United States Patent Application Publication US 2013/0267429 A1 - sequence listing, part 7

SEQ ID NO: 140200 - DNA, 50 bp, Artificial
  Synthetic oligonucleotide
gcccgcttgagtatccactgtctgccagtgctgcccagtctccaggcttg

SEQ ID NO: 140201 - DNA, 50 bp, Artificial
  Synthetic oligonucleotide
agtgctgcccagtctccaggcttgatgctgccccactgcagtgaacctat

SEQ ID NO: 140202 - DNA, 50 bp, Artificial
  Synthetic oligonucleotide
gcatcccttgcaagctgcgtggatcttgctatgtccgccacggtatgccc

SEQ ID NO: 140203 - DNA, 50 bp, Artificial
  Synthetic oligonucleotide
gccgtccgttgtgtcccggacaaccctgcacatgtcgcagttgagttccg

SEQ ID NO: 140204 - DNA, 58 bp, Artificial
  Synthetic oligonucleotide
gcaatcgttatcggtccgtatatagcaaatgtagacgaatacatatcataaagtatcc

SEQ ID NO: 140205 - DNA, 50 bp, Artificial
  Synthetic oligonucleotide
agtcgcatggcacaggttctgtctgcaccatggcgcctgcactgcgctcg

SEQ ID NO: 140206 - DNA, 50 bp, Artificial
  Synthetic oligonucleotide
gctgcgatgggcacgcgcagtgatctggacagtatggcaaggccctcgat

SEQ ID NO: 140207 - DNA, 50 bp, Artificial
  Synthetic oligonucleotide
ggactggacgggtatctgcgcgtctgtttgactgcgctggacgcaaggga

SEQ ID NO: 140208 - DNA, 50 bp, Artificial
  Synthetic oligonucleotide
aggttctgtctgcaccatggcgcctgcactgcgctcgctctggcctgaaa

SEQ ID NO: 140209 - DNA, 50 bp, Artificial
  Synthetic oligonucleotide
ggccaacacccccaggcgatgtgtaggtctgccccgtagccggtatcttt

SEQ ID NO: 140210 - DNA, 50 bp, Artificial
  Synthetic oligonucleotide
gaggatgtgaacgcgaactcgctgtgggtgtcgcacgttgaggcgctcac

SEQ ID NO: 140211 - DNA, 50 bp, Artificial
  Synthetic oligonucleotide
agggtgagccccttctcatatcccgtgaccgttgtgcatgcaacgtcgcc

SEQ ID NO: 140212 - DNA, 50 bp, Artificial
  Synthetic oligonucleotide
gaccacctgccctgctgcgtaagatacgcgcttatggtttcaggcggcct

SEQ ID NO: 140213 - DNA, 50 bp, Artificial
  Synthetic oligonucleotide
agggcgaggcgtgatcgatgtaacggccagtggctacgaaacgtacaccg

SEQ ID NO: 140214 - DNA, 50 bp, Artificial
  Synthetic oligonucleotide
gggtctgcagccttatccgggtctgcggccatcctgaactcatcggtgtg

SEQ ID NO: 140215 - DNA, 60 bp, Artificial
  Synthetic oligonucleotide
cccggcgccacgaacactgaggtgtactgttgccccctagtgactgtctgtagatcgctg

SEQ ID NO: 140216 - DNA, 55 bp, Artificial
  Synthetic oligonucleotide
cggcttcgaaccaggggacataacgttgacgggcaatgaggttatgctaagtacg

SEQ ID NO: 140217 - DNA, 55 bp, Artificial
  Synthetic oligonucleotide
gtcggcccttatctctgcttatatggaacttatgaaggtggcgctaagcctcggc

SEQ ID NO: 140218 - DNA, 55 bp, Artificial
  Synthetic oligonucleotide
gtcgacggactccctgggcaataccccgaacctcctggccacgtgtatgaacctg

SEQ ID NO: 140219 - DNA, 55 bp, Artificial
  Synthetic oligonucleotide
gtcctcgttgaggtacctattaagggtctgggtcttgaggaccgtggccagtgga

SEQ ID NO: 140220 - DNA, 55 bp, Artificial
  Synthetic oligonucleotide
gtcagaatcatgtaccagatggtgaagagatacgggagatacgtaaggccggcgc

SEQ ID NO: 140221 - DNA, 55 bp, Artificial
  Synthetic oligonucleotide
gtcagaagctatgggaaccgtgaagggatgtaaatacctgacacctcggctatta

SEQ ID NO: 140222 - DNA, 55 bp, Artificial
  Synthetic oligonucleotide
gtaggccgccgaaagtatctctaggagcctctcgggcggaactctgatgtaccac

SEQ ID NO: 140223 - DNA, 55 bp, Artificial
  Synthetic oligonucleotide
gtacgcgcccaccgagatactcacaagaaacaccgccaggggtagcccgtagacg

SEQ ID NO: 140224 - DNA, 55 bp, Artificial
  Synthetic oligonucleotide
gtaactcatgggtactcctactgtagccgtagagaccctggtaatcccacttaac

SEQ ID NO: 140225 - DNA, 55 bp, Artificial
  Synthetic oligonucleotide
gtaacgcgaaacctcctaataggccaccatgcgtaaccctggccatcaaacacac

SEQ ID NO: 140226 - DNA, 55 bp, Artificial
  Synthetic oligonucleotide
ggtgagtaacctcggcgttaacatatacaagacgcgggacttctactcgacttct

SEQ ID NO: 140227 - DNA, 55 bp, Artificial
  Synthetic oligonucleotide
cggcttcataaacacgacgccccacatctaagcgacgttggcactccccgccctc

SEQ ID NO: 140228 - DNA, 55 bp, Artificial
  Synthetic oligonucleotide
ggtctagcaagcagaggctatgacgtaactgtgcttatgcccagccacgggaggc

SEQ ID NO: 140229 - DNA, 55 bp, Artificial
  Synthetic oligonucleotide
ggtcgacctccccgtggataggaccgacagatacgaggaggtggagcttaggatc

SEQ ID NO: 140230 - DNA, 55 bp, Artificial
  Synthetic oligonucleotide
ggtccagcggtgagttgcaggtatatggtttgttagccagaattaggaggttact

SEQ ID NO: 140231 - DNA, 55 bp, Artificial
  Synthetic oligonucleotide
ggtcacgacgtctatggcgtttctagtcttagccaacagctcctgatcctgagtc

SEQ ID NO: 140232 - DNA, 55 bp, Artificial
  Synthetic oligonucleotide
gggtgatcaagccatgagcactgcacaagcccaacaaaagatttgtagtgagtgg

SEQ ID NO: 140233 - DNA, 55 bp, Artificial
  Synthetic oligonucleotide
gggtctggcagtatttatccgagatttagggttgtgaggaggggtgataggtacg

SEQ ID NO: 140234 - DNA, 55 bp, Artificial
  Synthetic oligonucleotide
ggggtttgcctacctccacgacgagggactggttcaagccgcacctctgctggcc

SEQ ID NO: 140235 - DNA, 55 bp, Artificial
  Synthetic oligonucleotide
ggggtccgcgcttatgtgtatgaccaggttctccggcgtttcaacgcgccttact

SEQ ID NO: 140236 - DNA, 55 bp, Artificial
  Synthetic oligonucleotide
ggggagttgccagtttgggatacgtggctgttgtggtctacgactcccgcagaga

SEQ ID NO: 140237 - DNA, 55 bp, Artificial
  Synthetic oligonucleotide
ggggagcccttaactattgaggagaaatacgccatgttggccgtgccaggagggt

SEQ ID NO: 140238 - DNA, 55 bp, Artificial
  Synthetic oligonucleotide
cggcttatcgcagtgttgacaatagacaagatataacgttggtttaggccctgat

SEQ ID NO: 140239 - DNA, 55 bp, Artificial
  Synthetic oligonucleotide
ggggacctctgtaggcgcccctctctacaagtctcttaaacagatagtgaggatc

SEQ ID NO: 140240 - DNA, 55 bp, Artificial
  Synthetic oligonucleotide
gggccgttagatttgacggagctagcaacgcctatgcaatgcctgaatacccggc

SEQ ID NO: 140241 - DNA, 55 bp, Artificial
  Synthetic oligonucleotide
tttgccaatccctagcgccgtctacccaagccgcctcaactaaactccttggaat

SEQ ID NO: 140242 - DNA, 55 bp, Artificial
  Synthetic oligonucleotide
ttaacacacggcaggttcacgccgatgtttctactctcccgcattagcgctccac

SEQ ID NO: 140243 - DNA, 55 bp, Artificial
  Synthetic oligonucleotide
tgtacataagcggaagaggagacgtggttgaggcctatatgttaatttggcgggg

SEQ ID NO: 140244 - DNA, 55 bp, Artificial
  Synthetic oligonucleotide
tggccaagtttaaacaagccgccgaggagttaaacccggccactgtgagagtctc

SEQ ID NO: 140245 - DNA, 55 bp, Artificial
  Synthetic oligonucleotide
tcggcccttttcacagtggcatatgggtaaaaccccgacacggctatcctctcgg

SEQ ID NO: 140246 - DNA, 55 bp, Artificial
  Synthetic oligonucleotide
tcgccattctatggtcttattagcccaagcccaatctacgtggtttatgccctgg

SEQ ID NO: 140247 - DNA, 55 bp, Artificial
  Synthetic oligonucleotide
tcctgggcaatactcggcgatagggaccgagttagtaggtacttaacgtggatta

SEQ ID NO: 140248 - DNA, 55 bp, Artificial
  Synthetic oligonucleotide
tcataggccgttggtgagggtcgtcaatacaaacggtcaggaaggcccagtaaca

SEQ ID NO: 140249 - DNA, 55 bp, Artificial
  Synthetic oligonucleotide
cggctccttatatgacgcgaagaggttggctccgtccctccagagactcacgtgt

SEQ ID NO: 140250 - DNA, 55 bp, Artificial
  Synthetic oligonucleotide
tcataatacctctttataccccactcaaagaatctctcagcggtatggcccttgg

SEQ ID NO: 140251 - DNA, 54 bp, Artificial
  Synthetic oligonucleotide
tcaaggggtatttcgaacttaccactcggtaacgtgcagttatagacctgcccg

SEQ ID NO: 140252 - DNA, 55 bp, Artificial
  Synthetic oligonucleotide
tatatagctcgagaggtgaagggcggtggctaaatacgtggtggatatctctacg

SEQ ID NO: 140253 - DNA, 55 bp, Artificial
  Synthetic oligonucleotide
tagggcataggttacaatggtcttttgaagctcagtcctaatttcgcccctacgc

SEQ ID NO: 140254 - DNA, 55 bp, Artificial
  Synthetic oligonucleotide
tagcctatataggcggcgttgaacccacctaatttctgccctctagcgtctcggg

SEQ ID NO: 140255 - DNA, 55 bp, Artificial
  Synthetic oligonucleotide
tagcccatacccctcctacccgttggatacatctcagtagcgtacacaggactca

SEQ ID NO: 140256 - DNA, 55 bp, Artificial
  Synthetic oligonucleotide
tacgcccaggggttgcttgaaggtatttgcacacctagtgacataattatcgcac

SEQ ID NO: 140257 - DNA, 55 bp, Artificial
  Synthetic oligonucleotide
taaagcctagcttctgatcacgtgggttgtttcaaaagtcctcaccgcaaacagc

SEQ ID NO: 140258 - DNA, 55 bp, Artificial
  Synthetic oligonucleotide
gttgctagacctactcgcggctacgagaaccacagtacaaataacgtgatgattg

SEQ ID NO: 140259 - DNA, 55 bp, Artificial
  Synthetic oligonucleotide
gttcgccgtcagttagttgaagaggccgtctacttcgcgttagtttcatatatgc

SEQ ID NO: 140260 - DNA, 55 bp, Artificial
  Synthetic oligonucleotide
cggcgtgttagaggcgtataggattgaggtgaggcttccacagctctcgtcgacg

SEQ ID NO: 140261 - DNA, 55 bp, Artificial
  Synthetic oligonucleotide
gttagtctagaagtgggcgccaatccctaaggctcgtcaacgggtcgcttggcaa

SEQ ID NO: 140262 - DNA, 55 bp, Artificial
  Synthetic oligonucleotide
gttaagttcggcacaatcagcacaggccacgcagttggtaattggttaaggccta

SEQ ID NO: 140263 - DNA, 55 bp, Artificial
  Synthetic oligonucleotide
gttaaggcgcagataatgggtaatccagggattaattacctaatggcctcagacg

SEQ ID NO: 140264 - DNA, 55 bp, Artificial
  Synthetic oligonucleotide
gttaaaatcactgggctttaccccgagtgacaatagatatttaccagccggtgag

SEQ ID NO: 140265 - DNA, 55 bp, Artificial
  Synthetic oligonucleotide
gtggcatgccctaagtgtgggaattactcaattacccgcgatactactaaaacgc

SEQ ID NO: 140266 - DNA, 55 bp, Artificial
  Synthetic oligonucleotide
gtgctagtagcaaagggccataggacggagatttacgtgcccgccaagaggagct

SEQ ID NO: 140267 - DNA, 55 bp, Artificial
  Synthetic oligonucleotide
gcgtaacccacggtctccaacgtatatccactagtatcaccagatgtggcatgtc

SEQ ID NO: 140268 - DNA, 55 bp, Artificial
  Synthetic oligonucleotide
gcggtgtaatgaccctttactatttctccaaccacatacccagatttctggtacc

SEQ ID NO: 140269 - DNA, 55 bp, Artificial
  Synthetic oligonucleotide
gcggggaggctcttgtggagagtcggagctaagaggatgtcctacatcggagtcc

SEQ ID NO: 140270 - DNA, 54 bp, Artificial
  Synthetic oligonucleotide
gcggcccttaaatactacgtggaaaccggcgatatatacgtcgcctcccgaatc

SEQ ID NO: 140271 - DNA, 55 bp, Artificial
  Synthetic oligonucleotide
cggccccggctcgaagtatctaaagctgttgccgagatacgtagaggagggcttg

SEQ ID NO: 140272 - DNA, 55 bp, Artificial
  Synthetic oligonucleotide
gcgagacaagccttcaattcgactatggcgtctttgttgattcgtacagggtgtc

SEQ ID NO: 140273 - DNA, 54 bp, Artificial
  Synthetic oligonucleotide
gcgaaggtaatcttcctagtcgataagttgggtggtttcgatacatttaattgg

SEQ ID NO: 140274 - DNA, 55 bp, Artificial
  Synthetic oligonucleotide
gcctacgtcatctaccgattgggaattagggcgcaggacctattggatcagggcg

SEQ ID NO: 140275 - DNA, 55 bp, Artificial
  Synthetic oligonucleotide
gccgtctcctggtgacgtggtggaagtggtgccagacctagtggggtttcacgac

SEQ ID NO: 140276 - DNA, 55 bp, Artificial
  Synthetic oligonucleotide
gccgagtaagcaaccaccttctcagggtcatacatcgcgatcatcttagccgcaa

SEQ ID NO: 140277 - DNA, 55 bp, Artificial
  Synthetic oligonucleotide
gccagttacggggtctgtgtgtaccgcgaggtatttatcgcctgacagtctaata

SEQ ID NO: 140278 - DNA, 55 bp, Artificial
  Synthetic oligonucleotide
gcatttgacaccctagtaccaagcctaacaccagccgctaggtaacgctcaatgg

SEQ ID NO: 140279 - DNA, 55 bp, Artificial
  Synthetic oligonucleotide
gcagtaaggcgatccacgtcatgcccctgagggctctcattaggaagcagatcga

SEQ ID NO: 140280 - DNA, 55 bp, Artificial
  Synthetic oligonucleotide
gcagagtccgcttgatacaaacaggggagacgcccggctcgcgatagacatttta

SEQ ID NO: 140281 - DNA, 55 bp, Artificial
  Synthetic oligonucleotide
gcacgagtctctcagtgtccgttaatggtgcaaagccaacgccaatcgaggtgtc

SEQ ID NO: 140282 - DNA, 55 bp, Artificial
  Synthetic oligonucleotide
cggccacaataatcgtacgcctaactatatcgcatatgccctcgatgtcattcct

SEQ ID NO: 140283 - DNA, 55 bp, Artificial
  Synthetic oligonucleotide
gcaccaccgaggagtagactaccgtttgagtatccagctgaggcgtagttggtgg

SEQ ID NO: 140284 - DNA, 55 bp, Artificial
  Synthetic oligonucleotide
gatcatggcgcgtagggcgaaggaatatctagagcgttttaaaatccccgtcgag

SEQ ID NO: 140285 - DNA, 55 bp, Artificial
  Synthetic oligonucleotide
gagttgtgcgtatgccgttttgcataagttcgtacactgtgagtctcgcgccctg

SEQ ID NO: 140286 - DNA, 55 bp, Artificial
  Synthetic oligonucleotide
gaggtctctaggtctatcacattcagtgagttgtttattggcacgactatgggga

SEQ ID NO: 140287 - DNA, 55 bp, Artificial
  Synthetic oligonucleotide
gaggctccccattgtacgtggagataagctagtaggcataataacaatgctggac

SEQ ID NO: 140288 - DNA, 55 bp, Artificial
  Synthetic oligonucleotide
gaggcggggctcgacgtaatagacgtctctttctacccagaggacccctttgcgc

SEQ ID NO: 140289 - DNA, 54 bp, Artificial
  Synthetic oligonucleotide
gagcccggtcgtctagcggccaaaggacaacccggcttgggatgcggggctttg

SEQ ID NO: 140290 - DNA, 55 bp, Artificial
  Synthetic oligonucleotide
gagactgaggttacgatgcaggataagccagttcaggaaactaacctgcctcgtg

SEQ ID NO: 140291 - DNA, 55 bp, Artificial
  Synthetic oligonucleotide
gagacatatgaagctgttgacctacagccaccgcggcgtaagaaaagttggcgcg

SEQ ID NO: 140292 - DNA, 55 bp, Artificial
  Synthetic oligonucleotide
gactcatatacacttcgatttggtgtatctagttcgcagagccggcggcgtattg

SEQ ID NO: 140293 - DNA, 55 bp, Artificial
  Synthetic oligonucleotide
cggcatttccttaataggcgacgccacttattaccgcctggggattaagtatcaa

SEQ ID NO: 140294 - DNA, 55 bp, Artificial
  Synthetic oligonucleotide
gggcccgctctgattgttgaggactactcgactacagtaatcccgccacgttggg

SEQ ID NO: 140295 - DNA, 55 bp, Artificial
  Synthetic oligonucleotide
gggattacctattcttctttgacaaggacgtgaatgttaaggccacggaattcag

SEQ ID NO: 140296 - DNA, 55 bp, Artificial
  Synthetic oligonucleotide
ggcttggtaataccacgacaagccgctatgtagagttgggaaaggacggatgtgt

SEQ ID NO: 140297 - DNA, 53 bp, Artificial
  Synthetic oligonucleotide
ggctgccacggccctatcaccaacaacggtaaccctaatgtccctaccgggct

SEQ ID NO: 140298 - DNA, 55 bp, Artificial
  Synthetic oligonucleotide
ggcggctctcttctttaccttgacgtagacgggtactctgtaggcgtagctccag

SEQ ID NO: 140299 - DNA, 55 bp, Artificial
  Synthetic oligonucleotide
ggcgcctagcgacgtctcgctctacctagacgcgtggacagccgtgaggttatca

SEQ ID NO: 140300 - DNA, 55 bp, Artificial
  Synthetic oligonucleotide
ggccttggtgcccgtagagtcatagtcacggaggtagacccggtgaggatgctcg

SEQ ID NO: 140301 - DNA, 55 bp, Artificial
  Synthetic oligonucleotide
ggcctcttatatatggggaacgactctcccaactccctaaaccactcgtggtcaa

SEQ ID NO: 140302 - DNA, 55 bp, Artificial
  Synthetic oligonucleotide
ggcctcctcgggcgagccatattgatagacgctgttccagtcgacaaataccgcc

SEQ ID NO: 140303 - DNA, 55 bp, Artificial
  Synthetic oligonucleotide
ggcctatgaatatcccgtgtagggcaaggtcgtataggtgggtcctgatacgccc

SEQ ID NO: 140304 - DNA, 55 bp, Artificial
  Synthetic oligonucleotide
cggcacaaggtacctcccatacctcaagagctacatcttaagcgtccccgcggtg

SEQ ID NO: 140305 - DNA, 55 bp, Artificial
  Synthetic oligonucleotide
ggcctaacgtcagtgtacgggaccctatatattgagacctcaccaaggtatatga

SEQ ID NO: 140306 - DNA, 55 bp, Artificial
  Synthetic oligonucleotide
ggccgtagccaaggccgacgtagtaatgatgctcatacccgacatggagcaaccg

SEQ ID NO: 140307 - DNA, 55 bp, Artificial
  Synthetic oligonucleotide
ggcagggttagggctagtgttgtgtagattagtctcatgtatctggttacgttga

SEQ ID NO: 140308 - DNA, 55 bp, Artificial
  Synthetic oligonucleotide
ggaggaggcctctaagatagttgacgactacatgaataaggagtccgaggtttac

SEQ ID NO: 140309 - DNA, 55 bp, Artificial
  Synthetic oligonucleotide
ggagcccgacggaggcttaatctacacagtgcccttacaggtggggtgtctcggc

SEQ ID NO: 140310 - DNA, 55 bp, Artificial
  Synthetic oligonucleotide
ggagcccatgttcattacgtgctcaagaggatgaggaggttcatgaggaattatc

SEQ ID NO: 140311 - DNA, 55 bp, Artificial
  Synthetic oligonucleotide
ggagcatggacctaaacatcgagccaatgacgatccaaacggtaattccaagacc

SEQ ID NO: 140312 - DNA, 55 bp, Artificial
  Synthetic oligonucleotide
ggagatcctccttataggatcgaggcctgcctctaaaactaagtcccatccgatc

SEQ ID NO: 140313 - DNA, 54 bp, Artificial
  Synthetic oligonucleotide
ggacgggcatttagttgatttaagccttccgccttcgttttcaacacagaccgc

SEQ ID NO: 140314 - DNA, 55 bp, Artificial
  Synthetic oligonucleotide
ggacatagcctactacggttcaggcatctactcagggccaatagtgtcaaccttc

SEQ ID NO: 140315 - DNA, 55 bp, Artificial
  Synthetic oligonucleotide
cggatgcctctccctaatgtatctcactaagtcattaagcctgtctctcctcgac

SEQ ID NO: 140316 - DNA, 55 bp, Artificial
  Synthetic oligonucleotide
ggaagcttgtgtacgccctattagtgggtgacattacgtactccgctgggttaag

SEQ ID NO: 140317 - DNA, 55 bp, Artificial
  Synthetic oligonucleotide
gcgtcctagagcggctgggagtggtcggctgatgttcgaaaggcttaggaggacc

SEQ ID NO: 140318 - DNA, 55 bp, Artificial
  Synthetic oligonucleotide
gcgtcaaggcgcaatttctaggcccatacataagcccgaggtcgttagtagacgc

SEQ ID NO: 140319 - DNA, 55 bp, Artificial
  Synthetic oligonucleotide
aaaagtgagatacgaggttgacaagaggcggcgtattgtaagagtcacgcctgag

SEQ ID NO: 140320 - DNA, 53 bp, Artificial
  Synthetic oligonucleotide
aacgaataccttagaacctggcgtcggtacgtgtctaacctcaagcacggact

SEQ ID NO: 140321 - DNA, 55 bp, Artificial
  Synthetic oligonucleotide
acgcctagaagctcactgttctttaagtccgctttcttgctcaacattgaggcgc

SEQ ID NO: 140322 - DNA, 55 bp, Artificial
  Synthetic oligonucleotide
aacactacaggggccgcatttctagtgttgtcaatagaacaccacccattaccca

SEQ ID NO: 140323 - DNA, 54 bp, Artificial
  Synthetic oligonucleotide
acaatcggagcgtatttatcgggaagcccgcggtaaatgccgtagcagaaaccg

SEQ ID NO: 140324 - DNA, 54 bp, Artificial
  Synthetic oligonucleotide
acgccaggtactgtaggatgtcggtcctagttattattccaacgggcttaccgc

SEQ ID NO: 140325 - DNA, 55 bp, Artificial
  Synthetic oligonucleotide
accaccacttcagggcgtaccagacgctccaccttagcgcgttctttacttcgtc

SEQ ID NO: 140326 - DNA, 60 bp, Artificial
  Synthetic oligonucleotide
gatggacacggcgagttctctggctatttgcgtcactgatgcctcaccccgcttggctag

SEQ ID NO: 140327 - DNA, 55 bp, Artificial
  Synthetic oligonucleotide
cggaagccctctagcctcggcgtacgtcacgtagtcctcgcccaactgcgatatc

SEQ ID NO: 140328 - DNA, 55 bp, Artificial
  Synthetic oligonucleotide
acagcgagtgcttaccttgtgggcttaataatcggttataaggcgctactgaagg

SEQ ID NO: 140329 - DNA, 54 bp, Artificial
  Synthetic oligonucleotide
cccacagagacaccgctgggaaatacgccaataaaatcgtagaggtgaacaacg

SEQ ID NO: 140330 - DNA, 54 bp, Artificial
  Synthetic oligonucleotide
acgtataaggccacgccgctacagtttcccgccgcctctgcctctatacgagag

SEQ ID NO: 140331 - DNA, 54 bp, Artificial
  Synthetic oligonucleotide
cctaccaacgtagatgcgttcaggcgagtaggctaatgcataatccctctcaac

SEQ ID NO: 140332 - DNA, 54 bp, Artificial
  Synthetic oligonucleotide
cgataggataggccgcaagtcgacgttcctcgccacgttgattctgatgggcct

SEQ ID NO: 140333 - DNA, 54 bp, Artificial
  Synthetic oligonucleotide
tagtggagagatacggcgtgacgatactctacacgtcgccaaccgccatacgta

SEQ ID NO: 140334 - DNA, 54 bp, Artificial
  Synthetic oligonucleotide
agatccagtcgcttgagcctctcgtcttagacgcagacgagtcccaagtcgtgt

SEQ ID NO: 140335 - DNA, 54 bp, Artificial
  Synthetic oligonucleotide
agggagagcatcaacgttaaggtgttagtcagtgatagagatacgcccatcgtt

SEQ ID NO: 140336 - DNA, 54 bp, Artificial
  Synthetic oligonucleotide
aattaccttagccgcgcttttctcagacatcctgctactcgcatcggctctgag

SEQ ID NO: 140337 - DNA, 54 bp, Artificial
  Synthetic oligonucleotide
ctggctctactctacgcggcgtataggctaagcggtgtgaggccgtccggcaga

SEQ ID NO: 140338 - DNA, 55 bp, Artificial
  Synthetic oligonucleotide
cgctccaggagaggcgctaggttgaacccgctgtttagatccggccatatctggc

SEQ ID NO: 140339 - DNA, 53 bp, Artificial
  Synthetic oligonucleotide
gtcctggtgcctataggaaaaccgagcactttgtgtttaaacgtccctatcgc

SEQ ID NO: 140340 - DNA, 53 bp, Artificial
  Synthetic oligonucleotide
ccagcggtagcttccccgtgcgatatttcagcatgaggtaaagccctctaaga

SEQ ID NO: 140341 - DNA, 53 bp, Artificial
  Synthetic oligonucleotide
gtgacttggtacctcgcaatattggcctacggcgccatagtcatcgttaggta

SEQ ID NO: 140342 - DNA, 53 bp, Artificial
  Synthetic oligonucleotide
catggcaggcgcaacggatgaagagggtaggttagttaagccaggtactcacg

SEQ ID NO: 140343 - DNA, 53 bp, Artificial
  Synthetic oligonucleotide
tgtctagggaattgattaggcagtacttcggcgcgattaggtatagggttgat

SEQ ID NO: 140344 - DNA, 53 bp, Artificial
  Synthetic oligonucleotide
ggtaccaggagtttgatgggtcgtggtgaaatgcgtatacgagctctggtagt

SEQ ID NO: 140345 - DNA, 53 bp, Artificial
  Synthetic oligonucleotide
gagagtgagaagagaaccgcggacttgctgtggcacctcggactagtgttaaa

SEQ ID NO: 140346 - DNA, 53 bp, Artificial
  Synthetic oligonucleotide
cctcagggaggggtgttccattaggtccatgtagtatttgacccagccgactg

SEQ ID NO: 140347 - DNA, 53 bp, Artificial
  Synthetic oligonucleotide
tggacgacgctcaagtctcagagctcgactatgaagcctacgagccatacgcc

SEQ ID NO: 140348 - DNA, 53 bp, Artificial
  Synthetic oligonucleotide
ggggttcgtatgtggatacagcaacaagcccatagaccccttcagttggtact

SEQ ID NO: 140349 - DNA, 55 bp, Artificial
  Synthetic oligonucleotide
cgcgggtcctcacgacttctatgggaggtggctggtgtctacgaagtctgggaag

SEQ ID NO: 140350 - DNA, 53 bp, Artificial
  Synthetic oligonucleotide
cgatagtggagacaaaccaaacgcctagtgtgccacgtgagcttggggtcccc

SEQ ID NO: 140351 - DNA, 53 bp, Artificial
  Synthetic oligonucleotide
attgtcctgccccaatcaattaattcgttaggtgtggtgtttaggaattccgt

SEQ ID NO: 140352 - DNA, 53 bp, Artificial
  Synthetic oligonucleotide
tacataacgcaccgcggatccccgcagtggcctaagccgaacgtgtggcctag

SEQ ID NO: 140353 - DNA, 53 bp, Artificial
  Synthetic oligonucleotide
cgcctattctggcggcggctaagagaactgcaaccgcctcaatactattgggc

SEQ ID NO: 140354 - DNA, 53 bp, Artificial
  Synthetic oligonucleotide
ctgtgtccatatggaggtccaggcgtacctgagaggtggcagtctcccgttat

SEQ ID NO: 140355 - DNA, 53 bp, Artificial
  Synthetic oligonucleotide
aaataggcggccacccctctgcggccttataaacagctaaggcggagatatat

SEQ ID NO: 140356 - DNA, 53 bp, Artificial
  Synthetic oligonucleotide
accagccaattaaaccgcctatggctatcctagttgttaatgatggtaacctt

SEQ ID NO: 140357 - DNA, 53 bp, Artificial
  Synthetic oligonucleotide
tgctaatgtgggaatgaagagggttaagtctcgtgcagttaagtaagccatgt

SEQ ID NO: 140358 - DNA, 53 bp, Artificial
  Synthetic oligonucleotide
ctctcctcctggagcggatacagtacctcgactacaccactgtacaggggaca

SEQ ID NO: 140359 - DNA, 52 bp, Artificial
  Synthetic oligonucleotide
gactgccactagtattagcgtacttaacggcacgaaggcaccgaatattacg

SEQ ID NO: 140360 - DNA, 55 bp, Artificial
  Synthetic oligonucleotide
cgcggctcaagtattaaagtcttataagaggccacatgcggcgttagttcacgcg

SEQ ID NO: 140361 - DNA, 52 bp, Artificial
  Synthetic oligonucleotide
tgtctattcaccgaggaggtagcgaggggctattctgagtttataatagggg

SEQ ID NO: 140362 - DNA, 52 bp, Artificial
  Synthetic oligonucleotide
aaagctcataggcccttccaagggctctaagcatctccgacgcggttctgag

SEQ ID NO: 140363 - DNA, 52 bp, Artificial
  Synthetic oligonucleotide
aagtacaactccacggtgtatacttacgaccaaatgctccagctgtataaag

SEQ ID NO: 140364 - DNA, 52 bp, Artificial
  Synthetic oligonucleotide
actaggtctctatacccctcgacgcatatgcccactgtgatgaagtagtcat

SEQ ID NO: 140365 - DNA, 52 bp, Artificial
  Synthetic oligonucleotide
ccaggctcgtaaaccgcgttcaggatgtaaccccacggcgccttgagagagc

SEQ ID NO: 140366 - DNA, 52 bp, Artificial
  Synthetic oligonucleotide
agtcctctccgcctcgggctacgtttaccacaaggtcactatctacgagggg

SEQ ID NO: 140367 - DNA, 52 bp, Artificial
  Synthetic oligonucleotide
ccccatgtaggccacgtgccttaccccaagcaacgcctttaggatcttgact

SEQ ID NO: 140368 - DNA, 52 bp, Artificial
  Synthetic oligonucleotide
tcagtcttattgcgacatcccgtttgtagcccgacacccttaaccgcacccc

SEQ ID NO: 140369 - DNA, 52 bp, Artificial
  Synthetic oligonucleotide
agtgggcgagaagtgtatcaactgcggccgttgtaaggacaactgcgacgcg

SEQ ID NO: 140370 - DNA, 52 bp, Artificial
  Synthetic oligonucleotide
gcggagtatctagagaggtgtctcgggatgcggtacttcaaggcgttggtta

SEQ ID NO: 140371 - DNA, 55 bp, Artificial
  Synthetic oligonucleotide
cgcggctatgggatactcttcggcatacatgcaggtggcttaattaggttaatag

SEQ ID NO: 140372 - DNA, 52 bp, Artificial
  Synthetic oligonucleotide
acacagagaaccgccaactccataccgctacagaacttcacggtacaggtcc

SEQ ID NO: 140373 - DNA, 52 bp, Artificial
  Synthetic oligonucleotide
aatgagaccatcctaatgtagtcgtctaaggacacgttcttccacctagccg

SEQ ID NO: 140374 - DNA, 52 bp, Artificial
  Synthetic oligonucleotide
tacaaccctacttagccttacgtacctatcatcgccgagcctaatgaaggct

SEQ ID NO: 140375 - DNA, 52 bp, Artificial
  Synthetic oligonucleotide
cggtctctgcgtggaagtcgccgtatctagctcggcgcatttcggttgcatc

SEQ ID NO: 140376 - DNA, 52 bp, Artificial
  Synthetic oligonucleotide
tagagacgtgaaatcgcctagggacttagagagcctgctagtcgagctgaca

SEQ ID NO: 140377 - DNA, 52 bp, Artificial
  Synthetic oligonucleotide
gctcagtcacatactggctctacggagtagtgtcgagggtggtaatgaactt

SEQ ID NO: 140378 - DNA, 52 bp, Artificial
  Synthetic oligonucleotide
ggccttctaggaggctccctcggaagcgtctacgacaaggcccgagataaac

SEQ ID NO: 140379 - DNA, 51 bp, Artificial
  Synthetic oligonucleotide
acaggcaatatggtcccttgggcatgtagaactcagatgagggcccgcccc

SEQ ID NO: 140380 - DNA, 51 bp, Artificial
  Synthetic oligonucleotide
ccgatatacggcctgctgtacctaccgttctacaacttgctaagcgacgcg

SEQ ID NO: 140381 - DNA, 51 bp, Artificial
  Synthetic oligonucleotide
ccgcctaagaacggaacgtggattctgggtctacctgttcaaacagtggat

SEQ ID NO: 140382 - DNA, 55 bp, Artificial
  Synthetic oligonucleotide
cgcggaaaggggagaggcgtacggggcgttaatcagaacgccgagaggcgcatta

SEQ ID NO: 140383 - DNA, 51 bp, Artificial
  Synthetic oligonucleotide
cctaatctcaggcgccgacttgttaatcctcgcaatggttggctatgtgtt

SEQ ID NO: 140384 - DNA, 51 bp, Artificial
  Synthetic oligonucleotide
acgccgcgtcgaactttatcttctcccctgtagtggtctctatctcgtttt

SEQ ID NO: 140385 - DNA, 51 bp, Artificial
  Synthetic oligonucleotide
cctatggtgttcatcagcggagctatccacggggactcgtatagggcaaat

SEQ ID NO: 140386 - DNA, 51 bp, Artificial
  Synthetic oligonucleotide
ggcttgacattcacatggaggatacggtactaataccgcagcccgtactgg

SEQ ID NO: 140387 - DNA, 51 bp, Artificial
  Synthetic oligonucleotide
gctctctttacgagctcggtatattctcctagttcgcctctggagatagtt

SEQ ID NO: 140388 - DNA, 51 bp, Artificial
  Synthetic oligonucleotide
gtgtcgccccagaggcggctcgacttagctctccgctggatagcagagggg

SEQ ID NO: 140389 - DNA, 51 bp, Artificial
  Synthetic oligonucleotide
tcgaagctttggcatagggccgtcgtgagaatttacgtatcaaagtaatgc

SEQ ID NO: 140390 - DNA, 51 bp, Artificial
  Synthetic oligonucleotide
actaacgcctgaataagacgagcgaggcactgttaagggttgataagcccg

SEQ ID NO: 140391 - DNA, 51 bp, Artificial
  Synthetic oligonucleotide
tgcttcttcccatgtacacgactacgccgtgcggagactcctctatagatc

SEQ ID NO: 140392 - DNA, 51 bp, Artificial
  Synthetic oligonucleotide
tttagggaactaggtgttgaggtatggagaggcttacgtctgttgttctct

SEQ ID NO: 140393 - DNA, 55 bp, Artificial
  Synthetic oligonucleotide
cgccgcgaaatatggcgtaggggttaatggagtgtatgtaagagggcgcgagatc

SEQ ID NO: 140394 - DNA, 51 bp, Artificial
  Synthetic oligonucleotide
ttgggatttctactctaacgacacacctgactttcgggcgccgccgtaagt

SEQ ID NO: 140395 - DNA, 50 bp, Artificial
  Synthetic oligonucleotide
aagggcacccgaggcgtgtcaatgccgtactccactgcgacggcgggagc

SEQ ID NO: 140396 - DNA, 50 bp, Artificial
  Synthetic oligonucleotide
aaagtcgccgaggctaggtcgcgggacgttggccgctctattgtgagggt

SEQ ID NO: 140397 - DNA, 50 bp, Artificial
  Synthetic oligonucleotide
gcggagtcagtggctagggggatacgtggagccgcggtggggccgttcac

SEQ ID NO: 140398 - DNA, 50 bp, Artificial
  Synthetic oligonucleotide
aaagtggcttgaggcgtgaatgggaacgccgagagggcgcctctgtactg

SEQ ID NO: 140399 - DNA, 50 bp, Artificial
  Synthetic oligonucleotide
aaggcggacccccacgcgaattggacgctgtcaacacaagcgtagcctcc

SEQ ID NO: 140400 - DNA, 50 bp, Artificial
  Synthetic oligonucleotide
gcggcgatcattacggggcctttcctgcctttaacctcggcttccccgat

SEQ ID NO: 140401 - DNA, 50 bp, Artificial
  Synthetic oligonucleotide
aaggcgacagcctattgacataccccgctcccccacgccgtcacaagaca

SEQ ID NO: 140402 - DNA, 50 bp, Artificial
  Synthetic oligonucleotide
aaatacgccgtttgtggccaggggtataggctacgaccgagccccgcctc

SEQ ID NO: 140403 - DNA, 50 bp, Artificial
  Synthetic oligonucleotide
aaggccctaaatgcgttggggatagacgccgttctcgcctactgagcggg

SEQ ID NO: 140404 - DNA, 55 bp, Artificial
  Synthetic oligonucleotide
gacaataccgctatacctaacactgaatgtgtctgccatagagagtaaggtggag

SEQ ID NO: 140405 - DNA, 50 bp, Artificial
  Synthetic oligonucleotide
aaggcccctcatacggctggccactaagacgaccacccactcgtttggcg

SEQ ID NO: 140406 - DNA, 50 bp, Artificial
  Synthetic oligonucleotide
aaggcccccacgaggactgtgctccgcatcaccctgatcaggagcctcaa

SEQ ID NO: 140407 - DNA, 50 bp, Artificial
  Synthetic oligonucleotide
aaggcaggcgattcggcggacttagacgaggtgttgcggcagtacggcat

SEQ ID NO: 140408 - DNA, 50 bp, Artificial
  Synthetic oligonucleotide
aaatcctccactcaaggcccatccggctgggaacatcgccgcattcccgt

SEQ ID NO: 140409 - DNA, 50 bp, Artificial
  Synthetic oligonucleotide
aagcaacgcgtaacagcggacccgccgaggcagggggccccgtagatgta

SEQ ID NO: 140410 - DNA, 50 bp, Artificial
  Synthetic oligonucleotide
tactccaagtgctcccccggttcaccctgggatgaatcagtccccactgc

SEQ ID NO: 140411 - DNA, 50 bp, Artificial
  Synthetic oligonucleotide
tacggggagggaaccaagaaccgtaaaagcccttgtggatacgggcgcca

SEQ ID NO: 140412 - DNA, 50 bp, Artificial
  Synthetic oligonucleotide
aagccgagcgatgctccttattgcgtctgccggagtctccacgaggggtt

SEQ ID NO: 140413 - DNA, 50 bp, Artificial
  Synthetic oligonucleotide
aaggagggttgaggggccttcgcatccgcctggtgaggtcttgtctcgcg

SEQ ID NO: 140414 - DNA, 50 bp, Artificial
  Synthetic oligonucleotide
ggacaccccattcctgccaggctcagcggacccaaacagggttgacccgg

SEQ ID NO: 140415 - DNA, 55 bp, Artificial
  Synthetic oligonucleotide
gaaggccacagcataggaggcgtcgctctcagtcattgccctcgtagggaggacg

SEQ ID NO: 140416 - DNA, 50 bp, Artificial
  Synthetic oligonucleotide
aaggaggcccaagtagatgcgcctgcccccgacctctaaggaggcggcaa

SEQ ID NO: 140417 - DNA, 50 bp, Artificial
  Synthetic oligonucleotide
aaggactcgcagttcaaccaagtgggggagagcgtcccgccgcctcttgc

SEQ ID NO: 140418 - DNA, 50 bp, Artificial
  Synthetic oligonucleotide
aaggacctgcaactataaccgtggcgagcgggcaatgcgaggtgttgggc

SEQ ID NO: 140419 - DNA, 50 bp, Artificial
  Synthetic oligonucleotide
aagctcacatggggccaccacggacccctcgtaggcgtagagtgcatact

SEQ ID NO: 140420 - DNA, 50 bp, Artificial
  Synthetic oligonucleotide
aagccttctgccgtattccgtaaggtcgctggggctcgggtgcacctcag

SEQ ID NO: 140421 - DNA, 50 bp, Artificial
  Synthetic oligonucleotide
aagcctcgccgttgtgccaactcaaggagggccccggtgacactcgttaa

SEQ ID NO: 140422 - DNA, 50 bp, Artificial
  Synthetic oligonucleotide
gagcgccagtaatatccattcgggccttatcattgacgaacatgggacct

SEQ ID NO: 140423 - DNA, 50 bp, Artificial
  Synthetic oligonucleotide
gaggacccaaccttcgctggtggtaggaatgatgagggggcgtggactgc

SEQ ID NO: 140424 - DNA, 50 bp, Artificial
  Synthetic oligonucleotide
aaaccctctccgtccattactccttgggcggcgctacgtacttggcgagc

SEQ ID NO: 140425 - DNA, 50 bp, Artificial
  Synthetic oligonucleotide
aattgccaggaatgggcctgagaacacgggcacggtgagattcacgggcc

SEQ ID NO: 140426 - DNA, 54 bp, Artificial
  Synthetic oligonucleotide
gaacccgcggaagtttaggcgggcgagttgggcaaagcagccgagctcttccct

SEQ ID NO: 140427 - DNA, 50 bp, Artificial
  Synthetic oligonucleotide
aaacgccgcgagggaggtattgaaggaggtcgtcccgcctctggccttag

SEQ ID NO: 140428 - DNA, 50 bp, Artificial
  Synthetic oligonucleotide
gagggcaggggtctcaatggcgctgtatccgaaggactcagcaaccctgg

SEQ ID NO: 140429 - DNA, 50 bp, Artificial
  Synthetic oligonucleotide
aatgagggagcctccgccgccgcaagttctggcaaccgtggaggggctac

SEQ ID NO: 140430 - DNA, 50 bp, Artificial
  Synthetic oligonucleotide
tggctggggcaaagttccacaccaatatgccgtcgacatagtagttctgg

SEQ ID NO: 140431 - DNA, 50 bp, Artificial
  Synthetic oligonucleotide
aaacgcggtgaatcgccgtgggtcaagttcctaaggggtgagccggtggg

SEQ ID NO: 140432 - DNA, 50 bp, Artificial
  Synthetic oligonucleotide
aatgaggccagggtggtctcggcacacaggacgccggagttcatgtttga

SEQ ID NO: 140433 - DNA, 50 bp, Artificial
  Synthetic oligonucleotide
aatccgttgcgcgcgttggttatgccgagatttggcgacaccccgccgtg

SEQ ID NO: 140434 - DNA, 50 bp, Artificial
  Synthetic oligonucleotide
aaacggacgcacgcggcgtagaagttgtaaggcgtgtaccccctcggcgt

SEQ ID NO: 140435 - DNA, 50 bp, Artificial
  Synthetic oligonucleotide
aatccgcgtccgcctcaattgccaccacccagcgcctattagggacacac

SEQ ID NO: 140436 - DNA, 50 bp, Artificial
  Synthetic oligonucleotide
aaacggcgcagggacgagttgggctaggtaaggcacgttgcgagacatgg

SEQ ID NO: 140437 - DNA, 60 bp, Artificial
  Synthetic oligonucleotide
cactgaggtgtactgttgccccctagtgactgtctgtagatcgctgggagcggaacaggg

SEQ ID NO: 140438 - DNA, 55 bp, Artificial
  Synthetic oligonucleotide
ctttcccaaagaactgcgcccaatattgcctccttaccctcgttaatggcgaggc

SEQ ID NO: 140439 - DNA, 50 bp, Artificial
  Synthetic oligonucleotide
aatagccgctccgatagcgggcgcctcaagtggaccgatacagccttcca

SEQ ID NO: 140440 - DNA, 50 bp, Artificial
  Synthetic oligonucleotide
aaagccagcgcggcttacggggaggactatgtcgcgaggagcgtcaggga

SEQ ID NO: 140441 - DNA, 50 bp, Artificial
  Synthetic oligonucleotide
aagtggccctacctccccctagagataggcctggcgtggcacccaatact

SEQ ID NO: 140442 - DNA, 50 bp, Artificial
  Synthetic oligonucleotide
aagtgcgcatgccccacaatcacgttggtgccctggggtatggggacttc

SEQ ID NO: 140443 - DNA, 50 bp, Artificial
  Synthetic oligonucleotide
tccctctaccccgtcgtgctgataaacaagggaggctatgtggcatatcc

SEQ ID NO: 140444 - DNA, 50 bp, Artificial
  Synthetic oligonucleotide
aagtccaccaataccgcgtagccttggcgggaggttgccggcgacatggc

SEQ ID NO: 140445 - DNA, 50 bp, Artificial
  Synthetic oligonucleotide
aagtatacaggggccgcacagctcagcagccacgtcgccaatgggcctcc

SEQ ID NO: 140446 - DNA, 50 bp, Artificial
  Synthetic oligonucleotide
aagtagacaggcggccctcgttccctcagcagaggctcgacgtggctctc

SEQ ID NO: 140447 - DNA, 50 bp, Artificial
  Synthetic oligonucleotide
gccgtaaagtccagagcccttctgggcggtaccagcgaagtcgccgatac

SEQ ID NO: 140448 - DNA, 50 bp, Artificial
  Synthetic oligonucleotide
aaagccatacccagtggagtaccatgcgcagtcagcggttgatgcggcta

SEQ ID NO: 140449 - DNA, 55 bp, Artificial
  Synthetic oligonucleotide
cttctcccttacatagagttaagcctcaacacacagggtgtgtaacccattcgcc

SEQ ID NO: 140450 - DNA, 50 bp, Artificial
  Synthetic oligonucleotide
aagtaagcctaggcaggggcgacatcataatccaagcgcctcccggggta

SEQ ID NO: 140451 - DNA, 50 bp, Artificial
  Synthetic oligonucleotide
aaggtctgcgtagttgtgacgccacgaaggcgtatgtgtagggcggcggg

SEQ ID NO: 140452 - DNA, 50 bp, Artificial
  Synthetic oligonucleotide
aacaagggggcctcgtggaatcgcctaatgagctcctccacgctccgcat

SEQ ID NO: 140453 - DNA, 50 bp, Artificial
  Synthetic oligonucleotide
aacgtgccccagctcccatacacgtggattgccttcccgccgtctgccaa

SEQ ID NO: 140454 - DNA, 50 bp, Artificial
  Synthetic oligonucleotide
aacacgaggaccctccctctgcacaccgccactatatcgggcacgtacct

SEQ ID NO: 140455 - DNA, 50 bp, Artificial
  Synthetic oligonucleotide
aacggggctctccaggcgagtgccctcaccacgtcccgttcagacagcac

SEQ ID NO: 140456 - DNA, 50 bp, Artificial
  Synthetic oligonucleotide
gttagggaggagttcccgccacgaatgataccgcaggtccagggattgat

SEQ ID NO: 140457 - DNA, 50 bp, Artificial
  Synthetic oligonucleotide
aacgggacctgggcgagtagagggagggtggactatgtgccagagtacgc

SEQ ID NO: 140458 - DNA, 50 bp, Artificial
  Synthetic oligonucleotide
aacacggcccccagggaatgccacaccactaaatccgcctctcatccggc

SEQ ID NO: 140459 - DNA, 50 bp, Artificial
  Synthetic oligonucleotide
aaccacccaccgagccaccgaatgaccttgctcaggtgcattacgcggac

SEQ ID NO: 140460 - DNA, 55 bp, Artificial
  Synthetic oligonucleotide
cttcgggcacagtctacataagtgagctaacaccgagtggtatgtccgttacatt

SEQ ID NO: 140461 - DNA, 50 bp, Artificial
  Synthetic oligonucleotide
gtgttgaggggccgaggggtagggtcacatacttcactggggcgtttccc

SEQ ID NO: 140462 - DNA, 50 bp, Artificial
  Synthetic oligonucleotide
aacggattagagctccggggtaggctagacggcgcctccgctacgctata

SEQ ID NO: 140463 - DNA, 50 bp, Artificial
  Synthetic oligonucleotide
aaccagacacggtgccgctcccaaagacatccccgggcctaacgtactcg

SEQ ID NO: 140464 - DNA, 50 bp, Artificial
  Synthetic oligonucleotide
aacggaggcacaccctccctatacgccacgagcctgggacatctcctgca

SEQ ID NO: 140465 - DNA, 50 bp, Artificial
  Synthetic oligonucleotide
aacggagagtctgccgccgtcatagctcctgcccgtcccttcgtcgtaaa

SEQ ID NO: 140466 - DNA, 50 bp, Artificial
  Synthetic oligonucleotide
gtggatacgggcgccacgtacacggtcatacccaggaaactggctgagga

SEQ ID NO: 140467 - DNA, 50 bp, Artificial
  Synthetic oligonucleotide
aaccagacagcggctaagccgtctaggggcaccgggcctatgtgggcgta

SEQ ID NO: 140468 - DNA, 50 bp, Artificial
  Synthetic oligonucleotide
aacgcggctacacagctctacagcaagagccccgagttgcatcggaacgc

SEQ ID NO: 140469 - DNA, 50 bp, Artificial
  Synthetic oligonucleotide
ggtctttagggagcggggcgccaaggttctggctgtttcaaacgtggtgg

SEQ ID NO: 140470 - DNA, 50 bp, Artificial
  Synthetic oligonucleotide
aacgccgtactctcctttgcgttgccccgcatagccgcgagggatggagg

SEQ ID NO: 140471 - DNA, 55 bp, Artificial
  Synthetic oligonucleotide
cttcggagagcaacttcctaagagtagccgagtggagtacgtaggcgatgtgccc

SEQ ID NO: 140472 - DNA, 50 bp, Artificial
  Synthetic oligonucleotide
aacgccggaaggctcgcaggcccaactccctatacggccagagagatagc

SEQ ID NO: 140473 - DNA, 50 bp, Artificial
  Synthetic oligonucleotide
aacgagtacggtagggctctggggcggtcgggccttggagcagttatggg

SEQ ID NO: 140474 - DNA, 50 bp, Artificial
  Synthetic oligonucleotide
aaccagcggagacccatccaccatctcgggaagccccaccttctcatccc

SEQ ID NO: 140475 - DNA, 50 bp, Artificial
  Synthetic oligonucleotide
aacctcgccccagctcctagaaggcggcgcgaaactcaacctcctgaggg

SEQ ID NO: 140476 - DNA, 50 bp, Artificial
  Synthetic oligonucleotide
aacccagcaatgccgttattggggcggccgaggcgtaggtcatcactagg

SEQ ID NO: 140477 - DNA, 50 bp, Artificial
  Synthetic oligonucleotide
aaccgtgtagaacaggcaaagccctccccggggcaacacaaggtcgcgcc

SEQ ID NO: 140478 - DNA, 50 bp, Artificial
  Synthetic oligonucleotide
aaccgtggcctctctatcgccgaacctgggcaccttgacgccgactagtc

SEQ ID NO: 140479 - DNA, 50 bp, Artificial
  Synthetic oligonucleotide
aaccgtccatgagcagtgtccaagggccgcttggtacgccgcgggcaact

SEQ ID NO: 140480 - DNA, 50 bp, Artificial
  Synthetic oligonucleotide
aaccctcaggcccatagatgaccttcggaaacccagcacccttctcggcc

SEQ ID NO: 140481 - DNA, 50 bp, Artificial
  Synthetic oligonucleotide
aaccgtcatggggataacaacccaccgcgtaggcacagcccagaagtcgg

SEQ ID NO: 140482 - DNA, 55 bp, Artificial
  Synthetic oligonucleotide
ctgggatatcgcgtaattattggggttcctaaacaccctatgtgcgggtacgcac

SEQ ID NO: 140483 - DNA, 50 bp, Artificial
  Synthetic oligonucleotide
ggaggggtggttacagggtcgttgtaaacccgacagggggcttcaagcct

SEQ ID NO: 140484 - DNA, 50 bp, Artificial
  Synthetic oligonucleotide
ggcaagcagtaactacgcacccccaggttacccagcggttcctcaccctg

SEQ ID NO: 140485 - DNA, 50 bp, Artificial
  Synthetic oligonucleotide
aagcaacgcctcctgggcaggcctctgctttgtcgggtctataccaagct

SEQ ID NO: 140486 - DNA, 50 bp, Artificial
  Synthetic oligonucleotide
aagatatcgccctttgcccgacgccggccagtctaaaacgacgtgcgcga

SEQ ID NO: 140487 - DNA, 50 bp, Artificial
  Synthetic oligonucleotide
aagatagctgtggcgggcgggtacgtcgacattagggagtcgaggtggct

SEQ ID NO: 140488 - DNA, 50 bp, Artificial
  Synthetic oligonucleotide
aagagctaggcactgtgcgggaggttcgggacgtgtgcggccaccttttg

SEQ ID NO: 140489 - DNA, 50 bp, Artificial
  Synthetic oligonucleotide
aagagaggccaacccgagcaggcctaagggcagttttcgccgtgcctcgc

SEQ ID NO: 140490 - DNA, 50 bp, Artificial
  Synthetic oligonucleotide
aagacgccggcctccctagctatgcgctggtgcttcacggtcaattgcca

SEQ ID NO: 140491 - DNA, 50 bp, Artificial
  Synthetic oligonucleotide
aaattgccgagatggggcaccgtctggacgtagggccacgcagatccaat

SEQ ID NO: 140492 - DNA, 50 bp, Artificial
  Synthetic oligonucleotide
taccatcctccttagccgccctagtctcctcaggcacgccgtcgaatgcc

SEQ ID NO: 140493 - DNA, 55 bp, Artificial
  Synthetic oligonucleotide
ctggacgctcaaaaggtcttgaacgccgaggaaatcacagagcagtctcgcaggg

SEQ ID NO: 140494 - DNA, 50 bp, Artificial
  Synthetic oligonucleotide
aagaccctcgtgcgcaggagaagacacatccccctcctaagggccgtggc

SEQ ID NO: 140495 - DNA, 50 bp, Artificial
  Synthetic oligonucleotide
aagacactgtggagatagtggcgagtaggaggcccagcccccgccccttc

SEQ ID NO: 140496 - DNA, 50 bp, Artificial
  Synthetic oligonucleotide
aagaacacgtggagccctactgcaacttcgacgcagccgcggagaacgtg

SEQ ID NO: 140497 - DNA, 50 bp, Artificial
  Synthetic oligonucleotide
ggctgagtaacataccgtacgccgccgttatgcctattgcaggcgcgccc

SEQ ID NO: 140498 - DNA, 50 bp, Artificial
  Synthetic oligonucleotide
aactgtagagacagggggctgtgcctagtcaacccacgcctgagggcccc

SEQ ID NO: 140499 - DNA, 50 bp, Artificial
  Synthetic oligonucleotide
tacagggtggtaggagggcgaggggtttacctgccttagtggttgggacg

SEQ ID NO: 140500 - DNA, 50 bp, Artificial
  Synthetic oligonucleotide
aactggggaggagacacggcgcacagtttacacccggcggaattctaggc

SEQ ID NO: 140501 - DNA, 50 bp, Artificial
  Synthetic oligonucleotide
gggatcccctcggtagatccatcacgcttgccctaccaacgatggcaccg

SEQ ID NO: 140502 - DNA, 50 bp, Artificial
  Synthetic oligonucleotide
aactggaggatcctcagatcggagctcccggaggcccgcataatgcccgt

SEQ ID NO: 140503 - DNA, 50 bp, Artificial
  Synthetic oligonucleotide
aactgccacttggggcagtaggagacctgcatagggccctctcctgacga

SEQ ID NO: 140504 - DNA, 55 bp, Artificial
  Synthetic oligonucleotide
ctgcgtatgccgtaaatgtacgtagtggggcgagatccaacgttctcaaaagggt

SEQ ID NO: 140505 - DNA, 50 bp, Artificial
  Synthetic oligonucleotide
taacggcttaaccagaggctacgttacctggggcgagctacataagttaa

SEQ ID NO: 140506 - DNA, 50 bp, Artificial
  Synthetic oligonucleotide
aacaacgccgctacagccctccgaggcgcttataacggttagagccgcct

SEQ ID NO: 140507 - DNA, 50 bp, Artificial
  Synthetic oligonucleotide
aactctgcgggtcaccactggaatagtgcgccggcttagggcattcggcg

SEQ ID NO: 140508 - DNA, 50 bp, Artificial
  Synthetic oligonucleotide
gggcggtagaagacgcacttacacaagctgtagtccaccacatccccata

SEQ ID NO: 140509 - DNA, 50 bp, Artificial
  Synthetic oligonucleotide
aactcgtactccccatccaagcggagcctagacgccctgcacaacacacc

SEQ ID NO: 140510 - DNA, 50 bp, Artificial
  Synthetic oligonucleotide
aactaccagtacgaggcgccgactacgcccaacgtgagcccgcgcaacaa

SEQ ID NO: 140511 - DNA, 50 bp, Artificial
  Synthetic oligonucleotide
aactacaggaggttcgtagggccgccggtgtggtatagagtggtgggccc

SEQ ID NO: 140512 - DNA, 50 bp, Artificial
  Synthetic oligonucleotide
aacgtggagaggcttcaatcggcgcctccccgtagggtcttcacggtcca

SEQ ID NO: 140513 - DNA, 50 bp, Artificial
  Synthetic oligonucleotide
ccagtcctcgttggcggctcatcgggcgcgttattcgggataatcggctt

SEQ ID NO: 140514 - DNA, 50 bp, Artificial
  Synthetic oligonucleotide
acgtccctgttgcccgcggtcacgtaactcacgcccacgaccctggccct

SEQ ID NO: 140515 - DNA, 55 bp, Artificial
  Synthetic oligonucleotide
ctctactaaaacctcgctagggtgtgtagaactgtgacggttgagatttacatgt

SEQ ID NO: 140516 - DNA, 50 bp, Artificial
  Synthetic oligonucleotide
acgtccgccacgtagggctctctgacccatctatcgcagtcgggcgtcga

SEQ ID NO: 140517 - DNA, 50 bp, Artificial
  Synthetic oligonucleotide
ccacctgtggctacgggcccttaacggacccagcccctcgtcggttaacc

SEQ ID NO: 140518 - DNA, 50 bp, Artificial
  Synthetic oligonucleotide
acgtcggggattgggctggcaggagggtcgggcttatggcgactaccctc

SEQ ID NO: 140519 - DNA, 50 bp, Artificial
  Synthetic oligonucleotide
acgttggtggcttaacccaggactcggctggtggccttgtcggtaccata

SEQ ID NO: 140520 - DNA, 50 bp, Artificial
  Synthetic oligonucleotide
cagggcactccctgactctacgcctaaactccctggcactcccgcgtttg

SEQ ID NO: 140521 - DNA, 50 bp, Artificial
  Synthetic oligonucleotide
cagcgactagcccgtcattaacccagattttcactaattcgtctatggct

SEQ ID NO: 140522 - DNA, 50 bp, Artificial
  Synthetic oligonucleotide
actatcaaaggggtggaccaagcactgggcagccgaccaggggtggtcaa

SEQ ID NO: 140523 - DNA, 50 bp, Artificial
  Synthetic oligonucleotide
actcaagcgcgcagtaggccctcctaaccctgggcccgtcgacccagtac

SEQ ID NO: 140524 - DNA, 50 bp, Artificial
  Synthetic oligonucleotide
actccacgtcgattgggatgagcccggggtacctccacgtcccgaagggc

SEQ ID NO: 140525 - DNA, 50 bp, Artificial
  Synthetic oligonucleotide
actctgcccttgggtatagccacgtcgtccttgctctgcggggcctccgc

SEQ ID NO: 140526 - DNA, 55 bp, Artificial
  Synthetic oligonucleotide
ctcgcaagtatttgaactacacgcctctaatatcgcagacgtggcgactgccggc

SEQ ID NO: 140527 - DNA, 50 bp, Artificial
  Synthetic oligonucleotide
actctggcgaaggtgcccaatgtggctgtctttagggccggacgcgtctt

SEQ ID NO: 140528 - DNA, 50 bp, Artificial
  Synthetic oligonucleotide
caccggggaaccaatgggtgcccctgacttcggctggaccacactgataa

SEQ ID NO: 140529 - DNA, 50 bp, Artificial
  Synthetic oligonucleotide
cacccctcactctaagtcccatgagcactgccgcggatagcgcctcgtca

SEQ ID NO: 140530 - DNA, 50 bp, Artificial
  Synthetic oligonucleotide
actgcccggagaggaccaaggcggctgtgtctctgctgaggactaggccc

SEQ ID NO: 140531 - DNA, 50 bp, Artificial
  Synthetic oligonucleotide
actgggtatcccctgacgagcgccacgtgaccataggacctcgcgtcacc

SEQ ID NO: 140532 - DNA, 50 bp, Artificial
  Synthetic oligonucleotide
acgcccgcagactccgcgatgagggccatagtgactgtggagctcggcac

SEQ ID NO: 140533 - DNA, 50 bp, Artificial
  Synthetic oligonucleotide
acgccgccccgtgccaagccgtacgcaacgtaacgccactcctcaggcgg

SEQ ID NO: 140534 - DNA, 50 bp, Artificial
  Synthetic oligonucleotide
cctatcctgagacgtcgggaatggggcctgcgttgccgcaaacctacccc

SEQ ID NO: 140535 - DNA, 50 bp, Artificial
  Synthetic oligonucleotide
acgccgggagtacgcttgcctcctgggcccactccaccgtggccgttgtc

SEQ ID NO: 140536 - DNA, 50 bp, Artificial
  Synthetic oligonucleotide
acgccgtagaggccgctctagaggaggcgcagatgttggggcctaggagg

SEQ ID NO: 140537 - DNA, 55 bp, Artificial
  Synthetic oligonucleotide
ctcattggccgcgtactacatagccctctccgtactgaccggcattgacctaagg

SEQ ID NO: 140538 - DNA, 50 bp, Artificial
  Synthetic oligonucleotide
ccggtcgcctaatgaggggtggttcatgggaggctgcctggaggcttgag

SEQ ID NO: 140539 - DNA, 50 bp, Artificial
  Synthetic oligonucleotide
acgcctaggtctcccagtcacagtacccctctcggcccaacctctcgcaa

SEQ ID NO: 140540 - DNA, 50 bp, Artificial
  Synthetic oligonucleotide
acgcgctccattgagggagggcctgtcgacgaccagagagctgagccgcc

SEQ ID NO: 140541 - DNA, 50 bp, Artificial
  Synthetic oligonucleotide
cccgtttatgcacagggtgccgactcagtcgagcctggggctaggactgg

SEQ ID NO: 140542 - DNA, 50 bp, Artificial
  Synthetic oligonucleotide
acgcggacgcacacctccttggtcccccagtcgagctgtgggactatcct

SEQ ID NO: 140543 - DNA, 50 bp, Artificial
  Synthetic oligonucleotide
acgctatccggcacgtccccgaggtggtttcgattcacgtagcaacggcc

SEQ ID NO: 140544 - DNA, 50 bp, Artificial
  Synthetic oligonucleotide
cccgaggcacagccagcccttaagtggtttgcaagattagcagcgccctt

SEQ ID NO: 140545 - DNA, 50 bp, Artificial
  Synthetic oligonucleotide
acggaaggctggctaacccatcgggcaatccgcctagtggtaggtccgct

SEQ ID NO: 140546 - DNA, 50 bp, Artificial
  Synthetic oligonucleotide
ccccactcaccctatcctgagacgtcgggaatggggcctgcgttgccgca

SEQ ID NO: 140547 - DNA, 50 bp, Artificial
  Synthetic oligonucleotide
acggagtagtgtccttcccgagccccgatgccgtaaggaccgcgtttggc

SEQ ID NO: 140548 - DNA, 60 bp, Artificial
  Synthetic oligonucleotide
ctctaaacacagcggcgaggccctaaggcttgcatacgccatgagccactacagaaagcc

SEQ ID NO: 140549 - DNA, 55 bp, Artificial
  Synthetic oligonucleotide
ctatggaaccaggcctaatgggtagtaaggccgcgtctgcgcataccacgtcaac

SEQ ID NO: 140550 - DNA, 50 bp, Artificial
  Synthetic oligonucleotide
acgggcacaagggcccctcctattgcgaccgacagagaaagggctatccc

SEQ ID NO: 140551 - DNA, 50 bp, Artificial
  Synthetic oligonucleotide
acgggcattcttgctcggtacctcgagtggcctgccgtatagttcgccga

SEQ ID NO: 140552 - DNA, 50 bp, Artificial
  Synthetic oligonucleotide
acggtgttcctgaggaaacgagggcggctaacccagacggcacgacaagg

SEQ ID NO: 140553 - DNA, 50 bp, Artificial
  Synthetic oligonucleotide
aggggttggggagtcccggcactcgtcgcagttcaccaggacttcacggg

SEQ ID NO: 140554 - DNA, 50 bp, Artificial
  Synthetic oligonucleotide
agggggtttggcttcaccacggagattggttggttgcccgacaccttcgg

SEQ ID NO: 140555 - DNA, 50 bp, Artificial
  Synthetic oligonucleotide
agggggccgtgcgataaaatacccaggttgccccgggtttactgcctacc

SEQ ID NO: 140556 - DNA, 50 bp, Artificial
  Synthetic oligonucleotide
aggggcaaagggtgggtaagggacgcagcggtgagaaccttaaggacgca

SEQ ID NO: 140557 - DNA, 50 bp, Artificial
  Synthetic oligonucleotide
agggcacccaacgcgcaggacattaggatgctgtataagctggcgctcga

SEQ ID NO: 140558 - DNA, 50 bp, Artificial
  Synthetic oligonucleotide
aggcccttggggacacccaatgccctggacacctcagttacgagctcact

SEQ ID NO: 140559 - DNA, 50 bp, Artificial
  Synthetic oligonucleotide
aggagggcgccgcctgaggagaggttatttgcatcggtatctgccgaggc

SEQ ID NO: 140560 - DNA, 55 bp, Artificial
  Synthetic oligonucleotide
ctacatatcggaggcgaggaggtactacgtgaatatagtggccaaatacggcagg

SEQ ID NO: 140561 - DNA, 50 bp, Artificial
  Synthetic oligonucleotide
aggacctaaccccggagacctggcgctacgacctaccacccggctgcaaa

SEQ ID NO: 140562 - DNA, 50 bp, Artificial
  Synthetic oligonucleotide
aggaccaaccctcaggtagcccctgctaaccccgtccaaaccgcctatta

SEQ ID NO: 140563 - DNA, 50 bp, Artificial
  Synthetic oligonucleotide
aggaagatagagcccctggcaccagacccggtggataggctgaggttcgc

SEQ ID NO: 140564 - DNA, 50 bp, Artificial
  Synthetic oligonucleotide
agctttacgcggagtcagtggctagggggatacgtggagccgcggtgggg

SEQ ID NO: 140565 - DNA, 50 bp, Artificial
  Synthetic oligonucleotide
agcgccaactaggaaccatgcgaggaatgtgcccaatctacggcctgcca

SEQ ID NO: 140566 - DNA, 50 bp, Artificial
  Synthetic oligonucleotide
agcgaggtcggcctatccgaggaggcactcgaaagccctggcaggtcggc

SEQ ID NO: 140567 - DNA, 50 bp, Artificial
  Synthetic oligonucleotide
agcatgacggccctcctggctaggtccaggttaaacggcgctgcacgcct

SEQ ID NO: 140568 - DNA, 50 bp, Artificial
  Synthetic oligonucleotide
agccggtaggttagccgtgaggtttaggacctgccttagcgcgcacgtga

SEQ ID NO: 140569 - DNA, 50 bp, Artificial
  Synthetic oligonucleotide
agccggtacctctctgctccctcggtaagccgagtatccacgcagccagc

SEQ ID NO: 140570 - DNA, 50 bp, Artificial
  Synthetic oligonucleotide
agccacccgacttatgcacaacaggcactaccccagcgtactgggcctca

SEQ ID NO: 140571 - DNA, 55 bp, Artificial
  Synthetic oligonucleotide
ctacacggggatagacggcaaatggggagattataacacactttggtacctcgag

SEQ ID NO: 140572 - DNA, 50 bp, Artificial
  Synthetic oligonucleotide
cacacccctgagtgacgcagccataccccttggtgtggagtcagggtccc

SEQ ID NO: 140573 - DNA, 50 bp, Artificial
  Synthetic oligonucleotide
atttaggcagccgctcaggtcatcacgcctcggcaatgcggtacccagga

SEQ ID NO: 140574 - DNA, 50 bp, Artificial
  Synthetic oligonucleotide
acttcccgccctccacgtcgtaagctacgagcctcccgcccctactgcct

SEQ ID NO: 140575 - DNA, 50 bp, Artificial
  Synthetic oligonucleotide
acttgccgtagagccgcgttgtgtcagagccggccgacggatccccaaat

SEQ ID NO: 140576 - DNA, 50 bp, Artificial
  Synthetic oligonucleotide
atgcgactgcgccagtacccacggtgtactccaagtgctcccccggttca

SEQ ID NO: 140577 - DNA, 50 bp, Artificial
  Synthetic oligonucleotide
atgaaggcaatggccctcggcatgttcctatgggcgttcgcaatcggcct

SEQ ID NO: 140578 - DNA, 50 bp, Artificial
  Synthetic oligonucleotide
atgaagcgcctctgctgcagctaacctggctgcgtagtagcatccaccga

SEQ ID NO: 140579 - DNA, 50 bp, Artificial
  Synthetic oligonucleotide
acttgcgctgacctatggactcgcgccctacggctcatcaccactgggtt

SEQ ID NO: 140580 - DNA, 50 bp, Artificial
  Synthetic oligonucleotide
atccggggtagtcccgattgcgataatggtagagcccgtggcatgcccat

SEQ ID NO: 140581 - DNA, 50 bp, Artificial
  Synthetic oligonucleotide
atccctcccgggaaacacaggccaaccaccctgagtcagttcgggggacc

SEQ ID NO: 140582 - DNA, 55 bp, Artificial
  Synthetic oligonucleotide
cgttttctctagaggtcagtcccgctgaagtttgctcatcgatcctctgaacccc

SEQ ID NO: 140583 - DNA, 50 bp, Artificial
  Synthetic oligonucleotide
agaagtccgccacgtagtttaccagcctccgccactccatggagccgaga

SEQ ID NO: 140584 - DNA, 50 bp, Artificial
  Synthetic oligonucleotide
agaatcgggcaaggctccgccgaccttacaggagtctacgacctgggggc

SEQ ID NO: 140585 - DNA, 50 bp, Artificial
  Synthetic oligonucleotide
atattcagcggaggccgtaatgtcgaggggcgttagggtttggggcgtga

SEQ ID NO: 140586 - DNA, 50 bp, Artificial
  Synthetic oligonucleotide
agacccgccaacgcgttccaaccaaggacaaggcctgttaacaacggcac

SEQ ID NO: 140587 - DNA, 50 bp, Artificial
  Synthetic oligonucleotide
agataaccacggccacgttcgtgacgcctgtagccccattcgcggctgag

SEQ ID NO: 140588 - DNA, 50 bp, Artificial
  Synthetic oligonucleotide
agtctcgacggctgccttgctgcattcctcgggtgccatttcgccaaatg

SEQ ID NO: 140589 - DNA, 50 bp, Artificial
  Synthetic oligonucleotide
aggttgacggtgatagggtggagacgcacccaatagccgggactaggccg

SEQ ID NO: 140590 - DNA, 50 bp, Artificial
  Synthetic oligonucleotide
aggtccaggggtcaaggtcaagcctaatgacgccactcgggctagccctc

SEQ ID NO: 140591 - DNA, 50 bp, Artificial
  Synthetic oligonucleotide
acagtgccacgggtccgagttctaccaaggcgacgcaatgtcgcgggcag

SEQ ID NO: 140592 - DNA, 50 bp, Artificial
  Synthetic oligonucleotide
acatagcgatatatagcgacgggagggtcgagaggctggggcccgcccac

SEQ ID NO: 140593 - DNA, 55 bp, Artificial
  Synthetic oligonucleotide
cgtttcgcccgattcaattcccgataatagctacggacgtcaagatatacgacac

SEQ ID NO: 140594 - DNA, 50 bp, Artificial
  Synthetic oligonucleotide
acatagtgctgggaagcgccatagtggacaatcccgcctccggtacgcct

SEQ ID NO: 140595 - DNA, 50 bp, Artificial
  Synthetic oligonucleotide
acatcgccagcgtagagaggcgcggcccctggatatacgccgtgtgctac

SEQ ID NO: 140596 - DNA, 50 bp, Artificial
  Synthetic oligonucleotide
accaagttctccacaacccaaccagggaatggccaagccgtcttcggcct

SEQ ID NO: 140597 - DNA, 50 bp, Artificial
  Synthetic oligonucleotide
accacgccgctattagcgcgttcataggaccgggaggcactgcgagactg

SEQ ID NO: 140598 - DNA, 50 bp, Artificial
  Synthetic oligonucleotide
accacggggagcagagactcccttaacaccagcgggagattccccaccac

SEQ ID NO: 140599 - DNA, 50 bp, Artificial
  Synthetic oligonucleotide
accacgtggcccgagccctctgcgacagctttgaggaactccctgtcttg

SEQ ID NO: 140600 - DNA, 50 bp, Artificial
  Synthetic oligonucleotide
accagctgcctccgtagcgatagtaaagcgacgaccaaccctcccagcgc

SEQ ID NO: 140601 - DNA, 50 bp, Artificial
  Synthetic oligonucleotide
accaggggtcgcccgccctctgcacgcgcttaatcaagagcgtctttcca

SEQ ID NO: 140602 - DNA, 50 bp, Artificial
  Synthetic oligonucleotide
accccacgtcgaggcttctgtgggtgccgtggctacgcagtgctacgcta

SEQ ID NO: 140603 - DNA, 50 bp, Artificial
  Synthetic oligonucleotide
cggtgtcccacataccgggcaggtgtactgggttagtattgccccctgcc

SEQ ID NO: 140604 - DNA, 54 bp, Artificial
  Synthetic oligonucleotide
cgtggcgtacaaaggcggaatagacgacacaagagaaaccccagcccaaccaat

SEQ ID NO: 140605 - DNA, 50 bp, Artificial
  Synthetic oligonucleotide
cgggtgcaaggggtagtctactgaatgccgctcaaatgaccgccgcccta

SEQ ID NO: 140606 - DNA, 50 bp, Artificial
  Synthetic oligonucleotide
accccatccacggccctgagcgcatcctccggcctctttaagtccccaat

SEQ ID NO: 140607 - DNA, 50 bp, Artificial
  Synthetic oligonucleotide
accccgacaaagtggctagacacgtaaagaggtgggactggggcggcgtt

SEQ ID NO: 140608 - DNA, 50 bp, Artificial
  Synthetic oligonucleotide
accccgtacacgaccgagggggatctacggatggcgggctctcccgggag

SEQ ID NO: 140609 - DNA, 50 bp, Artificial
  Synthetic oligonucleotide
aattggtgtgacgatcgtgcgccttgtcagacgggagggcagactgctct

SEQ ID NO: 140610 - DNA, 50 bp, Artificial
  Synthetic oligonucleotide
aatttgacgattaggcggcttcccacggggtacggcttgggcaccttcgc

SEQ ID NO: 140611 - DNA, 50 bp, Artificial
  Synthetic oligonucleotide
acaaaccgccacacgccttggggccctctaaagtcgggaatgccgctcgc

SEQ ID NO: 140612 - DNA, 50 bp, Artificial
  Synthetic oligonucleotide
acaagctcgtgagggatgcagtggccgagacgtcgctatcgcccgacgac

SEQ ID NO: 140613 - DNA, 50 bp, Artificial
  Synthetic oligonucleotide
acaaggcgccgtatatggaggggtcgcccgactttagcctggccacgagc

SEQ ID NO: 140614 - DNA, 50 bp, Artificial
  Synthetic oligonucleotide
acaagggcccacctggcggttgagtttatctggaccactgggggcgcgct

SEQ ID NO: 140615 - DNA, 55 bp, Artificial
  Synthetic oligonucleotide
cgtgaagtttaggctctcgaatgagtacccgtacaagctcctgtagacagctatt

SEQ ID NO: 140616 - DNA, 50 bp, Artificial
  Synthetic oligonucleotide
acaagtggcgcggctcgctgtgaatttgggcggtgctgtgatacctgtcg

SEQ ID NO: 140617 - DNA, 50 bp, Artificial
  Synthetic oligonucleotide
acacccgggggagccgcttgactaagacagtcctaaacccgctcaccgcc

SEQ ID NO: 140618 - DNA, 50 bp, Artificial
  Synthetic oligonucleotide
acacgtgggcaaccccgcacccttctaccacgtaatcagggggttcacgg

SEQ ID NO: 140619 - DNA, 50 bp, Artificial
  Synthetic oligonucleotide
acactctgtagttgccgggggtcgtcagaggcgaggtcctccagaggaga

SEQ ID NO: 140620 - DNA, 50 bp, Artificial
  Synthetic oligonucleotide
acagcacgcgctctactcccatcggcgtcgctatgaccgaggcaaccatc

SEQ ID NO: 140621 - DNA, 50 bp, Artificial
  Synthetic oligonucleotide
ctgctagccccaccgggaggttcaatagtggcctttaaggacgccggctt

SEQ ID NO: 140622 - DNA, 50 bp, Artificial
  Synthetic oligonucleotide
ctgcccacagggtgcggtgcagataaggggttacgcagacttcacgccat

SEQ ID NO: 140623 - DNA, 50 bp, Artificial
  Synthetic oligonucleotide
ctgacgagcgccacgtgaccataggacctcgcgtcacccttgacacctgt

SEQ ID NO: 140624 - DNA, 50 bp, Artificial
  Synthetic oligonucleotide
acaggccagtgccgtttatgctcataatcagaacccccggcggagggcca

SEQ ID NO: 140625 - DNA, 50 bp, Artificial
  Synthetic oligonucleotide
acaggttttcgccgctgggagatagaagggccgtggtgaggcttgtccca

SEQ ID NO: 140626 - DNA, 54 bp, Artificial
  Synthetic oligonucleotide
cgtgaaatattcgtgaagggcgaaataagggctctcgaagtttaggtactagcc

SEQ ID NO: 140627 - DNA, 50 bp, Artificial
  Synthetic oligonucleotide
acagtgagaggacttcagcggagctgacctaactaccccgcaaccccggc

SEQ ID NO: 140628 - DNA, 50 bp, Artificial
  Synthetic oligonucleotide
ctccctccccaaatccgcacgggcgttatcggggcacactgcgtacctta

SEQ ID NO: 140629 - DNA, 50 bp, Artificial
  Synthetic oligonucleotide
acctacgacgggaggctcaccacgtacggccctggggtcaactcacacga

SEQ ID NO: 140630 - DNA, 50 bp, Artificial
  Synthetic oligonucleotide
cgcccaacgccttgagtggattaatggcagggggccaagcctaatgagga

SEQ ID NO: 140631 - DNA, 50 bp, Artificial
  Synthetic oligonucleotide
cgccatgtctgggtccggcccgttgtattggtagtcgtggagatccagcg

SEQ ID NO: 140632 - DNA, 50 bp, Artificial
  Synthetic oligonucleotide
cgccacgtgaccataggacctcgcgtcacccttgacacctgtcgccctaa

SEQ ID NO: 140633 - DNA, 50 bp, Artificial
  Synthetic oligonucleotide
acctcaacgggcacgcctaggagcgccgacatcgatagggcagttctcaa

SEQ ID NO: 140634 - DNA, 50 bp, Artificial
  Synthetic oligonucleotide
acctctctgcgcgataccgtgtgccaagtcgggcacgtcttgtccacgta

SEQ ID NO: 140635 - DNA, 50 bp, Artificial
  Synthetic oligonucleotide
acctctgccagaggacgccgtccatgaggccggagtacgtgtccacagtt

SEQ ID NO: 140636 - DNA, 50 bp, Artificial
  Synthetic oligonucleotide
acctgcctattacgtggtttattacagcgccgttgttaggagtgtgccat

SEQ ID NO: 140637 - DNA, 55 bp, Artificial
  Synthetic oligonucleotide
cgtctctgtccctccaatcgatcacagtggttagagcctccgagactaacctcgt

SEQ ID NO: 140638 - DNA, 50 bp, Artificial
  Synthetic oligonucleotide
acctggtcggccctctctaactccgctttgtccggcctcaacagagcccc

SEQ ID NO: 140639 - DNA, 50 bp, Artificial
  Synthetic oligonucleotide
acgaaggggtgctccagtatggccctccagacatcctcggagctctccct

SEQ ID NO: 140640 - DNA, 50 bp, Artificial
  Synthetic oligonucleotide
acgacgagctagcctccctgccgtctgtagagctagtggcgacgctccaa

SEQ ID NO: 140641 - DNA, 50 bp, Artificial
  Synthetic oligonucleotide
acgacgtagtcagaaggtcgcggggcataggggcagatgcgcccctcgtc

SEQ ID NO: 140642 - DNA, 50 bp, Artificial
  Synthetic oligonucleotide
acgagcccaactggcggcttgtgcctagggcggctgagaacatgacccgg

SEQ ID NO: 140643 - DNA, 50 bp, Artificial
  Synthetic oligonucleotide
ccttacgccgagggcctagccaggaagtacaccccatggcttagcggatc

SEQ ID NO: 140644 - DNA, 50 bp, Artificial
  Synthetic oligonucleotide
acgcatccgccgccccaccatatcctcagacgccccgcttcctaacacca

SEQ ID NO: 140645 - DNA, 50 bp, Artificial
  Synthetic oligonucleotide
acgcattcccgcggcactaggccagcacgcaaccactccacagtcttgcg

SEQ ID NO: 140646 - DNA, 50 bp, Artificial
  Synthetic oligonucleotide
cctgggcggggacgacctattgattttgtcgcccgtggaggcagctctga

SEQ ID NO: 140647 - DNA, 50 bp, Artificial
  Synthetic oligonucleotide
acccgcaagaggggcacatggcaacgccactactcgcgcgcagcctcact

SEQ ID NO: 140648 - DNA, 55 bp, Artificial
  Synthetic oligonucleotide
cgtcgtcctcattacgtctgagtacgccgccgttgagaggatacttccgaggggc

SEQ ID NO: 140649 - DNA, 50 bp, Artificial
  Synthetic oligonucleotide
cggctaatggatccccatactcagcgtaggccctagccctagagcccccg

SEQ ID NO: 140650 - DNA, 50 bp, Artificial
  Synthetic oligonucleotide
acccgtttctggacgtgtatgggtcggctgtcgataagggggacgcggtg

SEQ ID NO: 140651 - DNA, 50 bp, Artificial
  Synthetic oligonucleotide
accctaaccacgtccctgttgcccgcggtcacgtaactcacgcccacgac

SEQ ID NO: 140652 - DNA, 50 bp, Artificial
  Synthetic oligonucleotide
accctaccgctctccgacgtcactgcaccacctattgccgctaaggcggc

SEQ ID NO: 140653 - DNA, 50 bp, Artificial
  Synthetic oligonucleotide
accctgggcccgtcgacccagtactccctacctgatccacgaagcacgag

SEQ ID NO: 140654 - DNA, 50 bp, Artificial
  Synthetic oligonucleotide
cggcagacccatactgaaggccttgactacgggcgatgagggcccttcag

SEQ ID NO: 140655 - DNA, 50 bp, Artificial
  Synthetic oligonucleotide
accgactggacgtgtagctccttgccgccaggcgccctaggctcctcctt

SEQ ID NO: 140656 - DNA, 50 bp, Artificial
  Synthetic oligonucleotide
accgccgagacttgaggtggcgggctctctcctcgagacgtctccttctg

SEQ ID NO: 140657 - DNA, 50 bp, Artificial
  Synthetic oligonucleotide
accgccgctggagtgtgcctcggcgtatttgggaccgcattgccctacat

SEQ ID NO: 140658 - DNA, 50 bp, Artificial
  Synthetic oligonucleotide
accgctgccagggcctaagtgcgggtccctgccttgttcgtaggtctcca

SEQ ID NO: 140659 - DNA, 56 bp, Artificial
  Synthetic oligonucleotide
gaacataagagtatatgtcatatcccagtatcgttatattagcctccttagcgaag

SEQ ID NO: 140660 - DNA, 55 bp, Artificial
  Synthetic oligonucleotide
cccagagtcgccgtgtatatagctagggaggcgtatttccacgacgtaggaactt

SEQ ID NO: 140661 - DNA, 50 bp, Artificial
  Synthetic oligonucleotide
accgggccgctgggtacagcgccttgaatatgcgtaggtggtactcgccc

SEQ ID NO: 140662 - DNA, 50 bp, Artificial
  Synthetic oligonucleotide
cgcggggttcttttcagctctaggggcacgggacccagggtatacggtga

SEQ ID NO: 140663 - DNA, 50 bp, Artificial
  Synthetic oligonucleotide
accggtggggcgggtgtctctggcgcctaggtataagtacatgggcgacg

SEQ ID NO: 140664 - DNA, 50 bp, Artificial
  Synthetic oligonucleotide
accggtgggtcacccacatgtttctccacgggggcgtgctccacatagtg

SEQ ID NO: 140665 - DNA, 50 bp, Artificial
  Synthetic oligonucleotide
acctaccggttttcgcgggacgactcctgccacaagctggggctcagaca

SEQ ID NO: 140666 - DNA, 50 bp, Artificial
  Synthetic oligonucleotide
cgccgtaacgggaggcttaatacccttcacaggcccagtagccaacgccc

SEQ ID NO: 140667 - DNA, 55 bp, Artificial
  Synthetic oligonucleotide
ccatgtatagactctctcaagtgccgtggcttgcctcgttgttatacttaatcgc

SEQ ID NO: 140668 - DNA, 55 bp, Artificial
  Synthetic oligonucleotide
ccatctcgggtccaggaacttcctcaccacatatgcagtggcgaagggcataacg

SEQ ID NO: 140669 - DNA, 55 bp, Artificial
  Synthetic oligonucleotide
ccagggcctaaataattgcgatgaagcggacttaatattcctggtcgatgttagt

SEQ ID NO: 140670 - DNA, 55 bp, Artificial
  Synthetic oligonucleotide
ccacgtagcattcccctacgcaccctagaaaagatcctagacctactatacggcc

SEQ ID NO: 140671 - DNA, 55 bp, Artificial
  Synthetic oligonucleotide
ccacccgcgtcccctatatatcaagctcccgttccagtactcgacatacatagta

SEQ ID NO: 140672 - DNA, 55 bp, Artificial
  Synthetic oligonucleotide
ccaacgccagcgctatagcaactgcgtagtttattatagacgtcatagcgaggcg

SEQ ID NO: 140673 - DNA, 55 bp, Artificial
  Synthetic oligonucleotide
catgcatgatcaacatagacgtgggttaggtattcattattaattgcggagcagg

SEQ ID NO: 140674 - DNA, 55 bp, Artificial
  Synthetic oligonucleotide
catccttaagtacagtgggaatgatgggtatattaatccacttactaggctgtag

SEQ ID NO: 140675 - DNA, 52 bp, Artificial
  Synthetic oligonucleotide
cagccccaagggaggagaggtttaaggggttaaggatcattaccgctaagac

SEQ ID NO: 140676 - DNA, 51 bp, Artificial
  Synthetic oligonucleotide
cgtagggccgtaggggtttaaatagggaccgttggatagcgccgcgggcaa

SEQ ID NO: 140677 - DNA, 55 bp, Artificial
  Synthetic oligonucleotide
cagagtccccatgtacaataacccgtatatagtcccacaccttgagctagccacg

SEQ ID NO: 140678 - DNA, 55 bp, Artificial
  Synthetic oligonucleotide
cagacgtcttgtcgacatttataagactaggccaagagtccgacaggcttggcgc

SEQ ID NO: 140679 - DNA, 55 bp, Artificial
  Synthetic oligonucleotide
cactctcttgctcgccaaggagtgatgttgaggttaagcacacgactctactcac

SEQ ID NO: 140680 - DNA, 55 bp, Artificial
  Synthetic oligonucleotide
caccagatctcccgcatactggcgcatcctcagttcgagcccctacgagatgagc

SEQ ID NO: 140681 - DNA, 55 bp, Artificial
  Synthetic oligonucleotide
cacatggttgtagggtcgatattgaggttattagtagggatgatcccgtgcaacc

SEQ ID NO: 140682 - DNA, 55 bp, Artificial
  Synthetic oligonucleotide
attcggcccattagtgacagtgctcttagcgtcgtattacgcaggttatttaata

SEQ ID NO: 140683 - DNA, 55 bp, Artificial
  Synthetic oligonucleotide
attatgcatggagtgagtgcgtcgggtgattatagtgcctagggccgttgattta

SEQ ID NO: 140684 - DNA, 55 bp, Artificial
  Synthetic oligonucleotide
atgaacctaggcgctatatttggctcgtcatatggcgtcccggcgtggtatggcg

SEQ ID NO: 140685 - DNA, 55 bp, Artificial
  Synthetic oligonucleotide
atccaattggccaggtactacgagagggctgtggatcacatcagagagctgtacg

SEQ ID NO: 140686 - DNA, 55 bp, Artificial
  Synthetic oligonucleotide
atcacatattaacggttgagttcacgaacactacgtattttcaggaggccctcgt

SEQ ID NO: 140687 - DNA, 55 bp, Artificial
  Synthetic oligonucleotide
cgtacacccacctacatgtagacggaaagtgcttgacaattgcggtggttagggg

SEQ ID NO: 140688 - DNA, 54 bp, Artificial
  Synthetic oligonucleotide
ataggcgacacggtcttggtaaaccccggccctctgaaagacggctactacgca

SEQ ID NO: 140689 - DNA, 55 bp, Artificial
  Synthetic oligonucleotide
atacagatcttgagtaggtacggccccataatcccgttcatagttgcctctctgc

SEQ ID NO: 140690 - DNA, 55 bp, Artificial
  Synthetic oligonucleotide
agtaagtccttgtatacttagccaactccactgctgactgaatcttctttatgag

SEQ ID NO: 140691 - DNA, 55 bp, Artificial
  Synthetic oligonucleotide
agcctctctactctggggaagcgcgtttataccatctaaaactactacgtcaggc

SEQ ID NO: 140692 - DNA, 55 bp, Artificial
  Synthetic oligonucleotide
cgccacagcttagccacgtcgctgtccgtagcggaggccttaacctccacgagta

SEQ ID NO: 140693 - DNA, 55 bp, Artificial
  Synthetic oligonucleotide
cgcattcaaccactattgggaacgcgatatagacgccgcaatgtctagaacagcg

SEQ ID NO: 140694 - DNA, 55 bp, Artificial
  Synthetic oligonucleotide
cgcattaacggtagcctacgttgtttacggtcttgattcacagttcctaagccga

SEQ ID NO: 140695 - DNA, 55 bp, Artificial
  Synthetic oligonucleotide
cgattcgcatcaagtcaagtaacccacagcagttaataatgtggttaacctcagg

SEQ ID NO: 140696 - DNA, 55 bp, Artificial
  Synthetic oligonucleotide
cgatgcgttggataggttggcgcgtgtatataggtatctactccttaagaaggcc

SEQ ID NO: 140697 - DNA, 55 bp, Artificial
  Synthetic oligonucleotide
cgagcgctattagggcgtaacacatgcctagctctctagcgaggtttatctcagg

SEQ ID NO: 140698 - DNA, 55 bp, Artificial
  Synthetic oligonucleotide
cgtaaacgcctagataatgcgtcattgttacccgtcgtctctcataagctcggcc

SEQ ID NO: 140699 - DNA, 55 bp, Artificial
  Synthetic oligonucleotide
cgacgatggcaacttggtagacgccgctaacttggcctccgtggccgccttaaaa

SEQ ID NO: 140700 - DNA, 55 bp, Artificial
  Synthetic oligonucleotide
ccttttgccgctgtgacgaaccctgtcgatgtcacggggagtacaacagatgagc

SEQ ID NO: 140701 - DNA, 55 bp, Artificial
  Synthetic oligonucleotide
ccttagtccttggagttactgaattctctatggtctccaggtcaagcctaaaccc

SEQ ID NO: 140702 - DNA, 54 bp, Artificial
  Synthetic oligonucleotide
ccttaaaccccgtatttccaggcgtgtcccaataagacgtcgtgcttctgggca

SEQ ID NO: 140703 - DNA, 54 bp, Artificial
  Synthetic oligonucleotide
cctggttgtcgtgcccgtatatatccaaccggtgcccataggggaaattacggc

SEQ ID NO: 140704 - DNA, 55 bp, Artificial
  Synthetic oligonucleotide
cctctacacttagatacattgctttggctggccggacggacggttatctatggcg

SEQ ID NO: 140705 - DNA, 55 bp, Artificial
  Synthetic oligonucleotide
cctcatataacgtgagggcaagcccatgcattaaaccacccattaactggccgtc

SEQ ID NO: 140706 - DNA, 54 bp, Artificial
  Synthetic oligonucleotide
cctcaatagtcgataaaccgcccttaatgttaccctcggttggttgtgagccaa

SEQ ID NO: 140707 - DNA, 55 bp, Artificial
  Synthetic oligonucleotide
cctagcccctcagctcttgagcgccctctcgagagtccacctaaacgcccttatt

SEQ ID NO: 140708 - DNA, 53 bp, Artificial
  Synthetic oligonucleotide
cctaattccattagccgtcgacacgtaactaaccccaactatcctagccctaa

SEQ ID NO: 140709 - DNA, 55 bp, Artificial
  Synthetic oligonucleotide
cgggcggcgctagagaaggaatccctcagagctatatgcccgcaagccactgcag

SEQ ID NO: 140710 - DNA, 55 bp, Artificial
  Synthetic oligonucleotide
ccgtgtgctagtgccgcattgtcgtagcggtcataatatatagatagcctcgcgg

SEQ ID NO: 140711 - DNA, 55 bp, Artificial
  Synthetic oligonucleotide
ccgagcttaccaccaggtatgaaagccacgagaccaggtacgtcgcttgggaccc

SEQ ID NO: 140712 - DNA, 55 bp, Artificial
  Synthetic oligonucleotide
ccgactccagagtagtgttcgcaggtgacttattatttgccgaaccatgcacgcc

SEQ ID NO: 140713 - DNA, 55 bp, Artificial
  Synthetic oligonucleotide
ccctccctctgcacaccgccactatatcgggcacgtaccttttcctcacaccacc

SEQ ID NO: 140714 - DNA, 55 bp, Artificial
  Synthetic oligonucleotide
cccgtctcctatgcttaggcgctacaactatatagtagtgtacacacgtcatctc

SEQ ID NO: 140715 - DNA, 51 bp, Artificial
  Synthetic oligonucleotide
ccccgtggctctaaagttcttgaggtgggtacgggaatcggaatactaacg

SEQ ID NO: 140716 - DNA, 55 bp, Artificial
  Synthetic oligonucleotide
cccatgctttaccgctatggtcattcgcaacaccgattagtacgggaaagccctt

SEQ ID NO: 140717 - DNA, 55 bp, Artificial
  Synthetic oligonucleotide
cccatcttgacttggccgctgggaccctttaagacgggataggctagattaaatc

SEQ ID NO: 140718 - DNA, 55 bp, Artificial
  Synthetic oligonucleotide
gtgccgtatgctcggtcatgtacaatatccccttaaccctcataaacaggtgggt

SEQ ID NO: 140719 - DNA, 55 bp, Artificial
  Synthetic oligonucleotide
gtctccgttgcgcgctgtgtgacagtttgagtcaccgtgtgagttaccgtgcttg

SEQ ID NO: 140720 - DNA, 56 bp, Artificial
  Synthetic oligonucleotide
gcagcacacatcaggcacgggaaatgtcgcctctctcgcgaacctcgcgcttctaa

SEQ ID NO: 140721 - DNA, 55 bp, Artificial
  Synthetic oligonucleotide
gctaagtaacttaaatcccttaaccttgcttccataggcgttatctgaacagttg

SEQ ID NO: 140722 - DNA, 55 bp, Artificial
  Synthetic oligonucleotide
ggaacagcagtgattcacgctctatgggagatatttggagcctttatgctaggtg

SEQ ID NO: 140723 - DNA, 55 bp, Artificial
  Synthetic oligonucleotide
ggccacgctaaccgcagctatcatatccatcgcatagctccataatgcgtaatgc

SEQ ID NO: 140724 - DNA, 55 bp, Artificial
  Synthetic oligonucleotide
ggccctggttctaattttgcacctatttcgggtatgagaagtgtacccgatgtgg

SEQ ID NO: 140725 - DNA, 55 bp, Artificial
  Synthetic oligonucleotide
gtaatatacgctatccagggaataaagggcataggatacagggtagctgagggca

SEQ ID NO: 140726 - DNA, 55 bp, Artificial
  Synthetic oligonucleotide
gtataggagccaatctgtaagttcaacccttccgtgtaggtctcctggcccaata

SEQ ID NO: 140727 - DNA, 55 bp, Artificial
  Synthetic oligonucleotide
gtcgctattacaaataacagggttattattgggacatattcgtatgctatacccc

SEQ ID NO: 140728 - DNA, 55 bp, Artificial
  Synthetic oligonucleotide
tatgggagtaccaacaactgcgaattatatcattacatctcttgtagccgcaccg

SEQ ID NO: 140729 - DNA, 55 bp, Artificial
  Synthetic oligonucleotide
tggataaccttatgggcactctctttattgtagtctttccgttctctgtgactag

SEQ ID NO: 140730 - DNA, 55 bp, Artificial
  Synthetic oligonucleotide
tgtgccacccttcctctatgggttccaccggtaactatggcaacacttccctcag

SEQ ID NO: 140731 - DNA, 56 bp, Artificial
  Synthetic oligonucleotide
agcgccctagcaggtgcttcattaggcgcccttgccctagcttggaaaggatacac

SEQ ID NO: 140732 - DNA, 55 bp, Artificial
  Synthetic oligonucleotide
ttagaacatcagtggtaaatcccttgcgcacatagctaccatcatccgttgtgat

SEQ ID NO: 140733 - DNA, 55 bp, Artificial
  Synthetic oligonucleotide
ttagcgaaaacaactctcgacttgtaaaggtgaaagttagggatcagcgcatccc

SEQ ID NO: 140734 - DNA, 55 bp, Artificial
  Synthetic oligonucleotide
accttaaatccgagaatctggccaccctttggattcacaggatatattcttcccc

SEQ ID NO: 140735 - DNA, 55 bp, Artificial
  Synthetic oligonucleotide
actgtagcattagcagtgtaatcaccaggcaggatgttaccaccatatacctgaa

SEQ ID NO: 140736 - DNA, 55 bp, Artificial
  Synthetic oligonucleotide
agatgatgtaagatacacctctaggggatctctaagcttctatttagaagaccct

SEQ ID NO: 140737 - DNA, 55 bp, Artificial
  Synthetic oligonucleotide
cccaccaagcaaggaaacatcgtgatagagaagtataacacgggaattatggttg

SEQ ID NO: 140738 - DNA, 55 bp, Artificial
  Synthetic oligonucleotide
cccgcttgagcgatgtaaatggagatgagataccattatcccttctttacgatgg

SEQ ID NO: 140739 - DNA, 55 bp, Artificial
  Synthetic oligonucleotide
ccgctaggaggattgtgaatgctcaaaggcatattgggatgaggagggatccaag

SEQ ID NO: 140740 - DNA, 55 bp, Artificial
  Synthetic oligonucleotide
cgatacttccaggcatggacattgtaatatgcgatacctgtggtgcagtttacca

SEQ ID NO: 140741 - DNA, 55 bp, Artificial
  Synthetic oligonucleotide
cgttcagggtataaccggacatcagggctcgttccacagcggtgagatgattaag

SEQ ID NO: 140742 - DNA, 56 bp, Artificial
  Synthetic oligonucleotide
agcgttgggcgaggtactagagccctttgcattcccccacctcgtatcaggatgga

SEQ ID NO: 140743 - DNA, 55 bp, Artificial
  Synthetic oligonucleotide
gagtattgaggctcaaggagaaaagcgatcctttagagggtagcccacaggcgag

SEQ ID NO: 140744 - DNA, 55 bp, Artificial
  Synthetic oligonucleotide
gagctctcgtatccgctcggcctctgattactttaatcttgtgaagcactctaaa

SEQ ID NO: 140745 - DNA, 55 bp, Artificial
  Synthetic oligonucleotide
cgttctgcgaagtatcctatcgggcatagtgggataatatggacctttacgcaca

SEQ ID NO: 140746 - DNA, 55 bp, Artificial
  Synthetic oligonucleotide
ctatcggtcataatcaatcccgggaaatcaagcatgttatgcaatccttctttta

SEQ ID NO: 140747 - DNA, 55 bp, Artificial
  Synthetic oligonucleotide
ctcgttacagcggttatacttgccttcattgcaggttttatgtccgcggagttga

SEQ ID NO: 140748 - DNA, 55 bp, Artificial
  Synthetic oligonucleotide
cttatggaagaatccttggcgtaaattccgttgtatccgttagattgcattgtac

SEQ ID NO: 140749 - DNA, 54 bp, Artificial
  Synthetic oligonucleotide
ttacaaggctattgatgcaataatgacacctatctacatactcttcttcggagc

SEQ ID NO: 140750 - DNA, 54 bp, Artificial
  Synthetic oligonucleotide
tatgcccgctaccgttggtattccgaccctgttgccgtagtcccttatcccagc

SEQ ID NO: 140751 - DNA, 54 bp, Artificial
  Synthetic oligonucleotide
ggacccactctacataacgggagtaagaggtgcaaaatgcgagtatgctacacc

SEQ ID NO: 140752 - DNA, 53 bp, Artificial
  Synthetic oligonucleotide
tacccgtcttcatcagtctccccgggcaatcccacaatgctcgtgtatgctgg

SEQ ID NO: 140753 - DNA, 56 bp, Artificial
  Synthetic oligonucleotide
tacaatgtatccggaggcctcaaggcaaagggacatcctgttggagccacaggcgt

SEQ ID NO: 140754 - DNA, 53 bp, Artificial
  Synthetic oligonucleotide
cataatacactcccgtaaatatcaacgccctatcgatgctccatccataaact

SEQ ID NO: 140755 - DNA, 53 bp, Artificial
  Synthetic oligonucleotide
atatacaaccttcccttggcgcgtactcatcttaccctcaggaagcttcacga

SEQ ID NO: 140756 - DNA, 53 bp, Artificial
  Synthetic oligonucleotide
tggaaagccaattagtagcagcatttatctcactctctcctttaccacgacta

SEQ ID NO: 140757 - DNA, 52 bp, Artificial
  Synthetic oligonucleotide
ccgcacaacaagggtccgagatgggaaaccagggcctagcgaaccacccagt

SEQ ID NO: 140758 - DNA, 50 bp, Artificial
  Synthetic oligonucleotide
tacacatgcgcatccggtaataggtacgatgattaaaagatcggttaaag

SEQ ID NO: 140759 - DNA, 50 bp, Artificial
  Synthetic oligonucleotide
agccatctcccaaccttattacccaactatctccataagggcctcctttt

SEQ ID NO: 140760 - DNA, 50 bp, Artificial
  Synthetic oligonucleotide
ctctcccatctgcaacgctggttttgggagcagttactatgagccccata

SEQ ID NO: 140761 - DNA, 50 bp, Artificial
  Synthetic oligonucleotide
ggcccacgatcgaccctaagccatatacaaacgcaggaatagtgctcacc

SEQ ID NO: 140762 - DNA, 55 bp, Artificial
  Synthetic oligonucleotide
gggtataagaggggccacgcacatgaaccctgtacggcattttcccaccgtcgct

SEQ ID NO: 140763 - DNA, 55 bp, Artificial
  Synthetic oligonucleotide
gcatgcttaactattcccggagagattagcatcgctccatgggtcgtcacaccgg

SEQ ID NO: 140764 - DNA, 55 bp, Artificial
  Synthetic oligonucleotide
gcccgctacgatatgggctctactgccgaggatgagcttcgcaaaatgggtacgg

SEQ ID NO: 140765 - DNA, 55 bp, Artificial
  Synthetic oligonucleotide
gcctttgcaacagacaaatatgatgctccggtggtgtagcacggccaagcattag

SEQ ID NO: 140766 - DNA, 55 bp, Artificial
  Synthetic oligonucleotide
gcgctcttgggataaccatgatcggatgcatagtgcaatactttgaaaagtgcgt

SEQ ID NO: 140767 - DNA, 52 bp, Artificial
  Synthetic oligonucleotide
accgggcgattcatgttcgtcaccaacccaaccgaccttaccggtatcggga

SEQ ID NO: 140768 - DNA, 55 bp, Artificial
  Synthetic oligonucleotide
ctccgcaattattgagcttaaagtgagccctgagcgggactttgggtacgaccgg

SEQ ID NO: 140769 - DNA, 55 bp, Artificial
  Synthetic oligonucleotide
ctgcctgatcaaagataggcgcgatactgacctctccggtaagttgcccgctcgg

SEQ ID NO: 140770 - DNA, 55 bp, Artificial
  Synthetic oligonucleotide
gactccggcataaccctgagaatggctacaacgcttcccatgccttacggtcccc

SEQ ID NO: 140771 - DNA, 55 bp, Artificial
  Synthetic oligonucleotide
gagataagccccgggtttgccccatgatctaccacgcaggttgtggagtctgccc

SEQ ID NO: 140772 - DNA, 55 bp, Artificial
  Synthetic oligonucleotide
gccatgataactgtccaccaaactgtcttgctatatttgtcgtcgcaattaatat

SEQ ID NO: 140773 - DNA, 55 bp, Artificial
  Synthetic oligonucleotide
gccttttaaaggcgcactctcctgaggaacttgtggcgtacatcaagtgggcgtc

SEQ ID NO: 140774 - DNA, 53 bp, Artificial
  Synthetic oligonucleotide
gcgccactcctccggtaaaccgggctacccggtcacgtacattttcgcgtgtc

SEQ ID NO: 140775 - DNA, 55 bp, Artificial
  Synthetic oligonucleotide
gcgcgattacagttttcccgagggctgaagcatatcccatctcccatgcagtgcc

SEQ ID NO: 140776 - DNA, 55 bp, Artificial
  Synthetic oligonucleotide
ggagctcggtagtctcgggattaagcagccgttctgtaacgatccggcactgggg

SEQ ID NO: 140777 - DNA, 55 bp, Artificial
  Synthetic oligonucleotide
ggatccctccttcgatttcattacaggagatactgacttctgtcacccggacacc

SEQ ID NO: 140778 - DNA, 55 bp, Artificial
  Synthetic oligonucleotide
catgaaatattgcctcaaaagatcgattgcacacccacccgggagtttcggcccc

SEQ ID NO: 140779 - DNA, 55 bp, Artificial
  Synthetic oligonucleotide
ggcaacagttaccacacgctcacgatcacccagagcggataccagccatacaccg

SEQ ID NO: 140780 - DNA, 55 bp, Artificial
  Synthetic oligonucleotide
gttgtgaggagcggtattcccggagaaactggtatatccgcttatagtctgaacc

SEQ ID NO: 140781 - DNA, 55 bp, Artificial
  Synthetic oligonucleotide
tcaggacgaacgacggtatcaggggagtggacctcacggtacgcccgcttaccga

SEQ ID NO: 140782 - DNA, 55 bp, Artificial
  Synthetic oligonucleotide
aaacggcacagagacgatattcataaggccgatggacgtcgaaaatttcttgggg

SEQ ID NO: 140783 - DNA, 55 bp, Artificial
  Synthetic oligonucleotide
tgcagcagatcgggctgatgtaagacaggccacaaggtcctgcccactgtacgag

SEQ ID NO: 140784 - DNA, 55 bp, Artificial
  Synthetic oligonucleotide
ttatggacgttccgtggtatctttgaggtacctgccagacactttctttgttatg

SEQ ID NO: 140785 - DNA, 53 bp, Artificial
  Synthetic oligonucleotide
tccggacttcccgtacccgcataggattacccgggaacttaccgcatcacgac

SEQ ID NO: 140786 - DNA, 53 bp, Artificial
  Synthetic oligonucleotide
caaccatacatccgagtgcaaccattgcttcccgcggtgtccgtatcgggagg

SEQ ID NO: 140787 - DNA, 51 bp, Artificial
  Synthetic oligonucleotide
atgcagaccacaggcctctgcgtgcaccgggatgcaatctgcgagaagatc

SEQ ID NO: 140788 - DNA, 51 bp, Artificial
  Synthetic oligonucleotide
attatctctgcagccctgatgccaaggatccgttcaaatgacgggttgaca

SEQ ID NO: 140789 - DNA, 53 bp, Artificial
  Synthetic oligonucleotide
cccgtgtaaacggttcgactagcggttaagtcctggatactggatcccgtcgc

SEQ ID NO: 140790 - DNA, 51 bp, Artificial
  Synthetic oligonucleotide
tccagctgtgtggcaaccgtgcttaccagagactgcggggtgagtactttg

SEQ ID NO: 140791 - DNA, 50 bp, Artificial
  Synthetic oligonucleotide
acgtagacttcccgtttcccggcagcagcaatctcccgtcccgggatgac

SEQ ID NO: 140792 - DNA, 50 bp, Artificial
  Synthetic oligonucleotide
acgggtgtaacactgtgcggcgggtgttatgcgagggagcggaagggaat

SEQ ID NO: 140793 - DNA, 50 bp, Artificial
  Synthetic oligonucleotide
aaaacccctatgcccttgtcctctgccgaggcccgtgcagcgtacaaccg

SEQ ID NO: 140794 - DNA, 50 bp, Artificial
  Synthetic oligonucleotide
aaacatgggagccggtattttcccggatcggcgggtgtgagtgcctctct

SEQ ID NO: 140795 - DNA, 50 bp, Artificial
  Synthetic oligonucleotide
aaacggggcgagcgggcgatctatatcagcctcgaagaacgggaggaccg

SEQ ID NO: 140796 - DNA, 50 bp, Artificial
  Synthetic oligonucleotide
aaactccgcaatgtcacgccctaccccggtgtcgcaaagacccttgcagc

SEQ ID NO: 140797 - DNA, 50 bp, Artificial
  Synthetic oligonucleotide
aacagcccgcccatgcaacagccttccgttgcaccggccccgatgtagct

SEQ ID NO: 140798 - DNA, 50 bp, Artificial
  Synthetic oligonucleotide
aacatgtgcctccactggaggttccggcgagacggggtgatcggtccgat

SEQ ID NO: 140799 - DNA, 50 bp, Artificial
  Synthetic oligonucleotide
aactcaattgcggtgctgcaggagtagacaccaggcccgatggggcggtc

SEQ ID NO: 140800 - DNA, 55 bp, Artificial
  Synthetic oligonucleotide
ccgggtgctatcgggtacatctccatcggctacctcacgtccgatgtcaaggcag

SEQ ID NO: 140801 - DNA, 50 bp, Artificial
  Synthetic oligonucleotide
aagagcgaccaggttgcacggacaccccgttgtgcaagaagatccgagcc

SEQ ID NO: 140802 - DNA, 50 bp, Artificial
  Synthetic oligonucleotide
aagcagtccgggccacatttccaggggttccttctggggacaggacaggg

SEQ ID NO: 140803 - DNA, 50 bp, Artificial
  Synthetic oligonucleotide
aagcatccatcgcgctcggagcgacacagtgggagaccatgaggaacgtg

SEQ ID NO: 140804 - DNA, 50 bp, Artificial
  Synthetic oligonucleotide
aagcatggtctcttcgcggagagagagatcgcagggggaggctacggcat

SEQ ID NO: 140805 - DNA, 50 bp, Artificial
  Synthetic oligonucleotide
aagcgatcgcccttgggggcattaccgcaggccactaccagaggggactt

SEQ ID NO: 140806 - DNA, 50 bp, Artificial
  Synthetic oligonucleotide
aaggcgggagttcccttgcacagttcaccgagctcgcctacaagatccgg

SEQ ID NO: 140807 - DNA, 50 bp, Artificial
  Synthetic oligonucleotide
aagggccggagagtgaacgggaatgccaatcggttgcgtcccgggatgac

SEQ ID NO: 140808 - DNA, 50 bp, Artificial
  Synthetic oligonucleotide
aagggggtgagggcaaaggtccgagcagactgaccggttgggttctggat

SEQ ID NO: 140809 - DNA, 50 bp, Artificial
  Synthetic oligonucleotide
aatctcccgggtactgtgcaccgctcccgaaaagggctcgcacgcccctt

SEQ ID NO: 140810 - DNA, 50 bp, Artificial
  Synthetic oligonucleotide
aatgcctacccgtccggtgtgtacaccgttaccgcccgctcccggcttaa

SEQ ID NO: 140811 - DNA, 53 bp, Artificial
  Synthetic oligonucleotide
cctgaaccgtcctttgggtacgacaagttcaaagcggataccttctcctgtcc

SEQ ID NO: 140812 - DNA, 50 bp, Artificial
  Synthetic oligonucleotide
aatgtcacgccctaccccggtgtcgcaaagacccttgcagcagtccggga

SEQ ID NO: 140813 - DNA, 50 bp, Artificial
  Synthetic oligonucleotide
acacctattcgcgggcatgcgggtgaaccccatggatgggcgctcgtttc

SEQ ID NO: 140814 - DNA, 50 bp, Artificial
  Synthetic oligonucleotide
acatcgacgcggtgtgtccccgccgggatagacaggttatactggccggg

SEQ ID NO: 140815 - DNA, 50 bp, Artificial
  Synthetic oligonucleotide
accacaagaagggtaatggccgccttgttcccggcaatcaccggggctat

SEQ ID NO: 140816 - DNA, 50 bp, Artificial
  Synthetic oligonucleotide
acccgcctatgggttcggactgaaacggggagattttgcccggtgtgcta

SEQ ID NO: 140817 - DNA, 50 bp, Artificial
  Synthetic oligonucleotide
accctgcgcaaaaggcaccgggccttcagatttagtgtccgcctgcagtg

SEQ ID NO: 140818 - DNA, 50 bp, Artificial
  Synthetic oligonucleotide
accggacctgccggttctccataacacgggtggcagccccgtaacagaag

SEQ ID NO: 140819 - DNA, 50 bp, Artificial
  Synthetic oligonucleotide
accggataacgtggccttcatcgaatacgtgcccggtccgaggttgggga

SEQ ID NO: 140820 - DNA, 50 bp, Artificial
  Synthetic oligonucleotide
accgttcatgagcccggtgtaccagatcgagctctcgcttgtgggccggc

SEQ ID NO: 140821 - DNA, 50 bp, Artificial
  Synthetic oligonucleotide
acctccgggtcaattggatttgaggaggtcctcgcccccttactgcccgc

SEQ ID NO: 140822 - DNA, 55 bp, Artificial
  Synthetic oligonucleotide
cgggagttacttgttctcgtacatgcaggactgcacatcgtggccgagtttcccg

SEQ ID NO: 140823 - DNA, 50 bp, Artificial
  Synthetic oligonucleotide
acctcgtttgtattcggtgtcgcttttgctgccgggtggaccccctgcgt

SEQ ID NO: 140824 - DNA, 50 bp, Artificial
  Synthetic oligonucleotide
acggcacccgagataaacccgagagaactgggcttgccgccatggaacca

SEQ ID NO: 140825 - DNA, 50 bp, Artificial
  Synthetic oligonucleotide
acggcccgggcgaggggtatgatcttgcgtcctatgcagactcctatgcg

SEQ ID NO: 140826 - DNA, 55 bp, Artificial
  Synthetic oligonucleotide
ctaaggtaacatatcgtcattcgccgacagaaagactacaccccttttcgtatcc

SEQ ID NO: 140827 - DNA, 55 bp, Artificial
  Synthetic oligonucleotide
ctacgctatgtttaagtagagtgctcacgcacatatattactccagagcgatggt

SEQ ID NO: 140828 - DNA, 55 bp, Artificial
  Synthetic oligonucleotide
ctatggatcccaccgatttaagtgactgtcgacaacaggatcgagtctgccggtg

SEQ ID NO: 140829 - DNA, 55 bp, Artificial
  Synthetic oligonucleotide
agttggtctcagagaacggcaggattctgaccatcatatagtcccgcatccggga

SEQ ID NO: 140830 - DNA, 55 bp, Artificial
  Synthetic oligonucleotide
agaacgatcggtacagggtgatcgtggtccccttggctgctcccctctcaccgga

SEQ ID NO: 140831 - DNA, 55 bp, Artificial
  Synthetic oligonucleotide
ctgggataaacgttgtcgtcgcaacagttgatttgacaacaaatgaagtggatgt

SEQ ID NO: 140832 - DNA, 55 bp, Artificial
  Synthetic oligonucleotide
gagccactcgcctgacctgatatccctgaccacaaactgttgctcagctgaagag

SEQ ID NO: 140833 - DNA, 55 bp, Artificial
  Synthetic oligonucleotide
gccgtgaaggcaaacatcgaataccgcattcggacctggggaatgtgtacgccac

SEQ ID NO: 140834 - DNA, 55 bp, Artificial
  Synthetic oligonucleotide
ttttgagtggacgaggcgtcctcatctctggtatagagagtgtgcagacaccctt

SEQ ID NO: 140835 - DNA, 55 bp, Artificial
  Synthetic oligonucleotide
ggcatgggttgttccctctcgaccggacctcgttaagattgccacgaatgtcagg

SEQ ID NO: 140836 - DNA, 55 bp, Artificial
  Synthetic oligonucleotide
ggccatactgtcgttgccgctacattcaaggatggctctacgtcagtcattctgg

SEQ ID NO: 140837 - DNA, 55 bp, Artificial
  Synthetic oligonucleotide
ggcgactctgcacctattctcaagagaccaggtgattcccgaagggttctgcgag

SEQ ID NO: 140838 - DNA, 55 bp, Artificial
  Synthetic oligonucleotide
ggcggatgtcactcctatcaccacagaaacgttctgcgagacggttcgaatggcc

SEQ ID NO: 140839 - DNA, 55 bp, Artificial
  Synthetic oligonucleotide
gggatctcttgcttacatgagggtgtatgccagacgagcggtacgaacactaccg

SEQ ID NO: 140840 - DNA, 55 bp, Artificial
  Synthetic oligonucleotide
caagaccgcaggtaagtacaccgtcactgagactgtccagaatcgtgctgggtca

SEQ ID NO: 140841 - DNA, 55 bp, Artificial
  Synthetic oligonucleotide
ggtggaatcaaagtactgaatggacaggggatccctgattgcatcctctacctga

SEQ ID NO: 140842 - DNA, 55 bp, Artificial
  Synthetic oligonucleotide
ggttgcgtggtagaatctgcatggtcgacgtatgatttgaaatttgtcattcagg

SEQ ID NO: 140843 - DNA, 55 bp, Artificial
  Synthetic oligonucleotide
gtgccggaggtctgggacgcactctgtgctcatataaccattatacctgtcgtgg

SEQ ID NO: 140844 - DNA, 55 bp, Artificial
  Synthetic oligonucleotide
tggttgtgggcgcctgctgagtcgagacgatccggagttcgttcacatacatggc

SEQ ID NO: 140845 - DNA, 55 bp, Artificial
  Synthetic oligonucleotide
tcttgtggctaactatggttgacgggaaatgaggtactgatgccggctcccatgg

SEQ ID NO: 140846 - DNA, 53 bp, Artificial
  Synthetic oligonucleotide
attaagtccaattctaccgttgaagtagattcagagacgaacgtgaattggac

SEQ ID NO: 140847 - DNA, 52 bp, Artificial
  Synthetic oligonucleotide
cgtccagatcgtactcagaacagggtacctccctgcaattgaagatgaccca

SEQ ID NO: 140848 - DNA, 51 bp, Artificial
  Synthetic oligonucleotide
tcatatctttctcgtaggtgcctgacgatctttaccatatactgtgcctcc

SEQ ID NO: 140849 - DNA, 51 bp, Artificial
  Synthetic oligonucleotide
ggaatcccgaccccatcatcccggtataccagcgtacagccgatctctgat

SEQ ID NO: 140850 - DNA, 50 bp, Artificial
  Synthetic oligonucleotide
taatacgatccgcatgtacatggacagttctgagtttaccatccccgcac

SEQ ID NO: 140851 - DNA, 55 bp, Artificial
  Synthetic oligonucleotide
cagacgcccgctgaccgttcccaatcacccggagattgcccgtggtacattacgg

SEQ ID NO: 140852 - DNA, 50 bp, Artificial
  Synthetic oligonucleotide
atcaccaagcggcatacttcccgactgcagagaacctctccggggagcgt

SEQ ID NO: 140853 - DNA, 50 bp, Artificial
  Synthetic oligonucleotide
agtacccggcgactcgtccagtcagtccaggatggggcaacgggaggcca

SEQ ID NO: 140854 - DNA, 50 bp, Artificial
  Synthetic oligonucleotide
agggtgatcgtggtccccttggctgctcccctctcaccggagggttcagc

SEQ ID NO: 140855 - DNA, 50 bp, Artificial
  Synthetic oligonucleotide
aaaacccgatgcggaaggggaagacagtctctggtcagggggcccggaag

SEQ ID NO: 140856 - DNA, 50 bp, Artificial
  Synthetic oligonucleotide
aacccccattcaatgcggcgtactatcatggtcggggagcagcctgtgga

SEQ ID NO: 140857 - DNA, 50 bp, Artificial
  Synthetic oligonucleotide
aacccggcccacttggaccaccacgtccctggcactgatctcggcgccac

SEQ ID NO: 140858 - DNA, 50 bp, Artificial
  Synthetic oligonucleotide
aaccggatggttcccggtgccctccagcagaaggatcctgaggtcgcacc

SEQ ID NO: 140859 - DNA, 50 bp, Artificial
  Synthetic oligonucleotide
aacgggttcgccgaagtgcctccctcgttccacccgcgcttcgatgccat

SEQ ID NO: 140860 - DNA, 50 bp, Artificial
  Synthetic oligonucleotide
aactgcgactgaggggatccgggtctcatcagcccaatatgaacggcggg

SEQ ID NO: 140861 - DNA, 50 bp, Artificial
  Synthetic oligonucleotide
aacttgcgtggcgtgccgccccacccgtagatagcaaagaccatccttcc

SEQ ID NO: 140862 - DNA, 54 bp, Artificial
  Synthetic oligonucleotide
ccagggtataagaaatcccgctctgggaattatccacttcgattgagaaaaccc

SEQ ID NO: 140863 - DNA, 50 bp, Artificial
  Synthetic oligonucleotide
aagaccccaaggcccgaacacctggcatcgccgctctcactcaagtccta

SEQ ID NO: 140864 - DNA, 50 bp, Artificial
  Synthetic oligonucleotide
aagcaccgtactgcgtccgaagctggtccgccttgagaagcgtatcgcct

SEQ ID NO: 140865 - DNA, 49 bp, Artificial
  Synthetic oligonucleotide
aaggtcggggttggggaacggtctttcaccatcggggacgagacggtct

SEQ ID NO: 140866 - DNA, 50 bp, Artificial
  Synthetic oligonucleotide
acacccaccgtctgtgagatctgggcgaccgttgaaccggcgatcgatct

SEQ ID NO: 140867 - DNA, 50 bp, Artificial
  Synthetic oligonucleotide
accacacctaccgatctgatcatttctgcgcctctcctgatggtcgggaa

SEQ ID NO: 140868 - DNA, 50 bp, Artificial
  Synthetic oligonucleotide
accgagtctcccgacctgccgatcagggagcagctggatgcgctcagagc

SEQ ID NO: 140869 - DNA, 50 bp, Artificial
  Synthetic oligonucleotide
acgaatacagggccccggtcgttatggacccggagatgcccctggaccaa

SEQ ID NO: 140870 - DNA, 50 bp, Artificial
  Synthetic oligonucleotide
acgtcgcggccttaagtcccagacgacaggtcgacggacgcagaccgtat

SEQ ID NO: 140871 - DNA, 50 bp, Artificial
  Synthetic oligonucleotide
actccccagtccgggacttcggtacgaccgatgaggcgttacgggtcagg

SEQ ID NO: 140872 - DNA, 50 bp, Artificial
  Synthetic oligonucleotide
agcccggttcaaacggattgatggccacgacggcgagtgacttcaccgct

SEQ ID NO: 140873 - DNA, 55 bp, Artificial
  Synthetic oligonucleotide
cccgagagtgttgggctcgtcgtagaatgccccactgatcccggtcgtgtactgc

SEQ ID NO: 140874 - DNA, 50 bp, Artificial
  Synthetic oligonucleotide
agcgcccttccaaccacgcagaaggagtgcccaccacgaatcaacagata

SEQ ID NO: 140875 - DNA, 50 bp, Artificial
  Synthetic oligonucleotide
agcgcctgatagtcccgcacgtgcttgagacagcagaggccgtggacatg

SEQ ID NO: 140876 - DNA, 50 bp, Artificial
  Synthetic oligonucleotide
agcggcagagaaccccggaccccgggatggtgtgattcgggcgagtgtgc

SEQ ID NO: 140877 - DNA, 50 bp, Artificial
  Synthetic oligonucleotide
agcggtacatggtcagcgaggtgcttggtaatgccccggatcactgcgat

SEQ ID NO: 140878 - DNA, 50 bp, Artificial
  Synthetic oligonucleotide
agcgtgaccgaacgtgagtccacgtccatataccgccctgccgcgagcac

SEQ ID NO: 140879 - DNA, 50 bp, Artificial
  Synthetic oligonucleotide
agctacgctggttccaagggtgagccctagatcggagagacgctggacga

SEQ ID NO: 140880 - DNA, 50 bp, Artificial
  Synthetic oligonucleotide
agctgcaaccgtgacccatccggaagcgtcgcatcgattaagggactccc

SEQ ID NO: 140881 - DNA, 50 bp, Artificial
  Synthetic oligonucleotide
aggacagtgggcaggaacgccagcggggtccgtgggatcaagttgaagta

SEQ ID NO: 140882 - DNA, 50 bp, Artificial
  Synthetic oligonucleotide
aggatgggagcaggcggcccgtaaaggaaaagtcggacgggggcgatgga

SEQ ID NO: 140883 - DNA, 50 bp, Artificial
  Synthetic oligonucleotide
aggcagaggtcgtgagccgagaagacctgtccctggatcaccgagcagcg

SEQ ID NO: 140884 - DNA, 55 bp, Artificial
  Synthetic oligonucleotide
ccgggagaatggagtaaagagccgtatcacatcgagatcggtgtatccatatact

SEQ ID NO: 140885 - DNA, 50 bp, Artificial
  Synthetic oligonucleotide
aggcccgaacacctggcatcgccgctctcactcaagtcctatccggaacc

SEQ ID NO: 140886 - DNA, 50 bp, Artificial
  Synthetic oligonucleotide
aggcggcccgtaaaggaaaagtcggacgggggcgatggatcgcacagaag

SEQ ID NO: 140887 - DNA, 50 bp, Artificial
  Synthetic oligonucleotide
agggccccggtcgttatggacccggagatgcccctggaccaaccttccgg

SEQ ID NO: 140888 - DNA, 55 bp, Artificial
  Synthetic oligonucleotide
cgacctccggcaagagatcattcactactgcactcatagacaccactaccggcgg

SEQ ID NO: 140889 - DNA, 55 bp, Artificial
  Synthetic oligonucleotide
cgccggtcttattctgagcggcatcggcagtgaccgggaagttggtgcagtccgt

SEQ ID NO: 140890 - DNA, 55 bp, Artificial
  Synthetic oligonucleotide
ctgaaggcactcgatcgatcagaggacgcattggaggcgctcgaatattccctgg

SEQ ID NO: 140891 - DNA, 55 bp, Artificial
  Synthetic oligonucleotide
cagcaacgtcctctttattagtgccagcctgcgctcataatcgtatcccggggag

SEQ ID NO: 140892 - DNA, 55 bp, Artificial
  Synthetic oligonucleotide
gaggtaaatcctgaattcgatcactctgggataacttgcttcgctgcagctaaga

SEQ ID NO: 140893 - DNA, 55 bp, Artificial
  Synthetic oligonucleotide
agagtagaagaagcccctatgcactcccactaacgctgggattaaggatatcagc

SEQ ID NO: 140894 - DNA, 55 bp, Artificial
  Synthetic oligonucleotide
agagggctgaagtatctacgggccctggagcgacagcgttcacagttatattgaa

SEQ ID NO: 140895 - DNA, 55 bp, Artificial
  Synthetic oligonucleotide
tccaggtgctagattcgaagataactcctcaacgccagccactaggccgaattcc

SEQ ID NO: 140896 - DNA, 55 bp, Artificial
  Synthetic oligonucleotide
gggtgctcgaggcatatgatgggttgagcttcaggattaggcccctcattatctc

SEQ ID NO: 140897 - DNA, 55 bp, Artificial
  Synthetic oligonucleotide
gggagcgatccactcatatatagctaatccgactagccagcctaacaggggcagt

SEQ ID NO: 140898 - DNA, 55 bp, Artificial
  Synthetic oligonucleotide
ggccatagttacgtcggcaggtgggtcaacataggcgccggctcgataacctcta

SEQ ID NO: 140899 - DNA, 55 bp, Artificial
  Synthetic oligonucleotide
ggactttcacggccacatcaagccaggggctcgtctacatgtcggaggtacttca

SEQ ID NO: 140900 - DNA, 55 bp, Artificial
  Synthetic oligonucleotide
gctggggtccttcgatgccccgactacggctatagctgatgggttgaatagcctc

SEQ ID NO: 140901 - DNA, 54 bp, Artificial
  Synthetic oligonucleotide
gctcgataagggagagttcaagcttaaggtctgcggggaaggcggttacgtggg

SEQ ID NO: 140902 - DNA, 55 bp, Artificial
  Synthetic oligonucleotide
catccttgggcctcactacgctcattatacgcgtcagctgatagggatagtagtg

SEQ ID NO: 140903 - DNA, 55 bp, Artificial
  Synthetic oligonucleotide
gctcgaggtgggaggatggagctaatagccataaggacccgtaagatagtcgagg

SEQ ID NO: 140904 - DNA, 55 bp, Artificial
  Synthetic oligonucleotide
gctcgagctattcgcggaatcagcccctgatagatcccaagaaagtctagctcct

SEQ ID NO: 140905 - DNA, 55 bp, Artificial
  Synthetic oligonucleotide
accggtaggcgaatctgtaagaatcatcgaacttagctagggcagtagtcggggt

SEQ ID NO: 140906 - DNA, 55 bp, Artificial
  Synthetic oligonucleotide
gcgtcaggaaggtatatacgaatgcgaaatatgtttacgatctcgacgtgcccga

SEQ ID NO: 140907 - DNA, 55 bp, Artificial
  Synthetic oligonucleotide
gcctccatctagcctttatgagcttaggagagtctactgtaaggttcagcttggc

SEQ ID NO: 140908 - DNA, 54 bp, Artificial
  Synthetic oligonucleotide
ctcgcttagcgagctccacagcgtacctcactgcctcctcagcggactccgtag

SEQ ID NO: 140909 - DNA, 53 bp, Artificial
  Synthetic oligonucleotide
gaccatctatcctcagtgtgaggccgtccttgagtatcgcgtaacgatcctcc

SEQ ID NO: 140910 - DNA, 52 bp, Artificial
  Synthetic oligonucleotide
ccttacatatgacttcccggagtgagtgaactcgcatacgactgagcaggtc

SEQ ID NO: 140911 - DNA, 52 bp, Artificial
  Synthetic oligonucleotide
gggctctccccgttgaagtattaccttatggggtctcctggaccctcggtaa

SEQ ID NO: 140912 - DNA, 51 bp, Artificial
  Synthetic oligonucleotide
atctcatgtgccctccaggcctctatccccggatccactacagcatgaagc

SEQ ID NO: 140913 - DNA, 55 bp, Artificial
  Synthetic oligonucleotide
ccaatgctacggttcaccagatagcgagcactatcatgctcagggtcccaccgac

SEQ ID NO: 140914 - DNA, 51 bp, Artificial
  Synthetic oligonucleotide
agggatatatctgagtctaggtccgttgtgaccagattcctagtggctgtg

SEQ ID NO: 140915 - DNA, 50 bp, Artificial
  Synthetic oligonucleotide
aggcccgatgaagggggcctggtgatccgatccctgagcaacgctaggct

SEQ ID NO: 140916 - DNA, 50 bp, Artificial
  Synthetic oligonucleotide
agcgtgactagggcggtcgcagaggacttagcatcctcgctcgaacccga

SEQ ID NO: 140917 - DNA, 50 bp, Artificial
  Synthetic oligonucleotide
agcggtcccccgggagacctcggatactaaggctagggctgctgggctgt

SEQ ID NO: 140918 - DNA, 50 bp, Artificial
  Synthetic oligonucleotide
agcccctcacgcagatagatacgcagggtgcagctaggacagccgcctta

SEQ ID NO: 140919 - DNA, 50 bp, Artificial
  Synthetic oligonucleotide
agccatgcttcagtcgtagccagggcaatagggaagccggctgtagtggg

SEQ ID NO: 140920 - DNA, 50 bp, Artificial
  Synthetic oligonucleotide
agaccgatgggaaggtgacgtggctctacaacccgctcgcagctccaggt

SEQ ID NO: 140921 - DNA, 50 bp, Artificial
  Synthetic oligonucleotide
actgccgataggtagtgcccagcgaaggtcccgaggctacccccactgca

SEQ ID NO: 140922 - DNA, 50 bp, Artificial
  Synthetic oligonucleotide
accgccacggggctcctcatagcagggcggaagctcggatccctcagtaa

SEQ ID NO: 140923 - DNA, 50 bp, Artificial
  Synthetic oligonucleotide
accatgacctcgctcctcctgaccccttcagctgtcctgagggcgcaaac

SEQ ID NO: 140924 - DNA, 55 bp, Artificial
  Synthetic oligonucleotide
ccgtactgctcctctacataggggtagatgtgattaggactaagctagcgatatc

SEQ ID NO: 140925 - DNA, 50 bp, Artificial
  Synthetic oligonucleotide
acatgctagcgaacgtatccgcggccctcaccagcatcctgataggggct

SEQ ID NO: 140926 - DNA, 50 bp, Artificial
  Synthetic oligonucleotide
acatcagcagtggccccctcctccatgaccctcccgaggtagaggacggc

SEQ ID NO: 140927 - DNA, 50 bp, Artificial
  Synthetic oligonucleotide
aagtgcgggctctgcgactctgagtgcgtgatcccggagggagggctcgg

SEQ ID NO: 140928 - DNA, 50 bp, Artificial
  Synthetic oligonucleotide
aagtcagcttcagtgagggccactcctccaagcggcccagcttctatgct

SEQ ID NO: 140929 - DNA, 50 bp, Artificial
  Synthetic oligonucleotide
aagctcgggtttcgcgtacctctccactatcttcccccaggaggcctcga

SEQ ID NO: 140930 - DNA, 50 bp, Artificial
  Synthetic oligonucleotide
aagaggcccctacgctcatcggaccgcatgcttcacccctcgaagctcca

SEQ ID NO: 140931 - DNA, 50 bp, Artificial
  Synthetic oligonucleotide
aaccggaccgtccagaagagctcccgagggctgcttgctgtggtaacaag

SEQ ID NO: 140932 - DNA, 50 bp, Artificial
  Synthetic oligonucleotide
aaacgcccctagcgctcggatcgaactccccaggacccctgaagaggtaa

SEQ ID NO: 140933 - DNA, 50 bp, Artificial
  Synthetic oligonucleotide
atatggtggtccggggtcggggcattgcacgtaacccagatctccgctcc

SEQ ID NO: 140934 - DNA, 50 bp, Artificial
  Synthetic oligonucleotide
atcacccaggaaggggacgtaatcgctggggccgacccttgcccctatct

SEQ ID NO: 140935 - DNA, 55 bp, Artificial
  Synthetic oligonucleotide
ccgtcactggtatcagtagcgtgaccagattcgcattcgtagctccagccctctc

SEQ ID NO: 140936 - DNA, 50 bp, Artificial
  Synthetic oligonucleotide
atccggtgttatctgagtcccctgatccataccgaaggcccctcccggga

SEQ ID NO: 140937 - DNA, 50 bp, Artificial
  Synthetic oligonucleotide
ataggtccctctgtataggttgcggtgtcgcccccaccctctgctcggag

SEQ ID NO: 140938 - DNA, 50 bp, Artificial
  Synthetic oligonucleotide
atctggctagggtgatgatggaggagaccggaagcctgggggttcgcgta

SEQ ID NO: 140939 - DNA, 50 bp, Artificial
  Synthetic oligonucleotide
atgcgacattcctcggtgcggctagggaagtcgggaggagctccgttcta

SEQ ID NO: 140940 - DNA, 50 bp, Artificial
  Synthetic oligonucleotide
atggaggagaccggaagcctgggggttcgcgtatacggatgcgagaggat

SEQ ID NO: 140941 - DNA, 50 bp, Artificial
  Synthetic oligonucleotide
caagggccccctctacgtcggggctggctctcagatagtcgcgggtagca

SEQ ID NO: 140942 - DNA, 50 bp, Artificial
  Synthetic oligonucleotide
cagactgatccctctctggaagtggctcctctcccactagcccgcggagg

SEQ ID NO: 140943 - DNA, 50 bp, Artificial
  Synthetic oligonucleotide
ataggcgaacctctccattctagcttggcccaccgctatcccggcggggg

SEQ ID NO: 140944 - DNA, 50 bp, Artificial
  Synthetic oligonucleotide
cagcgtacctgtgactccgaggggctccggcacctcactcgtaggaggac

SEQ ID NO: 140945 - DNA, 50 bp, Artificial
  Synthetic oligonucleotide
ataagcgggccgagcgtgactagggcggtcgcagaggacttagcatcctc

SEQ ID NO: 140946 - DNA, 55 bp, Artificial
  Synthetic oligonucleotide
cctcaataattccggatactgcccttcaaagtgaagagttgccagggctatatcg

SEQ ID NO: 140947 - DNA, 50 bp, Artificial
  Synthetic oligonucleotide
agttgagggggtgtgagtatgtgggcctactggttgagtgtccccgccca

SEQ ID NO: 140948 - DNA, 50 bp, Artificial
  Synthetic oligonucleotide
aggggcccccatcggaggctagggttccgctgaggatacgcgggacaggc

SEQ ID NO: 140949 - DNA, 50 bp, Artificial
  Synthetic oligonucleotide
agggagcgcggggattaggaacgtgtcggagcctgagtaggatggctcaa

SEQ ID NO: 140950 - DNA, 50 bp, Artificial
  Synthetic oligonucleotide
agggaagctactgccgataggtagtgcccagcgaaggtcccgaggctacc

SEQ ID NO: 140951 - DNA, 50 bp, Artificial
  Synthetic oligonucleotide
aggcgaagtcgcccccgcgttattcgttggtatggggctcggtttcttga

SEQ ID NO: 140952 - DNA, 55 bp, Artificial
  Synthetic oligonucleotide
ccttctcctaagcaccctgaggcatagttggacctatcaggagcatcattcactc

SEQ ID NO: 140953 - DNA, 55 bp, Artificial
  Synthetic oligonucleotide
cgcccgccgcttatcctctgggcataatcgatgtaatactcacgggcacgatgcc

SEQ ID NO: 140954 - DNA, 55 bp, Artificial
  Synthetic oligonucleotide
ctcgaatccctcattgaccctccctataagatgatcctcagttagcttaacgtta

SEQ ID NO: 140955 - DNA, 56 bp, Artificial
  Synthetic oligonucleotide
ttgggacggatagaggaagaataccacaacctacaataattcttgatatacctaac

SEQ ID NO: 140956 - DNA, 55 bp, Artificial
  Synthetic oligonucleotide
cgccttctcccaatagagaatagaaccaccctcttatttggtcccagccttctaa

SEQ ID NO: 140957 - DNA, 55 bp, Artificial
  Synthetic oligonucleotide
tatccccatataataccagcttgtaattacaaaggacacatctcgatagtgcgct

SEQ ID NO: 140958 - DNA, 55 bp, Artificial
  Synthetic oligonucleotide
taaattgcctcgcttgtttcattgttttagctaagcctttccttactaacatggt

SEQ ID NO: 140959 - DNA, 55 bp, Artificial
  Synthetic oligonucleotide
gccaggggtttggctataattagtgaatgtagagaaccaactaatacgcagtgca

SEQ ID NO: 140960 - DNA, 53 bp, Artificial
  Synthetic oligonucleotide
cggccaaccgggatagggccggggagtgccattatggcgagaaccggcctaaa

SEQ ID NO: 140961 - DNA, 55 bp, Artificial
  Synthetic oligonucleotide
caaggttacataaagctaaggggcttcgaagcagtaagaacagactgggctccca

SEQ ID NO: 140962 - DNA, 55 bp, Artificial
  Synthetic oligonucleotide
ttagatctaacttctcccaaaactaatgctgaatcgcccaatctaagggaagccc

SEQ ID NO: 140963 - DNA, 54 bp, Artificial
  Synthetic oligonucleotide
tctaccccactacagctcggggataaacatacccttattatgtctttcccggta

SEQ ID NO: 140964 - DNA, 54 bp, Artificial
  Synthetic oligonucleotide
tacacagcatattttagaccattggaaaattgagcccaccatattgtgtggtgt

SEQ ID NO: 140965 - DNA, 53 bp, Artificial
  Synthetic oligonucleotide
cttacccctaccaagggagagacaatagactaattactgggagaatccatcct

SEQ ID NO: 140966 - DNA, 60 bp, Artificial
  Synthetic oligonucleotide
cgaaaacagatctagcccatgcaatagcgaattggttgttattcacaataatgtccctcc

SEQ ID NO: 140967 - DNA, 53 bp, Artificial
  Synthetic oligonucleotide
ttactgttttggtagaccttactctctcgaacagtaccactcggtttagttag

SEQ ID NO: 140968 - DNA, 53 bp, Artificial
  Synthetic oligonucleotide
tagtagataacgccctcgatgctacagaggaagcgagaatattgcctacaatc

SEQ ID NO: 140969 - DNA, 52 bp, Artificial
  Synthetic oligonucleotide
tattattattcgctctaagcgccataatagtatttggaaccgctttagtcga

SEQ ID NO: 140970 - DNA, 52 bp, Artificial
  Synthetic oligonucleotide
tttacgcaacccattccataccgcatagcgcccatttggctatacatactcc

SEQ ID NO: 140971 - DNA, 52 bp, Artificial
  Synthetic oligonucleotide
accagatatatttgttacgggccatatacatagagttgggttaggagaatac

SEQ ID NO: 140972 - DNA, 51 bp, Artificial
  Synthetic oligonucleotide
aacagttacctaactcccccttactataagtataacgcactcgttggggat

SEQ ID NO: 140973 - DNA, 51 bp, Artificial
  Synthetic oligonucleotide
gccccaactagggcgtaaaagactaatgtaaatatactgctacgcctcaaa

SEQ ID NO: 140974 - DNA, 51 bp, Artificial
  Synthetic oligonucleotide
gaagcagtgaggcaagcaatcgctaggggtttagtagtatggacaggtagc

SEQ ID NO: 140975 - DNA, 51 bp, Artificial
  Synthetic oligonucleotide
gaagaaacctgttggaccagggtattggttagcgttttccaatacttctag

SEQ ID NO: 140976 - DNA, 51 bp, Artificial
  Synthetic oligonucleotide
cccactaatctcgaatctcgttccatttggtgtcttagttaccctatgctc

SEQ ID NO: 140977 - DNA, 56 bp, Artificial
  Synthetic oligonucleotide
cgaattctttatcatatggggcccattcgggctttgtagttcttaatggcctctta

SEQ ID NO: 140978 - DNA, 50 bp, Artificial
  Synthetic oligonucleotide
ataatgagtatacttcgctaacatttcctgcagttccattggtgtcatct

SEQ ID NO: 140979 - DNA, 55 bp, Artificial
  Synthetic oligonucleotide
gcacccgcggtaagctcgccgggatgattaatgattcccggtatccaaccgcggg

SEQ ID NO: 140980 - DNA, 53 bp, Artificial
  Synthetic oligonucleotide
tgtaggggaattggtcccaataggtaaaggtagaggcggaaccactgttacta

SEQ ID NO: 140981 - DNA, 56 bp, Artificial
  Synthetic oligonucleotide
ggacccaggataatatatccctacgaagctaggttaaggcaattaacttactctgc

SEQ ID NO: 140982 - DNA, 56 bp, Artificial
  Synthetic oligonucleotide
ggaagtaaagtcgactatttaactgggggggtatcagctataatggatatagagga

SEQ ID NO: 140983 - DNA, 55 bp, Artificial
  Synthetic oligonucleotide
cttataggctctttcattttatgctctataaccattagattggggttttccttta

SEQ ID NO: 140984 - DNA, 57 bp, Artificial
  Synthetic oligonucleotide
aatgtagctctctctagtggggatggtttcctctccattagcccatgcctggtaaat

SEQ ID NO: 140985 - DNA, 55 bp, Artificial
  Synthetic oligonucleotide
aggtcaaattctctgacgaagcgtgtgtctaccaccgtgacgtccctgggtatgc

SEQ ID NO: 140986 - DNA, 55 bp, Artificial
  Synthetic oligonucleotide
ctgagagatcgttgccgatatagtctcccgtaagcgggtcgctccctgtgattct

SEQ ID NO: 140987 - DNA, 55 bp, Artificial
  Synthetic oligonucleotide
ctgtcctgcctcatactatcacagaccccatgtttatcgaagtgccggtgcctaa

SEQ ID NO: 140988 - DNA, 55 bp, Artificial
  Synthetic oligonucleotide
gacaactgtttaccttatccttgtaataatggccggtaaagtgcagcgttagcct

SEQ ID NO: 140989 - DNA, 54 bp, Artificial
  Synthetic oligonucleotide
gaggattactatgttgacgcgggaccgccacttaggcttcgtggtaaagggccc

SEQ ID NO: 140990 - DNA, 55 bp, Artificial
  Synthetic oligonucleotide
gcagctctacgagcgatatcgtgggatccgcaatcggcgtggtattttctggcgt

SEQ ID NO: 140991 - DNA, 55 bp, Artificial
  Synthetic oligonucleotide
gccgcaatcgtgccgggtaatacccttccgggctaacacgcctgcggcataccta

SEQ ID NO: 140992 - DNA, 55 bp, Artificial
  Synthetic oligonucleotide
aatcattcctgtactgcatcaggtacgctttgcaggatacaacgtatacaacccg

SEQ ID NO: 140993 - DNA, 55 bp, Artificial
  Synthetic oligonucleotide
gtacacggacgctgcgatgtacctcacctgaatgtacaggctctcccgagatagc

SEQ ID NO: 140994 - DNA, 55 bp, Artificial
  Synthetic oligonucleotide
tcgtctgatatctggcagctcccgacaatttaacagtcccctgcaggagcctaac

SEQ ID NO: 140995 - DNA, 54 bp, Artificial
  Synthetic oligonucleotide
ggttgacctgaatgttcttatgctctcctacaggcacgtgatggtccaggatta

SEQ ID NO: 140996 - DNA, 55 bp, Artificial
  Synthetic oligonucleotide
caaatctcatatattcgatacgccctaataagtcagagagaatcgtccatgcagg

SEQ ID NO: 140997 - DNA, 53 bp, Artificial
  Synthetic oligonucleotide
acagactgcacactacagcgaagagccacgatcgagtgattgtgtgcgaggtc

SEQ ID NO: 140998 - DNA, 53 bp, Artificial
  Synthetic oligonucleotide
gcgctaagtaaaccttccagattgtccgtacagtcgaccttatgcttggcctt

SEQ ID NO: 140999 - DNA, 53 bp, Artificial
  Synthetic oligonucleotide
ggacctcgttaagcagagtgatcagccgggagtgatccttattcaggttcggg

SEQ ID NO: 141000 - DNA, 53 bp, Artificial
  Synthetic oligonucleotide
ggggaatagcgtagagtgagtagtcagtgtagttcgcgtttgacactccggtc

SEQ ID NO: 141001 - DNA, 53 bp, Artificial
  Synthetic oligonucleotide
aaaataggccttagagtactggtgcaatgctgtctccatgccgcagttgttcc

SEQ ID NO: 141002 - DNA, 53 bp, Artificial
  Synthetic oligonucleotide
aaaacacgtcgccccgatgcctaccgttcaggatcacaagcgagcctacgagg

SEQ ID NO: 141003 - DNA, 52 bp, Artificial
  Synthetic oligonucleotide
cgtagattgtgccggcgttccttactccgttcaacacgggcattgggtttgc

SEQ ID NO: 141004 - DNA, 52 bp, Artificial
  Synthetic oligonucleotide
tacagttaccacgagacctcctgaaaattacttgctctggtagtgatctctt

SEQ ID NO: 141005 - DNA, 51 bp, Artificial
  Synthetic oligonucleotide
ctgttactcgtcttcacacggatagaggccgatagtagaagaactattgtt

SEQ ID NO: 141006 - DNA, 51 bp, Artificial
  Synthetic oligonucleotide
tgcagactttctgagcccggcctcgtatgatcttaccggcgagatgtacca

SEQ ID NO: 141007 - DNA, 55 bp, Artificial
  Synthetic oligonucleotide
caactcccgccacagtccgcgtacttgagaaggccttatttctcccggagccaga

SEQ ID NO: 141008 - DNA, 51 bp, Artificial
  Synthetic oligonucleotide
ttctcatggggtcgctactcgcagatcattatccgcagatcactgtccgtc

SEQ ID NO: 141009 - DNA, 50 bp, Artificial
  Synthetic oligonucleotide
agattcggacaggccctttcaccaggcccccgtaaaggatcgcgatggga

SEQ ID NO: 141010 - DNA, 50 bp, Artificial
  Synthetic oligonucleotide
agaggcggatgggcggagagcactatcacgcatagttttggcaggggctg

SEQ ID NO: 141011 - DNA, 50 bp, Artificial
  Synthetic oligonucleotide
acgtgctcgatcgcaagtccctggagttccagtttcgcccgggcatgacg

SEQ ID NO: 141012 - DNA, 50 bp, Artificial
  Synthetic oligonucleotide
acggacgatcatgccacccgctcacaggtgatccctcagcggaaagcgtt

SEQ ID NO: 141013 - DNA, 50 bp, Artificial
  Synthetic oligonucleotide
acgataccttgtcgcctggtgcagtgtggccgctccaccctcacagggag

SEQ ID NO: 141014 - DNA, 50 bp, Artificial
  Synthetic oligonucleotide
accgggtccgcatatcggacgggtcgctcgtatggaaaacgcctgtaggc

SEQ ID NO: 141015 - DNA, 50 bp, Artificial
  Synthetic oligonucleotide
accgcccggtcaatgagcacgtcaactggcaccgatccctcgtactccct

SEQ ID NO: 141016 - DNA, 50 bp, Artificial
  Synthetic oligonucleotide
accgcaggacagctccggcgctatgctccaatctgtggacggcagcaatt

SEQ ID NO: 141017 - DNA, 50 bp, Artificial
  Synthetic oligonucleotide
accgcagcgacataccgaacctgtcacggagcggtggggatagcataccg

SEQ ID NO: 141018 - DNA, 55 bp, Artificial
  Synthetic oligonucleotide
agcgggaatcagtgcggctattaagggtcagagtcaggcctacgataggtcactg

SEQ ID NO: 141019 - DNA, 50 bp, Artificial
  Synthetic oligonucleotide
accccgaagcagcaagtccaacgctgcgctgtgctggccactattacagg

SEQ ID NO: 141020 - DNA, 50 bp, Artificial
  Synthetic oligonucleotide
acaccttgaaccccggctctaccgtcgcacggcacttcgggcacttcatg

SEQ ID NO: 141021 - DNA, 50 bp, Artificial
  Synthetic oligonucleotide
aaggcacagcgcagcgttcgtgtacgttcgcacgagaatttgcaagggct

SEQ ID NO: 141022 - DNA, 50 bp, Artificial
  Synthetic oligonucleotide
aaggacgggagcctggtatccacgtacctctcggcaggctgcatacgcaa

SEQ ID NO: 141023 - DNA, 50 bp, Artificial
  Synthetic oligonucleotide
aagcgtattccgtggctcggccgggaaacaggcaagctttgagcaggtta

SEQ ID NO: 141024 - DNA, 50 bp, Artificial
  Synthetic oligonucleotide
aagccttcgacccggattgtctcctcctgcctgtcagtggcgtcgacacg

SEQ ID NO: 141025 - DNA, 50 bp, Artificial
  Synthetic oligonucleotide
aactgcctgtacgtgaggcggtacggaggagtgcccacggtccacgatat

SEQ ID NO: 141026 - DNA, 50 bp, Artificial
  Synthetic oligonucleotide
aaccccggctctaccgtcgcacggcacttcgggcacttcatgggcccgtt

SEQ ID NO: 141027 - DNA, 50 bp, Artificial
  Synthetic oligonucleotide
aggcccatgcgtttgtaaaacgccatgcccgtcttgttctgaggcctcga

SEQ ID NO: 141028 - DNA, 50 bp, Artificial
  Synthetic oligonucleotide
aggcctcacaccaggtatagggagctggggcgggtatagcattttcgggc

SEQ ID NO: 141029 - DNA, 55 bp, Artificial
  Synthetic oligonucleotide
ccgactgtgtacttcggcattccgatcatggataatactacggccatagggacgc

SEQ ID NO: 141030 - DNA, 50 bp, Artificial
  Synthetic oligonucleotide
aggcgggtgcttcccgaaaaggctaagtccgtgctagactgccactgcgg

SEQ ID NO: 141031 - DNA, 50 bp, Artificial
  Synthetic oligonucleotide
aggctgccgttcgtggaatatgcgaggactccgtctctgaccggcacata

SEQ ID NO: 141032 - DNA, 50 bp, Artificial
  Synthetic oligonucleotide
agggatcctgtcgatatcgctcctggcgtcgggatgcaccctgccccggg

SEQ ID NO: 141033 - DNA, 50 bp, Artificial
  Synthetic oligonucleotide
agggctgcttccttgtgagggatagtcacgttcaggcccccgaagcccag

SEQ ID NO: 141034 - DNA, 50 bp, Artificial
  Synthetic oligonucleotide
aggcagcgtggcaaggtggtcctaccagaacctgatcaggagacagccgc

SEQ ID NO: 141035 - DNA, 50 bp, Artificial
  Synthetic oligonucleotide
agtacgccgggggctggcacgttcaggggtgtatcttcgtccgtggtgta

SEQ ID NO: 141036 - DNA, 50 bp, Artificial
  Synthetic oligonucleotide
agtagtgccggcgtcgactatgggctgataggagtggtgtgtggccgggt

SEQ ID NO: 141037 - DNA, 50 bp, Artificial
  Synthetic oligonucleotide
agtggactccaccgtgggctggacactgcctgagctaccgcagggcgaaa

SEQ ID NO: 141038 - DNA, 50 bp, Artificial
  Synthetic oligonucleotide
agttccagtttcgcccgggcatgacgatgagggacctgttcgcagagctg

SEQ ID NO: 141039 - DNA, 50 bp, Artificial
  Synthetic oligonucleotide
agttggcgcccgggtagtaaccgaagagcttcacgtccagaggtgcgttc

SEQ ID NO: 141040 - DNA, 55 bp, Artificial
  Synthetic oligonucleotide
ccggtagtcctctacagtcatctcgctatcttccatgtacatccctcatccaaac

SEQ ID NO: 141041 - DNA, 50 bp, Artificial
  Synthetic oligonucleotide
atagggagctggggcgggtatagcattttcgggccgttcgggctatacga

SEQ ID NO: 141042 - DNA, 50 bp, Artificial
  Synthetic oligonucleotide
atcaggctgtaggtcacagtacgcatctgtcgggcagtcagccggccgtt

SEQ ID NO: 141043 - DNA, 50 bp, Artificial
  Synthetic oligonucleotide
atcagggaacgcctactcctccgccggtcgtagtaactcccggcaccgac

SEQ ID NO: 141044 - DNA, 50 bp, Artificial
  Synthetic oligonucleotide
aggagaacggcccgtcagcgttagtcagcgtaagggtgtagctctccccg

SEQ ID NO: 141045 - DNA, 50 bp, Artificial
  Synthetic oligonucleotide
aggactgcgcgatccacatggctctacggagggctaacatgtccccggat

SEQ ID NO: 141046 - DNA, 50 bp, Artificial
  Synthetic oligonucleotide
agcggagtgacactggacggtttcacgatacagggagctaccgccggggt

SEQ ID NO: 141047 - DNA, 50 bp, Artificial
  Synthetic oligonucleotide
agcccagcggcacaataccctcggtcctgaaagagtggccgttcaggatg

SEQ ID NO: 141048 - DNA, 55 bp, Artificial
  Synthetic oligonucleotide
cgacgtcgacacgctaagggactcggtcagggcagacgtatcctcgatcagagag

SEQ ID NO: 141049 - DNA, 55 bp, Artificial
  Synthetic oligonucleotide
cgtgcggtagggctccacaccgttggtcagtcccatggcagcgtgcagggaatta

SEQ ID NO: 141050 - DNA, 55 bp, Artificial
  Synthetic oligonucleotide
acgggtgactgagccggttctcgtgaacacgggccctgtaaacaggcggaagatc

SEQ ID NO: 141051 - DNA, 58 bp, Artificial
  Synthetic oligonucleotide
gatttgtaaaatgattacgatctaagatgtctctggggtaatagaacgcgacaggacg

SEQ ID NO: 141052 - DNA, 57 bp, Artificial
  Synthetic oligonucleotide
ccaactcgagagtggggtcgtagacacgagtctgaccggacacaccagccctgattt

SEQ ID NO: 141053 - DNA, 50 bp, Artificial
  Synthetic oligonucleotide
ctgttgcatccccatactagtgtcgggtcgagatatgtgtagtcacgaga

SEQ ID NO: 141054 - DNA, 50 bp, Artificial
  Synthetic oligonucleotide
acggtcgcgggccggacagttgaacacaccgagtcgtgctcagagcagaa

SEQ ID NO: 141055 - DNA, 50 bp, Artificial
  Synthetic oligonucleotide
gaatcggatggagtcgatcaaggcaggcggtacagacccgggggacctct

SEQ ID NO: 141056 - DNA, 50 bp, Artificial
  Synthetic oligonucleotide
acggtcaccatctcgagtcagtccgcccacgggcaccgacagaagctctc

SEQ ID NO: 141057 - DNA, 50 bp, Artificial
  Synthetic oligonucleotide
acggccatcgtcccgacccgtgttccgtggacttatgtccgtgctcggct

SEQ ID NO: 141058 - DNA, 50 bp, Artificial
  Synthetic oligonucleotide
acgctccccgatacagccagaacgtccagcgagtgaggcggtgagtgcac

SEQ ID NO: 141059 - DNA, 50 bp, Artificial
  Synthetic oligonucleotide
gagccatcctgacgtagtccttcccgcgttccttgaggacggcgcccctc

SEQ ID NO: 141060 - DNA, 50 bp, Artificial
  Synthetic oligonucleotide
acgcgtgaggactcaaggggaacaaccaagcgggggactgagtagcggct

SEQ ID NO: 141061 - DNA, 50 bp, Artificial
  Synthetic oligonucleotide
gattgggtgcgtcacccgttcgtctctcccccgcgtatgtgcctcgccca

SEQ ID NO: 141062 - DNA, 50 bp, Artificial
  Synthetic oligonucleotide
acgcgctgtcctgaactcatcgccccagaggggtacgacctcaccgaata

SEQ ID NO: 141063 - DNA, 57 bp, Artificial
  Synthetic oligonucleotide
agtggggtcgtagacacgagtctgaccggacacaccagccctgatttgttccgcaat

SEQ ID NO: 141064 - DNA, 55 bp, Artificial
  Synthetic oligonucleotide
cgatctaagatgtctctggggtaatagaacgcgacaggacggattggtccatacc

SEQ ID NO: 141065 - DNA, 55 bp, Artificial
  Synthetic oligonucleotide
atccgtcaatccgaggtagctctggagttcgagaaacgcggtatcgtcataccgt

SEQ ID NO: 141066 - DNA, 55 bp, Artificial
  Synthetic oligonucleotide
cgaagcactcccagcactgtcggagacgacagggaccgagcttgacagtcgtgac

SEQ ID NO: 141067 - DNA, 55 bp, Artificial
  Synthetic oligonucleotide
cgccatggttttatcagtttacgatgtagccactgccccgcgctatgtgagggcg

SEQ ID NO: 141068 - DNA, 55 bp, Artificial
  Synthetic oligonucleotide
cacctgtaacctcgctctttagatgacgagtttctttcacggctgcctgtgcggc

SEQ ID NO: 141069 - DNA, 55 bp, Artificial
  Synthetic oligonucleotide
cgctccctcaattcggtgtagaagcgactgtaactgtttgcctcgtggcgtccca

SEQ ID NO: 141070 - DNA, 54 bp, Artificial
  Synthetic oligonucleotide
cactggactgtaaccgaaataccgagccacgccgtaaaagggtattgactctcc

SEQ ID NO: 141071 - DNA, 55 bp, Artificial
  Synthetic oligonucleotide
ctcggataccccgactgagtcaggcgaagcggacgtcgtaattggcgaggggagg

SEQ ID NO: 141072 - DNA, 60 bp, Artificial
  Synthetic oligonucleotide
ttacgcgggaatgatgtacgaacactgggaggacctatgaggatagtcgctccgtatgag

SEQ ID NO: 141073 - DNA, 55 bp, Artificial
  Synthetic oligonucleotide
actcgatacgggcactcgtcgactcaccgctctctcggggctcatgttggcgttc

SEQ ID NO: 141074 - DNA, 55 bp, Artificial
  Synthetic oligonucleotide
caggctagcactcactttacagcggttcttgggctttgatccccgacgagaaagt

SEQ ID NO: 141075 - DNA, 55 bp, Artificial
  Synthetic oligonucleotide
caggtgagcgctcagatgcgaccgcaaggatagcagtctccccggggtctaactc

SEQ ID NO: 141076 - DNA, 55 bp, Artificial
  Synthetic oligonucleotide
cagtagagcaccgttcaacatctcgctgttcaacttgcagagacgacacaggacc

SEQ ID NO: 141077 - DNA, 49 bp, Artificial
  Synthetic oligonucleotide
ccttaaccaacacgcggcgttaaccaccccggtatgttggttaagacgg

SEQ ID NO: 141078 - DNA, 55 bp, Artificial
  Synthetic oligonucleotide
cccgggtaaccgcggagccaggatcacgcatcaagagaggtcgacacccgctgca

SEQ ID NO: 141079 - DNA, 55 bp, Artificial
  Synthetic oligonucleotide
tggatcgccgacgggtcagccgacactggaggcgtttacgggacacaacccggac

SEQ ID NO: 141080 - DNA, 55 bp, Artificial
  Synthetic oligonucleotide
cccggcgcagacctatacattctatccagctttcgatgccgaaaatgcgacacag

SEQ ID NO: 141081 - DNA, 55 bp, Artificial
  Synthetic oligonucleotide
tgagcgtcttcgatgaatacaccatcttcgagagaggcgtgaggcggatggacgg

SEQ ID NO: 141082 - DNA, 55 bp, Artificial
  Synthetic oligonucleotide
cccgttgtcgattcgcgtcagaactgtttgtcacgtcgtccacaggcggggcgtg

SEQ ID NO: 141083 - DNA, 60 bp, Artificial
  Synthetic oligonucleotide
gatgcaccgatcaagccagaacggactcaaatcgctcgttaggtgctcagctaccgacga

SEQ ID NO: 141084 - DNA, 55 bp, Artificial
  Synthetic oligonucleotide
tcccctatcggctgtttgatgcctgctgtacgctactcgggactgccgagccctc

SEQ ID NO: 141085 - DNA, 55 bp, Artificial
  Synthetic oligonucleotide
ccgatgatgatgtctcgtccgatagctccgttacttcaagacgagaacttgctcg

SEQ ID NO: 141086 - DNA, 55 bp, Artificial
  Synthetic oligonucleotide
gtgtgaatctccggatgctcgtcccgtcacgattcctcagtccgcggccagatat

SEQ ID NO: 141087 - DNA, 55 bp, Artificial
  Synthetic oligonucleotide
gtcgtttcgtacgcctcgggatcaccagtcggctccatcccgaccaaagacactg

SEQ ID NO: 141088 - DNA, 55 bp, Artificial
  Synthetic oligonucleotide
gtcgattagattccgcattcggttgtgagcctgggcgactgattcgaggtgttcg

SEQ ID NO: 141089 - DNA, 54 bp, Artificial
  Synthetic oligonucleotide
ccagcgttcaacgaacggtctggcgggacgtggataaacgtcgaaggacagtcg

SEQ ID NO: 141090 - DNA, 55 bp, Artificial
  Synthetic oligonucleotide
gggtggtgtcacggatcgagacgtctgctggctcgagtacgctaagtgtgccagc

SEQ ID NO: 141091 - DNA, 54 bp, Artificial
  Synthetic oligonucleotide
gggaaccagatcaactcgggaggagttgtcgcctttgaaccgacccctgaggct

SEQ ID NO: 141092 - DNA, 55 bp, Artificial
  Synthetic oligonucleotide
ggagtcatctcaaggtgggagttatgtgtgtgtcaacacaagtcatagtgtaccg

SEQ ID NO: 141093 - DNA, 55 bp, Artificial
  Synthetic oligonucleotide
gctccggcgatataaccggcgacaaatggatctaggttctcctcatgaaccggga

SEQ ID NO: 141094 - DNA, 58 bp, Artificial
  Synthetic oligonucleotide
cagggaacctggcccgatgcgaccaactcgagagtggggtcgtagacacgagtctgac

SEQ ID NO: 141095 - DNA, 55 bp, Artificial
  Synthetic oligonucleotide
gctcagtcccattatacaagattgtcttcgtcgtaggactctcgttctctgtgtg

SEQ ID NO: 141096 - DNA, 55 bp, Artificial
  Synthetic oligonucleotide
gcgtatttatgacgattcatcaccacgcttcaaacggtatgtcacaacaagtccc

SEQ ID NO: 141097 - DNA, 55 bp, Artificial
  Synthetic oligonucleotide
gcgtactgcattccatcagcacggagaattcgtgcaaggtgggcacgatcgtacg

SEQ ID NO: 141098 - DNA, 55 bp, Artificial
  Synthetic oligonucleotide
gcgccacgacagaggtgggtgacgtgaaaacagatctgatagggctgcgaggtgg

SEQ ID NO: 141099 - DNA, 55 bp, Artificial
  Synthetic oligonucleotide
gcgatgaccgactccactatcacgagcgtggaccgtcttctagaggaactcgaag

SEQ ID NO: 141100 - DNA, 55 bp, Artificial
  Synthetic oligonucleotide
acgagggaggtgaggtctggacgacgattgaatcacagaacctcgcgtgacgcgc

SEQ ID NO: 141101 - DNA, 55 bp, Artificial
  Synthetic oligonucleotide
gcacgggcattgtcttccaactcacccacagtcgctgtggattgattgagagtag

SEQ ID NO: 141102 - DNA, 55 bp, Artificial
  Synthetic oligonucleotide
ccagcggaaagcagtattgaacgcttataccgatgcatttgaaaagaagttcggg

SEQ ID NO: 141103 - DNA, 54 bp, Artificial
  Synthetic oligonucleotide
gaagtgttccggtatcacctcgccagcacggggttgaagtgaactaccgctggt

SEQ ID NO: 141104 - DNA, 54 bp, Artificial
  Synthetic oligonucleotide
tcctgtcgacatatcgcagtctttggcataaggttcgcaggctcatcacggagt

SEQ ID NO: 141105 - DNA, 60 bp, Artificial
  Synthetic oligonucleotide
tcgtcggtagctgagcacctaacgagcgatttgagtccgttctggcttgatcggtgcatc

SEQ ID NO: 141106 - DNA, 53 bp, Artificial
  Synthetic oligonucleotide
tcccgactgccgttcgcgacctaacacacgcgacgagcgggtgggactggaaa

SEQ ID NO: 141107 - DNA, 52 bp, Artificial
  Synthetic oligonucleotide
gagacttcaaggacgaactcccagacagagtaacgaaagcagaattccgtga

SEQ ID NO: 141108 - DNA, 52 bp, Artificial
  Synthetic oligonucleotide
gcaagagacaacgtgcgcgtgtgagaacgcgagtcttgtgcgtcccagaggc

SEQ ID NO: 141109 - DNA, 52 bp, Artificial
  Synthetic oligonucleotide
taccaaaattttgtccggttgggacagcttcgctccgactactcattcttcc

SEQ ID NO: 141110 - DNA, 52 bp, Artificial
  Synthetic oligonucleotide
acactgggtggaagaataagggcgttccccttcgcgagagttcaaatagggg

SEQ ID NO: 141111 - DNA, 52 bp, Artificial
  Synthetic oligonucleotide
tgctggcggcccgctcactggtgtcgggcagacagtccttgcgaccgattca

SEQ ID NO: 141112 - DNA, 51 bp, Artificial
  Synthetic oligonucleotide
ggtcgcccccaaagcgcagaccgaatctcggtctcggtaggtgcacgatta

SEQ ID NO: 141113 - DNA, 51 bp, Artificial
  Synthetic oligonucleotide
ttcgtgcagttctctccagagagcgaggcctacgcacaggacgtgacacgg

SEQ ID NO: 141114 - DNA, 50 bp, Artificial
  Synthetic oligonucleotide
acgcagcctggacccaacgaaaccgcacgagtttgcgccctcgaagctac

SEQ ID NO: 141115 - DNA, 50 bp, Artificial
  Synthetic oligonucleotide
acgatcggaagtcttcgctaacgggggtactgtcccggccgttggttcga

SEQ ID NO: 141116 - DNA, 60 bp, Artificial
  Synthetic oligonucleotide
ctatagattgctcgctagctgtccgggacctaacttaccgggcagctgttacgctgtcag

SEQ ID NO: 141117 - DNA, 50 bp, Artificial
  Synthetic oligonucleotide
acctccacaaatgaaccagccacccgcctagcgatcagcagtcggacccg

SEQ ID NO: 141118 - DNA, 50 bp, Artificial
  Synthetic oligonucleotide
accgctgaatcggggttacttcgtggttagggcgtgcttttggccccagc

SEQ ID NO: 141119 - DNA, 50 bp, Artificial
  Synthetic oligonucleotide
accgattcactctcgcgtcgaaccccgacccacggttcggcatcccggat

SEQ ID NO: 141120 - DNA, 50 bp, Artificial
  Synthetic oligonucleotide
acccgcttggcgtaatccacacgaaaggccaccggctcccgagaagaggt

SEQ ID NO: 141121 - DNA, 50 bp, Artificial
  Synthetic oligonucleotide
accccgatttctggggctccctgtttgaaggcgtcggatggggttgccag

SEQ ID NO: 141122 - DNA, 50 bp, Artificial
  Synthetic oligonucleotide
accccgagtagacggggcgcgtgcttaacgacacggcctcagcccaaaaa

SEQ ID NO: 141123 - DNA, 50 bp, Artificial
  Synthetic oligonucleotide
acccccaacgccccgacaccggtgacaaccgtcgtggcaactctcccgga

SEQ ID NO: 141124 - DNA, 50 bp, Artificial
  Synthetic oligonucleotide
acccacatcggcgctccactcgggcctcttaatatgggagcatccctcga

SEQ ID NO: 141125 - DNA, 50 bp, Artificial
  Synthetic oligonucleotide
accagtgcttcgcaccgtgattctcgctcggatcggtctctgccaacgca

SEQ ID NO: 141126 - DNA, 50 bp, Artificial
  Synthetic oligonucleotide
accagccgaccactttcaccgtggtcgcacaacgctcttgaaaggggccc

SEQ ID NO: 141127 - DNA, 56 bp, Artificial
  Synthetic oligonucleotide
agtcgccaacccccactgactcggataccccgactgagtcaggcgaagcggacgtc

SEQ ID NO: 141128 - DNA, 50 bp, Artificial
  Synthetic oligonucleotide
accagccacccgcctagcgatcagcagtcggacccgctttcctcactccc

SEQ ID NO: 141129 - DNA, 50 bp, Artificial
  Synthetic oligonucleotide
accactttcaccgtggtcgcacaacgctcttgaaaggggcccgcgtagct

SEQ ID NO: 141130 - DNA, 50 bp, Artificial
  Synthetic oligonucleotide
accaacaggtcccgccggagttacgcgattttgcccgaacggaaccgttc

SEQ ID NO: 141131 - DNA, 50 bp, Artificial
  Synthetic oligonucleotide
acagttggctctcaccgcaccgtgcccgaaccacctacgaatcgagcggg

SEQ ID NO: 141132 - DNA, 50 bp, Artificial
  Synthetic oligonucleotide
acagcacccgcccgaaagacaaccgccacttgtcgtgacatcacccatcg

SEQ ID NO: 141133 - DNA, 50 bp, Artificial
  Synthetic oligonucleotide
acagcaccccacctggagagcacgcctctgtgtacgtcaccggtatccgc

SEQ ID NO: 141134 - DNA, 50 bp, Artificial
  Synthetic oligonucleotide
aatttcctcgcatccgcaggagcaacgatgctgggagttgctggcgcctc

SEQ ID NO: 141135 - DNA, 50 bp, Artificial
  Synthetic oligonucleotide
aatcagtcgtggccctgcagtgagaactcgctcacagcgtggggagtcgc

SEQ ID NO: 141136 - DNA, 50 bp, Artificial
  Synthetic oligonucleotide
aagcgggacgatggcgactgactcctcggccacatactctgcgaggtcgg

SEQ ID NO: 141137 - DNA, 50 bp, Artificial
  Synthetic oligonucleotide
aactccgcgcgacaacggctcacacgggcacaggcccagtttcccgttcc

SEQ ID NO: 141138 - DNA, 59 bp, Artificial
  Synthetic oligonucleotide
agtctgaccggacacaccagccctgatttgttccgcaatccaccaactatgagtaccaa

SEQ ID NO: 141139 - DNA, 50 bp, Artificial
  Synthetic oligonucleotide
aaccgctaggcttggccgcgaacacgaaccaatacccccagccatcgcga

SEQ ID NO: 141140 - DNA, 50 bp, Artificial
  Synthetic oligonucleotide
aaaggagtccaccgcagccagggacctccaccacgagacccataacgaga

SEQ ID NO: 141141 - DNA, 50 bp, Artificial
  Synthetic oligonucleotide
aaagcgtcaaacgggctgtctgggagactgtcgacccgggagaacggagc

SEQ ID NO: 141142 - DNA, 50 bp, Artificial
  Synthetic oligonucleotide
aaacgccctggaaacgaacggctcacgacagtgcggagtttcacgctggt

SEQ ID NO: 141143 - DNA, 50 bp, Artificial
  Synthetic oligonucleotide
cccgacgagcggtcccgccaagcaaacgcgcatatagtctcttttcggcg

SEQ ID NO: 141144 - DNA, 50 bp, Artificial
  Synthetic oligonucleotide
ccctagccagcggttgctcggacggattcatgtcgcacgtgggttcaccg

SEQ ID NO: 141145 - DNA, 50 bp, Artificial
  Synthetic oligonucleotide
cccttgtggagtgctgcagagtgtaccaaggcgacctccccctcacgcct

SEQ ID NO: 141146 - DNA, 50 bp, Artificial
  Synthetic oligonucleotide
ccatggcttgagattccggcgagtgaacgacgcaaggtcaccgctgacga

SEQ ID NO: 141147 - DNA, 50 bp, Artificial
  Synthetic oligonucleotide
ccgcgagtgccgtactggagaagtagcccgcaatccggtcgtattgctga

SEQ ID NO: 141148 - DNA, 50 bp, Artificial
  Synthetic oligonucleotide
ccgctcgtggttagcggtcagccgggttagtcgccggtctcatgcacaca

SEQ ID NO: 141149 - DNA, 53 bp, Artificial
  Synthetic oligonucleotide
gacgccggattagtgacgtttaccgatgggtcaaaggtatgggaatgggtcgg

SEQ ID NO: 141150 - DNA, 50 bp, Artificial
  Synthetic oligonucleotide
cagtcgctggggaccatggttaagaccctggcagtccccgtctccggtat

SEQ ID NO: 141151 - DNA, 50 bp, Artificial
  Synthetic oligonucleotide
atggccgccgtaagacacgtaccagtgcttcgcaccgtgattctcgctcg

SEQ ID NO: 141152 - DNA, 50 bp, Artificial
  Synthetic oligonucleotide
atcgcccgggatttcgtcgacggaggccgtctcgtggatcaagtacgact

SEQ ID NO: 141153 - DNA, 50 bp, Artificial
  Synthetic oligonucleotide
cgcattcggtcgctcggcccgtcaagcaacgcgagcaagtcgctgtacgt

SEQ ID NO: 141154 - DNA, 50 bp, Artificial
  Synthetic oligonucleotide
agtcggcgtgacggactcgaataacgggtcagctgggaccgacggtggga

SEQ ID NO: 141155 - DNA, 50 bp, Artificial
  Synthetic oligonucleotide
cgcggtctccctctgagatacgctgcatcgggactcagtacggcctcgac

SEQ ID NO: 141156 - DNA, 50 bp, Artificial
  Synthetic oligonucleotide
aggacgtaccgcattcggtcgctcggcccgtcaagcaacgcgagcaagtc

SEQ ID NO: 141157 - DNA, 50 bp, Artificial
  Synthetic oligonucleotide
cgtcacccgttcgtctctcccccgcgtatgtgcctcgcccatctctgagc

SEQ ID NO: 141158 - DNA, 50 bp, Artificial
  Synthetic oligonucleotide
agacgaccggaagtgaggaagttggcggacagttgtcggccgttttcccg

SEQ ID NO: 141159 - DNA, 50 bp, Artificial
  Synthetic oligonucleotide
actgacgacggcgagcgaaaggcaacgggctcgtactacacacccgagta

SEQ ID NO: 141160 - DNA, 58 bp, Artificial
  Synthetic oligonucleotide
cttgctaggtgtacggctaggctgccgggagataacagcctcctttgtaggacgccgc

SEQ ID NO: 141161 - DNA, 60 bp, Artificial
  Synthetic oligonucleotide
gaacggctcttctagctgggtcgatcctgggccccgtgccagatgcgaaggagccgcaca

SEQ ID NO: 141162 - DNA, 60 bp, Artificial
  Synthetic oligonucleotide
cccgcatttgcagagcaagaccctctacccagccgtcatgacacgcgaatgcggtacgtg

SEQ ID NO: 141163 - DNA, 55 bp, Artificial
  Synthetic oligonucleotide
gagctctatgggtaatttaacgatacaccttacgccagggttgttgtgagacaag

SEQ ID NO: 141164 - DNA, 55 bp, Artificial
  Synthetic oligonucleotide
cttaaggtgctcgaacagcatatcaaccagatgacgcatcgtaagcagcgcatcg

SEQ ID NO: 141165 - DNA, 55 bp, Artificial
  Synthetic oligonucleotide
gaagcactttctcgggagcaacgcgcaacaggatgtgcgcccagagtccggcggt

SEQ ID NO: 141166 - DNA, 55 bp, Artificial
  Synthetic oligonucleotide
aggctgccgggagataacagcctcctttgtaggacgccgcgccattgtgggttgc

SEQ ID NO: 141167 - DNA, 55 bp, Artificial
  Synthetic oligonucleotide
ctggtccgaaggcgggcggtccactttatctttcccggctggtagagcatgagcc

SEQ ID NO: 141168 - DNA, 55 bp, Artificial
  Synthetic oligonucleotide
ctggcattagcggtttatcctgcggcgaaagttgacgtcgaccgcacaggcgcaa

SEQ ID NO: 141169 - DNA, 55 bp, Artificial
  Synthetic oligonucleotide
ctcaggaacattcaggcgattagggcgcttcccggttttcttccatccggccgcc

SEQ ID NO: 141170 - DNA, 55 bp, Artificial
  Synthetic oligonucleotide
gacggacctcaatccaattttgttccttcagcacgttgatcgcacggagagcggt

SEQ ID NO: 141171 - DNA, 54 bp, Artificial
  Synthetic oligonucleotide
gcctgggtggtagtcactcacggcacgcattgtattcacaactgaaagccttct

SEQ ID NO: 141172 - DNA, 54 bp, Artificial
  Synthetic oligonucleotide
cctgaaaccaagccgggccgcccacgctcaggtagatactcaagccgatcacag

SEQ ID NO: 141173 - DNA, 56 bp, Artificial
  Synthetic oligonucleotide
ccctgataggggttgtcccactggatgaagccttttccagactggaagccgccttc

SEQ ID NO: 141174 - DNA, 54 bp, Artificial
  Synthetic oligonucleotide
gtaagccggggccggtaggtagctgcttctctcccggatacaggtctggaatgg

SEQ ID NO: 141175 - DNA, 54 bp, Artificial
  Synthetic oligonucleotide
gtaaccggccgttctaggccgccttgattatgcggcctgcctatgcggtatatt

SEQ ID NO: 141176 - DNA, 54 bp, Artificial
  Synthetic oligonucleotide
gcgtaaccattatatagcagtgtcggtacacgctcatcgctaccgatcaatcgt

SEQ ID NO: 141177 - DNA, 54 bp, Artificial
  Synthetic oligonucleotide
tggatgtcttgtcccgcgcccgtattccacatgagctgcgctatacctcaacca

SEQ ID NO: 141178 - DNA, 54 bp, Artificial
  Synthetic oligonucleotide
atatggttcatggcttcccatcttccctcgcggatccaacggtagaaatagccc

SEQ ID NO: 141179 - DNA, 54 bp, Artificial
  Synthetic oligonucleotide
gggtacaaccacctgattatccacggacaacaggcgaatctgatccggcttaag

SEQ ID NO: 141180 - DNA, 54 bp, Artificial
  Synthetic oligonucleotide
ccagcggagcgggaagccagctcagaagatgcccgacccggctcatggaattga

SEQ ID NO: 141181 - DNA, 54 bp, Artificial
  Synthetic oligonucleotide
tcgcatggcgaacgcgactgttatcgcttgtcgcactttcctaaatcgctatac

SEQ ID NO: 141182 - DNA, 54 bp, Artificial
  Synthetic oligonucleotide
gggtcatccggcatgggggtgggatttgggatcattcggcgggctccgggcgta

SEQ ID NO: 141183 - DNA, 54 bp, Artificial
  Synthetic oligonucleotide
atgaacggtcaaacatttcgaaatagccgactgactttgcgattaagtcaggcc

SEQ ID NO: 141184 - DNA, 60 bp, Artificial
  Synthetic oligonucleotide
ccgagaaattcggagggctcttggatgagttagttgcttagtgtgatcgatgcgcagttg

SEQ ID NO: 141185 - DNA, 54 bp, Artificial
  Synthetic oligonucleotide
tgcaggcctcagccaacgtggcgtgccagcgaaggaacagcgccgtatcgatgt

SEQ ID NO: 141186 - DNA, 54 bp, Artificial
  Synthetic oligonucleotide
ctgaactaactggatgcctgaacgtggcacgacacctgcacgaagcgcctgaat

SEQ ID NO: 141187 - DNA, 54 bp, Artificial
  Synthetic oligonucleotide
tgcagctggacactcacgcgagcgcccgcggcaatttgcggttcttgcaagcga

SEQ ID NO: 141188 - DNA, 54 bp, Artificial
  Synthetic oligonucleotide
caggaaaccaaaccatgtacgtttcagtggcaaaggctggtaccatcgttgata

SEQ ID NO: 141189 - DNA, 54 bp, Artificial
  Synthetic oligonucleotide
tcagtgatggatcaacaatggcagcatctcgtgggcaagaatgtcctcggtcac

SEQ ID NO: 141190 - DNA, 54 bp, Artificial
  Synthetic oligonucleotide
ttgcgcgaaagacgccgagccattaacttaaccggcttcttcagctatatgccg

SEQ ID NO: 141191 - DNA, 54 bp, Artificial
  Synthetic oligonucleotide
gatattttggtcacggcggccgagcgatatacggtgctccgccggttcagcccc

SEQ ID NO: 141192 - DNA, 54 bp, Artificial
  Synthetic oligonucleotide
ggcgccatgcatcaggaagttgagtggcatcatgagaaaacgcaataccgatgg

SEQ ID NO: 141193 - DNA, 54 bp, Artificial
  Synthetic oligonucleotide
ccgacgctgtagtcagagggcagagctacaggtttgaaccttgcctatccggtt

SEQ ID NO: 141194 - DNA, 54 bp, Artificial
  Synthetic oligonucleotide
tttcatgccgaaccttggcgctcttctgattctgcgtaccctgcaggggttcgc

SEQ ID NO: 141195 - DNA, 57 bp, Artificial
  Synthetic oligonucleotide
ccgcacccaacggaacttgggtgcaagtcgaacgagccgctatggaacgctggtcaa

SEQ ID NO: 141196 - DNA, 54 bp, Artificial
  Synthetic oligonucleotide
cgtctgacacggatgtgcagtttaagccaaaaccaagggcattcttccgcagtt

SEQ ID NO: 141197 - DNA, 52 bp, Artificial
  Synthetic oligonucleotide
ggaacgcgctccggattgtttcgatttactcgggattaaccggagttccgga

SEQ ID NO: 141198 - DNA, 54 bp, Artificial
  Synthetic oligonucleotide
ttttacccgagggtggggctgctcaataatgcaccgcggtttggcaaacgccgg

SEQ ID NO: 141199 - DNA, 54 bp, Artificial
  Synthetic oligonucleotide
ccaatgagtggacgggaaggccattcctcacatctgaagagtagagctgcgaga

SEQ ID NO: 141200 - DNA, 54 bp, Artificial
  Synthetic oligonucleotide
tttcggacatttgtccggaattggtcttacggacaattcgccattcattgataa

SEQ ID NO: 141201 - DNA, 54 bp, Artificial
  Synthetic oligonucleotide
tcagctatcaccacctggtcaatgtggcccaatggcacatcagcgatgacaatt

SEQ ID NO: 141202 - DNA, 54 bp, Artificial
  Synthetic oligonucleotide
ccgatgccgggtctgacgcggccatgcggaaacggcggcaacggatcaggtcag

SEQ ID NO: 141203 - DNA, 54 bp, Artificial
  Synthetic oligonucleotide
agcgttcccactttgtccgcttatgctacagcgcggggcgttccgttacttcgg

SEQ ID NO: 141204 - DNA, 54 bp, Artificial
  Synthetic oligonucleotide
cgagccagaccgaatggtggccgagcgtgatacggaagcagttttcattctggg

SEQ ID NO: 141205 - DNA, 54 bp, Artificial
  Synthetic oligonucleotide
gaggtcgatacgtcatccgatacggtgcggattctccgtatctggtacgaagcc

SEQ ID NO: 141206 - DNA, 60 bp, Artificial
  Synthetic oligonucleotide
ccgcatgagggggacaaaatgtcggaagcaagaacagatcaccgttgagtgacattacgc

SEQ ID NO: 141207 - DNA, 54 bp, Artificial
  Synthetic oligonucleotide
cacagtgacgtgttatctttcccgctgcacaatggcagcgacagtgttcttgct

SEQ ID NO: 141208 - DNA, 53 bp, Artificial
  Synthetic oligonucleotide
ccggattttacccggtcccgccaaaggcgctcactcgccctgcttagattttc

SEQ ID NO: 141209 - DNA, 54 bp, Artificial
  Synthetic oligonucleotide
tcaacgggacacactcacaaaacggctgaaagctcttcggaccaacattcaggc

SEQ ID NO: 141210 - DNA, 54 bp, Artificial
  Synthetic oligonucleotide
aacaccgggccttccacggtttgtgggattagaattattcccaatctcgccaga

SEQ ID NO: 141211 - DNA, 54 bp, Artificial
  Synthetic oligonucleotide
gggaccgcacgggcatagtggctatgcgtcaccccaaggattcaggagcgtgat

SEQ ID NO: 141212 - DNA, 54 bp, Artificial
  Synthetic oligonucleotide
attgcgcatagagggctcccgtgccgctcaccagtccgttgagtgccggggcta

SEQ ID NO: 141213 - DNA, 54 bp, Artificial
  Synthetic oligonucleotide
cggtgtctcgttcaatttcggtaaggcagtgagcaagatgcttagttgcgaaac

SEQ ID NO: 141214 - DNA, 54 bp, Artificial
  Synthetic oligonucleotide
agggcgaattgtgtcatggattgcgtagcccctccctgatgtactggatatatg

SEQ ID NO: 141215 - DNA, 54 bp, Artificial
  Synthetic oligonucleotide
cggttccgacttcctgcaccccttgggatacgcggcggatctccaacgctgtaa

SEQ ID NO: 141216 - DNA, 54 bp, Artificial
  Synthetic oligonucleotide
tcactaggattggactatagtcgtcatctggccgtgaatcggggattttgaatg

SEQ ID NO: 141217 - DNA, 60 bp, Artificial
  Synthetic oligonucleotide
ccgcgatctgtggcccaagccgtatccgcaccagcatgtaggcaggcgcgccagtcatcg

SEQ ID NO: 141218 - DNA, 54 bp, Artificial
  Synthetic oligonucleotide
ctcctacacctaatggtttgagagtcgaatggtatcgcgtcaaagagcgcatca

SEQ ID NO: 141219 - DNA, 53 bp, Artificial
  Synthetic oligonucleotide
tgccaacggattgaccggaggatgacggaatatcgagggcactcgtcgtggcc

SEQ ID NO: 141220 - DNA, 53 bp, Artificial
  Synthetic oligonucleotide
gtattggcaccgctgaatgcggtcgaaagaatatctacgcccgccatattgaa

SEQ ID NO: 141221 - DNA, 53 bp, Artificial
  Synthetic oligonucleotide
ccttgcgcagtctgcccgcagagcatcgtaaggatccgaaggccaagcgtgct

SEQ ID NO: 141222 - DNA, 53 bp, Artificial
  Synthetic oligonucleotide
aaggggtccagcttttccgaagcactgccaaatggcgcatcacagctgcgtta

SEQ ID NO: 141223 - DNA, 53 bp, Artificial
  Synthetic oligonucleotide
tctccgcgataccacgatcgccgggggaccactcgcctaatcgctcaagccga

SEQ ID NO: 141224 - DNA, 53 bp, Artificial
  Synthetic oligonucleotide
ctggcgcgcctgcctacatgctggtgcggatacggcttgggccacagatcgcg

SEQ ID NO: 141225 - DNA, 53 bp, Artificial
  Synthetic oligonucleotide
atccagcggcaccgctagatccatcgcgttatgcccggcacatcggggtcgtt

SEQ ID NO: 141226 - DNA, 53 bp, Artificial
  Synthetic oligonucleotide
tctgtcacgctttgtcccatagccggaagcaggtcttcccgcaggagcgctcc

SEQ ID NO: 141227 - DNA, 53 bp, Artificial
  Synthetic oligonucleotide
gtgaaggtagataagaccttcacggataaatgctcaggttgcacacgcaatcg

SEQ ID NO: 141228 - DNA, 56 bp, Artificial
  Synthetic oligonucleotide
ccggaactttaaggtatctatcggtaagggactttcctcatgctgctcacgatttc

SEQ ID NO: 141229 - DNA, 53 bp, Artificial
  Synthetic oligonucleotide
cattgatggaacgaccgtttcacgaccctacggctacccttgtgacgacccat

SEQ ID NO: 141230 - DNA, 53 bp, Artificial
  Synthetic oligonucleotide
atccgggaaacaaccgatcagatccagcagtataaatccagcgcgtcggaagc

SEQ ID NO: 141231 - DNA, 53 bp, Artificial
  Synthetic oligonucleotide
ccacgtatcagggaccgcacgggcatagtggctatgcgtcaccccaaggattc

SEQ ID NO: 141232 - DNA, 53 bp, Artificial
  Synthetic oligonucleotide
ccacgtcgaacaattgagtccctgtctgcctcgagttcatgacgatagcacca

SEQ ID NO: 141233 - DNA, 53 bp, Artificial
  Synthetic oligonucleotide
tgaatcgtttcgttagattacggagcccgccttgcgacgtcagacgacgacgc

SEQ ID NO: 141234 - DNA, 53 bp, Artificial
  Synthetic oligonucleotide
agtccggaagaaagacgatcggcaccttgcctttcagaaggcgcgcccggtct

SEQ ID NO: 141235 - DNA, 53 bp, Artificial
  Synthetic oligonucleotide
taatgctaatgacgacaataagaaagatgtaccggcaaccaatgctgcggcag

SEQ ID NO: 141236 - DNA, 53 bp, Artificial
  Synthetic oligonucleotide
agccgcgttcctccgcctggcgccgccaactcgcgaagtcgctcatatcgtcg

SEQ ID NO: 141237 - DNA, 53 bp, Artificial
  Synthetic oligonucleotide
cagaatggttacagacctgcgtaagttgaaacggcaatcgcgaagagggccag

SEQ ID NO: 141238 - DNA, 53 bp, Artificial
  Synthetic oligonucleotide
gggtgtgccgtttaaggcgtctgacctgggcaaggcatacgcatggaaggcat

SEQ ID NO: 141239 - DNA, 60 bp, Artificial
  Synthetic oligonucleotide
ccggccatcattcatcggccctgagggccgctgatcagcccgtccgcacaggtgggtcca

SEQ ID NO: 141240 - DNA, 53 bp, Artificial
  Synthetic oligonucleotide
aacccggcggccccacgaatattactggtaatcttcagcgcgggaacgatctt

SEQ ID NO: 141241 - DNA, 53 bp, Artificial
  Synthetic oligonucleotide
ggcggccccctctgtcgggtggcctgctcaatataacacccggactattgtcc

SEQ ID NO: 141242 - DNA, 53 bp, Artificial
  Synthetic oligonucleotide
aatggtcacttccgtaaccccacgcgcaggcagaggcagcacttctactgtaa

SEQ ID NO: 141243 - DNA, 53 bp, Artificial
  Synthetic oligonucleotide
gagcatgaatatacattctcgcgctcgctagcagcaccgatgtgcctcgcaca

SEQ ID NO: 141244 - DNA, 53 bp, Artificial
  Synthetic oligonucleotide
gatcacatcgagtgcgaagtacgagtaaggccagccgaccgtgtttgtgacta

SEQ ID NO: 141245 - DNA, 53 bp, Artificial
  Synthetic oligonucleotide
ggggaactttcaactccgtacggcgattagcacctgatttgttcgatttaacg

SEQ ID NO: 141246 - DNA, 53 bp, Artificial
  Synthetic oligonucleotide
gctcggcatcggttcaatggcgttggctggccagaattgtcgcgatctagcag

SEQ ID NO: 141247 - DNA, 53 bp, Artificial
  Synthetic oligonucleotide
tagctggtgggctaggggtagcccatagctggtgggctacccccccccctcac

SEQ ID NO: 141248 - DNA, 53 bp, Artificial
  Synthetic oligonucleotide
cacccgtggatgaatcattcgctgtcaccggcgtctaccttgtcctgtaggga

SEQ ID NO: 141249 - DNA, 53 bp, Artificial
  Synthetic oligonucleotide
cccttacgccgtctttatgaggccgcatcgttacatgccgcaagtttccaaaa

SEQ ID NO: 141250 - DNA, 53 bp, Artificial
  Synthetic oligonucleotide
ccggcccttcctgcgtctgtagccgggaactcccggttataggccgaaggatg

SEQ ID NO: 141251 - DNA, 53 bp, Artificial
  Synthetic oligonucleotide
ctgctgatacgtcattcgaaccctcgttgttatccggaaacgcgtgatgcgat

SEQ ID NO: 141252 - DNA, 53 bp, Artificial
  Synthetic oligonucleotide
tcgatggtactgagataatagcctgacaaaacggcctcctaaaatgaaggatg

SEQ ID NO: 141253 - DNA, 53 bp, Artificial
  Synthetic oligonucleotide
cctccggggtgatctttcaggggcgataaccgaagttacatcgccgaataata

SEQ ID NO: 141254 - DNA, 53 bp, Artificial
  Synthetic oligonucleotide
gcccgctcggtggcatggtcaccattcgcggagataaaaaggccgcaggactt

SEQ ID NO: 141255 - DNA, 53 bp, Artificial
  Synthetic oligonucleotide
tggtgtgacacgcgcgcgatcaatacccatgatcgggcggcggtactccaggc

SEQ ID NO: 141256 - DNA, 53 bp, Artificial
  Synthetic oligonucleotide
gactccgtgagcacaaaagccggccggatggcgtcccgcaagggcgcaatccg

SEQ ID NO: 141257 - DNA, 53 bp, Artificial
  Synthetic oligonucleotide
agccctcagtgctcaaatcctcgtccaggtcaggccagtgaatgccgtagccg

SEQ ID NO: 141258 - DNA, 53 bp, Artificial
  Synthetic oligonucleotide
ccgtcccatcagctatgggactaccccgtcccatcagctatgggactaccccc

SEQ ID NO: 141259 - DNA, 53 bp, Artificial
  Synthetic oligonucleotide
cgtttcttgcgttcggtcggattaggatgagcgcgaatatctcgggatacaag

SEQ ID NO: 141260 - DNA, 53 bp, Artificial
  Synthetic oligonucleotide
acgcatcactgtttccagaccctggttcgggcagaaacgtccccacagccagc

SEQ ID NO: 141261 - DNA, 60 bp, Artificial
  Synthetic oligonucleotide
ccgtccggcgttcagatcacaatcgaactgcctagccgcgatctctactcgggatcgctt

SEQ ID NO: 141262 - DNA, 53 bp, Artificial
  Synthetic oligonucleotide
ccccaaaggctatgcaggcaggatgtgttgggcataggctgcatgtgcggggc

SEQ ID NO: 141263 - DNA, 53 bp, Artificial
  Synthetic oligonucleotide
tttcgtgatgtatctgtggtcgttacgcccggttcatggattcggctttgtgc

SEQ ID NO: 141264 - DNA, 52 bp, Artificial
  Synthetic oligonucleotide
aattagcttgacggccagatgaatgtgtgattcggctatggttaatagcgag

SEQ ID NO: 141265 - DNA, 52 bp, Artificial
  Synthetic oligonucleotide
tcaagttttacgcaaattgtatgcggcggagcctgcccctgattacgctatc

SEQ ID NO: 141266 - DNA, 52 bp, Artificial
  Synthetic oligonucleotide
gtgtctcaatcaaccgtgctgcgggggacgcgttgcgatacaccgacgtgat

SEQ ID NO: 141267 - DNA, 52 bp, Artificial
  Synthetic oligonucleotide
tacggggtgatatgatgactttcacaaccgcgagaacatcgtgattaaacgt

SEQ ID NO: 141268 - DNA, 52 bp, Artificial
  Synthetic oligonucleotide
tacggccctctgacggccttatagcggatgatcgcaagaggcgatcgcctgt

SEQ ID NO: 141269 - DNA, 52 bp, Artificial
  Synthetic oligonucleotide
gaaattgagcactgccacggccagtctcactacccatgacaccaatctggac

SEQ ID NO: 141270 - DNA, 52 bp, Artificial
  Synthetic oligonucleotide
ccggcttctgaagcagcggccccgcaaagatgaccagtacattcgcaaaact

SEQ ID NO: 141271 - DNA, 52 bp, Artificial
  Synthetic oligonucleotide
agattgacgagtatcagagcgagattgcgccatccttgtgtgattattgaga

SEQ ID NO: 141272 - DNA, 54 bp, Artificial
  Synthetic oligonucleotide
gaacggggtcttccggaactaggaccgatctcgccgagagttgagatcggtcct

SEQ ID NO: 141273 - DNA, 54 bp, Artificial
  Synthetic oligonucleotide
attcggatagcgttaccttgatttcggacatttgtccggaattggtcttacgga

SEQ ID NO: 141274 - DNA, 52 bp, Artificial
  Synthetic oligonucleotide
aatgcgttttgctactaacagccaacggtgagattttcgactcaagactcat

SEQ ID NO: 141275 - DNA, 52 bp, Artificial
  Synthetic oligonucleotide
ccggtaggctacacgggcccacaaagcacatactgcgatggctaagtgcccc

SEQ ID NO: 141276 - DNA, 52 bp, Artificial
  Synthetic oligonucleotide
gaaagctcagtatccgtcgacgacgatcgagaatctgctcatgggcgacaga

SEQ ID NO: 141277 - DNA, 52 bp, Artificial
  Synthetic oligonucleotide
aatatggaggtgtcgttgtaggcgaagcctatcgcgtggacgaagaccggca

SEQ ID NO: 141278 - DNA, 52 bp, Artificial
  Synthetic oligonucleotide
tcgccggtgggtaactgccgctcgccgggtagtagcgtcggaatacgttcca

SEQ ID NO: 141279 - DNA, 52 bp, Artificial
  Synthetic oligonucleotide
acatagaccaactttttgtaatctggtgcgaaagcagtcatgtccttgtgca

SEQ ID NO: 141280 - DNA, 52 bp, Artificial
  Synthetic oligonucleotide
gacagatgataaagaacctcgctgcaagcgatcatctaccggattaccgtgt

SEQ ID NO: 141281 - DNA, 52 bp, Artificial
  Synthetic oligonucleotide
cctgagcgtctggtcgagccgaaaccaacccttggtgtgcaagccagggtgg

SEQ ID NO: 141282 - DNA, 52 bp, Artificial
  Synthetic oligonucleotide
agagtcggacgcgcctcgctggatgaggacacgtctggaccacataccagcg

SEQ ID NO: 141283 - DNA, 52 bp, Artificial
  Synthetic oligonucleotide
ccatttggcgaaacccatgcgccaccaacgctcgaactgcgtaacccaaggc

SEQ ID NO: 141284 - DNA, 56 bp, Artificial
  Synthetic oligonucleotide
atttctgacgcctgaatgatcgctaaggggaacccttggccgcacctcaaacggga

SEQ ID NO: 141285 - DNA, 52 bp, Artificial
  Synthetic oligonucleotide
gagtcgtaactacgcccttactacgttcggggcacctgaaccgcacgcaaac

SEQ ID NO: 141286 - DNA, 52 bp, Artificial
  Synthetic oligonucleotide
tttcgcatgattgcggtaagagcgatgttggcgtcttttccctttgcgacaa

SEQ ID NO: 141287 - DNA, 52 bp, Artificial
  Synthetic oligonucleotide
cacgccacaagacacgcagaagcgtccgtactgccgggtcaaggctcacacg

SEQ ID NO: 141288 - DNA, 52 bp, Artificial
  Synthetic oligonucleotide
atatgcgcgcgtaagccgcgcagacaagcaagatctgtctatgcagatccag

SEQ ID NO: 141289 - DNA, 52 bp, Artificial
  Synthetic oligonucleotide
ctctgcttcattcatggtgcgtcgctgctctggtcagccggaatcctcattg

SEQ ID NO: 141290 - DNA, 52 bp, Artificial
  Synthetic oligonucleotide
acgggcacataaagattatgtcggtggcgttcccttcgcgccggtttagggt

SEQ ID NO: 141291 - DNA, 52 bp, Artificial
  Synthetic oligonucleotide
aggaagacgcctgtacgagtgacagacatgccgctttcaacgtcccggcctg

SEQ ID NO: 141292 - DNA, 52 bp, Artificial
  Synthetic oligonucleotide
gagaactacaacgggcagcctaagatattgagtcaccgccgtcttttggaga

SEQ ID NO: 141293 - DNA, 52 bp, Artificial
  Synthetic oligonucleotide
gctatttatatcgtcactccccgaaaccccgttcttaaatctcgtcctagta

SEQ ID NO: 141294 - DNA, 52 bp, Artificial
  Synthetic oligonucleotide
ttgcagcctatgtcagcagtaatacggttccggtggacactctgcctgacct

SEQ ID NO: 141295 - DNA, 59 bp, Artificial
  Synthetic oligonucleotide
atttgagaacgcctctggcctctattctgggcgcaacgtccagcctcgaaagttatggc

SEQ ID NO: 141296 - DNA, 52 bp, Artificial
  Synthetic oligonucleotide
ttggcgtcaaacgggggtctcgggggcttgcccctgagcaagaaccgctagg

SEQ ID NO: 141297 - DNA, 52 bp, Artificial
  Synthetic oligonucleotide
ttcccgaacagcgtagcggggtgtgcgaaccggatatccataccatcccagt

SEQ ID NO: 141298 - DNA, 52 bp, Artificial
  Synthetic oligonucleotide
ctccggacagtcggtgcgtggcacacgggcctcgatgatgcaggcgtgctga

SEQ ID NO: 141299 - DNA, 52 bp, Artificial
  Synthetic oligonucleotide
tctcgtgattgcaggaatcatgcgagccagacgctatcctgtcttggccggt

SEQ ID NO: 141300 - DNA, 52 bp, Artificial
  Synthetic oligonucleotide
accatcacggttcatacataatccgcaccaccaaatcccgggaacaaacacc

SEQ ID NO: 141301 - DNA, 52 bp, Artificial
  Synthetic oligonucleotide
cgacctcagctcggcacgagagcgtcaaatgtcagcgcatcgtgccaggcta

SEQ ID NO: 141302 - DNA, 52 bp, Artificial
  Synthetic oligonucleotide
cattaccaacggggcagatcagggggcataaatcccccgccaagactgtgct

SEQ ID NO: 141303 - DNA, 52 bp, Artificial
  Synthetic oligonucleotide
aaggacttcagcgttctggccgacaattcgataaacgataatgtagggccaa

SEQ ID NO: 141304 - DNA, 52 bp, Artificial
  Synthetic oligonucleotide
agtcgcacactccggcgtatgaacatcgcctctgtagcggtgtgttcagaag

SEQ ID NO: 141305 - DNA, 52 bp, Artificial
  Synthetic oligonucleotide
ctggcgggttaaggccaatgccaaccagagctactcgcttggcggattgatt

SEQ ID NO: 141306 - DNA, 50 bp, Artificial
  Synthetic oligonucleotide
caaaccggccggtatccaattaacccgcggggcacctaattcacttgggg

SEQ ID NO: 141307 - DNA, 52 bp, Artificial
  Synthetic oligonucleotide
accggccgcagcaggtaggaagcgtgactgtctgtcggtgagccagaattcc

SEQ ID NO: 141308 - DNA, 52 bp, Artificial
  Synthetic oligonucleotide
gcgtaccgctcttccgacccattccacacgcacggaaagtgccgacgttgat

SEQ ID NO: 141309 - DNA, 52 bp, Artificial
  Synthetic oligonucleotide
ggatgttgatcgaggcggcctggagttaccgacatcccgcccgggtcagccg

SEQ ID NO: 141310 - DNA, 52 bp, Artificial
  Synthetic oligonucleotide
cgccctaaaaccccacgtatcagggaccgcacgggcatagtggctatgcgtc

SEQ ID NO: 141311 - DNA, 52 bp, Artificial
  Synthetic oligonucleotide
cacccaacgagactggatcaaaaaagtcatcggataggcaggctattaccct

SEQ ID NO: 141312 - DNA, 52 bp, Artificial
  Synthetic oligonucleotide
aggttcggcaggtaattctggaatatgagtcacatttcggtcacggtatttt

SEQ ID NO: 141313 - DNA, 51 bp, Artificial
  Synthetic oligonucleotide
ttgactggcgggatttaggtatggccaacgaaacgggtaagggtgatctga

SEQ ID NO: 141314 - DNA, 51 bp, Artificial
  Synthetic oligonucleotide
tcagtggccagtggggtacatcctgcgcaccgggatagggtgcatcattgt

SEQ ID NO: 141315 - DNA, 51 bp, Artificial
  Synthetic oligonucleotide
atgtcttggcgcatggcctatttaggtcgcttgcatctggtgattacaagc

SEQ ID NO: 141316 - DNA, 51 bp, Artificial
  Synthetic oligonucleotide
agcggaatcctacgttaacgcctgaatctatttcttgagtacgaacctctg

SEQ ID NO: 141317 - DNA, 58 bp, Artificial
  Synthetic oligonucleotide
caagatagggtctcaactgaattcgctcgcaggttttgcgccgaaattccgcagggga

SEQ ID NO: 141318 - DNA, 51 bp, Artificial
  Synthetic oligonucleotide
aaaatcgatccagaccgatgaatcgaccagaatcatacgtcggaacgcatg

SEQ ID NO: 141319 - DNA, 51 bp, Artificial
  Synthetic oligonucleotide
ccgcaacactgcgaccgaaggttacgtcgttggtctcctgtatgggccgca

SEQ ID NO: 141320 - DNA, 51 bp, Artificial
  Synthetic oligonucleotide
ttttcgtggtctctctctatgatctttggaccgtccccgaagcccacgggg

SEQ ID NO: 141321 - DNA, 51 bp, Artificial
  Synthetic oligonucleotide
aaaacccgaaacttccgttcgtcgctatgaacataacgggcaatggctgga

SEQ ID NO: 141322 - DNA, 51 bp, Artificial
  Synthetic oligonucleotide
gaggtagagcagatggcgctttcggatggcatgagccgggcggaggtagat

SEQ ID NO: 141323 - DNA, 51 bp, Artificial
  Synthetic oligonucleotide
cattggcataagcccgctgtatcaggacgattggcgactgggctagcggcc

SEQ ID NO: 141324 - DNA, 51 bp, Artificial
  Synthetic oligonucleotide
tctttgaccggcaaggagattgcaagcccatgaattcagatcgttaccggc

SEQ ID NO: 141325 - DNA, 51 bp, Artificial
  Synthetic oligonucleotide
gcactgtctgtctcaccgcgtgagctgtctgatagcgtgactatcatccga

SEQ ID NO: 141326 - DNA, 51 bp, Artificial
  Synthetic oligonucleotide
aagctttgcacagatccttggtctacacggctcgtggaacctcaaaggccg

SEQ ID NO: 141327 - DNA, 51 bp, Artificial
  Synthetic oligonucleotide
catattggaagatctgggttacaaggcttcggtccatagcattagccccgc

SEQ ID NO: 141328 - DNA, 60 bp, Artificial
  Synthetic oligonucleotide
caagccatgcgtctggttggcggggcaaatgagccggaattgggtgatagtgcaccagca

SEQ ID NO: 141329 - DNA, 51 bp, Artificial
  Synthetic oligonucleotide
tgcctccagacgctctgtcatgactcctctgcccgtccgctcaagccgttg

SEQ ID NO: 141330 - DNA, 51 bp, Artificial
  Synthetic oligonucleotide
atggagttctggttgaaactctctccgagtctcggtccggaaagaacgacg

SEQ ID NO: 141331 - DNA, 51 bp, Artificial
  Synthetic oligonucleotide
aactgcctcgcgtataggcggaggatcagggacgtggcccgtattggcaag

SEQ ID NO: 141332 - DNA, 51 bp, Artificial
  Synthetic oligonucleotide
gcatagaaagcattttgtgcgtctgattacccctttcagggataacacact

SEQ ID NO: 141333 - DNA, 51 bp, Artificial
  Synthetic oligonucleotide
gcataggccccgctctgaatgcgggacaatgcctgtgagacgagggcttgc

SEQ ID NO: 141334 - DNA, 51 bp, Artificial
  Synthetic oligonucleotide
tggaaagtgaccgagctcaacaacgcccgcatgacagagattggcgctgcc

SEQ ID NO: 141335 - DNA, 51 bp, Artificial
  Synthetic oligonucleotide
tgtcgtccaagtgcttgaaacaccttgcggcgttgcctagatcagtagtcg

SEQ ID NO: 141336 - DNA, 51 bp, Artificial
  Synthetic oligonucleotide
atggcggttgagcgggaggtagagcagatggcgctttcggatggcatgagc

SEQ ID NO: 141337 - DNA, 51 bp, Artificial
  Synthetic oligonucleotide
ttcagacccggttcatctatgcgatttttgtgggcgtgccgctccatatgt

SEQ ID NO: 141338 - DNA, 51 bp, Artificial
  Synthetic oligonucleotide
aacccgatccctacaacaagacatgcaagacccacccctaacagccaccag

SEQ ID NO: 141339 - DNA, 60 bp, Artificial
  Synthetic oligonucleotide
caagggatatcagcctgtgccgatcgctcatgctagaccctagcgcacccgtgccgttcg

SEQ ID NO: 141340 - DNA, 51 bp, Artificial
  Synthetic oligonucleotide
aacactagatctagtaggtatgggagtcaaccggataggcaaggctgattc

SEQ ID NO: 141341 - DNA, 51 bp, Artificial
  Synthetic oligonucleotide
aacacgacccgtcccctgggtgcgggccccattgccggtatgaaggtaccg

SEQ ID NO: 141342 - DNA, 51 bp, Artificial
  Synthetic oligonucleotide
taacgttgagccgagtttgcacgctgtccgagggaccgggtagagttttca

SEQ ID NO: 141343 - DNA, 51 bp, Artificial
  Synthetic oligonucleotide
gttccgtcatgggcgggttgttcatagcctgcgccttccctgaatcgatca

SEQ ID NO: 141344 - DNA, 51 bp, Artificial
  Synthetic oligonucleotide
gttcaggagagaagtcacagaccattgcacctttggagcctccggacatga

SEQ ID NO: 141345 - DNA, 51 bp, Artificial
  Synthetic oligonucleotide
cctgttggagcgcggggttacggtgccgcaggggcggagcaagctcgagcg

SEQ ID NO: 141346 - DNA, 51 bp, Artificial
  Synthetic oligonucleotide
gtggcgtcattcatcgtgggcggaacagatcgttgggagtccggaatggct

SEQ ID NO: 141347 - DNA, 51 bp, Artificial
  Synthetic oligonucleotide
ccttgcgcgacattttcgaacaagaccggcgccccatagcccagcggagca

SEQ ID NO: 141348 - DNA, 51 bp, Artificial
  Synthetic oligonucleotide
gtgcggctatgctgcgcacgggtggttggcgtccacatggtgtctccggca

SEQ ID NO: 141349 - DNA, 51 bp, Artificial
  Synthetic oligonucleotide
cgaacagaaccgccatatgttgcaggcgggaatgtacgccagatcggcttg

SEQ ID NO: 141350 - DNA, 60 bp, Artificial
  Synthetic oligonucleotide
caatctctggtattccaaaccagtgaagcgcgtctctgcatgaccttcttctcatcgtcc

SEQ ID NO: 141351 - DNA, 51 bp, Artificial
  Synthetic oligonucleotide
gtctgaaaaatctatcgcggtccaaagccgcgctgggtgtctgggatgcgt

SEQ ID NO: 141352 - DNA, 51 bp, Artificial
  Synthetic oligonucleotide
ctggccacgcatcaaggggccgagccagatatggcaatgcttggtcggctg

SEQ ID NO: 141353 - DNA, 51 bp, Artificial
  Synthetic oligonucleotide
aggttgcatcgtgcttggcgttcgcgatcctctttttcacatcgcctcccg

SEQ ID NO: 141354 - DNA, 51 bp, Artificial
  Synthetic oligonucleotide
cgctgctaagcaagcgcgggtcggctaggaagacgcctgtacgagtgacag

SEQ ID NO: 141355 - DNA, 51 bp, Artificial
  Synthetic oligonucleotide
cgcttccggtctgatcatcgtaaaagccccgtacgatcggctgagacggca

SEQ ID NO: 141356 - DNA, 51 bp, Artificial
  Synthetic oligonucleotide
ggggtatcaggtctttcccctatatcccgcctcttgaggtgtctgcccgct

SEQ ID NO: 141357 - DNA, 51 bp, Artificial
  Synthetic oligonucleotide
cgggggacgcgttgcgatacaccgacgtgattatggcccgctgtgaggcgt

SEQ ID NO: 141358 - DNA, 51 bp, Artificial
  Synthetic oligonucleotide
acggtttgcaatcgtcacgacaggctacactccggaatagcggacggaaaa

SEQ ID NO: 141359 - DNA, 51 bp, Artificial
  Synthetic oligonucleotide
ctctagaatcgtctgagacatccggttcgcctccacctagagttgcttgac

SEQ ID NO: 141360 - DNA, 51 bp, Artificial
  Synthetic oligonucleotide
gggataccgatcgcgaatgattttccccagcctgacctgtgtcagttcctg

SEQ ID NO: 141361 - DNA, 59 bp, Artificial
  Synthetic oligonucleotide
caatgaaatgtcgagttcatacgcaaccctgtccaccttgcccgatgaatgaagtttcg

SEQ ID NO: 141362 - DNA, 51 bp, Artificial
  Synthetic oligonucleotide
ggaaacggggaacattccgtccatagaaacagaaccgaccggcattgcaac

SEQ ID NO: 141363 - DNA, 51 bp, Artificial
  Synthetic oligonucleotide
agaaagatccatctcccgtcagaaacgcggcattacccctaccatccgccg

SEQ ID NO: 141364 - DNA, 51 bp, Artificial
  Synthetic oligonucleotide
ggaacggacgcaatccggcacgcatcgcactggcgtacacatctgacagtg

SEQ ID NO: 141365 - DNA, 51 bp, Artificial
  Synthetic oligonucleotide
ctacgggtaataagtcaactgatggattgcgaggttatacgattagtacag

SEQ ID NO: 141366 - DNA, 51 bp, Artificial
  Synthetic oligonucleotide
gccggaagcctgttaccctattgccggaccgagcgctggagacgtctcgag

SEQ ID NO: 141367 - DNA, 51 bp, Artificial
  Synthetic oligonucleotide
atcgtaaattatacgcttgcttcaataacgggaacgccgctgcaccggact

SEQ ID NO: 141368 - DNA, 51 bp, Artificial
  Synthetic oligonucleotide
taggtcaaaaaggtatccatttttgccactgatcgcgtgtcactacgacct

SEQ ID NO: 141369 - DNA, 51 bp, Artificial
  Synthetic oligonucleotide
aggctttagccggaaaggaaggacggatgcttcagagaaccgacagtatga

SEQ ID NO: 141370 - DNA, 51 bp, Artificial
  Synthetic oligonucleotide
ccgcgcagatggctacgtcgatctacgcagcccgatgggggccggcttagg

SEQ ID NO: 141371 - DNA, 51 bp, Artificial
  Synthetic oligonucleotide
taccgtcggtataccgttgacctaccttcgcaaggcagctaaaaggaggcg

SEQ ID NO: 141372 - DNA, 59 bp, Artificial
  Synthetic oligonucleotide
cacacgtagcctccggcgaggcacgatccttctcgcaacagaactcaaagttgggcttc

SEQ ID NO: 141373 - DNA, 51 bp, Artificial
  Synthetic oligonucleotide
ccgccggtcgaaagggcactgaccatgcgcgtaggagcgcgtgccatgatg

SEQ ID NO: 141374 - DNA, 50 bp, Artificial
  Synthetic oligonucleotide
agccggatatgacctggcattgcaaacgcggagcccggaaccgtagcgac

SEQ ID NO: 141375 - DNA, 50 bp, Artificial
  Synthetic oligonucleotide
cacagggacggaaggtagcacaacattccctgcgcgcgaggatacccgcc

SEQ ID NO: 141376 - DNA, 50 bp, Artificial
  Synthetic oligonucleotide
gatctcggtctgggcaatcgtatcgggcatgggggacatccgggaccgct

SEQ ID NO: 141377 - DNA, 50 bp, Artificial
  Synthetic oligonucleotide
agacgcgccttgatgtgccgtagggggcagacctgataggggaggatgcg

SEQ ID NO: 141378 - DNA, 50 bp, Artificial
  Synthetic oligonucleotide
aacccggggcttctcgcctgaagtcgtgttggcgacagcattctcaacct

SEQ ID NO: 141379 - DNA, 50 bp, Artificial
  Synthetic oligonucleotide
gctcagagcattgatgctttggaagtgcagatccgggcgcgtgcaaaaag

SEQ ID NO: 141380 - DNA, 50 bp, Artificial
  Synthetic oligonucleotide
ccgcgcggccaccaacatacaagcgagaaaacccttcatgtcacttgttc

SEQ ID NO: 141381 - DNA, 50 bp, Artificial
  Synthetic oligonucleotide
acggagagaggtcttccgtgccgaaccccttgcggcgtcccagaatgatg

SEQ ID NO: 141382 - DNA, 50 bp, Artificial
  Synthetic oligonucleotide
agaccttttcaccgcccccagtgacttcgcataacgcgcagatgccctga

SEQ ID NO: 141383 - DNA, 53 bp, Artificial
  Synthetic oligonucleotide
gaacgtccctttcgaaaggctggcgttgactgacgcggtcggttcatttcggt

SEQ ID NO: 141384 - DNA, 57 bp, Artificial
  Synthetic oligonucleotide
caccggacgaagaaccatcattcttcgcggtgcgtaccgctcttccgacccattcca

SEQ ID NO: 141385 - DNA, 50 bp, Artificial
  Synthetic oligonucleotide
cgggacgtcctcccctgggattggtagccgagcccctgacctgtcgatct

SEQ ID NO: 141386 - DNA, 50 bp, Artificial
  Synthetic oligonucleotide
agcgaaaagggtaccactgcaccatccagctggcagagaatgcggcgcaa

SEQ ID NO: 141387 - DNA, 50 bp, Artificial
  Synthetic oligonucleotide
cgggcgtgctccctgtacgggcattttcgtctcctgcgatggggtggata

SEQ ID NO: 141388 - DNA, 50 bp, Artificial
  Synthetic oligonucleotide
cacctgatacgcccagacgaaatgccgctcctccggacgggactggtcct

SEQ ID NO: 141389 - DNA, 50 bp, Artificial
  Synthetic oligonucleotide
gagattgtcagcttgccctcaaagtagaggttatttcaactgctgacgaa

SEQ ID NO: 141390 - DNA, 50 bp, Artificial
  Synthetic oligonucleotide
acggtcgttggttcactacgatcacagggggtctatctccgcgcacgcgg

SEQ ID NO: 141391 - DNA, 50 bp, Artificial
  Synthetic oligonucleotide
ggtgacttcgtgtgatggggagacagtccttgcggcgactgcggttggct

SEQ ID NO: 141392 - DNA, 50 bp, Artificial
  Synthetic oligonucleotide
aacgcacacgaaagtgcattttacgtacgcgtggggtgagcaccgttagg

SEQ ID NO: 141393 - DNA, 50 bp, Artificial
  Synthetic oligonucleotide
aggacgggcatagccggtcatatagttgaaaagccgggccgcatcccgtg

SEQ ID NO: 141394 - DNA, 50 bp, Artificial
  Synthetic oligonucleotide
agccattcagacccattcccgcccggacgaacgcattctggtcattccct

SEQ ID NO: 141395 - DNA, 54 bp, Artificial
  Synthetic oligonucleotide
cactcgtctttcgtatgccgcggatagggttgatttatatttttggaataggtt

SEQ ID NO: 141396 - DNA, 50 bp, Artificial
  Synthetic oligonucleotide
cagccgtcgaaagccggatatgacctggcattgcaaacgcggagcccgga

SEQ ID NO: 141397 - DNA, 50 bp, Artificial
  Synthetic oligonucleotide
atggcgaattgtccgggcgtgctccctgtacgggcattttcgtctcctgc

SEQ ID NO: 141398 - DNA, 50 bp, Artificial
  Synthetic oligonucleotide
acgaacgggatatcaccgtgggtccatgcacgcgtttacggaccggcagg

SEQ ID NO: 141399 - DNA, 50 bp, Artificial
  Synthetic oligonucleotide
acgacaccacggcggtatttatagtccccgtcccccgaaaccggcagact

SEQ ID NO: 141400 - DNA, 50 bp, Artificial
  Synthetic oligonucleotide
gattggcaccgccccagaggcgttcgcggacagcgcagttatagtccagt

SEQ ID NO: 141401 - DNA, 50 bp, Artificial
  Synthetic oligonucleotide
acgacaggggcttcggacccggcatgcgatgcgaaggcatagaggaacga

SEQ ID NO: 141402 - DNA, 50 bp, Artificial
  Synthetic oligonucleotide
aggctcgctcctttgcgcgttgggccagggatcgtggcttcggtccgaaa

SEQ ID NO: 141403 - DNA, 50 bp, Artificial
  Synthetic oligonucleotide
aggacgcagcgcacagggtacaatcgggcgcatgaacctggtcgactgta

SEQ ID NO: 141404 - DNA, 50 bp, Artificial
  Synthetic oligonucleotide
gcgtttagcacgtcgacacaggagttgggtcccctccaagaagccgccta

SEQ ID NO: 141405 - DNA, 50 bp, Artificial
  Synthetic oligonucleotide
agtcccagtgctgaggtgcaaggccatacgccggcagagcgccgtactgt

SEQ ID NO: 141406 - DNA, 59 bp, Artificial
  Synthetic oligonucleotide
cagatacagagcgtaggatacaacagggctacggtgtcacgttgaagcgtagccgccgt

SEQ ID NO: 141407 - DNA, 50 bp, Artificial
  Synthetic oligonucleotide
aacctgaggttcctgcacctcccattagtcagtcagggggcgcaggtcta

SEQ ID NO: 141408 - DNA, 50 bp, Artificial
  Synthetic oligonucleotide
gatgtatcgtggttgccagtggaaatgatgatccagccacccgaacgcgt

SEQ ID NO: 141409 - DNA, 50 bp, Artificial
  Synthetic oligonucleotide
atatcataatttgcgggatgagccgggggcgaatcgtgtggcgggcgtgt

SEQ ID NO: 141410 - DNA, 50 bp, Artificial
  Synthetic oligonucleotide
gagaccctctaatatcgacagatcccgcgcaacgaacggtatcaagcagt

SEQ ID NO: 141411 - DNA, 50 bp, Artificial
  Synthetic oligonucleotide
ttagacatgctctattcgcaggcccatttgacgagatattgactgaacta

SEQ ID NO: 141412 - DNA, 50 bp, Artificial
  Synthetic oligonucleotide
cggagtagccatgactagtcacgccaagccatgattagtcatgggatatc

SEQ ID NO: 141413 - DNA, 50 bp, Artificial
  Synthetic oligonucleotide
agagaatgcgaccgatgtcccccattacccgcctgcaacccgagacccgt

SEQ ID NO: 141414 - DNA, 50 bp, Artificial
  Synthetic oligonucleotide
acgctacccgtgcttcccgcaggggattaagcccgccggtcctgatatcg

SEQ ID NO: 141415 - DNA, 50 bp, Artificial
  Synthetic oligonucleotide
aaacgcgacgtcaggctctgacatccccggcaaggcggcatatcagtcta

SEQ ID NO: 141416 - DNA, 50 bp, Artificial
  Synthetic oligonucleotide
cgtccggttggtgacttcgtgtgatggggagacagtccttgcggcgactg

SEQ ID NO: 141417 - DNA, 59 bp, Artificial
  Synthetic oligonucleotide
cagcccttctagggaagctcgatacgtgaaacagttcgcctgtcacttcagaccaaata

SEQ ID NO: 141418 - DNA, 50 bp, Artificial
  Synthetic oligonucleotide
cgtcctttccccgcacggaccctagcacgtatgcgccggtgtccgataca

SEQ ID NO: 141419 - DNA, 50 bp, Artificial
  Synthetic oligonucleotide
caacgcatggagcctgccgaacgtccacagtaagcgcgttcccattgcga

SEQ ID NO: 141420 - DNA, 50 bp, Artificial
  Synthetic oligonucleotide
atctctaggttggattggaagattggcaccgccccagaggcgttcgcgga

SEQ ID NO: 141421 - DNA, 50 bp, Artificial
  Synthetic oligonucleotide
cgtgatatcattcgagcagcgaaaacgggcgggaatctggcaggcgtggg

SEQ ID NO: 141422 - DNA, 50 bp, Artificial
  Synthetic oligonucleotide
actccgagaaagcttcctccagtcgtgctcgcgtttccaaaagcaaaggt

SEQ ID NO: 141423 - DNA, 50 bp, Artificial
  Synthetic oligonucleotide
agttctcgggaagcggcaatagctaccaacccggagaagcgcccacgacg

SEQ ID NO: 141424 - DNA, 50 bp, Artificial
  Synthetic oligonucleotide
aatgttacacgcgcgccacgacggatcaatgccgggacaaagcgcagata

SEQ ID NO: 141425 - DNA, 50 bp, Artificial
  Synthetic oligonucleotide
cgtgtagcctgtggccctttaagcacctctattccggctagatcactaat

SEQ ID NO: 141426 - DNA, 50 bp, Artificial
  Synthetic oligonucleotide
actggcctgggatgatgcgttcagctttgcctacccgcatatgctggccg

SEQ ID NO: 141427 - DNA, 50 bp, Artificial
  Synthetic oligonucleotide
agtgcctcgcagggagcctttggtcgggccgttctccagatggagtgaca

SEQ ID NO: 141428 - DNA, 60 bp, Artificial
  Synthetic oligonucleotide
cagcgcacgactaatatagacgctttgatcgcaaaatttcatcaggaagttacggcagcg

SEQ ID NO: 141429 - DNA, 50 bp, Artificial
  Synthetic oligonucleotide
agtggggagaccagcaggtcacgcttcggcaacacaccgtccaaagcacc

SEQ ID NO: 141430 - DNA, 50 bp, Artificial
  Synthetic oligonucleotide
atgttctatattggttccccctgcgccgtcaacagccctcggaggctgcc

SEQ ID NO: 141431 - DNA, 50 bp, Artificial
  Synthetic oligonucleotide
aaaagcgcggcatcaacaggtttttccgtgctccctgccggccatagctc

SEQ ID NO: 141432 - DNA, 50 bp, Artificial
  Synthetic oligonucleotide
ctatggcttccgggactggcaaattccggtgcgcttcccgaaaccggggg

SEQ ID NO: 141433 - DNA, 50 bp, Artificial
  Synthetic oligonucleotide
atttacgcgacaatcccagcctcaaatccgtcttggatagcgcaatttct

SEQ ID NO: 141434 - DNA, 50 bp, Artificial
  Synthetic oligonucleotide
actcctgtcttcggacggtccgtcacatgcgccggtctttcgcgtcagtg

SEQ ID NO: 141435 - DNA, 50 bp, Artificial
  Synthetic oligonucleotide
ggatacattagccaccatcgcaacatttactgtaccatacggcatagcgc

SEQ ID NO: 141436 - DNA, 50 bp, Artificial
  Synthetic oligonucleotide
ttttgtagctcatactggtcgatctccttcagactgcttcgatcgggcct

SEQ ID NO: 141437 - DNA, 50 bp, Artificial
  Synthetic oligonucleotide
ggagacagtccttgcggcgactgcggttggctctgatgaccacggcgtgc

SEQ ID NO: 141438 - DNA, 50 bp, Artificial
  Synthetic oligonucleotide
aacatggactggtctgcggacgccgtgaggcatactgtgcgggcattggc

SEQ ID NO: 141439 - DNA, 58 bp, Artificial
  Synthetic oligonucleotide
cagcttctgtagtcaggaaaagccaaagtgtctgccccacaagggatacgtctaacaa

SEQ ID NO: 141440 - DNA, 50 bp, Artificial
  Synthetic oligonucleotide
aacaggggcactcatgcaagacgccgccatagacccgatacgcctcagcg

SEQ ID NO: 141441 - DNA, 50 bp, Artificial
  Synthetic oligonucleotide
acaaccgggcaagttgccgaccatccctcgatcaccacattcccgagcgg

SEQ ID NO: 141442 - DNA, 50 bp, Artificial
  Synthetic oligonucleotide
aacacgcgtgcaccgagtgacccgcccagtatcagcagattgatgacccc

SEQ ID NO: 141443 - DNA, 50 bp, Artificial
  Synthetic oligonucleotide
ctcgggagaggtgacggtgcagctccattggtcacgtcgggcggaatgcg

SEQ ID NO: 141444 - DNA, 50 bp, Artificial
  Synthetic oligonucleotide
atgggcctcttagccgtccaaaagcgtgacgagtcgcctcatctcgcgga

SEQ ID NO: 141445 - DNA, 50 bp, Artificial
  Synthetic oligonucleotide
agtcgcgtggtgcggctagatcccgacgtggaaggtaatcaagcccgcat

SEQ ID NO: 141446 - DNA, 50 bp, Artificial
  Synthetic oligonucleotide
ttgaacccacgttccgctgggcgcggttacgataccgtaagatttttctc

SEQ ID NO: 141447 - DNA, 50 bp, Artificial
  Synthetic oligonucleotide
aaatggcctcgcgtatggcagcccgcaaagcaggtcgtattgcgctcata

SEQ ID NO: 141448 - DNA, 50 bp, Artificial
  Synthetic oligonucleotide
agacatgtgacgagcgggacgggcagtcctgagcggacggccagttgata

SEQ ID NO: 141449 - DNA, 50 bp, Artificial
  Synthetic oligonucleotide
cggtttccctggtggcgctatccggcacgcaaaacccccgcactgtctcc

SEQ ID NO: 141450 - DNA, 56 bp, Artificial
  Synthetic oligonucleotide
cagggacaccgtgggttattcccgtctcatgagagtattgccgcccgcgccggttg

SEQ ID NO: 141451 - DNA, 50 bp, Artificial
  Synthetic oligonucleotide
acgtgtcctggcggccggagaagccgtcgaatggtcctctcccctgtcac

SEQ ID NO: 141452 - DNA, 50 bp, Artificial
  Synthetic oligonucleotide
ttgcaacgtgtttccgaacaagattgcacagtatgcctaacctgtttctc

SEQ ID NO: 141453 - DNA, 50 bp, Artificial
  Synthetic oligonucleotide
acgttccttctccgggtggctatttccagggcacgggggcggaaatcctg

SEQ ID NO: 141454 - DNA, 50 bp, Artificial
  Synthetic oligonucleotide
cgtcaggcccacgttcgaaaggtggctcaccgaatgacgtgcggcgaaga

SEQ ID NO: 141455 - DNA, 50 bp, Artificial
  Synthetic oligonucleotide
aaaggcctgaaggtcggacaccccttcgccccacagactcaggttgggcc

SEQ ID NO: 141456 - DNA, 50 bp, Artificial
  Synthetic oligonucleotide
gcccatgaggcggcgtccaaacatcgctagatcggcgcgagtaccgctct

SEQ ID NO: 141457 - DNA, 50 bp, Artificial
  Synthetic oligonucleotide
cgtcccgtggcggtttcgcagcacgaaaggagtgccgatgactgacgaca

SEQ ID NO: 141458 - DNA, 50 bp, Artificial
  Synthetic oligonucleotide
gaggggcgcactcgtatgttaggcgtctcggagctgcaacggtatcgcca

SEQ ID NO: 141459 - DNA, 50 bp, Artificial
  Synthetic oligonucleotide
ttgtcgtgacattgcgttgcgagcactcgtgcccgtactgccaggtctcg

SEQ ID NO: 141460 - DNA, 50 bp, Artificial
  Synthetic oligonucleotide
cctgcgactttgccagcctcgaggttcccaccgcggaggttcagatgcgt

SEQ ID NO: 141461 - DNA, 59 bp, Artificial
  Synthetic oligonucleotide
cagtacctccgctcaccatatgaacgagcccgccagaactaactgttatagttgaaatc

SEQ ID NO: 141462 - DNA, 50 bp, Artificial
  Synthetic oligonucleotide
ccatccctaccagcgtcgctcgggagaggtgacggtgcagctccattggt

SEQ ID NO: 141463 - DNA, 50 bp, Artificial
  Synthetic oligonucleotide
aatcacgacttccagaaccagtatgatcgccaaaccgatccatgggacga

SEQ ID NO: 141464 - DNA, 50 bp, Artificial
  Synthetic oligonucleotide
atcggtgaacgctttgttatctgctgtttgagatatgcctcgcgtgagaa

SEQ ID NO: 141465 - DNA, 50 bp, Artificial
  Synthetic oligonucleotide
gaccagaacggcttcgggacgccacgcaacatcggacccttgcttcgcga

SEQ ID NO: 141466 - DNA, 50 bp, Artificial
  Synthetic oligonucleotide
agggcgaagcctggtgcatccagcggaacggatttccagctgcgatcatc

SEQ ID NO: 141467 - DNA, 50 bp, Artificial
  Synthetic oligonucleotide
gtgtgttcgccatgagttcaacgaaatcatgcacctcatcctgttgagag

SEQ ID NO: 141468 - DNA, 50 bp, Artificial
  Synthetic oligonucleotide
gaatgggcctccatcattcgcagaccgaaggtccgtgacgcccttgtccg

SEQ ID NO: 141469 - DNA, 50 bp, Artificial
  Synthetic oligonucleotide
gacccttcgccgggcccacttggtcgctggtccgttagaccgtttcgcaa

SEQ ID NO: 141470 - DNA, 50 bp, Artificial
  Synthetic oligonucleotide
acacacccgtctacccacgggaagtcgccagacgtgcggtggaaattgga

SEQ ID NO: 141471 - DNA, 50 bp, Artificial
  Synthetic oligonucleotide
aaggtgatgcccggagcctgagatccctcaccctcggcaccatcgtttca

SEQ ID NO: 141472 - DNA, 60 bp, Artificial
  Synthetic oligonucleotide
cagtcagaccggcagaggccatccgcactacaagatcaactgcttgagtggcgtcggtaa

SEQ ID NO: 141473 - DNA, 50 bp, Artificial
  Synthetic oligonucleotide
aggcggcaatcgggcctctcccgccacatccttgcgatcggatgacaaca

SEQ ID NO: 141474 - DNA, 50 bp, Artificial
  Synthetic oligonucleotide
aagggttgccggcacgcaacttcgcttggacggtgttgttagaagtggcg

SEQ ID NO: 141475 - DNA, 50 bp, Artificial
  Synthetic oligonucleotide
ccaagctcggagccgagacgcgcacatccatcttgccggcgctcataatg

SEQ ID NO: 141476 - DNA, 50 bp, Artificial
  Synthetic oligonucleotide
accagaccctcaagcccagcagccaaacgccaccaacgtatcccttccta

SEQ ID NO: 141477 - DNA, 50 bp, Artificial
  Synthetic oligonucleotide
accagccgttacggggaaggatagcagccgggggctaaactaccaccaga

SEQ ID NO: 141478 - DNA, 50 bp, Artificial
  Synthetic oligonucleotide
acacaaggcgaagcgagcgtgaataagccgggcctccacacctgcggcac

SEQ ID NO: 141479 - DNA, 50 bp, Artificial
  Synthetic oligonucleotide
aggggaaactctctcacccatttgccggggcgcgtcataagccgatcacg

SEQ ID NO: 141480 - DNA, 50 bp, Artificial
  Synthetic oligonucleotide
gcagcgaaggttgcacgcttctccttcacaacgcgccacggaggcatggc

SEQ ID NO: 141481 - DNA, 50 bp, Artificial
  Synthetic oligonucleotide
cccgcggtgtaaccgatgctgtactgggtgaaattgtagtacaggccaaa

SEQ ID NO: 141482 - DNA, 50 bp, Artificial
  Synthetic oligonucleotide
tcccgataggcaaaatcccggccatccttgcgacgctgcccgtaaatcag

SEQ ID NO: 141483 - DNA, 58 bp, Artificial
  Synthetic oligonucleotide
cagttcgctaacggacattccgccgtagtgccgttcgacatagggcatggtgccggga

SEQ ID NO: 141484 - DNA, 50 bp, Artificial
  Synthetic oligonucleotide
agggcacggtctgtccgggactggtccgaaggcgggcggtccactttatc

SEQ ID NO: 141485 - DNA, 50 bp, Artificial
  Synthetic oligonucleotide
cccgccaccctagcagggtccgtggcccaagtcagcatttcaacgacttg

SEQ ID NO: 141486 - DNA, 50 bp, Artificial
  Synthetic oligonucleotide
aggcgcgccataactccgtgtctccaccgggcatgttttcggcacccacc

SEQ ID NO: 141487 - DNA, 50 bp, Artificial
  Synthetic oligonucleotide
aggccgcctgtaccctccagatcaattgttccggacagatggccgcctga

SEQ ID NO: 141488 - DNA, 50 bp, Artificial
  Synthetic oligonucleotide
ccccgcccggcctctactcagcacgggcatgaggtctgaaacggtctttc

SEQ ID NO: 141489 - DNA, 50 bp, Artificial
  Synthetic oligonucleotide
gccacctttcccttgactgagcggcccagatggctaggttgcggcctctc

SEQ ID NO: 141490 - DNA, 50 bp, Artificial
  Synthetic oligonucleotide
gaaaacgggcgggaatctggcaggcgtggggtctttccgcgacagcgtgt

SEQ ID NO: 141491 - DNA, 50 bp, Artificial
  Synthetic oligonucleotide
aatctggcgcgtaccatgacggaggcagcgtggcgcaaagcgggaatact

SEQ ID NO: 141492 - DNA, 50 bp, Artificial
  Synthetic oligonucleotide
ccgtcctgacggatgattccacccccgttcatgttcgtgtcgaaggggcg

SEQ ID NO: 141493 - DNA, 50 bp, Artificial
  Synthetic oligonucleotide
agggccgtttcctgtgctgtcggatgcaggtccggaatatggggtgccgt

SEQ ID NO: 141494 - DNA, 55 bp, Artificial
  Synthetic oligonucleotide
gaagaagcgccgttatggcccgaccccgaaagcgtcttcggatcgtcggtggcac

SEQ ID NO: 141495 - DNA, 54 bp, Artificial
  Synthetic oligonucleotide
catacgcccacgccgcgggatatgatccgagggggttttccggtcattcccttc

SEQ ID NO: 141496 - DNA, 50 bp, Artificial
  Synthetic oligonucleotide
aatccgcaggcggcgcgtggagtagctcagcatcataccgagagcgttac

SEQ ID NO: 141497 - DNA, 50 bp, Artificial
  Synthetic oligonucleotide
cccagagcgacatccatccgtcccatgccttcccccggccctgacgatcc

SEQ ID NO: 141498 - DNA, 50 bp, Artificial
  Synthetic oligonucleotide
agatccgtgtgctggtgacagtcccaccatttcccagagacgcggccaag

SEQ ID NO: 141499 - DNA, 50 bp, Artificial
  Synthetic oligonucleotide
agatcccgtgccggataaaagcaggacccccgcgtgtccaccgaatgctc

SEQ ID NO: 141500 - DNA, 50 bp, Artificial
  Synthetic oligonucleotide
acacccgttcaaggggccacgccacggcgaagcatatgtctgccaactac

SEQ ID NO: 141501 - DNA, 50 bp, Artificial
  Synthetic oligonucleotide
acagtcaggcgtcctctccagtggaatgaacggcaccccggttacggagc

SEQ ID NO: 141502 - DNA, 50 bp, Artificial
  Synthetic oligonucleotide
atcgacctccctctccgacctagtccttggcgaccctcgggacgttccag

SEQ ID NO: 141503 - DNA, 50 bp, Artificial
  Synthetic oligonucleotide
agcaaaggcggcggtgggtcagctattggtggagagaccggtatgacgga

SEQ ID NO: 141504 - DNA, 50 bp, Artificial
  Synthetic oligonucleotide
gtcaccttgcaactgagccggcttggccacaccgaagtgtgctcgcagcc

SEQ ID NO: 141505 - DNA, 50 bp, Artificial
  Synthetic oligonucleotide
accgtcaccgctatgcacgggaggggcgcactcgtatgttaggcgtctcg

SEQ ID NO: 141506 - DNA, 57 bp, Artificial
  Synthetic oligonucleotide
catcacaacttttatcgatgcacataacaaaaacccacggtcgtatcggtgggtcaa

SEQ ID NO: 141507 - DNA, 50 bp, Artificial
  Synthetic oligonucleotide
aagcctccatccgcgcattactgatgggggtgccgcaatccatccgtgtg

SEQ ID NO: 141508 - DNA, 50 bp, Artificial
  Synthetic oligonucleotide
aagccgtcgaatggtcctctcccctgtcaccggaaacactccgcccttta

SEQ ID NO: 141509 - DNA, 50 bp, Artificial
  Synthetic oligonucleotide
aagccgcggatagagggcggtgggctgcggtgaggcaccacgtatcggtt

SEQ ID NO: 141510 - DNA, 50 bp, Artificial
  Synthetic oligonucleotide
accgtcaggcgggttggggtacctggctctggcgatctgcggtaagcttt

SEQ ID NO: 141511 - DNA, 50 bp, Artificial
  Synthetic oligonucleotide
aggcactgtcgtcgggattggggcatcgacagggggcgtggaagccttaa

SEQ ID NO: 141512 - DNA, 50 bp, Artificial
  Synthetic oligonucleotide
gcgtcagcctgtaacggctctgttcccatccaggggctccacgtccatcg

SEQ ID NO: 141513 - DNA, 50 bp, Artificial
  Synthetic oligonucleotide
aactgtcctctggtgcgatccgtaatcaccagcctgatgtcatgatccgt

SEQ ID NO: 141514 - DNA, 50 bp, Artificial
  Synthetic oligonucleotide
acaagcagtggccgcagacaggcagcgattgggaatatcgcctgcatccc

SEQ ID NO: 141515 - DNA, 50 bp, Artificial
  Synthetic oligonucleotide
ctgccgaacgtccacagtaagcgcgttcccattgcgaagtaagcggcggg

SEQ ID NO: 141516 - DNA, 50 bp, Artificial
  Synthetic oligonucleotide
gacggctttcgagcagtcgcccacttggtctcggctggatttcgcgaggg

SEQ ID NO: 141517 - DNA, 60 bp, Artificial
  Synthetic oligonucleotide
cgccttcactcatgccttatctcagccacaggtgtcggggtatagcgtggctacgatggg

SEQ ID NO: 141518 - DNA, 50 bp, Artificial
  Synthetic oligonucleotide
caggcttggcgcgaaccgatccaatccgcatgggtcactaggccagcgat

SEQ ID NO: 141519 - DNA, 50 bp, Artificial
  Synthetic oligonucleotide
aacggtggtgcggaccaattctccggtcagcgcgcgagattgctatagct

SEQ ID NO: 141520 - DNA, 50 bp, Artificial
  Synthetic oligonucleotide
gcaagcccaaccgcaggggcaaggacgaatggtatctggtgcccgtttat

SEQ ID NO: 141521 - DNA, 50 bp, Artificial
  Synthetic oligonucleotide
accttcacgccacagagccccctttgcacgcatcgaagtgcagacaccac

SEQ ID NO: 141522 - DNA, 50 bp, Artificial
  Synthetic oligonucleotide
ctgcatcggagtacggttgagcccgtacatatccgcaaacttagcctcta

SEQ ID NO: 141523 - DNA, 50 bp, Artificial
  Synthetic oligonucleotide
aggctgatccgtctgcgttgccgactgacgctctcgtgccgtcacgctga

SEQ ID NO: 141524 - DNA, 50 bp, Artificial
  Synthetic oligonucleotide
aacgctgtcgtaggaggacgcagcgcacagggtacaatcgggcgcatgaa

SEQ ID NO: 141525 - DNA, 50 bp, Artificial
  Synthetic oligonucleotide
acgaacgcccccggagcgtgaggggtggaaggaaggcggataatggatga

SEQ ID NO: 141526 - DNA, 50 bp, Artificial
  Synthetic oligonucleotide
ggtgagaagcgcggactcggtcatatccatgacacgctactagcgcggcc

SEQ ID NO: 141527 - DNA, 50 bp, Artificial
  Synthetic oligonucleotide
gacctggcattgcaaacgcggagcccggaaccgtagcgaccaaagcctca

SEQ ID NO: 141528 - DNA, 57 bp, Artificial
  Synthetic oligonucleotide
cgcgcaccgtataaacgaccataaacgggatcccctcgatcaagcctgcggctctaa

SEQ ID NO: 141529 - DNA, 50 bp, Artificial
  Synthetic oligonucleotide
atcgaaaagatttctgctaaccatccaaccaccatcgcaaggcaggccac

SEQ ID NO: 141530 - DNA, 50 bp, Artificial
  Synthetic oligonucleotide
aggtactccgcgaacaattgccgaaagttggccgatgaccgggccacgaa

SEQ ID NO: 141531 - DNA, 50 bp, Artificial
  Synthetic oligonucleotide
acccccacccgcctgcaacctgtgctgaacagtctgggaggacgctactg

SEQ ID NO: 141532 - DNA, 50 bp, Artificial
  Synthetic oligonucleotide
aagggcggcgcaggttgttgccagccggtagcgactatgaggtcgatgac

SEQ ID NO: 141533 - DNA, 50 bp, Artificial
  Synthetic oligonucleotide
agggaagaggacggacctttcaggccgatggagtggccacggtccagaat

SEQ ID NO: 141534 - DNA, 50 bp, Artificial
  Synthetic oligonucleotide
cgagggtggcgtttgttgcggacccccgcatttgcctgtcagggacgggg

SEQ ID NO: 141535 - DNA, 50 bp, Artificial
  Synthetic oligonucleotide
aaggcgggtcgctgaactgaggctgcggcttgggtttcccggtcggcacg

SEQ ID NO: 141536 - DNA, 50 bp, Artificial
  Synthetic oligonucleotide
agatcctgccagtccattacggctgacggtgtcgggctcccgaaaggggg

SEQ ID NO: 141537 - DNA, 50 bp, Artificial
  Synthetic oligonucleotide
atccgtcatgcgtgtttccccgatggaagcggctgaatttcagactgcga

SEQ ID NO: 141538 - DNA, 50 bp, Artificial
  Synthetic oligonucleotide
accgacaaatcgcgttctcgcccgttgcgcggtgtgagaatcagacaggg

SEQ ID NO: 141539 - DNA, 60 bp, Artificial
  Synthetic oligonucleotide
cgctaaacagacacgcctacggcgtgaaatcataatctgacgatgcgtttacgcatcgcc

SEQ ID NO: 141540 - DNA, 50 bp, Artificial
  Synthetic oligonucleotide
catgcgcacaactatcccgcgcaggtggatggaaggcaatcagtctgcgc

SEQ ID NO: 141541 - DNA, 50 bp, Artificial
  Synthetic oligonucleotide
accgcgtcatggatggcctccctacactgtttcgccccgccgtgaaaagt

SEQ ID NO: 141542 - DNA, 50 bp, Artificial
  Synthetic oligonucleotide
cttagcaggctgtcgggttggggtacctggctctggcgatctgcggtaag

SEQ ID NO: 141543 - DNA, 50 bp, Artificial
  Synthetic oligonucleotide
gcggcctgtcgaattgcccctgtcgacagcctgcacatgagcttgtgtct

SEQ ID NO: 141544 - DNA, 50 bp, Artificial
  Synthetic oligonucleotide
atgcacgggaggggcgcactcgtatgttaggcgtctcggagctgcaacgg

SEQ ID NO: 141545 - DNA, 50 bp, Artificial
  Synthetic oligonucleotide
aagcgcgtaacgctgtcgtaggaggacgcagcgcacagggtacaatcggg

SEQ ID NO: 141546 - DNA, 50 bp, Artificial
  Synthetic oligonucleotide
aggtgccgggcactgtaccgctcatttgacatctccgtagacgcaacgga

SEQ ID NO: 141547 - DNA, 59 bp, Artificial
  Synthetic oligonucleotide
cgctcccggttctatgaaatcatgggactggttgagcgcggaacggacgcagaccacta

SEQ ID NO: 141548 - DNA, 59 bp, Artificial
  Synthetic oligonucleotide
cgctctgagcaggtctgctcctcaccccgaaatccgttcagtctatggaaaagctcgtt

SEQ ID NO: 141549 - DNA, 59 bp, Artificial
  Synthetic oligonucleotide
cgctggcgggtatcactccccgttcaaccagtaaggttcccatgcgcttatgctcgatc

SEQ ID NO: 141550 - DNA, 57 bp, Artificial
  Synthetic oligonucleotide
cggacttctagccatccgccatctttgagcacttgtaaggccgttcttaccgtgcgg

SEQ ID NO: 141551 - DNA, 60 bp, Artificial
  Synthetic oligonucleotide
cggatgactgttcgagctgaacaacccgcacgtgctgctatggcttcatggctgggaaag

SEQ ID NO: 141552 - DNA, 60 bp, Artificial
  Synthetic oligonucleotide
gaagaggcgtagacgctgtgctgggcgctgctatcgtacatttaggcgaaagccgcattg

SEQ ID NO: 141553 - DNA, 57 bp, Artificial
  Synthetic oligonucleotide
cggccaaagaccgcaagaaatcagtcaaattatgtctgaactggtggcttttcgggc

SEQ ID NO: 141554 - DNA, 56 bp, Artificial
  Synthetic oligonucleotide
cggctggactggcaaccaacacactaaaccgcctcaaaaatccccacagatgcccg

SEQ ID NO: 141555 - DNA, 53 bp, Artificial
  Synthetic oligonucleotide
cgggagcggcgtagcccgccggtaggcgtccagacgggccgaattgtggagtt

SEQ ID NO: 141556 - DNA, 60 bp, Artificial
  Synthetic oligonucleotide
cggtcagaatagcaacggcaccgactagagtaggccacatgcagcaaaacagcgcggccc

SEQ ID NO: 141557 - DNA, 60 bp, Artificial
  Synthetic oligonucleotide
cggtctatcacgtatagctaaccgaatatcgatccaatatcggcatccactcaatggaca

SEQ ID NO: 141558 - DNA, 57 bp, Artificial
  Synthetic oligonucleotide
cggttccgtgacagtaaaacagtgcccttcatacaccattgcaccgttggtgcggac

SEQ ID NO: 141559 - DNA, 52 bp, Artificial
  Synthetic oligonucleotide
cgtaaggacggtgcaatcaccacccccctaaaaccggtatgattcccgataa

SEQ ID NO: 141560 - DNA, 52 bp, Artificial
  Synthetic oligonucleotide
cgtagaatcggtcacaaactgacccccttaaaatgccgttttgtcgttatat

SEQ ID NO: 141561 - DNA, 57 bp, Artificial
  Synthetic oligonucleotide
cgtagccgcttcgcggttacgtaacttcacctgtcctgcccacgattaagatgatat

SEQ ID NO: 141562 - DNA, 57 bp, Artificial
  Synthetic oligonucleotide
cgtctggacttcgagccgctgttactgcgtcgaacgtgacgagtgtttcttttcgcg

SEQ ID NO: 141563 - DNA, 60 bp, Artificial
  Synthetic oligonucleotide
gaagttccagagagaggcagcagaaactcttttactttcgcttctccaccagcctgcctg

SEQ ID NO: 141564 - DNA, 57 bp, Artificial
  Synthetic oligonucleotide
cgtgagcctgaatcgggagtttggcgatcccaattttagcggtgcgatccatccgtt

SEQ ID NO: 141565 - DNA, 60 bp, Artificial
  Synthetic oligonucleotide
cgtgatgtcgccacttatcgtatgatcatcatacggatagttggccgcataggttgcctg

SEQ ID NO: 141566 - DNA, 53 bp, Artificial
  Synthetic oligonucleotide
ctaccaattcatcaccctttttagggtcatctaaaaaacgaactcgccggaca

SEQ ID NO: 141567 - DNA, 60 bp, Artificial
  Synthetic oligonucleotide
ctacccgtctctcacatcctcagatggtccgtctttcgacgaacgcatcaggccagtgct

SEQ ID NO: 141568 - DNA, 55 bp, Artificial
  Synthetic oligonucleotide
cctacacactccctccccctgagcagtcccaaccccgcccgcaagacgatgccgg

SEQ ID NO: 141569 - DNA, 52 bp, Artificial
  Synthetic oligonucleotide
cctaccggggtggtttgggcgccccagacggggggggcgagctgaggacaga

SEQ ID NO: 141570 - DNA, 60 bp, Artificial
  Synthetic oligonucleotide
cctctccgctagcaagcgttccggttcaggccgagtctggtcctgcgacatctcaagtgc

SEQ ID NO: 141571 - DNA, 53 bp, Artificial
  Synthetic oligonucleotide
ccttatggggggggggtagcccaccagctatgggctacccctagcccaccagc

SEQ ID NO: 141572 - DNA, 57 bp, Artificial
  Synthetic oligonucleotide
ccttctcccgtaacgggacagcctatgccgcaggatgggccgcgtgaattgacggat

SEQ ID NO: 141573 - DNA, 59 bp, Artificial
  Synthetic oligonucleotide
ccttgcggttttggacatagtcgtgcagcgcaacgcttatggacgacagaacgaatccc

SEQ ID NO: 141574 - DNA, 60 bp, Artificial
  Synthetic oligonucleotide
gaattcagacgatcattcagcagatcacatgttacggcatgcccgtcagacgctacagga

SEQ ID NO: 141575 - DNA, 60 bp, Artificial
  Synthetic oligonucleotide
cgaattggactggccgcccgtgtccgagcacgcaagaaaacattcgaggtgctggcagcc

SEQ ID NO: 141576 - DNA, 51 bp, Artificial
  Synthetic oligonucleotide
cgaccccagaaaatctacggaaagtagacggtaagtctacggtatacctta

SEQ ID NO: 141577 - DNA, 56 bp, Artificial
  Synthetic oligonucleotide
cgacctagtgcagaccctcacaggccggggcgtttgcgtccggttcatgaaagagg

SEQ ID NO: 141578 - DNA, 55 bp, Artificial
  Synthetic oligonucleotide
cgacgaccgaaaccgggtcggttggtgcgagaatggccccaaggacaatgcacca

SEQ ID NO: 141579 - DNA, 57 bp, Artificial
  Synthetic oligonucleotide
cgactatattagtcgcataagggcaattcaagcgtattttttcaaggtgtgccgcgt

SEQ ID NO: 141580 - DNA, 60 bp, Artificial
  Synthetic oligonucleotide
cgaggaagctgagctagtcgaccgtcattcgtgccacatcgaacaatctctcggctcgac

SEQ ID NO: 141581 - DNA, 57 bp, Artificial
  Synthetic oligonucleotide
cgatatgagcgacgaacctgaaaacatcaccgccgttcttctccgggaaatccgtga

SEQ ID NO: 141582 - DNA, 60 bp, Artificial
  Synthetic oligonucleotide
cgatcagggacggcgcagaccacgctagtgcgcacaggcctgatgtcagcgtgaaagcac

SEQ ID NO: 141583 - DNA, 60 bp, Artificial
  Synthetic oligonucleotide
cgatgaaggatgttacaaacagaccggtatcatcacgatagatctcgccgcggtaattta

SEQ ID NO: 141584 - DNA, 60 bp, Artificial
  Synthetic oligonucleotide
cgatgaaggtacgccgtgcaaccgataatcttcgatatgcagccgtgcgcgataatagga

SEQ ID NO: 141585 - DNA, 58 bp, Artificial
  Synthetic oligonucleotide
gacaaaacggcctcctaaaatgaaggatggccgcctcttgtcttgcatcggctcgaaa

SEQ ID NO: 141586 - DNA, 60 bp, Artificial
  Synthetic oligonucleotide
cgatgggagagatgagatcgtttgggctattaggaccgcttagctgagcctgttaccagg

SEQ ID NO: 141587 - DNA, 58 bp, Artificial
  Synthetic oligonucleotide
cgattcgcttctataaggtcagagacctcgggccggataagtagaggcgccaacagtc

SEQ ID NO: 141588 - DNA, 58 bp, Artificial
  Synthetic oligonucleotide
cgcagacaatgaacaacccgataaggatgaaattggcttacagccgtctctacacccc

SEQ ID NO: 141589 - DNA, 52 bp, Artificial
  Synthetic oligonucleotide
cgccatttttgctcgtcttttgcctctgggggggtaaaccgatttcctctgt

SEQ ID NO: 141590 - DNA, 54 bp, Artificial
  Synthetic oligonucleotide
cgccccctctctatgatcttaggactggggctccccctcatttttgtcgtcccg

SEQ ID NO: 141591 - DNA, 60 bp, Artificial
  Synthetic oligonucleotide
tctaaagtctactattcgtctatagtcagtttaccgtctacactcagtagaccatctgtc

SEQ ID NO: 141592 - DNA, 59 bp, Artificial
  Synthetic oligonucleotide
tctacgcttaaccctggagatagcgttctggtgcagccgtatatcgacggacaggaaac

SEQ ID NO: 141593 - DNA, 59 bp, Artificial
  Synthetic oligonucleotide
tctcaatcccatagaaattggccagaggaatgaccgatttccgttccgcccgctctatc

SEQ ID NO: 141594 - DNA, 60 bp, Artificial
  Synthetic oligonucleotide
tctcggatgccgaacaaccagaccattctgagcttggcgcacaaccatccctagagtcgt

SEQ ID NO: 141595 - DNA, 60 bp, Artificial
  Synthetic oligonucleotide
tcttctaggaagcggagagctagtgcatgagccggaaggggtctctactgtcgttgcggg

SEQ ID NO: 141596 - DNA, 60 bp, Artificial
  Synthetic oligonucleotide
gacaagagccggaagccatcatacggccctctgacggccttatagcggatgatcgcaaga

SEQ ID NO: 141597 - DNA, 60 bp, Artificial
  Synthetic oligonucleotide
tcttggcactcgtctgcgggtgcgtctccgaatactcgtgcatttcgttccagagataag

SEQ ID NO: 141598 - DNA, 57 bp, Artificial
  Synthetic oligonucleotide
tgaaagtcggcgtcggaacacttcccagcgcctcgaaatacctgtgtcgtataagaa

SEQ ID NO: 141599 - DNA, 57 bp, Artificial
  Synthetic oligonucleotide
tgaacaccctgaagagagctttaggggttttgagggatggcaactggatcgaagttc

SEQ ID NO: 141600 - DNA, 59 bp, Artificial
  Synthetic oligonucleotide
tgaatcttccgagttcatcgttcgttcccccttagcgttgtctggcgcataaccgatgc

SEQ ID NO: 141601 - DNA, 55 bp, Artificial
  Synthetic oligonucleotide
tgacaaaaaacgtccaaacccgtcccatcagctatgggactaccccgtcccatca

SEQ ID NO: 141602 - DNA, 60 bp, Artificial
  Synthetic oligonucleotide
tgaccggcgcatcaatcatgtttttgcaccatgccgcgaaaggtgcgtcgttgaacggat

SEQ ID NO: 141603 - DNA, 60 bp, Artificial
  Synthetic oligonucleotide
tgagttctccaggaagctcgaattattcatatctggagttctcgctccaaggccccgctg

SEQ ID NO: 141604 - DNA, 60 bp, Artificial
  Synthetic oligonucleotide
tgattcgtgccaacacgccgctctatcatactgtctcaaaaatccccgataatgactatg

SEQ ID NO: 141605 - DNA, 60 bp, Artificial
  Synthetic oligonucleotide
tgcacgttctgaggatgccggcgtcagtaggtggcataggtcaaatgcacatccctgcga

SEQ ID NO: 141606 - DNA, 56 bp, Artificial
  Synthetic oligonucleotide
tgcccgtagagtgtccagaagtctgaagtgagagggaaaccgcccttttccgtctc

SEQ ID NO: 141607 - DNA, 60 bp, Artificial
  Synthetic oligonucleotide
gaccatctccgtttatccatctatagacccatatccatatcgggatttagtctatagatg

SEQ ID NO: 141608 - DNA, 58 bp, Artificial
  Synthetic oligonucleotide
tgcccttgcttccgtagagaattctctcgatgtcggggactctggtgacaatacgttt

SEQ ID NO: 141609 - DNA, 60 bp, Artificial
  Synthetic oligonucleotide
tgccgcagccagagcgcgcggaccaaagggagggcgaaaattcgccctgaccaaagcaca

SEQ ID NO: 141610 - DNA, 60 bp, Artificial
  Synthetic oligonucleotide
tgcgcagttgaaatgcgggcgggaaccctcatgccaacttaccgtgcagctgccgtgcac

SEQ ID NO: 141611 - DNA, 60 bp, Artificial
  Synthetic oligonucleotide
tgcgcgttctaacgaccaatccaagctcataggcccgttcaagagcacgaataactgtgc

SEQ ID NO: 141612 - DNA, 58 bp, Artificial
  Synthetic oligonucleotide
tgctgggtcaagagcttccagtgttcccccgaaagaaaacagagcacgataggcttcc

SEQ ID NO: 141613 - DNA, 60 bp, Artificial
  Synthetic oligonucleotide
tgcttagtgtgatcgatgcgcagttgaaatgcgggcgggaaccctcatgccaacttaccg

SEQ ID NO: 141614 - DNA, 57 bp, Artificial
  Synthetic oligonucleotide
tggaactcctactacaagtcgccaggtctcaaaaccatgcgcgcgtaacctgggtag

SEQ ID NO: 141615 - DNA, 60 bp, Artificial
  Synthetic oligonucleotide
tcaaacgcgatctgaggtccggctatgcatctctatatgcgctgctagcgcacacaagac

SEQ ID NO: 141616 - DNA, 60 bp, Artificial
  Synthetic oligonucleotide
tcaaaggagtgcagcaacaacacagggcggccctgccctctcctgagcaggattgatgga

SEQ ID NO: 141617 - DNA, 60 bp, Artificial
  Synthetic oligonucleotide
tcaacgtggttgtcttcgcaccatgtcatcagactgtcccgggcgaaaccgctgtcccca

SEQ ID NO: 141618 - DNA, 58 bp, Artificial
  Synthetic oligonucleotide
cttggctgatctcttcctgttcgtcggaacgagccaaaacttcggctgagaacctagc

SEQ ID NO: 141619 - DNA, 56 bp, Artificial
  Synthetic oligonucleotide
gaccgagagggtttgcctgaaatggttcaggacgtcctagaggaagcacggtccta

SEQ ID NO: 141620 - DNA, 60 bp, Artificial
  Synthetic oligonucleotide
tcaagagcacgaataactgtgcgttctgaccgattacacgctttcgctatggtttcgtga

SEQ ID NO: 141621 - DNA, 59 bp, Artificial
  Synthetic oligonucleotide
tcagccctgatccgtgccaccagacctaacgtagcttctcaccggtaggcaagccctcc

SEQ ID NO: 141622 - DNA, 58 bp, Artificial
  Synthetic oligonucleotide
tcaggtaagccccgaatgaccgcctcatatcaagtcgcgttgggtcgatttgaaacga

SEQ ID NO: 141623 - DNA, 60 bp, Artificial
  Synthetic oligonucleotide
tcagtggacggtcatgtatccttgaggcaatgcatgtacaggctcaacgggatatctccg

SEQ ID NO: 141624 - DNA, 60 bp, Artificial
  Synthetic oligonucleotide
tccagctaatatcgacccaaacctggccagcggcgtagacgaattactctcgcagcaagc

SEQ ID NO: 141625 - DNA, 57 bp, Artificial
  Synthetic oligonucleotide
tcccgcaacctttctcgattcgccagcaaaaacttacgataatggtatactattcta

SEQ ID NO: 141626 - DNA, 60 bp, Artificial
  Synthetic oligonucleotide
tccgccataatcacggcagatacgatgcaaaaacacaacatgtccgctgcatatctgcgc

SEQ ID NO: 141627 - DNA, 56 bp, Artificial
  Synthetic oligonucleotide
tccgttcgagatcacctcccggccgacagaagagggaaaaatcgacggcaagatta

SEQ ID NO: 141628 - DNA, 58 bp, Artificial
  Synthetic oligonucleotide
tcgaaacagccataccgttctggcatcaggtacacggtccgacagccccagacctaaa

SEQ ID NO: 141629 - DNA, 60 bp, Artificial
  Synthetic oligonucleotide
tcgacattgccgcattcgcttcgatgtcttgcccgaggttgcgtccaattttagcgtttc

SEQ ID NO: 141630 - DNA, 59 bp, Artificial
  Synthetic oligonucleotide
gacggcgtagggttctctttgaccttcaccgttcagacatgccctgagactgctaagga

SEQ ID NO: 141631 - DNA, 60 bp, Artificial
  Synthetic oligonucleotide
tcgatacgggtgattcatatatgatcacatctgatccatacaaatcaaccctgctcacct

SEQ ID NO: 141632 - DNA, 55 bp, Artificial
  Synthetic oligonucleotide
tcgccggggcaaggttcgtcgcggcgaatggttacgcctctccgccctgggcaaa

SEQ ID NO: 141633 - DNA, 59 bp, Artificial
  Synthetic oligonucleotide
tcggctgtcaaagtagtggttgtcgccttatgtttggtgagccttccggctttcgcagc

SEQ ID NO: 141634 - DNA, 60 bp, Artificial
  Synthetic oligonucleotide
tcggcttgctagacggacgcttacacaggaggtctatatatgagcgatatgccgactaat

SEQ ID NO: 141635 - DNA, 60 bp, Artificial
  Synthetic oligonucleotide
tcgggaacagcgtgcagaacaccaaagcggggcttatgtgccgccatcgcgggccaataa

SEQ ID NO: 141636 - DNA, 56 bp, Artificial
  Synthetic oligonucleotide
tcggggaaagctcgcggtagtcttctgtggcgcgctttacaaaagcgttgaccacc

SEQ ID NO: 141637 - DNA, 58 bp, Artificial
  Synthetic oligonucleotide
tcgttatattacaacggcttatgagaaaccctcaaaaatccatccagacttatccaga

SEQ ID NO: 141638 - DNA, 60 bp, Artificial
  Synthetic oligonucleotide
tcgttgctcatgagtttagctccttcactagatcccgatatcgctttgtcgctaattcta

SEQ ID NO: 141639 - DNA, 60 bp, Artificial
  Synthetic oligonucleotide
ttctactctcaggcagaacgagtccgaatagacggaacgcctgctccagaatccgtatta

SEQ ID NO: 141640 - DNA, 60 bp, Artificial
  Synthetic oligonucleotide
ttctgtctcatcgggaaggtctgtcagaagtacatctgctcccttgaagtcactaacctg

SEQ ID NO: 141641 - DNA, 58 bp, Artificial
  Synthetic oligonucleotide
gacgtgcatgtcggtgaggcggcttgtggaggaattttcggccctgacagacccccca

SEQ ID NO: 141642 - DNA, 54 bp, Artificial
  Synthetic oligonucleotide
ttcttcccgctaaagtgcacatccgtgccaaggcatttccgtttcccggtaaag

SEQ ID NO: 141643 - DNA, 60 bp, Artificial
  Synthetic oligonucleotide
ttctttgctccggagatgcattgagaaggcgcggaaaccaggccagaggcacggcaatcg

SEQ ID NO: 141644 - DNA, 60 bp, Artificial
  Synthetic oligonucleotide
ttgaacggatcgggtgatgtccagcaagcctcacgcggatctagcgttttggtcgataac

SEQ ID NO: 141645 - DNA, 60 bp, Artificial
  Synthetic oligonucleotide
ttgacggcacggaatcgagtgtgattcggggagtctccttgagattgggagacgtgcatg

SEQ ID NO: 141646 - DNA, 60 bp, Artificial
  Synthetic oligonucleotide
ttgcgtgacggtgggtttaccgagcgtcgcttgcatgtaggcattatttgcgatgaagga

SEQ ID NO: 141647 - DNA, 59 bp, Artificial
  Synthetic oligonucleotide
ttggcagagaaccttgagatcatccctttgatgggtcggcccgtgaacctgttgcttcc

SEQ ID NO: 141648 - DNA, 53 bp, Artificial
  Synthetic oligonucleotide
ttgggaagaaaacgtctgagacaaagccgggccctttctaaattatgggcgag

SEQ ID NO: 141649 - DNA, 52 bp, Artificial
  Synthetic oligonucleotide
ttgggatatggataccggcggaaggtttttgcaaaaaatcgcagaaaaccgg

SEQ ID NO: 141650 - DNA, 60 bp, Artificial
  Synthetic oligonucleotide
ttgggatgcgacgagagcattattgcggcccatttgggaggtcataagcatcataacggc

SEQ ID NO: 141651 - DNA, 53 bp, Artificial
  Synthetic oligonucleotide
ttggggtttaaagacgaaccaggatagagcccgccggtcgaaagggcactgac

SEQ ID NO: 141652 - DNA, 56 bp, Artificial
  Synthetic oligonucleotide
ctacctgaacggcaacattgagcgggttggggttaatgatggggggcatgtggttg

SEQ ID NO: 141653 - DNA, 58 bp, Artificial
  Synthetic oligonucleotide
ttgttgaacccgttcgatgcccgctcggtggcatggtcaccattcgcggagataaaaa

SEQ ID NO: 141654 - DNA, 55 bp, Artificial
  Synthetic oligonucleotide
tttagcgttggaagcgtgcacttttccggagagtgatagcctaaaaacgggactc

SEQ ID NO: 141655 - DNA, 58 bp, Artificial
  Synthetic oligonucleotide
tttcctatgccggaggtaatgaaagaatagaagcatcgttgcttcgtctaatggggac

SEQ ID NO: 141656 - DNA, 60 bp, Artificial
  Synthetic oligonucleotide
tttcttcttcccggttctgccttccgatcaggtctggagcgagcgcagagcgggagcggc

SEQ ID NO: 141657 - DNA, 60 bp, Artificial
  Synthetic oligonucleotide
tttgcgcattcatctcgaacaaattgagcggacgatacgctcgcattttctcgctttttc

SEQ ID NO: 141658 - DNA, 60 bp, Artificial
  Synthetic oligonucleotide
tttgtaggacgccgcgccattgtgggttgcttggcgcgttctgcagcttggttggcctgc

SEQ ID NO: 141659 - DNA, 56 bp, Artificial
  Synthetic oligonucleotide
tttttccgctggatacggcccgctgtagggtggctctggatatcccccaggcttgg

SEQ ID NO: 141660 - DNA, 56 bp, Artificial
  Synthetic oligonucleotide
tttttcgtgagctgctcgttctgtttgaacccacgttccgctgggcgcggttacga

SEQ ID NO: 141661 - DNA, 56 bp, Artificial
  Synthetic oligonucleotide
tttttgcacacgctcaacgctaaatccttcggatacatcgagacggtttaactcgt

SEQ ID NO: 141662 - DNA, 59 bp, Artificial
  Synthetic oligonucleotide
tggacaatcaaatactattgaacatggttttaatctcgggattctggacggttcaatca

SEQ ID NO: 141663 - DNA, 55 bp, Artificial
  Synthetic oligonucleotide
ctatgggcgtagtcacctgtggcgaggggatgggccgggttgtggtaagcccggc

SEQ ID NO: 141664 - DNA, 60 bp, Artificial
  Synthetic oligonucleotide
tggccggtacactgttgctcatcgggtagggaaatggtcgattctcagcgaggcgattat

SEQ ID NO: 141665 - DNA, 57 bp, Artificial
  Synthetic oligonucleotide
tgggaatagtggaacggacccgccagcgtcagagggtatcagggcgcgtctgtaacg

SEQ ID NO: 141666 - DNA, 60 bp, Artificial
  Synthetic oligonucleotide
tgggatactgccggttattccatcacgcaaaggccgcaacgctccacagaaaacagactg

SEQ ID NO: 141667 - DNA, 58 bp, Artificial
  Synthetic oligonucleotide
tgggtagatccggctctagtccatcgagactaggttgggatggagggggttcaccatc

SEQ ID NO: 141668 - DNA, 60 bp, Artificial
  Synthetic oligonucleotide
tggtccgatccatgattaccgacaggtgtggccggtcgctatccaagcggttgaatgcga

SEQ ID NO: 141669 - DNA, 55 bp, Artificial
  Synthetic oligonucleotide
tggtcgcttggttaagttttaggagaacgatcatgggtaaaaacccagacgatca

SEQ ID NO: 141670 - DNA, 60 bp, Artificial
  Synthetic oligonucleotide
tgtcccagacaacaatgtaacattgaatacataattaatgcttgtattggccggcaatac

SEQ ID NO: 141671 - DNA, 60 bp, Artificial
  Synthetic oligonucleotide
tgtcgagcgcctgagccccccactcgcgcacctgctgccaaaccccctgccgctccctat

SEQ ID NO: 141672 - DNA, 56 bp, Artificial
  Synthetic oligonucleotide
tgtcgttccccttactcggcctctggcctaaaggtccatctctggcccgtctcggc

SEQ ID NO: 141673 - DNA, 58 bp, Artificial
  Synthetic oligonucleotide
tgtgccgggaatagatattctccgcgataccacgatcgccgggggaccactcgcctaa

SEQ ID NO: 141674 - DNA, 60 bp, Artificial
  Synthetic oligonucleotide
ctcaacatgtcataggtaccgagcggagaggtcagacccgtcactgtggcctcgaccgtc

SEQ ID NO: 141675 - DNA, 58 bp, Artificial
  Synthetic oligonucleotide
ttacgaactagagcggagatcaagcccccgaaaaaacccgcacgcatcatcagaacag

SEQ ID NO: 141676 - DNA, 51 bp, Artificial
  Synthetic oligonucleotide
ttatacccgaacggttgttccttagggaaggccggaatgaataaagctccc

SEQ ID NO: 141677 - DNA, 60 bp, Artificial
  Synthetic oligonucleotide
ttatcctcatgaggccgccggagcgaaatccggaacaatgggggagcccatcatggcgca

SEQ ID NO: 141678 - DNA, 57 bp, Artificial
  Synthetic oligonucleotide
ttatcgcaagagcaaaccgaagcctcgcgccgggcggtaacgtcaacgacagaagcc

SEQ ID NO: 141679 - DNA, 55 bp, Artificial
  Synthetic oligonucleotide
ttatggcgtgtttttgccgccattaacccggaacgcgggctattgatcacgaaac

SEQ ID NO: 141680 - DNA, 58 bp, Artificial
  Synthetic oligonucleotide
ttcacggtgccgcgtgggagtgtcgcagaacgagatatgcatccgggttaccccgtcc

SEQ ID NO: 141681 - DNA, 58 bp, Artificial
  Synthetic oligonucleotide
ttccctggtctcggcaatcgtcgctcccttaggggcgaaccggacatagagcgcatcc

SEQ ID NO: 141682 - DNA, 56 bp, Artificial
  Synthetic oligonucleotide
ttccttaactgcctcaacgaaagcctcagtatccgagttgtccggtatgggtgtgg

SEQ ID NO: 141683 - DNA, 59 bp, Artificial
  Synthetic oligonucleotide
ttcggtctctgccatctgctgggttacaggtttgcccccaggatcaaggatctccggga

SEQ ID NO: 141684 - DNA, 60 bp, Artificial
  Synthetic oligonucleotide
ttcgttgccacctgtccagcctgctcctgtcctcgcaccaggtgcaaccggaattgcccc

SEQ ID NO: 141685 - DNA, 55 bp, Artificial
  Synthetic oligonucleotide
ctcagcccaaccctctcgcagacccaacagcgggcttttgtccttcacgaacccc

SEQ ID NO: 141686 - DNA, 54 bp, Artificial
  Synthetic oligonucleotide
ggcgtataaatgggttcagtctggtaaagtaaagtctgaaaccatacttggaaa

SEQ ID NO: 141687 - DNA, 58 bp, Artificial
  Synthetic oligonucleotide
ggctgtagcggataccatcgcggtttccggaccaagccactcggtcattaacgatgta

SEQ ID NO: 141688 - DNA, 53 bp, Artificial
  Synthetic oligonucleotide
gggaacccttggccgcacctcaaacgggagtttgtataagtgcgcttccggga

SEQ ID NO: 141689 - DNA, 60 bp, Artificial
  Synthetic oligonucleotide
gggaagtgcagagagaaatagcttgacggatagttgcgtaccacgcaactatagttgcgt

SEQ ID NO: 141690 - DNA, 58 bp, Artificial
  Synthetic oligonucleotide
gggatttcctaaacgcagaccagtgagcaggttgcggctcccgccataggacggtgaa

SEQ ID NO: 141691 - DNA, 58 bp, Artificial
  Synthetic oligonucleotide
gggcactcaagggcgtcaataatggtcaacttcggcagtcatcgaccggaaccctcaa

SEQ ID NO: 141692 - DNA, 58 bp, Artificial
  Synthetic oligonucleotide
gggcctatttcgggctttcgccaagttgcaaaccgagatcagccctgatccgtgccac

SEQ ID NO: 141693 - DNA, 51 bp, Artificial
  Synthetic oligonucleotide
gggcgccccccaccaatgggcttgcgcgccccttggaaccccgactagttt

SEQ ID NO: 141694 - DNA, 57 bp, Artificial
  Synthetic oligonucleotide
gggcttggtagttggtcacaatgagcccgctgggatcagcaaggcgggcggaaaccg

SEQ ID NO: 141695 - DNA, 57 bp, Artificial
  Synthetic oligonucleotide
ggggagcagacgggagaggtctgtccacctaaccgcaacggcattgcggttaggtca

SEQ ID NO: 141696 - DNA, 60 bp, Artificial
  Synthetic oligonucleotide
ctcctggctctcctctctggctgaagcaggccgtaaggcgtctgggattaccagagcacg

SEQ ID NO: 141697 - DNA, 54 bp, Artificial
  Synthetic oligonucleotide
ggggcattgttgaacgtaaggccataaaacaacggcttcccgaacagcgtagcg

SEQ ID NO: 141698 - DNA, 55 bp, Artificial
  Synthetic oligonucleotide
gggggggtagcccaccagctatgggctacccctagcccaccagctatgggctagg

SEQ ID NO: 141699 - DNA, 50 bp, Artificial
  Synthetic oligonucleotide
gggtacgaccaaccgaaaagagtaccttagggacagtacgggagaccgtc

SEQ ID NO: 141700 - DNA, 54 bp, Artificial
  Synthetic oligonucleotide
gggtgtcaggacataaaacccgttctacggccttctgccgggccggaatgccca

SEQ ID NO: 141701 - DNA, 56 bp, Artificial
  Synthetic oligonucleotide
ggtaggtaagagtttataagatcgtttatacttcgtgctgttggcaaacatggccg

SEQ ID NO: 141702 - DNA, 59 bp, Artificial
  Synthetic oligonucleotide
ggtcctgcggttccaatccgcgtatcagaggatgatctaccgtcgtttcgggattgcgc

SEQ ID NO: 141703 - DNA, 60 bp, Artificial
  Synthetic oligonucleotide
ggtcgcgaagagacgggccaggctccacgcgattccggctggacgctgtgcgatcccgtc

SEQ ID NO: 141704 - DNA, 59 bp, Artificial
  Synthetic oligonucleotide
ggtcgtatcctatccaatatggtcgcttcgctttgacacgccgtcggcgactgacctat

SEQ ID NO: 141705 - DNA, 60 bp, Artificial
  Synthetic oligonucleotide
ggtctgaatccatcttggaggggagttggcgttctgagtgagcaaccccctgctcatatg

SEQ ID NO: 141706 - DNA, 60 bp, Artificial
  Synthetic oligonucleotide
ggtctgtccaggccggggcgctgtcatcgcctctctatcgtctgacgctcaagagccgcc

SEQ ID NO: 141707 - DNA, 57 bp, Artificial
  Synthetic oligonucleotide
ctcggcccttgctaggtgtacggctaggctgccgggagataacagcctcctttgtag

SEQ ID NO: 141708 - DNA, 60 bp, Artificial
  Synthetic oligonucleotide
ggtcttatcgggttgttcgtcgtctgagagcaacacagcggcagaaaacaggctgtagcg

SEQ ID NO: 141709 - DNA, 56 bp, Artificial
  Synthetic oligonucleotide
ggtgaacgccccaggaatgtggcgaagcgccccacgtcacgaaggtaattgcggtg

SEQ ID NO: 141710 - DNA, 60 bp, Artificial
  Synthetic oligonucleotide
gctgtcagaccgaaatatcccgcagcagtatgattgttgtcacctcccccgaacgagacc

SEQ ID NO: 141711 - DNA, 60 bp, Artificial
  Synthetic oligonucleotide
gcttcagcaccagtcgatacagattggagccactcaccatacggccctgacgcttcaccc

SEQ ID NO: 141712 - DNA, 60 bp, Artificial
  Synthetic oligonucleotide
gcttctagggctgtggctcgtcctgatcatcttggaattgctcggccatcaatcagccgc

SEQ ID NO: 141713 - DNA, 60 bp, Artificial
  Synthetic oligonucleotide
gcttggcccaaacatggctcatgcggtcacatggcacgatgtccacaaagcgcgcggccc

SEQ ID NO: 141714 - DNA, 58 bp, Artificial
  Synthetic oligonucleotide
ggaaaaagacttgcgaccgcagggagcaccgcttccgccgcaggcggtgcctcgtctc

SEQ ID NO: 141715 - DNA, 53 bp, Artificial
  Synthetic oligonucleotide
ggaaaccaacggcgcaaaaaaaatgagggctgaacggttcgcacccgctcaac

SEQ ID NO: 141716 - DNA, 59 bp, Artificial
  Synthetic oligonucleotide
ggaaatagccttagtctgaaccgtccgcatgtttgacaggcgagtgtttcggtcatgcc

SEQ ID NO: 141717 - DNA, 57 bp, Artificial
  Synthetic oligonucleotide
ggaaatggcgaaggctaggacaatcgcccaatgcccgaaccgaatgaagggatccca

SEQ ID NO: 141718 - DNA, 54 bp, Artificial
  Synthetic oligonucleotide
ctcgggggcggatcagaggctcataaaagggcgattaattccgttttcgtatcg

SEQ ID NO: 141719 - DNA, 60 bp, Artificial
  Synthetic oligonucleotide
ggaacgcggactactggtcaccatccggcgcagcaaaactgatcaggacggcagcgggca

SEQ ID NO: 141720 - DNA, 60 bp, Artificial
  Synthetic oligonucleotide
ggaaggatacgatagaggccacgtatcaggacacgaaagaggacacatcagaggatacgt

SEQ ID NO: 141721 - DNA, 60 bp, Artificial
  Synthetic oligonucleotide
ggaatcaagggccgtctggtgcgctggctggcaggagacgtactgccggattagctgtcc

SEQ ID NO: 141722 - DNA, 57 bp, Artificial
  Synthetic oligonucleotide
ggacgctcatttcacggaatatggactagttgaacggtttagtgtagaggcggccgc

SEQ ID NO: 141723 - DNA, 60 bp, Artificial
  Synthetic oligonucleotide
ggagcgcaagcgttggtatgtcctagaccagatgttcgcctgagattggggtgacccgtc

SEQ ID NO: 141724 - DNA, 60 bp, Artificial
  Synthetic oligonucleotide
ggcaatgcgtaataataaagcgctcacacatgcgaggcatgatcccggtcatgtcttggc

SEQ ID NO: 141725 - DNA, 59 bp, Artificial
  Synthetic oligonucleotide
ggccgagtcgagggtcgaggcgtaccccagctcgacgtgctgtttcacatactcagagg

SEQ ID NO: 141726 - DNA, 55 bp, Artificial
  Synthetic oligonucleotide
ggcgagacagacagatggccgagaaaaaaacgatcgtacacctttcgtagcgggt

SEQ ID NO: 141727 - DNA, 60 bp, Artificial
  Synthetic oligonucleotide
ggcgagtaagatgcgcattctgatctccgtttggcgtgaagttatatggcagcgtagctg

SEQ ID NO: 141728 - DNA, 59 bp, Artificial
  Synthetic oligonucleotide
ggcgcgaagcatctctgccggatcaatcgttccatccggcaaaacactaatttttccgc

SEQ ID NO: 141729 - DNA, 59 bp, Artificial
  Synthetic oligonucleotide
cttgttgggcgatccgactgccaatcggatcagggctatcagtaagagaaggtcgtacc

SEQ ID NO: 141730 - DNA, 57 bp, Artificial
  Synthetic oligonucleotide
ctctggggcgcgtccgaactggaaaatacgacttactgggagcaggaaacgtgagca

SEQ ID NO: 141731 - DNA, 57 bp, Artificial
  Synthetic oligonucleotide
ggcgcgtccgaactggaaaatacgacttactgggagcaggaaacgtgagcatcggga

SEQ ID NO: 141732 - DNA, 58 bp, Artificial
  Synthetic oligonucleotide
ggcggcacatcccacaaaatcggcacccttcgacgtttctggaaagtgaccgagctca

SEQ ID NO: 141733 - DNA, 59 bp, Artificial
  Synthetic oligonucleotide
ggcggccgattatggacaatcggtccaattcaagggctcgggtgttacagcactcgagc

SEQ ID NO: 141734 - DNA, 52 bp, Artificial
  Synthetic oligonucleotide
gtgcgctcgttcttcaaggccgttcccggggtgtttcgaaacccatcttccc

SEQ ID NO: 141735 - DNA, 56 bp, Artificial
  Synthetic oligonucleotide
gtggacagagtgcaggccggatcttctacgccctaaaaccccacgtatcagggacc

SEQ ID NO: 141736 - DNA, 60 bp, Artificial
  Synthetic oligonucleotide
gttacatgtaacaggggaggatagaccatgacccctgttgccgttcgcgtgcagaagcgc

SEQ ID NO: 141737 - DNA, 60 bp, Artificial
  Synthetic oligonucleotide
gttctgcatcgtctcaaacctctgctccctctgaatgacttcgtcgctgatttagcccaa

SEQ ID NO: 141738 - DNA, 60 bp, Artificial
  Synthetic oligonucleotide
gttgccatttcgatgcctgtccagatcccgcgattcaatgcggctgtctgagccacgata

SEQ ID NO: 141739 - DNA, 60 bp, Artificial
  Synthetic oligonucleotide
gttgtcgaccaagtgaatccgtctggcgaacgcgcttcgtaggcatcttcaggcacctca

SEQ ID NO: 141740 - DNA, 52 bp, Artificial
  Synthetic oligonucleotide
gtttgcccccttttggggtgtgcggccaaaggttccccttagcgatcttgag

SEQ ID NO: 141741 - DNA, 60 bp, Artificial
  Synthetic oligonucleotide
ctgagtcctgccggtctgggcatcactgcatcgaatggtgtagcgaccatgtcacatact

SEQ ID NO: 141742 - DNA, 53 bp, Artificial
  Synthetic oligonucleotide
gttttccaccgtttgagaaggggactacaggggaagagaatcttatctatttc

SEQ ID NO: 141743 - DNA, 56 bp, Artificial
  Synthetic oligonucleotide
taagcccacccattaagacttcattttccttccaaaccataaggcaagaaatatca

SEQ ID NO: 141744 - DNA, 60 bp, Artificial
  Synthetic oligonucleotide
taagcccgcgtgccgcgtccctggcgtgccatctgcatggcgacggggccgatcttgggt

SEQ ID NO: 141745 - DNA, 54 bp, Artificial
  Synthetic oligonucleotide
taagcccggagaggtttttgttcggcagaggggtgtgtttacacaacacgctct

SEQ ID NO: 141746 - DNA, 60 bp, Artificial
  Synthetic oligonucleotide
taatactgctggattgtcatgtttgttggcacggtcgagtagatactggccgcgataact

SEQ ID NO: 141747 - DNA, 60 bp, Artificial
  Synthetic oligonucleotide
tacacgcggcgcatgttgaagtgtccagacgccaagatttcggctttccggggcatgtct

SEQ ID NO: 141748 - DNA, 54 bp, Artificial
  Synthetic oligonucleotide
taccgcttacgcctctttcccgacacctaagtatgtgtttggcttttcgtagaa

SEQ ID NO: 141749 - DNA, 56 bp, Artificial
  Synthetic oligonucleotide
tacgcaatcgctgtattgttgaaagccgtatggccaaaagggtttaattaacaata

SEQ ID NO: 141750 - DNA, 60 bp, Artificial
  Synthetic oligonucleotide
tactgcacgtctgcccacgttgcgtcatcgcctctcaatatctggcgtagctccttctcc

SEQ ID NO: 141751 - DNA, 59 bp, Artificial
  Synthetic oligonucleotide
tagaaatgagatcggctgtcaaagtagtggttgtcgccttatgtttggtgagccttccg

SEQ ID NO: 141752 - DNA, 60 bp, Artificial
  Synthetic oligonucleotide
ctgagtgccctgtacggccatcctgcggcctctgatggggtgatcccggctacagacgca

SEQ ID NO: 141753 - DNA, 60 bp, Artificial
  Synthetic oligonucleotide
tagaatatggctattatcatcacacatggatctgatcatgacctatggcggcactcatgc

SEQ ID NO: 141754 - DNA, 60 bp, Artificial
  Synthetic oligonucleotide
tagagtggcaccaatcgattcagaacgccacccacattccagcgaacaacgtttcgttgc

SEQ ID NO: 141755 - DNA, 59 bp, Artificial
  Synthetic oligonucleotide
tataaggctgttgcgagcgagccttacaggttcttagggaaggcccgatgcttatggga

SEQ ID NO: 141756 - DNA, 57 bp, Artificial
  Synthetic oligonucleotide
tatacgggaagccccaagcaggtattgtgttccacaggtccgtgatggtcggggcat

SEQ ID NO: 141757 - DNA, 60 bp, Artificial
  Synthetic oligonucleotide
tatgacctcgaccgaggccttaaccttatggtgccggagatcagtaatatgattcgtgtc

SEQ ID NO: 141758 - DNA, 55 bp, Artificial
  Synthetic oligonucleotide
ggtgggtccaccgggatggctacgcgtcgccagcctccttacggggcgctccgaa

SEQ ID NO: 141759 - DNA, 60 bp, Artificial
  Synthetic oligonucleotide
ggtgtcgtggcaagcacattgtcgttgccgattgacgtgaaggtattggaggcgagttta

SEQ ID NO: 141760 - DNA, 60 bp, Artificial
  Synthetic oligonucleotide
ggtgttccgcagcattacccgtcacgggcatctgagcgcacagcctctctcagaccggtc

SEQ ID NO: 141761 - DNA, 59 bp, Artificial
  Synthetic oligonucleotide
ggttattccatcacgcaaaggccgcaacgctccacagaaaacagactggcggcgttaca

SEQ ID NO: 141762 - DNA, 58 bp, Artificial
  Synthetic oligonucleotide
ggtttccgctgtaaaaatgtcagtctgaagaaagcgctgtttcctgcgggccagagcc

SEQ ID NO: 141763 - DNA, 60 bp, Artificial
  Synthetic oligonucleotide
ctgcacgtcaatagaacacagcacaaccacagcagagtcacaccataaagtccgccataa

SEQ ID NO: 141764 - DNA, 60 bp, Artificial
  Synthetic oligonucleotide
ggtttgacgattggtagcgaccagcatgtcataagcttgaaggcggagtgtccggcctgg

SEQ ID NO: 141765 - DNA, 60 bp, Artificial
  Synthetic oligonucleotide
gtaaggccattctgcgcgttctaacgaccaatccaagctcataggcccgttcaagagcac

SEQ ID NO: 141766 - DNA, 60 bp, Artificial
  Synthetic oligonucleotide
gtagacgctatacgctcatggcttgcggcatccgggatcacacagggaccggtgttccgc

SEQ ID NO: 141767 - DNA, 60 bp, Artificial
  Synthetic oligonucleotide
gtatgacacacacattagatgtggttcgtcagctcgataaagcgttcgctgtcgttttaa

SEQ ID NO: 141768 - DNA, 59 bp, Artificial
  Synthetic oligonucleotide
gtcaggaaaacatagaaaactaatttattgacacactgtcatgatatgccctagaggtt

SEQ ID NO: 141769 - DNA, 56 bp, Artificial
  Synthetic oligonucleotide
gtcgaacttaccacgtcgcgattgtacctacgcacgactcgccaattaaccctatg

SEQ ID NO: 141770 - DNA, 60 bp, Artificial
  Synthetic oligonucleotide
gtcgcgtgagacgatgaacgagatcgatccaaaacgccaggagcggaacaagcggtatcg

SEQ ID NO: 141771 - DNA, 60 bp, Artificial
  Synthetic oligonucleotide
gtcgctgtcgctcccgggcgagttcatcactcgtaaacagcgggtgcgacctcagattgt

SEQ ID NO: 141772 - DNA, 54 bp, Artificial
  Synthetic oligonucleotide
gtctcaaccttccttcgacggcatggaaccggacttacctgccaccgaaaaata

SEQ ID NO: 141773 - DNA, 55 bp, Artificial
  Synthetic oligonucleotide
gtctcgtttgcttggtgtgagaggggggtatcaggtctttcccctatatcccgcc

SEQ ID NO: 141774 - DNA, 60 bp, Artificial
  Synthetic oligonucleotide
ctgccccgatatcctatgctctcacaccatcgtatcaggtcattatgtgacattccggcg

SEQ ID NO: 141775 - DNA, 56 bp, Artificial
  Synthetic oligonucleotide
gtctgattacccctttcagggataacacactaacccctattgccattctggcaaac

SEQ ID NO: 141776 - DNA, 60 bp, Artificial
  Synthetic oligonucleotide
gtctggacgcatctggcggcctcctacgggtctcagaagtggtctcagacggtcaagcac

SEQ ID NO: 141777 - DNA, 54 bp, Artificial
  Synthetic oligonucleotide
gtctttccgtataccggcacccggcgaccccacgaatattactggtaatcttca

SEQ ID NO: 141778 - DNA, 59 bp, Artificial
  Synthetic oligonucleotide
gtgaaaaaccagcattcgaagccagagcgacaggttcgagccaaagcttcgccgttgct

SEQ ID NO: 141779 - DNA, 60 bp, Artificial
  Synthetic oligonucleotide
gtgccaagatgaggtcgctcaaatgaccatcatgaaagggccgtcattacgcaatgtcga

SEQ ID NO: 141780 - DNA, 60 bp, Artificial
  Synthetic oligonucleotide
gtgcgacctaatagacgccaatgcaagggttctccacatgcctgcaacgattacccgctt

SEQ ID NO: 141781 - DNA, 56 bp, Artificial
  Synthetic oligonucleotide
acaacaacagtttcccatagctatatctccgttctccaacgaacatatctcccggt

SEQ ID NO: 141782 - DNA, 60 bp, Artificial
  Synthetic oligonucleotide
atcgtccgcttgcgaggtgtctcaatcaaccgtgctgcgggggacgcgttgcgatacacc

SEQ ID NO: 141783 - DNA, 60 bp, Artificial
  Synthetic oligonucleotide
acaagtgatgtattgcttcgagtcgaaatatacgctctgcctgtatgagatgacggagcg

SEQ ID NO: 141784 - DNA, 53 bp, Artificial
  Synthetic oligonucleotide
agagggaaggttacaccaaaggatagtgaaggcggcccgaagtatacaggtgg

SEQ ID NO: 141785 - DNA, 60 bp, Artificial
  Synthetic oligonucleotide
ctgcgaagatctgcgaccccataatcagacaagcctttgtcttcagataccggaacaacc

SEQ ID NO: 141786 - DNA, 60 bp, Artificial
  Synthetic oligonucleotide
acaatctgtcagcttctcgcactctggggtgacaccaaccggccgagcgcggatgtcaag

SEQ ID NO: 141787 - DNA, 60 bp, Artificial
  Synthetic oligonucleotide
atcggtgcctggaacagatgatacgtgacgttcgctcattggggtttgaggtcgctctgc

SEQ ID NO: 141788 - DNA, 56 bp, Artificial
  Synthetic oligonucleotide
aggtccgtcagacaaaaaatctcctgcccacagatgaagtctagggccgctttttg

SEQ ID NO: 141789 - DNA, 59 bp, Artificial
  Synthetic oligonucleotide
acactctaagcgccccctaaccgcgctgcgggtctgggcactgtgcttcaaacacctgc

SEQ ID NO: 141790 - DNA, 60 bp, Artificial
  Synthetic oligonucleotide
atcggaatatagcgcggcctgccgattacctcgctgtgctcagatcggtgcgcaatcacg

SEQ ID NO: 141791 - DNA, 60 bp, Artificial
  Synthetic oligonucleotide
atcgcgtcaggagaacaggtgatcgtctcttgcgatcatccaccagaaagccaccagaag

SEQ ID NO: 141792 - DNA, 54 bp, Artificial
  Synthetic oligonucleotide
acagccgcgtcagtgcgttctcgtgggtacgaccaaccgaaaagagtaccttag

SEQ ID NO: 141793 - DNA, 60 bp, Artificial
  Synthetic oligonucleotide
acagctgatcgagatatttccctgccgtctgacgcgcgatactcaggtccgactggacat

SEQ ID NO: 141794 - DNA, 59 bp, Artificial
  Synthetic oligonucleotide
aggtgagcggttgttggattactcgaaacagtggtgtcaattatgccgttgggcatgta

SEQ ID NO: 141795 - DNA, 60 bp, Artificial
  Synthetic oligonucleotide
acatcctcgcgatcctgacggttgatcggattggccataagcgactgcaactgattggtt

SEQ ID NO: 141796 - DNA, 60 bp, Artificial
  Synthetic oligonucleotide
ctgcgatgatggctgccgtgcttgaatagagcaacgtcatcacgcggtaagcttgggttt

SEQ ID NO: 141797 - DNA, 60 bp, Artificial
  Synthetic oligonucleotide
atcgacccactgcatcgctgaagcgcctcaccaatagttcgaaaacgaaattatatgccg

SEQ ID NO: 141798 - DNA, 57 bp, Artificial
  Synthetic oligonucleotide
accaatcgagacggcattgggccttgccgccccgttgcttacccaaagacagcaggc

SEQ ID NO: 141799 - DNA, 60 bp, Artificial
  Synthetic oligonucleotide
atcgacaccaaatcctgtggggagtgactcacgatagtgcttccgcgactcggacgctgt

SEQ ID NO: 141800 - DNA, 60 bp, Artificial
  Synthetic oligonucleotide
accatagccggctcaaaccatgacatgtcatggtttgagcgtgacatgtcatggttgcct

SEQ ID NO: 141801 - DNA, 48 bp, Artificial
  Synthetic oligonucleotide
aagggggttgtaggtattatggacggtcgggaaactgaccgttcgggg

SEQ ID NO: 141802 - DNA, 60 bp, Artificial
  Synthetic oligonucleotide
atgaggtttcacatctctcgattgattgggatggcaaaacaagtctaaaccttaccatca

SEQ ID NO: 141803 - DNA, 55 bp, Artificial
  Synthetic oligonucleotide
atgaggaaatcaggttaagctattttggcggtttgaacaaccacgaaaggattga

SEQ ID NO: 141804 - DNA, 54 bp, Artificial
  Synthetic oligonucleotide
agcaaacccatgcctttcgttcgacccttagcggagcgtaggggcgaaaggata

SEQ ID NO: 141805 - DNA, 60 bp, Artificial
  Synthetic oligonucleotide
atgacgctgccgagcgtcagaggcggctgctagaggttgagcaggagaaagcgcgcgcga

SEQ ID NO: 141806 - DNA, 60 bp, Artificial
  Synthetic oligonucleotide
aaggtaccattccgctcttcgtgtcaggcgatttgagtattgatctcgtgcgccgccaga

SEQ ID NO: 141807 - DNA, 60 bp, Artificial
  Synthetic oligonucleotide
ctgctcacctaagtgagcagggggctgctcacttaggtgagcagccccccctttgtaaca

SEQ ID NO: 141808 - DNA, 60 bp, Artificial
  Synthetic oligonucleotide
aagtcatgttctagtccatcaaatggtggttgagatggcggaggctcgccattaccagac

SEQ ID NO: 141809 - DNA, 59 bp, Artificial
  Synthetic oligonucleotide
aagtttgacgtcaatctgcagtatcgttctcacgaaatcggaaagactatcaggccgta

SEQ ID NO: 141810 - DNA, 58 bp, Artificial
  Synthetic oligonucleotide
agattatcgctacgggccttacggctaagattggaactctatacatccccaatctagc

SEQ ID NO: 141811 - DNA, 60 bp, Artificial
  Synthetic oligonucleotide
aatatccgaacttatcgcagctctgcgcctagacgtgcggcctcttgatcacaacctggc

SEQ ID NO: 141812 - DNA, 57 bp, Artificial
  Synthetic oligonucleotide
atcttgccggtcggttgaacagcgggcgtaaccgatcagggtgtgggccatgcggaa

SEQ ID NO: 141813 - DNA, 60 bp, Artificial
  Synthetic oligonucleotide
aatccgcactcaagaggacgtggcaaagcagctcatccagatttacagcgatgcacgaga

SEQ ID NO: 141814 - DNA, 57 bp, Artificial
  Synthetic oligonucleotide
agggcaatgaccttggtatggaggcggtggaatttgtgtcgttcccaccagatcgag

SEQ ID NO: 141815 - DNA, 57 bp, Artificial
  Synthetic oligonucleotide
aatggtcgggacgccgttctttctagcctccgagcagagacacgccccattcctgaa

SEQ ID NO: 141816 - DNA, 59 bp, Artificial
  Synthetic oligonucleotide
agggcaggcagagcggtttgccgcctctggtcttgattttccatccctgtccggagcag

SEQ ID NO: 141817 - DNA, 60 bp, Artificial
  Synthetic oligonucleotide
aatgtagattcgtcttgggtcggacccatagcgtgcgaccgcgactctcagcatctggcg

SEQ ID NO: 141818 - DNA, 60 bp, Artificial
  Synthetic oligonucleotide
ctgctcgtaaggccaaggaagcggctaagaggcaatgggcaatagccagccggtcaagca

SEQ ID NO: 141819 - DNA, 53 bp, Artificial
  Synthetic oligonucleotide
atctctgagtacttatccacacccgaaaaaccaattttacccatagacaacgg

SEQ ID NO: 141820 - DNA, 60 bp, Artificial
  Synthetic oligonucleotide
agatcctcgatcaaagctccatgattctgagcgttataccaaatgcgaaggatttcgacg

SEQ ID NO: 141821 - DNA, 60 bp, Artificial
  Synthetic oligonucleotide
agaagacatcttctcaaccgtttgagcagcgttattcatggggcagccgtgtggctattt

SEQ ID NO: 141822 - DNA, 60 bp, Artificial
  Synthetic oligonucleotide
agtcttcgcagtgttcggccagggagtgtcgtcataagcgaccacacaagaagccgcata

SEQ ID NO: 141823 - DNA, 55 bp, Artificial
  Synthetic oligonucleotide
atatctgcgccagaaaccccgccaaacccccgccactatgcgggcggaaagttca

SEQ ID NO: 141824 - DNA, 60 bp, Artificial
  Synthetic oligonucleotide
acgatgtaagcacaagccgtgcctgtggggccgatctgtcgaacttcgatccagttgccc

SEQ ID NO: 141825 - DNA, 60 bp, Artificial
  Synthetic oligonucleotide
actgttagtatatctagagtatcggaaggatttgcagtaatcccgagcggatagcttgcc

SEQ ID NO: 141826 - DNA, 59 bp, Artificial
  Synthetic oligonucleotide
actggggagggtacgccttcactcatgccttatctcagccacaggtgtcggggtatagc

SEQ ID NO: 141827 - DNA, 59 bp, Artificial
  Synthetic oligonucleotide
acgcccctcaatgccactttgtgggcctcagagccgccctaggcggctggataggatac

SEQ ID NO: 141828 - DNA, 56 bp, Artificial
  Synthetic oligonucleotide
agtgacaactcgatatttggcttgccgctcctaagtaagttctgttacgtattacc

SEQ ID NO: 141829 - DNA, 60 bp, Artificial
  Synthetic oligonucleotide
ctggacctgcggcatgacagccctggtcacaatccgacgtcacgtcgcacgctgtctgga

SEQ ID NO: 141830 - DNA, 51 bp, Artificial
  Synthetic oligonucleotide
acgctcaaaaaaaacgggggcagggtgtccctaccacactcctaaggcgga

SEQ ID NO: 141831 - DNA, 53 bp, Artificial
  Synthetic oligonucleotide
ataggtgcgggccagtttattgaatttcgggcagtccgttgtcccggaaaaca

SEQ ID NO: 141832 - DNA, 60 bp, Artificial
  Synthetic oligonucleotide
atagcggcttcactgcgtgccaggcggtaagcgcggctgattgcctcaaccagcctcgat

SEQ ID NO: 141833 - DNA, 55 bp, Artificial
  Synthetic oligonucleotide
acggtatagattgctcgttctaacttttttaccgccctgtaaggccattctgcgc

SEQ ID NO: 141834 - DNA, 55 bp, Artificial
  Synthetic oligonucleotide
acgtcccgcgcaccgtataaacgaccataaacgggatcccctcgatcaagcctgc

SEQ ID NO: 141835 - DNA, 57 bp, Artificial
  Synthetic oligonucleotide
ataatccgctcccagatcaaacgataaacgtcacaccactcaatcccctcggttatc

SEQ ID NO: 141836 - DNA, 60 bp, Artificial
  Synthetic oligonucleotide
ataataattgctccgccctgagcggtgcttggacagcagacctttctctgacagctgatc

SEQ ID NO: 141837 - DNA, 60 bp, Artificial
  Synthetic oligonucleotide
actatgcccaccccactagcgctgttcctgacagcatcagcgttggtccaggcacctata

SEQ ID NO: 141838 - DNA, 60 bp, Artificial
  Synthetic oligonucleotide
actccccggggcagaggcattcgcttgaaagtgctctcgatgtcttgattcgagattaag

SEQ ID NO: 141839 - DNA, 59 bp, Artificial
  Synthetic oligonucleotide
actcagccagagattcattcgccgtcagatacccgagaagttcgggatatacgtccaac

SEQ ID NO: 141840 - DNA, 60 bp, Artificial
  Synthetic oligonucleotide
cttttgaggacaggcaattgttaacgcagcaactcacatctcgaaagagtgtgcggaaca

SEQ ID NO: 141841 - DNA, 58 bp, Artificial
  Synthetic oligonucleotide
ctggcggcgtaccgtcgcaggagacggataagccggccccggcagatcgctttgtgtc

SEQ ID NO: 141842 - DNA, 55 bp, Artificial
  Synthetic oligonucleotide
agtcacaatcagacggtatagattgctcgttctaacttttttaccgccctgtaag

SEQ ID NO: 141843 - DNA, 56 bp, Artificial
  Synthetic oligonucleotide
atccgtgccaccagacctaacgtagcttctcaccggtaggcaagccctcccgacaa

SEQ ID NO: 141844 - DNA, 60 bp, Artificial
  Synthetic oligonucleotide
acccgacatgccaagctggttggcaatgctgaaggttccggtcgccagagccaatgacgt

SEQ ID NO: 141845 - DNA, 58 bp, Artificial
  Synthetic oligonucleotide
atccgtccggccgtctctggtggcgagtttagccgtgcgcgtggaatgatccttggac

SEQ ID NO: 141846 - DNA, 60 bp, Artificial
  Synthetic oligonucleotide
agagcgttgtggcggcccattttcgacacgatcacatgcatgagggcgcaagctctcggg

SEQ ID NO: 141847 - DNA, 57 bp, Artificial
  Synthetic oligonucleotide
accgccctgtaaggccattctgcgcgttctaacgaccaatccaagctcataggcccg

SEQ ID NO: 141848 - DNA, 60 bp, Artificial
  Synthetic oligonucleotide
atcccttttttgacggcttcaacgaaagcttccgtatcaggatcatctggcatggataca

SEQ ID NO: 141849 - DNA, 56 bp, Artificial
  Synthetic oligonucleotide
agacctaaaattgcgtagtatcggtcacaaaaccgcgtagaatcggtcacagaagc

SEQ ID NO: 141850 - DNA, 60 bp, Artificial
  Synthetic oligonucleotide
agaccgctgaggctggggtagcgaaggcccggctgaatctgcttgaggccaccgagacag

SEQ ID NO: 141851 - DNA, 60 bp, Artificial
  Synthetic oligonucleotide
agacatggccccgatgccatggcggttgagcgggaggtagagcagatggcgctttcggat

SEQ ID NO: 141852 - DNA, 59 bp, Artificial
  Synthetic oligonucleotide
cttcgggccggatttgtgacctctggtgcacagacggggcaagacgccctcgctctggc

SEQ ID NO: 141853 - DNA, 57 bp, Artificial
  Synthetic oligonucleotide
atcattgataaataacaatttttttcgtggtctctctctatgatctttggaccgtcc

SEQ ID NO: 141854 - DNA, 57 bp, Artificial
  Synthetic oligonucleotide
agtctgttcgcatgtttctagccgctaatgggggggggcgcaaaggcgatctatccc

SEQ ID NO: 141855 - DNA, 60 bp, Artificial
  Synthetic oligonucleotide
atcattacaacgtcgtagctcaccacaagctaaacagcatacgcgaacagaaccgccata

SEQ ID NO: 141856 - DNA, 60 bp, Artificial
  Synthetic oligonucleotide
accgttcgaccgtctgtgcccctgagcacgtgataccagattggtgcctgacacgtgagc

SEQ ID NO: 141857 - DNA, 60 bp, Artificial
  Synthetic oligonucleotide
acctgcccacatcgtccccaatgccgctatgcggtgtttgagccgccctgaacggcagga

SEQ ID NO: 141858 - DNA, 52 bp, Artificial
  Synthetic oligonucleotide
atcacctttaccatttccggatcgtccgaagtttcggtgacctgaatcccgg

SEQ ID NO: 141859 - DNA, 60 bp, Artificial
  Synthetic oligonucleotide
atatttcggcatctaggtcagtaggggagacactcattccatctaaaatgccacccacat

SEQ ID NO: 141860 - DNA, 60 bp, Artificial
  Synthetic oligonucleotide
agaatagaaattctccgtcagaccactcagcatgttgtactgaccaagcggaccagtcag

SEQ ID NO: 141861 - DNA, 53 bp, Artificial
  Synthetic oligonucleotide
agaagcgcgtagaatcggtcacaaactgacccccttaaaatgccgttttgtcg

SEQ ID NO: 141862 - DNA, 58 bp, Artificial
  Synthetic oligonucleotide
agcggtccgaatggtggtcctatcgggcttcaccataacgctgacgtcagctcggaaa

SEQ ID NO: 141863 - DNA, 60 bp, Artificial
  Synthetic oligonucleotide
cttgacatgatacacgtaagtatctatatctgactatgagtcattgtgactcagggtctt

SEQ ID NO: 141864 - DNA, 60 bp, Artificial
  Synthetic oligonucleotide
aaagcgtcttatcatcttggatactctccggcgcttccatgtcgctgatgaaaacaacgg

SEQ ID NO: 141865 - DNA, 58 bp, Artificial
  Synthetic oligonucleotide
agcgagtaggtcgagccgaaactgtcatcctgcaggttaagaccttgccgggaatcaa

SEQ ID NO: 141866 - DNA, 53 bp, Artificial
  Synthetic oligonucleotide
aaagctcactttagagacgcctccacgcttccaaccctcgtcccaaacgccgg

SEQ ID NO: 141867 - DNA, 60 bp, Artificial
  Synthetic oligonucleotide
aggcatgaggcgagaggtctccattgatactctttgctcttatgtgtggcccgatgccgg

SEQ ID NO: 141868 - DNA, 60 bp, Artificial
  Synthetic oligonucleotide
aaagttcactggtctgcgtagttttggcctcgatgactggcgcgcctgcctacatgctgg

SEQ ID NO: 141869 - DNA, 58 bp, Artificial
  Synthetic oligonucleotide
aaatctctgggcatgacctggggatatgaaccgacccattatcttttctcgtcgcctg

SEQ ID NO: 141870 - DNA, 60 bp, Artificial
  Synthetic oligonucleotide
atggctgccgtgacatccacgataaacgattctgctctgcctcgtctcgatattcgatca

SEQ ID NO: 141871 - DNA, 55 bp, Artificial
  Synthetic oligonucleotide
aaccctctgtctcaacccttgatgcaaccaaggaccgaaacttgcttacgttata

SEQ ID NO: 141872 - DNA, 60 bp, Artificial
  Synthetic oligonucleotide
aaccgccatatgttgcaggcgggaatgtacgccagatcggcttgtcttgcacgctcaaaa

SEQ ID NO: 141873 - DNA, 60 bp, Artificial
  Synthetic oligonucleotide
aacctagcgtagcggagcttgtcgcgctcttgcgtccaagcaactcggctattgatgact

SEQ ID NO: 141874 - DNA, 57 bp, Artificial
  Synthetic oligonucleotide
cttgaggggttgaggggcgcgcccattacgcaggacacacaccgtgagtcgtaacta

SEQ ID NO: 141875 - DNA, 60 bp, Artificial
  Synthetic oligonucleotide
agcactggcctgatgcgttcgtcgaaagacggaccatctgaggatgtgagagacgggtag

SEQ ID NO: 141876 - DNA, 60 bp, Artificial
  Synthetic oligonucleotide
aggatgccggcgtcagtaggtggcataggtcaaatgcacatccctgcgacatggttgacg

SEQ ID NO: 141877 - DNA, 60 bp, Artificial
  Synthetic oligonucleotide
aacgagcaggctgcgcaagtgctggctcccacgcttggagatgcccatcatgatctgccg

SEQ ID NO: 141878 - DNA, 57 bp, Artificial
  Synthetic oligonucleotide
aaaaatttccagttccattacagccgtttgcggctagacctcctattgattctgtga

SEQ ID NO: 141879 - DNA, 59 bp, Artificial
  Synthetic oligonucleotide
aagggcggcactctggcggcaattttcgcagtgccaccatgccgcgccctaaccccatg

SEQ ID NO: 141880 - DNA, 54 bp, Artificial
  Synthetic oligonucleotide
aaaaccagcaccgcaaaggctcaggaagaacggagccactggggagggtacgcc

SEQ ID NO: 141881 - DNA, 57 bp, Artificial
  Synthetic oligonucleotide
attagccgacaaaacaacgggtcgataatggcgcaagcgtacacgcccaagggatca

SEQ ID NO: 141882 - DNA, 60 bp, Artificial
  Synthetic oligonucleotide
attacgcggatccgcgtgcgggaaacagttcccgaccacgtgatcggagatgcagatgag

SEQ ID NO: 141883 - DNA, 60 bp, Artificial
  Synthetic oligonucleotide
agcaagaagacctgtgccaagcaatacgagcgacccaggctctggaacatctgtcatgct

SEQ ID NO: 141884 - DNA, 54 bp, Artificial
  Synthetic oligonucleotide
agcggtcacgctaggggaactgagccgataggtcggcggaagacccaacccttg

SEQ ID NO: 141885 - DNA, 60 bp, Artificial
  Synthetic oligonucleotide
cttgcatggcaggactacacctgcaccaaggtggccgctgatctggccgagatgcgcggt

SEQ ID NO: 141886 - DNA, 58 bp, Artificial
  Synthetic oligonucleotide
aaaccgtgagtgcatgaacgaccggacgtatgagaattatccggattgtaggaatgcc

SEQ ID NO: 141887 - DNA, 59 bp, Artificial
  Synthetic oligonucleotide
aacgtggggtcagtagtcattggaggcgtcacttactctgcttcggtggagaactctgc

SEQ ID NO: 141888 - DNA, 60 bp, Artificial
  Synthetic oligonucleotide
atgagtgcagcatcccgtgcagatacagaggcgctcaaagcgttccttacgcgaacccat

SEQ ID NO: 141889 - DNA, 60 bp, Artificial
  Synthetic oligonucleotide
atgattgtcagtacgtagacaatcaatgtctattttagcggacatttaatgtcaatgaac

SEQ ID NO: 141890 - DNA, 59 bp, Artificial
  Synthetic oligonucleotide
aacgccgaattccggtagcgccagctctaatcagcaggccctgccaagcaacccgataa

SEQ ID NO: 141891 - DNA, 57 bp, Artificial
  Synthetic oligonucleotide
aaacgacgcgacaaagctctggttacgatccagctggtcgcggtttaatcgtactga

SEQ ID NO: 141892 - DNA, 59 bp, Artificial
  Synthetic oligonucleotide
cagggcaactgtgagggattgcttgcaaaaactacgctgggttcagcgcaggacaggcc

SEQ ID NO: 141893 - DNA, 59 bp, Artificial
  Synthetic oligonucleotide
tggtagcgaccagcatgtcataagcttgaaggcggagtgtccggcctggttgttcgccg

SEQ ID NO: 141894 - DNA, 57 bp, Artificial
  Synthetic oligonucleotide
taggcggctggataggatacgatccggttcgccagtgcggcccgttagggccgccga

SEQ ID NO: 141895 - DNA, 59 bp, Artificial
  Synthetic oligonucleotide
atgcggagacgctggcagcgtttactgaggtcgagcgtggggatctgacgcgcttcagg

SEQ ID NO: 141896 - DNA, 60 bp, Artificial
  Synthetic oligonucleotide
gcaatcagggaataagaaaaagcacagcctgcaaagtgcttgcgggtggctctcggtatt

SEQ ID NO: 141897 - DNA, 56 bp, Artificial
  Synthetic oligonucleotide
gcagaggcccgtcttgcacggttacgtgaaaaatctcggaagaaggaaactcgtca

SEQ ID NO: 141898 - DNA, 56 bp, Artificial
  Synthetic oligonucleotide
gcgcatgtgggttaaccagtccggacaactcaagttacggggctatctcgggattc

SEQ ID NO: 141899 - DNA, 57 bp, Artificial
  Synthetic oligonucleotide
tacgaatggacgaaagctatgccgggcgtcttcccggtccctgatagcgagagccgg

SEQ ID NO: 141900 - DNA, 59 bp, Artificial
  Synthetic oligonucleotide
gcaccgcaagacaggacaccgttaagcactacaggtgcgcataaggtttatgtgaagta

SEQ ID NO: 141901 - DNA, 56 bp, Artificial
  Synthetic oligonucleotide
gttgccgtcgattgcccgattgaaagcccatagagacgccgcacgggaaggtaaaa

SEQ ID NO: 141902 - DNA, 58 bp, Artificial
  Synthetic oligonucleotide
aggatgatctaccgtcgtttcgggattgcgcctccagccttacccagtcgcagtcaaa

SEQ ID NO: 141903 - DNA, 57 bp, Artificial
  Synthetic oligonucleotide
gcaaaccggctccgccttaggagtgtggcagggacaccctgcaccccttccctgcaa

SEQ ID NO: 141904 - DNA, 59 bp, Artificial
  Synthetic oligonucleotide
cgaactgtaacagccatacgaagcgggtgatgcgaccatccaccgtattctctaacaga

SEQ ID NO: 141905 - DNA, 59 bp, Artificial
  Synthetic oligonucleotide
agtcgacagcggcgtgtgactgcgttccataacggtcccagccatcaggcttacgtctt

SEQ ID NO: 141906 - DNA, 58 bp, Artificial
  Synthetic oligonucleotide
gtcggaaatagtctcggtgaagtgttaggacgttcttactgatgactgaacgatagac

SEQ ID NO: 141907 - DNA, 60 bp, Artificial
  Synthetic oligonucleotide
gcacccggaagacagactatgagtccagcgactataagtattgttgaggcgaattcgaaa

SEQ ID NO: 141908 - DNA, 59 bp, Artificial
  Synthetic oligonucleotide
gtcccctcactatttgctgcgaacgctgccgcttattacacggagcgatgccacggtcc

SEQ ID NO: 141909 - DNA, 57 bp, Artificial
  Synthetic oligonucleotide
cgcgtgggagtgtcgcagaacgagatatgcatccgggttaccccgtcctgtcgttcg

SEQ ID NO: 141910 - DNA, 59 bp, Artificial
  Synthetic oligonucleotide
cggacaggtccagtccatcgaacatcccgcgtttttgctgtgccgacgcaggctctggc

SEQ ID NO: 141911 - DNA, 57 bp, Artificial
  Synthetic oligonucleotide
ggtatcaaaacccgagagaccaagcgtcccggtcagtagcatgagggttcaccgcag

SEQ ID NO: 141912 - DNA, 56 bp, Artificial
  Synthetic oligonucleotide
gggggaacgggtggatcaccgtagcttcgccaggcgcgggcttgaacaggctccta

SEQ ID NO: 141913 - DNA, 51 bp, Artificial
  Synthetic oligonucleotide
attacccgttccgtcggttgctgtccgatctttgggacggccccacggaaa

SEQ ID NO: 141914 - DNA, 52 bp, Artificial
  Synthetic oligonucleotide
acgtgttgatcgaggacgtgttgtaagcgtttccgatggacggaacccccgt

SEQ ID NO: 141915 - DNA, 59 bp, Artificial
  Synthetic oligonucleotide
ccaaccctagctccagccaacaagtagcaatcgatataacgaccgacaatactgatgtg

SEQ ID NO: 141916 - DNA, 58 bp, Artificial
  Synthetic oligonucleotide
tgaggcggcaaaggtcgaataaggtaggttggcgttaacatgacatcctgacgtggta

SEQ ID NO: 141917 - DNA, 59 bp, Artificial
  Synthetic oligonucleotide
gccacgtgcggcgctgcgtcgggctggcggggcgaatgagccggagcccggcgatgcct

SEQ ID NO: 141918 - DNA, 56 bp, Artificial
  Synthetic oligonucleotide
gcagcgcaaaattgccggggtggtatttcattcgtccttagatcgtcgccgtcctt

SEQ ID NO: 141919 - DNA, 59 bp, Artificial
  Synthetic oligonucleotide
tcgacatttgcctcttggatctacagagaggcaaatgtcgcctgcgtccaagcctcagc

SEQ ID NO: 141920 - DNA, 58 bp, Artificial
  Synthetic oligonucleotide
aaagagcctttggtctgatcatttgtctgaccgcgcttcacgtcctgcgctacacgat

SEQ ID NO: 141921 - DNA, 57 bp, Artificial
  Synthetic oligonucleotide
tagtccctaccctgcgcttccgcagaaaggcgtgcgacttccgcagtataactttgg

SEQ ID NO: 141922 - DNA, 55 bp, Artificial
  Synthetic oligonucleotide
gcggctttaagcaaccctcgacggtctaacgatccaggatttaacgatttcattc

SEQ ID NO: 141923 - DNA, 56 bp, Artificial
  Synthetic oligonucleotide
aggaacttgctgaccagtggaacattaccgttccagccgctaaacagcgggtccgc

SEQ ID NO: 141924 - DNA, 58 bp, Artificial
  Synthetic oligonucleotide
ctgcataggtctaatcagctatgcgaagttttgcgtaggttctggagagcggtcatcc

SEQ ID NO: 141925 - DNA, 58 bp, Artificial
  Synthetic oligonucleotide
ccggccagagccataccttcattgagcacgaaggctcgtgcgcggggcttaaagccca

SEQ ID NO: 141926 - DNA, 58 bp, Artificial
  Synthetic oligonucleotide
ttcaatgcgtcctgccgtgcccgtgagagttgagtattcacggggctattggggcggt

SEQ ID NO: 141927 - DNA, 58 bp, Artificial
  Synthetic oligonucleotide
taaaccttcactcccatggtccccagcatttttactgtggtgctcacatccatcgcgt

SEQ ID NO: 141928 - DNA, 55 bp, Artificial
  Synthetic oligonucleotide
cggttcctcaactgccgtaccctggtcgtgacaggcgaacgtgccgaagaaagtc

SEQ ID NO: 141929 - DNA, 59 bp, Artificial
  Synthetic oligonucleotide
gcagctcattccttgaccgaggattatcttgtggcaccggatacctacgcccaaaactg

SEQ ID NO: 141930 - DNA, 58 bp, Artificial
  Synthetic oligonucleotide
ccaatccgcgtatcagaggatgatctaccgtcgtttcgggattgcgcctccagcctta

SEQ ID NO: 141931 - DNA, 57 bp, Artificial
  Synthetic oligonucleotide
gcaggggtattgctcaaggggtggagtggctggcggattttcctccccgctttgcag

SEQ ID NO: 141932 - DNA, 58 bp, Artificial
  Synthetic oligonucleotide
ccgtctggcgaacgcgcttcgtaggcatcttcaggcacctcaataatctcacggacta

SEQ ID NO: 141933 - DNA, 58 bp, Artificial
  Synthetic oligonucleotide
ctctggggtgacaccaaccggccgagcgcggatgtcaagcggattgctctggctcatc

SEQ ID NO: 141934 - DNA, 57 bp, Artificial
  Synthetic oligonucleotide
gtcctttagcgggagccgtagtctgcttagtcgtaatgttttgcgaatcttgaaatc

SEQ ID NO: 141935 - DNA, 58 bp, Artificial
  Synthetic oligonucleotide
ttttgaccgaagcagcgaaggatgcaaaaattgccgggtggctgctaaagcagattga

SEQ ID NO: 141936 - DNA, 57 bp, Artificial
  Synthetic oligonucleotide
ttcgggaacggccccctgcatgagccggttcttgatggagtgcggggcaacctgaaa

SEQ ID NO: 141937 - DNA, 58 bp, Artificial
  Synthetic oligonucleotide
tatgacctcccaaatgggccgcaataatgctctcgtcgcatcccaagccacgttagct

SEQ ID NO: 141938 - DNA, 58 bp, Artificial
  Synthetic oligonucleotide
gtgaccgcaaactggtcagcatgaatgaaagattggtggaccttggtcaggatatgag

SEQ ID NO: 141939 - DNA, 55 bp, Artificial
  Synthetic oligonucleotide
aggttcttaaaaaacctggctcattagggcaccagccgcctcggcttactcgctc

SEQ ID NO: 141940 - DNA, 60 bp, Artificial
  Synthetic oligonucleotide
gcataaaacggagggcggctttcacgggtcgcctcttgtcagactcatgtcatgcgatgc

SEQ ID NO: 141941 - DNA, 58 bp, Artificial
  Synthetic oligonucleotide
tatgtatgaggaggccacacaactcgtagaaagctacgggctgaacgcatgtccacat

SEQ ID NO: 141942 - DNA, 58 bp, Artificial
  Synthetic oligonucleotide
atcctgcgggagaaaagccgcgagctgggtattaggaagggatcgacgctcgatcacg

SEQ ID NO: 141943 - DNA, 56 bp, Artificial
  Synthetic oligonucleotide
ccaaaccgacagggccaatctcgcggctctaaaagccaagggaggtaacagtcatc

SEQ ID NO: 141944 - DNA, 57 bp, Artificial
  Synthetic oligonucleotide
ttaggtctggggctgtcggaccgtgtacctgatgccagaacggtatggctgtttcga

SEQ ID NO: 141945 - DNA, 57 bp, Artificial
  Synthetic oligonucleotide
ccgttgggcatgtagtccgtagcgcgcgtgatctccgtatgtcgctcgaatagtttc

SEQ ID NO: 141946 - DNA, 57 bp, Artificial
  Synthetic oligonucleotide
tgcagatgaggtcgaacttatcgacctcactccgaacgatttgctacagcggatgcg

SEQ ID NO: 141947 - DNA, 57 bp, Artificial
  Synthetic oligonucleotide
gcgtccgccttataccaagccccacctcagttttgccgatcaagttgatctcctgat

SEQ ID NO: 141948 - DNA, 57 bp, Artificial
  Synthetic oligonucleotide
tctatctgaccccgattgatgcggcccatcattatctcgtcgtggacgacatgacgc

SEQ ID NO: 141949 - DNA, 57 bp, Artificial
  Synthetic oligonucleotide
cggctcaaaagagcatctgccctcttggtaaagatcggggtttctataactgaatgc

SEQ ID NO: 141950 - DNA, 57 bp, Artificial
  Synthetic oligonucleotide
cctccggcgaggcacgatccttctcgcaacagaactcaaagttgggcttcgcttacg

SEQ ID NO: 141951 - DNA, 60 bp, Artificial
  Synthetic oligonucleotide
cttttgctcaaatggaaagggcgctcattcgagagaggcaacgcgagggccaagagcagg

SEQ ID NO: 141952 - DNA, 60 bp, Artificial
  Synthetic oligonucleotide
gccaacttcgaactgtaacagccatacgaagcgggtgatgcgaccatccaccgtattctc

SEQ ID NO: 141953 - DNA, 55 bp, Artificial
  Synthetic oligonucleotide
ctatgatcttaggactggggctccccctcatttttgtcgtcccggtagtccacag

SEQ ID NO: 141954 - DNA, 57 bp, Artificial
  Synthetic oligonucleotide
gtggtagatcgccatggacacgacactatcacgcatttcaagcgtacgtcacgcagt

SEQ ID NO: 141955 - DNA, 57 bp, Artificial
  Synthetic oligonucleotide
tccgtgcatgtcgacgtcaccgccactgtttcgggcttgagcgtcagccctctggat

SEQ ID NO: 141956 - DNA, 57 bp, Artificial
  Synthetic oligonucleotide
tccgtcaggcgtgacggtttctgcgacatgcttgagctgccgcgtatccagctggcc

SEQ ID NO: 141957 - DNA, 54 bp, Artificial
  Synthetic oligonucleotide
acgggttattatacctccctcggaagtagcaggcccactgggtagtgctgtggg

SEQ ID NO: 141958 - DNA, 57 bp, Artificial
  Synthetic oligonucleotide
tatggcggggatgcatcaaagcgccctggcatttagatggcgcacaaggagaccaaa

SEQ ID NO: 141959 - DNA, 57 bp, Artificial
  Synthetic oligonucleotide
ctttcagcacgcctgcatcatcgaggcccgtgtgccacgcaccgactgtccggagca

SEQ ID NO: 141960 - DNA, 56 bp, Artificial
  Synthetic oligonucleotide
gcctacccctatattgccctcgccccggaaggggggatcagtctggagccatacga

SEQ ID NO: 141961 - DNA, 57 bp, Artificial
  Synthetic oligonucleotide
cgctctggctcgtgtaacacgccacaaaaatctctctgtcctgcaaacctacgtccg

SEQ ID NO: 141962 - DNA, 57 bp, Artificial
  Synthetic oligonucleotide
tcatagtcggtcacagaaacagtacgaacccgaatgtccggagtttcagtctcggcc

SEQ ID NO: 141963 - DNA, 59 bp, Artificial
  Synthetic oligonucleotide
gccacaggtgtcggggtatagcgtggctacgatggggatatgcctgtatcgtttaggcg

SEQ ID NO: 141964 - DNA, 57 bp, Artificial
  Synthetic oligonucleotide
ccatgaatttgcgcttgagcgtgctgcgctgggtcaggatcagacgcagccgatagc

SEQ ID NO: 141965 - DNA, 57 bp, Artificial
  Synthetic oligonucleotide
atacagatatgtcggaccgaagggcgagctcagggattatgggaagcgcgttctcag

SEQ ID NO: 141966 - DNA, 57 bp, Artificial
  Synthetic oligonucleotide
ccattggcaatggaggcgatcggtattgaggtcgttccacccgaatccactgtccgc

SEQ ID NO: 141967 - DNA, 56 bp, Artificial
  Synthetic oligonucleotide
ggcgcgcccattacgcaggacacacaccgtgagtcgtaactacgcccttactacgt

SEQ ID NO: 141968 - DNA, 57 bp, Artificial
  Synthetic oligonucleotide
tacggcatcgcgaccatgccctgacaggcaactggaaggactatcgggactgccatg

SEQ ID NO: 141969 - DNA, 57 bp, Artificial
  Synthetic oligonucleotide
tcgtcccactcagccagcggtgccggtaacattgtccggcactgaagccaaaggacg

SEQ ID NO: 141970 - DNA, 54 bp, Artificial
  Synthetic oligonucleotide
agaccaaattcgtttttggccgtctcgaacccttcttcgatcctccagcgcgtc

SEQ ID NO: 141971 - DNA, 57 bp, Artificial
  Synthetic oligonucleotide
agggaccgcatcgggctgccctagacaccgatctgcggcgaattatcgagcttctgg

SEQ ID NO: 141972 - DNA, 55 bp, Artificial
  Synthetic oligonucleotide
gaaccgctcacccgctggaaaactagacgtaagccgagagggtgaacaccttata

SEQ ID NO: 141973 - DNA, 54 bp, Artificial
  Synthetic oligonucleotide
gacgatggccgcgtaaagccatctcaaaaatcgagacactcgtaaaaaaaccgg

SEQ ID NO: 141974 - DNA, 60 bp, Artificial
  Synthetic oligonucleotide
gccatatgttttccggctgctctagcctgctctgatgcagtcacaatcagacggtataga

SEQ ID NO: 141975 - DNA, 56 bp, Artificial
  Synthetic oligonucleotide
cgagagaccaagcgtcccggtcagtagcatgagggttcaccgcaggtctgcgcatc

SEQ ID NO: 141976 - DNA, 56 bp, Artificial
  Synthetic oligonucleotide
ttgacggtcgaggccacagtgacggatctgacctctccgctcggtacctatgacat

SEQ ID NO: 141977 - DNA, 56 bp, Artificial
  Synthetic oligonucleotide
atggtcacgacgtctgaaatagtagcgccactggctacaatagcagatccgccact

SEQ ID NO: 141978 - DNA, 56 bp, Artificial
  Synthetic oligonucleotide
acctattggcgtaagggaccgcaggacacgttgcctccacctgacatgatggggcc

SEQ ID NO: 141979 - DNA, 56 bp, Artificial
  Synthetic oligonucleotide
ccatgcgcagtccgtccagtcggtatcgtgccaacccgaaggtttttcgtcctgaa

SEQ ID NO: 141980 - DNA, 56 bp, Artificial
  Synthetic oligonucleotide
tgccagcgagccatcgcgtccaaaattctcgagcggggtgctgattatctcgtcac

SEQ ID NO: 141981 - DNA, 56 bp, Artificial
  Synthetic oligonucleotide
gatgtgagtaagggagcggctttggaacttcgcgccccccaaattggccgtgcata

SEQ ID NO: 141982 - DNA, 56 bp, Artificial
  Synthetic oligonucleotide
gctctacggcctcctgaggggctggaatgggcattccggattagtagccgcgtggg

SEQ ID NO: 141983 - DNA, 56 bp, Artificial
  Synthetic oligonucleotide
gtccgtggtcattcatggcatgatttctcaaacgtttggagcttgcctatccggtt

SEQ ID NO: 141984 - DNA, 56 bp, Artificial
  Synthetic oligonucleotide
ttccgaagccgatggataataccaaatcctgtggggagtgactcacgatagtgctt

SEQ ID NO: 141985 - DNA, 60 bp, Artificial
  Synthetic oligonucleotide
gccgacgcttctacgcatcaatgaattttgtgtcgtgatttacacggcagatcatgtgcc

SEQ ID NO: 141986 - DNA, 56 bp, Artificial
  Synthetic oligonucleotide
gctattaaggactgattcacataatgctgtgatatgatgcatacttaaagagcagg

SEQ ID NO: 141987 - DNA, 52 bp, Artificial
  Synthetic oligonucleotide
cgattagaacacacctaagcggaccgcctttcgtggaaggattaacccgact

SEQ ID NO: 141988 - DNA, 56 bp, Artificial
  Synthetic oligonucleotide
cggatggatcaccactgacgtgccagcacctaggattgcgaaataggtggtgaaaa

SEQ ID NO: 141989 - DNA, 56 bp, Artificial
  Synthetic oligonucleotide
tcagtcgtataggacagggtatagaaaggacggagtgaggggtcgagggattccac

SEQ ID NO: 141990 - DNA, 56 bp, Artificial
  Synthetic oligonucleotide
gaaactaagccagagctccctcgctcgggcagatattcgaaccgatcacaggccgc

SEQ ID NO: 141991 - DNA, 56 bp, Artificial
  Synthetic oligonucleotide
tcttacacgcacggcgctggtaaccagtccatcagtcgtcggggcctacaagaatt

SEQ ID NO: 141992 - DNA, 56 bp, Artificial
  Synthetic oligonucleotide
tataaggtcagagacctcgggccggataagtagaggcgccaacagtcctctgcctg

SEQ ID NO: 141993 - DNA, 56 bp, Artificial
  Synthetic oligonucleotide
tcattgccattgcggtcggggcgcaccgacagccgataaccgggaaaaggctgccg

SEQ ID NO: 141994 - DNA, 56 bp, Artificial
  Synthetic oligonucleotide
agggtacgatagatggttgggcgggagacggagaataggtctgcgagatcagtgat

SEQ ID NO: 141995 - DNA, 56 bp, Artificial
  Synthetic oligonucleotide
gcgcgatccatgcgactcgcctctcgattgctattccacttcatgctacgctctgt

SEQ ID NO: 141996 - DNA, 55 bp, Artificial
  Synthetic oligonucleotide
gcctcgggaaattcccctaccacccttaacagaagctctgatcaggttttgctcg

SEQ ID NO: 141997 - DNA, 56 bp, Artificial
  Synthetic oligonucleotide
agccagtgctgagtcacgtaaacggtagagtccacgatcaccgaattacgattggc

SEQ ID NO: 141998 - DNA, 56 bp, Artificial
  Synthetic oligonucleotide
gggccgagaggcggtttgatgcggcacgaatgacggttgactagctccagcttcct

SEQ ID NO: 141999 - DNA, 56 bp, Artificial
  Synthetic oligonucleotide
tcgactagatagatatcgccgcgattcatcaaatcagttcttttccaactgccggg

SEQ ID NO: 142000 - DNA, 56 bp, Artificial
  Synthetic oligonucleotide
ctgctccggctagagatctaggcgctcatagagactgccgtccgacgtcggttgga

SEQ ID NO: 142001 - DNA, 56 bp, Artificial
  Synthetic oligonucleotide
cccatgtggctctttcacttgggccggtaggtctggctctaacccgaccagcggag

SEQ ID NO: 142002 - DNA, 55 bp, Artificial
  Synthetic oligonucleotide
ggaatagagatcactgcgcatataattcgcgtcccgcaggagaagcggggttccc

SEQ ID NO: 142003 - DNA, 55 bp, Artificial
  Synthetic oligonucleotide
gccaacgcaagccgtcgtaatgactgtggaagaaccgcccctcctggtggctgtg

SEQ ID NO: 142004 - DNA, 55 bp, Artificial
  Synthetic oligonucleotide
gccaaggattgaatcgcggaacttggacgtgatgctctagaccatttggcgtggc

SEQ ID NO: 142005 - DNA, 55 bp, Artificial
  Synthetic oligonucleotide
ggccgtgcctgcctggaatttctcgatacgtacctgtcacgacaggattatctgt

SEQ ID NO: 142006 - DNA, 55 bp, Artificial
  Synthetic oligonucleotide
gccagagaaaggcggagccaagaaggccaacaccggcaagcatcctttggagcgg

SEQ ID NO: 142007 - DNA, 57 bp, Artificial
  Synthetic oligonucleotide
gcctcgttccgttcagtgagcgatcaaaccggacttcaggacggatctcgaacaact

SEQ ID NO: 142008 - DNA, 55 bp, Artificial
  Synthetic oligonucleotide
agcggatgtacagctgatgtacagcttatgtcggctttcgggcgaccggtgcatg

SEQ ID NO: 142009 - DNA, 55 bp, Artificial
  Synthetic oligonucleotide
ggacggtcgggaaactgaccgttcggggtcattattagcggcatattcacacgcc

SEQ ID NO: 142010 - DNA, 55 bp, Artificial
  Synthetic oligonucleotide
ggcctgccgattacctcgctgtgctcagatcggtgcgcaatcacgcggtttgtgc

SEQ ID NO: 142011 - DNA, 55 bp, Artificial
  Synthetic oligonucleotide
gccagatatatggatacaaactctgccattgccgcacttagcgccctgtcacagt

SEQ ID NO: 142012 - DNA, 55 bp, Artificial
  Synthetic oligonucleotide
ggaggctctgcgacatgggtatgagaggaccgtccagtggcgccataaccgggaa

SEQ ID NO: 142013 - DNA, 55 bp, Artificial
  Synthetic oligonucleotide
ggccttgtttgccttatgcgctctcaatttcttcatggcggacgtccaagcgggg

SEQ ID NO: 142014 - DNA, 55 bp, Artificial
  Synthetic oligonucleotide
actctcccgctggcgacaaccgaccgatcacgcaccatgggttccgccggtctct

SEQ ID NO: 142015 - DNA, 55 bp, Artificial
  Synthetic oligonucleotide
gcccaacgtcgaattgcaaggctcacacacccggtcagttgtgactgtgccacca

SEQ ID NO: 142016 - DNA, 55 bp, Artificial
  Synthetic oligonucleotide
ggcgaatgattctcattcggtgggattttgttgtgaacgacagtcggcagcccga

SEQ ID NO: 142017 - DNA, 55 bp, Artificial
  Synthetic oligonucleotide
ggactttccgtctccatcgtgatcctccgttgtggctggatcgcgacaggcaaag

SEQ ID NO: 142018 - DNA, 55 bp, Artificial
  Synthetic oligonucleotide
gcctgaggcctttacccgaacggccaccatttccgacgtgggagatacgctaggc

SEQ ID NO: 142019 - DNA, 55 bp, Artificial
  Synthetic oligonucleotide
gcatcccaacgggtagataaaccagattctcgcaaagctttagtcagataagacc

SEQ ID NO: 142020 - DNA, 55 bp, Artificial
  Synthetic oligonucleotide
acttcgtgccttgctggcaagtctcgtccagaggggtaaacttgccccagctggg

SEQ ID NO: 142021 - DNA, 55 bp, Artificial
  Synthetic oligonucleotide
gatagcggtgtgttctgtccggcattgaacgctatatcctgaattgtccgtacgg

SEQ ID NO: 142022 - DNA, 55 bp, Artificial
  Synthetic oligonucleotide
ggcaacctgcgtgaaacccttcgtcaggagagacgcaacggaattcgggtttgta

SEQ ID NO: 142023 - DNA, 55 bp, Artificial
  Synthetic oligonucleotide
gcaggccggatcttctacgccctaaaaccccacgtatcagggaccgcacgggcat

SEQ ID NO: 142024 - DNA, 55 bp, Artificial
  Synthetic oligonucleotide
actccgccccataagaactgggcaccctggatacgtgctgccttcaggaacgtat

SEQ ID NO: 142025 - DNA, 55 bp, Artificial
  Synthetic oligonucleotide
gatagatcgccatggacgcgatcttatcacatcccttaagcgcacgtcacgaagt

SEQ ID NO: 142026 - DNA, 55 bp, Artificial
  Synthetic oligonucleotide
ggcaattaccgcctgaggttcacaatacactttcagacttggcgaaggttcaacg

SEQ ID NO: 142027 - DNA, 55 bp, Artificial
  Synthetic oligonucleotide
ggcacgcgtattgaatgtccgaggtacgacaagtcgcgcgtttcgagcggtgcgg

SEQ ID NO: 142028 - DNA, 55 bp, Artificial
  Synthetic oligonucleotide
ggaccgtctcgtaaagctctataacgagacctacaataaccttgtgccgcgtgcc

SEQ ID NO: 142029 - DNA, 51 bp, Artificial
  Synthetic oligonucleotide
gcctgcccgctagggcaccccgttttcctccaaccttccctaatactcttt

SEQ ID NO: 142030 - DNA, 55 bp, Artificial
  Synthetic oligonucleotide
ggcatctacgctgagaaccgaatagatatcatccgtaatgccgggttcttctgcc

SEQ ID NO: 142031 - DNA, 55 bp, Artificial
  Synthetic oligonucleotide
ggccacaggagcatgcgagagggttatcccaagaacatgacgggtcaagacacgg

SEQ ID NO: 142032 - DNA, 55 bp, Artificial
  Synthetic oligonucleotide
ggccagaccggaaatcaggcgcggtgcgagaaaatgtcgggctcttcgtagccca

SEQ ID NO: 142033 - DNA, 55 bp, Artificial
  Synthetic oligonucleotide
ggccagggagtgtcgtcataagcgaccacacaagaagccgcatagcgagccgttg

SEQ ID NO: 142034 - DNA, 55 bp, Artificial
  Synthetic oligonucleotide
ggcaaatcgtggtttgccctggaactggctatggccgttgcgggtggccctgatc

SEQ ID NO: 142035 - DNA, 55 bp, Artificial
  Synthetic oligonucleotide
ggcccgccccactgcaagctgttttgacctatcgggcactgagcagtctgcgtga

SEQ ID NO: 142036 - DNA, 55 bp, Artificial
  Synthetic oligonucleotide
ggaccatccacgggtcagaccaacccgcgacaaaggcacgtccacaaacgcacca

SEQ ID NO: 142037 - DNA, 55 bp, Artificial
  Synthetic oligonucleotide
ggcccgtttagcgtgaatcttgacggcatttatcaaggtggctcgttccatcccg

SEQ ID NO: 142038 - DNA, 55 bp, Artificial
  Synthetic oligonucleotide
ggcccttgcactgctttggcgggaaattatcaataagggttctcaatggatgcgg

SEQ ID NO: 142039 - DNA, 55 bp, Artificial
  Synthetic oligonucleotide
ggccggaggcgtgtcgggtgtcgtttgatctcgtcttatgcgtctgatgaagggg

SEQ ID NO: 142040 - DNA, 52 bp, Artificial
  Synthetic oligonucleotide
gcgaggattcctacgggtttcgcggaaaagccatccgccatcgaaatttttt

SEQ ID NO: 142041 - DNA, 55 bp, Artificial
  Synthetic oligonucleotide
ggacacaccggaaaggtgatgccaaccgccgttctgtatggatctgctctcgtaa

SEQ ID NO: 142042 - DNA, 55 bp, Artificial
  Synthetic oligonucleotide
gatatcggaacaccagacctggttaggtcgatcaatgaccagatcccgcagcaga

SEQ ID NO: 142043 - DNA, 55 bp, Artificial
  Synthetic oligonucleotide
gcgggttgtacctaccagtctgcggcgatatgctctagatggcgcttgtaaggtg

SEQ ID NO: 142044 - DNA, 55 bp, Artificial
  Synthetic oligonucleotide
gcggcttgatcattagatccagcattgagaaaatacgatctatcgtttggcctga

SEQ ID NO: 142045 - DNA, 55 bp, Artificial
  Synthetic oligonucleotide
gcggatatcggcgctgcatggggacaaggagcatctgcacctgcatgtggcgatc

SEQ ID NO: 142046 - DNA, 55 bp, Artificial
  Synthetic oligonucleotide
gcgctgcgtagctgtgtggagctacaagccatgtaacaaacagccccgcgataac

SEQ ID NO: 142047 - DNA, 55 bp, Artificial
  Synthetic oligonucleotide
gcaacacccataataaggctggatgttgacaaaataccgtcattcgcgcccaaca

SEQ ID NO: 142048 - DNA, 55 bp, Artificial
  Synthetic oligonucleotide
gcccttcccgaagatcggctttctcagcgttcgtattgcgctgcttgggagcagc

SEQ ID NO: 142049 - DNA, 55 bp, Artificial
  Synthetic oligonucleotide
gcgcgggtcggctaggaagacgcctgtacgagtgacagacatgccgctttcaacg

SEQ ID NO: 142050 - DNA, 55 bp, Artificial
  Synthetic oligonucleotide
gcgcgccgttcccgtcgttctatccgttccgaactgaatgcatggccgggctatg

SEQ ID NO: 142051 - DNA, 60 bp, Artificial
  Synthetic oligonucleotide
gcgcatccgcctcgggatcatagctggtcgtgatcacggtctggctcctcgatcaaaact

SEQ ID NO: 142052 - DNA, 55 bp, Artificial
  Synthetic oligonucleotide
gcacaactatcccgcgcaggtggatggaaggcaatcagtctgcgccgatatgcgc

SEQ ID NO: 142053 - DNA, 55 bp, Artificial
  Synthetic oligonucleotide
gcacacgcagacacaaagtacaaccctcacgtgccactctcagggcttaactgac

SEQ ID NO: 142054 - DNA, 55 bp, Artificial
  Synthetic oligonucleotide
gccctttggacgaacaataacgacatgatgtccggcgaactgaacatcaagcgcc

SEQ ID NO: 142055 - DNA, 55 bp, Artificial
  Synthetic oligonucleotide
gcgcgaactgccgatcgatggacgtaggaatagtgccaacaagattgcctgcgtc

SEQ ID NO: 142056 - DNA, 55 bp, Artificial
  Synthetic oligonucleotide
gccgagtgcatttctgacgcctgaatgatcgctaaggggaacccttggccgcacc

SEQ ID NO: 142057 - DNA, 55 bp, Artificial
  Synthetic oligonucleotide
gcgcccggcacaagcattcccttaaaagtgagggccatgattgactatcttgcag

SEQ ID NO: 142058 - DNA, 53 bp, Artificial
  Synthetic oligonucleotide
gccgccattaacccggaacgcgggctattgatcacgaaaccgcttccaaaacg

SEQ ID NO: 142059 - DNA, 55 bp, Artificial
  Synthetic oligonucleotide
gcgccattcagaagggccgtgggaagattgatggctccgagcacagatcgtgggg

SEQ ID NO: 142060 - DNA, 55 bp, Artificial
  Synthetic oligonucleotide
gcgccacgtcatccgacataccacacatgaaatcatcaacgtggactgcatgacc

SEQ ID NO: 142061 - DNA, 55 bp, Artificial
  Synthetic oligonucleotide
gcaccgcggccataacgccgcattgttgcgcaacagggccaatgagtttgtgggg

SEQ ID NO: 142062 - DNA, 59 bp, Artificial
  Synthetic oligonucleotide
gaaaccgcgtggttctgccacgtattctcatgaactgcggaatccagccgtatttccga

SEQ ID NO: 142063 - DNA, 60 bp, Artificial
  Synthetic oligonucleotide
gctacaacagcaagacgccagagaaaggcggagccaagaaggccaacaccggcaagcatc

SEQ ID NO: 142064 - DNA, 55 bp, Artificial
  Synthetic oligonucleotide
gccgctgttactgcgtcgaacgtgacgagtgtttcttttcgcgttgtcatgtcgg

SEQ ID NO: 142065 - DNA, 55 bp, Artificial
  Synthetic oligonucleotide
gccgggctgcgctcactggctgaaccgttccttgataccacatccgactttgccg

SEQ ID NO: 142066 - DNA, 54 bp, Artificial
  Synthetic oligonucleotide
gccggggtggtatttcattcgtccttagatcgtcgccgtcctttagcgggagcc

SEQ ID NO: 142067 - DNA, 55 bp, Artificial
  Synthetic oligonucleotide
gcgatcattcacgatgtaggcgtttgttgttccgacaccgcctagctgacggacc

SEQ ID NO: 142068 - DNA, 55 bp, Artificial
  Synthetic oligonucleotide
gcgatcaaaccggacttcaggacggatctcgaacaacttgacggaatgaccgagc

SEQ ID NO: 142069 - DNA, 55 bp, Artificial
  Synthetic oligonucleotide
gcgagtgctctggccccgtcaggattcacagaatcaataggaggtctaaacgcaa

SEQ ID NO: 142070 - DNA, 55 bp, Artificial
  Synthetic oligonucleotide
gcgaggcttgtcctcatatctaccaaacttgcgaccatgctcagtcggggtccag

SEQ ID NO: 142071 - DNA, 55 bp, Artificial
  Synthetic oligonucleotide
gcagatcacatgttacggcatgcccgtcagacgctacaggatggccgtacaggcg

SEQ ID NO: 142072 - DNA, 55 bp, Artificial
  Synthetic oligonucleotide
gcctccttctgtaatatggccgcttatggcttccgcatgcacggaacggagcgtg

SEQ ID NO: 142073 - DNA, 55 bp, Artificial
  Synthetic oligonucleotide
gccgggtcgcatgcggaacgggttaacatgtcgcaaggctattctcacgcttccg

SEQ ID NO: 142074 - DNA, 59 bp, Artificial
  Synthetic oligonucleotide
gctatccattaacaattacgtcataaagacttatagctctttaggatattccttcatag

SEQ ID NO: 142075 - DNA, 55 bp, Artificial
  Synthetic oligonucleotide
gccggtaatccctcgggcttacccagacggttcccgacagtacgcaggcatgtca

SEQ ID NO: 142076 - DNA, 55 bp, Artificial
  Synthetic oligonucleotide
gcccaccgattgactggaaccgcatgtgcccgccccagaaaatgggcgtggtaca

SEQ ID NO: 142077 - DNA, 55 bp, Artificial
  Synthetic oligonucleotide
gcccctttcatgcccaccatacggacatatagatgacagcctcttccccgctgga

SEQ ID NO: 142078 - DNA, 55 bp, Artificial
  Synthetic oligonucleotide
gcttgggtgaacgatgagacgaaattgcgcacctatggttcaaggactgacgctt

SEQ ID NO: 142079 - DNA, 55 bp, Artificial
  Synthetic oligonucleotide
gcttgccgctcctaagtaagttctgttacgtattaccgttcgtaatacggagctg

SEQ ID NO: 142080 - DNA, 55 bp, Artificial
  Synthetic oligonucleotide
gatcactgagtatgacgacgcgacaggaaaaccaacgtcattccttgacgcagtg

SEQ ID NO: 142081 - DNA, 55 bp, Artificial
  Synthetic oligonucleotide
agccgggaactcccggttataggccgaaggatggccgtacagggcactcagacga

SEQ ID NO: 142082 - DNA, 55 bp, Artificial
  Synthetic oligonucleotide
gatctgctgacttctaccgagcagctagatgagttgcggcgcgtgacacggtatc

SEQ ID NO: 142083 - DNA, 55 bp, Artificial
  Synthetic oligonucleotide
agacatgtcttccagaatccccgccccgtcagaccccgtgcgtccctgccgactg

SEQ ID NO: 142084 - DNA, 55 bp, Artificial
  Synthetic oligonucleotide
gctggtcttagtcgctcccttgatcgcaagagacgtgcgacccgtaaggaagtcg

SEQ ID NO: 142085 - DNA, 60 bp, Artificial
  Synthetic oligonucleotide
gctcacgtgtcaggcaccaatctggtatcacgtgctcaggggcacagacggtcgaacggt

SEQ ID NO: 142086 - DNA, 55 bp, Artificial
  Synthetic oligonucleotide
gatgcacgttgatatgcacatgtgctgttccacccgacccgttatcgaaggaacg

SEQ ID NO: 142087 - DNA, 55 bp, Artificial
  Synthetic oligonucleotide
gctggcgttgactgacgcggtcggttcatttcggttcggctgctttacgcagggg

SEQ ID NO: 142088 - DNA, 55 bp, Artificial
  Synthetic oligonucleotide
gctgatgcgtttgaatggctgtcgcagcttccgcccgagagcgttgacggcatgg

SEQ ID NO: 142089 - DNA, 55 bp, Artificial
  Synthetic oligonucleotide
gctctggttacgatccagctggtcgcggtttaatcgtactgatggctgcgagatc

SEQ ID NO: 142090 - DNA, 55 bp, Artificial
  Synthetic oligonucleotide
gctcgccctggcagtgcagatttcgaggcattggcgaagggatgcgatctactcg

SEQ ID NO: 142091 - DNA, 55 bp, Artificial
  Synthetic oligonucleotide
gctcgagcttgctccgcccctgcggcaccgtaaccccgcgctccaacaggatcgc

SEQ ID NO: 142092 - DNA, 55 bp, Artificial
  Synthetic oligonucleotide
gcccgctttgcatacgggtcagaatctccagccactcgtctttcgtatgccgcgg

SEQ ID NO: 142093 - DNA, 55 bp, Artificial
  Synthetic oligonucleotide
gctcatcaatctggatccagaagcatcccgcgttgttcagttgttcgaagcattc

SEQ ID NO: 142094 - DNA, 55 bp, Artificial
  Synthetic oligonucleotide
gctatctaagttaagaggtggccgatgggtgatagctgcatgaaaagcgggatct

SEQ ID NO: 142095 - DNA, 55 bp, Artificial
  Synthetic oligonucleotide
gcagcgccctttacgaatgcggtgcgcctcactagaaccattttcgcatacgccg

SEQ ID NO: 142096 - DNA, 60 bp, Artificial
  Synthetic oligonucleotide
gctccaaggtgttgcgtcagtctgatttccggttcatgtcatactcctatcagcttctgt

SEQ ID NO: 142097 - DNA, 55 bp, Artificial
  Synthetic oligonucleotide
gcgtttcccgacttattcctaagtcacgagcaatccgggctttgggctcatgggc

SEQ ID NO: 142098 - DNA, 55 bp, Artificial
  Synthetic oligonucleotide
gcgtttagctgccgcagtctcttccacaagcttgaggcgcccggatacagcccag

SEQ ID NO: 142099 - DNA, 55 bp, Artificial
  Synthetic oligonucleotide
gcgttgcgttgctcatttggcattctccgaacctgccgatagctttgtccgtgat

SEQ ID NO: 142100 - DNA, 55 bp, Artificial
  Synthetic oligonucleotide
gcccggtgggccacccttggcttcgccaaaggcgcgaagcatctctgccggatca

SEQ ID NO: 142101 - DNA, 55 bp, Artificial
  Synthetic oligonucleotide
gattcctcgcgcctggagatagcccgtaccataggtcgccccgtcagagactagg

SEQ ID NO: 142102 - DNA, 55 bp, Artificial
  Synthetic oligonucleotide
gcgtgagttcattcgcttgcagtccggctatatcggtcattcgggcgtgcggacc

SEQ ID NO: 142103 - DNA, 55 bp, Artificial
  Synthetic oligonucleotide
gcgtcttggcggaagtgtaaagaatcctgacaggtgattgcgagttttggggata

SEQ ID NO: 142104 - DNA, 55 bp, Artificial
  Synthetic oligonucleotide
gatttctttcgcgatcggaccttcatagaaggctttgggaccttcctttgcgacc

SEQ ID NO: 142105 - DNA, 55 bp, Artificial
  Synthetic oligonucleotide
gcgtccgatcagagaccgcttggcgctaaccggtagttcattgggtgcgaactgg

SEQ ID NO: 142106 - DNA, 55 bp, Artificial
  Synthetic oligonucleotide
gcgtataggcggaggatcagggacgtggcccgtattggcaagctcgccggcttaa

SEQ ID NO: 142107 - DNA, 60 bp, Artificial
  Synthetic oligonucleotide
gctccatagcggaaccgtgggctgataccatgacaagcactggtcgtctgatgctggctg

SEQ ID NO: 142108 - DNA, 55 bp, Artificial
  Synthetic oligonucleotide
acggtcttccgcctcaaacgtcaccccatccgtggccagcagaaaccgtgccttg

SEQ ID NO: 142109 - DNA, 55 bp, Artificial
  Synthetic oligonucleotide
tcatagcgtcccagcgccctatccgtccgcccggtcgcaagctccttcgtagccg

SEQ ID NO: 142110 - DNA, 55 bp, Artificial
  Synthetic oligonucleotide
tcatcacggcggccggtgtgatctgtgagaaagcggcatcggctcttgctgaatt

SEQ ID NO: 142111 - DNA, 55 bp, Artificial
  Synthetic oligonucleotide
tcatcgttgccggatattagggctgcaatcagacggccctagagccgcccctggc

SEQ ID NO: 142112 - DNA, 55 bp, Artificial
  Synthetic oligonucleotide
tcatgggactggttgagcgcggaacggacgcagaccactacaaggtgactgcgcg

SEQ ID NO: 142113 - DNA, 55 bp, Artificial
  Synthetic oligonucleotide
tccacgacgcggttcggccacgcatggtaggatgggaagtctgaagagacggccc

SEQ ID NO: 142114 - DNA, 55 bp, Artificial
  Synthetic oligonucleotide
tccatacggatgttaatggactgacgatccagttatcaggtcgcgtatcgtactg

SEQ ID NO: 142115 - DNA, 55 bp, Artificial
  Synthetic oligonucleotide
tcccacagttattcgcgctgccatgcgtgaggatgattccgtggtgcaaagccgc

SEQ ID NO: 142116 - DNA, 55 bp, Artificial
  Synthetic oligonucleotide
tcccacgcccgccacctgtgggtcggtaaacgtgacccagggcatgaccgtattg

SEQ ID NO: 142117 - DNA, 55 bp, Artificial
  Synthetic oligonucleotide
tccctcgggcccgcggcccagtatggcctgcgcaggggagcgcatagccagccac

SEQ ID NO: 142118 - DNA, 59 bp, Artificial
  Synthetic oligonucleotide
gctgggaaagagaccgtgtggaccctcaaaggaggcgagcgcctgtaagaccagatgtg

SEQ ID NO: 142119 - DNA, 55 bp, Artificial
  Synthetic oligonucleotide
tccctgaagcctgtgacaagcgcgcgggaccatagcggcagcgaggggcgaagtt

SEQ ID NO: 142120 - DNA, 55 bp, Artificial
  Synthetic oligonucleotide
tccgatcggcgcattgccacctccgtcctcgcagtggcgttggtgcatcatgttc

SEQ ID NO: 142121 - DNA, 55 bp, Artificial
  Synthetic oligonucleotide
tcgagacaaagccttacatttccataaagatcttatacgacacgtggagggttcg

SEQ ID NO: 142122 - DNA, 55 bp, Artificial
  Synthetic oligonucleotide
tcgcacagatatctcccgaagttattgttatacgcggatatacgtacctagaggg

SEQ ID NO: 142123 - DNA, 55 bp, Artificial
  Synthetic oligonucleotide
aatcccactgcccctgcgctggcacacgcttttcatgtgcatccacaccacgata

SEQ ID NO: 142124 - DNA, 55 bp, Artificial
  Synthetic oligonucleotide
tcgctcccttaggggcgaaccggacatagagcgcatccgcctcgggatcatagct

SEQ ID NO: 142125 - DNA, 55 bp, Artificial
  Synthetic oligonucleotide
aatagaaccgatatccctcatgccggaaaactaccggcattcacgattcctcccc

SEQ ID NO: 142126 - DNA, 55 bp, Artificial
  Synthetic oligonucleotide
tcggggcgtcacgaccaagcggggctaagtgcccgagcggactacgaaaactatc

SEQ ID NO: 142127 - DNA, 55 bp, Artificial
  Synthetic oligonucleotide
tcggtaagggactttcctcatgctgctcacgatttctgacgctgctgcattcgac

SEQ ID NO: 142128 - DNA, 55 bp, Artificial
  Synthetic oligonucleotide
tcgtatttaatttgagagcgactacggacatgatctagccgttcggtccacccta

SEQ ID NO: 142129 - DNA, 60 bp, Artificial
  Synthetic oligonucleotide
gctgtatccgggcgcctcaagcttgtggaagagactgcggcagctaaacgcgaactcttt

SEQ ID NO: 142130 - DNA, 55 bp, Artificial
  Synthetic oligonucleotide
tacacctgcaccaaggtggccgctgatctggccgagatgcgcggtgtcgataagg

SEQ ID NO: 142131 - DNA, 55 bp, Artificial
  Synthetic oligonucleotide
acacggcgccctgactccggtgactggtttcacgtttgctccatcacgaagcggg

SEQ ID NO: 142132 - DNA, 55 bp, Artificial
  Synthetic oligonucleotide
tacagtttcgacgtcgcactgtgccagtcaggaacgttctgcgaaaacgacctgg

SEQ ID NO: 142133 - DNA, 55 bp, Artificial
  Synthetic oligonucleotide
tacccactggtcccggtctcgacccgcccacccagccgccactgatgggattgga

SEQ ID NO: 142134 - DNA, 55 bp, Artificial
  Synthetic oligonucleotide
acacgcaggccgatcctgcggtctgacagatccttcacggtgttgaccaggtggg

SEQ ID NO: 142135 - DNA, 55 bp, Artificial
  Synthetic oligonucleotide
tacgccacttactttgatgcgattcgcttctataaggtcagagacctcgggccgg

SEQ ID NO: 142136 - DNA, 55 bp, Artificial
  Synthetic oligonucleotide
tactagcgcggaaccaacccgatctgtgctgttccggagcgccgccactcttgct

SEQ ID NO: 142137 - DNA, 55 bp, Artificial
  Synthetic oligonucleotide
acaccccgacccatgcaggggccatcagtgaggaaggctatcacaaggacctcgg

SEQ ID NO: 142138 - DNA, 55 bp, Artificial
  Synthetic oligonucleotide
tactgcgtctagtttcgacagatagtgttgttctgtatgtcgttagtccggcagg

SEQ ID NO: 142139 - DNA, 55 bp, Artificial
  Synthetic oligonucleotide
tagggattgggagacgttgtggtgtcacgagatccacatcccattaactccaccc

SEQ ID NO: 142140 - DNA, 60 bp, Artificial
  Synthetic oligonucleotide
gacgtttgatgtctgccaatgtcagttttgccatttgatccactcctttcggtgcatctt

SEQ ID NO: 142141 - DNA, 55 bp, Artificial
  Synthetic oligonucleotide
tatcaaccgtgcgccgtttctgtctcgtgctgaagcaacatccgtctggggcacg

SEQ ID NO: 142142 - DNA, 55 bp, Artificial
  Synthetic oligonucleotide
acaactcgaacttccacgttgccagctgtcaggatctcgtatagccgtctccaac

SEQ ID NO: 142143 - DNA, 55 bp, Artificial
  Synthetic oligonucleotide
tatggtgcctcaataggggatttaccaaaccgtagatgagatgccgtttcggccc

SEQ ID NO: 142144 - DNA, 55 bp, Artificial
  Synthetic oligonucleotide
tattcttctgtgccgcggtcatcgcagttacctgcaacttcaacgttaacctgcg

SEQ ID NO: 142145 - DNA, 55 bp, Artificial
  Synthetic oligonucleotide
tcaagcctggacgttgatgcaccggcgctggctgtcgggactgcgctttgagcag

SEQ ID NO: 142146 - DNA, 55 bp, Artificial
  Synthetic oligonucleotide
tcaccatccggcgcagcaaaactgatcaggacggcagcgggcagaccatcggcat

SEQ ID NO: 142147 - DNA, 55 bp, Artificial
  Synthetic oligonucleotide
tcacgaagtcccgtacaaggttgatctgctcttcccgcgaaagctcacggggaag

SEQ ID NO: 142148 - DNA, 55 bp, Artificial
  Synthetic oligonucleotide
tcaggacagacgtgatccgtgagcattggagcgacattgtccgcttggtcgcttc

SEQ ID NO: 142149 - DNA, 55 bp, Artificial
  Synthetic oligonucleotide
tcagtcaaattatgtctgaactggtggcttttcgggccatcactcgaacccgcca

SEQ ID NO: 142150 - DNA, 55 bp, Artificial
  Synthetic oligonucleotide
tcagtcaccattcagagattcacggagcgagtccacagtttcttgcgcccgagtc

SEQ ID NO: 142151 - DNA, 60 bp, Artificial
  Synthetic oligonucleotide
gactcaacagcccgccctgacgatgccgactgagtctcaatcggccctgaaccatagccg

SEQ ID NO: 142152 - DNA, 55 bp, Artificial
  Synthetic oligonucleotide
aacctgtcttatcgtcatggtcggaggcgctctcggcacgttggcgcgttacctg

SEQ ID NO: 142153 - DNA, 55 bp, Artificial
  Synthetic oligonucleotide
ttaatcagacttctcggtcctgaagaggggaatatctgtcgctgattctttcccc

SEQ ID NO: 142154 - DNA, 55 bp, Artificial
  Synthetic oligonucleotide
ttacgggcagctttcctttctcgctcggtatgtagcatattttccgagcgagttg

SEQ ID NO: 142155 - DNA, 55 bp, Artificial
  Synthetic oligonucleotide
ttagggacagtacgggagaccgtcgcgtgtggcctgttaagtgtggcgtgaacgg

SEQ ID NO: 142156 - DNA, 55 bp, Artificial
  Synthetic oligonucleotide
aaccgcgctgcgggtctgggcactgtgcttcaaacacctgcggacagacactgga

SEQ ID NO: 142157 - DNA, 55 bp, Artificial
  Synthetic oligonucleotide
ttcatatatgatcacatctgatccatacaaatcaaccctgctcacctaagtgagc

SEQ ID NO: 142158 - DNA, 55 bp, Artificial
  Synthetic oligonucleotide
ttccgagcgcacgttacgagagacttacgcgaccttttgtgagctacggccgaaa

SEQ ID NO: 142159 - DNA, 55 bp, Artificial
  Synthetic oligonucleotide
aacccgagcggatattcccagtcatccgatccgaagtagaaatcggagatcgcga

SEQ ID NO: 142160 - DNA, 55 bp, Artificial
  Synthetic oligonucleotide
ttcgacccttagcggagcgtaggggcgaaaggatagcgcagcgacgcctttcgtc

SEQ ID NO: 142161 - DNA, 55 bp, Artificial
  Synthetic oligonucleotide
ttcgcatatagcgatcttcctataccgccttgatgtgcctgggcatcatagcctg

SEQ ID NO: 142162 - DNA, 60 bp, Artificial
  Synthetic oligonucleotide
gactcagggatgatcactgagtatgacgacgcgacaggaaaaccaacgtcattccttgac

SEQ ID NO: 142163 - DNA, 55 bp, Artificial
  Synthetic oligonucleotide
aacatggttttaatctcgggattctggacggttcaatcatcggtgtgagccgaac

SEQ ID NO: 142164 - DNA, 55 bp, Artificial
  Synthetic oligonucleotide
ttcttcgcggtgcgtaccgctcttccgacccattccacacgcacggaaagtgccg

SEQ ID NO: 142165 - DNA, 55 bp, Artificial
  Synthetic oligonucleotide
aaagcgttgaacagccctgcctcgattcctgagcttacgttttgcgagcgtgcaa

SEQ ID NO: 142166 - DNA, 55 bp, Artificial
  Synthetic oligonucleotide
tttaccgccggtcatcgcgcttcaccggacggttccagaccagatggaaggcacg

SEQ ID NO: 142167 - DNA, 55 bp, Artificial
  Synthetic oligonucleotide
tttcaagagccgcgccgcccaaagtccgccaatccgctcgcagcctgtcggcgtt

SEQ ID NO: 142168 - DNA, 55 bp, Artificial
  Synthetic oligonucleotide
tttctctttcccggtgactggggatgcgcaacctagcgacaggagggcgctcctg

SEQ ID NO: 142169 - DNA, 55 bp, Artificial
  Synthetic oligonucleotide
tttgcgatctggagcgccggaagcctgttaccctattgccggaccgagcgctgga

SEQ ID NO: 142170 - DNA, 55 bp, Artificial
  Synthetic oligonucleotide
aaaaggttggcccgaccttcgggaccgccagtgacaccctcatgctggccgtcag

SEQ ID NO: 142171 - DNA, 55 bp, Artificial
  Synthetic oligonucleotide
ttttatcgtcttgtcaaaccattgccttatatacgaggcatacggatcattcgga

SEQ ID NO: 142172 - DNA, 55 bp, Artificial
  Synthetic oligonucleotide
tcgtcggaacgagccaaaacttcggctgagaacctagcgtagcggagcttgtcgc

SEQ ID NO: 142173 - DNA, 60 bp, Artificial
  Synthetic oligonucleotide
gaaagcttatgaggatgcgccagcgttagggcagtcaccccaagagtatgagcccaaggg

SEQ ID NO: 142174 - DNA, 60 bp, Artificial
  Synthetic oligonucleotide
gactgcaaccctgtaagatagagaatgcttcgtgtgccttggcgctgtgcaactcgcttg

SEQ ID NO: 142175 - DNA, 55 bp, Artificial
  Synthetic oligonucleotide
tctagacaactagatatccgtcaggctagcgtcaacgcgaaaattgccacggacc

SEQ ID NO: 142176 - DNA, 55 bp, Artificial
  Synthetic oligonucleotide
tctggaagacgggctaatcgatgaagctgaattctggctgaaggtgcgaaaccag

SEQ ID NO: 142177 - DNA, 54 bp, Artificial
  Synthetic oligonucleotide
tctggcccggaaccctagtccggccccgaccctaccaatgtcacagtcctgcgt

SEQ ID NO: 142178 - DNA, 55 bp, Artificial
  Synthetic oligonucleotide
tcttctcacatagagacggcgcgccactgtcgggtaggccgactcacataatacc

SEQ ID NO: 142179 - DNA, 55 bp, Artificial
  Synthetic oligonucleotide
tgaccctctttaactgccgcgtgccgatcctgaacgcatgacaacggatatgacc

SEQ ID NO: 142180 - DNA, 55 bp, Artificial
  Synthetic oligonucleotide
tgaccttcaccgttcagacatgccctgagactgctaaggactggtctcggctggt

SEQ ID NO: 142181 - DNA, 55 bp, Artificial
  Synthetic oligonucleotide
tgaggctgcggcttgggtttcccggtcggcacgggctgcggaacacatgagaaaa

SEQ ID NO: 142182 - DNA, 55 bp, Artificial
  Synthetic oligonucleotide
aagcttccgtatcaggatcatctggcatggatacagggttcgggatcattcagcg

SEQ ID NO: 142183 - DNA, 55 bp, Artificial
  Synthetic oligonucleotide
tgcagttcaggccgcgtcccatagcgagcatccggtccatgccatctgtggcgta

SEQ ID NO: 142184 - DNA, 53 bp, Artificial
  Synthetic oligonucleotide
aagacaccggcctaccgccctcgaaacgggtgccgcagtagacgccggtatcc

SEQ ID NO: 142185 - DNA, 60 bp, Artificial
  Synthetic oligonucleotide
gactgccatttgcatccaggatagcattaccaacggggcagatcagggggcataaatccc

SEQ ID NO: 142186 - DNA, 55 bp, Artificial
  Synthetic oligonucleotide
tggacaaggtgatgtttcgggacgatatgcggccagttaaccggttggcatgagg

SEQ ID NO: 142187 - DNA, 55 bp, Artificial
  Synthetic oligonucleotide
tggaggcggtggaatttgtgtcgttcccaccagatcgaggcgagactgccgctca

SEQ ID NO: 142188 - DNA, 55 bp, Artificial
  Synthetic oligonucleotide
tggcgcgttccatgtattgcggcatgtggcggcgcatatggtcacgcgcgggttt

SEQ ID NO: 142189 - DNA, 55 bp, Artificial
  Synthetic oligonucleotide
tggtcgcttcgctttgacacgccgtcggcgactgacctattgcaccttgaggaga

SEQ ID NO: 142190 - DNA, 55 bp, Artificial
  Synthetic oligonucleotide
aacgaggaaggaagtcgaaatgtccatcaggacgggcgatgcaccgccgcgcgtc

SEQ ID NO: 142191 - DNA, 54 bp, Artificial
  Synthetic oligonucleotide
tggtcttctccgttcagggacgtggtctgtcgggcggccctttgtggggaagag

SEQ ID NO: 142192 - DNA, 55 bp, Artificial
  Synthetic oligonucleotide
tggtgcgtttgtggacgtgcctttgtcgcgggttggtctgacccgtggatggtcc

SEQ ID NO: 142193 - DNA, 55 bp, Artificial
  Synthetic oligonucleotide
tggttatcccgattgaatgtaactgagctcgcaggtcgattaatccccgaaggat

SEQ ID NO: 142194 - DNA, 55 bp, Artificial
  Synthetic oligonucleotide
aacgaaggacgctccaatcccgatgcaggttatctgtcagcccgatacgcgccca

SEQ ID NO: 142195 - DNA, 55 bp, Artificial
  Synthetic oligonucleotide
ggggatatctagagccaccctacagcgggccgtatctagcggaaaacttagtgct

SEQ ID NO: 142196 - DNA, 52 bp, Artificial
  Synthetic oligonucleotide
gagaccgctacccgggcgaataaatctcggaatccccgggcgaataaacgtc

SEQ ID NO: 142197 - DNA, 55 bp, Artificial
  Synthetic oligonucleotide
acggctaggctgccgggagataacagcctcctttgtaggacgccgcgccattgtg

SEQ ID NO: 142198 - DNA, 55 bp, Artificial
  Synthetic oligonucleotide
ggggctaccggagacaacagcgggccagctgatccattccttttccagtcactac

SEQ ID NO: 142199 - DNA, 54 bp, Artificial
  Synthetic oligonucleotide
gggtaccgcttcccggggtcatgtgtggaacggccctggattcaagatcgacgg

SEQ ID NO: 142200 - DNA, 55 bp, Artificial
  Synthetic oligonucleotide
ggtaaggagtcgattttcgctgacaggtattctccggcccgcattgttccagcga

SEQ ID NO: 142201 - DNA, 55 bp, Artificial
  Synthetic oligonucleotide
ggtagatgtcacatctggccgggtttccgcgggctgtgtcgaatcagtcgcgggt

SEQ ID NO: 142202 - DNA, 55 bp, Artificial
  Synthetic oligonucleotide
ggtcagtaggggagacactcattccatctaaaatgccacccacattccagcgaac

SEQ ID NO: 142203 - DNA, 55 bp, Artificial
  Synthetic oligonucleotide
ggtcatcaatcgagtggaggcacccaaatgacacgcctttcaaggatcgagagtc

SEQ ID NO: 142204 - DNA, 55 bp, Artificial
  Synthetic oligonucleotide
ggtcctgtttgtcgattcacgggtcgataactggcgggaactgacatccggcctg

SEQ ID NO: 142205 - DNA, 55 bp, Artificial
  Synthetic oligonucleotide
ggtcgctcctgcgctccgcgcaagggcgtaatcacgccatgaggtttaatgttgc

SEQ ID NO: 142206 - DNA, 54 bp, Artificial
  Synthetic oligonucleotide
ggtctccgacggagttggtgcgctttctccgttaatcagtttccggccgacctc

SEQ ID NO: 142207 - DNA, 60 bp, Artificial
  Synthetic oligonucleotide
gagagcaacacagcggcagaaaacaggctgtagcggataccatcgcggtttccggaccaa

SEQ ID NO: 142208 - DNA, 55 bp, Artificial
  Synthetic oligonucleotide
ggtgggtgaagatgcaacctatgtttcacgccttcgtgtcgatccaacagttccc

SEQ ID NO: 142209 - DNA, 55 bp, Artificial
  Synthetic oligonucleotide
ggtgtacggctaggctgccgggagataacagcctcctttgtaggacgcctgcagc

SEQ ID NO: 142210 - DNA, 55 bp, Artificial
  Synthetic oligonucleotide
ggtgtcctctccgtcctgtataaccggactgtccttacaacactgcggttcgcgg

SEQ ID NO: 142211 - DNA, 55 bp, Artificial
  Synthetic oligonucleotide
acgaaagcttgatccttctggcgactatgatagcgttatcaggcagccacgggcg

SEQ ID NO: 142212 - DNA, 55 bp, Artificial
  Synthetic oligonucleotide
acctgcgacaacgttcgcatatgctaggtgatgctcttcatgtggcgtccagcat

SEQ ID NO: 142213 - DNA, 55 bp, Artificial
  Synthetic oligonucleotide
ggttcacgtcaggtttctctgttaccgtcagaaagtcatcgtcgtgatggcagga

SEQ ID NO: 142214 - DNA, 55 bp, Artificial
  Synthetic oligonucleotide
ggttccttaggggcaatgacaaccctgatccacaatactggcccacgtatgcccg

SEQ ID NO: 142215 - DNA, 54 bp, Artificial
  Synthetic oligonucleotide
gtaagggcggcatgatattattctacctaaagtagttcaaccggggaatttcgc

SEQ ID NO: 142216 - DNA, 55 bp, Artificial
  Synthetic oligonucleotide
gtaccagctttctgatcagcacggcccattgcgcatagtccctgggacggccgac

SEQ ID NO: 142217 - DNA, 55 bp, Artificial
  Synthetic oligonucleotide
ggcgatgtcccgccttcatttcggaagatgcgaacagattagatgcgtttgaccc

SEQ ID NO: 142218 - DNA, 56 bp, Artificial
  Synthetic oligonucleotide
gagagtatcggccttatccgtgtggaagcccgctacctatacgacccagagaaggg

SEQ ID NO: 142219 - DNA, 53 bp, Artificial
  Synthetic oligonucleotide
ggcgccaatcagttcattggttccggtccggtcgaggtaaacgagtttgaacc

SEQ ID NO: 142220 - DNA, 55 bp, Artificial
  Synthetic oligonucleotide
ggcgtgaacagggtgttccccacagtttcagcggctcccgctcttgaagctcctg

SEQ ID NO: 142221 - DNA, 55 bp, Artificial
  Synthetic oligonucleotide
ggcgtggactctagtgagttgccatagaaccggcaccagggcgtggactctggtg

SEQ ID NO: 142222 - DNA, 55 bp, Artificial
  Synthetic oligonucleotide
ggctcataaaagggcgattaattccgttttcgtatcgttgtgcgacgcttcagcg

SEQ ID NO: 142223 - DNA, 55 bp, Artificial
  Synthetic oligonucleotide
ggctccctacgagttggtaagaatcgtcgccagtatcggccgactgcccgtgcca

SEQ ID NO: 142224 - DNA, 55 bp, Artificial
  Synthetic oligonucleotide
ggctctctctatctcgggaagtgggatgccaagcgggcaatcaagctgaccgcag

SEQ ID NO: 142225 - DNA, 55 bp, Artificial
  Synthetic oligonucleotide
ggcttcaacgaaagcttccgtatcaggatcatctggcatggatacagggttcggg

SEQ ID NO: 142226 - DNA, 55 bp, Artificial
  Synthetic oligonucleotide
ggcttttcagcgttagcacaacgctgtcccgtcgaatacaggcttggccgttgac

SEQ ID NO: 142227 - DNA, 55 bp, Artificial
  Synthetic oligonucleotide
acgtcgtatcaatagccgaagctggaccgcgctcccactgacgggcatttccgag

SEQ ID NO: 142228 - DNA, 55 bp, Artificial
  Synthetic oligonucleotide
gggaatagatgatcgggttgaagcctgtcaggagaaacgtattctcgggcttgaa

SEQ ID NO: 142229 - DNA, 59 bp, Artificial
  Synthetic oligonucleotide
gagcgtgcttagctctttccagatttgctcgttgatttcgtgttccgtcatgggcgggt

SEQ ID NO: 142230 - DNA, 51 bp, Artificial
  Synthetic oligonucleotide
gggagccaacattccggggacctaaacacaaggaaaaccttgggtgaaata

SEQ ID NO: 142231 - DNA, 55 bp, Artificial
  Synthetic oligonucleotide
gggataacacactaacccctattgccattctggcaaaccggctccgccttaggag

SEQ ID NO: 142232 - DNA, 55 bp, Artificial
  Synthetic oligonucleotide
gggatctcaacagtgcggctttcctccggcgttcgtcatactgatcgagtcatgc

SEQ ID NO: 142233 - DNA, 55 bp, Artificial
  Synthetic oligonucleotide
gggatgcagaactacgcgctttccataccattgcgataccgccgccccatatgcg

SEQ ID NO: 142234 - DNA, 55 bp, Artificial
  Synthetic oligonucleotide
gggatgtgcagtggctttacggactggcacgacgactgtcagactgaacgctgga

SEQ ID NO: 142235 - DNA, 55 bp, Artificial
  Synthetic oligonucleotide
gggcagggtgtccctaccacactcctaaggcggagccggtttgccagaatggcaa

SEQ ID NO: 142236 - DNA, 55 bp, Artificial
  Synthetic oligonucleotide
gggcccagaggtgcgttacaagggaatgattgatgcccgtgcagatagtgcccat

SEQ ID NO: 142237 - DNA, 55 bp, Artificial
  Synthetic oligonucleotide
acgggtgcgacaaatacgatattgggccactcggtccagcgtcgcaggtagggtg

SEQ ID NO: 142238 - DNA, 55 bp, Artificial
  Synthetic oligonucleotide
ggggacgtgcgaaggggctcactgtgaaacgttccatgacctgaatatcccggtg

SEQ ID NO: 142239 - DNA, 55 bp, Artificial
  Synthetic oligonucleotide
accatgtcatcagactgtcccgggcgaaaccgctgtccccacgcaccaggatacg

SEQ ID NO: 142240 - DNA, 60 bp, Artificial
  Synthetic oligonucleotide
gaggcttccttctttcctgcgatattaggcttgaaagcctgttaggctatgcctactata

SEQ ID NO: 142241 - DNA, 55 bp, Artificial
  Synthetic oligonucleotide
gtgacaacgacatggtcgtctgttatagagcgtggccactcgtaatcattggcgg

SEQ ID NO: 142242 - DNA, 52 bp, Artificial
  Synthetic oligonucleotide
gtgaccctaccccgagcgtgccctcagttttaagttagggtctgtgggttgt

SEQ ID NO: 142243 - DNA, 55 bp, Artificial
  Synthetic oligonucleotide
gtgccagaactgtctttaatggtgacattctgcaataagcccagagcccttttgg

SEQ ID NO: 142244 - DNA, 55 bp, Artificial
  Synthetic oligonucleotide
gtgcgctggctggcaggagacgtactgccggattagctgtccggaatcgaccgta

SEQ ID NO: 142245 - DNA, 55 bp, Artificial
  Synthetic oligonucleotide
gtgcggaatgcggttgccagaatcgccagcctttgttaattcgccctccacgaac

SEQ ID NO: 142246 - DNA, 55 bp, Artificial
  Synthetic oligonucleotide
gtgtaaagaaagcgtcagaatctcgaattatggaaaacgtggacactacgcgtcc

SEQ ID NO: 142247 - DNA, 55 bp, Artificial
  Synthetic oligonucleotide
gtgtcccaacgtgcgataggacacttcggccccgccatagttacgtggcacagtg

SEQ ID NO: 142248 - DNA, 55 bp, Artificial
  Synthetic oligonucleotide
gtgtgattcggggagtctccttgagattgggagacgtgcatgtcggtgaggcggc

SEQ ID NO: 142249 - DNA, 55 bp, Artificial
  Synthetic oligonucleotide
gttaagccatcggctcaggcgatcaatatggcccggaaatcgttcacattggtca

SEQ ID NO: 142250 - DNA, 55 bp, Artificial
  Synthetic oligonucleotide
gttgctcccgacgctgaagagacggacggcgatagcgcgttctcaatgccggcat

SEQ ID NO: 142251 - DNA, 58 bp, Artificial
  Synthetic oligonucleotide
gaggtttggacgtggccgagtgcatttctgacgcctgaatgatcgctaaggggaaccc

SEQ ID NO: 142252 - DNA, 55 bp, Artificial
  Synthetic oligonucleotide
acagtgcccttcatacaccattgcaccgttggtgcggacgggtctgagaggcccg

SEQ ID NO: 142253 - DNA, 55 bp, Artificial
  Synthetic oligonucleotide
gtttagctccttcactagatcccgatatcgctttgtcgctaattctaagtccggt

SEQ ID NO: 142254 - DNA, 55 bp, Artificial
  Synthetic oligonucleotide
gtttctgcaaacgaaccaaaggcccagattgcccgtgatttgggaatcagccggg

SEQ ID NO: 142255 - DNA, 55 bp, Artificial
  Synthetic oligonucleotide
taagccaccgccccggatgaaaccagaacgccagcaaggttccacatgccagacc

SEQ ID NO: 142256 - DNA, 55 bp, Artificial
  Synthetic oligonucleotide
acagccacatgggccatggtcctatggcgtccgttacgacaggggcgcgcaatac

SEQ ID NO: 142257 - DNA, 55 bp, Artificial
  Synthetic oligonucleotide
acagcaatcacgaccggcgataccgcaacagtccagagggcggtacgcggatcga

SEQ ID NO: 142258 - DNA, 55 bp, Artificial
  Synthetic oligonucleotide
taagtctggctcgacttccgtatgggacaccaatccattgaagttccccattcgg

SEQ ID NO: 142259 - DNA, 55 bp, Artificial
  Synthetic oligonucleotide
tacaattacaggcgaatttggcttatgctgcgcgctccttaccgcagaatgcacc

SEQ ID NO: 142260 - DNA, 55 bp, Artificial
  Synthetic oligonucleotide
gtacgtctcctgttttgcatctccctctcgataccgcgtggtctggagcgagaca

SEQ ID NO: 142261 - DNA, 55 bp, Artificial
  Synthetic oligonucleotide
gtagcagactggcgttctggatatgacaggttcttctgcgcctacgagcacaaaa

SEQ ID NO: 142262 - DNA, 60 bp, Artificial
  Synthetic oligonucleotide
gagttcagagggaacctgaaatattcgcgccagcataggaatgtgcttgcgtgcgctact

SEQ ID NO: 142263 - DNA, 55 bp, Artificial
  Synthetic oligonucleotide
gtatggccggtacgcgccgtatggagaaagcacgccgcctgcaatggagtgccaa

SEQ ID NO: 142264 - DNA, 55 bp, Artificial
  Synthetic oligonucleotide
gtcagaataaagcgggatacagggttagcttcgcagatggtcataatcgctgcct

SEQ ID NO: 142265 - DNA, 55 bp, Artificial
  Synthetic oligonucleotide
accgctgaaatttgagatgttggcggtattcgtaaagaagtcggcgtacgtattc

SEQ ID NO: 142266 - DNA, 55 bp, Artificial
  Synthetic oligonucleotide
gtcaggaaaagccaaagtgtctgccccacaagggatacgtctaacaaacagacgg

SEQ ID NO: 142267 - DNA, 55 bp, Artificial
  Synthetic oligonucleotide
gtcatattgacggctcctgaaaacggggcctaggctctccgccatcacacgggat

SEQ ID NO: 142268 - DNA, 55 bp, Artificial
  Synthetic oligonucleotide
gtcatgttatctctacgcaatgccgcgggtgtcttttgggttcccgaaccgacgc

SEQ ID NO: 142269 - DNA, 55 bp, Artificial
  Synthetic oligonucleotide
gtccgattccagtacggacaattcaggatatagcgctcaatgccggacagaacac

SEQ ID NO: 142270 - DNA, 55 bp, Artificial
  Synthetic oligonucleotide
gtccgccaggggaagcccgttctcttcaacatattgccgtgaggcttcgagggaa

SEQ ID NO: 142271 - DNA, 55 bp, Artificial
  Synthetic oligonucleotide
gtcctatgatatgccgtgttgcgactggtaatggataaggggcgttaaggatcga

SEQ ID NO: 142272 - DNA, 55 bp, Artificial
  Synthetic oligonucleotide
gtcctgcgggactaacgccagacaaaccagcactatctgtcgaaactagacgcag

SEQ ID NO: 142273 - DNA, 55 bp, Artificial
  Synthetic oligonucleotide
gataaaaaggccgcaggactttaatcgggtagctgcggctttcgtgccccttgcg

SEQ ID NO: 142274 - DNA, 55 bp, Artificial
  Synthetic oligonucleotide
gtcgaacaggccgctttctgcgtctaggttggagaatcatgccaggtcaggcgct

SEQ ID NO: 142275 - DNA, 55 bp, Artificial
  Synthetic oligonucleotide
gtcgagctgaaagtgcgaaaattcgggaactcactcggggttgtactgcccaagg

SEQ ID NO: 142276 - DNA, 55 bp, Artificial
  Synthetic oligonucleotide
gtcggcgttgcagcattcaacaggaatcagcggggctaccgcgctctacggtgga

SEQ ID NO: 142277 - DNA, 54 bp, Artificial
  Synthetic oligonucleotide
gtcgtccttaagaccgcaatattgacttacgttccccgcacggtattgacttac

SEQ ID NO: 142278 - DNA, 55 bp, Artificial
  Synthetic oligonucleotide
gtcgtctgagagcaacacagcggcagaaaacaggctgtagcggataccatcgcgg

SEQ ID NO: 142279 - DNA, 55 bp, Artificial
  Synthetic oligonucleotide
gtcgtgcagcgcaacgcttatggacgacagaacgaatcccgtgttgctatgggaa

SEQ ID NO: 142280 - DNA, 55 bp, Artificial
  Synthetic oligonucleotide
acccgccagcgtcagagggtatcagggcgcgtctgtaacggtcctaatcggtacc

SEQ ID NO: 142281 - DNA, 54 bp, Artificial
  Synthetic oligonucleotide
gtctccccgccaaatcgggacgggtggtccgtcttatatgctaccttcaacgga

SEQ ID NO: 142282 - DNA, 55 bp, Artificial
  Synthetic oligonucleotide
accccacagatgcatccgagcatccctcctgccgtaagcaccgaaagcagacgtg

SEQ ID NO: 142283 - DNA, 55 bp, Artificial
  Synthetic oligonucleotide
atccggccttcccggacgtattggtgaaagcggtcgatgtgaatgcgcttggcga

SEQ ID NO: 142284 - DNA, 51 bp, Artificial
  Synthetic oligonucleotide
gaaatccccttcgagacggtttccgtataccataccattccgacggtgttt

SEQ ID NO: 142285 - DNA, 60 bp, Artificial
  Synthetic oligonucleotide
gatcaaaactctctacgatcctgtgcgccgtgccagatgcgaaggacttcagcgttctgg

SEQ ID NO: 142286 - DNA, 55 bp, Artificial
  Synthetic oligonucleotide
cgatgatggtcaaccccggacgcttggaggcccagtcttgcgccacatgggtaga

SEQ ID NO: 142287 - DNA, 55 bp, Artificial
  Synthetic oligonucleotide
atccctatccgtcccaagagtgcgacctgaccagttcgccgtctcacgcgtactc

SEQ ID NO: 142288 - DNA, 55 bp, Artificial
  Synthetic oligonucleotide
atcccggcttgaaggcaattcacctgcgcacaaacgaaatcaacccaacgacggc

SEQ ID NO: 142289 - DNA, 55 bp, Artificial
  Synthetic oligonucleotide
cgcaatctggcacccatgctgacatttaccagatctctccgccaatttcaggccc

SEQ ID NO: 142290 - DNA, 55 bp, Artificial
  Synthetic oligonucleotide
cgcacgcggaggaacctggaacggtgcgtacgtatcggagctatcgtcgggtcta

SEQ ID NO: 142291 - DNA, 55 bp, Artificial
  Synthetic oligonucleotide
cgcactgaagtggaaaatcctccagatcggttgccacaatccgttttgccccgtg

SEQ ID NO: 142292 - DNA, 55 bp, Artificial
  Synthetic oligonucleotide
cgcagcctcctacggaataatcggcttgttatgcgtaattcgggaggcgaggtca

SEQ ID NO: 142293 - DNA, 55 bp, Artificial
  Synthetic oligonucleotide
cgcaggtctttgcgagccgtctgattgccaagaactattgcgcgctgctggttcc

SEQ ID NO: 142294 - DNA, 55 bp, Artificial
  Synthetic oligonucleotide
cgcatatcctctggttgcagcaggctatatcgccttatttcgttgcacggccaag

SEQ ID NO: 142295 - DNA, 55 bp, Artificial
  Synthetic oligonucleotide
cgcatatcgaccatccagtagatattttacaacgtaaccacctataggtgcattg

SEQ ID NO: 142296 - DNA, 53 bp, Artificial
  Synthetic oligonucleotide
gatcacttccttgggtagtacgaccccgagtgagtttccgaattttcgcactt

SEQ ID NO: 142297 - DNA, 55 bp, Artificial
  Synthetic oligonucleotide
cgccaaagataggacagttttattgccacgaccttccggccatatccaaacctag

SEQ ID NO: 142298 - DNA, 55 bp, Artificial
  Synthetic oligonucleotide
cgccatcaagagcgaagcctgttcatcggttctggtggttcaccgcacgcgggac

SEQ ID NO: 142299 - DNA, 55 bp, Artificial
  Synthetic oligonucleotide
cgccgggaaaagtggtggccggacgcatcgtttgaggtggaaaatatcaggccag

SEQ ID NO: 142300 - DNA, 55 bp, Artificial
  Synthetic oligonucleotide
cgcctggatttccaagccgctcgcctcatgtcggccgaaggcatgtccgttgatg

SEQ ID NO: 142301 - DNA, 55 bp, Artificial
  Synthetic oligonucleotide
cgcggcggcaggctaatgtctgcgcttgtggtggaaattgtctgactgccgtgcg

SEQ ID NO: 142302 - DNA, 55 bp, Artificial
  Synthetic oligonucleotide
cgcgtgcgggaaacagttcccgaccacgtgatcggagatgcagatgaggtcgaac

SEQ ID NO: 142303 - DNA, 55 bp, Artificial
  Synthetic oligonucleotide
atatgtctcgagcccatcaatgtcgggccgccactcgctatcggccagatgccgg

SEQ ID NO: 142304 - DNA, 55 bp, Artificial
  Synthetic oligonucleotide
cgcttcgatgtcttgcccgaggttgcgtccaattttagcgtttcgggcgattgcg

SEQ ID NO: 142305 - DNA, 55 bp, Artificial
  Synthetic oligonucleotide
cggaaagcaggttccacttggcttcgccatacgccagatcgttccgcatggggtg

SEQ ID NO: 142306 - DNA, 55 bp, Artificial
  Synthetic oligonucleotide
ccgtccgcatgtttgacaggcgagtgtttcggtcatgccgcatagtccatgtggc

SEQ ID NO: 142307 - DNA, 56 bp, Artificial
  Synthetic oligonucleotide
gatccggttagaaataaagcgaagatggaagacttgcggagccttaggtactagta

SEQ ID NO: 142308 - DNA, 55 bp, Artificial
  Synthetic oligonucleotide
atcgcagctctgcgcctagacgtgcggcctcttgatcacaacctggctctgacgg

SEQ ID NO: 142309 - DNA, 55 bp, Artificial
  Synthetic oligonucleotide
cctccacgcttccaaccctcgtcccaaacgccgggcttatggaggctatccagtg

SEQ ID NO: 142310 - DNA, 55 bp, Artificial
  Synthetic oligonucleotide
cctcccactatgtccgagacgtcaccttcgcagaggatcgatcccggatccgaac

SEQ ID NO: 142311 - DNA, 55 bp, Artificial
  Synthetic oligonucleotide
cctgaaatattcgcgccagcataggaatgtgcttgcgtgcgctactggtgcgtcc

SEQ ID NO: 142312 - DNA, 55 bp, Artificial
  Synthetic oligonucleotide
cctgagcagtcccaaccccgcccgcaagacgatgccggtgagagagcgagcgcag

SEQ ID NO: 142313 - DNA, 55 bp, Artificial
  Synthetic oligonucleotide
cctgtacggccatcctatggcgtctagcgggcatgttgcgacacgtgagctgctg

SEQ ID NO: 142314 - DNA, 55 bp, Artificial
  Synthetic oligonucleotide
ccttatcaggttctattgcgcaagaatggataaggcagatcccatgacgccttcg

SEQ ID NO: 142315 - DNA, 54 bp, Artificial
  Synthetic oligonucleotide
atcgaccaaggttcggtcatatggtcgtaggcgaggattcctacgggtttcgcg

SEQ ID NO: 142316 - DNA, 52 bp, Artificial
  Synthetic oligonucleotide
ccttgatgcaaccaaggaccgaaacttgcttacgttatacccgaacggttgt

SEQ ID NO: 142317 - DNA, 55 bp, Artificial
  Synthetic oligonucleotide
cctttcaggatcgcaccagtattgcatcccggtcatgttgatgggtccgattcgg

SEQ ID NO: 142318 - DNA, 60 bp, Artificial
  Synthetic oligonucleotide
gatctatcggcttcggtctgtcataattcgctgccattcgtgcctgatagcatatcgaac

SEQ ID NO: 142319 - DNA, 55 bp, Artificial
  Synthetic oligonucleotide
atcgaatttaaacgcatgatttacgaaatctttctgaaacccgacaggaggagac

SEQ ID NO: 142320 - DNA, 55 bp, Artificial
  Synthetic oligonucleotide
cgaccccataatcagacaagcctttgtcttcagataccggaacaaccttctgccc

SEQ ID NO: 142321 - DNA, 55 bp, Artificial
  Synthetic oligonucleotide
atccttgtcaggatacagtaatggcattgagtgaatgtaggtcaggcagcggagc

SEQ ID NO: 142322 - DNA, 55 bp, Artificial
  Synthetic oligonucleotide
cgactgcatccgctctcacccgccatggaactgtcctatgcgcagaacacggcca

SEQ ID NO: 142323 - DNA, 55 bp, Artificial
  Synthetic oligonucleotide
cgagcgagccttacaggttcttagggaaggcccgatgcttatgggagcgtcgggc

SEQ ID NO: 142324 - DNA, 55 bp, Artificial
  Synthetic oligonucleotide
cgagctctccgtctcgcgttttcgtgatatcattcgagcagcgaaaacgggcggg

SEQ ID NO: 142325 - DNA, 55 bp, Artificial
  Synthetic oligonucleotide
cgaggcggcattggacataagccgacatcaccttacaagcgccatctagagcata

SEQ ID NO: 142326 - DNA, 53 bp, Artificial
  Synthetic oligonucleotide
cgaggtttgttcgctccggtcgaagtccatggaaacggccgtaacaaccctga

SEQ ID NO: 142327 - DNA, 55 bp, Artificial
  Synthetic oligonucleotide
cgatccgcgaagtccggaacgcggatgatcgatattggaagaccgatcgccgccg

SEQ ID NO: 142328 - DNA, 54 bp, Artificial
  Synthetic oligonucleotide
cggtttccgtataccataccattccgacggtgttttccgtacatgattcggcag

SEQ ID NO: 142329 - DNA, 60 bp, Artificial
  Synthetic oligonucleotide
gatctgaccacacagcccgattacgcaaatccaacgatcgcaatcccgtgatatgattac

SEQ ID NO: 142330 - DNA, 54 bp, Artificial
  Synthetic oligonucleotide
cgtaaggccataaaacaacggcttcccgaacagcgtagcgggatgtgcaaaccg

SEQ ID NO: 142331 - DNA, 55 bp, Artificial
  Synthetic oligonucleotide
cgtatccgcaccagcatgtaggcaggcgcgccagtcatcgaggccaaaactacgc

SEQ ID NO: 142332 - DNA, 55 bp, Artificial
  Synthetic oligonucleotide
cgtcaatgaccccatgagccagtgcatgatctcgaatgacgcataggggctgggc

SEQ ID NO: 142333 - DNA, 55 bp, Artificial
  Synthetic oligonucleotide
cgtcacaccgagggcgagtggaataagggcaccgaacacggataacggcacactg

SEQ ID NO: 142334 - DNA, 55 bp, Artificial
  Synthetic oligonucleotide
cgtcccaccccatgcaacgccggaacagtacgccctgtttagcgcttaccagagc

SEQ ID NO: 142335 - DNA, 55 bp, Artificial
  Synthetic oligonucleotide
cgtctatggaccgcaacgggttttgtcggaaggctggctgcctcccgcactgatt

SEQ ID NO: 142336 - DNA, 55 bp, Artificial
  Synthetic oligonucleotide
cgtctcgcagggtcgatatccgagacgcgcaaatttactacggcgtgtcgtcagt

SEQ ID NO: 142337 - DNA, 55 bp, Artificial
  Synthetic oligonucleotide
cgtgacggtttctgcgacatgcttgagctgccgcgtatccagctggcccgtttcc

SEQ ID NO: 142338 - DNA, 55 bp, Artificial
  Synthetic oligonucleotide
cgtgatcgcgtctgatgcaggatctctgtaatggattacacaagcgcggcgaact

SEQ ID NO: 142339 - DNA, 55 bp, Artificial
  Synthetic oligonucleotide
cgtgtaagccatgccgctgtttgcctagctgcacgagcgggcacattactcatct

SEQ ID NO: 142340 - DNA, 59 bp, Artificial
  Synthetic oligonucleotide
gatgatgaactcagaaaacgacattgtcacagcaggaacggggggcggaaatcaaacgc

SEQ ID NO: 142341 - DNA, 55 bp, Artificial
  Synthetic oligonucleotide
cgttcggtacaagcgatcagctatgcgagtggcgcatccgcatgaccggcgtgga

SEQ ID NO: 142342 - DNA, 55 bp, Artificial
  Synthetic oligonucleotide
ctacacccgatcctgtggcgttaccggtcttatcgagagaacatgatcggtcctg

SEQ ID NO: 142343 - DNA, 55 bp, Artificial
  Synthetic oligonucleotide
agtgtccagacgccaagatttcggctttccggggcatgtctcgttgggcaccggc

SEQ ID NO: 142344 - DNA, 55 bp, Artificial
  Synthetic oligonucleotide
agtgctgcgacgcagaatgatcggggcgcggcggtatcagcgtcgtgcattcaag

SEQ ID NO: 142345 - DNA, 55 bp, Artificial
  Synthetic oligonucleotide
ctactggactagattcttttgttggtgtcaatggggatcgtaggcctaattcgtc

SEQ ID NO: 142346 - DNA, 55 bp, Artificial
  Synthetic oligonucleotide
ctagaaaactaatctagtgctgaattggtgctagtttggtgctgaagtttagcac

SEQ ID NO: 142347 - DNA, 55 bp, Artificial
  Synthetic oligonucleotide
ctaggccgtggaacaaccgaggctcagctttttgacccggatcaagtagatcacg

SEQ ID NO: 142348 - DNA, 55 bp, Artificial
  Synthetic oligonucleotide
cggaaataagtgaggcggcggagcctaggaactccaaccgcctcgaaactcgctg

SEQ ID NO: 142349 - DNA, 55 bp, Artificial
  Synthetic oligonucleotide
cggatctcgctatcccgttctttggctataaatcgcatgtttccatcgatcggaa

SEQ ID NO: 142350 - DNA, 55 bp, Artificial
  Synthetic oligonucleotide
cggatgacgtgcgatcatgcgtggattggtacgcgtatcatgggagcgggtcaag

SEQ ID NO: 142351 - DNA, 60 bp, Artificial
  Synthetic oligonucleotide
gatgcgcggtgtcgataaggcccatatggctcgcaccatcgcgcttctggaaagcgttgg

SEQ ID NO: 142352 - DNA, 55 bp, Artificial
  Synthetic oligonucleotide
atatacgggcctgttgattaatgccgtgatctgcggggaaggcgccatactgccc

SEQ ID NO: 142353 - DNA, 55 bp, Artificial
  Synthetic oligonucleotide
cggcaattttcgcagtgccaccatgccgcgccctaaccccatgtgcagacagagg

SEQ ID NO: 142354 - DNA, 55 bp, Artificial
  Synthetic oligonucleotide
cggcacccttcgacgtttctggaaagtgaccgagctcaacaacgcccgcatgaca

SEQ ID NO: 142355 - DNA, 55 bp, Artificial
  Synthetic oligonucleotide
cggcacgggaattgctagttctgttttgcggcccaaatcggcgcctcccctgcgt

SEQ ID NO: 142356 - DNA, 55 bp, Artificial
  Synthetic oligonucleotide
cggcagaaaacaggctgtagcggataccatcgcggtttccggaccaagccactcg

SEQ ID NO: 142357 - DNA, 55 bp, Artificial
  Synthetic oligonucleotide
cggccgatgtagccaatcgcaagtgatcttccaattcgagcccgctgccgtttgg

SEQ ID NO: 142358 - DNA, 55 bp, Artificial
  Synthetic oligonucleotide
cggcgtgtcgtcagttaagccctgagagtggcacgtgagggttgtactttgtgtc

SEQ ID NO: 142359 - DNA, 55 bp, Artificial
  Synthetic oligonucleotide
cggctggttgtgcgtattccctaaactaacaggttaagacgcagctctgttttgc

SEQ ID NO: 142360 - DNA, 55 bp, Artificial
  Synthetic oligonucleotide
cgggagcagccgggcaacctgcaaatgccgcttatgttgcgtaacggcaccatgc

SEQ ID NO: 142361 - DNA, 55 bp, Artificial
  Synthetic oligonucleotide
atagcccgccagcgcccgatggaccggaacggggatcattggcgcgcctccccat

SEQ ID NO: 142362 - DNA, 56 bp, Artificial
  Synthetic oligonucleotide
gattctggacaaggcccggaaggaactggacggtctttacaagaaacttgcatcca

SEQ ID NO: 142363 - DNA, 54 bp, Artificial
  Synthetic oligonucleotide
cgggcagaacaaacgcttgtttccattaagggtatcacccttcagggtgcgttg

SEQ ID NO: 142364 - DNA, 55 bp, Artificial
  Synthetic oligonucleotide
cgggtcatgtttcgggtcctattcctgttgtcgtcgcaagcatgggccgccattc

SEQ ID NO: 142365 - DNA, 55 bp, Artificial
  Synthetic oligonucleotide
cgggtccatgatcgaaccaggctgatgaaaggaggtgatcgtgctattctcgttc

SEQ ID NO: 142366 - DNA, 55 bp, Artificial
  Synthetic oligonucleotide
cgggtggaacgacctcaataccgatcgcctccattgccaatggccttcccggtcg

SEQ ID NO: 142367 - DNA, 51 bp, Artificial
  Synthetic oligonucleotide
cgggttcgggtacgggtgtacccgatgtcggcgtcagggtttctgaaataa

SEQ ID NO: 142368 - DNA, 55 bp, Artificial
  Synthetic oligonucleotide
cggtagggacaggttgtgcgcacgataggcgaaggcagggtccgcataataccgc

SEQ ID NO: 142369 - DNA, 55 bp, Artificial
  Synthetic oligonucleotide
atagcaggaggccgctgcaccggacttctgcacctgaaattcctacttccggcct

SEQ ID NO: 142370 - DNA, 55 bp, Artificial
  Synthetic oligonucleotide
cggtcgctatatgcagagggcactctcgctcgttccagctctcaagcgtagcgtg

SEQ ID NO: 142371 - DNA, 55 bp, Artificial
  Synthetic oligonucleotide
cagacgtttcgtccgggtaccaatcggccgccacctgtctcatttccgagacagg

SEQ ID NO: 142372 - DNA, 55 bp, Artificial
  Synthetic oligonucleotide
cagagacggaaatagccgccatagcgcggatgatagagttccgaatcgggaaagc

SEQ ID NO: 142373 - DNA, 59 bp, Artificial
  Synthetic oligonucleotide
gatttggacacgatcacaccgaatggtcgcgggggatatcgcttcgcctttgtgcgtgg

SEQ ID NO: 142374 - DNA, 55 bp, Artificial
  Synthetic oligonucleotide
cagagcgaggtgtggcacgaaatacccttgtggaactcgcaagagtcccggatcc

SEQ ID NO: 142375 - DNA, 55 bp, Artificial
  Synthetic oligonucleotide
cagaggatcgacaccccggttcgacagacaaccgcacttgctgtcacgcccactc

SEQ ID NO: 142376 - DNA, 55 bp, Artificial
  Synthetic oligonucleotide
atggcggaggctcgccattaccagacgggagttggcgttcacctggtagcaatgt

SEQ ID NO: 142377 - DNA, 55 bp, Artificial
  Synthetic oligonucleotide
cagatgatgatggcacaggccacgaatatccgggaagtatggtgcatgactggcc

SEQ ID NO: 142378 - DNA, 55 bp, Artificial
  Synthetic oligonucleotide
cagcacgcaagttcgggaactctgtctccggatagccttcttcccacggcagcgc

SEQ ID NO: 142379 - DNA, 55 bp, Artificial
  Synthetic oligonucleotide
cagcagacctttctccgacagctgatcgagatatttccctgccgtctgacgcgcg

SEQ ID NO: 142380 - DNA, 55 bp, Artificial
  Synthetic oligonucleotide
cagccgtttgcggctagacctcctattgattctgtgaatcctgacggggccagag

SEQ ID NO: 142381 - DNA, 55 bp, Artificial
  Synthetic oligonucleotide
atggatgtcctgatcgttccgtctgaccagcggcctgcgacggccttgcactctg

SEQ ID NO: 142382 - DNA, 55 bp, Artificial
  Synthetic oligonucleotide
caggccggggcgtttgcgtccggttcatgaaagagggccttaccttcactggcga

SEQ ID NO: 142383 - DNA, 55 bp, Artificial
  Synthetic oligonucleotide
caggcgtgacgtggccttcacatcgattgggttgttcttgatcttctgaacggtc

SEQ ID NO: 142384 - DNA, 60 bp, Artificial
  Synthetic oligonucleotide
catcacgaggatacgtcaagcgattgagcggctttttgccgtgacgatctttatacagtc

SEQ ID NO: 142385 - DNA, 52 bp, Artificial
  Synthetic oligonucleotide
atggatcggccccgttctgcgttgggccttttatccgccaaaacggaaagac

SEQ ID NO: 142386 - DNA, 55 bp, Artificial
  Synthetic oligonucleotide
atgcgcctgcacggctgacagagacggaacacacagccctgcgtctcctggaggg

SEQ ID NO: 142387 - DNA, 55 bp, Artificial
  Synthetic oligonucleotide
cataaagaccttatgacccagccacgctcttcccggccagtatcatcgagaatac

SEQ ID NO: 142388 - DNA, 55 bp, Artificial
  Synthetic oligonucleotide
cataagtaggccagagcggaagtaattggtgcctgttgcaatgccagacccacgg

SEQ ID NO: 142389 - DNA, 55 bp, Artificial
  Synthetic oligonucleotide
cataattcataacgccatgtcttcggcctgtgacaacaactaggcggagaacata

SEQ ID NO: 142390 - DNA, 55 bp, Artificial
  Synthetic oligonucleotide
catcccgcgaacgagaggccagacgccgtaacgcagaagccgtataatccatccg

SEQ ID NO: 142391 - DNA, 55 bp, Artificial
  Synthetic oligonucleotide
catccggggccatattcaggaaaccttacgcctacgccacacgaagacgtgacgc

SEQ ID NO: 142392 - DNA, 55 bp, Artificial
  Synthetic oligonucleotide
catgtcatattctgctgtcggcttttatcccctgaagactattcctgctctgccg

SEQ ID NO: 142393 - DNA, 55 bp, Artificial
  Synthetic oligonucleotide
catgtttgttggcacggtcgagtagatactggccgcgataactgacagacgcgta

SEQ ID NO: 142394 - DNA, 55 bp, Artificial
  Synthetic oligonucleotide
attcctgtcatatgggtggtgcggacacgcgccccggaaatgcgtgtgaccgtgg

SEQ ID NO: 142395 - DNA, 60 bp, Artificial
  Synthetic oligonucleotide
gaaccgggagcgttgaaaagagcacgctcaatgcccgcacggcaatggacagcgggatca

SEQ ID NO: 142396 - DNA, 60 bp, Artificial
  Synthetic oligonucleotide
cattgcgccatgaactttctacgatgatagaatcatgcgggggaggtaatatttcagaat

SEQ ID NO: 142397 - DNA, 55 bp, Artificial
  Synthetic oligonucleotide
caaaggacggagcgatccatctctccccgtcacaattgacttgtctgctggaggg

SEQ ID NO: 142398 - DNA, 55 bp, Artificial
  Synthetic oligonucleotide
caaatggtggttgagatggcggaggctcgccattaccagacgggagttggcgttc

SEQ ID NO: 142399 - DNA, 55 bp, Artificial
  Synthetic oligonucleotide
caacccgataaggatgaaattggcttacagccgtctctacaccccgttccagacc

SEQ ID NO: 142400 - DNA, 55 bp, Artificial
  Synthetic oligonucleotide
caactcaattttcggtcgggctctaagaaggaggcttggggctatcccctgagca

SEQ ID NO: 142401 - DNA, 55 bp, Artificial
  Synthetic oligonucleotide
atgtcgtggcgtgcggctgaggccctaggcattgaccgtttcaagccaccaaccc

SEQ ID NO: 142402 - DNA, 55 bp, Artificial
  Synthetic oligonucleotide
caagcgacctggttctaatccccgtccagccatcaccttacgacgtgtgggctgc

SEQ ID NO: 142403 - DNA, 55 bp, Artificial
  Synthetic oligonucleotide
atgtcggacataaaagtgggttggctcgcctttcgcataacggacatagtccgcg

SEQ ID NO: 142404 - DNA, 55 bp, Artificial
  Synthetic oligonucleotide
atggttactttcgatggtgtgccaatggtcgatccggcatacggtgtctggcagg

SEQ ID NO: 142405 - DNA, 55 bp, Artificial
  Synthetic oligonucleotide
caatgctccactatttgtctcctgtaaccatgaccgatcctgctattcaggggcg

SEQ ID NO: 142406 - DNA, 55 bp, Artificial
  Synthetic oligonucleotide
caatgctttaagtgacgtattattcaacgcgtttggttcagtcggcaccaagggg

SEQ ID NO: 142407 - DNA, 55 bp, Artificial
  Synthetic oligonucleotide
ccaaagggcaacgtgcgcttggtgtcgggcgatctatttttcggtggccggcaag

SEQ ID NO: 142408 - DNA, 55 bp, Artificial
  Synthetic oligonucleotide
cacaataatccgcttactgtccaccgtgcccttggggtcaaactattgaggcgga

SEQ ID NO: 142409 - DNA, 55 bp, Artificial
  Synthetic oligonucleotide
caccggcagtcgtatggcagccgtcaagcagtggcgctacggctatcaagacgag

SEQ ID NO: 142410 - DNA, 55 bp, Artificial
  Synthetic oligonucleotide
cacggctgctcctcctcgatgcttgcggccgatgcacacacaaccacgctctatc

SEQ ID NO: 142411 - DNA, 55 bp, Artificial
  Synthetic oligonucleotide
cacgggttcgcggtcatggggcatgcgtgaggaaagatcggctgtttgccgatgg

SEQ ID NO: 142412 - DNA, 55 bp, Artificial
  Synthetic oligonucleotide
cactgaacaggctgtagcgtatgccatcgcggctcccagtccatgccacgcgatc

SEQ ID NO: 142413 - DNA, 55 bp, Artificial
  Synthetic oligonucleotide
cagaactcatcccgatatgaaggaagtcacagtttcaggtcttctcaatgttccg

SEQ ID NO: 142414 - DNA, 55 bp, Artificial
  Synthetic oligonucleotide
cagaaggtctgacgcgtatggtgttgacgctgtgtgccgccggatattccacggg

SEQ ID NO: 142415 - DNA, 55 bp, Artificial
  Synthetic oligonucleotide
cagacgtgccgatacattcacacgattcctcacagatggccggatctgcctctca

SEQ ID NO: 142416 - DNA, 55 bp, Artificial
  Synthetic oligonucleotide
ccgacatgtgaacacgttgtacgaggccacccctgcaaccattcggggcctgctt

SEQ ID NO: 142417 - DNA, 54 bp, Artificial
  Synthetic oligonucleotide
ccgacgcggagtcttggaccctgtttgagtgcggaccgtataatctcggaaggg

SEQ ID NO: 142418 - DNA, 58 bp, Artificial
  Synthetic oligonucleotide
ccaaccgcctcgaaactcgctgttagcccagcgttcagatgcaaaagcgatttagccc

SEQ ID NO: 142419 - DNA, 55 bp, Artificial
  Synthetic oligonucleotide
atctgcatggcgttaaaccatgaatcacccgtctcggcgattaccgtggtgttcg

SEQ ID NO: 142420 - DNA, 52 bp, Artificial
  Synthetic oligonucleotide
ccgcagaaagccaagccttggagacgttaagggatacggtcgaaaacctaac

SEQ ID NO: 142421 - DNA, 55 bp, Artificial
  Synthetic oligonucleotide
ccgccattacaaaccaacgtatgggacgtaagcgaatggatgcagagcgagtcgt

SEQ ID NO: 142422 - DNA, 55 bp, Artificial
  Synthetic oligonucleotide
atcgtttatacttcgtgctgttggcaaacatggccggtacactgttgctcatcgg

SEQ ID NO: 142423 - DNA, 55 bp, Artificial
  Synthetic oligonucleotide
ccgcgcgaaagatcgcgccggatcaaagagatgacacttagatgcgaggtgcgga

SEQ ID NO: 142424 - DNA, 55 bp, Artificial
  Synthetic oligonucleotide
ccgcggctgatgttttatgatgtactgacgctggcccctggaattgtgagccttg

SEQ ID NO: 142425 - DNA, 54 bp, Artificial
  Synthetic oligonucleotide
ccgcgttattgacgacaaaacggtaggtccagacaaaccctgtatacaggacag

SEQ ID NO: 142426 - DNA, 55 bp, Artificial
  Synthetic oligonucleotide
ccgctggaagtgaaggcgcggcggtctgaagccaaggaatactgcgcacgcaatc

SEQ ID NO: 142427 - DNA, 55 bp, Artificial
  Synthetic oligonucleotide
ccggagagcgcatcggtttatgcgaacatatgtcctcttcgctcgtggacgcggg

SEQ ID NO: 142428 - DNA, 55 bp, Artificial
  Synthetic oligonucleotide
ccggagtcagatgtctttgcgttcgccctcccatgcccttaacggcgagttgccc

SEQ ID NO: 142429 - DNA, 57 bp, Artificial
  Synthetic oligonucleotide
ccaagttaaggcgaagtgtgatcgaccaaggttcggtcatatggtcgtaggcgagga

SEQ ID NO: 142430 - DNA, 55 bp, Artificial
  Synthetic oligonucleotide
ccggcgattactccatcagcgatctagccgaagtcttttccatctctcgtccgac

SEQ ID NO: 142431 - DNA, 55 bp, Artificial
  Synthetic oligonucleotide
ccggctgctctagcctgctctgatgcagtcacaatcagacggtatagattgctcg

SEQ ID NO: 142432 - DNA, 55 bp, Artificial
  Synthetic oligonucleotide
ccgggttatcctgcctgctcatgaatgaatgttttagcggctaaaattatcatga

SEQ ID NO: 142433 - DNA, 55 bp, Artificial
  Synthetic oligonucleotide
ccggtcgtttcgctggatgccgctactggactcatgttcacgcaggaatacaggg

SEQ ID NO: 142434 - DNA, 55 bp, Artificial
  Synthetic oligonucleotide
ccgtaaaattgttctgtggccgagattacagtctgtgcgttttggatgatcgtgt

SEQ ID NO: 142435 - DNA, 52 bp, Artificial
  Synthetic oligonucleotide
ccgtaataccggtgaatatcctgccgggttacgctaaacggcggccccgcta

SEQ ID NO: 142436 - DNA, 53 bp, Artificial
  Synthetic oligonucleotide
ccgtcaaaccccgacgcaacagaatgtcccggttaacccggcagatcagaccc

SEQ ID NO: 142437 - DNA, 55 bp, Artificial
  Synthetic oligonucleotide
atgagcggccaaaggccgcacatcataggcagaccgcgcaagcggtcttccgatt

SEQ ID NO: 142438 - DNA, 52 bp, Artificial
  Synthetic oligonucleotide
ccaacgtgccgactaaacttgggtgggatatcggcccacggtattttgcccc

SEQ ID NO: 142439 - DNA, 55 bp, Artificial
  Synthetic oligonucleotide
ccaagaaaagtttccaccctgtcataccacggtgccagatcggcataggaaaagg

SEQ ID NO: 142440 - DNA, 58 bp, Artificial
  Synthetic oligonucleotide
ccactcccgcccaactggcagagctctctcgggccgttaaatcggcagatcccgccga

SEQ ID NO: 142441 - DNA, 55 bp, Artificial
  Synthetic oligonucleotide
ccaatccaagctcataggcccgttcaagagcacgaataactgtgcgttctgaccg

SEQ ID NO: 142442 - DNA, 55 bp, Artificial
  Synthetic oligonucleotide
ccacgggatggaggtgccgggcactgtaccgctcatttgacatctccgtagacgc

SEQ ID NO: 142443 - DNA, 55 bp, Artificial
  Synthetic oligonucleotide
atgacgcatgtcgttccctttcccctgatcaggtccgcaccgaaacatcaggcta

SEQ ID NO: 142444 - DNA, 55 bp, Artificial
  Synthetic oligonucleotide
atgaattttgtgtcgtgatttacacggcagatcatgtgcccaatgcacgttcacg

SEQ ID NO: 142445 - DNA, 55 bp, Artificial
  Synthetic oligonucleotide
atcttgtaacttccgctaagatcattccagtaacgttgagccgagtttgcacgct

SEQ ID NO: 142446 - DNA, 55 bp, Artificial
  Synthetic oligonucleotide
cccacggatggtccaagctggcgatatattcaaccgtgctacgcaggatgggtga

SEQ ID NO: 142447 - DNA, 55 bp, Artificial
  Synthetic oligonucleotide
cccacgtaagaaggggaattaacgcctattcaggaactgccatgttcatacagcc

SEQ ID NO: 142448 - DNA, 55 bp, Artificial
  Synthetic oligonucleotide
cccacgttgcgtcatcgcctctcaatatctggcgtagctccttctccgccccggt

SEQ ID NO: 142449 - DNA, 55 bp, Artificial
  Synthetic oligonucleotide
cccagtatcgccaaattcgcaggttactatcaatggcgacaatcctataacaggg

SEQ ID NO: 142450 - DNA, 55 bp, Artificial
  Synthetic oligonucleotide
cccgaatagagtaacgaagccgactgttgccccaagagttagcgttgtgccggaa

SEQ ID NO: 142451 - DNA, 56 bp, Artificial
  Synthetic oligonucleotide
ccactgacggttgcgccgtctcatttttccgtggggttcgtcaagcgccctgatcg

SEQ ID NO: 142452 - DNA, 55 bp, Artificial
  Synthetic oligonucleotide
atctgtgtggcgacgaacgagaccagggcaggatcgggtatctcgccggcatgga

SEQ ID NO: 142453 - DNA, 53 bp, Artificial
  Synthetic oligonucleotide
cccggaccgattcaagcggttaactgggaaacttgttttgtgtaatgagacag

SEQ ID NO: 142454 - DNA, 55 bp, Artificial
  Synthetic oligonucleotide
cccggcgccccgcttgcagttagctcattgagcgagaatgaaccgtaagatccgc

SEQ ID NO: 142455 - DNA, 55 bp, Artificial
  Synthetic oligonucleotide
cccgtaagaccatcgccagaaccccgaggggaggagagatccatggcctatttcc

SEQ ID NO: 142456 - DNA, 55 bp, Artificial
  Synthetic oligonucleotide
cccgtctgaggtgttgaacgaactacagcagctaatcgagcgcagacctcagccg

SEQ ID NO: 142457 - DNA, 55 bp, Artificial
  Synthetic oligonucleotide
ccctacgaacagacagtcgggacatttgtcaagatgatacgtgagagttcgggtc

SEQ ID NO: 142458 - DNA, 55 bp, Artificial
  Synthetic oligonucleotide
ccctagcctgccgcgtttcattaccggaagtctcgtgaagaaacatgacgccgcg

SEQ ID NO: 142459 - DNA, 55 bp, Artificial
  Synthetic oligonucleotide
atctgctccatctatgggatgatatccgtgagcataccctgcaatccgttgcacc

SEQ ID NO: 142460 - DNA, 55 bp, Artificial
  Synthetic oligonucleotide
ccgacagactgctaggcggtgatccggacacgattgcggttgtcaataatatggg

SEQ ID NO: 142461 - DNA, 55 bp, Artificial
  Synthetic oligonucleotide
ctccatgtgcttggaccggagcgagataaccgagctgtaatctcaggtcaacacg

SEQ ID NO: 142462 - DNA, 54 bp, Artificial
  Synthetic oligonucleotide
ccatagccgctcgttcgacctgaacccaagttccgttgggtgcggtggttaatc

SEQ ID NO: 142463 - DNA, 55 bp, Artificial
  Synthetic oligonucleotide
gaaaccgcttccaaaacgtcatgcaatcctgggacgccaggttgcagaaccacgg

SEQ ID NO: 142464 - DNA, 55 bp, Artificial
  Synthetic oligonucleotide
gacggaaatagccgccatagcgcggatgatagagttccgagtcggggaagcccga

SEQ ID NO: 142465 - DNA, 55 bp, Artificial
  Synthetic oligonucleotide
cttgtaaggtgatgtcggcttatgtccaatgccgcctcgtatatttcagaacccg

SEQ ID NO: 142466 - DNA, 55 bp, Artificial
  Synthetic oligonucleotide
ctccctgatagagcaagtgccggaatggggtggacagacctccatcctgtgcagg

SEQ ID NO: 142467 - DNA, 55 bp, Artificial
  Synthetic oligonucleotide
ctgagggccgctgatcagcccgtccgcacaggtgggtccaccgggatggctacgc

SEQ ID NO: 142468 - DNA, 55 bp, Artificial
  Synthetic oligonucleotide
gaagcggctaagaggcaatgggcaatagccagccggtcaagcatggccgagtggg

SEQ ID NO: 142469 - DNA, 54 bp, Artificial
  Synthetic oligonucleotide
ctccggcgtaaccggagttctctcagccaagaggtctaaaaggtcggcctcgga

SEQ ID NO: 142470 - DNA, 55 bp, Artificial
  Synthetic oligonucleotide
gacgcaactgctctaaccgtcgtttctgcttaatactcgcatgcccctgttgcac

SEQ ID NO: 142471 - DNA, 55 bp, Artificial
  Synthetic oligonucleotide
gaaacgacagggataggcgacagatgagcgacgtaacccttcgtagtgatacgga

SEQ ID NO: 142472 - DNA, 55 bp, Artificial
  Synthetic oligonucleotide
ctcctgtctgccgcgaatatatggcgcacaatgggattgacaacgaatcgcgggc

SEQ ID NO: 142473 - DNA, 60 bp, Artificial
  Synthetic oligonucleotide
ccatccctcccgggttccagccaatgctgaccaggaggagggatcacgatgatcttctgc

SEQ ID NO: 142474 - DNA, 55 bp, Artificial
  Synthetic oligonucleotide
ctcgacgtaatagcctcatgggcggcagagacgccgcctaaaccgtcaccgggtt

SEQ ID NO: 142475 - DNA, 55 bp, Artificial
  Synthetic oligonucleotide
ctgagccgataggtcggcggaagacccaacccttgttgggcgatccgactgccaa

SEQ ID NO: 142476 - DNA, 55 bp, Artificial
  Synthetic oligonucleotide
cttgcggcaccttaaatcttcacctgtttggggatttcctaaacgcagaccagtg

SEQ ID NO: 142477 - DNA, 53 bp, Artificial
  Synthetic oligonucleotide
gaaagccgtatggccaaaagggtttaattaacaataacttctgggtcatgaaa

SEQ ID NO: 142478 - DNA, 53 bp, Artificial
  Synthetic oligonucleotide
cttagggaaggccggaatgaataaagctccctcaaaacgtggttcttgtagcg

SEQ ID NO: 142479 - DNA, 55 bp, Artificial
  Synthetic oligonucleotide
ctttattccgaccgcgatcgaaagcactgcggtagagagtgccgggctacacaaa

SEQ ID NO: 142480 - DNA, 55 bp, Artificial
  Synthetic oligonucleotide
aggccctgtattccgggacggagatcccgcggaaagccagtcaaatacgacaagc

SEQ ID NO: 142481 - DNA, 55 bp, Artificial
  Synthetic oligonucleotide
ctctccccttcatagggtaccccaacccgacaggctgttagggcttcatatcagc

SEQ ID NO: 142482 - DNA, 55 bp, Artificial
  Synthetic oligonucleotide
agctgtaaggcatccacatatccgttcaacatggacgagtttacaggtgatctgg

SEQ ID NO: 142483 - DNA, 55 bp, Artificial
  Synthetic oligonucleotide
gaacggcgtcccctatcaaggattggcgtcggattatctgccgcagatcgaactc

SEQ ID NO: 142484 - DNA, 58 bp, Artificial
  Synthetic oligonucleotide
cccaatgaggcgcgacatagcgtgtatgggttaatggtgtttcctcgaagaacctcat

SEQ ID NO: 142485 - DNA, 55 bp, Artificial
  Synthetic oligonucleotide
ctctcgattgattgggatggcaaaacaagtctaaaccttaccatcatggcagtgt

SEQ ID NO: 142486 - DNA, 55 bp, Artificial
  Synthetic oligonucleotide
ctctttcggatgcgacattggcggtcaggaatgctgcatagcccagttcgtccat

SEQ ID NO: 142487 - DNA, 55 bp, Artificial
  Synthetic oligonucleotide
ctctcggattacgtgggcgggctttctctaccaccgtttgcgctgccggttccac

SEQ ID NO: 142488 - DNA, 55 bp, Artificial
  Synthetic oligonucleotide
agtcgaccgtcattcgtgccacatcgaacaatctctcggctcgacgctccggtcc

SEQ ID NO: 142489 - DNA, 55 bp, Artificial
  Synthetic oligonucleotide
cttgaggcaatgcatgtacaggctcaacgggatatctccgcggctgaattgcgcg

SEQ ID NO: 142490 - DNA, 55 bp, Artificial
  Synthetic oligonucleotide
cttctgtaacaacacaggagatttgggacataacgaatcgccctcctctatctgg

SEQ ID NO: 142491 - DNA, 55 bp, Artificial
  Synthetic oligonucleotide
cttgaccgaggattatcttgtggcaccggatacctacgcccaaaactgggactag

SEQ ID NO: 142492 - DNA, 55 bp, Artificial
  Synthetic oligonucleotide
ctctcgtgatgctctgcgctccatcgatacagatcatagtttcgtccgagcctac

SEQ ID NO: 142493 - DNA, 55 bp, Artificial
  Synthetic oligonucleotide
aggtcctcgaaaatcttgactgtctgttaagtggcacaagcagggaagacaccgg

SEQ ID NO: 142494 - DNA, 55 bp, Artificial
  Synthetic oligonucleotide
gacgatgtgtgcgccctacgcaaatgatggacaagacacgggcgatgcctgacgg

SEQ ID NO: 142495 - DNA, 53 bp, Artificial
  Synthetic oligonucleotide
cccacgacgatcgcccgcgaaaaggttggcccgaccttcgggaccgccagtga

SEQ ID NO: 142496 - DNA, 55 bp, Artificial
  Synthetic oligonucleotide
gaattctctcgatgtcggggactctggtgacaatacgttttggttgctggcggac

SEQ ID NO: 142497 - DNA, 55 bp, Artificial
  Synthetic oligonucleotide
ctatggattggcgtgtgctgcgggctagcaacttttggcaccggttaccgcgcct

SEQ ID NO: 142498 - DNA, 55 bp, Artificial
  Synthetic oligonucleotide
gacggccagatgaatgtgtgattcggctatggttaatagcgaggtgtaacccggc

SEQ ID NO: 142499 - DNA, 55 bp, Artificial
  Synthetic oligonucleotide
aggttatcgtccgtggacgcgcaaaaggacacctgcacgcttcgagttttatcgg

SEQ ID NO: 142500 - DNA, 55 bp, Artificial
  Synthetic oligonucleotide
gacagtgaagctcgcaaacgggtatgaccttgcgatcggtaatccacccttttcc

SEQ ID NO: 142501 - DNA, 55 bp, Artificial
  Synthetic oligonucleotide
gacctcatgcgtctgatccgtggccccttccgtcatggtctgaatagttctggtg

SEQ ID NO: 142502 - DNA, 55 bp, Artificial
  Synthetic oligonucleotide
cttgggaagtgttcgctgggtcctgaaaggaccgacatgaccacgtttcccgctc

SEQ ID NO: 142503 - DNA, 55 bp, Artificial
  Synthetic oligonucleotide
ctcaccacaagctaaacagcatacgcgaacagaaccgccatatgttgcaggcggg

SEQ ID NO: 142504 - DNA, 55 bp, Artificial
  Synthetic oligonucleotide
aggatgcgccagcgttagggcagtcaccccaagagtatgagcccaagggaagggc

SEQ ID NO: 142505 - DNA, 55 bp, Artificial
  Synthetic oligonucleotide
gacctgatagcggtgtgttctgtccggcattgagcgctatatcctgaattgtccg

SEQ ID NO: 142506 - DNA, 59 bp, Artificial
  Synthetic oligonucleotide
gctcttgaccgtgataacaattggaaccgtattaatttagtctataatatgcttacatc

SEQ ID NO: 142507 - DNA, 54 bp, Artificial
  Synthetic oligonucleotide
gaaatatctaaattagattttagtatagcagttaatataaaagataaagttaat

SEQ ID NO: 142508 - DNA, 57 bp, Artificial
  Synthetic oligonucleotide
cacacttccttttttagatctgtgtttgctgattccgttgcttaaatcctcacacaa

SEQ ID NO: 142509 - DNA, 56 bp, Artificial
  Synthetic oligonucleotide
gggagcttactctatgatacctaaaattaccagtatctgtaattaaacccacataa

SEQ ID NO: 142510 - DNA, 56 bp, Artificial
  Synthetic oligonucleotide
gcatccctagctttaggaatgactcgcaagcaagcttttaaacgcgttatatgtcc

SEQ ID NO: 142511 - DNA, 54 bp, Artificial
  Synthetic oligonucleotide
attaagttatctaacccacataaaccttcactataattataccagaggtgaatt

SEQ ID NO: 142512 - DNA, 55 bp, Artificial
  Synthetic oligonucleotide
ttctcggattagataatgatgaaaccgggctaaaaaccgcccaccgattaagtca

SEQ ID NO: 142513 - DNA, 52 bp, Artificial
  Synthetic oligonucleotide
cggcgaagataaatcctttgtatataaaaccgacccaacaattcccaataaa

SEQ ID NO: 142514 - DNA, 56 bp, Artificial
  Synthetic oligonucleotide
aatatataaaatcctcagcatttccctaccatagagggcttgtctctatggtaggg

SEQ ID NO: 142515 - DNA, 50 bp, Artificial
  Synthetic oligonucleotide
aaccgacgaaaacgtttttttacttactcgcagtgtgaaatttggacaag

SEQ ID NO: 142516 - DNA, 55 bp, Artificial
  Synthetic oligonucleotide
ttaaaccatcatcagtgagtcctaaaagtgaaccggaaatgccaattatccctac

SEQ ID NO: 142517 - DNA, 55 bp, Artificial
  Synthetic oligonucleotide
aaatacttctgctagatggcaacgtcaattggcaattgctattaaaagagctcgc

SEQ ID NO: 142518 - DNA, 52 bp, Artificial
  Synthetic oligonucleotide
gaaaaatatactaataaagatggtgaaaataaaacctcaaataaagtaatag

SEQ ID NO: 142519 - DNA, 55 bp, Artificial
  Synthetic oligonucleotide
aaactgttccttctgtgtaataatttaccttagcaaaggaggtcaatgtgcgctg

SEQ ID NO: 142520 - DNA, 55 bp, Artificial
  Synthetic oligonucleotide
ttgcagaatctatgactggaggacgcttaagttacgaattggttaagttccaagg

SEQ ID NO: 142521 - DNA, 55 bp, Artificial
  Synthetic oligonucleotide
gctaatacccctacggataaagccacgcctgttagtactaatgctagtaccgaca

SEQ ID NO: 142522 - DNA, 55 bp, Artificial
  Synthetic oligonucleotide
tttgcctctctcgctttgacgagcagagcgaactaggcggccagccgaagtacag

SEQ ID NO: 142523 - DNA, 55 bp, Artificial
  Synthetic oligonucleotide
gcggtacatttgctggactaccacttgaggtgagtcgttcttataccgactttag

SEQ ID NO: 142524 - DNA, 55 bp, Artificial
  Synthetic oligonucleotide
gcgggtactactgtttcacaaggaagtgctaaagctgtagtatatgctattggag

SEQ ID NO: 142525 - DNA, 55 bp, Artificial
  Synthetic oligonucleotide
gcgctaaaggtagtgggcatttaatcagaaaacgtacatcacacattacagtggt

SEQ ID NO: 142526 - DNA, 55 bp, Artificial
  Synthetic oligonucleotide
gcctgttaccacagtatttagtgttgggtaatatgtaaacataccagcgatgtaa

SEQ ID NO: 142527 - DNA, 54 bp, Artificial
  Synthetic oligonucleotide
gcctctaaatctactccaaaacaaattcaaacaccacaacaaccaaattcccaa

SEQ ID NO: 142528 - DNA, 54 bp, Artificial
  Synthetic oligonucleotide
gcccttacaaggcgtttggaagtcttcaccagttaggatgtagccaaactcgtt

SEQ ID NO: 142529 - DNA, 53 bp, Artificial
  Synthetic oligonucleotide
cttaaatatcctcccacaattaattattacggtggtaatgaaaaaaagattca

SEQ ID NO: 142530 - DNA, 55 bp, Artificial
  Synthetic oligonucleotide
tttgtaaactacttaatgtagcaactaagtcaccacttctttccatagcggcacc

SEQ ID NO: 142531 - DNA, 55 bp, Artificial
  Synthetic oligonucleotide
gcattacaaccagaacaagcctctaaatctactccaaaacaaattcaaacaccac

SEQ ID NO: 142532 - DNA, 55 bp, Artificial
  Synthetic oligonucleotide
actcgaaagctatccttccaaagttactattgtaggaggcggtgttattggagta

SEQ ID NO: 142533 - DNA, 55 bp, Artificial
  Synthetic oligonucleotide
ttttcgcaataaatagcaggaaaatggctgtccggaacaaaaccagatacaggta

SEQ ID NO: 142534 - DNA, 55 bp, Artificial
  Synthetic oligonucleotide
gtgctgatgcaatgacctggtgtaaatctaatgtcgttcggatgtaccttccttg

SEQ ID NO: 142535 - DNA, 55 bp, Artificial
  Synthetic oligonucleotide
gtgagttttggtcatgttgaggactgttttattatgcatgaaggtacggttgcac

SEQ ID NO: 142536 - DNA, 55 bp, Artificial
  Synthetic oligonucleotide
gttaaagggcacgcgctctttggtgaatacggtacagacattgtatgtagtgcag

SEQ ID NO: 142537 - DNA, 55 bp, Artificial
  Synthetic oligonucleotide
acattccttgcgatgcacaataatgcctcttcctttagtgacaaatcctaggatt

SEQ ID NO: 142538 - DNA, 55 bp, Artificial
  Synthetic oligonucleotide
taaattcttcaatcgtctttgatccgtctatgtggtaataggtttggttggcctt

SEQ ID NO: 142539 - DNA, 55 bp, Artificial
  Synthetic oligonucleotide
gtcgatgtatgatagtcacgctatgagctcagtcgttctcttttcgatcgaactc

SEQ ID NO: 142540 - DNA, 58 bp, Artificial
  Synthetic oligonucleotide
ctcattactcatttactgcctaacgcagcaaaggcactcgaatataaaaaaaaatagc

SEQ ID NO: 142541 - DNA, 55 bp, Artificial
  Synthetic oligonucleotide
ggtcttcccagttttctgcatagtatggtccacttgcatagtgtggtggtaggtc

SEQ ID NO: 142542 - DNA, 55 bp, Artificial
  Synthetic oligonucleotide
tacctctcgcgccttcgccgtgaactatcggtgaaggagtagcgagaacgaacca

SEQ ID NO: 142543 - DNA, 53 bp, Artificial
  Synthetic oligonucleotide
gggcttcacctcgaagtaccaaactcaattaaactccgaatgttattaaagta

SEQ ID NO: 142544 - DNA, 55 bp, Artificial
  Synthetic oligonucleotide
taggcctattcaactcattatggcgttccaaaacttccgaaatcaaatacctatc

SEQ ID NO: 142545 - DNA, 55 bp, Artificial
  Synthetic oligonucleotide
ggctgtttagttctaacacctatatttgcatcattaggtccagtttcagcccctc

SEQ ID NO: 142546 - DNA, 55 bp, Artificial
  Synthetic oligonucleotide
tcgtatctaccgggattacgtcagttgttgtagagaaccatccattagcccattc

SEQ ID NO: 142547 - DNA, 55 bp, Artificial
  Synthetic oligonucleotide
ggcgctggttcgggttatgttccagtagatgtaggacaaccaactattagggtga

SEQ ID NO: 142548 - DNA, 55 bp, Artificial
  Synthetic oligonucleotide
ggcgctacaaaccatatcgcccaaatcgatgaagctatcaaatcaagattcactt

SEQ ID NO: 142549 - DNA, 55 bp, Artificial
  Synthetic oligonucleotide
ggcccaggcgcaggacgagaagcttctatacgttctttacaggcttcaggattag

SEQ ID NO: 142550 - DNA, 55 bp, Artificial
  Synthetic oligonucleotide
tgaaacctttaaccttagaactggcaaactagccaacgtgacatattattatgcg

SEQ ID NO: 142551 - DNA, 60 bp, Artificial
  Synthetic oligonucleotide
ctaccttacatttgactccattgtgactccaatttgcctccatcactcattttttgtgac

SEQ ID NO: 142552 - DNA, 55 bp, Artificial
  Synthetic oligonucleotide
ggagaaagattctttgacattgaaggttttcatcccgaaatcgaaactgctcgtg

SEQ ID NO: 142553 - DNA, 55 bp, Artificial
  Synthetic oligonucleotide
ggacatcaatttagtgcagtatgggctggtatggggacatccggattggttggaa

SEQ ID NO: 142554 - DNA, 55 bp, Artificial
  Synthetic oligonucleotide
cttcagaccctgatgtttatgcttgtggcgactgtgttaacgtttattacaatcc

SEQ ID NO: 142555 - DNA, 54 bp, Artificial
  Synthetic oligonucleotide
cttacctgtgaactatcaggtaaggagtagcgagaacgaaccaaacgcctttac

SEQ ID NO: 142556 - DNA, 55 bp, Artificial
  Synthetic oligonucleotide
ctgtggaagcttctgggttcgatggtattattattagttctaaacatcaagttcc

SEQ ID NO: 142557 - DNA, 55 bp, Artificial
  Synthetic oligonucleotide
ctgcactaaataatgtacgaccagtaacaagcgctaccgctctagcgtcttcacc

SEQ ID NO: 142558 - DNA, 53 bp, Artificial
  Synthetic oligonucleotide
ctcaaggaccaggtttaattggttctttgttggtaggtattaattgcgctttg

SEQ ID NO: 142559 - DNA, 55 bp, Artificial
  Synthetic oligonucleotide
ctcaaattggtgaagtttctgttttggctcagtgcattgataaaggaagcggaac

SEQ ID NO: 142560 - DNA, 55 bp, Artificial
  Synthetic oligonucleotide
cgtttctgaagtaatgcatcatagaaaagaaatagctgcggtggagattaaatgc

SEQ ID NO: 142561 - DNA, 54 bp, Artificial
  Synthetic oligonucleotide
cgttattcgcggattaggaagttctacaattggggaatccatacgcgaaacatt

SEQ ID NO: 142562 - DNA, 57 bp, Artificial
  Synthetic oligonucleotide
ctacaagcgttatatattgatagactctggactatacggtttcggtagtttgcgtac

SEQ ID NO: 142563 - DNA, 55 bp, Artificial
  Synthetic oligonucleotide
cgtacagacgtctgaactgagtcgattcgtgctattctcacaataaggcctattg

SEQ ID NO: 142564 - DNA, 55 bp, Artificial
  Synthetic oligonucleotide
cgatccgcggatgtattgatcatccatattatacctaactcgtatgcttatcagt

SEQ ID NO: 142565 - DNA, 55 bp, Artificial
  Synthetic oligonucleotide
ccttgtacgccacctactgatggtaatggagcgataccgaagtttagaccttctg

SEQ ID NO: 142566 - DNA, 52 bp, Artificial
  Synthetic oligonucleotide
ccgataacctagtcaaaacaactagttttcatgaagacggtaaaacacctag

SEQ ID NO: 142567 - DNA, 55 bp, Artificial
  Synthetic oligonucleotide
ccgaggtgattccgtagagagagttgaggtcggataggacgaattgtttgtcttg

SEQ ID NO: 142568 - DNA, 55 bp, Artificial
  Synthetic oligonucleotide
ccgaattgaggactccacaaaattataaacaccataataacgacggtcaacttga

SEQ ID NO: 142569 - DNA, 55 bp, Artificial
  Synthetic oligonucleotide
ccatgtgccctagctgccgctgacattccttccactcttacagctatttctaacc

SEQ ID NO: 142570 - DNA, 55 bp, Artificial
  Synthetic oligonucleotide
ccagctggtttagtaactcgtgatccaagagctaaagaacgttataaatacggtc

SEQ ID NO: 142571 - DNA, 55 bp, Artificial
  Synthetic oligonucleotide
ccaccggtgtagtgtcttccttctatacttgctaggttatagacgttttctacag

SEQ ID NO: 142572 - DNA, 55 bp, Artificial
  Synthetic oligonucleotide
ccaacttttatcaaagcacggaatatcaagagctaaccgcgtcagcattcacggg

SEQ ID NO: 142573 - DNA, 60 bp, Artificial
  Synthetic oligonucleotide
ctaatgagataattgctgcgattcaaacacaattatcagtgcaatcattaggcaaacgac

SEQ ID NO: 142574 - DNA, 55 bp, Artificial
  Synthetic oligonucleotide
ccaaagcaagtccgtgcattaaataagaatactgcatgccgcataacatagcacc

SEQ ID NO: 142575 - DNA, 54 bp, Artificial
  Synthetic oligonucleotide
ccaaacaggtaaggaaatcaagaagaccttatacaatcctaacggtacaatctg

SEQ ID NO: 142576 - DNA, 55 bp, Artificial
  Synthetic oligonucleotide
catagctaatctagcgctcaacttgcttatataacggataagcgatccgtacagt

SEQ ID NO: 142577 - DNA, 55 bp, Artificial
  Synthetic oligonucleotide
cataagcaccgtaacaaatatcttgaactgtattaacggttgcgtcaccaacacc

SEQ ID NO: 142578 - DNA, 55 bp, Artificial
  Synthetic oligonucleotide
cagtgcaatcattaggtgaacgccctaaatccattgtgattgaaggctttagtag

SEQ ID NO: 142579 - DNA, 55 bp, Artificial
  Synthetic oligonucleotide
caggtatcgaccattcacctggatatggttcagcagctaaatacgttgcaacttc

SEQ ID NO: 142580 - DNA, 55 bp, Artificial
  Synthetic oligonucleotide
cagaaatacttagcgaaaccactcacttgattataagcttgacctagtatacccc

SEQ ID NO: 142581 - DNA, 55 bp, Artificial
  Synthetic oligonucleotide
caatgagcgaagcaggtccccttcatttagaatacaatatgactcgtgctaaatt

SEQ ID NO: 142582 - DNA, 55 bp, Artificial
  Synthetic oligonucleotide
gagcgaactaggcggtcagccgaagaccattacaattaatctattacacccctcc

SEQ ID NO: 142583 - DNA, 55 bp, Artificial
  Synthetic oligonucleotide
gagcattgattttagatagtgcgcgggtgcttctaaataatgaggtagtggtcta

SEQ ID NO: 142584 - DNA, 58 bp, Artificial
  Synthetic oligonucleotide
ctaatcgttctgataaacatcaatatgacgaaaaagcagtggttagtaagttcgactg

SEQ ID NO: 142585 - DNA, 55 bp, Artificial
  Synthetic oligonucleotide
gagaacgaaccaaccacctttgctgcgttaggcagtaaaggagtaggttggagag

SEQ ID NO: 142586 - DNA, 55 bp, Artificial
  Synthetic oligonucleotide
gagggtttatgactgccattcgaggcaatgattttcctttgaggtcatctcttac

SEQ ID NO: 142587 - DNA, 55 bp, Artificial
  Synthetic oligonucleotide
gatacaatactaaccatcaaatgattttgggttgttgtagcctgccattcccctc

SEQ ID NO: 142588 - DNA, 55 bp, Artificial
  Synthetic oligonucleotide
gactttattcaaacccaaagccatcgcttctgcttctagttgacctgttactgtt

SEQ ID NO: 142589 - DNA, 55 bp, Artificial
  Synthetic oligonucleotide
gatcatcaacaaataaaagatttgcgattagcttcaactatggcattcggcggag

SEQ ID NO: 142590 - DNA, 55 bp, Artificial
  Synthetic oligonucleotide
agattctttgacattgaaggttttcatcccgaaatcgaaactgctcgtgatatcg

SEQ ID NO: 142591 - DNA, 55 bp, Artificial
  Synthetic oligonucleotide
aggccattagcctggtgccaaagtggaagcggatcaatatgatcttaaatcgcag

SEQ ID NO: 142592 - DNA, 55 bp, Artificial
  Synthetic oligonucleotide
gcagttgttattggctgtttagttctaacacctatatttgcatcattaggtccag

SEQ ID NO: 142593 - DNA, 55 bp, Artificial
  Synthetic oligonucleotide
ctttgccagctaaaatagctactgtttctcctactttaatacgcattgagctgtc

SEQ ID NO: 142594 - DNA, 54 bp, Artificial
  Synthetic oligonucleotide
tggggattgtttatatcagtatctgttattggtcttttaataattctattatta

SEQ ID NO: 142595 - DNA, 60 bp, Artificial
  Synthetic oligonucleotide
ctaactctaaaactaatgagataattgctgcgattcaaacacaattatcagtgcaatcat

SEQ ID NO: 142596 - DNA, 54 bp, Artificial
  Synthetic oligonucleotide
attctcatgttttatttcaattaaccaaacgaacaacatttaatggagaaagat

SEQ ID NO: 142597 - DNA, 54 bp, Artificial
  Synthetic oligonucleotide
gcaatatcaatttgattggaattcaaattatgataacgatgataataaattaat

SEQ ID NO: 142598 - DNA, 54 bp, Artificial
  Synthetic oligonucleotide
tatctagcttttttgatataatataagtgtattgactacgacatcaacaataag

SEQ ID NO: 142599 - DNA, 54 bp, Artificial
  Synthetic oligonucleotide
aagatggcgacttcattgaagaaggcacccctagacataaaaaatacgttcgtc

SEQ ID NO: 142600 - DNA, 54 bp, Artificial
  Synthetic oligonucleotide
gaaaggagaaataaaatgttaaataaagttcaattaattggtaatatcactcac

SEQ ID NO: 142601 - DNA, 52 bp, Artificial
  Synthetic oligonucleotide
aacatttttgatgatataagtattcctaaaattagaaaagaaggtttattta

SEQ ID NO: 142602 - DNA, 54 bp, Artificial
  Synthetic oligonucleotide
gactttgattttagcaagcaaagtcataaaaatgcttataaagtaaacattttt

SEQ ID NO: 142603 - DNA, 51 bp, Artificial
  Synthetic oligonucleotide
aacaataagtcttaatttttaactcaaataaatgttaaaataattatgacc

SEQ ID NO: 142604 - DNA, 53 bp, Artificial
  Synthetic oligonucleotide
ttaactaaaaacctaatagaaaatcattaccaatctgatggtaaaacgttaga

SEQ ID NO: 142605 - DNA, 53 bp, Artificial
  Synthetic oligonucleotide
tacttttttatcaatgtgtgtactttttaaaatttacctctcgcgcctttgcc

SEQ ID NO: 142606 - DNA, 53 bp, Artificial
  Synthetic oligonucleotide
cgtttctaacggcgcttacaacgattttaaacacgctacgcaaatagctaaac

SEQ ID NO: 142607 - DNA, 54 bp, Artificial
  Synthetic oligonucleotide
atcaaccctcttggcaaaagaaaacgatttatataactatcatgaaaggatgca

SEQ ID NO: 142608 - DNA, 49 bp, Artificial
  Synthetic oligonucleotide
gctagtgtttacgttgtaggggggggggtactctataaaagaagttaaa

SEQ ID NO: 142609 - DNA, 52 bp, Artificial
  Synthetic oligonucleotide
attatgacactaaaacaggtaatgaattattaaaaacttattataaccccga

SEQ ID NO: 142610 - DNA, 54 bp, Artificial
  Synthetic oligonucleotide
aaaatcacacgaagaacaattcgcggattccgatgctagtgataaacaacgtct

SEQ ID NO: 142611 - DNA, 54 bp, Artificial
  Synthetic oligonucleotide
ttctttatcagtggaaaaatatactaataaagatggtgaaaataaaacctcaaa

SEQ ID NO: 142612 - DNA, 54 bp, Artificial
  Synthetic oligonucleotide
atgaccctattatatatgttcgtcgtagtccatatatgtagggtcatttttgtt

SEQ ID NO: 142613 - DNA, 47 bp, Artificial
  Synthetic oligonucleotide
ttggtttttttatacccaaattcgctagtgtttacgttagggggggg

SEQ ID NO: 142614 - DNA, 54 bp, Artificial
  Synthetic oligonucleotide
ctaacttatatgcgcgtgggaaatagcattgccccacgcgtatctttatatttt

SEQ ID NO: 142615 - DNA, 54 bp, Artificial
  Synthetic oligonucleotide
atgtccctgataaattatattaattcgtttccgcggaatgtcaatttaaaacat

SEQ ID NO: 142616 - DNA, 53 bp, Artificial
  Synthetic oligonucleotide
gaggccaaggaggatttatagttgatgttaaatattctcctaaaaggttatta

SEQ ID NO: 142617 - DNA, 60 bp, Artificial
  Synthetic oligonucleotide
gctcctcattggcatatatatctaagatttaattattcacaagatactaaacatatatct

SEQ ID NO: 142618 - DNA, 60 bp, Artificial
  Synthetic oligonucleotide
cgtgctgcagctctgaatactgcgcatgtctcagcgctcctctattagctactaatataa

SEQ ID NO: 142619 - DNA, 53 bp, Artificial
  Synthetic oligonucleotide
tctctgctactcattatgcaagtagttggttattacacaagtttgctccccga

SEQ ID NO: 142620 - DNA, 53 bp, Artificial
  Synthetic oligonucleotide
tttcgtggaaagagtaaaagttatatggttgtaagctccaaggctcctgtaat

SEQ ID NO: 142621 - DNA, 53 bp, Artificial
  Synthetic oligonucleotide
ttttccacattaaggactttaccacgcaaaggaaggatggcttgaaaacgcga

SEQ ID NO: 142622 - DNA, 53 bp, Artificial
  Synthetic oligonucleotide
gagggaaaaggcgttcatcattagtttggacgtgggtatgagtgcctacaata

SEQ ID NO: 142623 - DNA, 53 bp, Artificial
  Synthetic oligonucleotide
caaaattcaatcccaaatatcgttttccttggtcccattcatggacaaaaccc

SEQ ID NO: 142624 - DNA, 52 bp, Artificial
  Synthetic oligonucleotide
acaccataaagtggacgttctgcattaatcggccatttagattccatcgata

SEQ ID NO: 142625 - DNA, 52 bp, Artificial
  Synthetic oligonucleotide
ttcgtttaataagcacaattaacgaggtgagagaaaccactcagcacaacct

SEQ ID NO: 142626 - DNA, 52 bp, Artificial
  Synthetic oligonucleotide
cgccactagcgactgccacagctccaatacctaaagctaaagcgccataacc

SEQ ID NO: 142627 - DNA, 52 bp, Artificial
  Synthetic oligonucleotide
cctagttgtcatgctcaacgtcctggtgatattgtaacttctatgtctggac

SEQ ID NO: 142628 - DNA, 52 bp, Artificial
  Synthetic oligonucleotide
ccgctcgacgtatgaggaattaatcgcgttttctaaccacgcattttatgat

SEQ ID NO: 142629 - DNA, 53 bp, Artificial
  Synthetic oligonucleotide
cgctattaaccctgttaatcaaaaaaaagtaccaatttggatttcagactata

SEQ ID NO: 142630 - DNA, 51 bp, Artificial
  Synthetic oligonucleotide
gtggtgtcctgaagtcaaccctttttttccgtacattggtatttttttaca

SEQ ID NO: 142631 - DNA, 52 bp, Artificial
  Synthetic oligonucleotide
gtctacccgatattacacttatcaatccactcgcagaactactagggattac

SEQ ID NO: 142632 - DNA, 52 bp, Artificial
  Synthetic oligonucleotide
tatattagtgccaaaatggtaggaggcggcttacacaaattatctagatacg

SEQ ID NO: 142633 - DNA, 52 bp, Artificial
  Synthetic oligonucleotide
tggttagataacacgatatttaggcatctttggcgcccacgctttttgttcg

SEQ ID NO: 142634 - DNA, 52 bp, Artificial
  Synthetic oligonucleotide
tggtccggccacccataaagaagaattagcactgggtagaaatgttacagta

SEQ ID NO: 142635 - DNA, 52 bp, Artificial
  Synthetic oligonucleotide
tgcgagtaataaccgctatttgggtttcgttttgaactttggcgcgagttcc

SEQ ID NO: 142636 - DNA, 52 bp, Artificial
  Synthetic oligonucleotide
actatcttttatgcgcgtggggaataacattgccccacgcacatctctagta

SEQ ID NO: 142637 - DNA, 51 bp, Artificial
  Synthetic oligonucleotide
agtagactcggtaaaaccgagtttatattaagttatctaacccacataaac

SEQ ID NO: 142638 - DNA, 51 bp, Artificial
  Synthetic oligonucleotide
gcaacgccaaacctactttatatttggtagcaactcccataggcaatttac

SEQ ID NO: 142639 - DNA, 51 bp, Artificial
  Synthetic oligonucleotide
tttgaatcaaagcatctagcaataactctaccgctgtttgatggtttggca

SEQ ID NO: 142640 - DNA, 52 bp, Artificial
  Synthetic oligonucleotide
ccctttcgttccatggaacaattagtccatgataaacttttcgggaccactt

SEQ ID NO: 142641 - DNA, 51 bp, Artificial
  Synthetic oligonucleotide
agtaacgcttgaacaacccacatcatctgaagctaccatatatcaaacatg

SEQ ID NO: 142642 - DNA, 51 bp, Artificial
  Synthetic oligonucleotide
attaccacatcccttgcgattgcagaagtttctatgcagcttgtagggttc

SEQ ID NO: 142643 - DNA, 51 bp, Artificial
  Synthetic oligonucleotide
cttggtgaatcttggtaaggacgtttgttaagggtgttgtaattttgaggt

SEQ ID NO: 142644 - DNA, 51 bp, Artificial
  Synthetic oligonucleotide
agatacgaggatattatagcaaatagcgacaaggtttgtgaagtaggagtt

SEQ ID NO: 142645 - DNA, 50 bp, Artificial
  Synthetic oligonucleotide
cgtggattaaagtgtcttgggatttaaatgggttgtcgcctgtgattgag

SEQ ID NO: 142646 - DNA, 50 bp, Artificial
  Synthetic oligonucleotide
ttaccggtaactgtatagatagtagtccatactcacttggtctaatccca

SEQ ID NO: 142647 - DNA, 50 bp, Artificial
  Synthetic oligonucleotide
caacgatacgccttacagtagctcctttaggaagccaaaagggaagtccc

SEQ ID NO: 142648 - DNA, 50 bp, Artificial
  Synthetic oligonucleotide
gccatagagggcttgtctctatggcagggagtatatgtagtataaattat

SEQ ID NO: 142649 - DNA, 50 bp, Artificial
  Synthetic oligonucleotide
caacccccaaaggacaagtaattgccatcgtacaggcttccgctactggc

SEQ ID NO: 142650 - DNA, 50 bp, Artificial
  Synthetic oligonucleotide
tgttggactattatagcttgttcgcgattcatttcttgtaaaatgcgcgc

SEQ ID NO: 142651 - DNA, 57 bp, Artificial
  Synthetic oligonucleotide
cccacataaaccttcattataattataccagaggagactttgattttagcaagcaaa

SEQ ID NO: 142652 - DNA, 50 bp, Artificial
  Synthetic oligonucleotide
tgttatcaatgtttagggattattcacggtcatttttcgccacttcccct

SEQ ID NO: 142653 - DNA, 50 bp, Artificial
  Synthetic oligonucleotide
tagctcatagagtaagcttcgtagtcaaagttattagtaactcctacgcc

SEQ ID NO: 142654 - DNA, 50 bp, Artificial
  Synthetic oligonucleotide
aaaaggtaggtcagttggttcgtattcttggtggtgtccgcgtcctaagc

SEQ ID NO: 142655 - DNA, 50 bp, Artificial
  Synthetic oligonucleotide
tataagattctctcaaaggcataatccctgcagtcataccaccactcgat

SEQ ID NO: 142656 - DNA, 50 bp, Artificial
  Synthetic oligonucleotide
caagtagatttttttaactcacgacgcagttgcataaaagagcttaccgg

SEQ ID NO: 142657 - DNA, 50 bp, Artificial
  Synthetic oligonucleotide
tcaatccgcgccaactcttagaacttattgcccaaatgcaaggcgaatca

SEQ ID NO: 142658 - DNA, 50 bp, Artificial
  Synthetic oligonucleotide
tcctcaattactagatgattcagcatctgagaatagtcaaggtgaaacga

SEQ ID NO: 142659 - DNA, 50 bp, Artificial
  Synthetic oligonucleotide
tcggtaggattaatacctgaaattctcgatgcttgacccaaattatacgg

SEQ ID NO: 142660 - DNA, 51 bp, Artificial
  Synthetic oligonucleotide
cccaaaaactccccaaaatatcaattgtggggagttattttcaattgtggg

SEQ ID NO: 142661 - DNA, 59 bp, Artificial
  Synthetic oligonucleotide
ccagtttattggatacgctatcgaacacattaaatttgcgattcacgaacttatccgca

SEQ ID NO: 142662 - DNA, 56 bp, Artificial
  Synthetic oligonucleotide
catctacgagcacgacccccaaacaggtaaggaaatcaagaagaccttatacaatc

SEQ ID NO: 142663 - DNA, 59 bp, Artificial
  Synthetic oligonucleotide
cataacatcctccgcctttccctgccatagagggcttgtctctatggcggggcgaatgg

SEQ ID NO: 142664 - DNA, 60 bp, Artificial
  Synthetic oligonucleotide
caggtatccaaatacgagcagagcgaactaggctgccagccgaagaacattacaattaat

SEQ ID NO: 142665 - DNA, 54 bp, Artificial
  Synthetic oligonucleotide
tttttattttccccctcgcgccttacctgtgaactatcaggtaaggagtagcga

SEQ ID NO: 142666 - DNA, 54 bp, Artificial
  Synthetic oligonucleotide
gcgccttgcccgtgaactatcgggtaaggagtagcgagaacgaaccaaccacct

SEQ ID NO: 142667 - DNA, 56 bp, Artificial
  Synthetic oligonucleotide
tttgatggaccgttcatatactttcagtgtttatcggcgttgggaattggttagat

SEQ ID NO: 142668 - DNA, 56 bp, Artificial
  Synthetic oligonucleotide
tttatttgatatcccaaattctatcggaataattattcaatttggtttatctatct

SEQ ID NO: 142669 - DNA, 59 bp, Artificial
  Synthetic oligonucleotide
ttcgactggaaatcggaagcacaacaagatattttcctgcgtgaatataaaatagactc

SEQ ID NO: 142670 - DNA, 59 bp, Artificial
  Synthetic oligonucleotide
ttataataatatcgagcgccttacctgtgaactatcaggtaaggagtagcgagaacgaa

SEQ ID NO: 142671 - DNA, 55 bp, Artificial
  Synthetic oligonucleotide
ttacgaaaggacatactttaattgtaactaaacaagagtacactaacattactga

SEQ ID NO: 142672 - DNA, 56 bp, Artificial
  Synthetic oligonucleotide
ttaatttttttatgtgtaattatctagcttttttgatataatataagtgtattgac

SEQ ID NO: 142673 - DNA, 53 bp, Artificial
  Synthetic oligonucleotide
ttaactactggtgcggttgtaattacttgttctgttttaactcctattttatc

SEQ ID NO: 142674 - DNA, 53 bp, Artificial
  Synthetic oligonucleotide
tgtgcgtcgtggtcatcgtagtccggctttagtaattgaaggggtaaccggtt

SEQ ID NO: 142675 - DNA, 56 bp, Artificial
  Synthetic oligonucleotide
tgtatctacataaaggttcaaaagtgtatgtagagggttctttatcagtggaaaaa

SEQ ID NO: 142676 - DNA, 53 bp, Artificial
  Synthetic oligonucleotide
tgtaactttaactactggtgcggttgtaattacttgttctgttttaactccta

SEQ ID NO: 142677 - DNA, 55 bp, Artificial
  Synthetic oligonucleotide
gcgccttcgccgtgaactatcggtgaaggagtagcgagaacgaaccaaccgcctt

SEQ ID NO: 142678 - DNA, 56 bp, Artificial
  Synthetic oligonucleotide
tgtaaattactcgatcatagttttcgttatgccgatcaaatgggtcaaagaacggg

SEQ ID NO: 142679 - DNA, 54 bp, Artificial
  Synthetic oligonucleotide
tatttactcccaaatcagcattaacccaaccagttaaccctaataattctaatc

SEQ ID NO: 142680 - DNA, 59 bp, Artificial
  Synthetic oligonucleotide
tattatgctcttgaccgtgataacaattggaaccgtattaatttagtctataatatgct

SEQ ID NO: 142681 - DNA, 60 bp, Artificial
  Synthetic oligonucleotide
tattaaggtagtatagatatgttataataatatcgagcgccttacctgtgaactatcagg

SEQ ID NO: 142682 - DNA, 60 bp, Artificial
  Synthetic oligonucleotide
tatcaaagcgcggaatatcaagaactaactcaagctaaatccgcgtcagcattcacgtgt

SEQ ID NO: 142683 - DNA, 57 bp, Artificial
  Synthetic oligonucleotide
tagatagattaaaagaacaatactataatgatgataatttaactttaagtcaagtta

SEQ ID NO: 142684 - DNA, 47 bp, Artificial
  Synthetic oligonucleotide
tagacttaatttacaaaagaaacaaaatttaattaaaaaagtagggt

SEQ ID NO: 142685 - DNA, 58 bp, Artificial
  Synthetic oligonucleotide
taattttattccatgtgttatttttagaaaccaagcagataatatgtttatgtatcta

SEQ ID NO: 142686 - DNA, 53 bp, Artificial
  Synthetic oligonucleotide
taatggcttctaaaaaaaaagaaattcaatatttgattactaatcaagaaaac

SEQ ID NO: 142687 - DNA, 60 bp, Artificial
  Synthetic oligonucleotide
taatgcctttatgcaaactaaagatggcatgatcatgcatggaacattgctttataattg

SEQ ID NO: 142688 - DNA, 55 bp, Artificial
  Synthetic oligonucleotide
gcattacaaccaaaacaatccccacaatcgtttaatcaaccagtagaggataaac

SEQ ID NO: 142689 - DNA, 56 bp, Artificial
  Synthetic oligonucleotide
taaggtaatgatttgatatattcttccataaattcccaatctgccccccctttatc

SEQ ID NO: 142690 - DNA, 56 bp, Artificial
  Synthetic oligonucleotide
taaccgatttaaccaacttttatcaaagcacggaatatcaagagctaaccgcgtca

SEQ ID NO: 142691 - DNA, 60 bp, Artificial
  Synthetic oligonucleotide
taaaatcctcagcatttccctgccatagagggcttgtctctatggcagggagtatatgta

SEQ ID NO: 142692 - DNA, 54 bp, Artificial
  Synthetic oligonucleotide
gttaggcactttttaaaatttacctctcgcgccttcgccgtgaactatcggtga

SEQ ID NO: 142693 - DNA, 56 bp, Artificial
  Synthetic oligonucleotide
gttaatccagataattcatttaaaggttattgcgaatggtctcgtaataacggtca

SEQ ID NO: 142694 - DNA, 56 bp, Artificial
  Synthetic oligonucleotide
gtgaaggagtagcgagaacgaaccaaccgcctttgtcgtgtcagacgataaaggag

SEQ ID NO: 142695 - DNA, 58 bp, Artificial
  Synthetic oligonucleotide
gtaatatcactcacgacttagaaccaaaaagtattaatactaatgatggtgaaatatc

SEQ ID NO: 142696 - DNA, 54 bp, Artificial
  Synthetic oligonucleotide
gggtcatttttgttatgtaaagtccacattaaaataaatatttttatattctca

SEQ ID NO: 142697 - DNA, 60 bp, Artificial
  Synthetic oligonucleotide
ggattgccccatcattcgtgcttgcaaacccatagccatattacccatatcgcctactaa

SEQ ID NO: 142698 - DNA, 60 bp, Artificial
  Synthetic oligonucleotide
gctttaatgtatatgactcatgctaatagttctgataaacatcaatatgacgaaaaagcg

SEQ ID NO: 142699 - DNA, 60 bp, Artificial
  Synthetic oligonucleotide
gattaacatctacttttgccaaagcaagtccgtgcattaaataagaatactgcatgccgc

SEQ ID NO: 142700 - DNA, 50 bp, Artificial
  Synthetic oligonucleotide
agttttattctaaacaaggtaattttataaacgaaacaaattatcaaata

SEQ ID NO: 142701 - DNA, 59 bp, Artificial
  Synthetic oligonucleotide
caaaaagttcaagagattcattataaatctgatggtaaaacaatagattatattactga

SEQ ID NO: 142702 - DNA, 58 bp, Artificial
  Synthetic oligonucleotide
attccaggtttccgttcgtgattgataaactatccaacacgctaacaatatgttgata

SEQ ID NO: 142703 - DNA, 60 bp, Artificial
  Synthetic oligonucleotide
aactaatgagataattgaggctataaatcaacaattatcagttcaatcattaggcaaacg

SEQ ID NO: 142704 - DNA, 56 bp, Artificial
  Synthetic oligonucleotide
aactatcaggtaaggagtagcgagaacgaaccaaccgcctttgctgcgttaggcag

SEQ ID NO: 142705 - DNA, 46 bp, Artificial
  Synthetic oligonucleotide
ataaagtcccctttggggatttaggggttggtttttttatacccaa

SEQ ID NO: 142706 - DNA, 57 bp, Artificial
  Synthetic oligonucleotide
aagtggttagtaattttgattgggagagcgaagcaaaccaagatacatttatgagaa

SEQ ID NO: 142707 - DNA, 57 bp, Artificial
  Synthetic oligonucleotide
accctttaacagaatcacgactcaaaacaacttggtataactctgatggtacaatca

SEQ ID NO: 142708 - DNA, 60 bp, Artificial
  Synthetic oligonucleotide
acccaattcattccatgtgtagtttttcgtaatcaagcagacaatatgtttatgtatcta

SEQ ID NO: 142709 - DNA, 55 bp, Artificial
  Synthetic oligonucleotide
aatctagatgaattaaaacaattaaataaaaaaatatcagatttagaatatagac

SEQ ID NO: 142710 - DNA, 58 bp, Artificial
  Synthetic oligonucleotide
gacgcgcacgtgttcacgatgctaacttcgaattaaccgatttccgcctccacttcaa

SEQ ID NO: 142711 - DNA, 56 bp, Artificial
  Synthetic oligonucleotide
acaaactgaaaaacaaaaacaagaagaagagcaatatcaatttgattggaattcaa

SEQ ID NO: 142712 - DNA, 56 bp, Artificial
  Synthetic oligonucleotide
acaatcctaacggtacaatctggttcatcatagagcacgacccccaaacaggtaag

SEQ ID NO: 142713 - DNA, 57 bp, Artificial
  Synthetic oligonucleotide
attaggtatttactaacttatatgcgcgtgggaaatagcattgccccacgcgtatct

SEQ ID NO: 142714 - DNA, 49 bp, Artificial
  Synthetic oligonucleotide
acacgttttcccgcgtctttctattaaagttaagcccgaattggttaat

SEQ ID NO: 142715 - DNA, 56 bp, Artificial
  Synthetic oligonucleotide
atctactatcgggggtaaaagagttattgccgcaagaagatctaaaggacgtgtgc

SEQ ID NO: 142716 - DNA, 54 bp, Artificial
  Synthetic oligonucleotide
acatttacaattccgataacctagtcaaaacaactagttttcatgaagacggta

SEQ ID NO: 142717 - DNA, 50 bp, Artificial
  Synthetic oligonucleotide
atggaaaaaaataaatttaaaataaatgccaaagatatctttttaaccta

SEQ ID NO: 142718 - DNA, 52 bp, Artificial
  Synthetic oligonucleotide
aaaaaagaaaaattatattaataatttgggttatcttcatctccattattct

SEQ ID NO: 142719 - DNA, 58 bp, Artificial
  Synthetic oligonucleotide
agaatagttcaacgatataaaaaatcacacgaagaacaattcgcggattccgatgcta

SEQ ID NO: 142720 - DNA, 60 bp, Artificial
  Synthetic oligonucleotide
actatcatgaaaggatgcattattcatgcagatattcaattataacataagcgcatttat

SEQ ID NO: 142721 - DNA, 50 bp, Artificial
  Synthetic oligonucleotide
gaagaaattgaaaaacaagaattagaaaaattagaaaaaaaagaacaaca

SEQ ID NO: 142722 - DNA, 60 bp, Artificial
  Synthetic oligonucleotide
actaatataaaataatcgatccgcggatgtattgatcatccatattatacctaactcgta

SEQ ID NO: 142723 - DNA, 54 bp, Artificial
  Synthetic oligonucleotide
aaccataaagaccataaagaaattcattctcatgttttatttcaattaaccaaa

SEQ ID NO: 142724 - DNA, 60 bp, Artificial
  Synthetic oligonucleotide
accgagtagagttgtaagtcgatgtatgatagtcacgctatgagctcagtcgttctcttt

SEQ ID NO: 142725 - DNA, 54 bp, Artificial
  Synthetic oligonucleotide
aaccatagctggtaagaagttaagtatctttttagttaaccctgatatctcatt

SEQ ID NO: 142726 - DNA, 54 bp, Artificial
  Synthetic oligonucleotide
acggagcattttttttggtatatatcaatcgtgtcaaaaggtttttcgcaagcc

SEQ ID NO: 142727 - DNA, 53 bp, Artificial
  Synthetic oligonucleotide
ctattatatatgttcgtggttgggcgtatatatagggtcgtttttttatacct

SEQ ID NO: 142728 - DNA, 59 bp, Artificial
  Synthetic oligonucleotide
gctactatttgtttattaatcgcaggcatttgtgatatgtttgatgggttagtaagtcg

SEQ ID NO: 142729 - DNA, 54 bp, Artificial
  Synthetic oligonucleotide
tcaatgtgcggaacttttttttgaccgttaaatggaacatttgacggacacaac

SEQ ID NO: 142730 - DNA, 58 bp, Artificial
  Synthetic oligonucleotide
caataaacttcagttacataacgtctagtaccatctggagcatcataactactagttc

SEQ ID NO: 142731 - DNA, 58 bp, Artificial
  Synthetic oligonucleotide
cataaagccagatggacgccagcggaaattgcgaagcaatccgaaggtcggcggccgt

SEQ ID NO: 142732 - DNA, 57 bp, Artificial
  Synthetic oligonucleotide
gaacatctaaacgaaaatggctaacatattgggctgaatctaaaattactaaagcat

SEQ ID NO: 142733 - DNA, 58 bp, Artificial
  Synthetic oligonucleotide
aatcggtcggagattataaaatacctcactggcatatcatgttaaggtttcaccaatc

SEQ ID NO: 142734 - DNA, 58 bp, Artificial
  Synthetic oligonucleotide
cgaacatcgtttcaagatggttgaacttatgacgcaacatttagattatgtcgaaatc

SEQ ID NO: 142735 - DNA, 58 bp, Artificial
  Synthetic oligonucleotide
ttaatacaatccaaatacatcaggcaagagattgaacgccgcaacgacggagcaattg

SEQ ID NO: 142736 - DNA, 57 bp, Artificial
  Synthetic oligonucleotide
ccgactaaatccataggaggatattttatctgtgttcctataggtttatctatgttc

SEQ ID NO: 142737 - DNA, 56 bp, Artificial
  Synthetic oligonucleotide
cgagcgtagcgaactaggcgtccagccgaagtatacttagattaacctattacacc

SEQ ID NO: 142738 - DNA, 57 bp, Artificial
  Synthetic oligonucleotide
gaccttatatatatgttcgttgctgtgcgtatatgtagggtcatttttgttttgtaa

SEQ ID NO: 142739 - DNA, 55 bp, Artificial
  Synthetic oligonucleotide
gtacattggtatttttttacatcgggacaccatgggacaccactatttatataaa

SEQ ID NO: 142740 - DNA, 55 bp, Artificial
  Synthetic oligonucleotide
gcgttaacatttgttcttttgaaggcaaagtagctaaggtgtttatttcttgcaa

SEQ ID NO: 142741 - DNA, 57 bp, Artificial
  Synthetic oligonucleotide
tcagtatttccctaccatagagggcttgtctctatggtagggagaatggtagaacga

SEQ ID NO: 142742 - DNA, 57 bp, Artificial
  Synthetic oligonucleotide
tggcatagctttggccgagaaactagttattagattatagggatagattatttgcgt

SEQ ID NO: 142743 - DNA, 55 bp, Artificial
  Synthetic oligonucleotide
ctttgcaacaccttactatgcggctaaacacgggatggtcgaaatggtcattgaa

SEQ ID NO: 142744 - DNA, 55 bp, Artificial
  Synthetic oligonucleotide
cggacctatgaaacatggttctaagtctcatcgtgagcctggttctatgggcccc

SEQ ID NO: 142745 - DNA, 50 bp, Artificial
  Synthetic oligonucleotide
ggtagagcgctggggtctgtgccgtcctacggtagcagctctggctgcat

SEQ ID NO: 142746 - DNA, 50 bp, Artificial
  Synthetic oligonucleotide
acgtggccacagccttcctggtcgctcccatcgagaccacggaacggaaa

SEQ ID NO: 142747 - DNA, 50 bp, Artificial
  Synthetic oligonucleotide
agacggcgaatgccgttccagcttaccaaggcgggggtatccaccaagca

SEQ ID NO: 142748 - DNA, 50 bp, Artificial
  Synthetic oligonucleotide
acaggggtggctccatctggtcatgttccactggttcccggccagtcagg

SEQ ID NO: 142749 - DNA, 50 bp, Artificial
  Synthetic oligonucleotide
ggcgatactgcgggcgtacgtgatgctaccgctctggctgcgtccctcat

SEQ ID NO: 142750 - DNA, 50 bp, Artificial
  Synthetic oligonucleotide
ggccgaaggtcgccttttaggccgtcaggttgtggagctggtacgcacac

SEQ ID NO: 142751 - DNA, 50 bp, Artificial
  Synthetic oligonucleotide
acagattgccccctgttcccctatcggttcggtaaggggccaaaggcggc

SEQ ID NO: 142752 - DNA, 50 bp, Artificial
  Synthetic oligonucleotide
acacgatggtagccacgacccccagaccaagcataccgcagccaacggta

SEQ ID NO: 142753 - DNA, 50 bp, Artificial
  Synthetic oligonucleotide
aatgttggccttggcagactccgttctgggtgttaccggtgcaagcgtgg

SEQ ID NO: 142754 - DNA, 50 bp, Artificial
  Synthetic oligonucleotide
gctaacatcgtagccgctaccttcgtagcaagcccgcaggctgcaaccgc

SEQ ID NO: 142755 - DNA, 55 bp, Artificial
  Synthetic oligonucleotide
cggaccatgatgaccaggttaccagctatgccgcacaggtggactattacacgaa

SEQ ID NO: 142756 - DNA, 50 bp, Artificial
  Synthetic oligonucleotide
gcgtggagcgctctacaaccgcctgtgggtaagcgactggagcatcaacg

SEQ ID NO: 142757 - DNA, 50 bp, Artificial
  Synthetic oligonucleotide
atgaatacccgggacttgtaccctctccgtcgggatttgtggggccagcc

SEQ ID NO: 142758 - DNA, 50 bp, Artificial
  Synthetic oligonucleotide
atgcccggacggtggaagcccaagaacggggttggaaggccggagatttt

SEQ ID NO: 142759 - DNA, 50 bp, Artificial
  Synthetic oligonucleotide
cgcattcaacgacggcaatggatggccggtagacaagaccgccgcggatc

SEQ ID NO: 142760 - DNA, 50 bp, Artificial
  Synthetic oligonucleotide
cgcagccttatcctgcagcacaacgcactgcagtctgcctgtttccacct

SEQ ID NO: 142761 - DNA, 50 bp, Artificial
  Synthetic oligonucleotide
atggagacttccttcagattggggtccgggggccggaaataacagcggct

SEQ ID NO: 142762 - DNA, 50 bp, Artificial
  Synthetic oligonucleotide
cgaggcttcgcccatccgtgttctcacgttcctcgacagccaggagcata

SEQ ID NO: 142763 - DNA, 50 bp, Artificial
  Synthetic oligonucleotide
ccttggcagactccgttctgggtgttaccggtgcaagcgtgggcgctgta

SEQ ID NO: 142764 - DNA, 50 bp, Artificial
  Synthetic oligonucleotide
ccttacgctcagtgacggctccctttttacggggcaagccgatacggggc

SEQ ID NO: 142765 - DNA, 50 bp, Artificial
  Synthetic oligonucleotide
ccttaccagccccaatgcggacagccactcggttcatgcggccctccccc

SEQ ID NO: 142766 - DNA, 55 bp, Artificial
  Synthetic oligonucleotide
cgcgtaaagctcggaccatgatagctgggatttgcctccacaagccaagggaatt

SEQ ID NO: 142767 - DNA, 50 bp, Artificial
  Synthetic oligonucleotide
attaccagggcgtagccgccatgaactacaccgaccgggaaacaccctgg

SEQ ID NO: 142768 - DNA, 50 bp, Artificial
  Synthetic oligonucleotide
atttcccagtattcattgggcagatgttcccgtaccgcatccccggggaa

SEQ ID NO: 142769 - DNA, 50 bp, Artificial
  Synthetic oligonucleotide
ccgtaccggggacattgaaaacgtgggacgcacggcccggcaccatacct

SEQ ID NO: 142770 - DNA, 50 bp, Artificial
  Synthetic oligonucleotide
ccggtatctgtaccagatcgtgggcccggcggtccattcggaaacccggg

SEQ ID NO: 142771 - DNA, 50 bp, Artificial
  Synthetic oligonucleotide
ccggggctgaattcgtaacggccctccagaccgtagtgagccgggaagtg

SEQ ID NO: 142772 - DNA, 50 bp, Artificial
  Synthetic oligonucleotide
ccggacctggggcgcggaattcaaaaatgcatatacggccagtgaccggc

SEQ ID NO: 142773 - DNA, 50 bp, Artificial
  Synthetic oligonucleotide
cagataatcgtgccgctgacagcgaaggataccaacgctcccacgccgct

SEQ ID NO: 142774 - DNA, 50 bp, Artificial
  Synthetic oligonucleotide
ccgcatagttggctccgtccgtaagccccatggctttgagccgggcacag

SEQ ID NO: 142775 - DNA, 50 bp, Artificial
  Synthetic oligonucleotide
caggccgcaggaaacggatcccaggagatacccgatgaccccactgagca

SEQ ID NO: 142776 - DNA, 50 bp, Artificial
  Synthetic oligonucleotide
cccgtcggggatatcctgccccgcatggtagcaagtgaaatgagggccgt

SEQ ID NO: 142777 - DNA, 55 bp, Artificial
  Synthetic oligonucleotide
cgcgctacatgccgagcaatccgaatctattacgggccattgcagaggaagggca

SEQ ID NO: 142778 - DNA, 50 bp, Artificial
  Synthetic oligonucleotide
cccggtgcccatacaccatgtgaacggctacttccgttccacccctgacg

SEQ ID NO: 142779 - DNA, 50 bp, Artificial
  Synthetic oligonucleotide
catgacacgcaggagggccgtagcagacagtttgcgcgtccggtccacac

SEQ ID NO: 142780 - DNA, 50 bp, Artificial
  Synthetic oligonucleotide
ccccagggcaatcgaagaatttccccgagcattggctgcatcgccgatgg

SEQ ID NO: 142781 - DNA, 50 bp, Artificial
  Synthetic oligonucleotide
cccaatgcggacagccactcggttcatgcggccctcccccttgaccttac

SEQ ID NO: 142782 - DNA, 50 bp, Artificial
  Synthetic oligonucleotide
ccattcctacgtggccacagccttcctggtcgctcccatcgagaccacgg

SEQ ID NO: 142783 - DNA, 50 bp, Artificial
  Synthetic oligonucleotide
ccagtccgcttgtcgcaaaggtaagcgcactctccgccgtagtggcaata

SEQ ID NO: 142784 - DNA, 50 bp, Artificial
  Synthetic oligonucleotide
ccagctcgaagattcccgggccgctgcctatgaaccggtcctaacgtggt

SEQ ID NO: 142785 - DNA, 50 bp, Artificial
  Synthetic oligonucleotide
ccaacgggttgcgcccaaaccataggaagcagcacggtagcttttgggga

SEQ ID NO: 142786 - DNA, 50 bp, Artificial
  Synthetic oligonucleotide
gaacccgggaaaccggcctgaatacgcccggtatgcctatgaactgggcc

SEQ ID NO: 142787 - DNA, 50 bp, Artificial
  Synthetic oligonucleotide
agcttcccggttcgagtcccacaccggaaagagcatcagcccctgtcggt

SEQ ID NO: 142788 - DNA, 55 bp, Artificial
  Synthetic oligonucleotide
cgatcgcctacaccggtcttcacggtactcccgccatgttccttcatggccttgt

SEQ ID NO: 142789 - DNA, 50 bp, Artificial
  Synthetic oligonucleotide
agggtccgcgggaaaccgacataggggttgaggaccgtgagcacgccgat

SEQ ID NO: 142790 - DNA, 50 bp, Artificial
  Synthetic oligonucleotide
aggtcagggctgcgtagagggctgccaccatggctccgcgataggctttc

SEQ ID NO: 142791 - DNA, 50 bp, Artificial
  Synthetic oligonucleotide
cttcattgtgcggcccgctgttgtgacgcttctcctgcggccctttggag

SEQ ID NO: 142792 - DNA, 50 bp, Artificial
  Synthetic oligonucleotide
agtagtctgcagcgcaggttaagcgagccggggtatggtgcaagcccgga

SEQ ID NO: 142793 - DNA, 50 bp, Artificial
  Synthetic oligonucleotide
ctctgggctgtctcccaaaaggcaggcccggtggatgtagctgccgtgga

SEQ ID NO: 142794 - DNA, 50 bp, Artificial
  Synthetic oligonucleotide
ctcgcctacggtccctatcgacccatccgcgttgtcaaatgcggcgagcc

SEQ ID NO: 142795 - DNA, 50 bp, Artificial
  Synthetic oligonucleotide
ctccaaagcgggcttgggactcgggcgaatcttcctcactaccgcctgca

SEQ ID NO: 142796 - DNA, 50 bp, Artificial
  Synthetic oligonucleotide
agtttcgtttcgatgacagccgccttgccagtgtccggagtcgtgccact

SEQ ID NO: 142797 - DNA, 50 bp, Artificial
  Synthetic oligonucleotide
cgtcgctccatcccccagggcaatcgaagaatttccccgagcattggctg

SEQ ID NO: 142798 - DNA, 50 bp, Artificial
  Synthetic oligonucleotide
cgtcaggttgtggagctggtacgcacacgcatgcccgtatgcaccaagga

SEQ ID NO: 142799 - DNA, 55 bp, Artificial
  Synthetic oligonucleotide
cctgtcaaaagctccttctgctccgcactcaaaaggtcgggacgcagagcaagcg

SEQ ID NO: 142800 - DNA, 50 bp, Artificial
  Synthetic oligonucleotide
cgtagccgcagcaagacccgtggaacttgtcagggcgcccgtataggtcc

SEQ ID NO: 142801 - DNA, 50 bp, Artificial
  Synthetic oligonucleotide
ataatcttattgcgtgtagtctgcggtctgtcggacataatagcgatttt

SEQ ID NO: 142802 - DNA, 50 bp, Artificial
  Synthetic oligonucleotide
cgggtaacctcttttgcgtaatggccccacgggccgccgttatcgcctaa

SEQ ID NO: 142803 - DNA, 50 bp, Artificial
  Synthetic oligonucleotide
cgggcgtacgtgatgctaccgctctggctgcgtccctcatgttccttgct

SEQ ID NO: 142804 - DNA, 50 bp, Artificial
  Synthetic oligonucleotide
cgggccctctgggcagcagaccttgacgcaacgtctgcgggacagttaac

SEQ ID NO: 142805 - DNA, 50 bp, Artificial
  Synthetic oligonucleotide
cgggacgcagttgggggcacgtggaaacggtggccatttacgtgagcatt

SEQ ID NO: 142806 - DNA, 50 bp, Artificial
  Synthetic oligonucleotide
cggccgggtttccgcataaccggagcaggagaaaatgggctctccccggg

SEQ ID NO: 142807 - DNA, 50 bp, Artificial
  Synthetic oligonucleotide
atccccggttctacatcaagaggcaggctttctcccgtaagggcggccgt

SEQ ID NO: 142808 - DNA, 50 bp, Artificial
  Synthetic oligonucleotide
atcctgaaccgcggctaccgttcgcattggggcaaggagctgggcgtagt

SEQ ID NO: 142809 - DNA, 50 bp, Artificial
  Synthetic oligonucleotide
cggaccttcacagcaacgccggaaggactggccgcacaggaaaacggaga

SEQ ID NO: 142810 - DNA, 52 bp, Artificial
  Synthetic oligonucleotide
ccgttttacgttgtagttccccggtggttcttggtatggtataatgctgcgg

SEQ ID NO: 142811 - DNA, 50 bp, Artificial
  Synthetic oligonucleotide
atcgggggtactatgccacgaaccaaattccgcgctttcgcgcatccggg

SEQ ID NO: 142812 - DNA, 50 bp, Artificial
  Synthetic oligonucleotide
atcgggtgccccggacggtcacaatcatgacgccctttcctttacggtcc

SEQ ID NO: 142813 - DNA, 50 bp, Artificial
  Synthetic oligonucleotide
cgcttgaaggaccgtcacggccacgaatactgccttggtcctacccacga

SEQ ID NO: 142814 - DNA, 50 bp, Artificial
  Synthetic oligonucleotide
cgctgaccggtgcttcctgggggtcaatggcaccaccggggtcatccacg

SEQ ID NO: 142815 - DNA, 50 bp, Artificial
  Synthetic oligonucleotide
cgcgttgttatcctgaaccgcggctaccgttcgcattggggcaaggagct

SEQ ID NO: 142816 - DNA, 54 bp, Artificial
  Synthetic oligonucleotide
ccgtcgcaagttgcctccccttcgtaatggcttctaagctcgtcaaaaggttcc

SEQ ID NO: 142817 - DNA, 55 bp, Artificial
  Synthetic oligonucleotide
ccggatcagctgggacaacacgtcggggatagaatcgtagagaaggtccagggct

SEQ ID NO: 142818 - DNA, 53 bp, Artificial
  Synthetic oligonucleotide
ccggacgaagatgcagggttttcccttcccggtgagctgccggaacaattccg

SEQ ID NO: 142819 - DNA, 55 bp, Artificial
  Synthetic oligonucleotide
cttccgcataggtctggtcgaatttagtgttgccggtgacaaagatccggcgttt

SEQ ID NO: 142820 - DNA, 55 bp, Artificial
  Synthetic oligonucleotide
ccggacccgattacggacacatgctggacattggaagcggtattcttgtatccgg

SEQ ID NO: 142821 - DNA, 55 bp, Artificial
  Synthetic oligonucleotide
cccttgattggtacctgtgcagggtcatcaaccgtccctttcggaagatggcacc

SEQ ID NO: 142822 - DNA, 55 bp, Artificial
  Synthetic oligonucleotide
cccggcgtaaccagtgctattgctgttgccgaatatgccggtatccctgttaccc

SEQ ID NO: 142823 - DNA, 55 bp, Artificial
  Synthetic oligonucleotide
ccccttgccgactttgatgaaccgggcatcttcgtagccttttatatcagtccgg

SEQ ID NO: 142824 - DNA, 55 bp, Artificial
  Synthetic oligonucleotide
ccagaccgggatgccaatcatacccgccctcaatcggaccggtacgcacaccgta

SEQ ID NO: 142825 - DNA, 55 bp, Artificial
  Synthetic oligonucleotide
ttgccagattgtgatagttgtcatagcgaaggcccgtattgagctgccacgtcgg

SEQ ID NO: 142826 - DNA, 55 bp, Artificial
  Synthetic oligonucleotide
ttcttacaaaatacggatccctgccgctttacagggaagatctcatgccccttac

SEQ ID NO: 142827 - DNA, 55 bp, Artificial
  Synthetic oligonucleotide
tggttcgcacgactttatagtcgcccggacgtttctcctgagccattcgaagcag

SEQ ID NO: 142828 - DNA, 55 bp, Artificial
  Synthetic oligonucleotide
tgcgtgcgcttaactaccacgccgcagacagcaccggcctctaagcctaacgcct

SEQ ID NO: 142829 - DNA, 55 bp, Artificial
  Synthetic oligonucleotide
tgactccatacacccatacagtcagaggctgtgacgggaaggagtacagcgcccc

SEQ ID NO: 142830 - DNA, 55 bp, Artificial
  Synthetic oligonucleotide
ctgcagggcgttgccaacaccactatttctatcgaaaccaagcatctgacggtag

SEQ ID NO: 142831 - DNA, 55 bp, Artificial
  Synthetic oligonucleotide
tgaaaacgagagttgccatcatgggctacggaaatttgggccgtggtgttgaact

SEQ ID NO: 142832 - DNA, 55 bp, Artificial
  Synthetic oligonucleotide
tcttctgtaaggtgctccacttcgcggcggatacttgatagcggtcgggaacgca

SEQ ID NO: 142833 - DNA, 55 bp, Artificial
  Synthetic oligonucleotide
tctgggaaaatagacctgtgcattgctacgaaatttgaggaaccagaagtggcgg

SEQ ID NO: 142834 - DNA, 55 bp, Artificial
  Synthetic oligonucleotide
tcgttgcagcggtatatagttctccggtacttgtcagtcgaatgccagaccttgg

SEQ ID NO: 142835 - DNA, 55 bp, Artificial
  Synthetic oligonucleotide
tcgcgcatatcctccgggccgacttctgcagcgatactgatgcatcgcagctaga

SEQ ID NO: 142836 - DNA, 55 bp, Artificial
  Synthetic oligonucleotide
tcacgctgagtccatgacggcatcccgtagaaagcagttctcctcgctcggtgcc

SEQ ID NO: 142837 - DNA, 55 bp, Artificial
  Synthetic oligonucleotide
gtgcctgaagccaggcggacggattggcaacgttaactacctcggttccggagac

SEQ ID NO: 142838 - DNA, 55 bp, Artificial
  Synthetic oligonucleotide
gtcatggcaattgttacctacgctatccgcgtgcttccgctaacactcattcgta

SEQ ID NO: 142839 - DNA, 50 bp, Artificial
  Synthetic oligonucleotide
gtacgggttacctttccctaaaaggaaagtcgttttagtcagagaatgcc

SEQ ID NO: 142840 - DNA, 55 bp, Artificial
  Synthetic oligonucleotide
ggtgttattatgaccagcatttacggcagagaggaaagccgttgctttgctaagg

SEQ ID NO: 142841 - DNA, 55 bp, Artificial
  Synthetic oligonucleotide
ctgcaaaccatagaccggttaacctttcaccatcgctgcgtaaagttatttcgcc

SEQ ID NO: 142842 - DNA, 53 bp, Artificial
  Synthetic oligonucleotide
gggtacctgtcaacgattttagagcttcggccaacctagttctttaccgccca

SEQ ID NO: 142843 - DNA, 55 bp, Artificial
  Synthetic oligonucleotide
ggggtaagggctgttagatcgatggtcacggtccgtttatagacagcgtcactgt

SEQ ID NO: 142844 - DNA, 55 bp, Artificial
  Synthetic oligonucleotide
ggggctttcttcgtagccaaagggcatgacgccagcctttcctaaggtgccgaac

SEQ ID NO: 142845 - DNA, 55 bp, Artificial
  Synthetic oligonucleotide
gggattgcacaaacagaaatcagccgaatcgaaaatggaacccgcaacccatccc

SEQ ID NO: 142846 - DNA, 54 bp, Artificial
  Synthetic oligonucleotide
ggatccggatagtgttcctggttaaatttctccactgtcgccacgccccttttc

SEQ ID NO: 142847 - DNA, 55 bp, Artificial
  Synthetic oligonucleotide
ggactgcgaaatctatactcaggtaactcgtggcagcggtgcttatgccctgtcc

SEQ ID NO: 142848 - DNA, 55 bp, Artificial
  Synthetic oligonucleotide
gcaggcaagtccttcgccatagcccattatatacattcttgtacccagagggatg

SEQ ID NO: 142849 - DNA, 55 bp, Artificial
  Synthetic oligonucleotide
gcaaccgctttcggcccttacaccaacaatgacccacgccaggtattatcgagat

SEQ ID NO: 142850 - DNA, 55 bp, Artificial
  Synthetic oligonucleotide
gaggcgcgtatagtagccctttatgcgtcttgtagtggccttacaatgagggcag

SEQ ID NO: 142851 - DNA, 55 bp, Artificial
  Synthetic oligonucleotide
ctttgggcatccctggcgagagcgttacagctgtcctcatgggcgggctcatcat

SEQ ID NO: 142852 - DNA, 55 bp, Artificial
  Synthetic oligonucleotide
ctcaccctagactttgccatatatagccgtcatagacggaacactctcaccatca

SEQ ID NO: 142853 - DNA, 55 bp, Artificial
  Synthetic oligonucleotide
caaacaccaggcttccctcgatccgaccgtaatggatccgggccttcacatgatg

SEQ ID NO: 142854 - DNA, 53 bp, Artificial
  Synthetic oligonucleotide
agaggtttggactctggttggtatcggccagtatattttcccggtagcggtac

SEQ ID NO: 142855 - DNA, 55 bp, Artificial
  Synthetic oligonucleotide
caagggtcgacaagagaccgtattcttccatgtaccggccaagaccctgatagtc

SEQ ID NO: 142856 - DNA, 55 bp, Artificial
  Synthetic oligonucleotide
cactactttgctgtagttgggatcgattacaggagcaactttgtgggttgcggcc

SEQ ID NO: 142857 - DNA, 55 bp, Artificial
  Synthetic oligonucleotide
agcatccccgatgcggtatctcttgcaatccatacgcctgtgggtacaattgtcc

SEQ ID NO: 142858 - DNA, 55 bp, Artificial
  Synthetic oligonucleotide
agtttaaggtccttgaggccaagccgtttgaggaccgtaatagcaagcaggatgg

SEQ ID NO: 142859 - DNA, 55 bp, Artificial
  Synthetic oligonucleotide
agtaccgtcaggagcttaggataggcataggtctctggactgatatccgtacggg

SEQ ID NO: 142860 - DNA, 55 bp, Artificial
  Synthetic oligonucleotide
ccaaagcgcatgctaagctggaaccgattgttaccgcttaccgtgaatatcgcga

SEQ ID NO: 142861 - DNA, 55 bp, Artificial
  Synthetic oligonucleotide
agctgggctgaacggggaatgcccaaggcgaggataacagtctttgcctcggtta

SEQ ID NO: 142862 - DNA, 54 bp, Artificial
  Synthetic oligonucleotide
aacaccgacggagcttcccggttcgagtcccacaccggaaagagcatcagcccc

SEQ ID NO: 142863 - DNA, 55 bp, Artificial
  Synthetic oligonucleotide
cgtgggcaggagttttcccgttgccgcaccggcaggatccatgaagtacatatcg

SEQ ID NO: 142864 - DNA, 53 bp, Artificial
  Synthetic oligonucleotide
ctgtgcctttgacaacgcccgtccggctttctcgttccgggtcaataccctcc

SEQ ID NO: 142865 - DNA, 54 bp, Artificial
  Synthetic oligonucleotide
ggaaccatcacgaacagaggaaccgggttggatttaccacggatcagagctgcc

SEQ ID NO: 142866 - DNA, 54 bp, Artificial
  Synthetic oligonucleotide
gggacagatcccaggacttatcctgtaagtaaagccggcgggccaaacccgctg

SEQ ID NO: 142867 - DNA, 54 bp, Artificial
  Synthetic oligonucleotide
gaaggaatcccacataccgttcatggtgtggtaaatcatggtcggagctccctg

SEQ ID NO: 142868 - DNA, 54 bp, Artificial
  Synthetic oligonucleotide
aacgccagaaaatgtgcgcacagagagtccggaaagctgagagccggatcgtgg

SEQ ID NO: 142869 - DNA, 54 bp, Artificial
  Synthetic oligonucleotide
tacggttgctccaggtaagagtcattgcacgcacgcctaaggcgtaaaggcaac

SEQ ID NO: 142870 - DNA, 53 bp, Artificial
  Synthetic oligonucleotide
ctctgtttgctcatcaaattgtagatggaccaggtcacttccccggtctgtgg

SEQ ID NO: 142871 - DNA, 53 bp, Artificial
  Synthetic oligonucleotide
ggcaaagacggattcgatactgtccatatggagcccaaaatcccggcaaaggt

SEQ ID NO: 142872 - DNA, 53 bp, Artificial
  Synthetic oligonucleotide
gaagattaccggggctaaagtacgaaaccgaagctgtggctacgacatatgtc

SEQ ID NO: 142873 - DNA, 52 bp, Artificial
  Synthetic oligonucleotide
ctatccagatctgttggtccatcgtctcctcaaggagcagcggacggggcag

SEQ ID NO: 142874 - DNA, 55 bp, Artificial
  Synthetic oligonucleotide
cggttgccaaagtctatcatagtttgtccgatgcggaactgtttagatacgcacc

SEQ ID NO: 142875 - DNA, 52 bp, Artificial
  Synthetic oligonucleotide
gtttgggcattcctgcgggatagaaagggacgtcggaccattccggtggaag

SEQ ID NO: 142876 - DNA, 52 bp, Artificial
  Synthetic oligonucleotide
tatgaggtccttgaacgttacggccgctttacggtcgtgcgctgccgcctcc

SEQ ID NO: 142877 - DNA, 52 bp, Artificial
  Synthetic oligonucleotide
agacggcccggagcattgcggattcttcggactgcgccattgggtttgaagc

SEQ ID NO: 142878 - DNA, 51 bp, Artificial
  Synthetic oligonucleotide
agccaggatggaaccataggtcagccgcccttgcatatcacgcttgaaaat

SEQ ID NO: 142879 - DNA, 51 bp, Artificial
  Synthetic oligonucleotide
tctgtcctccgtcagtacggcagtaagctccgatgctaccgccgcataagc

SEQ ID NO: 142880 - DNA, 51 bp, Artificial
  Synthetic oligonucleotide
gatgtgtggaagtcagccgctatatctgtgaagctgcgtcttttagaaaac

SEQ ID NO: 142881 - DNA, 51 bp, Artificial
  Synthetic oligonucleotide
gatccgtctcacggaagcgggcaaaagcctgtacgataccgccaaacggat

SEQ ID NO: 142882 - DNA, 51 bp, Artificial
  Synthetic oligonucleotide
tcttatgccgatcaaaggatacagttgacccatcccgctttatgacttgca

SEQ ID NO: 142883 - DNA, 51 bp, Artificial
  Synthetic oligonucleotide
ccgtccgcgtctgctgaaatccggacatctgaatattatggtgcgtacacc

SEQ ID NO: 142884 - DNA, 50 bp, Artificial
  Synthetic oligonucleotide
gagtcacgggttgccccatcgatgataaggcccttgacgccgcgagcttt

SEQ ID NO: 142885 - DNA, 52 bp, Artificial
  Synthetic oligonucleotide
cggcacaggggaatgggaatgaaacaacccttcaaaaggatccctacggggc

SEQ ID NO: 142886 - DNA, 50 bp, Artificial
  Synthetic oligonucleotide
aatgggcccgcagttcaccgctcgtcttccccacttcttccaagagggac

SEQ ID NO: 142887 - DNA, 50 bp, Artificial
  Synthetic oligonucleotide
gatatgcccgttgcccttatcgcaggcaccctttccgcaggcctgttggg

SEQ ID NO: 142888 - DNA, 50 bp, Artificial
  Synthetic oligonucleotide
aagggtcggttccttcggcccatagtcgtcccgcagctttaggagccgtt

SEQ ID NO: 142889 - DNA, 50 bp, Artificial
  Synthetic oligonucleotide
aagcatttcccctccgttcctggacacatcgaggtccgaggcgccagggt

SEQ ID NO: 142890 - DNA, 50 bp, Artificial
  Synthetic oligonucleotide
gactcaagacgggcatcgtttccatcggagccagtgaaacggccctgcgc

SEQ ID NO: 142891 - DNA, 50 bp, Artificial
  Synthetic oligonucleotide
gaaggtctatgcccggacggtggaagcccaagaacggggttggaaggccg

SEQ ID NO: 142892 - DNA, 50 bp, Artificial
  Synthetic oligonucleotide
aacgcccgtgacgcttcccagcgtctttgtgcccgccctagtgctgactg

SEQ ID NO: 142893 - DNA, 50 bp, Artificial
  Synthetic oligonucleotide
aaccaccggaatctccaggatgtgggcatcgggctgatctggtcccggta

SEQ ID NO: 142894 - DNA, 50 bp, Artificial
  Synthetic oligonucleotide
gcaaatatgcccgagtcccaagcccgcattggggcaaagcacaagggcgc

SEQ ID NO: 142895 - DNA, 50 bp, Artificial
  Synthetic oligonucleotide
agccgggggccctgatccacagcacctgggaagggaatccctgctatgtg

SEQ ID NO: 142896 - DNA, 55 bp, Artificial
  Synthetic oligonucleotide
cggattggcccggtcaagaagggtctttagctgacctgtcaggccatagtagtag

SEQ ID NO: 142897 - DNA, 50 bp, Artificial
  Synthetic oligonucleotide
agcccggccagagtccgactgccgaaggtccctcccagggggctggcttc

SEQ ID NO: 142898 - DNA, 50 bp, Artificial
  Synthetic oligonucleotide
gcaggcactacgaccttggcaatagtctgccaacgggttgcgcccaaacc

SEQ ID NO: 142899 - DNA, 50 bp, Artificial
  Synthetic oligonucleotide
gcagtacagccaaggttcccagcgttacgccaccgcaaacgcccttaccc

SEQ ID NO: 142900 - DNA, 50 bp, Artificial
  Synthetic oligonucleotide
gccagcggcgtaggcattcccgttggcatgaagaatcctactagcggcga

SEQ ID NO: 142901 - DNA, 50 bp, Artificial
  Synthetic oligonucleotide
taacgtccgtagccaccgttccaacctgcctgttcaatcgtaccggcagc

SEQ ID NO: 142902 - DNA, 50 bp, Artificial
  Synthetic oligonucleotide
accggaagagcggttttcgtgacggtcctagcggcaaagagcctgtggca

SEQ ID NO: 142903 - DNA, 50 bp, Artificial
  Synthetic oligonucleotide
gtcttgcctgtttccttacggcagcgctcctgccatgcggtcacctgctc

SEQ ID NO: 142904 - DNA, 50 bp, Artificial
  Synthetic oligonucleotide
gtcgccttttaggccgtcaggttgtggagctggtacgcacacgcatgccc

SEQ ID NO: 142905 - DNA, 50 bp, Artificial
  Synthetic oligonucleotide
gtagggagtgccctccaacgttgctaccagagattcggtgcagggctggc

SEQ ID NO: 142906 - DNA, 50 bp, Artificial
  Synthetic oligonucleotide
acctcggtctgcgactatggcatggaggttactgcttccgtgggacgcgg

SEQ ID NO: 142907 - DNA, 55 bp, Artificial
  Synthetic oligonucleotide
cggtcgaacagtctagacgcaccgacctcgccgttacttccgcttgcgccgagga

SEQ ID NO: 142908 - DNA, 55 bp, Artificial
  Synthetic oligonucleotide
gccgtacccactatgacggtggacttcgtcacgcgccgtccaaggcactacctca

SEQ ID NO: 142909 - DNA, 55 bp, Artificial
  Synthetic oligonucleotide
cctgttggaacttgccgagagcttcctcgtaggcagcacgtccctcatcggtcgt

SEQ ID NO: 142910 - DNA, 55 bp, Artificial
  Synthetic oligonucleotide
acgacgcaggtgggcttgggacaccccagacgacaggtaccgaccaacgcgagga

SEQ ID NO: 142911 - DNA, 55 bp, Artificial
  Synthetic oligonucleotide
gcgcacgacgaggagagagtgatagttcgccgaggcgacttgcgtcgactctcgt

SEQ ID NO: 142912 - DNA, 55 bp, Artificial
  Synthetic oligonucleotide
gcgggaggtgcgtacctgcgacgtatgagcgactactgccgatcctgtgagtacg

SEQ ID NO: 142913 - DNA, 55 bp, Artificial
  Synthetic oligonucleotide
ggtccgagggtagggaagagtgtggtgacgatcgacaggtgtcgtgccaatgggg

SEQ ID NO: 142914 - DNA, 55 bp, Artificial
  Synthetic oligonucleotide
cccggatcagacgactgcactgtacgtatcggcgcctgagctctatggatgcgcc

SEQ ID NO: 142915 - DNA, 55 bp, Artificial
  Synthetic oligonucleotide
caggccttactaccagtgctaccgtacacatagataggggaggacatcggtgaag

SEQ ID NO: 142916 - DNA, 55 bp, Artificial
  Synthetic oligonucleotide
tctgccttacgtgtccatgctgatcagagtcctcgcacggcgggtgggctcgatg

SEQ ID NO: 142917 - DNA, 55 bp, Artificial
  Synthetic oligonucleotide
cacgagtccctcccatacctcggtcgcaggccgacccggatcgaacaagatgaag

SEQ ID NO: 142918 - DNA, 54 bp, Artificial
  Synthetic oligonucleotide
cgggctaggatcgtcgttggtagatgtccgggtgagccgacgaaaccctaggag

SEQ ID NO: 142919 - DNA, 55 bp, Artificial
  Synthetic oligonucleotide
aacgaagggccaatcgccgaccgcagcgagagaggccgaccgacgatcgttgcgt

SEQ ID NO: 142920 - DNA, 55 bp, Artificial
  Synthetic oligonucleotide
ttgcgcgtccacaccgtggcacgtctcacagtcctcagcgaagagcgcttgcccc

SEQ ID NO: 142921 - DNA, 54 bp, Artificial
  Synthetic oligonucleotide
gaccggtagcgtagcattcctcgcgctctgtgaggaggtggcgtgatcggctga

SEQ ID NO: 142922 - DNA, 54 bp, Artificial
  Synthetic oligonucleotide
gcattctcaggtaccgtcttaggcccggtcggaacgagggtctctggtgaccga

SEQ ID NO: 142923 - DNA, 54 bp, Artificial
  Synthetic oligonucleotide
tcgaccggtggtgaggtgccccagatttcgtagacacccaggttacttcacgcg

SEQ ID NO: 142924 - DNA, 53 bp, Artificial
  Synthetic oligonucleotide
gtttcggcctccgcaccccggctgatgtccactatgacgtgctgaggggctcc

SEQ ID NO: 142925 - DNA, 53 bp, Artificial
  Synthetic oligonucleotide
tggtgatacgggagctcgtcgaccctctcaccagcgacctcgtaggcggtgca

SEQ ID NO: 142926 - DNA, 52 bp, Artificial
  Synthetic oligonucleotide
gagctcacccaacacgtcgggtgtcggtccgagttcgatcgtcagagacgaa

SEQ ID NO: 142927 - DNA, 52 bp, Artificial
  Synthetic oligonucleotide
agcctgccacccctacgcacctccggaccgtccgccctgtagcttacggagc

SEQ ID NO: 142928 - DNA, 51 bp, Artificial
  Synthetic oligonucleotide
acgagccttggaccgaggctgtccatacgagcgaccgaagttgggtaccga

SEQ ID NO: 142929 - DNA, 55 bp, Artificial
  Synthetic oligonucleotide
cgtgtacaccgctcgacggtgagctgaggatcgcggggacaatggccttcgagag

SEQ ID NO: 142930 - DNA, 50 bp, Artificial
  Synthetic oligonucleotide
cgtggggaggcaatccggcgggcgacacacaaggaccaactgcgcagcac

SEQ ID NO: 142931 - DNA, 50 bp, Artificial
  Synthetic oligonucleotide
caacgccgaccctcgtgttccaggtcgtggagccacacccccgctcgaat

SEQ ID NO: 142932 - DNA, 50 bp, Artificial
  Synthetic oligonucleotide
attcctaggagccgtcgacatctgcctcctctgtcgcgacgccagacacc

SEQ ID NO: 142933 - DNA, 50 bp, Artificial
  Synthetic oligonucleotide
atcgggcctcttcccaccgttcgagggaatcgagcacgacaccactggca

SEQ ID NO: 142934 - DNA, 50 bp, Artificial
  Synthetic oligonucleotide
atcccgacgatgggagctgcgagcggacgtgacccaccgaggcccgtgag

SEQ ID NO: 142935 - DNA, 50 bp, Artificial
  Synthetic oligonucleotide
atagtccgaacctcgcgggcagccacgatgaaggtgcacactcgagcgct

SEQ ID NO: 142936 - DNA, 50 bp, Artificial
  Synthetic oligonucleotide
aaccccctctgtggatgtgacgagggatctcgcagaccccgctggatcat

SEQ ID NO: 142937 - DNA, 50 bp, Artificial
  Synthetic oligonucleotide
aacgggccgacataggagcgaacccgtacgcaggtcgacgtggtgagggt

SEQ ID NO: 142938 - DNA, 50 bp, Artificial
  Synthetic oligonucleotide
aactcccgattccttcctctccacggggctcgtcccaacagctggtcaga

SEQ ID NO: 142939 - DNA, 50 bp, Artificial
  Synthetic oligonucleotide
aaggccggtgcctacaacgaggggttctgctatctcgcctcggtactcga

SEQ ID NO: 142940 - DNA, 55 bp, Artificial
  Synthetic oligonucleotide
cgggagggagaccacctgatgggagcacgcgccacacaggcgaaggtcacgcttg

SEQ ID NO: 142941 - DNA, 50 bp, Artificial
  Synthetic oligonucleotide
acaacacgccaatacggcacctcgtaaccgcgatcgagtcggtacgggcg

SEQ ID NO: 142942 - DNA, 50 bp, Artificial
  Synthetic oligonucleotide
acacagcaaacccgttgggcacctgtacgacccctgatggcgtacccaca

SEQ ID NO: 142943 - DNA, 50 bp, Artificial
  Synthetic oligonucleotide
accaaggccgtgtggctccgtgtgatcctgggaagcaccgaatcccacac

SEQ ID NO: 142944 - DNA, 50 bp, Artificial
  Synthetic oligonucleotide
acgtcgtccacgacgcctgtcatgatacgagcgggcagagtgcacgagag

SEQ ID NO: 142945 - DNA, 50 bp, Artificial
  Synthetic oligonucleotide
actgggattcgacggggtctcgcctactacgcacgtgctgagctcgcgga

SEQ ID NO: 142946 - DNA, 50 bp, Artificial
  Synthetic oligonucleotide
agagctacgtgcgcagcgtctctggtgccatggggagccgtccggacact

SEQ ID NO: 142947 - DNA, 50 bp, Artificial
  Synthetic oligonucleotide
agcgagtgttgcagtatgagcgaaccacgggggctcgacgacgcaaggtt

SEQ ID NO: 142948 - DNA, 50 bp, Artificial
  Synthetic oligonucleotide
agcgggcgcactttggggaccctgccgttcgtctcgactatcagcgcacc

SEQ ID NO: 142949 - DNA, 50 bp, Artificial
  Synthetic oligonucleotide
agctaggaaccctggctggcgcccctcaaacaagaccacccgcttcgtga

SEQ ID NO: 142950 - DNA, 50 bp, Artificial
  Synthetic oligonucleotide
agctcctcagcgagcgacacttgatccccctgtcacgaccgtccggcagc

SEQ ID NO: 142951 - DNA, 55 bp, Artificial
  Synthetic oligonucleotide
cggaaggtccggagcctacttgcgaccctcggcattcgccagtcagtgggcagag

SEQ ID NO: 142952 - DNA, 50 bp, Artificial
  Synthetic oligonucleotide
aggctgaccacagagacgagggggtgccgtgaagccaatcccggttgagt

SEQ ID NO: 142953 - DNA, 50 bp, Artificial
  Synthetic oligonucleotide
agggcgaagggcagaggcgagacgagaagcggaggtgaccatgcagtatc

SEQ ID NO: 142954 - DNA, 50 bp, Artificial
  Synthetic oligonucleotide
agggggatcacatccccgcaccggaactccttcatggttggccctccttc

SEQ ID NO: 142955 - DNA, 50 bp, Artificial
  Synthetic oligonucleotide
agggtgcaccgacctcgcagcccaatgatgcctctgagctcacgtgcagg

SEQ ID NO: 142956 - DNA, 50 bp, Artificial
  Synthetic oligonucleotide
aggtagacccgcgactcattccgcactctcgtcacctcccgtcacgaccg

SEQ ID NO: 142957 - DNA, 50 bp, Artificial
  Synthetic oligonucleotide
aggtcgtggagccacacccccgctcgaatcttgacgctacgtcgtgccga

SEQ ID NO: 142958 - DNA, 50 bp, Artificial
  Synthetic oligonucleotide
aggtggatctcggatcaggcggatcgtgggctggtcactcgagcgtcgca

SEQ ID NO: 142959 - DNA, 50 bp, Artificial
  Synthetic oligonucleotide
agtcagccgtgagccctgaaccgcgaagcgcaccgctcccgaaacctcga

SEQ ID NO: 142960 - DNA, 50 bp, Artificial
  Synthetic oligonucleotide
agtcccacgtgacggcgaagtgcatggcgtacctccttcgaccaggctaa

SEQ ID NO: 142961 - DNA, 50 bp, Artificial
  Synthetic oligonucleotide
agtcgcacagggggatcacatccccgcaccggaactccttcatggttggc

SEQ ID NO: 142962 - DNA, 55 bp, Artificial
  Synthetic oligonucleotide
gatctgtgttagcttcctactgcaaagatgaggaggtgtgatgtccactgcatgg

SEQ ID NO: 142963 - DNA, 50 bp, Artificial
  Synthetic oligonucleotide
agtcggaggtcagctaccataggcctcatcggaaccccgttcgctcaccc

SEQ ID NO: 142964 - DNA, 50 bp, Artificial
  Synthetic oligonucleotide
agtgcccaattcctaggagccgtcgacatctgcctcctctgtcgcgacgc

SEQ ID NO: 142965 - DNA, 50 bp, Artificial
  Synthetic oligonucleotide
agtgtagcgtggagcggtcgtgtcgggccctcgatcaccctccgtggggt

SEQ ID NO: 142966 - DNA, 50 bp, Artificial
  Synthetic oligonucleotide
atagccctcgtcgcgagccgtggcagaccctacaaggatggcttgggccg

SEQ ID NO: 142967 - DNA, 55 bp, Artificial
  Synthetic oligonucleotide
cgagcgaatgtcctgtgtgcaatccgtagtgaagaacgagagacggtagcggtcg

SEQ ID NO: 142968 - DNA, 55 bp, Artificial
  Synthetic oligonucleotide
gattcgatcaagtagttcgtaggacatgtaacccctagcttacgacggcgacgac

SEQ ID NO: 142969 - DNA, 55 bp, Artificial
  Synthetic oligonucleotide
cctttggcatcaacgctcgttcaatatcccgaccgttcgcaacgttacacggtgc

SEQ ID NO: 142970 - DNA, 60 bp, Artificial
  Synthetic oligonucleotide
ggacagtcaagcggtcgcgatacgggattctagatcggttcacagagacagatggtgccc

SEQ ID NO: 142971 - DNA, 60 bp, Artificial
  Synthetic oligonucleotide
ggcacatacactgtcaaccgtccggattcacggatctggatgataagttcggtggctggt

SEQ ID NO: 142972 - DNA, 56 bp, Artificial
  Synthetic oligonucleotide
tacaccggagcacacactggaccggaggaccaatctatgacgctaggctcgtatag

SEQ ID NO: 142973 - DNA, 55 bp, Artificial
  Synthetic oligonucleotide
ctgtcgacgtccaatagggtgtctggtccaatccgggtattcgaggcacctgggg

SEQ ID NO: 142974 - DNA, 55 bp, Artificial
  Synthetic oligonucleotide
cttcatcaatatggcctatctcatcctgggtaagctcgatctccggctacccaca

SEQ ID NO: 142975 - DNA, 54 bp, Artificial
  Synthetic oligonucleotide
gattagtcgtaaaatcgttcttccgttaatacggaaaaggtaagatcatgattg

SEQ ID NO: 142976 - DNA, 55 bp, Artificial
  Synthetic oligonucleotide
ctttattgtccgttaacagcaactctgacgcttgtggagccgaaaccgttctagc

SEQ ID NO: 142977 - DNA, 55 bp, Artificial
  Synthetic oligonucleotide
gacccgattcgtaaacagaccagatagcctctatcgttcggttctggggtggaac

SEQ ID NO: 142978 - DNA, 55 bp, Artificial
  Synthetic oligonucleotide
tcaggcgcaccatagcgttgcagagcctctcccaggcaggctacacagaactccg

SEQ ID NO: 142979 - DNA, 55 bp, Artificial
  Synthetic oligonucleotide
gacgtgacctacacttacggtaaggatcgtgttgagtttagcggtccagagccgc

SEQ ID NO: 142980 - DNA, 55 bp, Artificial
  Synthetic oligonucleotide
gtgctttgtcaatgccatttgcggcgtcgtcatccctcgcgttatcaggatccgg

SEQ ID NO: 142981 - DNA, 55 bp, Artificial
  Synthetic oligonucleotide
gagcctatcacattctgggcgagttgccgtgctacgcctcatgctggttttccgc

SEQ ID NO: 142982 - DNA, 57 bp, Artificial
  Synthetic oligonucleotide
tccgaaaatatgttgtaacttgagttcccggaagataagatagtcggacgatatgac

SEQ ID NO: 142983 - DNA, 55 bp, Artificial
  Synthetic oligonucleotide
gatgtcccgttctaagcctgccgtctacgccaaaatggaccctgcgcacttgttc

SEQ ID NO: 142984 - DNA, 54 bp, Artificial
  Synthetic oligonucleotide
ggctattgtggctaccgtgggcgatatgaaagcctttcggtccgggcgggagtt

SEQ ID NO: 142985 - DNA, 55 bp, Artificial
  Synthetic oligonucleotide
ggcttccatacggtaaaagttaccgcatctggcctcggaggtccatagagggcct

SEQ ID NO: 142986 - DNA, 55 bp, Artificial
  Synthetic oligonucleotide
gggccaaccggtacaagcttggacgtttagctgctacactcagcggctgtacgaa

SEQ ID NO: 142987 - DNA, 55 bp, Artificial
  Synthetic oligonucleotide
gggcgcccaaagtcagcacatcccgcaatcccaggttatagccttgcccggccaa

SEQ ID NO: 142988 - DNA, 55 bp, Artificial
  Synthetic oligonucleotide
ggggtgtgcctctattccgttgagccggtgtctgtgtctgtggacttcggatcgc

SEQ ID NO: 142989 - DNA, 55 bp, Artificial
  Synthetic oligonucleotide
gggtcgtgccgcttctagttcaatgtgattggcatcgataccatccaccacgcag

SEQ ID NO: 142990 - DNA, 55 bp, Artificial
  Synthetic oligonucleotide
gggtctgaaagagaccccgaaggaccgcttcacgccctatgtcgatagatgactg

SEQ ID NO: 142991 - DNA, 55 bp, Artificial
  Synthetic oligonucleotide
ggtccgctcgccgtcatacctcgacgagaaagcaagattttcttgtccgggcgtg

SEQ ID NO: 142992 - DNA, 55 bp, Artificial
  Synthetic oligonucleotide
ggtgatatgatggctactctgggcttgccttatattattgcggcgttgctagccc

SEQ ID NO: 142993 - DNA, 60 bp, Artificial
  Synthetic oligonucleotide
agatgctgttcgtcaaaagcgcgcagttgaagcgaagcgagccgcagggctgaagaagct

SEQ ID NO: 142994 - DNA, 55 bp, Artificial
  Synthetic oligonucleotide
ggtggctcttgtatgtgatcgtccttgtggtcttagagaaaacgatgtagcgcca

SEQ ID NO: 142995 - DNA, 55 bp, Artificial
  Synthetic oligonucleotide
ggtttacctctgcccgcaatccagagttccgcattcggtaacacggcagttttga

SEQ ID NO: 142996 - DNA, 55 bp, Artificial
  Synthetic oligonucleotide
gtatactaggcccgttcgctcatcaaggatgtcgcatggaccccaaagcacaccg

SEQ ID NO: 142997 - DNA, 55 bp, Artificial
  Synthetic oligonucleotide
gtatcccgacttcgagcagtggttacgacgcgagcacggggcagaacaggcgact

SEQ ID NO: 142998 - DNA, 55 bp, Artificial
  Synthetic oligonucleotide
gtcaggataggtggctagatccccagcagcccagatgcgggagtcactgctgcgc

SEQ ID NO: 142999 - DNA, 55 bp, Artificial
  Synthetic oligonucleotide
gtcctgacgccgtgtaaggtgcgccgtatggaaccggaccacccgttgcagtttc

SEQ ID NO: 143000 - DNA, 55 bp, Artificial
  Synthetic oligonucleotide
gtcgtgctttccttggcgttatcatactgcgtcaagtctttctctagtgttggag

SEQ ID NO: 143001 - DNA, 53 bp, Artificial
  Synthetic oligonucleotide
gtgaacccggattccctttaggcagctttcgggccgtttgccaggcccgtgac

SEQ ID NO: 143002 - DNA, 55 bp, Artificial
  Synthetic oligonucleotide
gattgctgtgagctccgtgtccgtctgtgaggagtagctatagtttaagggccag

SEQ ID NO: 143003 - DNA, 55 bp, Artificial
  Synthetic oligonucleotide
gattgggacggggataaaatttgcgtggtacgacctaaacagcgtgctcgacgtc

SEQ ID NO: 143004 - DNA, 58 bp, Artificial
  Synthetic oligonucleotide
tcgcggtacaaatagggatttttgctcgccacatgcgcgaagaacggggactatctcc

SEQ ID NO: 143005 - DNA, 55 bp, Artificial
  Synthetic oligonucleotide
gcagtccgaaggtgggagtgttgatcggcaactagactacgctaggcgctgggcg

SEQ ID NO: 143006 - DNA, 55 bp, Artificial
  Synthetic oligonucleotide
gcattctccggaagattggatgcgatcggacctgaattaccttgcaattgccaca

SEQ ID NO: 143007 - DNA, 55 bp, Artificial
  Synthetic oligonucleotide
gcctatctcatcctgggtaagctcgatctccggctacccacatgaaacgtcgaag

SEQ ID NO: 143008 - DNA, 55 bp, Artificial
  Synthetic oligonucleotide
gcgcaattttggcccgagttatccacgccagatagtatttagatgatagacggcg

SEQ ID NO: 143009 - DNA, 55 bp, Artificial
  Synthetic oligonucleotide
gcgcagttgaagcgaagcgagccgcagggctgaagaagctgcaaatgtgggtgcc

SEQ ID NO: 143010 - DNA, 55 bp, Artificial
  Synthetic oligonucleotide
gcgcggttaaggccgaattttcagagcgccaagtgcaggccaaacgggagaagga

SEQ ID NO: 143011 - DNA, 55 bp, Artificial
  Synthetic oligonucleotide
gcggaagatgctcccgctccagatcccactcccataagtgacgatagaagggtcg

SEQ ID NO: 143012 - DNA, 52 bp, Artificial
  Synthetic oligonucleotide
gcgtccgtctatccgttgaaacagggggttgtgggacgcttttgggggtgtc

SEQ ID NO: 143013 - DNA, 55 bp, Artificial
  Synthetic oligonucleotide
gctggcaggcaacggcccgccattcgcagcttgtacaacaccagacaccgctttc

SEQ ID NO: 143014 - DNA, 55 bp, Artificial
  Synthetic oligonucleotide
gctttcagagaaagcccggcccattccaaatgatcttcccgccagcgcaatccgg

SEQ ID NO: 143015 - DNA, 58 bp, Artificial
  Synthetic oligonucleotide
ggcagattgagttcagccggacaacccagaccccaataggccgtttgtgctggttggc

SEQ ID NO: 143016 - DNA, 55 bp, Artificial
  Synthetic oligonucleotide
ggacagcagttctgatgacgcggcggagattcttcccttggctgcttcttcggcg

SEQ ID NO: 143017 - DNA, 55 bp, Artificial
  Synthetic oligonucleotide
ggactgattgcgggtcatctactaaaggggtaactcaatgaccaataaagataac

SEQ ID NO: 143018 - DNA, 55 bp, Artificial
  Synthetic oligonucleotide
ggcaacgggagcagaacgggcgctatgaagtgttagagaatggcgagctaggacg

SEQ ID NO: 143019 - DNA, 55 bp, Artificial
  Synthetic oligonucleotide
ggcacctttcggttaatccccggagcgagatgggcaagattgtgtaagctctagg

SEQ ID NO: 143020 - DNA, 55 bp, Artificial
  Synthetic oligonucleotide
tctgccagagccggagtttcagccatccgtccccatagcgccagacccgccgata

SEQ ID NO: 143021 - DNA, 55 bp, Artificial
  Synthetic oligonucleotide
tcgccgaagaggtgaactcccctgccactgtggcgactatcccggaagatacccc

SEQ ID NO: 143022 - DNA, 55 bp, Artificial
  Synthetic oligonucleotide
aggttccacgaatctggacatgtggagcttcgcaaacaacaaggaggttaacgcc

SEQ ID NO: 143023 - DNA, 55 bp, Artificial
  Synthetic oligonucleotide
gttgacatggccctgtacgggaccttgagctggccagttatgtaactaaacaggc

SEQ ID NO: 143024 - DNA, 55 bp, Artificial
  Synthetic oligonucleotide
attgagggcgccatctaccagtgtgccccatcgatccgggagcagcaggaaagcc

SEQ ID NO: 143025 - DNA, 55 bp, Artificial
  Synthetic oligonucleotide
caatgcgcaaggactttcggtgctatctgatgccatcgcgtcgaggatacaaacg

SEQ ID NO: 143026 - DNA, 60 bp, Artificial
  Synthetic oligonucleotide
tctcgggcacgaatgccaaagctggcaggcaacggcccgccattcgcagcttgtacaaca

SEQ ID NO: 143027 - DNA, 55 bp, Artificial
  Synthetic oligonucleotide
cacagtgtgccactcgctctaatcaatcagtacggttacaactataactggccct

SEQ ID NO: 143028 - DNA, 54 bp, Artificial
  Synthetic oligonucleotide
caccaatacccgtaaccggtcttggcctgctcggacggtgagtaccatacccac

SEQ ID NO: 143029 - DNA, 55 bp, Artificial
  Synthetic oligonucleotide
cagctggtcaagattcggaccatgcagattaacgcaattcgtggactcctctatg

SEQ ID NO: 143030 - DNA, 55 bp, Artificial
  Synthetic oligonucleotide
cagtgcgccaccttgcccaagtcagccgtaatccgcccttacattagattcggtc

SEQ ID NO: 143031 - DNA, 55 bp, Artificial
  Synthetic oligonucleotide
ccaatataaactggtagacggacccatcttcagaacagaagatgttctggactaa

SEQ ID NO: 143032 - DNA, 55 bp, Artificial
  Synthetic oligonucleotide
ccatcgcgtcgaggatacaaacggttatcggccagtagaaaacgtgcgaatgcgc

SEQ ID NO: 143033 - DNA, 55 bp, Artificial
  Synthetic oligonucleotide
ccgatactcgcacttcatactgtccgggcggcaactgagtataagggccatgaag

SEQ ID NO: 143034 - DNA, 55 bp, Artificial
  Synthetic oligonucleotide
ccgcggttacggagttgcgcgcaaattataggcaccgattgaatttcgcgcgtgt

SEQ ID NO: 143035 - DNA, 55 bp, Artificial
  Synthetic oligonucleotide
ccggcaaatatggaggtcacgcgcttgatcgtgtccaattggtttggctgaaact

SEQ ID NO: 143036 - DNA, 50 bp, Artificial
  Synthetic oligonucleotide
ccgggtttcctgggtaaagaccgttcgctggcgccctaaagttgcacggg

SEQ ID NO: 143037 - DNA, 57 bp, Artificial
  Synthetic oligonucleotide
ggcggatttctgcgaaaaaggcgcaattttggcccgagttatccacgccagatagta

SEQ ID NO: 143038 - DNA, 54 bp, Artificial
  Synthetic oligonucleotide
aacgcctcctgacactgtattgtcccgcttccggatgggttgtttaagttagcg

SEQ ID NO: 143039 - DNA, 55 bp, Artificial
  Synthetic oligonucleotide
aacgggtcgctttgtgagatcgagaccacgcaccacggcctgtgctggctgagag

SEQ ID NO: 143040 - DNA, 55 bp, Artificial
  Synthetic oligonucleotide
ttggccatatccaccgcagcacgagcttcgggcacataatggtcaatcactcgcc

SEQ ID NO: 143041 - DNA, 55 bp, Artificial
  Synthetic oligonucleotide
tacgccggttcatgggagggacggtcattctgtcagcgggtggtgtggcaagtcc

SEQ ID NO: 143042 - DNA, 55 bp, Artificial
  Synthetic oligonucleotide
ttgcccaaagtgaaacggggagccgcatgcgcaactgtcactactgcccacgagg

SEQ ID NO: 143043 - DNA, 55 bp, Artificial
  Synthetic oligonucleotide
ttcagtatcgccctggagcgtatgcctacgcccttgcccgagggtaatgagcccg

SEQ ID NO: 143044 - DNA, 55 bp, Artificial
  Synthetic oligonucleotide
ttacgtgttgaaggctcaatgcagtgtccttattacgttctcgatgcccttaggc

SEQ ID NO: 143045 - DNA, 55 bp, Artificial
  Synthetic oligonucleotide
aatggcgcaagtggtccaaggacggaccgagagctccgacaggcaggaccagacc

SEQ ID NO: 143046 - DNA, 55 bp, Artificial
  Synthetic oligonucleotide
taatagccactgcggcgctaccgcgacacagcgtatggtgtttccgctaacggcc

SEQ ID NO: 143047 - DNA, 55 bp, Artificial
  Synthetic oligonucleotide
accagccagcgggcatttaaagcggcttggcgggcgcttcaagcaatggcaagac

SEQ ID NO: 143048 - DNA, 60 bp, Artificial
  Synthetic oligonucleotide
cgcccagagcttcagtgccaccagcgggcgggccgagtggtccgcgagatagtcaacgac

SEQ ID NO: 143049 - DNA, 54 bp, Artificial
  Synthetic oligonucleotide
accgtaggacccgccatatcgacgcaatccgtggccaattttccggtgggcgga

SEQ ID NO: 143050 - DNA, 55 bp, Artificial
  Synthetic oligonucleotide
tgatgggtcatggttccatacccggagttcgaatgccccgcggtcgcttgtgggg

SEQ ID NO: 143051 - DNA, 55 bp, Artificial
  Synthetic oligonucleotide
tgacgggctgatgtccgacgctgtgtgagtggaagtgcaaatcgcgtaggctgcc

SEQ ID NO: 143052 - DNA, 55 bp, Artificial
  Synthetic oligonucleotide
taagggcctgaatatcatcccgttgtttcatcaagggttatgcttcctcgcggag

SEQ ID NO: 143053 - DNA, 55 bp, Artificial
  Synthetic oligonucleotide
actacctggctggcctgtcaccgacacgcattctcctggttcggtggcgttccca

SEQ ID NO: 143054 - DNA, 55 bp, Artificial
  Synthetic oligonucleotide
tcttatggcataagcatggctaatgtctacatgcacgtcagaaaggactttaagc

SEQ ID NO: 143055 - DNA, 55 bp, Artificial
  Synthetic oligonucleotide
cgccgttgacttgtgggacagcataccgcgttactctatttcacgagccagaatg

SEQ ID NO: 143056 - DNA, 55 bp, Artificial
  Synthetic oligonucleotide
cgggagaaggatcgagggttcgatatgatggactaagccgcccagagcggtgctc

SEQ ID NO: 143057 - DNA, 55 bp, Artificial
  Synthetic oligonucleotide
cgggctttgtcttgaccagagcgactgtgccttcgagtgggcaccggtagcgctt

SEQ ID NO: 143058 - DNA, 55 bp, Artificial
  Synthetic oligonucleotide
cggtgcacgaggttgatgtgataccgacggcgactgtacgcccacacacgcagca

SEQ ID NO: 143059 - DNA, 58 bp, Artificial
  Synthetic oligonucleotide
acgttgacgagcccctgccctaacgttgacaccacaaaacacgctaagccagcattga

SEQ ID NO: 143060 - DNA, 55 bp, Artificial
  Synthetic oligonucleotide
cgtagtggttcataattcgttttatagactgattaaaggggctttcatgagcacg

SEQ ID NO: 143061 - DNA, 55 bp, Artificial
  Synthetic oligonucleotide
cgtatatgaccgtataggtttgcttggatcacgtactgttctcgctcactgcgtt

SEQ ID NO: 143062 - DNA, 55 bp, Artificial
  Synthetic oligonucleotide
cgtggcagaaaggaggcgctcatgagcctacgtgtaggagtgcgagaattacgcg

SEQ ID NO: 143063 - DNA, 55 bp, Artificial
  Synthetic oligonucleotide
cgttactgagacccttgtcgaagtatagctggaatccgctacctgcacgggtaac

SEQ ID NO: 143064 - DNA, 55 bp, Artificial
  Synthetic oligonucleotide
cgttagacattatccgggcatctatcgactcagagtcgtcatcgaaggttgggat

SEQ ID NO: 143065 - DNA, 55 bp, Artificial
  Synthetic oligonucleotide
cgttgccattttctccggtgagagtgcttgacaccgtaatggtgctgtgcgaccg

SEQ ID NO: 143066 - DNA, 55 bp, Artificial
  Synthetic oligonucleotide
ctcgggccttggttcagcacgtcaaagagggccgcgagcatgtgcatgtggtctg

SEQ ID NO: 143067 - DNA, 55 bp, Artificial
  Synthetic oligonucleotide
ctctggatgcggtcgtcaatgtccggctaaccgcatcggagaaagcgcgtctacg

SEQ ID NO: 143068 - DNA, 55 bp, Artificial
  Synthetic oligonucleotide
ctgagggtcatggagcgggtagatgtgcgtaaattgacggtggatgggcgcaaca

SEQ ID NO: 143069 - DNA, 55 bp, Artificial
  Synthetic oligonucleotide
ctgtccttggctaccagcaaggccccttcggcctccccaggataagtcccgtcat

SEQ ID NO: 143070 - DNA, 57 bp, Artificial
  Synthetic oligonucleotide
gagaaagtatcgaacgactatggaaggtctccgtgatcgttcagcgcgaggggaaac

SEQ ID NO: 143071 - DNA, 55 bp, Artificial
  Synthetic oligonucleotide
cgccggcacattattgcggttacttcggcattatatggtatcgccttaccatccg

SEQ ID NO: 143072 - DNA, 55 bp, Artificial
  Synthetic oligonucleotide
cgcccaatgctccttctgcactgtacatttcagcgtgttggaccgcaattcccgg

SEQ ID NO: 143073 - DNA, 55 bp, Artificial
  Synthetic oligonucleotide
cgatgccatacaacgaaactatggaagggctccgaaaacaatgcggcacacctcg

SEQ ID NO: 143074 - DNA, 55 bp, Artificial
  Synthetic oligonucleotide
cgagttgaacggggcgagcgcccggtaagtggccattctgtggcacgataaatgc

SEQ ID NO: 143075 - DNA, 55 bp, Artificial
  Synthetic oligonucleotide
cgagggcatgcgcaaccatctgactctcgatctcaaggcccgttggcagatgtct

SEQ ID NO: 143076 - DNA, 55 bp, Artificial
  Synthetic oligonucleotide
cctttgaccacgttcactcctgagcggtaagttctcacgttgctttgtgtggtac

SEQ ID NO: 143077 - DNA, 55 bp, Artificial
  Synthetic oligonucleotide
ccgttgagacaaggagtgaagcgcgtggctaaaccatctgctctaacagttgacg

SEQ ID NO: 143078 - DNA, 55 bp, Artificial
  Synthetic oligonucleotide
ccttgagcaagcgtggtcaccggaatagatggcggggagtttatgcatggagcac

SEQ ID NO: 143079 - DNA, 55 bp, Artificial
  Synthetic oligonucleotide
ccgtcccaatggttcatgagggtgtaggcgaccctgacgataggcggcagatcgc

SEQ ID NO: 143080 - DNA, 55 bp, Artificial
  Synthetic oligonucleotide
cctggggcgtcattcctccacgaaaagcgctcaagtgggagactacggcttcggg

SEQ ID NO: 143081 - DNA, 60 bp, Artificial
  Synthetic oligonucleotide
ggatccttgtggagaaattgtcagacagggcagttgcaagatcgaggcgcacccactgtc

SEQ ID NO: 143082 - DNA, 60 bp, Artificial
  Synthetic oligonucleotide
tgaagttggcagctgaacatggtttcaagatcaccaatccagagttgcaggaacgcatcc

SEQ ID NO: 143083 - DNA, 54 bp, Artificial
  Synthetic oligonucleotide
ttgagcataatcctcgcgataatgacagggtgctcggctatgatactgcccaca

SEQ ID NO: 143084 - DNA, 54 bp, Artificial
  Synthetic oligonucleotide
gggttcgcgcataccgttgtcgacgctgggggcagagactccgttggtcttcgg

SEQ ID NO: 143085 - DNA, 54 bp, Artificial
  Synthetic oligonucleotide
gcccttgggcataaatgggattattccacggacgtatcacctcctgatccgtac

SEQ ID NO: 143086 - DNA, 54 bp, Artificial
  Synthetic oligonucleotide
gaccgaagaccaacggagtctctgcccccagcgtcgacaacggtatgcgcgaac

SEQ ID NO: 143087 - DNA, 54 bp, Artificial
  Synthetic oligonucleotide
ctgcaaaccgtaatcggtgaatccgacagtaccggcgatcagagaaaatgcagc

SEQ ID NO: 143088 - DNA, 54 bp, Artificial
  Synthetic oligonucleotide
acgcccggaaggattcgcttgtcggttccattcacgcatgacggtgctccctat

SEQ ID NO: 143089 - DNA, 54 bp, Artificial
  Synthetic oligonucleotide
aacggagtctctgcccccagcgtcgacaacggtatgcgcgaacccctggctcag

SEQ ID NO: 143090 - DNA, 54 bp, Artificial
  Synthetic oligonucleotide
gtgacaggccatatccttgcgtcagccgattgggaataaacaggctcggtaacc

SEQ ID NO: 143091 - DNA, 54 bp, Artificial
  Synthetic oligonucleotide
tcgcttgctatcacacctcctaataatcaactatgattgacgctggcggtacaa

SEQ ID NO: 143092 - DNA, 54 bp, Artificial
  Synthetic oligonucleotide
tcgcagctttgcagcgatagcctctagctgttctgtcgtgtacttcatcgtgct

SEQ ID NO: 143093 - DNA, 59 bp, Artificial
  Synthetic oligonucleotide
cctccagacgaaactgaggtgaagtcttatgaacggctacgaatagcagcgaaagcgtc

SEQ ID NO: 143094 - DNA, 53 bp, Artificial
  Synthetic oligonucleotide
gcagccattcgaggccaatcacatgaatttcggcccctaattcttgaacctcc

SEQ ID NO: 143095 - DNA, 53 bp, Artificial
  Synthetic oligonucleotide
aaagacgtggagccaacccattgccacgtcagatctagtccccatcggtgctg

SEQ ID NO: 143096 - DNA, 53 bp, Artificial
  Synthetic oligonucleotide
ccgcccagagcggtgctcagtagaaaaataccttcacgaaagtgaccaccgtt

SEQ ID NO: 143097 - DNA, 53 bp, Artificial
  Synthetic oligonucleotide
ttgatccctgcgtacacagggcacaccggatcattcgccaaaagccagacatc

SEQ ID NO: 143098 - DNA, 53 bp, Artificial
  Synthetic oligonucleotide
gtcgcacccctgccacacaattaaaggaaatcggccattatagccatgcaccc

SEQ ID NO: 143099 - DNA, 53 bp, Artificial
  Synthetic oligonucleotide
aaactgggcagcaatcaagcggacctcatgccccagcttacgcaattcccgtc

SEQ ID NO: 143100 - DNA, 53 bp, Artificial
  Synthetic oligonucleotide
aagccacgcggaaatgcagcaagccgagcgatcgggcctcgaccccaaggcaa

SEQ ID NO: 143101 - DNA, 53 bp, Artificial
  Synthetic oligonucleotide
ctccagctcgtaacggggtggggacgccacgggattcactccccaggagtccg

SEQ ID NO: 143102 - DNA, 53 bp, Artificial
  Synthetic oligonucleotide
tcatgggaatggagagcgacggtcgacgctacacgacgttgcggaagcagatg

SEQ ID NO: 143103 - DNA, 53 bp, Artificial
  Synthetic oligonucleotide
ccgcaatctgctacggattctcggcgcatgatccagcactcgcacaagctgtg

SEQ ID NO: 143104 - DNA, 60 bp, Artificial
  Synthetic oligonucleotide
tgagcaagtagcaacgctgaccgaagaccaacggagtctctgcccccagcgtcgacaacg

SEQ ID NO: 143105 - DNA, 53 bp, Artificial
  Synthetic oligonucleotide
tgcaaacagcaagaccgaacatatgatggccgtgctacaaaacaagacgttac

SEQ ID NO: 143106 - DNA, 53 bp, Artificial
  Synthetic oligonucleotide
gacgggaattgcgtaagctggggcatgaggtccgcttgattgctgcccagttt

SEQ ID NO: 143107 - DNA, 53 bp, Artificial
  Synthetic oligonucleotide
gggaagactgtaactcgtgggtctgcatgattcacctcaatggaatagggttt

SEQ ID NO: 143108 - DNA, 53 bp, Artificial
  Synthetic oligonucleotide
cataccgttgtcgacgctgggggcagagactccgttggtcttcggtcagcgtt

SEQ ID NO: 143109 - DNA, 53 bp, Artificial
  Synthetic oligonucleotide
agccactatccaccgtccatgcatttaggtagtgccgccagacgtagtgctga

SEQ ID NO: 143110 - DNA, 52 bp, Artificial
  Synthetic oligonucleotide
gtttcgatacgttccttcaaccgcaatttctatgggcgttccggcactaaaa

SEQ ID NO: 143111 - DNA, 52 bp, Artificial
  Synthetic oligonucleotide
taggtgaggacaaaacctagtcctaggtgaggacaaacttagtcctaggtga

SEQ ID NO: 143112 - DNA, 52 bp, Artificial
  Synthetic oligonucleotide
gggatcgctatcataattaggcttgtagtagaggttatctcgatagtaatca

SEQ ID NO: 143113 - DNA, 52 bp, Artificial
  Synthetic oligonucleotide
gagaacagcatggctttggacattatggcggcattcaccaacgaaccgccag

SEQ ID NO: 143114 - DNA, 52 bp, Artificial
  Synthetic oligonucleotide
gaagcaacgagcaatgggaaggtaaaaaacgatggcaaaggaaagcgcgatg

SEQ ID NO: 143115 - DNA, 58 bp, Artificial
  Synthetic oligonucleotide
cccgtcaatgctggcttagcgtgttttgtggtgtcaacgttagggcaggggctcgtca

SEQ ID NO: 143116 - DNA, 52 bp, Artificial
  Synthetic oligonucleotide
ccagagcagacgaccgtcgttctggaccccaaaacttcggttgccgaagtct

SEQ ID NO: 143117 - DNA, 52 bp, Artificial
  Synthetic oligonucleotide
atgatcccaacggtcttgtgccttacatagatgagagcacgacgtgtgatgc

SEQ ID NO: 143118 - DNA, 52 bp, Artificial
  Synthetic oligonucleotide
ttgggttaacatagtagtttaaccccaccgtggtattgtccagcttggcatc

SEQ ID NO: 143119 - DNA, 51 bp, Artificial
  Synthetic oligonucleotide
tcgcccgggtaaacctggcctggtatgttggcgctctgctttctaccggtg

SEQ ID NO: 143120 - DNA, 51 bp, Artificial
  Synthetic oligonucleotide
tgaacgcttacgacagttccatgtctcatgggcactagcgtcggacattgg

SEQ ID NO: 143121 - DNA, 51 bp, Artificial
  Synthetic oligonucleotide
tgcgccgacagactgctcgtaatgcgctgcccgagcttaccactgtaggct

SEQ ID NO: 143122 - DNA, 51 bp, Artificial
  Synthetic oligonucleotide
tggcagcacaagggatgcgctacgagcagaagggcagtggcgcattgcttt

SEQ ID NO: 143123 - DNA, 51 bp, Artificial
  Synthetic oligonucleotide
ttgccgaacatccgctgaaaggcttggtagctcaatttttcggccatcacc

SEQ ID NO: 143124 - DNA, 51 bp, Artificial
  Synthetic oligonucleotide
ttttggcacgtcagttatataccatcctgagagagttttgctcgaacaatc

SEQ ID NO: 143125 - DNA, 51 bp, Artificial
  Synthetic oligonucleotide
actgcctgggtggagagacctttgtgtccttcgacaagcgtgcggtgcgga

SEQ ID NO: 143126 - DNA, 54 bp, Artificial
  Synthetic oligonucleotide
ccctgccctaacgttgacgagcccctgccctaacgttgacaccacaaaacacgc

SEQ ID NO: 143127 - DNA, 51 bp, Artificial
  Synthetic oligonucleotide
gacgctgggggcagagactccgttggtcttcggtcagcgttgctacttgct

SEQ ID NO: 143128 - DNA, 51 bp, Artificial
  Synthetic oligonucleotide
gacccacccaattctgggcgaggacataactggggcggttgtgcttatgac

SEQ ID NO: 143129 - DNA, 51 bp, Artificial
  Synthetic oligonucleotide
gaatctcctgccagtccaaggttagtcagcattgggcatgatctgtaagct

SEQ ID NO: 143130 - DNA, 51 bp, Artificial
  Synthetic oligonucleotide
cggttgaccggacagaacgtccgccggccatgagatccttttcaaataccc

SEQ ID NO: 143131 - DNA, 51 bp, Artificial
  Synthetic oligonucleotide
acgaacgggtggggtgctcagagaaaagtgccgtagccacatcgcggggat

SEQ ID NO: 143132 - DNA, 51 bp, Artificial
  Synthetic oligonucleotide
cgccggacaggaaattcgcgtcttcggccctaactcgggccgtatgtggag

SEQ ID NO: 143133 - DNA, 51 bp, Artificial
  Synthetic oligonucleotide
ccccaggagcccggtcgcggacgctcttgccgaacatccgctgaaaggctt

SEQ ID NO: 143134 - DNA, 51 bp, Artificial
  Synthetic oligonucleotide
catagaatctggctgtctctaagcgcacgtaatccatacagccagaaatca

SEQ ID NO: 143135 - DNA, 51 bp, Artificial
  Synthetic oligonucleotide
cacatagtcgcgccggacaggaaattcgcgtcttcggccctaactcgggcc

SEQ ID NO: 143136 - DNA, 50 bp, Artificial
  Synthetic oligonucleotide
aagcagcccccaatgctccagtagtgccgcaatcagtagtcggccaaggc

SEQ ID NO: 143137 - DNA, 55 bp, Artificial
  Synthetic oligonucleotide
ccccatgacagggacgtgggcaaccgcctgagcgaggccttgaaccgggagtacg

SEQ ID NO: 143138 - DNA, 50 bp, Artificial
  Synthetic oligonucleotide
aagcagcggcgcagtttcagagcagtcaggcaagccagcaggaatcattg

SEQ ID NO: 143139 - DNA, 50 bp, Artificial
  Synthetic oligonucleotide
aagcggcactgcggtcatcacattccggcttgcgccttcgggtcgattgc

SEQ ID NO: 143140 - DNA, 50 bp, Artificial
  Synthetic oligonucleotide
aagtctggtggaccccgaaaggccggacgtctagtcgactcgcaccgatg

SEQ ID NO: 143141 - DNA, 50 bp, Artificial
  Synthetic oligonucleotide
aatcccgtacctcactctgcgatccctcgtcggaccctacggacggtgca

SEQ ID NO: 143142 - DNA, 50 bp, Artificial
  Synthetic oligonucleotide
aatgcgtgcccccaataacaccgacgtccccgctcatgcatccacacggc

SEQ ID NO: 143143 - DNA, 50 bp, Artificial
  Synthetic oligonucleotide
aatggccacagactgaacacctgggggcaccgctccagcagtgggtgtca

SEQ ID NO: 143144 - DNA, 50 bp, Artificial
  Synthetic oligonucleotide
acaaaagggaggcgtgcgtgttcagagttcggtgctggccagtaaggcgg

SEQ ID NO: 143145 - DNA, 50 bp, Artificial
  Synthetic oligonucleotide
acaaactcggctggccccgtatgggcaatctgcgcaaaacccagggtctc

SEQ ID NO: 143146 - DNA, 50 bp, Artificial
  Synthetic oligonucleotide
aagacgctgcaccgctcctccaacggctggaccatgcccactggatcgct

SEQ ID NO: 143147 - DNA, 50 bp, Artificial
  Synthetic oligonucleotide
aactggggcatgaggtccgcttgatcgcagcccagtttgtgcgtcccttt

SEQ ID NO: 143148 - DNA, 60 bp, Artificial
  Synthetic oligonucleotide
ccgacacgcaaggcactctgacccaatggcacgaagccagagagactgaggagcctcgac

SEQ ID NO: 143149 - DNA, 50 bp, Artificial
  Synthetic oligonucleotide
aacgttgttggcgacggagcatagcgagcccacaccggggcaaactaaca

SEQ ID NO: 143150 - DNA, 50 bp, Artificial
  Synthetic oligonucleotide
aaccataaagagccgcgcacgtcgccgcaacacaatccagctgcgtgtgc

SEQ ID NO: 143151 - DNA, 50 bp, Artificial
  Synthetic oligonucleotide
aacatacgagaaaaccggcaacactcgccaggatcagccgcctctgcccg

SEQ ID NO: 143152 - DNA, 50 bp, Artificial
  Synthetic oligonucleotide
aacacgtaagccaccgggagcgattcatccaggcgcggaatagtgggtga

SEQ ID NO: 143153 - DNA, 50 bp, Artificial
  Synthetic oligonucleotide
aacaactcccggtgggcacttactttgggcgaagcgcgggacagggtaga

SEQ ID NO: 143154 - DNA, 50 bp, Artificial
  Synthetic oligonucleotide
aaattcggcgcattgcaccgggacaccgatctccgcacggcgatcaacgc

SEQ ID NO: 143155 - DNA, 50 bp, Artificial
  Synthetic oligonucleotide
aaatggcacagtgcaagacgctgcaccgctcctccaacggctggaccatg

SEQ ID NO: 143156 - DNA, 50 bp, Artificial
  Synthetic oligonucleotide
aaagcatgggcaccctattcgctgcgggaggcttgcgcgtccattatcaa

SEQ ID NO: 143157 - DNA, 50 bp, Artificial
  Synthetic oligonucleotide
aaaatcgatcccgctccgttgcaggcccccagatccggatcagcacccct

SEQ ID NO: 143158 - DNA, 50 bp, Artificial
  Synthetic oligonucleotide
gttctcccgcatcagtaggcaaggcgttcgctcttggcgtcatcactata

SEQ ID NO: 143159 - DNA, 58 bp, Artificial
  Synthetic oligonucleotide
cccatgatcggcgaccctaacgggtcgctttgtgagatcgagaccacgcaccacggcc

SEQ ID NO: 143160 - DNA, 50 bp, Artificial
  Synthetic oligonucleotide
gtatctgagctatggcaattccctgtatcggtattcatgccgtaagcata

SEQ ID NO: 143161 - DNA, 50 bp, Artificial
  Synthetic oligonucleotide
gcaccgcttggtaggcggtgccatctcctaaaggcttagactattagaat

SEQ ID NO: 143162 - DNA, 50 bp, Artificial
  Synthetic oligonucleotide
tccaggcaagggctggcaagcattaaagggagtatgctctggacatagcc

SEQ ID NO: 143163 - DNA, 50 bp, Artificial
  Synthetic oligonucleotide
aggccccgatacgccgtccgtcccggctacaggcaagcaccggtagacag

SEQ ID NO: 143164 - DNA, 50 bp, Artificial
  Synthetic oligonucleotide
agcacaaagcgatggcgacagcctagcaccgcaatgcgctggacccaagg

SEQ ID NO: 143165 - DNA, 50 bp, Artificial
  Synthetic oligonucleotide
acttcagggagccttgtgtgggccgattcacgctccatccggcattccca

SEQ ID NO: 143166 - DNA, 50 bp, Artificial
  Synthetic oligonucleotide
actgcgggacgaaaagcccctcagcatggcagtcgtagcgtagtgaccgg

SEQ ID NO: 143167 - DNA, 50 bp, Artificial
  Synthetic oligonucleotide
actgccaatgcaattcgctgtgcaactccgcccagagtcgacgcaggcta

SEQ ID NO: 143168 - DNA, 50 bp, Artificial
  Synthetic oligonucleotide
actacgccgtgcacgctaaagagggctccatgcacaatacgcccccgacc

SEQ ID NO: 143169 - DNA, 50 bp, Artificial
  Synthetic oligonucleotide
acgtgcagcgtcggcacgaccatctcctttactgcgctttggagcgttgg

SEQ ID NO: 143170 - DNA, 54 bp, Artificial
  Synthetic oligonucleotide
cggactcctggggagtgaatcccgtggcgtccccaccccgttacgagctggagc

SEQ ID NO: 143171 - DNA, 50 bp, Artificial
  Synthetic oligonucleotide
acgtaaagtggcacccatgcgcgtggaaagctgtcccgtcatgtcggcaa

SEQ ID NO: 143172 - DNA, 50 bp, Artificial
  Synthetic oligonucleotide
acggtggactccgattggaaacccaggacatgcccaccttggcgccagga

SEQ ID NO: 143173 - DNA, 50 bp, Artificial
  Synthetic oligonucleotide
acgggtcttctgcggacatcgaggcctcagccgtgatttctaccgacgga

SEQ ID NO: 143174 - DNA, 50 bp, Artificial
  Synthetic oligonucleotide
acgctgggtgtaaagagtccacccggggcgccgctaccaagacatccggc

SEQ ID NO: 143175 - DNA, 50 bp, Artificial
  Synthetic oligonucleotide
acgacctagtagcagtgaccgttgaggggccgtcggtagacgaggccgca

SEQ ID NO: 143176 - DNA, 50 bp, Artificial
  Synthetic oligonucleotide
accgtgaattgcgcccgccgtgagctatacggggtgccagccaatgggga

SEQ ID NO: 143177 - DNA, 50 bp, Artificial
  Synthetic oligonucleotide
accagggagccaggggttaatgccggggttagccgccgtcacctgattgt

SEQ ID NO: 143178 - DNA, 50 bp, Artificial
  Synthetic oligonucleotide
acagttgtatggaagcagcggcgcagtttcagagcagtcaggcaagccag

SEQ ID NO: 143179 - DNA, 50 bp, Artificial
  Synthetic oligonucleotide
acagcccggcgtgatccctaagcgacgacggatttccaccggaatgacga

SEQ ID NO: 143180 - DNA, 60 bp, Artificial
  Synthetic oligonucleotide
gtgtgcaccccgagacgctcaagattgttgagatcaaccgtggctttgatattgaactgg

SEQ ID NO: 143181 - DNA, 60 bp, Artificial
  Synthetic oligonucleotide
atccggggcctcccactgcatcgttccaccttcgagaaagagctgctctgtctcgggcac

SEQ ID NO: 143182 - DNA, 53 bp, Artificial
  Synthetic oligonucleotide
ccactcccgtacccaccagcgctccagctcgtaacggggtggggacgccacgg

SEQ ID NO: 143183 - DNA, 60 bp, Artificial
  Synthetic oligonucleotide
cgcgacactcgatggatagcacaattccatccgttagtgacgcagagtatcgatcatgtg

SEQ ID NO: 143184 - DNA, 56 bp, Artificial
  Synthetic oligonucleotide
tccggttgtccgtcatatcgtccgactatcttatcttccgggaactcaagttacaa

SEQ ID NO: 143185 - DNA, 60 bp, Artificial
  Synthetic oligonucleotide
catacttgcatactggtaccgttgagacaaggagtgaagcgcgtggctaaaccatctgct

SEQ ID NO: 143186 - DNA, 57 bp, Artificial
  Synthetic oligonucleotide
gcgtcaagtcgtcccacaatcatagcgtccgtctatccgttgaaacagggggttgtg

SEQ ID NO: 143187 - DNA, 60 bp, Artificial
  Synthetic oligonucleotide
cggccatgatcgctcagggtatccacgatttggtccatcttggcgtcaagacgccgaaga

SEQ ID NO: 143188 - DNA, 60 bp, Artificial
  Synthetic oligonucleotide
gctgatactctcgatactctcaaaagccgtgcgggttgcctctgccaaagcgatagcggg

SEQ ID NO: 143189 - DNA, 60 bp, Artificial
  Synthetic oligonucleotide
cactcttgatcgctctgatgacatcggctttcccgcctttgccggtgacttctccgggct

SEQ ID NO: 143190 - DNA, 59 bp, Artificial
  Synthetic oligonucleotide
gcctgtgtgcgtcaagtcgtcccacaatcatagcgtccgtctatccgttgaaacagggg

SEQ ID NO: 143191 - DNA, 58 bp, Artificial
  Synthetic oligonucleotide
gcatcacgaggccgggaaccgccgacccgagacaaagcgaccagcccacttctgacca

SEQ ID NO: 143192 - DNA, 60 bp, Artificial
  Synthetic oligonucleotide
atcactctcaaacgccgttgacttgtgggacagcataccgcgttactctatttcacgagc

SEQ ID NO: 143193 - DNA, 60 bp, Artificial
  Synthetic oligonucleotide
cggcctacacaaggacacggacaatatccacttgcacatcgccatcaaccgtgtgcaccc

SEQ ID NO: 143194 - DNA, 57 bp, Artificial
  Synthetic oligonucleotide
gaggattacgaagatgtcccgttctaagcctgccgtctacgccaaaatggaccctgc

SEQ ID NO: 143195 - DNA, 60 bp, Artificial
  Synthetic oligonucleotide
ggaaggggagcagcctagcccggagcaggtggaagaagcggtaagcatctttctggatga

SEQ ID NO: 143196 - DNA, 58 bp, Artificial
  Synthetic oligonucleotide
gaggacacgcattttgtccataagggcctgaatatcatcccgttgtttcatcaagggt

SEQ ID NO: 143197 - DNA, 59 bp, Artificial
  Synthetic oligonucleotide
tatcccgatgaggccaaaagcgcggttaaggccgaattttcagagcgccaagtgcaggc

SEQ ID NO: 143198 - DNA, 60 bp, Artificial
  Synthetic oligonucleotide
atttgcaggcccttagagacgctcagagggctccagagctaccagaggccgtccagacga

SEQ ID NO: 143199 - DNA, 58 bp, Artificial
  Synthetic oligonucleotide
tttgcaagccatgcgcgggttccccgcacgtcttgccagggggatgctccgctccccc

SEQ ID NO: 143200 - DNA, 58 bp, Artificial
  Synthetic oligonucleotide
ggtactccgataggggtgtgcctctattccgttgagccggtgtctgtgtctgtggact

SEQ ID NO: 143201 - DNA, 60 bp, Artificial
  Synthetic oligonucleotide
aagtacagcctgacgctctcaaaatcgattctagggcctctaacgaggctgtaatgggca

SEQ ID NO: 143202 - DNA, 55 bp, Artificial
  Synthetic oligonucleotide
aagcttaaaaaagccttggaaacagccaaaaacctgagagatgactggcgacgcc

SEQ ID NO: 143203 - DNA, 59 bp, Artificial
  Synthetic oligonucleotide
agtgcaggccaaacgggagaaggatcgagggttcgatatgatggactaagccgcccaga

SEQ ID NO: 143204 - DNA, 60 bp, Artificial
  Synthetic oligonucleotide
ttgtcgatcggtcgatgcggtcagtcagtcgctccgcttcgctttccgtcatcttggcga

SEQ ID NO: 143205 - DNA, 56 bp, Artificial
  Synthetic oligonucleotide
ttgacgagcccctgccctaacgttgacgagcccctgccctaacgttgacaccacaa

SEQ ID NO: 143206 - DNA, 57 bp, Artificial
  Synthetic oligonucleotide
gaattgtgggttcttcgacgtttcatgtgggtagccggagatcgagcttacccagga

SEQ ID NO: 143207 - DNA, 60 bp, Artificial
  Synthetic oligonucleotide
ggtcgagcgcgacaactcgcccggcatgagtcgctagcgttgcgcggcggttgtgatatg

SEQ ID NO: 143208 - DNA, 60 bp, Artificial
  Synthetic oligonucleotide
aagactcgggagccgcgtgcgacaccagcgaaattcctgacggagcaaacgcgatgatcg

SEQ ID NO: 143209 - DNA, 60 bp, Artificial
  Synthetic oligonucleotide
gcaaggcactctgacccaatggcacgaagccagagagactgaggagcctcgacgcgtggt

SEQ ID NO: 143210 - DNA, 60 bp, Artificial
  Synthetic oligonucleotide
tccagatgatgcccgatccagcaagcgtttttgcacttcgtggcgtatgcctgcaaaccg

SEQ ID NO: 143211 - DNA, 55 bp, Artificial
  Synthetic oligonucleotide
gtggtggtgtcaatggattcggtcagggaccgaaaaccgcacccgcgttgttcca

SEQ ID NO: 143212 - DNA, 60 bp, Artificial
  Synthetic oligonucleotide
ttgtaggtatcgggattgctgtcgtcactctccaccagaacacaggaatgactcccggag

SEQ ID NO: 143213 - DNA, 60 bp, Artificial
  Synthetic oligonucleotide
cctttgggaaagttgatgtgcagatccaggcgtttctcctccaccgtgaaagtcacatga

SEQ ID NO: 143214 - DNA, 55 bp, Artificial
  Synthetic oligonucleotide
cggtctggcctggttttcagagcgtggattgtggccgccattgaaccccccttta

SEQ ID NO: 143215 - DNA, 57 bp, Artificial
  Synthetic oligonucleotide
gtatgcctatgggcaaaaaaaccagccagcgggcatttaaagcggcttggcgggcgc

SEQ ID NO: 143216 - DNA, 60 bp, Artificial
  Synthetic oligonucleotide
aacagcccacgaggccgctagagcgatttttgctctatacctgtgggtctgtatgcctat

SEQ ID NO: 143217 - DNA, 54 bp, Artificial
  Synthetic oligonucleotide
tagctgtattcgatcattggtctaacccccacggtaactgtacccaccccccac

SEQ ID NO: 143218 - DNA, 60 bp, Artificial
  Synthetic oligonucleotide
ttgtacaacaccagacaccgctttctccagcagcgattccgcagcgcaccagccctcgcg

SEQ ID NO: 143219 - DNA, 60 bp, Artificial
  Synthetic oligonucleotide
gggcctggtcacgttcctgaccgctcagatgcgtggcgacgcgagggttcatgaagtagt

SEQ ID NO: 143220 - DNA, 60 bp, Artificial
  Synthetic oligonucleotide
acgccgaagatagaccagcatcaggttttcaggttggtcactcatgggacgagcctatca

SEQ ID NO: 143221 - DNA, 60 bp, Artificial
  Synthetic oligonucleotide
gggcgaaaatccatgctatgaaccattcccgccacgcttacgctgcaactcgcgatagag

SEQ ID NO: 143222 - DNA, 56 bp, Artificial
  Synthetic oligonucleotide
tcaagggttatgcttcctcgcggaggtctaggcgacgctccacacgggtaattcgg

SEQ ID NO: 143223 - DNA, 60 bp, Artificial
  Synthetic oligonucleotide
tgcccacaaatgatcatccgtgggcaccatctgtctctgtgaaccgatctagaatcccgt

SEQ ID NO: 143224 - DNA, 60 bp, Artificial
  Synthetic oligonucleotide
tgcgacgcagatggttcatgaatcccccaggagcccggtcgcggacgctcttgccgaaca

SEQ ID NO: 143225 - DNA, 59 bp, Artificial
  Synthetic oligonucleotide
aggcttcacgggtcagcctcgggccttggttcagcacgtcaaagagggccgcgagcatg

SEQ ID NO: 143226 - DNA, 60 bp, Artificial
  Synthetic oligonucleotide
ggggatgcactacgagcggaagctccaggacaaaggatgggccagacgctttagacatgc

SEQ ID NO: 143227 - DNA, 54 bp, Artificial
  Synthetic oligonucleotide
aaaccgggccattcccgacagccacaactaccgcaaacacgaggaagtcgctcg

SEQ ID NO: 143228 - DNA, 54 bp, Artificial
  Synthetic oligonucleotide
gggggctggcgtcgatcacacaaaccgaacagggaacctttcgggtcagatacc

SEQ ID NO: 143229 - DNA, 60 bp, Artificial
  Synthetic oligonucleotide
gacccggcatatttactagacatgttcctattctacaagcaactaatccggtgatcacca

SEQ ID NO: 143230 - DNA, 58 bp, Artificial
  Synthetic oligonucleotide
cgatgttattcaacatcgccgttagaagatggtcttccggttccactcttctccgaga

SEQ ID NO: 143231 - DNA, 60 bp, Artificial
  Synthetic oligonucleotide
cgaaggcgagcagccaagcccggagcaggtggaggaagccgtaagcatcttcatggaaga

SEQ ID NO: 143232 - DNA, 60 bp, Artificial
  Synthetic oligonucleotide
tgtctctaagcgcacgtaatccatacagccagaaatcaccgggcatgtcgctcgggtcta

SEQ ID NO: 143233 - DNA, 60 bp, Artificial
  Synthetic oligonucleotide
tgtggttcgacttgtatctgaccttatattccgacatgcaatcattatacatcttctatt

SEQ ID NO: 143234 - DNA, 56 bp, Artificial
  Synthetic oligonucleotide
aattgtgtccttaccataaaagtaggcaccgcttggtaggcggtgccatctcctaa

SEQ ID NO: 143235 - DNA, 60 bp, Artificial
  Synthetic oligonucleotide
ttttcagagcgccaagtgcaggccaaacgggagaaggatcgagggttcgatatgatggac

SEQ ID NO: 143236 - DNA, 60 bp, Artificial
  Synthetic oligonucleotide
aggcggacctgacccgatggcgctcgatgccgctaaacgcgctccaatgggagattaata

SEQ ID NO: 143237 - DNA, 56 bp, Artificial
  Synthetic oligonucleotide
gggtacgttggcgcaaaacttctccagaaaggcatccgtctccgagacaacggcaa

SEQ ID NO: 143238 - DNA, 54 bp, Artificial
  Synthetic oligonucleotide
ctaacgttgacgagcccctgccctaacgttgacgagcccctgccctaacgttga

SEQ ID NO: 143239 - DNA, 60 bp, Artificial
  Synthetic oligonucleotide
ttcgttatgttaaatatctcaacaatgcgcaaggactttcggtgctatctgatgccatcg

SEQ ID NO: 143240 - DNA, 59 bp, Artificial
  Synthetic oligonucleotide
tttgctcgccacatgcgcgaagaacggggactatctcccgtgactattgcaacccgttg

SEQ ID NO: 143241 - DNA, 58 bp, Artificial
  Synthetic oligonucleotide
ctttctcgggcagttggcgtagcccgttcatgaaagtggttgccttctccagcaagct

SEQ ID NO: 143242 - DNA, 59 bp, Artificial
  Synthetic oligonucleotide
ctctcgatactctcaaaagccgtgcgggttgcctctgccaaagcgatagcgggttacga

SEQ ID NO: 143243 - DNA, 58 bp, Artificial
  Synthetic oligonucleotide
cgggttgcaatagtcacgggagatagtccccgttcttcgcgcatgtggcgagcaaaaa

SEQ ID NO: 143244 - DNA, 58 bp, Artificial
  Synthetic oligonucleotide
gcaccccctgccgatcccctttttgtgtggctatacccagggaggcaagccatgaaga

SEQ ID NO: 143245 - DNA, 59 bp, Artificial
  Synthetic oligonucleotide
agcgccaagtgcaggccaaacgggagaaggatcgagggttcgatatgatggactaagcc

SEQ ID NO: 143246 - DNA, 59 bp, Artificial
  Synthetic oligonucleotide
tgggaacgccaccgaaccaggagaatgcgtgtcggtgacaggccagccaggtagtgacc

SEQ ID NO: 143247 - DNA, 58 bp, Artificial
  Synthetic oligonucleotide
ggcaactgagccaggggttcgcgcataccgttgtcgacgctgggggcagagactccgt

SEQ ID NO: 143248 - DNA, 59 bp, Artificial
  Synthetic oligonucleotide
tcgcgtaattctcgcactcctacacgtaggctcatgagcgcctcctttctgccacgatg

SEQ ID NO: 143249 - DNA, 54 bp, Artificial
  Synthetic oligonucleotide
taagggggttagaaagctggtgggaggcgcgcccttaaccaacgcggtgacaca

SEQ ID NO: 143250 - DNA, 58 bp, Artificial
  Synthetic oligonucleotide
gcacaaaagtagtgctataaccatctaaaatagtgcactccgcctgttcgtcgtttca

SEQ ID NO: 143251 - DNA, 58 bp, Artificial
  Synthetic oligonucleotide
gattccacagtaagatgtcgcaactccattattaaatgacgtaaacgcagactcagtt

SEQ ID NO: 143252 - DNA, 57 bp, Artificial
  Synthetic oligonucleotide
gagtgagcgtttgccacagcgtcgttatgttgcccacggaagttttcggcgaggaac

SEQ ID NO: 143253 - DNA, 55 bp, Artificial
  Synthetic oligonucleotide
cactccgaagcgtggtctgggggacgattggtagtgcgccttgtttctcggtaag

SEQ ID NO: 143254 - DNA, 58 bp, Artificial
  Synthetic oligonucleotide
cacggatggacagcggttctatcgtccggttggaagcctttgcgaggtgtacgatgga

SEQ ID NO: 143255 - DNA, 58 bp, Artificial
  Synthetic oligonucleotide
ctcgaggaggatacccaggagcgtggttctgtcgagtgagaggagtcctgctgcttct

SEQ ID NO: 143256 - DNA, 54 bp, Artificial
  Synthetic oligonucleotide
cccgcacgtcttgccagggggatgctccgctcccccgtggacccccaaggcaag

SEQ ID NO: 143257 - DNA, 57 bp, Artificial
  Synthetic oligonucleotide
tccaggaatttctcaccctgtggccagagaatctgcatgtcgcgtcccaagcccatt

SEQ ID NO: 143258 - DNA, 59 bp, Artificial
  Synthetic oligonucleotide
accgtcgtgccagcttcaggggttgagctgaccgtcatacttccgagactctcgtaata

SEQ ID NO: 143259 - DNA, 57 bp, Artificial
  Synthetic oligonucleotide
cagtgagatcgtgagccgggaccgaggcggtatttacgctcaagccacacggttggc

SEQ ID NO: 143260 - DNA, 55 bp, Artificial
  Synthetic oligonucleotide
tcgggcctccaagatagacgagctggtagttcccgtgcgccttgaaaagtgctcc

SEQ ID NO: 143261 - DNA, 55 bp, Artificial
  Synthetic oligonucleotide
tcgacaccgattccaggtgagatcacggttgaggcgctctgtaggtattggaagg

SEQ ID NO: 143262 - DNA, 55 bp, Artificial
  Synthetic oligonucleotide
tccgctcgtacagcaacaccactcgcagcgtacccgcctttcgcggaggcatggg

SEQ ID NO: 143263 - DNA, 55 bp, Artificial
  Synthetic oligonucleotide
tcccggtggtacagagaccggcggtgaatgcggaacacagatcgctgaagtcacc

SEQ ID NO: 143264 - DNA, 55 bp, Artificial
  Synthetic oligonucleotide
tcatgtcgaatatccctgccgtaaagtcactcctagatctgtcttggtcaacccg

SEQ ID NO: 143265 - DNA, 55 bp, Artificial
  Synthetic oligonucleotide
tatgcgcgtgtttcgctggaacgctcaggcgatacgctgacgggcatgtggggca

SEQ ID NO: 143266 - DNA, 55 bp, Artificial
  Synthetic oligonucleotide
gcgtgagcctctgtccatacatagtcggtcccgagacaacgagacgcctgtggac

SEQ ID NO: 143267 - DNA, 55 bp, Artificial
  Synthetic oligonucleotide
gcggcgcttcgccataagtggggttctcctcaaagggtataaagactattcggca

SEQ ID NO: 143268 - DNA, 55 bp, Artificial
  Synthetic oligonucleotide
gcgcggaatcttccggaagggacgaagacgctgttggattttggctctggagggg

SEQ ID NO: 143269 - DNA, 55 bp, Artificial
  Synthetic oligonucleotide
gcgaggtaagcgcatacaacgaagagcagagcgccgaacggagccagaccccaga

SEQ ID NO: 143270 - DNA, 57 bp, Artificial
  Synthetic oligonucleotide
ggcttgagcgtaaataccgcctcggtcccggctcacgatctcactgccaggatgctc

SEQ ID NO: 143271 - DNA, 55 bp, Artificial
  Synthetic oligonucleotide
gccggaatcaattatctgacgactgcggaaagtgagatcgcgcgtgtctctcaca

SEQ ID NO: 143272 - DNA, 55 bp, Artificial
  Synthetic oligonucleotide
gccgatctgaggtccaagcgccaacaggaaacgtaactcctttgaatcaaacggt

SEQ ID NO: 143273 - DNA, 55 bp, Artificial
  Synthetic oligonucleotide
gccccggatttgggctgccccttctcttcgctttattacactatcgaatgcaacc

SEQ ID NO: 143274 - DNA, 55 bp, Artificial
  Synthetic oligonucleotide
gcccacgtgtcggatccatattggagcgttctactatacgatgcaagagcccctg

SEQ ID NO: 143275 - DNA, 55 bp, Artificial
  Synthetic oligonucleotide
gcccacggatgcgcatagtaaaccgcgcagcaatctcccacgagcatcgaccaga

SEQ ID NO: 143276 - DNA, 55 bp, Artificial
  Synthetic oligonucleotide
gccacggatgctccattggtagccattctttggaacggagtagctgatgttggcg

SEQ ID NO: 143277 - DNA, 55 bp, Artificial
  Synthetic oligonucleotide
gcattcgcggttgcatcattcttagggcatcctacctcaccccgcgggcgtatag

SEQ ID NO: 143278 - DNA, 55 bp, Artificial
  Synthetic oligonucleotide
gcagtcgttaggattcaagggcctctcagcccagcccgaattggaaattgcggcc

SEQ ID NO: 143279 - DNA, 55 bp, Artificial
  Synthetic oligonucleotide
gcaggcgagagcgccatgggcaacgaatcagaggcttttcgcggcggtaatcgga

SEQ ID NO: 143280 - DNA, 55 bp, Artificial
  Synthetic oligonucleotide
gcagcgaatccactggggcggcatatcttcgatcccaaagctgctccgcttgatt

SEQ ID NO: 143281 - DNA, 54 bp, Artificial
  Synthetic oligonucleotide
ggggaggttccaggcgtcgtcacatctccgcaaccttcggttccgccgtgggag

SEQ ID NO: 143282 - DNA, 55 bp, Artificial
  Synthetic oligonucleotide
gcaaccctctaatcaatagagcggacaagtaggcaatagatggctgatcagtccc

SEQ ID NO: 143283 - DNA, 55 bp, Artificial
  Synthetic oligonucleotide
gattctggtgcgtcgccacttcagaccaagcctctcttcagcgcttacacggcgc

SEQ ID NO: 143284 - DNA, 55 bp, Artificial
  Synthetic oligonucleotide
gatggtaagtatgaccctagatcggctatgcccatccgttatgcagttgtgcggc

SEQ ID NO: 143285 - DNA, 55 bp, Artificial
  Synthetic oligonucleotide
ggtattctggtctcgatcctgcttcagacccgcaagttcttctgtgttgtcgaga

SEQ ID NO: 143286 - DNA, 55 bp, Artificial
  Synthetic oligonucleotide
ggtagacggacggcacgtcctttattagctggtcgagcctcagaaatcgcttgcc

SEQ ID NO: 143287 - DNA, 55 bp, Artificial
  Synthetic oligonucleotide
gggtccccgtctagaaccacggaaccggcatcaagtgtcctctatgcgatagcct

SEQ ID NO: 143288 - DNA, 54 bp, Artificial
  Synthetic oligonucleotide
ggggacttgccgactccgtgttctacctccaaaaggggcgggccaagctgacag

SEQ ID NO: 143289 - DNA, 55 bp, Artificial
  Synthetic oligonucleotide
gggcgggcttccttactatgcccgcgagactcacaaggagcaaccaggacagacg

SEQ ID NO: 143290 - DNA, 55 bp, Artificial
  Synthetic oligonucleotide
gggactctgggcgcaaacgaccaatggcggcgtgaatgtcacccttggcagccat

SEQ ID NO: 143291 - DNA, 55 bp, Artificial
  Synthetic oligonucleotide
gggacaaatcattggattcagggcgtttcgttgtacactgcctagcaatcgtatg

SEQ ID NO: 143292 - DNA, 56 bp, Artificial
  Synthetic oligonucleotide
ctagcgaagcagaacacctattgtcggaagctgggattatcattccgcgacagaaa

SEQ ID NO: 143293 - DNA, 55 bp, Artificial
  Synthetic oligonucleotide
ggctcgtatcaagtttgtgcgttgttttcgtgatcagtttcgcgcttcagtatgg

SEQ ID NO: 143294 - DNA, 55 bp, Artificial
  Synthetic oligonucleotide
ggcgaatgaaggtcctggtagatacacatgtaatcttgtgggctgcattctccag

SEQ ID NO: 143295 - DNA, 55 bp, Artificial
  Synthetic oligonucleotide
ggccgcattgcacggtcattggttaccggccatggatattcgagtccattcgggg

SEQ ID NO: 143296 - DNA, 55 bp, Artificial
  Synthetic oligonucleotide
ggagccttgacggagttgtgggcgaagatagcggactgatccatagcactcggcc

SEQ ID NO: 143297 - DNA, 55 bp, Artificial
  Synthetic oligonucleotide
ggacaggcgaccgttggctgaagcgcagactcagagctaagtatggacatggggc

SEQ ID NO: 143298 - DNA, 55 bp, Artificial
  Synthetic oligonucleotide
ggaaccgtttccgtgatccggcacctctggttccacacaccctacctgcccactg

SEQ ID NO: 143299 - DNA, 55 bp, Artificial
  Synthetic oligonucleotide
gctcgtatctgccggaagtgtgtttccggatggccgggtcaaacgtttgagcgat

SEQ ID NO: 143300 - DNA, 55 bp, Artificial
  Synthetic oligonucleotide
gctcgatccacacgggtggagtgccaacctaagccgtagcactcttcccttccgg

SEQ ID NO: 143301 - DNA, 55 bp, Artificial
  Synthetic oligonucleotide
gctcgataaaaggcataagaccgacttcttggagcagtttgaccgttcgctccgc

SEQ ID NO: 143302 - DNA, 55 bp, Artificial
  Synthetic oligonucleotide
gcgttgcaatgttgtcgcgcacaagatgagctagcgcaggcacaacttggagccg

SEQ ID NO: 143303 - DNA, 55 bp, Artificial
  Synthetic oligonucleotide
gtaactcccacggcggaaccgaaggttgcggagatgtgacgacgcctggaacctc

SEQ ID NO: 143304 - DNA, 55 bp, Artificial
  Synthetic oligonucleotide
acgtgcgaactgtacccgatcgtactcccgggtgcaagcgtggagatcttcggac

SEQ ID NO: 143305 - DNA, 55 bp, Artificial
  Synthetic oligonucleotide
agcttgtcagaaaggtctctgcctgggcccggagtgcttcacttggttggagttc

SEQ ID NO: 143306 - DNA, 55 bp, Artificial
  Synthetic oligonucleotide
acatgcgggaaaagtatggactatcgcgttaggctgatgccacgagcggaacgag

SEQ ID NO: 143307 - DNA, 55 bp, Artificial
  Synthetic oligonucleotide
aggacttttgtcatcccgtagggcagcgaagggatctgcttttggcttccacgca

SEQ ID NO: 143308 - DNA, 55 bp, Artificial
  Synthetic oligonucleotide
aatctgaagctgaacgttatctacctgcgcctgcgctagcaacccgaacgacgtg

SEQ ID NO: 143309 - DNA, 55 bp, Artificial
  Synthetic oligonucleotide
aatcgtcatgggattgcgtctgagagcgcacgtgagattgagggcaacggtgggg

SEQ ID NO: 143310 - DNA, 55 bp, Artificial
  Synthetic oligonucleotide
ataccgctcaccaattttgataaccaagagatcggcgcgaggagtgacgactctc

SEQ ID NO: 143311 - DNA, 55 bp, Artificial
  Synthetic oligonucleotide
atcacgccatcgcgcgttcgcagatcctcatagactgtccagctctcatccccac

SEQ ID NO: 143312 - DNA, 55 bp, Artificial
  Synthetic oligonucleotide
aaggcgagagattttcggaaagtgtcacaactattggatggtagcggttacggac

SEQ ID NO: 143313 - DNA, 55 bp, Artificial
  Synthetic oligonucleotide
atgatcagagccagtctcatgcacacatgggagtgggaatagcggggatgcggga

SEQ ID NO: 143314 - DNA, 55 bp, Artificial
  Synthetic oligonucleotide
cgctttgcggacggtcgggtacgggagagaaaacttgccctagagatgctcacgg

SEQ ID NO: 143315 - DNA, 55 bp, Artificial
  Synthetic oligonucleotide
atgattctgaacgaccgccgctcacgacttctcttcctcgcatcgaccccgatca

SEQ ID NO: 143316 - DNA, 54 bp, Artificial
  Synthetic oligonucleotide
aacgccgacagagggaactacctccaccgcagtctggtatttagaaccggccta

SEQ ID NO: 143317 - DNA, 55 bp, Artificial
  Synthetic oligonucleotide
caaatagaagttcagtgttggatgctgctctacctttcggtgatcgagtgaaagg

SEQ ID NO: 143318 - DNA, 54 bp, Artificial
  Synthetic oligonucleotide
gaaatacacccgccttcaccatcatgtctagcgcggagctgagtaactgaaagg

SEQ ID NO: 143319 - DNA, 54 bp, Artificial
  Synthetic oligonucleotide
tattctcgaactggagacgggtgttctgctgatggagcggaaggacactcaaca

SEQ ID NO: 143320 - DNA, 54 bp, Artificial
  Synthetic oligonucleotide
gttgacgggcgtggatgcaggtcaaatgtcctagctgttcgccagaatttgggg

SEQ ID NO: 143321 - DNA, 54 bp, Artificial
  Synthetic oligonucleotide
gtgaagagcacttcgtagttatccgaagtattgccgaagttctgtaccacctta

SEQ ID NO: 143322 - DNA, 54 bp, Artificial
  Synthetic oligonucleotide
cgagctatcgaggcacccatgatagatcgccctttcagggctcgacctttgtag

SEQ ID NO: 143323 - DNA, 54 bp, Artificial
  Synthetic oligonucleotide
gtctcccaggatctagctccaaatcgatcacagtcactccaggtagatcgacct

SEQ ID NO: 143324 - DNA, 54 bp, Artificial
  Synthetic oligonucleotide
tgcgcgcccagaggtgcttaatgttgcgctgatctttcactgagcagggcatca

SEQ ID NO: 143325 - DNA, 55 bp, Artificial
  Synthetic oligonucleotide
cggacatgttagagggcatggagtaaatcgcctgtcaaccttgtaccaaggaatc

SEQ ID NO: 143326 - DNA, 54 bp, Artificial
  Synthetic oligonucleotide
ggtagggctctactactcgatcttgtctttacgtgatgacattcgacacttcaa

SEQ ID NO: 143327 - DNA, 54 bp, Artificial
  Synthetic oligonucleotide
atccaattcccttcaccgtgacagacgcgaagggtcagcaggcgagtgccacct

SEQ ID NO: 143328 - DNA, 54 bp, Artificial
  Synthetic oligonucleotide
cccacatccttatgcccttcaggacgtgccatgactaaccgtgcgccatacaga

SEQ ID NO: 143329 - DNA, 53 bp, Artificial
  Synthetic oligonucleotide
tcgcaggtgccacgatttgtcccgacaccagaagtgcttgaatcggtataaca

SEQ ID NO: 143330 - DNA, 53 bp, Artificial
  Synthetic oligonucleotide
gccgggaccgaggcggtatttacgctcaagccacacggttggccgcgcctgga

SEQ ID NO: 143331 - DNA, 53 bp, Artificial
  Synthetic oligonucleotide
agacgcgttagcgtctatcctagaaacgtggcaagatctcgcaaacgaccgga

SEQ ID NO: 143332 - DNA, 53 bp, Artificial
  Synthetic oligonucleotide
ccatagcgcatctgccctgtactccgaatctttcctgcgtctttcaactctgt

SEQ ID NO: 143333 - DNA, 53 bp, Artificial
  Synthetic oligonucleotide
ggctcacgatctcactgccaggatgctcccgaagccactcagcgacagttcca

SEQ ID NO: 143334 - DNA, 53 bp, Artificial
  Synthetic oligonucleotide
tctagggacggatcaataaaacgtttgacagtcgagattcggcgcgtgtacag

SEQ ID NO: 143335 - DNA, 53 bp, Artificial
  Synthetic oligonucleotide
tatttcgcagaactgaagctcccgcggcaacgacctcacatcccttgccgtat

SEQ ID NO: 143336 - DNA, 55 bp, Artificial
  Synthetic oligonucleotide
cggacgtaaaccacttgcaatgagggtcgaactcagtgctcgttaggtgcaaact

SEQ ID NO: 143337 - DNA, 53 bp, Artificial
  Synthetic oligonucleotide
cctgcgaatctgaaggcgtggattgacatggtcgtgcgtccgaaggtcacgca

SEQ ID NO: 143338 - DNA, 53 bp, Artificial
  Synthetic oligonucleotide
gaccgcagggtttgcaatttatccagggaagttgtcccacgaatcatgtttcc

SEQ ID NO: 143339 - DNA, 53 bp, Artificial
  Synthetic oligonucleotide
cgtaatgcctggaatgaaacgaacgaacccgtaaatagagacatagcccggac

SEQ ID NO: 143340 - DNA, 53 bp, Artificial
  Synthetic oligonucleotide
caggcgtcgtcacatctccgcaaccttcggttccgccgtgggagttacgggcc

SEQ ID NO: 143341 - DNA, 53 bp, Artificial
  Synthetic oligonucleotide
aagtacccgcatcgtgcagcgattgtaacggggtcacgcccttaggttgtaaa

SEQ ID NO: 143342 - DNA, 53 bp, Artificial
  Synthetic oligonucleotide
ctcggcaaaagtacgaccgatgccacacccggctatggtccggcagccgacac

SEQ ID NO: 143343 - DNA, 52 bp, Artificial
  Synthetic oligonucleotide
tgactttgaagccggtacgagacgagcagtagagtgtctttctgaatacccc

SEQ ID NO: 143344 - DNA, 52 bp, Artificial
  Synthetic oligonucleotide
tgaaagccaacttttacggtgatttcagtaccgttgcctgcggagctttgga

SEQ ID NO: 143345 - DNA, 52 bp, Artificial
  Synthetic oligonucleotide
cacgcatcaagacacggtcttacggatcgaatcctcagtacgcgattccatg

SEQ ID NO: 143346 - DNA, 52 bp, Artificial
  Synthetic oligonucleotide
cagttctccgcaaaagtgggaactatcttcgaggattctcccctgggtctgg

SEQ ID NO: 143347 - DNA, 55 bp, Artificial
  Synthetic oligonucleotide
cggagaaggcgcggctattttgactgcgcttgctctcgtcaaccatgcctatggt

SEQ ID NO: 143348 - DNA, 52 bp, Artificial
  Synthetic oligonucleotide
cggcacatatcactgacgagatgccgccttgacgggactaatcacgggacag

SEQ ID NO: 143349 - DNA, 52 bp, Artificial
  Synthetic oligonucleotide
tccggaggcgtctcaccggttggatcgaagctaccgatcttaatgagcggtg

SEQ ID NO: 143350 - DNA, 52 bp, Artificial
  Synthetic oligonucleotide
ggttattcgggtgggatgcgctttgcacatgaacccatgtcccaaaagcggg

SEQ ID NO: 143351 - DNA, 52 bp, Artificial
  Synthetic oligonucleotide
gtaacgcaggccgctcgtgtgcctgtactatgctctgcacaatcttcgtgag

SEQ ID NO: 143352 - DNA, 52 bp, Artificial
  Synthetic oligonucleotide
tagctggtgtactcctgttcgatatgtttcgtattggcgagtccccagatat

SEQ ID NO: 143353 - DNA, 52 bp, Artificial
  Synthetic oligonucleotide
gttctacaaaatctcattgcgatgcggggaggggtactcttgcgctctcgga

SEQ ID NO: 143354 - DNA, 52 bp, Artificial
  Synthetic oligonucleotide
cccctctggcttacatcgcgtagtcttcatcgtgcgtctaaggacacatacc

SEQ ID NO: 143355 - DNA, 52 bp, Artificial
  Synthetic oligonucleotide
gttcggattcatcacggggcccaacacgaacttcacctcgacgggatctcgc

SEQ ID NO: 143356 - DNA, 52 bp, Artificial
  Synthetic oligonucleotide
gatttagtgcgggaacagaatcccgtgaccaagacaggcccctcggcaggac

SEQ ID NO: 143357 - DNA, 52 bp, Artificial
  Synthetic oligonucleotide
gagccgagtcgaccaccaaggaccctacctacctagcgtgaacctgtgaaaa

SEQ ID NO: 143358 - DNA, 55 bp, Artificial
  Synthetic oligonucleotide
cggcaaggctgaccgtacaagaattcagtagggagccccagtcctgagcgaatgc

SEQ ID NO: 143359 - DNA, 52 bp, Artificial
  Synthetic oligonucleotide
gatggttgcagccttttccaggttgcgaagcatccgagcgttctccccggcg

SEQ ID NO: 143360 - DNA, 51 bp, Artificial
  Synthetic oligonucleotide
ctggttgctgggaacctgattgttcgggtagggagcgttcgcgaaaacgtt

SEQ ID NO: 143361 - DNA, 51 bp, Artificial
  Synthetic oligonucleotide
gaaacaatactacgactggtgtctgacatgggctcctgattggttgagggt

SEQ ID NO: 143362 - DNA, 51 bp, Artificial
  Synthetic oligonucleotide
aagtggcgctcgcgtccccaggcaaaccccgcatcttctagcagcacatcc

SEQ ID NO: 143363 - DNA, 51 bp, Artificial
  Synthetic oligonucleotide
gagcgaagcccgaatcaacgagcaaagttggagtgcagcctaaatggcgta

SEQ ID NO: 143364 - DNA, 51 bp, Artificial
  Synthetic oligonucleotide
atgcgaatcttccgtaccattccacgctcctcatgccatcctactgaaaca

SEQ ID NO: 143365 - DNA, 51 bp, Artificial
  Synthetic oligonucleotide
gggaacagcgtagtactcatgaaagagccgcgcgtcgaagttggacgacga

SEQ ID NO: 143366 - DNA, 51 bp, Artificial
  Synthetic oligonucleotide
aactacaacgctgggatcgtcaacctgactcgccggatgtcccatggacta

SEQ ID NO: 143367 - DNA, 51 bp, Artificial
  Synthetic oligonucleotide
tgctgtgcggctgtgggctatggctagagaaaggcgtaacggggataagaa

SEQ ID NO: 143368 - DNA, 51 bp, Artificial
  Synthetic oligonucleotide
cctgatagatgcgaacgacagggttgtatccaacgatctcgccggttttag

SEQ ID NO: 143369 - DNA, 60 bp, Artificial
  Synthetic oligonucleotide
ttgagacaagcgatgccagagatactcgagaacgcggagtcgaacctgacgccacgcatg

SEQ ID NO: 143370 - DNA, 54 bp, Artificial
  Synthetic oligonucleotide
cggcgagtttaccgccgtacgggatgtcaatctcagcgtcgccccgggtcagtt

SEQ ID NO: 143371 - DNA, 51 bp, Artificial
  Synthetic oligonucleotide
ggaccagccttagaagggctcaagaaggacgcaggtcctacgattcacttt

SEQ ID NO: 143372 - DNA, 51 bp, Artificial
  Synthetic oligonucleotide
gctccaaattgaattgagcatgttgttaggtagttcacccgtgcccctgcg

SEQ ID NO: 143373 - DNA, 51 bp, Artificial
  Synthetic oligonucleotide
aactcggcgtcatgtgaaagtggcgctcgcgtccccaggcaaaccccgcat

SEQ ID NO: 143374 - DNA, 51 bp, Artificial
  Synthetic oligonucleotide
aggattgtgtgggggtttacccgtcaacccgaaagcggcttgccaagtgcg

SEQ ID NO: 143375 - DNA, 51 bp, Artificial
  Synthetic oligonucleotide
agtttgcgcaggattgtgtgggggtttacccgtcaacccgaaagcggcttg

SEQ ID NO: 143376 - DNA, 51 bp, Artificial
  Synthetic oligonucleotide
ataaggcggacaggctcgagcgcaaggcatgcggcaaagagaccccgacgg

SEQ ID NO: 143377 - DNA, 51 bp, Artificial
  Synthetic oligonucleotide
agaacgtagaagcggtgatgccccgacgagacgaacctaccgccgctaccc

SEQ ID NO: 143378 - DNA, 51 bp, Artificial
  Synthetic oligonucleotide
agaagggttgtggcattcggcccgaaaccgttggaggtagctcccgtgatg

SEQ ID NO: 143379 - DNA, 51 bp, Artificial
  Synthetic oligonucleotide
cccgcaccgttgatgggaaaccctcgatgagaggtcgcaccacctgcatag

SEQ ID NO: 143380 - DNA, 51 bp, Artificial
  Synthetic oligonucleotide
agagcacggacctccgaaatgctcgctctattgtgttgcgggagatcaaga

SEQ ID NO: 143381 - DNA, 55 bp, Artificial
  Synthetic oligonucleotide
cggtgcttcctggactggtggggatgcacgatcatctttactatcttcagcggcc

SEQ ID NO: 143382 - DNA, 51 bp, Artificial
  Synthetic oligonucleotide
agcggtgatgccccgacgagacgaacctaccgccgctacccccacaagcag

SEQ ID NO: 143383 - DNA, 50 bp, Artificial
  Synthetic oligonucleotide
aaccgttgcgagatcgcatactatcgctcacccaagcctccacggtcggg

SEQ ID NO: 143384 - DNA, 50 bp, Artificial
  Synthetic oligonucleotide
aaccgggactggagcctcagcgcgttgtccttcccacggaactgatacga

SEQ ID NO: 143385 - DNA, 50 bp, Artificial
  Synthetic oligonucleotide
aacggtcttaccggaggccgagggcgtttcactctgtgtcaccggtgccg

SEQ ID NO: 143386 - DNA, 50 bp, Artificial
  Synthetic oligonucleotide
ggcgctacggtgtggcccatcctattcgacccgaagcaggaactcacgta

SEQ ID NO: 143387 - DNA, 50 bp, Artificial
  Synthetic oligonucleotide
aacggggcctatcccggagccgtgcaaagaacaagcgcgccccacgccta

SEQ ID NO: 143388 - DNA, 50 bp, Artificial
  Synthetic oligonucleotide
aacctccgcaaacggcgaccactccaacacttcctcaccagagccgcggt

SEQ ID NO: 143389 - DNA, 50 bp, Artificial
  Synthetic oligonucleotide
aaccgctgcagtccttccaccactctcgcccaagggtcgcgtcctttctc

SEQ ID NO: 143390 - DNA, 50 bp, Artificial
  Synthetic oligonucleotide
gtcacgtcacacacgcgggatgaactaacgagcaaaggaactgtgggaga

SEQ ID NO: 143391 - DNA, 50 bp, Artificial
  Synthetic oligonucleotide
aacctgcagcatgcctcgcgttaacgaggagacaattcgcgtgaagcggc

SEQ ID NO: 143392 - DNA, 55 bp, Artificial
  Synthetic oligonucleotide
cgccccgcattatcgacatactgcacatccggaatcccataccgcttaccggtat

SEQ ID NO: 143393 - DNA, 50 bp, Artificial
  Synthetic oligonucleotide
aacggctggtggcgtgaggccgagggaagctacgacagacctgacgcgat

SEQ ID NO: 143394 - DNA, 50 bp, Artificial
  Synthetic oligonucleotide
aaccttcgaggctcggccatcgtttcgcattcgagtgcccgcttcaagcc

SEQ ID NO: 143395 - DNA, 50 bp, Artificial
  Synthetic oligonucleotide
aacgacccaccgcctctccccgcgtaaaatagtcgagatgcccagcccgt

SEQ ID NO: 143396 - DNA, 50 bp, Artificial
  Synthetic oligonucleotide
aacggcgtttggtggatccttccagagatgggctgcggcacgatctttgc

SEQ ID NO: 143397 - DNA, 50 bp, Artificial
  Synthetic oligonucleotide
aacggcgtgtccgcagcctggtaccgagaatggtctcgaaagagcaaccg

SEQ ID NO: 143398 - DNA, 50 bp, Artificial
  Synthetic oligonucleotide
aacggcctttgtcaccgcagtctgcagcgatgtaagcagtgtgccagcga

SEQ ID NO: 143399 - DNA, 50 bp, Artificial
  Synthetic oligonucleotide
aacggagcttcgtggacacgcgttttagcgcctatctgcggggtgccgtg

SEQ ID NO: 143400 - DNA, 50 bp, Artificial
  Synthetic oligonucleotide
aacgccgaccatgcctggacgtcggacaacgagggtaccgttacgatggc

SEQ ID NO: 143401 - DNA, 50 bp, Artificial
  Synthetic oligonucleotide
aacgccgcagtaacccatcagctggcgagcgctctcaaagcgagatacct

SEQ ID NO: 143402 - DNA, 50 bp, Artificial
  Synthetic oligonucleotide
aacgccggctcaggtttcagtggatatcggggtagccccggtctgcccct

SEQ ID NO: 143403 - DNA, 55 bp, Artificial
  Synthetic oligonucleotide
cgccctcattgactgcagccgtagtcacgagcggatcaacattgacggaggaggc

SEQ ID NO: 143404 - DNA, 50 bp, Artificial
  Synthetic oligonucleotide
aacgctgcacaacggatggagggaccgaaatgacgacgcgctacagtccg

SEQ ID NO: 143405 - DNA, 50 bp, Artificial
  Synthetic oligonucleotide
aaaaggccgctgagtgtccgaccctatgccatgcgacatcgcagccggta

SEQ ID NO: 143406 - DNA, 50 bp, Artificial
  Synthetic oligonucleotide
aacgccggtagcgccaaaggatccgaggctctgttacaagccgcccaaaa

SEQ ID NO: 143407 - DNA, 50 bp, Artificial
  Synthetic oligonucleotide
aacagtgaagtgcctccggcacaggaaggtttgcaagtccgcgcatggct

SEQ ID NO: 143408 - DNA, 50 bp, Artificial
  Synthetic oligonucleotide
aacacgaccacaggctcggtggaactcgcggcaggctcggcaattggatg

SEQ ID NO: 143409 - DNA, 50 bp, Artificial
  Synthetic oligonucleotide
aacacccttcacggccgcgtgctcaaacacaaacggtccacgcgtatcgg

SEQ ID NO: 143410 - DNA, 50 bp, Artificial
  Synthetic oligonucleotide
aacaatggggcgctgtgaactgagaagcgctgtgcgttcgaggggagaga

SEQ ID NO: 143411 - DNA, 50 bp, Artificial
  Synthetic oligonucleotide
aaattctgcccgagatcttgcgtgtaaccgcgcgatgccccggcaggttg

SEQ ID NO: 143412 - DNA, 50 bp, Artificial
  Synthetic oligonucleotide
aaatgccggaatctcccacgctgtctccgtagtcgcccgcaccagagtca

SEQ ID NO: 143413 - DNA, 50 bp, Artificial
  Synthetic oligonucleotide
aaatccgcgatcggggccggcatgtggactgacagtgcgagcccagtggg

SEQ ID NO: 143414 - DNA, 55 bp, Artificial
  Synthetic oligonucleotide
cgcctgttacgacggagtcaggttccctgtccagctcccgccaaccgctgtgacc

SEQ ID NO: 143415 - DNA, 50 bp, Artificial
  Synthetic oligonucleotide
aaagcgtgctttacgtccccagcaatcgctacggctccgccaccttgcgt

SEQ ID NO: 143416 - DNA, 50 bp, Artificial
  Synthetic oligonucleotide
aaagaatcgacgtcccagattggacgcgcgacacctcccgagcgaaccag

SEQ ID NO: 143417 - DNA, 50 bp, Artificial
  Synthetic oligonucleotide
aaacttctccgtaccggcgctgctatcttccttacaggcgccctcgcggc

SEQ ID NO: 143418 - DNA, 50 bp, Artificial
  Synthetic oligonucleotide
aaactcgcgggaaccggagccaagtcttatggtgtcggcgaggcaccaaa

SEQ ID NO: 143419 - DNA, 50 bp, Artificial
  Synthetic oligonucleotide
aaactagtaccactgagcgaggccggagggtcgcatcgcgagattcccgc

SEQ ID NO: 143420 - DNA, 50 bp, Artificial
  Synthetic oligonucleotide
aaaccgcggcaccagtgctttggcaaatagcccgacgcccgcatacaaat

SEQ ID NO: 143421 - DNA, 50 bp, Artificial
  Synthetic oligonucleotide
aaaccgcgcctatccggttcgtgccttgcctgatggaccgtggcaggtga

SEQ ID NO: 143422 - DNA, 50 bp, Artificial
  Synthetic oligonucleotide
aaaccaggaccacgctccgaaccagggctagccgatccaaaggcagtcgc

SEQ ID NO: 143423 - DNA, 50 bp, Artificial
  Synthetic oligonucleotide
aaaccagatccctcaggaagccccaaccgggtgccccatacatcgcgtac

SEQ ID NO: 143424 - DNA, 50 bp, Artificial
  Synthetic oligonucleotide
aaccgcatcgcacaaccgggactggagcctcagcgcgttgtccttcccac

SEQ ID NO: 143425 - DNA, 55 bp, Artificial
  Synthetic oligonucleotide
cgccttagctcacaaactgctcgttcgactcaacgcaaaagcccgcgaagtccga

SEQ ID NO: 143426 - DNA, 50 bp, Artificial
  Synthetic oligonucleotide
aaaattcgtacgccgcgctccgggggatggaggccgacactcgatcccaa

SEQ ID NO: 143427 - DNA, 50 bp, Artificial
  Synthetic oligonucleotide
aaccgagggccccggagagaatggcagccagcagtgtagcgagagctgaa

SEQ ID NO: 143428 - DNA, 50 bp, Artificial
  Synthetic oligonucleotide
aacccgtgaaacagcccgtcccacacatgaagctccgtcttgacacccct

SEQ ID NO: 143429 - DNA, 50 bp, Artificial
  Synthetic oligonucleotide
aacccgcacacactccgcttgagtgtccacggcacgcaaatctccgctta

SEQ ID NO: 143430 - DNA, 50 bp, Artificial
  Synthetic oligonucleotide
aacccgaagcaaggcttgcagtgccgagcgatgtgccacccgatgaaaag

SEQ ID NO: 143431 - DNA, 50 bp, Artificial
  Synthetic oligonucleotide
aaacagtcttggacgccgcccatctttaccgggcttgcttagcctggccg

SEQ ID NO: 143432 - DNA, 50 bp, Artificial
  Synthetic oligonucleotide
gtttgtggagagcagcccaaagggggtcgcgtagacgccggtcccggtgg

SEQ ID NO: 143433 - DNA, 50 bp, Artificial
  Synthetic oligonucleotide
aaccccttgttgcgctgcggtgaattgtgagcatgccctgttgagagcct

SEQ ID NO: 143434 - DNA, 50 bp, Artificial
  Synthetic oligonucleotide
tacccatcaacccgcgttctgatcttgacgacattcgctcggcctggcta

SEQ ID NO: 143435 - DNA, 50 bp, Artificial
  Synthetic oligonucleotide
aacccatcagctggcgagcgctctcaaagcgagatacctggcccaactcg

SEQ ID NO: 143436 - DNA, 55 bp, Artificial
  Synthetic oligonucleotide
gatctttcgtcgcggcttggatagtcacttgcctcgtctcaccaggtacgagcga

SEQ ID NO: 143437 - DNA, 50 bp, Artificial
  Synthetic oligonucleotide
tatagcctgtggacccgtcatcgtagacaaacgacagaccaagggaatcg

SEQ ID NO: 143438 - DNA, 50 bp, Artificial
  Synthetic oligonucleotide
aacccacgttgccacacgattcacgacaccggtacatgcggggtgcgtcg

SEQ ID NO: 143439 - DNA, 50 bp, Artificial
  Synthetic oligonucleotide
aaccagggctagccgatccaaaggcagtcgccgattcctgggcataagcg

SEQ ID NO: 143440 - DNA, 50 bp, Artificial
  Synthetic oligonucleotide
aacatggagattgctgtggtcagcgcccttctccagttggaccagggggc

SEQ ID NO: 143441 - DNA, 50 bp, Artificial
  Synthetic oligonucleotide
tcatgtgaaagtggcgctcgcgtccccaggcaaaccccgcatcttctagc

SEQ ID NO: 143442 - DNA, 50 bp, Artificial
  Synthetic oligonucleotide
tccccgaggtagctctcagctggcgtgaacagatgttagcccttgccgag

SEQ ID NO: 143443 - DNA, 50 bp, Artificial
  Synthetic oligonucleotide
aacatctgcggttccgtctctggagtcgcaggtgcttccgctccgattcc

SEQ ID NO: 143444 - DNA, 50 bp, Artificial
  Synthetic oligonucleotide
cgcatcatgagtgcagtccatcgggtcgcttcccgcatcgatacgtttat

SEQ ID NO: 143445 - DNA, 50 bp, Artificial
  Synthetic oligonucleotide
aatcgggtcgcagagctcaggcccgcgcacaggcaatacatggcgcaatt

SEQ ID NO: 143446 - DNA, 50 bp, Artificial
  Synthetic oligonucleotide
aatcggctcctctcccggtgccggatgcttgttgcggacgtatccctcgg

SEQ ID NO: 143447 - DNA, 55 bp, Artificial
  Synthetic oligonucleotide
gagttcgcatatgtcttaccccgcctcaactcagcaagacgcagacaccacttcc

SEQ ID NO: 143448 - DNA, 50 bp, Artificial
  Synthetic oligonucleotide
aatcgcacaccatgccttcagcggaatggacagccgcacagacagggctt

SEQ ID NO: 143449 - DNA, 50 bp, Artificial
  Synthetic oligonucleotide
aatcactgcggcgcgacccgtaagaaagtcggtgcgatttcgccattggg

SEQ ID NO: 143450 - DNA, 50 bp, Artificial
  Synthetic oligonucleotide
aatatgcacgccaaaccagcgacccaggggaaacgaccaaccgcgcatga

SEQ ID NO: 143451 - DNA, 50 bp, Artificial
  Synthetic oligonucleotide
aatactgcgatggcgcgtttccgttacactcacaccacgccacgggtgcg

SEQ ID NO: 143452 - DNA, 50 bp, Artificial
  Synthetic oligonucleotide
cggacggtgcaccccgaagatgcgactacgttggttagcaagtgcctggc

SEQ ID NO: 143453 - DNA, 50 bp, Artificial
  Synthetic oligonucleotide
aataagatgcgaatgtccgcatgggatgcctccgctgaagcgcccacacg

SEQ ID NO: 143454 - DNA, 50 bp, Artificial
  Synthetic oligonucleotide
aagtttgccggctctatcgggcgcaagtctgtttccgcacccaagaagcg

SEQ ID NO: 143455 - DNA, 50 bp, Artificial
  Synthetic oligonucleotide
aagttgcgggccagttgtttcccgtaagcggcactccccaggcaaacgct

SEQ ID NO: 143456 - DNA, 50 bp, Artificial
  Synthetic oligonucleotide
aagtgggctgtgcgacacatattcccagacgctccgttccgctggcggac

SEQ ID NO: 143457 - DNA, 50 bp, Artificial
  Synthetic oligonucleotide
cggctcaacaatgtacgcccagtgatctagcacttcgtattctgttcgcc

SEQ ID NO: 143458 - DNA, 55 bp, Artificial
  Synthetic oligonucleotide
gaggggctcaacatggacctccgtaaacatcctcagccgctcaacgagcggacct

SEQ ID NO: 143459 - DNA, 50 bp, Artificial
  Synthetic oligonucleotide
aagggtggggtcacgcagagcgcacaaaccagatccctcaggaagcccca

SEQ ID NO: 143460 - DNA, 50 bp, Artificial
  Synthetic oligonucleotide
aagggtgatatgggggcaaggagcggagcacatctggtgcgtccgaagtt

SEQ ID NO: 143461 - DNA, 50 bp, Artificial
  Synthetic oligonucleotide
aaggggccgcacggtagccgggagtcttgaggtctggtccaccatattgc

SEQ ID NO: 143462 - DNA, 50 bp, Artificial
  Synthetic oligonucleotide
aaggctcgcagggccgtggaaagccgtgcaattaagcatcgcgttcccga

SEQ ID NO: 143463 - DNA, 50 bp, Artificial
  Synthetic oligonucleotide
aaggattgcgggacactagcgccggttcgttcctgggaactgtgcccaca

SEQ ID NO: 143464 - DNA, 50 bp, Artificial
  Synthetic oligonucleotide
aaggacggaggcgttgtagttgtgagccctgctcccatattcggaggcgg

SEQ ID NO: 143465 - DNA, 50 bp, Artificial
  Synthetic oligonucleotide
caccttcgggcctccaagatagacgagctggtagttcccgtgcgccttga

SEQ ID NO: 143466 - DNA, 50 bp, Artificial
  Synthetic oligonucleotide
atgaggcacatttagggcgacatacgggaccaaagatgaacgcgtacatc

SEQ ID NO: 143467 - DNA, 50 bp, Artificial
  Synthetic oligonucleotide
atgacctcgataaggcggacaggctcgagcgcaaggcatgcggcaaagag

SEQ ID NO: 143468 - DNA, 50 bp, Artificial
  Synthetic oligonucleotide
cccgcttcttaacccggggatcgttcgccccttgagcgattaggagggga

SEQ ID NO: 143469 - DNA, 52 bp, Artificial
  Synthetic oligonucleotide
gaggaggtaagagcacgaccgccgggaccaacccaggttttagtccaggaac

SEQ ID NO: 143470 - DNA, 50 bp, Artificial
  Synthetic oligonucleotide
cccgtcaacccgaaagcggcttgccaagtgcgacactaaaaaccgcgtcc

SEQ ID NO: 143471 - DNA, 50 bp, Artificial
  Synthetic oligonucleotide
acgccaaggtggttgcagccgctcttacggaaaagcgcaagccaacggtt

SEQ ID NO: 143472 - DNA, 50 bp, Artificial
  Synthetic oligonucleotide
acctaccccgactaggccccgaacatcttgctgctgtctcgtcaccgggt

SEQ ID NO: 143473 - DNA, 50 bp, Artificial
  Synthetic oligonucleotide
acccaacccttgccgccgtggaaactcgcgcatgtcaggccgggcgtttg

SEQ ID NO: 143474 - DNA, 50 bp, Artificial
  Synthetic oligonucleotide
ccggccggtgctctgaagcgtaggtgaagtagacacttgtgtggcgcgca

SEQ ID NO: 143475 - DNA, 50 bp, Artificial
  Synthetic oligonucleotide
ccggggatcgttcgccccttgagcgattaggaggggagcgctaatgcttg

SEQ ID NO: 143476 - DNA, 50 bp, Artificial
  Synthetic oligonucleotide
accactgtgcgtagacggctccgtcaaagctccagttgtgctgcgggagc

SEQ ID NO: 143477 - DNA, 50 bp, Artificial
  Synthetic oligonucleotide
acattggggctcggtggaggaacgacgaaccggcctaacctggtcaccgg

SEQ ID NO: 143478 - DNA, 50 bp, Artificial
  Synthetic oligonucleotide
acatccaacccccactcaagagctgggcctcagcccccgagcgaaaccgc

SEQ ID NO: 143479 - DNA, 50 bp, Artificial
  Synthetic oligonucleotide
acagtgggggcgacaagcaacagttcaccctcagcgactcggatgcgacg

SEQ ID NO: 143480 - DNA, 60 bp, Artificial
  Synthetic oligonucleotide
cgtcgttcgtgtagatgcgtgcgtcctgggaagcacgcgatacagcgacataagcgagcc

SEQ ID NO: 143481 - DNA, 55 bp, Artificial
  Synthetic oligonucleotide
gagcagcaaggacgaaagaacagtcacaacggcgtgtccgcagcctggtaccgag

SEQ ID NO: 143482 - DNA, 50 bp, Artificial
  Synthetic oligonucleotide
acagctttgactccgcccggggagagattcgccgctgtgccgggtcgcaa

SEQ ID NO: 143483 - DNA, 50 bp, Artificial
  Synthetic oligonucleotide
acagctaacacacgagtcgttccacaggctggaatgccccaccgggcccc

SEQ ID NO: 143484 - DNA, 50 bp, Artificial
  Synthetic oligonucleotide
acacgcccgcgacggttcccgaacagcccgaagccaaaccgcctgtccgg

SEQ ID NO: 143485 - DNA, 50 bp, Artificial
  Synthetic oligonucleotide
acacgcacggcgaagacatcagcggccctgatcatgacacggccaagtcc

SEQ ID NO: 143486 - DNA, 50 bp, Artificial
  Synthetic oligonucleotide
acaaatgcgcccttcaccccagcgtcttacgtgttgccccgtagcaggat

SEQ ID NO: 143487 - DNA, 50 bp, Artificial
  Synthetic oligonucleotide
aatcggtcgagtttccttttggcagcctgccctacgacggccacggcaaa

SEQ ID NO: 143488 - DNA, 50 bp, Artificial
  Synthetic oligonucleotide
aagatgaggctggcgtcggctcccggctccaattcgacgttgagtgcggc

SEQ ID NO: 143489 - DNA, 50 bp, Artificial
  Synthetic oligonucleotide
aagagttttgcagtcgtcacgggggcttgccacgcgtcctaccagcgacc

SEQ ID NO: 143490 - DNA, 50 bp, Artificial
  Synthetic oligonucleotide
aagaggtccctctttcagtgacggtcgggcgggatgggagccgcagcttc

SEQ ID NO: 143491 - DNA, 50 bp, Artificial
  Synthetic oligonucleotide
aagagctggggtcaggacccgtggcaccttggcggtctttcggcattcgc

SEQ ID NO: 143492 - DNA, 55 bp, Artificial
  Synthetic oligonucleotide
gacgcaagccatgcccgtcgtgagactcgcacagaatagtgttctacgcctcatg

SEQ ID NO: 143493 - DNA, 50 bp, Artificial
  Synthetic oligonucleotide
aagagcccgcgatcgagtcacaggcacccccttcttctctcggcgactct

SEQ ID NO: 143494 - DNA, 50 bp, Artificial
  Synthetic oligonucleotide
aagagcacggcaagacaccccgatgggcgagtgtcgatactccttggtgg

SEQ ID NO: 143495 - DNA, 50 bp, Artificial
  Synthetic oligonucleotide
gcctcggacagaaggcctactatgaccctcgcaaagactaaccagcacaa

SEQ ID NO: 143496 - DNA, 50 bp, Artificial
  Synthetic oligonucleotide
aagacacggcgcatcagaccgttgctacccccgcgcccgacgttataaac

SEQ ID NO: 143497 - DNA, 50 bp, Artificial
  Synthetic oligonucleotide
gcgcatgctagtgaaagccgcctaacacgggaccttccctctgagcgtcc

SEQ ID NO: 143498 - DNA, 50 bp, Artificial
  Synthetic oligonucleotide
aagaagcgcctggcaagatgtgtgaagtgtaacccggaccagggcgagcg

SEQ ID NO: 143499 - DNA, 50 bp, Artificial
  Synthetic oligonucleotide
aacttgagtgccctccgactgagcactacccagtcgccagagtgcgggac

SEQ ID NO: 143500 - DNA, 50 bp, Artificial
  Synthetic oligonucleotide
aactgggcagagggccgctcatcgtgtgcgctggagtaaacgtgccgcac

SEQ ID NO: 143501 - DNA, 50 bp, Artificial
  Synthetic oligonucleotide
aactcattcgcgcatcccggctgagcgtcacaggaatcaaccggcttccc

SEQ ID NO: 143502 - DNA, 50 bp, Artificial
  Synthetic oligonucleotide
aactacccggaaccgatccgacgcgcgactcaacttgcgctgcgctgccg

SEQ ID NO: 143503 - DNA, 55 bp, Artificial
  Synthetic oligonucleotide
gacgatgtagacacgagactgtacggccgaagctcccggaacctgaagctcgaag

SEQ ID NO: 143504 - DNA, 50 bp, Artificial
  Synthetic oligonucleotide
aactacacggacacgttgagtacgacaacgccccaggccaccggaagcgg

SEQ ID NO: 143505 - DNA, 50 bp, Artificial
  Synthetic oligonucleotide
aactaaccggaagcgcgcctggtccgcactcttcactgagtgtggcttgg

SEQ ID NO: 143506 - DNA, 50 bp, Artificial
  Synthetic oligonucleotide
aacgttgcaagatgctggtgtgtcatgggaaaccgtcgccagggttccgc

SEQ ID NO: 143507 - DNA, 50 bp, Artificial
  Synthetic oligonucleotide
aacgttagcccctccgcatcgcagagccgtcgcgcctcggtatacgcagc

SEQ ID NO: 143508 - DNA, 50 bp, Artificial
  Synthetic oligonucleotide
aacgtgccccaccaccccgcatgtgagcgatactgggaaccgatgccaga

SEQ ID NO: 143509 - DNA, 50 bp, Artificial
  Synthetic oligonucleotide
aaggacgcacacctggttacgggcccccatcactggtcgagtctgaacgg

SEQ ID NO: 143510 - DNA, 50 bp, Artificial
  Synthetic oligonucleotide
aaggacgatcgcatgcgcaccttgtttcagcggatgtctgcgaggtcggg

SEQ ID NO: 143511 - DNA, 50 bp, Artificial
  Synthetic oligonucleotide
aagctttatgacatgctccccgcggatgcaggcgagacgagcgaaggacg

SEQ ID NO: 143512 - DNA, 50 bp, Artificial
  Synthetic oligonucleotide
aagcttgaaacccaggcctgcgggctttcccaaaagtcccggctaccgaa

SEQ ID NO: 143513 - DNA, 50 bp, Artificial
  Synthetic oligonucleotide
aagctgtgcattcgcgcctgtcaccgtcgcttgtgcgtccaccacttcaa

SEQ ID NO: 143514 - DNA, 55 bp, Artificial
  Synthetic oligonucleotide
gacatttctaacgagccgctacacaacgaggagacgtaatgagcattatcagacg

SEQ ID NO: 143515 - DNA, 50 bp, Artificial
  Synthetic oligonucleotide
aagctccgctcgcgaaggcaggagtgtcggacgagagctttcctgagagc

SEQ ID NO: 143516 - DNA, 50 bp, Artificial
  Synthetic oligonucleotide
aagctccaagcgcgatccaccgaggacacaggcagggatcgccggaaaag

SEQ ID NO: 143517 - DNA, 50 bp, Artificial
  Synthetic oligonucleotide
aagcgtagccccaggtacaggccatacggaaagcagagggctgtaggccc

SEQ ID NO: 143518 - DNA, 50 bp, Artificial
  Synthetic oligonucleotide
aagcgccgtgaatgggttcagtagcactgtggcggttgcacttaaggggc

SEQ ID NO: 143519 - DNA, 50 bp, Artificial
  Synthetic oligonucleotide
aagcgccctataacgacgcgcataaggggccgactcgtgcgtgagcaagt

SEQ ID NO: 143520 - DNA, 50 bp, Artificial
  Synthetic oligonucleotide
aagcgcactttgtaggcacggcaagcggtcccattgcgggtctggatgtc

SEQ ID NO: 143521 - DNA, 50 bp, Artificial
  Synthetic oligonucleotide
aagcgacgtatatccaatcggtgaccaccgtcgcacaccgcacaacgcct

SEQ ID NO: 143522 - DNA, 50 bp, Artificial
  Synthetic oligonucleotide
aagccgttgtgggcgctatcgtagttctggttcacggtgtaccacggccc

SEQ ID NO: 143523 - DNA, 50 bp, Artificial
  Synthetic oligonucleotide
aagccgtaccctcccgtttcgtgccacggaagaacgtttgcacccctgcg

SEQ ID NO: 143524 - DNA, 50 bp, Artificial
  Synthetic oligonucleotide
aagccctgtgtgccgctaggcatgttcgcaacgcaactaatacgtccggc

SEQ ID NO: 143525 - DNA, 55 bp, Artificial
  Synthetic oligonucleotide
gaatcccgctggacagataggcgcggagcccattcgcaagggccagaagtttacc

SEQ ID NO: 143526 - DNA, 50 bp, Artificial
  Synthetic oligonucleotide
aagcccgaagtgattccagcgccggtgttgctttggatagcgccgccatt

SEQ ID NO: 143527 - DNA, 50 bp, Artificial
  Synthetic oligonucleotide
aagccccgtgacttctctgcgtgagtggcagcgtcaggattctgatggcg

SEQ ID NO: 143528 - DNA, 50 bp, Artificial
  Synthetic oligonucleotide
aagcatgtggtggggacttcaaccacgccgcacacactggaagaacggcc

SEQ ID NO: 143529 - DNA, 50 bp, Artificial
  Synthetic oligonucleotide
aagcagagtgacggcctcctgcagttcagcgcgcatgcaagtaccctgtc

SEQ ID NO: 143530 - DNA, 50 bp, Artificial
  Synthetic oligonucleotide
aagatgctacgactgcgcgcacggacgcgatgaggtgagctgctgacatg

SEQ ID NO: 143531 - DNA, 55 bp, Artificial
  Synthetic oligonucleotide
ctgagcccatctgactgatcgaggttcgggacgagcagaccaaacttgcaatgaa

SEQ ID NO: 143532 - DNA, 55 bp, Artificial
  Synthetic oligonucleotide
ctcttacgttccgtgaatctaccggactctccggttcttctcgcactcgaactcc

SEQ ID NO: 143533 - DNA, 55 bp, Artificial
  Synthetic oligonucleotide
ctcaggcagcgcctatagagcctgggcgactccatgagccgttgaagctcactct

SEQ ID NO: 143534 - DNA, 55 bp, Artificial
  Synthetic oligonucleotide
ctcaagaccccactccggcgacggctcacctttcaagacccgagcaagattgaag

SEQ ID NO: 143535 - DNA, 55 bp, Artificial
  Synthetic oligonucleotide
ctatgcgctgcacggcgcttataccgaaagcgggctgccaggtcttgtcgtcgac

SEQ ID NO: 143536 - DNA, 60 bp, Artificial
  Synthetic oligonucleotide
tatatccctggatgccaaagcgtgtgagactgccgaaacaccgacttttggggcagtaga

SEQ ID NO: 143537 - DNA, 55 bp, Artificial
  Synthetic oligonucleotide
ctagccatccgggatctcggtcgactcggcagaagtgtcgctcttgataccctga

SEQ ID NO: 143538 - DNA, 55 bp, Artificial
  Synthetic oligonucleotide
cgtgtgaccagatagccgccaaaggcctcatgcgtaaagggaaccgtcgagttgt

SEQ ID NO: 143539 - DNA, 53 bp, Artificial
  Synthetic oligonucleotide
cgtgggtggtgggttaacttcccagcgaagaccacctgaaattgttagttgcg

SEQ ID NO: 143540 - DNA, 55 bp, Artificial
  Synthetic oligonucleotide
ccgagctgctaccaccaaccgggttctttgaaacgtgcttatagctgatcagatc

SEQ ID NO: 143541 - DNA, 55 bp, Artificial
  Synthetic oligonucleotide
ccctgtgcgtaatgcaagctaaccagtctgcggcgagcgcgtcaacagccggtct

SEQ ID NO: 143542 - DNA, 54 bp, Artificial
  Synthetic oligonucleotide
cccgcgggatagtagtacccagttgtcttataaaggacgttggcggactcagac

SEQ ID NO: 143543 - DNA, 55 bp, Artificial
  Synthetic oligonucleotide
cccgcaaataactaaatggcatgcgaatccccggcgcgctccattacacaaggtg

SEQ ID NO: 143544 - DNA, 55 bp, Artificial
  Synthetic oligonucleotide
cccgagtgtgttttctggaatacgaaagcaagatacggagtgttggttgtcttgc

SEQ ID NO: 143545 - DNA, 55 bp, Artificial
  Synthetic oligonucleotide
ccccaagtgcgttcgacacctcgtgctatgggctccctacaccggtaaatgtcgg

SEQ ID NO: 143546 - DNA, 55 bp, Artificial
  Synthetic oligonucleotide
ccacttccgatccatgcaaaacactccacagtatcggtgaaaatgctttaactcc

SEQ ID NO: 143547 - DNA, 57 bp, Artificial
  Synthetic oligonucleotide
tcttagagggtctaagactgctccgaacatacaaagggacccacgtgcgtcgaacca

SEQ ID NO: 143548 - DNA, 55 bp, Artificial
  Synthetic oligonucleotide
ccacgcgcagagcgcaaagtcccgtcgaacgccctagtcccgtcgcccgtttgaa

SEQ ID NO: 143549 - DNA, 55 bp, Artificial
  Synthetic oligonucleotide
cattccacacatctcgtctactgggctggggtatctgtacatgatgcactttgtc

SEQ ID NO: 143550 - DNA, 55 bp, Artificial
  Synthetic oligonucleotide
catgggtagaacttctctgaagagcccaaatgctccacgcactgacgtattaggc

SEQ ID NO: 143551 - DNA, 55 bp, Artificial
  Synthetic oligonucleotide
catacctgccaaccgtcggatcacccgcaggaataacagcctgcctcagagcgga

SEQ ID NO: 143552 - DNA, 54 bp, Artificial
  Synthetic oligonucleotide
cagttgaacgaggctaggggtctcgcctaacgctcctggtacccggacctggta

SEQ ID NO: 143553 - DNA, 55 bp, Artificial
  Synthetic oligonucleotide
cagtgctcaagcggaagatctctgcgaacttgtctgggtacatgggtgccattct

SEQ ID NO: 143554 - DNA, 55 bp, Artificial
  Synthetic oligonucleotide
cagcacgaactgtacatctttcagtgttggcccgatattgtccaggcagcgcgaa

SEQ ID NO: 143555 - DNA, 52 bp, Artificial
  Synthetic oligonucleotide
cactggcggttcgaaaccgtggacaacctacgtcccgtagcaccctccccac

SEQ ID NO: 143556 - DNA, 55 bp, Artificial
  Synthetic oligonucleotide
cactctgagccgtaaagatccctgataagacgaacccgttcgtccatttcttgtg

SEQ ID NO: 143557 - DNA, 55 bp, Artificial
  Synthetic oligonucleotide
cacgggtgtgagatccatcggctcgtgtcctagcaaaccaactcgaaacagatgg

SEQ ID NO: 143558 - DNA, 60 bp, Artificial
  Synthetic oligonucleotide
tggccgacgacacacccaagattgcttgcaccaccatgtagcaaagaagctcaagcggag

SEQ ID NO: 143559 - DNA, 55 bp, Artificial
  Synthetic oligonucleotide
cgcagttgaatccgcggtatcagttcgacgcgtttgtgattgggagtgggaacca

SEQ ID NO: 143560 - DNA, 55 bp, Artificial
  Synthetic oligonucleotide
cgcaagcactcactccaggcctgaaatgccctgctactcaagcaccgccccgcta

SEQ ID NO: 143561 - DNA, 55 bp, Artificial
  Synthetic oligonucleotide
cgcaaacggctgccctgtagagggattgacgataatcggataggttacccctacc

SEQ ID NO: 143562 - DNA, 55 bp, Artificial
  Synthetic oligonucleotide
cgactttcccgttaggtactgtccgcctaatgcggataaaaggaatctatatgcg

SEQ ID NO: 143563 - DNA, 55 bp, Artificial
  Synthetic oligonucleotide
cgaccccaaatcgcgagagttttcgcgttacgccggagcgactacgatctgcccc

SEQ ID NO: 143564 - DNA, 54 bp, Artificial
  Synthetic oligonucleotide
cgaccagcaacgggcgatccgtagagtacttatgtaacccctcgggccccgcaa

SEQ ID NO: 143565 - DNA, 55 bp, Artificial
  Synthetic oligonucleotide
cgacactccagtcggaagattaaagctaatagcgagtgataacggactcgttgcc

SEQ ID NO: 143566 - DNA, 55 bp, Artificial
  Synthetic oligonucleotide
cgaagatccatttcacccagactttggactgcgatgggcacgtaggctttgagcg

SEQ ID NO: 143567 - DNA, 55 bp, Artificial
  Synthetic oligonucleotide
cgaaatctatgctggcgtcaagcagctcaatcgcttcacggttctcgcaagccct

SEQ ID NO: 143568 - DNA, 55 bp, Artificial
  Synthetic oligonucleotide
cctggtgcgggtcagatttctccgcaatctcaaatgagacgcggtgtggcctcac

SEQ ID NO: 143569 - DNA, 59 bp, Artificial
  Synthetic oligonucleotide
ttatgctcgatgcatacctaaatacgtatttgcgttatcacgtttattcgcattaagca

SEQ ID NO: 143570 - DNA, 55 bp, Artificial
  Synthetic oligonucleotide
cctacgctcctgctgcgcaagtgccgacggactacaacacgctaaacaggtaacg

SEQ ID NO: 143571 - DNA, 55 bp, Artificial
  Synthetic oligonucleotide
ccgtgcgtcgacaacccagctctacgcagaagaaccttcgcatctgcagacggat

SEQ ID NO: 143572 - DNA, 55 bp, Artificial
  Synthetic oligonucleotide
ccgtctcggccgtaatccagaaagcggagtaacccggaatctcgttcacatgctg

SEQ ID NO: 143573 - DNA, 55 bp, Artificial
  Synthetic oligonucleotide
ccggaaccaatattggcgattgtagatttcaagacgctcgaaggaactgaggcgg

SEQ ID NO: 143574 - DNA, 55 bp, Artificial
  Synthetic oligonucleotide
ccgctaggagcgccaaacgtggcagacgaactcgataagtacgaagaagacgtag

SEQ ID NO: 143575 - DNA, 55 bp, Artificial
  Synthetic oligonucleotide
ccgcccattagaaacgacactaacgggatgggactagtccagatgagtgaacggg

SEQ ID NO: 143576 - DNA, 55 bp, Artificial
  Synthetic oligonucleotide
ccgcacaccatagctgaaggtgagaccgggtttgacgcgccagtcgtcctgatag

SEQ ID NO: 143577 - DNA, 55 bp, Artificial
  Synthetic oligonucleotide
ggtccaatgataggcattgctcctccgcccgtagacgtgacaacggctttggcac

SEQ ID NO: 143578 - DNA, 55 bp, Artificial
  Synthetic oligonucleotide
ggtctacccatccggtgtactgcgagaatgtgacgtttcggaatgtgacggtgca

SEQ ID NO: 143579 - DNA, 55 bp, Artificial
  Synthetic oligonucleotide
ggtctccaccgcaaaggagtcggcgccaaaggttggtcgattgcctgcgttggtg

SEQ ID NO: 143580 - DNA, 58 bp, Artificial
  Synthetic oligonucleotide
gccaaccgtgtggcttgagcgtaaataccgcctcggtcccggctcacgatctcactgc

SEQ ID NO: 143581 - DNA, 52 bp, Artificial
  Synthetic oligonucleotide
gtactaaacttagccaaaatcccggttttccggcgcttacatattacgtagc

SEQ ID NO: 143582 - DNA, 55 bp, Artificial
  Synthetic oligonucleotide
gtacttgaatgctgaacgatcggcccttcagccatgcggtcctcagacgtgtact

SEQ ID NO: 143583 - DNA, 55 bp, Artificial
  Synthetic oligonucleotide
gtccagcgaccttgccagtgagtaccgtggggaggaagccgcccacgaatcggaa

SEQ ID NO: 143584 - DNA, 54 bp, Artificial
  Synthetic oligonucleotide
gtcctccaaggagtcagcgtaacctctaccccgctttagtggttgacaggaacc

SEQ ID NO: 143585 - DNA, 55 bp, Artificial
  Synthetic oligonucleotide
gtcgatttagacacagcactctctttgtgggtgacgcgtccacaccttgccagcc

SEQ ID NO: 143586 - DNA, 55 bp, Artificial
  Synthetic oligonucleotide
gtcgtcctcttgcgctgacttatgttcgttgccatgccctgtatgtttaatgaac

SEQ ID NO: 143587 - DNA, 55 bp, Artificial
  Synthetic oligonucleotide
gtctccggcgatggaatgatgcgctgagctccaagcttattgacgatactttcgc

SEQ ID NO: 143588 - DNA, 55 bp, Artificial
  Synthetic oligonucleotide
gtgcaatgaccctggccgctccaacttcggctgaatcgaaccaaccgtaagaggg

SEQ ID NO: 143589 - DNA, 55 bp, Artificial
  Synthetic oligonucleotide
gtgggagttcaatacgcacccgctgttctcggagtacctcatgggtaagcaggac

SEQ ID NO: 143590 - DNA, 55 bp, Artificial
  Synthetic oligonucleotide
gttcggcgcaaaaccacgatagaaaccaaatgtacccgctcctgttgcggtcatc

SEQ ID NO: 143591 - DNA, 57 bp, Artificial
  Synthetic oligonucleotide
gagcatcctggcagtgagatcgtgagccgggaccgaggcggtatttacgctcaagcc

SEQ ID NO: 143592 - DNA, 55 bp, Artificial
  Synthetic oligonucleotide
tagctgttaaagccttggtgaagcaatccgacaacgtaaaggggccgcttcccac

SEQ ID NO: 143593 - DNA, 55 bp, Artificial
  Synthetic oligonucleotide
ttttccaatatgagcgtctccgtgggattcgcggcacacattgtggacctgctcg

SEQ ID NO: 143594 - DNA, 55 bp, Artificial
  Synthetic oligonucleotide
ttctgtgtcatgacgtaactccgctttaggctgttgcgtgatcctggatgtcctc

SEQ ID NO: 143595 - DNA, 55 bp, Artificial
  Synthetic oligonucleotide
ttcccctgagacgacaaaagccaccgtcttcgcgcctgtagcgcggattccggca

SEQ ID NO: 143596 - DNA, 55 bp, Artificial
  Synthetic oligonucleotide
ttagatgaacagaattacagcagcacaccgtacatctcgtttactagtccgcatg

SEQ ID NO: 143597 - DNA, 55 bp, Artificial
  Synthetic oligonucleotide
tggcgagccacattgcaatggagtagtccccgttgaatgtctgctgaaggaacgt

SEQ ID NO: 143598 - DNA, 55 bp, Artificial
  Synthetic oligonucleotide
tgcgcgacgaatttcgagtgatttcgagggtagatccatagtgtctcagtagagg

SEQ ID NO: 143599 - DNA, 55 bp, Artificial
  Synthetic oligonucleotide
tctgctccattacggacgatacgcttggctggcacgatcctcttggcggttgttc

SEQ ID NO: 143600 - DNA, 55 bp, Artificial
  Synthetic oligonucleotide
tctgcgagatccgcatagagaaccgtggccttgagctttacggcgtcattgccta

SEQ ID NO: 143601 - DNA, 55 bp, Artificial
  Synthetic oligonucleotide
tcgtcattcggaatcgggaagccaagtcgatatggcatacgttgacaagaagcct

SEQ ID NO: 143602 - DNA, 55 bp, Artificial
  Synthetic oligonucleotide
atgtcaaagtcgtgcacagcgcaatcgcggaaaataccgcctgagacggccacgt

SEQ ID NO: 143603 - DNA, 55 bp, Artificial
  Synthetic oligonucleotide
gcctcccgcaggtgggttcagggctgtatccccgatgtggacactgatctcgtct

SEQ ID NO: 143604 - DNA, 55 bp, Artificial
  Synthetic oligonucleotide
gcggctggcgattgctgagtatttggccggtcgactgggaccccgttttgaacca

SEQ ID NO: 143605 - DNA, 55 bp, Artificial
  Synthetic oligonucleotide
ttccccaaccacgacgtcccggggtctcactgcttgatgactcgaacgacggtcg

SEQ ID NO: 143606 - DNA, 55 bp, Artificial
  Synthetic oligonucleotide
ttatcacgtggtgcagcgtatctacgcccggagccgctaccctcgtacccggtcg

SEQ ID NO: 143607 - DNA, 55 bp, Artificial
  Synthetic oligonucleotide
tagcatgccggcggcctttcgcacccggtccgcttgcttttcgtgcccggcccta

SEQ ID NO: 143608 - DNA, 55 bp, Artificial
  Synthetic oligonucleotide
gtcttggcccacaacccaacgtggttgacgagtgaggctgacgtgtcggagacgg

SEQ ID NO: 143609 - DNA, 55 bp, Artificial
  Synthetic oligonucleotide
gtcgccgacggaggagcttgccgcactccgtgtcgatgagatcataggtggctac

SEQ ID NO: 143610 - DNA, 55 bp, Artificial
  Synthetic oligonucleotide
ggttcggttggccttgacatcactcacggttctgcgatactagcagtctattcag

SEQ ID NO: 143611 - DNA, 55 bp, Artificial
  Synthetic oligonucleotide
aatcgtcggcctaccgtcacactgcgtaacgagcgcggctgggacctcgggtgat

SEQ ID NO: 143612 - DNA, 55 bp, Artificial
  Synthetic oligonucleotide
ggcatggaacgcgttcgcggcaaattctcggaattcttcgggaagccgcgtcctc

SEQ ID NO: 143613 - DNA, 55 bp, Artificial
  Synthetic oligonucleotide
caacgaccatctcgcggataacgtcctgcggcacggaatgtccacggtcatcgag

SEQ ID NO: 143614 - DNA, 55 bp, Artificial
  Synthetic oligonucleotide
ggactgaccgtctcgactgtcggtttgggctgcaacaacattggacgtcggcttg

SEQ ID NO: 143615 - DNA, 54 bp, Artificial
  Synthetic oligonucleotide
gcacacgtgaaatcgaaagcacgctctctggcctttcctcccgtacaatccaga

SEQ ID NO: 143616 - DNA, 53 bp, Artificial
  Synthetic oligonucleotide
cgaagcgacccacgaattccatgagtttgtcgtgattgaccatgagctcccgc

SEQ ID NO: 143617 - DNA, 52 bp, Artificial
  Synthetic oligonucleotide
gtaccgggcttccagactctcccgagtgcgctcccacgagtcgctaggctgc

SEQ ID NO: 143618 - DNA, 52 bp, Artificial
  Synthetic oligonucleotide
gcctaccggaggactacctcgcccttattgctcctaaccgagccgccttcgt

SEQ ID NO: 143619 - DNA, 52 bp, Artificial
  Synthetic oligonucleotide
gcgccaggctccgtgccatctgggtcgcacggtgagaattcttcagaacggc

SEQ ID NO: 143620 - DNA, 52 bp, Artificial
  Synthetic oligonucleotide
gcggatgccggttccgacgactaccggtatctgctcatgccggtccgtcttg

SEQ ID NO: 143621 - DNA, 51 bp, Artificial
  Synthetic oligonucleotide
gagggacctccgctgtcacgtagcaggttccctctgtcatcgcacctgaga

SEQ ID NO: 143622 - DNA, 51 bp, Artificial
  Synthetic oligonucleotide
gtcgggcgggaacttgtccagaacgcggtgagcttgaattccgccacgttt

SEQ ID NO: 143623 - DNA, 51 bp, Artificial
  Synthetic oligonucleotide
cctgttggctaccgagcctcactgtggaattcttgagggagatccattgcg

SEQ ID NO: 143624 - DNA, 55 bp, Artificial
  Synthetic oligonucleotide
ccgaggagcgcacaagttcgtgagtgagggcgattttcgcgtacgcaaggagtat

SEQ ID NO: 143625 - DNA, 50 bp, Artificial
  Synthetic oligonucleotide
cgaaaccaacgatgtacgagaacttcgccggattgtcacccatgaggtag

SEQ ID NO: 143626 - DNA, 50 bp, Artificial
  Synthetic oligonucleotide
atccggttcggcgatttgggtctcgaacgcgacaactccttctagccccg

SEQ ID NO: 143627 - DNA, 50 bp, Artificial
  Synthetic oligonucleotide
aacccagcttgctcatcgacgtgcctttccgcgagacatggccgctcaca

SEQ ID NO: 143628 - DNA, 50 bp, Artificial
  Synthetic oligonucleotide
aacctcgtcgggcatccatccgacgacctcagcaatctgcgttcggcgaa

SEQ ID NO: 143629 - DNA, 50 bp, Artificial
  Synthetic oligonucleotide
aacgagcgtccccaaccctgcgtgtccccaccgtcccgagtggtcgcgga

SEQ ID NO: 143630 - DNA, 50 bp, Artificial
  Synthetic oligonucleotide
aacgtggctcggttctcctccgcgcgtcccttgcagccgtggcaattctg

SEQ ID NO: 143631 - DNA, 50 bp, Artificial
  Synthetic oligonucleotide
aagccgcaatgggctgggctccgcaactttcgggccgtattcaccgatcc

SEQ ID NO: 143632 - DNA, 50 bp, Artificial
  Synthetic oligonucleotide
aagtccgtggcgcaaactgagggactaacgactccgtggcgcagcccgta

SEQ ID NO: 143633 - DNA, 50 bp, Artificial
  Synthetic oligonucleotide
aagtgaactcaacccgtgcaatttgccgctgcgcggactcatccccgacg

SEQ ID NO: 143634 - DNA, 50 bp, Artificial
  Synthetic oligonucleotide
acaggacgttcccggaccgcacttgtcgttcgatatcccagacggcgagc

SEQ ID NO: 143635 - DNA, 55 bp, Artificial
  Synthetic oligonucleotide
cgcacttgcacgcgttgggttcgcttgcgctcactggtgtacgagtaattgcaga

SEQ ID NO: 143636 - DNA, 50 bp, Artificial
  Synthetic oligonucleotide
accgcgtgtcgcagaatagtcctcggttgcacgacgggacgagtgacacc

SEQ ID NO: 143637 - DNA, 50 bp, Artificial
  Synthetic oligonucleotide
acgcagtcacactacgccggttgcgagccaagctccgcgactctatcgtt

SEQ ID NO: 143638 - DNA, 50 bp, Artificial
  Synthetic oligonucleotide
acgccctcactgaggtaccgctctcgttccgtgcgtggtaccgcgtcgaa

SEQ ID NO: 143639 - DNA, 50 bp, Artificial
  Synthetic oligonucleotide
acgcgccatgtccaccccggttccccggtcaggagtgtcaagcgtgagca

SEQ ID NO: 143640 - DNA, 50 bp, Artificial
  Synthetic oligonucleotide
acgcttgcacccacgatgtgcgcccgtatgccgagggagcagtcaatggc

SEQ ID NO: 143641 - DNA, 50 bp, Artificial
  Synthetic oligonucleotide
acggagcgaactgtgaatatgcgagcgacgacggcccgtcttcttccggc

SEQ ID NO: 143642 - DNA, 50 bp, Artificial
  Synthetic oligonucleotide
actcagcagacaacggagggtgcgaaggggtaggctcggctcaccaacca

SEQ ID NO: 143643 - DNA, 50 bp, Artificial
  Synthetic oligonucleotide
agacaagcggtgtgttctccgtgtcccgggttgcaaccggcctccccaat

SEQ ID NO: 143644 - DNA, 50 bp, Artificial
  Synthetic oligonucleotide
agcctacctgcgatggcaccacggacctgaactcctccggtaggtgtcgg

SEQ ID NO: 143645 - DNA, 50 bp, Artificial
  Synthetic oligonucleotide
agcgcgcacctgtcactcgcaaggtcagtaacggcgtcgtgtcacgtatt

SEQ ID NO: 143646 - DNA, 55 bp, Artificial
  Synthetic oligonucleotide
cggtatcgcacgacagatgtgggtcgccgtcccgttaccgattcgtagccgagag

SEQ ID NO: 143647 - DNA, 50 bp, Artificial
  Synthetic oligonucleotide
agcgcgggtgctatcgaccgaaacgcttgcgggagtatcactcgatgcag

SEQ ID NO: 143648 - DNA, 50 bp, Artificial
  Synthetic oligonucleotide
agcgcgtcggcagtggacggaatgccgcgtaaaggaagctcggctggtag

SEQ ID NO: 143649 - DNA, 50 bp, Artificial
  Synthetic oligonucleotide
agcgctttgaacgcaccgaacatggtcaatggcgggggagcggaaaactc

SEQ ID NO: 143650 - DNA, 50 bp, Artificial
  Synthetic oligonucleotide
agcggacagcatggagtcactcgaaggcggtgagccgtgaacactcgaca

SEQ ID NO: 143651 - DNA, 50 bp, Artificial
  Synthetic oligonucleotide
agctctcggttccggcctcaccgcaatcctcgacctaacgcgaccgcagt

SEQ ID NO: 143652 - DNA, 50 bp, Artificial
  Synthetic oligonucleotide
agggacacctcgccacagtgcttcgcctatccatcgcgcgtggtccagcg

SEQ ID NO: 143653 - DNA, 50 bp, Artificial
  Synthetic oligonucleotide
aggggtgcacgtgagcacctttcgcgcatcgaacactccgcgaagcactt

SEQ ID NO: 143654 - DNA, 50 bp, Artificial
  Synthetic oligonucleotide
aggtgacggtggatccaagcgcgttgcacgtctggtatctgaacccgtcg

SEQ ID NO: 143655 - DNA, 50 bp, Artificial
  Synthetic oligonucleotide
agtctcaggctgtgtccgacgtagcggtgccgcgtcagattgccgcgtat

SEQ ID NO: 143656 - DNA, 50 bp, Artificial
  Synthetic oligonucleotide
atacactgcggaacgtggctcggttctcctccgcgcgtcccttgcagccg

SEQ ID NO: 143657 - DNA, 55 bp, Artificial
  Synthetic oligonucleotide
ctcacctcgtgacgcggtccggtcatcatctcatgttcgcattcggcgtacttgt

SEQ ID NO: 143658 - DNA, 55 bp, Artificial
  Synthetic oligonucleotide
ctcacgggtttacggctcatcttcgagcgcaatgtccccgagtagtccgatcccc

SEQ ID NO: 143659 - DNA, 55 bp, Artificial
  Synthetic oligonucleotide
gccgaggcgcacctctgacatcgtgactcctcatacaaacggttgcgtcgatgat

SEQ ID NO: 143660 - DNA, 55 bp, Artificial
  Synthetic oligonucleotide
gccgggtcgagtctcggcctgaccattacgggtccgctgtttcacatcaactgac

SEQ ID NO: 143661 - DNA, 58 bp, Artificial
  Synthetic oligonucleotide
tccagcgacgaacgcagcagagacaagcgaagccaaatcccttcgaaccggagggaag

SEQ ID NO: 143662 - DNA, 56 bp, Artificial
  Synthetic oligonucleotide
aggtcggagaatgccggtgcgcgggtacaaattccgcggttgcccgctcgctctcc

SEQ ID NO: 143663 - DNA, 55 bp, Artificial
  Synthetic oligonucleotide
atctgcgtaacttgttggggcaaaccgaggcgacttcggtagtggggcttgacca

SEQ ID NO: 143664 - DNA, 55 bp, Artificial
  Synthetic oligonucleotide
cgcgcgtcgggatttccagtaacgcgggaccacgacatgtcagtactctcgccca

SEQ ID NO: 143665 - DNA, 55 bp, Artificial
  Synthetic oligonucleotide
cgcgcactatggctaggttaggatgcgcgggtatgaggtgtctggattgacttat

SEQ ID NO: 143666 - DNA, 54 bp, Artificial
  Synthetic oligonucleotide
atgcacgatttgtgaaacccagtgccccgtgttgcgggtcaccgaaaagttccc

SEQ ID NO: 143667 - DNA, 55 bp, Artificial
  Synthetic oligonucleotide
cgcgacttaccaggacaaggccgcacgttcagacggaaatccgctaggctgtggg

SEQ ID NO: 143668 - DNA, 55 bp, Artificial
  Synthetic oligonucleotide
cgcagacggggtgggatttcagtcttggcgcagtaaagccttagaaatcttagcg

SEQ ID NO: 143669 - DNA, 55 bp, Artificial
  Synthetic oligonucleotide
cgcaccggtctagaagcggtgaattttggtctagaggttggcctagaggtgcgta

SEQ ID NO: 143670 - DNA, 55 bp, Artificial
  Synthetic oligonucleotide
cgcaagcaggtttaagtgcccgctacatttctaacattgaccctaccgacgcggg

SEQ ID NO: 143671 - DNA, 55 bp, Artificial
  Synthetic oligonucleotide
cgagggattattacgttcatcgtccggtatctgatgctccaagtgggcctcctgg

SEQ ID NO: 143672 - DNA, 55 bp, Artificial
  Synthetic oligonucleotide
cgagccaagtgttccaacaacctcggggcaacccgcatcgcaacctcccctccta

SEQ ID NO: 143673 - DNA, 59 bp, Artificial
  Synthetic oligonucleotide
gcttcgcggtaggcgctgtcccggtgtcgaacaggacttgcgaataaatagagaggaca

SEQ ID NO: 143674 - DNA, 55 bp, Artificial
  Synthetic oligonucleotide
cgagcatactcccgcaaatcggactactttggtcctatatcctcggtccgcgaga

SEQ ID NO: 143675 - DNA, 55 bp, Artificial
  Synthetic oligonucleotide
caaaggcgctggcaagcgtgcgagtcggtggacgcatcgtggttgaaagctatca

SEQ ID NO: 143676 - DNA, 55 bp, Artificial
  Synthetic oligonucleotide
cgactgtaggcgaccgcagtccggtgatacgcacgtcatagtacttatccaaggc

SEQ ID NO: 143677 - DNA, 54 bp, Artificial
  Synthetic oligonucleotide
cgacggcggttacaagaactactcctcgacggatgagtacgtctcgcccaacgg

SEQ ID NO: 143678 - DNA, 55 bp, Artificial
  Synthetic oligonucleotide
cgacgcagcctgtatgcttggcaacatgaccgaacttggagtcacaggagagcat

SEQ ID NO: 143679 - DNA, 55 bp, Artificial
  Synthetic oligonucleotide
cacacaccctcctcgcatgacacattgcgcattaaatcttctagttggcgcccgg

SEQ ID NO: 143680 - DNA, 55 bp, Artificial
  Synthetic oligonucleotide
cacccgcgttcccttcaaatgacgcgtataacattcgagacgacgaatatgggtc

SEQ ID NO: 143681 - DNA, 55 bp, Artificial
  Synthetic oligonucleotide
cgacctcactaatgtcctgcagctcggagccaatagattctacccgccccaaggc

SEQ ID NO: 143682 - DNA, 55 bp, Artificial
  Synthetic oligonucleotide
caccgtcgcctcaagcgagactgagcttaaacacttagggctccctttacaagcg

SEQ ID NO: 143683 - DNA, 55 bp, Artificial
  Synthetic oligonucleotide
cacgctttggaaggcgacttagttgcctccgcattcggtaactctgaaaccgacg

SEQ ID NO: 143684 - DNA, 52 bp, Artificial
  Synthetic oligonucleotide
aacaagggttgttcgcggggacaaaactagccccaagctcgcgtttccgcga

SEQ ID NO: 143685 - DNA, 53 bp, Artificial
  Synthetic oligonucleotide
cagaccggccctcgtttggcccacaggtagggttgtccggcgatctcgtaacg

SEQ ID NO: 143686 - DNA, 55 bp, Artificial
  Synthetic oligonucleotide
gtctcaccgagtcgaatgatgctgccggttcgctgaatcgcgcccaaaccgcaac

SEQ ID NO: 143687 - DNA, 55 bp, Artificial
  Synthetic oligonucleotide
gtcgccggtttagccaggacaacatgtcagcacgaaaagtcatcactagaaccgg

SEQ ID NO: 143688 - DNA, 55 bp, Artificial
  Synthetic oligonucleotide
aattgttggcgtggtgcagcctcgtactggtctgtcccggccaagtccctcacct

SEQ ID NO: 143689 - DNA, 55 bp, Artificial
  Synthetic oligonucleotide
gtaggggccactcaccgagttatagaggccgcgtctaggcgtcaggtgcccattg

SEQ ID NO: 143690 - DNA, 55 bp, Artificial
  Synthetic oligonucleotide
gtagacttgcaccagttaacttcacgtgttagcttagttgctaacagacgtgagg

SEQ ID NO: 143691 - DNA, 55 bp, Artificial
  Synthetic oligonucleotide
gtaatctgccatgttgaagttgtagagaccttcaagaatgtgccagttaacaccg

SEQ ID NO: 143692 - DNA, 55 bp, Artificial
  Synthetic oligonucleotide
ggtttagcaaattcgccctgcggcactgcgccgaagaaataagccgtcacatccg

SEQ ID NO: 143693 - DNA, 55 bp, Artificial
  Synthetic oligonucleotide
acatcgacaaacacgaaatatagcaacgtcaagaggagtgcgggtacgaccagca

SEQ ID NO: 143694 - DNA, 55 bp, Artificial
  Synthetic oligonucleotide
ggtgaatccccgatggcacctcgtgaagccgaaagcaacgcgagtgtcggaacta

SEQ ID NO: 143695 - DNA, 54 bp, Artificial
  Synthetic oligonucleotide
agaacggcgttaagccttccggctcgccagattcaaaaagttatccccgccgca

SEQ ID NO: 143696 - DNA, 55 bp, Artificial
  Synthetic oligonucleotide
acattgacactttgtcctaacaaactgttgacaggcgtaggtgctcgccgtagac

SEQ ID NO: 143697 - DNA, 55 bp, Artificial
  Synthetic oligonucleotide
ggtcgaaaaccgtttccatgccgcctctaaacatcacggcgtaatctaagaccca

SEQ ID NO: 143698 - DNA, 54 bp, Artificial
  Synthetic oligonucleotide
ggtcaggaacgctacgcccaatccttgttcgacggtttaaaggcgtgggcagag

SEQ ID NO: 143699 - DNA, 55 bp, Artificial
  Synthetic oligonucleotide
ggtaggacggtccgttgaaatgcggtggacgcagagggtcgtggaaaggagaaga

SEQ ID NO: 143700 - DNA, 55 bp, Artificial
  Synthetic oligonucleotide
ggtagaatttgttgttgccgctcgggtaggtttgtttcgcgacgagtgctgagac

SEQ ID NO: 143701 - DNA, 54 bp, Artificial
  Synthetic oligonucleotide
gggtttaggacaaccgagtcggtgtttgacgtattctgtcgcgcaaaacgcgtc

SEQ ID NO: 143702 - DNA, 55 bp, Artificial
  Synthetic oligonucleotide
acccagactctgaccagcgtctgtaccgttgattccgcctgagcgcagaccctcg

SEQ ID NO: 143703 - DNA, 52 bp, Artificial
  Synthetic oligonucleotide
gggtcgacagtagaaatcgctttcccgaaccctggattggtacgggcgtttg

SEQ ID NO: 143704 - DNA, 55 bp, Artificial
  Synthetic oligonucleotide
ggggaatgtgtatagagtcggggatttcggctcgcacctcatgaacccgtagcta

SEQ ID NO: 143705 - DNA, 55 bp, Artificial
  Synthetic oligonucleotide
gggcgaacgtgtgggcgtacaccacttcgattcggtccacgtcacgggttagcga

SEQ ID NO: 143706 - DNA, 57 bp, Artificial
  Synthetic oligonucleotide
aaatctcggcgttgaacagtccgacgaagagattgcctctgaggaaatcggggacga

SEQ ID NO: 143707 - DNA, 53 bp, Artificial
  Synthetic oligonucleotide
gggaagccttcgtgacttataagtccggcggtcgttcggggacctgggagcga

SEQ ID NO: 143708 - DNA, 55 bp, Artificial
  Synthetic oligonucleotide
ggctattgaggaccaagcgaaagctacaggtgccgaggtggttcgtttggcgggg

SEQ ID NO: 143709 - DNA, 55 bp, Artificial
  Synthetic oligonucleotide
ggcgtccggttccggactggttaatatcaccacgggagaatatgatccgaagctg

SEQ ID NO: 143710 - DNA, 52 bp, Artificial
  Synthetic oligonucleotide
aaaccccgataggcctgaagaccctgaacagtaacagccgggattttaggtg

SEQ ID NO: 143711 - DNA, 55 bp, Artificial
  Synthetic oligonucleotide
tttccaactgtttgccggaatggttagagtctcctgagttctccgcattgttgct

SEQ ID NO: 143712 - DNA, 54 bp, Artificial
  Synthetic oligonucleotide
aaagactcggggttgagtttagcgatgacgcgggtaagggctttatctagactg

SEQ ID NO: 143713 - DNA, 55 bp, Artificial
  Synthetic oligonucleotide
tttaacgttttgggcaaattcttgggtcgttaccagcaactgacctgcagattcc

SEQ ID NO: 143714 - DNA, 55 bp, Artificial
  Synthetic oligonucleotide
ttgcagatgcttagccgggacttttgcgtcgtgggtttccactacggaacgcccc

SEQ ID NO: 143715 - DNA, 55 bp, Artificial
  Synthetic oligonucleotide
aaatctcgaccattgagtccgtccggaagtgtggccgcgtgcccgtggcacctct

SEQ ID NO: 143716 - DNA, 55 bp, Artificial
  Synthetic oligonucleotide
tgtgtcggtgcgtcagatgcatcggtgggcgcggaagactgctcggaggaggatg

SEQ ID NO: 143717 - DNA, 59 bp, Artificial
  Synthetic oligonucleotide
ctaccccccagagatttatatgtcatccgatttcattgctgaacggtgggaagctggcc

SEQ ID NO: 143718 - DNA, 55 bp, Artificial
  Synthetic oligonucleotide
tgtacccggcggttcgtagaccctctcactgcgtgccgtcgtgtcccggcccaat

SEQ ID NO: 143719 - DNA, 55 bp, Artificial
  Synthetic oligonucleotide
tgcttgagcgtgccagggctgttttaccctacaaaacgcgcttggtatgcccgcg

SEQ ID NO: 143720 - DNA, 55 bp, Artificial
  Synthetic oligonucleotide
tcgattggccagtattacgcctcctacccaggcgcagtgatcgttccagaggatt

SEQ ID NO: 143721 - DNA, 55 bp, Artificial
  Synthetic oligonucleotide
tcccactacgcgttacctagtcgctggcttgaccgcgattattgtcagcatgggc

SEQ ID NO: 143722 - DNA, 55 bp, Artificial
  Synthetic oligonucleotide
tccacgaacacaggttgtcgttggaagctagaacccgtccgcttgctacgtccgt

SEQ ID NO: 143723 - DNA, 55 bp, Artificial
  Synthetic oligonucleotide
tattcccacacccgagacggccatcccgggctcgaagatggagtgggagaacgca

SEQ ID NO: 143724 - DNA, 53 bp, Artificial
  Synthetic oligonucleotide
taggcccgcgttttcgacccctgggactttgggcgcgagagacgtggggacta

SEQ ID NO: 143725 - DNA, 55 bp, Artificial
  Synthetic oligonucleotide
gtttcgcgcttagtgcgttcatgaggcgcttcctggggtggagggctgactcggt

SEQ ID NO: 143726 - DNA, 55 bp, Artificial
  Synthetic oligonucleotide
gttgtggctagtcactgagtgtataggaggcgtggtggaaacgaaatacggtttg

SEQ ID NO: 143727 - DNA, 55 bp, Artificial
  Synthetic oligonucleotide
gttggtaggttttactgctcggccatgttgctcgcggagctttgttgtgacgggg

SEQ ID NO: 143728 - DNA, 56 bp, Artificial
  Synthetic oligonucleotide
caactcgtttttagccgtccagctaaacgagaagcccgtctgtatatgtctcggat

SEQ ID NO: 143729 - DNA, 55 bp, Artificial
  Synthetic oligonucleotide
gttgaccacctatgggcaatgccagttttggttgactacgtacgttccaagactg

SEQ ID NO: 143730 - DNA, 55 bp, Artificial
  Synthetic oligonucleotide
gtggagccctgacgacggacatgtagtggcgatggaccacacttgtggggcacac

SEQ ID NO: 143731 - DNA, 55 bp, Artificial
  Synthetic oligonucleotide
aatcagcacctagtttcgacgaatcatcgtattagacacctgtgttactggacga

SEQ ID NO: 143732 - DNA, 55 bp, Artificial
  Synthetic oligonucleotide
gtcttttccgaagagggaaccgcttcctcggtcttagccatggtcaacagcggag

SEQ ID NO: 143733 - DNA, 55 bp, Artificial
  Synthetic oligonucleotide
gtctgaagtaaattccccacggaggcatggtttcatatatcctaaacttatgacg

SEQ ID NO: 143734 - DNA, 55 bp, Artificial
  Synthetic oligonucleotide
gccaggggaccgcacgagtactttaatcccagtggcggcggagcgatgtgcgtaa

SEQ ID NO: 143735 - DNA, 55 bp, Artificial
  Synthetic oligonucleotide
gccccgaggctcaacgcacacacttactaacaaacacgctatcgtgagacacatg

SEQ ID NO: 143736 - DNA, 55 bp, Artificial
  Synthetic oligonucleotide
gcgtagctggttgctcaagggtgatttctgctaagcaaacaacgcctaattcccc

SEQ ID NO: 143737 - DNA, 55 bp, Artificial
  Synthetic oligonucleotide
gcggtcaatgctcccgcttttattgctacatccatgctgattgggccgtgttatt

SEQ ID NO: 143738 - DNA, 55 bp, Artificial
  Synthetic oligonucleotide
gcgggtacaaattccgcggttgcccgctcgctctcctctcgcgcattcattcctg

SEQ ID NO: 143739 - DNA, 60 bp, Artificial
  Synthetic oligonucleotide
gcgtgaggcctcaagggaggcttgttcttcctcgtgataggccgaggtctcatagtccgc

SEQ ID NO: 143740 - DNA, 55 bp, Artificial
  Synthetic oligonucleotide
gcggagtatggcaaattggcaatacgtgtgtcgctgcacagattggtctccccac

SEQ ID NO: 143741 - DNA, 55 bp, Artificial
  Synthetic oligonucleotide
gcgctgtcccggtgtcgaacaggacttgcgaataaatagagaggacacggccgcg

SEQ ID NO: 143742 - DNA, 55 bp, Artificial
  Synthetic oligonucleotide
gcccctctctacgcaaacgagcttcttccacgcaaacttgcctccttacaaccag

SEQ ID NO: 143743 - DNA, 55 bp, Artificial
  Synthetic oligonucleotide
actatgagggatgagtcgcacactcgactgcccggttactaggggcggccagcgt

SEQ ID NO: 143744 - DNA, 55 bp, Artificial
  Synthetic oligonucleotide
gcgctatttacgcatgacgcttggcgtcaggtgcgacgttttggagccgctgaac

SEQ ID NO: 143745 - DNA, 55 bp, Artificial
  Synthetic oligonucleotide
gcgagccgcccaactttcggtggcctcccaggatgcggctagcggcttcaccggc

SEQ ID NO: 143746 - DNA, 55 bp, Artificial
  Synthetic oligonucleotide
gcgacgggaactcccgaatccatgacaagacgtacggtcaaacgggaatcgtgtg

SEQ ID NO: 143747 - DNA, 55 bp, Artificial
  Synthetic oligonucleotide
agaacccgtttgcagcacgttcgcacgactgcgaggggtcttgagtgcgcaccgt

SEQ ID NO: 143748 - DNA, 55 bp, Artificial
  Synthetic oligonucleotide
gcccgattattgcgcctccgggatcgttcaataatgagttggggatgcctctgac

SEQ ID NO: 143749 - DNA, 55 bp, Artificial
  Synthetic oligonucleotide
gcgaacgaattgcttcgctttgaagacggtaccttggggctggcatctaacctag

SEQ ID NO: 143750 - DNA, 59 bp, Artificial
  Synthetic oligonucleotide
gcgtgcccgtggcacctctcgtctcgttgcgagcaaaatctgacggtaaaggcgccgga

SEQ ID NO: 143751 - DNA, 55 bp, Artificial
  Synthetic oligonucleotide
gccttgccggtacatgaaccgacctgccttatttacgcgtgtcctgattctctcg

SEQ ID NO: 143752 - DNA, 55 bp, Artificial
  Synthetic oligonucleotide
gcctcgctgaggacatgaagagacttgatgcgatcggagggtcgaagttcagagt

SEQ ID NO: 143753 - DNA, 55 bp, Artificial
  Synthetic oligonucleotide
gcccgcaagcgcaggagcgttcttttcccgtgaaaataccacaaggtcggccatt

SEQ ID NO: 143754 - DNA, 53 bp, Artificial
  Synthetic oligonucleotide
gccggtacactcttaggcattttagtcgctaccttcgccccacttatacccct

SEQ ID NO: 143755 - DNA, 55 bp, Artificial
  Synthetic oligonucleotide
gcccgtacggagaataaaactgtgacgtgggtggacgctcgcctcgtgcgcactc

SEQ ID NO: 143756 - DNA, 55 bp, Artificial
  Synthetic oligonucleotide
gccggacaatctaccaaggtagttatccttgaaagctccaatagtcgctcccgac

SEQ ID NO: 143757 - DNA, 52 bp, Artificial
  Synthetic oligonucleotide
ggcggttgcgtaaggaaaacgcggagcttaaacgtactaacgagagtttgaa

SEQ ID NO: 143758 - DNA, 55 bp, Artificial
  Synthetic oligonucleotide
ggcggtaccctcctggcggtgactacatttatgtggcacaataatcgtgtggaag

SEQ ID NO: 143759 - DNA, 55 bp, Artificial
  Synthetic oligonucleotide
ggcggggctccaatcacgaatctcgacatggaagacttctcgcgcgtcctacgcg

SEQ ID NO: 143760 - DNA, 55 bp, Artificial
  Synthetic oligonucleotide
ggcgcgtgggcatcattaccctcggctacatcgcactatatgttccatggctcgc

SEQ ID NO: 143761 - DNA, 60 bp, Artificial
  Synthetic oligonucleotide
gagagcaagaaaacagctaaatctcgccgttctgagagatacgaactcagagacggatta

SEQ ID NO: 143762 - DNA, 55 bp, Artificial
  Synthetic oligonucleotide
ggccctacaacctcatgaggactcgcgaccttagcgggtctcacgactggagtgc

SEQ ID NO: 143763 - DNA, 55 bp, Artificial
  Synthetic oligonucleotide
gcaaccgaaggtgtgtccagcagacgattcggatgtcttgtccggtggcgtaacg

SEQ ID NO: 143764 - DNA, 55 bp, Artificial
  Synthetic oligonucleotide
ggcacatcaatctggcattccttttcggactctaggccagcaaactccgggttag

SEQ ID NO: 143765 - DNA, 55 bp, Artificial
  Synthetic oligonucleotide
gcactggctgtaaccctattccaagcacgcaccaactatgcgattcctcatcgcg

SEQ ID NO: 143766 - DNA, 55 bp, Artificial
  Synthetic oligonucleotide
gcagacttctcgcgcctaaagccttccgtaacgctacccggtacagcgcagaagg

SEQ ID NO: 143767 - DNA, 55 bp, Artificial
  Synthetic oligonucleotide
ggacctcccgtgggacgttcccctcgaggagtggccatccaacttactcgcggca

SEQ ID NO: 143768 - DNA, 55 bp, Artificial
  Synthetic oligonucleotide
gcaggtatgcggaaaactttaggaacaaggtgaccacagcgtcacctgaccaccc

SEQ ID NO: 143769 - DNA, 55 bp, Artificial
  Synthetic oligonucleotide
acgagtatgagaaaaccgcgcgagattggaaagcgctcgaaggggtatgcggcgc

SEQ ID NO: 143770 - DNA, 55 bp, Artificial
  Synthetic oligonucleotide
gcttgtcacaaccttgaccgtagagccacttccttttgtcaacgctttgcgttgc

SEQ ID NO: 143771 - DNA, 55 bp, Artificial
  Synthetic oligonucleotide
gcttacaccccgaatctagaggccgcccgcctttacgatgtgctctttgggttct

SEQ ID NO: 143772 - DNA, 56 bp, Artificial
  Synthetic oligonucleotide
aagaccaagttgcaggtatgcggaaaactttaggaacaaggtgaccacagcgtcac

SEQ ID NO: 143773 - DNA, 60 bp, Artificial
  Synthetic oligonucleotide
gagaggacacggccgcgagtgctctgtccctggattactcggcgtttgttcgcagacgcc

SEQ ID NO: 143774 - DNA, 55 bp, Artificial
  Synthetic oligonucleotide
gcttaagaaggggccggctgaatacggtgcgtggtctctcatgctgggcgccgca

SEQ ID NO: 143775 - DNA, 55 bp, Artificial
  Synthetic oligonucleotide
gcatcgcgtaaccaccgcaacttggtagaggtaatggaagctacatgcacgctgc

SEQ ID NO: 143776 - DNA, 55 bp, Artificial
  Synthetic oligonucleotide
agacatcgccgctgggctacccgaactaagacggctaggccgcacattgaagcgc

SEQ ID NO: 143777 - DNA, 55 bp, Artificial
  Synthetic oligonucleotide
gctctgctaagattttgtcgagcgtccgttcagactgtgtcgccatcgggcggac

SEQ ID NO: 143778 - DNA, 55 bp, Artificial
  Synthetic oligonucleotide
gctcgagtaagcacggccgttcaggctcctagaagttatctagttgccgaagatg

SEQ ID NO: 143779 - DNA, 55 bp, Artificial
  Synthetic oligonucleotide
gccagctttgcggtcacaaattaaagcgacttcttatggtttagcttacgggttg

SEQ ID NO: 143780 - DNA, 55 bp, Artificial
  Synthetic oligonucleotide
gctactgcccgtaccgaactcatcgagctaggatagtccatgcgagtgggtccaa

SEQ ID NO: 143781 - DNA, 54 bp, Artificial
  Synthetic oligonucleotide
tgcagcactgacgacagctacactcaacccgaccgtcgactaacccgggacatg

SEQ ID NO: 143782 - DNA, 54 bp, Artificial
  Synthetic oligonucleotide
ccccatattcgaggagtcctgctggatttgtaccgagaggaacggaaatcgggc

SEQ ID NO: 143783 - DNA, 53 bp, Artificial
  Synthetic oligonucleotide
ccccacacgaaaacgcaggtaggctaataaagacgactaggtaagataccgta

SEQ ID NO: 143784 - DNA, 57 bp, Artificial
  Synthetic oligonucleotide
agacggattagccgaaatctcgaccattgagtccgtccggaagtgtggccgcgtgcc

SEQ ID NO: 143785 - DNA, 54 bp, Artificial
  Synthetic oligonucleotide
tacgacgggctggtcggattagccgcagtgaagcacggactcaccctagcgact

SEQ ID NO: 143786 - DNA, 54 bp, Artificial
  Synthetic oligonucleotide
cctgcccacacaatgccaccctggacccaccattcgtggtcgaacttcacatcc

SEQ ID NO: 143787 - DNA, 54 bp, Artificial
  Synthetic oligonucleotide
aagtccgctaggacgcagagaccggggcgcacaatcgcactgtttgcgctcttt

SEQ ID NO: 143788 - DNA, 54 bp, Artificial
  Synthetic oligonucleotide
gtgggtagtgtcttagtcatgtgagctccttgtgcgggtcgtaggtgttctagt

SEQ ID NO: 143789 - DNA, 54 bp, Artificial
  Synthetic oligonucleotide
cggaggaacaaatagtggaatatttcggagcgcctgtaccttaaagtcccattg

SEQ ID NO: 143790 - DNA, 54 bp, Artificial
  Synthetic oligonucleotide
agctgcctcactaccgagcgagcccgaggaggcttccatgagtcgagcgatcga

SEQ ID NO: 143791 - DNA, 54 bp, Artificial
  Synthetic oligonucleotide
ggggacatcaccaagggacatgtattcaacgtgaccggggactgcttgaacctt

SEQ ID NO: 143792 - DNA, 54 bp, Artificial
  Synthetic oligonucleotide
caagttgcgctgatagctgaaggacttcgttatccaaatgagctacgtgggcgc

SEQ ID NO: 143793 - DNA, 54 bp, Artificial
  Synthetic oligonucleotide
ggacgaataacgccactatcgccgtgcaaatggtagccacatttatgactgggg

SEQ ID NO: 143794 - DNA, 54 bp, Artificial
  Synthetic oligonucleotide
atgtcaatccgatgtcgcagacctacgggtcagacaaggacttgagccccgctc

SEQ ID NO: 143795 - DNA, 55 bp, Artificial
  Synthetic oligonucleotide
ataggaggcgtggtggaaacgaaatacggtttgttgggactgttgacgcgcgagc

SEQ ID NO: 143796 - DNA, 54 bp, Artificial
  Synthetic oligonucleotide
gggtggaactgaggcggtgccctcaggtatggtccgagattaacccgtgccgcg

SEQ ID NO: 143797 - DNA, 54 bp, Artificial
  Synthetic oligonucleotide
gctgccacttcggcaggaactcagtctggacgaaagccggcatatattccgcgt

SEQ ID NO: 143798 - DNA, 53 bp, Artificial
  Synthetic oligonucleotide
ttttagcgccgaagtaaagtttatggagaacggttcagtggcgagcggtttag

SEQ ID NO: 143799 - DNA, 53 bp, Artificial
  Synthetic oligonucleotide
tttcaaaacggcacgccatatctaccacggcctgtgccaaaccgccgttagac

SEQ ID NO: 143800 - DNA, 53 bp, Artificial
  Synthetic oligonucleotide
cgtcttatgagcctccaaccacgcactacgaaacctactctaattcgggtaaa

SEQ ID NO: 143801 - DNA, 53 bp, Artificial
  Synthetic oligonucleotide
ggttaactgcaatagtggtggttatctgcgatgacacacgttaccagttgata

SEQ ID NO: 143802 - DNA, 53 bp, Artificial
  Synthetic oligonucleotide
tgtcaggaagacgttacccgcgacggcagtcgtcgatggggtaaaagattggg

SEQ ID NO: 143803 - DNA, 53 bp, Artificial
  Synthetic oligonucleotide
gtaactataggcagtatcaacagccacaaccaaagggagtgcggtggggtttt

SEQ ID NO: 143804 - DNA, 53 bp, Artificial
  Synthetic oligonucleotide
gtctgacctacacgatctacggtgtcatgaacttggtgatcgcagtgatcttg

SEQ ID NO: 143805 - DNA, 53 bp, Artificial
  Synthetic oligonucleotide
tgacctatgtacgtgttatggacggctcgctcactgcccgtcagaaaatcaac

SEQ ID NO: 143806 - DNA, 60 bp, Artificial
  Synthetic oligonucleotide
gggacgaagcaatagcgctatttacgcatgacgcttggcgtcaggtgcgacgttttggag

SEQ ID NO: 143807 - DNA, 53 bp, Artificial
  Synthetic oligonucleotide
tctaggcagtggcgcgctgtcagtacccactggtcggcaatgagtgtgcctgt

SEQ ID NO: 143808 - DNA, 53 bp, Artificial
  Synthetic oligonucleotide
acagcgttcgtaaccgatgtgtttagccgaaagattgttggctggtccacccg

SEQ ID NO: 143809 - DNA, 53 bp, Artificial
  Synthetic oligonucleotide
ccccgtccccgctactgacacggtgaatcgtcccgaaccgactattgacgcta

SEQ ID NO: 143810 - DNA, 53 bp, Artificial
  Synthetic oligonucleotide
catcgtcatacaacatgcacagcattaagcaactctactgcgagaaacgcccc

SEQ ID NO: 143811 - DNA, 53 bp, Artificial
  Synthetic oligonucleotide
aaggcgtataagactaagacggttcatattgttggtggataccaggcggtgtc

SEQ ID NO: 143812 - DNA, 53 bp, Artificial
  Synthetic oligonucleotide
cagctggtacacagtcgcaccgatatttgccacacgcatgatagcgcgagtca

SEQ ID NO: 143813 - DNA, 52 bp, Artificial
  Synthetic oligonucleotide
ggtttcttctacggtccggccccactcgcaggagggaaacgtcgtgagcgac

SEQ ID NO: 143814 - DNA, 52 bp, Artificial
  Synthetic oligonucleotide
acatccgtatgaatgtggcacgcaacaagaggaccccgggttacagtgagcc

SEQ ID NO: 143815 - DNA, 52 bp, Artificial
  Synthetic oligonucleotide
ggtgccttggaatcggaaggagtttcgggagcactcggcgtgtcagaaccgg

SEQ ID NO: 143816 - DNA, 52 bp, Artificial
  Synthetic oligonucleotide
ggtacgacccgacaaccttaatgtgacgagccgcggtatcaccgctatcgcg

SEQ ID NO: 143817 - DNA, 50 bp, Artificial
  Synthetic oligonucleotide
ccaatttcacccccgaccccaggttccgtgccggggaaaaagctctcacc

SEQ ID NO: 143818 - DNA, 52 bp, Artificial
  Synthetic oligonucleotide
cgtcagttctgtggtcgcgaaaggcatataggggtcagtctttggctgctcc

SEQ ID NO: 143819 - DNA, 52 bp, Artificial
  Synthetic oligonucleotide
aggtcttaccgtccctgcagtgtacggggactaattatcacccgcggtttta

SEQ ID NO: 143820 - DNA, 52 bp, Artificial
  Synthetic oligonucleotide
gggcttcaacgaaacgtaagagttcgggatccgcgtcagaaatccgctccac

SEQ ID NO: 143821 - DNA, 52 bp, Artificial
  Synthetic oligonucleotide
agtagcaccgaagctcatagcgaaagccccatttcctaccatcatagcatcg

SEQ ID NO: 143822 - DNA, 52 bp, Artificial
  Synthetic oligonucleotide
gccttgcacacgcgtcgtcctacacactgctagacgcaccggaggcccaaac

SEQ ID NO: 143823 - DNA, 52 bp, Artificial
  Synthetic oligonucleotide
tgacggagatttccctgtgtagaacggattgcggctaaacccgtgagcaaaa

SEQ ID NO: 143824 - DNA, 52 bp, Artificial
  Synthetic oligonucleotide
atgaaatgacacgacttccgcaagtggcacgggacgagacagtgagtactcc

SEQ ID NO: 143825 - DNA, 52 bp, Artificial
  Synthetic oligonucleotide
gctctatatcaagctagttttcgctatccccactgccgtcatggaagatatt

SEQ ID NO: 143826 - DNA, 52 bp, Artificial
  Synthetic oligonucleotide
caatgggcaaaccttccaggattctgtgttccacggggtgcaaagtttaacg

SEQ ID NO: 143827 - DNA, 52 bp, Artificial
  Synthetic oligonucleotide
tttcggtgtaacccacccgacgcgcctcggacacaatgtgctccaagtaatc

SEQ ID NO: 143828 - DNA, 57 bp, Artificial
  Synthetic oligonucleotide
tccgggcgccaactagaagatttaatgcgcaatgtgtcatgcgaggagggtgtgtgg

SEQ ID NO: 143829 - DNA, 52 bp, Artificial
  Synthetic oligonucleotide
gcgttgaaaggcgacgaattgctcatgccgtagtgcccgcccggacaatcga

SEQ ID NO: 143830 - DNA, 52 bp, Artificial
  Synthetic oligonucleotide
gcgtgacggggctagccgcctagaccgggctcgtgaacagataacgtccact

SEQ ID NO: 143831 - DNA, 51 bp, Artificial
  Synthetic oligonucleotide
tagagcacccgcaggtaggtcgggctgccccacacggcgcggtaggtcact

SEQ ID NO: 143832 - DNA, 51 bp, Artificial
  Synthetic oligonucleotide
caagtgcccccgggagcgccagcaccgtttgatcggattgggtcgattatg

SEQ ID NO: 143833 - DNA, 51 bp, Artificial
  Synthetic oligonucleotide
gtgtctacctgcctcgttggcacgattgacttgaatccgtatgcgtgggat

SEQ ID NO: 143834 - DNA, 51 bp, Artificial
  Synthetic oligonucleotide
tctagcctgcggtcgcctacgctggagaggtgactgagcccaacaccgcgc

SEQ ID NO: 143835 - DNA, 51 bp, Artificial
  Synthetic oligonucleotide
agagcactagggcaataagttcgcttacccacaatcgtacagatgttcgac

SEQ ID NO: 143836 - DNA, 51 bp, Artificial
  Synthetic oligonucleotide
tgccccgagacccgcgtatcgcgaccgataatcgcgcgcggcttggcaggt

SEQ ID NO: 143837 - DNA, 51 bp, Artificial
  Synthetic oligonucleotide
gcggtcgaaatcccgagacggcatgaaacgttggcgttgcccggttctgac

SEQ ID NO: 143838 - DNA, 51 bp, Artificial
  Synthetic oligonucleotide
gtcgatgttcaagtgcccccgggagcgccagcaccgtttgatcggattggg

SEQ ID NO: 143839 - DNA, 56 bp, Artificial
  Synthetic oligonucleotide
ctctggtcgtcgttggattgagttcaaggagcaatttggtttagtcggttatgttc

SEQ ID NO: 143840 - DNA, 50 bp, Artificial
  Synthetic oligonucleotide
acgcggccgtcacataccctcgcacgccgaacgaaccgtcctcagtagtc

SEQ ID NO: 143841 - DNA, 50 bp, Artificial
  Synthetic oligonucleotide
accccgtcgggatgtggattgtcaaaaggcagtcccgagcagtgcgccag

SEQ ID NO: 143842 - DNA, 50 bp, Artificial
  Synthetic oligonucleotide
acccatgatagcgtcgcggaaccctcgccccaaggcgggtgacaatctca

SEQ ID NO: 143843 - DNA, 50 bp, Artificial
  Synthetic oligonucleotide
acagggtgaacggccccacggtaggacccatgcctgtcacgagccaggta

SEQ ID NO: 143844 - DNA, 50 bp, Artificial
  Synthetic oligonucleotide
acccaagtccggcgtcatcaggcgtccgagcacgcctcaacgaaaggtcg

SEQ ID NO: 143845 - DNA, 50 bp, Artificial
  Synthetic oligonucleotide
acccaagaactccgcgtagtgcctggtaatcccgcggccctacattcggg

SEQ ID NO: 143846 - DNA, 50 bp, Artificial
  Synthetic oligonucleotide
acgccccgaccctgacctaaggagcacggatgggtctgttcagcaagcga

SEQ ID NO: 143847 - DNA, 50 bp, Artificial
  Synthetic oligonucleotide
accagcgcgtaagaatcgcccgggattgtgacacgcacctcgctacagcg

SEQ ID NO: 143848 - DNA, 50 bp, Artificial
  Synthetic oligonucleotide
ggtaggaccaacgcccgaaagacgaggcgcgagcatccgaagtcgttgtg

SEQ ID NO: 143849 - DNA, 50 bp, Artificial
  Synthetic oligonucleotide
gctgggacaagaccgcgcgaggaacgggggtggcgctgttctctgaggtg

SEQ ID NO: 143850 - DNA, 56 bp, Artificial
  Synthetic oligonucleotide
cgcgattccggaggcttggactggaccgttgcgaaagacgcgcgagccatcggcaa

SEQ ID NO: 143851 - DNA, 50 bp, Artificial
  Synthetic oligonucleotide
acattccagaatcgtgagccgttgatgtggctgtgtgcgcctggcccgta

SEQ ID NO: 143852 - DNA, 50 bp, Artificial
  Synthetic oligonucleotide
acatttccatggatgccgcggatcgggagacttacgccgccctcacacgc

SEQ ID NO: 143853 - DNA, 50 bp, Artificial
  Synthetic oligonucleotide
accacgcacgtaaggaagaaccatggcgcccaccgctaagcccctgggga

SEQ ID NO: 143854 - DNA, 50 bp, Artificial
  Synthetic oligonucleotide
accaccccgttccacaggcgcgaatgcttctcggtcacttgcactcgcga

SEQ ID NO: 143855 - DNA, 50 bp, Artificial
  Synthetic oligonucleotide
acgaagagtgggccaggctagcgcaatcgactccccttccgctgacgcag

SEQ ID NO: 143856 - DNA, 50 bp, Artificial
  Synthetic oligonucleotide
acgaaacccccaagatcacacgggtggcgatggctgggaggccgtagccc

SEQ ID NO: 143857 - DNA, 50 bp, Artificial
  Synthetic oligonucleotide
accttgcgtggggtgaatgggaactcgtcgaaacgaaggcgccgtttgga

SEQ ID NO: 143858 - DNA, 50 bp, Artificial
  Synthetic oligonucleotide
acctcgccgtggcaacccagatcattcggcgctgccccaccgtcatcttg

SEQ ID NO: 143859 - DNA, 50 bp, Artificial
  Synthetic oligonucleotide
ggccaggctatcagcgtgagcgtcatcgcacgaaacccggagacgatacg

SEQ ID NO: 143860 - DNA, 50 bp, Artificial
  Synthetic oligonucleotide
acctcctcaggacaccgacgactgaggtggaccacgcgtcactttcggct

SEQ ID NO: 143861 - DNA, 56 bp, Artificial
  Synthetic oligonucleotide
tctcatgccgaccgcactatagcgttcacctacgatgaatcctgggatgggcagga

SEQ ID NO: 143862 - DNA, 50 bp, Artificial
  Synthetic oligonucleotide
acgcaacgggtgtaagcggcaactggatcgatggcttgggtgattgggcg

SEQ ID NO: 143863 - DNA, 50 bp, Artificial
  Synthetic oligonucleotide
ggcctgggctggtcggatcgaggatcatggtgtctcccatcatcggaaga

SEQ ID NO: 143864 - DNA, 50 bp, Artificial
  Synthetic oligonucleotide
accgtgcatcctaatctgggagggaaagcccgcgcgactcttggggagac

SEQ ID NO: 143865 - DNA, 50 bp, Artificial
  Synthetic oligonucleotide
accgcgtggcgcatccctgcccgtttctaatcgttcttcgtttggtggcg

SEQ ID NO: 143866 - DNA, 50 bp, Artificial
  Synthetic oligonucleotide
accgatgcagtacacgaccctcgggaccacggacatcaccatcccccgcc

SEQ ID NO: 143867 - DNA, 50 bp, Artificial
  Synthetic oligonucleotide
accgagggacgtctcgagtgttctggaagccgatacgcgcacccgagtgc

SEQ ID NO: 143868 - DNA, 50 bp, Artificial
  Synthetic oligonucleotide
accgagcacccgcaaaatcaacccacgcctcagtgtactgcgttgcctga

SEQ ID NO: 143869 - DNA, 50 bp, Artificial
  Synthetic oligonucleotide
accctgcttcgttgggcacagaccgtacgcaactcaagcgacccaacagc

SEQ ID NO: 143870 - DNA, 50 bp, Artificial
  Synthetic oligonucleotide
acccgtcaccagacactccggctcctcgatccgaggggagtacacctccc

SEQ ID NO: 143871 - DNA, 50 bp, Artificial
  Synthetic oligonucleotide
acgcactgtcgacggggctcaccgtggcttcaaacctcgtcgtgaccgtc

SEQ ID NO: 143872 - DNA, 52 bp, Artificial
  Synthetic oligonucleotide
agggtcaaccccaccccgcgattcacgtgcccttggcaccccaggttaagac

SEQ ID NO: 143873 - DNA, 50 bp, Artificial
  Synthetic oligonucleotide
acccggggtgggccgaaaggttgtgaactggggtctcgttcggcggtgct

SEQ ID NO: 143874 - DNA, 50 bp, Artificial
  Synthetic oligonucleotide
acccgggggcaaagtccctcgcagcttcaaatccgggtcgcctccctcat

SEQ ID NO: 143875 - DNA, 50 bp, Artificial
  Synthetic oligonucleotide
acgccagggctctccgtcctgccgcctcccaccggactttgcttcctccc

SEQ ID NO: 143876 - DNA, 50 bp, Artificial
  Synthetic oligonucleotide
accccgttgtgcctgtcgctactccttggtgttggtcgctaccccgtagc

SEQ ID NO: 143877 - DNA, 50 bp, Artificial
  Synthetic oligonucleotide
aactgcgcgaaactgccacccgagccgaggcaatgagcctcatcatgtca

SEQ ID NO: 143878 - DNA, 50 bp, Artificial
  Synthetic oligonucleotide
aactacctgcggaatcgacgcgtggcagttcaagcatgcacctggctgct

SEQ ID NO: 143879 - DNA, 50 bp, Artificial
  Synthetic oligonucleotide
aacgttgggccaccccggcagagatatccgggcgtgctgacacgatcaca

SEQ ID NO: 143880 - DNA, 50 bp, Artificial
  Synthetic oligonucleotide
aacgttcgcctatgacggacccttcttggcggtgtgcgcaaagcacgact

SEQ ID NO: 143881 - DNA, 50 bp, Artificial
  Synthetic oligonucleotide
aacgcgcagccgctttcaccccataagcaagcgtactgtgagcatgcgaa

SEQ ID NO: 143882 - DNA, 50 bp, Artificial
  Synthetic oligonucleotide
tcttgtactgctgtcgtgcgacatacacggcacctgcgtccgggtatcga

SEQ ID NO: 143883 - DNA, 59 bp, Artificial
  Synthetic oligonucleotide
tcgattcctccccagttcgtccagttgattgatgacgctgtgaagagtcgggaacttct

SEQ ID NO: 143884 - DNA, 51 bp, Artificial
  Synthetic oligonucleotide
atagccgttccgcaacctttaggtcggtggtaaggtgacgtttaacgcaaa

SEQ ID NO: 143885 - DNA, 50 bp, Artificial
  Synthetic oligonucleotide
aacctgctcgcacgcactgtcgacggggctcaccgtggcttcaaacctcg

SEQ ID NO: 143886 - DNA, 50 bp, Artificial
  Synthetic oligonucleotide
tgaggtgtctactgctagcctctcgcggtaaagaatgagaccacacctgg

SEQ ID NO: 143887 - DNA, 50 bp, Artificial
  Synthetic oligonucleotide
aacctccaaagggccgcggacgagtaccttcacgacgagcagtcgggaaa

SEQ ID NO: 143888 - DNA, 50 bp, Artificial
  Synthetic oligonucleotide
aaccggtagtaaacgttgaaccggcgggagatttcgcaaccgcgccacta

SEQ ID NO: 143889 - DNA, 50 bp, Artificial
  Synthetic oligonucleotide
aaccgcgttggaccaaacactgttggcccattcggcctgggacaatcgtt

SEQ ID NO: 143890 - DNA, 50 bp, Artificial
  Synthetic oligonucleotide
tgggtggctctctgaaagatggccccgtgttgttattgtcgcctcatgaa

SEQ ID NO: 143891 - DNA, 50 bp, Artificial
  Synthetic oligonucleotide
aaccagaggagcaatacccgctgatgttccgtggcctccgctcatcgcgg

SEQ ID NO: 143892 - DNA, 50 bp, Artificial
  Synthetic oligonucleotide
aaccagagcttgttcgaagccctgcacgtgggtaccgcctttaggggtgg

SEQ ID NO: 143893 - DNA, 50 bp, Artificial
  Synthetic oligonucleotide
aaatgactcggccgttcgccttctcagacaaagggagtgtacgcgcggga

SEQ ID NO: 143894 - DNA, 50 bp, Artificial
  Synthetic oligonucleotide
ttcgtgtttgtcgatgttcaagtgcccccgggagcgccagcaccgtttga

SEQ ID NO: 143895 - DNA, 55 bp, Artificial
  Synthetic oligonucleotide
atactctagcgcatcgaccgggagggcacaaactgtgcgcggtgatttacgtccc

SEQ ID NO: 143896 - DNA, 50 bp, Artificial
  Synthetic oligonucleotide
aaatcgaccgattggcgtgagacgagcaacgaaatgcggcgcctcatgga

SEQ ID NO: 143897 - DNA, 50 bp, Artificial
  Synthetic oligonucleotide
aaagcgtgggcagcggctgagcgtatgtcacgtaggcacggagcagtcaa

SEQ ID NO: 143898 - DNA, 50 bp, Artificial
  Synthetic oligonucleotide
aaagcggccttccttacgagcctcattcgccagacacagccgcaggtgct

SEQ ID NO: 143899 - DNA, 50 bp, Artificial
  Synthetic oligonucleotide
aaacctctagacgggcgggcaagcagctctagatcggcaggcgacctcta

SEQ ID NO: 143900 - DNA, 50 bp, Artificial
  Synthetic oligonucleotide
aaacatgccttcccaccatcggggatttcgccaccatacgcgcccgtccc

SEQ ID NO: 143901 - DNA, 50 bp, Artificial
  Synthetic oligonucleotide
acagccgacggagagtcccactcgcaacaacccgacgacacctgtgccaa

SEQ ID NO: 143902 - DNA, 50 bp, Artificial
  Synthetic oligonucleotide
acactgccatgagcgggccacaggtaagagccaaacaacccgggttagcc

SEQ ID NO: 143903 - DNA, 50 bp, Artificial
  Synthetic oligonucleotide
acacgggtgcggagcaacctctccgtccccaacgaaaggaccgtcatggc

SEQ ID NO: 143904 - DNA, 50 bp, Artificial
  Synthetic oligonucleotide
acacggcgaacctccaaagggccgcggacgagtaccttcacgacgagcag

SEQ ID NO: 143905 - DNA, 50 bp, Artificial
  Synthetic oligonucleotide
gtccgcacaaaaaccacgcacgtaaggaagaaccatggcgcccaccgcta

SEQ ID NO: 143906 - DNA, 54 bp, Artificial
  Synthetic oligonucleotide
cggctcgcgcgtcaacagtcccaacaaaccgtatttcgtttccaccacgcctcc

SEQ ID NO: 143907 - DNA, 50 bp, Artificial
  Synthetic oligonucleotide
aattgcgaggccctcggggcaattccacgcgagtgagccgaatgctcccg

SEQ ID NO: 143908 - DNA, 50 bp, Artificial
  Synthetic oligonucleotide
aattcgcgtagggttacggctccgtctcgtttggcgagtcgcgctccggt

SEQ ID NO: 143909 - DNA, 50 bp, Artificial
  Synthetic oligonucleotide
aatgggcttcacccgttcccggttctcaggcgctctgaacgcagacctac

SEQ ID NO: 143910 - DNA, 50 bp, Artificial
  Synthetic oligonucleotide
aatcgcggagcttatgacgcaactgggcgcttatcccgaggcccagacct

SEQ ID NO: 143911 - DNA, 50 bp, Artificial
  Synthetic oligonucleotide
aatatcggccgtaccgaacgacgaaatcgccaactgagccaacgcgccgc

SEQ ID NO: 143912 - DNA, 50 bp, Artificial
  Synthetic oligonucleotide
aagttcgatgagcacgcacagcctagtcggaacgccgcccgccctttcta

SEQ ID NO: 143913 - DNA, 50 bp, Artificial
  Synthetic oligonucleotide
aagtaccgagagaaccattcaagctggggagtgcccgcgccaaaccgtgg

SEQ ID NO: 143914 - DNA, 50 bp, Artificial
  Synthetic oligonucleotide
aaggtagggggcattccaccatgaatccccgggttccattagcggccagg

SEQ ID NO: 143915 - DNA, 50 bp, Artificial
  Synthetic oligonucleotide
aaggagccgccaacaaggcgttataggcttgagacacccggcgcatcgca

SEQ ID NO: 143916 - DNA, 50 bp, Artificial
  Synthetic oligonucleotide
aagcttggccttccacctcgcagcctctcgcacggcaagccccagggcga

SEQ ID NO: 143917 - DNA, 55 bp, Artificial
  Synthetic oligonucleotide
cgtgctggtcgctagaagtttagttagcacggggcaacgcgaagtctccagggtg

SEQ ID NO: 143918 - DNA, 50 bp, Artificial
  Synthetic oligonucleotide
aagcggatcagaaccgtgacgctggtgcgttgggtcctcgaatcgcaggt

SEQ ID NO: 143919 - DNA, 50 bp, Artificial
  Synthetic oligonucleotide
tactttcccaggcatttgcacgtaggccacagttaaggaaccgctacgtc

SEQ ID NO: 143920 - DNA, 50 bp, Artificial
  Synthetic oligonucleotide
aagcgagggtcttctttggagcgtcgcgagtcggcttagccggagccggc

SEQ ID NO: 143921 - DNA, 50 bp, Artificial
  Synthetic oligonucleotide
aagccaaacacgtaccgccctcgtgaaactccccgcgctaaacggaacga

SEQ ID NO: 143922 - DNA, 50 bp, Artificial
  Synthetic oligonucleotide
aagcacgtagacttggcgggaacctgctcgcacgcactgtcgacggggct

SEQ ID NO: 143923 - DNA, 50 bp, Artificial
  Synthetic oligonucleotide
aagcacccacgcccaaagatgcctgtttagccttacgttccacccccgga

SEQ ID NO: 143924 - DNA, 50 bp, Artificial
  Synthetic oligonucleotide
aagaggctgcagacggatgttgaggatcgggtgtgaaaagaggccggcga

SEQ ID NO: 143925 - DNA, 50 bp, Artificial
  Synthetic oligonucleotide
aagactcgtcccattcttcccgcgacgagtgctccgaaaggacgcggacg

SEQ ID NO: 143926 - DNA, 50 bp, Artificial
  Synthetic oligonucleotide
atagtgcgccaaatctggcgtgctcgcgtaacagcttcctcgtcagttaa

SEQ ID NO: 143927 - DNA, 50 bp, Artificial
  Synthetic oligonucleotide
ataatcgacccaatccgatcaaacggtgctggcgctcccgggggcacttg

SEQ ID NO: 143928 - DNA, 55 bp, Artificial
  Synthetic oligonucleotide
cgtctcgccgggcgttcgcacattccccggtaaggccctgtttgcaatggtgaca

SEQ ID NO: 143929 - DNA, 50 bp, Artificial
  Synthetic oligonucleotide
agtttcctcaaccggcacccagccagcgtcagacaagccctgtgggtcaa

SEQ ID NO: 143930 - DNA, 50 bp, Artificial
  Synthetic oligonucleotide
agttgtcacggggttgtcgggtgatcgggacgagtgggtgagaagcgcgg

SEQ ID NO: 143931 - DNA, 50 bp, Artificial
  Synthetic oligonucleotide
agtggaaaacagcggtgcgttggggtttgcaggagcttgcgcgtttagct

SEQ ID NO: 143932 - DNA, 50 bp, Artificial
  Synthetic oligonucleotide
cggggatacaaaccgcctcaggatgtatgccacagcccgccgacgtgtct

SEQ ID NO: 143933 - DNA, 50 bp, Artificial
  Synthetic oligonucleotide
agtactctacggcggttgggcagaagccgatggagcattagctgtcgcgc

SEQ ID NO: 143934 - DNA, 50 bp, Artificial
  Synthetic oligonucleotide
aggtgacgcccagtctgcacgactgcaacgcctctacccgggaactatta

SEQ ID NO: 143935 - DNA, 50 bp, Artificial
  Synthetic oligonucleotide
cgtaaggaagaaccatggcgcccaccgctaagcccctggggattacgacc

SEQ ID NO: 143936 - DNA, 50 bp, Artificial
  Synthetic oligonucleotide
aggtaacagagtctctcctggcgcgtttagcggagtactgccacaagact

SEQ ID NO: 143937 - DNA, 50 bp, Artificial
  Synthetic oligonucleotide
aggtaacaccgtggtactcgcacccgcctgtgcatcctgggaccagttcg

SEQ ID NO: 143938 - DNA, 50 bp, Artificial
  Synthetic oligonucleotide
agggtgtcaacaacctgacgccatgcggaaacagccagcttaccaccgga

SEQ ID NO: 143939 - DNA, 55 bp, Artificial
  Synthetic oligonucleotide
aggtcaatcttgccgtattgccgcgcaacggaggcggaatttccacctacctgac

SEQ ID NO: 143940 - DNA, 50 bp, Artificial
  Synthetic oligonucleotide
agggtataaccgtgctgcggtgcccaaccgaagagccacatctgcgcagc

SEQ ID NO: 143941 - DNA, 50 bp, Artificial
  Synthetic oligonucleotide
aggcggaaggtgcgacgaatcggaccgaggtttacggcacgtggggcgtt

SEQ ID NO: 143942 - DNA, 50 bp, Artificial
  Synthetic oligonucleotide
aggcattcgatgtgtgtcggccccacctgtttcgccgtccgtgcgcccaa

SEQ ID NO: 143943 - DNA, 50 bp, Artificial
  Synthetic oligonucleotide
aggcagaggccgttaatcggtacgtgttgattgcccatttgggtgcggcg

SEQ ID NO: 143944 - DNA, 50 bp, Artificial
  Synthetic oligonucleotide
aggagtgttacgctccggggtaggtgaggtaacagaaccgccctcgggaa

SEQ ID NO: 143945 - DNA, 50 bp, Artificial
  Synthetic oligonucleotide
aggaggaagcgagcatgaacacagacccctggggaggcccgtcctcatgg

SEQ ID NO: 143946 - DNA, 50 bp, Artificial
  Synthetic oligonucleotide
aggagcagaccccttgctatcggggttttccgtgcaggaccgggggtgag

SEQ ID NO: 143947 - DNA, 50 bp, Artificial
  Synthetic oligonucleotide
aggacacctagcggccagtcacagtggacgtgcccaacagctgaatcacg

SEQ ID NO: 143948 - DNA, 50 bp, Artificial
  Synthetic oligonucleotide
agcttccccacgttgccggtgtgcgctatcttggcgtagccgatttcgtt

SEQ ID NO: 143949 - DNA, 50 bp, Artificial
  Synthetic oligonucleotide
agcgttgtatgcttcgcgtggaactaccagcacgtggccgggacgcacag

SEQ ID NO: 143950 - DNA, 55 bp, Artificial
  Synthetic oligonucleotide
cgggcacactcaatctgagaactggctcataattcgagaaagatccttgaataac

SEQ ID NO: 143951 - DNA, 50 bp, Artificial
  Synthetic oligonucleotide
agcggggtagcggggtggaagccgctccatggaagtcgttatggtgtccc

SEQ ID NO: 143952 - DNA, 50 bp, Artificial
  Synthetic oligonucleotide
cttcgagtatcccatcaacacagtgcaagtcttctgatgcgctccctttc

SEQ ID NO: 143953 - DNA, 50 bp, Artificial
  Synthetic oligonucleotide
ccgcgcgcgttctgcctaaactatctcccgtcttcggacgccagttcgac

SEQ ID NO: 143954 - DNA, 50 bp, Artificial
  Synthetic oligonucleotide
cccggggtcgcgaatatccgctaagcaagcggcacacaaggacacatccg

SEQ ID NO: 143955 - DNA, 50 bp, Artificial
  Synthetic oligonucleotide
cccgcatgtgttcttggccgcgactagcgcaggtgccgagtcggaactat

SEQ ID NO: 143956 - DNA, 50 bp, Artificial
  Synthetic oligonucleotide
ccaatcgcccatgtgaccccactggcggtcagaactagccccgcgtgggt

SEQ ID NO: 143957 - DNA, 50 bp, Artificial
  Synthetic oligonucleotide
cattgcagatcgattaatatatgaggggtagtgcagtgcgtgtgctaaga

SEQ ID NO: 143958 - DNA, 50 bp, Artificial
  Synthetic oligonucleotide
cagtgctgtccaccaggcgcctcgcaggatagagccggaactttgtgcct

SEQ ID NO: 143959 - DNA, 50 bp, Artificial
  Synthetic oligonucleotide
caccgaccttgaatccaggagccaatcgcccatgtgaccccactggcggt

SEQ ID NO: 143960 - DNA, 50 bp, Artificial
  Synthetic oligonucleotide
caacgcccgaaagacgaggcgcgagcatccgaagtcgttgtgcatgggtt

SEQ ID NO: 143961 - DNA, 55 bp, Artificial
  Synthetic oligonucleotide
cgggcgtggatgtgactgcgattcggcgtattttgggtacgaagcgccgtaataa

SEQ ID NO: 143962 - DNA, 50 bp, Artificial
  Synthetic oligonucleotide
attttccggggtgtcaacatcgtgaccgtaagctgcggcaatccagcgga

SEQ ID NO: 143963 - DNA, 50 bp, Artificial
  Synthetic oligonucleotide
attgccaccaggaatgggagtgccgtggacgttaccctctgagtctagaa

SEQ ID NO: 143964 - DNA, 50 bp, Artificial
  Synthetic oligonucleotide
atggccttcgcgggatctgatgccatcatcctggagagtaacggccgctt

SEQ ID NO: 143965 - DNA, 50 bp, Artificial
  Synthetic oligonucleotide
atggcctccgtgtgacaaccggtagtgggcaaagacgccccacagcgctc

SEQ ID NO: 143966 - DNA, 50 bp, Artificial
  Synthetic oligonucleotide
atggcactgtgggtggaacgtcgtggcttggcacgtatgcagactcgtcc

SEQ ID NO: 143967 - DNA, 50 bp, Artificial
  Synthetic oligonucleotide
atgcgcaccaccgaagacgaatcccagattgactccgccaccgaagcagg

SEQ ID NO: 143968 - DNA, 50 bp, Artificial
  Synthetic oligonucleotide
atgccaaggcggcggtttgtcccgttaaagcagtttcggctcggctgaat

SEQ ID NO: 143969 - DNA, 50 bp, Artificial
  Synthetic oligonucleotide
atgacgcggaggaccagtgcgtaaggccacgatcggagccctgacagcag

SEQ ID NO: 143970 - DNA, 50 bp, Artificial
  Synthetic oligonucleotide
atctgagggcggcacccgtccttaccgcgtacacttccgtgacccatcct

SEQ ID NO: 143971 - DNA, 50 bp, Artificial
  Synthetic oligonucleotide
atcggtagggcgcgtcatcgagacctccggacgggatgtggaccgtgtca

SEQ ID NO: 143972 - DNA, 53 bp, Artificial
  Synthetic oligonucleotide
cggggacaaaactagccccaagctcgcgtttccgcgaacaatccgcgttagta

SEQ ID NO: 143973 - DNA, 50 bp, Artificial
  Synthetic oligonucleotide
atcgctaccccttcgcctcggtggctaccccaagaacctgcattctgggg

SEQ ID NO: 143974 - DNA, 50 bp, Artificial
  Synthetic oligonucleotide
atcgactccatcaagcaccccggccgctaacacgagtgccccgccacccg

SEQ ID NO: 143975 - DNA, 50 bp, Artificial
  Synthetic oligonucleotide
cggagccatgaaggcacaggcagtacgggatttggcgagagaacgccacc

SEQ ID NO: 143976 - DNA, 50 bp, Artificial
  Synthetic oligonucleotide
atccccaccgctgcaacttcttgtacctgaggcatggacgcaatcgcggt

SEQ ID NO: 143977 - DNA, 50 bp, Artificial
  Synthetic oligonucleotide
cggcggagccagcaaccagattgacacaagctctgacgccaagcccaaca

SEQ ID NO: 143978 - DNA, 50 bp, Artificial
  Synthetic oligonucleotide
agaacggcaccacaccccaatagcggggcagggctcattagaaccgaacg

SEQ ID NO: 143979 - DNA, 50 bp, Artificial
  Synthetic oligonucleotide
actgttcaggacctgaagcgacggccccaaccccagcgtccccgcccgaa

SEQ ID NO: 143980 - DNA, 50 bp, Artificial
  Synthetic oligonucleotide
actgcatgaccacgtagggttggcccgattcggccacattggcgtcgtgt

SEQ ID NO: 143981 - DNA, 50 bp, Artificial
  Synthetic oligonucleotide
actgaccaccgatgcgacgtcgtgccatgcagatgaccatgggggcggtc

SEQ ID NO: 143982 - DNA, 50 bp, Artificial
  Synthetic oligonucleotide
gccctacttacctaccgaaatttcctcagttgtgcgcaggtacttagcga

SEQ ID NO: 143983 - DNA, 55 bp, Artificial
  Synthetic oligonucleotide
cgtagctgaaatttctcgtgcgccggaagcccgttggaggagcgaacaagccgcg

SEQ ID NO: 143984 - DNA, 50 bp, Artificial
  Synthetic oligonucleotide
actcgtgctcccgctcccgtgggacggaagaaagtgctcaccccgtctcc

SEQ ID NO: 143985 - DNA, 50 bp, Artificial
  Synthetic oligonucleotide
actcgtcgtccgtggtgcctatgtatcccaactcgcctccggcagtggcg

SEQ ID NO: 143986 - DNA, 50 bp, Artificial
  Synthetic oligonucleotide
actcgcgggtgtcgatgcgggctgagacgcgtcgtttgttggggcttccc

SEQ ID NO: 143987 - DNA, 50 bp, Artificial
  Synthetic oligonucleotide
actcgataagctcacccgggctccctggagggtgcggtgtttgtgggact

SEQ ID NO: 143988 - DNA, 50 bp, Artificial
  Synthetic oligonucleotide
actcctggcagccgctccaaacccgatcctatgcatccgcaaccaacaga

SEQ ID NO: 143989 - DNA, 50 bp, Artificial
  Synthetic oligonucleotide
actccgcagactggggtgcgcagaagcctgcaggacgtgaaagcctgggc

SEQ ID NO: 143990 - DNA, 50 bp, Artificial
  Synthetic oligonucleotide
actcccgtatcgactccatcaagcaccccggccgctaacacgagtgcccc

SEQ ID NO: 143991 - DNA, 50 bp, Artificial
  Synthetic oligonucleotide
gcgcatactgcgttgccaaaagacccacgactgcggaagggttatgtatc

SEQ ID NO: 143992 - DNA, 50 bp, Artificial
  Synthetic oligonucleotide
actccccggttcgcgcacctctaaacgcaacgtacgcaaaatggacgcga

SEQ ID NO: 143993 - DNA, 50 bp, Artificial
  Synthetic oligonucleotide
actactcctcgtaaccgcgaacggagacgcggacctcagcacagacggcg

SEQ ID NO: 143994 - DNA, 60 bp, Artificial
  Synthetic oligonucleotide
tcgttcggacgccgtgcacttacatggtcgaaagggctcagagattgggcaaatctcggc

SEQ ID NO: 143995 - DNA, 55 bp, Artificial
  Synthetic oligonucleotide
agtatctataccttgcatgtattttgggtctcggtcactacgctaggtcagttac

SEQ ID NO: 143996 - DNA, 50 bp, Artificial
  Synthetic oligonucleotide
acgtggacttttgtgacggggcgtagccccttcgaggacccaatcggtga

SEQ ID NO: 143997 - DNA, 50 bp, Artificial
  Synthetic oligonucleotide
acgtgacggtgccatgcccctagcctaccgattcatcgccccggagcgag

SEQ ID NO: 143998 - DNA, 50 bp, Artificial
  Synthetic oligonucleotide
acgtagccgtgcagacgaggttcgcgcccaccctgtggtgcgtaccctcc

SEQ ID NO: 143999 - DNA, 50 bp, Artificial
  Synthetic oligonucleotide
acgtacggcgttgatcgtgacatgttctgcgcccttcggcggatcccaca

SEQ ID NO: 144000 - DNA, 50 bp, Artificial
  Synthetic oligonucleotide
acggggcgggaactaccactgtcgcttgtcgtcgaggcacttccagccga

SEQ ID NO: 144001 - DNA, 50 bp, Artificial
  Synthetic oligonucleotide
acgggctcccccaacgacgcatcgtgagccgtacgcgccaaaaccgcacg

SEQ ID NO: 144002 - DNA, 50 bp, Artificial
  Synthetic oligonucleotide
acggctccgtctcgtttggcgagtcgcgctccggtggtggagagtaccag

SEQ ID NO: 144003 - DNA, 50 bp, Artificial
  Synthetic oligonucleotide
acggcacgtggggcgttaatcccggtgcgttgagccagcgtgttgaaatc

SEQ ID NO: 144004 - DNA, 50 bp, Artificial
  Synthetic oligonucleotide
acgcggggtagacgtccacaccattcgccaacccgtaggcgttgttgcag

SEQ ID NO: 144005 - DNA, 50 bp, Artificial
  Synthetic oligonucleotide
agcgcgccggatattgaaccacagtagccattactcgtcctccgccggtt

SEQ ID NO: 144006 - DNA, 55 bp, Artificial
  Synthetic oligonucleotide
cgggtcacccgggaatctcctggactttacagttccgagcacgcatcgatggagc

SEQ ID NO: 144007 - DNA, 50 bp, Artificial
  Synthetic oligonucleotide
agcgccacaacgaacagtgggtcaatggcgatccgttgccagagcacaca

SEQ ID NO: 144008 - DNA, 50 bp, Artificial
  Synthetic oligonucleotide
agcgcacccggaactgttggccccatccaacgaagtgagagtggtcctag

SEQ ID NO: 144009 - DNA, 50 bp, Artificial
  Synthetic oligonucleotide
agcgcacccagtcgtccgaagtgggggttaagtcttcgtcctgcaagccc

SEQ ID NO: 144010 - DNA, 50 bp, Artificial
  Synthetic oligonucleotide
agcgatcatcgggtcaaggcgttcgttgccctccccaacggaacccgtat

SEQ ID NO: 144011 - DNA, 50 bp, Artificial
  Synthetic oligonucleotide
agccttgcgcgtacagagtctgacgaacataggcaaccacctgtgcccga

SEQ ID NO: 144012 - DNA, 50 bp, Artificial
  Synthetic oligonucleotide
agcctgcgaggttccaaagccacttggcgcacccatgtaaagccacacca

SEQ ID NO: 144013 - DNA, 50 bp, Artificial
  Synthetic oligonucleotide
agccgtacgcgccaaaaccgcacgcaacccagcccaatctgtattcttcg

SEQ ID NO: 144014 - DNA, 50 bp, Artificial
  Synthetic oligonucleotide
agccgctgagccggtaggccactggtagtgcaggcgccctggacggggtg

SEQ ID NO: 144015 - DNA, 50 bp, Artificial
  Synthetic oligonucleotide
agccctggcgtgttcgtcatgtgatcgttatcgtcccctgtggcggttcc

SEQ ID NO: 144016 - DNA, 50 bp, Artificial
  Synthetic oligonucleotide
agccatgagccgtcccgctaatgacacttccacggggccactggtaactc

SEQ ID NO: 144017 - DNA, 55 bp, Artificial
  Synthetic oligonucleotide
cggtcgagtcagatgattccaacgcggcgtttagtgatgcggaaggggagtggca

SEQ ID NO: 144018 - DNA, 50 bp, Artificial
  Synthetic oligonucleotide
agcagtgctcactcgtgctcccgctcccgtgggacggaagaaagtgctca

SEQ ID NO: 144019 - DNA, 50 bp, Artificial
  Synthetic oligonucleotide
agcaggtttgcccgtaacaccgtcgacctactcaccactgtgcgagccat

SEQ ID NO: 144020 - DNA, 50 bp, Artificial
  Synthetic oligonucleotide
agcagggtcctacgcgtgcgattggcgtcccgggtaccgggcttgctatt

SEQ ID NO: 144021 - DNA, 50 bp, Artificial
  Synthetic oligonucleotide
agatcgccctagaaacacgccactccctacgcaccaccctgcgagccttc

SEQ ID NO: 144022 - DNA, 50 bp, Artificial
  Synthetic oligonucleotide
agagcagatcgttcgcccgaagcgaggctaatagtggcaggcgcacaacg

SEQ ID NO: 144023 - DNA, 50 bp, Artificial
  Synthetic oligonucleotide
agacgtcagtgagcaagtagaccccgggtgctgcgggggtaggaccaacg

SEQ ID NO: 144024 - DNA, 50 bp, Artificial
  Synthetic oligonucleotide
agacgcagtgcctgctagcgccgcgatgcctatgactacggtcccccagc

SEQ ID NO: 144025 - DNA, 50 bp, Artificial
  Synthetic oligonucleotide
agaccgcctgctgatggcgttaaccggtcaagggatccgcgaaaccatta

SEQ ID NO: 144026 - DNA, 50 bp, Artificial
  Synthetic oligonucleotide
gcatctggcccaccggtctgtgagcgccgtattcacagctgtctcctgac

SEQ ID NO: 144027 - DNA, 50 bp, Artificial
  Synthetic oligonucleotide
agaatcgcccgggattgtgacacgcacctcgctacagcgccacgagcacc

SEQ ID NO: 144028 - DNA, 55 bp, Artificial
  Synthetic oligonucleotide
cggtcagttctcatggcagttgtcctctcggtttgcaccataagtcggccgagcc

SEQ ID NO: 144029 - DNA, 50 bp, Artificial
  Synthetic oligonucleotide
agaaggtgcgtttgtggaggcacagggcactcaggtggcgtttttagcgg

SEQ ID NO: 144030 - DNA, 50 bp, Artificial
  Synthetic oligonucleotide
agaagggagtgtgggacgtaccgcagtggaagcgagtctgcgagcaacca

SEQ ID NO: 144031 - DNA, 55 bp, Artificial
  Synthetic oligonucleotide
gagtcccggaaaccctcggagaatgggaggccctagtctacattcgctaactcca

SEQ ID NO: 144032 - DNA, 55 bp, Artificial
  Synthetic oligonucleotide
gagcggaaatccttcgctcgaggcagttattgcgcgacggcaatgccatacgggg

SEQ ID NO: 144033 - DNA, 55 bp, Artificial
  Synthetic oligonucleotide
gagacaagcgaagccaaatcccttcgaaccggagggaaggacgctcagcgaccca

SEQ ID NO: 144034 - DNA, 55 bp, Artificial
  Synthetic oligonucleotide
gacctatggccaggtcttcgcgatcttaacggtcgcaggcctgggagcctcagca

SEQ ID NO: 144035 - DNA, 55 bp, Artificial
  Synthetic oligonucleotide
gacataatagggtagctgaaactggtttgcctggtgtggtggatccgctcccaca

SEQ ID NO: 144036 - DNA, 55 bp, Artificial
  Synthetic oligonucleotide
gacactgctctcgcgtaatgacgagggactgcacaacctcatgcgcctggactcc

SEQ ID NO: 144037 - DNA, 58 bp, Artificial
  Synthetic oligonucleotide
ggaacttcttgaattcgagaaggtcaatcttgccgtattgccgcgcaacggaggcgga

SEQ ID NO: 144038 - DNA, 55 bp, Artificial
  Synthetic oligonucleotide
gaatgcgtctcatgaatccttacgctatgactaccaggtaacctgtgccgagttg

SEQ ID NO: 144039 - DNA, 55 bp, Artificial
  Synthetic oligonucleotide
gaagagtccgacgtgtatgcggcatcgttcgtgcagcttgagcaatgatgaacgc

SEQ ID NO: 144040 - DNA, 55 bp, Artificial
  Synthetic oligonucleotide
gaaatcccgtccaaatgtgccagagggaaccgaaagggccactgccagcgagacg

SEQ ID NO: 144041 - DNA, 54 bp, Artificial
  Synthetic oligonucleotide
ctttcgggacaatcgtcgggaataaaggccaactcgtgaatggcgtagcgtccc

SEQ ID NO: 144042 - DNA, 55 bp, Artificial
  Synthetic oligonucleotide
cttctcggtggacataagctgctccttaggctgacttacgtagcctaccccatcg

SEQ ID NO: 144043 - DNA, 55 bp, Artificial
  Synthetic oligonucleotide
cttcgtgaagggaatcgtgcccaccgacggcctcatgtgccagtagggacgtgac

SEQ ID NO: 144044 - DNA, 54 bp, Artificial
  Synthetic oligonucleotide
cttcgggcttggacggcactaagccggagggtgacgtggtaggactgcggttac

SEQ ID NO: 144045 - DNA, 55 bp, Artificial
  Synthetic oligonucleotide
ctccattggacctcctcgaccctccattggaccgtcttgtcggacgcttccctcc

SEQ ID NO: 144046 - DNA, 55 bp, Artificial
  Synthetic oligonucleotide
agctctgtctgtcgtgttccgtgtacgcgaaggagtggctcgcccttaggggagc

SEQ ID NO: 144047 - DNA, 55 bp, Artificial
  Synthetic oligonucleotide
ctcagtgactagccacaactattcaccaagtgtatagctttacggcatcggttac

SEQ ID NO: 144048 - DNA, 55 bp, Artificial
  Synthetic oligonucleotide
gaaaatcgagtgaagtcgtcaaaccatactttaagtagaggtcgagaagtccgtg

SEQ ID NO: 144049 - DNA, 55 bp, Artificial
  Synthetic oligonucleotide
ctcacgtgacaccttcctagatactgcccctagtttacgggcagacgcccacact

SEQ ID NO: 144050 - DNA, 55 bp, Artificial
  Synthetic oligonucleotide
ctcacaatgggcgacggatgcgtaaagtaggcggaatttcgcttctattaaccgt

SEQ ID NO: 144051 - DNA, 55 bp, Artificial
  Synthetic oligonucleotide
ctaaatcgaaggtgtaatacgcaggactgacaatcccgtcatacagcgacactcc

SEQ ID NO: 144052 - DNA, 55 bp, Artificial
  Synthetic oligonucleotide
cgttttggcttgcagacggttgatttctgcggtgagggtagccgggagcggacgg

SEQ ID NO: 144053 - DNA, 55 bp, Artificial
  Synthetic oligonucleotide
cgttgatggttccgcatggttagaagcaatcagccaagtcactatcgctgcgtcg

SEQ ID NO: 144054 - DNA, 55 bp, Artificial
  Synthetic oligonucleotide
cgttcccggcagacatacgaagtcccctgcaagcgtgcagattttgcgagcgacc

SEQ ID NO: 144055 - DNA, 55 bp, Artificial
  Synthetic oligonucleotide
aggggatccctagtattgcggttatcccaccacgatttctttcgagcattctcct

SEQ ID NO: 144056 - DNA, 55 bp, Artificial
  Synthetic oligonucleotide
cgtgtactcaggtttcccaatcctgtacgtactctctgcagcactgaacccaaac

SEQ ID NO: 144057 - DNA, 55 bp, Artificial
  Synthetic oligonucleotide
cgaaattgaagtctcgtaaattgcacgtcatcagaagattgcctcaatccaagtg

SEQ ID NO: 144058 - DNA, 55 bp, Artificial
  Synthetic oligonucleotide
cctgtcactggcttacaagccccagatgacgtgcctaaacgccaaggagaggcga

SEQ ID NO: 144059 - DNA, 58 bp, Artificial
  Synthetic oligonucleotide
tgagttcccgtcctgacttaaattgttggcgtggtgcagcctcgtactggtctgtccc

SEQ ID NO: 144060 - DNA, 55 bp, Artificial
  Synthetic oligonucleotide
cctgggtggtttattgcgtctttgtgtatcgataacgtatcatgaagatatgaag

SEQ ID NO: 144061 - DNA, 55 bp, Artificial
  Synthetic oligonucleotide
catctgccaagtcatgacgcgcccgcgtatcaatgactaacagttccatccccgc

SEQ ID NO: 144062 - DNA, 55 bp, Artificial
  Synthetic oligonucleotide
catggggttggccgcaagttattgacggtctggctgtgtgttaagcgtcaggccg

SEQ ID NO: 144063 - DNA, 55 bp, Artificial
  Synthetic oligonucleotide
ccaagagccggcggataaagcgttagactgggaacgtgaagcaaccagttattgt

SEQ ID NO: 144064 - DNA, 55 bp, Artificial
  Synthetic oligonucleotide
cctaggaaactacactacctgctattctgcaagcgactagtcttcagcataccct

SEQ ID NO: 144065 - DNA, 55 bp, Artificial
  Synthetic oligonucleotide
ccagtcgttacaacactaccagcccgaggcgcattcccagacaccgacccacatc

SEQ ID NO: 144066 - DNA, 55 bp, Artificial
  Synthetic oligonucleotide
ccagttagatgctattcgtgactctactttggaagtccaacgtcataagcgcagt

SEQ ID NO: 144067 - DNA, 55 bp, Artificial
  Synthetic oligonucleotide
cccaagagtcttgccatacgcacgatttcaaagttagcgcaactcctgtgccatc

SEQ ID NO: 144068 - DNA, 55 bp, Artificial
  Synthetic oligonucleotide
cccaatcgtcaacaaccttgttggcaaggtgattaacccgactatcggagggctg

SEQ ID NO: 144069 - DNA, 55 bp, Artificial
  Synthetic oligonucleotide
cccaggtgcgcagtaaataagccgcatcacgtaagacgaacgcgcaatagcgaga

SEQ ID NO: 144070 - DNA, 54 bp, Artificial
  Synthetic oligonucleotide
ccgtggaaaagtcgcggcgcctctactgcgaaagtaggtatttatcgatgtttt

SEQ ID NO: 144071 - DNA, 55 bp, Artificial
  Synthetic oligonucleotide
ccccacgtaaggcagtcgcttagacggctgtagattcgtgatttctgctacgcga

SEQ ID NO: 144072 - DNA, 55 bp, Artificial
  Synthetic oligonucleotide
cccctgccacttcgacgggcggtcaaatgtacgattttcgaggtctcgcctccca

SEQ ID NO: 144073 - DNA, 55 bp, Artificial
  Synthetic oligonucleotide
cccgatccgctaagacgtaggcttcggcagggccacctacccacacgtcaaactc

SEQ ID NO: 144074 - DNA, 55 bp, Artificial
  Synthetic oligonucleotide
cccgatcctgcccctcttttgtgtgactcgcagcacttacggggagtgtgtcgca

SEQ ID NO: 144075 - DNA, 55 bp, Artificial
  Synthetic oligonucleotide
cccgcactcctcttgacgttgctatatttcgtgtttgtcgatgttcaagtgcccc

SEQ ID NO: 144076 - DNA, 55 bp, Artificial
  Synthetic oligonucleotide
ccgtcaaaacgatcaatgaactttaagtcaccgtagcgaatcatgcgtcctcccc

SEQ ID NO: 144077 - DNA, 55 bp, Artificial
  Synthetic oligonucleotide
cccgctggtgtgcgtcccggagtccgccgagactagctaaccattgcagttgaga

SEQ ID NO: 144078 - DNA, 55 bp, Artificial
  Synthetic oligonucleotide
ccggccgcacttacccacaggggtacgtgagctgtccacaggaaggaaggttgtg

SEQ ID NO: 144079 - DNA, 54 bp, Artificial
  Synthetic oligonucleotide
cccggtggtcatcaactatccaggaccgacttttgacgtactgggtaaggattc

SEQ ID NO: 144080 - DNA, 55 bp, Artificial
  Synthetic oligonucleotide
cccgtgccgctagagtatgccgggtgaatagctcagatccctacggccgcaacat

SEQ ID NO: 144081 - DNA, 59 bp, Artificial
  Synthetic oligonucleotide
ggtgctggcgctcccgggggcacttgaacatcgacaaacacgaaatatagcaacgtcaa

SEQ ID NO: 144082 - DNA, 54 bp, Artificial
  Synthetic oligonucleotide
cccgtggaactcaccaacggggaacgcatagaaattacgcaaagtatccgggca

SEQ ID NO: 144083 - DNA, 55 bp, Artificial
  Synthetic oligonucleotide
ccgagtggacgttatctgttcacgagcccggtctaggcggctagccccgtcacgc

SEQ ID NO: 144084 - DNA, 55 bp, Artificial
  Synthetic oligonucleotide
ccgcgagtgctctgtccctggattactcggcgtttgttcgcagacgccaaggctc

SEQ ID NO: 144085 - DNA, 55 bp, Artificial
  Synthetic oligonucleotide
ccgctatagttgaggtttgcgccgcagaagagcatcgatatgctgtaaatagtag

SEQ ID NO: 144086 - DNA, 55 bp, Artificial
  Synthetic oligonucleotide
cggcgtgtttatttccggtatgacttgtattcctagttcactcgcccactgcagc

SEQ ID NO: 144087 - DNA, 55 bp, Artificial
  Synthetic oligonucleotide
cgcttagcttgaagactactagcgagtatcgatcggcacaagcatgactaagggt

SEQ ID NO: 144088 - DNA, 55 bp, Artificial
  Synthetic oligonucleotide
cgctgtgagatacgtggactggcgcttcgttggagcaaacgcaacctttacacaa

SEQ ID NO: 144089 - DNA, 55 bp, Artificial
  Synthetic oligonucleotide
cgctgcaggcactcatcgtgtctgaatatcgtcgcgcgttgttcgctgacggtgg

SEQ ID NO: 144090 - DNA, 55 bp, Artificial
  Synthetic oligonucleotide
atctcgccgttctgagagatacgaactcagagacggattagccgaaatctcgacc

SEQ ID NO: 144091 - DNA, 52 bp, Artificial
  Synthetic oligonucleotide
cgctacgggcaaagtaaatctagaatttaccgaaacgtctacaatcccttat

SEQ ID NO: 144092 - DNA, 55 bp, Artificial
  Synthetic oligonucleotide
caccgcgagcacagaacgccacatggttactcagactagtcatcgcaccgtctgg

SEQ ID NO: 144093 - DNA, 53 bp, Artificial
  Synthetic oligonucleotide
accccggatggtaaccgggcactccccgtcacccgctcagggcagaatcgtgg

SEQ ID NO: 144094 - DNA, 55 bp, Artificial
  Synthetic oligonucleotide
cgggtagttcgtcatctcccgtgccactgctcctcgctgcttacggggagaatac

SEQ ID NO: 144095 - DNA, 55 bp, Artificial
  Synthetic oligonucleotide
gccactagccgtatcgaggcttttcgaccaagcgttatccacgtgatcaccgctc

SEQ ID NO: 144096 - DNA, 55 bp, Artificial
  Synthetic oligonucleotide
ggtgactacgctccgccactcaagtaggtggtaaccgagagctccactgggtaaa

SEQ ID NO: 144097 - DNA, 55 bp, Artificial
  Synthetic oligonucleotide
ttgtcactcatctacgcgcaccctaccaaccggtggtcccaggtctgcacacggg

SEQ ID NO: 144098 - DNA, 55 bp, Artificial
  Synthetic oligonucleotide
ttggccatgtccgcagcctagcgggtgtctatacacccagtcgagtgaagttccc

SEQ ID NO: 144099 - DNA, 55 bp, Artificial
  Synthetic oligonucleotide
gtggcgtagttacagatgtcgagggcaacacacgctatgcgagcacacacggagg

SEQ ID NO: 144100 - DNA, 55 bp, Artificial
  Synthetic oligonucleotide
tacacaatggtccgattagggttaaaacgtgtcacagccggatgttcgacgcacg

SEQ ID NO: 144101 - DNA, 55 bp, Artificial
  Synthetic oligonucleotide
tccatcgtcgcacggactcgcggtgttgcggattacggcgaccggagggacttgc

SEQ ID NO: 144102 - DNA, 55 bp, Artificial
  Synthetic oligonucleotide
tctgaacaggcccaagcctcgcagaaaccgccgggaggagccctacgtcaacttt

SEQ ID NO: 144103 - DNA, 55 bp, Artificial
  Synthetic oligonucleotide
cagtccgactcctgcgaagtgtgtcaccgtcttaaccgcgcaacccaccgggttg

SEQ ID NO: 144104 - DNA, 55 bp, Artificial
  Synthetic oligonucleotide
tggtccgtgagtacgtgccgaatcagcatgggaaccccgagtagcgctgactccc

SEQ ID NO: 144105 - DNA, 55 bp, Artificial
  Synthetic oligonucleotide
aacgtcgcacgagggttcatcctgccattcggtgtggtctgccaagacccggtcg

SEQ ID NO: 144106 - DNA, 55 bp, Artificial
  Synthetic oligonucleotide
ttcgctccgatgccactccccaaccccggcggtcactcttagcatcagggtgact

SEQ ID NO: 144107 - DNA, 54 bp, Artificial
  Synthetic oligonucleotide
cacggtctgacaaagtttggcggggtgcgctgcgtagtcggcgtcatcctgtgg

SEQ ID NO: 144108 - DNA, 54 bp, Artificial
  Synthetic oligonucleotide
tgtgagtcgcttccgggcttctgtgagcaactgaggtgcgtccttgatgcactc

SEQ ID NO: 144109 - DNA, 52 bp, Artificial
  Synthetic oligonucleotide
ccccgggtgagaccgaaggtggcagggcctggtccgctgaacgaggttcccc

SEQ ID NO: 144110 - DNA, 53 bp, Artificial
  Synthetic oligonucleotide
gtcgaacgaggtgaactctaccgcacgttcccacgaactcggaaatcggtatc

SEQ ID NO: 144111 - DNA, 53 bp, Artificial
  Synthetic oligonucleotide
gcccgctgtccactactgacacgcaaccgacctacctaccggctctcacagga

SEQ ID NO: 144112 - DNA, 53 bp, Artificial
  Synthetic oligonucleotide
atcagtgctcccggactggcggcctgcgctgtggaacagctccgatccagtat

SEQ ID NO: 144113 - DNA, 52 bp, Artificial
  Synthetic oligonucleotide
ttcctcgcagagtgaggtaagcgctttccgcaacagtgatcgttgggtgcgg

SEQ ID NO: 144114 - DNA, 55 bp, Artificial
  Synthetic oligonucleotide
ccacttccgcagtactccgaacgggtgaggtttgttcatggcacgagcattggtg

SEQ ID NO: 144115 - DNA, 52 bp, Artificial
  Synthetic oligonucleotide
gagttccgactgcagtccgcgaccttggaagacgtgtacctggaccatgtcc

SEQ ID NO: 144116 - DNA, 50 bp, Artificial
  Synthetic oligonucleotide
agtcgtacacgccgatcaacccgtggtgtgacgcgttctcagctccgacc

SEQ ID NO: 144117 - DNA, 50 bp, Artificial
  Synthetic oligonucleotide
aggctatcccctcggggattccggttcggacactggacccaccacgctac

SEQ ID NO: 144118 - DNA, 50 bp, Artificial
  Synthetic oligonucleotide
aggcgtcgtcgtgtgcatacctgagcacctatagtggctgagcggccgag

SEQ ID NO: 144119 - DNA, 50 bp, Artificial
  Synthetic oligonucleotide
aaagtagcgagggacggggctatgggcactgcggaagtggaattagccga

SEQ ID NO: 144120 - DNA, 50 bp, Artificial
  Synthetic oligonucleotide
aaccaagggtgagtggaccgttcgctaacggtgagggccgaggctccgct

SEQ ID NO: 144121 - DNA, 50 bp, Artificial
  Synthetic oligonucleotide
aacccggacgggtgggcaccattacgcaaccgagagggaaccggtgcact

SEQ ID NO: 144122 - DNA, 50 bp, Artificial
  Synthetic oligonucleotide
aaccgaggatgacacgcttaccgctctgacctgcgcttccgtggctgagg

SEQ ID NO: 144123 - DNA, 50 bp, Artificial
  Synthetic oligonucleotide
aacgccctgtcccggtgagggattccgagagctgccacatcgctgagggc

SEQ ID NO: 144124 - DNA, 50 bp, Artificial
  Synthetic oligonucleotide
aagtagcgcgtgagccctcaccagggttttccgcaaaactgcggtccact

SEQ ID NO: 144125 - DNA, 55 bp, Artificial
  Synthetic oligonucleotide
ccccacttcgcgaacaacacgtcctccctcggtacagtgcgttactgttgcgtga

SEQ ID NO: 144126 - DNA, 50 bp, Artificial
  Synthetic oligonucleotide
aagtggtcgggctgtggacaagcggttgggggaagagcggagaggtgcta

SEQ ID NO: 144127 - DNA, 50 bp, Artificial
  Synthetic oligonucleotide
acaacgttaacaccggccgttgactgctcctcacgggggattgctccgga

SEQ ID NO: 144128 - DNA, 50 bp, Artificial
  Synthetic oligonucleotide
acaccggccgttgactgctcctcacgggggattgctccggaatgaggatg

SEQ ID NO: 144129 - DNA, 50 bp, Artificial
  Synthetic oligonucleotide
acacctcaattgcgaccagcggtaagggtgggtgacctcgctcacacccg

SEQ ID NO: 144130 - DNA, 50 bp, Artificial
  Synthetic oligonucleotide
acacgcaacgttgtccaggcgcactccccctttggggtcgttttgctgac

SEQ ID NO: 144131 - DNA, 50 bp, Artificial
  Synthetic oligonucleotide
accatctccgaggggagtcagtgaccaccgcgtgctctcaggggcactcc

SEQ ID NO: 144132 - DNA, 50 bp, Artificial
  Synthetic oligonucleotide
accccatttgtccgttctcggctccggtcacgtaggttgcccgtcgtgca

SEQ ID NO: 144133 - DNA, 50 bp, Artificial
  Synthetic oligonucleotide
accccctcgtttcccgcagttccgcatgatgagaaccgggccgtgtggca

SEQ ID NO: 144134 - DNA, 50 bp, Artificial
  Synthetic oligonucleotide
acccggagggggtttgccatgccgaaagcattccgaaaccagggaatcga

SEQ ID NO: 144135 - DNA, 50 bp, Artificial
  Synthetic oligonucleotide
accctgcccgcattcgggtccgggcgcacatatgcgactacccacacttc

SEQ ID NO: 144136 - DNA, 55 bp, Artificial
  Synthetic oligonucleotide
cccctctccgtacggagcactgatcaagggcgctgatacatgtccggtaaccggg

SEQ ID NO: 144137 - DNA, 50 bp, Artificial
  Synthetic oligonucleotide
acgaaagctgcgcacgccacggacaaccagcgtctcatacgactagcccc

SEQ ID NO: 144138 - DNA, 50 bp, Artificial
  Synthetic oligonucleotide
acgaatcggttcgcacggttaccgggtgcatacccacgactaccctcggg

SEQ ID NO: 144139 - DNA, 50 bp, Artificial
  Synthetic oligonucleotide
acgcccgaccttcggttcaaggtctctccagggagttcgcgtgttcgagc

SEQ ID NO: 144140 - DNA, 50 bp, Artificial
  Synthetic oligonucleotide
acgcgtgcccgtgcacattctgcaacctacccgtatcacccgtccgtgag

SEQ ID NO: 144141 - DNA, 50 bp, Artificial
  Synthetic oligonucleotide
acggtggtgaatcggcgcttggtatcgggccccggtccgttggtaggggg

SEQ ID NO: 144142 - DNA, 50 bp, Artificial
  Synthetic oligonucleotide
actacgcgccggtatcgtacgcggccctgagaccagtgggcaaatggtcc

SEQ ID NO: 144143 - DNA, 50 bp, Artificial
  Synthetic oligonucleotide
actcggtgttacccgagtggacccgctcactccggtccgctaccgcaagt

SEQ ID NO: 144144 - DNA, 50 bp, Artificial
  Synthetic oligonucleotide
actcgttggagttaggacttccacagaggtgccgggtggacgtgagccga

SEQ ID NO: 144145 - DNA, 50 bp, Artificial
  Synthetic oligonucleotide
actggacccacggccattagggtgatcccgtgacctgcacgtttgcatgg

SEQ ID NO: 144146 - DNA, 50 bp, Artificial
  Synthetic oligonucleotide
agagagggaccaatgtccgggtttgcgcagctcaggtgtcctgtccgggc

SEQ ID NO: 144147 - DNA, 55 bp, Artificial
  Synthetic oligonucleotide
cccgactgcgagtgatcattcatacgatcgtcatatacaagcgtatagatcccgg

SEQ ID NO: 144148 - DNA, 50 bp, Artificial
  Synthetic oligonucleotide
agcacgtgaccaacccgtgctacgaagtccccagatcggacggccggtaa

SEQ ID NO: 144149 - DNA, 50 bp, Artificial
  Synthetic oligonucleotide
agcggaggacccccgacacatgagggcgtggagttagggcaggaacgtag

SEQ ID NO: 144150 - DNA, 50 bp, Artificial
  Synthetic oligonucleotide
aggacgggtgggacaggtcgctcaggtctgcgaaggccagcggacagtca

SEQ ID NO: 144151 - DNA, 50 bp, Artificial
  Synthetic oligonucleotide
aggccaaacggagaagagggaccccacccaccgcagtggtaaacgggacc

SEQ ID NO: 144152 - DNA, 55 bp, Artificial
  Synthetic oligonucleotide
cccgttaccagcggatacgtgagcacaggcgggacgaaccggacatgttcactcg

SEQ ID NO: 144153 - DNA, 55 bp, Artificial
  Synthetic oligonucleotide
cccgtttccattccgagatttgccgatatcaattaccgtcggtgagtcatgagtc

SEQ ID NO: 144154 - DNA, 51 bp, Artificial
  Synthetic oligonucleotide
ccgcaaacccttacgcaacctaatcggttgagccgaaggactttacgggtg

SEQ ID NO: 144155 - DNA, 58 bp, Artificial
  Synthetic oligonucleotide
agccccttatgccctatggagcttccgccacaggatacattctgccagctatgtcccg

SEQ ID NO: 144156 - DNA, 54 bp, Artificial
  Synthetic oligonucleotide
cttacgggaggctttgcggagttttggcggccaagatgtggtcattcgtttcgt

SEQ ID NO: 144157 - DNA, 51 bp, Artificial
  Synthetic oligonucleotide
ccgctaccgggttcgtgttcccgtcaaaagcagccccacccatagacatga

SEQ ID NO: 144158 - DNA, 51 bp, Artificial
  Synthetic oligonucleotide
agccgtgacttatcgcggtttgcggacctttcagaccgggtagcggacgat

SEQ ID NO: 144159 - DNA, 51 bp, Artificial
  Synthetic oligonucleotide
gttgcgaagccgtaacctccgagcagtagtcatacaccgggctatgcctgt

SEQ ID NO: 144160 - DNA, 51 bp, Artificial
  Synthetic oligonucleotide
ccggcgtccgcaaatttcccgcccgctacaagtgtgctgccttagcttgga

SEQ ID NO: 144161 - DNA, 51 bp, Artificial
  Synthetic oligonucleotide
agaccttgactgtgattgtcactggggcagcctctggaattggggcagccc

SEQ ID NO: 144162 - DNA, 51 bp, Artificial
  Synthetic oligonucleotide
actatcttagccggcgtccgcaaatttcccgcccgctacaagtgtgctgcc

SEQ ID NO: 144163 - DNA, 51 bp, Artificial
  Synthetic oligonucleotide
tagttctagggcatttaaggccgaccgcaagtccccaaaggctgcatgggc

SEQ ID NO: 144164 - DNA, 51 bp, Artificial
  Synthetic oligonucleotide
acgggtcctgcttaccaagccctggacctctataacggcctcgccttccgt

SEQ ID NO: 144165 - DNA, 51 bp, Artificial
  Synthetic oligonucleotide
tccggtggggttacagctgccagttgcggcacctttgcaatcagattccta

SEQ ID NO: 144166 - DNA, 51 bp, Artificial
  Synthetic oligonucleotide
aaccgcccaaatcacgtggacccaaactccgaccaacccctgcgacaagcc

SEQ ID NO: 144167 - DNA, 55 bp, Artificial
  Synthetic oligonucleotide
gaaatgaatcgacgcagggtccccaccgagttccccacagaccccaatcttgagc

SEQ ID NO: 144168 - DNA, 51 bp, Artificial
  Synthetic oligonucleotide
cgataaaggcgtgcttgtccataaagccggcaatccgacgacacccccgca

SEQ ID NO: 144169 - DNA, 51 bp, Artificial
  Synthetic oligonucleotide
cgactaggccgggtccttgggttactgcgacagcgtccacatcttcccagg

SEQ ID NO: 144170 - DNA, 51 bp, Artificial
  Synthetic oligonucleotide
gaccataccgccaccgtgggcttttagatggcgccagtcgcctggaatgcc

SEQ ID NO: 144171 - DNA, 51 bp, Artificial
  Synthetic oligonucleotide
cactcaaagagccacagcaaagacggtcccacggggctggtgccagctaat

SEQ ID NO: 144172 - DNA, 51 bp, Artificial
  Synthetic oligonucleotide
gaagtgcctacgagtgacgaaggttgcccgccccaccgcttttggaggacg

SEQ ID NO: 144173 - DNA, 51 bp, Artificial
  Synthetic oligonucleotide
gccagtcgcctggaatgccattagcgccatggacgcgtgattcaatctgga

SEQ ID NO: 144174 - DNA, 51 bp, Artificial
  Synthetic oligonucleotide
gcccgccccttcagtcccgattactgtgacaatatctgccccgtccgcttg

SEQ ID NO: 144175 - DNA, 51 bp, Artificial
  Synthetic oligonucleotide
ccccgtaaatggcgtgaaccacactgaggacaggtttgcggcacctgctct

SEQ ID NO: 144176 - DNA, 51 bp, Artificial
  Synthetic oligonucleotide
cccggtaacgggctgaacggtcgcaatccggactaagacatccttggcccc

SEQ ID NO: 144177 - DNA, 50 bp, Artificial
  Synthetic oligonucleotide
gatccaagccatcctcctccaaggactgggccggattttctggccggcgg

SEQ ID NO: 144178 - DNA, 55 bp, Artificial
  Synthetic oligonucleotide
gaaccctgtatctcgtgtttacccacgtgactatattgaaactgggttctcagcc

SEQ ID NO: 144179 - DNA, 50 bp, Artificial
  Synthetic oligonucleotide
accacgtcactccctggttcgtggggttaacggcaagtcctccggggccg

SEQ ID NO: 144180 - DNA, 50 bp, Artificial
  Synthetic oligonucleotide
cggccaaggcgaccctcagtgaacgccagggggttccccatcatttgtta

SEQ ID NO: 144181 - DNA, 50 bp, Artificial
  Synthetic oligonucleotide
tccctaccggccaattcacttggaccagggcttgcagacgggttatgtgc

SEQ ID NO: 144182 - DNA, 50 bp, Artificial
  Synthetic oligonucleotide
ggcagctcactcgccgccagcagccgtcctaaaagtaagtcttgcacgct

SEQ ID NO: 144183 - DNA, 50 bp, Artificial
  Synthetic oligonucleotide
acacggtgtgggggcttccgtcgttaacgcgctttcaaccaaactccggg

SEQ ID NO: 144184 - DNA, 50 bp, Artificial
  Synthetic oligonucleotide
aatggttgctggcgcaggtgccaccgtccaacaacaatttggtgtccccg

SEQ ID NO: 144185 - DNA, 50 bp, Artificial
  Synthetic oligonucleotide
tgatagttaaccgagcctgactgtgggcgccgtcgttcccccacctccat

SEQ ID NO: 144186 - DNA, 50 bp, Artificial
  Synthetic oligonucleotide
ccgtgggcttgccgggtggttgttccctcggtccccgtcctattgacctc

SEQ ID NO: 144187 - DNA, 50 bp, Artificial
  Synthetic oligonucleotide
cgcccacaaagagggccccttctacccaatgcatccagaaaggtgcaggg

SEQ ID NO: 144188 - DNA, 50 bp, Artificial
  Synthetic oligonucleotide
tgcccagccccctatgcctgccggtttaagcattactctggcttgcggac

SEQ ID NO: 144189 - DNA, 55 bp, Artificial
  Synthetic oligonucleotide
gaacgtagtcactatcgaatcggtgtaccatatgcaggtacttatcaagtggtct

SEQ ID NO: 144190 - DNA, 50 bp, Artificial
  Synthetic oligonucleotide
aagccctagaagcccgcgaagcagagagcaccaccggagtcggtcagcaa

SEQ ID NO: 144191 - DNA, 50 bp, Artificial
  Synthetic oligonucleotide
ccttgagaccagtcgcttgactgacgcgtttgccagtggtcccggtcgcc

SEQ ID NO: 144192 - DNA, 50 bp, Artificial
  Synthetic oligonucleotide
cgattcctatacggctagcgagcgcagcgtccactccctgtcaggaggcg

SEQ ID NO: 144193 - DNA, 50 bp, Artificial
  Synthetic oligonucleotide
caggtagagacggagcctgacgtccgggtagtggtgcttagggccaaggg

SEQ ID NO: 144194 - DNA, 50 bp, Artificial
  Synthetic oligonucleotide
cccgcgaagcagagagcaccaccggagtcggtcagcaattagccattccc

SEQ ID NO: 144195 - DNA, 50 bp, Artificial
  Synthetic oligonucleotide
agtacagcttgggagatggtatctggcatgatataacttcctccgagcct

SEQ ID NO: 144196 - DNA, 50 bp, Artificial
  Synthetic oligonucleotide
ctgcactgaggagtcccgcgactgggaagatgatccaggaccgaccccag

SEQ ID NO: 144197 - DNA, 50 bp, Artificial
  Synthetic oligonucleotide
gggttgctgaccctaggataacgggcgaatggtggtaagctgcccgccat

SEQ ID NO: 144198 - DNA, 50 bp, Artificial
  Synthetic oligonucleotide
aggctttcccctatgcagccgcaggtactcactacaccattcgtgggcga

SEQ ID NO: 144199 - DNA, 50 bp, Artificial
  Synthetic oligonucleotide
atggagcgaggcgcgttgcaccgtcgttcctgccagaaaaacaggatcca

SEQ ID NO: 144200 - DNA, 55 bp, Artificial
  Synthetic oligonucleotide
gacacgcaagctgctaggccgaacccgactcgatgtgaattaccggctagtaggc

SEQ ID NO: 144201 - DNA, 50 bp, Artificial
  Synthetic oligonucleotide
ggccgccattagtcggatcgtgccgggctccgttgataagaaggctgacg

SEQ ID NO: 144202 - DNA, 50 bp, Artificial
  Synthetic oligonucleotide
ccatggtgagaacctcaaccgtgcttgggcccgggtcagatgcagcagtt

SEQ ID NO: 144203 - DNA, 50 bp, Artificial
  Synthetic oligonucleotide
gttcaacaggccctcctccatcaaacggagccggtcgctgccagtccgga

SEQ ID NO: 144204 - DNA, 50 bp, Artificial
  Synthetic oligonucleotide
attgggcacaccaggaaccatccactgtgcgcgccgtccaaccgttacta

SEQ ID NO: 144205 - DNA, 50 bp, Artificial
  Synthetic oligonucleotide
ggcattcatccctaccggccaattcacttggaccagggcttgcagacggg

SEQ ID NO: 144206 - DNA, 50 bp, Artificial
  Synthetic oligonucleotide
agcccatgcaagtcatggtgaccgctggagccagtttcgtaggatcggga

SEQ ID NO: 144207 - DNA, 50 bp, Artificial
  Synthetic oligonucleotide
gttttccttatatcgaagaaatgtacggacttgtgcttacgggaggccct

SEQ ID NO: 144208 - DNA, 50 bp, Artificial
  Synthetic oligonucleotide
taaagacccggaggcggacagtctgggtattcacgctgggatcggtggtt

SEQ ID NO: 144209 - DNA, 50 bp, Artificial
  Synthetic oligonucleotide
gccaattcacttggaccagggcttgcagacgggttatgtgctccgcccct

SEQ ID NO: 144210 - DNA, 50 bp, Artificial
  Synthetic oligonucleotide
cggtgttgatacccggttaccgcaagccaaacgcggtgtgcccgattctc

SEQ ID NO: 144211 - DNA, 55 bp, Artificial
  Synthetic oligonucleotide
gaccagatctatttagatagtcacgaccaagtgatggcttattcggggcggaagt

SEQ ID NO: 144212 - DNA, 50 bp, Artificial
  Synthetic oligonucleotide
ccacagcagaagggtctccattagccttcccgctaaccactggtgcccct

SEQ ID NO: 144213 - DNA, 50 bp, Artificial
  Synthetic oligonucleotide
caaccgtgcttgggcccgggtcagatgcagcagttgttcgcatacgtggg

SEQ ID NO: 144214 - DNA, 55 bp, Artificial
  Synthetic oligonucleotide
gatacagacgcaaagcgagtgtatcattccggcgggtgggcaaggatagacacgc

SEQ ID NO: 144215 - DNA, 55 bp, Artificial
  Synthetic oligonucleotide
gcataggcccttgaagtggactagtaagtactttccgtccttctatattcgcaga

SEQ ID NO: 144216 - DNA, 55 bp, Artificial
  Synthetic oligonucleotide
gccaaggatggttggctgccaccttaatttcagttaaggctgacccattcggatc

SEQ ID NO: 144217 - DNA, 55 bp, Artificial
  Synthetic oligonucleotide
gcccctaaggtatagccaatcatccggtgaatggtagcagccggaagtcctgtcg

SEQ ID NO: 144218 - DNA, 57 bp, Artificial
  Synthetic oligonucleotide
agccgcctttagctcacatgatcccggagggcagcggacatcttgtacttccggcag

SEQ ID NO: 144219 - DNA, 55 bp, Artificial
  Synthetic oligonucleotide
ctggaactgctccctaggccacgtgtgatgggaatctgactgtgcatatataatt

SEQ ID NO: 144220 - DNA, 55 bp, Artificial
  Synthetic oligonucleotide
ctgacaaggggataccttgcgggacatgtaaccattgtcgtcggatattgtccgc

SEQ ID NO: 144221 - DNA, 52 bp, Artificial
  Synthetic oligonucleotide
ctccaattggaatgaaacctaagggagttgaccccaaaactatcgttaacgc

SEQ ID NO: 144222 - DNA, 55 bp, Artificial
  Synthetic oligonucleotide
ctcagggtatggctataggctatcaggaatccggaaccaacgatcctatagaaga

SEQ ID NO: 144223 - DNA, 55 bp, Artificial
  Synthetic oligonucleotide
cgtttgacattaaagcctctgtaaccgaatcgccatcctcactgtgaactatcgc

SEQ ID NO: 144224 - DNA, 55 bp, Artificial
  Synthetic oligonucleotide
cgttgccacaagctacggaacttttgccacaaagtgggatttgaatcatccgaat

SEQ ID NO: 144225 - DNA, 55 bp, Artificial
  Synthetic oligonucleotide
cgtgccattagtcgtagcaactgtgccattctatgcccgtcagattcaaaatgcc

SEQ ID NO: 144226 - DNA, 55 bp, Artificial
  Synthetic oligonucleotide
cggtggtgctgatgaggttagcggtaagcaggttggacctaaattccgtcctatt

SEQ ID NO: 144227 - DNA, 55 bp, Artificial
  Synthetic oligonucleotide
cggtaaagggtaggatccgagtttggtaggggccaaggtcatcaatactatgcgc

SEQ ID NO: 144228 - DNA, 55 bp, Artificial
  Synthetic oligonucleotide
cggaccactcatggttaccaaaccattctcaataacataagccctgtctgatgcc

SEQ ID NO: 144229 - DNA, 57 bp, Artificial
  Synthetic oligonucleotide
cacactgtctccctgcgagcaaaatacgtgcagagccgttgccacaccgccaagaac

SEQ ID NO: 144230 - DNA, 55 bp, Artificial
  Synthetic oligonucleotide
cggaaatggccaaatgcatattcggagcatataatcgaagtcgagacagtaaggt

SEQ ID NO: 144231 - DNA, 55 bp, Artificial
  Synthetic oligonucleotide
cgcacatagaatgcgaagtggacgtcagggctgacttttggagcacgttttgaat

SEQ ID NO: 144232 - DNA, 55 bp, Artificial
  Synthetic oligonucleotide
cgattcttaacgcttccactaactcaattaagcccatcccattacttgccttcac

SEQ ID NO: 144233 - DNA, 55 bp, Artificial
  Synthetic oligonucleotide
cgactggtgacgatgttaagatcgaactaccaagtgatgcaccaacctatgaccc

SEQ ID NO: 144234 - DNA, 55 bp, Artificial
  Synthetic oligonucleotide
tttagtccctgatgaagtaaccaacggcattgtcaaggaccgcttagctcaggtc

SEQ ID NO: 144235 - DNA, 51 bp, Artificial
  Synthetic oligonucleotide
ttgggatgcccgcttccttaatcggttttataaagttacccggacgttgtc

SEQ ID NO: 144236 - DNA, 55 bp, Artificial
  Synthetic oligonucleotide
ttgaagtcagaaccccaatgaagcgtccaggtaaacctggggaattagctagtgc

SEQ ID NO: 144237 - DNA, 55 bp, Artificial
  Synthetic oligonucleotide
ttcccctagcatggcgccatagatggacttgttcagcccatggtaaccccagccg

SEQ ID NO: 144238 - DNA, 55 bp, Artificial
  Synthetic oligonucleotide
ttaggtccatccgctgttatggaagacggcgtaatctcaaaccggttctgggtaa

SEQ ID NO: 144239 - DNA, 55 bp, Artificial
  Synthetic oligonucleotide
tgccgcatttgggaaatactattcgtcagtatcgacatccaatgatcacgcatag

SEQ ID NO: 144240 - DNA, 54 bp, Artificial
  Synthetic oligonucleotide
agaggttgaccgttcgggactggttgccggttatgtcgggcagacagccttaaa

SEQ ID NO: 144241 - DNA, 55 bp, Artificial
  Synthetic oligonucleotide
tgcagacaacattgcttacgggtcaaacaatccaaatgtgacacgtgatgaagtg

SEQ ID NO: 144242 - DNA, 55 bp, Artificial
  Synthetic oligonucleotide
tctgactaatctcgcccgccgctagggccgctttaatggcgcattggggctcgtg

SEQ ID NO: 144243 - DNA, 52 bp, Artificial
  Synthetic oligonucleotide
tatttccggtaccccacaatccgcaggtttcggtttagtgggtattgtcgga

SEQ ID NO: 144244 - DNA, 55 bp, Artificial
  Synthetic oligonucleotide
tatctcaaatatcggtggctcccttgatttactagggccgtcacaagattatgcg

SEQ ID NO: 144245 - DNA, 55 bp, Artificial
  Synthetic oligonucleotide
taattcgtccaagacgcgtttagccatctgaccacctggtactaaggggttaatc

SEQ ID NO: 144246 - DNA, 55 bp, Artificial
  Synthetic oligonucleotide
gttggtctaataacgccatgatccgcctcctttatcgcaaggtaaacgattagaa

SEQ ID NO: 144247 - DNA, 55 bp, Artificial
  Synthetic oligonucleotide
gttaggatgactaatatgaccactatcataggaatctctaccagcgataaccttc

SEQ ID NO: 144248 - DNA, 55 bp, Artificial
  Synthetic oligonucleotide
gtggctatgagcatttacctagattggaccttgcctaaggaagtgcgtctgttga

SEQ ID NO: 144249 - DNA, 55 bp, Artificial
  Synthetic oligonucleotide
gtccatgccaatctaaaagcaggtagattagaaagcaaccggatgccaatagcgg

SEQ ID NO: 144250 - DNA, 54 bp, Artificial
  Synthetic oligonucleotide
gtaggcccggcctaattgatttgccgcatctgaccttaaagaccgggtccgttg

SEQ ID NO: 144251 - DNA, 56 bp, Artificial
  Synthetic oligonucleotide
tcggctcgatatagccggttcctcccctcctgttatccgcatcccgcaaaagaagg

SEQ ID NO: 144252 - DNA, 55 bp, Artificial
  Synthetic oligonucleotide
ggtgctgtgggtgtccaaatgggtactgtcttcttagcagcccaagaaactccta

SEQ ID NO: 144253 - DNA, 55 bp, Artificial
  Synthetic oligonucleotide
ggggtcatgttggagacgatttcgcaaaaccatcacgtagtataaagcccactcc

SEQ ID NO: 144254 - DNA, 55 bp, Artificial
  Synthetic oligonucleotide
gctatggacgaagggttagctattttggaagacatgcaagacatgttagtagcga

SEQ ID NO: 144255 - DNA, 55 bp, Artificial
  Synthetic oligonucleotide
gctacctttctatgtctgcctgcatagaagatgcacaacaggttgccatgcttat

SEQ ID NO: 144256 - DNA, 55 bp, Artificial
  Synthetic oligonucleotide
gcggttcttgagctgactgacgaaacggcgggagacattgacctgttgaccggta

SEQ ID NO: 144257 - DNA, 55 bp, Artificial
  Synthetic oligonucleotide
gcgagcaaaatacgtgcagagccgttgccacaccgccaagaactccgttctcata

SEQ ID NO: 144258 - DNA, 55 bp, Artificial
  Synthetic oligonucleotide
gcctatatgacaggcacttctatggcagcaccctttgtagcgggaacagcggccc

SEQ ID NO: 144259 - DNA, 55 bp, Artificial
  Synthetic oligonucleotide
gcctacaccaccgtggttgaaggaccaaatgcagccggcgaacctggtcgttgga

SEQ ID NO: 144260 - DNA, 55 bp, Artificial
  Synthetic oligonucleotide
gccggaactgactcctatcaatctttcgggtgtggacttcgacgatatactttac

SEQ ID NO: 144261 - DNA, 55 bp, Artificial
  Synthetic oligonucleotide
gcccgtcttctttatacgcaagcgtttgagtgattaagctctttccaccgcctgt

SEQ ID NO: 144262 - DNA, 57 bp, Artificial
  Synthetic oligonucleotide
tccaagggagaagtcccttatctgtcacaggtccccagtttgctctggcagtcccca

SEQ ID NO: 144263 - DNA, 55 bp, Artificial
  Synthetic oligonucleotide
gcccctgcgactgacaaaatggtgcaggagatcagtgttgaagatatccgtccaa

SEQ ID NO: 144264 - DNA, 55 bp, Artificial
  Synthetic oligonucleotide
atccaagagggacggtctcgtcacgtctaaaccaaccattgtaatcgggacagat

SEQ ID NO: 144265 - DNA, 50 bp, Artificial
  Synthetic oligonucleotide
caaataaatttactcccgtattttcctccttaataacctggactttgacc

SEQ ID NO: 144266 - DNA, 55 bp, Artificial
  Synthetic oligonucleotide
ccacactagatccaactccgtggagcccaccagaggtcttataagcactttcgct

SEQ ID NO: 144267 - DNA, 55 bp, Artificial
  Synthetic oligonucleotide
ccaaataaaacgtggtaacacatctgtctaatggccgctagcatcccctcaggcg

SEQ ID NO: 144268 - DNA, 53 bp, Artificial
  Synthetic oligonucleotide
cccgttagcggaagccgcccatccaagaccgttgtaaattgaaactcttcttc

SEQ ID NO: 144269 - DNA, 55 bp, Artificial
  Synthetic oligonucleotide
catgtccccacctgtttgtacaccaacaaaggcgtgaacagcatttctagagtca

SEQ ID NO: 144270 - DNA, 55 bp, Artificial
  Synthetic oligonucleotide
cagtccgttgcaaatcactggtatagacagccgagaaattaacatcacgtaaacc

SEQ ID NO: 144271 - DNA, 55 bp, Artificial
  Synthetic oligonucleotide
ccggggagttgccattggctggctcttaagtcaggatgtcgcggcgtagaagatc

SEQ ID NO: 144272 - DNA, 55 bp, Artificial
  Synthetic oligonucleotide
ccgtcaacaggtagaggggttgggatggcaccaggggagaggattaacttgtcat

SEQ ID NO: 144273 - DNA, 57 bp, Artificial
  Synthetic oligonucleotide
taggaagcacctgagtcttgccccagatataaagccctcccgtcttgcttacgccgg

SEQ ID NO: 144274 - DNA, 55 bp, Artificial
  Synthetic oligonucleotide
cacggagaatggactggcgcacatcaaagacttggcagcttgcctgcttagtctt

SEQ ID NO: 144275 - DNA, 55 bp, Artificial
  Synthetic oligonucleotide
cctagaacacctagccaaactattactcgtcacccctgactactttgaccaagac

SEQ ID NO: 144276 - DNA, 53 bp, Artificial
  Synthetic oligonucleotide
cctatcttaatcggaaattaaccggtttgggtgccataacggcttcgattgtg

SEQ ID NO: 144277 - DNA, 54 bp, Artificial
  Synthetic oligonucleotide
aacggacgtttctccttcatcaggttggttttcggtagcacatattttctggta

SEQ ID NO: 144278 - DNA, 54 bp, Artificial
  Synthetic oligonucleotide
gttggattaggatggcaatcacacgtaatgagtccaccaagtggtacatcactg

SEQ ID NO: 144279 - DNA, 54 bp, Artificial
  Synthetic oligonucleotide
aatcaggagcataataccgtatacggcgccaaactgtttatccccataacttga

SEQ ID NO: 144280 - DNA, 53 bp, Artificial
  Synthetic oligonucleotide
agcttggatgtttgggtaaccttcaaacgtgaattgactttcaaagggcgcct

SEQ ID NO: 144281 - DNA, 54 bp, Artificial
  Synthetic oligonucleotide
gaggcacttgtacctatagcggtaggacttgtcggaagtccgatagcaatcttc

SEQ ID NO: 144282 - DNA, 54 bp, Artificial
  Synthetic oligonucleotide
gactgacatacggagggcggcaagccttaaggcaggaggcgtaggcatacgtta

SEQ ID NO: 144283 - DNA, 54 bp, Artificial
  Synthetic oligonucleotide
ataataagccgaagtcccgatatacagtaaaacttgagctgtgtagcctcaaaa

SEQ ID NO: 144284 - DNA, 56 bp, Artificial
  Synthetic oligonucleotide
cactggcagaagatgccatactcacaatagctcctcccgtgcgcaaaggctccgta

SEQ ID NO: 144285 - DNA, 53 bp, Artificial
  Synthetic oligonucleotide
tgcacttttcggactggtgcttacaagcggtactacagcttctgtatttgcgg

SEQ ID NO: 144286 - DNA, 53 bp, Artificial
  Synthetic oligonucleotide
ctcgtacccctgtggtgtaaggtaggcaccggttacattatcaagatatccgg

SEQ ID NO: 144287 - DNA, 52 bp, Artificial
  Synthetic oligonucleotide
gactaagttgggcttgacgaactatcttttggacgagcatccattcataatc

SEQ ID NO: 144288 - DNA, 52 bp, Artificial
  Synthetic oligonucleotide
atggtctagctgatagttaaccgagcctgactgtgggcgccgtcgttccccc

SEQ ID NO: 144289 - DNA, 52 bp, Artificial
  Synthetic oligonucleotide
agtccagacacggctaaacaccgtaggcaaggtgcttgccagaacttggccc

SEQ ID NO: 144290 - DNA, 52 bp, Artificial
  Synthetic oligonucleotide
agggtcgctaggatagctccgggtaagcccgccatgcgaagaccgataaagg

SEQ ID NO: 144291 - DNA, 52 bp, Artificial
  Synthetic oligonucleotide
agggcgtcccgtgcacaagaccacttgatacccttcagactgagcagtggcc

SEQ ID NO: 144292 - DNA, 52 bp, Artificial
  Synthetic oligonucleotide
agcgtaaggtgacccgtttaggacgtggcactaagcccggcacttcacggtt

SEQ ID NO: 144293 - DNA, 52 bp, Artificial
  Synthetic oligonucleotide
tacccacaggctttttaggacttccgccaagaggccccgctattccggacac

SEQ ID NO: 144294 - DNA, 52 bp, Artificial
  Synthetic oligonucleotide
accaagattataagccccagttacggtcccgcgcttacgattaatagcacct

SEQ ID NO: 144295 - DNA, 55 bp, Artificial
  Synthetic oligonucleotide
ctggcctcaaggacaagtcatttctcaacggtatggaacgctcgacaacctcttc

SEQ ID NO: 144296 - DNA, 52 bp, Artificial
  Synthetic oligonucleotide
ttacgaagacggtttcccttttgagaggtacaagggttatgcggcagttatg

SEQ ID NO: 144297 - DNA, 52 bp, Artificial
  Synthetic oligonucleotide
aaccagggtggcccgccccttcagtcccgattactgtgacaatatctgcccc

SEQ ID NO: 144298 - DNA, 52 bp, Artificial
  Synthetic oligonucleotide
aaagggagcttaaggcgaggcacccttagatactcaagcgggcaccggtggc

SEQ ID NO: 144299 - DNA, 51 bp, Artificial
  Synthetic oligonucleotide
ggacatcaaacaaagggtaatagtcttgcatcggacttaaccgtcccatga

SEQ ID NO: 144300 - DNA, 51 bp, Artificial
  Synthetic oligonucleotide
gggacttgtttacaggttgctttcggagcgaaataatttacccgccttaat

SEQ ID NO: 144301 - DNA, 51 bp, Artificial
  Synthetic oligonucleotide
gggcgcgacccgtgaaccagccattgccaaggtttgcgctgactttgatgc

SEQ ID NO: 144302 - DNA, 51 bp, Artificial
  Synthetic oligonucleotide
ggggcagttgcccaattgctccgcgtgccagatacttatactggggccgtt

SEQ ID NO: 144303 - DNA, 51 bp, Artificial
  Synthetic oligonucleotide
agggcagattgcatggcgagatggccatgaggggcatgtaagcggcgacgg

SEQ ID NO: 144304 - DNA, 51 bp, Artificial
  Synthetic oligonucleotide
aggcgtcggtagggattgaacgagagggtcaccggattacacctgaggggc

SEQ ID NO: 144305 - DNA, 51 bp, Artificial
  Synthetic oligonucleotide
ctatctgcattaataggaatgtctgtaggtagcgtattttcatgaagcgag

SEQ ID NO: 144306 - DNA, 54 bp, Artificial
  Synthetic oligonucleotide
attccttcttagaccttgtatctacttcaaattgcaggcttccgtttaaggtta

SEQ ID NO: 144307 - DNA, 58 bp, Artificial
  Synthetic oligonucleotide
cacagtgacaataattaaggagatcgggtatgaaatcaggtcggttgggtactcctga

SEQ ID NO: 144308 - DNA, 58 bp, Artificial
  Synthetic oligonucleotide
acctatcctcgaagccctccaattacagtcactgttactctaaatagtctcactaaca

SEQ ID NO: 144309 - DNA, 56 bp, Artificial
  Synthetic oligonucleotide
aggctagtgggctggggcgtaacgtcactgtgttcgataacgtgcgggaatggggc

SEQ ID NO: 144310 - DNA, 60 bp, Artificial
  Synthetic oligonucleotide
aacttgctacgatcagtttcatcagatcattatcggttaactctagggccgtatgaatag

SEQ ID NO: 144311 - DNA, 56 bp, Artificial
  Synthetic oligonucleotide
gctttcccaggtcggcggacagaagaggtctatggtcacagttaccgtaattgagg

SEQ ID NO: 144312 - DNA, 60 bp, Artificial
  Synthetic oligonucleotide
tcggtgataaattacgccattagaacttatcagtgataaactgtcaaacatgagaattca

SEQ ID NO: 144313 - DNA, 59 bp, Artificial
  Synthetic oligonucleotide
gcgacggtcggattgaaaaataggccgacaataaacactcgacagcgtgcgactgtcga

SEQ ID NO: 144314 - DNA, 60 bp, Artificial
  Synthetic oligonucleotide
ttacatgcaacattgtacgcacctcgcaagttacatgcaacaggtatttaaagactcatc

SEQ ID NO: 144315 - DNA, 54 bp, Artificial
  Synthetic oligonucleotide
acccgacgattcgggcggataaattcggcttgtgttagccaggtgtcacggctt

SEQ ID NO: 144316 - DNA, 56 bp, Artificial
  Synthetic oligonucleotide
ggatggcttgttgacaccttaccttcgacacgaactccttttcttatacgagcaat

SEQ ID NO: 144317 - DNA, 60 bp, Artificial
  Synthetic oligonucleotide
tctggtgttcgatgtggacagctcagacggctatgaggcgtggaaggatgcgggattacc

SEQ ID NO: 144318 - DNA, 59 bp, Artificial
  Synthetic oligonucleotide
caccaaacaagccagcaccgccaataagcgcggtgtccaatggtaaaaccagcgcttca

SEQ ID NO: 144319 - DNA, 60 bp, Artificial
  Synthetic oligonucleotide
tctgtaccctcaacggaggtaacgtgatgaacgaatacagcgtagccgagtatgactaca

SEQ ID NO: 144320 - DNA, 59 bp, Artificial
  Synthetic oligonucleotide
ttgccactatcatgccccataaaggggccaataaacttcagtggaacgtcaggctacac

SEQ ID NO: 144321 - DNA, 60 bp, Artificial
  Synthetic oligonucleotide
gcttgcgatggcaaactttagtaacgccaattgctacggtattgagttacgtgagtgtga

SEQ ID NO: 144322 - DNA, 57 bp, Artificial
  Synthetic oligonucleotide
aacgtcacggtgttcgataacgtgcgtgaatgggcctacagcgccgttagagagtac

SEQ ID NO: 144323 - DNA, 52 bp, Artificial
  Synthetic oligonucleotide
agcaagatgcttgaccgggcacggcaacgggaaaaaacggtcaccgttacct

SEQ ID NO: 144324 - DNA, 60 bp, Artificial
  Synthetic oligonucleotide
agatcgctgtcgtgttgctgtgagcgaaaaggaggccgagactcgggccgccctctctga

SEQ ID NO: 144325 - DNA, 58 bp, Artificial
  Synthetic oligonucleotide
gctcgaggcgacgaacccgttccagacacggtgtaggactcaggccaactcgcttgga

SEQ ID NO: 144326 - DNA, 55 bp, Artificial
  Synthetic oligonucleotide
acccccaaagcctatggccaaagggcgtgacgatgctcattaaattcctttccca

SEQ ID NO: 144327 - DNA, 58 bp, Artificial
  Synthetic oligonucleotide
agagcctattaggccttcgactcttttgctaagaatatggcttagggttgcacgctct

SEQ ID NO: 144328 - DNA, 60 bp, Artificial
  Synthetic oligonucleotide
tgcatgaggctgtgcggtcggcatggcgggggcagcttcattccggtaacggtgaccaaa

SEQ ID NO: 144329 - DNA, 60 bp, Artificial
  Synthetic oligonucleotide
gatatgggatatgcagggcttatcaccaaaaaccccgtacatggcgattggtggacgata

SEQ ID NO: 144330 - DNA, 54 bp, Artificial
  Synthetic oligonucleotide
agaaaagacaaaccccgaatctctgtttagtcaacttggcgggagacaacagag

SEQ ID NO: 144331 - DNA, 57 bp, Artificial
  Synthetic oligonucleotide
gtcgtgtgtctgaggctcccgctgggttagatgctcggtttcgctttaccggccacg

SEQ ID NO: 144332 - DNA, 56 bp, Artificial
  Synthetic oligonucleotide
gcggaattacaacgcgcccgcgcttatcagttttcacgccagggaaagccttcacc

SEQ ID NO: 144333 - DNA, 57 bp, Artificial
  Synthetic oligonucleotide
ttggactacaaagacccggcatctttcttccgagaagcaccgctcccagactcgaaa

SEQ ID NO: 144334 - DNA, 56 bp, Artificial
  Synthetic oligonucleotide
cggagtgacaacccgcttttgttgcgctctgaacatccagtcggcccctaatttgg

SEQ ID NO: 144335 - DNA, 57 bp, Artificial
  Synthetic oligonucleotide
cctcgtttgcggattacgttgatcggacacatacccccgagatccaagcgcggagag

SEQ ID NO: 144336 - DNA, 59 bp, Artificial
  Synthetic oligonucleotide
ggggagagcgatgcacattaagttccttgcccacggcacgggaagcggtgctcacgcct

SEQ ID NO: 144337 - DNA, 59 bp, Artificial
  Synthetic oligonucleotide
gctgcataactctctgcacgtacctggcgcgattctccgctgtccaggcgtaccgatag

SEQ ID NO: 144338 - DNA, 59 bp, Artificial
  Synthetic oligonucleotide
gatcacatcaaacaagccagcaccgccaataagcgcggtgtccgatggtaaaaccagcg

SEQ ID NO: 144339 - DNA, 59 bp, Artificial
  Synthetic oligonucleotide
tctgcaaatctcggctggcagtgtgtccaattacctccgttgtgatcttgagtgatcaa

SEQ ID NO: 144340 - DNA, 59 bp, Artificial
  Synthetic oligonucleotide
cactaacaggtggttacaacctattccgcctatgtcaaacttgactctaagctagcata

SEQ ID NO: 144341 - DNA, 58 bp, Artificial
  Synthetic oligonucleotide
tctctttatgcgtggatgtgaccgacatagccccatactgcccgttttggcggaaata

SEQ ID NO: 144342 - DNA, 58 bp, Artificial
  Synthetic oligonucleotide
cgcaaccctggggcatctgcaagtagagcgtaacggggcaccaaccacggccagctct

SEQ ID NO: 144343 - DNA, 57 bp, Artificial
  Synthetic oligonucleotide
tcaatggtgccgcgtactttgaacgttaacatagaggctcagggcgctattttaccc

SEQ ID NO: 144344 - DNA, 58 bp, Artificial
  Synthetic oligonucleotide
agagcgatgattaccctctgaccgtggatgtgacccctcccaagtacacctcacttgc

SEQ ID NO: 144345 - DNA, 56 bp, Artificial
  Synthetic oligonucleotide
caggggaacgcaaagacttcgatgcggtgagggacaagcacaaccacgaaaaggga

SEQ ID NO: 144346 - DNA, 53 bp, Artificial
  Synthetic oligonucleotide
cgaaacctgttcccgactgcttttccccgaaactacctatcggacatagagaa

SEQ ID NO: 144347 - DNA, 58 bp, Artificial
  Synthetic oligonucleotide
acaaccgtgaccgctatcagggacgagatcgaggacttgccccagcatatctacgacg

SEQ ID NO: 144348 - DNA, 54 bp, Artificial
  Synthetic oligonucleotide
cggtgagggacaagcacaaccacgaaaaggggtgggcgcggccagacgacccgc

SEQ ID NO: 144349 - DNA, 58 bp, Artificial
  Synthetic oligonucleotide
tgcgttcagaactatcttcgagggctgcttgctgctcactgacagagcccgtcgtata

SEQ ID NO: 144350 - DNA, 57 bp, Artificial
  Synthetic oligonucleotide
ttgcgatttccagcccctcgcgggacattcccttgaactccggcatgagggagatca

SEQ ID NO: 144351 - DNA, 55 bp, Artificial
  Synthetic oligonucleotide
cactgggccccggattggaccaacgtcacgtcagaacaaaccaaggcctaatggc

SEQ ID NO: 144352 - DNA, 57 bp, Artificial
  Synthetic oligonucleotide
gctagcatacacagagtgcccttagccgcttcgcgtcttcggttcctctgtgaagct

SEQ ID NO: 144353 - DNA, 57 bp, Artificial
  Synthetic oligonucleotide
ttgcactgccagccggatatttttaggcaaggtgcaaaatggccaatagcgacaaaa

SEQ ID NO: 144354 - DNA, 57 bp, Artificial
  Synthetic oligonucleotide
ggctctgtatagggttgaacgatgcacgcccaatatggcggctacttccctcacgct

SEQ ID NO: 144355 - DNA, 56 bp, Artificial
  Synthetic oligonucleotide
gcggcaaggaacctggatgggcaagaacttggcaaattagcctaggtacgacggaa

SEQ ID NO: 144356 - DNA, 57 bp, Artificial
  Synthetic oligonucleotide
cgcgttgcttggcagctgcgtattccggagagagggaggggagcctgtaaatccaat

SEQ ID NO: 144357 - DNA, 54 bp, Artificial
  Synthetic oligonucleotide
aaccgatttacccccgcagggtttagccaggtgcaagcacatagaggggctaag

SEQ ID NO: 144358 - DNA, 57 bp, Artificial
  Synthetic oligonucleotide
taggaccacagcgcgttgcttggcagctgcgtattccggagagagggaggggagcct

SEQ ID NO: 144359 - DNA, 56 bp, Artificial
  Synthetic oligonucleotide
gacctcagtttgtcggactggatcaggggggctatcgatgccaatcagcaaacgca

SEQ ID NO: 144360 - DNA, 56 bp, Artificial
  Synthetic oligonucleotide
cagaaatgaggtttaggaattatttccgcctctctctttaaacatgacgatacgcg

SEQ ID NO: 144361 - DNA, 56 bp, Artificial
  Synthetic oligonucleotide
tacaaatacatccctccggcggagtgcactacgcagttggtcgagagcgcagaaag

SEQ ID NO: 144362 - DNA, 55 bp, Artificial
  Synthetic oligonucleotide
gagtatcgcccgttggatctggcggcaccttaccccgacctcgtttgcggattac

SEQ ID NO: 144363 - DNA, 56 bp, Artificial
  Synthetic oligonucleotide
tgcactacaggcaatcaatactgcgtccgggcgcaacggatcctttagtggtgacg

SEQ ID NO: 144364 - DNA, 56 bp, Artificial
  Synthetic oligonucleotide
cgagcagacccttgaaaacagtcttgagggaggtcaaggacgaagccgacatgctg

SEQ ID NO: 144365 - DNA, 56 bp, Artificial
  Synthetic oligonucleotide
gccaattcatgatcgggctgtgttcgataaacggggcgataccataggcctcgtac

SEQ ID NO: 144366 - DNA, 56 bp, Artificial
  Synthetic oligonucleotide
tatgcagagctgctgacactaactcgccaaaagagaccccattcatgtgggggcga

SEQ ID NO: 144367 - DNA, 55 bp, Artificial
  Synthetic oligonucleotide
ctcagcacaactgcatcacctatcagagccgggagcgacgctaccacgagtggtc

SEQ ID NO: 144368 - DNA, 55 bp, Artificial
  Synthetic oligonucleotide
ggaagagcggaacgggtggtatacggcttccagggtcgcaacgctctggttggac

SEQ ID NO: 144369 - DNA, 55 bp, Artificial
  Synthetic oligonucleotide
ggcagagcctcaaggagtatcgcttcaatttcagagacttgcattatgcgtcctc

SEQ ID NO: 144370 - DNA, 55 bp, Artificial
  Synthetic oligonucleotide
ggactagattagactagtccaaaccattgttgactagaagtcttggacacgataa

SEQ ID NO: 144371 - DNA, 55 bp, Artificial
  Synthetic oligonucleotide
ctaagcaagcaacgctctggatgaccagagtaaagagttcaggctgtcgaatctt

SEQ ID NO: 144372 - DNA, 55 bp, Artificial
  Synthetic oligonucleotide
cgttggactctcgcttatgcaaacccttctcgacacggctcattgtcgtctgacc

SEQ ID NO: 144373 - DNA, 60 bp, Artificial
  Synthetic oligonucleotide
cagcatgaacagatatggaataagtatctggccccatgggtaatacgccacttgaattaa

SEQ ID NO: 144374 - DNA, 55 bp, Artificial
  Synthetic oligonucleotide
cgttgaccccgaccttacgcaggtcgtcaccgatagccattagtgttttcttgcc

SEQ ID NO: 144375 - DNA, 55 bp, Artificial
  Synthetic oligonucleotide
ggagccctaatcctcagcttgcgagtaaccgtgtggcggctaatacctgctaagc

SEQ ID NO: 144376 - DNA, 55 bp, Artificial
  Synthetic oligonucleotide
ggataagcttcgggtaatatagcgccccttttcgggtcaatacacatgaccctcg

SEQ ID NO: 144377 - DNA, 55 bp, Artificial
  Synthetic oligonucleotide
ggatctgcaaatttcgccgggcagcgtgtccaattacctccgtcgtgatcgtgag

SEQ ID NO: 144378 - DNA, 54 bp, Artificial
  Synthetic oligonucleotide
gggtcagaaaaccagacagcgtttattacggcagttgataaaagccggcgttac

SEQ ID NO: 144379 - DNA, 55 bp, Artificial
  Synthetic oligonucleotide
cgtgcgtgaatgggcctacagcgccgttagagagtactggcggcctaacgggtac

SEQ ID NO: 144380 - DNA, 55 bp, Artificial
  Synthetic oligonucleotide
ggtagtacgctcggtctcccttctcttgcacagtgttaggtacagcaaacccgcg

SEQ ID NO: 144381 - DNA, 55 bp, Artificial
  Synthetic oligonucleotide
ggattttagatgaatggctgtgtatcagagtggccccacctctcactgcccgcga

SEQ ID NO: 144382 - DNA, 54 bp, Artificial
  Synthetic oligonucleotide
ggcaaccaaagtgaccggtacacagaaagtgtatatgggaacccgggtacagcg

SEQ ID NO: 144383 - DNA, 55 bp, Artificial
  Synthetic oligonucleotide
gagtatcgcttcaatttcagagacttgcattatgcgtcctcagttgtgagcgggg

SEQ ID NO: 144384 - DNA, 52 bp, Artificial
  Synthetic oligonucleotide
cagggaggggcttgttttccccttcccattggatgtatcaaacggattttcc

SEQ ID NO: 144385 - DNA, 55 bp, Artificial
  Synthetic oligonucleotide
ggcgcccaattcatcatccggtgccgtcgttatggatgccaatatcgttgtgctg

SEQ ID NO: 144386 - DNA, 55 bp, Artificial
  Synthetic oligonucleotide
gcgccgtatcgtccatccgtgagggagatagtggcgagtagagcaccgtctggtg

SEQ ID NO: 144387 - DNA, 55 bp, Artificial
  Synthetic oligonucleotide
gagtgcctcgcatgaaaccatgtgcccagtcgttgccacgcacgagtccatccgc

SEQ ID NO: 144388 - DNA, 55 bp, Artificial
  Synthetic oligonucleotide
gagtgcggcggatatagccactgtaggcaaagatgctcaatcatttggacagagc

SEQ ID NO: 144389 - DNA, 55 bp, Artificial
  Synthetic oligonucleotide
gataacgtgcgtgaatgggcctacagcgccgttagggcgtattggcggcctaacg

SEQ ID NO: 144390 - DNA, 55 bp, Artificial
  Synthetic oligonucleotide
ggcgagtggccccgtgggttaacagttcatgcgcaataactcggtgatcacggcc

SEQ ID NO: 144391 - DNA, 55 bp, Artificial
  Synthetic oligonucleotide
gatccttggctatcggacaatccaagagtacgttcgcggtgcgaaatatcaatgg

SEQ ID NO: 144392 - DNA, 55 bp, Artificial
  Synthetic oligonucleotide
ggccgccccaattctgaatagtgagtgcagaatcgattttggctttgacgggtcg

SEQ ID NO: 144393 - DNA, 55 bp, Artificial
  Synthetic oligonucleotide
gcgccactcgtcagctgccacgatatgcaccactcgttcggcacattcaggggct

SEQ ID NO: 144394 - DNA, 55 bp, Artificial
  Synthetic oligonucleotide
gcgcagtatgtgcccatcaatgcgagacggaggaataactcatggtctctgcggc

SEQ ID NO: 144395 - DNA, 60 bp, Artificial
  Synthetic oligonucleotide
catcactgctatgcagaaatgaggtttaggaattatttccgcctctctctttaaacatga

SEQ ID NO: 144396 - DNA, 55 bp, Artificial
  Synthetic oligonucleotide
gcgactggacccaccgtatgactccaaaactagggatgcagcgtgcgtttcaccc

SEQ ID NO: 144397 - DNA, 55 bp, Artificial
  Synthetic oligonucleotide
gccatttcagcatggaagaactaccaatcgtcttaaaattagccaacgggcgcag

SEQ ID NO: 144398 - DNA, 55 bp, Artificial
  Synthetic oligonucleotide
gcccgacccgtagctgttgagtcgctggtaatcccctcgaagcaaggtgacgagc

SEQ ID NO: 144399 - DNA, 55 bp, Artificial
  Synthetic oligonucleotide
ggcagtgaacggcgcccctcatttccatccgctcttgccaccccagcttattgcc

SEQ ID NO: 144400 - DNA, 55 bp, Artificial
  Synthetic oligonucleotide
gcctgaccccaagtctcatctttcagaccaccgtacgccagacgggtacgcaggt

SEQ ID NO: 144401 - DNA, 53 bp, Artificial
  Synthetic oligonucleotide
ggggctaagggcggtaaggtatccaagggcggcggcaggccaagtaacagtgg

SEQ ID NO: 144402 - DNA, 55 bp, Artificial
  Synthetic oligonucleotide
ctccgagccaaagcgcccggataagtccctattcaagcggctggcatggccggtt

SEQ ID NO: 144403 - DNA, 55 bp, Artificial
  Synthetic oligonucleotide
gctgcgctatccagcgttatatatccccgttcatgtcgcttgctggggctaacga

SEQ ID NO: 144404 - DNA, 55 bp, Artificial
  Synthetic oligonucleotide
ctcttttgctaagaatatggcttagggttgcacgctcttttgccattggggcagc

SEQ ID NO: 144405 - DNA, 55 bp, Artificial
  Synthetic oligonucleotide
ctgcagagtttacgcctgattcgcttgctgcaatccgcctgtggttatccgcgca

SEQ ID NO: 144406 - DNA, 57 bp, Artificial
  Synthetic oligonucleotide
ggcggcctatagtcgccgcagtcgcaaagaggtcggcggactgggccgtaacgtcac

SEQ ID NO: 144407 - DNA, 55 bp, Artificial
  Synthetic oligonucleotide
cttgcaaaggcagttggggagcaccttggaagggtacgagacgcactgcgccagc

SEQ ID NO: 144408 - DNA, 55 bp, Artificial
  Synthetic oligonucleotide
gggccagaaatgaaaacgactgtattacagttaatggctccagcatttgccctgg

SEQ ID NO: 144409 - DNA, 55 bp, Artificial
  Synthetic oligonucleotide
gctcagactttactggagagcggtgagccggcagaagcgtttgtctgggcgcaaa

SEQ ID NO: 144410 - DNA, 55 bp, Artificial
  Synthetic oligonucleotide
gaagcgggctgtacgaccgttgttgtaacggctcatatcaaacgactgccccttg

SEQ ID NO: 144411 - DNA, 55 bp, Artificial
  Synthetic oligonucleotide
gggacgattaaccttcgcatcgatgatgagctgaaaacccgctcgtatgcggtac

SEQ ID NO: 144412 - DNA, 55 bp, Artificial
  Synthetic oligonucleotide
gacggagcgagttgccatcagtggcccacgggtcgattatcatcactatcgggcc

SEQ ID NO: 144413 - DNA, 55 bp, Artificial
  Synthetic oligonucleotide
ggctgctcctgtctttggcctaccccgtccgcgcttgatgccaaacatgtcccca

SEQ ID NO: 144414 - DNA, 55 bp, Artificial
  Synthetic oligonucleotide
gagcaggtaagcccatcgagcctctgttttatctggttccgccttagcttgagcg

SEQ ID NO: 144415 - DNA, 55 bp, Artificial
  Synthetic oligonucleotide
gaggaagcaggaccctgcgattgtccgagcggacgcaactggggtcattagtaaa

SEQ ID NO: 144416 - DNA, 50 bp, Artificial
  Synthetic oligonucleotide
gaggccgttagcggcatagaaagggaaaaccccggaaaccaacttggcgg

SEQ ID NO: 144417 - DNA, 54 bp, Artificial
  Synthetic oligonucleotide
gcaccttaccccgacctcgtttgcggattacgttgatcggacacatacccccga

SEQ ID NO: 144418 - DNA, 60 bp, Artificial
  Synthetic oligonucleotide
tcgagtgaaatacttcatggataccgtgtctcctttccccgggaatggctatggcacagc

SEQ ID NO: 144419 - DNA, 55 bp, Artificial
  Synthetic oligonucleotide
tcgatgcggtgagggacaagcacaaccacgaaaagggatgggcgcggccagacga

SEQ ID NO: 144420 - DNA, 55 bp, Artificial
  Synthetic oligonucleotide
tcgactctggcccctgaggtggtggccaggttgcatgaggctgtgcggtcggcat

SEQ ID NO: 144421 - DNA, 55 bp, Artificial
  Synthetic oligonucleotide
agtgaagcaatcgaggggtgttcggaatccaacgtttgcactactgcgggtggcc

SEQ ID NO: 144422 - DNA, 55 bp, Artificial
  Synthetic oligonucleotide
ataagtatctggccccatgggtaatacgccacttgaattaacgcatcctgtaagg

SEQ ID NO: 144423 - DNA, 55 bp, Artificial
  Synthetic oligonucleotide
atccggtgttgtttgcggcggtggccgactcgcttccgttccagcatcgttacgc

SEQ ID NO: 144424 - DNA, 55 bp, Artificial
  Synthetic oligonucleotide
atgctcgcgaaggcacagcgacaggggccgaataggtcgaggtgccgtagcctga

SEQ ID NO: 144425 - DNA, 55 bp, Artificial
  Synthetic oligonucleotide
tagcggctgtcgtggcccgtaccagtgcggccaagcaaaagccgttgcgctatct

SEQ ID NO: 144426 - DNA, 55 bp, Artificial
  Synthetic oligonucleotide
caaacggagctaaatgacctgactttgtaataaagggcaggtatagtgcccgcag

SEQ ID NO: 144427 - DNA, 55 bp, Artificial
  Synthetic oligonucleotide
caatgccgcaataaccccaactattgctaacgaggccagcatagagagtgctctc

SEQ ID NO: 144428 - DNA, 55 bp, Artificial
  Synthetic oligonucleotide
caccttaccttcgacacgaactccttttcttatacgagcaattctggtgctacgc

SEQ ID NO: 144429 - DNA, 60 bp, Artificial
  Synthetic oligonucleotide
gcccgcttccagtgtcagagatcaaggccacggcaaagagtatcgcccgttgggtatgga

SEQ ID NO: 144430 - DNA, 55 bp, Artificial
  Synthetic oligonucleotide
cacctttggcgctttgtcgtattcgctcggattggacgcaagtgattgttgccgt

SEQ ID NO: 144431 - DNA, 55 bp, Artificial
  Synthetic oligonucleotide
cacgatccgggtattacagcgatcggaaaagatataaggcagcaatgcagcggga

SEQ ID NO: 144432 - DNA, 55 bp, Artificial
  Synthetic oligonucleotide
taaatgatagcctgagatgacgattaccggttggcggtgcgctccgctcagctcc

SEQ ID NO: 144433 - DNA, 55 bp, Artificial
  Synthetic oligonucleotide
gttttcaacttggcggaagagcacagagagttcggggccggacttatgcaaagca

SEQ ID NO: 144434 - DNA, 55 bp, Artificial
  Synthetic oligonucleotide
gtttattcactggtcgacccgcaaccgacaaattataatgcggcccattagaaaa

SEQ ID NO: 144435 - DNA, 55 bp, Artificial
  Synthetic oligonucleotide
gttgtggaacctggcgatgcagtgttgaagccccgaatcctctacaggtaggggc

SEQ ID NO: 144436 - DNA, 55 bp, Artificial
  Synthetic oligonucleotide
cagacgtggatatgagcaatgttttcgaggttaggatcttcttgtgatcctgtcg

SEQ ID NO: 144437 - DNA, 55 bp, Artificial
  Synthetic oligonucleotide
caggactatttatgtagaaggtaagccttacacgatgtacagcgattgctgggct

SEQ ID NO: 144438 - DNA, 55 bp, Artificial
  Synthetic oligonucleotide
caggagaagctgacaggatccggaggatcaagggctccggattatactggcaacc

SEQ ID NO: 144439 - DNA, 55 bp, Artificial
  Synthetic oligonucleotide
gttgcggccaatagatgcataatcctgatagtacaatgccgcaataaccccaact

SEQ ID NO: 144440 - DNA, 55 bp, Artificial
  Synthetic oligonucleotide
tccggctcgttaaggccgcggaaccgttgatacctggcggctatagggcaagcct

SEQ ID NO: 144441 - DNA, 55 bp, Artificial
  Synthetic oligonucleotide
ccaaggcggttgagacgactcttggactgctcgatgttgtcggaggagagccagg

SEQ ID NO: 144442 - DNA, 53 bp, Artificial
  Synthetic oligonucleotide
ttttcagcccctacttttatgctaccttggttttagccagcctacccgtatta

SEQ ID NO: 144443 - DNA, 55 bp, Artificial
  Synthetic oligonucleotide
tttgacaccatggtgcgtttaccgggctgcgggacattgcagttgcgggcaccgg

SEQ ID NO: 144444 - DNA, 55 bp, Artificial
  Synthetic oligonucleotide
tttcgggccgagagaaaccggccacgaagtagatgcttacgcgaacttaaggatc

SEQ ID NO: 144445 - DNA, 55 bp, Artificial
  Synthetic oligonucleotide
tttcgcgtcctgaggggaacgtctacttaacgttcagtatgaagggaggatccac

SEQ ID NO: 144446 - DNA, 55 bp, Artificial
  Synthetic oligonucleotide
aacacttcacacacaagcgtttaaatggctgtaactattcggttataatccagtc

SEQ ID NO: 144447 - DNA, 55 bp, Artificial
  Synthetic oligonucleotide
tttaagacgattggtagttcttccatgctgaaatggctcgtacgcctgtttattg

SEQ ID NO: 144448 - DNA, 55 bp, Artificial
  Synthetic oligonucleotide
aacgcaacttaaacaagtgggggatcgatgaataagggctatgacactctagccg

SEQ ID NO: 144449 - DNA, 55 bp, Artificial
  Synthetic oligonucleotide
aacgtgatgaacgaatacagcgtagccgagtatgactacaccctgatccggttgc

SEQ ID NO: 144450 - DNA, 55 bp, Artificial
  Synthetic oligonucleotide
aagccgatgtgccgcacagatgttgaacctcgacaaggagttacctctgtacgtc

SEQ ID NO: 144451 - DNA, 59 bp, Artificial
  Synthetic oligonucleotide
tccgacagggtttgccgtatatgttttgctcatagctgcgcgtatttttcgacccaata

SEQ ID NO: 144452 - DNA, 55 bp, Artificial
  Synthetic oligonucleotide
ttctcgaggcgttggactcaagcgggcggagattgaacgccgctatcgacgccca

SEQ ID NO: 144453 - DNA, 55 bp, Artificial
  Synthetic oligonucleotide
ttccttggcccatcgaacgtgagcagacgaattaaagcagagcgggcatcacaag

SEQ ID NO: 144454 - DNA, 55 bp, Artificial
  Synthetic oligonucleotide
ttccgatgtcagcaccaagactgaaccgccatccctgattgcctgcatctgggcg

SEQ ID NO: 144455 - DNA, 55 bp, Artificial
  Synthetic oligonucleotide
aatggccgcccaattggcctttgaggacacactatgcatccccgttttgccaagc

SEQ ID NO: 144456 - DNA, 55 bp, Artificial
  Synthetic oligonucleotide
acaactgaggacgcataatgcaagtctctgaaattgaagcgatactcctcgaggc

SEQ ID NO: 144457 - DNA, 55 bp, Artificial
  Synthetic oligonucleotide
ttagtgaattttggctttcctcccacaacgtcgaatttctcgttgcaggtaggga

SEQ ID NO: 144458 - DNA, 49 bp, Artificial
  Synthetic oligonucleotide
ttagcggcatagaaagggaaaaccccggaaaccaacttggcgggcggtt

SEQ ID NO: 144459 - DNA, 54 bp, Artificial
  Synthetic oligonucleotide
tggcgtttccggtcttgggtctaccccggccacgcttctcgccaaacatatccc

SEQ ID NO: 144460 - DNA, 55 bp, Artificial
  Synthetic oligonucleotide
actcaccatcaaacccagtgtgcttccctatcaccttaatcgtggtggggttggc

SEQ ID NO: 144461 - DNA, 54 bp, Artificial
  Synthetic oligonucleotide
actggttgggccttgggccgctctacagcgccttggcggggccttcttgggacg

SEQ ID NO: 144462 - DNA, 59 bp, Artificial
  Synthetic oligonucleotide
tcccacggtacgggcagcggtgcccgtgcttcggcctacctcatgggctcgcacgacca

SEQ ID NO: 144463 - DNA, 55 bp, Artificial
  Synthetic oligonucleotide
aggaagcgccctgcgagccgcttggcgtcgcgtcttgagcgtattggggttggtt

SEQ ID NO: 144464 - DNA, 55 bp, Artificial
  Synthetic oligonucleotide
tcgcgatgaaacaaggtcgcggtcaggcctccacgtctaagcggccgtctctgct

SEQ ID NO: 144465 - DNA, 55 bp, Artificial
  Synthetic oligonucleotide
gtctttatcaaagttctggccatttatccggagcccacaaaagcgcaggctccgg

SEQ ID NO: 144466 - DNA, 55 bp, Artificial
  Synthetic oligonucleotide
gtcctgtccctgtgcgttaacccaggcagcctgatagccgtttcttatcgccccg

SEQ ID NO: 144467 - DNA, 55 bp, Artificial
  Synthetic oligonucleotide
gtccgttgcccgagtctcgccatagtatagaagggtcagaatcccaacacgaccc

SEQ ID NO: 144468 - DNA, 55 bp, Artificial
  Synthetic oligonucleotide
gtacgcacctcgcaagttacatgcaacaggtatttaaagactcatccccggcgag

SEQ ID NO: 144469 - DNA, 55 bp, Artificial
  Synthetic oligonucleotide
gtaccttaacgctggcaaggtatttaactggctagctaactctattggctcccag

SEQ ID NO: 144470 - DNA, 52 bp, Artificial
  Synthetic oligonucleotide
cctaacggtggtttaggtaacccgtaatgaagtgggtatgtaacatccacca

SEQ ID NO: 144471 - DNA, 55 bp, Artificial
  Synthetic oligonucleotide
cctcgttgcgattgaacgctatcccggatactaggggagcttccatcctctcacc

SEQ ID NO: 144472 - DNA, 55 bp, Artificial
  Synthetic oligonucleotide
cctgatgctgtgatccgtctggtgttttccgggtctgacaatatgtagactagtg

SEQ ID NO: 144473 - DNA, 60 bp, Artificial
  Synthetic oligonucleotide
tcactcaacagcgtgctgcgcaaagcgaccaaacaaaggaagctgttcccgaccgatgag

SEQ ID NO: 144474 - DNA, 53 bp, Artificial
  Synthetic oligonucleotide
ccttgtatctacttcaaattgcaggcttccgtttaaggttactttacctaatg

SEQ ID NO: 144475 - DNA, 55 bp, Artificial
  Synthetic oligonucleotide
cgaacatgtacgctaatgcgaaccatacgcagcagggcagctgatgtcgccatcc

SEQ ID NO: 144476 - DNA, 55 bp, Artificial
  Synthetic oligonucleotide
cgaacctcagggctttcgattagcgtatcagtgtggataacaaagtggtgctgac

SEQ ID NO: 144477 - DNA, 55 bp, Artificial
  Synthetic oligonucleotide
cgcggttcaaataaggatggagaatccgaagattctccatcagtgcgacgccctt

SEQ ID NO: 144478 - DNA, 55 bp, Artificial
  Synthetic oligonucleotide
cgctgtcgcttcgggtatgctgggacgcagacccacggcaagtgggcgttattga

SEQ ID NO: 144479 - DNA, 55 bp, Artificial
  Synthetic oligonucleotide
cgcttgcgcagggtcttgtggctctgcgcaccttcagttatctaggggtccgctc

SEQ ID NO: 144480 - DNA, 55 bp, Artificial
  Synthetic oligonucleotide
cggaacgggtggtatacggcttccagggtcgcaacgctctggttggacttgtagc

SEQ ID NO: 144481 - DNA, 55 bp, Artificial
  Synthetic oligonucleotide
cggctttgttcgcagaacgctcttcgtggaaacgaaaacgagtgccagcacgagc

SEQ ID NO: 144482 - DNA, 55 bp, Artificial
  Synthetic oligonucleotide
cgggacagaaatgggaaacgccaccaggcgcttttggccgtgaggcatgtggttc

SEQ ID NO: 144483 - DNA, 54 bp, Artificial
  Synthetic oligonucleotide
cggttacccaaggggtaactgcttacgtttcacagctcgggaccagactgatcc

SEQ ID NO: 144484 - DNA, 60 bp, Artificial
  Synthetic oligonucleotide
tcacatttgcacggtcaggactacgcgtgaaacgaacaccattgatatgggaaaactgca

SEQ ID NO: 144485 - DNA, 53 bp, Artificial
  Synthetic oligonucleotide
cggttttaaactgtagtaccctaaccttcatcgttaactgtcagtctgcgagg

SEQ ID NO: 144486 - DNA, 55 bp, Artificial
  Synthetic oligonucleotide
ccctcagccgaagctagtctgggcctgattagcgtgaaagtttatgacaaatcgc

SEQ ID NO: 144487 - DNA, 55 bp, Artificial
  Synthetic oligonucleotide
gtgttaccacaacgttcgcaggtttcaccatccgcagtgacgaggcgctgccagg

SEQ ID NO: 144488 - DNA, 55 bp, Artificial
  Synthetic oligonucleotide
ccgagagaacagatatgtctgcctatttaacactgcggcaacgggccatgacccg

SEQ ID NO: 144489 - DNA, 55 bp, Artificial
  Synthetic oligonucleotide
gttacattcaatgcgctttcgttggaagggtataatgtccggtgatgctgagcgc

SEQ ID NO: 144490 - DNA, 55 bp, Artificial
  Synthetic oligonucleotide
gttattaacagagattgctgtggcctactatgaaaacgagcagactcaagaggag

SEQ ID NO: 144491 - DNA, 55 bp, Artificial
  Synthetic oligonucleotide
gttcagttgtcctggcgtgaagaatcgaaagggcgattccgtcttgagtatccgg

SEQ ID NO: 144492 - DNA, 54 bp, Artificial
  Synthetic oligonucleotide
gttcgttatagacacctttaggtcctctaaatgctggttcgtttagctcgggga

SEQ ID NO: 144493 - DNA, 55 bp, Artificial
  Synthetic oligonucleotide
gtgtcagttgcatggtcgcacttgcctcttactacaagccaggaatcaggacgac

SEQ ID NO: 144494 - DNA, 55 bp, Artificial
  Synthetic oligonucleotide
gttgccggcccctgactggtgatcagtttattcggcttatcgacgacaacgcgat

SEQ ID NO: 144495 - DNA, 58 bp, Artificial
  Synthetic oligonucleotide
agtgggtaaacgagagcgggagcaggtgtatctggacgctggttatcggctggaatag

SEQ ID NO: 144496 - DNA, 55 bp, Artificial
  Synthetic oligonucleotide
ccccaattggcctttgaggacacactatgcatccccgttttgccaagccactcga

SEQ ID NO: 144497 - DNA, 54 bp, Artificial
  Synthetic oligonucleotide
ccggaggcaaaagggctatactctgcgcccgttggctaattttaagacgattgg

SEQ ID NO: 144498 - DNA, 54 bp, Artificial
  Synthetic oligonucleotide
gtgattacagctatggtaacaaggtcgtttacaacacctttccttggcccaccg

SEQ ID NO: 144499 - DNA, 55 bp, Artificial
  Synthetic oligonucleotide
ccacataaagtcgatgtgcaccaacgcttgttccgacacgatccggaactgcggt

SEQ ID NO: 144500 - DNA, 54 bp, Artificial
  Synthetic oligonucleotide
ggacaggttattagcggtgatgtatggaaactcggcactgggggcgcagaggag

SEQ ID NO: 144501 - DNA, 54 bp, Artificial
  Synthetic oligonucleotide
catgagctcacgcccctgacaggtaaacttgctcgttgacaccgcgatcacaaa

SEQ ID NO: 144502 - DNA, 54 bp, Artificial
  Synthetic oligonucleotide
gaagcacgccagttgacctcgtgagcaaccagtttggggacatagtggcgtttt

SEQ ID NO: 144503 - DNA, 54 bp, Artificial
  Synthetic oligonucleotide
cccctatagcagaggcgattcagttatgagccaaagagccacccaaggcagcac

SEQ ID NO: 144504 - DNA, 54 bp, Artificial
  Synthetic oligonucleotide
cacgctcttttgccattggggcagcatgttgcacagtttgagttttcatcacac

SEQ ID NO: 144505 - DNA, 54 bp, Artificial
  Synthetic oligonucleotide
gttacaacctattccgcctatgtcaaacttgactctaagctagcatacacagag

SEQ ID NO: 144506 - DNA, 56 bp, Artificial
  Synthetic oligonucleotide
tatggggtactcagggctcatcacaaaaaaccccgtacacggcgattggtggacaa

SEQ ID NO: 144507 - DNA, 54 bp, Artificial
  Synthetic oligonucleotide
ttatgtatccaatcctgagcctctataccaaggctttgtttcaccagaacggac

SEQ ID NO: 144508 - DNA, 54 bp, Artificial
  Synthetic oligonucleotide
tgggtctgtaggagggctctcctatcttgaagcgcagcgaaagataggagagcc

SEQ ID NO: 144509 - DNA, 54 bp, Artificial
  Synthetic oligonucleotide
ctttattactggatgtaacctgtcttatgccaatatggagcgggtctgtttaga

SEQ ID NO: 144510 - DNA, 54 bp, Artificial
  Synthetic oligonucleotide
actgcacataacatggaagttgatataatccgacgggtttattgcctctgatgg

SEQ ID NO: 144511 - DNA, 54 bp, Artificial
  Synthetic oligonucleotide
tacgtttatgttacgccggtatgtgtaaaacgtcaatcttggtgcaaggatgca

SEQ ID NO: 144512 - DNA, 54 bp, Artificial
  Synthetic oligonucleotide
atccaatggatggaacatctgcttgagagccaagggccggaagccctgagtagt

SEQ ID NO: 144513 - DNA, 54 bp, Artificial
  Synthetic oligonucleotide
cttagcatcttattaagttgatctcgatagagtccatcaattcgaccgaggggc

SEQ ID NO: 144514 - DNA, 53 bp, Artificial
  Synthetic oligonucleotide
ttcgcttgcaaacgcgctgctcctggatagccgccgcatagttatagtcgtat

SEQ ID NO: 144515 - DNA, 53 bp, Artificial
  Synthetic oligonucleotide
ttaaacagtctgtggtgtcgctaccacaggaataaattttcactgagccaccg

SEQ ID NO: 144516 - DNA, 53 bp, Artificial
  Synthetic oligonucleotide
ttctgcgaatagaattcaaccgacttggtttcttcgagcggcttttgttcaaa

SEQ ID NO: 144517 - DNA, 54 bp, Artificial
  Synthetic oligonucleotide
atacgctaatatgtaagtacaaacgtacttacacctggggtttggatatgggga

SEQ ID NO: 144518 - DNA, 53 bp, Artificial
  Synthetic oligonucleotide
ggtgggtttttccgttgatcggggtggcatttctgctggggatcagctgggtc

SEQ ID NO: 144519 - DNA, 53 bp, Artificial
  Synthetic oligonucleotide
tgagtcatgcccaaagatggtcatcggcttgttaacagtgatgctcccagcga

SEQ ID NO: 144520 - DNA, 53 bp, Artificial
  Synthetic oligonucleotide
ggtcatccgaatcgtgtggtcacaccgtttggcaatccggagattgtatccac

SEQ ID NO: 144521 - DNA, 53 bp, Artificial
  Synthetic oligonucleotide
ccccgagatccaagcgcggagaggggctaagggcggcaaggtatccaagggcg

SEQ ID NO: 144522 - DNA, 53 bp, Artificial
  Synthetic oligonucleotide
ccccgttcccttgtcggtgctgtccttcatagccactccaattttagtcactg

SEQ ID NO: 144523 - DNA, 53 bp, Artificial
  Synthetic oligonucleotide
cagaagagggtcgagatggcgagtgccactccggttttacgcatggtgattac

SEQ ID NO: 144524 - DNA, 53 bp, Artificial
  Synthetic oligonucleotide
acatagagcagcctgttatccgcatcggggcgccagccaaaacggggctccca

SEQ ID NO: 144525 - DNA, 53 bp, Artificial
  Synthetic oligonucleotide
caaggattgacctagctaaagcattgaagtgagttgatgtaggatcgctctta

SEQ ID NO: 144526 - DNA, 53 bp, Artificial
  Synthetic oligonucleotide
cctaaacaccccaagtcatggagttggggttctcttcggctcgccagagtatc

SEQ ID NO: 144527 - DNA, 53 bp, Artificial
  Synthetic oligonucleotide
aagactttgcgaccttctcaggaacaatcggtttgaacgtggtcgcttcaaag

SEQ ID NO: 144528 - DNA, 58 bp, Artificial
  Synthetic oligonucleotide
attgggcatcgcagtgaagtatatggtggaagttagtttttgttactgactgtcttgg

SEQ ID NO: 144529 - DNA, 60 bp, Artificial
  Synthetic oligonucleotide
tatgccagtagttcgagtgcggcggatatagccactgtaggcaaagatgctcaatcattt

SEQ ID NO: 144530 - DNA, 53 bp, Artificial
  Synthetic oligonucleotide
cgccgggtaggggtgaagcggatcccgcgttgttcgcagagtcgttcggctcg

SEQ ID NO: 144531 - DNA, 53 bp, Artificial
  Synthetic oligonucleotide
atgacgccgttcggtgtttcaacgcgagtccagagcacaaagatccgtgcttg

SEQ ID NO: 144532 - DNA, 53 bp, Artificial
  Synthetic oligonucleotide
accgtctttaaggcccgtgtagcctgacgttccactgaggttgatcggcccct

SEQ ID NO: 144533 - DNA, 53 bp, Artificial
  Synthetic oligonucleotide
ctcaccacggctgagcagatgatgctcacgtttggtcttgtgactatacacaa

SEQ ID NO: 144534 - DNA, 53 bp, Artificial
  Synthetic oligonucleotide
agttgccacagctcggggtcactgctgttcagcaccacctgacggtagtttgg

SEQ ID NO: 144535 - DNA, 53 bp, Artificial
  Synthetic oligonucleotide
aaaataggccgacaataaacactcgacagcgtgcgactgtcgaactataatat

SEQ ID NO: 144536 - DNA, 53 bp, Artificial
  Synthetic oligonucleotide
aaaatctcgatgggaacctggtcgggaacagtgtcactgcgcgggtgtttgct

SEQ ID NO: 144537 - DNA, 53 bp, Artificial
  Synthetic oligonucleotide
gacgtgtcattaccatctgggtgtgctcttatgtactgatccaatctacgttg

SEQ ID NO: 144538 - DNA, 53 bp, Artificial
  Synthetic oligonucleotide
agtacggtgattgagtggccctactcaatcattagccggtatagctgttgcga

SEQ ID NO: 144539 - DNA, 53 bp, Artificial
  Synthetic oligonucleotide
gagaaggtcgatgacggtaaacacatctacggggcccctggtgctaggttcac

SEQ ID NO: 144540 - DNA, 60 bp, Artificial
  Synthetic oligonucleotide
gccactggtgaggcaagttcatgggtcgtctacctagccacatctggcgcaatgacactc

SEQ ID NO: 144541 - DNA, 53 bp, Artificial
  Synthetic oligonucleotide
aggtaacggggcggtccggagacatagagcagcctgttatccgcatcggggcg

SEQ ID NO: 144542 - DNA, 52 bp, Artificial
  Synthetic oligonucleotide
aatgaccgctcaccccggatcggttgatatgcctgttaagcctcaaatgttg

SEQ ID NO: 144543 - DNA, 52 bp, Artificial
  Synthetic oligonucleotide
cccgcccagacaaccggagaggggcagggaaaattagcggttatgaactggc

SEQ ID NO: 144544 - DNA, 52 bp, Artificial
  Synthetic oligonucleotide
aatctcgtccagtacagtaagcctatatctcaaacgtgatcgtgagtgatcg

SEQ ID NO: 144545 - DNA, 52 bp, Artificial
  Synthetic oligonucleotide
gtggacgatatggcatcacagcgagccgtttagcctcgactatctggcggag

SEQ ID NO: 144546 - DNA, 52 bp, Artificial
  Synthetic oligonucleotide
agctgatctatgttcacctcgcaccagctgccaacctgactctcgcgctcac

SEQ ID NO: 144547 - DNA, 52 bp, Artificial
  Synthetic oligonucleotide
taaggcccgtgtagcctgacgttccactgaagttgatcggcccctttatggg

SEQ ID NO: 144548 - DNA, 52 bp, Artificial
  Synthetic oligonucleotide
gtcagtgtggctgaccggcatgatgtcactgatacgaagcgagcctgttaca

SEQ ID NO: 144549 - DNA, 52 bp, Artificial
  Synthetic oligonucleotide
ttaatggtacttctgaccatccatccctgatcgcctgcaaatgtactgacag

SEQ ID NO: 144550 - DNA, 52 bp, Artificial
  Synthetic oligonucleotide
accctgcctggtgataatgcggcagcaactcgatccctatatagcgccgccc

SEQ ID NO: 144551 - DNA, 60 bp, Artificial
  Synthetic oligonucleotide
tatctggctgagagggtcatggagaatgttcgcaagggcgaagagcgcctgttctcattg

SEQ ID NO: 144552 - DNA, 52 bp, Artificial
  Synthetic oligonucleotide
tagcttggtttgtggccagcctaacaaggcagtacggacaaacttgatttca

SEQ ID NO: 144553 - DNA, 52 bp, Artificial
  Synthetic oligonucleotide
ttggaagggtacgagacgcactgcgccagcttacacaccgcattcgtggcct

SEQ ID NO: 144554 - DNA, 52 bp, Artificial
  Synthetic oligonucleotide
tcagaaccatgacatgactcattaagcagaagagtcctatggtaacctctgg

SEQ ID NO: 144555 - DNA, 52 bp, Artificial
  Synthetic oligonucleotide
tggaatgatgtttcgatgtgctggctattctatccattgcctcgctccgtgg

SEQ ID NO: 144556 - DNA, 52 bp, Artificial
  Synthetic oligonucleotide
ctgtgcccactttcagaccaggaatggactcggagaagagtaactgcttacg

SEQ ID NO: 144557 - DNA, 52 bp, Artificial
  Synthetic oligonucleotide
tttaaagaggtcgttaatggcaaagagctatcggatcgaaaggcgcgtcact

SEQ ID NO: 144558 - DNA, 52 bp, Artificial
  Synthetic oligonucleotide
tggagtcccgattgtgttagtgaatctgcaatcctggctgatgcgttagtca

SEQ ID NO: 144559 - DNA, 52 bp, Artificial
  Synthetic oligonucleotide
tccatggatcgttttggtgcactaaaatggtgcgcattatacggtcagcacc

SEQ ID NO: 144560 - DNA, 51 bp, Artificial
  Synthetic oligonucleotide
tctatcttggcgtcatatcggcgatggttgcccagaaggcatcgatcaagg

SEQ ID NO: 144561 - DNA, 51 bp, Artificial
  Synthetic oligonucleotide
cagggcagacccgcaagtgcggagtacccataccaacttgtgaccgctgaa

SEQ ID NO: 144562 - DNA, 58 bp, Artificial
  Synthetic oligonucleotide
tatcgttaacattatcgtgtccaagacttctagtcaacaatggtttggactagtctaa

SEQ ID NO: 144563 - DNA, 51 bp, Artificial
  Synthetic oligonucleotide
cagcggggccgagaggcaacccaggcgccataaacgcctattgctgccctt

SEQ ID NO: 144564 - DNA, 51 bp, Artificial
  Synthetic oligonucleotide
tcatcgccgagaactgggtggagatctcgcgccagaacaagacattggagc

SEQ ID NO: 144565 - DNA, 51 bp, Artificial
  Synthetic oligonucleotide
acaatcgcaatggctattccaccaagcgcctaaaaggccagcacggagagg

SEQ ID NO: 144566 - DNA, 51 bp, Artificial
  Synthetic oligonucleotide
cacgtcacagtgcccccaaaacttctcggtgtaggcgggaacctgactggc

SEQ ID NO: 144567 - DNA, 51 bp, Artificial
  Synthetic oligonucleotide
atatcgctccggccataactcggacggtagcatgtccagcgcagaggcgat

SEQ ID NO: 144568 - DNA, 51 bp, Artificial
  Synthetic oligonucleotide
atttcgcgcgcctcttggctcccggcctaatgggtttctaaccgggtgaaa

SEQ ID NO: 144569 - DNA, 51 bp, Artificial
  Synthetic oligonucleotide
acctctcataacacccgaatccgccgttcactcagcggggtgtgctcaccc

SEQ ID NO: 144570 - DNA, 51 bp, Artificial
  Synthetic oligonucleotide
tcccaaacagcatacctatcggcccctcgcctacgggtttattaccccgga

SEQ ID NO: 144571 - DNA, 51 bp, Artificial
  Synthetic oligonucleotide
accgtgcagcgaacctaccgttcttgccctacgctttgaacctccccggct

SEQ ID NO: 144572 - DNA, 51 bp, Artificial
  Synthetic oligonucleotide
ttttggttgtagcagaggccgccgtcttgtgcccgaaagggagacagccaa

SEQ ID NO: 144573 - DNA, 59 bp, Artificial
  Synthetic oligonucleotide
tatatcgtcacagtgacaataattaaggagatcgggtatgaaatcaggtcggttgggta

SEQ ID NO: 144574 - DNA, 51 bp, Artificial
  Synthetic oligonucleotide
aaacgtagaatagccggtctttagttaatcaatcgacaggagtttagagtg

SEQ ID NO: 144575 - DNA, 51 bp, Artificial
  Synthetic oligonucleotide
gatcacaaaatatctgcggcggattatgatgcttgaaaatccgagggatgc

SEQ ID NO: 144576 - DNA, 51 bp, Artificial
  Synthetic oligonucleotide
gagctggagttatcgctggagtatgagcggtatagagggcttgagctgtag

SEQ ID NO: 144577 - DNA, 51 bp, Artificial
  Synthetic oligonucleotide
gactgtcgcactgtgacccagggccgatacccccaagcctggatgtctcgg

SEQ ID NO: 144578 - DNA, 51 bp, Artificial
  Synthetic oligonucleotide
gaccctaaatcgatgtgggtctgtaggagggctctcctatcttgaagcgca

SEQ ID NO: 144579 - DNA, 51 bp, Artificial
  Synthetic oligonucleotide
gaaaatggtgccggtactttcttcccgccagagtcagcctatgaggcatgg

SEQ ID NO: 144580 - DNA, 51 bp, Artificial
  Synthetic oligonucleotide
cttcgacatggagagctatttcagcgaactgggacttgagaaacacttgag

SEQ ID NO: 144581 - DNA, 51 bp, Artificial
  Synthetic oligonucleotide
ctgaggcatcgaaggaactactaccgccatggtgtccttagacaattcacg

SEQ ID NO: 144582 - DNA, 51 bp, Artificial
  Synthetic oligonucleotide
ctccccaacgagccacctttagccacaggggcttcgggataggcgtttgag

SEQ ID NO: 144583 - DNA, 51 bp, Artificial
  Synthetic oligonucleotide
ggggtcgatggccccaccctgcgttttgatataggtaatcgtccccatccc

SEQ ID NO: 144584 - DNA, 56 bp, Artificial
  Synthetic oligonucleotide
atgctaacttggattaagccagcctacccgtattactgtttcgcccgcttcgcggc

SEQ ID NO: 144585 - DNA, 51 bp, Artificial
  Synthetic oligonucleotide
cgtggcaaagcgtttgcataatttcttcgggggggcatacggcgaagtaag

SEQ ID NO: 144586 - DNA, 51 bp, Artificial
  Synthetic oligonucleotide
cggtttgtaatacaggccatctgcatggcgcatgatgaccaggatcccttt

SEQ ID NO: 144587 - DNA, 51 bp, Artificial
  Synthetic oligonucleotide
cgggacgtgtagctctgagcttaggtgcaaggtgggagtcatatgcggtta

SEQ ID NO: 144588 - DNA, 51 bp, Artificial
  Synthetic oligonucleotide
cgcccggacataaccggatcggggacaatggcttgagcatggaatagggct

SEQ ID NO: 144589 - DNA, 51 bp, Artificial
  Synthetic oligonucleotide
aagggatgggcgcggccagacgacccgctcagggcgcggctattgcggcca

SEQ ID NO: 144590 - DNA, 51 bp, Artificial
  Synthetic oligonucleotide
ccggtatgggctggtcaatcgctggggcgaactgtaatgagccggtcaggg

SEQ ID NO: 144591 - DNA, 51 bp, Artificial
  Synthetic oligonucleotide
ccgtatccacgttaccgcgtttcttttgcgaacgaatagacatgatggaag

SEQ ID NO: 144592 - DNA, 51 bp, Artificial
  Synthetic oligonucleotide
ccctatgagcagcggcgagaagggtatcaagagtggcgagagcgtggcttg

SEQ ID NO: 144593 - DNA, 51 bp, Artificial
  Synthetic oligonucleotide
ccccgtacagttggtgcgccgtatgccagtagccgcaacccacgacctgtt

SEQ ID NO: 144594 - DNA, 51 bp, Artificial
  Synthetic oligonucleotide
gtcagactctgccgccctatcatcagctgcataaacaaatactggatcgtc

SEQ ID NO: 144595 - DNA, 60 bp, Artificial
  Synthetic oligonucleotide
gcagagctgcgaaaagagcagcggagagatcgtgggttgagcatgtgatatatcgtcaca

SEQ ID NO: 144596 - DNA, 50 bp, Artificial
  Synthetic oligonucleotide
agccctgtccgagctgtcagggcagccgtttgcgtcaggaagcgcgtcat

SEQ ID NO: 144597 - DNA, 50 bp, Artificial
  Synthetic oligonucleotide
agaccctccggattaaaccgccgctggatcaccacctcatagggctgcgc

SEQ ID NO: 144598 - DNA, 50 bp, Artificial
  Synthetic oligonucleotide
agcctgcagcgtttattccaaggggtgatacgacggcgcctctcgctcca

SEQ ID NO: 144599 - DNA, 50 bp, Artificial
  Synthetic oligonucleotide
actgccttgcgcgttcgccagatgattccgtaaccggtgcgcgacgattt

SEQ ID NO: 144600 - DNA, 50 bp, Artificial
  Synthetic oligonucleotide
acgctccatgcgtcggagcttgtctatcgccccatcaaccccagctttgg

SEQ ID NO: 144601 - DNA, 50 bp, Artificial
  Synthetic oligonucleotide
acgctagggaagcgttatgtctcggcgcttgggcgtgagtgtgtcgagct

SEQ ID NO: 144602 - DNA, 50 bp, Artificial
  Synthetic oligonucleotide
agcgccgccgttccctgttatctgtgccctggacaattaagccaccgcgc

SEQ ID NO: 144603 - DNA, 50 bp, Artificial
  Synthetic oligonucleotide
aatcaggtgcctgctggagcgatccaactggcggttcccttcacgacctt

SEQ ID NO: 144604 - DNA, 50 bp, Artificial
  Synthetic oligonucleotide
acgcgaagctggctctgacgtgacgacgttcagtgtcggtcagcgggtct

SEQ ID NO: 144605 - DNA, 50 bp, Artificial
  Synthetic oligonucleotide
aatacaaccgtggacgctatccgggacgggataaagggattgcccaaaca

SEQ ID NO: 144606 - DNA, 55 bp, Artificial
  Synthetic oligonucleotide
atggcaagagttacatcctcgctccgacattgggaaaaacgtacgaaacgcaaag

SEQ ID NO: 144607 - DNA, 50 bp, Artificial
  Synthetic oligonucleotide
acctgcgagctcgtcgctggttgctagtactgccggtgcaagtgtggccc

SEQ ID NO: 144608 - DNA, 50 bp, Artificial
  Synthetic oligonucleotide
aacaccttgaccaatatgtggcccgagcgccgcagctaaacagtgggggc

SEQ ID NO: 144609 - DNA, 50 bp, Artificial
  Synthetic oligonucleotide
aagtccagacccacatctggtgtgtcgcctgtcgcacagccagagaccgc

SEQ ID NO: 144610 - DNA, 50 bp, Artificial
  Synthetic oligonucleotide
aacaggcgatggctgcccccgaggttcacctctatgtggatggtcaaccg

SEQ ID NO: 144611 - DNA, 50 bp, Artificial
  Synthetic oligonucleotide
acatagccattcgcccccgaccccgcttttcggctagaatccccgcttgc

SEQ ID NO: 144612 - DNA, 50 bp, Artificial
  Synthetic oligonucleotide
acctgacccacggcccagaacaacgacaagcccagtacggacaagcggat

SEQ ID NO: 144613 - DNA, 50 bp, Artificial
  Synthetic oligonucleotide
ttgagctcaacttcgtgatcccgaatatcgagctgctgagtggcaagcgg

SEQ ID NO: 144614 - DNA, 50 bp, Artificial
  Synthetic oligonucleotide
acccaccccggcccctgctttaggctagggcgacctcacctgaacggaaa

SEQ ID NO: 144615 - DNA, 50 bp, Artificial
  Synthetic oligonucleotide
aagacgagcaggggcgtgagtacggccttcagtggaccctgtttcgccaa

SEQ ID NO: 144616 - DNA, 50 bp, Artificial
  Synthetic oligonucleotide
acccctctctttcgcgtgagggctgcaccctaacccgattgccgtcaggg

SEQ ID NO: 144617 - DNA, 58 bp, Artificial
  Synthetic oligonucleotide
atgggctgccggactgctacaagattaagctgcgtggggctgggtaccggttggtgta

SEQ ID NO: 144618 - DNA, 50 bp, Artificial
  Synthetic oligonucleotide
accggttgatccaccagagtgggtcccagcggcacccaggtagcgcgggt

SEQ ID NO: 144619 - DNA, 50 bp, Artificial
  Synthetic oligonucleotide
aagcggctcactgccatcttggggtagggatggcccatcagtcgtgacat

SEQ ID NO: 144620 - DNA, 50 bp, Artificial
  Synthetic oligonucleotide
aagccggcgactaaaccgttaaagctgctgagcgcggccgttgacgtact

SEQ ID NO: 144621 - DNA, 50 bp, Artificial
  Synthetic oligonucleotide
caattctgggggctgaccgcgtgacaggggacgcattttgcgagaagggg

SEQ ID NO: 144622 - DNA, 50 bp, Artificial
  Synthetic oligonucleotide
caccacaaagtggggcgggaagagtgccgtgagagaatggggcgagcgat

SEQ ID NO: 144623 - DNA, 50 bp, Artificial
  Synthetic oligonucleotide
cacttcattccgtctggtaacctttctgataatatttcctcatggagcgc

SEQ ID NO: 144624 - DNA, 50 bp, Artificial
  Synthetic oligonucleotide
ccccacgtcatttgcgcaccagccattggacattcgtcctctgggtgcat

SEQ ID NO: 144625 - DNA, 50 bp, Artificial
  Synthetic oligonucleotide
ccccgcgcaccgaaaatcgtggtacgcaaagggagtgatgaacagccggc

SEQ ID NO: 144626 - DNA, 50 bp, Artificial
  Synthetic oligonucleotide
ccgactgggttggtgataaccggagccaatgtgtgtctggcggcgcatgc

SEQ ID NO: 144627 - DNA, 50 bp, Artificial
  Synthetic oligonucleotide
ccgccataccgagtgcccgggtatccattccgccgactataccggctgat

SEQ ID NO: 144628 - DNA, 60 bp, Artificial
  Synthetic oligonucleotide
atggtcatatgacactctaccgcagcggggctgtgcttattgaatcggcccgggaaatgt

SEQ ID NO: 144629 - DNA, 50 bp, Artificial
  Synthetic oligonucleotide
ccggaccattagataagctgccggcacaatcccggctggagggttaccgg

SEQ ID NO: 144630 - DNA, 50 bp, Artificial
  Synthetic oligonucleotide
ccggctgtaccagcgccagtctggtaagcgcggtcatgacggtagtcggt

SEQ ID NO: 144631 - DNA, 50 bp, Artificial
  Synthetic oligonucleotide
ccgggccatatccagtaactgatcccggctcagtacccgcttcggccgtt

SEQ ID NO: 144632 - DNA, 50 bp, Artificial
  Synthetic oligonucleotide
ccggtggcacacctctagtggtctcggaaggtgcctgcgtgttaggggtt

SEQ ID NO: 144633 - DNA, 50 bp, Artificial
  Synthetic oligonucleotide
ccgtgtgacgtttatctccggtgccgcaaaagttcgcacgcctgatggcg

SEQ ID NO: 144634 - DNA, 50 bp, Artificial
  Synthetic oligonucleotide
ccgttaggtttgattgaacgcgggcagatgacctatggccgcacgccggc

SEQ ID NO: 144635 - DNA, 50 bp, Artificial
  Synthetic oligonucleotide
cctaacgcgaccaccgccataccgagtgcccgggtatccattccgccgac

SEQ ID NO: 144636 - DNA, 50 bp, Artificial
  Synthetic oligonucleotide
cgccgccaacatacagtgcccgctcactacggcataccttccggatccct

SEQ ID NO: 144637 - DNA, 50 bp, Artificial
  Synthetic oligonucleotide
ggtccggagacatagagcagcctgttatccgcatcggggcgccagccaaa

SEQ ID NO: 144638 - DNA, 50 bp, Artificial
  Synthetic oligonucleotide
cgttcgccaccgtcacacagctgggacaggccgcatccagagccttaatc

SEQ ID NO: 144639 - DNA, 59 bp, Artificial
  Synthetic oligonucleotide
tactgcgacaaactctggaatatgtggcctctcaggaacgactgccttttcggacgacc

SEQ ID NO: 144640 - DNA, 58 bp, Artificial
  Synthetic oligonucleotide
gggggtggttgatatccagacgtggatatgagcaatgttttcgaggttaggatcttct

SEQ ID NO: 144641 - DNA, 50 bp, Artificial
  Synthetic oligonucleotide
gcacagtgccccggtagggttagagtcatcgttacttcgcgcccaccaga

SEQ ID NO: 144642 - DNA, 50 bp, Artificial
  Synthetic oligonucleotide
gccttaaaggggccaaaatcttacgaagcacaagaacgatttagggcggc

SEQ ID NO: 144643 - DNA, 50 bp, Artificial
  Synthetic oligonucleotide
ggcacaaaggacgttagcggcgactgccaactatgccaatccgacgggta

SEQ ID NO: 144644 - DNA, 50 bp, Artificial
  Synthetic oligonucleotide
agcgttacccaagcagccggagtgtggtgctggaaaaggcctcacacgcg

SEQ ID NO: 144645 - DNA, 50 bp, Artificial
  Synthetic oligonucleotide
tctcttttacaaatgcttgctcatcgctactcaagttttctagaccaagg

SEQ ID NO: 144646 - DNA, 50 bp, Artificial
  Synthetic oligonucleotide
agctctgagagagcgtcagtccatgggggtgtgactggtcggctcaagga

SEQ ID NO: 144647 - DNA, 50 bp, Artificial
  Synthetic oligonucleotide
aggatcctgtcccacgcgctttaagtcaggggactcgcgcctggcaatca

SEQ ID NO: 144648 - DNA, 50 bp, Artificial
  Synthetic oligonucleotide
aggcacctgggcgctgtatcgtgagcaagggttacgcatgcggttaatgc

SEQ ID NO: 144649 - DNA, 50 bp, Artificial
  Synthetic oligonucleotide
aggccggtactgcattggactgaggaactggtatgggaggtactggagaa

SEQ ID NO: 144650 - DNA, 50 bp, Artificial
  Synthetic oligonucleotide
tcgcctgcacagtcgatcttctaccgtgcagcgaacctaccgctttcccc

SEQ ID NO: 144651 - DNA, 58 bp, Artificial
  Synthetic oligonucleotide
cgaacggcagttattgaacgcgttagagagtttggaaggcgggtacagagtgcagcac

SEQ ID NO: 144652 - DNA, 50 bp, Artificial
  Synthetic oligonucleotide
aggctataatccgcgcctcggagttggctgggcaatcgctgcttcgtcgt

SEQ ID NO: 144653 - DNA, 50 bp, Artificial
  Synthetic oligonucleotide
aggggtgatccgggtcatgtcaggcgcatatctatcggcgggcctgttct

SEQ ID NO: 144654 - DNA, 50 bp, Artificial
  Synthetic oligonucleotide
agtaagcgggggagtcgcaatctggctaaatcctgcccgcacggcgtgtg

SEQ ID NO: 144655 - DNA, 50 bp, Artificial
  Synthetic oligonucleotide
agtgcctgccagtttacccgtcggctctgccgcaacaattggtgtcccgt

SEQ ID NO: 144656 - DNA, 50 bp, Artificial
  Synthetic oligonucleotide
agtgcgcctcacgcatgtcccaaccgggaggttgccaatacatgccatta

SEQ ID NO: 144657 - DNA, 50 bp, Artificial
  Synthetic oligonucleotide
agtgcgggcaagtatcctcggacactgagcgtgcaagggcctgagcgaat

SEQ ID NO: 144658 - DNA, 50 bp, Artificial
  Synthetic oligonucleotide
agttgatcggttggcgttacccgccattcggtccccaacgtcagctgccc

SEQ ID NO: 144659 - DNA, 50 bp, Artificial
  Synthetic oligonucleotide
atcacggctggcgtagtggcatcggtgagtccgcagaacatcccgcgggc

SEQ ID NO: 144660 - DNA, 50 bp, Artificial
  Synthetic oligonucleotide
atcctcggacactgagcgtgcaagggcctgagcgaatcgtccctttccga

SEQ ID NO: 144661 - DNA, 50 bp, Artificial
  Synthetic oligonucleotide
atctggaggccggggaagattgctacaggccctgcttgagagccgtccta

SEQ ID NO: 144662 - DNA, 58 bp, Artificial
  Synthetic oligonucleotide
cgaatgacaaagttcagttgtcctggcgtgaagaatcgaaagggcgattccgtcttga

SEQ ID NO: 144663 - DNA, 50 bp, Artificial
  Synthetic oligonucleotide
atgtacgccagtcctgtccctgtgcgttaacccaggcagcctgatagccg

SEQ ID NO: 144664 - DNA, 50 bp, Artificial
  Synthetic oligonucleotide
attgcctgtctgcgcgctttggtggcacacttctgttatccgcccgtagc

SEQ ID NO: 144665 - DNA, 50 bp, Artificial
  Synthetic oligonucleotide
atttcgcgcgcctcttggctcccggcatatgggtttttcaccgggtgaaa

SEQ ID NO: 144666 - DNA, 50 bp, Artificial
  Synthetic oligonucleotide
caaaggtaacagtttcctaaatctcgaaggctacaacctagtggtatatc

SEQ ID NO: 144667 - DNA, 50 bp, Artificial
  Synthetic oligonucleotide
caaccttgctccattatcaaaccggcaagctggttgtgccttgaagcgcc

SEQ ID NO: 144668 - DNA, 50 bp, Artificial
  Synthetic oligonucleotide
caagcgcgcgccccggtgatagactgccccctttgcaccgagaggaaagc

SEQ ID NO: 144669 - DNA, 60 bp, Artificial
  Synthetic oligonucleotide
cgagccgcacgagaaagctattctcgaggcgttggactcaagcgggcggagattgaacgc

SEQ ID NO: 144670 - DNA, 60 bp, Artificial
  Synthetic oligonucleotide
cgatttagagtctgattgttgcggccaatagatgcataatcctgatagtacaatgccgca

SEQ ID NO: 144671 - DNA, 57 bp, Artificial
  Synthetic oligonucleotide
ctatctaatggctgcaaccttcgtatatggggtgtttttgactcaccgaaacactct

SEQ ID NO: 144672 - DNA, 57 bp, Artificial
  Synthetic oligonucleotide
ggtttaaccgccttctgacaccagacgctaatagcagtaagaggggccgcgatactg

SEQ ID NO: 144673 - DNA, 58 bp, Artificial
  Synthetic oligonucleotide
ggttcaactgtcattgctcattctcctggtgttaaacctagcggctaaagccgctacg

SEQ ID NO: 144674 - DNA, 58 bp, Artificial
  Synthetic oligonucleotide
ggtggtcaacgcccagttgggattgcatgacccggatgatcccttgaacaaacgggca

SEQ ID NO: 144675 - DNA, 55 bp, Artificial
  Synthetic oligonucleotide
ctagccagcatgggccggagtttggaccagaccaaccgggttaccggagcagtac

SEQ ID NO: 144676 - DNA, 58 bp, Artificial
  Synthetic oligonucleotide
gcaaggcgagcttatcctgtaaaagaccctaaatcgatgtgggtctgtaggagggctc

SEQ ID NO: 144677 - DNA, 60 bp, Artificial
  Synthetic oligonucleotide
ctaaacgtagagtgatccatgttcttcacaaggatggtcttgccttgattaaggcaatat

SEQ ID NO: 144678 - DNA, 58 bp, Artificial
  Synthetic oligonucleotide
cggcaaatcgttcaatccggccccgccagggcagcgcaaagacttcgatgcggtgagg

SEQ ID NO: 144679 - DNA, 60 bp, Artificial
  Synthetic oligonucleotide
cggctccgaggtatggaaactatgtcgtaccgctattggatatgttgcgcgcataccttc

SEQ ID NO: 144680 - DNA, 58 bp, Artificial
  Synthetic oligonucleotide
gggtacgaactggcgagctatcaaggctccccgtggctatgggccgatggaaagccgc

SEQ ID NO: 144681 - DNA, 55 bp, Artificial
  Synthetic oligonucleotide
cgtgtggacggcgagctgaatacaaccgtggacgctatccgggacgggataaagg

SEQ ID NO: 144682 - DNA, 59 bp, Artificial
  Synthetic oligonucleotide
cggttggtagcgcttacgccactggtgaggcaagttcatgggtcgtctacctagccaca

SEQ ID NO: 144683 - DNA, 56 bp, Artificial
  Synthetic oligonucleotide
cggttttgccttgggtcgtgtgtctgaggctcccgctgggttagatgctcggtttc

SEQ ID NO: 144684 - DNA, 59 bp, Artificial
  Synthetic oligonucleotide
cgtccgcgcttctcgccaaacatatctcccgttcccttgtcggtgctgtccttcatagc

SEQ ID NO: 144685 - DNA, 52 bp, Artificial
  Synthetic oligonucleotide
cgtctaggacaggtgaggccgttagcggcatagaaagggaaaaccccggaaa

SEQ ID NO: 144686 - DNA, 60 bp, Artificial
  Synthetic oligonucleotide
gacttgaactgtaggaccacagcgcgttgcttggcagctgcgtattccggagagagggag

SEQ ID NO: 144687 - DNA, 56 bp, Artificial
  Synthetic oligonucleotide
tacggtggcaacgtaccttaacgctggcaaggtatttaactggctagctaactcta

SEQ ID NO: 144688 - DNA, 60 bp, Artificial
  Synthetic oligonucleotide
gaaccgcgatccctgatcgcctgcatttgggcatccagtccatccagcagttcccgactt

SEQ ID NO: 144689 - DNA, 60 bp, Artificial
  Synthetic oligonucleotide
gaaacctaccgtcacacatatcgacaccacagtttttcacatcaagatctaagtgatatt

SEQ ID NO: 144690 - DNA, 54 bp, Artificial
  Synthetic oligonucleotide
cccgttggatctggcggcaccttaccccgacctcgtttgcggattacgttgatc

SEQ ID NO: 144691 - DNA, 58 bp, Artificial
  Synthetic oligonucleotide
gtgttactgagggggccagaaatgaaaacgactgtattacagttaatggctccagcat

SEQ ID NO: 144692 - DNA, 55 bp, Artificial
  Synthetic oligonucleotide
gggcaaggttcactacccgacgattcgggcggataaattcggcttgtgttagcca

SEQ ID NO: 144693 - DNA, 59 bp, Artificial
  Synthetic oligonucleotide
ccgaagattgccgaggctgtagagcccaagccccggaaccatgaagacgatctagagcg

SEQ ID NO: 144694 - DNA, 60 bp, Artificial
  Synthetic oligonucleotide
ctttcgctacgctcaatggctctgtatagggttgaacgatgcacgcccaatatggcggct

SEQ ID NO: 144695 - DNA, 52 bp, Artificial
  Synthetic oligonucleotide
gtgtgtgtaaataaacgcggtcgcccattttgggtggccgccattttttaac

SEQ ID NO: 144696 - DNA, 59 bp, Artificial
  Synthetic oligonucleotide
cttcatagccactccatttttagtcactgtgacaataaaagattatgcgttattgtaac

SEQ ID NO: 144697 - DNA, 59 bp, Artificial
  Synthetic oligonucleotide
gggcgggagtatcgagagtatgggtgatcgggagtacggtgattgagtggccctactca

SEQ ID NO: 144698 - DNA, 60 bp, Artificial
  Synthetic oligonucleotide
tacgcatagtcgagcatgtagccagaccatgcgagtacagccagcgataagccgaatgta

SEQ ID NO: 144699 - DNA, 54 bp, Artificial
  Synthetic oligonucleotide
gtaggccgtccatcaggccgtgggtttggcctgtgggcgggggtgttgtccacg

SEQ ID NO: 144700 - DNA, 55 bp, Artificial
  Synthetic oligonucleotide
cctaacaacccataataaagatggtgtcgccagttaatggcgacacttcttaccc

SEQ ID NO: 144701 - DNA, 60 bp, Artificial
  Synthetic oligonucleotide
ctctggagcgcgtgagagggagctgccgcaagcagtctcgatagtccggagcaaggcgag

SEQ ID NO: 144702 - DNA, 60 bp, Artificial
  Synthetic oligonucleotide
cctacgggatggccgcacctcgactctggcccctgaggtggtggccaggttgcatgaggc

SEQ ID NO: 144703 - DNA, 57 bp, Artificial
  Synthetic oligonucleotide
ctctcttctataaaaaagctaaccgcgaattaagataataagtgcaacgcgtgagga

SEQ ID NO: 144704 - DNA, 60 bp, Artificial
  Synthetic oligonucleotide
cctcagatcggacatcgtagtgaggtgtatggctaaacgttgctcaggcgtaggcacctg

SEQ ID NO: 144705 - DNA, 60 bp, Artificial
  Synthetic oligonucleotide
ctctcaagaggacatatgcagagctgctgacactaactcgccaaaagagaccccattcat

SEQ ID NO: 144706 - DNA, 56 bp, Artificial
  Synthetic oligonucleotide
cctttgcgtaggactccgagccaaagcgcccggataagtccctattcaagcggctg

SEQ ID NO: 144707 - DNA, 60 bp, Artificial
  Synthetic oligonucleotide
acttaatgctgctcagtttttgacacaagatatgaagtgtaccgatagcgcaaccgaaga

SEQ ID NO: 144708 - DNA, 54 bp, Artificial
  Synthetic oligonucleotide
gcttaaaaatagagaatacgctaatatgtaagtacaaacgtacttacacctggg

SEQ ID NO: 144709 - DNA, 60 bp, Artificial
  Synthetic oligonucleotide
taatgctgggtgtttctgtaggtcactcaaattagagataacatcgtttgcctggtcagg

SEQ ID NO: 144710 - DNA, 55 bp, Artificial
  Synthetic oligonucleotide
tgcccgttgggtatggaaccgatttacccccgcagggtttagccaggtgcaagca

SEQ ID NO: 144711 - DNA, 60 bp, Artificial
  Synthetic oligonucleotide
ggagagctgtaattcagtccagccccgagcttcagcaatatcgaccattgaggccgctac

SEQ ID NO: 144712 - DNA, 60 bp, Artificial
  Synthetic oligonucleotide
actctttgagcgcgttgcaaaaggtgtgcagcgatgcgctcaggagctgcgggaagctat

SEQ ID NO: 144713 - DNA, 60 bp, Artificial
  Synthetic oligonucleotide
ttcagcagcgctatagcagcgcggtgatctcatgggctgccgaagaggccccgcgaccgg

SEQ ID NO: 144714 - DNA, 51 bp, Artificial
  Synthetic oligonucleotide
gcgccgggggtggttaccacctgcgccgggggtggttaccacctgcgccgg

SEQ ID NO: 144715 - DNA, 58 bp, Artificial
  Synthetic oligonucleotide
actatgggtactatcttgaggctgttgtggcccgtacctgtgcggccaagcaaaagcc

SEQ ID NO: 144716 - DNA, 59 bp, Artificial
  Synthetic oligonucleotide
tgcctaattaacgttgacgtttacatcagcaggactttgataattaggtcgctgtaatc

SEQ ID NO: 144717 - DNA, 57 bp, Artificial
  Synthetic oligonucleotide
tgttaccaaaggctttcacctttggcgctttgtcgtattcgctcggattggacgcaa

SEQ ID NO: 144718 - DNA, 60 bp, Artificial
  Synthetic oligonucleotide
tgcggcggagctgcaggactacctacaaacatcgctcgggtgcgaaatcacgcgcacagg

SEQ ID NO: 144719 - DNA, 56 bp, Artificial
  Synthetic oligonucleotide
acccatgtttaccacgtatctgaattgttcttttccgttggatatggctcttccta

SEQ ID NO: 144720 - DNA, 57 bp, Artificial
  Synthetic oligonucleotide
cacactttgatgtgtcatttagtgaattttggctttcctcccacaacgtcgaatttc

SEQ ID NO: 144721 - DNA, 60 bp, Artificial
  Synthetic oligonucleotide
ttataccgcggattttgcagtaactgcgtgcgctgagtcatatggtcgcctttaccataa

SEQ ID NO: 144722 - DNA, 60 bp, Artificial
  Synthetic oligonucleotide
ttagcgaccttcggcgagcgctgggatagccagtacccgcagatagcgcgctcgtggcag

SEQ ID NO: 144723 - DNA, 55 bp, Artificial
  Synthetic oligonucleotide
acgcaatggatttcctgttggatggcgtgtaacgtactgtctataaaaaacaaac

SEQ ID NO: 144724 - DNA, 55 bp, Artificial
  Synthetic oligonucleotide
tggaataggtgaagttgccgtggggtggctagtacggtaacgtactgtccagaaa

SEQ ID NO: 144725 - DNA, 60 bp, Artificial
  Synthetic oligonucleotide
tgtggtggaatgagcttcgggcgggagtatcgagagtatggtgatcgggagtacggtgat

SEQ ID NO: 144726 - DNA, 60 bp, Artificial
  Synthetic oligonucleotide
tggcccactatgccctgttgtccgccgatacatggcggcaacggctgctcgatgcaggtg

SEQ ID NO: 144727 - DNA, 49 bp, Artificial
  Synthetic oligonucleotide
aaggccaacgagggggggggctaggggttataagccggaagccaagaaa

SEQ ID NO: 144728 - DNA, 60 bp, Artificial
  Synthetic oligonucleotide
ttattgtcaccgtgacgttaatatctgccaattttgcacggtaggctgcttgccgttctg

SEQ ID NO: 144729 - DNA, 58 bp, Artificial
  Synthetic oligonucleotide
aaccatcaccagggagattgtcaactgggctgcgaatcttccctgttcgccttacgac

SEQ ID NO: 144730 - DNA, 52 bp, Artificial
  Synthetic oligonucleotide
aacgaccaacccggctttgttcgcagaacgctcttcgtggaaacgaaaacga

SEQ ID NO: 144731 - DNA, 55 bp, Artificial
  Synthetic oligonucleotide
gttaacagaaccggctcgtatcagcatacccagacgagttttgttaataaccgcg

SEQ ID NO: 144732 - DNA, 59 bp, Artificial
  Synthetic oligonucleotide
gcataattggcttcccatttagatcggtagtacttcctagccccgccaatctcacgcca

SEQ ID NO: 144733 - DNA, 55 bp, Artificial
  Synthetic oligonucleotide
cgaagtacatgatgcgtacaagggtatgtatcggcttatcgctgcgcctgagtcc

SEQ ID NO: 144734 - DNA, 55 bp, Artificial
  Synthetic oligonucleotide
cgctgctcggagaatctgccgaagccgaacccacagcctggaagccggtactcaa

SEQ ID NO: 144735 - DNA, 55 bp, Artificial
  Synthetic oligonucleotide
cgctgcaatgtagctcgatcaacgtgccggccgcctcggggttcgcgccatcctt

SEQ ID NO: 144736 - DNA, 55 bp, Artificial
  Synthetic oligonucleotide
ggttatctcgattttcgtgattcagcttccgtgtcggcgcgtattgtttgcccga

SEQ ID NO: 144737 - DNA, 55 bp, Artificial
  Synthetic oligonucleotide
cgctcacgtctatctcaaacgaaacagaactacctcatccgaccgttctccggtt

SEQ ID NO: 144738 - DNA, 55 bp, Artificial
  Synthetic oligonucleotide
cgctatgtatttgtcggcggcagcggcaacctgcgggcttagtcttcctggccca

SEQ ID NO: 144739 - DNA, 55 bp, Artificial
  Synthetic oligonucleotide
ggctgccgcatcctttgccacgggctcgacgaactttgaaacattgcgcagggta

SEQ ID NO: 144740 - DNA, 55 bp, Artificial
  Synthetic oligonucleotide
gcgcgccgattcatcgaccgcggcggcatcgccgcgcccaatggcctgcagcatg

SEQ ID NO: 144741 - DNA, 55 bp, Artificial
  Synthetic oligonucleotide
gcgccttgtcaccatcgtatttgatgctggaattgctcccgatttcaggtacttt

SEQ ID NO: 144742 - DNA, 55 bp, Artificial
  Synthetic oligonucleotide
gcgcacggtatttggggacgataccctgccggaaacccactgacgccagacatcg

SEQ ID NO: 144743 - DNA, 58 bp, Artificial
  Synthetic oligonucleotide
tcgcttcttcttgcgcctggtctaaggtggtggccttcaacacggtaaaggtgcgctc

SEQ ID NO: 144744 - DNA, 55 bp, Artificial
  Synthetic oligonucleotide
gggaaaggcgccgagagagggatagcggcaacgtcgcatgttcatgcgatctccc

SEQ ID NO: 144745 - DNA, 55 bp, Artificial
  Synthetic oligonucleotide
gcgaggcgacattcaccaattcgatcgtgcgtggttcgaccttcgggctgtacgc

SEQ ID NO: 144746 - DNA, 55 bp, Artificial
  Synthetic oligonucleotide
gcgagctgcccgtcgaataccgctggtcgagccgcttcatcttcatggactcgca

SEQ ID NO: 144747 - DNA, 55 bp, Artificial
  Synthetic oligonucleotide
gcgagaaatcacagggtttacgcaaattacccaaattttggagacaagcacgtct

SEQ ID NO: 144748 - DNA, 55 bp, Artificial
  Synthetic oligonucleotide
gcgaatcctctggcactactctatgcggtctaataataaagtcatctagacccct

SEQ ID NO: 144749 - DNA, 54 bp, Artificial
  Synthetic oligonucleotide
gggaggccaccatacccgtttacaaagcgaacaggaaagtcaatgaaatcaacg

SEQ ID NO: 144750 - DNA, 55 bp, Artificial
  Synthetic oligonucleotide
gcctaccaagcacatcgtatctatagcctacttcatgattaagggcatcgatgcg

SEQ ID NO: 144751 - DNA, 55 bp, Artificial
  Synthetic oligonucleotide
gcctaatagggaaatttcatggagtaacagcgtcggtaacagagtcgggatatgg

SEQ ID NO: 144752 - DNA, 55 bp, Artificial
  Synthetic oligonucleotide
gccgtcagcctcgcagagcaggattccccgttgagcacgaagtgcgaataagggg

SEQ ID NO: 144753 - DNA, 55 bp, Artificial
  Synthetic oligonucleotide
gccggacgcctgcgcgaaattccccttctcggcagtcagattggcgtcgtgaact

SEQ ID NO: 144754 - DNA, 60 bp, Artificial
  Synthetic oligonucleotide
taattgcgtcaccgttttgtgttagctgatacatgttcaaatctccgcatcaataaagac

SEQ ID NO: 144755 - DNA, 55 bp, Artificial
  Synthetic oligonucleotide
gccggaattctgccggactgaatgcgtaatttggagtgaattgaagtgatcgcgg

SEQ ID NO: 144756 - DNA, 55 bp, Artificial
  Synthetic oligonucleotide
gccgacatgatcccttggcacatgttgttcttcagggtttccaaaggaatcccgt

SEQ ID NO: 144757 - DNA, 55 bp, Artificial
  Synthetic oligonucleotide
gccgacaatgttcatcgcacgttccaactcggggtcttgacgctcgcgcagtcgc

SEQ ID NO: 144758 - DNA, 55 bp, Artificial
  Synthetic oligonucleotide
gccctctttcaattgctcgatcagcttctcggccactgtctcgtgaaatggcttt

SEQ ID NO: 144759 - DNA, 55 bp, Artificial
  Synthetic oligonucleotide
gggattcggggacattgccatcgcagataggcctttgagtaagataaggcctggc

SEQ ID NO: 144760 - DNA, 55 bp, Artificial
  Synthetic oligonucleotide
ggccaccagagtgacgctgctcaagttggcttcaaactcttggccgtcatcctcg

SEQ ID NO: 144761 - DNA, 55 bp, Artificial
  Synthetic oligonucleotide
ggccgtttggaacagttgggtacggggctggcgctcccatttgctgattgggcag

SEQ ID NO: 144762 - DNA, 55 bp, Artificial
  Synthetic oligonucleotide
ggcaatcgtaaagagggtgtggcggatgtgcccgagagccaacgcagaagcgcct

SEQ ID NO: 144763 - DNA, 55 bp, Artificial
  Synthetic oligonucleotide
ggatgcttatttatggctaacgactctcttaaatccaaacagccccggcgaacct

SEQ ID NO: 144764 - DNA, 55 bp, Artificial
  Synthetic oligonucleotide
ggagtctacgtacatacggaccaccgaatacggatcacaggagaaacgggccgtg

SEQ ID NO: 144765 - DNA, 60 bp, Artificial
  Synthetic oligonucleotide
gatcatgtgcaacttcatagaaacgctcggggtcgtgtccggtgacactgccaacggtgg

SEQ ID NO: 144766 - DNA, 53 bp, Artificial
  Synthetic oligonucleotide
ggagcgttaccttttgcgttaccatcggcgttagttttatggattgccaccct

SEQ ID NO: 144767 - DNA, 55 bp, Artificial
  Synthetic oligonucleotide
ggaattccggggcccagtgcaatagtctacgctcgagccacgtaacacagtacac

SEQ ID NO: 144768 - DNA, 55 bp, Artificial
  Synthetic oligonucleotide
gctgtgctccatattggcggctgggtattgttgggactctccgttgcagccacag

SEQ ID NO: 144769 - DNA, 55 bp, Artificial
  Synthetic oligonucleotide
gctgggctcttacttttcataacggcagtttcacgtggtttacgcactaactgac

SEQ ID NO: 144770 - DNA, 55 bp, Artificial
  Synthetic oligonucleotide
gctgggcaggtgacagactatctgtatcggaatgctgtagctggcagaccggaag

SEQ ID NO: 144771 - DNA, 55 bp, Artificial
  Synthetic oligonucleotide
gctccggtgtgagcccatacattgcgcctatcggttcgagcgttatgcccacccg

SEQ ID NO: 144772 - DNA, 55 bp, Artificial
  Synthetic oligonucleotide
ggctcgtatcagcatacccagacgagttttgttaataaccgcgtgaggccctacc

SEQ ID NO: 144773 - DNA, 55 bp, Artificial
  Synthetic oligonucleotide
gctcaggattgatgcgtccgtaatgcaccttacgcccctgatagatttgtagccc

SEQ ID NO: 144774 - DNA, 55 bp, Artificial
  Synthetic oligonucleotide
gctagttttcatggcggctgagtcctctgtttgaactcctataaccttgatatgc

SEQ ID NO: 144775 - DNA, 55 bp, Artificial
  Synthetic oligonucleotide
ggctcttcgccgtacccaggcaacaggatacgggcgtaggatgggaaagtggcca

SEQ ID NO: 144776 - DNA, 59 bp, Artificial
  Synthetic oligonucleotide
gagttggggacacgtgccgcacacaccgcacttaccgagctatcgaacctttcgcgcac

SEQ ID NO: 144777 - DNA, 55 bp, Artificial
  Synthetic oligonucleotide
gcgtcaaccgcccagacataagaattctttatgaccctgcatacgaactaacaat

SEQ ID NO: 144778 - DNA, 55 bp, Artificial
  Synthetic oligonucleotide
gcggccagaatagtgatattcggacaactagggacaaccgtgaatcctacggtgt

SEQ ID NO: 144779 - DNA, 55 bp, Artificial
  Synthetic oligonucleotide
gcggagttgtgcggaaacatgacgggaatacgatcagttcaacgcgccttccaag

SEQ ID NO: 144780 - DNA, 55 bp, Artificial
  Synthetic oligonucleotide
gcgctttcatgagactggacttaccaacgccggccggacctgagagtagggtggg

SEQ ID NO: 144781 - DNA, 55 bp, Artificial
  Synthetic oligonucleotide
gacgggagtccgtcatccacacgacgatggaaccatcagccatcgcacagccgga

SEQ ID NO: 144782 - DNA, 55 bp, Artificial
  Synthetic oligonucleotide
gacgccggtaccagccgattccaaggtcccatcatgagccgcgtagaacaactcc

SEQ ID NO: 144783 - DNA, 55 bp, Artificial
  Synthetic oligonucleotide
gacgacatgggcgtactttgtcggtacatcctgaaacataaacaagcgcccgact

SEQ ID NO: 144784 - DNA, 55 bp, Artificial
  Synthetic oligonucleotide
gaccaagcaggcggcctatgtaatacgaaatggcatcgcccagtacagcacccgc

SEQ ID NO: 144785 - DNA, 55 bp, Artificial
  Synthetic oligonucleotide
gaccaactacaaccccattgctacgaatagcggccctacttttaagtgagcccac

SEQ ID NO: 144786 - DNA, 55 bp, Artificial
  Synthetic oligonucleotide
gaatgcaagctgaattagcgtaatcgacgcactccctgggaaaacccggagaaac

SEQ ID NO: 144787 - DNA, 60 bp, Artificial
  Synthetic oligonucleotide
tcccgtggctcattgccttgccccggccagactctgcatgacgctgcgcttcgcatcttc

SEQ ID NO: 144788 - DNA, 55 bp, Artificial
  Synthetic oligonucleotide
gaatccgtacacaactgggtctaatcacacacgtggggttgctgttgatttaggg

SEQ ID NO: 144789 - DNA, 55 bp, Artificial
  Synthetic oligonucleotide
gaaatcatgcgaagtacttctggatcccattgcgagacgtagttgccgacacgcg

SEQ ID NO: 144790 - DNA, 54 bp, Artificial
  Synthetic oligonucleotide
cttggttttcagggcgatacgagcggttttcgggagtgcgggcgttatggcgtc

SEQ ID NO: 144791 - DNA, 55 bp, Artificial
  Synthetic oligonucleotide
gggtagttgctgcaaccccaccagaacatgcctttcttcttcgtgctggcccgcc

SEQ ID NO: 144792 - DNA, 55 bp, Artificial
  Synthetic oligonucleotide
cttgccgctcgatcaggtcttcaagccggtcctcgatctttccgcctggtcgtgc

SEQ ID NO: 144793 - DNA, 55 bp, Artificial
  Synthetic oligonucleotide
cttcgctcaaggcgtcttctgcgaacgcgccggcacggtcggcctcgtcgggatc

SEQ ID NO: 144794 - DNA, 55 bp, Artificial
  Synthetic oligonucleotide
cttccgagaacagggccagtgtttggcgctcccgcagcttgtggctcgccctggg

SEQ ID NO: 144795 - DNA, 55 bp, Artificial
  Synthetic oligonucleotide
cttcaatgtcaccctcgcagtcgctgtgcgcgtttgctgtccaagcaatgcacct

SEQ ID NO: 144796 - DNA, 55 bp, Artificial
  Synthetic oligonucleotide
cttacagacggtattgcgaaatcctagcgtcacaacagctttggtagaatccccg

SEQ ID NO: 144797 - DNA, 55 bp, Artificial
  Synthetic oligonucleotide
gggtcaactactcaggatatctgcatgcctcccaaactcccctcgctacacagcc

SEQ ID NO: 144798 - DNA, 55 bp, Artificial
  Synthetic oligonucleotide
cacatacggagcaactttccgaccgtaagatcggggtcgtcccaacccatggcga

SEQ ID NO: 144799 - DNA, 55 bp, Artificial
  Synthetic oligonucleotide
ctggttcgaccctgtcagcgcctcctacgtatgtctcaatgagcctgatgatccc

SEQ ID NO: 144800 - DNA, 51 bp, Artificial
  Synthetic oligonucleotide
ctggaggaaaccacgggagaaatccgaagaagtcccaacgccccaattcct

SEQ ID NO: 144801 - DNA, 55 bp, Artificial
  Synthetic oligonucleotide
ctgcgctgtcggaacatgacgactctattattcttgcgaaagccggaaatctacc

SEQ ID NO: 144802 - DNA, 55 bp, Artificial
  Synthetic oligonucleotide
gggcaatgactaagagggcactactaacttgctcacccgtagcagcaagcatgtc

SEQ ID NO: 144803 - DNA, 55 bp, Artificial
  Synthetic oligonucleotide
gggccaggttcgatcttgttagcaatatggctacaccgcccttgtatagcaaaac

SEQ ID NO: 144804 - DNA, 55 bp, Artificial
  Synthetic oligonucleotide
gcatggccatgactacagatattgtcagtcgcgtagacagccccctcgacaccat

SEQ ID NO: 144805 - DNA, 55 bp, Artificial
  Synthetic oligonucleotide
gcaggcaggttcggcgacgtaagactcacgtaagcttgtcacttagcaaacacga

SEQ ID NO: 144806 - DNA, 55 bp, Artificial
  Synthetic oligonucleotide
gcacgtctagtgtgttaagattatgggcttttctggctaattgcacgggcgaaac

SEQ ID NO: 144807 - DNA, 55 bp, Artificial
  Synthetic oligonucleotide
gcaccgccaacctagggaaaacaccgattcttgctgcctatttgaagaaggtgtg

SEQ ID NO: 144808 - DNA, 55 bp, Artificial
  Synthetic oligonucleotide
gcaccaggttgaccaggctcccacggcttttgccatggagcggtgccctctttca

SEQ ID NO: 144809 - DNA, 46 bp, Artificial
  Synthetic oligonucleotide
cggttataacaaccaggtttaataaaaggttaccttcggttaaaaa

SEQ ID NO: 144810 - DNA, 55 bp, Artificial
  Synthetic oligonucleotide
gatttcacagttgaacttaagcacgtaggtaaaatgcctaaagcggctatgggtc

SEQ ID NO: 144811 - DNA, 55 bp, Artificial
  Synthetic oligonucleotide
gatgggcccggtgagcgtcggaaaggcgctggaagcccgcaggggtcgagacgcg

SEQ ID NO: 144812 - DNA, 55 bp, Artificial
  Synthetic oligonucleotide
gatgcacctgtccgccattagacttaattagtgtggtgtaacgctcagtcatagc

SEQ ID NO: 144813 - DNA, 55 bp, Artificial
  Synthetic oligonucleotide
gatcgaatgctttatcagggaaatgtttgtccgtaatgtacctttctgccagtgt

SEQ ID NO: 144814 - DNA, 55 bp, Artificial
  Synthetic oligonucleotide
gatatctataagcaagcgataactagtgcaggaacgggatgtatggcagctctcg

SEQ ID NO: 144815 - DNA, 55 bp, Artificial
  Synthetic oligonucleotide
gagtgaataccgccagtgtaccgcctcgcgtcttgaacttgagttgcccaagccg

SEQ ID NO: 144816 - DNA, 55 bp, Artificial
  Synthetic oligonucleotide
gaggcatagacgcatgttagcggctagtcgcctgttattcatttcaggactttgc

SEQ ID NO: 144817 - DNA, 55 bp, Artificial
  Synthetic oligonucleotide
gaggacggttcgtcggatatccatggtgcctactgaagtgaatacgggccagcaa

SEQ ID NO: 144818 - DNA, 55 bp, Artificial
  Synthetic oligonucleotide
gacttaatcatcactctgcacctgtagatgtgcgtgagagggtttctatgtctgg

SEQ ID NO: 144819 - DNA, 55 bp, Artificial
  Synthetic oligonucleotide
gactgtttgatcgctgaatgcccggaagacagacgcgatccgatagaacgctagc

SEQ ID NO: 144820 - DNA, 55 bp, Artificial
  Synthetic oligonucleotide
gacgaggaacagcctaggtaagtaatcgcggggtgcgcgtaccccaacaggcaac

SEQ ID NO: 144821 - DNA, 54 bp, Artificial
  Synthetic oligonucleotide
ggggcgttttaggactaagccacgttgagacagctcgttggggcggacttccaa

SEQ ID NO: 144822 - DNA, 55 bp, Artificial
  Synthetic oligonucleotide
gactccgtgcgaacgcaagacaaaccgtatagccttacacttactgctttgctac

SEQ ID NO: 144823 - DNA, 55 bp, Artificial
  Synthetic oligonucleotide
aggaagccttaatcaaagttgcttataacggatatgctgaagtcgcaactggtgt

SEQ ID NO: 144824 - DNA, 55 bp, Artificial
  Synthetic oligonucleotide
agctttagtcgtcatatccgggagccttgcagtcgttcgtgccattgggcgatcg

SEQ ID NO: 144825 - DNA, 55 bp, Artificial
  Synthetic oligonucleotide
agcggcggaatatgcgtcaatatcatgaacctgattctagaaatgcacgttatgc

SEQ ID NO: 144826 - DNA, 55 bp, Artificial
  Synthetic oligonucleotide
tcagtgtgtgtgcaagaacggccacactcagctagaagaggtcgaatattattaa

SEQ ID NO: 144827 - DNA, 55 bp, Artificial
  Synthetic oligonucleotide
agcatacgtacacgcaacgattgatcgaactgggttatgccgatacgatgcggcg

SEQ ID NO: 144828 - DNA, 54 bp, Artificial
  Synthetic oligonucleotide
tccaattatttccacgatgagaaagacccaggtgtccaaaacgaacttactaaa

SEQ ID NO: 144829 - DNA, 55 bp, Artificial
  Synthetic oligonucleotide
agcagcgcctcgatgtccagcgggtggcccgaggccttcaggtagtccggcatct

SEQ ID NO: 144830 - DNA, 55 bp, Artificial
  Synthetic oligonucleotide
tccatcaggccagtggcagcatcggcccgagcacgccggtcagcacgatttcgcc

SEQ ID NO: 144831 - DNA, 60 bp, Artificial
  Synthetic oligonucleotide
caagcgctgtcaataatggctgagctgcgtttaccgcataaggcgtaggctccatgcgtc

SEQ ID NO: 144832 - DNA, 55 bp, Artificial
  Synthetic oligonucleotide
tccccttaggcatatcaatctccctaataggcaatcttgcaaattccgaggcagg

SEQ ID NO: 144833 - DNA, 55 bp, Artificial
  Synthetic oligonucleotide
agaggtccgcgccctggtgatggcttggctcgatgccctcgcagtacagggcaaa

SEQ ID NO: 144834 - DNA, 55 bp, Artificial
  Synthetic oligonucleotide
acgttataggtaggcgactttacgacgaagtagctgctgggtacgtggccatcat

SEQ ID NO: 144835 - DNA, 55 bp, Artificial
  Synthetic oligonucleotide
tccgaaagcgagcctcatggacagattcgaccaataccgtgtcttcgcccaagtc

SEQ ID NO: 144836 - DNA, 55 bp, Artificial
  Synthetic oligonucleotide
acggagatataggtcgtatctatcggagacgttctggcattgataacgcccgagg

SEQ ID NO: 144837 - DNA, 55 bp, Artificial
  Synthetic oligonucleotide
tcgctgtggccctggctcatgagctggatagcgttgatgccccggtagcgcttgc

SEQ ID NO: 144838 - DNA, 55 bp, Artificial
  Synthetic oligonucleotide
tcgcttggatacgaagcgactgcgaccctggctgcctaattgcgccgacttgccc

SEQ ID NO: 144839 - DNA, 55 bp, Artificial
  Synthetic oligonucleotide
tcggacatgagaagaatctccaggctaggactgacgtcattgtagccagcaaaat

SEQ ID NO: 144840 - DNA, 55 bp, Artificial
  Synthetic oligonucleotide
accatagccgccattgttctggcctatttgaaacggggtgacgcagccggtacgg

SEQ ID NO: 144841 - DNA, 55 bp, Artificial
  Synthetic oligonucleotide
attccagctcgccccataagccagctagtgagttagtccataatgtcaaagtgat

SEQ ID NO: 144842 - DNA, 60 bp, Artificial
  Synthetic oligonucleotide
gcgcattagcagtggtacgtatcattgcaagcgctgtcaataatggctgagctgcgttta

SEQ ID NO: 144843 - DNA, 56 bp, Artificial
  Synthetic oligonucleotide
caacaatgcagcgtcgtaactttgcgcggcgtaatttgacggaatacgaccgtact

SEQ ID NO: 144844 - DNA, 55 bp, Artificial
  Synthetic oligonucleotide
tagaccctgttactgccgcaagattagctcctaacgacagtcaaagaatttcgcg

SEQ ID NO: 144845 - DNA, 55 bp, Artificial
  Synthetic oligonucleotide
atggcgacttcctgcacggcgagccacgtttcgacggccagccactcaccgtgat

SEQ ID NO: 144846 - DNA, 55 bp, Artificial
  Synthetic oligonucleotide
atgctctgcgacatccttaccgaaatgatccgcgcgactgcatcgaccgccccgc

SEQ ID NO: 144847 - DNA, 55 bp, Artificial
  Synthetic oligonucleotide
atgcgcgcggggatacgctgaaggaggacgggtgcctgtccccggatggagcatg

SEQ ID NO: 144848 - DNA, 55 bp, Artificial
  Synthetic oligonucleotide
atgacggttctccgaaattatgcggcgggagccacgcggcctttccagggacgcg

SEQ ID NO: 144849 - DNA, 55 bp, Artificial
  Synthetic oligonucleotide
atcgtccctgtgatgaccaagtgcgatcttcgtgcaacccaactcatcgctcact

SEQ ID NO: 144850 - DNA, 54 bp, Artificial
  Synthetic oligonucleotide
tagggagcggaacgcggcaaaaggcctagaggctatcccggatagggtagaccc

SEQ ID NO: 144851 - DNA, 55 bp, Artificial
  Synthetic oligonucleotide
tagtatatcgttcggaatatgctctgaagtacgggtctcgccgtgcaaataaatt

SEQ ID NO: 144852 - DNA, 55 bp, Artificial
  Synthetic oligonucleotide
tatgcctgtgtaacgacaccatgggcgcaaactttagggcacggggatggtaggg

SEQ ID NO: 144853 - DNA, 55 bp, Artificial
  Synthetic oligonucleotide
aggtccaccatgcttcgacattccgcgttttcgctgacccgtctgggcgccgcat

SEQ ID NO: 144854 - DNA, 60 bp, Artificial
  Synthetic oligonucleotide
ctagccgtccacaacaaggctagcgccataagtactcgctattaattccctcagccactg

SEQ ID NO: 144855 - DNA, 55 bp, Artificial
  Synthetic oligonucleotide
tcaagcccaaggtcgcccgcaatcacggccagcgcctcacgtcgctcgtcttcct

SEQ ID NO: 144856 - DNA, 53 bp, Artificial
  Synthetic oligonucleotide
aggggaggcgagggtaaatgggtgacgacacgtagtatcccaaaactttcaga

SEQ ID NO: 144857 - DNA, 55 bp, Artificial
  Synthetic oligonucleotide
agggcgttaacagcctcgccccgattgagcacccggcgcaactcgttcctgaaag

SEQ ID NO: 144858 - DNA, 55 bp, Artificial
  Synthetic oligonucleotide
tcaatctcagcggggtgcctggaacaaccgtgccggtcgggtctctggcggaaac

SEQ ID NO: 144859 - DNA, 55 bp, Artificial
  Synthetic oligonucleotide
tcagcggatctgcgtctttgctggccaagggcaaacgcagctttacgagctgtcc

SEQ ID NO: 144860 - DNA, 55 bp, Artificial
  Synthetic oligonucleotide
aggcagcacggtctccagggcggcaccgatggccagcaggtcacggtccgatcca

SEQ ID NO: 144861 - DNA, 55 bp, Artificial
  Synthetic oligonucleotide
aagtgaacggccacccacctggctccgccgagtatcaacgggtggctgacttggt

SEQ ID NO: 144862 - DNA, 55 bp, Artificial
  Synthetic oligonucleotide
tgtccacgagccaatcttccagtaattctggcgtgcgggcattaatcgatgggaa

SEQ ID NO: 144863 - DNA, 55 bp, Artificial
  Synthetic oligonucleotide
aagcgtgagccacgatttagtgtgcggtcaggatgtatgtcattagctgcctgac

SEQ ID NO: 144864 - DNA, 55 bp, Artificial
  Synthetic oligonucleotide
tgtgatacgctgccgccctagttgcatcgcttcagttaaaacacattaactaaag

SEQ ID NO: 144865 - DNA, 57 bp, Artificial
  Synthetic oligonucleotide
atttgaacggcgtgccaacggtcttgagcgtcaagcgacccttatcgtctttcacaa

SEQ ID NO: 144866 - DNA, 55 bp, Artificial
  Synthetic oligonucleotide
ttccagacgcgcagagcaagtagacagacaggcgccggcaaacagagaacggacg

SEQ ID NO: 144867 - DNA, 49 bp, Artificial
  Synthetic oligonucleotide
aacctcacgatagaggtcttttgtttccgtaaatcgcccccggagggtt

SEQ ID NO: 144868 - DNA, 54 bp, Artificial
  Synthetic oligonucleotide
aaccctgttcagaacgcgctcgcacgggaaaactgctccgtcctacggggcgac

SEQ ID NO: 144869 - DNA, 55 bp, Artificial
  Synthetic oligonucleotide
ttcggatgccgaggtcacgctcggtgcggacaagggctacgacgcgcaggagttc

SEQ ID NO: 144870 - DNA, 55 bp, Artificial
  Synthetic oligonucleotide
tttcatcgagtgggttccagcaaacgctaccgctggccgtcgccggctcgaaacg

SEQ ID NO: 144871 - DNA, 55 bp, Artificial
  Synthetic oligonucleotide
aaatggtcatctactccaaagacttgacgcagagtcaacattagttgtcgtagtc

SEQ ID NO: 144872 - DNA, 55 bp, Artificial
  Synthetic oligonucleotide
tttccgggatgcggataggcgtggtagtccagtgcggcttggcggtcggtgtctt

SEQ ID NO: 144873 - DNA, 55 bp, Artificial
  Synthetic oligonucleotide
aaagatccgtgcatggtgggcgtatccataaagatttcgcgcgaataatggccgt

SEQ ID NO: 144874 - DNA, 55 bp, Artificial
  Synthetic oligonucleotide
aaagaacaccctcggccgctccagcttgaccgactgcttgaccggctcgccctgt

SEQ ID NO: 144875 - DNA, 55 bp, Artificial
  Synthetic oligonucleotide
tttgcgcggcgtaatttgacggaatacgaccgtacttcgcctcgaaggcctgaac

SEQ ID NO: 144876 - DNA, 60 bp, Artificial
  Synthetic oligonucleotide
atccatagcgaacgatccgaacagaattaacgcagcagccaaggccctatcgagacacat

SEQ ID NO: 144877 - DNA, 55 bp, Artificial
  Synthetic oligonucleotide
aaacgctcggggtcgtgtccggtgacactgccaacggtggtaagcgcacgatctc

SEQ ID NO: 144878 - DNA, 55 bp, Artificial
  Synthetic oligonucleotide
aaaccattgccggctaccacggcaaggaagtcacacgcggcaagcccatcctgga

SEQ ID NO: 144879 - DNA, 53 bp, Artificial
  Synthetic oligonucleotide
aaaagagcgcaaggccgaccgccgccaacgaggccgatctcccggttcccacc

SEQ ID NO: 144880 - DNA, 55 bp, Artificial
  Synthetic oligonucleotide
acatgacgtaagcgcccttctctaccggcgcgctgcttgcccaatagaggccgac

SEQ ID NO: 144881 - DNA, 55 bp, Artificial
  Synthetic oligonucleotide
tctatattcagtacctagtcagcaatgcagctacaggaaggtcctgaaattggat

SEQ ID NO: 144882 - DNA, 55 bp, Artificial
  Synthetic oligonucleotide
tctggataatcccgtaatgaccgcaaaagatgcaagcctcgcctgagagtgcggg

SEQ ID NO: 144883 - DNA, 55 bp, Artificial
  Synthetic oligonucleotide
tctggatcctttgagatataaagcttgcagcttggcaaggtactcgatggcagga

SEQ ID NO: 144884 - DNA, 55 bp, Artificial
  Synthetic oligonucleotide
tgaacctgttcttggcgttgctatactggccccgttttcctgatatgcggcgggg

SEQ ID NO: 144885 - DNA, 55 bp, Artificial
  Synthetic oligonucleotide
tgactccgtaggtgtcagacaccgctgtgtgcctcgacggcttcatgcgcactcg

SEQ ID NO: 144886 - DNA, 55 bp, Artificial
  Synthetic oligonucleotide
tgcctcgtgcagttcaaggggagccgattggacgttaaagcgcccgccacgattc

SEQ ID NO: 144887 - DNA, 60 bp, Artificial
  Synthetic oligonucleotide
ctggctcaagtagcgagaatcgccgctcaagttcgtttcgtgccgccgatacatcaatgt

SEQ ID NO: 144888 - DNA, 55 bp, Artificial
  Synthetic oligonucleotide
acaatgcttgccataccggatgtgacacgtccgaaataagccggaataccggcgc

SEQ ID NO: 144889 - DNA, 55 bp, Artificial
  Synthetic oligonucleotide
acaatcgcagcccacgcgggacccgagacgccgccccaaggtcagtagggacaat

SEQ ID NO: 144890 - DNA, 55 bp, Artificial
  Synthetic oligonucleotide
tgcggaaacgcacactatcgtcctgccgcacgcaatagcctataacgcaccgaac

SEQ ID NO: 144891 - DNA, 55 bp, Artificial
  Synthetic oligonucleotide
tgcgggcaaccccgcgaaccgcctgtgctatcccggctaggtgtgaactgtcaat

SEQ ID NO: 144892 - DNA, 55 bp, Artificial
  Synthetic oligonucleotide
tggaaaggtaggactgcgattgccctatcgtgacggaaggacttttgacctcgta

SEQ ID NO: 144893 - DNA, 55 bp, Artificial
  Synthetic oligonucleotide
tggcagaaatccttacttgctattccgggaagaacccgcttccttcgcgaggacg

SEQ ID NO: 144894 - DNA, 55 bp, Artificial
  Synthetic oligonucleotide
tggcatagaaatccaggcagtactcctgcgccggccgggagctccattgcgacag

SEQ ID NO: 144895 - DNA, 55 bp, Artificial
  Synthetic oligonucleotide
aatgactgctggcccttctgccgcacctggtctgtgccctgggcgaagaggtccg

SEQ ID NO: 144896 - DNA, 55 bp, Artificial
  Synthetic oligonucleotide
tggggaactgccccttgtcgggcatgtggatgctgtccgtcgccgggcggtagaa

SEQ ID NO: 144897 - DNA, 55 bp, Artificial
  Synthetic oligonucleotide
tgggtaccagccagcggaatgattggtagagcgcctgatattggtcgttcatggc

SEQ ID NO: 144898 - DNA, 60 bp, Artificial
  Synthetic oligonucleotide
ggatttgttcaggccacgagtaaattctgcgctgtcgagccctaagatgacattgagtct

SEQ ID NO: 144899 - DNA, 55 bp, Artificial
  Synthetic oligonucleotide
tggtaagtcttaacaccgtcccattgatgacgccaggggcctatgcgcaggcggc

SEQ ID NO: 144900 - DNA, 55 bp, Artificial
  Synthetic oligonucleotide
cccactcggtccatttgcatcggtgacgactccagagaaatgataggagcctaaa

SEQ ID NO: 144901 - DNA, 55 bp, Artificial
  Synthetic oligonucleotide
gttcatcgcaggcttcaaatcgcgaatcaacttcggtccgccccgtagacatcgg

SEQ ID NO: 144902 - DNA, 55 bp, Artificial
  Synthetic oligonucleotide
cccacacccatacccgcctgtcgcgaatatagaacatggcgaaaatgcccaggat

SEQ ID NO: 144903 - DNA, 55 bp, Artificial
  Synthetic oligonucleotide
ccatttaaggatccggcggccggcatatactgtttattcacacagtgattttgct

SEQ ID NO: 144904 - DNA, 55 bp, Artificial
  Synthetic oligonucleotide
ccatgcgtctaccgcaggatatgtaagtagagagtttcataatgaggcggctagg

SEQ ID NO: 144905 - DNA, 55 bp, Artificial
  Synthetic oligonucleotide
ccatagacgcgacatgagccattatgcagcacattcgtaacacgttcgacaacaa

SEQ ID NO: 144906 - DNA, 55 bp, Artificial
  Synthetic oligonucleotide
ccaggcatgctctgtgcgtcggccctaccgaccagcgcgcgtccatcaaccggta

SEQ ID NO: 144907 - DNA, 55 bp, Artificial
  Synthetic oligonucleotide
gttcgcgccaagatcaggcaccaccttatgccgcccaaatatcagcgtcatcggc

SEQ ID NO: 144908 - DNA, 55 bp, Artificial
  Synthetic oligonucleotide
ccagacgactcccgttggcagcacctgacaacactcacgtactacttcggcgtgc

SEQ ID NO: 144909 - DNA, 54 bp, Artificial
  Synthetic oligonucleotide
aacgctgcactaacgattggagcgttaccttttgcgttaccatcggcgttagtt

SEQ ID NO: 144910 - DNA, 55 bp, Artificial
  Synthetic oligonucleotide
ccacttggtactgtagcggaggtggacgaagggacattgtcagtcccgtaggaca

SEQ ID NO: 144911 - DNA, 55 bp, Artificial
  Synthetic oligonucleotide
ccaagtatcatctaaccatcatgacctatcgataaccattagatgacgtactcgc

SEQ ID NO: 144912 - DNA, 55 bp, Artificial
  Synthetic oligonucleotide
catggcgtccattcggataggcgataaccctgattgtacgacaagttgccgaacg

SEQ ID NO: 144913 - DNA, 55 bp, Artificial
  Synthetic oligonucleotide
gttgcggtgttcccggaatggaaccagggcggaagatcgtctcaagcggattgcg

SEQ ID NO: 144914 - DNA, 55 bp, Artificial
  Synthetic oligonucleotide
cagtcgtgattgcagatcgtgttctgcagaccatccctagaactgtgcgtcatag

SEQ ID NO: 144915 - DNA, 55 bp, Artificial
  Synthetic oligonucleotide
gtttgccagaacgaacgcgcacgcgggatgaggccggccgcctgaatgtccctga

SEQ ID NO: 144916 - DNA, 55 bp, Artificial
  Synthetic oligonucleotide
caggatgggatgcggataatttgaatgcacttgagattgctatgctctctgaatc

SEQ ID NO: 144917 - DNA, 55 bp, Artificial
  Synthetic oligonucleotide
cagcggcaagccataggccagcgtgaattgcccgacatagggacgcgaggtgttg

SEQ ID NO: 144918 - DNA, 55 bp, Artificial
  Synthetic oligonucleotide
ccggagacaccgggatccatcagtgtagctcgcccagcggaggagccatgcaaga

SEQ ID NO: 144919 - DNA, 55 bp, Artificial
  Synthetic oligonucleotide
ccgcgtgatggtcagaccataaggatagcagccggcacggggtctaggtgtgaac

SEQ ID NO: 144920 - DNA, 60 bp, Artificial
  Synthetic oligonucleotide
ggagggcaccctcacatatcaaccgtcaaacaggcattagcaccctgccaaaagtcatct

SEQ ID NO: 144921 - DNA, 53 bp, Artificial
  Synthetic oligonucleotide
gtctcaggcgggtcctagccgaaagtattaagccgttggatggtaacgttttc

SEQ ID NO: 144922 - DNA, 55 bp, Artificial
  Synthetic oligonucleotide
gtcttgtgctttcgtgaaggaacactgcaggccgtagagtcaaccaacagcccgt

SEQ ID NO: 144923 - DNA, 54 bp, Artificial
  Synthetic oligonucleotide
ccgagtaattgggtcaagtatagcaaattcccgagtaaaacgctaagtatctcg

SEQ ID NO: 144924 - DNA, 55 bp, Artificial
  Synthetic oligonucleotide
ccctgggttgtcattctgatggccggggctgcaaggtgttaaaggaacgaccgtg

SEQ ID NO: 144925 - DNA, 55 bp, Artificial
  Synthetic oligonucleotide
ccctggacctcttacgggtttggacgctcgagctgataccgcacatggcaccgca

SEQ ID NO: 144926 - DNA, 55 bp, Artificial
  Synthetic oligonucleotide
ccctgcgagagccactagccctttcaatctggacgagttaagcaaggcccaggct

SEQ ID NO: 144927 - DNA, 55 bp, Artificial
  Synthetic oligonucleotide
ccctgagctatagattgtccgcttggactagtagtacctgtgctcggtgcaggtt

SEQ ID NO: 144928 - DNA, 55 bp, Artificial
  Synthetic oligonucleotide
cccgtttgcagtttcagctgggccactctcggcattaactgcttgataatggacg

SEQ ID NO: 144929 - DNA, 55 bp, Artificial
  Synthetic oligonucleotide
cccgcccggtttacatcgtgttgcgtcccgaggctgtcctgcaatattcccctcg

SEQ ID NO: 144930 - DNA, 55 bp, Artificial
  Synthetic oligonucleotide
gtgcttgcccatatgcttgctccaaacacaaatgggcctacagataatacagccc

SEQ ID NO: 144931 - DNA, 60 bp, Artificial
  Synthetic oligonucleotide
ttcgcttgctgctgtggttcacctgttgcaagccgaactctttttcgagcttgaccgcaa

SEQ ID NO: 144932 - DNA, 55 bp, Artificial
  Synthetic oligonucleotide
gtgtcgaagcggagaggacgaaagaacgcccgaaagcagacctctagggcgtgcg

SEQ ID NO: 144933 - DNA, 55 bp, Artificial
  Synthetic oligonucleotide
gtgttacggccctgggtacggggcttaatttcggtgtgcccatctctgagtacga

SEQ ID NO: 144934 - DNA, 55 bp, Artificial
  Synthetic oligonucleotide
gttcacacctagcgtccatgccagcttggcgtaggacgtcccgttgtttacggct

SEQ ID NO: 144935 - DNA, 55 bp, Artificial
  Synthetic oligonucleotide
ccccggtaagcatcacaactctgactcccgacctgtgtagcgcatcgatcgcctg

SEQ ID NO: 144936 - DNA, 55 bp, Artificial
  Synthetic oligonucleotide
cccattgcacgatgatgtagcgcaacgtgcatcgacggcagattgagtcgtgcca

SEQ ID NO: 144937 - DNA, 55 bp, Artificial
  Synthetic oligonucleotide
cacccagataaacgacgccattgcgccggaattgcctgggcgtggactaagctcg

SEQ ID NO: 144938 - DNA, 55 bp, Artificial
  Synthetic oligonucleotide
cacaataggcgctaccgaaacgcagaggggaagacggaatgcgttggactcgggc

SEQ ID NO: 144939 - DNA, 55 bp, Artificial
  Synthetic oligonucleotide
cacctggggccgtggtttacggtccatgcaacctcgagtcggagtgctcatgcct

SEQ ID NO: 144940 - DNA, 55 bp, Artificial
  Synthetic oligonucleotide
cacgcctgacgatgcaaaagcgcctgagtcacctatacgtccttgtgctgtgccc

SEQ ID NO: 144941 - DNA, 55 bp, Artificial
  Synthetic oligonucleotide
cacaatagcctccacgggcttgcactgtttgtttagctactagggataacccgaa

SEQ ID NO: 144942 - DNA, 60 bp, Artificial
  Synthetic oligonucleotide
ttcacaccgaccctcaagggtctgacgcttggctggaggctcgtcgcggcgtgataacag

SEQ ID NO: 144943 - DNA, 55 bp, Artificial
  Synthetic oligonucleotide
caagggtcgtgacctacatgattcgagcaaactctctaagtttaagacgtggcag

SEQ ID NO: 144944 - DNA, 55 bp, Artificial
  Synthetic oligonucleotide
caaattggcgattcgagagagttatgcggtggcacacatgtttctaatacaggtc

SEQ ID NO: 144945 - DNA, 55 bp, Artificial
  Synthetic oligonucleotide
caaatctgcttccccacaattcgaagctacggacctatttggatgaccttgctcc

SEQ ID NO: 144946 - DNA, 55 bp, Artificial
  Synthetic oligonucleotide
taccgcgcaatcgatccgataaatgtgcaattgctaatgcatagctctccgccgc

SEQ ID NO: 144947 - DNA, 55 bp, Artificial
  Synthetic oligonucleotide
caaaggtaagcgtgacgttagatgatgttcacgttgaaacataccaaaagagcga

SEQ ID NO: 144948 - DNA, 55 bp, Artificial
  Synthetic oligonucleotide
taagtataagcctcaaaagctagttctagtcgagctctcggagtttgccctttac

SEQ ID NO: 144949 - DNA, 55 bp, Artificial
  Synthetic oligonucleotide
cacggcccgtgtgagtggtcgtatacaggttcgtcccagacgacgcgaggtccat

SEQ ID NO: 144950 - DNA, 55 bp, Artificial
  Synthetic oligonucleotide
taagtcgacatgcaatgaatcaaggacgccgtgagaactgaacgaccggtagaaa

SEQ ID NO: 144951 - DNA, 55 bp, Artificial
  Synthetic oligonucleotide
cacgtcgcccacttcgttttccgtgccaaggcggatttcatcgagtgggttccag

SEQ ID NO: 144952 - DNA, 54 bp, Artificial
  Synthetic oligonucleotide
agggcatcgccttcgctcaaggcgtcttctgcgaacgcgccggcacggtcggcc

SEQ ID NO: 144953 - DNA, 60 bp, Artificial
  Synthetic oligonucleotide
gcgatggacccggcaataaggtttacgctggcgtacacggcagacacgcgcatagccgtc

SEQ ID NO: 144954 - DNA, 54 bp, Artificial
  Synthetic oligonucleotide
ccctgcgcccacttaatgaacggggcagtttcaacccccggcggcacataccag

SEQ ID NO: 144955 - DNA, 54 bp, Artificial
  Synthetic oligonucleotide
attgaacgcagagggtcccggaggcttgatggtgcttggccatgggattcagcc

SEQ ID NO: 144956 - DNA, 54 bp, Artificial
  Synthetic oligonucleotide
atttacgcggaattttggtccgcagtcaggcgacgatcccaaacttcgcaacgc

SEQ ID NO: 144957 - DNA, 54 bp, Artificial
  Synthetic oligonucleotide
tgcgaggttctgcacgtcgcccacttcgttttccgtgccaaggcggatttcatc

SEQ ID NO: 144958 - DNA, 54 bp, Artificial
  Synthetic oligonucleotide
gcctcaatcttattcgtgcgttggacatcgcaaagtacaatccgcctagcttta

SEQ ID NO: 144959 - DNA, 54 bp, Artificial
  Synthetic oligonucleotide
cttcgtttgtcttcggggctgacaacgcccctctgactcactccgcctggggac

SEQ ID NO: 144960 - DNA, 54 bp, Artificial
  Synthetic oligonucleotide
ggtaaccctgcgttgcggcggggttaaggcgatagcccgcacaagagccgatac

SEQ ID NO: 144961 - DNA, 54 bp, Artificial
  Synthetic oligonucleotide
ggagtcctctgtctgttgcaccttaaagtcgtgtccaaagattaatacgtcgta

SEQ ID NO: 144962 - DNA, 54 bp, Artificial
  Synthetic oligonucleotide
ggagccttagttgggggtctggcctcgggtctcgatatggccggcactctggaa

SEQ ID NO: 144963 - DNA, 54 bp, Artificial
  Synthetic oligonucleotide
cgactcaagtccccgcataacaggtcgataccaattttgcgtacgcataccctc

SEQ ID NO: 144964 - DNA, 54 bp, Artificial
  Synthetic oligonucleotide
gcgcgggaggtctgcgctcgggccgtcatcgtcaaggaatgccggctccagcga

SEQ ID NO: 144965 - DNA, 60 bp, Artificial
  Synthetic oligonucleotide
gcttcagacgacatacggcactacctgcacaagccgcttcgcactgagcgcgggctagta

SEQ ID NO: 144966 - DNA, 54 bp, Artificial
  Synthetic oligonucleotide
ttaacctcgacagtgtgtctggctactttggcggtcaagcggtatcccttgtag

SEQ ID NO: 144967 - DNA, 54 bp, Artificial
  Synthetic oligonucleotide
tagcctacaccaagtggtgcaggtgcactaactccaggagcgtgagcttgagga

SEQ ID NO: 144968 - DNA, 54 bp, Artificial
  Synthetic oligonucleotide
ctgcacacattggttttgtgtcgccctaaagacgctgccaggccagttaggcct

SEQ ID NO: 144969 - DNA, 54 bp, Artificial
  Synthetic oligonucleotide
gatagccggcgtaacgccggtctatgtcgtcccatagcggtttgaggctgggtt

SEQ ID NO: 144970 - DNA, 54 bp, Artificial
  Synthetic oligonucleotide
tcgctcttatggctggatcgacaccgctaactggcggtcacggtaactccgcta

SEQ ID NO: 144971 - DNA, 54 bp, Artificial
  Synthetic oligonucleotide
agagccgacaaccgggtggacctggccgtctacgtggctgtaggtggtcatttc

SEQ ID NO: 144972 - DNA, 54 bp, Artificial
  Synthetic oligonucleotide
cattggatagttgccatcaaccccttgactatccaaccgtgtgtcgttgaactc

SEQ ID NO: 144973 - DNA, 54 bp, Artificial
  Synthetic oligonucleotide
gcagggatggcaacttgttgcgtttcagggtcaagaatatccaacgcagcaaca

SEQ ID NO: 144974 - DNA, 54 bp, Artificial
  Synthetic oligonucleotide
gttcgtcctgcgctggcactgctcaatcctcaaacggcgcacaatattccgtca

SEQ ID NO: 144975 - DNA, 54 bp, Artificial
  Synthetic oligonucleotide
tacctgcttgcacgaggcttggtctggctgactgtgagcgtcagccttatctgt

SEQ ID NO: 144976 - DNA, 56 bp, Artificial
  Synthetic oligonucleotide
aagagccgtgcccctggtgcgactcaaccggcaataagctagtcccgatcccggta

SEQ ID NO: 144977 - DNA, 54 bp, Artificial
  Synthetic oligonucleotide
gccaatgccgtggaactgcacggtaaccacagcaccttggaattcgacggagga

SEQ ID NO: 144978 - DNA, 54 bp, Artificial
  Synthetic oligonucleotide
ggggctggggtatcgatatgtgtagtgtcagtcattgaaggaggttgatgcccg

SEQ ID NO: 144979 - DNA, 53 bp, Artificial
  Synthetic oligonucleotide
ggcgaggttagtgcccgagctgtgaacgactgacgagtcacgtaggctccgca

SEQ ID NO: 144980 - DNA, 53 bp, Artificial
  Synthetic oligonucleotide
cggggctgacaacgcccctctgactcactccgcctggggaccatgttgttagt

SEQ ID NO: 144981 - DNA, 53 bp, Artificial
  Synthetic oligonucleotide
cgcgctacaaccctcctactacgattgttctgtcgcgtaaggccccggcggcc

SEQ ID NO: 144982 - DNA, 53 bp, Artificial
  Synthetic oligonucleotide
gtcgttgtcattgccagctagggcggctccgcgtgattgggtgagtgtgtgtt

SEQ ID NO: 144983 - DNA, 53 bp, Artificial
  Synthetic oligonucleotide
aacatggcactccgcttgtgtctgcggcggctttgcaatggacagggcatatt

SEQ ID NO: 144984 - DNA, 53 bp, Artificial
  Synthetic oligonucleotide
ggacttcttccaagtgcagttgcgatactcgttctggtgcgaagagacgacag

SEQ ID NO: 144985 - DNA, 53 bp, Artificial
  Synthetic oligonucleotide
ttctacgaagggaacggacgctccttggacgcccctctgtctacgcttatggg

SEQ ID NO: 144986 - DNA, 53 bp, Artificial
  Synthetic oligonucleotide
catgctggtccataagaaaacgcaatacatctcggggagatgaggccgggatg

SEQ ID NO: 144987 - DNA, 59 bp, Artificial
  Synthetic oligonucleotide
cggtccatgagagcccttgcttcgctcaggttggacgcatctttcccgatcaggagtgg

SEQ ID NO: 144988 - DNA, 53 bp, Artificial
  Synthetic oligonucleotide
tttccgtgcgatccgcctgagatgatctcccgccctggttccacttcgggaac

SEQ ID NO: 144989 - DNA, 53 bp, Artificial
  Synthetic oligonucleotide
gtgcgggagagcagctattgtggagggttgccgaccatgcgtagtcgtgtgct

SEQ ID NO: 144990 - DNA, 53 bp, Artificial
  Synthetic oligonucleotide
cgtgcgcgcaagcctgacccttgcctcagatcaattcgcatccatgacgggct

SEQ ID NO: 144991 - DNA, 53 bp, Artificial
  Synthetic oligonucleotide
acagctctagcagaaattaccgttggcaatgctggacatagggccgaacgtga

SEQ ID NO: 144992 - DNA, 53 bp, Artificial
  Synthetic oligonucleotide
aagcacaggtcctgaggtggcttacggcttgccgcacgcgtttcggtggttca

SEQ ID NO: 144993 - DNA, 53 bp, Artificial
  Synthetic oligonucleotide
atttgtcactggatcgttcggcaccgacactatcgggcggagaggcccaacgc

SEQ ID NO: 144994 - DNA, 53 bp, Artificial
  Synthetic oligonucleotide
gtatagacggtttaactcggctgccaagatcaaggcatgattgtgatcagggt

SEQ ID NO: 144995 - DNA, 53 bp, Artificial
  Synthetic oligonucleotide
gcgaacgcgtgagggaatcgggccgtgcttctgccatgtcggagtcgtgtgtg

SEQ ID NO: 144996 - DNA, 53 bp, Artificial
  Synthetic oligonucleotide
aggggccacgtggcgaccacttgttatgccctatattgatcaatactcgcaaa

SEQ ID NO: 144997 - DNA, 53 bp, Artificial
  Synthetic oligonucleotide
cgtacttcgcctcgaaggcctgaacaaactgacgactttgggcattatcgaaa

SEQ ID NO: 144998 - DNA, 54 bp, Artificial
  Synthetic oligonucleotide
ccgcccccgaaactgttggcaataccggcctgacgcccagacaaatcacgggaa

SEQ ID NO: 144999 - DNA, 53 bp, Artificial
  Synthetic oligonucleotide
aattcggacttgctcacgttgcgggccacgatgggatcgcggtacagggccaa

SEQ ID NO: 145000 - DNA, 53 bp, Artificial
  Synthetic oligonucleotide
gaggctgcggcgatcctagcggtggggcaagtcctatcatcttgagaagggca

SEQ ID NO: 145001 - DNA, 53 bp, Artificial
  Synthetic oligonucleotide
gcagcgcaggatatgattttcaggcttgcccacccgatgatcgaatccccgca

SEQ ID NO: 145002 - DNA, 53 bp, Artificial
  Synthetic oligonucleotide
acctacaccgtaactggtggtccagaggggatctcgttggtccacaggtacgt

SEQ ID NO: 145003 - DNA, 53 bp, Artificial
  Synthetic oligonucleotide
atagcgtttgccgggatcgttcagttttgccctgaagtcgccgaaagggaatt

SEQ ID NO: 145004 - DNA, 53 bp, Artificial
  Synthetic oligonucleotide
acctgctttaaatacagccgaccgatattcatacacgggagcagtttatgtcc

SEQ ID NO: 145005 - DNA, 53 bp, Artificial
  Synthetic oligonucleotide
aagctccacgcaatctcgcaagacgcccgacgcgtcctgacccatccccacgt

SEQ ID NO: 145006 - DNA, 53 bp, Artificial
  Synthetic oligonucleotide
ggattggcggcgttcgaaattgcttaaagcggcggccacattgcgtagggcca

SEQ ID NO: 145007 - DNA, 53 bp, Artificial
  Synthetic oligonucleotide
aaactcggtaacaaagagtcatgcaagcagttaggtcgtgtgcgatgagttta

SEQ ID NO: 145008 - DNA, 52 bp, Artificial
  Synthetic oligonucleotide
tccctgccgttcgatacacagagcatagacttgctggttttaccgcatgtgc

SEQ ID NO: 145009 - DNA, 58 bp, Artificial
  Synthetic oligonucleotide
ggataagtgactcgcagcgaacccccgccgcatatcaggaaaacggggccagtatagc

SEQ ID NO: 145010 - DNA, 52 bp, Artificial
  Synthetic oligonucleotide
tacaggtatggcactctcggccgcccattgctcaaactggctccatccaata

SEQ ID NO: 145011 - DNA, 51 bp, Artificial
  Synthetic oligonucleotide
gggttccgcgcgttaaaggggccgggctgctaccgtatgggacaatacttt

SEQ ID NO: 145012 - DNA, 52 bp, Artificial
  Synthetic oligonucleotide
ttttggtaacacaacccgagaccgccagcattaagcacgccattacagcaag

SEQ ID NO: 145013 - DNA, 52 bp, Artificial
  Synthetic oligonucleotide
ggcgatgcactcgcagctgcgcaatcttccggcgggtgggaaccgcacgacg

SEQ ID NO: 145014 - DNA, 52 bp, Artificial
  Synthetic oligonucleotide
tagcggaggtggacgaagggacattgtcagtcccgaagaacaccgaagcccc

SEQ ID NO: 145015 - DNA, 52 bp, Artificial
  Synthetic oligonucleotide
ttatcgattccagcgccccgattgaggaggcgagcacgtaaggcagtattgc

SEQ ID NO: 145016 - DNA, 52 bp, Artificial
  Synthetic oligonucleotide
gggctaggagtgtcggtcggagaagtggtcatgaaacgtggatgtacagcaa

SEQ ID NO: 145017 - DNA, 52 bp, Artificial
  Synthetic oligonucleotide
ggtagtccgcccaattgggaatcaactgataccgcacgtggctgcgttcaag

SEQ ID NO: 145018 - DNA, 52 bp, Artificial
  Synthetic oligonucleotide
tagctggaatcagctaccgggcgtatcgcacgtcatcgttcggccattactg

SEQ ID NO: 145019 - DNA, 52 bp, Artificial
  Synthetic oligonucleotide
gtcactagagagaataaccaggacgcagtcatacatccgtgatgtccgcaca

SEQ ID NO: 145020 - DNA, 57 bp, Artificial
  Synthetic oligonucleotide
tcgaaccattggagagccttcagcctcgcgattgagtgatggaatcgcataaaaggt

SEQ ID NO: 145021 - DNA, 52 bp, Artificial
  Synthetic oligonucleotide
tcggtcgtgcaggccctgagcgacgacgcacacgatgttgtgcaagtcgtcc

SEQ ID NO: 145022 - DNA, 52 bp, Artificial
  Synthetic oligonucleotide
agcaggtcgacgctcagttcacgtagagacacccgcaccggggattcttccg

SEQ ID NO: 145023 - DNA, 52 bp, Artificial
  Synthetic oligonucleotide
ccgcggtgatacagttctggccccgaaccggtgctttcggcaagtacgcttg

SEQ ID NO: 145024 - DNA, 52 bp, Artificial
  Synthetic oligonucleotide
cctaatttcgtcggatccaagcgttgtttgcaccttacaaacggccgaaagt

SEQ ID NO: 145025 - DNA, 52 bp, Artificial
  Synthetic oligonucleotide
aagcacgccataatcgggctcttcgccgtacccaggcaacaggatacgggcg

SEQ ID NO: 145026 - DNA, 52 bp, Artificial
  Synthetic oligonucleotide
agagtgtttgggtcgccgctattgtagggtgcgcgagatcaggccatcgtca

SEQ ID NO: 145027 - DNA, 52 bp, Artificial
  Synthetic oligonucleotide
aggcccagctattgttggggcatgtcttgggtgtcgatcgcgtttggcttct

SEQ ID NO: 145028 - DNA, 52 bp, Artificial
  Synthetic oligonucleotide
agggggtggtacactacatcttgtggtcgctaaacacgctggacccaccggc

SEQ ID NO: 145029 - DNA, 52 bp, Artificial
  Synthetic oligonucleotide
cccaccggccacgcaccccggaccattcgtccacgcgtagcgattcccctca

SEQ ID NO: 145030 - DNA, 52 bp, Artificial
  Synthetic oligonucleotide
ccaggcaacaggatacgggcgtaggatgggaaagtggccattacgcgagcgc

SEQ ID NO: 145031 - DNA, 57 bp, Artificial
  Synthetic oligonucleotide
tccggactccctgcgtggttggtctcatctgtagtgcccctgaaaacgcggttgcgc

SEQ ID NO: 145032 - DNA, 52 bp, Artificial
  Synthetic oligonucleotide
cagttaggcggcgctcgtgaaaattagggccgcatacgccgaaaatcgggtg

SEQ ID NO: 145033 - DNA, 52 bp, Artificial
  Synthetic oligonucleotide
agttctggccccgaaccggtgctttcggcaagtacgcttgcgcggaaggtaa

SEQ ID NO: 145034 - DNA, 52 bp, Artificial
  Synthetic oligonucleotide
acccggcccgcgttgcatcacgttgcatgtttgtaagcgcaacggaacgttc

SEQ ID NO: 145035 - DNA, 52 bp, Artificial
  Synthetic oligonucleotide
ctccggttcgtggagctcgacagatgcttgaggaccttttccttatagtcgt

SEQ ID NO: 145036 - DNA, 52 bp, Artificial
  Synthetic oligonucleotide
ctcgctttccaccgacttgtgttttcgggtctgcaccataggccggcgctac

SEQ ID NO: 145037 - DNA, 52 bp, Artificial
  Synthetic oligonucleotide
atgaagagaccgggcgaaccgttacgctgtttgcctccaacgaggccgtgct

SEQ ID NO: 145038 - DNA, 52 bp, Artificial
  Synthetic oligonucleotide
ggacgcggttatcggtgggcaagagctgtggggtggggtagtgcccaaaatc

SEQ ID NO: 145039 - DNA, 52 bp, Artificial
  Synthetic oligonucleotide
atgactcccgcctctgcccttcttcgtttccgcaccatgttcaaacgcctta

SEQ ID NO: 145040 - DNA, 52 bp, Artificial
  Synthetic oligonucleotide
cacacatcacataacaaggggcttgaatcatgacgcactcgattacttacgc

SEQ ID NO: 145041 - DNA, 52 bp, Artificial
  Synthetic oligonucleotide
aacaggcaacgacatgccagccgttcgccagaacttatgaagttgagtaccc

SEQ ID NO: 145042 - DNA, 56 bp, Artificial
  Synthetic oligonucleotide
gctgtgcgatggctgatggttccatcgtcgtgtggatgacggactcccgtccaggc

SEQ ID NO: 145043 - DNA, 52 bp, Artificial
  Synthetic oligonucleotide
gcctcggggtgaaatgtaattacgtcggccccagcctttgcgaacatgggga

SEQ ID NO: 145044 - DNA, 52 bp, Artificial
  Synthetic oligonucleotide
gccaccttttagaagggttttagccatatgcagacgcccccgctcaccgcct

SEQ ID NO: 145045 - DNA, 52 bp, Artificial
  Synthetic oligonucleotide
acacaggcgccaaacccgtaccgcccgcaatacacaacataggcccctcgtg

SEQ ID NO: 145046 - DNA, 52 bp, Artificial
  Synthetic oligonucleotide
cactacatcttgtggtcgctaaacacgctggacccaccggccacgcaccccg

SEQ ID NO: 145047 - DNA, 52 bp, Artificial
  Synthetic oligonucleotide
acaacgtggaagagtctgtttcggacagtatcttgtacaggtgggagcgaga

SEQ ID NO: 145048 - DNA, 51 bp, Artificial
  Synthetic oligonucleotide
ccaacggtggtaagcgcacgatctcgaagggcttgctccaggctatcgcct

SEQ ID NO: 145049 - DNA, 51 bp, Artificial
  Synthetic oligonucleotide
tagttacgggttggcattctcactcgcgtgtcgcgttctataggttttggc

SEQ ID NO: 145050 - DNA, 51 bp, Artificial
  Synthetic oligonucleotide
ccccgttcaatgtggccgttgtacttgattgtgatcatgtgcctggcgcct

SEQ ID NO: 145051 - DNA, 51 bp, Artificial
  Synthetic oligonucleotide
cccgaatggattggacaagtctcgatcaaggcgcgactcgtggccggtcca

SEQ ID NO: 145052 - DNA, 51 bp, Artificial
  Synthetic oligonucleotide
taaacacgctggacccaccggccacgcaccccggaccattcgtccacgcgt

SEQ ID NO: 145053 - DNA, 56 bp, Artificial
  Synthetic oligonucleotide
acggctttcgaggcttgtacgtgccttctgcccctgctatccgctaaacgggaagc

SEQ ID NO: 145054 - DNA, 51 bp, Artificial
  Synthetic oligonucleotide
atgttccgtacgtcatgcacggacatgggcatcatgttgctattgaggtga

SEQ ID NO: 145055 - DNA, 51 bp, Artificial
  Synthetic oligonucleotide
tagcaccaatttggacaccgccctctgccgtagtcccccatctcaatccga

SEQ ID NO: 145056 - DNA, 51 bp, Artificial
  Synthetic oligonucleotide
tgtagctacgcctccgatggcacaggccgtccctaagagcatacgacgcga

SEQ ID NO: 145057 - DNA, 51 bp, Artificial
  Synthetic oligonucleotide
atgcggttacctgcgcggttaattttccgcgttcgtcaatttgtatttcgg

SEQ ID NO: 145058 - DNA, 51 bp, Artificial
  Synthetic oligonucleotide
atcgcccctgctcagcttcgttgccactacttaacagcccgaagccccggt

SEQ ID NO: 145059 - DNA, 51 bp, Artificial
  Synthetic oligonucleotide
agttgtccccgccaactgtggataagcgtgaggacagcttgcgggcagatc

SEQ ID NO: 145060 - DNA, 51 bp, Artificial
  Synthetic oligonucleotide
tcgctgtcggccaactaacaggccgctggcacatagaactttgggccgcat

SEQ ID NO: 145061 - DNA, 51 bp, Artificial
  Synthetic oligonucleotide
gctaaacctagttgctcatgcactaatgcattcagcgcccggcgtgactgg

SEQ ID NO: 145062 - DNA, 51 bp, Artificial
  Synthetic oligonucleotide
gcgcttgcatggggctcctcgaggggatttgtcgttatcggggcgcgattc

SEQ ID NO: 145063 - DNA, 51 bp, Artificial
  Synthetic oligonucleotide
tcgcccaaatctcgaagcagccgtaaaacgagcagccgaagcaacaacccc

SEQ ID NO: 145064 - DNA, 60 bp, Artificial
  Synthetic oligonucleotide
tggctatcgtgctgtcatggtgcgtcttgcataccgcagcccaattggattgatcccaaa

SEQ ID NO: 145065 - DNA, 54 bp, Artificial
  Synthetic oligonucleotide
cggggcggctaaattcccttgggcttgtatatcgagacgaagtaggtaatcgcg

SEQ ID NO: 145066 - DNA, 51 bp, Artificial
  Synthetic oligonucleotide
gccatgaccgaccgcaggaatagcagacgccaatgcgcttcctttacaccg

SEQ ID NO: 145067 - DNA, 51 bp, Artificial
  Synthetic oligonucleotide
ttgtggtcgctaaacacgctggacccaccggccacgcaccccggaccattc

SEQ ID NO: 145068 - DNA, 51 bp, Artificial
  Synthetic oligonucleotide
cttgctcggattgcgtcatttcctctccgttttcgggttctcagccagtca

SEQ ID NO: 145069 - DNA, 51 bp, Artificial
  Synthetic oligonucleotide
ttctaacttcaggtcggtaccttccaggtaggttcggataagggtcgaatc

SEQ ID NO: 145070 - DNA, 51 bp, Artificial
  Synthetic oligonucleotide
tcggccgtccgtatccaagacaaagaataggatgcgatccataggccggag

SEQ ID NO: 145071 - DNA, 51 bp, Artificial
  Synthetic oligonucleotide
tccgcacaggattggcggcgttcgaaattgcttaaagcggcggccacattg

SEQ ID NO: 145072 - DNA, 51 bp, Artificial
  Synthetic oligonucleotide
cggtattgcccataccggcaagcgtgtgccccatcaagagcgcactcgtga

SEQ ID NO: 145073 - DNA, 51 bp, Artificial
  Synthetic oligonucleotide
ttccaaaataggaccattgactccgctatcaggagtattgcgccgatatta

SEQ ID NO: 145074 - DNA, 51 bp, Artificial
  Synthetic oligonucleotide
cgctccctgctcgcacgcaaggtctgtgtagactctgccggccacatcagg

SEQ ID NO: 145075 - DNA, 51 bp, Artificial
  Synthetic oligonucleotide
cgctacctgcgaaccaggccacaactccggctagtacaccgacgtaaatgg

SEQ ID NO: 145076 - DNA, 56 bp, Artificial
  Synthetic oligonucleotide
acacatccacgaagtgaacggccacccacctggctccgccgagtatcaacgggtgg

SEQ ID NO: 145077 - DNA, 51 bp, Artificial
  Synthetic oligonucleotide
acatagccactgacccaatctacggtgttaaacactgcctttagcgccgaa

SEQ ID NO: 145078 - DNA, 51 bp, Artificial
  Synthetic oligonucleotide
cgcctccgatggcacaggccgtccctaagagcatacgacgcgatggatcat

SEQ ID NO: 145079 - DNA, 51 bp, Artificial
  Synthetic oligonucleotide
tgttctcgtcccggcgctatcagttgcgggaaaccgagctcgccatatttg

SEQ ID NO: 145080 - DNA, 51 bp, Artificial
  Synthetic oligonucleotide
ccgcaaacattcaatatccgcgtaagcacactgttatgacccaagttccca

SEQ ID NO: 145081 - DNA, 51 bp, Artificial
  Synthetic oligonucleotide
gtgaggacagtttcgagacgacctcggatactgaagtcattctgcgtgcgt

SEQ ID NO: 145082 - DNA, 50 bp, Artificial
  Synthetic oligonucleotide
acacggttccaggttgccccgtgcgtagaggggtagcggccggtgtagta

SEQ ID NO: 145083 - DNA, 50 bp, Artificial
  Synthetic oligonucleotide
accaatcggagggaaaggcactcgatagaccgagagcggaacacgccgct

SEQ ID NO: 145084 - DNA, 50 bp, Artificial
  Synthetic oligonucleotide
acattggaccgcccaaacagcctccgtcttcccgacagcgccaaggttcg

SEQ ID NO: 145085 - DNA, 50 bp, Artificial
  Synthetic oligonucleotide
acacgtggctgcgaagtccgcaatagttggttggctcgaccaaggccgca

SEQ ID NO: 145086 - DNA, 50 bp, Artificial
  Synthetic oligonucleotide
acgcagctggagttcaatgtgcgctccgaaaaccgggacgagtgcgtgac

SEQ ID NO: 145087 - DNA, 56 bp, Artificial
  Synthetic oligonucleotide
actgcgccaaaactttggttcgcgtgcagcacaaaccattcattggaaatccagca

SEQ ID NO: 145088 - DNA, 50 bp, Artificial
  Synthetic oligonucleotide
acaggcgccatcctggacgtgaatggcgggtcgtttatgcagtagtgccc

SEQ ID NO: 145089 - DNA, 50 bp, Artificial
  Synthetic oligonucleotide
acgccgctgacgtctccatgctttcatggacgcggaatgcaagcgccaat

SEQ ID NO: 145090 - DNA, 50 bp, Artificial
  Synthetic oligonucleotide
acgccgttacagggcagcgactgttaatgcctagcggtcttagcgccgca

SEQ ID NO: 145091 - DNA, 50 bp, Artificial
  Synthetic oligonucleotide
aaaatagcctcgacccgctgccacgtctgtatgacggggtgtatgccccc

SEQ ID NO: 145092 - DNA, 50 bp, Artificial
  Synthetic oligonucleotide
aaacttctccacgagcggcccaaagggaggttcgatcgcggctgcaggca

SEQ ID NO: 145093 - DNA, 50 bp, Artificial
  Synthetic oligonucleotide
aaagcgcgcctctgaccctgagatgttcgggcctctgacagtctcgagcg

SEQ ID NO: 145094 - DNA, 50 bp, Artificial
  Synthetic oligonucleotide
aaagcgcgctaccaaggcggtaacctgacgtgtgttgggtttcctgcggc

SEQ ID NO: 145095 - DNA, 50 bp, Artificial
  Synthetic oligonucleotide
aacattgacgggagtccagcccgactgctgcctcgtgtcggccaggaata

SEQ ID NO: 145096 - DNA, 50 bp, Artificial
  Synthetic oligonucleotide
aaccccaggcgcttcgctctgcagtgccagttgttgtgggacggtgcgat

SEQ ID NO: 145097 - DNA, 50 bp, Artificial
  Synthetic oligonucleotide
aacccccgcgtccgcgcatgactctggctacgaatggcagggccgcgcct

SEQ ID NO: 145098 - DNA, 56 bp, Artificial
  Synthetic oligonucleotide
atgccagacgattacagggccagcgggcacaattacgccagtgcgcttgacgtaag

SEQ ID NO: 145099 - DNA, 50 bp, Artificial
  Synthetic oligonucleotide
aacgcgtggcaatgaagcacgccaagtccagctcgcagaggatgtacgca

SEQ ID NO: 145100 - DNA, 50 bp, Artificial
  Synthetic oligonucleotide
aacgtgtagctagcgctctcgtccgggtcaggccgattagggcccctggg

SEQ ID NO: 145101 - DNA, 50 bp, Artificial
  Synthetic oligonucleotide
aactgggacttatggccgccctcctatggatggtggttggcacttcgcga

SEQ ID NO: 145102 - DNA, 50 bp, Artificial
  Synthetic oligonucleotide
ttattggaggggctacacgcatcgtaaacttgctagctgcaactggacga

SEQ ID NO: 145103 - DNA, 50 bp, Artificial
  Synthetic oligonucleotide
aacttgccgcctacacgatggatcttccacacccggcgcacttgagtcgg

SEQ ID NO: 145104 - DNA, 50 bp, Artificial
  Synthetic oligonucleotide
aagccccgacctggagctcacggttgccctggatcgcagcgggtccccgg

SEQ ID NO: 145105 - DNA, 50 bp, Artificial
  Synthetic oligonucleotide
aagggcccgaagtggtgcaacgcatgtaccgtgaagtgtcgcgcttgcaa

SEQ ID NO: 145106 - DNA, 50 bp, Artificial
  Synthetic oligonucleotide
aatccgaccatcccccggagtgcgtggcggaacacaagaatggggactgt

SEQ ID NO: 145107 - DNA, 50 bp, Artificial
  Synthetic oligonucleotide
aatcctgcagggaatccaggaaatcggacacgaccagaggcgcccagcca

SEQ ID NO: 145108 - DNA, 50 bp, Artificial
  Synthetic oligonucleotide
aatcggagcgagctctgcggtcggattctatgttgcgcaaatggcccggt

SEQ ID NO: 145109 - DNA, 56 bp, Artificial
  Synthetic oligonucleotide
cgatccgcctggttatgcctgtgtaacgacaccatgggcgcaaactttagggcacg

SEQ ID NO: 145110 - DNA, 50 bp, Artificial
  Synthetic oligonucleotide
aatgattccgggatggctgcccactcaagatgccaaggacccgtggcccg

SEQ ID NO: 145111 - DNA, 50 bp, Artificial
  Synthetic oligonucleotide
aatgtcgccgtaaagcgcgcctctgaccctgagatgttcgggcctctgac

SEQ ID NO: 145112 - DNA, 50 bp, Artificial
  Synthetic oligonucleotide
aattggggcgcagtccccacggctagaagtagggacgcaaccactcaagg

SEQ ID NO: 145113 - DNA, 50 bp, Artificial
  Synthetic oligonucleotide
acaaaagcgtccgtcccatccaggcccacggcaatatgacccttgcgcgt

SEQ ID NO: 145114 - DNA, 50 bp, Artificial
  Synthetic oligonucleotide
acaacccacatagcccagcgctccgacaggattggaaccgccccctggta

SEQ ID NO: 145115 - DNA, 50 bp, Artificial
  Synthetic oligonucleotide
acaacggcacacggttccaggttgccccgtgcgtagaggggtagcggccg

SEQ ID NO: 145116 - DNA, 50 bp, Artificial
  Synthetic oligonucleotide
acacccgttgaccagtctgccgtccgtaaacctaccgtgcgtcccgccta

SEQ ID NO: 145117 - DNA, 50 bp, Artificial
  Synthetic oligonucleotide
cccgagctgtgaacgactgacgagtcacgtaggctccgcagagggtgacc

SEQ ID NO: 145118 - DNA, 50 bp, Artificial
  Synthetic oligonucleotide
ccctgagatgttcgggcctctgacagtctcgagcgaagtggcagctccct

SEQ ID NO: 145119 - DNA, 50 bp, Artificial
  Synthetic oligonucleotide
ccgaatttcgcatcaacccggacaatggagcctcccttggtcgtaagttg

SEQ ID NO: 145120 - DNA, 56 bp, Artificial
  Synthetic oligonucleotide
tagcggcatgacagttagtcagccgaacctcgcctagtcgatgctccttgctttgc

SEQ ID NO: 145121 - DNA, 50 bp, Artificial
  Synthetic oligonucleotide
ccttcgcaaggtggcccggtcacaccgattgaccgtgtggggaacagatt

SEQ ID NO: 145122 - DNA, 50 bp, Artificial
  Synthetic oligonucleotide
cgcaaacggatgcccgagacgcagttgatgccaagccgcccagtactgaa

SEQ ID NO: 145123 - DNA, 50 bp, Artificial
  Synthetic oligonucleotide
cgcattactcacctggggagcgttggagaccgccttagcgccccttccga

SEQ ID NO: 145124 - DNA, 50 bp, Artificial
  Synthetic oligonucleotide
cgcccaaacagcctccgtcttcccgacagcgccaaggttcggcgacgcgc

SEQ ID NO: 145125 - DNA, 50 bp, Artificial
  Synthetic oligonucleotide
cgcgacgagtcctgatcgccggacatcgtgtaaaggacagttccacgcgc

SEQ ID NO: 145126 - DNA, 50 bp, Artificial
  Synthetic oligonucleotide
cgcgccaactcgcccctctggtcaatccgcagccaggtgatacccgagaa

SEQ ID NO: 145127 - DNA, 50 bp, Artificial
  Synthetic oligonucleotide
cggcgacgcgcggcacagatcgtagacgcttgggcggagtgcattccaag

SEQ ID NO: 145128 - DNA, 50 bp, Artificial
  Synthetic oligonucleotide
cgtgcctgaccaggtacgtaggctcgggagtgcggcctcggcagtcgcat

SEQ ID NO: 145129 - DNA, 50 bp, Artificial
  Synthetic oligonucleotide
cgttggagaccgccttagcgccccttccgagaacagggccagtgtttggc

SEQ ID NO: 145130 - DNA, 50 bp, Artificial
  Synthetic oligonucleotide
ctcatagtcccggccagccaaatcactgtttaattgagcggcttctgtac

SEQ ID NO: 145131 - DNA, 56 bp, Artificial
  Synthetic oligonucleotide
gggaaccagcgtacttaacttgaatggtgttgtttgcgtcatcgttatctccgggc

SEQ ID NO: 145132 - DNA, 50 bp, Artificial
  Synthetic oligonucleotide
ctgttagattggagggtgaaatggcatatccgaggtttgtcgaattccat

SEQ ID NO: 145133 - DNA, 50 bp, Artificial
  Synthetic oligonucleotide
gacaccgccctctgccgtagtcccccatctcaatccgagttgctgaacga

SEQ ID NO: 145134 - DNA, 50 bp, Artificial
  Synthetic oligonucleotide
gactgatcatagccaccgaattccgcgataaacaacaaccaaattgtgtg

SEQ ID NO: 145135 - DNA, 50 bp, Artificial
  Synthetic oligonucleotide
gcgaagcccccagcttatggcccgtctgccccgcttgtacgcccccgggc

SEQ ID NO: 145136 - DNA, 50 bp, Artificial
  Synthetic oligonucleotide
gctgcagtacaggcggatatcgatgagaatcgttcaaagtttgattaccc

SEQ ID NO: 145137 - DNA, 50 bp, Artificial
  Synthetic oligonucleotide
ggcattggcttcgggagtgcaaggggtgaggccgattccagtgtattgga

SEQ ID NO: 145138 - DNA, 50 bp, Artificial
  Synthetic oligonucleotide
acgcctcgggcaggtatgcgcgcgaaccattgatcagtacatcgcaaccg

SEQ ID NO: 145139 - DNA, 50 bp, Artificial
  Synthetic oligonucleotide
acgcgctttggtaccgcccgtgcaattccagaacagatcaggcccctgga

SEQ ID NO: 145140 - DNA, 50 bp, Artificial
  Synthetic oligonucleotide
tcgcagctgggtcctgaaaatctcgggatgagccaggcaatatcgtatgg

SEQ ID NO: 145141 - DNA, 50 bp, Artificial
  Synthetic oligonucleotide
acgcgtgtgcgatgcatgggtatcgtctcatggcgtggccggtttagccc

SEQ ID NO: 145142 - DNA, 56 bp, Artificial
  Synthetic oligonucleotide
cccgtggtatgccccacctctaatggctgtattcatcgtaggcgcatacgcacttg

SEQ ID NO: 145143 - DNA, 50 bp, Artificial
  Synthetic oligonucleotide
acgcgtgtgcggcgtatcgccaggctctaccctgaccgaaatccatgcca

SEQ ID NO: 145144 - DNA, 50 bp, Artificial
  Synthetic oligonucleotide
acggcgcattgttacaacgtgtagctagcgctctcgtccgggtcaggccg

SEQ ID NO: 145145 - DNA, 50 bp, Artificial
  Synthetic oligonucleotide
agaaaactgcataggttgcggctattgcattacaggttgcccattcgacg

SEQ ID NO: 145146 - DNA, 50 bp, Artificial
  Synthetic oligonucleotide
agagagaacgaacactagtggatctacgtacgtacgagtggaccagagat

SEQ ID NO: 145147 - DNA, 50 bp, Artificial
  Synthetic oligonucleotide
agcgaccatccgttccataaggctccgggtgagatgcaccgtggtgaggt

SEQ ID NO: 145148 - DNA, 50 bp, Artificial
  Synthetic oligonucleotide
aggctccgggtgagatgcaccgtggtgaggtgaacgtacaaatcacggcg

SEQ ID NO: 145149 - DNA, 50 bp, Artificial
  Synthetic oligonucleotide
aggtgcctttgtgcggtaagattggctaaatctattcgatggagcggtta

SEQ ID NO: 145150 - DNA, 50 bp, Artificial
  Synthetic oligonucleotide
tagcggatgtcgctcatgatggctcagcgtccggacttcagttcggccca

SEQ ID NO: 145151 - DNA, 50 bp, Artificial
  Synthetic oligonucleotide
cagcctccgtcttcccgacagcgccaaggttcggcgacgcgcggcacaga

SEQ ID NO: 145152 - DNA, 50 bp, Artificial
  Synthetic oligonucleotide
caggctgcgagtttcgacctgccacgaagggctccaagaagggccgttgg

SEQ ID NO: 145153 - DNA, 55 bp, Artificial
  Synthetic oligonucleotide
ccggtgaggcgtctaagttgggatccgcgtcatgacagtcgatcgcacgtcttcg

SEQ ID NO: 145154 - DNA, 50 bp, Artificial
  Synthetic oligonucleotide
catcctcgaggggacgagagccgttcctcggatcttgcgaggtggtgcag

SEQ ID NO: 145155 - DNA, 50 bp, Artificial
  Synthetic oligonucleotide
ccccgtcgaaacttctccacgagcggcccaaagggaggttcgatcgcggc

SEQ ID NO: 145156 - DNA, 50 bp, Artificial
  Synthetic oligonucleotide
gttcaattgaacgcaggcacagttcattcgctgccctacgtgccaatgac

SEQ ID NO: 145157 - DNA, 50 bp, Artificial
  Synthetic oligonucleotide
cccgacagcgccaaggttcggcgacgcgcggcacagatcgtagacgcttg

SEQ ID NO: 145158 - DNA, 55 bp, Artificial
  Synthetic oligonucleotide
ctgccccaacatacgctccatactgcggaacagcgtcaggtccacattcaagcac

SEQ ID NO: 145159 - DNA, 60 bp, Artificial
  Synthetic oligonucleotide
cgcgagaagaggcatatacgctactgcagcaagtgaatgcggacttgcgatcatcgttgc

SEQ ID NO: 145160 - DNA, 55 bp, Artificial
  Synthetic oligonucleotide
cctcctggaggtggctatgctcgatctttagtacgtccccaattctctgtcccgt

SEQ ID NO: 145161 - DNA, 55 bp, Artificial
  Synthetic oligonucleotide
ccgttggccgtagtgttgacagccgcacccatactgacctggtatgcgctgaacc

SEQ ID NO: 145162 - DNA, 55 bp, Artificial
  Synthetic oligonucleotide
ctgacgaactattgagatggcccctgcgcatttctatgtctgacaccttacggag

SEQ ID NO: 145163 - DNA, 55 bp, Artificial
  Synthetic oligonucleotide
gggtggatacgactgagggcggataccggcccgtgcaagcaagacgctagggaaa

SEQ ID NO: 145164 - DNA, 55 bp, Artificial
  Synthetic oligonucleotide
cgggtggacctggccgtctacgtggctgtaggtggtcatttccatccacagctcg

SEQ ID NO: 145165 - DNA, 55 bp, Artificial
  Synthetic oligonucleotide
cgggttgcagccctagtcaggtcaaacgagtttgggcgacacatagggcgaaatc

SEQ ID NO: 145166 - DNA, 55 bp, Artificial
  Synthetic oligonucleotide
ggtcgttcgctcctgaagcatcgagggaggccatcctggtggtcgaggtcgaaga

SEQ ID NO: 145167 - DNA, 55 bp, Artificial
  Synthetic oligonucleotide
gggtgtagcagaagccaccttaaatacgtatcgcccaagcgctcctggccccaac

SEQ ID NO: 145168 - DNA, 55 bp, Artificial
  Synthetic oligonucleotide
cggtgagaaacagagcgctattgctcagttcgacatcatcaattacgactcgttg

SEQ ID NO: 145169 - DNA, 55 bp, Artificial
  Synthetic oligonucleotide
cctcattgaggtcgggaggaccaccggcgatatcgtagccccagatgcagagcca

SEQ ID NO: 145170 - DNA, 60 bp, Artificial
  Synthetic oligonucleotide
acagttgagaggcaagctctacggagatataggtcgtatctatcggagacgttctggcat

SEQ ID NO: 145171 - DNA, 55 bp, Artificial
  Synthetic oligonucleotide
ctcccctatattggtttccgattttccgtcatgaatgcttcgaccctgcccgacg

SEQ ID NO: 145172 - DNA, 55 bp, Artificial
  Synthetic oligonucleotide
cggtgcctggaacattgccacccatgccaggtgttgtaccagcagacatatcgcc

SEQ ID NO: 145173 - DNA, 55 bp, Artificial
  Synthetic oligonucleotide
cctagctagcgcaatacaaacgatggcgcataaggcaatccacggcattagatcg

SEQ ID NO: 145174 - DNA, 55 bp, Artificial
  Synthetic oligonucleotide
cgtatcattgcaagcgctgtcaataatggctgagctgcgtttaccgcataaggcg

SEQ ID NO: 145175 - DNA, 55 bp, Artificial
  Synthetic oligonucleotide
ctccataaagtatcgatcacagcatttcatgcctaatgaatcggcattttggcgc

SEQ ID NO: 145176 - DNA, 55 bp, Artificial
  Synthetic oligonucleotide
cgtatcgcacgagtcttgtcaacactgcgttctgtcgaggggcgcttgcaagtgg

SEQ ID NO: 145177 - DNA, 55 bp, Artificial
  Synthetic oligonucleotide
gtctaaggtggtggccttcaacacggtaaaggtgcgctcttcaccctcgcgcccc

SEQ ID NO: 145178 - DNA, 55 bp, Artificial
  Synthetic oligonucleotide
cgtcaaagttcaacaaggtccaataccaggcgctattgaagcgacggccagcata

SEQ ID NO: 145179 - DNA, 55 bp, Artificial
  Synthetic oligonucleotide
cgtcgacgttttgcagatcaacgtgccccagaaggtgcgccacaacggtcctact

SEQ ID NO: 145180 - DNA, 55 bp, Artificial
  Synthetic oligonucleotide
ctccaatctagagatgaagtcgcaggcatgaccttagctcctaggcgcgacagcg

SEQ ID NO: 145181 - DNA, 60 bp, Artificial
  Synthetic oligonucleotide
gttgggagaggccaccgctcaattgttcgggatgctctcagggtttaaggatgcactgcg

SEQ ID NO: 145182 - DNA, 55 bp, Artificial
  Synthetic oligonucleotide
cgttcccggagaacactgcatgtcggattcatactccgagccgagccgaccacgt

SEQ ID NO: 145183 - DNA, 55 bp, Artificial
  Synthetic oligonucleotide
cctaagtcctggcgttgaagcatccccgtggctatacgcgaactcccgactcgcg

SEQ ID NO: 145184 - DNA, 55 bp, Artificial
  Synthetic oligonucleotide
ctataacctcgcaaccgcgcttaagccaggattgccgtccccgatgacaattcac

SEQ ID NO: 145185 - DNA, 55 bp, Artificial
  Synthetic oligonucleotide
cgagccatccccgcatagattgccatccagaatgacaataatgaagtgcagaatt

SEQ ID NO: 145186 - DNA, 55 bp, Artificial
  Synthetic oligonucleotide
cgagcctgttccagaagatgccttaccagccgtccaaggcattcgcgccggtcgt

SEQ ID NO: 145187 - DNA, 55 bp, Artificial
  Synthetic oligonucleotide
cgacgcttttcaagcatacgcctgggaggcgaacggttctttcgagattctgccc

SEQ ID NO: 145188 - DNA, 54 bp, Artificial
  Synthetic oligonucleotide
cgatgcattcgccgggataggccgtccccgataaacggggcgtccgtggttgta

SEQ ID NO: 145189 - DNA, 55 bp, Artificial
  Synthetic oligonucleotide
gtcctgaaaatgatgcaagggagcagacatatgagcagcgctttccaaccctggg

SEQ ID NO: 145190 - DNA, 55 bp, Artificial
  Synthetic oligonucleotide
cgcagtagtcttgcaaggcgtcgtagcgtaaagccatcttatggtccttcttgcg

SEQ ID NO: 145191 - DNA, 55 bp, Artificial
  Synthetic oligonucleotide
cgacaagccagaccgctgcactctccaccatcttgccacgccaacatgcgtcctg

SEQ ID NO: 145192 - DNA, 59 bp, Artificial
  Synthetic oligonucleotide
tcggtggagtagagaatgccgtatccctcggagcaaagttccgccgcgccgctagcgac

SEQ ID NO: 145193 - DNA, 55 bp, Artificial
  Synthetic oligonucleotide
gtcctatctacagccgtcgggaaaagccgagccctatcgacaaagaaatgttgcg

SEQ ID NO: 145194 - DNA, 55 bp, Artificial
  Synthetic oligonucleotide
gtatgtttcagcaacccaaccctcttctgcgtcgatagggccatttgatagacgc

SEQ ID NO: 145195 - DNA, 55 bp, Artificial
  Synthetic oligonucleotide
gtagccttgtgtaaacgcctcgtcggagagttctcagatcaatcttttggaagcc

SEQ ID NO: 145196 - DNA, 55 bp, Artificial
  Synthetic oligonucleotide
gtacccaatggtctacgtaaccaaagaggtgctagttcagttaggaacattgcga

SEQ ID NO: 145197 - DNA, 55 bp, Artificial
  Synthetic oligonucleotide
gtacatgcgtatgtcgaagccggtctcatcggaatccgtcagaacatacctgtcc

SEQ ID NO: 145198 - DNA, 55 bp, Artificial
  Synthetic oligonucleotide
cgcgcgtatacataggaaaatcgggatcgtttgcgttaatcacacgaagcttaga

SEQ ID NO: 145199 - DNA, 55 bp, Artificial
  Synthetic oligonucleotide
cgcggatatctaacgtgcttcgtcccagaatcattccctgcctactggtccgaga

SEQ ID NO: 145200 - DNA, 55 bp, Artificial
  Synthetic oligonucleotide
cgcgttgctggatgcctccggtacgagtgcgctgcttgatattcccgggcagggg

SEQ ID NO: 145201 - DNA, 55 bp, Artificial
  Synthetic oligonucleotide
gtaaaataggcaccaccgaaacgcagaggggaagacgggatgcgttgcactcggg

SEQ ID NO: 145202 - DNA, 55 bp, Artificial
  Synthetic oligonucleotide
cggggagagcatgatggcgtctcgatggttacgtttattggctggcagcacactg

SEQ ID NO: 145203 - DNA, 60 bp, Artificial
  Synthetic oligonucleotide
gtttataggtcatccagcgtccatcactacggccttgggccatcaggtgaatagcgttga

SEQ ID NO: 145204 - DNA, 55 bp, Artificial
  Synthetic oligonucleotide
cgggaattcaagtcccgagtaaggggcatcgcaggcagtttatccgccgccagga

SEQ ID NO: 145205 - DNA, 55 bp, Artificial
  Synthetic oligonucleotide
ccttcgccacacaggagctttgacacttgtcgcctgcgcacaaaacgagcatact

SEQ ID NO: 145206 - DNA, 55 bp, Artificial
  Synthetic oligonucleotide
cggctcgaaacgcagaaccttgttcttcgcatgcttctgccgccatccggccgtc

SEQ ID NO: 145207 - DNA, 55 bp, Artificial
  Synthetic oligonucleotide
cggcgtaacgccggtctatgtcgtcccatagcggtttgaggctgggttcctcgcg

SEQ ID NO: 145208 - DNA, 55 bp, Artificial
  Synthetic oligonucleotide
ggtgcagttccgttccatatgtggttacccgatgtgtatagcggggctcctacca

SEQ ID NO: 145209 - DNA, 55 bp, Artificial
  Synthetic oligonucleotide
cggcagacctggtgtgatttccatcgctgaatcagactgaacatcgctcggcgcg

SEQ ID NO: 145210 - DNA, 55 bp, Artificial
  Synthetic oligonucleotide
cggactcttgagtgacatgcgcgaccaaacgcgattgagcgttgttgccgggatg

SEQ ID NO: 145211 - DNA, 55 bp, Artificial
  Synthetic oligonucleotide
ccttcgtcccgatgctctccggtggaggcgaatcatgaaacagcagggtcttccg

SEQ ID NO: 145212 - DNA, 55 bp, Artificial
  Synthetic oligonucleotide
cgaaaagattgttgctgcgcgcaggatagccaccgatgtcgtactctgacaaatc

SEQ ID NO: 145213 - DNA, 55 bp, Artificial
  Synthetic oligonucleotide
cgctttcctagggattgccctaatcctaatttgacaacgttaccattagactgcc

SEQ ID NO: 145214 - DNA, 60 bp, Artificial
  Synthetic oligonucleotide
ccagaagagcatctcgccgatccagtaatgtcacggcttcctgcctgggtgccacgctat

SEQ ID NO: 145215 - DNA, 51 bp, Artificial
  Synthetic oligonucleotide
cctaaaccaaccttccactcgggttggtcaaagacggtttgatattggggc

SEQ ID NO: 145216 - DNA, 50 bp, Artificial
  Synthetic oligonucleotide
cccggccgcgtgtttgttggccaacgcaaagacccttttgctgtcaacct

SEQ ID NO: 145217 - DNA, 50 bp, Artificial
  Synthetic oligonucleotide
ccccgcctgccatgataagccgttgcccctcgcccgaagtgactaaagca

SEQ ID NO: 145218 - DNA, 55 bp, Artificial
  Synthetic oligonucleotide
cctcctgagcgtttgtctgtttcagcggtgcgagtccatccgaactatcgtgcgg

SEQ ID NO: 145219 - DNA, 55 bp, Artificial
  Synthetic oligonucleotide
cgacccagcagttaatttcgagttcgaaaactttaccatcactaaagttgcgagc

SEQ ID NO: 145220 - DNA, 55 bp, Artificial
  Synthetic oligonucleotide
cgcagagggtatcgccgctagtgccacttcgcgctgaattcttgagccgggccta

SEQ ID NO: 145221 - DNA, 55 bp, Artificial
  Synthetic oligonucleotide
cgccaatacctgacaatgtagggagtccagcttcaaagctactgctattagtcag

SEQ ID NO: 145222 - DNA, 55 bp, Artificial
  Synthetic oligonucleotide
cgcttgcgtttgcgggatctggtggtaagccgaggtcaagtgttatgacctgtgg

SEQ ID NO: 145223 - DNA, 55 bp, Artificial
  Synthetic oligonucleotide
gggtggcgcgactttcttaatgcaccggggccaagcctgctctatggcgcgataa

SEQ ID NO: 145224 - DNA, 55 bp, Artificial
  Synthetic oligonucleotide
cggctaagtcgacctacaaaacctcgcaacagcacgcaacctttgtgctcagaag

SEQ ID NO: 145225 - DNA, 55 bp, Artificial
  Synthetic oligonucleotide
cggctagatagcgaaaacggtcaactactgtgccgaggcgagcccttattgtcgc

SEQ ID NO: 145226 - DNA, 55 bp, Artificial
  Synthetic oligonucleotide
gagaggtgaccatagtatcgctcggtcaagtagcccaaagtgccgtcctctcgaa

SEQ ID NO: 145227 - DNA, 59 bp, Artificial
  Synthetic oligonucleotide
atctcgccgatccagtaatgtcacggcttcctgcctgggtgccacgctatcaatagcct

SEQ ID NO: 145228 - DNA, 55 bp, Artificial
  Synthetic oligonucleotide
gggctccataagggtgagtcctatgcccaagcattgtcgcgtcttcagtctgatg

SEQ ID NO: 145229 - DNA, 55 bp, Artificial
  Synthetic oligonucleotide
cgttgcgactaaagccttgagtgacaatggggttattgtggtgttctctgcgggt

SEQ ID NO: 145230 - DNA, 55 bp, Artificial
  Synthetic oligonucleotide
gaccgaaaagtacgctgcagacaggaaccccgtagtgatacaaagtttcggaggc

SEQ ID NO: 145231 - DNA, 55 bp, Artificial
  Synthetic oligonucleotide
ggagtgcccgagcaccaactgaaacaaccctccggcatcgctaccgtacgcatcg

SEQ ID NO: 145232 - DNA, 55 bp, Artificial
  Synthetic oligonucleotide
ctggcaacacgctgtaaggggtttcagcattggcttccagcacttgtagtgcctg

SEQ ID NO: 145233 - DNA, 55 bp, Artificial
  Synthetic oligonucleotide
cttatgtcaccagagcttatggcgcaagtgggcacttacatcaagcctgcatcaa

SEQ ID NO: 145234 - DNA, 55 bp, Artificial
  Synthetic oligonucleotide
tttccgtcataccggtagcacgtcccagtgagggcagcaatgtaaacaccagcgt

SEQ ID NO: 145235 - DNA, 55 bp, Artificial
  Synthetic oligonucleotide
aatggtaacgggacaaatcgctagtggcggtaattaagtcgtctaggctgagtcg

SEQ ID NO: 145236 - DNA, 55 bp, Artificial
  Synthetic oligonucleotide
ttgaaacgccagtgaagttgtctagcgagcagaaagagttgttgcgtaaattcca

SEQ ID NO: 145237 - DNA, 53 bp, Artificial
  Synthetic oligonucleotide
ttccagttctgagaccgaaacccgtgaacactgggcggctatcggggccgggg

SEQ ID NO: 145238 - DNA, 55 bp, Artificial
  Synthetic oligonucleotide
gagccgaatccaattcaaagtgcaagcatgtttactgtggcagttattggcctga

SEQ ID NO: 145239 - DNA, 55 bp, Artificial
  Synthetic oligonucleotide
tgcgtccccataagttgaaaataccgctcgaaaagcccgctcagacgtttacagc

SEQ ID NO: 145240 - DNA, 55 bp, Artificial
  Synthetic oligonucleotide
tgactgcatgcgtttgctccctgttttccccagcgctaccccattacaggcacgc

SEQ ID NO: 145241 - DNA, 55 bp, Artificial
  Synthetic oligonucleotide
tgactattggtcatcacgcctctctgttgcgaccgagtgaagatggtgtgacgcc

SEQ ID NO: 145242 - DNA, 53 bp, Artificial
  Synthetic oligonucleotide
gcgtcgcggtaagtcgccccgccctaaacaatgtcgtttcgttggattacgcc

SEQ ID NO: 145243 - DNA, 55 bp, Artificial
  Synthetic oligonucleotide
gctctgcgggtttgatggttagcgtcctggcaccactttgtgcatccaccggtag

SEQ ID NO: 145244 - DNA, 55 bp, Artificial
  Synthetic oligonucleotide
agggtaacgaacgatgttgcagccgaagcgtaccaaattccggaaagtgatgaag

SEQ ID NO: 145245 - DNA, 55 bp, Artificial
  Synthetic oligonucleotide
ataaaggctgaccggcgggctatcacccacacgccacgctgctataatgcgcgcc

SEQ ID NO: 145246 - DNA, 55 bp, Artificial
  Synthetic oligonucleotide
tgactactcataacttgctccgttcccttgttattctgccgttcacgggaaggac

SEQ ID NO: 145247 - DNA, 55 bp, Artificial
  Synthetic oligonucleotide
gctggccaaggtttgtgcgatcggaccactgagcgtacacatctgctgcttatcc

SEQ ID NO: 145248 - DNA, 55 bp, Artificial
  Synthetic oligonucleotide
atgcaggttaacccgatgtatgtgcaaaacagtcgcggcaaatttgagctacagg

SEQ ID NO: 145249 - DNA, 55 bp, Artificial
  Synthetic oligonucleotide
ccagaggtatcataaaccgacagcggtgggttatcctcgaactttccgtccgcca

SEQ ID NO: 145250 - DNA, 55 bp, Artificial
  Synthetic oligonucleotide
atggaccgtgacatgattcagatcgtcgctgagtacgattttatctacgctaccc

SEQ ID NO: 145251 - DNA, 55 bp, Artificial
  Synthetic oligonucleotide
gcaggacttgtgtttggtcgcttgtctcattgatgctaatcagccaatagacagc

SEQ ID NO: 145252 - DNA, 55 bp, Artificial
  Synthetic oligonucleotide
attcaaagtacacgcgcggcttcataggggcctgttaaccctatgccgggatcgc

SEQ ID NO: 145253 - DNA, 55 bp, Artificial
  Synthetic oligonucleotide
gttgcgtctcgcttgttagcttgtaacgactattcgcatttatatagggtcacca

SEQ ID NO: 145254 - DNA, 55 bp, Artificial
  Synthetic oligonucleotide
caaggcggtggcagataccgtaaatagtggccgtttgttgatagacctgtgtggt

SEQ ID NO: 145255 - DNA, 55 bp, Artificial
  Synthetic oligonucleotide
cagcccggaatcgggataatgcggggatacataaaagagggtaccaatggctgag

SEQ ID NO: 145256 - DNA, 55 bp, Artificial
  Synthetic oligonucleotide
cagttgtcgcgagacttccagcgacaaacgattccttggatcgtacatagttctt

SEQ ID NO: 145257 - DNA, 55 bp, Artificial
  Synthetic oligonucleotide
cataaatagcccgcatggtaaccaagactatcgcctgaatcggtaggttgcatcg

SEQ ID NO: 145258 - DNA, 55 bp, Artificial
  Synthetic oligonucleotide
cattagcaggggctgtaattccagcgtgctccaagcggcgggattaggcacaccc

SEQ ID NO: 145259 - DNA, 55 bp, Artificial
  Synthetic oligonucleotide
gcactctggccggtacttttgtcgccgcgcagttaacgctcgccctggttacagc

SEQ ID NO: 145260 - DNA, 55 bp, Artificial
  Synthetic oligonucleotide
gtggcacgggacccgtcacagcggcgggtattcgagatcatgttccagaagtgcg

SEQ ID NO: 145261 - DNA, 54 bp, Artificial
  Synthetic oligonucleotide
gcgttgcctggccagaagagcatctcgccgatccagtaatgtcacggcttcctg

SEQ ID NO: 145262 - DNA, 54 bp, Artificial
  Synthetic oligonucleotide
ctaccgatggtcacagacttgctctctcccgtgctaaggcatctattgatgcgg

SEQ ID NO: 145263 - DNA, 51 bp, Artificial
  Synthetic oligonucleotide
ggggtagttccaagggctgataatacctactacgcctaacggtacccgtaa

SEQ ID NO: 145264 - DNA, 54 bp, Artificial
  Synthetic oligonucleotide
gtagtgtacgatctatccagtttcgacacccttccgaacgctttcgtgcctcgt

SEQ ID NO: 145265 - DNA, 54 bp, Artificial
  Synthetic oligonucleotide
gtgtcgcaggggcctttaaccactgcactacgatcagttgccccgacaatgacg

SEQ ID NO: 145266 - DNA, 54 bp, Artificial
  Synthetic oligonucleotide
tatcaccgtaagtgccaaaacctttgacgctcttattcttatggacgtaattgt

SEQ ID NO: 145267 - DNA, 54 bp, Artificial
  Synthetic oligonucleotide
tctgggttgataccgtggacccgcatagcagcaaggcactaagccagtacgggc

SEQ ID NO: 145268 - DNA, 52 bp, Artificial
  Synthetic oligonucleotide
agccgtttccccgtgatcaagggccgtttattgcgttaacagggaaggccag

SEQ ID NO: 145269 - DNA, 53 bp, Artificial
  Synthetic oligonucleotide
ccacctaagtgcccaagcacggttctgtgtgatgactgaacggtcagaattgg

SEQ ID NO: 145270 - DNA, 53 bp, Artificial
  Synthetic oligonucleotide
gccatactgccgtagataaaagcaaatcggttgtaatacctcggcaattgctc

SEQ ID NO: 145271 - DNA, 55 bp, Artificial
  Synthetic oligonucleotide
gtgcgcatcactttccaggtggccggaccatccacccctcgcatggctcgccagg

SEQ ID NO: 145272 - DNA, 53 bp, Artificial
  Synthetic oligonucleotide
agcgccagcattggcaccctaagtgtgactaacggctcggccagcctcaataa

SEQ ID NO: 145273 - DNA, 53 bp, Artificial
  Synthetic oligonucleotide
acgcgagagcgcgatcggagtgtgagtgggcgaaaggactggattcgttggcg

SEQ ID NO: 145274 - DNA, 52 bp, Artificial
  Synthetic oligonucleotide
ggccatccagtcccacaccatataccctgcagtttcggtttcattattgatg

SEQ ID NO: 145275 - DNA, 52 bp, Artificial
  Synthetic oligonucleotide
ggcgttgcataggacgggcccatcagcatgtcatgagtggcttcgattgcag

SEQ ID NO: 145276 - DNA, 52 bp, Artificial
  Synthetic oligonucleotide
gaagataagtgccgcgtcaggttaactacagggaaggatcatgcgtcgagca

SEQ ID NO: 145277 - DNA, 52 bp, Artificial
  Synthetic oligonucleotide
agcataccaagggtgatcaggacgggtttaaggctgaaaggccgaatatcag

SEQ ID NO: 145278 - DNA, 51 bp, Artificial
  Synthetic oligonucleotide
gagatccgtcatagcgatccttactatccacaaggtgttgggaaagcccct

SEQ ID NO: 145279 - DNA, 51 bp, Artificial
  Synthetic oligonucleotide
gaccaaggtgttgacccggttaacgaacaattacggcattgataccgagcc

SEQ ID NO: 145280 - DNA, 51 bp, Artificial
  Synthetic oligonucleotide
acgtgcattttccatcgttggtaatgggcggaaattgatcgacgagagagt

SEQ ID NO: 145281 - DNA, 51 bp, Artificial
  Synthetic oligonucleotide
ttagggcacattttgatccgcgtaccctctgaagcccggccgcagcagatt

SEQ ID NO: 145282 - DNA, 54 bp, Artificial
  Synthetic oligonucleotide
ggaaggaccagtcacgattaaagcggtaacccatttgagcgccgggaagggtca

SEQ ID NO: 145283 - DNA, 51 bp, Artificial
  Synthetic oligonucleotide
atggcttgctcgctatcggattcatctccttgctcggaacggacaaattca

SEQ ID NO: 145284 - DNA, 51 bp, Artificial
  Synthetic oligonucleotide
atcccaccactggttccggcgtgggccagtaagaaacgtgtcccagggtgc

SEQ ID NO: 145285 - DNA, 50 bp, Artificial
  Synthetic oligonucleotide
gtgtcgcacctggtcaggcggccccatgcttggagtggatggtggcgaag

SEQ ID NO: 145286 - DNA, 50 bp, Artificial
  Synthetic oligonucleotide
ccaataaagtcaccaccctgcagtggttgtcgtttggctggctccgcgcc

SEQ ID NO: 145287 - DNA, 50 bp, Artificial
  Synthetic oligonucleotide
atttaccgctagtgagcttagcgggcccaagccgccggtcatatggaggc

SEQ ID NO: 145288 - DNA, 50 bp, Artificial
  Synthetic oligonucleotide
taatgggcaggggtggtcaaaaatccgctccacacgtggtgtgcgagact

SEQ ID NO: 145289 - DNA, 50 bp, Artificial
  Synthetic oligonucleotide
atcgccgcaccataaaagtcagccacgcccaacttaaagccctccacgcc

SEQ ID NO: 145290 - DNA, 50 bp, Artificial
  Synthetic oligonucleotide
agcacgcatgagctttgcttgcgcgggtttttgggggttgctacaatcga

SEQ ID NO: 145291 - DNA, 50 bp, Artificial
  Synthetic oligonucleotide
actcagcgaagggtggactggtgcgcagtggctaagcccgacccctatta

SEQ ID NO: 145292 - DNA, 50 bp, Artificial
  Synthetic oligonucleotide
tggaatacgattcggctcaagcaaacatggcctcccgcgtaggtatgtca

SEQ ID NO: 145293 - DNA, 55 bp, Artificial
  Synthetic oligonucleotide
ggtgtgctgataaccacacccaacggatcggggctaattcagagcgttcggacac

SEQ ID NO: 145294 - DNA, 50 bp, Artificial
  Synthetic oligonucleotide
tgtcataggccaattgcagcacaccagtaacaaggccttcatggttatat

SEQ ID NO: 145295 - DNA, 50 bp, Artificial
  Synthetic oligonucleotide
accctgcagtggttgtcgtttggctggctccgcgccaaaatggttaggct

SEQ ID NO: 145296 - DNA, 50 bp, Artificial
  Synthetic oligonucleotide
ttgcgcaagaggatggtagcctggacgagcaaccttataaacgcgcttgg

SEQ ID NO: 145297 - DNA, 50 bp, Artificial
  Synthetic oligonucleotide
aactgctctcagcccggccgcgtgtttgttggccaacgcaaagacccttt

SEQ ID NO: 145298 - DNA, 50 bp, Artificial
  Synthetic oligonucleotide
gctccacacgtggtgtgcgagactttgttcgctttggaggcgtaccgggc

SEQ ID NO: 145299 - DNA, 50 bp, Artificial
  Synthetic oligonucleotide
gcgcggtttctaaaagctgatcctcgctctcaatggcacacgggccggcc

SEQ ID NO: 145300 - DNA, 50 bp, Artificial
  Synthetic oligonucleotide
gcgcagtcatttcattaccatcggctgcagagtccacccccggtgacgga

SEQ ID NO: 145301 - DNA, 50 bp, Artificial
  Synthetic oligonucleotide
ggcattagggatcaaaaaggcccgttagcggttcaatcgtggccgggcga

SEQ ID NO: 145302 - DNA, 50 bp, Artificial
  Synthetic oligonucleotide
ggccggcacatccagcgaacatgcttcgaacccaatgctcggtaacgcac

SEQ ID NO: 145303 - DNA, 50 bp, Artificial
  Synthetic oligonucleotide
ggccgtacagtcactatcgaaacgggtcgtgtggctcgtcaagcgaccgg

SEQ ID NO: 145304 - DNA, 55 bp, Artificial
  Synthetic oligonucleotide
ccgtgacattgatgactgtgactgtttggcttgaactagcgaggtgtgagccatg

SEQ ID NO: 145305 - DNA, 50 bp, Artificial
  Synthetic oligonucleotide
ggcgcctatcgggagtcgagtcaaagcctggtttatgcaggagcgggcaa

SEQ ID NO: 145306 - DNA, 50 bp, Artificial
  Synthetic oligonucleotide
ctctggtggggaagggggagcgccaggcgggaagttgcataaggttgttg

SEQ ID NO: 145307 - DNA, 50 bp, Artificial
  Synthetic oligonucleotide
ggctggggaaggtcagtagcgccagttccaggtcaccgcttagcactcgg

SEQ ID NO: 145308 - DNA, 50 bp, Artificial
  Synthetic oligonucleotide
gggcatccacgggaagtcgccagagaagtgccccttaacgcccagctttt

SEQ ID NO: 145309 - DNA, 50 bp, Artificial
  Synthetic oligonucleotide
gggccgaattgcaaatcccgctggaaggagggagtcgcggggagcgcatt

SEQ ID NO: 145310 - DNA, 50 bp, Artificial
  Synthetic oligonucleotide
cgttccagtcaatgccacacagcgcggattggaagcctgcgtacccgaca

SEQ ID NO: 145311 - DNA, 50 bp, Artificial
  Synthetic oligonucleotide
cgtcacaggccattcgcagggctctttccgaatcgggcttagcttgcgtg

SEQ ID NO: 145312 - DNA, 50 bp, Artificial
  Synthetic oligonucleotide
cggccccggagtcatggcgcccgatgaacctattcaggaagcaatcgacc

SEQ ID NO: 145313 - DNA, 50 bp, Artificial
  Synthetic oligonucleotide
ccggagtcgggtcacagtccgcgtgaacgtctgaacgtggaggcactagc

SEQ ID NO: 145314 - DNA, 50 bp, Artificial
  Synthetic oligonucleotide
ccctctgcgcttgaatccctgcatgctgaagtgggacgactgactcgcct

SEQ ID NO: 145315 - DNA, 60 bp, Artificial
  Synthetic oligonucleotide
gtcaaatctcatgccctgctgtcgccagtagtctgagggcacggcgcccgtagccaaaac

SEQ ID NO: 145316 - DNA, 54 bp, Artificial
  Synthetic oligonucleotide
attgtcaaaagtcacgccgttgcgaataacggttttcaacactttcttatcctc

SEQ ID NO: 145317 - DNA, 54 bp, Artificial
  Synthetic oligonucleotide
cattctctggaggtcatgatggacgttcacattcgcggagagcacatcacattg

SEQ ID NO: 145318 - DNA, 54 bp, Artificial
  Synthetic oligonucleotide
ggggcgcctgagtaagactcgagatcgcagcggatcccatgtgcggaatagcga

SEQ ID NO: 145319 - DNA, 54 bp, Artificial
  Synthetic oligonucleotide
ttgcccctaccggagcctctcctcagggtatgcgagccgaagaaagggtgtctc

SEQ ID NO: 145320 - DNA, 54 bp, Artificial
  Synthetic oligonucleotide
gccatccccacgatccctccttgcccggtcatacaagagcgggatacagtcagg

SEQ ID NO: 145321 - DNA, 54 bp, Artificial
  Synthetic oligonucleotide
actcggtgcggggagatgcgttgtttattcgggcggactcgccctacaaagact

SEQ ID NO: 145322 - DNA, 54 bp, Artificial
  Synthetic oligonucleotide
cgcaggctggagtcgcttgcagccacggcgcactctctctggaacagcccaaac

SEQ ID NO: 145323 - DNA, 54 bp, Artificial
  Synthetic oligonucleotide
cgtatactgatacgtaacgtgccattctcgcattctatgaccttcatgctaggg

SEQ ID NO: 145324 - DNA, 53 bp, Artificial
  Synthetic oligonucleotide
agacacgaaccgacggacgcgcaaggtgccagcggttggaccctctgcggaag

SEQ ID NO: 145325 - DNA, 53 bp, Artificial
  Synthetic oligonucleotide
gactgtccagaacttggcgaacgcgatggctgatgttctacgggggtgaagaa

SEQ ID NO: 145326 - DNA, 53 bp, Artificial
  Synthetic oligonucleotide
cgggatgccgcctcccggccttttgctgtgagagtgaggagggttacccgacg

SEQ ID NO: 145327 - DNA, 59 bp, Artificial
  Synthetic oligonucleotide
cgttggttctgtacgacttgaccagcactcatctccacgggcacgcctgtcccttagga

SEQ ID NO: 145328 - DNA, 53 bp, Artificial
  Synthetic oligonucleotide
gaacgatgagaaaggagtcgtgcggccagatttggagcatggcgcgtgtcggc

SEQ ID NO: 145329 - DNA, 53 bp, Artificial
  Synthetic oligonucleotide
ccgtcctgggccttgtacgactcttccgtttggagttgggatctgcgcgctta

SEQ ID NO: 145330 - DNA, 53 bp, Artificial
  Synthetic oligonucleotide
tacgtgccgaatcggtacaggttcggctcgcgtgtggtctggaactcgagatg

SEQ ID NO: 145331 - DNA, 53 bp, Artificial
  Synthetic oligonucleotide
caaactggcgcataaggaactgcatgacgctctaacttgatgtccgttaacat

SEQ ID NO: 145332 - DNA, 53 bp, Artificial
  Synthetic oligonucleotide
ctcatgggtcactgcgtgtgtcaacagccatagggcgcttcacatctgaacct

SEQ ID NO: 145333 - DNA, 52 bp, Artificial
  Synthetic oligonucleotide
cggatcgcgtacccgtaggtttgggcgagtcgattcaaatcaccaagcccgc

SEQ ID NO: 145334 - DNA, 52 bp, Artificial
  Synthetic oligonucleotide
gctagccgcaaagatccatccctcgaagtgaaacaccgcaatcagaatggga

SEQ ID NO: 145335 - DNA, 52 bp, Artificial
  Synthetic oligonucleotide
tgtgtggatagatcacgccccttcggtggtgttcgttcgaagcatcaggtta

SEQ ID NO: 145336 - DNA, 52 bp, Artificial
  Synthetic oligonucleotide
gcacatgtgacacatccaggtggagcgggtacaatgagtctctagaattgcg

SEQ ID NO: 145337 - DNA, 52 bp, Artificial
  Synthetic oligonucleotide
gcgttttgacctatacatcgacggtcataccgcgccacgactggattcttga

SEQ ID NO: 145338 - DNA, 57 bp, Artificial
  Synthetic oligonucleotide
tgccatggaagtttacaaccacctaatcgaaaagagaggaggctgtaccagttacag

SEQ ID NO: 145339 - DNA, 52 bp, Artificial
  Synthetic oligonucleotide
tcgggtaggcctaacgactcggggtcaacgcctaagcgagcggcgatgtgat

SEQ ID NO: 145340 - DNA, 52 bp, Artificial
  Synthetic oligonucleotide
ccaatgcctcaacgaaagctccgtcgctcacataaagcgtacggttctgggg

SEQ ID NO: 145341 - DNA, 51 bp, Artificial
  Synthetic oligonucleotide
tctgcaaagaacgattgattgacgcgttaactcaaacccaccgcgcacttc

SEQ ID NO: 145342 - DNA, 51 bp, Artificial
  Synthetic oligonucleotide
aacggtctaccacgaggtcagtcccgacgttcgtctgtactgggacggagg

SEQ ID NO: 145343 - DNA, 51 bp, Artificial
  Synthetic oligonucleotide
catgttcggagccggagtacattcgcaacgcgatccgtcgaaatggaccgc

SEQ ID NO: 145344 - DNA, 51 bp, Artificial
  Synthetic oligonucleotide
tgcaccctcctcctcgcattgcccctaccggagcctctcctcagggtatgc

SEQ ID NO: 145345 - DNA, 51 bp, Artificial
  Synthetic oligonucleotide
tatcctccatggatggccctccgcgtacgggattcatttgaaccccattat

SEQ ID NO: 145346 - DNA, 51 bp, Artificial
  Synthetic oligonucleotide
taagcctccgacccttcgcactgtgggccttatgaaaccgcggctcgcgcc

SEQ ID NO: 145347 - DNA, 51 bp, Artificial
  Synthetic oligonucleotide
cgccacacggtatacctatgtcgcgtgacgacacacccctgtcgccagacg

SEQ ID NO: 145348 - DNA, 51 bp, Artificial
  Synthetic oligonucleotide
catcgggccgacatatttcggtgcagggcaaccagcctataacccggccag

SEQ ID NO: 145349 - DNA, 55 bp, Artificial
  Synthetic oligonucleotide
tgttggcgtactagacccgggtggttgtctaccaaccattgtatcgctttggaag

SEQ ID NO: 145350 - DNA, 51 bp, Artificial
  Synthetic oligonucleotide
caagaccctgtatacggcaccactgtcgatgttccactcttcgggtagcat

SEQ ID NO: 145351 - DNA, 51 bp, Artificial
  Synthetic oligonucleotide
agcggcccccaaggtggtgcctgtctccagtctagcacaagcctctacgag

SEQ ID NO: 145352 - DNA, 51 bp, Artificial
  Synthetic oligonucleotide
ctggcgtcagatcaaaacccttcgggaaccggaccgtttaggggcgtgggc

SEQ ID NO: 145353 - DNA, 51 bp, Artificial
  Synthetic oligonucleotide
gaggtggcttatggacagcgtcttgtttcgccagacaggtacggtggcttg

SEQ ID NO: 145354 - DNA, 51 bp, Artificial
  Synthetic oligonucleotide
gcaaaccgtacgtgtgtccctttcgtgcgacaaagcgcggtggacgcctta

SEQ ID NO: 145355 - DNA, 51 bp, Artificial
  Synthetic oligonucleotide
ctgcacgggcacttctgtccagccagcttgtatcgcgacagcgcgacgaaa

SEQ ID NO: 145356 - DNA, 51 bp, Artificial
  Synthetic oligonucleotide
gccccgaggccggtaaacctagggggcggttacttgcgtactatggcaagt

SEQ ID NO: 145357 - DNA, 51 bp, Artificial
  Synthetic oligonucleotide
atccgcggaggtctccactcgaaccggaagttcaaacgactcggtgacccc

SEQ ID NO: 145358 - DNA, 51 bp, Artificial
  Synthetic oligonucleotide
cgaatcgcgtggttcaaagttcaccgaccgcttgcgttctacgcgacctat

SEQ ID NO: 145359 - DNA, 51 bp, Artificial
  Synthetic oligonucleotide
catacagccgcgcttcgtaaatccaggtcattcaaacccctccccgcctag

SEQ ID NO: 145360 - DNA, 54 bp, Artificial
  Synthetic oligonucleotide
cgaagagcatggtttagaccggatacgaagcttaactacttttcgaaacgtcga

SEQ ID NO: 145361 - DNA, 51 bp, Artificial
  Synthetic oligonucleotide
ctagggaaatggggcgattggggtgtggagcttgttcacggactacgatgc

SEQ ID NO: 145362 - DNA, 50 bp, Artificial
  Synthetic oligonucleotide
aagccttcctgatgcccattccatcacccgcggtcgaagggagccggttc

SEQ ID NO: 145363 - DNA, 50 bp, Artificial
  Synthetic oligonucleotide
aagccaggcgagtcccactttctcgcaatccccgctcaagccacttctct

SEQ ID NO: 145364 - DNA, 50 bp, Artificial
  Synthetic oligonucleotide
aagccagacacccactgcgacggtgttggggcaaaatgttcacgtccgca

SEQ ID NO: 145365 - DNA, 50 bp, Artificial
  Synthetic oligonucleotide
aaattctttgggtggggcgttggccttacacattgcccaccggcgtccgg

SEQ ID NO: 145366 - DNA, 50 bp, Artificial
  Synthetic oligonucleotide
aagaatccccaagtgcagcctaccagtgcgttggccgcggagggtgagaa

SEQ ID NO: 145367 - DNA, 50 bp, Artificial
  Synthetic oligonucleotide
aaaagccggggtgggggtttcgagccaaggagcggtgtccacaccacaga

SEQ ID NO: 145368 - DNA, 50 bp, Artificial
  Synthetic oligonucleotide
tccctttcgtgcgacaaagcgcggtggacgccttacatttggctcagccg

SEQ ID NO: 145369 - DNA, 50 bp, Artificial
  Synthetic oligonucleotide
aacgtaagccaccgtcaattgcccaagaaaggcgccgggccacccaaagc

SEQ ID NO: 145370 - DNA, 50 bp, Artificial
  Synthetic oligonucleotide
aacgcatgaagaatccccaagtgcagcctaccagtgcgttggccgcggag

SEQ ID NO: 145371 - DNA, 56 bp, Artificial
  Synthetic oligonucleotide
cctaatacgacgtggacgtttaacacgttactgtatcgtcagccgctccccatgta

SEQ ID NO: 145372 - DNA, 50 bp, Artificial
  Synthetic oligonucleotide
aacaccgggtcctcttcgggcggggacagatcggaagaccgctccttaca

SEQ ID NO: 145373 - DNA, 50 bp, Artificial
  Synthetic oligonucleotide
aacgagtgggggtagtgccagcataactgccgacaagtcttcgccggcat

SEQ ID NO: 145374 - DNA, 50 bp, Artificial
  Synthetic oligonucleotide
aaccgcagcggaggggcaggtgtctcttggctgggaggccggagtcacgt

SEQ ID NO: 145375 - DNA, 50 bp, Artificial
  Synthetic oligonucleotide
aaacggagtgaccaccgccccggaaattcggcgcagcctctggcaatggt

SEQ ID NO: 145376 - DNA, 50 bp, Artificial
  Synthetic oligonucleotide
aacatggcggacaggctgcttcaggggcggggcatcaagggcttgtttac

SEQ ID NO: 145377 - DNA, 50 bp, Artificial
  Synthetic oligonucleotide
aaccgcaacggaaccccggatctttccacgcttggatgacgacgtcaggg

SEQ ID NO: 145378 - DNA, 50 bp, Artificial
  Synthetic oligonucleotide
aaccacgccccgcccagtactgccaagagaatcggaagggacacctccac

SEQ ID NO: 145379 - DNA, 50 bp, Artificial
  Synthetic oligonucleotide
aaccacgtgacttgccattccccgttcgtgcgcccttcggtgcacctcaa

SEQ ID NO: 145380 - DNA, 50 bp, Artificial
  Synthetic oligonucleotide
caatcaaatcgtacaagattgatgcgaaggcgcagtttgcggagtccttc

SEQ ID NO: 145381 - DNA, 50 bp, Artificial
  Synthetic oligonucleotide
ctcctaatggatggtgttgcgctagctcgatcgttgggaattagcgtaga

SEQ ID NO: 145382 - DNA, 60 bp, Artificial
  Synthetic oligonucleotide
ccgaggtgagcccttggagaccgtccgcaagcatgcgccactcacatgcgttgtatcgcg

SEQ ID NO: 145383 - DNA, 50 bp, Artificial
  Synthetic oligonucleotide
gaggatcgattgtgggttctatcctgtactggcgaccgttccatactaaa

SEQ ID NO: 145384 - DNA, 50 bp, Artificial
  Synthetic oligonucleotide
accgagaagcggcacttcggaggatagcggcatacagccctaggggacct

SEQ ID NO: 145385 - DNA, 50 bp, Artificial
  Synthetic oligonucleotide
acccgttcaggccccgcctctctgtcccaaggccgttatgcacttcaccg

SEQ ID NO: 145386 - DNA, 50 bp, Artificial
  Synthetic oligonucleotide
acccgatctgccatccgctactcttccccctttaggaggcgggttcggca

SEQ ID NO: 145387 - DNA, 49 bp, Artificial
  Synthetic oligonucleotide
acccaagggggaatggtactgagcggtacgacaggggaacccaaggggg

SEQ ID NO: 145388 - DNA, 50 bp, Artificial
  Synthetic oligonucleotide
accagtcacagcgggggaagcatttcagccgggaccagacggatgacgtg

SEQ ID NO: 145389 - DNA, 50 bp, Artificial
  Synthetic oligonucleotide
accacggcgtagtacggtggatcgggtgtgtgcgcgaaattggccatccg

SEQ ID NO: 145390 - DNA, 50 bp, Artificial
  Synthetic oligonucleotide
accacccctgcgtccgcatcccggctccgacacaccaggtatgcgtctgt

SEQ ID NO: 145391 - DNA, 50 bp, Artificial
  Synthetic oligonucleotide
accacacgttcatggcccaaccccgagggcagggactcacacgagcccct

SEQ ID NO: 145392 - DNA, 50 bp, Artificial
  Synthetic oligonucleotide
acatcactgcgacgtattcacgggaagcggggagcttgtcggcactcggc

SEQ ID NO: 145393 - DNA, 59 bp, Artificial
  Synthetic oligonucleotide
tatagggaaagagccgtatgtgacatatgaatgcatcgtctcggaggacgaacttagcg

SEQ ID NO: 145394 - DNA, 50 bp, Artificial
  Synthetic oligonucleotide
ggctatattgaatctcctcatgtttggcgagtgcccgcgaaccgatgggt

SEQ ID NO: 145395 - DNA, 50 bp, Artificial
  Synthetic oligonucleotide
acacgcgatgttcccaggcgggaaaccgccgtgatcccaccaccggagcg

SEQ ID NO: 145396 - DNA, 50 bp, Artificial
  Synthetic oligonucleotide
acacccgcgccacacggtatacccgatctgccatccgctactcttccccc

SEQ ID NO: 145397 - DNA, 50 bp, Artificial
  Synthetic oligonucleotide
aattgcccggtcaatcttggtcgggcccaccccggctccgatacacacac

SEQ ID NO: 145398 - DNA, 50 bp, Artificial
  Synthetic oligonucleotide
aatggcccggacgaaggcgggactctgctcagggacggccactaacgcga

SEQ ID NO: 145399 - DNA, 50 bp, Artificial
  Synthetic oligonucleotide
aatcggcaggacgtctgagccaaacggagtttcaggcttcaacggggccg

SEQ ID NO: 145400 - DNA, 47 bp, Artificial
  Synthetic oligonucleotide
aatcccgttccttcggggttaaccctccgttgcggtaaaggcggtcc

SEQ ID NO: 145401 - DNA, 50 bp, Artificial
  Synthetic oligonucleotide
aagtgtccgcatgaacatgggccccggacaaaacggccatccgcacggga

SEQ ID NO: 145402 - DNA, 50 bp, Artificial
  Synthetic oligonucleotide
gtgcctggcaagtcggcaccgcgcaaagtggacgtgttcacgtttggggg

SEQ ID NO: 145403 - DNA, 50 bp, Artificial
  Synthetic oligonucleotide
gtggagcgtcgtagtccggcatagcctcgagcttcgcaatctcagcctgg

SEQ ID NO: 145404 - DNA, 56 bp, Artificial
  Synthetic oligonucleotide
ggtacaagacaaccgtgcgaatcctcgtccggtgttcgttcgccaagcgtgcgtcg

SEQ ID NO: 145405 - DNA, 50 bp, Artificial
  Synthetic oligonucleotide
aagtgcctggcccggaattcattcagtctatggcctccgccgtgaacggg

SEQ ID NO: 145406 - DNA, 50 bp, Artificial
  Synthetic oligonucleotide
aaggtactgtccgcggtccccgttcgtatggtggtgttgcagcgctccgg

SEQ ID NO: 145407 - DNA, 50 bp, Artificial
  Synthetic oligonucleotide
aagggggacgagacaatggcagagcgggcggatgggatcacccgggaggt

SEQ ID NO: 145408 - DNA, 50 bp, Artificial
  Synthetic oligonucleotide
aagggcaccaagatgctgtacacgggccactcggatcttggcagtcggga

SEQ ID NO: 145409 - DNA, 50 bp, Artificial
  Synthetic oligonucleotide
aaggcgaccccttccctgggcgctcgggtttgcaagtcccccttctcgag

SEQ ID NO: 145410 - DNA, 50 bp, Artificial
  Synthetic oligonucleotide
taactccagtataccgcggcactcccatgacgcgcgatggccaactttgc

SEQ ID NO: 145411 - DNA, 58 bp, Artificial
  Synthetic oligonucleotide
ttgcgatccttgttctgcgagtccggaaattcaaagattccgtattggatcgcagcct

SEQ ID NO: 145412 - DNA, 56 bp, Artificial
  Synthetic oligonucleotide
gtacatatcggttcgctcctttgcccatccccgatgtcacgggggatgggtaggtg

SEQ ID NO: 145413 - DNA, 57 bp, Artificial
  Synthetic oligonucleotide
tcatccagtccgtgaaacatcagcgggagtggcgtgagctaagccgccggagacaac

SEQ ID NO: 145414 - DNA, 57 bp, Artificial
  Synthetic oligonucleotide
ccctgctgtcgccagtagtctgagggcacggcgcccgtagccaaaacacgctcgtcc

SEQ ID NO: 145415 - DNA, 54 bp, Artificial
  Synthetic oligonucleotide
tttggtcactcggcgaaagaggggcccggaatcaatccccgtcgcgttcaacca

SEQ ID NO: 145416 - DNA, 51 bp, Artificial
  Synthetic oligonucleotide
gacccgaaaggtaggtttgcaagttggggaagaacgcccatcgacgtaagg

SEQ ID NO: 145417 - DNA, 55 bp, Artificial
  Synthetic oligonucleotide
gaaaggagtcgtgcggccagatttggagcatggcgcgtgtcggcctaagctgagc

SEQ ID NO: 145418 - DNA, 55 bp, Artificial
  Synthetic oligonucleotide
tccttgacactcgacacgtacagatggaagttgcggccctggtccccgcatgcgg

SEQ ID NO: 145419 - DNA, 55 bp, Artificial
  Synthetic oligonucleotide
cttgacaccaacgcacgacctctctccgggtcaacgcagctccgggcttgagttc

SEQ ID NO: 145420 - DNA, 53 bp, Artificial
  Synthetic oligonucleotide
cttcctcccgttgcgatttccctaccctttccgattaggcggatgacccctca

SEQ ID NO: 145421 - DNA, 55 bp, Artificial
  Synthetic oligonucleotide
ctcggatgctgttcaacgaaagccctcccttaaacgataccctccccatgatacc

SEQ ID NO: 145422 - DNA, 55 bp, Artificial
  Synthetic oligonucleotide
ctcgcaatctacgtcacgaaggaggcgaaagcttgtgcgattcaagccgtggatg

SEQ ID NO: 145423 - DNA, 58 bp, Artificial
  Synthetic oligonucleotide
gttgcacggaagcgggaggagtgtggaatgaaacgacgggcatttgccaaccttgatc

SEQ ID NO: 145424 - DNA, 55 bp, Artificial
  Synthetic oligonucleotide
tcggcacttggcggttctgggccaaaagtacgaccgagggctcacaccctcgctt

SEQ ID NO: 145425 - DNA, 52 bp, Artificial
  Synthetic oligonucleotide
tcgtgccggacaaaacgggaaagtttcgctactactcggatcgggacggaat

SEQ ID NO: 145426 - DNA, 55 bp, Artificial
  Synthetic oligonucleotide
ctccatcttccactgatccgtgtagtcctcccagaataacccgcgcaccctgcgg

SEQ ID NO: 145427 - DNA, 55 bp, Artificial
  Synthetic oligonucleotide
tcttttgcagccttgttatgtatgcagcaggaacgtattcatgcaccgcgctgtc

SEQ ID NO: 145428 - DNA, 53 bp, Artificial
  Synthetic oligonucleotide
ctatctacgatagcttctaaggcagtaaccgccccgaggccggtaaacctagg

SEQ ID NO: 145429 - DNA, 55 bp, Artificial
  Synthetic oligonucleotide
tgaaacctagagagcgtcagaagagtttaggagattcggacccttttaatctcat

SEQ ID NO: 145430 - DNA, 55 bp, Artificial
  Synthetic oligonucleotide
ttaacgatgcgtgatctcccttttctgaatagacgcctttccggactccaagtgc

SEQ ID NO: 145431 - DNA, 55 bp, Artificial
  Synthetic oligonucleotide
cgttgcgaataacggttttcaacactttcttatcctccatggatggccctccgcg

SEQ ID NO: 145432 - DNA, 55 bp, Artificial
  Synthetic oligonucleotide
cgctttggaaggttcctctatacggcgaagcgtgtcgattgtggtcacaaaggca

SEQ ID NO: 145433 - DNA, 55 bp, Artificial
  Synthetic oligonucleotide
cgcttgctacccatccaccttgtcttgcgttgtagggatcggtgatagtagtcgc

SEQ ID NO: 145434 - DNA, 55 bp, Artificial
  Synthetic oligonucleotide
ggtcgcccctccgatctgggtcgaaacacattcggcccagggcgcaagggcgaat

SEQ ID NO: 145435 - DNA, 55 bp, Artificial
  Synthetic oligonucleotide
cgctcgacgtaattgcagacatggatcttccagtcgttgttaaaccagcaaacga

SEQ ID NO: 145436 - DNA, 55 bp, Artificial
  Synthetic oligonucleotide
cgccttctgcaagcaggttattcgcaatctcgcgagcttttaaccactcacctct

SEQ ID NO: 145437 - DNA, 55 bp, Artificial
  Synthetic oligonucleotide
cgcatagtggtcgagcacgttccgaacgaaggctggcccgtaatcccagtacagc

SEQ ID NO: 145438 - DNA, 55 bp, Artificial
  Synthetic oligonucleotide
cgcacgtcgagggtcaataccccattcaaacagttgcgtcgtatcccgtggaagg

SEQ ID NO: 145439 - DNA, 55 bp, Artificial
  Synthetic oligonucleotide
cgagcaacacgcgagccacactatcaactccctgtcagaatgctcgctctgagcg

SEQ ID NO: 145440 - DNA, 55 bp, Artificial
  Synthetic oligonucleotide
ttcccttgcctatctgcggcggtttgaggtgacgcggattaaaattgaccggagt

SEQ ID NO: 145441 - DNA, 55 bp, Artificial
  Synthetic oligonucleotide
cctgagactcttgcaattctcgccacagttccgacatggaggtgcatagccagca

SEQ ID NO: 145442 - DNA, 55 bp, Artificial
  Synthetic oligonucleotide
ttgctggcgcatgctcagggctcattttagccggcgcagggacctgggtcatgtc

SEQ ID NO: 145443 - DNA, 54 bp, Artificial
  Synthetic oligonucleotide
ccgggtggttgtctaccaaccattgtatcgctttggaaggttcctctatacggc

SEQ ID NO: 145444 - DNA, 55 bp, Artificial
  Synthetic oligonucleotide
ttggctgcgcttttatctatccttcttggcgcactcctaggattcatcaacggcc

SEQ ID NO: 145445 - DNA, 60 bp, Artificial
  Synthetic oligonucleotide
gcacaacgggcgaagcgaccacgccatacctcgccatggcacaccctaccacggcacacc

SEQ ID NO: 145446 - DNA, 52 bp, Artificial
  Synthetic oligonucleotide
cccttcccaaggcatcccgccctcgatctggggatacccaaaggtaacgacc

SEQ ID NO: 145447 - DNA, 55 bp, Artificial
  Synthetic oligonucleotide
gtggcatcgagaaagtcaccgtacatgcgtacatccacgcgattgtgctcttggc

SEQ ID NO: 145448 - DNA, 55 bp, Artificial
  Synthetic oligonucleotide
gtggcaactgcgaaagagtatcgcggagtttgcaaacagcaacacgaccgagttg

SEQ ID NO: 145449 - DNA, 55 bp, Artificial
  Synthetic oligonucleotide
gtccgatcatggacacgctagatggcggcagatgattgggattggcagtggacgc

SEQ ID NO: 145450 - DNA, 55 bp, Artificial
  Synthetic oligonucleotide
gtgtgacgtaggatagaaacggaggtggaacgtgtggggtgtacgattagtgtag

SEQ ID NO: 145451 - DNA, 54 bp, Artificial
  Synthetic oligonucleotide
gtgttcgatcgtttgaatggcaacccttccgtccggttttgagttccggatggc

SEQ ID NO: 145452 - DNA, 55 bp, Artificial
  Synthetic oligonucleotide
taagcacggggatagccgtacttatcctctttggttcgtatccctgaggcatttt

SEQ ID NO: 145453 - DNA, 55 bp, Artificial
  Synthetic oligonucleotide
ggtccggaggacatcagtgtagtacgaaaggcggcttatgcctccaaggctaggg

SEQ ID NO: 145454 - DNA, 54 bp, Artificial
  Synthetic oligonucleotide
ggtacccggctcgctttcaacgaggagtacgggattcgcaggacgattagcccg

SEQ ID NO: 145455 - DNA, 55 bp, Artificial
  Synthetic oligonucleotide
tacccttgatatgacgcggattgtaggggcaagtttgtaccacacgcacgttagc

SEQ ID NO: 145456 - DNA, 54 bp, Artificial
  Synthetic oligonucleotide
agggtgtaaaggcgatgtaaaggtgatgtataggtcgatgtaaaggcgtttttg

SEQ ID NO: 145457 - DNA, 55 bp, Artificial
  Synthetic oligonucleotide
ggtaaggaattcgatgtggcgcctctgacggtagtcgtggatccgggtcgcattc

SEQ ID NO: 145458 - DNA, 55 bp, Artificial
  Synthetic oligonucleotide
ggggtcgggctgcggacagtataacgagattgcggcgggattgcaaaccacgttc

SEQ ID NO: 145459 - DNA, 55 bp, Artificial
  Synthetic oligonucleotide
gggcgcccctggcgtatcccacctatgagcagattgtggcaagtttgcgcaggag

SEQ ID NO: 145460 - DNA, 55 bp, Artificial
  Synthetic oligonucleotide
ggctagacgtcgctccatctggggccgcttgtaatgactcagatcgatcccggtc

SEQ ID NO: 145461 - DNA, 55 bp, Artificial
  Synthetic oligonucleotide
ggcgctactgagattgctcggggctgtcatcataaatgtctgtactgttccgtct

SEQ ID NO: 145462 - DNA, 55 bp, Artificial
  Synthetic oligonucleotide
ggcgcaccaaccaagaactgttgaccttcgcggagtttcacaccttggcgaccaa

SEQ ID NO: 145463 - DNA, 55 bp, Artificial
  Synthetic oligonucleotide
ggaggcataagccgcctttcgtattacactgatgtcctccggaccagtgcctggt

SEQ ID NO: 145464 - DNA, 55 bp, Artificial
  Synthetic oligonucleotide
ggacaatcaccttatgtacttcgttctggacgtgtattcccaactttgagtcgac

SEQ ID NO: 145465 - DNA, 55 bp, Artificial
  Synthetic oligonucleotide
gctgaacgtgcgaagaacgacgaggttcggatgtgcgtcgagcagcggaagcgtc

SEQ ID NO: 145466 - DNA, 55 bp, Artificial
  Synthetic oligonucleotide
gcgtcgtagtccggcatagcctcgagcttcgcaatctcagcctggacttggttcc

SEQ ID NO: 145467 - DNA, 58 bp, Artificial
  Synthetic oligonucleotide
atgaccttgtcaaagaccaacgctgtgccaccgttcgtgtaagtgattcgaactggcg

SEQ ID NO: 145468 - DNA, 55 bp, Artificial
  Synthetic oligonucleotide
gcggcaaatggtcggagacggtagcacagaatatcggattgtctgaaacgcgaat

SEQ ID NO: 145469 - DNA, 55 bp, Artificial
  Synthetic oligonucleotide
gcggatcccttacaaagtcggacgttacggcacgtggacgctactggtgttagcc

SEQ ID NO: 145470 - DNA, 55 bp, Artificial
  Synthetic oligonucleotide
gccgctcaaatgacaggggttccagtttactacggatcgattcgacaatggttgc

SEQ ID NO: 145471 - DNA, 55 bp, Artificial
  Synthetic oligonucleotide
gccgagtattcgtatcgctcctgaaccgcaattggcggtggcaaggggactgtac

SEQ ID NO: 145472 - DNA, 53 bp, Artificial
  Synthetic oligonucleotide
gcccataagcccttccgcgttcgtaattgcgtcgggacttacctcgcttttcg

SEQ ID NO: 145473 - DNA, 53 bp, Artificial
  Synthetic oligonucleotide
tccatcgttttgcccgcccgctactttgttgagttggtccggaaactccccga

SEQ ID NO: 145474 - DNA, 55 bp, Artificial
  Synthetic oligonucleotide
gccatgggagcttgcacgtttacacaccagcgaattaccaaacgagtatcccaag

SEQ ID NO: 145475 - DNA, 55 bp, Artificial
  Synthetic oligonucleotide
gcataccacggcgtgtttacggacgtagtgtgattcagacctaagttatcggcga

SEQ ID NO: 145476 - DNA, 54 bp, Artificial
  Synthetic oligonucleotide
tccccgctacgtgatgaggtcccaagacggatcttaccgaaggagggcccgtcc

SEQ ID NO: 145477 - DNA, 55 bp, Artificial
  Synthetic oligonucleotide
gacgcaaccattcctagcattagggctaccactaatagcatcgccgtaattatac

SEQ ID NO: 145478 - DNA, 57 bp, Artificial
  Synthetic oligonucleotide
atgcggaccgaccatgggtgaagtacgtcttgcgcgaactttccagaattccgtctc

SEQ ID NO: 145479 - DNA, 55 bp, Artificial
  Synthetic oligonucleotide
aagcgcacttggcgctccccgttcgtggctttgatccacccgtaccccagatcca

SEQ ID NO: 145480 - DNA, 55 bp, Artificial
  Synthetic oligonucleotide
aagcgaccacgccatacctcgccatggcacaccctaccacggcacaccctaccac

SEQ ID NO: 145481 - DNA, 55 bp, Artificial
  Synthetic oligonucleotide
aagttccgtcggacgactgccaagggcgatccgtgtacgcactcgcagtgggcat

SEQ ID NO: 145482 - DNA, 55 bp, Artificial
  Synthetic oligonucleotide
aatcaattagcgttgtactcaggcgtgagttcggcattaatctctcgaattgaaa

SEQ ID NO: 145483 - DNA, 55 bp, Artificial
  Synthetic oligonucleotide
acacgtacagatggaagttgcggccctggtccccgcatacggggcagtgagcctt

SEQ ID NO: 145484 - DNA, 55 bp, Artificial
  Synthetic oligonucleotide
acaggaagatcggttggacccaaatcgcgggattttatctcacccatccctctcg

SEQ ID NO: 145485 - DNA, 55 bp, Artificial
  Synthetic oligonucleotide
acgacttgaccagcactcatctccacgggcacgcctgtcccttaggagagcatgg

SEQ ID NO: 145486 - DNA, 55 bp, Artificial
  Synthetic oligonucleotide
agcgcactatggatgacggtctctagtatgcagcatgccccttccatcgggtcgt

SEQ ID NO: 145487 - DNA, 55 bp, Artificial
  Synthetic oligonucleotide
ataggctagtctcagcgaacaagctgtgcgacgttgggggcgaggtctgtgcgcg

SEQ ID NO: 145488 - DNA, 55 bp, Artificial
  Synthetic oligonucleotide
atccccgttgttgacaatcaaacggttgcagggttctacgagtccctgatgggac

SEQ ID NO: 145489 - DNA, 60 bp, Artificial
  Synthetic oligonucleotide
aacgatggtatcttctcgcaatctacgtcacgaaggaggcgaaagcttgtgcgattcaag

SEQ ID NO: 145490 - DNA, 55 bp, Artificial
  Synthetic oligonucleotide
atctctcgattggcaaccgatacccctctttgaaagacgcgtcgaaactcctctc

SEQ ID NO: 145491 - DNA, 55 bp, Artificial
  Synthetic oligonucleotide
attcgcctatccgacctagacacgaaccgacggacgcgcaaggtgccagcggttg

SEQ ID NO: 145492 - DNA, 55 bp, Artificial
  Synthetic oligonucleotide
caaaagtgatacttggagcgctcctcacacttggatcgtatcaccatatacttcg

SEQ ID NO: 145493 - DNA, 55 bp, Artificial
  Synthetic oligonucleotide
cacgcacggtggcttcttcgtcaattggggacgacgaattttacaccaccacttg

SEQ ID NO: 145494 - DNA, 55 bp, Artificial
  Synthetic oligonucleotide
cagccacgtttcatccgcgcattcaggaagacctcgcttctcggtgcgcttcccc

SEQ ID NO: 145495 - DNA, 55 bp, Artificial
  Synthetic oligonucleotide
cagctcgcccacactcgtagaagacggttttcctcgttgccagtggtgcctgggg

SEQ ID NO: 145496 - DNA, 55 bp, Artificial
  Synthetic oligonucleotide
cccacatccatccatgagtctacgtgctatgtccaactgtcgaagtcggggtacg

SEQ ID NO: 145497 - DNA, 55 bp, Artificial
  Synthetic oligonucleotide
catggtgcgccgtctctccctggcatcgtggcttcatggtcttgcgatccttatg

SEQ ID NO: 145498 - DNA, 55 bp, Artificial
  Synthetic oligonucleotide
catcttcgtacagcggagtgtatcggtatagcgggtccgggcgcgtgtcaacctc

SEQ ID NO: 145499 - DNA, 55 bp, Artificial
  Synthetic oligonucleotide
catacggctctctcgaagcgcaacgatgctcgcgtgataagtcctgtatccggtt

SEQ ID NO: 145500 - DNA, 57 bp, Artificial
  Synthetic oligonucleotide
gaggacactctgcaactggagagcgcaaccgaaaccacggaagtgctttacgacccc

SEQ ID NO: 145501 - DNA, 55 bp, Artificial
  Synthetic oligonucleotide
gaggccccaccgtactgaggcaccacaccttcaggctagggccgaacttagagca

SEQ ID NO: 145502 - DNA, 55 bp, Artificial
  Synthetic oligonucleotide
caattgaggtcgtcacactaggtgtttgacaaagcatggcttcggccaacttgcc

SEQ ID NO: 145503 - DNA, 55 bp, Artificial
  Synthetic oligonucleotide
caatacgcagctatccaagtttctaggtagggtttctaggtcggcttgggtagcg

SEQ ID NO: 145504 - DNA, 55 bp, Artificial
  Synthetic oligonucleotide
caagttatagtgcgtacagtgctaccgctgtctgaaatgatatactcaggcgcag

SEQ ID NO: 145505 - DNA, 55 bp, Artificial
  Synthetic oligonucleotide
caagaataaatgtagagcggtctaatggctcccaaacaatacccgcttgccaagt

SEQ ID NO: 145506 - DNA, 55 bp, Artificial
  Synthetic oligonucleotide
cttgggtaacggcgttacgagttgctggctcaattttgtttgaacctccacgctg

SEQ ID NO: 145507 - DNA, 55 bp, Artificial
  Synthetic oligonucleotide
cccctctaactgtcgttcgccgcgataacctgaccgttttgcgagctacttgacc

SEQ ID NO: 145508 - DNA, 55 bp, Artificial
  Synthetic oligonucleotide
cgctcgtacacgtatataatcgcacgcattgcctgcactagaagttaaccgcaac

SEQ ID NO: 145509 - DNA, 55 bp, Artificial
  Synthetic oligonucleotide
ctgccagcaactaatattgggccgtctgttagtgaaaggcccatgaacccaatac

SEQ ID NO: 145510 - DNA, 55 bp, Artificial
  Synthetic oligonucleotide
agtaccggaagggtgagcatcaggattatacgatgtactaaccggttgactatcc

SEQ ID NO: 145511 - DNA, 55 bp, Artificial
  Synthetic oligonucleotide
agtcctcaatctaatagggattcttcaaacaatatatcgatcccattccccgtag

SEQ ID NO: 145512 - DNA, 55 bp, Artificial
  Synthetic oligonucleotide
gaggcgttccaagtgggcgatagcgccccatctgtcaacgaatccgcatcaagcg

SEQ ID NO: 145513 - DNA, 55 bp, Artificial
  Synthetic oligonucleotide
ccccgagcgataagtgtgcagtcccttcaccaaaacattctaaataagcaccgac

SEQ ID NO: 145514 - DNA, 55 bp, Artificial
  Synthetic oligonucleotide
cccaggagcaatggcagggactaagcgctctctctttcggcttgaccccgctcag

SEQ ID NO: 145515 - DNA, 55 bp, Artificial
  Synthetic oligonucleotide
ctgactaaagcgagatagggcacgctttgcacctataggggttaaatactccctt

SEQ ID NO: 145516 - DNA, 55 bp, Artificial
  Synthetic oligonucleotide
cccactaggagcaagcttactggacttacgtaatctaggtagtgagcgaacctta

SEQ ID NO: 145517 - DNA, 55 bp, Artificial
  Synthetic oligonucleotide
ctctgcgcctctctacaccctctcttactcatgtaaaggaacaaagcatggcatt

SEQ ID NO: 145518 - DNA, 55 bp, Artificial
  Synthetic oligonucleotide
ccatggcaggtcccttaaaagagttgcgcgtacttgatcttagccgcgtgttggc

SEQ ID NO: 145519 - DNA, 55 bp, Artificial
  Synthetic oligonucleotide
ccatcggtctgctttcagtgacgatcaggagtgatcaagccgcctcagagttgaa

SEQ ID NO: 145520 - DNA, 55 bp, Artificial
  Synthetic oligonucleotide
ctcgcgccacttgcaaataagcgacccactaaataaacagtgcctgcctgatatt

SEQ ID NO: 145521 - DNA, 55 bp, Artificial
  Synthetic oligonucleotide
ctccgcttgacctaacagaggaatggacaatagtactgaacacagcaacgcccga

SEQ ID NO: 145522 - DNA, 55 bp, Artificial
  Synthetic oligonucleotide
cgtttcaaccgatgacatgtattccaccaaaccgtaggtctgaattaagcgttgc

SEQ ID NO: 145523 - DNA, 55 bp, Artificial
  Synthetic oligonucleotide
gagtcaacactgtatgtctcgtatgtttgttaatgagtgtgaccgtcgttgcgca

SEQ ID NO: 145524 - DNA, 55 bp, Artificial
  Synthetic oligonucleotide
cgtttgctctaactcttagggtgctgtaacccttagatactaaatggctcttgcg

SEQ ID NO: 145525 - DNA, 55 bp, Artificial
  Synthetic oligonucleotide
ctactatacgtttgtggtcgcccattaagccgtctattcgcaactgtagatcggc

SEQ ID NO: 145526 - DNA, 53 bp, Artificial
  Synthetic oligonucleotide
ctagacggaacaggcccacttaaggttgtcggaaaggcggttcgaggttgcca

SEQ ID NO: 145527 - DNA, 55 bp, Artificial
  Synthetic oligonucleotide
ccagggcgggtcattctgggtcttcaagatgccctcctgggcacaagcctcccgt

SEQ ID NO: 145528 - DNA, 55 bp, Artificial
  Synthetic oligonucleotide
cgggcgactcaagacacgttctgacaccggaggcgctaatgtcccaggaaagcag

SEQ ID NO: 145529 - DNA, 55 bp, Artificial
  Synthetic oligonucleotide
atgaacacagtagcgtcctcctaatggaactacgggtacaaaggaaggatccagt

SEQ ID NO: 145530 - DNA, 55 bp, Artificial
  Synthetic oligonucleotide
ctagcgctccatcagcgttatttacagtttgccaacgctgtcgcccagtcttgat

SEQ ID NO: 145531 - DNA, 55 bp, Artificial
  Synthetic oligonucleotide
ctattcctctagcgaattcccgtttgatgttaggttcgttgaaggcgatacacgt

SEQ ID NO: 145532 - DNA, 55 bp, Artificial
  Synthetic oligonucleotide
atcggacggaacgccgatttatagcgatacccctgagcgtggccagattgtcggg

SEQ ID NO: 145533 - DNA, 55 bp, Artificial
  Synthetic oligonucleotide
ctcaagaacgccgagatttgctacctcgtgatctaggcttggcgcttcaagaact

SEQ ID NO: 145534 - DNA, 55 bp, Artificial
  Synthetic oligonucleotide
acgtccaccacgttccaggtaatttctgaatcatggtgcgggaccagcctgttcg

SEQ ID NO: 145535 - DNA, 55 bp, Artificial
  Synthetic oligonucleotide
ctcagccaagcggttacgttagcccagctgatgtaaaccctggttcatgtgtccc

SEQ ID NO: 145536 - DNA, 55 bp, Artificial
  Synthetic oligonucleotide
ccatccatacggttaataagccaacgcgttaagccactgtgataacgctgcgcag

SEQ ID NO: 145537 - DNA, 55 bp, Artificial
  Synthetic oligonucleotide
cggagagctgattaaagcggagtgggtcgatgtgaatttaaagcagggtgcttgg

SEQ ID NO: 145538 - DNA, 55 bp, Artificial
  Synthetic oligonucleotide
ctccgagaaactcacggacggtcaagctccctgatgcgaaaccggttcccaagtc

SEQ ID NO: 145539 - DNA, 55 bp, Artificial
  Synthetic oligonucleotide
atattagagcagggcggttcacagcaggcgatggtattgtttgagaatttccgcg

SEQ ID NO: 145540 - DNA, 55 bp, Artificial
  Synthetic oligonucleotide
ctccgctacctgcctcacctgactagcaagttcctcccagcttacccgtttgact

SEQ ID NO: 145541 - DNA, 55 bp, Artificial
  Synthetic oligonucleotide
tcgctcgtatggtctacccggtgtaccgtcagggcccaatcatgattagcgagag

SEQ ID NO: 145542 - DNA, 55 bp, Artificial
  Synthetic oligonucleotide
cgagggtatagacaatgtgctggtgacttatgatgggcagttagaagctgccgct

SEQ ID NO: 145543 - DNA, 52 bp, Artificial
  Synthetic oligonucleotide
aaccggtaaacctctcccgctgttaaagtaatgttatgagacgtttcaccaa

SEQ ID NO: 145544 - DNA, 55 bp, Artificial
  Synthetic oligonucleotide
tcgatgcacctgccacttattgtcgcgtgacgccattaacgttagtgcccttcgc

SEQ ID NO: 145545 - DNA, 55 bp, Artificial
  Synthetic oligonucleotide
acgggctgaagtctttcaaatagaacctggctagcatggcaagtataattgtcga

SEQ ID NO: 145546 - DNA, 55 bp, Artificial
  Synthetic oligonucleotide
tcgaggaatcgcattcctttcaacgtcagactgcattcgataacaccgtgcagtc

SEQ ID NO: 145547 - DNA, 55 bp, Artificial
  Synthetic oligonucleotide
tcctgaactcggggccacggatatcgtgcaaggccagggcgaccttaccggtgta

SEQ ID NO: 145548 - DNA, 55 bp, Artificial
  Synthetic oligonucleotide
tccgcttcataatcattccgggatatcgggcagccatattactaactgaggggcg

SEQ ID NO: 145549 - DNA, 55 bp, Artificial
  Synthetic oligonucleotide
tcccgctggctcgtcatctgtgtttgtactggctcggacagtatgccctgaggat

SEQ ID NO: 145550 - DNA, 55 bp, Artificial
  Synthetic oligonucleotide
tccaaggtcgtgttattggtcatcgtgacgggtttggtttcctacatatcagccg

SEQ ID NO: 145551 - DNA, 55 bp, Artificial
  Synthetic oligonucleotide
cgagtatgacttacgacgtgtcgcctgagctggtgtttagtccgaggcaaacact

SEQ ID NO: 145552 - DNA, 55 bp, Artificial
  Synthetic oligonucleotide
tcaggctctgaacagaccgtagttaccgattcagaaccgtcatgcatgggagtac

SEQ ID NO: 145553 - DNA, 55 bp, Artificial
  Synthetic oligonucleotide
tcagctccacttaattgcgcctaaccgctttgtattggattgggtgaacgacaag

SEQ ID NO: 145554 - DNA, 55 bp, Artificial
  Synthetic oligonucleotide
ccgtggggacgttatacccagcatattattgccgtggtgcctaacgatgattgca

SEQ ID NO: 145555 - DNA, 55 bp, Artificial
  Synthetic oligonucleotide
aacgcctagctgacgtcctcaaatgtcatgatgatgccccgaatgtgcctcgttc

SEQ ID NO: 145556 - DNA, 55 bp, Artificial
  Synthetic oligonucleotide
gagtgatcgtaacaggccggttctcaacgtggattccgtatccaggtgttgccag

SEQ ID NO: 145557 - DNA, 55 bp, Artificial
  Synthetic oligonucleotide
tatccgctgggtgcttactttcagccagcctacttagccactcaggcatggttac

SEQ ID NO: 145558 - DNA, 55 bp, Artificial
  Synthetic oligonucleotide
ccgtgaaagacagtgtgaatcaattactgctatcagaatcacagcagcgcacccg

SEQ ID NO: 145559 - DNA, 55 bp, Artificial
  Synthetic oligonucleotide
ccggtaactcgcaaagtgcgtatcctgaactaagctgacgacaaggcggggtaaa

SEQ ID NO: 145560 - DNA, 55 bp, Artificial
  Synthetic oligonucleotide
gtcgaaggaataagcggcgaatctttgcgtttgctaggatctgttggggagccga

SEQ ID NO: 145561 - DNA, 55 bp, Artificial
  Synthetic oligonucleotide
gtcgcttggatcaactacgcctatcgcgtggtgtacattcgttttatcggcaccc

SEQ ID NO: 145562 - DNA, 55 bp, Artificial
  Synthetic oligonucleotide
gtctcgcacatcggtaaacccgtcgacgttttccgcactctgattccagcctggg

SEQ ID NO: 145563 - DNA, 55 bp, Artificial
  Synthetic oligonucleotide
gtgattgggcaagtgattgggaatgggatggaggttgctgatgcgctcgctgcac

SEQ ID NO: 145564 - DNA, 55 bp, Artificial
  Synthetic oligonucleotide
gtgctgctgatatcgcctaccgttcttcaaacacaacggatcaaatcgccacacg

SEQ ID NO: 145565 - DNA, 55 bp, Artificial
  Synthetic oligonucleotide
gtggcgccattgtaacgtttgtgggcagtgtgcgagattttggtggcgagggaag

SEQ ID NO: 145566 - DNA, 55 bp, Artificial
  Synthetic oligonucleotide
ccgtaggcatactgtttgtgaccaaacgctgtcacgacaacaataagcgaaccaa

SEQ ID NO: 145567 - DNA, 55 bp, Artificial
  Synthetic oligonucleotide
gagtgcgcagtaaaactctgcaccggccagttaaggcgtgaggcgacttggtacg

SEQ ID NO: 145568 - DNA, 55 bp, Artificial
  Synthetic oligonucleotide
ccgtcgcttgcggaacgagataacgctaactgctttgaatcaggtgaaaaggcta

SEQ ID NO: 145569 - DNA, 55 bp, Artificial
  Synthetic oligonucleotide
gttaaactagccgatataggcacagtgtctggttacgcctacctactagataacg

SEQ ID NO: 145570 - DNA, 54 bp, Artificial
  Synthetic oligonucleotide
gtttactcaacctatacaaatgcggtttaacgagttaattagtggcgtcagggc

SEQ ID NO: 145571 - DNA, 55 bp, Artificial
  Synthetic oligonucleotide
taacagccattaagttggtaaccgacgaccgaagctaataagtcctgcgtatctc

SEQ ID NO: 145572 - DNA, 55 bp, Artificial
  Synthetic oligonucleotide
tacaatagcagctatgcagtagcgcacagactctaaacatctacttgcacgcaca

SEQ ID NO: 145573 - DNA, 55 bp, Artificial
  Synthetic oligonucleotide
tacacaaattatgggcgtgttggattgggagctagcaaccttgggcgacccactt

SEQ ID NO: 145574 - DNA, 55 bp, Artificial
  Synthetic oligonucleotide
taccgcaaatttcgatatggcccgttgacggtcggtctagcccgcctagcaaatt

SEQ ID NO: 145575 - DNA, 55 bp, Artificial
  Synthetic oligonucleotide
tactaaggccggttaatataggcaacacgaagtatgggtcttttactgataaatc

SEQ ID NO: 145576 - DNA, 55 bp, Artificial
  Synthetic oligonucleotide
taggctttaagggcctgcgttacgattactccaaaggttacgacgcatattacgc

SEQ ID NO: 145577 - DNA, 55 bp, Artificial
  Synthetic oligonucleotide
ttccctatctattggccgcacgccactagttaagctaaatcgcgtaacatcaggt

SEQ ID NO: 145578 - DNA, 55 bp, Artificial
  Synthetic oligonucleotide
gagttcgacgtaaaggagcccaatcaagtgtggaccggagacataacctatcttt

SEQ ID NO: 145579 - DNA, 55 bp, Artificial
  Synthetic oligonucleotide
ttccgcgatggtcataaatgcttacccgacggtgttggtagcccctcggtttgcg

SEQ ID NO: 145580 - DNA, 55 bp, Artificial
  Synthetic oligonucleotide
cgaaacagtaaatggccgtagattcaatcatcgctaaacccacgaacaatgttcg

SEQ ID NO: 145581 - DNA, 55 bp, Artificial
  Synthetic oligonucleotide
ttctgccggagactctgacgcttctatgcgggatgacggttgagcacgcataccc

SEQ ID NO: 145582 - DNA, 55 bp, Artificial
  Synthetic oligonucleotide
ttcttgctacgacgagctgatgactatgcgtcttaacgagctagacaaggcaggt

SEQ ID NO: 145583 - DNA, 55 bp, Artificial
  Synthetic oligonucleotide
ttgcaatggttgagttagtcgccgtcaatgacgtaactacgcctgatactgagtt

SEQ ID NO: 145584 - DNA, 55 bp, Artificial
  Synthetic oligonucleotide
ttgtcttagtgcaccgttagaggtagccacaaggtcaaagggcagtctttctgac

SEQ ID NO: 145585 - DNA, 55 bp, Artificial
  Synthetic oligonucleotide
aaagcacgttcattgcgatacgccactcagcttaagacctgcgaagaagacctcc

SEQ ID NO: 145586 - DNA, 55 bp, Artificial
  Synthetic oligonucleotide
cgaacatcgatgccgcaacgattagatcgtaattgccccattcagccggcaagcc

SEQ ID NO: 145587 - DNA, 55 bp, Artificial
  Synthetic oligonucleotide
cgaggggtgaataaacgtcggcagtgaccacttgtctgtactgtggcattgcacg

SEQ ID NO: 145588 - DNA, 55 bp, Artificial
  Synthetic oligonucleotide
cgaggcatgaaaatttgtactacagaagccggtaattcgccagtgcatacctgta

SEQ ID NO: 145589 - DNA, 55 bp, Artificial
  Synthetic oligonucleotide
gatacatccccatcccttacgttcccgtaacttgttccactgtactttgagctac

SEQ ID NO: 145590 - DNA, 55 bp, Artificial
  Synthetic oligonucleotide
cgacacgggaaagttactgtatgcctatttaacctatatcggtctaacgctggcc

SEQ ID NO: 145591 - DNA, 55 bp, Artificial
  Synthetic oligonucleotide
cgaccatctaatctaatgtgcccatgctccattttgtgaaggacaagtgcacggc

SEQ ID NO: 145592 - DNA, 55 bp, Artificial
  Synthetic oligonucleotide
cgacgaagtgtgtgagactttcaactgggaatgtcacgcctactgcctaatgggc

SEQ ID NO: 145593 - DNA, 55 bp, Artificial
  Synthetic oligonucleotide
tttgtgcaatgcgcaggtaagatatgacgcgctcacgaaattctgatgttgcctg

SEQ ID NO: 145594 - DNA, 55 bp, Artificial
  Synthetic oligonucleotide
cgaggaagacgccagtcagtggtacgttgagacgacatacggcttcaaccgcacc

SEQ ID NO: 145595 - DNA, 55 bp, Artificial
  Synthetic oligonucleotide
cgagaccgctttgccatctcgtcaggtgattattccacgtaaaggcgtgttagaa

SEQ ID NO: 145596 - DNA, 55 bp, Artificial
  Synthetic oligonucleotide
tcggtaacctcagagttattctcgggcacacctatggcaaccaatggcccttggt

SEQ ID NO: 145597 - DNA, 55 bp, Artificial
  Synthetic oligonucleotide
cctcggtaaccgagcaattagtaagtcaaacggcaagttcggtagaccagatgca

SEQ ID NO: 145598 - DNA, 55 bp, Artificial
  Synthetic oligonucleotide
tctttaactttaccgtagccgcccctcaaattgtatcgggcctaactgctggctg

SEQ ID NO: 145599 - DNA, 55 bp, Artificial
  Synthetic oligonucleotide
cctgcagcttactcgccaagttcgcactgacttcttctaacgccttgccatctgc

SEQ ID NO: 145600 - DNA, 55 bp, Artificial
  Synthetic oligonucleotide
gatagctggcctttctcatagaaatggatggccataggtcggtatcagacctccg

SEQ ID NO: 145601 - DNA, 55 bp, Artificial
  Synthetic oligonucleotide
cctgctcgggaataaagcatacgcaggctgttagaaagggtagttatactgccta

SEQ ID NO: 145602 - DNA, 55 bp, Artificial
  Synthetic oligonucleotide
tgctatggcacgcaagctagaagtagacccacttaccgtacgtaaacaaaatttg

SEQ ID NO: 145603 - DNA, 55 bp, Artificial
  Synthetic oligonucleotide
tgctcttcgtgaatatcgtgagctatatcatttgctagtgcgctcatacagacgc

SEQ ID NO: 145604 - DNA, 55 bp, Artificial
  Synthetic oligonucleotide
tgcttctgttatcttttgccctatggagcacgccttgttggtttgcgcctctctg

SEQ ID NO: 145605 - DNA, 55 bp, Artificial
  Synthetic oligonucleotide
tggatatggctgaagcctcgttagaagtagctaaattgcacggtttagagtctgg

SEQ ID NO: 145606 - DNA, 55 bp, Artificial
  Synthetic oligonucleotide
tggccttaagtaaggtggaaggggtgtcgcaagtttccgtgagctaccctgatcg

SEQ ID NO: 145607 - DNA, 55 bp, Artificial
  Synthetic oligonucleotide
tggtccgctttcgtaattgtttgtcggactttcggtcatgctaaacacgcgagtc

SEQ ID NO: 145608 - DNA, 52 bp, Artificial
  Synthetic oligonucleotide
ccttgcattcgcggggttttcagtacgccggtttactcaaagttaacgtcac

SEQ ID NO: 145609 - DNA, 55 bp, Artificial
  Synthetic oligonucleotide
tgtgagaaagacggtattagcaacacagtaaaacaagcgcctgtccctcacagcg

SEQ ID NO: 145610 - DNA, 55 bp, Artificial
  Synthetic oligonucleotide
tgttgccttacctggaagagggtgtagccagccggatgctgtccattgtgggctt

SEQ ID NO: 145611 - DNA, 60 bp, Artificial
  Synthetic oligonucleotide
tcgccacagaccgaagcatcatggatcagtgtctgacacctaattggccctctggagcct

SEQ ID NO: 145612 - DNA, 55 bp, Artificial
  Synthetic oligonucleotide
gatattgatccgcttttggctcgcccctgcgtacaagacttactaacgattacac

SEQ ID NO: 145613 - DNA, 55 bp, Artificial
  Synthetic oligonucleotide
aaatgtcgctaagcgagacaacatactgttagccgtacttttatcgccacgcaac

SEQ ID NO: 145614 - DNA, 55 bp, Artificial
  Synthetic oligonucleotide
cctttgataagcttgcacaacacacgttctcagtaggtgtagagcttccgctaga

SEQ ID NO: 145615 - DNA, 55 bp, Artificial
  Synthetic oligonucleotide
ttcaaatgcccgtgcggtggtgactgtcacccctgatggtgtggagctacttccg

SEQ ID NO: 145616 - DNA, 55 bp, Artificial
  Synthetic oligonucleotide
ggccgcactcaagcgaaattagaaagtgtttacgacgaaatagaagccgccggct

SEQ ID NO: 145617 - DNA, 55 bp, Artificial
  Synthetic oligonucleotide
ggccctaacactccccgaagccgcagagtatgcgcgtcgattatttgaggcggtc

SEQ ID NO: 145618 - DNA, 55 bp, Artificial
  Synthetic oligonucleotide
ggccacaacgatagcgccatgacttaacacgaccacggtctaaccaaggcagagc

SEQ ID NO: 145619 - DNA, 55 bp, Artificial
  Synthetic oligonucleotide
ggcagcaatacagcctgacagaattgtggctagaaacggccctgtcttactatcg

SEQ ID NO: 145620 - DNA, 55 bp, Artificial
  Synthetic oligonucleotide
ggcaatccaaatacaacccaatcgaagaactgacactgtggacgcaaatcaaccc

SEQ ID NO: 145621 - DNA, 55 bp, Artificial
  Synthetic oligonucleotide
ggattgccgtgccagccatcccagacgataagcgagacttcacacccgagccact

SEQ ID NO: 145622 - DNA, 55 bp, Artificial
  Synthetic oligonucleotide
ggatactgtctttcattacttcgcggccgtggcgtgagttacttaaccctgcggc

SEQ ID NO: 145623 - DNA, 55 bp, Artificial
  Synthetic oligonucleotide
gaaataccaccgatatctgagcaacgtgagatagttcgacgcgttgaagagttac

SEQ ID NO: 145624 - DNA, 55 bp, Artificial
  Synthetic oligonucleotide
ggacttaatctctatccagtcgttagcctccttaccgagagtgactggaaccgcc

SEQ ID NO: 145625 - DNA, 55 bp, Artificial
  Synthetic oligonucleotide
ggacggacactgtccaatttcatagtgtacgctgaactgcctaagtcattttcag

SEQ ID NO: 145626 - DNA, 55 bp, Artificial
  Synthetic oligonucleotide
ggacgctgacagatcacgtggtccactacattctgggcgcgtatcagtataaagg

SEQ ID NO: 145627 - DNA, 55 bp, Artificial
  Synthetic oligonucleotide
ggacgacctaattcgtcattcctgtctaagcggtcaatcacagtggacaaatcgt

SEQ ID NO: 145628 - DNA, 55 bp, Artificial
  Synthetic oligonucleotide
ggaacggtatgaacggccgttggaggccctgacagcattccgcctccgattcggt

SEQ ID NO: 145629 - DNA, 55 bp, Artificial
  Synthetic oligonucleotide
ggaaagggattcggtgacattttcgacaggatggatcaattgttcattgtcgctg

SEQ ID NO: 145630 - DNA, 55 bp, Artificial
  Synthetic oligonucleotide
gctttagcctcgcaatctaaatgatcacctgaccctacttttgcgccaccggcct

SEQ ID NO: 145631 - DNA, 55 bp, Artificial
  Synthetic oligonucleotide
gcttaacggcactgtcagttagcgaaatgagctttgtactaggtacgaaagtttc

SEQ ID NO: 145632 - DNA, 55 bp, Artificial
  Synthetic oligonucleotide
gctgtgggcctattcgtattgtggggagtgtaaaatgagtttacccgttcacgag

SEQ ID NO: 145633 - DNA, 55 bp, Artificial
  Synthetic oligonucleotide
gcgcacacctttcaggtaggcataaggattatggccattcagcttcgttgacccg

SEQ ID NO: 145634 - DNA, 55 bp, Artificial
  Synthetic oligonucleotide
aggcagtgtgcacgatagttaaagatgcgtgatccatgctatgttaaacctagcg

SEQ ID NO: 145635 - DNA, 55 bp, Artificial
  Synthetic oligonucleotide
cgcaccacgcgctatttggtgctccaacatcaaattttcgttctaatctattcgg

SEQ ID NO: 145636 - DNA, 55 bp, Artificial
  Synthetic oligonucleotide
gcgcgacctatacatacctgatgaacggccgtgacccacaaacaaactggactgc

SEQ ID NO: 145637 - DNA, 55 bp, Artificial
  Synthetic oligonucleotide
gcgctgttaggaagcctgtgacgcataggcaaaggcttttgacttagtacttgct

SEQ ID NO: 145638 - DNA, 55 bp, Artificial
  Synthetic oligonucleotide
gcgctttcgctaggtatccctctaatgacttatagcattgttgtcgacgaaatga

SEQ ID NO: 145639 - DNA, 55 bp, Artificial
  Synthetic oligonucleotide
gcggaccacgcctgacccagccagtatatgcgtgatcaacggcatacagatgtac

SEQ ID NO: 145640 - DNA, 55 bp, Artificial
  Synthetic oligonucleotide
gcggcaggcgcattgtgcttgctacgaacgtggctgaaacgtcgttaacggtgcc

SEQ ID NO: 145641 - DNA, 55 bp, Artificial
  Synthetic oligonucleotide
gcggctgatattcgtggcgaggagcattccctggatgagttccgtggcaaagttc

SEQ ID NO: 145642 - DNA, 55 bp, Artificial
  Synthetic oligonucleotide
gcggtacagcgggcacatctgtgtaggcaagtacattacctgcgaacaatgctgt

SEQ ID NO: 145643 - DNA, 55 bp, Artificial
  Synthetic oligonucleotide
gcggttacatcaacggtgtttggtgtatcgacgtcgctaggctttggcgcttcgc

SEQ ID NO: 145644 - DNA, 55 bp, Artificial
  Synthetic oligonucleotide
gcgtcagcgatcaaaacagtagtgctcagagtgatagcgcatcagatcctgctaa

SEQ ID NO: 145645 - DNA, 55 bp, Artificial
  Synthetic oligonucleotide
gaacacagagagcgtctggctcaccgacaatataggctcccagagtagtggcgcg

SEQ ID NO: 145646 - DNA, 55 bp, Artificial
  Synthetic oligonucleotide
gcgtctaagaaaccaaggcttgcggttaaagttagcgtgtcgctgtaattgtagg

SEQ ID NO: 145647 - DNA, 55 bp, Artificial
  Synthetic oligonucleotide
gcgttgtgccgtcttcggtagatacggtgtagtgtagcgttacaacgctgtcaga

SEQ ID NO: 145648 - DNA, 55 bp, Artificial
  Synthetic oligonucleotide
gctacccggaatactctgattttgttggcgactgatcgcccctaacccgaactcg

SEQ ID NO: 145649 - DNA, 55 bp, Artificial
  Synthetic oligonucleotide
gctcaggttatgctcaacactggcaatggcctggctggacacgtcactgaaatgc

SEQ ID NO: 145650 - DNA, 55 bp, Artificial
  Synthetic oligonucleotide
gctcgcgatcaactagagttggaacagtaccgtaagggttaagctccaacagatc

SEQ ID NO: 145651 - DNA, 55 bp, Artificial
  Synthetic oligonucleotide
gctggagccgtcacgccctacccatcaaaagccataacgacaagccggcaaccac

SEQ ID NO: 145652 - DNA, 55 bp, Artificial
  Synthetic oligonucleotide
gtcccagcaacgcgagtctttgttgtaagggccgaatgtcgtgctgtctgagtga

SEQ ID NO: 145653 - DNA, 55 bp, Artificial
  Synthetic oligonucleotide
gtcaaagatccttataaccctaatgggtttattacagtgactgaagatgcttcgg

SEQ ID NO: 145654 - DNA, 55 bp, Artificial
  Synthetic oligonucleotide
gtaaacgtgctcgcttttagcggtttcagctagctccaatacggtagccgttgcg

SEQ ID NO: 145655 - DNA, 55 bp, Artificial
  Synthetic oligonucleotide
ggttcaggtgttcactaccagtcctggtttgtcgccagttgatatcgaaacgctg

SEQ ID NO: 145656 - DNA, 55 bp, Artificial
  Synthetic oligonucleotide
gaaccccacgcttcattaacagagcagtatgtggcattacttggcacggaaggcg

SEQ ID NO: 145657 - DNA, 52 bp, Artificial
  Synthetic oligonucleotide
ggtgcctatttgggccagaaatggttggttgttaccttttcccgagccgccc

SEQ ID NO: 145658 - DNA, 55 bp, Artificial
  Synthetic oligonucleotide
ggtgaaccgagagatacgttgacattcacctctgtttcgccactggcagttggtg

SEQ ID NO: 145659 - DNA, 55 bp, Artificial
  Synthetic oligonucleotide
ggtattcccctagccattggctacattattagctcactcgtcgccatcccactgg

SEQ ID NO: 145660 - DNA, 55 bp, Artificial
  Synthetic oligonucleotide
cgataacgctgcgaactctacgcgcacctcccaaagtcaatactggcaagggctc

SEQ ID NO: 145661 - DNA, 55 bp, Artificial
  Synthetic oligonucleotide
ggtaccttgtttcgcctggtcacgtactttagtcagactttgcatgatagtactt

SEQ ID NO: 145662 - DNA, 55 bp, Artificial
  Synthetic oligonucleotide
ggtacattgaaaatcaccgctcgcagacaaaatattaactgtcccggtcaaaacg

SEQ ID NO: 145663 - DNA, 55 bp, Artificial
  Synthetic oligonucleotide
ggtacaggcgcttgttttactgtgttgctaataccgtctttctcacaggtacgac

SEQ ID NO: 145664 - DNA, 55 bp, Artificial
  Synthetic oligonucleotide
ggtaatagcggtgggcagcccagcaaccatttctttagcgaatgttgggccagac

SEQ ID NO: 145665 - DNA, 55 bp, Artificial
  Synthetic oligonucleotide
gggtgctgatactcgaagtaaccgcaaagtagcaccgggccttcagctcttagtt

SEQ ID NO: 145666 - DNA, 55 bp, Artificial
  Synthetic oligonucleotide
gggtcgttaactggatatgcacttgatcctgcgcgcttttcggagttacacccgg

SEQ ID NO: 145667 - DNA, 55 bp, Artificial
  Synthetic oligonucleotide
cccctttatgacggaccacaatgaccaagcgagcacattcggactgtcggctttc

SEQ ID NO: 145668 - DNA, 55 bp, Artificial
  Synthetic oligonucleotide
ccggagccggaacgtcctccaggtggtattaggcgctatggtccagctgatatcg

SEQ ID NO: 145669 - DNA, 55 bp, Artificial
  Synthetic oligonucleotide
cgatcaaacgcggtgatacgcagataatacgccgactgcacgtcttccatttcca

SEQ ID NO: 145670 - DNA, 55 bp, Artificial
  Synthetic oligonucleotide
aatatgaccaaactcactgcgctgatcgtagacgacgaacctgacatccgtgacc

SEQ ID NO: 145671 - DNA, 55 bp, Artificial
  Synthetic oligonucleotide
ggccgttcttttcctatgggcgctacggtaagtgcgcaaggcaccaatttcgcaa

SEQ ID NO: 145672 - DNA, 55 bp, Artificial
  Synthetic oligonucleotide
ggcctatcctcaggcattcggtagtgccacccagctagactatttctctgaccct

SEQ ID NO: 145673 - DNA, 55 bp, Artificial
  Synthetic oligonucleotide
ggccttagttcgcaagtaagagagaccaattctatgaaggggcctccagagcccc

SEQ ID NO: 145674 - DNA, 55 bp, Artificial
  Synthetic oligonucleotide
ggcctttcaaacgatgttggtccaatgccgcacaagcctctaccgtttctgagac

SEQ ID NO: 145675 - DNA, 55 bp, Artificial
  Synthetic oligonucleotide
aagtccgacctcaccttttgttgcagcgttagcgacactcaccgggtccttcata

SEQ ID NO: 145676 - DNA, 55 bp, Artificial
  Synthetic oligonucleotide
ggcgaggaactcaccgtatgcgttgtagagaaaggttctgagatcggcgcccaca

SEQ ID NO: 145677 - DNA, 55 bp, Artificial
  Synthetic oligonucleotide
ggcgatacggcacatatattccatgtgggtgatgctagagtctgtttgtattctg

SEQ ID NO: 145678 - DNA, 55 bp, Artificial
  Synthetic oligonucleotide
gaaccccgatggtccgggtagcttgcaacgaagcgctcgcaggcagttacgaagg

SEQ ID NO: 145679 - DNA, 55 bp, Artificial
  Synthetic oligonucleotide
ggcgccagagatggatgtgttcatggacgaacggctaaccatgcttcattaaccg

SEQ ID NO: 145680 - DNA, 55 bp, Artificial
  Synthetic oligonucleotide
ggcggctttacctgacctaccagcgataccccgatggcggtaaacatccgtttgc

SEQ ID NO: 145681 - DNA, 55 bp, Artificial
  Synthetic oligonucleotide
ccgccagagcggtcggtgagctttgtcagctgtgcgaaacagacaacgatggcca

SEQ ID NO: 145682 - DNA, 51 bp, Artificial
  Synthetic oligonucleotide
cgcaaggtacccggggtgttaattacggcaaacagaagtgagggtattagg

SEQ ID NO: 145683 - DNA, 55 bp, Artificial
  Synthetic oligonucleotide
ccgcgccactaaatccgtaattcagatactgcgatagaacttgaacgctctaagt

SEQ ID NO: 145684 - DNA, 55 bp, Artificial
  Synthetic oligonucleotide
ggctgctgtaccaaatattaggtgaagaaggtgcgtcacagcgctttatgcgctt

SEQ ID NO: 145685 - DNA, 55 bp, Artificial
  Synthetic oligonucleotide
gggcaatactgtccagcttagcgccgaaccacacaagattgttgcatcgttacaa

SEQ ID NO: 145686 - DNA, 54 bp, Artificial
  Synthetic oligonucleotide
ccgtctggcgcgaggttagactgcccatttgcgtgagtatcggcccaacgccca

SEQ ID NO: 145687 - DNA, 54 bp, Artificial
  Synthetic oligonucleotide
cgaattagatcgctgctagatgttatgtactaggtgcgtggcaatgtcaccccg

SEQ ID NO: 145688 - DNA, 54 bp, Artificial
  Synthetic oligonucleotide
ccgatcacaatcactccgaacgccgttaacacaattgccgacaccatttctcct

SEQ ID NO: 145689 - DNA, 55 bp, Artificial
  Synthetic oligonucleotide
gaatacggcggctctgcagcattgccaatttggatagactttatgaaggaggcgt

SEQ ID NO: 145690 - DNA, 54 bp, Artificial
  Synthetic oligonucleotide
cccgggccatccaatgatcgaatcaccccagttcccaccgttactaacgggaga

SEQ ID NO: 145691 - DNA, 54 bp, Artificial
  Synthetic oligonucleotide
ccgggttactgcgggaatttgcaggtccaaacgcacctcagttacgtcttgatg

SEQ ID NO: 145692 - DNA, 54 bp, Artificial
  Synthetic oligonucleotide
tgaatgagacccgacatatttccccactcataggcacccagtcccattaccact

SEQ ID NO: 145693 - DNA, 54 bp, Artificial
  Synthetic oligonucleotide
gggcgatgcaatcctacttcgcggcatgttcccaagcgccaagatgcgttggtg

SEQ ID NO: 145694 - DNA, 54 bp, Artificial
  Synthetic oligonucleotide
tcgccttcgttagcatgacgtgcgatcacgactcccgagaacggtgctgtgacc

SEQ ID NO: 145695 - DNA, 54 bp, Artificial
  Synthetic oligonucleotide
ctagatcacacgaattttgcctactcattccctgaggcacgtagttgtagcgta

SEQ ID NO: 145696 - DNA, 54 bp, Artificial
  Synthetic oligonucleotide
atgacaggcataacacgcctccactttggcttttggctcgccagcgactttggc

SEQ ID NO: 145697 - DNA, 54 bp, Artificial
  Synthetic oligonucleotide
gtgtcagcagtggctaaccaaccgccgaacacaggaagcccaccctgccaaata

SEQ ID NO: 145698 - DNA, 54 bp, Artificial
  Synthetic oligonucleotide
gagcgagaaacactaaaatacacgcgataagcgcaagctgataccgaagtgtaa

SEQ ID NO: 145699 - DNA, 54 bp, Artificial
  Synthetic oligonucleotide
actgttgatgtgggaccggtgtgctcaaggggcagactcccttgtgcgatgtga

SEQ ID NO: 145700 - DNA, 55 bp, Artificial
  Synthetic oligonucleotide
gaattgtaaatgcggtgatgacggaagttcaaatctggcggcaaataggggcgcg

SEQ ID NO: 145701 - DNA, 54 bp, Artificial
  Synthetic oligonucleotide
cggttgtcatactcagaaagggaccggcgaaggttaccgaagccgcgtcgtgta

SEQ ID NO: 145702 - DNA, 54 bp, Artificial
  Synthetic oligonucleotide
gatgtgagttggtcagcactgacatcgccgaatacttctggccggtcattcacc

SEQ ID NO: 145703 - DNA, 54 bp, Artificial
  Synthetic oligonucleotide
ggtatgcatcagtactagggtaaaacagcctcactacgcacaccatccatatcg

SEQ ID NO: 145704 - DNA, 53 bp, Artificial
  Synthetic oligonucleotide
gtcctctaacttgatatcagcgcggttcattaggaactgagacagcataggca

SEQ ID NO: 145705 - DNA, 53 bp, Artificial
  Synthetic oligonucleotide
tcaacggacgtatcggtaacccgaacatctagcttcacccccaccagggcgtg

SEQ ID NO: 145706 - DNA, 53 bp, Artificial
  Synthetic oligonucleotide
cttgcgatgcaggtatcctgcgacggttccgctgacactaaggccgcaatcgg

SEQ ID NO: 145707 - DNA, 53 bp, Artificial
  Synthetic oligonucleotide
gatgacgtaaaagtggcttttgacacatacagagagtctgggtttatcgcggg

SEQ ID NO: 145708 - DNA, 53 bp, Artificial
  Synthetic oligonucleotide
cggacattcccgtgacccaataatgtgcactgctagtgagacgcaaataaggg

SEQ ID NO: 145709 - DNA, 53 bp, Artificial
  Synthetic oligonucleotide
cggtgttgctcttggtagtaggggcggcgggcctatatggctttatcgtcgct

SEQ ID NO: 145710 - DNA, 53 bp, Artificial
  Synthetic oligonucleotide
cgacgagtgtgatacccgtctgatatttgacgttcatccttgaatctccgagg

SEQ ID NO: 145711 - DNA, 55 bp, Artificial
  Synthetic oligonucleotide
gacagtctccctaagtgcataaatccgtaatcgaacgcaacctcagtaacatttt

SEQ ID NO: 145712 - DNA, 53 bp, Artificial
  Synthetic oligonucleotide
aaaacgagcaagtcgctaactggttgctgcgactaaccgaaactcacaaacgt

SEQ ID NO: 145713 - DNA, 53 bp, Artificial
  Synthetic oligonucleotide
caccttccgtcaccggacaactcagcacgcgttaccgccgattgttacaggaa

SEQ ID NO: 145714 - DNA, 53 bp, Artificial
  Synthetic oligonucleotide
atttgcattggctggctccagtcacttccaggaatgtcttgattaaaccctag

SEQ ID NO: 145715 - DNA, 53 bp, Artificial
  Synthetic oligonucleotide
aaaccaacgaaagcgtttcgaatagcatcactggcagccctaattgtgggtgt

SEQ ID NO: 145716 - DNA, 53 bp, Artificial
  Synthetic oligonucleotide
cgaatcgagaagtgttttccatgcgtaagcgcctttcatacgatctttgccta

SEQ ID NO: 145717 - DNA, 53 bp, Artificial
  Synthetic oligonucleotide
tttaggattgatagcgagatactcattcgagcgattggcacgctcagctgttg

SEQ ID NO: 145718 - DNA, 53 bp, Artificial
  Synthetic oligonucleotide
attagcgtaattagcggagtaaggctgtaattgttagcaagcgcactctgaat

SEQ ID NO: 145719 - DNA, 53 bp, Artificial
  Synthetic oligonucleotide
atccagagaagtctaatttattctcgacataccttttcagcgttgaaggcagt

SEQ ID NO: 145720 - DNA, 53 bp, Artificial
  Synthetic oligonucleotide
ctccaaccctgcgaccacaagcggtctccaactctatggcaaccgggagatta

SEQ ID NO: 145721 - DNA, 53 bp, Artificial
  Synthetic oligonucleotide
gcgaactcacgaatagttgcggctgcgagatgcgtctcttttgcgaagctaag

SEQ ID NO: 145722 - DNA, 56 bp, Artificial
  Synthetic oligonucleotide
caaaacttcggttggagagcaaccttccttgtggtttccgcgcttggcacacttgc

SEQ ID NO: 145723 - DNA, 55 bp, Artificial
  Synthetic oligonucleotide
gacatgcttctcacggatctccagcacttataccgcctgatttctcaatctaccg

SEQ ID NO: 145724 - DNA, 53 bp, Artificial
  Synthetic oligonucleotide
agttcgcaaaggtacatagagcgagattggtcaaccgacgcgttacctgcaag

SEQ ID NO: 145725 - DNA, 53 bp, Artificial
  Synthetic oligonucleotide
tgcccttttaagtccgtcttgacgttattatcacctttgaataacaccggctt

SEQ ID NO: 145726 - DNA, 52 bp, Artificial
  Synthetic oligonucleotide
aaggcctccagcaccctttctccacgatttgcaccgcggtagtcaccatgtg

SEQ ID NO: 145727 - DNA, 52 bp, Artificial
  Synthetic oligonucleotide
ggggtgaaagggtacttaagcctgtggtcaaaagtagcggttatacacactg

SEQ ID NO: 145728 - DNA, 52 bp, Artificial
  Synthetic oligonucleotide
ggcgttttgcacgacaggttctaataccagcgcagctaactcattgtgatgt

SEQ ID NO: 145729 - DNA, 52 bp, Artificial
  Synthetic oligonucleotide
gtacaaactagcgcaatcagaattgactaataaggtgcgccacgttgagcat

SEQ ID NO: 145730 - DNA, 52 bp, Artificial
  Synthetic oligonucleotide
tcatttccagtttcgccttcggctgaattggtaccatcattctattaaggcg

SEQ ID NO: 145731 - DNA, 52 bp, Artificial
  Synthetic oligonucleotide
tcgtcatctgcaatccgagaaacggcattcaccccgtacctgcgaacactat

SEQ ID NO: 145732 - DNA, 52 bp, Artificial
  Synthetic oligonucleotide
ttaggtgggtagctgcagcggtaatgtttctaaattcggctacttttatcac

SEQ ID NO: 145733 - DNA, 52 bp, Artificial
  Synthetic oligonucleotide
ttgtgaatggtttagtacgtaagcatatgggcaatgtacagcgccgaattgc

SEQ ID NO: 145734 - DNA, 55 bp, Artificial
  Synthetic oligonucleotide
gacccgaagctgccacgccatcccgacggaatgtatcgcagaaattgggctgatt

SEQ ID NO: 145735 - DNA, 52 bp, Artificial
  Synthetic oligonucleotide
tttgagttattcttgcaaatgtgtctatctccgtgtgatattccgcacctga

SEQ ID NO: 145736 - DNA, 52 bp, Artificial
  Synthetic oligonucleotide
cggttctgcggggtagtgtattgcaatcgtttcaatgctgcgacaccaaact

SEQ ID NO: 145737 - DNA, 52 bp, Artificial
  Synthetic oligonucleotide
cataccaccgctgaaatacgactgggtctatcgccttaaagcccgttacccg

SEQ ID NO: 145738 - DNA, 52 bp, Artificial
  Synthetic oligonucleotide
catcgcacaggcgttcccaactaggaccagcaaaactccgaacgcagaaagt

SEQ ID NO: 145739 - DNA, 52 bp, Artificial
  Synthetic oligonucleotide
cattcgccaaggtattcaaagccgtaacacacaacctttgagtaagaccgct

SEQ ID NO: 145740 - DNA, 52 bp, Artificial
  Synthetic oligonucleotide
attccactataaccaaagcatgcagccctacttcaataaaggcctcgaacta

SEQ ID NO: 145741 - DNA, 52 bp, Artificial
  Synthetic oligonucleotide
ccaaagtgctcacgtcattcagcaaggaccactcaagaccatgaaaaccgta

SEQ ID NO: 145742 - DNA, 52 bp, Artificial
  Synthetic oligonucleotide
ctctagaccatatcgcatacattttgctctcaatgacgagggcaaattctgg

SEQ ID NO: 145743 - DNA, 52 bp, Artificial
  Synthetic oligonucleotide
agtgattgggaatgggatggaggttgctgatgcgctcgctgcactaccacgc

SEQ ID NO: 145744 - DNA, 52 bp, Artificial
  Synthetic oligonucleotide
cccatattaaactgacgctgtcaaaccaacgactcttcacaaacggatccac

SEQ ID NO: 145745 - DNA, 55 bp, Artificial
  Synthetic oligonucleotide
gaccgttagaagatgtctgacgaatagtcgctcgctgactagttacccgtgagaa

SEQ ID NO: 145746 - DNA, 52 bp, Artificial
  Synthetic oligonucleotide
aggggctactggatcagtatgccgatgtattgacacccgatggtcgcaaggc

SEQ ID NO: 145747 - DNA, 52 bp, Artificial
  Synthetic oligonucleotide
ccccttataatcttgccgtgaatctgataaacacccggcgctagtttagtca

SEQ ID NO: 145748 - DNA, 52 bp, Artificial
  Synthetic oligonucleotide
gcgccctcagtcaaatgcacatctaggtatagcacctcggtgtctaccactt

SEQ ID NO: 145749 - DNA, 52 bp, Artificial
  Synthetic oligonucleotide
aggaacgggagcagaggtgcagcgtccgctagcgacggttgttatcggtgga

SEQ ID NO: 145750 - DNA, 52 bp, Artificial
  Synthetic oligonucleotide
acattgatttctgttgacagcaataaagcgcccggaatagttgctctcatca

SEQ ID NO: 145751 - DNA, 52 bp, Artificial
  Synthetic oligonucleotide
accacggctggctttgcaacgaccgactttgccgcttggccggtgtttttac

SEQ ID NO: 145752 - DNA, 52 bp, Artificial
  Synthetic oligonucleotide
agatttcccggatctcagcgtcaaccaatcaactcgagtatcataaacacct

SEQ ID NO: 145753 - DNA, 52 bp, Artificial
  Synthetic oligonucleotide
gcaagtcgttcttcgcttaattcaggcagtaatagcggcaatacgcagcaga

SEQ ID NO: 145754 - DNA, 51 bp, Artificial
  Synthetic oligonucleotide
ttttgacatgcggtgttcctctttcaactggctggccaatcgaccaacccc

SEQ ID NO: 145755 - DNA, 51 bp, Artificial
  Synthetic oligonucleotide
ggctctatactccgccgcagattgggtgcagtcgaagtttggctggcgtcc

SEQ ID NO: 145756 - DNA, 55 bp, Artificial
  Synthetic oligonucleotide
gacgggtgaaaacggaaatctgtcgcttgcgccccattctcgacagcgcctcatc

SEQ ID NO: 145757 - DNA, 51 bp, Artificial
  Synthetic oligonucleotide
tttcggtcggagggagtgaggatcgggatactgctcgggacaacgtacaag

SEQ ID NO: 145758 - DNA, 51 bp, Artificial
  Synthetic oligonucleotide
tttcctcgggcatactaaaatcgaattcatccacctgtgaatcgatcgtta

SEQ ID NO: 145759 - DNA, 51 bp, Artificial
  Synthetic oligonucleotide
tttatgcaagacgaatgatcgccctgcaggcagaaacagacgcaaacttta

SEQ ID NO: 145760 - DNA, 51 bp, Artificial
  Synthetic oligonucleotide
gcctaaaatcctcagccaacaagtctcgcaaggttgtgggacgcggaacgt

SEQ ID NO: 145761 - DNA, 51 bp, Artificial
  Synthetic oligonucleotide
gcccataagcgggtatcgccgcagcacggttatgccaacctcgcgcgactg

SEQ ID NO: 145762 - DNA, 51 bp, Artificial
  Synthetic oligonucleotide
cgttaatcaacggttctcagctgcactggtacggccttctccataaagcga

SEQ ID NO: 145763 - DNA, 51 bp, Artificial
  Synthetic oligonucleotide
ttcgactcaccctaacgaccagcccgcgtttactccgcagctgacctcctt

SEQ ID NO: 145764 - DNA, 51 bp, Artificial
  Synthetic oligonucleotide
tgtcggtgattcgtttaatttacgtcattttgatgcacgtttggccgcaac

SEQ ID NO: 145765 - DNA, 51 bp, Artificial
  Synthetic oligonucleotide
ctgatgtccaccggtgacagtatcgggcgtgtgtgccccgacgcctttaat

SEQ ID NO: 145766 - DNA, 51 bp, Artificial
  Synthetic oligonucleotide
gtgggagcgggtgacggtgtgccgttggggttagtaccttgaacggttcga

SEQ ID NO: 145767 - DNA, 55 bp, Artificial
  Synthetic oligonucleotide
agcacgtgtaggaccaacgccatagatcgcttggatagcgattacagcatgcttg

SEQ ID NO: 145768 - DNA, 51 bp, Artificial
  Synthetic oligonucleotide
tcgcggtgcttggtatggcacaatgcattcgagcagaatacgcccccaagg

SEQ ID NO: 145769 - DNA, 51 bp, Artificial
  Synthetic oligonucleotide
ctgcagcaagcgacgaatgttgagtacttgctcttgactcattggcgcact

SEQ ID NO: 145770 - DNA, 51 bp, Artificial
  Synthetic oligonucleotide
gttgggtgccgtctatatgtgcgccccaacgctccatcgtcatacccggta

SEQ ID NO: 145771 - DNA, 51 bp, Artificial
  Synthetic oligonucleotide
tatcctagcattcagccggatttaagacacttgccctcttgattgcgggcc

SEQ ID NO: 145772 - DNA, 51 bp, Artificial
  Synthetic oligonucleotide
tagtacgtcaaccaccggttggccttggcgtagcaggtattgaccgcgcgc

SEQ ID NO: 145773 - DNA, 51 bp, Artificial
  Synthetic oligonucleotide
aacctagcccgcttaaccgaattcactcacaaagtgaaagccatggtgcgc

SEQ ID NO: 145774 - DNA, 51 bp, Artificial
  Synthetic oligonucleotide
atgaattcccctaaattctaccggcgcacccactgttaacccgcgcactga

SEQ ID NO: 145775 - DNA, 51 bp, Artificial
  Synthetic oligonucleotide
aatagaacgggaccgccccaaaatatcgtagcgagtggtcgtccaatattg

SEQ ID NO: 145776 - DNA, 51 bp, Artificial
  Synthetic oligonucleotide
acgaccagcccgcgtttactccgcagctgacctccttagagatcccgtgct

SEQ ID NO: 145777 - DNA, 51 bp, Artificial
  Synthetic oligonucleotide
acgccataagcgtaaccacggtgttagtgctccaatcgagcatgcggtgaa

SEQ ID NO: 145778 - DNA, 55 bp, Artificial
  Synthetic oligonucleotide
gagagcaatttctgaggctactccacccggactgcagagatcctgacctgcccgc

SEQ ID NO: 145779 - DNA, 51 bp, Artificial
  Synthetic oligonucleotide
ccccacgtcgggctaacgctaatgcatgtgaacggcctaagcctgcaccgg

SEQ ID NO: 145780 - DNA, 51 bp, Artificial
  Synthetic oligonucleotide
ataggcgtgtcttagcgctgattccttttctttgcgggtaaggccacttgc

SEQ ID NO: 145781 - DNA, 51 bp, Artificial
  Synthetic oligonucleotide
cccgcattagggccaatgtctactatccagtctgcgtgttgaataacgctt

SEQ ID NO: 145782 - DNA, 51 bp, Artificial
  Synthetic oligonucleotide
atactaattcgagcacgctgatagcttctttagctcggtcgaggctcaaca

SEQ ID NO: 145783 - DNA, 51 bp, Artificial
  Synthetic oligonucleotide
acggcgcttaccgcccatttgacgccacatcactgcagctcgtacacccgc

SEQ ID NO: 145784 - DNA, 51 bp, Artificial
  Synthetic oligonucleotide
cgacgacttttgccccacgtcgggctaacgctaatgcatgtgaacggccta

SEQ ID NO: 145785 - DNA, 51 bp, Artificial
  Synthetic oligonucleotide
actatttcaattagcgccgaaaacgacgctccggtagcaacttccgatacg

SEQ ID NO: 145786 - DNA, 50 bp, Artificial
  Synthetic oligonucleotide
ggggcgatgcatattcgccagggccaaacgtgttgctgcatgactggcta

SEQ ID NO: 145787 - DNA, 50 bp, Artificial
  Synthetic oligonucleotide
aagcgtgtctggatccttcgagcgtgagccctccgaataccacggccgct

SEQ ID NO: 145788 - DNA, 50 bp, Artificial
  Synthetic oligonucleotide
aagcggccgtgcaaaaatagtgataggcacgcgcctagctgccttagccg

SEQ ID NO: 145789 - DNA, 55 bp, Artificial
  Synthetic oligonucleotide
cgctcacgagctctccacaacggttgtcttgaacacaggacctctatgcatacgg

SEQ ID NO: 145790 - DNA, 50 bp, Artificial
  Synthetic oligonucleotide
aagcgctcgtcgtttatcccggcccgccatcaattcctggcagataccgg

SEQ ID NO: 145791 - DNA, 50 bp, Artificial
  Synthetic oligonucleotide
aagcgcagactgagcaccaacggcaaaagccgcctcacgaaccgccctca

SEQ ID NO: 145792 - DNA, 50 bp, Artificial
  Synthetic oligonucleotide
aagcgcagaagtttaccacaggcacccgtgagcccaatccccttgtcgga

SEQ ID NO: 145793 - DNA, 50 bp, Artificial
  Synthetic oligonucleotide
aacttagcggcctcgcctgccaacaaacccacgtgaacgcgaataccggc

SEQ ID NO: 145794 - DNA, 50 bp, Artificial
  Synthetic oligonucleotide
aagccttgcgcttctggacgacttggccgtacaggtgctccgggaaacga

SEQ ID NO: 145795 - DNA, 50 bp, Artificial
  Synthetic oligonucleotide
aagcccgcgagtaccgatctcgaaaccagccggatcaaggttccccctca

SEQ ID NO: 145796 - DNA, 50 bp, Artificial
  Synthetic oligonucleotide
gtggccaacttatcggagccatggtggtcgcatttcagacgcagcccacg

SEQ ID NO: 145797 - DNA, 50 bp, Artificial
  Synthetic oligonucleotide
aagacggctgggactatcagttactgaacgcgtccggaaacgccccgcac

SEQ ID NO: 145798 - DNA, 50 bp, Artificial
  Synthetic oligonucleotide
aagccccgcgcttggagcgctattatgcccgtacagcaaccgcgctaaat

SEQ ID NO: 145799 - DNA, 50 bp, Artificial
  Synthetic oligonucleotide
aagccagttccctgtcgtgggtagcgagcaccagtgcacaaccggtttgc

SEQ ID NO: 145800 - DNA, 55 bp, Artificial
  Synthetic oligonucleotide
gagctccgcgataaccgatggtctggctctccgagagatcatatttcaggtctgc

SEQ ID NO: 145801 - DNA, 50 bp, Artificial
  Synthetic oligonucleotide
aagagctatggctccaggcggatgaagcacgctctgaacgctctgggcta

SEQ ID NO: 145802 - DNA, 50 bp, Artificial
  Synthetic oligonucleotide
aagagtgggacagggctcggcctttatctggcacgagaactgtgcgaggc

SEQ ID NO: 145803 - DNA, 50 bp, Artificial
  Synthetic oligonucleotide
gtctcgaatgcttcgcgaaagcttctgggggttaggcggcgggccagtgc

SEQ ID NO: 145804 - DNA, 50 bp, Artificial
  Synthetic oligonucleotide
aagccagagcctctgtggctgataccccctgcttacggcacgttgacagg

SEQ ID NO: 145805 - DNA, 50 bp, Artificial
  Synthetic oligonucleotide
aagatcggagagaaatccgtcggcactgtcctgagcgcgggcacccatgg

SEQ ID NO: 145806 - DNA, 50 bp, Artificial
  Synthetic oligonucleotide
aagatgcgtctgaacgaacttagtccggaacccggttcacgccaggcccc

SEQ ID NO: 145807 - DNA, 50 bp, Artificial
  Synthetic oligonucleotide
aagcattgcacgcactgcggagtagcttggtggctcgggtaagcggtcta

SEQ ID NO: 145808 - DNA, 50 bp, Artificial
  Synthetic oligonucleotide
aagcatcaccaggccgaccacccgatcaggatgagtcagagcacaccgta

SEQ ID NO: 145809 - DNA, 50 bp, Artificial
  Synthetic oligonucleotide
ggttgactggcttacgcacacctaacatctacactgccgaatctaacaac

SEQ ID NO: 145810 - DNA, 50 bp, Artificial
  Synthetic oligonucleotide
aagcatagacgacttggcggacgaggcatcaacacccgcccaagcgatgg

SEQ ID NO: 145811 - DNA, 55 bp, Artificial
  Synthetic oligonucleotide
cccgactacaaccgccgctcagccacacacacggacgtggtaggcctgattcaag

SEQ ID NO: 145812 - DNA, 50 bp, Artificial
  Synthetic oligonucleotide
aagcagtgccggataaccgccagtttgcggcgtcgagtgcagttgctcag

SEQ ID NO: 145813 - DNA, 50 bp, Artificial
  Synthetic oligonucleotide
aagcaggagcactcatgcacgcggcagtagcagccgccaaaaggttagct

SEQ ID NO: 145814 - DNA, 50 bp, Artificial
  Synthetic oligonucleotide
aagcacgctctgaacgctctgggctatccagtgggtcggcgaaaggcgcg

SEQ ID NO: 145815 - DNA, 50 bp, Artificial
  Synthetic oligonucleotide
aagcaattacccaagccgccaggactgctcagatcgtcggggctcgtcgg

SEQ ID NO: 145816 - DNA, 50 bp, Artificial
  Synthetic oligonucleotide
aatgcggccagcgcggttaccttgtaggaagccacaacccgtggatcagt

SEQ ID NO: 145817 - DNA, 50 bp, Artificial
  Synthetic oligonucleotide
aatgctgataggcgttggaggtcaccatccgccctctgggagtccggacc

SEQ ID NO: 145818 - DNA, 50 bp, Artificial
  Synthetic oligonucleotide
aatggcaccccgtactccgcccgcgtccagtgtaatctccgggactcggg

SEQ ID NO: 145819 - DNA, 50 bp, Artificial
  Synthetic oligonucleotide
aatgtggcgggtgcagcaagggttcggctagattcgctcaacagccctca

SEQ ID NO: 145820 - DNA, 50 bp, Artificial
  Synthetic oligonucleotide
aatgttcccaagtgcggtagccgcgtgcatgttaggccgtaaaggcgcac

SEQ ID NO: 145821 - DNA, 50 bp, Artificial
  Synthetic oligonucleotide
ggacccgatggggacggcgcaaaccgcccaacatatggagtcgcaggcat

SEQ ID NO: 145822 - DNA, 55 bp, Artificial
  Synthetic oligonucleotide
ccgaccggtatgccaactaacccttatggacagtctaaactcatggtcgaacatg

SEQ ID NO: 145823 - DNA, 50 bp, Artificial
  Synthetic oligonucleotide
aattcgtggcatctgcttgagctcttacgggcgccgcaaacgcgaggtct

SEQ ID NO: 145824 - DNA, 50 bp, Artificial
  Synthetic oligonucleotide
aattctcaggccgtttcgtaggggatccctggcgagcattccaggcgctt

SEQ ID NO: 145825 - DNA, 50 bp, Artificial
  Synthetic oligonucleotide
aattgaacccgccggttgggaaaacggcacgttcaggtagctcatggggc

SEQ ID NO: 145826 - DNA, 50 bp, Artificial
  Synthetic oligonucleotide
acaaaacgctaaaacaccgttccggcctgtggcctccactggacgcccaa

SEQ ID NO: 145827 - DNA, 50 bp, Artificial
  Synthetic oligonucleotide
gcttaacgcgcccgaacttagcgctgccacctgaccttccagcatgtcgt

SEQ ID NO: 145828 - DNA, 50 bp, Artificial
  Synthetic oligonucleotide
acaaacgcgcaactctgccagagcccgttaaatcaggctccgggactcgc

SEQ ID NO: 145829 - DNA, 50 bp, Artificial
  Synthetic oligonucleotide
acaaatccctcagcggtgcctacacttccagccacttggccgaacgtgcg

SEQ ID NO: 145830 - DNA, 50 bp, Artificial
  Synthetic oligonucleotide
acaacatccgacgaccacgaacacacagccgggccttgagggagtcctcg

SEQ ID NO: 145831 - DNA, 50 bp, Artificial
  Synthetic oligonucleotide
acaaccatcccgagaacgcagccgttaccagcatggcaaacagtccccct

SEQ ID NO: 145832 - DNA, 50 bp, Artificial
  Synthetic oligonucleotide
acaaggccattggctggctccggcctttcgaagtggcgatcacgcgaacc

SEQ ID NO: 145833 - DNA, 54 bp, Artificial
  Synthetic oligonucleotide
ttcccaatgtccgaaaaattcgcccggtaggcattccccaaatccggcaagcca

SEQ ID NO: 145834 - DNA, 55 bp, Artificial
  Synthetic oligonucleotide
cgcccaataaccgttacctacgtgactgtgatgcctcagcctgcgagaactggtt

SEQ ID NO: 145835 - DNA, 50 bp, Artificial
  Synthetic oligonucleotide
acaaggcggttgccattacacccttgcgacatgaaggccccttgcccggg

SEQ ID NO: 145836 - DNA, 50 bp, Artificial
  Synthetic oligonucleotide
gcgttacgttcgactgggggcagcccagagcgccatccgctgacattcaa

SEQ ID NO: 145837 - DNA, 50 bp, Artificial
  Synthetic oligonucleotide
aagctcaggcctctcgctggattaacgccatgcaacacacaacggtgccc

SEQ ID NO: 145838 - DNA, 50 bp, Artificial
  Synthetic oligonucleotide
aaggcccaaaaagctcaggtcaacattcggtagccccgcccagtccagcg

SEQ ID NO: 145839 - DNA, 50 bp, Artificial
  Synthetic oligonucleotide
aaggccgttccaggtgctaccgacaccggcgcgggttacccagatggcgg

SEQ ID NO: 145840 - DNA, 50 bp, Artificial
  Synthetic oligonucleotide
aaggcggcttctagccctgctcgtgggaaatcgagcgtaactcccccacg

SEQ ID NO: 145841 - DNA, 50 bp, Artificial
  Synthetic oligonucleotide
aagggacgcccaaagcgcctcatctggtcaggaacagcacggtctatgga

SEQ ID NO: 145842 - DNA, 50 bp, Artificial
  Synthetic oligonucleotide
aagggccaacggcccgcatgactacggcacagcgttgaagctcacaccag

SEQ ID NO: 145843 - DNA, 50 bp, Artificial
  Synthetic oligonucleotide
aagggctaggcgggcactggaacaaatacgcaaacaggtggtcaggcggg

SEQ ID NO: 145844 - DNA, 50 bp, Artificial
  Synthetic oligonucleotide
aagtacttctcaggctgatgggcttatacagttacgtgcgcacaacccat

SEQ ID NO: 145845 - DNA, 55 bp, Artificial
  Synthetic oligonucleotide
gcccatcggagcaagacgagaatgcgtccgatatttctgtgcccaacactaatag

SEQ ID NO: 145846 - DNA, 50 bp, Artificial
  Synthetic oligonucleotide
aagtatcactgggccgccggaatgggatatggcgcagaattcccggaggg

SEQ ID NO: 145847 - DNA, 50 bp, Artificial
  Synthetic oligonucleotide
aagtcgcgtagggcagacagttttgcgggcgcgaataagtgaccgcatgc

SEQ ID NO: 145848 - DNA, 50 bp, Artificial
  Synthetic oligonucleotide
aatacgcgcagttcccagcgacctccacgtttcagcggataccgccagag

SEQ ID NO: 145849 - DNA, 50 bp, Artificial
  Synthetic oligonucleotide
aatatacgcaggtgccatgaccgatgccgcacctacggctaagcccccta

SEQ ID NO: 145850 - DNA, 50 bp, Artificial
  Synthetic oligonucleotide
aatccggcgggattggggcagtatggccttgcctgtaagcgcttggttga

SEQ ID NO: 145851 - DNA, 50 bp, Artificial
  Synthetic oligonucleotide
aatccggggccaacgcgtctcgcacttgcagcatttgacgacgtgacgta

SEQ ID NO: 145852 - DNA, 50 bp, Artificial
  Synthetic oligonucleotide
aatcgcgttacgcatcaacccccatcgcttgatccaccgcaggcgagaca

SEQ ID NO: 145853 - DNA, 50 bp, Artificial
  Synthetic oligonucleotide
aatgaactgagcgggcccgactggcaagccccagcgctgattatgcagaa

SEQ ID NO: 145854 - DNA, 50 bp, Artificial
  Synthetic oligonucleotide
aatgccgtccctgctctcgcgccatccatccccggtgtagctgctgtata

SEQ ID NO: 145855 - DNA, 50 bp, Artificial
  Synthetic oligonucleotide
aatgcctctgccagggccataaagccaaaaccctctgccagcgataccgc

SEQ ID NO: 145856 - DNA, 55 bp, Artificial
  Synthetic oligonucleotide
gccccgcagaccaaatagtgggtgatttatgccgttatgattatgcgccgtttag

SEQ ID NO: 145857 - DNA, 50 bp, Artificial
  Synthetic oligonucleotide
aaatggtagggcgataggccgccttcccccgtgtttacccagcagcccgc

SEQ ID NO: 145858 - DNA, 50 bp, Artificial
  Synthetic oligonucleotide
aacaagtagaatggccagcgcaaaccacacgccgtcccacccaagctcaa

SEQ ID NO: 145859 - DNA, 50 bp, Artificial
  Synthetic oligonucleotide
aacaatgctgtgcctgtagcagttgcgatgagtttaagtagttctctgcg

SEQ ID NO: 145860 - DNA, 50 bp, Artificial
  Synthetic oligonucleotide
aacaccgtaaccaattggcgcgtggtacgcatgcccaaccggataacggc

SEQ ID NO: 145861 - DNA, 50 bp, Artificial
  Synthetic oligonucleotide
aacagaccgtcgtcggtcaatcgggagaggatcagcccctcgcgttggat

SEQ ID NO: 145862 - DNA, 50 bp, Artificial
  Synthetic oligonucleotide
aacatagcgacgccactcgggttgatctccgggcacatcaggaggacgga

SEQ ID NO: 145863 - DNA, 50 bp, Artificial
  Synthetic oligonucleotide
aacatgtgcgcaaggcgagtgagttcttcgccgctgtgaccgtgttgtgg

SEQ ID NO: 145864 - DNA, 50 bp, Artificial
  Synthetic oligonucleotide
aaccaagccgtgtatgttgcggatgcttcgcgtgcagttggtgtcgcctc

SEQ ID NO: 145865 - DNA, 50 bp, Artificial
  Synthetic oligonucleotide
aaccaattggcgcgtggtacgcatgcccaaccggataacggcttcgcgaa

SEQ ID NO: 145866 - DNA, 50 bp, Artificial
  Synthetic oligonucleotide
aaccaggtagcaccggattcttggttccagtgctcgatagagccgcccgg

SEQ ID NO: 145867 - DNA, 55 bp, Artificial
  Synthetic oligonucleotide
gcccgagtcagtgctgcaggttggtacgacgatgcctacaaggatcgtactgtgg

SEQ ID NO: 145868 - DNA, 50 bp, Artificial
  Synthetic oligonucleotide
aacccagactttctcgtcatgcacacccccacggtacctgtccgccagga

SEQ ID NO: 145869 - DNA, 50 bp, Artificial
  Synthetic oligonucleotide
aacccgccctcgagcggcaatgttttcggacgcgtttctagagcgagcag

SEQ ID NO: 145870 - DNA, 50 bp, Artificial
  Synthetic oligonucleotide
aacccggccattggtcgccgtgtagtcccaccaacacgacccatgtgaga

SEQ ID NO: 145871 - DNA, 50 bp, Artificial
  Synthetic oligonucleotide
aacccgggccggcacaccttgcgatccccctggatgtaatgcgccatcgg

SEQ ID NO: 145872 - DNA, 50 bp, Artificial
  Synthetic oligonucleotide
aaccctttaatgccggctcacccgcagggtatggtgatacagccgcagcg

SEQ ID NO: 145873 - DNA, 50 bp, Artificial
  Synthetic oligonucleotide
aaccgcaaacgtactgttgagccgctctgacaccttggggcgaccgaggg

SEQ ID NO: 145874 - DNA, 50 bp, Artificial
  Synthetic oligonucleotide
aaccggagggggcgacaatgagcgattctcggcttggggcgacgaaatag

SEQ ID NO: 145875 - DNA, 50 bp, Artificial
  Synthetic oligonucleotide
aaaaccggacgctcgccacgaggcatcatactggccaggataccagccga

SEQ ID NO: 145876 - DNA, 50 bp, Artificial
  Synthetic oligonucleotide
aaaatttgcgtgaggctgtgtgcgggggattgatgggtcaggagctccgg

SEQ ID NO: 145877 - DNA, 50 bp, Artificial
  Synthetic oligonucleotide
aaacagggtttcagtggcgctccgatgcagggggtgtttgagggccagcc

SEQ ID NO: 145878 - DNA, 55 bp, Artificial
  Synthetic oligonucleotide
gccgatatcgcaaaccaatacgaatattactcaacccgctttgacggtcatactt

SEQ ID NO: 145879 - DNA, 50 bp, Artificial
  Synthetic oligonucleotide
aaacccggagccggggattttagtactggaccagagcaaccgcacgccat

SEQ ID NO: 145880 - DNA, 50 bp, Artificial
  Synthetic oligonucleotide
aaacctattggacagccccctacccagtgcacggtggcgtaagcacacct

SEQ ID NO: 145881 - DNA, 50 bp, Artificial
  Synthetic oligonucleotide
aaacgcggtggtattccgcttcagctacctgcctattgcggccattccgc

SEQ ID NO: 145882 - DNA, 50 bp, Artificial
  Synthetic oligonucleotide
aaacgggtcagacacgatgcacgttctggcctcggatggggtgtcgccca

SEQ ID NO: 145883 - DNA, 50 bp, Artificial
  Synthetic oligonucleotide
aaacgtgccatcccggcgtgacagtgcgtagctgccaagcacaattggcg

SEQ ID NO: 145884 - DNA, 50 bp, Artificial
  Synthetic oligonucleotide
aaagcgcagtggtgttgtaacctctagcccacccgcctcgctcaccaact

SEQ ID NO: 145885 - DNA, 50 bp, Artificial
  Synthetic oligonucleotide
aaagcgcgcagtgccgagttgacgcgaatgagtcgctggatcatcccact

SEQ ID NO: 145886 - DNA, 50 bp, Artificial
  Synthetic oligonucleotide
aaagctaccgggccacccaatgcccgacacttgaaggctggtaaacgccc

SEQ ID NO: 145887 - DNA, 50 bp, Artificial
  Synthetic oligonucleotide
aaagctgctcgcgttccatctgagccatcgcaagtgcgcgataggcctct

SEQ ID NO: 145888 - DNA, 50 bp, Artificial
  Synthetic oligonucleotide
aaaggctaaccgccacccgtgcgcgtgtgactttagtagagggccgctac

SEQ ID NO: 145889 - DNA, 55 bp, Artificial
  Synthetic oligonucleotide
gccgcaggtatagtggttctacatcaaggtgacacaacaaagagtacggacattt

SEQ ID NO: 145890 - DNA, 50 bp, Artificial
  Synthetic oligonucleotide
aaagttgcccacgctgctcctagcacgcccatagcgtcgataccgagtcc

SEQ ID NO: 145891 - DNA, 50 bp, Artificial
  Synthetic oligonucleotide
aaatcgtccccaagcccacgtttgagacccattccgggtacgccgaacgc

SEQ ID NO: 145892 - DNA, 50 bp, Artificial
  Synthetic oligonucleotide
aaatgcccagtgcgcttgccgcgtcacctttccgaccccgtgactgcata

SEQ ID NO: 145893 - DNA, 50 bp, Artificial
  Synthetic oligonucleotide
aaatgcgtagggccacaaccatagcaggcttacgtagcgcgcccgctgta

SEQ ID NO: 145894 - DNA, 50 bp, Artificial
  Synthetic oligonucleotide
aacgccggcttgagtgcgcagacgttgtagccactcatgacgccaactca

SEQ ID NO: 145895 - DNA, 50 bp, Artificial
  Synthetic oligonucleotide
aacgcctgcccacggcgccaggcctcctgaacaacgttgttttgacagac

SEQ ID NO: 145896 - DNA, 50 bp, Artificial
  Synthetic oligonucleotide
aacgcggggagttggcgaacgacccagtccatggctacgctaagttcgac

SEQ ID NO: 145897 - DNA, 50 bp, Artificial
  Synthetic oligonucleotide
aacgctggcgtcataagcccgcccaagaggacacctgcccgcttagcgtg

SEQ ID NO: 145898 - DNA, 50 bp, Artificial
  Synthetic oligonucleotide
aacggcccgagatacagcttcgggttctgtcagtggcgcccaatgggttg

SEQ ID NO: 145899 - DNA, 50 bp, Artificial
  Synthetic oligonucleotide
aacgggactccaggccgacttacccgtgacctctccgctttggtaggcat

SEQ ID NO: 145900 - DNA, 55 bp, Artificial
  Synthetic oligonucleotide
gccgtagtttgttgaacaggtggtgtagctggtttagggccatatgcgtcctgat

SEQ ID NO: 145901 - DNA, 50 bp, Artificial
  Synthetic oligonucleotide
taccaaacggcgtggctgcgttatccaagcccagcacgttcgcagacatg

SEQ ID NO: 145902 - DNA, 50 bp, Artificial
  Synthetic oligonucleotide
aacgggcgtcgacctgaggactggcttgctttcaatcccacgacgcggct

SEQ ID NO: 145903 - DNA, 50 bp, Artificial
  Synthetic oligonucleotide
aacggtccatgccaggtaccaccgcctttcttcgtgcgccctcttcgaaa

SEQ ID NO: 145904 - DNA, 50 bp, Artificial
  Synthetic oligonucleotide
aacgtcctggccagtgccgtcagtcagcgggggtagtgttttgggaacct

SEQ ID NO: 145905 - DNA, 50 bp, Artificial
  Synthetic oligonucleotide
taaagcgttcagccataccgctgagtcctttaggccccgcacctcgcttt

SEQ ID NO: 145906 - DNA, 50 bp, Artificial
  Synthetic oligonucleotide
aacgtgggccgagggtgccaaaaacactgctggtacatggaagcgcgcta

SEQ ID NO: 145907 - DNA, 50 bp, Artificial
  Synthetic oligonucleotide
aacgtgggtacatcgggatagccactggccgcgggatgattcaccgtggt

SEQ ID NO: 145908 - DNA, 50 bp, Artificial
  Synthetic oligonucleotide
gttgctgtggtctcgaatgcttcgcgaaagcttctgggggttaggcggcg

SEQ ID NO: 145909 - DNA, 50 bp, Artificial
  Synthetic oligonucleotide
aacgttattgctagcgccaattgtgccgcacgcctgtcacgcactgtggc

SEQ ID NO: 145910 - DNA, 50 bp, Artificial
  Synthetic oligonucleotide
aactcaaacggaagcggctcggcagccatttgcttaggtgcacgagcgca

SEQ ID NO: 145911 - DNA, 55 bp, Artificial
  Synthetic oligonucleotide
ccgagaacatactaagaggtgcaaactttaaccatatagtggcattgcgatctgc

SEQ ID NO: 145912 - DNA, 50 bp, Artificial
  Synthetic oligonucleotide
aactggcgaccatagacgattcgccctcgaatgcggtaagggtgccccaa

SEQ ID NO: 145913 - DNA, 50 bp, Artificial
  Synthetic oligonucleotide
aaccggctgacactcaggcaggccacactggcaaggtcgctcaccgttat

SEQ ID NO: 145914 - DNA, 50 bp, Artificial
  Synthetic oligonucleotide
aaccgtttcgatctccccggaactcagccatccgcgggactgctcaatga

SEQ ID NO: 145915 - DNA, 50 bp, Artificial
  Synthetic oligonucleotide
tcgccagcgaattagtggaccgagtgcgcaatgttccgggaaccgagcta

SEQ ID NO: 145916 - DNA, 50 bp, Artificial
  Synthetic oligonucleotide
aacctagcccctagctgccaaaactcgcgccgacgagtgtctaaccagcc

SEQ ID NO: 145917 - DNA, 50 bp, Artificial
  Synthetic oligonucleotide
aacctccgacgaagtgccaggcccgaactgggacccgtattcagaacccg

SEQ ID NO: 145918 - DNA, 50 bp, Artificial
  Synthetic oligonucleotide
aacctggcgctttcagtgcagtcacgggtgaaagggctgacaccagacga

SEQ ID NO: 145919 - DNA, 50 bp, Artificial
  Synthetic oligonucleotide
aacctggcggcgcgggatctgttgccggacgaggttgcaaataaccgtgc

SEQ ID NO: 145920 - DNA, 50 bp, Artificial
  Synthetic oligonucleotide
aacgaaaccgttgcgggactggaaagcgggggcattctggttgaacaccc

SEQ ID NO: 145921 - DNA, 50 bp, Artificial
  Synthetic oligonucleotide
tccccatgtaaaactgtcgttgctagtgcaaccgcccgcaggcgtcaacc

SEQ ID NO: 145922 - DNA, 55 bp, Artificial
  Synthetic oligonucleotide
gcctgaatgctgcttagcactagacgtttcgccatcgggcgttttgggcgtgacg

SEQ ID NO: 145923 - DNA, 50 bp, Artificial
  Synthetic oligonucleotide
aacgaggacttggggagcgcgggctaggagccctattagcaaattcccgc

SEQ ID NO: 145924 - DNA, 50 bp, Artificial
  Synthetic oligonucleotide
aacgcaccgcccccagagcggagttatcgaacgctgtattcccgctgcta

SEQ ID NO: 145925 - DNA, 50 bp, Artificial
  Synthetic oligonucleotide
aacgcacggttctcgggccagccttctcaatgctctcgagccacgattga

SEQ ID NO: 145926 - DNA, 50 bp, Artificial
  Synthetic oligonucleotide
aacgccagtaaagggtctatcgtcgggctccaaacacccaatggcccccg

SEQ ID NO: 145927 - DNA, 50 bp, Artificial
  Synthetic oligonucleotide
tcaaggcgaatcgcgaggaccattgctcagggcgtttctgggagtcacga

SEQ ID NO: 145928 - DNA, 50 bp, Artificial
  Synthetic oligonucleotide
aacgccccgtctggggcctcattgaccgagaggacaggacatggaactcg

SEQ ID NO: 145929 - DNA, 50 bp, Artificial
  Synthetic oligonucleotide
tcaacaagcgctcgacgtggctgtattagaagtcggcctaggtggccgcc

SEQ ID NO: 145930 - DNA, 50 bp, Artificial
  Synthetic oligonucleotide
tattgcagtgcagctcatgcccacctaactgtgccgttcggcaacgctct

SEQ ID NO: 145931 - DNA, 50 bp, Artificial
  Synthetic oligonucleotide
caacgtatcagcagcgggttgggtgaacatcatgccaccgcggcggttaa

SEQ ID NO: 145932 - DNA, 50 bp, Artificial
  Synthetic oligonucleotide
caacccgtcatggcatccgggcattgttggattggtggcttcgggcatta

SEQ ID NO: 145933 - DNA, 55 bp, Artificial
  Synthetic oligonucleotide
gcctggcgccaaccgctgctagacatacccgctgttgcgattacctcgttaagcg

SEQ ID NO: 145934 - DNA, 50 bp, Artificial
  Synthetic oligonucleotide
attgcgcgaagcgactaaaggcttcttgggcgacgtcttctggctcgggc

SEQ ID NO: 145935 - DNA, 50 bp, Artificial
  Synthetic oligonucleotide
atgttagggatgccgtatgctggggcatattgcgcgtctaaggcggcggt

SEQ ID NO: 145936 - DNA, 50 bp, Artificial
  Synthetic oligonucleotide
atgtgaaatctggcgccgctgaggcaggttttgtcgcgctcagccaagta

SEQ ID NO: 145937 - DNA, 50 bp, Artificial
  Synthetic oligonucleotide
atgtctgtaagcgcagcccccaagctggctaagctgactgtcgggcttgg

SEQ ID NO: 145938 - DNA, 50 bp, Artificial
  Synthetic oligonucleotide
atgggcgctaccgtcattggtacagcaacgagcgaaaatggagccgctgc

SEQ ID NO: 145939 - DNA, 50 bp, Artificial
  Synthetic oligonucleotide
atgctgggcagagtgcctgccgctatcactcagtctgcgcgcccattgct

SEQ ID NO: 145940 - DNA, 50 bp, Artificial
  Synthetic oligonucleotide
atgcccttaggcgtacatgggcgtagtgctggtatgcgctgggccaagcg

SEQ ID NO: 145941 - DNA, 50 bp, Artificial
  Synthetic oligonucleotide
atgccagccaaatctagcgcagcttcaacgcccgagttcccaccgcctat

SEQ ID NO: 145942 - DNA, 50 bp, Artificial
  Synthetic oligonucleotide
atgagccgctaccggcagaaggagccgcgtttcttgatggtcgtcggttt

SEQ ID NO: 145943 - DNA, 50 bp, Artificial
  Synthetic oligonucleotide
atctgcttcgccccggaaggtgacccaaacgcaaaacctggaacgccgga

SEQ ID NO: 145944 - DNA, 59 bp, Artificial
  Synthetic oligonucleotide
cctaccagcgataccccgatggcggtaaacatccgtttgcattcacgacgcaatcaggc

SEQ ID NO: 145945 - DNA, 55 bp, Artificial
  Synthetic oligonucleotide
cgccaagtttctagaccttgaatggcgtacctgtcgtaagccaaataattgccag

SEQ ID NO: 145946 - DNA, 50 bp, Artificial
  Synthetic oligonucleotide
atcggcctggcgcaaacggctgaaaagggcgcgtacccagaggtaatgtg

SEQ ID NO: 145947 - DNA, 50 bp, Artificial
  Synthetic oligonucleotide
atcgccctgggattgatagctggttaggctgggcccccgctatgcaaata

SEQ ID NO: 145948 - DNA, 50 bp, Artificial
  Synthetic oligonucleotide
atcgccccgcccaagcagggatagctgcgccttcgcggtttacccaacga

SEQ ID NO: 145949 - DNA, 50 bp, Artificial
  Synthetic oligonucleotide
atcagggacccaaagtagttccccgcctgctaatcgggcaccaagtccgc

SEQ ID NO: 145950 - DNA, 50 bp, Artificial
  Synthetic oligonucleotide
agcgtgggcgatgatgcgctaggtcaagtgtggcgctttgaagcgttgga

SEQ ID NO: 145951 - DNA, 50 bp, Artificial
  Synthetic oligonucleotide
agctcaagcagcgacagtgtagagccgtctcctactgagcccaccacgcc

SEQ ID NO: 145952 - DNA, 50 bp, Artificial
  Synthetic oligonucleotide
aggagcgaacgaaaggtgcggtaatctgcttcgccccggaaggtgaccca

SEQ ID NO: 145953 - DNA, 50 bp, Artificial
  Synthetic oligonucleotide
aggcagcagaaacgcggcttatcttacatgtgcagtggcgggcccacatc

SEQ ID NO: 145954 - DNA, 50 bp, Artificial
  Synthetic oligonucleotide
aggcgaatgccggagtgttaacgccaaccaccaaaggctatgggccgctt

SEQ ID NO: 145955 - DNA, 50 bp, Artificial
  Synthetic oligonucleotide
aggcgacctgccgccttgtagctccctgggaaccgaatcacaatctgagg

SEQ ID NO: 145956 - DNA, 55 bp, Artificial
  Synthetic oligonucleotide
gccttctcgccttagtgcttgcggcgtgaattctcggtcgtctggtttgatacta

SEQ ID NO: 145957 - DNA, 50 bp, Artificial
  Synthetic oligonucleotide
aggcggtgcgcagttgctttcgccgcgcaatggagttgtggctagtgctt

SEQ ID NO: 145958 - DNA, 50 bp, Artificial
  Synthetic oligonucleotide
ctgtgagcgcgcaccccttagctgcgccagtgtcgatcagcaccgtattc

SEQ ID NO: 145959 - DNA, 50 bp, Artificial
  Synthetic oligonucleotide
aggtgtggttagcccgctgcttccccacatgaatcatctcggcagtgtct

SEQ ID NO: 145960 - DNA, 50 bp, Artificial
  Synthetic oligonucleotide
agtcggctgacgtagacatggtaggcgctaacagtccgcctgcagggtta

SEQ ID NO: 145961 - DNA, 50 bp, Artificial
  Synthetic oligonucleotide
agtcgtgatgggttgccacgcaggctaactctccgcaagcgtcgctctta

SEQ ID NO: 145962 - DNA, 50 bp, Artificial
  Synthetic oligonucleotide
agtgacgacccgaacactcccgcgcaactcatcacactttggagctgcct

SEQ ID NO: 145963 - DNA, 50 bp, Artificial
  Synthetic oligonucleotide
agtgtcgcgagtgatagtgacttcaccggcctgtttttgccagcgcgcta

SEQ ID NO: 145964 - DNA, 50 bp, Artificial
  Synthetic oligonucleotide
agttctttcgcgtgaccgcgttagcggcagcactcatcgcaaggcccgat

SEQ ID NO: 145965 - DNA, 50 bp, Artificial
  Synthetic oligonucleotide
atactccgttcgggcgcttcaaggcccgcacaaaggcctggtattgggct

SEQ ID NO: 145966 - DNA, 50 bp, Artificial
  Synthetic oligonucleotide
atcaacgttaatttgccaaacggcattgcgctcacggggtaggtcttcta

SEQ ID NO: 145967 - DNA, 55 bp, Artificial
  Synthetic oligonucleotide
gccttctggtggggtaatccagtggtaggcgtagctcacatctaggtaatctgag

SEQ ID NO: 145968 - DNA, 50 bp, Artificial
  Synthetic oligonucleotide
cgacaccccttcggccaggccttaatgcaaatgcgcaaggatgccggtat

SEQ ID NO: 145969 - DNA, 50 bp, Artificial
  Synthetic oligonucleotide
cgaggcccgaactcacagacggaggatgttttgctggcctctcgcggtca

SEQ ID NO: 145970 - DNA, 50 bp, Artificial
  Synthetic oligonucleotide
cgaagtgcacctaggctcgtggaagcgccctgacgcagacagtggtcagc

SEQ ID NO: 145971 - DNA, 50 bp, Artificial
  Synthetic oligonucleotide
cctccggagcaccagacataccaccgcccaaggcccgcatattatccctt

SEQ ID NO: 145972 - DNA, 50 bp, Artificial
  Synthetic oligonucleotide
ccgtgtcccgcattcagtccctgagcatcacgaaagcctccgagggcgca

SEQ ID NO: 145973 - DNA, 50 bp, Artificial
  Synthetic oligonucleotide
ccgtgcctaccacgttaacagccgagaacgggtcgatgatgccccgtctt

SEQ ID NO: 145974 - DNA, 50 bp, Artificial
  Synthetic oligonucleotide
ccgggagaccagttcaagccagccgttcccctggaggttcaggcgggaat

SEQ ID NO: 145975 - DNA, 50 bp, Artificial
  Synthetic oligonucleotide
ccgctttggcatactggcgccatgaaagcccctcttcgctccagaatcgg

SEQ ID NO: 145976 - DNA, 50 bp, Artificial
  Synthetic oligonucleotide
ccgccattagatgcctgtcgataatcgggttggctcgcgcaccccgccat

SEQ ID NO: 145977 - DNA, 50 bp, Artificial
  Synthetic oligonucleotide
ccgccacttgtttctgtgccgcgctgcattcgggtccaaccctctctacc

SEQ ID NO: 145978 - DNA, 55 bp, Artificial
  Synthetic oligonucleotide
cgcaggcgtccgcatatcccagggatacatcctgccacccaacgcggaaccagaa

SEQ ID NO: 145979 - DNA, 50 bp, Artificial
  Synthetic oligonucleotide
ccgcaagcattcgaaccctcgccgtggccagaggtatttctcccgggaaa

SEQ ID NO: 145980 - DNA, 50 bp, Artificial
  Synthetic oligonucleotide
ccgagttcgcctgcccttgcccgctgccataccgataatcgcgcggcgtc

SEQ ID NO: 145981 - DNA, 50 bp, Artificial
  Synthetic oligonucleotide
ccgacgcttgcacggcctaaggagacgtacgccgttcaaaattgtgcggg

SEQ ID NO: 145982 - DNA, 50 bp, Artificial
  Synthetic oligonucleotide
cgcgaaggaccagagcacgagcccaagcagtgccaacgcaatagcgaaaa

SEQ ID NO: 145983 - DNA, 50 bp, Artificial
  Synthetic oligonucleotide
cgcgcagtgtccggcaagaacagcatgacagctcacgtagttggcgccgg

SEQ ID NO: 145984 - DNA, 50 bp, Artificial
  Synthetic oligonucleotide
cgcgcctgagttccattacggcgacttagagctcgcggatgcgacaccca

SEQ ID NO: 145985 - DNA, 50 bp, Artificial
  Synthetic oligonucleotide
caccagcacgctaagcttgcgatcacgtggaatgccctcccaaacgacga

SEQ ID NO: 145986 - DNA, 50 bp, Artificial
  Synthetic oligonucleotide
cacgaacactttggcgcctgcgactttagcgaactgagcggtgcctagcc

SEQ ID NO: 145987 - DNA, 50 bp, Artificial
  Synthetic oligonucleotide
cactcattgcccgttgtgtgcttcgcgccgaaagccccttgtcgtggcgg

SEQ ID NO: 145988 - DNA, 50 bp, Artificial
  Synthetic oligonucleotide
cagactcccgtgggagcgccatctgacgataggtggcttggtcggatcgt

SEQ ID NO: 145989 - DNA, 55 bp, Artificial
  Synthetic oligonucleotide
gcgaccaataccgtgatagcttcgacttttcagggatcgaacaagacgctcgttt

SEQ ID NO: 145990 - DNA, 50 bp, Artificial
  Synthetic oligonucleotide
cagcccacataaaggtggcgtgagaaacgcgcagcaacttggtcgctgcc

SEQ ID NO: 145991 - DNA, 50 bp, Artificial
  Synthetic oligonucleotide
cagctgcaggcgtgccaaccctcgacggttttgggccttacggtgatggc

SEQ ID NO: 145992 - DNA, 50 bp, Artificial
  Synthetic oligonucleotide
cagttcaagccagccgttcccctggaggttcaggcgggaatccgggatta

SEQ ID NO: 145993 - DNA, 50 bp, Artificial
  Synthetic oligonucleotide
catcgggggtggcttgctgagatagcagcacgcggtggctagattcacgc

SEQ ID NO: 145994 - DNA, 50 bp, Artificial
  Synthetic oligonucleotide
ccaacccggcggtacatttggacccgtttccgcagccacgttagccactc

SEQ ID NO: 145995 - DNA, 50 bp, Artificial
  Synthetic oligonucleotide
ccaacggggttagcacaacaacaaaggtagcgcataggcccgccggcaca

SEQ ID NO: 145996 - DNA, 50 bp, Artificial
  Synthetic oligonucleotide
ccagttcagctgcagccctagttggcggtggcagttatccaaaaccggga

SEQ ID NO: 145997 - DNA, 50 bp, Artificial
  Synthetic oligonucleotide
ccatcctcaaaccgggagaccagttcaagccagccgttcccctggaggtt

SEQ ID NO: 145998 - DNA, 50 bp, Artificial
  Synthetic oligonucleotide
cccctcgtccgaagcactaacaaaggtcgccccgcttggtattgcagccg

SEQ ID NO: 145999 - DNA, 50 bp, Artificial
  Synthetic oligonucleotide
cccgctatcgcggtaacgccgttatcattgacgtcccccattgccgcctc

SEQ ID NO: 146000 - DNA, 55 bp, Artificial
  Synthetic oligonucleotide
gcgatgtaccccaagccgattcgttagctgcttgcgccaataccagtgcgggcgg

SEQ ID NO: 146001 - DNA, 50 bp, Artificial
  Synthetic oligonucleotide
cgcgggcacggcaactttcactgagccgtcaggttggatcggcgtatacc

SEQ ID NO: 146002 - DNA, 50 bp, Artificial
  Synthetic oligonucleotide
ccgaaaccgatatgtggtagtccgatccttgcgaaccgggtaggtgaagt

SEQ ID NO: 146003 - DNA, 50 bp, Artificial
  Synthetic oligonucleotide
acccgctcgactcggctgaatgtgcggtcgggcaccagtattgcctccgt

SEQ ID NO: 146004 - DNA, 50 bp, Artificial
  Synthetic oligonucleotide
acccctgcgggagtccccgcaaatacgctacgcccgtggaagctttcact

SEQ ID NO: 146005 - DNA, 50 bp, Artificial
  Synthetic oligonucleotide
gccccactcggagcagggagcccgacaagtcttcaaacgggctatcactt

SEQ ID NO: 146006 - DNA, 50 bp, Artificial
  Synthetic oligonucleotide
gccccgacagaatccgctggaattggacgcgtaccccgtcgacagttcgc

SEQ ID NO: 146007 - DNA, 50 bp, Artificial
  Synthetic oligonucleotide
accccgtcacgcagcgcgtagtgaccgcacaagagaacggcaacgaagcg

SEQ ID NO: 146008 - DNA, 50 bp, Artificial
  Synthetic oligonucleotide
gcccctatggacgctttcagcctgaaaatggccgcgctaaggctcagcaa

SEQ ID NO: 146009 - DNA, 50 bp, Artificial
  Synthetic oligonucleotide
accccctacatgcgtgcggtcagacagatcctgggcaacgcgggtttcga

SEQ ID NO: 146010 - DNA, 50 bp, Artificial
  Synthetic oligonucleotide
accccaacgcacaagatttccggcgctaccgtgttccgggttggtccagt

SEQ ID NO: 146011 - DNA, 55 bp, Artificial
  Synthetic oligonucleotide
cccgcgctatcagtaatggtaagggtaacggtactgccctgcgtcgcgtcagtgg

SEQ ID NO: 146012 - DNA, 50 bp, Artificial
  Synthetic oligonucleotide
acccatcgcttttggcgcctattgctgcgagccggcctgttatctgtcgc

SEQ ID NO: 146013 - DNA, 50 bp, Artificial
  Synthetic oligonucleotide
accatgaagacccatcgcttttggcgcctattgctgcgagccggcctgtt

SEQ ID NO: 146014 - DNA, 50 bp, Artificial
  Synthetic oligonucleotide
accagggctgcgccaaagcaggcttgtgttacccgccccagacccgggat

SEQ ID NO: 146015 - DNA, 50 bp, Artificial
  Synthetic oligonucleotide
accaggcaggctcgccaggtgtccaggtgcgaacctgttccgtccacact

SEQ ID NO: 146016 - DNA, 50 bp, Artificial
  Synthetic oligonucleotide
accacgggccacgcacaggtgattcgcagaggccgtcccgcaagagtagg

SEQ ID NO: 146017 - DNA, 50 bp, Artificial
  Synthetic oligonucleotide
accacggcgtgcgacgttaggtccaccgcgaagctgctataaccgttggg

SEQ ID NO: 146018 - DNA, 50 bp, Artificial
  Synthetic oligonucleotide
accaccgacgcactgcacgcaatcagcagcatctgaacgggcgcgagctc

SEQ ID NO: 146019 - DNA, 50 bp, Artificial
  Synthetic oligonucleotide
gcgaaacgaatccaagtggcacgtcgctatcgccaccaacgcacgcacac

SEQ ID NO: 146020 - DNA, 50 bp, Artificial
  Synthetic oligonucleotide
acacacgcgcgcacaaacgcctgccaatagcttgagcataacggcacaga

SEQ ID NO: 146021 - DNA, 50 bp, Artificial
  Synthetic oligonucleotide
acacagacatagccgcgagggcttctgcaccgtgcaagtgcgaaaccgta

SEQ ID NO: 146022 - DNA, 55 bp, Artificial
  Synthetic oligonucleotide
gatcggtagtgggagtgcaatcactggttacttttcagcgttaattccgacacat

SEQ ID NO: 146023 - DNA, 50 bp, Artificial
  Synthetic oligonucleotide
acaccggacaacgcccgcaacagaaacagcctggaagtgcgagtcatcgc

SEQ ID NO: 146024 - DNA, 50 bp, Artificial
  Synthetic oligonucleotide
acaccgtaggcgacacacccgaaggcattgtgttcccgaaccgcgacgta

SEQ ID NO: 146025 - DNA, 50 bp, Artificial
  Synthetic oligonucleotide
acacgttggtaacacagcgaccgcacaaatcggggaggtctgcgtggcta

SEQ ID NO: 146026 - DNA, 50 bp, Artificial
  Synthetic oligonucleotide
acagaccagcacggctgtcatcagtgttcctcgcaaccagggcagtcgcc

SEQ ID NO: 146027 - DNA, 50 bp, Artificial
  Synthetic oligonucleotide
gcggaccatcctgagctggcgactgaaccgattcaatgggcgcatccatg

SEQ ID NO: 146028 - DNA, 50 bp, Artificial
  Synthetic oligonucleotide
acagcgccagtttccttcaggcctgcagccaccacatagagggtcgcgat

SEQ ID NO: 146029 - DNA, 50 bp, Artificial
  Synthetic oligonucleotide
acagctcacccgctgtgcccacacgaattgctccgtggcgttcgacgcta

SEQ ID NO: 146030 - DNA, 50 bp, Artificial
  Synthetic oligonucleotide
acaggacatcctcctgatcccgccttgcagtcagactggcccgccgtgaa

SEQ ID NO: 146031 - DNA, 50 bp, Artificial
  Synthetic oligonucleotide
gcgctaccggtgtgccccgacagaatccgctggaattggacgcgtacccc

SEQ ID NO: 146032 - DNA, 50 bp, Artificial
  Synthetic oligonucleotide
acaggccaccggccggcgaatcccgccatgtttgcgctaacctccgatgc

SEQ ID NO: 146033 - DNA, 55 bp, Artificial
  Synthetic oligonucleotide
acgctgtgaacattttctgtagagcgtcaaacagttctaaccctagtggttcggc

SEQ ID NO: 146034 - DNA, 50 bp, Artificial
  Synthetic oligonucleotide
acagggttgctaccgctgtttgtcccgacttgttggcaacgcgccaggcc

SEQ ID NO: 146035 - DNA, 50 bp, Artificial
  Synthetic oligonucleotide
acaggttcgggagaggcgtcgggttgcttttgcgcaccgaacaacggcat

SEQ ID NO: 146036 - DNA, 50 bp, Artificial
  Synthetic oligonucleotide
acaggtttaccgatgacggccctggggtcttccaacccgagcagatgggc

SEQ ID NO: 146037 - DNA, 50 bp, Artificial
  Synthetic oligonucleotide
acagtggccgtggcaaggctatggttcggaaagtaggctaccgggtgcgc

SEQ ID NO: 146038 - DNA, 50 bp, Artificial
  Synthetic oligonucleotide
accaacggcaaaagccgcctcacgaaccgccctcacgcgaaatccgttat

SEQ ID NO: 146039 - DNA, 50 bp, Artificial
  Synthetic oligonucleotide
acggcctccgcgcacagtgcgaaccacctcccctaagcgccaagcaacta

SEQ ID NO: 146040 - DNA, 50 bp, Artificial
  Synthetic oligonucleotide
acggcggacgcttttacgggcctactcgcctaagggaggcgctgtaccga

SEQ ID NO: 146041 - DNA, 50 bp, Artificial
  Synthetic oligonucleotide
gagtgccccggcggttacgagacagccgttcactccatggccatccagat

SEQ ID NO: 146042 - DNA, 50 bp, Artificial
  Synthetic oligonucleotide
acggcggtagcgtggtcgattaccactgacgggcgcttgccaggccccct

SEQ ID NO: 146043 - DNA, 50 bp, Artificial
  Synthetic oligonucleotide
acgtccatcgcgcgctctagcaagcgctgatcgccgtctagcttggcatg

SEQ ID NO: 146044 - DNA, 55 bp, Artificial
  Synthetic oligonucleotide
cgcgtatctcgaagagcccagctcctattgatttggtgtgcggttccccaagatt

SEQ ID NO: 146045 - DNA, 50 bp, Artificial
  Synthetic oligonucleotide
actacgcgtgtggcatacgacggtgcctcaggtttgtcggctgcagagga

SEQ ID NO: 146046 - DNA, 50 bp, Artificial
  Synthetic oligonucleotide
agaccgatgttgcgcacaggggtaccgcgtttagccgtaaagtttgcgcc

SEQ ID NO: 146047 - DNA, 50 bp, Artificial
  Synthetic oligonucleotide
agcaatgtcaggcagcacttgagtgcgccgtagcagcgcgtcaatggtta

SEQ ID NO: 146048 - DNA, 50 bp, Artificial
  Synthetic oligonucleotide
agcaattagcttaccgtccggggagatgctcgggccgttgtcagggccta

SEQ ID NO: 146049 - DNA, 50 bp, Artificial
  Synthetic oligonucleotide
agcacgctaccctgccgttgagctactaaccgccgtcatgtctgctgtcg

SEQ ID NO: 146050 - DNA, 50 bp, Artificial
  Synthetic oligonucleotide
gactgggctccaacgcaatgctcgatgggaacaacatggcggcgggtaat

SEQ ID NO: 146051 - DNA, 50 bp, Artificial
  Synthetic oligonucleotide
agccataactttcccgcctttccggtttggaagctcagccctcgggggcg

SEQ ID NO: 146052 - DNA, 50 bp, Artificial
  Synthetic oligonucleotide
agcccctagcccgccaataagtgcataagcatgggcatacggccattgga

SEQ ID NO: 146053 - DNA, 50 bp, Artificial
  Synthetic oligonucleotide
agcgacagtgtagagccgtctcctactgagcccaccacgccggtagtgga

SEQ ID NO: 146054 - DNA, 50 bp, Artificial
  Synthetic oligonucleotide
agcgagtacgggcgtaccacttggggcagcactaaaggtcgcattcggaa

SEQ ID NO: 146055 - DNA, 52 bp, Artificial
  Synthetic oligonucleotide
cgagtcgcaaagcccctgtttaaggctcgggtgtgtcgttcgtacgggggta

SEQ ID NO: 146056 - DNA, 55 bp, Artificial
  Synthetic oligonucleotide
gattgacacgtataggaaacgcaagttaagtcatccgagggactggtattttgac

SEQ ID NO: 146057 - DNA, 50 bp, Artificial
  Synthetic oligonucleotide
agcgattctcgctgcccatcgaaaatgcgcaggaagacccactagcggca

SEQ ID NO: 146058 - DNA, 50 bp, Artificial
  Synthetic oligonucleotide
agcgccgtcacgtcccataccggttagcaacacccctacagcatttgccc

SEQ ID NO: 146059 - DNA, 50 bp, Artificial
  Synthetic oligonucleotide
gccaggaccaatcacaacacacgtcgcccaagccagcgcttcctccaagc

SEQ ID NO: 146060 - DNA, 50 bp, Artificial
  Synthetic oligonucleotide
gccaaggacggtctcaagatgtttaggcgccaagccaaaggctggccgca

SEQ ID NO: 146061 - DNA, 50 bp, Artificial
  Synthetic oligonucleotide
acccgggacaaaggcgggagacttcccagagccgggtttaggctcgatgt

SEQ ID NO: 146062 - DNA, 50 bp, Artificial
  Synthetic oligonucleotide
acccgggcaccatccagcgtcacatgacacagctggttcggttgttcgcc

SEQ ID NO: 146063 - DNA, 50 bp, Artificial
  Synthetic oligonucleotide
acccgtcagcgccaactctaacgagcgttgttcgccggagatgtgccgac

SEQ ID NO: 146064 - DNA, 50 bp, Artificial
  Synthetic oligonucleotide
accgagcgggacggatcgctagtcgcatgcactcgcacatcccccaatta

SEQ ID NO: 146065 - DNA, 50 bp, Artificial
  Synthetic oligonucleotide
accgagggcagtggcgtggtaacgagccgagggcacgtacactatgtggt

SEQ ID NO: 146066 - DNA, 50 bp, Artificial
  Synthetic oligonucleotide
accgcaccaattggcacgagtaccaacgcggctaccgtcatgcctaacgc

SEQ ID NO: 146067 - DNA, 55 bp, Artificial
  Synthetic oligonucleotide
acgcaaaacgcgactgctggcacatctaatattaaccttcggggccttggtgttg

SEQ ID NO: 146068 - DNA, 50 bp, Artificial
  Synthetic oligonucleotide
accggacaacccacaccggtctgcgatcgaagcccaacttcgcaaatggg

SEQ ID NO: 146069 - DNA, 50 bp, Artificial
  Synthetic oligonucleotide
accggagtcggagtggtttccccacgacctccctgatggcctgaaacgca

SEQ ID NO: 146070 - DNA, 50 bp, Artificial
  Synthetic oligonucleotide
accgtaccatccggtctctggcgctcgtaggacatcggccgtccctcacg

SEQ ID NO: 146071 - DNA, 50 bp, Artificial
  Synthetic oligonucleotide
accgtagccaagtgggtcgccccaaagttcgctgttgtggtgcagctcgc

SEQ ID NO: 146072 - DNA, 50 bp, Artificial
  Synthetic oligonucleotide
acgcacgctcctgcaacagttgagtgccctgcaccgtaagaagggtgcat

SEQ ID NO: 146073 - DNA, 50 bp, Artificial
  Synthetic oligonucleotide
acgccacctatattggcctcggcaccgcagtaggcgcgcaattgtaccaa

SEQ ID NO: 146074 - DNA, 50 bp, Artificial
  Synthetic oligonucleotide
acgcttccccaggtggttgccataagaaggccccaaaacgcctagggtcg

SEQ ID NO: 146075 - DNA, 50 bp, Artificial
  Synthetic oligonucleotide
acggcccattatgtgaaatctggcgccgctgaggcaggttttgtcgcgct

SEQ ID NO: 146076 - DNA, 50 bp, Artificial
  Synthetic oligonucleotide
acggcccgcatgactacggcacagcgttgaagctcacaccagggcacaca

SEQ ID NO: 146077 - DNA, 55 bp, Artificial
  Synthetic oligonucleotide
gcaacgaaatgttccgctcaattaaagccacctatttccgtattgcgctagactt

SEQ ID NO: 146078 - DNA, 55 bp, Artificial
  Synthetic oligonucleotide
cgcggcaatatgttagctctgtagcccctaccaatttcttactcaccaaccccga

SEQ ID NO: 146079 - DNA, 55 bp, Artificial
  Synthetic oligonucleotide
gcaataacaggtaaacggtagtctatctatgtcaaagcaacgaatcccgctaggc

SEQ ID NO: 146080 - DNA, 55 bp, Artificial
  Synthetic oligonucleotide
gcacgttcaatcccaatacgttctacctcgtcagagctatccctaaggcctgctg

SEQ ID NO: 146081 - DNA, 55 bp, Artificial
  Synthetic oligonucleotide
gcagacggtgtagttatattgtcatccgaactaatggtacacaaggcgcgtatag

SEQ ID NO: 146082 - DNA, 55 bp, Artificial
  Synthetic oligonucleotide
gcagcaggtgcttacggcctgatgaaagctctagatcgtatcaacgctgccgtgt

SEQ ID NO: 146083 - DNA, 55 bp, Artificial
  Synthetic oligonucleotide
gcaggattaaaggtaaactctgcgctcgttaagcaccgtgttgtttaactcggct

SEQ ID NO: 146084 - DNA, 55 bp, Artificial
  Synthetic oligonucleotide
gcagttctggtgtctacggtgctccacgcgtgtttctggaccttcgggaagccgg

SEQ ID NO: 146085 - DNA, 57 bp, Artificial
  Synthetic oligonucleotide
tgcatcaacccatgactgtctactaacggtcgaacacctgaatcaagaccctacggg

SEQ ID NO: 146086 - DNA, 55 bp, Artificial
  Synthetic oligonucleotide
gcatggctttagcgtctgtggtagtcagtcgctcatcacaggtgtcaacggccac

SEQ ID NO: 146087 - DNA, 55 bp, Artificial
  Synthetic oligonucleotide
gcatttgttagagatatcgccgacatcgttacggtgatggacggtggttcgttac

SEQ ID NO: 146088 - DNA, 55 bp, Artificial
  Synthetic oligonucleotide
gccaagatcaagagtttaactttattccaacagccgttgatgtggacgcaggaga

SEQ ID NO: 146089 - DNA, 55 bp, Artificial
  Synthetic oligonucleotide
cgttgttaaggactagagctctgtccatgccgggtctgtctccacgtatctgtgc

SEQ ID NO: 146090 - DNA, 55 bp, Artificial
  Synthetic oligonucleotide
cgttaggtgttggtggaagctgggcgagtaccttgactgcgtttgagcccgtacg

SEQ ID NO: 146091 - DNA, 55 bp, Artificial
  Synthetic oligonucleotide
cgggtgcaagttcaatggttatggtttggtcaggcaagattctggcatgggtact

SEQ ID NO: 146092 - DNA, 51 bp, Artificial
  Synthetic oligonucleotide
cgtgaacgataacctcacgaggtaggcctttgggtaacggtttacgtgtgg

SEQ ID NO: 146093 - DNA, 55 bp, Artificial
  Synthetic oligonucleotide
cgggtgctcaaacgcggctgtccggtattctccgggtgttggatcgggtgcaatc

SEQ ID NO: 146094 - DNA, 55 bp, Artificial
  Synthetic oligonucleotide
attcaaagaacgtttacagcccctagctgcgcaataacgtacggttattacagcg

SEQ ID NO: 146095 - DNA, 55 bp, Artificial
  Synthetic oligonucleotide
cattgggttccatcgatttatcgactcgtatccccagggacttacacatggcacc

SEQ ID NO: 146096 - DNA, 54 bp, Artificial
  Synthetic oligonucleotide
caactggagagcgcaaccgaaaccacggaagtgctttacgaccccttgggctac

SEQ ID NO: 146097 - DNA, 55 bp, Artificial
  Synthetic oligonucleotide
cgtctattgggccatataaggtatcgacttttgacattacacgactcctgcttta

SEQ ID NO: 146098 - DNA, 55 bp, Artificial
  Synthetic oligonucleotide
atttaaagggtacgcaatattaaccattctccgcgctgagtaaactctaattggc

SEQ ID NO: 146099 - DNA, 55 bp, Artificial
  Synthetic oligonucleotide
cattagccgcagcacctgagttattctgaaccgtgtaatttaccgcaacgttgta

SEQ ID NO: 146100 - DNA, 55 bp, Artificial
  Synthetic oligonucleotide
caaagaatacagctgcaatgtaaaagacgatttagctcaacttcaccgtagggcg

SEQ ID NO: 146101 - DNA, 55 bp, Artificial
  Synthetic oligonucleotide
cgtctacgctgccgtgctggtagcgataatgccaaccttcctctgcgcccattcg

SEQ ID NO: 146102 - DNA, 55 bp, Artificial
  Synthetic oligonucleotide
caacccgtgctcggttgacctgtagtggcaaaggtatcggtgtcgcaaccagaca

SEQ ID NO: 146103 - DNA, 54 bp, Artificial
  Synthetic oligonucleotide
cgtcgatcaaatgggaccccgtaagggcgttgcgtaagtcgtggcggttgagag

SEQ ID NO: 146104 - DNA, 55 bp, Artificial
  Synthetic oligonucleotide
caacgtcattgtgacgggaagtccgacagtgacttgcgcggattgccgttcaaag

SEQ ID NO: 146105 - DNA, 55 bp, Artificial
  Synthetic oligonucleotide
caactgcttaggtgcttcggcccaatctacagcaattattcgactaggctcatta

SEQ ID NO: 146106 - DNA, 55 bp, Artificial
  Synthetic oligonucleotide
cggttcgcagcaagcgcgttaagcgaatctttatgtgctacgatgtcgatgtgca

SEQ ID NO: 146107 - DNA, 55 bp, Artificial
  Synthetic oligonucleotide
cgctatgcaagacggaagcttagcaaacgtgcactttgtagggttaacctataac

SEQ ID NO: 146108 - DNA, 55 bp, Artificial
  Synthetic oligonucleotide
cagataacttagacttgtcgcttgagtattactacgacgaagcaagctatgcgtc

SEQ ID NO: 146109 - DNA, 55 bp, Artificial
  Synthetic oligonucleotide
cggtaggcattccccaaatccggcaagccacattgatggaatttaagtttcagta

SEQ ID NO: 146110 - DNA, 53 bp, Artificial
  Synthetic oligonucleotide
cagacccgagtcgcaaagcccctgtttaaggctcgggtgtgtcgttcgtacgg

SEQ ID NO: 146111 - DNA, 55 bp, Artificial
  Synthetic oligonucleotide
cactggcctagatgcaagtacttccaaaatagtacaaagcacggacgcacaaacc

SEQ ID NO: 146112 - DNA, 55 bp, Artificial
  Synthetic oligonucleotide
cggtaacgtctaccgttcagtggcatggcctgatgcagtaaagcccatggtcctc

SEQ ID NO: 146113 - DNA, 55 bp, Artificial
  Synthetic oligonucleotide
cacgcacagcatcaccaacagatgggtattcagtgaaggttgtcgagtaggcaaa

SEQ ID NO: 146114 - DNA, 55 bp, Artificial
  Synthetic oligonucleotide
cgtcagtaatagtggacgggcagaaagggcctatgtctgtatttgcaggtgcgcc

SEQ ID NO: 146115 - DNA, 55 bp, Artificial
  Synthetic oligonucleotide
catggcatgatcactgagagccttcgttctttatatggccaggatgcgcctaatc

SEQ ID NO: 146116 - DNA, 55 bp, Artificial
  Synthetic oligonucleotide
caccgaagtgactattgtcccaggcacaaacctaatggcggcaggtaagcgtgag

SEQ ID NO: 146117 - DNA, 55 bp, Artificial
  Synthetic oligonucleotide
cgtccctgtgaacccagggcatgtattgccgtccggagcccagttttccgccaag

SEQ ID NO: 146118 - DNA, 53 bp, Artificial
  Synthetic oligonucleotide
cctggtaacccattccaaagcgctggttagaataaacggaataccctgggcca

SEQ ID NO: 146119 - DNA, 55 bp, Artificial
  Synthetic oligonucleotide
ggcgaaaacacttccccggcacgttgaataatgaatttgatcgcatcctcagacg

SEQ ID NO: 146120 - DNA, 55 bp, Artificial
  Synthetic oligonucleotide
gtacgccctcttcgatatgcagtccgttgtccagcactctgatcatggcttcccc

SEQ ID NO: 146121 - DNA, 55 bp, Artificial
  Synthetic oligonucleotide
gtatcccgcctttcagccccgcgagaatgttcctgagccgaatctcttagaagag

SEQ ID NO: 146122 - DNA, 55 bp, Artificial
  Synthetic oligonucleotide
gtgctgcgctgatgggatccagtaagtactcccaaacggggtttcgtgggcttcc

SEQ ID NO: 146123 - DNA, 55 bp, Artificial
  Synthetic oligonucleotide
gtggacctcgagtatcagaaatctatgcgcaacccagcagatcgccaggtagccc

SEQ ID NO: 146124 - DNA, 55 bp, Artificial
  Synthetic oligonucleotide
gttccctaaccagtcgattcacagaacgctggacaggtagagttaatggagagcc

SEQ ID NO: 146125 - DNA, 53 bp, Artificial
  Synthetic oligonucleotide
gttccctggtgtaatctccaaaaccggtggtaaattgcctgaggaagcgtacc

SEQ ID NO: 146126 - DNA, 55 bp, Artificial
  Synthetic oligonucleotide
aacccgcacgggtgatatactacagaggggagatctctcgcatgaccacgtacgt

SEQ ID NO: 146127 - DNA, 55 bp, Artificial
  Synthetic oligonucleotide
gtttggcgctccggtgcatgtagttgaaatcagtcggggacctacagttacgcag

SEQ ID NO: 146128 - DNA, 55 bp, Artificial
  Synthetic oligonucleotide
tcaccgttatgtagaacgcttcacgcaacttatccgacagagtgaaattcagggg

SEQ ID NO: 146129 - DNA, 55 bp, Artificial
  Synthetic oligonucleotide
cggctttcatagagaactccgctaagaggtgtctacaagattgtatctcacaatt

SEQ ID NO: 146130 - DNA, 55 bp, Artificial
  Synthetic oligonucleotide
tcgaagacggttgggcagcccgtgagcatttaattacggcaaactcacgtctggt

SEQ ID NO: 146131 - DNA, 55 bp, Artificial
  Synthetic oligonucleotide
tgcaccggatggacaatctctcatctgtgaatattgcgaaagccaatcccgtctt

SEQ ID NO: 146132 - DNA, 55 bp, Artificial
  Synthetic oligonucleotide
tttggtgcgttcctgagtggggttgctgaaaatgacgctgggcggaccttcctcg

SEQ ID NO: 146133 - DNA, 54 bp, Artificial
  Synthetic oligonucleotide
gaatacgggcgtcatgttcaatcaccgagtccacggatgcccatgagacttctc

SEQ ID NO: 146134 - DNA, 53 bp, Artificial
  Synthetic oligonucleotide
atggtatgactgatagtgttggggtaaaggtgatgaaagatgatccgccagtc

SEQ ID NO: 146135 - DNA, 53 bp, Artificial
  Synthetic oligonucleotide
ctttccccaatttgcccgtcctgtacaccgaatggaacgtttcgcccatccat

SEQ ID NO: 146136 - DNA, 52 bp, Artificial
  Synthetic oligonucleotide
acgtgatatccacttcactacaggcgctgacgccccaaattatacactgcct

SEQ ID NO: 146137 - DNA, 52 bp, Artificial
  Synthetic oligonucleotide
gaaactccgttgccgaatccagaacaaaccgacgcataaaccctatggctcg

SEQ ID NO: 146138 - DNA, 52 bp, Artificial
  Synthetic oligonucleotide
agcccaattcgccacgatacatcccgggctgagcatttgcatagcatgaaaa

SEQ ID NO: 146139 - DNA, 51 bp, Artificial
  Synthetic oligonucleotide
actccgcgtgtactttggaacgccactggtgaaatatttgcgtcaaaaccg

SEQ ID NO: 146140 - DNA, 55 bp, Artificial
  Synthetic oligonucleotide
ctctttcagatgcaccgtcaagccgttggcgagctttgtgaacagagtcggtgag

SEQ ID NO: 146141 - DNA, 50 bp, Artificial
  Synthetic oligonucleotide
ggacgaatttggttcggacctggctggaaggatgaagcgtgtccatgaat

SEQ ID NO: 146142 - DNA, 50 bp, Artificial
  Synthetic oligonucleotide
aggtgcaggcacacgaacaacctctgtgccggctggaatctctcccagca

SEQ ID NO: 146143 - DNA, 50 bp, Artificial
  Synthetic oligonucleotide
aggtccgaatgcggttgcagtcgtcaggcaaactatgggagccactcgcc

SEQ ID NO: 146144 - DNA, 50 bp, Artificial
  Synthetic oligonucleotide
aggtcccagaaccggcacggggtgggttacccatacctcccacaaggcta

SEQ ID NO: 146145 - DNA, 50 bp, Artificial
  Synthetic oligonucleotide
aggtagattgatggttctggcgtgcatgtgtccgaggcggggcgtgggat

SEQ ID NO: 146146 - DNA, 50 bp, Artificial
  Synthetic oligonucleotide
agggggtacgctggcttcgacacggtttggcaggctcactgtgcgtctct

SEQ ID NO: 146147 - DNA, 50 bp, Artificial
  Synthetic oligonucleotide
aggcgtaaggctgtgagcaatccctttgaggcgtgggtggacccgcaaaa

SEQ ID NO: 146148 - DNA, 50 bp, Artificial
  Synthetic oligonucleotide
aaacgccacgtacatccacgccagttcaggaccaagcacccccacccaac

SEQ ID NO: 146149 - DNA, 50 bp, Artificial
  Synthetic oligonucleotide
aaacggtagggactggcgttaatctccagcgcaaccccggacgtctgcag

SEQ ID NO: 146150 - DNA, 50 bp, Artificial
  Synthetic oligonucleotide
aaagagagtcactgtcaacctcgctccagcctcggtgcgcaaagagggcc

SEQ ID NO: 146151 - DNA, 55 bp, Artificial
  Synthetic oligonucleotide
cctcacagggcatctcgatctcacgtcggaaggatccgtaagtgcgctcgatccg

SEQ ID NO: 146152 - DNA, 50 bp, Artificial
  Synthetic oligonucleotide
aacactcttgccagcggggtcatcccccaaatcagcgtcatgctggggcc

SEQ ID NO: 146153 - DNA, 50 bp, Artificial
  Synthetic oligonucleotide
aacccagcagatcgccaggtagcccaaatcaccattcgagggcgcggcta

SEQ ID NO: 146154 - DNA, 50 bp, Artificial
  Synthetic oligonucleotide
aacccgggcaggcttgggatggtagcctcatactggcggggatttggttt

SEQ ID NO: 146155 - DNA, 50 bp, Artificial
  Synthetic oligonucleotide
aaccgatggcttacagcgtggaattccagtcagacggaccggcgctccaa

SEQ ID NO: 146156 - DNA, 50 bp, Artificial
  Synthetic oligonucleotide
aagcactgtcaacccgggcaggcttgggatggtagcctcatactggcggg

SEQ ID NO: 146157 - DNA, 50 bp, Artificial
  Synthetic oligonucleotide
aagcgctcccccaattgccggaccaaggatgaagcctaaaccgaatgcgg

SEQ ID NO: 146158 - DNA, 50 bp, Artificial
  Synthetic oligonucleotide
aatccgattgggatgcaccaaaccacaccccctgcggcgaaagtcccatg

SEQ ID NO: 146159 - DNA, 50 bp, Artificial
  Synthetic oligonucleotide
aatgcggcgccaattagccctaatcctcgagcgcggctctgagcatcggt

SEQ ID NO: 146160 - DNA, 50 bp, Artificial
  Synthetic oligonucleotide
aattggcgacaccttcccaccggaaaaacgcggcagtgccttgggaatga

SEQ ID NO: 146161 - DNA, 50 bp, Artificial
  Synthetic oligonucleotide
acacgatatctccgaccggcggcaaaaggacgggcaagcaatagccctgc

SEQ ID NO: 146162 - DNA, 55 bp, Artificial
  Synthetic oligonucleotide
agatgcctggagattcttacgggagaggcatacaggcatttccgagggttctgct

SEQ ID NO: 146163 - DNA, 50 bp, Artificial
  Synthetic oligonucleotide
acagggcttgtgtccaccgtgcggaattgacccgtgcggacttgcaccgc

SEQ ID NO: 146164 - DNA, 50 bp, Artificial
  Synthetic oligonucleotide
acccaaaaccgctcgaggacgggtagccattccaggacccgcaaaagcca

SEQ ID NO: 146165 - DNA, 50 bp, Artificial
  Synthetic oligonucleotide
acgatgccatgcgagcattgatggctcgctacgaagccgcccctctgtgg

SEQ ID NO: 146166 - DNA, 50 bp, Artificial
  Synthetic oligonucleotide
acggatcgagggggatgcaacatcactgtaggtgtgcgcggattgcgcta

SEQ ID NO: 146167 - DNA, 50 bp, Artificial
  Synthetic oligonucleotide
acggatcgagggggatgcaacatcggaggtccaccctgtcaggcgcacag

SEQ ID NO: 146168 - DNA, 50 bp, Artificial
  Synthetic oligonucleotide
agagcccgaatggtacggcgcacatttcgcgggtcaatcttctgagcggc

SEQ ID NO: 146169 - DNA, 50 bp, Artificial
  Synthetic oligonucleotide
agaggaattgggcggtgccatctccctgagaccccacgcctttacacccg

SEQ ID NO: 146170 - DNA, 50 bp, Artificial
  Synthetic oligonucleotide
agagttgctcaccacagcgcatcaggcgtatgctacaccgttggggctga

SEQ ID NO: 146171 - DNA, 50 bp, Artificial
  Synthetic oligonucleotide
agatcgatgtgagtggtctggagccgcagattgcctgccatccggacgtg

SEQ ID NO: 146172 - DNA, 50 bp, Artificial
  Synthetic oligonucleotide
agcaatccctttgaggcgtgggtggacccgcaaaatccgcacctgaggcg

SEQ ID NO: 146173 - DNA, 54 bp, Artificial
  Synthetic oligonucleotide
ccccagtcgaccatgagaagtgaagacagcccggtcaatggttcgttttccggg

SEQ ID NO: 146174 - DNA, 50 bp, Artificial
  Synthetic oligonucleotide
agcacacccccggttcgaacagtcgcgccgggtaatcttcggcacggatt

SEQ ID NO: 146175 - DNA, 50 bp, Artificial
  Synthetic oligonucleotide
agcagctacccccaatcgagcagtcaggagtaaaccgctcaccgccgcaa

SEQ ID NO: 146176 - DNA, 50 bp, Artificial
  Synthetic oligonucleotide
agcattgatggctcgctacgaagccgcccctctgtgggcgtgagtccgtg

SEQ ID NO: 146177 - DNA, 50 bp, Artificial
  Synthetic oligonucleotide
agccactggaaacaccccgtcaaactgtggtgctttgcgcccatctggac

SEQ ID NO: 146178 - DNA, 50 bp, Artificial
  Synthetic oligonucleotide
agcgcgaagcgaggggttctggcacgccatcatcgtcatagagacgtcct

SEQ ID NO: 146179 - DNA, 50 bp, Artificial
  Synthetic oligonucleotide
agcggacaatgctggctcgccgatcctgcggattgggtacgcgctcaagg

SEQ ID NO: 146180 - DNA, 50 bp, Artificial
  Synthetic oligonucleotide
aggactgctcccatggggatatgccctgttccaaagcatgcgcacgctga

SEQ ID NO: 146181 - DNA, 50 bp, Artificial
  Synthetic oligonucleotide
aggcaattccaatcacgccgggttcactctccgccgcctgcagactttcc

SEQ ID NO: 146182 - DNA, 55 bp, Artificial
  Synthetic oligonucleotide
cagttactaccgaatatttgccgttcgcagttttggagcagtagagtgagcggcg

SEQ ID NO: 146183 - DNA, 55 bp, Artificial
  Synthetic oligonucleotide
gactttatcaacatagcctctcacgagttaaggacccctctaacccaaattctgg

SEQ ID NO: 146184 - DNA, 55 bp, Artificial
  Synthetic oligonucleotide
gagtagggaaatatgcgtcgtaccaaacctgaggtccgagaaatcaatccggatg

SEQ ID NO: 146185 - DNA, 60 bp, Artificial
  Synthetic oligonucleotide
gagataccgtgacggtatgacggttcgcggtggcatgacgataagcctcatcatcccgct

SEQ ID NO: 146186 - DNA, 59 bp, Artificial
  Synthetic oligonucleotide
tgccctgtcaatcacatgtccaccctatttgggctggtaagtaagcgccagctgcacgg

SEQ ID NO: 146187 - DNA, 54 bp, Artificial
  Synthetic oligonucleotide
ggccactacaccacaccgctaacaagtagtaaagcgtcgataaacctaagttac

SEQ ID NO: 146188 - DNA, 55 bp, Artificial
  Synthetic oligonucleotide
ggcatgcactaacattcgctcaccttcagtattacctattacgtaagctgacttc

SEQ ID NO: 146189 - DNA, 55 bp, Artificial
  Synthetic oligonucleotide
ggcatacttagtgtaagggctgtaattaggaagacagagcacactaatggtgtgc

SEQ ID NO: 146190 - DNA, 55 bp, Artificial
  Synthetic oligonucleotide
ggattaccagaggatttaggaattaaagggtcactctttgtcgacgcagcaactt

SEQ ID NO: 146191 - DNA, 55 bp, Artificial
  Synthetic oligonucleotide
ggatcatcccctggagggtggtctcagtttgcagcacaaagggtatcacacaaca

SEQ ID NO: 146192 - DNA, 55 bp, Artificial
  Synthetic oligonucleotide
gtcaaggccttggttcataccagaaagtacaccgctcagcgtgcaacttcacaac

SEQ ID NO: 146193 - DNA, 55 bp, Artificial
  Synthetic oligonucleotide
gtagaaagtaccactagttcagcatcaacagttacagggcataatactcttaaca

SEQ ID NO: 146194 - DNA, 55 bp, Artificial
  Synthetic oligonucleotide
gtacgaatgtccttttgcatttgtgcagagcgagggattttgtgtggagctccca

SEQ ID NO: 146195 - DNA, 52 bp, Artificial
  Synthetic oligonucleotide
gtaccttgataccaacggttgtaataccaattttcctttcgggtcgcgccac

SEQ ID NO: 146196 - DNA, 55 bp, Artificial
  Synthetic oligonucleotide
gtacacataaagcttcagttatgtgaaagcgacatgcctccaagtgtagcgaaga

SEQ ID NO: 146197 - DNA, 59 bp, Artificial
  Synthetic oligonucleotide
caagcagcgggacgacgattgtcagggtgtcatcctagcgcccctatgatgtcatccga

SEQ ID NO: 146198 - DNA, 55 bp, Artificial
  Synthetic oligonucleotide
gtaatcgtatcctgtctccaataaacagcggttttgctatgtatccttgatcagc

SEQ ID NO: 146199 - DNA, 55 bp, Artificial
  Synthetic oligonucleotide
gtaaaacattgcttcttgtatactccgaccacacattatagatccatgattacgc

SEQ ID NO: 146200 - DNA, 55 bp, Artificial
  Synthetic oligonucleotide
ggttttgctggaggaccatggacggtagcgctctatataattgaaggtggatggg

SEQ ID NO: 146201 - DNA, 55 bp, Artificial
  Synthetic oligonucleotide
ggttggttctgtagttaaacctactctcaatagtcagtataaccttactggacta

SEQ ID NO: 146202 - DNA, 55 bp, Artificial
  Synthetic oligonucleotide
gtccagtctctggtgcagcctgcaatctttaagaagttgtctagcatttcacgcc

SEQ ID NO: 146203 - DNA, 55 bp, Artificial
  Synthetic oligonucleotide
ggttcaagattaataggcggttattcatttgactcggatgttacaagagcccgca

SEQ ID NO: 146204 - DNA, 55 bp, Artificial
  Synthetic oligonucleotide
gtcggagagtgcgcgaagtccagtcaaacgtttggtgttgttgccaacgatctta

SEQ ID NO: 146205 - DNA, 55 bp, Artificial
  Synthetic oligonucleotide
ggtgtcgtaactaaggctgactctgataagactgtaaaggtttcggtgttacaag

SEQ ID NO: 146206 - DNA, 55 bp, Artificial
  Synthetic oligonucleotide
ggtggctgcaacacgctcaagctggttttcaacaggagttcccagttgctacgcg

SEQ ID NO: 146207 - DNA, 55 bp, Artificial
  Synthetic oligonucleotide
ggtgcgtgtgaagggtctatggcctgttctacatgtcatcttatagtagctcccg

SEQ ID NO: 146208 - DNA, 58 bp, Artificial
  Synthetic oligonucleotide
taccgccgcagtatctcagccgctaacaagtagcgggattatcttcatgctgccacga

SEQ ID NO: 146209 - DNA, 55 bp, Artificial
  Synthetic oligonucleotide
ggtgacgtgtacacaatagtgacggccgtacagaaacccagcactctatcaccca

SEQ ID NO: 146210 - DNA, 55 bp, Artificial
  Synthetic oligonucleotide
gtctagtactactgctaagttgtagactacgtcatcgctgcgcattgttcttaca

SEQ ID NO: 146211 - DNA, 55 bp, Artificial
  Synthetic oligonucleotide
ggtattaaatctctcaagcgcgcacatatttcacgtcctcttttctcagatctac

SEQ ID NO: 146212 - DNA, 55 bp, Artificial
  Synthetic oligonucleotide
gcctttaccacgcaatacttcttgctggtgcagaaatggtccgctatagacactg

SEQ ID NO: 146213 - DNA, 55 bp, Artificial
  Synthetic oligonucleotide
gtgtactcactagcgactggtagcaccataatgccattctcgggtaatatctctg

SEQ ID NO: 146214 - DNA, 55 bp, Artificial
  Synthetic oligonucleotide
gttatagatgcggcttctggggagttatggcgagttgaggtgccttcatggcgta

SEQ ID NO: 146215 - DNA, 55 bp, Artificial
  Synthetic oligonucleotide
gccccttcttgtcatttaagcagttgacactgggatctcacttttacacattgga

SEQ ID NO: 146216 - DNA, 55 bp, Artificial
  Synthetic oligonucleotide
gccatccattcaagcgtttgcgtcttaatctagtgctaggaaattgcatatgttc

SEQ ID NO: 146217 - DNA, 55 bp, Artificial
  Synthetic oligonucleotide
gccactccgtatatagagatgcagcggggaactacttgtttcccgaggactcgca

SEQ ID NO: 146218 - DNA, 55 bp, Artificial
  Synthetic oligonucleotide
gccaaagaacaccactatgggcccaatgcagtagaacagaagtttccctattgtg

SEQ ID NO: 146219 - DNA, 58 bp, Artificial
  Synthetic oligonucleotide
cttatagcactaatgaagctcttgtaactttcactaaccttgcaaataacttgcgtac

SEQ ID NO: 146220 - DNA, 55 bp, Artificial
  Synthetic oligonucleotide
gcatgaacatccgcgataggagcctatttaatgatgcttgcgaacaggagtctat

SEQ ID NO: 146221 - DNA, 55 bp, Artificial
  Synthetic oligonucleotide
gcagtctacagcagtaatggacaacacgcaatgcgttgtaggcggtggtaactat

SEQ ID NO: 146222 - DNA, 55 bp, Artificial
  Synthetic oligonucleotide
gcaggtagaccgcgattgtaccacaacttgttgcgatatttccactagctcgctc

SEQ ID NO: 146223 - DNA, 55 bp, Artificial
  Synthetic oligonucleotide
gcagcatgacctgcatcggagggactaccaccgcctgtaacaccggtataaccca

SEQ ID NO: 146224 - DNA, 55 bp, Artificial
  Synthetic oligonucleotide
gcactcctgagcctaatcgcaggtctccactcagcatctatagcgagctccgcac

SEQ ID NO: 146225 - DNA, 55 bp, Artificial
  Synthetic oligonucleotide
gcactattaccagaaaatgctagtagtgattgggatactccttttctgaatatgg

SEQ ID NO: 146226 - DNA, 55 bp, Artificial
  Synthetic oligonucleotide
gttgatgcgctccacaagactagcaccactaaagctagcatcgtttcctacgggg

SEQ ID NO: 146227 - DNA, 55 bp, Artificial
  Synthetic oligonucleotide
gcacgctgagcggtgtactttctggtatgaaccaaggccttgacataacttgggt

SEQ ID NO: 146228 - DNA, 55 bp, Artificial
  Synthetic oligonucleotide
gcaccgtctcaccttgcgagaattctatgtaggaatgatagccatagttgaacac

SEQ ID NO: 146229 - DNA, 55 bp, Artificial
  Synthetic oligonucleotide
gcacacttagcgcttggttccaccatgactttagcagagcatccacgcgatagtg

SEQ ID NO: 146230 - DNA, 58 bp, Artificial
  Synthetic oligonucleotide
gtggttggcgagaacgacaagggcaaaaggtatacgtatggaacccagcgcagccaga

SEQ ID NO: 146231 - DNA, 55 bp, Artificial
  Synthetic oligonucleotide
gcacaaatcgttggtcgtgatggccaatatgttttattacgactcaggtctggtc

SEQ ID NO: 146232 - DNA, 55 bp, Artificial
  Synthetic oligonucleotide
ggagtaaacgacattgcggcaatagtttcacggtggaccggcattcccgtagaaa

SEQ ID NO: 146233 - DNA, 55 bp, Artificial
  Synthetic oligonucleotide
ggaggacgtaagaccagaggcaaagttttacgtactattgttggtggagatacag

SEQ ID NO: 146234 - DNA, 55 bp, Artificial
  Synthetic oligonucleotide
gtgctgtagtggtaacttatggtggaactacagtattgtcaacagtggtagcagg

SEQ ID NO: 146235 - DNA, 55 bp, Artificial
  Synthetic oligonucleotide
ggacctcgatcggcaaaagctccttggtgacgtttcgcagggtaacttcctccac

SEQ ID NO: 146236 - DNA, 55 bp, Artificial
  Synthetic oligonucleotide
ggacacatcgcctgtacactgagagatgtaaggacacacacagtcatccgcggga

SEQ ID NO: 146237 - DNA, 55 bp, Artificial
  Synthetic oligonucleotide
gctttagcaagtagtaatgtgccaggtctacaacaagagctgtctcataggatgg

SEQ ID NO: 146238 - DNA, 55 bp, Artificial
  Synthetic oligonucleotide
gctgcaaaagtgtccaccagccctttctccggtactgagtgcaacatcaacgcta

SEQ ID NO: 146239 - DNA, 55 bp, Artificial
  Synthetic oligonucleotide
gctcctagtcaagatcatgcttctcaagatggattacatagagtagctcctagtc

SEQ ID NO: 146240 - DNA, 55 bp, Artificial
  Synthetic oligonucleotide
gctcatcttgataagaccccagcgtagctacgactaaactctgtgtcccaccacg

SEQ ID NO: 146241 - DNA, 58 bp, Artificial
  Synthetic oligonucleotide
tcttagccgctaacaagcagcgggacgacgattgtcagggtgtcatcctagcgcccct

SEQ ID NO: 146242 - DNA, 55 bp, Artificial
  Synthetic oligonucleotide
gtggaattcagtggattgtctggtacgtcacacttggtagagcttcccaggcatt

SEQ ID NO: 146243 - DNA, 55 bp, Artificial
  Synthetic oligonucleotide
gctaagggcggttctcatcagtgattctagggcgacgattttgcccgcggtaacg

SEQ ID NO: 146244 - DNA, 55 bp, Artificial
  Synthetic oligonucleotide
gctaagaatctaggagcttattatgaggcaatcagtgtaggtccatcgcacaatt

SEQ ID NO: 146245 - DNA, 55 bp, Artificial
  Synthetic oligonucleotide
gcgttcgtcaaatcaggtatgcgtaccgccactatcgtgtcacggaagttgtttg

SEQ ID NO: 146246 - DNA, 55 bp, Artificial
  Synthetic oligonucleotide
gcgtaggtgaggtatgcttcactacagggttcaccggctatcagtataccataac

SEQ ID NO: 146247 - DNA, 55 bp, Artificial
  Synthetic oligonucleotide
gcgtacagagtcttgcctgcgtgctcctccgtagactggtggtaagagtttgtcg

SEQ ID NO: 146248 - DNA, 55 bp, Artificial
  Synthetic oligonucleotide
gcgagttcttacatgtcgttggtggaacactacttgctgactagggaagctttac

SEQ ID NO: 146249 - DNA, 55 bp, Artificial
  Synthetic oligonucleotide
gcgacggcacattacatagattttgtgcgcatagagtggtgttagcaacaggtgg

SEQ ID NO: 146250 - DNA, 55 bp, Artificial
  Synthetic oligonucleotide
tcttaacataggccactatttaattagcgaagctgtattttacggcttacacagc

SEQ ID NO: 146251 - DNA, 55 bp, Artificial
  Synthetic oligonucleotide
agtactgcattaggttctcaagcaactatgacaggagtgtctactcaggctagtc

SEQ ID NO: 146252 - DNA, 56 bp, Artificial
  Synthetic oligonucleotide
ggagttgttgactcttttgttctagtacttggtatactggaattactgtttgtgta

SEQ ID NO: 146253 - DNA, 55 bp, Artificial
  Synthetic oligonucleotide
agtagtgatcatgtctcagttaaaccttgtgagcctagacgtatagttccgcaag

SEQ ID NO: 146254 - DNA, 55 bp, Artificial
  Synthetic oligonucleotide
ataaagcgtcacaagaaatgttgatagctcatgaagataggatgtcacgagaagc

SEQ ID NO: 146255 - DNA, 55 bp, Artificial
  Synthetic oligonucleotide
atacaccgcctattttgattcgtcagtgctgacatgcaggtgtgctttccataca

SEQ ID NO: 146256 - DNA, 55 bp, Artificial
  Synthetic oligonucleotide
atacacttaccggcataccttgcgtcattaaggacatgtattgcactaaaggtgt

SEQ ID NO: 146257 - DNA, 55 bp, Artificial
  Synthetic oligonucleotide
atacgattcagtgtaaagttctaaaagctggtcaggaggctaaactgcatgatgc

SEQ ID NO: 146258 - DNA, 55 bp, Artificial
  Synthetic oligonucleotide
atatgtgctgcagggataaggggagattgcatgtgagacactaaagatataccgc

SEQ ID NO: 146259 - DNA, 55 bp, Artificial
  Synthetic oligonucleotide
tctctatgtagacggcgctccacagaagcaaagcgttgggttgctccctgcagag

SEQ ID NO: 146260 - DNA, 55 bp, Artificial
  Synthetic oligonucleotide
tctcagatactctatctccagataattctacatctaacgcacttggttgtgtagt

SEQ ID NO: 146261 - DNA, 55 bp, Artificial
  Synthetic oligonucleotide
atcatgtgtactccaatgcttgagccttcgttaatcggttttaagacgtacggat

SEQ ID NO: 146262 - DNA, 55 bp, Artificial
  Synthetic oligonucleotide
atgatgcccgggcagtttgggcctatcaacagacttttagagttacttaatgcgc

SEQ ID NO: 146263 - DNA, 57 bp, Artificial
  Synthetic oligonucleotide
tatgcatgcatctccgagtgcgcaccgctctcccgcagaccggcgtatgacgttccc

SEQ ID NO: 146264 - DNA, 55 bp, Artificial
  Synthetic oligonucleotide
tcctttagctccaaagcatttatattgtcgacaaatagggtaatgcgacgtgccg

SEQ ID NO: 146265 - DNA, 55 bp, Artificial
  Synthetic oligonucleotide
tcctaagatggctagaactgcttctggtcttaatgggcctcatgtcactcagtgc

SEQ ID NO: 146266 - DNA, 55 bp, Artificial
  Synthetic oligonucleotide
attgcctgtggctagatccggataacagagtctcagacgagtataatactgaggg

SEQ ID NO: 146267 - DNA, 55 bp, Artificial
  Synthetic oligonucleotide
atttagacaccaaaaccattgtgagcaggaccgggcatatagtagacttggcgga

SEQ ID NO: 146268 - DNA, 55 bp, Artificial
  Synthetic oligonucleotide
caacatacagtatgacccatttgcagtctgtgtgcttcttgatagcctgcagtgc

SEQ ID NO: 146269 - DNA, 55 bp, Artificial
  Synthetic oligonucleotide
tcatcacctacaccatggcaaatgggttttcagactcctgtaacagatataatgg

SEQ ID NO: 146270 - DNA, 55 bp, Artificial
  Synthetic oligonucleotide
caagtagttccccgctgcatctctatatacggagtggcaaaccataccctgcgtg

SEQ ID NO: 146271 - DNA, 51 bp, Artificial
  Synthetic oligonucleotide
caagtttagtacctaaacctcctgaggctagagaaactttcggtacgttaa

SEQ ID NO: 146272 - DNA, 55 bp, Artificial
  Synthetic oligonucleotide
cacaattgtacgaacattgcgatttgagagcaatcttcactagaaaggatgtcat

SEQ ID NO: 146273 - DNA, 55 bp, Artificial
  Synthetic oligonucleotide
cacagtcctgatatgttgtttagattgatcgggagttaatagacatacactggtg

SEQ ID NO: 146274 - DNA, 57 bp, Artificial
  Synthetic oligonucleotide
agccgaccatcacttcagggctccgttttggcaccgctgctgagacaacacgcggac

SEQ ID NO: 146275 - DNA, 55 bp, Artificial
  Synthetic oligonucleotide
caccatgctttagtgggctagaacgcataatgctattgggcttagactgagcagc

SEQ ID NO: 146276 - DNA, 55 bp, Artificial
  Synthetic oligonucleotide
cacgccgccacgaaccgtcataccttaacatagatcccgctaacaagtagcggga

SEQ ID NO: 146277 - DNA, 55 bp, Artificial
  Synthetic oligonucleotide
tcatagctgaagccaaatcttatgggcttgcagtagtgctatggtcttatccacg

SEQ ID NO: 146278 - DNA, 55 bp, Artificial
  Synthetic oligonucleotide
cagcaaaacagcgcaccataagtgccggagacatcttaatattggtacgacaccg

SEQ ID NO: 146279 - DNA, 55 bp, Artificial
  Synthetic oligonucleotide
cagcagtatcagagagaatgattgggtatccgccaatgtcaatatgagcttcaag

SEQ ID NO: 146280 - DNA, 55 bp, Artificial
  Synthetic oligonucleotide
cagccatcaatatatgaacgggtttcaatagttaatgaggtggatgcatctcgca

SEQ ID NO: 146281 - DNA, 55 bp, Artificial
  Synthetic oligonucleotide
caggaaacaaactatcggttagtaattcctcactccttgcactagtaccagccgt

SEQ ID NO: 146282 - DNA, 55 bp, Artificial
  Synthetic oligonucleotide
caggatggaacttctactgcgttaatgtcgttgccggatatgagtatcccaatac

SEQ ID NO: 146283 - DNA, 55 bp, Artificial
  Synthetic oligonucleotide
tttcgtctgggtgcaggtttgttacgcttagttgccttccattgggcggcacgcg

SEQ ID NO: 146284 - DNA, 55 bp, Artificial
  Synthetic oligonucleotide
tttatgagggtgtcatcggagtagcccctttctcgtcatcccgctacgtgttagc

SEQ ID NO: 146285 - DNA, 57 bp, Artificial
  Synthetic oligonucleotide
tagccggaggtgcagctaatctgctggggagagtaccaagagttggaggagtgctga

SEQ ID NO: 146286 - DNA, 55 bp, Artificial
  Synthetic oligonucleotide
ttgtagttactctaccagtatgttaagctatagcgacttttactaatacgccagg

SEQ ID NO: 146287 - DNA, 55 bp, Artificial
  Synthetic oligonucleotide
aaattcgaggactgctagattgaatattggtagtgtcggtacaagtcatatgact

SEQ ID NO: 146288 - DNA, 55 bp, Artificial
  Synthetic oligonucleotide
ttgtacatctccgtagcaagcccgaaaggccgcccactagcgccggaccagagct

SEQ ID NO: 146289 - DNA, 55 bp, Artificial
  Synthetic oligonucleotide
aacctatttcacttgccaattctacttgagtatgccctcgcattaacctgctatc

SEQ ID NO: 146290 - DNA, 55 bp, Artificial
  Synthetic oligonucleotide
aacctgaggtttgtgctactatgtctgacaatatatcgccatataggttctcagt

SEQ ID NO: 146291 - DNA, 55 bp, Artificial
  Synthetic oligonucleotide
aacgtttcgactactagctgcaaaatttagcgaaattctcacgttattgatctgg

SEQ ID NO: 146292 - DNA, 55 bp, Artificial
  Synthetic oligonucleotide
aaggccgcgctgcagtggtacgggcaaggttacggtacgcccatactggtgggaa

SEQ ID NO: 146293 - DNA, 55 bp, Artificial
  Synthetic oligonucleotide
aaggcgaattactgcatcgaaagttgacagaggaggagacggcattaggatgctc

SEQ ID NO: 146294 - DNA, 55 bp, Artificial
  Synthetic oligonucleotide
ttctgccgtacgtaacgatatacatcctggagcaaatacaccgttccacggaagg

SEQ ID NO: 146295 - DNA, 55 bp, Artificial
  Synthetic oligonucleotide
acactaaatgaaagataccgcgacatattcatcaggcggcgactaatcgaagaac

SEQ ID NO: 146296 - DNA, 58 bp, Artificial
  Synthetic oligonucleotide
gctacttgttagcggctgagataccgcgacggtatgacggttaagtaggccagtgccc

SEQ ID NO: 146297 - DNA, 56 bp, Artificial
  Synthetic oligonucleotide
gtccgcgtgttgtctcagcagcggtgccaaaacggagccctgaagtgatggtcggc

SEQ ID NO: 146298 - DNA, 55 bp, Artificial
  Synthetic oligonucleotide
acactgatcagaactatttgctacagtctatcccaagagtaaataggattagtgc

SEQ ID NO: 146299 - DNA, 55 bp, Artificial
  Synthetic oligonucleotide
acaggagttgctactgcgtctgtatggtcgtagccaggattacaattgtaccgcg

SEQ ID NO: 146300 - DNA, 55 bp, Artificial
  Synthetic oligonucleotide
acatgtatagagtgcccgatagccagatctagcaagtccacctctaagctttgcg

SEQ ID NO: 146301 - DNA, 55 bp, Artificial
  Synthetic oligonucleotide
accagcagagggagatagttgccagattactgtgcgacgcagatctgagaaccgc

SEQ ID NO: 146302 - DNA, 55 bp, Artificial
  Synthetic oligonucleotide
ttcgtcatatcacgattcatttgtggtatctctagattccgctaacaagcagctg

SEQ ID NO: 146303 - DNA, 55 bp, Artificial
  Synthetic oligonucleotide
ttcatcggtactaccagtctgctcatcatatatagacattgttacagttgcaccg

SEQ ID NO: 146304 - DNA, 55 bp, Artificial
  Synthetic oligonucleotide
ttatccagagtaagtggagtggttgaaaggcgtaattcaatagatgttttggcgt

SEQ ID NO: 146305 - DNA, 55 bp, Artificial
  Synthetic oligonucleotide
ttaatcctagccttcacgctatcttacggtctggtggcttgctgactagggactc

SEQ ID NO: 146306 - DNA, 55 bp, Artificial
  Synthetic oligonucleotide
acgtagcctcagctgggttgttattactcagaactgcagatacaacagctacacc

SEQ ID NO: 146307 - DNA, 55 bp, Artificial
  Synthetic oligonucleotide
acgtcctagtgtagacacttcagaagaacaacctgtagtgtttgtagaacaacac

SEQ ID NO: 146308 - DNA, 56 bp, Artificial
  Synthetic oligonucleotide
cttagtatttggagcatgtcctatagcaataaacactccttttactggaagagtag

SEQ ID NO: 146309 - DNA, 55 bp, Artificial
  Synthetic oligonucleotide
tgttggactgccggataaaactgttgcagaatccagagagcgtatcagagcagcg

SEQ ID NO: 146310 - DNA, 55 bp, Artificial
  Synthetic oligonucleotide
actagagtcacaagaaggctctatactttctcgtatgtcaggtagtggtgtaggg

SEQ ID NO: 146311 - DNA, 55 bp, Artificial
  Synthetic oligonucleotide
actgctacatgtcaagagatatatcttaagaaaggtccgtatggagtttacttgc

SEQ ID NO: 146312 - DNA, 55 bp, Artificial
  Synthetic oligonucleotide
tgtaaccaagatcatgaacattaacgcaatcattgaatgcgaggcgtgtgtagtg

SEQ ID NO: 146313 - DNA, 55 bp, Artificial
  Synthetic oligonucleotide
agagatcaccaccagtctccgtatacgcaagcccagtaacaactcccaccatgct

SEQ ID NO: 146314 - DNA, 55 bp, Artificial
  Synthetic oligonucleotide
tgccgtctcctcctctgtcaactttcgatgcagtaattcgccttacattaggagc

SEQ ID NO: 146315 - DNA, 55 bp, Artificial
  Synthetic oligonucleotide
agcaactagagatgacaacacagttgtgctgcctgcagagttctcgaatctattg

SEQ ID NO: 146316 - DNA, 55 bp, Artificial
  Synthetic oligonucleotide
tgatgagctaggtagacaaaccattactacgcaaccagcacgtatagaaagatct

SEQ ID NO: 146317 - DNA, 55 bp, Artificial
  Synthetic oligonucleotide
agctcttataattggccatgcagacgtggtatactctctcgtaagaaacggtgcg

SEQ ID NO: 146318 - DNA, 55 bp, Artificial
  Synthetic oligonucleotide
tagtccttccagtcgctcttttagattttctccgtaagcttccactgttacccag

SEQ ID NO: 146319 - DNA, 56 bp, Artificial
  Synthetic oligonucleotide
gtgcattctttgggtgtaacttctgtcaatttacgcgatatattaactacttctcc

SEQ ID NO: 146320 - DNA, 55 bp, Artificial
  Synthetic oligonucleotide
cgaaaactgttcgttcaagaccttagagctttccctgattttcatcacgctccag

SEQ ID NO: 146321 - DNA, 55 bp, Artificial
  Synthetic oligonucleotide
ccttacgaactatatactcaaaattacctggcaattgagcccaaaatgctggctc

SEQ ID NO: 146322 - DNA, 55 bp, Artificial
  Synthetic oligonucleotide
cccagctttccgatgtagctatggagaagcttgccatctccttcccgttttgcat

SEQ ID NO: 146323 - DNA, 55 bp, Artificial
  Synthetic oligonucleotide
tatagcgccgtcacctaagcaagtgaacacgactccaccgttcgctttatactta

SEQ ID NO: 146324 - DNA, 55 bp, Artificial
  Synthetic oligonucleotide
cctcttcacctgaaaatgtctagcactaacttgaaatttagtaaactgcggctcg

SEQ ID NO: 146325 - DNA, 55 bp, Artificial
  Synthetic oligonucleotide
cccatggttcactgtcagcacaattgggcggctggtagcctgcgttttgtggaac

SEQ ID NO: 146326 - DNA, 55 bp, Artificial
  Synthetic oligonucleotide
cctcgtgccaatgtagagtctgatattcacgacaagttggccgtattatagcacg

SEQ ID NO: 146327 - DNA, 55 bp, Artificial
  Synthetic oligonucleotide
ccccgatcagaaaccgaatacaggccacgtgccgctaacgacgcatacagcagga

SEQ ID NO: 146328 - DNA, 55 bp, Artificial
  Synthetic oligonucleotide
ccctagcgtaccatactacgcgcccaaggactttgatatcttcaaccgggcattc

SEQ ID NO: 146329 - DNA, 55 bp, Artificial
  Synthetic oligonucleotide
ccctcttatgcacaggatcttgcatggatactacaggcaccttggcagaatagac

SEQ ID NO: 146330 - DNA, 56 bp, Artificial
  Synthetic oligonucleotide
cctcaattgacttgaagcaaactcattaacacttgttccactacttaacatgcaac

SEQ ID NO: 146331 - DNA, 55 bp, Artificial
  Synthetic oligonucleotide
cccttcagaaagggaactacttgcaaggaacacgcactcataaatgtgagaaggc

SEQ ID NO: 146332 - DNA, 53 bp, Artificial
  Synthetic oligonucleotide
cctatgtttacgtcaacgtagttagtttctgatttaaactcccaaggtagatc

SEQ ID NO: 146333 - DNA, 55 bp, Artificial
  Synthetic oligonucleotide
cctagatctcgttgcattaggtacagtctgtgacgtcgttagacttaccggaatc

SEQ ID NO: 146334 - DNA, 55 bp, Artificial
  Synthetic oligonucleotide
cccttcaggataccctcgtgggaagcgctaaagtatcaggcaatttcatggctgg

SEQ ID NO: 146335 - DNA, 55 bp, Artificial
  Synthetic oligonucleotide
ccgagcaggtgttgctgtttattaaggcgaatacaagtgtgttagagaatacacg

SEQ ID NO: 146336 - DNA, 55 bp, Artificial
  Synthetic oligonucleotide
cctaatagatccttggtaccccttacttctcttaacttatcacgctgcataaaac

SEQ ID NO: 146337 - DNA, 55 bp, Artificial
  Synthetic oligonucleotide
ccgttgtgttgacatggtaattgatcgattgggtgctacgcctttggtgttgcaa

SEQ ID NO: 146338 - DNA, 55 bp, Artificial
  Synthetic oligonucleotide
ccgaggttctcttatctcactaaactcacgtgcaatacgcctaacacgtctttcc

SEQ ID NO: 146339 - DNA, 55 bp, Artificial
  Synthetic oligonucleotide
ccgcagtcctgactctagatttctccatgcagctcaacataatctatcttgccat

SEQ ID NO: 146340 - DNA, 55 bp, Artificial
  Synthetic oligonucleotide
ccgcgtttgcagagcttgcagtgcaaaatgattacacgaaacccatcattaacga

SEQ ID NO: 146341 - DNA, 56 bp, Artificial
  Synthetic oligonucleotide
gcttgtcgtatattggattagcagcattactatagcatgagtagagatctaatgtg

SEQ ID NO: 146342 - DNA, 55 bp, Artificial
  Synthetic oligonucleotide
ccgttaagcccacaactgtatgaacattgtgatttgagagtaatctccactagga

SEQ ID NO: 146343 - DNA, 55 bp, Artificial
  Synthetic oligonucleotide
ccgctaggccccgctctgcggtcaatgcataaccattaggtaacacacacacttt

SEQ ID NO: 146344 - DNA, 55 bp, Artificial
  Synthetic oligonucleotide
cgcggttcactgcgctaatcttgttcaataccgacgcatttcctgacgcagaccc

SEQ ID NO: 146345 - DNA, 55 bp, Artificial
  Synthetic oligonucleotide
catctccggtactgcatcacttacggtgtttggaagcgtaactggcttttcatac

SEQ ID NO: 146346 - DNA, 55 bp, Artificial
  Synthetic oligonucleotide
catgtttaaccttgcattgccgggtggtagcgtgcagatattagggctgtcgcca

SEQ ID NO: 146347 - DNA, 55 bp, Artificial
  Synthetic oligonucleotide
cattcgtgatggcactagggaatcttattataccttcgcacaaactagcagaatg

SEQ ID NO: 146348 - DNA, 55 bp, Artificial
  Synthetic oligonucleotide
cgcgactgacgtctatagtagaggaagtgtcattcgatgtgcgcaacagtggcgc

SEQ ID NO: 146349 - DNA, 55 bp, Artificial
  Synthetic oligonucleotide
catattgacattggcggatacccaatcattctctctgatactgctggaattcgtg

SEQ ID NO: 146350 - DNA, 55 bp, Artificial
  Synthetic oligonucleotide
cgccttgttaaccatagtagcgctatcaaccgagattttacggcccatcttccat

SEQ ID NO: 146351 - DNA, 55 bp, Artificial
  Synthetic oligonucleotide
cataccccaaacatcctaactctattcctaaatcccttgctatagaacgaacata

SEQ ID NO: 146352 - DNA, 56 bp, Artificial
  Synthetic oligonucleotide
gtgtaaaccacatatttgtggtgctactaacctagcaactctgtattgtatgattg

SEQ ID NO: 146353 - DNA, 55 bp, Artificial
  Synthetic oligonucleotide
cgcagttttgatcatcaacggtgatagtcgagagaagggaagtcattagtatctg

SEQ ID NO: 146354 - DNA, 55 bp, Artificial
  Synthetic oligonucleotide
cgatcttctcctgttgcacttgtccgacagagtgttagaatatcacgacgactga

SEQ ID NO: 146355 - DNA, 55 bp, Artificial
  Synthetic oligonucleotide
tcaagcaactttgctctgaatccgttcatcacagacatcaccactattagtgttg

SEQ ID NO: 146356 - DNA, 55 bp, Artificial
  Synthetic oligonucleotide
cgagtagtgggagcactttcgcaaagtatggtactacaacacaggggagtaccac

SEQ ID NO: 146357 - DNA, 55 bp, Artificial
  Synthetic oligonucleotide
cgctttccagcacttgcaactccaataacaccatctctttccatacgctctacta

SEQ ID NO: 146358 - DNA, 55 bp, Artificial
  Synthetic oligonucleotide
cggaaaggccttataagactctttgcatcgtatgtaatttcaataaccgacggtg

SEQ ID NO: 146359 - DNA, 55 bp, Artificial
  Synthetic oligonucleotide
ccacgcattataggtaatactccatcacatctaaagggacctgcagatggagact

SEQ ID NO: 146360 - DNA, 55 bp, Artificial
  Synthetic oligonucleotide
cgacaatcgagacaaggcgcaccgcacttctgaaacaaagcctctcatactcgcg

SEQ ID NO: 146361 - DNA, 55 bp, Artificial
  Synthetic oligonucleotide
ccagcaacagggtgtataacttgtatacgctgagcctgagttgactcttcaccag

SEQ ID NO: 146362 - DNA, 55 bp, Artificial
  Synthetic oligonucleotide
ccagttcatgcatatcataccgaacccacaccattcatggataccaaacatgcaa

SEQ ID NO: 146363 - DNA, 56 bp, Artificial
  Synthetic oligonucleotide
catgggtggtaacttctatattagtggaaagtatgtaccaagtgtctcacattttg

SEQ ID NO: 146364 - DNA, 54 bp, Artificial
  Synthetic oligonucleotide
gtgctatatcctttgatgcagattcgatgactgatacatcgcctattcatgatg

SEQ ID NO: 146365 - DNA, 54 bp, Artificial
  Synthetic oligonucleotide
cggggcacacaccgtcccgttgagcaccacagtcccggaggttggtacctcaag

SEQ ID NO: 146366 - DNA, 54 bp, Artificial
  Synthetic oligonucleotide
agcaacagacgtcttcctgcgccctgtgccatatgcgcggccctgtctatcaac

SEQ ID NO: 146367 - DNA, 54 bp, Artificial
  Synthetic oligonucleotide
agcaacttagcgctgcacctgaagcggtggcgggacgagtatccccagctgtag

SEQ ID NO: 146368 - DNA, 54 bp, Artificial
  Synthetic oligonucleotide
agaacaactagctacgaagatggtcataagtcgtggttctataatgagagctta

SEQ ID NO: 146369 - DNA, 54 bp, Artificial
  Synthetic oligonucleotide
ggatgccaaaccggtaggtatacagcagaactcccacgtcgcaaagacccctga

SEQ ID NO: 146370 - DNA, 54 bp, Artificial
  Synthetic oligonucleotide
tgtctaccttattctgccactccgctgaacggatacactgcatctaacctcact

SEQ ID NO: 146371 - DNA, 54 bp, Artificial
  Synthetic oligonucleotide
actcagtttcatttccttagtgtggagtaatagcattgccagcgttttggcaca

SEQ ID NO: 146372 - DNA, 54 bp, Artificial
  Synthetic oligonucleotide
cgcccaacacgcacatgatggatagatgctgcgtggccgtcttgcacatcccat

SEQ ID NO: 146373 - DNA, 54 bp, Artificial
  Synthetic oligonucleotide
gtcacttgccggggcacacaccgtcccgttgagcaccacagtcccggaggttgg

SEQ ID NO: 146374 - DNA, 56 bp, Artificial
  Synthetic oligonucleotide
cagcactcctccaactcttggtaccctacccagcagattagctgcacctccggcta

SEQ ID NO: 146375 - DNA, 54 bp, Artificial
  Synthetic oligonucleotide
ttgggcagtaatgttatgatctagttgtcttacagatccggctgcggcgttgcg

SEQ ID NO: 146376 - DNA, 54 bp, Artificial
  Synthetic oligonucleotide
acatactcgtggtcatttaagagctttgcggcctctagagccatgtgtagtgct

SEQ ID NO: 146377 - DNA, 54 bp, Artificial
  Synthetic oligonucleotide
gtgacatgctgcgcccaacacgcacatgatggatagatgctgcgtggccgtctt

SEQ ID NO: 146378 - DNA, 54 bp, Artificial
  Synthetic oligonucleotide
ttatcttacgagatgacatggctatatctggtgtactgttttctacaccttgac

SEQ ID NO: 146379 - DNA, 54 bp, Artificial
  Synthetic oligonucleotide
ggggcaaatcgggacaccatgccagcggacgtgtgcaccgacgctggacgagtg

SEQ ID NO: 146380 - DNA, 54 bp, Artificial
  Synthetic oligonucleotide
cagtccaacccctgttcttagctatctccatcgcactagctaatgctgccttaa

SEQ ID NO: 146381 - DNA, 54 bp, Artificial
  Synthetic oligonucleotide
gaagccctgggattcattgaggtgcacactcccattttgacctcatcttccccg

SEQ ID NO: 146382 - DNA, 54 bp, Artificial
  Synthetic oligonucleotide
ccaaaaccgaatgcaggcaagacggggcgagttatatggtctcggagcgcgatt

SEQ ID NO: 146383 - DNA, 54 bp, Artificial
  Synthetic oligonucleotide
gatctgcatgttcaaacaagctggtaggatatcctagaggagcataacttacag

SEQ ID NO: 146384 - DNA, 54 bp, Artificial
  Synthetic oligonucleotide
gatgacaccctcctgctagacaatgttcgtacagttgtacatctaccatgcaag

SEQ ID NO: 146385 - DNA, 56 bp, Artificial
  Synthetic oligonucleotide
ggtggtagatacgtgtatgcatgcatctccgagtgcgcaccgctctcccgcagacc

SEQ ID NO: 146386 - DNA, 54 bp, Artificial
  Synthetic oligonucleotide
caagcgctctcgattagttgggagcgtatttgtaagattgtgacattcgtgcct

SEQ ID NO: 146387 - DNA, 54 bp, Artificial
  Synthetic oligonucleotide
tccgcgtccgttatctactatcttaacatggagcttaagatcctctatccgggt

SEQ ID NO: 146388 - DNA, 54 bp, Artificial
  Synthetic oligonucleotide
atgcgctatggcccatctaggtgcatctgatagcgtgcccagcctcgcatgtaa

SEQ ID NO: 146389 - DNA, 54 bp, Artificial
  Synthetic oligonucleotide
gcgcttctcttactcaccgtccgctgcaagactaggagggccgggtgatatcct

SEQ ID NO: 146390 - DNA, 54 bp, Artificial
  Synthetic oligonucleotide
agttgtccgtttttacatcagcgcagggtagcgtaccacctttcccgcgcggca

SEQ ID NO: 146391 - DNA, 54 bp, Artificial
  Synthetic oligonucleotide
tgccattggaaacgcatccataccaagaggaccaagaactcctgtatacattgc

SEQ ID NO: 146392 - DNA, 54 bp, Artificial
  Synthetic oligonucleotide
aggtaatgaccgctgttacagagattgccagtataacaagacgcttttgcgcgt

SEQ ID NO: 146393 - DNA, 54 bp, Artificial
  Synthetic oligonucleotide
tcttcctgcgccctgtgccatatgcgcggccctgtctatcaacaaccggcactc

SEQ ID NO: 146394 - DNA, 53 bp, Artificial
  Synthetic oligonucleotide
tatgttgtgctgctacagatggacataggttgtcgttaactaagttgagtcaa

SEQ ID NO: 146395 - DNA, 53 bp, Artificial
  Synthetic oligonucleotide
agggtacatttcatcgcactggcagctgacgaaacaaactacactttgcggta

SEQ ID NO: 146396 - DNA, 55 bp, Artificial
  Synthetic oligonucleotide
gtttacatctaccggggcaagtttaaatctagcgttccttatgtctgccgagagg

SEQ ID NO: 146397 - DNA, 51 bp, Artificial
  Synthetic oligonucleotide
caagggtacggactaccgaagggggtcctgttcgggctacttacggctgga

SEQ ID NO: 146398 - DNA, 53 bp, Artificial
  Synthetic oligonucleotide
ggtcatttactgctccgctgatcttcttttcgtttagattgagtagcgcgtgt

SEQ ID NO: 146399 - DNA, 53 bp, Artificial
  Synthetic oligonucleotide
cgttcccctgccctctttacaattataggatccaaagcgtcgtctgcttcagt

SEQ ID NO: 146400 - DNA, 53 bp, Artificial
  Synthetic oligonucleotide
aatagtaacactggacgtgttctactttggcatagaacttggaggaaggttta

SEQ ID NO: 146401 - DNA, 53 bp, Artificial
  Synthetic oligonucleotide
cgcacgaatgtcgcatagtgttcgccgtcacgtaaaccaatatagccgtctag

SEQ ID NO: 146402 - DNA, 53 bp, Artificial
  Synthetic oligonucleotide
cgtcccgttgagcaccacagtcccggaggttggtacctcaagcaggcttgcta

SEQ ID NO: 146403 - DNA, 53 bp, Artificial
  Synthetic oligonucleotide
ttgatcgtgcatttcacaaagctgaggttgctttgcgggctgtgccttgcccc

SEQ ID NO: 146404 - DNA, 53 bp, Artificial
  Synthetic oligonucleotide
ctgattgatcattcttaagctgcctatacccaccagccaattggttatagtac

SEQ ID NO: 146405 - DNA, 53 bp, Artificial
  Synthetic oligonucleotide
ccaagcgacgaagctatagcaggggtcggagaagccttacccgctggaacacg

SEQ ID NO: 146406 - DNA, 53 bp, Artificial
  Synthetic oligonucleotide
gtgcttaatatcgtagcacaaggtgaaaatctagctagtgcaaaacatcaagc

SEQ ID NO: 146407 - DNA, 60 bp, Artificial
  Synthetic oligonucleotide
gcgggatgatgaggcttatcgtcatgccaccgcgaaccgtcataccgtcacggtatctct

SEQ ID NO: 146408 - DNA, 55 bp, Artificial
  Synthetic oligonucleotide
gaacacaagcgattaatagtagttatcctgaatcaagtgtagcaacaggtatacc

SEQ ID NO: 146409 - DNA, 53 bp, Artificial
  Synthetic oligonucleotide
ggttgtcttacgtggtgaggttcgtctccgtgggatacgcgattcccagcacc

SEQ ID NO: 146410 - DNA, 53 bp, Artificial
  Synthetic oligonucleotide
ctctgagttcgactgttgcacaatagcttttggtattcggaacgtttccgatc

SEQ ID NO: 146411 - DNA, 53 bp, Artificial
  Synthetic oligonucleotide
gaggtggttacaatgatgttgctttagcaagtagtaatgtgccaggtttacga

SEQ ID NO: 146412 - DNA, 53 bp, Artificial
  Synthetic oligonucleotide
aacagacgtcttcctgcgtcctgtgccgtatgcacggccttgcctatcgacaa

SEQ ID NO: 146413 - DNA, 53 bp, Artificial
  Synthetic oligonucleotide
gaccaatagcttttcagtttggcactcgtctgcttttaacgaaagaaagccca

SEQ ID NO: 146414 - DNA, 53 bp, Artificial
  Synthetic oligonucleotide
tagcaactacttcctttccaacacctggcgaaccagtaatgagtatacgactc

SEQ ID NO: 146415 - DNA, 53 bp, Artificial
  Synthetic oligonucleotide
gtatgagtaaatggatgtcctgaactagcagctcgcgcaattgaatcagtaag

SEQ ID NO: 146416 - DNA, 53 bp, Artificial
  Synthetic oligonucleotide
tctgcgcttattcgacaaactttgcgtagtaagtaatccaaccctaaccatta

SEQ ID NO: 146417 - DNA, 53 bp, Artificial
  Synthetic oligonucleotide
tggttcttgtcttgtcacttgccggggcacacaccgtcccgttgagcaccaca

SEQ ID NO: 146418 - DNA, 53 bp, Artificial
  Synthetic oligonucleotide
ccgagggttccctatgtttgtccttaccctgtcgcgtgtcggtagcgcgtgtg

SEQ ID NO: 146419 - DNA, 55 bp, Artificial
  Synthetic oligonucleotide
gttgttggccgtcctgtgacccaaagccccgatccattagccgcgattgacgaaa

SEQ ID NO: 146420 - DNA, 53 bp, Artificial
  Synthetic oligonucleotide
gcgtggaggctttgggctgacaattgggaacgcgatgcgtagggttctccttt

SEQ ID NO: 146421 - DNA, 53 bp, Artificial
  Synthetic oligonucleotide
tgttccacgctagcatcttgactgatgtattgacgacctgctacaaaacctaa

SEQ ID NO: 146422 - DNA, 53 bp, Artificial
  Synthetic oligonucleotide
cttattactctttgtaacgataagtagcccatttgttcccgtgaagccacata

SEQ ID NO: 146423 - DNA, 53 bp, Artificial
  Synthetic oligonucleotide
tctgatgaatgtagcagagcaaaagttgtccactaggcgctctaggcattgat

SEQ ID NO: 146424 - DNA, 53 bp, Artificial
  Synthetic oligonucleotide
atatatgaaaccaccatccataggatctgcaagacgcataccaggtgtaacac

SEQ ID NO: 146425 - DNA, 53 bp, Artificial
  Synthetic oligonucleotide
tcggttgctagaactttgcgcacgggctcatgtgttgcccatccgaagtgtga

SEQ ID NO: 146426 - DNA, 53 bp, Artificial
  Synthetic oligonucleotide
gggagagtagagtcaagatacatacgtgtcagaacgcaaaatgcaggcgtaat

SEQ ID NO: 146427 - DNA, 53 bp, Artificial
  Synthetic oligonucleotide
gtgcggagcgtttagccgagggttccccatgtttgtccttaccctgtcgcgtg

SEQ ID NO: 146428 - DNA, 53 bp, Artificial
  Synthetic oligonucleotide
cctggcttacgccggtttgaactcagatcatgtaagaattcaaaggtcgaaca

SEQ ID NO: 146429 - DNA, 53 bp, Artificial
  Synthetic oligonucleotide
atgcggctactttaaccatggaggccccaacgcgcattagggtaaacatgtta

SEQ ID NO: 146430 - DNA, 55 bp, Artificial
  Synthetic oligonucleotide
gaaatttatgcgctatggcccatctaggtgcatctgatagtgtacccagcctcgc

SEQ ID NO: 146431 - DNA, 53 bp, Artificial
  Synthetic oligonucleotide
acgcatcatggttcttgtcttgtcacttgccggggcacacaccgtcccgttga

SEQ ID NO: 146432 - DNA, 53 bp, Artificial
  Synthetic oligonucleotide
tacccgtgctctcccctacctggcgagttgactggtccgcttgatgtagaagg

SEQ ID NO: 146433 - DNA, 53 bp, Artificial
  Synthetic oligonucleotide
attatgtatcttgttgtcctcacaggagttacaggaataataatcgctccagg

SEQ ID NO: 146434 - DNA, 53 bp, Artificial
  Synthetic oligonucleotide
accactacggttatataagcgccttctcaactcttccatagatggaggcaata

SEQ ID NO: 146435 - DNA, 53 bp, Artificial
  Synthetic oligonucleotide
tccgcgtcagcaaaacctgccccacaatcgatcatgatccaccgacccttgta

SEQ ID NO: 146436 - DNA, 52 bp, Artificial
  Synthetic oligonucleotide
tgcgatgttttccgtagactactgctggtattgcaccattacgccttaaagt

SEQ ID NO: 146437 - DNA, 52 bp, Artificial
  Synthetic oligonucleotide
tcgcccccgtggtgcggtagtgcctctgctacgaatttgatcagacctcgta

SEQ ID NO: 146438 - DNA, 52 bp, Artificial
  Synthetic oligonucleotide
ttcgtgacaatgaagaacgcacatctgccaacatagagtttacctgagtagt

SEQ ID NO: 146439 - DNA, 52 bp, Artificial
  Synthetic oligonucleotide
taccccgcagcatcgagcttgttcacaaccgtcctgcgcgcatcctcaataa

SEQ ID NO: 146440 - DNA, 52 bp, Artificial
  Synthetic oligonucleotide
tcagttgcggtagtacaagggtacggactaccgaagggggtcctgttcgggc

SEQ ID NO: 146441 - DNA, 53 bp, Artificial
  Synthetic oligonucleotide
gatacttaaagtgtggatagatggacttaaacccctagaagtttccttactag

SEQ ID NO: 146442 - DNA, 52 bp, Artificial
  Synthetic oligonucleotide
gttgacatgttgacatagtgacacgttgacatggtgacacgttgacatggtg

SEQ ID NO: 146443 - DNA, 52 bp, Artificial
  Synthetic oligonucleotide
caacttgccggatgtgatccaacaataatggcagacgctgctaaactcaatg

SEQ ID NO: 146444 - DNA, 52 bp, Artificial
  Synthetic oligonucleotide
agatttcttcgacggttatctagctcgcatgtggggtgtgcagtcacggttt

SEQ ID NO: 146445 - DNA, 52 bp, Artificial
  Synthetic oligonucleotide
agaaactcccataccgtgcgtaaggtgtaaccaaacagtaaaatttcgcgat

SEQ ID NO: 146446 - DNA, 52 bp, Artificial
  Synthetic oligonucleotide
cacgggtctcttgcgttaggtctggaagaactatacgtatggtattaccctc

SEQ ID NO: 146447 - DNA, 52 bp, Artificial
  Synthetic oligonucleotide
ccacgaagtgatgcatctcgcattaagtatcgcggcatacgaacaactaaaa

SEQ ID NO: 146448 - DNA, 52 bp, Artificial
  Synthetic oligonucleotide
gagggtgctcgcagggctaaggtggctgaggttgggcttgaagcgttaagga

SEQ ID NO: 146449 - DNA, 52 bp, Artificial
  Synthetic oligonucleotide
agtaaggttgggtgtggccaaaactagcagtgagtccagattatctcaaagg

SEQ ID NO: 146450 - DNA, 52 bp, Artificial
  Synthetic oligonucleotide
cctggcatacgtgaatatgcatgagggtcaagttgaggaccacaaccaacca

SEQ ID NO: 146451 - DNA, 52 bp, Artificial
  Synthetic oligonucleotide
aagtagctgacgcgagctctacgtcataccgccgcagaccatcataccgccg

SEQ ID NO: 146452 - DNA, 55 bp, Artificial
  Synthetic oligonucleotide
gatcatgaattctatattccggagcatagtcaagtggcaatgcagtctgaagata

SEQ ID NO: 146453 - DNA, 52 bp, Artificial
  Synthetic oligonucleotide
aagccttctcgttatgaacgcttgtctcccgaaattacaagaccatgttccc

SEQ ID NO: 146454 - DNA, 52 bp, Artificial
  Synthetic oligonucleotide
ggtgttagttggagggataacacgtcttactcattctggtttgtcgattact

SEQ ID NO: 146455 - DNA, 52 bp, Artificial
  Synthetic oligonucleotide
aaaaggcagttgtcttacttaaccttggtggacctgactcactgagtgcggt

SEQ ID NO: 146456 - DNA, 52 bp, Artificial
  Synthetic oligonucleotide
gcactagttagtgctactacattactgtcaacatgacgcaatatctcatcag

SEQ ID NO: 146457 - DNA, 52 bp, Artificial
  Synthetic oligonucleotide
ggttgcctgaccttaacctactgtacaaccctatgattgaagagctctcact

SEQ ID NO: 146458 - DNA, 52 bp, Artificial
  Synthetic oligonucleotide
atccaactactagcattgaggagccgttctatgtatctaacatgcggaagta

SEQ ID NO: 146459 - DNA, 51 bp, Artificial
  Synthetic oligonucleotide
attaacagctagatccgacgttaactctgcttcatctgctatatacctttg

SEQ ID NO: 146460 - DNA, 51 bp, Artificial
  Synthetic oligonucleotide
atgcctaaagcgccctctggacaacttttgctctgctacattcatcagacg

SEQ ID NO: 146461 - DNA, 51 bp, Artificial
  Synthetic oligonucleotide
tcccccaaagtttgcgcagtgaccgaccccttgctcgtgctagtgttctcc

SEQ ID NO: 146462 - DNA, 51 bp, Artificial
  Synthetic oligonucleotide
tccaccatcagtgattggcaactatgcaggcgcgcaagacggagacggact

SEQ ID NO: 146463 - DNA, 55 bp, Artificial
  Synthetic oligonucleotide
gatgagatattgctactaataacataagccatgctcccatactggaccctatgat

SEQ ID NO: 146464 - DNA, 51 bp, Artificial
  Synthetic oligonucleotide
catgccaattgccagagcatgcttggtaactatagaaggtcaagaactacg

SEQ ID NO: 146465 - DNA, 51 bp, Artificial
  Synthetic oligonucleotide
ccacgcacgcctgtatgcaacacagtgtcggccaacttgaacgcgtcagcg

SEQ ID NO: 146466 - DNA, 51 bp, Artificial
  Synthetic oligonucleotide
ccgtgctagggatgtcattggactcgggagggcacttaacgcatggagcgg

SEQ ID NO: 146467 - DNA, 51 bp, Artificial
  Synthetic oligonucleotide
cgaaacgcacacgaagggggcaagtgaggggagaacgtctttgtgcggtga

SEQ ID NO: 146468 - DNA, 51 bp, Artificial
  Synthetic oligonucleotide
taggtaaccctctcttagtgccaccattgctgagtattggtgttgaaggca

SEQ ID NO: 146469 - DNA, 51 bp, Artificial
  Synthetic oligonucleotide
cgatgactgcacgcttctccacgctagagtgctgctctctattcctactgg

SEQ ID NO: 146470 - DNA, 51 bp, Artificial
  Synthetic oligonucleotide
cgctcttactctcctcgattcacgaccaaactctgattacaagccgagtga

SEQ ID NO: 146471 - DNA, 51 bp, Artificial
  Synthetic oligonucleotide
ttttgctatgcgacataactatacaaccgcgtgaaccgctaatctgcgatg

SEQ ID NO: 146472 - DNA, 51 bp, Artificial
  Synthetic oligonucleotide
ttttatgaatctgggccaagatcctcatatgttgttgaaggggcgtcggag

SEQ ID NO: 146473 - DNA, 51 bp, Artificial
  Synthetic oligonucleotide
aaaggcaacgggagcttctacataggcctagactataacccaactttcaac

SEQ ID NO: 146474 - DNA, 55 bp, Artificial
  Synthetic oligonucleotide
gatgatgttctgtgcgtctttgtcgacagagatcgtgtaatgtagcgtaccatcc

SEQ ID NO: 146475 - DNA, 51 bp, Artificial
  Synthetic oligonucleotide
aaaggctccgttcgccgctcctagagatccgctcgcgtggccaactccaca

SEQ ID NO: 146476 - DNA, 51 bp, Artificial
  Synthetic oligonucleotide
aatcaattttcctggatcgaagtagtcaaggcactgggatgacaccctact

SEQ ID NO: 146477 - DNA, 51 bp, Artificial
  Synthetic oligonucleotide
acgccttatcggaaccacttcgagggaccaacatccactggccaaccccct

SEQ ID NO: 146478 - DNA, 51 bp, Artificial
  Synthetic oligonucleotide
acggagtattgggttctcctgcagttttacctctaggatgccagctgtcag

SEQ ID NO: 146479 - DNA, 51 bp, Artificial
  Synthetic oligonucleotide
actcgtacgaccgactcccatgcgtttaataacgtgaatattcgaatacgt

SEQ ID NO: 146480 - DNA, 51 bp, Artificial
  Synthetic oligonucleotide
actggcctaggggacagcatagcacttcgagcggtgcgaaggttggtgtgc

SEQ ID NO: 146481 - DNA, 51 bp, Artificial
  Synthetic oligonucleotide
tgtcgttgcaacgagcaatgacatggacggacaagtgacgtgccattacat

SEQ ID NO: 146482 - DNA, 51 bp, Artificial
  Synthetic oligonucleotide
agcaagcataccgatgaccccagcatcgtgaacagagaccccacgtgcagc

SEQ ID NO: 146483 - DNA, 51 bp, Artificial
  Synthetic oligonucleotide
agcaaggcccgatacccatgcaagttgtgcctatcgcgtgcacaccacgca

SEQ ID NO: 146484 - DNA, 51 bp, Artificial
  Synthetic oligonucleotide
agcatctcggggtcagatcatttgcgcatcgcccgaacgcggtcacaaagg

SEQ ID NO: 146485 - DNA, 55 bp, Artificial
  Synthetic oligonucleotide
gttgctacaggcttctgaccagctattaatgcaagatcacgaacacaagaattca

SEQ ID NO: 146486 - DNA, 51 bp, Artificial
  Synthetic oligonucleotide
agggagcaagttgactatatagatgtgtcaccaaagcaaattgtatctgtg

SEQ ID NO: 146487 - DNA, 51 bp, Artificial
  Synthetic oligonucleotide
atagaacatacagttccagtagcatctgagcatgaatcaagtagtgaaacc

SEQ ID NO: 146488 - DNA, 51 bp, Artificial
  Synthetic oligonucleotide
tctcccaaacgcttacggctactgggctctcccaacacgcagtagtccggg

SEQ ID NO: 146489 - DNA, 51 bp, Artificial
  Synthetic oligonucleotide
atcacggcaggtattagtccccttgcacgtaaagcgcgggcactccctgta

SEQ ID NO: 146490 - DNA, 51 bp, Artificial
  Synthetic oligonucleotide
gcgcttccaccgtagcctgcgccttgtctccaaatgatgcgacgctactcc

SEQ ID NO: 146491 - DNA, 51 bp, Artificial
  Synthetic oligonucleotide
gcgacttgctccactattgcgtcgcggaccttttgacctcctggcaacgga

SEQ ID NO: 146492 - DNA, 51 bp, Artificial
  Synthetic oligonucleotide
gtgggtctgaatccgccaaagacaaactccaagacagcaatgaccagatgc

SEQ ID NO: 146493 - DNA, 51 bp, Artificial
  Synthetic oligonucleotide
gtgtcttgccgctatcgtcttttaccagagggtctatgtcttctcgtgtta

SEQ ID NO: 146494 - DNA, 51 bp, Artificial
  Synthetic oligonucleotide
ggaaattatctgactagccaagacttgtgtgtgatcatcacttggttagta

SEQ ID NO: 146495 - DNA, 51 bp, Artificial
  Synthetic oligonucleotide
gccgaccccatattgtgtagcgtatgccttgaatgtgcgccaacagccgcg

SEQ ID NO: 146496 - DNA, 55 bp, Artificial
  Synthetic oligonucleotide
gatttggcggatgtacggcccgtagttgcagggcccaaaatgccacaggaaaggg

SEQ ID NO: 146497 - DNA, 51 bp, Artificial
  Synthetic oligonucleotide
ggagagtacctttgaaaggtccaatctctggagtaatacaccagttaattg

SEQ ID NO: 146498 - DNA, 51 bp, Artificial
  Synthetic oligonucleotide
gttctgtcgtaggtagagctatatcagttgttggcgaaatgttgttcataa

SEQ ID NO: 146499 - DNA, 51 bp, Artificial
  Synthetic oligonucleotide
gcacgtaaagcgcgggcactccctgtaccacacctctcacgaacggaggca

SEQ ID NO: 146500 - DNA, 51 bp, Artificial
  Synthetic oligonucleotide
gatgtcgatagtttagtcttgaagatgaacgaatgcttaaacccaaagggg

SEQ ID NO: 146501 - DNA, 51 bp, Artificial
  Synthetic oligonucleotide
gggatgtcattggactcgggagggcacttaacgcatggagcggggcctaat

SEQ ID NO: 146502 - DNA, 51 bp, Artificial
  Synthetic oligonucleotide
gggcagcccagaatcaagtaagtattgatagcgccctgaaggcattgcagc

SEQ ID NO: 146503 - DNA, 51 bp, Artificial
  Synthetic oligonucleotide
gacgtagaaggttaagagttggtgagtaccgtgtgatttacagagtaaatc

SEQ ID NO: 146504 - DNA, 51 bp, Artificial
  Synthetic oligonucleotide
tacaaccggccctccgaacgtcctaccatttcgttcctcccgtgtgcggat

SEQ ID NO: 146505 - DNA, 51 bp, Artificial
  Synthetic oligonucleotide
gacctcccacaatagctgcatgtaaaggtgtaagaccataattagcactag

SEQ ID NO: 146506 - DNA, 51 bp, Artificial
  Synthetic oligonucleotide
gaagtaacataaccggaatcctcccagcgcattagttgtctgcctgaagta

SEQ ID NO: 146507 - DNA, 55 bp, Artificial
  Synthetic oligonucleotide
gaaccctcaggcagacagttggcaacaagcttgcaaaactctatttactgccagc

SEQ ID NO: 146508 - DNA, 51 bp, Artificial
  Synthetic oligonucleotide
ggttgacactaattcgggattaatccgagcataatattgcatcactacaag

SEQ ID NO: 146509 - DNA, 51 bp, Artificial
  Synthetic oligonucleotide
ggtagctatatagaagttagatgagtaaatcgccttataaccttcctcagc

SEQ ID NO: 146510 - DNA, 51 bp, Artificial
  Synthetic oligonucleotide
ggtatagaatcactgatagctaacacaatacctacaatcaatctagacccg

SEQ ID NO: 146511 - DNA, 51 bp, Artificial
  Synthetic oligonucleotide
ggttattccatttgaagggataagcgatgaaaccctattaaaggtgtgcac

SEQ ID NO: 146512 - DNA, 51 bp, Artificial
  Synthetic oligonucleotide
cttcatgtcacgatattgtctattttgtgttcggattacgttaccttctcc

SEQ ID NO: 146513 - DNA, 51 bp, Artificial
  Synthetic oligonucleotide
gtcgcatcaaaaccgctacactgcgcttccaccgtagcctgcgccttgtct

SEQ ID NO: 146514 - DNA, 51 bp, Artificial
  Synthetic oligonucleotide
taccgccgcggtatctcagccgctaacaagtagcggggtgacgagttacta

SEQ ID NO: 146515 - DNA, 51 bp, Artificial
  Synthetic oligonucleotide
ggtcatgtgagaatcctgcggacctaggcaaagcgtgtgccccttatcccc

SEQ ID NO: 146516 - DNA, 50 bp, Artificial
  Synthetic oligonucleotide
gtattaacgtttctagaggagactgatgctctgatgcgatgatatatggg

SEQ ID NO: 146517 - DNA, 50 bp, Artificial
  Synthetic oligonucleotide
tttgagcaggagattgtatagtcggagttgggctttgttcagtaggcata

SEQ ID NO: 146518 - DNA, 56 bp, Artificial
  Synthetic oligonucleotide
aggggcactggcctacttaaccgtcataccgtcgcggtatctcagccgctaacaag

SEQ ID NO: 146519 - DNA, 55 bp, Artificial
  Synthetic oligonucleotide
gaagaaatacctcatgtggactagtgtagatttctattggtgctcatgatgggtg

SEQ ID NO: 146520 - DNA, 50 bp, Artificial
  Synthetic oligonucleotide
agacccagcgacttattagcgggaaacttgctaccaaaaccaccagactc

SEQ ID NO: 146521 - DNA, 50 bp, Artificial
  Synthetic oligonucleotide
actgtgccgtgctagcaccgctactcgctcgtcccgagtcaccacacaac

SEQ ID NO: 146522 - DNA, 50 bp, Artificial
  Synthetic oligonucleotide
aactgtagggtatacgtaggagggttctctctggaagatgcgctgagaaa

SEQ ID NO: 146523 - DNA, 50 bp, Artificial
  Synthetic oligonucleotide
ggtatggtcctgtggtaacattatatgagtttgaaccatctgctggtact

SEQ ID NO: 146524 - DNA, 50 bp, Artificial
  Synthetic oligonucleotide
ggagcgtctgtattgcaacatgtacctggtacgtatgactctagtcagtt

SEQ ID NO: 146525 - DNA, 50 bp, Artificial
  Synthetic oligonucleotide
acgtttgcagaatcgttcctggaagattttagttcgtctccccgttgggt

SEQ ID NO: 146526 - DNA, 50 bp, Artificial
  Synthetic oligonucleotide
ttaagatttacggtcccacaaggaatactggtacgttcgagtcagtaaaa

SEQ ID NO: 146527 - DNA, 50 bp, Artificial
  Synthetic oligonucleotide
acggcacgtcacgccggcagaccaagccaccccggcaattgtatacgata

SEQ ID NO: 146528 - DNA, 50 bp, Artificial
  Synthetic oligonucleotide
accctggcaacagacgtcttcctgcgtcctgtgccgtatgcacggccttg

SEQ ID NO: 146529 - DNA, 50 bp, Artificial
  Synthetic oligonucleotide
acgatcaataactcttgaaaggtaataccatggtaaatgcgtttgacccc

SEQ ID NO: 146530 - DNA, 55 bp, Artificial
  Synthetic oligonucleotide
gaaggtgtatcatggcttataatgcctttcagcggtgtttgcgtgagggaagctg

SEQ ID NO: 146531 - DNA, 50 bp, Artificial
  Synthetic oligonucleotide
tagaggatggaaacctatatgagttctccagcgaagaaatggggtatttt

SEQ ID NO: 146532 - DNA, 50 bp, Artificial
  Synthetic oligonucleotide
tactcatggcgagaacaccgcaagccccacccaggacggttatgccaatc

SEQ ID NO: 146533 - DNA, 50 bp, Artificial
  Synthetic oligonucleotide
cgtccttcacaaattttagagtagtgccgcctggcacagggatttgccac

SEQ ID NO: 146534 - DNA, 50 bp, Artificial
  Synthetic oligonucleotide
cgatacaatatctatgggtgattcaaccggttggcagttaatcccaaaag

SEQ ID NO: 146535 - DNA, 50 bp, Artificial
  Synthetic oligonucleotide
taggcagggcatcgtctgtttgacgacgggttcttcgcgacacaccttgc

SEQ ID NO: 146536 - DNA, 50 bp, Artificial
  Synthetic oligonucleotide
ctcgaattggagcttctaatattgactcaccaccaagattttcagccctt

SEQ ID NO: 146537 - DNA, 50 bp, Artificial
  Synthetic oligonucleotide
tatgactgtaaaatctctccttaggccgactcgctccgcgttgctacgca

SEQ ID NO: 146538 - DNA, 50 bp, Artificial
  Synthetic oligonucleotide
ccatacactcggcgacgcatcatcaggattaaaccatctagcacccaggc

SEQ ID NO: 146539 - DNA, 50 bp, Artificial
  Synthetic oligonucleotide
cttgttaatgcggacctaaagcctgccaaatgtgtaccaccatcccgttg

SEQ ID NO: 146540 - DNA, 50 bp, Artificial
  Synthetic oligonucleotide
gaaccagtgcaactgctgtaagacaagcacctattactggataatcgtat

SEQ ID NO: 146541 - DNA, 55 bp, Artificial
  Synthetic oligonucleotide
taccactccacacatcgtccaatcattaaactgtaacattgttgtaatggaactc

SEQ ID NO: 146542 - DNA, 50 bp, Artificial
  Synthetic oligonucleotide
tcaccctagctcctgcgcccagatttagcccgttctcacacttcgccgta

SEQ ID NO: 146543 - DNA, 50 bp, Artificial
  Synthetic oligonucleotide
gagatcttcctgcattgctagggaatatgcgccttctattggaatgaaca

SEQ ID NO: 146544 - DNA, 50 bp, Artificial
  Synthetic oligonucleotide
caaaacgggcaatattgtgatatgaagggcgtacttcagatgactttccc

SEQ ID NO: 146545 - DNA, 50 bp, Artificial
  Synthetic oligonucleotide
attgattataccgtgaggagtaagtatggtacctagtcgtgcgttattgt

SEQ ID NO: 146546 - DNA, 50 bp, Artificial
  Synthetic oligonucleotide
gaggtgccccctcgttgttgtccgtgaaagtagggtcccgctgcccctag

SEQ ID NO: 146547 - DNA, 50 bp, Artificial
  Synthetic oligonucleotide
atggcttgacctacaactgtacgaactttctttgtagtcgacagaagttt

SEQ ID NO: 146548 - DNA, 50 bp, Artificial
  Synthetic oligonucleotide
gagtgcgcaccgctctcccgcagaccggcgtatgacgttcccggttcggt

SEQ ID NO: 146549 - DNA, 50 bp, Artificial
  Synthetic oligonucleotide
atattactaagtgcatccgtaaacatcagtgcaataatacaacccggagg

SEQ ID NO: 146550 - DNA, 50 bp, Artificial
  Synthetic oligonucleotide
agtcggaagtgctggcagtagccagtaggcgtgttaatgcgggggctgtt

SEQ ID NO: 146551 - DNA, 50 bp, Artificial
  Synthetic oligonucleotide
agggcgagtatcctgcaagcaaggagtgctgcattttctgcgccggcttt

SEQ ID NO: 146552 - DNA, 55 bp, Artificial
  Synthetic oligonucleotide
gtttggggtcaaccttgcgaccagagacgctgtcatactttcggggttcagcgaa

SEQ ID NO: 146553 - DNA, 50 bp, Artificial
  Synthetic oligonucleotide
gtgtctgtagatccggcttctgagaaagtccctacgtgttgtggtgtttt

SEQ ID NO: 146554 - DNA, 50 bp, Artificial
  Synthetic oligonucleotide
gccgctgcgtaactcagttgctctgcggtcaaaacctccctgccccaatc

SEQ ID NO: 146555 - DNA, 44 bp, Artificial
  Synthetic oligonucleotide
aaccgtcataccgtcacggtatctcttagccgctaacaagtagc

SEQ ID NO: 146556 - DNA, 44 bp, Artificial
  Synthetic oligonucleotide
gctacttgttagcggctaagagataccgtgacggtatgacggtt

SEQ ID NO: 146557 - DNA, 55 bp, Artificial
  Synthetic oligonucleotide
gaagtttgccctccttgccgtgcagcccagttttgacctcgggcctgtttataag

SEQ ID NO: 146558 - DNA, 55 bp, Artificial
  Synthetic oligonucleotide
gacaagacagagtaatgtatagaaacttagatgacaacagcctaatggtctctgc

SEQ ID NO: 146559 - DNA, 55 bp, Artificial
  Synthetic oligonucleotide
gaccaatacgactgctctcaactctgaaagacgctttcttgatcggactataaag

SEQ ID NO: 146560 - DNA, 55 bp, Artificial
  Synthetic oligonucleotide
gaccagactaattttctgtcgataattctggcgggcagatgcggttgactgtcga

SEQ ID NO: 146561 - DNA, 55 bp, Artificial
  Synthetic oligonucleotide
taatacgtagcatttctttgccgtaatcatcgtaacgtcctgactctcgccaaag

SEQ ID NO: 146562 - DNA, 55 bp, Artificial
  Synthetic oligonucleotide
gagccacaactcggttgcttatttgcggagcctcggagccacaactcggttgcta

SEQ ID NO: 146563 - DNA, 60 bp, Artificial
  Synthetic oligonucleotide
agggtgcaaagccaaaaagacgtgctcagtgctctatgcatcaggcaacggttcctgtgg

SEQ ID NO: 146564 - DNA, 55 bp, Artificial
  Synthetic oligonucleotide
taaggtagggaatgaaaatgatagaggcaaacatgttaccaatgaggacgatcgt

SEQ ID NO: 146565 - DNA, 55 bp, Artificial
  Synthetic oligonucleotide
gagcattaggagctataaagtgagcattaggcaatagttcacccattaaacgtcc

SEQ ID NO: 146566 - DNA, 55 bp, Artificial
  Synthetic oligonucleotide
ctattgagacaacagttactatacgttttgcagtatctacacggtagacgatacg

SEQ ID NO: 146567 - DNA, 55 bp, Artificial
  Synthetic oligonucleotide
ctatactaacaacgatagcgcgagatatacgcaagaaggtaatcgcgtgttgcca

SEQ ID NO: 146568 - DNA, 55 bp, Artificial
  Synthetic oligonucleotide
ctaggtggctgctagtgtgccacaacgctgctataaaatcccaccgtgagcagcc

SEQ ID NO: 146569 - DNA, 55 bp, Artificial
  Synthetic oligonucleotide
ctagaaaactcggaatatatcggagtaacaggagcattatggaaaccatacgatg

SEQ ID NO: 146570 - DNA, 55 bp, Artificial
  Synthetic oligonucleotide
ctacgagatacagcacagaacttatgactttgactcccttcaggataccactgcc

SEQ ID NO: 146571 - DNA, 53 bp, Artificial
  Synthetic oligonucleotide
ctaccggaaagcctagactcggatttgcttccagaagcttaaggtaacggtcc

SEQ ID NO: 146572 - DNA, 55 bp, Artificial
  Synthetic oligonucleotide
ctaatacacctaccggccttgcacagagcactgccccaggcatcacaggaaatct

SEQ ID NO: 146573 - DNA, 50 bp, Artificial
  Synthetic oligonucleotide
cgtttaaaccgaaggttacgcttaagtatcctatggaaaagggtccacta

SEQ ID NO: 146574 - DNA, 59 bp, Artificial
  Synthetic oligonucleotide
gccaaacgcttgacactggaaccttatcgtcatgccatcacgaaccgtcataccgccgg

SEQ ID NO: 146575 - DNA, 55 bp, Artificial
  Synthetic oligonucleotide
cgttgttgattgctatgatgatcattctagctcgtgatattgccatagactgtaa

SEQ ID NO: 146576 - DNA, 55 bp, Artificial
  Synthetic oligonucleotide
cgtgtccattgactcatatagctgctttctgttcttatgcacgctatcgaatgct

SEQ ID NO: 146577 - DNA, 55 bp, Artificial
  Synthetic oligonucleotide
tacgcagtattcccacaacgtactgtcccggccttccagatctatgcatgcccat

SEQ ID NO: 146578 - DNA, 55 bp, Artificial
  Synthetic oligonucleotide
cgtcataccgccgcggtatctcttagccgctaacaagtagcgggatgacgattgt

SEQ ID NO: 146579 - DNA, 54 bp, Artificial
  Synthetic oligonucleotide
cgtcacgaagagcagggttaatcttttgtccagagtaccgataaaacgtcgaat

SEQ ID NO: 146580 - DNA, 55 bp, Artificial
  Synthetic oligonucleotide
cgtattgagcgcgccgcttagttgtaccatggcatcatgcgtagcaagcgcctcg

SEQ ID NO: 146581 - DNA, 55 bp, Artificial
  Synthetic oligonucleotide
cgtatatcccgttagtagctcggatttattgccagtggcgaggagcaaccatccc

SEQ ID NO: 146582 - DNA, 55 bp, Artificial
  Synthetic oligonucleotide
cggttcgcggtggcatgatgtaggactgctgtgacaccattatagaatgaaccag

SEQ ID NO: 146583 - DNA, 55 bp, Artificial
  Synthetic oligonucleotide
cgggatctcttgttagcggctgagatactgcggcggtatgacgtagattgctgtc

SEQ ID NO: 146584 - DNA, 55 bp, Artificial
  Synthetic oligonucleotide
cggctttctcattagtagcacttgtagggttgcgcctaatacgtgtgaagccagg

SEQ ID NO: 146585 - DNA, 59 bp, Artificial
  Synthetic oligonucleotide
acgggttacaacagcagcatgcgaggtcatccctccccgtgctgttactatgccacttg

SEQ ID NO: 146586 - DNA, 55 bp, Artificial
  Synthetic oligonucleotide
gaaagtgcagtcataaatgcctgaaaatgcgtaatatggccatcatggtgattcg

SEQ ID NO: 146587 - DNA, 55 bp, Artificial
  Synthetic oligonucleotide
ctttaccctctcaggatcagaagacgcgagatcggccttattgagtacagtaacg

SEQ ID NO: 146588 - DNA, 55 bp, Artificial
  Synthetic oligonucleotide
cttgtgctgcagtctagacataacgcccgcgtgcgacctctcagggcttcttcgg

SEQ ID NO: 146589 - DNA, 54 bp, Artificial
  Synthetic oligonucleotide
cttggaatacgtttaggttgttttggatatgtagcaaaattgcgtagagtacgg

SEQ ID NO: 146590 - DNA, 55 bp, Artificial
  Synthetic oligonucleotide
cttgccgatcttaccgtgccgagactgagttacgtatcagctgtgcacactccgc

SEQ ID NO: 146591 - DNA, 55 bp, Artificial
  Synthetic oligonucleotide
cttctataagttccccacattacccttgagttagcagaactatcattaacatgca

SEQ ID NO: 146592 - DNA, 55 bp, Artificial
  Synthetic oligonucleotide
cttcaccccagattatatgtgttcttgaattcaaaccgtacttactagtcagtcc

SEQ ID NO: 146593 - DNA, 53 bp, Artificial
  Synthetic oligonucleotide
cttagttagacttcgtggtaaacatgttaccgtccacttccgcctaacaagta

SEQ ID NO: 146594 - DNA, 55 bp, Artificial
  Synthetic oligonucleotide
cttaaattgtcattgtgggtacgtatgcaagccgagtaaccaggttgatgacgac

SEQ ID NO: 146595 - DNA, 55 bp, Artificial
  Synthetic oligonucleotide
ctgtgcgaattcaaaatctcgtgtatcatgagctgggcaaccaaatattgctccc

SEQ ID NO: 146596 - DNA, 59 bp, Artificial
  Synthetic oligonucleotide
gaggcttatcgtcatgccaccgcgaaccgtcataccgtcacggtatctcttagccgcta

SEQ ID NO: 146597 - DNA, 55 bp, Artificial
  Synthetic oligonucleotide
ctgcaggaaatccctcgtatctgggccgtataaaactattacaccacggcttggc

SEQ ID NO: 146598 - DNA, 55 bp, Artificial
  Synthetic oligonucleotide
ctctagatgatccggaaggacctgtgtcattttctcatctcgtttatagtactgg

SEQ ID NO: 146599 - DNA, 55 bp, Artificial
  Synthetic oligonucleotide
ctcggactaacagatcgatttgatgtcatagtcggctcaggtgatacggaccagg

SEQ ID NO: 146600 - DNA, 55 bp, Artificial
  Synthetic oligonucleotide
taccgcgatgccagtaaacgcgtgctcgcttatgggtgtatcaacaactctgcta

SEQ ID NO: 146601 - DNA, 55 bp, Artificial
  Synthetic oligonucleotide
ctcctctgcagattttaccgacgcatccttggtagaggtaaacttcacggaatcc

SEQ ID NO: 146602 - DNA, 55 bp, Artificial
  Synthetic oligonucleotide
ctccgagtagtctaccttcgttggattacatattggttaacctgctacagtttag

SEQ ID NO: 146603 - DNA, 55 bp, Artificial
  Synthetic oligonucleotide
ctcaggaacgtacctatttagtataataggctctggttctacaggtacaggtgta

SEQ ID NO: 146604 - DNA, 55 bp, Artificial
  Synthetic oligonucleotide
ctatttggaagttgatactcaagagaagtcggtgaggtatttaagagtgcctaag

SEQ ID NO: 146605 - DNA, 55 bp, Artificial
  Synthetic oligonucleotide
gtgagattaagtctagaagagaaacagatagtgaaataccgtatcggggttatct

SEQ ID NO: 146606 - DNA, 55 bp, Artificial
  Synthetic oligonucleotide
gggtgcagcctgaatttgtggtcgtgttttgtggtgggattatggggttcttgcg

SEQ ID NO: 146607 - DNA, 59 bp, Artificial
  Synthetic oligonucleotide
tagcggggtctagagataccgcagatgagttgcgccaacgtctccgctggaatgacata

SEQ ID NO: 146608 - DNA, 55 bp, Artificial
  Synthetic oligonucleotide
gggtacccttgagcatcatatcgcatcccatttcaacagaacgaagtactgcagc

SEQ ID NO: 146609 - DNA, 55 bp, Artificial
  Synthetic oligonucleotide
gggctagcgtaagtatcagagcacctcgacaataagctaagttaagcgaagaata

SEQ ID NO: 146610 - DNA, 55 bp, Artificial
  Synthetic oligonucleotide
gggcccaagacctatagatgtggacatactactgtacgatggcctgtcgatgcag

SEQ ID NO: 146611 - DNA, 55 bp, Artificial
  Synthetic oligonucleotide
gggcatggagtgcttcctaatactccgattgagaatattgctgcgctagtcgact

SEQ ID NO: 146612 - DNA, 55 bp, Artificial
  Synthetic oligonucleotide
gggcatgaaccaaggtccaacacatacctaccccgctgcaagagcttaaatttgc

SEQ ID NO: 146613 - DNA, 55 bp, Artificial
  Synthetic oligonucleotide
gtgcgttttatggtgataaggtgctctatacgcactcctcacacttgagcgacgc

SEQ ID NO: 146614 - DNA, 55 bp, Artificial
  Synthetic oligonucleotide
gggaccactttatcgtagggcagaaatcggaatctaggtggctatttcccggcgc

SEQ ID NO: 146615 - DNA, 55 bp, Artificial
  Synthetic oligonucleotide
ggcctctagccccgaggtcaaaagtagtgtagagagcctgttgagagtttatggc

SEQ ID NO: 146616 - DNA, 55 bp, Artificial
  Synthetic oligonucleotide
ggcccttcacgttggagttcgtgagtatgacgcactctataccggagatgcactc

SEQ ID NO: 146617 - DNA, 55 bp, Artificial
  Synthetic oligonucleotide
ggccagaactaagcgcctattctacttgcgggatgtgctcacatggtcgcctctg

SEQ ID NO: 146618 - DNA, 50 bp, Artificial
  Synthetic oligonucleotide
acccccacgtatgggctatgggtcctaccacggcttttaacgaaaccgcc

SEQ ID NO: 146619 - DNA, 57 bp, Artificial
  Synthetic oligonucleotide
gaccctctcatatccgttcgtatcctttcccgaatccactcctacgcagtaatccga

SEQ ID NO: 146620 - DNA, 55 bp, Artificial
  Synthetic oligonucleotide
gccttgagagaatctggctctgtaccatcccacacaaagtgaccgtgtgctcctc

SEQ ID NO: 146621 - DNA, 55 bp, Artificial
  Synthetic oligonucleotide
gcgcggagacctccagtcctatcttgtaagatgttcccacgaagggtgcccacct

SEQ ID NO: 146622 - DNA, 54 bp, Artificial
  Synthetic oligonucleotide
cgcgctctaagtagaagaacaccacgttttcccatacacgcagactgtcaaaga

SEQ ID NO: 146623 - DNA, 54 bp, Artificial
  Synthetic oligonucleotide
tacaaggctccagttatacaatttgccaagaaaccataagctgcaacgtttgta

SEQ ID NO: 146624 - DNA, 54 bp, Artificial
  Synthetic oligonucleotide
tatcccgcaagcgctgattacgagtggaaagtcaacgggggtttcaggtatcaa

SEQ ID NO: 146625 - DNA, 54 bp, Artificial
  Synthetic oligonucleotide
ctccattagagtccaccgagttcaaacctgcagaacctctttatctcaacgttg

SEQ ID NO: 146626 - DNA, 54 bp, Artificial
  Synthetic oligonucleotide
ggaatccaccgcgaaacgatttacatggacagagtaagcgtaatctataaactc

SEQ ID NO: 146627 - DNA, 54 bp, Artificial
  Synthetic oligonucleotide
ttacgagacatagcaggtgtaagaagagtaaaatccttcacaccccttatctga

SEQ ID NO: 146628 - DNA, 54 bp, Artificial
  Synthetic oligonucleotide
atacacttacccagtccgcaaggtgcaccaggtaaagacttctcgcaaggtaag

SEQ ID NO: 146629 - DNA, 53 bp, Artificial
  Synthetic oligonucleotide
aaaacggtgatagtataccatggctatggtttcgttaccctttacgctcacct

SEQ ID NO: 146630 - DNA, 57 bp, Artificial
  Synthetic oligonucleotide
attacccacattatcaaccctgagttcattgcaccgcaatttgtttcccagaccctc

SEQ ID NO: 146631 - DNA, 53 bp, Artificial
  Synthetic oligonucleotide
ctgatacttcttaaagagagccattacagtctgaacccaccaactggtaaggt

SEQ ID NO: 146632 - DNA, 53 bp, Artificial
  Synthetic oligonucleotide
atgaaggtagctcccgacccctacagagaccagacttacaccctcaaggctat

SEQ ID NO: 146633 - DNA, 53 bp, Artificial
  Synthetic oligonucleotide
gataatacccgagttcgtaggacacacaatagcggttcacaacgggaaaactt

SEQ ID NO: 146634 - DNA, 51 bp, Artificial
  Synthetic oligonucleotide
gagtacgtccccgtacttggggtcgggcggtatttctctcggaggtactgg

SEQ ID NO: 146635 - DNA, 53 bp, Artificial
  Synthetic oligonucleotide
atccaggcgtccatcggataggcaaagtaccgggagaaggttacgaccctccc

SEQ ID NO: 146636 - DNA, 53 bp, Artificial
  Synthetic oligonucleotide
caagtggcgaagttatccaaagcgtgagcgtaaaggctatagattacaaagac

SEQ ID NO: 146637 - DNA, 53 bp, Artificial
  Synthetic oligonucleotide
ccgtactcctttaccaggtgttgaacatagtctttacctcccatggatacacc

SEQ ID NO: 146638 - DNA, 53 bp, Artificial
  Synthetic oligonucleotide
gtaaaactccttagcgtaggggtctttgtatacaagcgttccagagataccgc

SEQ ID NO: 146639 - DNA, 53 bp, Artificial
  Synthetic oligonucleotide
tatagttgcagaatcctacgatcccgatagtaagccttccgaaacggaaaact

SEQ ID NO: 146640 - DNA, 53 bp, Artificial
  Synthetic oligonucleotide
gtaggtatgtatactgtagagagcataccgcgcgaagctggtaccactttggg

SEQ ID NO: 146641 - DNA, 57 bp, Artificial
  Synthetic oligonucleotide
ccgctagtgtgcccgatttaactcccaacagggtgactgtggttgatagcaacggcg

SEQ ID NO: 146642 - DNA, 52 bp, Artificial
  Synthetic oligonucleotide
cccttacataacctactcaagcgtttggtcggggactccggcagctttaaag

SEQ ID NO: 146643 - DNA, 52 bp, Artificial
  Synthetic oligonucleotide
ctcccgaaagtctaaaggtctttttaactcgctccataaatccatctttaag

SEQ ID NO: 146644 - DNA, 52 bp, Artificial
  Synthetic oligonucleotide
accagtaacgccttgtccacattgtggtgtaatacaaaacccgccttatcta

SEQ ID NO: 146645 - DNA, 51 bp, Artificial
  Synthetic oligonucleotide
gggtggcactaagggagcacgtactggagtatctcaccactaccactatag

SEQ ID NO: 146646 - DNA, 51 bp, Artificial
  Synthetic oligonucleotide
tctcagcgtatgcatcaggggttccatctccgttaaagtcaggggtgaagt

SEQ ID NO: 146647 - DNA, 51 bp, Artificial
  Synthetic oligonucleotide
aggttcccggttctgactcgtccgcgttgcatataaagtacctgggtccgg

SEQ ID NO: 146648 - DNA, 51 bp, Artificial
  Synthetic oligonucleotide
ggtggacccatagaggtggtaaaccccgacgcggaggtgtttgtggtagct

SEQ ID NO: 146649 - DNA, 51 bp, Artificial
  Synthetic oligonucleotide
agcttcaggcacccaccattgcagaatccggtgccaatgtgccagtcagcg

SEQ ID NO: 146650 - DNA, 51 bp, Artificial
  Synthetic oligonucleotide
tagatagaacctctcggtagccagagaacgagtcctgctcccacgttttcg

SEQ ID NO: 146651 - DNA, 51 bp, Artificial
  Synthetic oligonucleotide
aggagtgctggacagctcggtagcgaaggggctactggggagcattagcag

SEQ ID NO: 146652 - DNA, 57 bp, Artificial
  Synthetic oligonucleotide
ttagctgtttgacacattaaaaaccacgtataatcttatacatatgaaagttcgcaa

SEQ ID NO: 146653 - DNA, 51 bp, Artificial
  Synthetic oligonucleotide
atacagcgggagacctgtcaaagcagtgcaagtgggcggtcctttgggtgc

SEQ ID NO: 146654 - DNA, 51 bp, Artificial
  Synthetic oligonucleotide
agcctgccgttgacagctcccccttaggtattggcggacctgcaaaggaca

SEQ ID NO: 146655 - DNA, 51 bp, Artificial
  Synthetic oligonucleotide
tgacactcgatggaggacccgttaaggttacagatggttcaaagtgggaaa

SEQ ID NO: 146656 - DNA, 51 bp, Artificial
  Synthetic oligonucleotide
agaggggttggcaaatagaggagtgctggacagctcggtagcgaaggggct

SEQ ID NO: 146657 - DNA, 51 bp, Artificial
  Synthetic oligonucleotide
aaatcgcatgcctcccatacccttccgagagggttttaacgagggcgggcg

SEQ ID NO: 146658 - DNA, 51 bp, Artificial
  Synthetic oligonucleotide
ttacgaaggggcaagatggactatagcagaatgcgctagaaacttatcttg

SEQ ID NO: 146659 - DNA, 51 bp, Artificial
  Synthetic oligonucleotide
acgtcctgtacgcttccctcaccaacctgttaagaccaggctcatcaaaac

SEQ ID NO: 146660 - DNA, 51 bp, Artificial
  Synthetic oligonucleotide
ccgcaccgtaaggtaccgcgctgggtgctatggcgtgctttgagcctttta

SEQ ID NO: 146661 - DNA, 51 bp, Artificial
  Synthetic oligonucleotide
actcaagcccgtactcgcaggcaaagagcctggtagccacacccgcatctc

SEQ ID NO: 146662 - DNA, 50 bp, Artificial
  Synthetic oligonucleotide
gtgcagccgtaggcatacagctggcacacgcaggcagaaaggctgaggac

SEQ ID NO: 146663 - DNA, 55 bp, Artificial
  Synthetic oligonucleotide
cgaaagcgtaataaggagtaaggcaaggcttacctatgacgaggctctaaggctc

SEQ ID NO: 146664 - DNA, 50 bp, Artificial
  Synthetic oligonucleotide
gtctcacttccaccgccgaaggagcatcccgcctgtatctgcccgaaggt

SEQ ID NO: 146665 - DNA, 50 bp, Artificial
  Synthetic oligonucleotide
aaggtcagggagttctgtcccgtgtgcggtacccgtttcagcgttggggg

SEQ ID NO: 146666 - DNA, 50 bp, Artificial
  Synthetic oligonucleotide
aatggcagccaacgttatacagctgctcggtgtcccctccgtcgcagggg

SEQ ID NO: 146667 - DNA, 50 bp, Artificial
  Synthetic oligonucleotide
aagggtggacagctggtcaggtctgccggcacagaggcacagatactcgg

SEQ ID NO: 146668 - DNA, 50 bp, Artificial
  Synthetic oligonucleotide
gtgggtgcgggtagtggaggttacgaggcggggctttacgccttcagaag

SEQ ID NO: 146669 - DNA, 50 bp, Artificial
  Synthetic oligonucleotide
acaaccaccacgggagagctctttagcacccgcgaagcctcacgcgcaag

SEQ ID NO: 146670 - DNA, 50 bp, Artificial
  Synthetic oligonucleotide
acacagccctacacggcgtaagctccccggaggacgttccctccttcgtg

SEQ ID NO: 146671 - DNA, 50 bp, Artificial
  Synthetic oligonucleotide
acagggtggggacgctctcgggaggtaagcccatggctggggcgaggctt

SEQ ID NO: 146672 - DNA, 50 bp, Artificial
  Synthetic oligonucleotide
ggtatcctcgttgaacctcctacgagcactatgtcgtctatgtcctgggg

SEQ ID NO: 146673 - DNA, 50 bp, Artificial
  Synthetic oligonucleotide
ggtaggaactccgtaagccgcacccctcggatacctcagggcgaaaggct

SEQ ID NO: 146674 - DNA, 55 bp, Artificial
  Synthetic oligonucleotide
atgtggtaggtcttggcaagaaggataaggcaagctttgacgactacaggagagc

SEQ ID NO: 146675 - DNA, 50 bp, Artificial
  Synthetic oligonucleotide
gggttcgagcattacccttacgagggcgtagagggctcccagtcccccta

SEQ ID NO: 146676 - DNA, 50 bp, Artificial
  Synthetic oligonucleotide
gggtaccgctattcccaccacgaccgcctctctaacaccgagggccacag

SEQ ID NO: 146677 - DNA, 50 bp, Artificial
  Synthetic oligonucleotide
ggggtattcctggcccttacgtgcgattgggtctttgcacgggatggcgt

SEQ ID NO: 146678 - DNA, 50 bp, Artificial
  Synthetic oligonucleotide
ggggcatgtctcggttggatctctatggcacccatctgcttgggagccgg

SEQ ID NO: 146679 - DNA, 50 bp, Artificial
  Synthetic oligonucleotide
acatagcgcccaagcctgctatcgcagtcccgcccaccgtgctgagagtt

SEQ ID NO: 146680 - DNA, 50 bp, Artificial
  Synthetic oligonucleotide
ggcgagtccttccactattgcggtcttaccgactccggggtctcccacga

SEQ ID NO: 146681 - DNA, 50 bp, Artificial
  Synthetic oligonucleotide
ggcgagaaagggcggagagttccacgcctggtcccccgaagttgttcgtg

SEQ ID NO: 146682 - DNA, 50 bp, Artificial
  Synthetic oligonucleotide
ggcatggaccccgcctatcgccttaaccctccatcacccataggaggggg

SEQ ID NO: 146683 - DNA, 50 bp, Artificial
  Synthetic oligonucleotide
ggcaggctttactcccggtgaggcggacaccctcagaaaggccataggta

SEQ ID NO: 146684 - DNA, 50 bp, Artificial
  Synthetic oligonucleotide
ggacccatacgtgcctgtatgtggcccgccagcttacgctcaaaccacgt

SEQ ID NO: 146685 - DNA, 55 bp, Artificial
  Synthetic oligonucleotide
attacgggcacatatacaaggactacgagtgatcagctctccttaagggagttca

SEQ ID NO: 146686 - DNA, 50 bp, Artificial
  Synthetic oligonucleotide
ttgggaccgctaagagcccagcctatgagggggacccattcctgacctga

SEQ ID NO: 146687 - DNA, 50 bp, Artificial
  Synthetic oligonucleotide
ttcttgctttgagcttgaaagccctgctttactccttaatcactaaacgg

SEQ ID NO: 146688 - DNA, 50 bp, Artificial
  Synthetic oligonucleotide
ttaggtgggtgctctcccgaaacgccctcaggacagttccggagaccgag

SEQ ID NO: 146689 - DNA, 50 bp, Artificial
  Synthetic oligonucleotide
aaaggcagccttcctgcacgttgtcacggacaccttaggctccgtagccg

SEQ ID NO: 146690 - DNA, 50 bp, Artificial
  Synthetic oligonucleotide
aaaggcgcttccttgtctcacttccaccgccgaaggagcatcccgcctgt

SEQ ID NO: 146691 - DNA, 50 bp, Artificial
  Synthetic oligonucleotide
tgcaactggcaagcgttccaccggttagcgcccacctcaccaggtccatc

SEQ ID NO: 146692 - DNA, 50 bp, Artificial
  Synthetic oligonucleotide
aaccctcctacgaaggctggggtgcgggatacgaccctaagctactgccc

SEQ ID NO: 146693 - DNA, 50 bp, Artificial
  Synthetic oligonucleotide
aaccctgcagagctctggcgcgaaacgggaaggtgggacctgtacggtag

SEQ ID NO: 146694 - DNA, 50 bp, Artificial
  Synthetic oligonucleotide
tcttccagaacggaaggctcagctggtacgtgatgggtcttgccacggga

SEQ ID NO: 146695 - DNA, 50 bp, Artificial
  Synthetic oligonucleotide
tctcccaccgccacggctacctgacctgttgacccgctcctgcaatcccc

SEQ ID NO: 146696 - DNA, 55 bp, Artificial
  Synthetic oligonucleotide
ccttcagacaaatcttcttgtgcggaagctttattttgtgtaccttgtggtcttg

SEQ ID NO: 146697 - DNA, 50 bp, Artificial
  Synthetic oligonucleotide
aacctcatcaaggtgtccgcaaaggcgggcgtagcggcgataacagcctc

SEQ ID NO: 146698 - DNA, 50 bp, Artificial
  Synthetic oligonucleotide
aacctcatggggaactcacgccacgcccagatgtcccccgcatcgtactc

SEQ ID NO: 146699 - DNA, 50 bp, Artificial
  Synthetic oligonucleotide
tcccgtgagggtcgcgagttttccgtccagggtctgggcccattttagcg

SEQ ID NO: 146700 - DNA, 50 bp, Artificial
  Synthetic oligonucleotide
tcccgccgtaatgtgcactcctgataactccgagggctgttccccacccg

SEQ ID NO: 146701 - DNA, 50 bp, Artificial
  Synthetic oligonucleotide
aaccttcacgtccacggcagtaaccgtacctccgaagcccatgggtcccc

SEQ ID NO: 146702 - DNA, 50 bp, Artificial
  Synthetic oligonucleotide
tcaagtaggaacgaacaccctccttatccccgggcacgacgcagcggttt

SEQ ID NO: 146703 - DNA, 50 bp, Artificial
  Synthetic oligonucleotide
aacgcatgcgagggagcccccgagtgcaggcagatattcgccacaccctt

SEQ ID NO: 146704 - DNA, 50 bp, Artificial
  Synthetic oligonucleotide
tcaagggagcttgcaaacgccacgagcccgtaccttgaaactctcccgta

SEQ ID NO: 146705 - DNA, 50 bp, Artificial
  Synthetic oligonucleotide
aacgggtgtaggtggcgctaaggactaccgagggtagcacgctccccttg

SEQ ID NO: 146706 - DNA, 50 bp, Artificial
  Synthetic oligonucleotide
tactcgcaggcaaagagcctggtagccacacccgcatctccaaaagcgtt

SEQ ID NO: 146707 - DNA, 55 bp, Artificial
  Synthetic oligonucleotide
cctaccgtccttttgcacctccggaagctgtataaagtatccgccgtgcctactc

SEQ ID NO: 146708 - DNA, 50 bp, Artificial
  Synthetic oligonucleotide
taccactcaggcgctatgtgagcgggggtcttaagggggtttgcgggttc

SEQ ID NO: 146709 - DNA, 49 bp, Artificial
  Synthetic oligonucleotide
aactccgggaacctccgcggttgtgtaggaaagtccgaacccgtcctcc

SEQ ID NO: 146710 - DNA, 50 bp, Artificial
  Synthetic oligonucleotide
aactctgtactccccgccgcagctgctatccttccccagttcggatccct

SEQ ID NO: 146711 - DNA, 50 bp, Artificial
  Synthetic oligonucleotide
aactgcgtgggcggaaccctttacaggtacggaacgagcatggatccggc

SEQ ID NO: 146712 - DNA, 50 bp, Artificial
  Synthetic oligonucleotide
aagccagctcgtaaaggatagcggcaagatagcgtgcgactgccggtcgg

SEQ ID NO: 146713 - DNA, 50 bp, Artificial
  Synthetic oligonucleotide
aagcgggctggggctcgtttccgtccacgactttatgggcgaagaacccc

SEQ ID NO: 146714 - DNA, 50 bp, Artificial
  Synthetic oligonucleotide
taacagatgccgtccacctcaggtgcctgcaggtaaacccttcccacggg

SEQ ID NO: 146715 - DNA, 50 bp, Artificial
  Synthetic oligonucleotide
taacacctaaggcggtaccccatcccgctgtggccaaagctcccgtgtta

SEQ ID NO: 146716 - DNA, 50 bp, Artificial
  Synthetic oligonucleotide
aaggcgacgtttgtcgcgaggtctccgtgcttctcgtcccttggcttctc

SEQ ID NO: 146717 - DNA, 50 bp, Artificial
  Synthetic oligonucleotide
aagggactcccctgctaaggtagcccgccgaaggagcaaagatgtcccta

SEQ ID NO: 146718 - DNA, 55 bp, Artificial
  Synthetic oligonucleotide
caacgcctcctactatgagcttacagcagacagagtttataacgcgcccatcctc

SEQ ID NO: 146719 - DNA, 50 bp, Artificial
  Synthetic oligonucleotide
agcctccgcgtctccggaagtttccaccgcaacgaagagactgcctccga

SEQ ID NO: 146720 - DNA, 50 bp, Artificial
  Synthetic oligonucleotide
agcggatgtgctgccgcccagggaagggaagctcagaggtacgccgaaca

SEQ ID NO: 146721 - DNA, 50 bp, Artificial
  Synthetic oligonucleotide
agcttatggaagccccaaacaggacgatgcttccgctcacggagctcccc

SEQ ID NO: 146722 - DNA, 50 bp, Artificial
  Synthetic oligonucleotide
ctccgccaagctacccgagttgcctgcgtaagcggaggaggaggtgaaca

SEQ ID NO: 146723 - DNA, 50 bp, Artificial
  Synthetic oligonucleotide
ctcagaggagcgcccacatacccggcaggcggcatttggacgccctcacg

SEQ ID NO: 146724 - DNA, 50 bp, Artificial
  Synthetic oligonucleotide
ctcacgatgtgctacgcgagcctttgcgtggttgcaaaccctgctgcggg

SEQ ID NO: 146725 - DNA, 50 bp, Artificial
  Synthetic oligonucleotide
aggcgagacctcacggacagtctcctgcccgccggacttctgagggagcc

SEQ ID NO: 146726 - DNA, 50 bp, Artificial
  Synthetic oligonucleotide
ctatagcaccgtaagcgcttggagggcgaaggtggggtcagtactggcgg

SEQ ID NO: 146727 - DNA, 50 bp, Artificial
  Synthetic oligonucleotide
aggcgcgagcggactcttgatactcaccgggctcgtgttggtcaagaccg

SEQ ID NO: 146728 - DNA, 50 bp, Artificial
  Synthetic oligonucleotide
agggctcctccctcgggaacctcatagcttgaacgcttgcgtagtgggct

SEQ ID NO: 146729 - DNA, 60 bp, Artificial
  Synthetic oligonucleotide
ctctcagcaacagtatacgtgtgataacggaggtactgcaaccatagattactcttacga

SEQ ID NO: 146730 - DNA, 55 bp, Artificial
  Synthetic oligonucleotide
cgagtatccttacgaggtcttcctgtgtgagctcgtcaagggtggttataacggg

SEQ ID NO: 146731 - DNA, 50 bp, Artificial
  Synthetic oligonucleotide
agggttgcacggcttacgggagagcacacgggcagctttcttgctaccgc

SEQ ID NO: 146732 - DNA, 50 bp, Artificial
  Synthetic oligonucleotide
cgtccacggcagtaaccgtacctccgaagcccatgggtccccagcctatc

SEQ ID NO: 146733 - DNA, 50 bp, Artificial
  Synthetic oligonucleotide
cggtggggataggagctggtccgtactgccacgggcaggttctggtgttc

SEQ ID NO: 146734 - DNA, 50 bp, Artificial
  Synthetic oligonucleotide
cggggtctctgtggctctgaccttccgtgaagagcctgtggtaggtgccg

SEQ ID NO: 146735 - DNA, 50 bp, Artificial
  Synthetic oligonucleotide
cggaccccgccgttagtcccaaagccacaggcgttaaagaggccactacc

SEQ ID NO: 146736 - DNA, 50 bp, Artificial
  Synthetic oligonucleotide
agtgctcctaagcttgtacccacacctgcgtccttggtgaacgagggcgc

SEQ ID NO: 146737 - DNA, 50 bp, Artificial
  Synthetic oligonucleotide
cgcgagcctttgcgtggttgcaaaccctgctgcgggaatagcgggataca

SEQ ID NO: 146738 - DNA, 50 bp, Artificial
  Synthetic oligonucleotide
cgagtgtgacacgctccaacggtggccagtttggccgcaagattcggaag

SEQ ID NO: 146739 - DNA, 50 bp, Artificial
  Synthetic oligonucleotide
atcggtgttggacctgcgggcagagaagtgcctatagacgccgcggatta

SEQ ID NO: 146740 - DNA, 50 bp, Artificial
  Synthetic oligonucleotide
cgagggagcccccgagtgcaggcagatattcgccacaccctttgcacagc

SEQ ID NO: 146741 - DNA, 55 bp, Artificial
  Synthetic oligonucleotide
cgcctatccccactatatgcgtatctccgtagttgtctatctccgccaccagagc

SEQ ID NO: 146742 - DNA, 50 bp, Artificial
  Synthetic oligonucleotide
atttataccccgcctcagaggagcgcccacatacccggcaggcggcattt

SEQ ID NO: 146743 - DNA, 50 bp, Artificial
  Synthetic oligonucleotide
ccttacgagggcgtagagggctcccagtccccctacagccccgagagccc

SEQ ID NO: 146744 - DNA, 50 bp, Artificial
  Synthetic oligonucleotide
cctatggtgctaacgcaaaacttacatcctacagcacagcctatctgggt

SEQ ID NO: 146745 - DNA, 50 bp, Artificial
  Synthetic oligonucleotide
atttcctcggagggtgcgggagacaccgcgatagttgtgggctacgccac

SEQ ID NO: 146746 - DNA, 50 bp, Artificial
  Synthetic oligonucleotide
caccacacctaagccgggtgctacgtgccctccgttctttgcggtgacct

SEQ ID NO: 146747 - DNA, 50 bp, Artificial
  Synthetic oligonucleotide
ccggacgttcacgtggggtacggctttcccgtgggaggggtaatggccac

SEQ ID NO: 146748 - DNA, 50 bp, Artificial
  Synthetic oligonucleotide
cacccaggtgccgggctatttataccccgcctcagaggagcgcccacata

SEQ ID NO: 146749 - DNA, 50 bp, Artificial
  Synthetic oligonucleotide
cacctggccagttacccacccgtaaggtggtcccggcgatatggttgaga

SEQ ID NO: 146750 - DNA, 50 bp, Artificial
  Synthetic oligonucleotide
catacagtgagtccgccctttgtgtaatacctacagtaccggagctttat

SEQ ID NO: 146751 - DNA, 50 bp, Artificial
  Synthetic oligonucleotide
catccgggaccacccggtgatagaggaccctccgctcttgactgggctat

SEQ ID NO: 146752 - DNA, 55 bp, Artificial
  Synthetic oligonucleotide
cgcctgctacgataacccaactggcatgagtctgtattaaggttccaccagtttc

SEQ ID NO: 146753 - DNA, 50 bp, Artificial
  Synthetic oligonucleotide
catcggggaaaaagtgcagccctgcggtagcatgcgccacagtctcaacc

SEQ ID NO: 146754 - DNA, 50 bp, Artificial
  Synthetic oligonucleotide
accaccgcggctgtgggacatacaaagctggcgacccttgacgggaaggc

SEQ ID NO: 146755 - DNA, 50 bp, Artificial
  Synthetic oligonucleotide
ggaagacggtgagggcccccagatccaacgcaccagttcccagccacaga

SEQ ID NO: 146756 - DNA, 50 bp, Artificial
  Synthetic oligonucleotide
accatggcgtaagcacctatcctcgcccactggtggactgccgagagtcc

SEQ ID NO: 146757 - DNA, 50 bp, Artificial
  Synthetic oligonucleotide
gcttcagtgtgagagaagttccaccctccactcccggggcaaggggcgtt

SEQ ID NO: 146758 - DNA, 50 bp, Artificial
  Synthetic oligonucleotide
acccagatgcggacgtattcatagttgcgagcggatgtgctgccgcccag

SEQ ID NO: 146759 - DNA, 50 bp, Artificial
  Synthetic oligonucleotide
accccgccgtggtggctgcaagcgccgtccttggaaggatagcccatccc

SEQ ID NO: 146760 - DNA, 50 bp, Artificial
  Synthetic oligonucleotide
gctcatgtaatcgccagatatagcaagcccgttttgaagaccggagatac

SEQ ID NO: 146761 - DNA, 50 bp, Artificial
  Synthetic oligonucleotide
gctaacctgaaccctccccatcaagcggcggacattgcctggaaagccgg

SEQ ID NO: 146762 - DNA, 50 bp, Artificial
  Synthetic oligonucleotide
gcgtccgctgcgcacacgagagcaacctcggggtatctgactggctcttc

SEQ ID NO: 146763 - DNA, 55 bp, Artificial
  Synthetic oligonucleotide
cgccttacagcacaggggtcaagagagtgtaggtattgcggtatctgactacgag

SEQ ID NO: 146764 - DNA, 50 bp, Artificial
  Synthetic oligonucleotide
gcggctgttatcgctcctccgtaccttccgccggtgtttaggacatccgc

SEQ ID NO: 146765 - DNA, 50 bp, Artificial
  Synthetic oligonucleotide
gcggacacatgaaggcgagaaagggcggagagttccacgcctggtccccc

SEQ ID NO: 146766 - DNA, 50 bp, Artificial
  Synthetic oligonucleotide
accccgtgacctctgacaaccaccacgggagagctctttagcacccgcga

SEQ ID NO: 146767 - DNA, 50 bp, Artificial
  Synthetic oligonucleotide
acccctcctcagatgggacccagagctacgcagatgggtgggggacacac

SEQ ID NO: 146768 - DNA, 50 bp, Artificial
  Synthetic oligonucleotide
acccgacatcctgtctccgagggataccttggcgtcgtagcccacccaca

SEQ ID NO: 146769 - DNA, 50 bp, Artificial
  Synthetic oligonucleotide
accctcaagggtgcgagaacagacgccataccctcgggagacaccaccct

SEQ ID NO: 146770 - DNA, 50 bp, Artificial
  Synthetic oligonucleotide
gccattcataagagacgccgaaggtggaagcaataagttttagggcggtg

SEQ ID NO: 146771 - DNA, 50 bp, Artificial
  Synthetic oligonucleotide
accgtgcggtgggttccgtgggagggggttaccagtttggacagctactc

SEQ ID NO: 146772 - DNA, 50 bp, Artificial
  Synthetic oligonucleotide
acctgtgttgcaactggcaagcgttccaccggttagcgcccacctcacca

SEQ ID NO: 146773 - DNA, 50 bp, Artificial
  Synthetic oligonucleotide
acgaaggctggggtgcgggatacgaccctaagctactgcccgtccttgag

SEQ ID NO: 146774 - DNA, 52 bp, Artificial
  Synthetic oligonucleotide
agtccccactcccataggtaacctcagggacataaccctaagggctttagaa

SEQ ID NO: 146775 - DNA, 50 bp, Artificial
  Synthetic oligonucleotide
gcaccacggggcacaccatcttggagcccatgagtacagcttctggcctc

SEQ ID NO: 146776 - DNA, 50 bp, Artificial
  Synthetic oligonucleotide
gcaagcgttccaccggttagcgcccacctcaccaggtccatcctactcat

SEQ ID NO: 146777 - DNA, 50 bp, Artificial
  Synthetic oligonucleotide
gcaaaccgagtacttgggaccgctaagagcccagcctatgagggggaccc

SEQ ID NO: 146778 - DNA, 50 bp, Artificial
  Synthetic oligonucleotide
acggcttacgggagagcacacgggcagctttcttgctaccgcccagttca

SEQ ID NO: 146779 - DNA, 50 bp, Artificial
  Synthetic oligonucleotide
acggggtagctaaccacgcctcccgtctggggaaccacgtaggggatctc

SEQ ID NO: 146780 - DNA, 50 bp, Artificial
  Synthetic oligonucleotide
gagggtgcgggagacaccgcgatagttgtgggctacgccacgaaggaagc

SEQ ID NO: 146781 - DNA, 50 bp, Artificial
  Synthetic oligonucleotide
acggtgcgataggtgttgtgtccgccgtcggaaccggatacaggcatcct

SEQ ID NO: 146782 - DNA, 50 bp, Artificial
  Synthetic oligonucleotide
gaccgcgcaggtggcagtttctaaccctcccacaacaccgccatcgctac

SEQ ID NO: 146783 - DNA, 50 bp, Artificial
  Synthetic oligonucleotide
agaaccaggcagctggcaacttaaaggtaggctctgcgtcaccccgccat

SEQ ID NO: 146784 - DNA, 50 bp, Artificial
  Synthetic oligonucleotide
agaccccgtgagtagcgcccgtcaggtgagggttttgcccgacgtgagtg

SEQ ID NO: 146785 - DNA, 55 bp, Artificial
  Synthetic oligonucleotide
cgcgggttgcaccgctctagtgtgctaacggcatttctctaagctatggagtgta

SEQ ID NO: 146786 - DNA, 50 bp, Artificial
  Synthetic oligonucleotide
gaagagtggcaggtgtcgccgtgcagggtacacgaaaagtggacgcgcct

SEQ ID NO: 146787 - DNA, 50 bp, Artificial
  Synthetic oligonucleotide
agagcgtcaacgggtccgaaggctaccgatgggggtctgtccaagaggga

SEQ ID NO: 146788 - DNA, 50 bp, Artificial
  Synthetic oligonucleotide
agcccgtatacggagcgggggactggaaccacctgtcggtcaggaacgcc

SEQ ID NO: 146789 - DNA, 53 bp, Artificial
  Synthetic oligonucleotide
ctacctcggggatacggcaagggttccatacggcaccaaatctccggatacgg

SEQ ID NO: 146790 - DNA, 55 bp, Artificial
  Synthetic oligonucleotide
ctacgagaccctgagacagctccacaggagagtcaacgagagaaccttcaactcc

SEQ ID NO: 146791 - DNA, 55 bp, Artificial
  Synthetic oligonucleotide
ctacttttggagggtatgattatatccgcttacgctcttggggtcaacagagctt

SEQ ID NO: 146792 - DNA, 55 bp, Artificial
  Synthetic oligonucleotide
aggcgagcacctctcacaacagaggctacacccaaaggtaggctggcgtatcctc

SEQ ID NO: 146793 - DNA, 57 bp, Artificial
  Synthetic oligonucleotide
gcttccggacgcttacaccgcagcccctactcctataacaggtttcatggcctccgc

SEQ ID NO: 146794 - DNA, 55 bp, Artificial
  Synthetic oligonucleotide
ctatcatccgttggtgatctactttgcagtgggagcgcttgtgtcttcctatacc

SEQ ID NO: 146795 - DNA, 55 bp, Artificial
  Synthetic oligonucleotide
ctccgttcattccctttccaacgtaatcattcgcctgtccagtaagtattagttc

SEQ ID NO: 146796 - DNA, 55 bp, Artificial
  Synthetic oligonucleotide
ctctacgcatacgcctggtggatggcttatagagcgggaagaacacccaaaggta

SEQ ID NO: 146797 - DNA, 55 bp, Artificial
  Synthetic oligonucleotide
ctgccgtagataaagcgccttttagcatgtctataccttcataccctaacgctga

SEQ ID NO: 146798 - DNA, 55 bp, Artificial
  Synthetic oligonucleotide
ccatgtggctatgtgctaaatggtagcgtatacgcaaaggacctgaactatcccc

SEQ ID NO: 146799 - DNA, 55 bp, Artificial
  Synthetic oligonucleotide
ccatctccttttggaaatccccgtagtagcctatatcgggtcgctctacgcctcc

SEQ ID NO: 146800 - DNA, 55 bp, Artificial
  Synthetic oligonucleotide
ccactgcgattttcctcaggaggcgcgctttaagactatgctcaccaacatagga

SEQ ID NO: 146801 - DNA, 55 bp, Artificial
  Synthetic oligonucleotide
ccactgaggtgtaaagcctatatgagcgcacacgggaatacctatctttgtaagt

SEQ ID NO: 146802 - DNA, 55 bp, Artificial
  Synthetic oligonucleotide
ccaccatggtagctataacagagatgggtatgcttccgtaaggtgattctggact

SEQ ID NO: 146803 - DNA, 53 bp, Artificial
  Synthetic oligonucleotide
ccaacgtggagagagatcacgttaggtggcttgggactaaccccgaaagtagg

SEQ ID NO: 146804 - DNA, 53 bp, Artificial
  Synthetic oligonucleotide
aagtgtcgcttccgttgtaaatgaacctttacaacttcgcttcttagttctcc

SEQ ID NO: 146805 - DNA, 55 bp, Artificial
  Synthetic oligonucleotide
ccaaaggtgtagctgatcttatgaaggattcagagcaacatgtacactcaagccc

SEQ ID NO: 146806 - DNA, 55 bp, Artificial
  Synthetic oligonucleotide
cattagcttacgggactgagacaataccagctgtagaaaagatagtcggtcctgg

SEQ ID NO: 146807 - DNA, 53 bp, Artificial
  Synthetic oligonucleotide
cccggaaacccacttcaaatcaagccctccttaaccatgtactctttcagttc

SEQ ID NO: 146808 - DNA, 55 bp, Artificial
  Synthetic oligonucleotide
catcctgaggatagcttaatcccctctccacgatagctccgttgggtatcctacc

SEQ ID NO: 146809 - DNA, 55 bp, Artificial
  Synthetic oligonucleotide
cccgttgcaatgacatgccttctttcggcgtccgttctgtacggaataggctttg

SEQ ID NO: 146810 - DNA, 55 bp, Artificial
  Synthetic oligonucleotide
catcaccgccatgctactaaaacagctggatggtagaaccgtagtgatagcaccc

SEQ ID NO: 146811 - DNA, 55 bp, Artificial
  Synthetic oligonucleotide
catcaacgctgtcagttaaagactcaccatttgtagcgcacagaaaagttgtgac

SEQ ID NO: 146812 - DNA, 55 bp, Artificial
  Synthetic oligonucleotide
ccctaacctgtaggcctcttcctttagcatgctgaggattagtcccagcctctcg

SEQ ID NO: 146813 - DNA, 55 bp, Artificial
  Synthetic oligonucleotide
cagggaccacctgttgcactgcatacaaagtcagtaagatgagctatgagccttc

SEQ ID NO: 146814 - DNA, 55 bp, Artificial
  Synthetic oligonucleotide
caggaaacctccgcagttggttcccacagccctcccatgaccacaggatatgtag

SEQ ID NO: 146815 - DNA, 57 bp, Artificial
  Synthetic oligonucleotide
cacaaaagtaggcactcccttcaagttacaagctatccacaagagaccgccaagtta

SEQ ID NO: 146816 - DNA, 55 bp, Artificial
  Synthetic oligonucleotide
cagagggttgactaccgagttattttgctggaggctcccaagaggatagtggtgg

SEQ ID NO: 146817 - DNA, 55 bp, Artificial
  Synthetic oligonucleotide
caccctcgtaaatcctggatacttgcttcccgataggatagttaagcttaccggc

SEQ ID NO: 146818 - DNA, 55 bp, Artificial
  Synthetic oligonucleotide
ccgctataaagaggagagccttatccaccgtcagacctgactttaagagctggag

SEQ ID NO: 146819 - DNA, 55 bp, Artificial
  Synthetic oligonucleotide
caccacagctataaacagccatatgccgtatatcctatcccacaggttggcagga

SEQ ID NO: 146820 - DNA, 55 bp, Artificial
  Synthetic oligonucleotide
ccggagctttgtatggatctcttggtggaagcttcatatcttccggtgtcatatt

SEQ ID NO: 146821 - DNA, 55 bp, Artificial
  Synthetic oligonucleotide
ccgttaccgcagctcatattatagctaccgcagcagattacgaaggatactatgc

SEQ ID NO: 146822 - DNA, 54 bp, Artificial
  Synthetic oligonucleotide
caagatacggacccttctttatacgtccgctctactgccccttagtctacttcc

SEQ ID NO: 146823 - DNA, 55 bp, Artificial
  Synthetic oligonucleotide
gctctccccagctggctaacctcgtttatctctgcaaacccaacggtggacaccg

SEQ ID NO: 146824 - DNA, 55 bp, Artificial
  Synthetic oligonucleotide
gctcttgcatctgccagaatgggtgcaaagacggttatgtttgtccttaacgcag

SEQ ID NO: 146825 - DNA, 55 bp, Artificial
  Synthetic oligonucleotide
gctttcttatcccatgcttctctttatgggagcagcctctcactatcctatgggc

SEQ ID NO: 146826 - DNA, 57 bp, Artificial
  Synthetic oligonucleotide
cactacattcctacctccgaaagtttcatgtatccatccgcagtttagttccctaca

SEQ ID NO: 146827 - DNA, 53 bp, Artificial
  Synthetic oligonucleotide
ggctttgtaggtaagattccctccgttttgatatacaaagtcggggaggataa

SEQ ID NO: 146828 - DNA, 55 bp, Artificial
  Synthetic oligonucleotide
ggttatgaaggagtcaatgaggagtgcatagctgaggggatgaagtctaaagacc

SEQ ID NO: 146829 - DNA, 55 bp, Artificial
  Synthetic oligonucleotide
gtaagaaccgctatagaaaacgcggcatccgtagcaggaacgatgctcaccgctg

SEQ ID NO: 146830 - DNA, 50 bp, Artificial
  Synthetic oligonucleotide
gtaattagcctaaaaggtccaaaagcggaagacaacccttggaagtcccc

SEQ ID NO: 146831 - DNA, 55 bp, Artificial
  Synthetic oligonucleotide
gtatcataggggactgatagcggtgacggcttgtctgaaaggtgtgcccacttat

SEQ ID NO: 146832 - DNA, 55 bp, Artificial
  Synthetic oligonucleotide
aataggtactgcccttgtgctaataaaagatgaatggcacctaagcgcccaacaa

SEQ ID NO: 146833 - DNA, 55 bp, Artificial
  Synthetic oligonucleotide
gtctaggtccggaggggatctatgcaggtagtgttagcgtgattgaggtgagcaa

SEQ ID NO: 146834 - DNA, 55 bp, Artificial
  Synthetic oligonucleotide
gtgggaggggtattacttcggcctcaggacgattgcttactccgcaccgataacc

SEQ ID NO: 146835 - DNA, 55 bp, Artificial
  Synthetic oligonucleotide
gtgttaccaatagctcctctggcggtggtatgctaggcggtactaccgtaaaccc

SEQ ID NO: 146836 - DNA, 55 bp, Artificial
  Synthetic oligonucleotide
gttctataatgcgtatcatcccacatctattttaaactgcagagggacagatatc

SEQ ID NO: 146837 - DNA, 58 bp, Artificial
  Synthetic oligonucleotide
tcgcatcaagagagggagacgaagacacttattttgcactcggaatttacccgataat

SEQ ID NO: 146838 - DNA, 55 bp, Artificial
  Synthetic oligonucleotide
taacccaccctacaactaccctcttgaggatatagacatagtggttatatcccac

SEQ ID NO: 146839 - DNA, 53 bp, Artificial
  Synthetic oligonucleotide
taacgttctccttaaggcgttacctaccgtgataccaaaccctctctccagag

SEQ ID NO: 146840 - DNA, 55 bp, Artificial
  Synthetic oligonucleotide
taaggcaggtgggagtcctcacactcctttcccacatcggtagttttatccctgc

SEQ ID NO: 146841 - DNA, 55 bp, Artificial
  Synthetic oligonucleotide
tcccatatcgggtgccaccttcatactgctggcaaaggaccagcccgagaggtcc

SEQ ID NO: 146842 - DNA, 55 bp, Artificial
  Synthetic oligonucleotide
tctccaaaaggtctgttacaagccacttctgtggttttacctctgcaaccagctg

SEQ ID NO: 146843 - DNA, 55 bp, Artificial
  Synthetic oligonucleotide
tgacgtccagaaagctataacaacgttaaggaacatagtggacgttgcggagccc

SEQ ID NO: 146844 - DNA, 55 bp, Artificial
  Synthetic oligonucleotide
tgatacctactattactgtatcgtttcctatcttctgggtggccccatgaaatag

SEQ ID NO: 146845 - DNA, 55 bp, Artificial
  Synthetic oligonucleotide
aacagcctctgcagaagatgcaaactctgcacggcagtctggataagggctatca

SEQ ID NO: 146846 - DNA, 55 bp, Artificial
  Synthetic oligonucleotide
ttaagacacggcatatccggactaaaccttgaactctttacagaagaccctgcac

SEQ ID NO: 146847 - DNA, 55 bp, Artificial
  Synthetic oligonucleotide
ttgagcacctcctctaccagcacaccttttggacacctgtgggtacacttgtggc

SEQ ID NO: 146848 - DNA, 57 bp, Artificial
  Synthetic oligonucleotide
taaccgttcccacacaagcgcatccaaaccccctctatcccatacccttcagcgtga

SEQ ID NO: 146849 - DNA, 55 bp, Artificial
  Synthetic oligonucleotide
ctgtgatagacgccacctctggtaatacgggtatagcgcttgctatggtaggagc

SEQ ID NO: 146850 - DNA, 55 bp, Artificial
  Synthetic oligonucleotide
cttccaaccattcagaatcctgaggttcgtggtcatagtcgctcgtctcctgagg

SEQ ID NO: 146851 - DNA, 55 bp, Artificial
  Synthetic oligonucleotide
gaaccccgtgggttgcacaggctaacaccctcttcgcacccctgtttatgagcat

SEQ ID NO: 146852 - DNA, 55 bp, Artificial
  Synthetic oligonucleotide
gaagagtccgcccagaactacgtgaattacaagaatgagtacttaagaagtgctt

SEQ ID NO: 146853 - DNA, 55 bp, Artificial
  Synthetic oligonucleotide
agacttccaatgtgagggcaatactcaaaatgaaggacggctcttatcttatggc

SEQ ID NO: 146854 - DNA, 55 bp, Artificial
  Synthetic oligonucleotide
gaatgcctgtctcggatgtcacatgcccgacgtagccaagtccgtgggtgcgacg

SEQ ID NO: 146855 - DNA, 55 bp, Artificial
  Synthetic oligonucleotide
gacaaagaactacacaacgtcaaggctaccatgctcgtgtcctacacttcctacg

SEQ ID NO: 146856 - DNA, 54 bp, Artificial
  Synthetic oligonucleotide
acttttagatgcggaccgggagatggtgaaaggttttaggtacttactgctcag

SEQ ID NO: 146857 - DNA, 55 bp, Artificial
  Synthetic oligonucleotide
acttggtaagcactccggaagacacgctttaaaatctcgtttgcaagagcttggc

SEQ ID NO: 146858 - DNA, 55 bp, Artificial
  Synthetic oligonucleotide
gacggtgctcactatttcagcacccatgccgtactcgtacttttcgtctattgtg

SEQ ID NO: 146859 - DNA, 60 bp, Artificial
  Synthetic oligonucleotide
tcaagggcattctcctcaaaagcaccgtggcaaaagatcctcatagcagcggcaggacca

SEQ ID NO: 146860 - DNA, 55 bp, Artificial
  Synthetic oligonucleotide
gagcagtctccaatacagccttctattacctgagagttctgaccggtagctgatt

SEQ ID NO: 146861 - DNA, 55 bp, Artificial
  Synthetic oligonucleotide
gatacgagggttccagcacattaccacacggtaatagcgagtatactcgtgggcg

SEQ ID NO: 146862 - DNA, 55 bp, Artificial
  Synthetic oligonucleotide
gatttcgcggtgaggccctttactccatatcaagcgtaagcaagtttaaactccg

SEQ ID NO: 146863 - DNA, 55 bp, Artificial
  Synthetic oligonucleotide
acgcggactacgttatagacaactcaggaagtattgaagagacctataagcaggt

SEQ ID NO: 146864 - DNA, 55 bp, Artificial
  Synthetic oligonucleotide
acgatgttgcagtgctgtgctcgggagatagcgattttgaaaggctcgtatgggt

SEQ ID NO: 146865 - DNA, 55 bp, Artificial
  Synthetic oligonucleotide
gcacctgatcatccattctttaggggagataaggctcgcctggtcctcaaaccgc

SEQ ID NO: 146866 - DNA, 55 bp, Artificial
  Synthetic oligonucleotide
gcactatgtcgtaagcgctctctttaaaagcctcccaatcttttatgtcagttat

SEQ ID NO: 146867 - DNA, 55 bp, Artificial
  Synthetic oligonucleotide
gcagtgccgagcttacctaccactataccggcacacacattggcaagttcgcagg

SEQ ID NO: 146868 - DNA, 55 bp, Artificial
  Synthetic oligonucleotide
gccctacgagaagagagcctacgagatggtactgagctttctcatagcccttgac

SEQ ID NO: 146869 - DNA, 55 bp, Artificial
  Synthetic oligonucleotide
gcccttcggcaggcgaactctctttatcctcacgtccttaccgagaaggtctatt

SEQ ID NO: 146870 - DNA, 60 bp, Artificial
  Synthetic oligonucleotide
cgggccgaagctgaagcgcacggcgcaagcggtgcgcggcgcgctgggactgtagcctcg

SEQ ID NO: 146871 - DNA, 60 bp, Artificial
  Synthetic oligonucleotide
gctcgcgacctcggccatcggacgggcctatctcgccggcctgccggaccgagatcgcgc

SEQ ID NO: 146872 - DNA, 50 bp, Artificial
  Synthetic oligonucleotide
accacgtcaaacagtgcgcgggcggacctgactttccggttctgagggcc

SEQ ID NO: 146873 - DNA, 59 bp, Artificial
  Synthetic oligonucleotide
gctgggcttcgtcgtctcggccggcgactggaagcgcgaggtcaacgccgtcggcgtgc

SEQ ID NO: 146874 - DNA, 60 bp, Artificial
  Synthetic oligonucleotide
gtcggggctggcttaactatgcggcatcagagcagattgtactgagagtgcaccatatgc

SEQ ID NO: 146875 - DNA, 60 bp, Artificial
  Synthetic oligonucleotide
tgtagcctcgccgcgccgccggcttgtgcgatgcgcataggaaaatcgtcgcgcatggga

SEQ ID NO: 146876 - DNA, 60 bp, Artificial
  Synthetic oligonucleotide
ctctgacacatgcagctcccggagacggtcacagcttgtctgtaagcggatgccgggagc

SEQ ID NO: 146877 - DNA, 58 bp, Artificial
  Synthetic oligonucleotide
tggccggcgatggaggcggggatcgccgcggcgctcaaggatttccgggcgctgggct

SEQ ID NO: 146878 - DNA, 60 bp, Artificial
  Synthetic oligonucleotide
tgcggcgggccggccttcgcgctgccggccgagcggctgcgcagcgacgtcgggccgaag

SEQ ID NO: 146879 - DNA, 57 bp, Artificial
  Synthetic oligonucleotide
cggtgcgggcctcttcgctattacgccagaattcgagctcggtacccctgagtctag

SEQ ID NO: 146880 - DNA, 58 bp, Artificial
  Synthetic oligonucleotide
tgccgggagcagacaagcccgtcagggcgcgtcagcgggtgttggcgggtgtcggggc

SEQ ID NO: 146881 - DNA, 60 bp, Artificial
  Synthetic oligonucleotide
tcggcgtgccgctggccatcggtaccggcggtctcgccttcgcgctgaattgcggcgggc

SEQ ID NO: 146882 - DNA, 60 bp, Artificial
  Synthetic oligonucleotide
catcaggcgccattcgccattcaggctgcgcaactgttgggaagggcgatcggtgcgggc

SEQ ID NO: 146883 - DNA, 55 bp, Artificial
  Synthetic oligonucleotide
gagaccgagctagcggatgccgaatccttgcttgatgatcccgagtccgatcgcg

SEQ ID NO: 146884 - DNA, 55 bp, Artificial
  Synthetic oligonucleotide
gaacgtgatatcctcgactgcgaccaccttgtgatgagccgtgccgggatggtcg

SEQ ID NO: 146885 - DNA, 55 bp, Artificial
  Synthetic oligonucleotide
cgcttcgagcgatgaggtcgtatcgtcttttgatgccgtgtccgagcttgcgtcg

SEQ ID NO: 146886 - DNA, 55 bp, Artificial
  Synthetic oligonucleotide
agcccgtcagggcgcgtcagcgggtgttggcgggtgtcggggctggcttaactat

SEQ ID NO: 146887 - DNA, 55 bp, Artificial
  Synthetic oligonucleotide
cgctgggactgtagcctcgccgcgccgccggcttgtgcgatgcgcataggaaaat

SEQ ID NO: 146888 - DNA, 55 bp, Artificial
  Synthetic oligonucleotide
aggcggggatcgccgcggcgctcaaggatttccgggcgctgggcttcgtcgtctc

SEQ ID NO: 146889 - DNA, 55 bp, Artificial
  Synthetic oligonucleotide
cgctctgaacctcaaaggcagccgtgccggaattgtcgctcgactggaactttag

SEQ ID NO: 146890 - DNA, 55 bp, Artificial
  Synthetic oligonucleotide
ttcagatccgccgcgtcgccgttgcgcgtggtgaacaggaacagccccatccggt

SEQ ID NO: 146891 - DNA, 55 bp, Artificial
  Synthetic oligonucleotide
cttctgcttcgaagaaggcctgcgattcagtcgaggtgccgaaccgagccgcgtt

SEQ ID NO: 146892 - DNA, 55 bp, Artificial
  Synthetic oligonucleotide
atttgatggcgaagctggcggcccgcgagggcgaggcctggccggcgatggaggc

SEQ ID NO: 146893 - DNA, 60 bp, Artificial
  Synthetic oligonucleotide
caccatatgcggtgtgaaataccgcacagatgcgtaaggagaaaataccgcatcaggcgc

SEQ ID NO: 146894 - DNA, 55 bp, Artificial
  Synthetic oligonucleotide
cgccaaccttatctctaacgcagagttaattttgcggaaagcgcatgtagatggg

SEQ ID NO: 146895 - DNA, 55 bp, Artificial
  Synthetic oligonucleotide
cataggaaaatcgtcgcgcatgggacgaagtcccttttccttccagcgcgatggc

SEQ ID NO: 146896 - DNA, 55 bp, Artificial
  Synthetic oligonucleotide
ccggcagctcacttttcagaaagccggctccatttagctccgtgaattaccggga

SEQ ID NO: 146897 - DNA, 55 bp, Artificial
  Synthetic oligonucleotide
tttgggcaccggaccggtcggtcacactcaatgggagaccccgatcgtggcagca

SEQ ID NO: 146898 - DNA, 55 bp, Artificial
  Synthetic oligonucleotide
ccgccggcttgtgcgatgcgcataggaaaatcgtcgcgcatgggacgaagtccct

SEQ ID NO: 146899 - DNA, 55 bp, Artificial
  Synthetic oligonucleotide
ccggaccggtcggtcacactcaatgggagaccccgatcgtggcagcacgcatcat

SEQ ID NO: 146900 - DNA, 55 bp, Artificial
  Synthetic oligonucleotide
tccagcgcgatggcaataggtttcgccgcaatccgcgtcggttttgggcaccgga

SEQ ID NO: 146901 - DNA, 55 bp, Artificial
  Synthetic oligonucleotide
tcaggctgcgcaactgttgggaagggcgatcggtgcgggcctcttcgctattacg

SEQ ID NO: 146902 - DNA, 55 bp, Artificial
  Synthetic oligonucleotide
tcagcaggttcggctagtagcccgccgtccctatcgcgcgaccgtacttcgagga

SEQ ID NO: 146903 - DNA, 55 bp, Artificial
  Synthetic oligonucleotide
tcaagagcgatattgaatgcaacttgccggagtgaccgtatactcatgcgatgga

SEQ ID NO: 146904 - DNA, 55 bp, Artificial
  Synthetic oligonucleotide
agtctaggtcggactagaccttgtaaaacgacggccagtccagtgtgctggaaag

SEQ ID NO: 146905 - DNA, 55 bp, Artificial
  Synthetic oligonucleotide
tatctcgccggcctgccggaccgagatcgcgccgatttgatggcgaagctggcgg

SEQ ID NO: 146906 - DNA, 55 bp, Artificial
  Synthetic oligonucleotide
taccgagtggggcaatgatgcaccctggccagaaattgcgtttgagttcgaacgg

SEQ ID NO: 146907 - DNA, 55 bp, Artificial
  Synthetic oligonucleotide
gtggtcgtaggcaattagcgtcacctccgaattgagctcgaacgatcgcaggtcc

SEQ ID NO: 146908 - DNA, 55 bp, Artificial
  Synthetic oligonucleotide
gtgggcataggttcgcatgcaatgtgcgggatatccagagagacagtttcgccag

SEQ ID NO: 146909 - DNA, 55 bp, Artificial
  Synthetic oligonucleotide
ggttgatcgaatgttacttccaccgaaaatgggtacctgccaaggacgccttgga

SEQ ID NO: 146910 - DNA, 55 bp, Artificial
  Synthetic oligonucleotide
gggacgcgtttattgataggtacacgtcgtccggcatagccggcagtgctttcag

SEQ ID NO: 146911 - DNA, 55 bp, Artificial
  Synthetic oligonucleotide
ggctgccgactgttcagtgttcctgtcgcttctcgaagattggtcaaaacgcccc

SEQ ID NO: 146912 - DNA, 55 bp, Artificial
  Synthetic oligonucleotide
ggcgacgttaaggaagaggcccactgcgcggcgattgttgagcggaccgtctcag

SEQ ID NO: 146913 - DNA, 55 bp, Artificial
  Synthetic oligonucleotide
ggacggcggactggccaagcgacgatattggtaatcttctctggtcgagatttcc

SEQ ID NO: 146914 - DNA, 55 bp, Artificial
  Synthetic oligonucleotide
tggccatcggtaccggcggtctcgccttcgcgctgaattgcggcgggccggcctt

SEQ ID NO: 146915 - DNA, 58 bp, Artificial
  Synthetic oligonucleotide
gaaaggccgccgccggccttcagatccgccgcgtcgccgttgcgcgtggtgaacagga

SEQ ID NO: 146916 - DNA, 55 bp, Artificial
  Synthetic oligonucleotide
gcgatctcggaatactggtgacgagcatatctctcctggtgacccgcggcaggca

SEQ ID NO: 146917 - DNA, 55 bp, Artificial
  Synthetic oligonucleotide
gcctacggaaccgcacggtgaatatcgagtaagagattaggctttgcggatcgtt

SEQ ID NO: 146918 - DNA, 55 bp, Artificial
  Synthetic oligonucleotide
tgggtatagggtcgggacgggcgcattatgccaatcgggttcccgggtctgccaa

SEQ ID NO: 146919 - DNA, 55 bp, Artificial
  Synthetic oligonucleotide
acgcgatcctggtgaatgcatcccatctgactgccgtcatgctgaggaaatgcga

SEQ ID NO: 146920 - DNA, 54 bp, Artificial
  Synthetic oligonucleotide
tggttggaggacgagtatcaggcctctaccgcgaccggaaacgtagtttggtcg

SEQ ID NO: 146921 - DNA, 54 bp, Artificial
  Synthetic oligonucleotide
tgtgcgatgcgcataggaaaatcgtcgcgcatgggacgaagtcccttttccttc

SEQ ID NO: 146922 - DNA, 54 bp, Artificial
  Synthetic oligonucleotide
ttcggatggcgagtcgtacgcgatcagtatcttgaggtctccttttatcgtcgc

SEQ ID NO: 146923 - DNA, 54 bp, Artificial
  Synthetic oligonucleotide
ttttccttccagcgcgatggcaataggtttcgccgcaatccgcgtcggttttgg

SEQ ID NO: 146924 - DNA, 54 bp, Artificial
  Synthetic oligonucleotide
cggtgcgcggcgcgctgggactgtagcctcgccgcgccgccggcttgtgcgatg

SEQ ID NO: 146925 - DNA, 53 bp, Artificial
  Synthetic oligonucleotide
attggaattcgctaaaagtgtcggggtattcgatgacatccggcggtctacca

SEQ ID NO: 146926 - DNA, 60 bp, Artificial
  Synthetic oligonucleotide
gaacaggaacagccccatccggtcgatctcgacgtcggcagccatctgaagctcgcgacc

SEQ ID NO: 146927 - DNA, 53 bp, Artificial
  Synthetic oligonucleotide
tttcgttccacgcatatcggaccgataaccgccgagccagacgatggtcggtt

SEQ ID NO: 146928 - DNA, 53 bp, Artificial
  Synthetic oligonucleotide
aacgaggcttgcgaaagcggtagtcaggatcagtctcttcatgtcgtattcct

SEQ ID NO: 146929 - DNA, 52 bp, Artificial
  Synthetic oligonucleotide
cggtggtcggtacaaggatgttgccagcgtatgagcgtatcgcagtcctaca

SEQ ID NO: 146930 - DNA, 52 bp, Artificial
  Synthetic oligonucleotide
acgttttcttagtccgagttttgtttgattggcttacggtttcactcgacca

SEQ ID NO: 146931 - DNA, 52 bp, Artificial
  Synthetic oligonucleotide
accctatccggaaccgacacgcgtagagatttgacaatctagagggcttcgc

SEQ ID NO: 146932 - DNA, 51 bp, Artificial
  Synthetic oligonucleotide
taagtgaccgcaacaggacgcatgcttacaaatcgttacgccgctacaacg

SEQ ID NO: 146933 - DNA, 50 bp, Artificial
  Synthetic oligonucleotide
acaccttcggcagcctggttaagagccgcaatcgtctcgtctgcccgctg

SEQ ID NO: 146934 - DNA, 50 bp, Artificial
  Synthetic oligonucleotide
acaccttcgatttccgtcagtagccggcgcggtgcattgaggacctcgcc

SEQ ID NO: 146935 - DNA, 50 bp, Artificial
  Synthetic oligonucleotide
aattcgggcgaaggagggtcaggtgccgtgccgtgtactgctgccatccc

SEQ ID NO: 146936 - DNA, 50 bp, Artificial
  Synthetic oligonucleotide
aatccattgcgatcgacgtggggtcctcccaactccgggggagccacttc

SEQ ID NO: 146937 - DNA, 60 bp, Artificial
  Synthetic oligonucleotide
gagatcgcgccgatttgatggcgaagctggcggcccgcgagggcgaggcctggccggcga

SEQ ID NO: 146938 - DNA, 50 bp, Artificial
  Synthetic oligonucleotide
aaggtgccgcaccgaactgaggccgcgagttggtcgagtgaactctcagg

SEQ ID NO: 146939 - DNA, 50 bp, Artificial
  Synthetic oligonucleotide
aaggtcgcccaactgaacggaagcagaccagcgatctcgctagcgcacat

SEQ ID NO: 146940 - DNA, 50 bp, Artificial
  Synthetic oligonucleotide
aagggcgtcgatcgctgagtgacccgtcacgctttcaatccgagcgctca

SEQ ID NO: 146941 - DNA, 50 bp, Artificial
  Synthetic oligonucleotide
aaggcgtcttggcttgacgatctcgcagagggtgtgatcgcccttaccgg

SEQ ID NO: 146942 - DNA, 50 bp, Artificial
  Synthetic oligonucleotide
aaggcgcaatactcgagatacgtgccgggactggagggtcggaggcagga

SEQ ID NO: 146943 - DNA, 50 bp, Artificial
  Synthetic oligonucleotide
aagcgagggtccgggcgctgatagcgactcaccaaactccgtagctccgt

SEQ ID NO: 146944 - DNA, 50 bp, Artificial
  Synthetic oligonucleotide
aagatgccctttaccatcggcaagtgcgcccttccaaagcgcgatcgctt

SEQ ID NO: 146945 - DNA, 50 bp, Artificial
  Synthetic oligonucleotide
aacctccgatgacatggcggggattggtgtcgtgcgccgcttgacggttg

SEQ ID NO: 146946 - DNA, 50 bp, Artificial
  Synthetic oligonucleotide
aaaggctgctcgaatgagttccgcgaaacaaagcctgcccgctatgcggg

SEQ ID NO: 146947 - DNA, 50 bp, Artificial
  Synthetic oligonucleotide
aaagcggaccaaatcgccgcctccctaaagctcggttcgtgtgccttccg

SEQ ID NO: 146948 - DNA, 56 bp, Artificial
  Synthetic oligonucleotide
gccgcaatccgcgtcggttttgggcaccggaccggtcggtcacactcaatgggaga

SEQ ID NO: 146949 - DNA, 50 bp, Artificial
  Synthetic oligonucleotide
aaagatgcgcattgagatcagctctcccgtggtcgagcgaccgacgtgga

SEQ ID NO: 146950 - DNA, 50 bp, Artificial
  Synthetic oligonucleotide
aaactgcagtgcgcgacggcgagagagtggcgcgaaccttattcagcccg

SEQ ID NO: 146951 - DNA, 50 bp, Artificial
  Synthetic oligonucleotide
acgggccgattgctcctcagcgacgcttgcgccatcgttggttcttcgag

SEQ ID NO: 146952 - DNA, 50 bp, Artificial
  Synthetic oligonucleotide
acgggaatcgagccaaattcgggcgaaggagggtcaggtgccgtgccgtg

SEQ ID NO: 146953 - DNA, 50 bp, Artificial
  Synthetic oligonucleotide
acggccatgcgtatggagtcgcttctcggacgagcgtagatgggcccaac

SEQ ID NO: 146954 - DNA, 50 bp, Artificial
  Synthetic oligonucleotide
acggagccaagggactttgtcttcatgcggcgtgtcccccgatgcgatgc

SEQ ID NO: 146955 - DNA, 50 bp, Artificial
  Synthetic oligonucleotide
acgatttccgagatcgacgctgtgcgttcgcgaagggtccctgtggcctc

SEQ ID NO: 146956 - DNA, 50 bp, Artificial
  Synthetic oligonucleotide
acgacgctatccggctaaccggtctcgttgagggatgccgccaacaaggg

SEQ ID NO: 146957 - DNA, 50 bp, Artificial
  Synthetic oligonucleotide
acgaacgtacgccttgacgcttcgctagccgcccgcacttagccggacaa

SEQ ID NO: 146958 - DNA, 50 bp, Artificial
  Synthetic oligonucleotide
acctgcgtgaagacgtggcacttttgcgctaggacgcgagggcgccaaat

SEQ ID NO: 146959 - DNA, 59 bp, Artificial
  Synthetic oligonucleotide
gcgcatgggacgaagtcccttttccttccagcgcgatggcaataggtttcgccgcaatc

SEQ ID NO: 146960 - DNA, 50 bp, Artificial
  Synthetic oligonucleotide
acctgccaaaaggtcgcggcaagaggagcggcacggctaatgacaatcgc

SEQ ID NO: 146961 - DNA, 50 bp, Artificial
  Synthetic oligonucleotide
acctaccagatacgccagagagcggccttcctgaaattgcggcgcgtcgg

SEQ ID NO: 146962 - DNA, 50 bp, Artificial
  Synthetic oligonucleotide
accggttgcgtcgacagacggaaacagttccggagcagatcagccctgca

SEQ ID NO: 146963 - DNA, 50 bp, Artificial
  Synthetic oligonucleotide
accgatacttatctcgggccgcttcgctggaccgcagtgctcggccgtca

SEQ ID NO: 146964 - DNA, 50 bp, Artificial
  Synthetic oligonucleotide
acccttcccatggtggtaggcctcgtttggctggccgtccaatacgttgc

SEQ ID NO: 146965 - DNA, 50 bp, Artificial
  Synthetic oligonucleotide
acccggcacgcgtaggcactggatcggctctgcgtcgagaacgctcgtaa

SEQ ID NO: 146966 - DNA, 50 bp, Artificial
  Synthetic oligonucleotide
accccgctgtcgtctgttcggaacgtccaaagccgcggcgatcataggct

SEQ ID NO: 146967 - DNA, 50 bp, Artificial
  Synthetic oligonucleotide
accccgctaggcgatcgaccgaaccggagccccgatgaaagccagattgt

SEQ ID NO: 146968 - DNA, 50 bp, Artificial
  Synthetic oligonucleotide
accccaccttgctgattgcggcgtagccagcgagtttccgagcctttcat

SEQ ID NO: 146969 - DNA, 50 bp, Artificial
  Synthetic oligonucleotide
acccaagcctcgtcggaagtggcgagcagatcctttgtggctcggtcggc

SEQ ID NO: 146970 - DNA, 57 bp, Artificial
  Synthetic oligonucleotide
gtagagtttataagctcatcgttgcttatcccgatttcctaccgtcagattcgtact

SEQ ID NO: 146971 - DNA, 57 bp, Artificial
  Synthetic oligonucleotide
gtattttttctctgttcctataaatcgcttaaacgttgatgctgtaacgtgcggatg

SEQ ID NO: 146972 - DNA, 60 bp, Artificial
  Synthetic oligonucleotide
caggtttgattacaagtgtgacatggacagctactgatgcaggcttgtcacctacagagt

SEQ ID NO: 146973 - DNA, 55 bp, Artificial
  Synthetic oligonucleotide
tagggcgtttagtacgtggtcgtagacccgaaaccaggtgatctacccatgtcca

SEQ ID NO: 146974 - DNA, 60 bp, Artificial
  Synthetic oligonucleotide
aggacactccattcctaataggctgtttaatatggatgatgagcgatttgtattaattgg

SEQ ID NO: 146975 - DNA, 60 bp, Artificial
  Synthetic oligonucleotide
taggagccatcttgctatcgtgtacgttcgctgttgtaaacgcgtaagataatacaacac

SEQ ID NO: 146976 - DNA, 56 bp, Artificial
  Synthetic oligonucleotide
tagcttttgaacggtggaggaatacatacagtacctgtcaacggtaagcggacgga

SEQ ID NO: 146977 - DNA, 59 bp, Artificial
  Synthetic oligonucleotide
tattgtgagccaagatccgtatgaagaagtaagtcctttccgggcttttgagcagtgta

SEQ ID NO: 146978 - DNA, 56 bp, Artificial
  Synthetic oligonucleotide
tattgtatatcgggtgtcggtaacttcacttgttcacattcgaaaaagttttgcac

SEQ ID NO: 146979 - DNA, 58 bp, Artificial
  Synthetic oligonucleotide
agccatcattttctttaagcagggactaaaggaagaagctcttgactattgtgtgaag

SEQ ID NO: 146980 - DNA, 59 bp, Artificial
  Synthetic oligonucleotide
tattcaaagatcattattagatctaatgcaggaaattacaggtgaaaaacattttatcg

SEQ ID NO: 146981 - DNA, 60 bp, Artificial
  Synthetic oligonucleotide
tatgttcgaatctcgaatgaaggttattggaatagcgcaattccagtaggtgaccgtatg

SEQ ID NO: 146982 - DNA, 60 bp, Artificial
  Synthetic oligonucleotide
tatgtatgcatattatcctttagtgtcgcaagatagttatctacaagtagaaacaaaatc

SEQ ID NO: 146983 - DNA, 60 bp, Artificial
  Synthetic oligonucleotide
caggtgatcttttaagcgcaggtgttgcactaatgaaagttgtaggaccaatcgtattgc

SEQ ID NO: 146984 - DNA, 60 bp, Artificial
  Synthetic oligonucleotide
tatgtaggagtcaacgataagcggacttcggcgttagccgatggagcattaaggagttga

SEQ ID NO: 146985 - DNA, 60 bp, Artificial
  Synthetic oligonucleotide
tatgtaaatccttctcaaaatcaagtgaacaaagctgattatttgcgagctgttgaaggt

SEQ ID NO: 146986 - DNA, 60 bp, Artificial
  Synthetic oligonucleotide
tatgggtgattacccagcaagtttcgggacagttagacagagagctaacagacatgttaa

SEQ ID NO: 146987 - DNA, 55 bp, Artificial
  Synthetic oligonucleotide
agccggatctacgacaattgagaaaacaaatacaaagtctaacggagattttcaa

SEQ ID NO: 146988 - DNA, 60 bp, Artificial
  Synthetic oligonucleotide
tatgcctagcataaccaagctcaattgggtaccaattgtagagcttgccttattccgact

SEQ ID NO: 146989 - DNA, 54 bp, Artificial
  Synthetic oligonucleotide
tttttagtttggttaagttagaaagggcgcacggtggatgccttgacactagga

SEQ ID NO: 146990 - DNA, 59 bp, Artificial
  Synthetic oligonucleotide
agcctctggatgcttatgcacccgaggtctcaactaggcctttctccgacggaagtctc

SEQ ID NO: 146991 - DNA, 60 bp, Artificial
  Synthetic oligonucleotide
tatgatttatccatctagcatattgttgtatcaattatctgaacggcttggtattgatcc

SEQ ID NO: 146992 - DNA, 57 bp, Artificial
  Synthetic oligonucleotide
agcgaagacaattgtcttcgctaagtaattaaacgtggatataacggttgctctcca

SEQ ID NO: 146993 - DNA, 56 bp, Artificial
  Synthetic oligonucleotide
agcgaattacgtgtaaagttgtttggagttcctggtgaaagtgtagttgatccaga

SEQ ID NO: 146994 - DNA, 60 bp, Artificial
  Synthetic oligonucleotide
cagggcatggatcggcgaatgccgaagagcctcgcagagcacgtccaaatgaaatttggt

SEQ ID NO: 146995 - DNA, 59 bp, Artificial
  Synthetic oligonucleotide
tatgaattttcccgctataatgaggacagcgaagtataatattccataagttgggacaa

SEQ ID NO: 146996 - DNA, 60 bp, Artificial
  Synthetic oligonucleotide
agcgatggtggaacaggaatgtgcagcgcaaggtgtaccagaactcgttccctatgtgct

SEQ ID NO: 146997 - DNA, 58 bp, Artificial
  Synthetic oligonucleotide
tatctttggatccgaccgagtttgtcataaagtcgaacttaaggatattgacgagaca

SEQ ID NO: 146998 - DNA, 60 bp, Artificial
  Synthetic oligonucleotide
tttttcacaaaattagtcgctgcatcatcaacaagttgcaactcacaacgcacccaatgc

SEQ ID NO: 146999 - DNA, 58 bp, Artificial
  Synthetic oligonucleotide
agcgcataaggaaaaatcgaggtgatccgctatgaacaccgatacaaccgctacaaaa

SEQ ID NO: 147000 - DNA, 60 bp, Artificial
  Synthetic oligonucleotide
aaaacctgtctcttgtgcgagttgttgaagaatatgtggagatagatatcgctgtagctc

SEQ ID NO: 147001 - DNA, 57 bp, Artificial
  Synthetic oligonucleotide
aaaacagatcggtaattgccttatatcgcaaaatcgcaaacagcaggaaattataag

SEQ ID NO: 147002 - DNA, 57 bp, Artificial
  Synthetic oligonucleotide
agcgcgagttaagtgcgcgtttaaacgttgggcgttcatctgtacgggaagcattgc

SEQ ID NO: 147003 - DNA, 60 bp, Artificial
  Synthetic oligonucleotide
tttttgaggtgagacgctatgaagacgttatatagtcctggtgacgtggcagagcaatta

SEQ ID NO: 147004 - DNA, 57 bp, Artificial
  Synthetic oligonucleotide
acttaaatcctcgtttttggtatgttcggcttggcgacatgctcacacctgccgaat

SEQ ID NO: 147005 - DNA, 60 bp, Artificial
  Synthetic oligonucleotide
ccaagagtccacatcgacggggaggtttggcacctcgatgtcggctcatcgcatcctggg

SEQ ID NO: 147006 - DNA, 57 bp, Artificial
  Synthetic oligonucleotide
acttgttaagtcatccactactcttatcagagactttcaaggacaggtaattggggc

SEQ ID NO: 147007 - DNA, 55 bp, Artificial
  Synthetic oligonucleotide
acttaagggagatgtataaatgaatatcggtagacaaatacaatattttcgtaaa

SEQ ID NO: 147008 - DNA, 59 bp, Artificial
  Synthetic oligonucleotide
ttgtgggcatagcgactccaactgtacggaagtatgctcaagctctcgaaaaggaaggg

SEQ ID NO: 147009 - DNA, 51 bp, Artificial
  Synthetic oligonucleotide
agaaaaaacctgttggtcgtccgtctattggtgtgacaaaaaaagtttcag

SEQ ID NO: 147010 - DNA, 54 bp, Artificial
  Synthetic oligonucleotide
aaacttcctagccgctttactcaagcttttagcgaaggtatccgctccaaatag

SEQ ID NO: 147011 - DNA, 60 bp, Artificial
  Synthetic oligonucleotide
tccggcgtgtgctacaagccccgacaagtcgagtacacatggatggttgacgcacccact

SEQ ID NO: 147012 - DNA, 57 bp, Artificial
  Synthetic oligonucleotide
acttgcggacagtcaccggctctataccgaggtgttttgcgacgtctttggacgata

SEQ ID NO: 147013 - DNA, 59 bp, Artificial
  Synthetic oligonucleotide
tcctggcatagatccatccaagttagacgaaaatatctactttgttcaaaaggacatcc

SEQ ID NO: 147014 - DNA, 60 bp, Artificial
  Synthetic oligonucleotide
acttcggtaacaagtccccattggtatgcctcttgcgctgtaattcgtcgcgcacgcata

SEQ ID NO: 147015 - DNA, 57 bp, Artificial
  Synthetic oligonucleotide
tttatgatcagtcaatgtgttgtttatccgggtactaattttaatcggttatgtaca

SEQ ID NO: 147016 - DNA, 58 bp, Artificial
  Synthetic oligonucleotide
ggatttgcgccagcttgagtaactccgttcacagttacactccctggaatgaaagtag

SEQ ID NO: 147017 - DNA, 59 bp, Artificial
  Synthetic oligonucleotide
tcctgcatttcagttatcgctatgtttaaagacatctgaaaacttttttcgctatcctc

SEQ ID NO: 147018 - DNA, 47 bp, Artificial
  Synthetic oligonucleotide
tttagaaaagccaacgagggttttttcacgaaagtttggtaacgttt

SEQ ID NO: 147019 - DNA, 52 bp, Artificial
  Synthetic oligonucleotide
aaactccgtttagtgttacagtaccaagagtcaatatcgttccgtttggaag

SEQ ID NO: 147020 - DNA, 58 bp, Artificial
  Synthetic oligonucleotide
ttgttctaatcgaatctcttgtatgtcgtgccaatgaacacgtccgaaataacgggcg

SEQ ID NO: 147021 - DNA, 60 bp, Artificial
  Synthetic oligonucleotide
aaagcaaaatctagtggaatgactgccctaggtattaccgatcatggcgtatgcagtgca

SEQ ID NO: 147022 - DNA, 60 bp, Artificial
  Synthetic oligonucleotide
ttgtgtccaaaagccatacatcgttagattatagacgttcaatcgaaacacatcttagat

SEQ ID NO: 147023 - DNA, 56 bp, Artificial
  Synthetic oligonucleotide
tttaacttaacctcaaacttaagggagatgtataaatgaacattggtagacagata

SEQ ID NO: 147024 - DNA, 50 bp, Artificial
  Synthetic oligonucleotide
aaacttttttcggctggtttttagcttttgccaagccgaacagaccaaaa

SEQ ID NO: 147025 - DNA, 54 bp, Artificial
  Synthetic oligonucleotide
ttgttaccccagattccgcaactcctaaaattcctttaactagtaaatcattca

SEQ ID NO: 147026 - DNA, 57 bp, Artificial
  Synthetic oligonucleotide
ttgtctcttaataactgtgggagtagattggattcgctcctacaattacctcgttcc

SEQ ID NO: 147027 - DNA, 60 bp, Artificial
  Synthetic oligonucleotide
ggcaaatccgcttatcgcgtaaaggctgagctgtgatggggaagctccttatggagcgaa

SEQ ID NO: 147028 - DNA, 58 bp, Artificial
  Synthetic oligonucleotide
cacttgtgagagttagcggtacaataaagcacatggctttagtaattggtcgtaacga

SEQ ID NO: 147029 - DNA, 59 bp, Artificial
  Synthetic oligonucleotide
ggtgtagatgtatcaaatgcatcagaattcgcataataatagttaggatctatgaggtg

SEQ ID NO: 147030 - DNA, 53 bp, Artificial
  Synthetic oligonucleotide
tccgcccatcctacccctattaaaactaaacttcctcctattactatcttcca

SEQ ID NO: 147031 - DNA, 59 bp, Artificial
  Synthetic oligonucleotide
gccccggtcgatgtgtgcgagattttgtaattgtccgctctcgatgatcctctcccgct

SEQ ID NO: 147032 - DNA, 55 bp, Artificial
  Synthetic oligonucleotide
tcgcaagttgctgacccacaaacggacccattgttaaccctgttccacccaatcc

SEQ ID NO: 147033 - DNA, 55 bp, Artificial
  Synthetic oligonucleotide
ttggttacgtatattatagcaagtactccaacaaaaaatcaatcgttggaggaat

SEQ ID NO: 147034 - DNA, 59 bp, Artificial
  Synthetic oligonucleotide
cagaagttggcgcatcttaaacattgtaggggaacataggaaaatcgcaatgagccttc

SEQ ID NO: 147035 - DNA, 54 bp, Artificial
  Synthetic oligonucleotide
tatactaaaccggctaagccggtcgcgaacggttcagtttatgaatgtttgtta

SEQ ID NO: 147036 - DNA, 59 bp, Artificial
  Synthetic oligonucleotide
ggttctgtaatcgcttgttctacagtctttcctctataatgaatccgctgatataccac

SEQ ID NO: 147037 - DNA, 54 bp, Artificial
  Synthetic oligonucleotide
cgtaacgcgttcccattaactatgtaatagcacgtaagctacgttttatcagtt

SEQ ID NO: 147038 - DNA, 60 bp, Artificial
  Synthetic oligonucleotide
ggcaacgcggtacaaatgttcaacatccagcggtgtgatttctcttccgtcaaattcatg

SEQ ID NO: 147039 - DNA, 57 bp, Artificial
  Synthetic oligonucleotide
atcaacctcggtgagcttttcataagtaaatgaggttcttcacaagtaattcgtgaa

SEQ ID NO: 147040 - DNA, 59 bp, Artificial
  Synthetic oligonucleotide
cgtaagtatgcactttattaacatatagtatcgaatagtatactgtatttctaatcgat

SEQ ID NO: 147041 - DNA, 57 bp, Artificial
  Synthetic oligonucleotide
atcgagttagctcgaatctcggtgatccgatacgaatcgactaaaatcgaaaacacg

SEQ ID NO: 147042 - DNA, 55 bp, Artificial
  Synthetic oligonucleotide
ccgaatttcgaaagtagtcgaggattaacgaggcgtgtcggaatggatagagctt

SEQ ID NO: 147043 - DNA, 53 bp, Artificial
  Synthetic oligonucleotide
cggaacggtcctttggtggaaacgtaaaccagatggtcattttggagcgccga

SEQ ID NO: 147044 - DNA, 55 bp, Artificial
  Synthetic oligonucleotide
caatgtttgggagaacgcgagagcttgtttttactattccatttggcaaccctac

SEQ ID NO: 147045 - DNA, 59 bp, Artificial
  Synthetic oligonucleotide
tccgctctagcgaggccgaatcccttctcgaggttatgttgctgtaaggcctgccttaa

SEQ ID NO: 147046 - DNA, 55 bp, Artificial
  Synthetic oligonucleotide
tccaattgttgttccgtttctattaccgccagcaggtgcaacaaccgttaaagag

SEQ ID NO: 147047 - DNA, 56 bp, Artificial
  Synthetic oligonucleotide
aagtctttacgtcatcctcggtatagagtcgccatccttttgaatctttattgaag

SEQ ID NO: 147048 - DNA, 59 bp, Artificial
  Synthetic oligonucleotide
ttcaggagcggaatccaaatctagtagtttataacatggttttacatgacgatgaagcc

SEQ ID NO: 147049 - DNA, 55 bp, Artificial
  Synthetic oligonucleotide
ccaacaaagcctttaagtctcgtctataccaagccaaacgttcgttcaatggcat

SEQ ID NO: 147050 - DNA, 59 bp, Artificial
  Synthetic oligonucleotide
caatcgtggactcaatcaaggtacgaagcgagtggccgctatcgtggcgactgctgggc

SEQ ID NO: 147051 - DNA, 59 bp, Artificial
  Synthetic oligonucleotide
agctgcattagtaggtctattttccgagcctagtgcactacgttcgagtacttccgcta

SEQ ID NO: 147052 - DNA, 59 bp, Artificial
  Synthetic oligonucleotide
ttctgtttggctcggaccaatagtgttccaatagaagatatgtcaatatgaagtacgtc

SEQ ID NO: 147053 - DNA, 56 bp, Artificial
  Synthetic oligonucleotide
ggtaactatttccgcacggaaatcgatgcctatgtattgttttatcccttgtgtac

SEQ ID NO: 147054 - DNA, 53 bp, Artificial
  Synthetic oligonucleotide
aggatgtaggttgttcgacttggattagtaattatacccgccgaaccgccagt

SEQ ID NO: 147055 - DNA, 56 bp, Artificial
  Synthetic oligonucleotide
ggtattactgactttcttcactttactcttctcactcttatatatagggctaaaag

SEQ ID NO: 147056 - DNA, 54 bp, Artificial
  Synthetic oligonucleotide
aatgggtatacgttagagaagttgacaggtgtaccgaaagtgaaagctaactat

SEQ ID NO: 147057 - DNA, 58 bp, Artificial
  Synthetic oligonucleotide
agacgctaagagatcgggtggccgtactggaacagtggaaagacaaaatggtgcagtg

SEQ ID NO: 147058 - DNA, 58 bp, Artificial
  Synthetic oligonucleotide
cgtgtacttcttctccctattcacgaattggagtggcaaacagtggtcgtggcactcc

SEQ ID NO: 147059 - DNA, 58 bp, Artificial
  Synthetic oligonucleotide
ccccggtctttcagccatccgaagaactcgctccagctggactccgattcactgtttc

SEQ ID NO: 147060 - DNA, 57 bp, Artificial
  Synthetic oligonucleotide
ccaaaacgtttgacgttttgacaggccaagaggttgaagaatcaattgcacgtgtca

SEQ ID NO: 147061 - DNA, 55 bp, Artificial
  Synthetic oligonucleotide
gggttacacccgtatttcatatgctaggatttaacataaaaagggacagagatcg

SEQ ID NO: 147062 - DNA, 59 bp, Artificial
  Synthetic oligonucleotide
tcagctttgacttgtccaattggagccaagctaacagcgagtgatacagcaagtaaaga

SEQ ID NO: 147063 - DNA, 59 bp, Artificial
  Synthetic oligonucleotide
ttttatagtgacggacaatctgttgaatatgcaacacagacagttgtaagcttggggga

SEQ ID NO: 147064 - DNA, 59 bp, Artificial
  Synthetic oligonucleotide
tgacacgtgagcaatggagagatatgaaaaaaaaggttgatgcagcggttattataaag

SEQ ID NO: 147065 - DNA, 58 bp, Artificial
  Synthetic oligonucleotide
ttcgtaccatcggttagctgaagcaacgcagttccaccggtcataaccgatgccctta

SEQ ID NO: 147066 - DNA, 55 bp, Artificial
  Synthetic oligonucleotide
ccataaagtgagcctttctaatgtgattctttcgtttccaatcgaataaatacgt

SEQ ID NO: 147067 - DNA, 59 bp, Artificial
  Synthetic oligonucleotide
tatgtaattgtgcggaatgtcttgtgtttagaagagatgttgaaacaggcaggctacga

SEQ ID NO: 147068 - DNA, 59 bp, Artificial
  Synthetic oligonucleotide
tatcgtattgctagttcagataaattttggccagcatacattaatcctaagttgtgacg

SEQ ID NO: 147069 - DNA, 59 bp, Artificial
  Synthetic oligonucleotide
tggaaccactaaagaaaaaggactcctgtgatacatatgcaatttgtttacgcaatgct

SEQ ID NO: 147070 - DNA, 59 bp, Artificial
  Synthetic oligonucleotide
ggtggatctcaagtgaaagacaagttatgttatcaagtgacgaatgtatctcagcagtt

SEQ ID NO: 147071 - DNA, 53 bp, Artificial
  Synthetic oligonucleotide
cattttcacaggataaactacgtttaacttgggtagtttatcttcattatacc

SEQ ID NO: 147072 - DNA, 55 bp, Artificial
  Synthetic oligonucleotide
tacaaaataacttccgataacgggaattatgtaaacatacctcaatgataaagga

SEQ ID NO: 147073 - DNA, 58 bp, Artificial
  Synthetic oligonucleotide
cgcgacgtatggttgcttgtgggatgagtttgtacaacggattggaagtatctctttc

SEQ ID NO: 147074 - DNA, 59 bp, Artificial
  Synthetic oligonucleotide
cacattgctgttgtgaatgacatttgtacgctcctttctagctcactatgccagtagtg

SEQ ID NO: 147075 - DNA, 58 bp, Artificial
  Synthetic oligonucleotide
ctatcctaagagcaaaccagtttatgtaactattcaacacagacaatgtaaagattcc

SEQ ID NO: 147076 - DNA, 59 bp, Artificial
  Synthetic oligonucleotide
tgtgacattgtagattgtggaacacgtagtaacttctgtaactcggatacatgtaatgg

SEQ ID NO: 147077 - DNA, 53 bp, Artificial
  Synthetic oligonucleotide
agaacgtcgcacccgtgggactcgatcccgttagctaaactgttcgcccccta

SEQ ID NO: 147078 - DNA, 59 bp, Artificial
  Synthetic oligonucleotide
ggatggatccaatgttcacaccgctagcgggatttgcgcccacttgtgtcgtgccatct

SEQ ID NO: 147079 - DNA, 56 bp, Artificial
  Synthetic oligonucleotide
caaattcttgtttatttgagggatactccaaaggtgttaccatagcaaatgtttca

SEQ ID NO: 147080 - DNA, 59 bp, Artificial
  Synthetic oligonucleotide
acattgcataagattgtgattttatatgatccacatgtacagtttgatttttccataga

SEQ ID NO: 147081 - DNA, 57 bp, Artificial
  Synthetic oligonucleotide
aagtgttgcgcttaggcggacgtgtcactggtgttatgcctcgtggtttatttcgcg

SEQ ID NO: 147082 - DNA, 55 bp, Artificial
  Synthetic oligonucleotide
gtcaaaactggtaaagcaggtggctctataacagctaacaagacggtaacgtttg

SEQ ID NO: 147083 - DNA, 54 bp, Artificial
  Synthetic oligonucleotide
ggcacggtttattaagaagtttttgtccgaatcgtcatgggagtacgtccagga

SEQ ID NO: 147084 - DNA, 59 bp, Artificial
  Synthetic oligonucleotide
ggccttgccgcgaatgtactcgaccaatcctgtgtaatcgctgatgagcataaaagtgt

SEQ ID NO: 147085 - DNA, 59 bp, Artificial
  Synthetic oligonucleotide
ttatgagtggctgcgataatccgaacgtccacctcaatcgattttgtgcctccaactct

SEQ ID NO: 147086 - DNA, 56 bp, Artificial
  Synthetic oligonucleotide
cttcacttgcggaataaacaatttcgtccgtcataacgctacaacggatacaattc

SEQ ID NO: 147087 - DNA, 59 bp, Artificial
  Synthetic oligonucleotide
ctaaaatggtcgagattgcttcagaagacttcgatagtataaaatcattagctaagtct

SEQ ID NO: 147088 - DNA, 54 bp, Artificial
  Synthetic oligonucleotide
cgttctggaatttgcaaccctgaatttagggaaattgacgtaatttcgcataaa

SEQ ID NO: 147089 - DNA, 58 bp, Artificial
  Synthetic oligonucleotide
cgaacactagcttatgaccatattaaaagtatactgcaattaatcgagctacgtaaag

SEQ ID NO: 147090 - DNA, 59 bp, Artificial
  Synthetic oligonucleotide
acaccttgcgctgcacattcctgttccaccatcgcttgccacctcatgacttcaggcgg

SEQ ID NO: 147091 - DNA, 56 bp, Artificial
  Synthetic oligonucleotide
taaaattagtcgctttgctcgattttaattagtgtcgcttcgctcgatttttataa

SEQ ID NO: 147092 - DNA, 59 bp, Artificial
  Synthetic oligonucleotide
catgttagctagatgaaacaggttcatccgataggctccttcttccgcatacggaccac

SEQ ID NO: 147093 - DNA, 59 bp, Artificial
  Synthetic oligonucleotide
gggagaatagactccactcccgtagcctgagaggcgccatgaagtgaaagcgacatggc

SEQ ID NO: 147094 - DNA, 57 bp, Artificial
  Synthetic oligonucleotide
catttggcttcaccttattatggaaaaatcacacaaaactttctatttatcaagtga

SEQ ID NO: 147095 - DNA, 54 bp, Artificial
  Synthetic oligonucleotide
tccctaaacttgggtaagctaatctaaactaggactctcctcgtatttcgctag

SEQ ID NO: 147096 - DNA, 52 bp, Artificial
  Synthetic oligonucleotide
gagcgtttcggctaaaaggtatagtttcgtatattaataactttacaaagcg

SEQ ID NO: 147097 - DNA, 57 bp, Artificial
  Synthetic oligonucleotide
gttactgaagaggaattcgaacggctatcgttgatggcggataacgtaggaatgacg

SEQ ID NO: 147098 - DNA, 59 bp, Artificial
  Synthetic oligonucleotide
ccaccgagtcgctttaatgtaggtcccgctttaagacacttctactatgctatgacaga

SEQ ID NO: 147099 - DNA, 55 bp, Artificial
  Synthetic oligonucleotide
cagtccggtaacattcgacctggttatacaacaagggttcaaattatgttagcaa

SEQ ID NO: 147100 - DNA, 54 bp, Artificial
  Synthetic oligonucleotide
gggatttgtttctaaattcactgtgagacaataacccttagtaatttcaaatgg

SEQ ID NO: 147101 - DNA, 59 bp, Artificial
  Synthetic oligonucleotide
atagagaccaagagacctctatagcagctattcatagcttccacatgtcgattagtgaa

SEQ ID NO: 147102 - DNA, 59 bp, Artificial
  Synthetic oligonucleotide
ttgcggcccctagttcccagttcgtaccactgtcagtcgagtgaactgcgacaacgata

SEQ ID NO: 147103 - DNA, 57 bp, Artificial
  Synthetic oligonucleotide
taaccatatacaaatgaaccgctcatgccactaaccacgggtgttaatatagtcgtt

SEQ ID NO: 147104 - DNA, 59 bp, Artificial
  Synthetic oligonucleotide
gacggaaatcgagagattttagcactcacacaggggtgtgtataagtgcgccattttca

SEQ ID NO: 147105 - DNA, 60 bp, Artificial
  Synthetic oligonucleotide
cattgtccccgactaccatcaatacgcgaatgccatcggggcttgcattgccccggtgag

SEQ ID NO: 147106 - DNA, 57 bp, Artificial
  Synthetic oligonucleotide
tagactcatagttgtaagggctaactgctgttttgtctaaggataggggaatttctc

SEQ ID NO: 147107 - DNA, 58 bp, Artificial
  Synthetic oligonucleotide
tacggatcgttaagaccaatttatttgtgacagctgcgggcagctgtccgtttacaaa

SEQ ID NO: 147108 - DNA, 54 bp, Artificial
  Synthetic oligonucleotide
agccaccggagttactggggcgacgggcattactggagccaccggagttactgg

SEQ ID NO: 147109 - DNA, 59 bp, Artificial
  Synthetic oligonucleotide
caacagttttcgattaacatagataaagagacaattgcaatagttaatcagctattagt

SEQ ID NO: 147110 - DNA, 59 bp, Artificial
  Synthetic oligonucleotide
aggcgaatttgaagcatcagcattaagtcaatcactcgatactgtaccacttacaggcg

SEQ ID NO: 147111 - DNA, 54 bp, Artificial
  Synthetic oligonucleotide
tggaagagaacgagtacgtgttctctaaaggcgaacaagaaagccgagcttttt

SEQ ID NO: 147112 - DNA, 58 bp, Artificial
  Synthetic oligonucleotide
tatgcatcggggtctcccctaggccttgcttccataggacaaggaagactgcgacagc

SEQ ID NO: 147113 - DNA, 58 bp, Artificial
  Synthetic oligonucleotide
ttggattcctgttcatctggtgagggggggcgagaacttgcccagggacgattctcta

SEQ ID NO: 147114 - DNA, 54 bp, Artificial
  Synthetic oligonucleotide
cgccggggcgcaaaatgtcaagctccaccgttgttcctttcttgccgcggattt

SEQ ID NO: 147115 - DNA, 56 bp, Artificial
  Synthetic oligonucleotide
ggacaagtatgagataattaattgtcctaaaggggaatggataaacgaatggcaaa

SEQ ID NO: 147116 - DNA, 60 bp, Artificial
  Synthetic oligonucleotide
cattatacgcttgttgtatgtatacctgatggtgtaacaggagcatgtatttcgttccaa

SEQ ID NO: 147117 - DNA, 58 bp, Artificial
  Synthetic oligonucleotide
atagtatgcgttgctacagcattctacgaaacggagtctacgactgattacgcattaa

SEQ ID NO: 147118 - DNA, 58 bp, Artificial
  Synthetic oligonucleotide
attcatggcgtaacagtaggagtacgatactcgcaatggtcccattcattcgttcgct

SEQ ID NO: 147119 - DNA, 58 bp, Artificial
  Synthetic oligonucleotide
acataacgctttaccacatccaacgccctagtggctacagtttctatatcacctgatt

SEQ ID NO: 147120 - DNA, 58 bp, Artificial
  Synthetic oligonucleotide
ttccacatgacgctggccaattagctgcagcttttcattttcactctctacctgttgc

SEQ ID NO: 147121 - DNA, 58 bp, Artificial
  Synthetic oligonucleotide
tcaatgggcaacacgatcagaccgattgctatgaaatgaccttacttgttctatactc

SEQ ID NO: 147122 - DNA, 58 bp, Artificial
  Synthetic oligonucleotide
tgctcgacttggactagcaagtatacccgccgaatcgccagttctatcgttccaaaaa

SEQ ID NO: 147123 - DNA, 58 bp, Artificial
  Synthetic oligonucleotide
tttgcgatgcttggaaacggttgggtcatatttgtaagtaccgcctgtgtattggcag

SEQ ID NO: 147124 - DNA, 57 bp, Artificial
  Synthetic oligonucleotide
ggagttgtaaggtaatgggcttatttgatcgttttagtgataagatgcctaaatcaa

SEQ ID NO: 147125 - DNA, 56 bp, Artificial
  Synthetic oligonucleotide
gaccttgactctcactcgtaacgctttgctcgggacataagccaaagggatggttt

SEQ ID NO: 147126 - DNA, 58 bp, Artificial
  Synthetic oligonucleotide
ctccatcaagaaaggccaaaccgcttcgaactaaaagatcctgaacacgcatgtcgtc

SEQ ID NO: 147127 - DNA, 58 bp, Artificial
  Synthetic oligonucleotide
cattagccgctaccatcaaggtttgctgtgcggcaaccgtgttcggggtcaagccgat

SEQ ID NO: 147128 - DNA, 57 bp, Artificial
  Synthetic oligonucleotide
catattacaagttagaaatgtccgacttacctttgaacgatagccatgaatttaagc

SEQ ID NO: 147129 - DNA, 58 bp, Artificial
  Synthetic oligonucleotide
ctttgttcacagcgattgtatataaacgagcctgacgtcgatcaatattacttggctt

SEQ ID NO: 147130 - DNA, 57 bp, Artificial
  Synthetic oligonucleotide
actcaggaactcaagctcaaaacctcgctcttttagagaagattacaactggaactc

SEQ ID NO: 147131 - DNA, 54 bp, Artificial
  Synthetic oligonucleotide
ctgtacaaacaccaggttggaactgggttggaaaggaacatattattactgatt

SEQ ID NO: 147132 - DNA, 58 bp, Artificial
  Synthetic oligonucleotide
gtcgtcagcactaaaaatactcttagacgtctttgaatcaccgtctgtcatctctact

SEQ ID NO: 147133 - DNA, 52 bp, Artificial
  Synthetic oligonucleotide
gagtttataatggattttcgtaacatcaaaaagaacgttaaaaaatctacag

SEQ ID NO: 147134 - DNA, 54 bp, Artificial
  Synthetic oligonucleotide
gaggtaggtgcttagtttgatacaaccagttacaactaaggacttaatacaatt

SEQ ID NO: 147135 - DNA, 58 bp, Artificial
  Synthetic oligonucleotide
gtggtggtacacttgctagagctagtcattcccgctaaaggttggtagccgttagcat

SEQ ID NO: 147136 - DNA, 56 bp, Artificial
  Synthetic oligonucleotide
attcggtcgtaagcgctaggagatcccccacgttgaatatgcccaagtatggttac

SEQ ID NO: 147137 - DNA, 58 bp, Artificial
  Synthetic oligonucleotide
catcaagaattacataatcacatagaaaagcaggctaatagagcctgcttttttgtat

SEQ ID NO: 147138 - DNA, 58 bp, Artificial
  Synthetic oligonucleotide
catgcggagttgggtcatgggaaaaatcgtttcgattttagctttgcgctacatgagt

SEQ ID NO: 147139 - DNA, 53 bp, Artificial
  Synthetic oligonucleotide
aacgaattacaagtagtgaaaaagggtttagaaagtgatgtcgttgctacgta

SEQ ID NO: 147140 - DNA, 57 bp, Artificial
  Synthetic oligonucleotide
ctattaccaggtggagggttactatgagctggaaacaaaagctaacggatctagatc

SEQ ID NO: 147141 - DNA, 51 bp, Artificial
  Synthetic oligonucleotide
ggggtagacgtattaagaagtattttatatccttaatcctaaaagggtata

SEQ ID NO: 147142 - DNA, 58 bp, Artificial
  Synthetic oligonucleotide
tgatatgagttacaccatgctctaacaataaatcgcctcgtcgatacatttcagctcg

SEQ ID NO: 147143 - DNA, 58 bp, Artificial
  Synthetic oligonucleotide
gggtccgaaatgtacttgggtggacatgattctacctcttctaatctgatctggtgat

SEQ ID NO: 147144 - DNA, 58 bp, Artificial
  Synthetic oligonucleotide
ggctactgatatattacttcctactggattacttacagttattccagctgtagttaca

SEQ ID NO: 147145 - DNA, 54 bp, Artificial
  Synthetic oligonucleotide
cgctttcggaccgaattaaaggtaatgctaaattaagtcatttactgaaagcaa

SEQ ID NO: 147146 - DNA, 57 bp, Artificial
  Synthetic oligonucleotide
acggttttggcattagatggcgctcttgcttataagaggttaattggctatggcggt

SEQ ID NO: 147147 - DNA, 58 bp, Artificial
  Synthetic oligonucleotide
cgaaatgttattcaggctgtctttgaaaagcaacaacagataatcgatcaacaacaag

SEQ ID NO: 147148 - DNA, 54 bp, Artificial
  Synthetic oligonucleotide
cgataatttgatcccttagagtaagtccagttgtttcggtatctaaaataacga

SEQ ID NO: 147149 - DNA, 58 bp, Artificial
  Synthetic oligonucleotide
ggcgagcggtatccgatatggacaagttcgaccaatacaagggtgctacaagtttggc

SEQ ID NO: 147150 - DNA, 57 bp, Artificial
  Synthetic oligonucleotide
tcggaaatcagttttggcaaatatggccgtttctagcatggtacttaggtattccac

SEQ ID NO: 147151 - DNA, 58 bp, Artificial
  Synthetic oligonucleotide
ctcgtttcttttgaccaactaatgtttgagtttctgcatgatattctaaattctcggc

SEQ ID NO: 147152 - DNA, 58 bp, Artificial
  Synthetic oligonucleotide
gtgctgttatgaatacctctctacgagcgtcggcgcacgtctcgcataaagattggta

SEQ ID NO: 147153 - DNA, 56 bp, Artificial
  Synthetic oligonucleotide
gtaaatagaacagcagttgactgtttagattttaaggatttgagaaccatacggga

SEQ ID NO: 147154 - DNA, 56 bp, Artificial
  Synthetic oligonucleotide
ccgattcctgactgcggcgaaacaacgtacaagggatcgggacagttacaaggcag

SEQ ID NO: 147155 - DNA, 58 bp, Artificial
  Synthetic oligonucleotide
gcgggagcccaatccgtcgcataaaatctgcgtgctccagcattggtgttgcggttgt

SEQ ID NO: 147156 - DNA, 58 bp, Artificial
  Synthetic oligonucleotide
tgtgataaatattatgctcctagaactaatgcaagagcaaactgctatagtatgtacg

SEQ ID NO: 147157 - DNA, 57 bp, Artificial
  Synthetic oligonucleotide
aaaaagcgaaattaagagatagtaagattgatagtatttatgaccaattgcaaactg

SEQ ID NO: 147158 - DNA, 57 bp, Artificial
  Synthetic oligonucleotide
taggggttattaatgatactgtgattaatcagttaaatttgactattagcccaactc

SEQ ID NO: 147159 - DNA, 58 bp, Artificial
  Synthetic oligonucleotide
cgagacattgaacaattaagtgaacaggagcttgagagattggtatacaatctcgacg

SEQ ID NO: 147160 - DNA, 59 bp, Artificial
  Synthetic oligonucleotide
catgataagatcgggaaatcgctttcttcgttatatctaattgaagttgctaatcgtta

SEQ ID NO: 147161 - DNA, 58 bp, Artificial
  Synthetic oligonucleotide
cgtacagtcttaattaccactgctattcttggattgcttcttgtatccggcggacatg

SEQ ID NO: 147162 - DNA, 58 bp, Artificial
  Synthetic oligonucleotide
aatcatgatattgaatcggagcgaacacatcttaattatgatttacataatgatggcc

SEQ ID NO: 147163 - DNA, 57 bp, Artificial
  Synthetic oligonucleotide
aagtgttggtagtgaagcaacaccatttcaacgcaataacagcgccgccggggttgc

SEQ ID NO: 147164 - DNA, 56 bp, Artificial
  Synthetic oligonucleotide
atgggcgtttggctcgctagttcaggggtcgccaacattttaggtggtcaactcgc

SEQ ID NO: 147165 - DNA, 53 bp, Artificial
  Synthetic oligonucleotide
aatattgtaacatttcgacgaagacaagggtttccctcctaccataacgaatg

SEQ ID NO: 147166 - DNA, 58 bp, Artificial
  Synthetic oligonucleotide
gtgaggtgatgataagtgagcacaccaggttacgaggctttagccaggaaggttaaga

SEQ ID NO: 147167 - DNA, 57 bp, Artificial
  Synthetic oligonucleotide
cgacccgaatataaaggggtactatgatcgagcaaagcaccttattcgtattaatgc

SEQ ID NO: 147168 - DNA, 58 bp, Artificial
  Synthetic oligonucleotide
ccgctccgcttctatcacattcagcttctggatttcgttgtaccacgcattgattttc

SEQ ID NO: 147169 - DNA, 58 bp, Artificial
  Synthetic oligonucleotide
ctagagtctgaatgcaatcagatcagagagatgcttgcccaaatggcagcacaatacg

SEQ ID NO: 147170 - DNA, 58 bp, Artificial
  Synthetic oligonucleotide
tactagaacttaattaacttctgataacgagaattatgtaaatcagctgtccatatgg

SEQ ID NO: 147171 - DNA, 60 bp, Artificial
  Synthetic oligonucleotide
catgaggtggcaagcgatggtggaacaggaatgtgcagcgcaaggtgtaccagaactcgt

SEQ ID NO: 147172 - DNA, 58 bp, Artificial
  Synthetic oligonucleotide
gtcagaagattaatgagtggtatcaacatatcaaaaggttgaatgtgacagatgcaga

SEQ ID NO: 147173 - DNA, 56 bp, Artificial
  Synthetic oligonucleotide
caagcatcaaacgagtattttaataccgtatcggttaacgatgtttattatgtcgc

SEQ ID NO: 147174 - DNA, 58 bp, Artificial
  Synthetic oligonucleotide
cgccatctacattacgaactgtaagtgtgagaaaaatccacctgcagccatactgccg

SEQ ID NO: 147175 - DNA, 56 bp, Artificial
  Synthetic oligonucleotide
tggacgatttagtatataatcgtaaattgcctatcgagattaaccttagaacaggg

SEQ ID NO: 147176 - DNA, 58 bp, Artificial
  Synthetic oligonucleotide
aggcagcataaactaccttctataacatctaaacccgtcatcaatctttggtaatgaa

SEQ ID NO: 147177 - DNA, 58 bp, Artificial
  Synthetic oligonucleotide
gatcatggtgtatgtcattccatacgacagattcgctagagacgatatcagttattac

SEQ ID NO: 147178 - DNA, 57 bp, Artificial
  Synthetic oligonucleotide
gttcttaacggaaacgctcattctgtttcgtaggaagccaacgatgtcacgagatag

SEQ ID NO: 147179 - DNA, 58 bp, Artificial
  Synthetic oligonucleotide
tccgcccctgtcattccgttggctattaggtcgccactactgtatgtagtcggcgcat

SEQ ID NO: 147180 - DNA, 58 bp, Artificial
  Synthetic oligonucleotide
gcatagcccgcttaatttgagacccttcaatctgccacacgggcgatgccaggaagga

SEQ ID NO: 147181 - DNA, 56 bp, Artificial
  Synthetic oligonucleotide
ctgccgcgttgcatcccgcaacttatccggagtaaagagtccacctaaccctgtcg

SEQ ID NO: 147182 - DNA, 58 bp, Artificial
  Synthetic oligonucleotide
catgagcaacgagaattggttgtagcgatcggggaaggtaaagatgacccaaagtata

SEQ ID NO: 147183 - DNA, 54 bp, Artificial
  Synthetic oligonucleotide
gaaataggcccaaaatgttcggacccttaggaatatagcaaacttatggaggtg

SEQ ID NO: 147184 - DNA, 58 bp, Artificial
  Synthetic oligonucleotide
gctcttaccaaaatggttagagtccttttcgtatagcaaagataaggcgtgcagagcc

SEQ ID NO: 147185 - DNA, 56 bp, Artificial
  Synthetic oligonucleotide
tccgaatgccaggggattaggagaacatgcggtaaaaaccctggttcattggatta

SEQ ID NO: 147186 - DNA, 58 bp, Artificial
  Synthetic oligonucleotide
gtgtgacaagttacgggatgtgattgactatgtccaacatggttatcattcgggcgag

SEQ ID NO: 147187 - DNA, 55 bp, Artificial
  Synthetic oligonucleotide
gtattaatttgcggggaaccaaactgcatcccccattcataactcgtacgatccc

SEQ ID NO: 147188 - DNA, 58 bp, Artificial
  Synthetic oligonucleotide
gtgcttgcctgtgatgctagtagggtaatagggtcaactcctatggctattgcacatt

SEQ ID NO: 147189 - DNA, 58 bp, Artificial
  Synthetic oligonucleotide
aatgcaagatccaatgacaattattacgttacttaattgcatttatcgagactagccg

SEQ ID NO: 147190 - DNA, 58 bp, Artificial
  Synthetic oligonucleotide
agaccccactacttttatagtgctatacatctaagctttactgcaaatgaacgagcca

SEQ ID NO: 147191 - DNA, 58 bp, Artificial
  Synthetic oligonucleotide
gctaatggtactttaggatcagcaattacatgggcttcatctatgtaaacttgtgtcg

SEQ ID NO: 147192 - DNA, 58 bp, Artificial
  Synthetic oligonucleotide
gtgtgatagagtacttctactatcccatcatgagcaagaggttccacgaacatattcg

SEQ ID NO: 147193 - DNA, 56 bp, Artificial
  Synthetic oligonucleotide
gtcaaagcagatttttttaccgaatacacctattaggtcagaacatgggacgtctg

SEQ ID NO: 147194 - DNA, 60 bp, Artificial
  Synthetic oligonucleotide
catgaatctttccatccactgctaacaccgcaacatctttcccgtttggcagcggcttaa

SEQ ID NO: 147195 - DNA, 52 bp, Artificial
  Synthetic oligonucleotide
agtatgatacgattacaaaaaggggacagggaattctaaggaggaatttccg

SEQ ID NO: 147196 - DNA, 57 bp, Artificial
  Synthetic oligonucleotide
ttacgctcttttccaggggtatattctgcaagctataatcaagtaaccggaagtcta

SEQ ID NO: 147197 - DNA, 56 bp, Artificial
  Synthetic oligonucleotide
gcccgttatctagccagacatgccgtaccagtccccgcgttcctggaatacccacg

SEQ ID NO: 147198 - DNA, 58 bp, Artificial
  Synthetic oligonucleotide
tatcttgtaacaatagcatctctagtaggtgtgggaatagctcagttaatgaatttac

SEQ ID NO: 147199 - DNA, 58 bp, Artificial
  Synthetic oligonucleotide
gctataagcgaggacttgaaaagcaagtgtcgtttgatcgggctattacgcaacaaga

SEQ ID NO: 147200 - DNA, 57 bp, Artificial
  Synthetic oligonucleotide
aggatttagaaaccacgcagaacaggcagcgacaaaagcgggagccatgccagttga

SEQ ID NO: 147201 - DNA, 57 bp, Artificial
  Synthetic oligonucleotide
ggcgttgtgtgccttttgagacgcctcatagctaatattgaaagagtcccgcgcttc

SEQ ID NO: 147202 - DNA, 57 bp, Artificial
  Synthetic oligonucleotide
ggcatgagtacacgggaaattggcaagtttattgaacgaattctaggaaatgcttat

SEQ ID NO: 147203 - DNA, 57 bp, Artificial
  Synthetic oligonucleotide
ctgctatgtatataaaaacatctagttgtttgttgtctatgatccctaagacagtta

SEQ ID NO: 147204 - DNA, 56 bp, Artificial
  Synthetic oligonucleotide
taggggtcactatacatagccatcaacttaaggattttcactacccctaagtacaa

SEQ ID NO: 147205 - DNA, 60 bp, Artificial
  Synthetic oligonucleotide
catgaagagttcattgcgtattactatcaaccaacctgtcattattgtaaaaaggctgca

SEQ ID NO: 147206 - DNA, 57 bp, Artificial
  Synthetic oligonucleotide
agggctcgccttagcaacgccatgctaagtcactcgccattacgacttttccgacga

SEQ ID NO: 147207 - DNA, 57 bp, Artificial
  Synthetic oligonucleotide
tcaactggcatggctcccgcttttgtcgctgcctgttctgcgtggtttctaaatcct

SEQ ID NO: 147208 - DNA, 57 bp, Artificial
  Synthetic oligonucleotide
acagccaccgggacttgccacagtggaagatattgcaggaatccgggcagccttaca

SEQ ID NO: 147209 - DNA, 57 bp, Artificial
  Synthetic oligonucleotide
gcgacaatgggggcaacaaaaggacggccatggattatggtggcctattcaatcgag

SEQ ID NO: 147210 - DNA, 57 bp, Artificial
  Synthetic oligonucleotide
gtggtaaagcttatgtaagaggaacaaagctatacggcatgaatgtagttggccaac

SEQ ID NO: 147211 - DNA, 57 bp, Artificial
  Synthetic oligonucleotide
tgtgattgtgcggaatgtcttgcgtttaagagagatttagaaacgggcagactacga

SEQ ID NO: 147212 - DNA, 56 bp, Artificial
  Synthetic oligonucleotide
tgtcctacaacggcttcactttctatgagggtgtttaaagaacaatattcggaaga

SEQ ID NO: 147213 - DNA, 54 bp, Artificial
  Synthetic oligonucleotide
cgctttgtttaacggaagtctattatgcaaacgattgcttttacccaaattgga

SEQ ID NO: 147214 - DNA, 57 bp, Artificial
  Synthetic oligonucleotide
gagattattatcagggaggcggagcaatatgattaaaccggagtttctacacattcg

SEQ ID NO: 147215 - DNA, 57 bp, Artificial
  Synthetic oligonucleotide
aacgtgagacaaataatccggcatcacctacatatctagctgaaaagtttaaaatga

SEQ ID NO: 147216 - DNA, 59 bp, Artificial
  Synthetic oligonucleotide
catcttgagtcttctttggattctctatgtaccttatcttgtattgtgcggttttgtcg

SEQ ID NO: 147217 - DNA, 57 bp, Artificial
  Synthetic oligonucleotide
taaccgttatgtcttctgttgtagcagttatatccgttatatcggttgtgtccgtca

SEQ ID NO: 147218 - DNA, 57 bp, Artificial
  Synthetic oligonucleotide
tatatcgatacaatcaaaatcgaatggatccttaccggtcgtgatttctaccgtgtg

SEQ ID NO: 147219 - DNA, 57 bp, Artificial
  Synthetic oligonucleotide
aagcccatcagggtgtaaaacgtgtccgccgcgcaagaatagcaagtgcggaaggag

SEQ ID NO: 147220 - DNA, 55 bp, Artificial
  Synthetic oligonucleotide
ggagaaaaagatccgattaaactatatgaaaaatcgtggcacgcccgtctttgaa

SEQ ID NO: 147221 - DNA, 57 bp, Artificial
  Synthetic oligonucleotide
tacacccaatccgatatatcacatcgtctaaatattgcccgcactaattatgcaatt

SEQ ID NO: 147222 - DNA, 57 bp, Artificial
  Synthetic oligonucleotide
taattgaaaatttgacacacagaacaatttgttcatgcggtcaaatgctgcgggagt

SEQ ID NO: 147223 - DNA, 57 bp, Artificial
  Synthetic oligonucleotide
tggatcagctgacaaaatcgatacaggacttaacgatcgccttaaaccggagctcgc

SEQ ID NO: 147224 - DNA, 57 bp, Artificial
  Synthetic oligonucleotide
attacatctctcatgtaatacttacgatccacaggtaaaaacttaagtagcatgaca

SEQ ID NO: 147225 - DNA, 57 bp, Artificial
  Synthetic oligonucleotide
taagggggacgccacatacgtggctacaactaccaggcaaagcctggtatatcatgg

SEQ ID NO: 147226 - DNA, 57 bp, Artificial
  Synthetic oligonucleotide
gatcttgagagatatagtttaattctgcctgtgaaagttcgtcatattccaatgtgg

SEQ ID NO: 147227 - DNA, 60 bp, Artificial
  Synthetic oligonucleotide
catcttagattgcttcaggaagggctaaataagcgtgcagaacgctataataagccgaaa

SEQ ID NO: 147228 - DNA, 57 bp, Artificial
  Synthetic oligonucleotide
attccaaacggctaattgcgttgcataatgagcttccttccaattcgaaacacctaa

SEQ ID NO: 147229 - DNA, 57 bp, Artificial
  Synthetic oligonucleotide
actcgcaatcctgcataggtaagcaggtacaccactgcacggtcccgacgatatttc

SEQ ID NO: 147230 - DNA, 57 bp, Artificial
  Synthetic oligonucleotide
gctgccattaatggagaagcgtggtaagttcgtgtattaataatataacacgttctt

SEQ ID NO: 147231 - DNA, 57 bp, Artificial
  Synthetic oligonucleotide
cgcaattcaggtatagtccaatccttatgattcaccatttgcgctaatgtactcaca

SEQ ID NO: 147232 - DNA, 57 bp, Artificial
  Synthetic oligonucleotide
ccatcctagccaacgcaatacataattcacgatgtctcctacttgaagataatccga

SEQ ID NO: 147233 - DNA, 57 bp, Artificial
  Synthetic oligonucleotide
gtctcgacctattaactattactttatcaatgatagtaaatcctaatatcatgctgt

SEQ ID NO: 147234 - DNA, 55 bp, Artificial
  Synthetic oligonucleotide
tttttaaaggctgaacttcctcatatctatcaaggtgggattctaaacgacaaaa

SEQ ID NO: 147235 - DNA, 57 bp, Artificial
  Synthetic oligonucleotide
ttaggtaacggagtcataattctttagatactatgtaactacttcagtaagcttgcc

SEQ ID NO: 147236 - DNA, 52 bp, Artificial
  Synthetic oligonucleotide
gagggtacgctgagggggttcttgcaaacatttccttgtacccgaggttttg

SEQ ID NO: 147237 - DNA, 57 bp, Artificial
  Synthetic oligonucleotide
gtgcgtcacaagggattggtagccccattggatcgacctaatgtagatactgatgcg

SEQ ID NO: 147238 - DNA, 60 bp, Artificial
  Synthetic oligonucleotide
cacgggtgcggcgtgtgctaggctggacaagccggaaggcgctcccctgcatctgtgtac

SEQ ID NO: 147239 - DNA, 57 bp, Artificial
  Synthetic oligonucleotide
ggattgtggttaatcaatgaagagacacctgaaaatcaacttcatgtactcattaca

SEQ ID NO: 147240 - DNA, 51 bp, Artificial
  Synthetic oligonucleotide
aaaacgtcacaaaaaggcttaaaagtgtgacgaaaacgtcacaccctgaaa

SEQ ID NO: 147241 - DNA, 54 bp, Artificial
  Synthetic oligonucleotide
cgactattcttccgtacctcatacccttcccgttcaagaacatccgagtatttc

SEQ ID NO: 147242 - DNA, 57 bp, Artificial
  Synthetic oligonucleotide
ggatccgtcagtagttttttctctgatttatagaaagagacagaatggttagtcgca

SEQ ID NO: 147243 - DNA, 57 bp, Artificial
  Synthetic oligonucleotide
tgttgagacaatcgtttagacatcacaagtatacaaaaatgctcctgccgggggcaa

SEQ ID NO: 147244 - DNA, 57 bp, Artificial
  Synthetic oligonucleotide
tagtgttaggggctatatgtttgagcgtggcggtagtagcgcccatgttctttgtgg

SEQ ID NO: 147245 - DNA, 57 bp, Artificial
  Synthetic oligonucleotide
gagtggccgctatcgtggcgactgctgggcgtctgttgcccgtggtatccattcgtc

SEQ ID NO: 147246 - DNA, 53 bp, Artificial
  Synthetic oligonucleotide
tattcagggagaaccgggtccagaaggcccaacaggaccacaaggtaacccag

SEQ ID NO: 147247 - DNA, 57 bp, Artificial
  Synthetic oligonucleotide
agtttaactgtggttcgtttgcacttggatagtatgcgttgaggggtgattgttgtg

SEQ ID NO: 147248 - DNA, 57 bp, Artificial
  Synthetic oligonucleotide
cgagcctcggatgcttatgcatcggggtctcccctaggccttgcttccataggacaa

SEQ ID NO: 147249 - DNA, 54 bp, Artificial
  Synthetic oligonucleotide
ggtatccgttcaggaaaaacggcaagggacaacgtctctactatgaaaaggaca

SEQ ID NO: 147250 - DNA, 57 bp, Artificial
  Synthetic oligonucleotide
tagttcgaatctgactgttagtaacatcaatatagcttcgctctaacagttttggaa

SEQ ID NO: 147251 - DNA, 57 bp, Artificial
  Synthetic oligonucleotide
tataaccttgataacttaatcattgtatctcctaagactcaccaaaccatcttagac

SEQ ID NO: 147252 - DNA, 56 bp, Artificial
  Synthetic oligonucleotide
ttaatggggttgcgaaagtcacttggatttgaagagtagagatttaaattcaagta

SEQ ID NO: 147253 - DNA, 55 bp, Artificial
  Synthetic oligonucleotide
agttgaagtcgcagtgcgactagtttttttacggtagcacttttagggatcgatg

SEQ ID NO: 147254 - DNA, 57 bp, Artificial
  Synthetic oligonucleotide
ccagatagaaggttctacattgcttagtttgtccaatacgccagtgtcttcttgcgg

SEQ ID NO: 147255 - DNA, 54 bp, Artificial
  Synthetic oligonucleotide
cgataataaattacgttcttgggggctagcccccaaacccctagccagcactca

SEQ ID NO: 147256 - DNA, 56 bp, Artificial
  Synthetic oligonucleotide
gactatttcgtatatatgattggctaaagtacgggcaatcaaaggatttacgaaaa

SEQ ID NO: 147257 - DNA, 57 bp, Artificial
  Synthetic oligonucleotide
gggagaagcggtcatcgcgacagacaagatcaatgtcagaggcggtcccggcctgag

SEQ ID NO: 147258 - DNA, 57 bp, Artificial
  Synthetic oligonucleotide
cagcgccatcgtttgatgatttagattcacgtataagaggaattacaaatgttcttg

SEQ ID NO: 147259 - DNA, 57 bp, Artificial
  Synthetic oligonucleotide
aaaatcctcttcaatgattaactgaagaggactttgatgtgtgattagtgtatttcg

SEQ ID NO: 147260 - DNA, 60 bp, Artificial
  Synthetic oligonucleotide
ggtcagcgatttgtgctgatccatgaaaggagcattaaggaattgacacgtgcaattgat

SEQ ID NO: 147261 - DNA, 55 bp, Artificial
  Synthetic oligonucleotide
ggggatgagaacattggaaagtgactacacgaaggactccttgaaatttattccg

SEQ ID NO: 147262 - DNA, 57 bp, Artificial
  Synthetic oligonucleotide
atcactggtatatccgtagggggattttgcacatcttttttccaaagcgtagctaca

SEQ ID NO: 147263 - DNA, 57 bp, Artificial
  Synthetic oligonucleotide
tcgccactactgtatgtagtcggcgcattacctgctacattgcgaagacgtccgccg

SEQ ID NO: 147264 - DNA, 57 bp, Artificial
  Synthetic oligonucleotide
cactctatcacgttgtctgatgccaagacgctgaaatgcagaagccactcgccagac

SEQ ID NO: 147265 - DNA, 56 bp, Artificial
  Synthetic oligonucleotide
gaatggttgttggtaaatcaacttatacaggttcttctggtagtaagaattcgatg

SEQ ID NO: 147266 - DNA, 54 bp, Artificial
  Synthetic oligonucleotide
gtccaacacaaatacgttttaatcgaaagttcgaagaattcctagcttactatg

SEQ ID NO: 147267 - DNA, 57 bp, Artificial
  Synthetic oligonucleotide
gttagtgaggtgttattatggctaatgcgatatcgttttttgcaggagctggcggtt

SEQ ID NO: 147268 - DNA, 57 bp, Artificial
  Synthetic oligonucleotide
gtacatataaaactcttatattcgtctgcaaaccctttatatgagcttttaacgagc

SEQ ID NO: 147269 - DNA, 54 bp, Artificial
  Synthetic oligonucleotide
acgtaaagtgttcaaccttttacaaggatgaatagctctgcgtgttttttttgc

SEQ ID NO: 147270 - DNA, 53 bp, Artificial
  Synthetic oligonucleotide
tttctaatgttttttttgcgtcctcatacgtggtaaatacggattctttgccc

SEQ ID NO: 147271 - DNA, 52 bp, Artificial
  Synthetic oligonucleotide
cacgaatcaccccttaaaaagggttcgctatagcgatactaaagacctttaa

SEQ ID NO: 147272 - DNA, 57 bp, Artificial
  Synthetic oligonucleotide
tcggtgtcccacgcacaagcaactgaatgctcggacgtcttacacctgtctcttcgg

SEQ ID NO: 147273 - DNA, 57 bp, Artificial
  Synthetic oligonucleotide
tttccgccattgaatgggcagacgagttcaccgcccgattggaagagtgggcgaagc

SEQ ID NO: 147274 - DNA, 57 bp, Artificial
  Synthetic oligonucleotide
gtttcctgatcaggagtaagcctatacattacagctcttacgggaagtagatagtca

SEQ ID NO: 147275 - DNA, 55 bp, Artificial
  Synthetic oligonucleotide
cggacataaccgaacgggctgaaccggtgctcaatccccattgacccaagaggga

SEQ ID NO: 147276 - DNA, 56 bp, Artificial
  Synthetic oligonucleotide
tcggaagcaggctgacagaacggccggcatgctctgacgcatacaaaacgacggtg

SEQ ID NO: 147277 - DNA, 56 bp, Artificial
  Synthetic oligonucleotide
ccatcggattggatgaaatcgaattgacactctccacatgacttaaactactaacc

SEQ ID NO: 147278 - DNA, 56 bp, Artificial
  Synthetic oligonucleotide
aacctgtcatcgctggcgctagtggaccagggtgttccgcaacggtcgtatacggt

SEQ ID NO: 147279 - DNA, 56 bp, Artificial
  Synthetic oligonucleotide
actgtatccgccccgtgcgaccgtaaataagaggcggcatcaaacgtacgagcgcc

SEQ ID NO: 147280 - DNA, 56 bp, Artificial
  Synthetic oligonucleotide
cgccttatagcgcgtcctatcgaaaattcctttcattcatcgcttactggttaagc

SEQ ID NO: 147281 - DNA, 56 bp, Artificial
  Synthetic oligonucleotide
cgccttatgagctttatcgctcccggagctacatctttgttactactagtaggtcc

SEQ ID NO: 147282 - DNA, 60 bp, Artificial
  Synthetic oligonucleotide
cacctttaggagttgatttcagtgcctgaatttggattcagaccatcgatgtctcagtta

SEQ ID NO: 147283 - DNA, 56 bp, Artificial
  Synthetic oligonucleotide
tctaacaaatctcggatcagtattaggtaaagcgaacagttacaattacatggaac

SEQ ID NO: 147284 - DNA, 56 bp, Artificial
  Synthetic oligonucleotide
gtctatatccgattatcgttgctaatattgaactaatccatgtaagcgtcttacgc

SEQ ID NO: 147285 - DNA, 53 bp, Artificial
  Synthetic oligonucleotide
ggacgaggcgaatggggacggacctcgttagccggcaaaaggctaatagggac

SEQ ID NO: 147286 - DNA, 54 bp, Artificial
  Synthetic oligonucleotide
ctttttggtagcgacaattttacatgaatttaaatagtcgccaggaagttgttg

SEQ ID NO: 147287 - DNA, 54 bp, Artificial
  Synthetic oligonucleotide
tcaattaaaaaacatcccttctttggttatatgggcccgtatataatatacctc

SEQ ID NO: 147288 - DNA, 56 bp, Artificial
  Synthetic oligonucleotide
ctctgggcattcccacaatgcgagatcgagtctatcaaaacgtagtaaaaaacgca

SEQ ID NO: 147289 - DNA, 56 bp, Artificial
  Synthetic oligonucleotide
ggggctgcgagtaacatcgcttctacccgatgggttatgcgtatatgggcgacaca

SEQ ID NO: 147290 - DNA, 56 bp, Artificial
  Synthetic oligonucleotide
cgaagtaagtcacgtcaaactcatgcgccaactatggacactgggtattcgtgaca

SEQ ID NO: 147291 - DNA, 54 bp, Artificial
  Synthetic oligonucleotide
actgtccgtcttgttcccacaaaacgagccagacagtaagcgtcgggattaggg

SEQ ID NO: 147292 - DNA, 56 bp, Artificial
  Synthetic oligonucleotide
gcctaaaacggaatctacttgtggaattgatgttggactaaaagattttgccattc

SEQ ID NO: 147293 - DNA, 58 bp, Artificial
  Synthetic oligonucleotide
cacctatgccggaagcgttccctgatattagtgtactgaaaattgttcactcaaaagc

SEQ ID NO: 147294 - DNA, 56 bp, Artificial
  Synthetic oligonucleotide
gaacattacatctatttttgaagaggtttatttgtatgcagcaggattggaaagta

SEQ ID NO: 147295 - DNA, 56 bp, Artificial
  Synthetic oligonucleotide
ttcgagacaatctccaccaacttcaagtgttctacacattaagtctggtgattcgt

SEQ ID NO: 147296 - DNA, 56 bp, Artificial
  Synthetic oligonucleotide
agccacatgctcgattgcgcggtcagccctaaatcgccacgatcggtcatacgcat

SEQ ID NO: 147297 - DNA, 56 bp, Artificial
  Synthetic oligonucleotide
gtcgtgtagatttgtacaccggttcttactattacaatgggcagctgattcctagt

SEQ ID NO: 147298 - DNA, 56 bp, Artificial
  Synthetic oligonucleotide
aaggctaatggggacggaccttgtttgccggatcaccgctcatgcaatcgcaaacc

SEQ ID NO: 147299 - DNA, 55 bp, Artificial
  Synthetic oligonucleotide
taacagggcatcgttcactagcggcgttaccgtttgggggccgttatcgactcat

SEQ ID NO: 147300 - DNA, 56 bp, Artificial
  Synthetic oligonucleotide
ttatatcgctttattgccgctttgatattgatattcagaacatacaaataataagg

SEQ ID NO: 147301 - DNA, 54 bp, Artificial
  Synthetic oligonucleotide
ccgttcttttatcaggttgggactgtatttagtttatgggggagtgccaatgag

SEQ ID NO: 147302 - DNA, 55 bp, Artificial
  Synthetic oligonucleotide
gcactcacacccaaaaacaaggaggataccaataaaaaagtcaaaatcctatata

SEQ ID NO: 147303 - DNA, 56 bp, Artificial
  Synthetic oligonucleotide
ctcggaacatatgtaagtgcctttatatgtgactcatctttaattgtcgtatacgg

SEQ ID NO: 147304 - DNA, 60 bp, Artificial
  Synthetic oligonucleotide
caaagcgcttattaagtccttctggactcatcagggtgcctgtggctgcgtgtaattggc

SEQ ID NO: 147305 - DNA, 57 bp, Artificial
  Synthetic oligonucleotide
ggtgctttaataatatatttagggtcacaataaatacgctcattacagttgttttga

SEQ ID NO: 147306 - DNA, 56 bp, Artificial
  Synthetic oligonucleotide
cacatgttgccacaacctcattctcagtttcatgaacatcaactcgaatcccacct

SEQ ID NO: 147307 - DNA, 56 bp, Artificial
  Synthetic oligonucleotide
cttgtacgacttttaattcttaatcgctgcgcgtcatctatcaaaagattgtttct

SEQ ID NO: 147308 - DNA, 54 bp, Artificial
  Synthetic oligonucleotide
cggttattacagtctttcgttaaagattagtgatgctaaagacgtagtgacgtt

SEQ ID NO: 147309 - DNA, 56 bp, Artificial
  Synthetic oligonucleotide
agcggataaatcagactcattatactgacgccatcccttagtgtctctggcgaaat

SEQ ID NO: 147310 - DNA, 56 bp, Artificial
  Synthetic oligonucleotide
gaatcaatttatcgagataagcaagcgattgcccaataataaaattacgctaaaga

SEQ ID NO: 147311 - DNA, 53 bp, Artificial
  Synthetic oligonucleotide
aatctcgatcgggctgttacccccatcacaagacgacctttcggaagggtctt

SEQ ID NO: 147312 - DNA, 56 bp, Artificial
  Synthetic oligonucleotide
cttggtaatggttgggttgtttttgtaagtacagcatgtatattagcggctactta

SEQ ID NO: 147313 - DNA, 53 bp, Artificial
  Synthetic oligonucleotide
gtcttattaccttagaaagttacgttgtacgttgtttattacagcgccatcgt

SEQ ID NO: 147314 - DNA, 54 bp, Artificial
  Synthetic oligonucleotide
aatgagtcgataacggcccccaaacggtaacgccgctagtgaacgatgccctgt

SEQ ID NO: 147315 - DNA, 56 bp, Artificial
  Synthetic oligonucleotide
agaattaggtaattttttagcagggacatttcaccaagacatggaatcgcctgagg

SEQ ID NO: 147316 - DNA, 55 bp, Artificial
  Synthetic oligonucleotide
caccctagtaaaaccattcccgtaccgcaaagcctgctcatacgccggattagga

SEQ ID NO: 147317 - DNA, 56 bp, Artificial
  Synthetic oligonucleotide
aaccagcgtatgcaccgtctacagcaacgtgaacaagcgtgcccactgtttgcggc

SEQ ID NO: 147318 - DNA, 56 bp, Artificial
  Synthetic oligonucleotide
cttactgggtcaatgttgaaaatgcttcgttctgattatgggacaagtgatattcg

SEQ ID NO: 147319 - DNA, 56 bp, Artificial
  Synthetic oligonucleotide
tttgaaatatcactattgatctcattagacgaaccggtgtatatagattttccgtt

SEQ ID NO: 147320 - DNA, 55 bp, Artificial
  Synthetic oligonucleotide
cggtgtcggttgcccaggaccacttgacccgtggaaaggtgagatacaatcccca

SEQ ID NO: 147321 - DNA, 56 bp, Artificial
  Synthetic oligonucleotide
gtctgaatttgttcggaatgttttcggaatacattcagattatgttaagataagat

SEQ ID NO: 147322 - DNA, 54 bp, Artificial
  Synthetic oligonucleotide
cgatttactaaaggtatggtcaaacgaatttaacatacaaacggagcgaagcca

SEQ ID NO: 147323 - DNA, 52 bp, Artificial
  Synthetic oligonucleotide
cgttcgggtatagttcgtacccgaacggacataactctctttttcttcgata

SEQ ID NO: 147324 - DNA, 56 bp, Artificial
  Synthetic oligonucleotide
gtgacttaacttcattcgtggaatcccaatcgctatataaatagattacactagcg

SEQ ID NO: 147325 - DNA, 56 bp, Artificial
  Synthetic oligonucleotide
agctggagctagaggaccaactggtcctcaaggaaaccaaggtattcaaggaccaa

SEQ ID NO: 147326 - DNA, 56 bp, Artificial
  Synthetic oligonucleotide
gctgtgtgttttctctccgttcaaagcagaatgccagggcattgtaccgttgagaa

SEQ ID NO: 147327 - DNA, 60 bp, Artificial
  Synthetic oligonucleotide
caccctacaacattgattgccactctagaatgaagtctcctaacatgattacaggcggaa

SEQ ID NO: 147328 - DNA, 56 bp, Artificial
  Synthetic oligonucleotide
gcaaagcacataatgttgttgaagcttgttcagatgttgtagcaatctccattact

SEQ ID NO: 147329 - DNA, 54 bp, Artificial
  Synthetic oligonucleotide
gatccataaacgccaggcaagactccctcttggttaccaggtgaccaagggggg

SEQ ID NO: 147330 - DNA, 56 bp, Artificial
  Synthetic oligonucleotide
tcgaaaatgcaatatacgatcttatgtggggacttattggacataaaccgttccat

SEQ ID NO: 147331 - DNA, 56 bp, Artificial
  Synthetic oligonucleotide
gaagaccagactttgttcgttcactaataatatctctttctagttcagcgatgctt

SEQ ID NO: 147332 - DNA, 54 bp, Artificial
  Synthetic oligonucleotide
cccagtccagacaagggatagagtagatatcgaatgttccgggaacccccgtgt

SEQ ID NO: 147333 - DNA, 56 bp, Artificial
  Synthetic oligonucleotide
taagcctatcgttcacatacaacgggtaaaacccaaagaacagcttgaggacatgg

SEQ ID NO: 147334 - DNA, 56 bp, Artificial
  Synthetic oligonucleotide
gcttgttaatgattgctcgttccatgttggtaaatcaaagtggactcgtccagaac

SEQ ID NO: 147335 - DNA, 56 bp, Artificial
  Synthetic oligonucleotide
tcgtacttctcggtaccctaccacactcttgtgtgctatacctttcggtatagtgc

SEQ ID NO: 147336 - DNA, 56 bp, Artificial
  Synthetic oligonucleotide
agcatacttattggccgaggaatttaacatggactctggaatattgaagactctag

SEQ ID NO: 147337 - DNA, 55 bp, Artificial
  Synthetic oligonucleotide
cattggttacgttgagagtaatcactttttttagagtgttgtcttgataaattcc

SEQ ID NO: 147338 - DNA, 58 bp, Artificial
  Synthetic oligonucleotide
cacatgagcaacgagaattggttgtagcgattggggaaggtaaagacgactcgaaata

SEQ ID NO: 147339 - DNA, 56 bp, Artificial
  Synthetic oligonucleotide
cattatttgcacttgctactgatggccataccaacatcactgaaacacacgttaat

SEQ ID NO: 147340 - DNA, 56 bp, Artificial
  Synthetic oligonucleotide
ggctttacttctacggatttaaccgctccttgctaattcccgccttcagacagctg

SEQ ID NO: 147341 - DNA, 56 bp, Artificial
  Synthetic oligonucleotide
cctattggccgagattgaatcgtgtgcccccgccaataagtcatatgcctagtatt

SEQ ID NO: 147342 - DNA, 56 bp, Artificial
  Synthetic oligonucleotide
tttggctttttggagttgtcattctagcaatgataacttgtattatgaatagacgg

SEQ ID NO: 147343 - DNA, 56 bp, Artificial
  Synthetic oligonucleotide
cgcttttcggaagtgctcaaacttatgtcacttttggtaatgaattatcgaagtac

SEQ ID NO: 147344 - DNA, 56 bp, Artificial
  Synthetic oligonucleotide
cttctgtccttcagtgagaggcgtgtggcgactaatgatgggtggttggcggctcg

SEQ ID NO: 147345 - DNA, 56 bp, Artificial
  Synthetic oligonucleotide
aaactgtagtgtgctacagtttacatggaactacgaccgaagaaggagcgatgccc

SEQ ID NO: 147346 - DNA, 56 bp, Artificial
  Synthetic oligonucleotide
tcactcgaacaatatgtatgaataatagaggtacttatctctactactctagtaaa

SEQ ID NO: 147347 - DNA, 56 bp, Artificial
  Synthetic oligonucleotide
gaaacggtaaagcacatagcaagcttatatcgttctaaactgaccatatcggatac

SEQ ID NO: 147348 - DNA, 56 bp, Artificial
  Synthetic oligonucleotide
atgaactagagacctatttgaagagcaaggaggttgctcaatattatagtatgcaa

SEQ ID NO: 147349 - DNA, 60 bp, Artificial
  Synthetic oligonucleotide
cacaggacgagtggacaagcctttggcaaaaggcgatgaagatagattataagcctatcg

SEQ ID NO: 147350 - DNA, 56 bp, Artificial
  Synthetic oligonucleotide
cttgctcttgaagttgtctcatgaaagtttctaatgtttgagcgacttgtgagcta

SEQ ID NO: 147351 - DNA, 56 bp, Artificial
  Synthetic oligonucleotide
tagcttctatatgcccaataccgcactacgtattttggcgtgaacgtagaacctta

SEQ ID NO: 147352 - DNA, 51 bp, Artificial
  Synthetic oligonucleotide
actacaagggtccctacaggctgtttttgaacactcgtagttctttttaaa

SEQ ID NO: 147353 - DNA, 56 bp, Artificial
  Synthetic oligonucleotide
gccaaagcctgtccaacgcgccaataaactcgtggacagcccttctcttgctcctg

SEQ ID NO: 147354 - DNA, 56 bp, Artificial
  Synthetic oligonucleotide
gacttgcagtatctgcattggctcttttgctgagtcaaaatgaagtacaattgtcg

SEQ ID NO: 147355 - DNA, 56 bp, Artificial
  Synthetic oligonucleotide
atatgagatgccggaaccagaagtattgctaatgaaagaagtagaggaacgttata

SEQ ID NO: 147356 - DNA, 54 bp, Artificial
  Synthetic oligonucleotide
cctttagtgtcgcaagatagttatctacaagtagaaacaaaatccctcctaaaa

SEQ ID NO: 147357 - DNA, 54 bp, Artificial
  Synthetic oligonucleotide
tatttgaagtagcggaaaaatctctaccgtcaccttttagatatgtctttttaa

SEQ ID NO: 147358 - DNA, 55 bp, Artificial
  Synthetic oligonucleotide
ctgcagagtttaaagcacggccttcacgaactagcttacgagctaactctcgccc

SEQ ID NO: 147359 - DNA, 55 bp, Artificial
  Synthetic oligonucleotide
tttcaagggcttcgttcatctaaatcaagacattgttttcctttcaccagggaga

SEQ ID NO: 147360 - DNA, 55 bp, Artificial
  Synthetic oligonucleotide
ggtgttactttgcctaacctagcagcaaacgctactcaccttatttcgttccaaa

SEQ ID NO: 147361 - DNA, 55 bp, Artificial
  Synthetic oligonucleotide
ttaagtttgagcctacttcctacggttttcgtcctaaacgaagcacacatgatgc

SEQ ID NO: 147362 - DNA, 55 bp, Artificial
  Synthetic oligonucleotide
gaaggggtgattacgggtatgacccatattacggcagaatgactgtcatgtgtgt

SEQ ID NO: 147363 - DNA, 55 bp, Artificial
  Synthetic oligonucleotide
gattgtggaacacgtagtaacttctgtaactcggatacatttaatggacctttcg

SEQ ID NO: 147364 - DNA, 54 bp, Artificial
  Synthetic oligonucleotide
ttaagtgatccggaccgaaagcgatattggaacacggtttatagtccgtcctat

SEQ ID NO: 147365 - DNA, 55 bp, Artificial
  Synthetic oligonucleotide
gagagcgtatgtagaggggatatggtgaaactattgcagcgttacaggaggagtc

SEQ ID NO: 147366 - DNA, 55 bp, Artificial
  Synthetic oligonucleotide
gatttcacgcattaaactggccatgacgtatttgttcaccgcccctggcatcccg

SEQ ID NO: 147367 - DNA, 55 bp, Artificial
  Synthetic oligonucleotide
cttattggaatacaaccgatacaattggcgtcgtttgggaagccaatgctcacgc

SEQ ID NO: 147368 - DNA, 55 bp, Artificial
  Synthetic oligonucleotide
gaagcgttaggaattatccgccaatatgaaatgaaacgaccgagtgacatgcagc

SEQ ID NO: 147369 - DNA, 55 bp, Artificial
  Synthetic oligonucleotide
ttgcacggaaatcagcagcggtgtctcaagcggtttacctcatgtctcctagttg

SEQ ID NO: 147370 - DNA, 55 bp, Artificial
  Synthetic oligonucleotide
ctgcgacgtttcacgcagaagcaaaatatcggacgagtttgcctgactgcacaag

SEQ ID NO: 147371 - DNA, 54 bp, Artificial
  Synthetic oligonucleotide
ggttgtattcgttacagttggcgaattgctacggaagattaaaagtacgttcag

SEQ ID NO: 147372 - DNA, 55 bp, Artificial
  Synthetic oligonucleotide
gattttattgacgtctcacaacaaggtggacatacagtcattatgtcatcaagtg

SEQ ID NO: 147373 - DNA, 55 bp, Artificial
  Synthetic oligonucleotide
ttgcctgtgaagaaaagctattttactcacaattacattaagcagtctgagtgga

SEQ ID NO: 147374 - DNA, 55 bp, Artificial
  Synthetic oligonucleotide
gaagcctatcaggtcacgcaaaacagccgctataaagagatttgtgagcagatca

SEQ ID NO: 147375 - DNA, 55 bp, Artificial
  Synthetic oligonucleotide
gcaaacatgttagatcaaaacgcagacagaatgtattgggtgattggtgcagtgt

SEQ ID NO: 147376 - DNA, 55 bp, Artificial
  Synthetic oligonucleotide
gcaacacgctctttctaatatgaaggctggtattactggacgacaggcagatagc

SEQ ID NO: 147377 - DNA, 55 bp, Artificial
  Synthetic oligonucleotide
gcatcgctcgtatcagctactctcaaagaacggtcggaagtgtcatcgctttaag

SEQ ID NO: 147378 - DNA, 55 bp, Artificial
  Synthetic oligonucleotide
ttgctaaagaccgttcattcttaattactaacacctgcctcaccgatggttcacc

SEQ ID NO: 147379 - DNA, 55 bp, Artificial
  Synthetic oligonucleotide
gcaaacgagtaatgctatcgtgattcagccggttccgaaggttccgaaagagtgc

SEQ ID NO: 147380 - DNA, 55 bp, Artificial
  Synthetic oligonucleotide
gcatccgttatccaaaagatgccttcgcatacgctcattctggatattgcctcca

SEQ ID NO: 147381 - DNA, 54 bp, Artificial
  Synthetic oligonucleotide
gaagattcgtataaacgtaggggccccgggatagttcgggttgatatcattgtc

SEQ ID NO: 147382 - DNA, 53 bp, Artificial
  Synthetic oligonucleotide
ggtttttccaggctataacgtatccaccactggacatagaaactttcgtttcc

SEQ ID NO: 147383 - DNA, 55 bp, Artificial
  Synthetic oligonucleotide
gcatcatatgcaacacgttgatacaatctttgaacgccttggattaaacgaagcg

SEQ ID NO: 147384 - DNA, 55 bp, Artificial
  Synthetic oligonucleotide
cttcaagacaataacaacagcctccagacggaaaacactattcttcatcgaacac

SEQ ID NO: 147385 - DNA, 55 bp, Artificial
  Synthetic oligonucleotide
gcaaagtgcgcctctacgtcagaagctccatccccctcccattctgaacgagccg

SEQ ID NO: 147386 - DNA, 55 bp, Artificial
  Synthetic oligonucleotide
gaagatggaagatattgcggagcgtttaggtactagtaagagtacattggggaag

SEQ ID NO: 147387 - DNA, 55 bp, Artificial
  Synthetic oligonucleotide
gcatcaattgtgcgccagtaaccgttgtgactggtgcaatccaagagttgagggc

SEQ ID NO: 147388 - DNA, 55 bp, Artificial
  Synthetic oligonucleotide
gcatcaacttgcatatctaggttttgttcctccgtactcactcgcgcgtaaccaa

SEQ ID NO: 147389 - DNA, 55 bp, Artificial
  Synthetic oligonucleotide
gagaagaaaacgtggagctttaacacgacgtgaatatcttaaacaacagcattct

SEQ ID NO: 147390 - DNA, 55 bp, Artificial
  Synthetic oligonucleotide
gcaaatccgcatctacatattaactatgtaccgaatttcgaaagtagtcgaggat

SEQ ID NO: 147391 - DNA, 54 bp, Artificial
  Synthetic oligonucleotide
gaagagtatcaaatggttcgtttaagtctgttagacaaggggaaaagtctaatc

SEQ ID NO: 147392 - DNA, 55 bp, Artificial
  Synthetic oligonucleotide
tttttgtgggcgtgtgatggcagctgtatgttgaaaggcgggtttagtcaggttt

SEQ ID NO: 147393 - DNA, 60 bp, Artificial
  Synthetic oligonucleotide
caattgatataccattagcgggatttgcgccagcttgagtaactccgttcacagttacac

SEQ ID NO: 147394 - DNA, 55 bp, Artificial
  Synthetic oligonucleotide
gcattctccactacgtaagctttccacagctcgatggatggcaactaatgaactc

SEQ ID NO: 147395 - DNA, 55 bp, Artificial
  Synthetic oligonucleotide
gaaatttcgtacagaaacatcgcttgttgtgcacaatcgggaactgcctaagggg

SEQ ID NO: 147396 - DNA, 55 bp, Artificial
  Synthetic oligonucleotide
ctgatgatttattgcattggactcgttgtgaattacaacttgttgatgatgcagc

SEQ ID NO: 147397 - DNA, 55 bp, Artificial
  Synthetic oligonucleotide
gatgtagttgtccttcgttagcgtctttccaaacgtactgtcaacatgtagcagc

SEQ ID NO: 147398 - DNA, 55 bp, Artificial
  Synthetic oligonucleotide
ctgatgtcacggtttagtcagagaataacatccggaggaatcgaatatgcgaaca

SEQ ID NO: 147399 - DNA, 55 bp, Artificial
  Synthetic oligonucleotide
gcacttgcaaggatatttaatggatgtagcagagcaattttctatagcggcacca

SEQ ID NO: 147400 - DNA, 55 bp, Artificial
  Synthetic oligonucleotide
cttgctgaaatactaggagcatccattttagagcgattacgcacccttcaaacgg

SEQ ID NO: 147401 - DNA, 55 bp, Artificial
  Synthetic oligonucleotide
gaatacatagggtaaggaagacagacccagggaactgaaacatctaagtacctgg

SEQ ID NO: 147402 - DNA, 55 bp, Artificial
  Synthetic oligonucleotide
gcactatcagcggttacggggaggctagtaggtccagtgtcgcctgtaggcccag

SEQ ID NO: 147403 - DNA, 54 bp, Artificial
  Synthetic oligonucleotide
cttattacataaacacggaacgaaagtaacgagcgaacagttccaagattgcgg

SEQ ID NO: 147404 - DNA, 56 bp, Artificial
  Synthetic oligonucleotide
caattctttcatgaagagtatcaaatggttcgtttaagtctgttagacaaggggaa

SEQ ID NO: 147405 - DNA, 54 bp, Artificial
  Synthetic oligonucleotide
gcagagggtacgttaatttcccctccggagaatacagataaaagcggatattac

SEQ ID NO: 147406 - DNA, 55 bp, Artificial
  Synthetic oligonucleotide
ctggaaggactgccatatagacgctatccgtattcaaattacaaattccagcgct

SEQ ID NO: 147407 - DNA, 55 bp, Artificial
  Synthetic oligonucleotide
gcattaccaaactctatctcatagacagattgaacgaaggaatgtaggcgctaag

SEQ ID NO: 147408 - DNA, 55 bp, Artificial
  Synthetic oligonucleotide
gcatgtttgggttgtatgccggtacggggatcaatggttattaacgcatcattta

SEQ ID NO: 147409 - DNA, 55 bp, Artificial
  Synthetic oligonucleotide
gaagtgggagattcctgcgaacaccgatgtatccaacagttatcttagcaggcac

SEQ ID NO: 147410 - DNA, 54 bp, Artificial
  Synthetic oligonucleotide
tttcccctataaatgtttattcgtgaaatgggagggctgttaaagatggaacgc

SEQ ID NO: 147411 - DNA, 55 bp, Artificial
  Synthetic oligonucleotide
cttgcacaactatggaatccttcccaacatctattacagcggctcgaaacggttc

SEQ ID NO: 147412 - DNA, 55 bp, Artificial
  Synthetic oligonucleotide
gattcgtttagtgatattcgtgtgaagccaatggtgcttgctatttcggagcagc

SEQ ID NO: 147413 - DNA, 55 bp, Artificial
  Synthetic oligonucleotide
ttgagcgtatagagagcataacaactgaatttatggcggtagccaaaccacaggg

SEQ ID NO: 147414 - DNA, 55 bp, Artificial
  Synthetic oligonucleotide
ctgctttatctacctaatacgagcagctatcaacggctgatgtcaagtacatttg

SEQ ID NO: 147415 - DNA, 60 bp, Artificial
  Synthetic oligonucleotide
gtcaaataaaaatgacgactagctgaatgctctagtcgccctttttatgatgggtgtgat

SEQ ID NO: 147416 - DNA, 60 bp, Artificial
  Synthetic oligonucleotide
gtaaaagatgcccatagcacatttgatacggctgtgctttcagcttctaaaatagtagaa

SEQ ID NO: 147417 - DNA, 55 bp, Artificial
  Synthetic oligonucleotide
cttattcatcatccgactcagaatggtatggacggatcaggctgatagcgtgttt

SEQ ID NO: 147418 - DNA, 55 bp, Artificial
  Synthetic oligonucleotide
tttgtgtcatccgctataatggggcgaacaatggctgttcgtatccggctagccc

SEQ ID NO: 147419 - DNA, 55 bp, Artificial
  Synthetic oligonucleotide
cttgcgacaaatatggcaagtgctgaaatgttaatgcacgcattagagcgaggag

SEQ ID NO: 147420 - DNA, 55 bp, Artificial
  Synthetic oligonucleotide
ttgtaggtattccaaatcagaagctcgcttaaagcatatccgcaccattctctgg

SEQ ID NO: 147421 - DNA, 55 bp, Artificial
  Synthetic oligonucleotide
gcatgcctgattcacgtgatgcttgcagtaactcgtctggtacatcttgattacg

SEQ ID NO: 147422 - DNA, 55 bp, Artificial
  Synthetic oligonucleotide
ttaatccaccctctacctaactgctttgctttcgctgaattttgaggttaggatc

SEQ ID NO: 147423 - DNA, 55 bp, Artificial
  Synthetic oligonucleotide
gaaggtctcgtatccagtcttgatccccttctgagcagtgtgggtgactggtccg

SEQ ID NO: 147424 - DNA, 55 bp, Artificial
  Synthetic oligonucleotide
ctgctggaacgctcctattagatgttccaagaacgcgagatggggaattcagtcc

SEQ ID NO: 147425 - DNA, 55 bp, Artificial
  Synthetic oligonucleotide
ctgctcgcatttctcgtcatcatgtggggcgtcaattggccgctgtccaaagccg

SEQ ID NO: 147426 - DNA, 55 bp, Artificial
  Synthetic oligonucleotide
ctgcaaatccgagagcatcttatctttcgaatctgcccgctccctttcttcgacg

SEQ ID NO: 147427 - DNA, 58 bp, Artificial
  Synthetic oligonucleotide
caatgctatgagtatttacaacatagttttagtcaggtaaataagaaaaaccacagca

SEQ ID NO: 147428 - DNA, 55 bp, Artificial
  Synthetic oligonucleotide
gagacataggttctctaatagctggtacataaatcatttggatcgctgttctatg

SEQ ID NO: 147429 - DNA, 55 bp, Artificial
  Synthetic oligonucleotide
ctgccgtttgtctcgcaaaacgtcttccgtcaatatgaatatcattcgttatttg

SEQ ID NO: 147430 - DNA, 55 bp, Artificial
  Synthetic oligonucleotide
gaaaactggctagggacagatagctccggaagagataacttttctaggctcgttc

SEQ ID NO: 147431 - DNA, 55 bp, Artificial
  Synthetic oligonucleotide
gcagggcagtggctcttgtgttagcggaatcgggtggcgccgattcaataacgct

SEQ ID NO: 147432 - DNA, 55 bp, Artificial
  Synthetic oligonucleotide
ctgcggctgaattagctgcttactacaagtctcgtcaaatgacggtgtatgaagg

SEQ ID NO: 147433 - DNA, 55 bp, Artificial
  Synthetic oligonucleotide
gcagcatatatgtgtggtaatccgttccgaccttgtatcttaagccggcaacgat

SEQ ID NO: 147434 - DNA, 55 bp, Artificial
  Synthetic oligonucleotide
gaacagtaacacgctcttgttcccttccaataggtttattttctcttgggcacca

SEQ ID NO: 147435 - DNA, 55 bp, Artificial
  Synthetic oligonucleotide
gcacaaacctgacgtattttatcggagctctcttcgtggttagccgtttcaggga

SEQ ID NO: 147436 - DNA, 55 bp, Artificial
  Synthetic oligonucleotide
gaacagtatcagtcgtggggatatagagatggttggtataatgtgggtggagacc

SEQ ID NO: 147437 - DNA, 55 bp, Artificial
  Synthetic oligonucleotide
gcacacaagagtgtggtagggtaccgagaagtacgaatctgacggtaggaaatcg

SEQ ID NO: 147438 - DNA, 60 bp, Artificial
  Synthetic oligonucleotide
caatgctataataggaacagttactgaatcgaacattcgttttatcatctgagttagtgt

SEQ ID NO: 147439 - DNA, 55 bp, Artificial
  Synthetic oligonucleotide
cttgcatcagtgtttagtatacaaaggcgatattgtttagccgcaggctcgctcc

SEQ ID NO: 147440 - DNA, 55 bp, Artificial
  Synthetic oligonucleotide
gcacacgtaatgcttgaacaaaggcctttacacctgttacttcctccgcaagctt

SEQ ID NO: 147441 - DNA, 55 bp, Artificial
  Synthetic oligonucleotide
cttgcactgaagctgtggattcatacgccagtgagctacggcacggcttggggct

SEQ ID NO: 147442 - DNA, 55 bp, Artificial
  Synthetic oligonucleotide
gcagcacaaaaggaattcgcagaggcaaccagcctaccatgcacgccactccatg

SEQ ID NO: 147443 - DNA, 55 bp, Artificial
  Synthetic oligonucleotide
gcacactccgtcgatacgaagagtctttataatagtgaatacgaaagacccgcta

SEQ ID NO: 147444 - DNA, 54 bp, Artificial
  Synthetic oligonucleotide
gcacgctttccccagtcatggtaatagtataaaacctgtcctgttaacccaact

SEQ ID NO: 147445 - DNA, 55 bp, Artificial
  Synthetic oligonucleotide
gaacatgtgtagttgaacaggtcatatcgtttgattcggagattttagaaacgag

SEQ ID NO: 147446 - DNA, 55 bp, Artificial
  Synthetic oligonucleotide
gaaattcatttcgggaactatggatggtgcggaaatggttcatatggctcgaacg

SEQ ID NO: 147447 - DNA, 55 bp, Artificial
  Synthetic oligonucleotide
tttcgagccgctgtaatagatgttgggaaggattccatagttgtgcaagtaactg

SEQ ID NO: 147448 - DNA, 55 bp, Artificial
  Synthetic oligonucleotide
tgtgatacgatatctttggctaaacgacggagccgttttggagtaccgacgactt

SEQ ID NO: 147449 - DNA, 54 bp, Artificial
  Synthetic oligonucleotide
gtaaaattgtagatacaaagattgtaaacgaggatagcgaaaaaagttttcaga

SEQ ID NO: 147450 - DNA, 55 bp, Artificial
  Synthetic oligonucleotide
gaaccaccgatagctgtgtctgcattgtatgaatcaaatacaataactgttcaaa

SEQ ID NO: 147451 - DNA, 55 bp, Artificial
  Synthetic oligonucleotide
gcaccccagtacactggtgtacgctgaataaaagtaaccagtaaaccgacaacta

SEQ ID NO: 147452 - DNA, 55 bp, Artificial
  Synthetic oligonucleotide
tttctcgaaagtggcattatggagggtcttaactggaacgaatctaacaacggag

SEQ ID NO: 147453 - DNA, 55 bp, Artificial
  Synthetic oligonucleotide
gcacccatgtattaatcgttcctgcatggtattgctccgcacgatgaaaagcacg

SEQ ID NO: 147454 - DNA, 55 bp, Artificial
  Synthetic oligonucleotide
gcaccagggagacaaccgctacttgttcccgtcatcgctttgtcggtatgaatat

SEQ ID NO: 147455 - DNA, 55 bp, Artificial
  Synthetic oligonucleotide
gcacatagggaacgagttctggtacaccttgcgctgcacattcctgttccaccat

SEQ ID NO: 147456 - DNA, 55 bp, Artificial
  Synthetic oligonucleotide
gcacaggctgaacggaccgactgtcatcaacggccgaaagctgatccgcagacag

SEQ ID NO: 147457 - DNA, 55 bp, Artificial
  Synthetic oligonucleotide
gaaccggttaattgataggcaatccaaggtaacgcaaaagtatagaatgagtctc

SEQ ID NO: 147458 - DNA, 55 bp, Artificial
  Synthetic oligonucleotide
tgtgctgtaatgcggattgagattcaactacgattgaatgctgaatgtggtatgt

SEQ ID NO: 147459 - DNA, 52 bp, Artificial
  Synthetic oligonucleotide
gaaaacgaacctttccatgttttcgcgccttatacggtgtataaagaatacg

SEQ ID NO: 147460 - DNA, 59 bp, Artificial
  Synthetic oligonucleotide
caggacattcgtaaaccggaaaaaccatagtatctcaacaatgtataaaatcatgcata

SEQ ID NO: 147461 - DNA, 55 bp, Artificial
  Synthetic oligonucleotide
gaacctttgaaatagcaggtaatcatgtatatccactagcagacatacagacacg

SEQ ID NO: 147462 - DNA, 55 bp, Artificial
  Synthetic oligonucleotide
gaacgaaagctaatcgcccggagtttaataagctattagcaaagttagaggatgg

SEQ ID NO: 147463 - DNA, 55 bp, Artificial
  Synthetic oligonucleotide
gaaagcccgactttattatcgtctgattttatatacttgtgcccgtgataccgcg

SEQ ID NO: 147464 - DNA, 55 bp, Artificial
  Synthetic oligonucleotide
gcagatactgtgcatacgaatgagtgcctcatgcgattcttgaaaatctccgtac

SEQ ID NO: 147465 - DNA, 55 bp, Artificial
  Synthetic oligonucleotide
gcatatgacggaggcgctttgtgcgtcagtccataacctgttggaaatcacccct

SEQ ID NO: 147466 - DNA, 55 bp, Artificial
  Synthetic oligonucleotide
gaagaactcgctattatacagattttagtaggagtatttgcggcacccgtatatg

SEQ ID NO: 147467 - DNA, 55 bp, Artificial
  Synthetic oligonucleotide
gcataggacgacggatcccacactgccgcccattctcttgcctgtgccgagccgg

SEQ ID NO: 147468 - DNA, 55 bp, Artificial
  Synthetic oligonucleotide
gcaacacgttgatacaatctttgaacgcctaggattaaacgaagcgtaaaatttc

SEQ ID NO: 147469 - DNA, 55 bp, Artificial
  Synthetic oligonucleotide
ttcattcagctctactacatataccgcatcagttgcttgttcgattagtgcacgg

SEQ ID NO: 147470 - DNA, 55 bp, Artificial
  Synthetic oligonucleotide
gcaacgactattacattgatagttgttagaggtacatctcttaccgatcccgtca

SEQ ID NO: 147471 - DNA, 53 bp, Artificial
  Synthetic oligonucleotide
gggataaaggctggtggaggggtagttggaggttgctgtccaccgaaggaggg

SEQ ID NO: 147472 - DNA, 55 bp, Artificial
  Synthetic oligonucleotide
gcaagaccggaacaatatcggccacacaaaattgataacggttacataaaagtcc

SEQ ID NO: 147473 - DNA, 55 bp, Artificial
  Synthetic oligonucleotide
gaactcgtaaagagagaaatcgtgttggtcgaggcatgtcttctggtaacggaaa

SEQ ID NO: 147474 - DNA, 55 bp, Artificial
  Synthetic oligonucleotide
gcaagatttcggctctttagtcctttaaactgaatacctggtgcaacctcaacga

SEQ ID NO: 147475 - DNA, 55 bp, Artificial
  Synthetic oligonucleotide
cttcacgctcaatagctcggaactcagttgtattacttctccaagcgtttccgcc

SEQ ID NO: 147476 - DNA, 55 bp, Artificial
  Synthetic oligonucleotide
gaactatgaccagtttcccatacatcgtgctcactctcacaacgtttcgggaaac

SEQ ID NO: 147477 - DNA, 55 bp, Artificial
  Synthetic oligonucleotide
gagagcgtacactcacacttaccggcacgcaggataaatacggccgccctatcct

SEQ ID NO: 147478 - DNA, 55 bp, Artificial
  Synthetic oligonucleotide
ctgcatcctccataaatggtcctccttatttacatggagaagtgcctctatgacg

SEQ ID NO: 147479 - DNA, 55 bp, Artificial
  Synthetic oligonucleotide
gcaagcaacggcgcagttgttcaaagcgtgtatgttcggaatccatattatcgca

SEQ ID NO: 147480 - DNA, 55 bp, Artificial
  Synthetic oligonucleotide
tgtcccgatatcctctacctctcctgctaattctacgccaagtatagggtttctc

SEQ ID NO: 147481 - DNA, 55 bp, Artificial
  Synthetic oligonucleotide
gcagtaccacttatgttacatattatggggagtttcccgcaaggaacgtatcagt

SEQ ID NO: 147482 - DNA, 59 bp, Artificial
  Synthetic oligonucleotide
caggaaccgtttcagggcatatcccatctgcacaaacggtcttagttgaaattcatggc

SEQ ID NO: 147483 - DNA, 55 bp, Artificial
  Synthetic oligonucleotide
cttccccgatcgctacgactaattctcgttgctcatgcgtcttatcgtctttatg

SEQ ID NO: 147484 - DNA, 55 bp, Artificial
  Synthetic oligonucleotide
gcatacgtcgccgtgatacttgtacctgttactcccgtcggacccgttgaccctg

SEQ ID NO: 147485 - DNA, 55 bp, Artificial
  Synthetic oligonucleotide
ctgcgtcatagactagcccgatctgcattggataagttgtgccgaactcaaagcc

SEQ ID NO: 147486 - DNA, 52 bp, Artificial
  Synthetic oligonucleotide
cttcctattggacctgtgtttccggttaccccagtgcttcctgttggacccg

SEQ ID NO: 147487 - DNA, 55 bp, Artificial
  Synthetic oligonucleotide
gcaattcgctatttaaaagcgtacgcccaaccggagtttcatgtggagcttgtcg

SEQ ID NO: 147488 - DNA, 55 bp, Artificial
  Synthetic oligonucleotide
gaacgggcattaacagcaattgccttgctatttgcgatattaagggttcgaccgg

SEQ ID NO: 147489 - DNA, 55 bp, Artificial
  Synthetic oligonucleotide
gcaatgtaaacccgttataggtgccgcttgtgatgcatgtccactataggataag

SEQ ID NO: 147490 - DNA, 55 bp, Artificial
  Synthetic oligonucleotide
gcaatcgccccttgccactgtacgtatgtaacccagcataaagcatatgctacac

SEQ ID NO: 147491 - DNA, 51 bp, Artificial
  Synthetic oligonucleotide
tttctatttcggttacggtacgaagcgcggttttaaacggtgtatgaagat

SEQ ID NO: 147492 - DNA, 55 bp, Artificial
  Synthetic oligonucleotide
gaaaacccaacgatcttacttaaaagcacttatacaggacaagcgtcacgcaagc

SEQ ID NO: 147493 - DNA, 55 bp, Artificial
  Synthetic oligonucleotide
gggatatgtttgagttgaagtaacggttatgtttcgaaaatgtagtcttattgat

SEQ ID NO: 147494 - DNA, 55 bp, Artificial
  Synthetic oligonucleotide
gcaagtttatgaaggcagtgactaatcagaagatccaatcgatttcaaggtgcgc

SEQ ID NO: 147495 - DNA, 55 bp, Artificial
  Synthetic oligonucleotide
gaacgtgttaaatgtgctgatagtgatgtagtagagacggagacagccatttata

SEQ ID NO: 147496 - DNA, 55 bp, Artificial
  Synthetic oligonucleotide
ttgcattttgtgaagagctattgtttcgtggcgtcattcagacgcatgtcggcct

SEQ ID NO: 147497 - DNA, 55 bp, Artificial
  Synthetic oligonucleotide
gcaaggccctcagctaggcatcccgcaaatgattcaaagccgtgcccaattcggc

SEQ ID NO: 147498 - DNA, 55 bp, Artificial
  Synthetic oligonucleotide
gcaagccaaagaagaacgctatgaactgcaattcttacaggtggcctatgggtct

SEQ ID NO: 147499 - DNA, 55 bp, Artificial
  Synthetic oligonucleotide
gacgcggctctttgacgttagatggtgaatggtctaatcgtcgggagctcacaca

SEQ ID NO: 147500 - DNA, 55 bp, Artificial
  Synthetic oligonucleotide
ttcgatgtataaaacactggcgaaccacaattacagaacatcggttttccacgcc

SEQ ID NO: 147501 - DNA, 55 bp, Artificial
  Synthetic oligonucleotide
gagtgggactgcccttcttgtggaacacattatgatagagatagggatgcaagac

SEQ ID NO: 147502 - DNA, 55 bp, Artificial
  Synthetic oligonucleotide
gagagggtatcagacccatctactttagcccggtttcagaagttaccatcaaatt

SEQ ID NO: 147503 - DNA, 55 bp, Artificial
  Synthetic oligonucleotide
gacggagcattagctacagaattggaggcgcatggatgtaatttggacgatcctc

SEQ ID NO: 147504 - DNA, 60 bp, Artificial
  Synthetic oligonucleotide
cagcgtatcaactatagcctggtaaatgagtagatcactgaatctccacgagcaacaagg

SEQ ID NO: 147505 - DNA, 55 bp, Artificial
  Synthetic oligonucleotide
gacggaggaagcctgtgcagcggtagtcattgcgtcagagggatatccgggtgag

SEQ ID NO: 147506 - DNA, 55 bp, Artificial
  Synthetic oligonucleotide
tttgcttaagtcttgttcctacttcctttactgcaccgcgtccaattacgctggc

SEQ ID NO: 147507 - DNA, 55 bp, Artificial
  Synthetic oligonucleotide
gagtgcaatgacacgcgagaaaaccgagtcacgaagataagatgtgtcatacgag

SEQ ID NO: 147508 - DNA, 55 bp, Artificial
  Synthetic oligonucleotide
cttcgttcgttctatgcaagcgtatcgtgcatcaaaatgggactagacccactcc

SEQ ID NO: 147509 - DNA, 55 bp, Artificial
  Synthetic oligonucleotide
gagtcgcaattgccccttgccactgtacgtatgtaacccagcataaagcatatgc

SEQ ID NO: 147510 - DNA, 55 bp, Artificial
  Synthetic oligonucleotide
ctttcaagaccgctcacaggcaagtggtatgacattcacggtcccaacttcattg

SEQ ID NO: 147511 - DNA, 55 bp, Artificial
  Synthetic oligonucleotide
ttcctgcggatatgaagacataggcacatagctgtcagtgcttgcttcaaactgg

SEQ ID NO: 147512 - DNA, 55 bp, Artificial
  Synthetic oligonucleotide
gagtccactacacatatagttccaagtcttacctccatcattactctccgcgtac

SEQ ID NO: 147513 - DNA, 55 bp, Artificial
  Synthetic oligonucleotide
gagtagatacgatattggtcgtatcagtcccgcttactgccggttgatttggtac

SEQ ID NO: 147514 - DNA, 55 bp, Artificial
  Synthetic oligonucleotide
cttttggtagtggatcatattcatgcgggttagctccaattggaacaagactatg

SEQ ID NO: 147515 - DNA, 57 bp, Artificial
  Synthetic oligonucleotide
gggcgtttggggcgagccttatatggaaggggataaaacattgatggtgcacatccg

SEQ ID NO: 147516 - DNA, 55 bp, Artificial
  Synthetic oligonucleotide
ctgtatacgactcaccgtttcgtagaggcacattcgataatgaacgatcttgcga

SEQ ID NO: 147517 - DNA, 54 bp, Artificial
  Synthetic oligonucleotide
ttatcggcgtcttaaagccggaagtgtaccaaagtagaacggttgctgggcgac

SEQ ID NO: 147518 - DNA, 55 bp, Artificial
  Synthetic oligonucleotide
gacggtcgtcagaaaggacgttttgctaaacaattagcgttgtatgtcaaaatgt

SEQ ID NO: 147519 - DNA, 55 bp, Artificial
  Synthetic oligonucleotide
gaggttaggttatcgaggagttatgattaattctggagtagcatggtggagctgc

SEQ ID NO: 147520 - DNA, 55 bp, Artificial
  Synthetic oligonucleotide
gaggtagatatacagtgtctgtcaacggtaagcggacagaatgaagctgtaagcg

SEQ ID NO: 147521 - DNA, 53 bp, Artificial
  Synthetic oligonucleotide
gataaacctacggagaaagataaaccatccgaaaaggataaaacgcctgagaa

SEQ ID NO: 147522 - DNA, 55 bp, Artificial
  Synthetic oligonucleotide
gaccgctatctcgctaaacgataatccttgtgttgtatgcatgaagaatacgtcc

SEQ ID NO: 147523 - DNA, 55 bp, Artificial
  Synthetic oligonucleotide
gagtttatccacaggcggctgattgaacagcgggaccacggaaaggctgtcctgc

SEQ ID NO: 147524 - DNA, 55 bp, Artificial
  Synthetic oligonucleotide
gagttgtgcctgcgtctcccacgagagaacggcccggttcgatccaaatttccgg

SEQ ID NO: 147525 - DNA, 55 bp, Artificial
  Synthetic oligonucleotide
gaccgtcttgctttaataaggccgatttgtgtgtaataatctaccgtccgcttcg

SEQ ID NO: 147526 - DNA, 57 bp, Artificial
  Synthetic oligonucleotide
caaacgcttgtacagacgcctctatctgtctttttactcgtttactaccaatcataa

SEQ ID NO: 147527 - DNA, 54 bp, Artificial
  Synthetic oligonucleotide
ggggaacgccaactggcgagggagcctcccaggattgggaggttggtgggtgga

SEQ ID NO: 147528 - DNA, 55 bp, Artificial
  Synthetic oligonucleotide
gagttgcacggttatcggcaacagttttaagagcagcatcgatttgtttaactgc

SEQ ID NO: 147529 - DNA, 55 bp, Artificial
  Synthetic oligonucleotide
gagttctcctgccaatccatgaatgttgttcatctatatcaggcaacaaagcccc

SEQ ID NO: 147530 - DNA, 55 bp, Artificial
  Synthetic oligonucleotide
ttcggcgcatccccgatccagcgaaacggataacatgtaattaacgtaagcgtcg

SEQ ID NO: 147531 - DNA, 55 bp, Artificial
  Synthetic oligonucleotide
gagttcgagcgagaagtaataaacgagcggacaaagagcggtagactttctacag

SEQ ID NO: 147532 - DNA, 55 bp, Artificial
  Synthetic oligonucleotide
gagagctattatctgcattcgaaattacactcgctcgaactgtctctgtaacgcc

SEQ ID NO: 147533 - DNA, 54 bp, Artificial
  Synthetic oligonucleotide
gacctactacttcaaacttcaatcctagtttcggtaacttacgtccggcatctg

SEQ ID NO: 147534 - DNA, 51 bp, Artificial
  Synthetic oligonucleotide
gacctgtgtttccggttaccccagtgcttcctgttggacccgtgtttcccg

SEQ ID NO: 147535 - DNA, 55 bp, Artificial
  Synthetic oligonucleotide
gacctttaggtgattccgaccattaactggactggggctattgttcatagacctc

SEQ ID NO: 147536 - DNA, 55 bp, Artificial
  Synthetic oligonucleotide
gagagctattggacaagattaaacgtagaacttgtagcagaagacacaacgcaag

SEQ ID NO: 147537 - DNA, 55 bp, Artificial
  Synthetic oligonucleotide
gacgaatcatcacaagcaactagactcatcgctaaagcacttcctaatgcaatgg

SEQ ID NO: 147538 - DNA, 58 bp, Artificial
  Synthetic oligonucleotide
cagacgctttgattttgggggagaagattcggaactaagagtgattgagtcgcttcac

SEQ ID NO: 147539 - DNA, 55 bp, Artificial
  Synthetic oligonucleotide
gagtggtctggacgtgtggctggtttactatatgcaatctatatcccaagcatcg

SEQ ID NO: 147540 - DNA, 55 bp, Artificial
  Synthetic oligonucleotide
gacgatcgttcgcgtggtcaaatgataccagtaagaaatatgttgaaccaatgtc

SEQ ID NO: 147541 - DNA, 55 bp, Artificial
  Synthetic oligonucleotide
tttgctatcgaagtatgacctcaagtttagggtgtaccatcaccctccttaagat

SEQ ID NO: 147542 - DNA, 55 bp, Artificial
  Synthetic oligonucleotide
ctggtgtaactgtcgtattactcggctctgttactacaaccggtggctctcctgg

SEQ ID NO: 147543 - DNA, 55 bp, Artificial
  Synthetic oligonucleotide
ctgtaagacttgatggcctctatgtattttccctccgaaaagtagtacatcccgg

SEQ ID NO: 147544 - DNA, 55 bp, Artificial
  Synthetic oligonucleotide
gagcgagagtttggagcagcgaaagatcgatacaatgataagcagcaacgtcggg

SEQ ID NO: 147545 - DNA, 55 bp, Artificial
  Synthetic oligonucleotide
gagccttggtacaaccctgattctttagaccctattgtggatcgagtgataaaac

SEQ ID NO: 147546 - DNA, 55 bp, Artificial
  Synthetic oligonucleotide
cttcgtttgcgggaaggaccacaacgccgatatcaagagagccgtccccgacacc

SEQ ID NO: 147547 - DNA, 55 bp, Artificial
  Synthetic oligonucleotide
gagcattttaaagcatttagagggcttgttaagaatgatctggatatgaagggcg

SEQ ID NO: 147548 - DNA, 55 bp, Artificial
  Synthetic oligonucleotide
ctgtatgttggggtttgtccgtatttcgaaaatcatctcggagcgggagaaccgc

SEQ ID NO: 147549 - DNA, 53 bp, Artificial
  Synthetic oligonucleotide
ggggacttttacaacagagggtactcgttcaactgtgttaacttcttgccgtg

SEQ ID NO: 147550 - DNA, 55 bp, Artificial
  Synthetic oligonucleotide
gagattgcgcgtaacgagaaagtcatcggacgttcacttgaagcaagtgtgacgc

SEQ ID NO: 147551 - DNA, 55 bp, Artificial
  Synthetic oligonucleotide
ctgtcgacgttccaattggccgccttgcgccactatgagctgacgatccctgaca

SEQ ID NO: 147552 - DNA, 55 bp, Artificial
  Synthetic oligonucleotide
gagattcactctgccgggcgcaaagaaaatgcgcaggtcctccgattccccgaat

SEQ ID NO: 147553 - DNA, 55 bp, Artificial
  Synthetic oligonucleotide
ttttacgagcctgaaataggagggctgatctcgctcgtttctatttatttcggcc

SEQ ID NO: 147554 - DNA, 55 bp, Artificial
  Synthetic oligonucleotide
cttttaataaactagctgaggatggagcagtacttatgcctttaggtgcctatcc

SEQ ID NO: 147555 - DNA, 55 bp, Artificial
  Synthetic oligonucleotide
ctgtttcgctccattcaagaggggacaaacccgatggcagatttccgctccagtg

SEQ ID NO: 147556 - DNA, 53 bp, Artificial
  Synthetic oligonucleotide
tttggtgaaggctgtatttcctggtgggacaattaccggtgccccgaaaatac

SEQ ID NO: 147557 - DNA, 55 bp, Artificial
  Synthetic oligonucleotide
ttttaagatgctgaatcaaaatggacatgtcgtctttacaagcggtccacagcca

SEQ ID NO: 147558 - DNA, 55 bp, Artificial
  Synthetic oligonucleotide
tttgtgttccagcagagttgcttgttgcaagaccgttaaaagttgttcctccggc

SEQ ID NO: 147559 - DNA, 55 bp, Artificial
  Synthetic oligonucleotide
gacttccttgctactattcagccgaagtttaaggatgacccaacgcttggaccgt

SEQ ID NO: 147560 - DNA, 57 bp, Artificial
  Synthetic oligonucleotide
ggggattgtgatgctagccggattggcaccttcccgacttccgtttgctgccggttg

SEQ ID NO: 147561 - DNA, 55 bp, Artificial
  Synthetic oligonucleotide
ttcacgatagggaagttgctgtgaaggcaagcgataagtttgacgtgtctgtaga

SEQ ID NO: 147562 - DNA, 55 bp, Artificial
  Synthetic oligonucleotide
gacttcttcgaatgagcttagtgtaacacaggaactcatgtatatgtgttacgga

SEQ ID NO: 147563 - DNA, 55 bp, Artificial
  Synthetic oligonucleotide
ctgtggcttcggaggtacttgcggtttctctatcggcttctcctttgatttagcg

SEQ ID NO: 147564 - DNA, 55 bp, Artificial
  Synthetic oligonucleotide
ctgttagatgggacgttatttagctcagaagacatgtattcgaatttcgcttcgg

SEQ ID NO: 147565 - DNA, 55 bp, Artificial
  Synthetic oligonucleotide
gacttttggtgcggtagctggtccaaatttagtaggcgtaatgggagattttgcc

SEQ ID NO: 147566 - DNA, 55 bp, Artificial
  Synthetic oligonucleotide
ctgtatctagtagtccgactgtacaagaagcggcgttttctaattttgaaagccc

SEQ ID NO: 147567 - DNA, 52 bp, Artificial
  Synthetic oligonucleotide
gacggttaatcaacgtgagaacgttaagtggctattcctaacccttaccgtc

SEQ ID NO: 147568 - DNA, 55 bp, Artificial
  Synthetic oligonucleotide
ttgcttgcgcaaatccgtaaactcgatgtcaccatccgtacaaatgcccgggtcg

SEQ ID NO: 147569 - DNA, 55 bp, Artificial
  Synthetic oligonucleotide
gacgtagtatcagtcggagatattgtgaccgtgtgggtggatggagtagacgccc

SEQ ID NO: 147570 - DNA, 55 bp, Artificial
  Synthetic oligonucleotide
gaggctctaccatccaaatggacgtcaccttgattaaaacttaatcccgtaatcc

SEQ ID NO: 147571 - DNA, 53 bp, Artificial
  Synthetic oligonucleotide
gggggtattgtcctacagggaaacaccatctttacctacagggaaagatgtat

SEQ ID NO: 147572 - DNA, 55 bp, Artificial
  Synthetic oligonucleotide
ttggcattaagcagggtgattacaaagtagaagtacaagttacaaaacgcggtgg

SEQ ID NO: 147573 - DNA, 55 bp, Artificial
  Synthetic oligonucleotide
ctttcactccattcaaacacatcctgctttgcaatctcctgggaacaagtttcgc

SEQ ID NO: 147574 - DNA, 55 bp, Artificial
  Synthetic oligonucleotide
gacgtattcatttatatgactcctatcacatagcatcaaacgcttcaggcgaccg

SEQ ID NO: 147575 - DNA, 55 bp, Artificial
  Synthetic oligonucleotide
gaggagtgtgtgccttgcaaagcgacgggatatgttatgtcgtatgaaacaattg

SEQ ID NO: 147576 - DNA, 55 bp, Artificial
  Synthetic oligonucleotide
gacgtccctccatttgagtgatcgctacattcatcgcccgatccgtctttgcccg

SEQ ID NO: 147577 - DNA, 55 bp, Artificial
  Synthetic oligonucleotide
gagctagaaaggcggtcaaagctaagtcgcggcactatctcgcggctgtgtaacg

SEQ ID NO: 147578 - DNA, 55 bp, Artificial
  Synthetic oligonucleotide
gacgtccgacattattgaacagcttacaggtgcgcgattgacgccaaagtttgtt

SEQ ID NO: 147579 - DNA, 55 bp, Artificial
  Synthetic oligonucleotide
gacgtgtcctcccgccttggcatagagaccgtcacagtccgcaaatattcaaagc

SEQ ID NO: 147580 - DNA, 55 bp, Artificial
  Synthetic oligonucleotide
gacgttttattaaggggcaaagaaagttgcatgcgctagtaattggtggaacagg

SEQ ID NO: 147581 - DNA, 55 bp, Artificial
  Synthetic oligonucleotide
ctttgtcgaattatgagcgattttcccgaatagcagctgatctgaggtatatgta

SEQ ID NO: 147582 - DNA, 55 bp, Artificial
  Synthetic oligonucleotide
cacttgtggcttctccggtaaaaacggacccattatgcctatttgcaataattac

SEQ ID NO: 147583 - DNA, 55 bp, Artificial
  Synthetic oligonucleotide
gagcgtgctagcggtatctcattgttcttccaaggtattgggaacttcttcggca

SEQ ID NO: 147584 - DNA, 55 bp, Artificial
  Synthetic oligonucleotide
gagcggcctaggatctggttaaactctacgccatatatatcaagacaattagggc

SEQ ID NO: 147585 - DNA, 55 bp, Artificial
  Synthetic oligonucleotide
ctttctgcactattatgcccgtctaatataacggcgaattcccaatcaccattcg

SEQ ID NO: 147586 - DNA, 54 bp, Artificial
  Synthetic oligonucleotide
tttggagtacccatgccataaagttgggacgaaataaattggtgtatccttacc

SEQ ID NO: 147587 - DNA, 55 bp, Artificial
  Synthetic oligonucleotide
gactaaaaggttgtgaaggacttgaagttaatcctagtgcttcgcaaatgtcccc

SEQ ID NO: 147588 - DNA, 55 bp, Artificial
  Synthetic oligonucleotide
gagcgatacttcggggtattacacctagatttccaatgcatggacgctcttgtgg

SEQ ID NO: 147589 - DNA, 55 bp, Artificial
  Synthetic oligonucleotide
tttgtattggtctagttcagctaacagttgttttacaccctccggactcagcgtc

SEQ ID NO: 147590 - DNA, 55 bp, Artificial
  Synthetic oligonucleotide
gatcttattactgaggaaacgatgacaagtccaacgaatacgtatggggagacga

SEQ ID NO: 147591 - DNA, 55 bp, Artificial
  Synthetic oligonucleotide
ttgtagaccataccagaaccgcagtcagcacagaaagctaatctagcaaataaag

SEQ ID NO: 147592 - DNA, 55 bp, Artificial
  Synthetic oligonucleotide
gatctgtcgttattcatatagacggctgctcccaagttcttattggcaatatcgc

SEQ ID NO: 147593 - DNA, 52 bp, Artificial
  Synthetic oligonucleotide
gggggtctggggaagagttccccagcaggtttggacagagtccaaggttttg

SEQ ID NO: 147594 - DNA, 55 bp, Artificial
  Synthetic oligonucleotide
gatctgctaacgttcccgttacaggtgcaaacagaatcgctgtcgtcgctattgc

SEQ ID NO: 147595 - DNA, 55 bp, Artificial
  Synthetic oligonucleotide
gatctctatattggagggaagagtcttgctcgtggatatgctaatcgtccggacc

SEQ ID NO: 147596 - DNA, 55 bp, Artificial
  Synthetic oligonucleotide
gaatggtttgcagggtttcaactcaagtggtatgccgtcccgatcgtgtcaaaca

SEQ ID NO: 147597 - DNA, 55 bp, Artificial
  Synthetic oligonucleotide
cttaaggttgtattttgaggccaactgctccaaataaggggtggacatgcccgta

SEQ ID NO: 147598 - DNA, 55 bp, Artificial
  Synthetic oligonucleotide
gaattaagatatagctatcccctctttcaaccataagctttagctagtctgccaa

SEQ ID NO: 147599 - DNA, 55 bp, Artificial
  Synthetic oligonucleotide
gaattacacctacaaaagcgagagcgaacgaggtgaagaacgtgtcagaaaacga

SEQ ID NO: 147600 - DNA, 55 bp, Artificial
  Synthetic oligonucleotide
gaattcgtctaaactccagccaactgctattggcaagagtgaaccgccgagtccg

SEQ ID NO: 147601 - DNA, 55 bp, Artificial
  Synthetic oligonucleotide
gatcgggccccatcaaagcctaattcggcatccagcaagaaggtatagttccccg

SEQ ID NO: 147602 - DNA, 55 bp, Artificial
  Synthetic oligonucleotide
gatcggacagagtggaggcaagaacgcattaacccgctgcaaaggctcactgggc

SEQ ID NO: 147603 - DNA, 55 bp, Artificial
  Synthetic oligonucleotide
gatcggaatttgccccggagcggagctttggtttccgacagcaaacgtcaccgcc

SEQ ID NO: 147604 - DNA, 58 bp, Artificial
  Synthetic oligonucleotide
cacttctccatctttcgttaagaagaaatcagctcttgttaagcccgcactatctaaa

SEQ ID NO: 147605 - DNA, 55 bp, Artificial
  Synthetic oligonucleotide
gatcgcattacgctatgacgatgttgttaccatattgaaagatccgcgttttctc

SEQ ID NO: 147606 - DNA, 55 bp, Artificial
  Synthetic oligonucleotide
ttcttcagggaatagtattattccagaaagtcacgtggatctgtactttaaggga

SEQ ID NO: 147607 - DNA, 55 bp, Artificial
  Synthetic oligonucleotide
ctggatccttcccgtatgtgcgcccgagcgagctttcacatacagtggatgttcc

SEQ ID NO: 147608 - DNA, 55 bp, Artificial
  Synthetic oligonucleotide
cttaagcaaacagctgtcccgctatgctggcccggtaacattgcatatcgttcct

SEQ ID NO: 147609 - DNA, 55 bp, Artificial
  Synthetic oligonucleotide
gatcctagtcgactaactggattctcttgcataggagaaatgccctgttcggatt

SEQ ID NO: 147610 - DNA, 55 bp, Artificial
  Synthetic oligonucleotide
gaattggttgtagcgatcggggaaggtaaagatgacccaaagtatagggaggcca

SEQ ID NO: 147611 - DNA, 53 bp, Artificial
  Synthetic oligonucleotide
gaatacccctcctatgctaacaggggggtagtaatcgtaagtgttaagcggaa

SEQ ID NO: 147612 - DNA, 55 bp, Artificial
  Synthetic oligonucleotide
gatggcaatgtcttagatgaaccgctatccgcaagtggacataaccgcgcttggc

SEQ ID NO: 147613 - DNA, 55 bp, Artificial
  Synthetic oligonucleotide
gatggacctgtttcggacgtcatcttctatagcccaaaagataagcctcggcttc

SEQ ID NO: 147614 - DNA, 55 bp, Artificial
  Synthetic oligonucleotide
gatgcggacaacgataagaggtgaggtgtgagtgtatggacaagcaatcacgaac

SEQ ID NO: 147615 - DNA, 52 bp, Artificial
  Synthetic oligonucleotide
ggggttgaagggacattgcaaacgttttcagtgtacccactggaaaaaatcg

SEQ ID NO: 147616 - DNA, 55 bp, Artificial
  Synthetic oligonucleotide
gaatcactgtaacgacccgcaagtcgatttgcatttatagttgcatgctgcccaa

SEQ ID NO: 147617 - DNA, 55 bp, Artificial
  Synthetic oligonucleotide
cttgtgcaatctttatacgagaaaggatatgtatcgtatcctcgaaccgattcgc

SEQ ID NO: 147618 - DNA, 55 bp, Artificial
  Synthetic oligonucleotide
cttgttaccccttaccctgtacttagggaaggcatcaagatatggctcaagctcc

SEQ ID NO: 147619 - DNA, 55 bp, Artificial
  Synthetic oligonucleotide
cttagtgggtgcgtcaaccatccatgtgtactcgacttgtcggggcttgtagcac

SEQ ID NO: 147620 - DNA, 55 bp, Artificial
  Synthetic oligonucleotide
gatgcataaaggcgatttggtgcttcagggatgcatgagtaattgatgcgcatcg

SEQ ID NO: 147621 - DNA, 55 bp, Artificial
  Synthetic oligonucleotide
ctggagcaatagaaggagtcagaatcatggtttctggtttcacattacgagcata

SEQ ID NO: 147622 - DNA, 55 bp, Artificial
  Synthetic oligonucleotide
cttagctccacatgtaaaggcaggttctgagtgggcgattacaattagcctttgg

SEQ ID NO: 147623 - DNA, 55 bp, Artificial
  Synthetic oligonucleotide
gatgcagtttgtcgaatcctccctaccacccataccggcttctattatggcgatg

SEQ ID NO: 147624 - DNA, 55 bp, Artificial
  Synthetic oligonucleotide
ctggaggaagagaaagcaaatgcgatttcctgagtagcggcgagcgaaacggaac

SEQ ID NO: 147625 - DNA, 55 bp, Artificial
  Synthetic oligonucleotide
gaatgaatatacgaatatctgtagttttaccctatggctattcttatagtgattc

SEQ ID NO: 147626 - DNA, 60 bp, Artificial
  Synthetic oligonucleotide
cactgtaagaggaaggtggataagcgccatagcaaacgtgggggcattacatgtaatgac

SEQ ID NO: 147627 - DNA, 52 bp, Artificial
  Synthetic oligonucleotide
ttactctcaccgtttaccgtaagacgtttccgaaggaactgaaatataatta

SEQ ID NO: 147628 - DNA, 55 bp, Artificial
  Synthetic oligonucleotide
gatgatcagcggtcaattgagacccttacctcgatcaatatcggtcccgcgaagg

SEQ ID NO: 147629 - DNA, 55 bp, Artificial
  Synthetic oligonucleotide
ttagatggggcgctgagcgctaggcggttgatcggttatggtgggatcttgaagg

SEQ ID NO: 147630 - DNA, 55 bp, Artificial
  Synthetic oligonucleotide
gaatggagtgcctcacatcaatattagaggtctatgaacaatagccccagtccag

SEQ ID NO: 147631 - DNA, 55 bp, Artificial
  Synthetic oligonucleotide
gaatggagtgtaccattggccttgagagtcagcgaaagatggtttagcatcttta

SEQ ID NO: 147632 - DNA, 55 bp, Artificial
  Synthetic oligonucleotide
gatgagaggtaggcagatacttcgtgattttgttgaatcttatgtgcaatcatcg

SEQ ID NO: 147633 - DNA, 55 bp, Artificial
  Synthetic oligonucleotide
gaatggtcgctcctaatacgtctttaaaatgccctaatgcccattcgtgacccgg

SEQ ID NO: 147634 - DNA, 55 bp, Artificial
  Synthetic oligonucleotide
gacaccgggttcaattcgtttatgactggtgcataggctcgagcgacagcatccc

SEQ ID NO: 147635 - DNA, 55 bp, Artificial
  Synthetic oligonucleotide
gatagcaattgtcttatctattttggcgatagtatcgtcggtaagtgcgtgtgtt

SEQ ID NO: 147636 - DNA, 55 bp, Artificial
  Synthetic oligonucleotide
ttcgtagaatagggtcacgggcatggtgggatgttccttcctcaatgctagaata

SEQ ID NO: 147637 - DNA, 60 bp, Artificial
  Synthetic oligonucleotide
gtcacagtccgcaaatattcaaagctgctcgagtctcacggctattttttcgagcgcgac

SEQ ID NO: 147638 - DNA, 58 bp, Artificial
  Synthetic oligonucleotide
cactgccgcatgttctacgtcccatatcacatcggaacttaataagtcttcccaattt

SEQ ID NO: 147639 - DNA, 55 bp, Artificial
  Synthetic oligonucleotide
gacagcgcagtatacgaaaatgagtgatgcgccttttcatattggcatgcttcac

SEQ ID NO: 147640 - DNA, 55 bp, Artificial
  Synthetic oligonucleotide
gatagaatctgctacaactaagttaaggatagcaggagttgcctcaatacgaata

SEQ ID NO: 147641 - DNA, 55 bp, Artificial
  Synthetic oligonucleotide
gacaggccaagagggtgaagaatcaattgcacgtgtcaattccttaatgctcctt

SEQ ID NO: 147642 - DNA, 55 bp, Artificial
  Synthetic oligonucleotide
ttataatgcgcacccctgctttcgttacggttataagcgccgagtgtaatgaccc

SEQ ID NO: 147643 - DNA, 55 bp, Artificial
  Synthetic oligonucleotide
gatacggtttattacttggatggtgctttagcttccagaaggctgatcggttacg

SEQ ID NO: 147644 - DNA, 55 bp, Artificial
  Synthetic oligonucleotide
gacagtaaagagattcgccatagcgtccatacccgggactggtatagcgtgactg

SEQ ID NO: 147645 - DNA, 55 bp, Artificial
  Synthetic oligonucleotide
ttttgcaaatgggtaggctaaaaccccatcaggtccaaaatgagcgtgaataagg

SEQ ID NO: 147646 - DNA, 55 bp, Artificial
  Synthetic oligonucleotide
gaccaattactaaagccatgtgttttattgtaccgctaactctcacaattggttg

SEQ ID NO: 147647 - DNA, 55 bp, Artificial
  Synthetic oligonucleotide
gatacggtacgtaagcataattgtaagcatcccatagcactagatctgccttgcg

SEQ ID NO: 147648 - DNA, 55 bp, Artificial
  Synthetic oligonucleotide
tttaaattcaccagctatgtctagcgaagctataagaacaacggttgtaacggcg

SEQ ID NO: 147649 - DNA, 52 bp, Artificial
  Synthetic oligonucleotide
gggtgttcaaaaacagcctgtagggacccttgtagttcaataccaataaaaa

SEQ ID NO: 147650 - DNA, 55 bp, Artificial
  Synthetic oligonucleotide
ctggtcgtgctgaatttccaaagttcaaaagccggaaggcaagacagtcgtatac

SEQ ID NO: 147651 - DNA, 55 bp, Artificial
  Synthetic oligonucleotide
gataccttttctcgtttaatacttgttcatatggcgtcttgtagtcaccatcccc

SEQ ID NO: 147652 - DNA, 55 bp, Artificial
  Synthetic oligonucleotide
gaccacacataccaactgtcgtacctactgcaaatttcggtactaattccatcgc

SEQ ID NO: 147653 - DNA, 55 bp, Artificial
  Synthetic oligonucleotide
gaccaccttcaatctacgaatcttactcggattgattgcgtcacgatacgcttcg

SEQ ID NO: 147654 - DNA, 55 bp, Artificial
  Synthetic oligonucleotide
cttgttgcaatggttcccaggattgtaccgatgataacagaaccatagaatcccc

SEQ ID NO: 147655 - DNA, 55 bp, Artificial
  Synthetic oligonucleotide
gacccagtcgggctattcctattacagaatgcggaaacaaatgtaaagctatcgg

SEQ ID NO: 147656 - DNA, 54 bp, Artificial
  Synthetic oligonucleotide
gagaacgtacggaataaacgagtgcgaaatagcgttagcataccgtaaagttcc

SEQ ID NO: 147657 - DNA, 55 bp, Artificial
  Synthetic oligonucleotide
gatccgtatatgacggaaccgctggaattgcaaatatactggttgatgcctaccg

SEQ ID NO: 147658 - DNA, 55 bp, Artificial
  Synthetic oligonucleotide
gatccgacgaacgccaatgggtaagcattttatatccgttcttgctgaaacggag

SEQ ID NO: 147659 - DNA, 55 bp, Artificial
  Synthetic oligonucleotide
gatcccaatggtacgctgacaagaggccagatggcgattattcttgttaacgcct

SEQ ID NO: 147660 - DNA, 60 bp, Artificial
  Synthetic oligonucleotide
cactcgctcgaactgtctctgtaacgccttgtgtaatcgagtccgtagcgaaattctctc

SEQ ID NO: 147661 - DNA, 55 bp, Artificial
  Synthetic oligonucleotide
gatccatccaggttagaagagaatatctactttgttcaaaaggacatccgaagtg

SEQ ID NO: 147662 - DNA, 55 bp, Artificial
  Synthetic oligonucleotide
tttgagcgatagcatgggaaagctaggcacccgcctagcctaatcatggaacatg

SEQ ID NO: 147663 - DNA, 55 bp, Artificial
  Synthetic oligonucleotide
gatccaagtttacctgccgttgtcagaaacgctactagcaatatagtaacgacgc

SEQ ID NO: 147664 - DNA, 55 bp, Artificial
  Synthetic oligonucleotide
gacaaacacttgctcgagaccctcggtatactatttgtatgctcttattataacg

SEQ ID NO: 147665 - DNA, 55 bp, Artificial
  Synthetic oligonucleotide
gatcaggcgtatggtacgactcgaacagacatgatacaaaagagtgagttgtata

SEQ ID NO: 147666 - DNA, 55 bp, Artificial
  Synthetic oligonucleotide
gatcacgccggcaactttgttaatggccccatttggaggaagttgtatgttagca

SEQ ID NO: 147667 - DNA, 55 bp, Artificial
  Synthetic oligonucleotide
gatcacgaacgataggtaatattcctttgacagcaattctcttaacgataacaat

SEQ ID NO: 147668 - DNA, 55 bp, Artificial
  Synthetic oligonucleotide
gatcaagtacatcagacggaattcgagaaagtgcgtcaagcaaatgattatgccc

SEQ ID NO: 147669 - DNA, 55 bp, Artificial
  Synthetic oligonucleotide
ttctctctatcgggcttaaaacgtcaatcagagcaatctaaacaaacgagacgac

SEQ ID NO: 147670 - DNA, 54 bp, Artificial
  Synthetic oligonucleotide
gacaaggcgtttgggcgttgccaggaatcgttgttgtattgggtaggtgtaaac

SEQ ID NO: 147671 - DNA, 56 bp, Artificial
  Synthetic oligonucleotide
ggtaatcgttaataaatattgaattacacctacaaaagcgagagcgaacgaggtga

SEQ ID NO: 147672 - DNA, 55 bp, Artificial
  Synthetic oligonucleotide
cttcgtcttctgggatgacgaatttcggttcattcagcctttccggcaggagtgc

SEQ ID NO: 147673 - DNA, 55 bp, Artificial
  Synthetic oligonucleotide
ttaggtacaggggatcaagttaataagccgttagggtatgaaattgtcacagttc

SEQ ID NO: 147674 - DNA, 55 bp, Artificial
  Synthetic oligonucleotide
ttagtcatcttaaccagtcctcagagcctatactagctcattgcctacgtcaccg

SEQ ID NO: 147675 - DNA, 55 bp, Artificial
  Synthetic oligonucleotide
ctggccatagtaaaggtggtgcagaagcggaccttatcgctgcagaattagattg

SEQ ID NO: 147676 - DNA, 55 bp, Artificial
  Synthetic oligonucleotide
gacaatacatgcatgattattatacgccggaccgagtggtgatttcggtagcggg

SEQ ID NO: 147677 - DNA, 55 bp, Artificial
  Synthetic oligonucleotide
ttcgtatgacatccgaatcattaagtagtccgtcagggatgtttagtgggaagtc

SEQ ID NO: 147678 - DNA, 55 bp, Artificial
  Synthetic oligonucleotide
gataggctcgaaattctttacgaactcgatgatcaaactccagcgtttctccgta

SEQ ID NO: 147679 - DNA, 55 bp, Artificial
  Synthetic oligonucleotide
tcgttagattatagacgttcaatcgaaacacatcttagattgcttcaggaagggc

SEQ ID NO: 147680 - DNA, 55 bp, Artificial
  Synthetic oligonucleotide
tcgttacagcccctattagaagcattggtgcgattatgactaacgaccacatagc

SEQ ID NO: 147681 - DNA, 54 bp, Artificial
  Synthetic oligonucleotide
gtagaggttgtaacggttgctagttttacagaccatttcacaacaataaaccga

SEQ ID NO: 147682 - DNA, 59 bp, Artificial
  Synthetic oligonucleotide
cacgtgtagtaagtgggcggatgctgatacggttcgaatcgacgattaagatttcgtca

SEQ ID NO: 147683 - DNA, 55 bp, Artificial
  Synthetic oligonucleotide
tcgtgcataggatgtgtcttccgaatggaacaacatattggcgagttaatcgcgc

SEQ ID NO: 147684 - DNA, 55 bp, Artificial
  Synthetic oligonucleotide
gtagcatcgttccttctagcgtaattaaagagcggaaagcccctgcgaccattgg

SEQ ID NO: 147685 - DNA, 55 bp, Artificial
  Synthetic oligonucleotide
gtagctcctttgcaaatctattaattcacggtattccctacgatcagtcacgcta

SEQ ID NO: 147686 - DNA, 52 bp, Artificial
  Synthetic oligonucleotide
gtaggacctgtaactcccgtaggacctgtaactcccgtaggtcctgtaactc

SEQ ID NO: 147687 - DNA, 55 bp, Artificial
  Synthetic oligonucleotide
gtaggagggcgtcactgaacaatgctattactctctccatatttaagtacctcct

SEQ ID NO: 147688 - DNA, 55 bp, Artificial
  Synthetic oligonucleotide
gtagtcgaggattaacgaggcgtgtcggaatggatagagccttgcaacaacaagg

SEQ ID NO: 147689 - DNA, 55 bp, Artificial
  Synthetic oligonucleotide
gtatcggaattaacaggtttgtatcctggtagtcttaggagaatgctggtggaac

SEQ ID NO: 147690 - DNA, 53 bp, Artificial
  Synthetic oligonucleotide
gtatgtaaacggtattttgggcatccaaatgcgtttagaatacgttaaaccgc

SEQ ID NO: 147691 - DNA, 55 bp, Artificial
  Synthetic oligonucleotide
gtatgtcgtgccaatgaacacgtccgaaataacgggcgtttacttgatatgtacc

SEQ ID NO: 147692 - DNA, 55 bp, Artificial
  Synthetic oligonucleotide
gtattaacttacacctttgcccttactaacgatggaaatgttgcagcgaacaatg

SEQ ID NO: 147693 - DNA, 58 bp, Artificial
  Synthetic oligonucleotide
taacgccctggcatccactaagtaggatgaccaggacggccaaagcttgcattaactt

SEQ ID NO: 147694 - DNA, 55 bp, Artificial
  Synthetic oligonucleotide
gtattcatgcagtcttggaatcaccggtgaaacttgtccgatctgaaaagcggcc

SEQ ID NO: 147695 - DNA, 55 bp, Artificial
  Synthetic oligonucleotide
gtatttgaccctgatgaggacggtacgattttcgaacagattgatcttgcaaagc

SEQ ID NO: 147696 - DNA, 55 bp, Artificial
  Synthetic oligonucleotide
tcggtccgctcggtgcaacttggcgcataatttctgctttaccaccgtatgctcc

SEQ ID NO: 147697 - DNA, 55 bp, Artificial
  Synthetic oligonucleotide
gtcaatcaaagacgcaccctagtaccctttccggccatatttacttctgcgaccg

SEQ ID NO: 147698 - DNA, 55 bp, Artificial
  Synthetic oligonucleotide
gtaagctatattgttcatggacgtcctctcgtaatttctactgctacagcacgat

SEQ ID NO: 147699 - DNA, 55 bp, Artificial
  Synthetic oligonucleotide
gtaagtcttaaaggggattatggttctcaaggtggaagtacgataacacagcaag

SEQ ID NO: 147700 - DNA, 55 bp, Artificial
  Synthetic oligonucleotide
tcttaatcaccatcattggtacattggtgacagactttatcgttgaaccgcgcct

SEQ ID NO: 147701 - DNA, 55 bp, Artificial
  Synthetic oligonucleotide
tctgtacttaggaatcttccacttcaaacagtccgcaaggacgttaagtggtgag

SEQ ID NO: 147702 - DNA, 55 bp, Artificial
  Synthetic oligonucleotide
tctgccgactctacctgtgcttcgaaccccatgaactgtcattcatgacgcacgc

SEQ ID NO: 147703 - DNA, 55 bp, Artificial
  Synthetic oligonucleotide
tctgccatttctcgtactcatgcgcgcacggaacccatgaactttgctgcgcttc

SEQ ID NO: 147704 - DNA, 58 bp, Artificial
  Synthetic oligonucleotide
agttagagagctttagaaattcagtaggcacagcctatttcaccactttgaactagaa

SEQ ID NO: 147705 - DNA, 54 bp, Artificial
  Synthetic oligonucleotide
gtacaaagctataattttggtctaggttttatcccttatgcgttagatcgaggg

SEQ ID NO: 147706 - DNA, 55 bp, Artificial
  Synthetic oligonucleotide
gtacagctgtaccacttaccgcaaccattaacattccagcacgaataattgcgta

SEQ ID NO: 147707 - DNA, 53 bp, Artificial
  Synthetic oligonucleotide
tctcccactaagaagacccggtcacccttcaatgtttgttcggttgctttcgg

SEQ ID NO: 147708 - DNA, 55 bp, Artificial
  Synthetic oligonucleotide
gtacctgggccgctgcgcatatttacaggtgcaccgctgcttgttgagaccgtat

SEQ ID NO: 147709 - DNA, 55 bp, Artificial
  Synthetic oligonucleotide
tctagatgtcacagagacgattgtccgcctcagcatccaagataacggcacttgt

SEQ ID NO: 147710 - DNA, 54 bp, Artificial
  Synthetic oligonucleotide
gtacgcggaacaaaatggtgcagtaaaggtattaccggtatattcaaatcaaac

SEQ ID NO: 147711 - DNA, 55 bp, Artificial
  Synthetic oligonucleotide
tctagataaatatcggttgctgaaattcgttcgttcgaaccaaggcacgtgctat

SEQ ID NO: 147712 - DNA, 55 bp, Artificial
  Synthetic oligonucleotide
gtactgcttccatttcaaaacgtggagcttgttttcctacaaaacgctctgccat

SEQ ID NO: 147713 - DNA, 55 bp, Artificial
  Synthetic oligonucleotide
gtacttaaagcatttacaaattgtatcgccatcgctttaatagggttgcctatcg

SEQ ID NO: 147714 - DNA, 52 bp, Artificial
  Synthetic oligonucleotide
gtagaccgttatttaatggggagttcggttctgccaaaataggtcaaacaaa

SEQ ID NO: 147715 - DNA, 60 bp, Artificial
  Synthetic oligonucleotide
agttacattgatgtactctaacgtttctgtttatgctgattcaccttctatgcaactggt

SEQ ID NO: 147716 - DNA, 54 bp, Artificial
  Synthetic oligonucleotide
gtagacggctagcagtacttccttagggtcaacctcgaccttttctcctttgac

SEQ ID NO: 147717 - DNA, 55 bp, Artificial
  Synthetic oligonucleotide
gtcgaccattaattcgtcatacttgttcctacgatctgcatcaaacgggtactgc

SEQ ID NO: 147718 - DNA, 55 bp, Artificial
  Synthetic oligonucleotide
gtcgatctcatgccgtttcagagcttgatcgttttggagaagaggaataaggtgc

SEQ ID NO: 147719 - DNA, 55 bp, Artificial
  Synthetic oligonucleotide
gtcgcctgagataggactggcgaccgtttatcgcacactggagctgttaacggaa

SEQ ID NO: 147720 - DNA, 55 bp, Artificial
  Synthetic oligonucleotide
gtcgctattttcacttgccgctggagacggagataccggggtagctggcttactt

SEQ ID NO: 147721 - DNA, 55 bp, Artificial
  Synthetic oligonucleotide
gtcgctgcatcatcaacaagttgcaactcacaacgcacccaatgcaataaatcac

SEQ ID NO: 147722 - DNA, 55 bp, Artificial
  Synthetic oligonucleotide
gtcgcttgtccgcccggacggaacggtgaaaatgtttgagctgacggcgacttcc

SEQ ID NO: 147723 - DNA, 55 bp, Artificial
  Synthetic oligonucleotide
gtcgtacgctgcacgtacaagctgatctagacctgactgttcgatgcctagttct

SEQ ID NO: 147724 - DNA, 55 bp, Artificial
  Synthetic oligonucleotide
gtcgtgacggtcattcattttgcgtagttcttcgtggcgtactgtgatatcttct

SEQ ID NO: 147725 - DNA, 55 bp, Artificial
  Synthetic oligonucleotide
gtcgtttgtatacttcacttgcggaataaacaatttcgtccgtcataacgtcaca

SEQ ID NO: 147726 - DNA, 57 bp, Artificial
  Synthetic oligonucleotide
taacgggtgatggcgtgccttttgtagaatgaaccggcgagttacgatcccgtgcga

SEQ ID NO: 147727 - DNA, 55 bp, Artificial
  Synthetic oligonucleotide
gtctaataaaactagctaacttctttactggttcaggtggagaagacggtgtgta

SEQ ID NO: 147728 - DNA, 55 bp, Artificial
  Synthetic oligonucleotide
gtctaatttatggactatggtcgggcgtgttttcggattatttatagcgattgct

SEQ ID NO: 147729 - DNA, 55 bp, Artificial
  Synthetic oligonucleotide
tcgaggttaggatattgaccgataagtaagcgaacgacactcacggtattagagc

SEQ ID NO: 147730 - DNA, 55 bp, Artificial
  Synthetic oligonucleotide
tcgactgttttcataagttttcgggtgtttgaggtgtgttcgagtaggagatatc

SEQ ID NO: 147731 - DNA, 55 bp, Artificial
  Synthetic oligonucleotide
gtctgaacggaacgtcgaaagccactaacgttgggtctatgactctatcggcgga

SEQ ID NO: 147732 - DNA, 55 bp, Artificial
  Synthetic oligonucleotide
tcgacggggaggtttggcacctcgatgtcggctcatcgcatcctggggctgtagt

SEQ ID NO: 147733 - DNA, 54 bp, Artificial
  Synthetic oligonucleotide
gtctttagtaaatcctgagcgtatccttccgggcggttatgtatatttaacgga

SEQ ID NO: 147734 - DNA, 55 bp, Artificial
  Synthetic oligonucleotide
gtgaactaggtgatccgggcatgccgcaccgatttgcgagagcactggcgcttga

SEQ ID NO: 147735 - DNA, 55 bp, Artificial
  Synthetic oligonucleotide
tcggtatgtacaacttcatccgctatctcggtatgggcacagggccacttgtagg

SEQ ID NO: 147736 - DNA, 55 bp, Artificial
  Synthetic oligonucleotide
tcgggatgtctccggtgtgtaggctgaccgacaatcttatggatgagagctagtc

SEQ ID NO: 147737 - DNA, 57 bp, Artificial
  Synthetic oligonucleotide
taactcctttagattttcgatttttgctaatccttctacactttgctcaacgatcat

SEQ ID NO: 147738 - DNA, 55 bp, Artificial
  Synthetic oligonucleotide
tcggctcgttatcattagctgactgctgtcgttcagtgatggtgacattcggtgc

SEQ ID NO: 147739 - DNA, 55 bp, Artificial
  Synthetic oligonucleotide
gtcacgctggtagaggaggaatggtggaaaactcctaaacagccgaaaaccgctc

SEQ ID NO: 147740 - DNA, 55 bp, Artificial
  Synthetic oligonucleotide
tcggctcctcattttgctcgatttggcgaaagtgctcgaccgataacccgtggag

SEQ ID NO: 147741 - DNA, 55 bp, Artificial
  Synthetic oligonucleotide
gtcactctatgaatgcagttgatgttcgcgttgcaaaagatgagacggaagcaga

SEQ ID NO: 147742 - DNA, 55 bp, Artificial
  Synthetic oligonucleotide
gtcagtgcattgactgaacctccaaaagccgcccacatgccttcatctatattaa

SEQ ID NO: 147743 - DNA, 55 bp, Artificial
  Synthetic oligonucleotide
gtcattcgcatggtcagcttagcgcttttggtcgtgccgattatgagccttgtcc

SEQ ID NO: 147744 - DNA, 55 bp, Artificial
  Synthetic oligonucleotide
gtcattgtagacgcgactgtgattgtgatgagtgtcgtcgtagacgtaatcatga

SEQ ID NO: 147745 - DNA, 53 bp, Artificial
  Synthetic oligonucleotide
gtccaagacaaactaaaaccaatcgggaaaagccagtaaaacagcctagagga

SEQ ID NO: 147746 - DNA, 55 bp, Artificial
  Synthetic oligonucleotide
gtccactacacaaagccacccctgtgcgacaagttgatcgtgctccctagcacct

SEQ ID NO: 147747 - DNA, 55 bp, Artificial
  Synthetic oligonucleotide
gtccatatacatgcagtacagaactgttagaagagtgtgcacgtattgcggtaga

SEQ ID NO: 147748 - DNA, 55 bp, Artificial
  Synthetic oligonucleotide
caaacatatgtaacaccccactatacattaatgtgtagtttttgaaacaacttgt

SEQ ID NO: 147749 - DNA, 57 bp, Artificial
  Synthetic oligonucleotide
taagaagaattttgcctaatctaatacaaccattttctctgccggatttggcgtatg

SEQ ID NO: 147750 - DNA, 55 bp, Artificial
  Synthetic oligonucleotide
tcgattgttgccagtacgtaattcacgaattcctgatgaatagcaaggaacaggt

SEQ ID NO: 147751 - DNA, 55 bp, Artificial
  Synthetic oligonucleotide
gtcctagacgatccaatcgccaaactacaattgtatcgccttcacgtgcataatg

SEQ ID NO: 147752 - DNA, 55 bp, Artificial
  Synthetic oligonucleotide
tcgatcttgacatacggactggagaagacattcctattgaacagaggcatgccag

SEQ ID NO: 147753 - DNA, 55 bp, Artificial
  Synthetic oligonucleotide
gtccttgttgctctgcacgacttaaacctgatctatattcattgtctctgagacc

SEQ ID NO: 147754 - DNA, 55 bp, Artificial
  Synthetic oligonucleotide
gtcctttccacattagctccaaccgttcccttctacacgatatgtgcttttgact

SEQ ID NO: 147755 - DNA, 55 bp, Artificial
  Synthetic oligonucleotide
gggttcagtgctttaatcagatacgtttcgtagatgtctcgatggaacacgttac

SEQ ID NO: 147756 - DNA, 55 bp, Artificial
  Synthetic oligonucleotide
gggttgaacggtttcacttgtgccctaattatgaattgcgtaataatggcgctac

SEQ ID NO: 147757 - DNA, 49 bp, Artificial
  Synthetic oligonucleotide
gggttggttaacttcaacggccaccatatcgggacgaggggttaaaatt

SEQ ID NO: 147758 - DNA, 55 bp, Artificial
  Synthetic oligonucleotide
ggtaacgagaaagaatgttcgagcctgaaaggaaatcactcgtgcagaagcagct

SEQ ID NO: 147759 - DNA, 55 bp, Artificial
  Synthetic oligonucleotide
tgaatgcaggtcattttctctgccagtttgcatacgggcatcctgttgctacatg

SEQ ID NO: 147760 - DNA, 54 bp, Artificial
  Synthetic oligonucleotide
agtgggaattaataacctttagatctgatgtttttatgtcctttggtataagta

SEQ ID NO: 147761 - DNA, 55 bp, Artificial
  Synthetic oligonucleotide
ggtaatgcgaaattatcaggtcttgtaaaggctcaagttgctagtgctaatggtg

SEQ ID NO: 147762 - DNA, 55 bp, Artificial
  Synthetic oligonucleotide
tgaagctcctaatccgttcgcaacgagaataccgtcgaagttaggaagtggtccg

SEQ ID NO: 147763 - DNA, 54 bp, Artificial
  Synthetic oligonucleotide
ggtaattaaaccccattgttttagttcgcataagcttccctgacttcggattca

SEQ ID NO: 147764 - DNA, 55 bp, Artificial
  Synthetic oligonucleotide
ggtactaccgatcccactgaacacttcgggagaggaatcaatgatgacgcgtccc

SEQ ID NO: 147765 - DNA, 51 bp, Artificial
  Synthetic oligonucleotide
ggtagacgaagcgacctggaaaggtccgtcgtagagggtaacaaccccgta

SEQ ID NO: 147766 - DNA, 55 bp, Artificial
  Synthetic oligonucleotide
ggtagatccgacgattgaactggtggcgtgcggcagttccaacatcgatatgccg

SEQ ID NO: 147767 - DNA, 55 bp, Artificial
  Synthetic oligonucleotide
ggtagcaacacgcggtatgaaatcatatcttcactaagtagcggcagtcgcgtat

SEQ ID NO: 147768 - DNA, 55 bp, Artificial
  Synthetic oligonucleotide
ggtatccctaatctgtctacttacgctcctaatgtcacgtactgtcgagaggaga

SEQ ID NO: 147769 - DNA, 55 bp, Artificial
  Synthetic oligonucleotide
ggtatgttcggcttggcgacatgctcacacctgccgaatttcactatgcaatagc

SEQ ID NO: 147770 - DNA, 55 bp, Artificial
  Synthetic oligonucleotide
ggtcagagtagcgacagatacccgcacgataaaacctggcatgtggaagtgaacg

SEQ ID NO: 147771 - DNA, 60 bp, Artificial
  Synthetic oligonucleotide
taagatcaatggacactcactcgacgaaacggtaaagcacatagcaagcttatatcgttc

SEQ ID NO: 147772 - DNA, 55 bp, Artificial
  Synthetic oligonucleotide
ggtccaataacaatccgcctattgctgtaccattaactgtaagggcagctgtagc

SEQ ID NO: 147773 - DNA, 51 bp, Artificial
  Synthetic oligonucleotide
ggtcctaaggtagcgaaattccttgtcgggtaagttccgacccgcacgaaa

SEQ ID NO: 147774 - DNA, 51 bp, Artificial
  Synthetic oligonucleotide
ggggaagagttccccttgtaggttcggacaaagtccgaggtcttttagcca

SEQ ID NO: 147775 - DNA, 55 bp, Artificial
  Synthetic oligonucleotide
ggggacaaggtaccacttcatgtgcttccgattcctcacgcgtagtagcttacga

SEQ ID NO: 147776 - DNA, 54 bp, Artificial
  Synthetic oligonucleotide
ggggacgggcaaagttatccatttaacgagcgattggaacaactcgcaaaacga

SEQ ID NO: 147777 - DNA, 52 bp, Artificial
  Synthetic oligonucleotide
tgacgtcacaacccccctatgtaatacgggttgtgtgaccccaaaaataaag

SEQ ID NO: 147778 - DNA, 55 bp, Artificial
  Synthetic oligonucleotide
tgacgaacttagcaagtcatagtacgtcaaaccctacttcaatcgctcaatacgg

SEQ ID NO: 147779 - DNA, 54 bp, Artificial
  Synthetic oligonucleotide
ggggagtcgtcggcttaaaatcgctgcaaaatttcccagtctacgagccgtttc

SEQ ID NO: 147780 - DNA, 55 bp, Artificial
  Synthetic oligonucleotide
ggggcatgatcttcattcagctctactacatatatggcgtcagttgcttgttcaa

SEQ ID NO: 147781 - DNA, 54 bp, Artificial
  Synthetic oligonucleotide
ggggccaattacagttttaagtgcgtcttcgtttgaaggagaactgttaactgc

SEQ ID NO: 147782 - DNA, 55 bp, Artificial
  Synthetic oligonucleotide
taagatcttaataatcgttgatagataaggtgtttaaacgatgtataaagccttt

SEQ ID NO: 147783 - DNA, 55 bp, Artificial
  Synthetic oligonucleotide
ggggctgtcccaagcataaacctcattttgcgaccaatcatgcgccttgtaagca

SEQ ID NO: 147784 - DNA, 50 bp, Artificial
  Synthetic oligonucleotide
ggggcttcggggttatttcggtaatcaaagcatagaaggttaccaaacgg

SEQ ID NO: 147785 - DNA, 55 bp, Artificial
  Synthetic oligonucleotide
tgacgaacgctgacttaggtgttcatcaaatggaagggactattggtgacgtttt

SEQ ID NO: 147786 - DNA, 55 bp, Artificial
  Synthetic oligonucleotide
tgaccggttaaattactgccaccatgtcgcttcaagtgtcgaagagtggaccggg

SEQ ID NO: 147787 - DNA, 55 bp, Artificial
  Synthetic oligonucleotide
gggtatgatctccgaggatgtattatctggatactcaacaacctggtcaaacgca

SEQ ID NO: 147788 - DNA, 55 bp, Artificial
  Synthetic oligonucleotide
gggtcggatgaaatgggaaacacgcgtttattgctgacggctctaaggttctgcc

SEQ ID NO: 147789 - DNA, 55 bp, Artificial
  Synthetic oligonucleotide
gggtgatggtggcggggatttaacaacgtctggtggcggggctacgtcttcgtca

SEQ ID NO: 147790 - DNA, 55 bp, Artificial
  Synthetic oligonucleotide
tgacacatccgagagataatgtacccctcattccttcgccagtctctctaactgc

SEQ ID NO: 147791 - DNA, 55 bp, Artificial
  Synthetic oligonucleotide
ggtgtccttataacgaacgccgaacacacaagcgttaacaaaacgttgccatgcg

SEQ ID NO: 147792 - DNA, 55 bp, Artificial
  Synthetic oligonucleotide
ggtgtgactacgctaatgcgcgcaccaataggaccaatccgtgaaagtgatgggg

SEQ ID NO: 147793 - DNA, 60 bp, Artificial
  Synthetic oligonucleotide
taagcccgcatggatatttctcacgttgacagtaaaaaacgttgagggcgatgatctcaa

SEQ ID NO: 147794 - DNA, 55 bp, Artificial
  Synthetic oligonucleotide
ggtgttcgcaggaatctcccacttcaaacagtctgtaaggacgttaagtggtgag

SEQ ID NO: 147795 - DNA, 55 bp, Artificial
  Synthetic oligonucleotide
ggttccaggagttccagcaacggaatccccaactgaaaatgtacaatgcggtgat

SEQ ID NO: 147796 - DNA, 55 bp, Artificial
  Synthetic oligonucleotide
ggttcgctttctgcttggaaagctcctacattgcatgaatctagtgtacccaaac

SEQ ID NO: 147797 - DNA, 55 bp, Artificial
  Synthetic oligonucleotide
ggttgtatccttcaatcatcgtttgttgcatgtgagcaactgttacgggtgtatg

SEQ ID NO: 147798 - DNA, 55 bp, Artificial
  Synthetic oligonucleotide
ggttgtatctaacttctcgatgacaattggcttgttataccgctccgctaagtcc

SEQ ID NO: 147799 - DNA, 55 bp, Artificial
  Synthetic oligonucleotide
tctttcaccgtttctaaagctctcttaagtcgaacttcacgtgaaatggtggaca

SEQ ID NO: 147800 - DNA, 55 bp, Artificial
  Synthetic oligonucleotide
ggtttacggcaagcttaaggtttatgaactgaacagacagagccagaccacgcat

SEQ ID NO: 147801 - DNA, 54 bp, Artificial
  Synthetic oligonucleotide
ggtttggaaacgagtgcaacggcgtttccagcacttccgaaggaagtgagttgg

SEQ ID NO: 147802 - DNA, 55 bp, Artificial
  Synthetic oligonucleotide
tcttgcattagacgcatcatgtgaataaacgtactgtaaagcatagggtcgccct

SEQ ID NO: 147803 - DNA, 55 bp, Artificial
  Synthetic oligonucleotide
tcttgacagactggaacaggattgcatttgggctaaacggtacgaagatgttcct

SEQ ID NO: 147804 - DNA, 53 bp, Artificial
  Synthetic oligonucleotide
taagccgaaaacatatttctgtcctaagaagcgactaatcccccctagaaacc

SEQ ID NO: 147805 - DNA, 55 bp, Artificial
  Synthetic oligonucleotide
tcttcgtacagtaggacttcgctttgcgattgtgcgcggtacaccatacgacgga

SEQ ID NO: 147806 - DNA, 55 bp, Artificial
  Synthetic oligonucleotide
gtaaatcaaccacggccttattgtagtcttggcggtctctattgatctggccacg

SEQ ID NO: 147807 - DNA, 55 bp, Artificial
  Synthetic oligonucleotide
gtaacaacgtgagaggaggactacatgtgcttgagcaaggtttattagtaacggc

SEQ ID NO: 147808 - DNA, 55 bp, Artificial
  Synthetic oligonucleotide
gtaacagcttcgcctgattacatgcattcattacgtttagaggaacagaaacgtt

SEQ ID NO: 147809 - DNA, 55 bp, Artificial
  Synthetic oligonucleotide
ggtctggactgctccatgtagcatagcctcctttcactctagatctgatagcgcg

SEQ ID NO: 147810 - DNA, 55 bp, Artificial
  Synthetic oligonucleotide
ggtgaaagaacgccgcatgctgattcttctattcggggaagcttgatcggaatgg

SEQ ID NO: 147811 - DNA, 55 bp, Artificial
  Synthetic oligonucleotide
ggtgatccgaaacaactatggcgtttggccggcgttttccgctattgttacaagc

SEQ ID NO: 147812 - DNA, 55 bp, Artificial
  Synthetic oligonucleotide
tgaaccagagaataccgattaaattacatgtagcttgctttctcaaagtatgggc

SEQ ID NO: 147813 - DNA, 55 bp, Artificial
  Synthetic oligonucleotide
ggtgatccgctatgaacaccgatacaaccgctacaaaacttacttcaaaagacgt

SEQ ID NO: 147814 - DNA, 55 bp, Artificial
  Synthetic oligonucleotide
ggtgcgccggtccatttcgctatctcggttggtgaccaaaactcttttggtgtat

SEQ ID NO: 147815 - DNA, 60 bp, Artificial
  Synthetic oligonucleotide
agtgcccactcgatgtgtgctttcgtttcttcgtcattcggctttcccatgcactcggct

SEQ ID NO: 147816 - DNA, 55 bp, Artificial
  Synthetic oligonucleotide
ggtgctagatgtgccggctctaccctggcaatttatcttgctaaggcaggtttcc

SEQ ID NO: 147817 - DNA, 55 bp, Artificial
  Synthetic oligonucleotide
ggtgctgcagtatgcgtgcgccgagatggggattacactcatccacacccagccg

SEQ ID NO: 147818 - DNA, 55 bp, Artificial
  Synthetic oligonucleotide
ggtgctgcttgggataacccacctaaaagagaagagcttcgttgctccatcgaac

SEQ ID NO: 147819 - DNA, 55 bp, Artificial
  Synthetic oligonucleotide
tgaaatgggcgagcaatgtttgacctccactctttgtcgaagaggtgacacttcc

SEQ ID NO: 147820 - DNA, 53 bp, Artificial
  Synthetic oligonucleotide
ggtggactctacattgtaacgggacctacggttattcttcctcttttacggca

SEQ ID NO: 147821 - DNA, 55 bp, Artificial
  Synthetic oligonucleotide
ggtggatctatatgagtagtcccttcaattgggcttggtaaatctaagtatccgt

SEQ ID NO: 147822 - DNA, 55 bp, Artificial
  Synthetic oligonucleotide
ggtggattagatttacttaggttaaacttacgctcgcgttccgctcttctgatcg

SEQ ID NO: 147823 - DNA, 55 bp, Artificial
  Synthetic oligonucleotide
ggtggcctccaatcttatgtattcgccttccgctccttaaacatcatacagcgtt

SEQ ID NO: 147824 - DNA, 55 bp, Artificial
  Synthetic oligonucleotide
ggtgggcgggcgagtgcatttgattcctcatcaaggggacaaacccattgcggcg

SEQ ID NO: 147825 - DNA, 55 bp, Artificial
  Synthetic oligonucleotide
tgaaagtagcgggtgttactgtaacggataaggcaggagcgaaattaacaagcgg

SEQ ID NO: 147826 - DNA, 57 bp, Artificial
  Synthetic oligonucleotide
taagcttgtatctctcaacaagttaaagaaccctaataagctttatgtcggccagaa

SEQ ID NO: 147827 - DNA, 55 bp, Artificial
  Synthetic oligonucleotide
ggtgtaccgcgcacaatcgcaaagcgaagtcctactgtacgaagaacgtctgcta

SEQ ID NO: 147828 - DNA, 55 bp, Artificial
  Synthetic oligonucleotide
taaagcggcgagaccggattgaagcaccataaacaggctcaccctatttgcgcga

SEQ ID NO: 147829 - DNA, 55 bp, Artificial
  Synthetic oligonucleotide
taaaggctatggtccgaacaacggcgagtgtctttagaatagatggatttgtaca

SEQ ID NO: 147830 - DNA, 55 bp, Artificial
  Synthetic oligonucleotide
taaagtgatacaatagagttctaggcgaaggtgcgtagcggaagacgacgacagt

SEQ ID NO: 147831 - DNA, 55 bp, Artificial
  Synthetic oligonucleotide
taaatccacccatgtaattagcagcacctacagataccccgataataacaggaga

SEQ ID NO: 147832 - DNA, 55 bp, Artificial
  Synthetic oligonucleotide
tattgaagggattcaggaaatgaaggtaggctatgtcatcttatggcgctttgtt

SEQ ID NO: 147833 - DNA, 55 bp, Artificial
  Synthetic oligonucleotide
tattcacgcgcttgcatacgttgtatatgcatattggcttgtgaggaattcattt

SEQ ID NO: 147834 - DNA, 55 bp, Artificial
  Synthetic oligonucleotide
taaccaataggattgtttgaacgtctccatgctggctgattcaacaccgtccaca

SEQ ID NO: 147835 - DNA, 55 bp, Artificial
  Synthetic oligonucleotide
taaccgtacttagcgcggtgcttcctattctttggccgactaatactccaacgcc

SEQ ID NO: 147836 - DNA, 54 bp, Artificial
  Synthetic oligonucleotide
taactccgttaacagttacactccctggaatgaaagtagtcccgctaggaatcg

SEQ ID NO: 147837 - DNA, 60 bp, Artificial
  Synthetic oligonucleotide
agtgaccacgaggggctgcgatgcctaagttcacgcccttacctgcatctacttcgtcac

SEQ ID NO: 147838 - DNA, 55 bp, Artificial
  Synthetic oligonucleotide
tatggagtaaccaagaccatgctttaccatctctttgcaagtctcttgtcgatcc

SEQ ID NO: 147839 - DNA, 55 bp, Artificial
  Synthetic oligonucleotide
tatgctgtaaagggatacaccgctgaccaagagatgttattagatgtatcgaaaa

SEQ ID NO: 147840 - DNA, 55 bp, Artificial
  Synthetic oligonucleotide
tatgcatggggtcaagtcccattttgatgcaacttactgaagcgtaaaagctgcg

SEQ ID NO: 147841 - DNA, 55 bp, Artificial
  Synthetic oligonucleotide
taagcaaatcgtaaaggaacggcatcgcaacccgaattggaaacggattacaagc

SEQ ID NO: 147842 - DNA, 55 bp, Artificial
  Synthetic oligonucleotide
tatgcactaggagtagcatttggcgctcctgtattaacgtcgttgacagctagta

SEQ ID NO: 147843 - DNA, 55 bp, Artificial
  Synthetic oligonucleotide
taagctatttacccggagactgtatatcttactagtcttcggtttactccacttc

SEQ ID NO: 147844 - DNA, 55 bp, Artificial
  Synthetic oligonucleotide
tatgagttggttcaagaatatctagacacactaccaaataagccttcttgcgtac

SEQ ID NO: 147845 - DNA, 53 bp, Artificial
  Synthetic oligonucleotide
taaggtaactaaaccgggtgaccaacaaatctaagtaatcgtagtccatagga

SEQ ID NO: 147846 - DNA, 55 bp, Artificial
  Synthetic oligonucleotide
gttggttctgttatggtaagaagtaaagcgaaagctggcggtatcatgatgactg

SEQ ID NO: 147847 - DNA, 55 bp, Artificial
  Synthetic oligonucleotide
tcactgcacacctcttcatacgtagggttttcagtatggccgcctgtatacccgg

SEQ ID NO: 147848 - DNA, 59 bp, Artificial
  Synthetic oligonucleotide
taaggcaggccttacagcaacataacctcgagaagggattcggcctcgctagagcggat

SEQ ID NO: 147849 - DNA, 55 bp, Artificial
  Synthetic oligonucleotide
gttgtggcgtaacgacaatgtgtcatctttacgaatagatacattgctaccgatc

SEQ ID NO: 147850 - DNA, 55 bp, Artificial
  Synthetic oligonucleotide
gtttagggatacatgaagcagagaaacgctttgaacagtacccacatcaattaag

SEQ ID NO: 147851 - DNA, 52 bp, Artificial
  Synthetic oligonucleotide
gtttatataaaaccaagaaaaggggcgattctaaggccacctacctcaatgg

SEQ ID NO: 147852 - DNA, 55 bp, Artificial
  Synthetic oligonucleotide
gtttattgttggtgttctttgcaagttcgttcacatacccagtgactatgtccta

SEQ ID NO: 147853 - DNA, 55 bp, Artificial
  Synthetic oligonucleotide
tcactactatccaattcggaaacatctcttgcaaacgtggtgttaatctcggcat

SEQ ID NO: 147854 - DNA, 55 bp, Artificial
  Synthetic oligonucleotide
tcacatgttgaaaagaacgctagagccttttggaaagagcatccgttctatgcgg

SEQ ID NO: 147855 - DNA, 55 bp, Artificial
  Synthetic oligonucleotide
tcacacggtctccgaatatcggcttcaaggttgcagatacgagtccaggctcacc

SEQ ID NO: 147856 - DNA, 49 bp, Artificial
  Synthetic oligonucleotide
gtttcggatcctgtctgaaaagggttaaaacgtccctaaacggtcgaaa

SEQ ID NO: 147857 - DNA, 55 bp, Artificial
  Synthetic oligonucleotide
gtttgagctcacgtaattcgcaattaatttgttccaggagctcttctgttttgcg

SEQ ID NO: 147858 - DNA, 55 bp, Artificial
  Synthetic oligonucleotide
gtttgctagtgcggacgcggttttgtacctatggattggtgcaagttttgcagcg

SEQ ID NO: 147859 - DNA, 60 bp, Artificial
  Synthetic oligonucleotide
gtcacatgcgattaaggatgaactcatgattggtatgagtttaatcaatttgggtaactg

SEQ ID NO: 147860 - DNA, 56 bp, Artificial
  Synthetic oligonucleotide
agtctagcaaagcgacgaaatggtgtcaattagagtaaccctatacgtattttgac

SEQ ID NO: 147861 - DNA, 55 bp, Artificial
  Synthetic oligonucleotide
tcaagacgcaggaattccactattgcaaagtcaaatcacaacatacaatgaggcg

SEQ ID NO: 147862 - DNA, 55 bp, Artificial
  Synthetic oligonucleotide
gttttggtatgaaaaaagttgtgattttgttgtgctattcgagttaatcgaatgg

SEQ ID NO: 147863 - DNA, 52 bp, Artificial
  Synthetic oligonucleotide
tcaaataccgtttggcccttttattagccttggggcgatttgttacttgttg

SEQ ID NO: 147864 - DNA, 53 bp, Artificial
  Synthetic oligonucleotide
taaaaggtggggaattcgaaattagggtgaatcaacaaccttttacgtgcata

SEQ ID NO: 147865 - DNA, 55 bp, Artificial
  Synthetic oligonucleotide
tatttgtcatcggagctatggcagttattggcgcgttggacagcggaattagggg

SEQ ID NO: 147866 - DNA, 55 bp, Artificial
  Synthetic oligonucleotide
tagtagcgactcaaacacctaaagagcacagcggtaaagcattaggtacgttgtc

SEQ ID NO: 147867 - DNA, 55 bp, Artificial
  Synthetic oligonucleotide
tactattactggtttagttgctttatttatatataacaaggttacaggagagtga

SEQ ID NO: 147868 - DNA, 55 bp, Artificial
  Synthetic oligonucleotide
tactcacatgggaagtagtgactggcttactctcaaccggattcgattgtaatgg

SEQ ID NO: 147869 - DNA, 55 bp, Artificial
  Synthetic oligonucleotide
tactcggacaacgggaaaatttatcggtccgaggtgctgcagtatgcgtgcgccg

SEQ ID NO: 147870 - DNA, 55 bp, Artificial
  Synthetic oligonucleotide
tactgctaaaccgcctgacaatccgggaggaagtgtgaaatatcctatcccatag

SEQ ID NO: 147871 - DNA, 55 bp, Artificial
  Synthetic oligonucleotide
taaggcttctaaccgcaaggactgcggggttagcctaataaattagagttcgata

SEQ ID NO: 147872 - DNA, 55 bp, Artificial
  Synthetic oligonucleotide
taggtcaatggctgtcgctagagtcgaaggcagcagagagtgaagattcatatga

SEQ ID NO: 147873 - DNA, 55 bp, Artificial
  Synthetic oligonucleotide
tacttgcaggaatggacggggattaccaatctattcggatggagaaaacccgctg

SEQ ID NO: 147874 - DNA, 55 bp, Artificial
  Synthetic oligonucleotide
tagaagaatcgaacacgttggacttatggttgcaaacctagaaacatctatcgca

SEQ ID NO: 147875 - DNA, 55 bp, Artificial
  Synthetic oligonucleotide
tagacattcctgtaggtaaattacgccttcgtatgaaaggcagtgcgggtggaca

SEQ ID NO: 147876 - DNA, 55 bp, Artificial
  Synthetic oligonucleotide
tagacgatgtgtgaacatatcagatccgttaggacagacacatcttactgcttta

SEQ ID NO: 147877 - DNA, 52 bp, Artificial
  Synthetic oligonucleotide
tagaggtccccaagggaatctaggagaaaacgggataacaggtcctcaaggg

SEQ ID NO: 147878 - DNA, 55 bp, Artificial
  Synthetic oligonucleotide
tagatggtgtatatcgcgtcgctggtgataactacgacatgggtgtgcaaggtgc

SEQ ID NO: 147879 - DNA, 55 bp, Artificial
  Synthetic oligonucleotide
tagattatggtgccatgtaccatcaggtctataatgacgaagtgctcacgaggga

SEQ ID NO: 147880 - DNA, 55 bp, Artificial
  Synthetic oligonucleotide
tagcaatgctatctactatcgctttcacaatgattacgtttctatatgggttcgg

SEQ ID NO: 147881 - DNA, 55 bp, Artificial
  Synthetic oligonucleotide
taggcgcacaaaatcttgagatgcgtaacataatccaccatgacgtttacgaata

SEQ ID NO: 147882 - DNA, 60 bp, Artificial
  Synthetic oligonucleotide
agtcgctagggaatgaatcggaatggagcaattatgcttgcttaggctacgcaatcaaag

SEQ ID NO: 147883 - DNA, 55 bp, Artificial
  Synthetic oligonucleotide
taggaccatccgcgggtgttcccgataatcgccaataggacgccgataaaagcgg

SEQ ID NO: 147884 - DNA, 55 bp, Artificial
  Synthetic oligonucleotide
taggaatcttccacttcaaacagtccgcaaggacgttaagtggtgagtagttcag

SEQ ID NO: 147885 - DNA, 55 bp, Artificial
  Synthetic oligonucleotide
taatacttctccgactgtgttatcgagatttatcggtttaaacgctacatagccg

SEQ ID NO: 147886 - DNA, 55 bp, Artificial
  Synthetic oligonucleotide
taatcgtagatcatcaggcgatgtatatttcacccatgttgtgaggatcacacgc

SEQ ID NO: 147887 - DNA, 55 bp, Artificial
  Synthetic oligonucleotide
tatcggttcatactttgcggtctatgacagcaaccttgtcattgccccaaatacg

SEQ ID NO: 147888 - DNA, 55 bp, Artificial
  Synthetic oligonucleotide
taattactagtcgtagcttgatagtcgtggtagatacgcataagccttccatggt

SEQ ID NO: 147889 - DNA, 55 bp, Artificial
  Synthetic oligonucleotide
tatcgatctttagctgcactaagaccaaatataaagagtaagactgatgcaccga

SEQ ID NO: 147890 - DNA, 55 bp, Artificial
  Synthetic oligonucleotide
tatcgacagtaggatgctcgttatgaaaggcagcgataagacgaacttttgcacc

SEQ ID NO: 147891 - DNA, 55 bp, Artificial
  Synthetic oligonucleotide
tatccgttgtggcattatgcggtgggctgtttattatggtcggtagccaggaacg

SEQ ID NO: 147892 - DNA, 53 bp, Artificial
  Synthetic oligonucleotide
tatccgaaaacagggccgattaccgtattgacaccatttcggtaaatggggcc

SEQ ID NO: 147893 - DNA, 57 bp, Artificial
  Synthetic oligonucleotide
taagggagatgtataaatgaacattggtagacagatacaatattttcgtaaacggga

SEQ ID NO: 147894 - DNA, 54 bp, Artificial
  Synthetic oligonucleotide
taccgaaacgccggttactcgcttacaagaagtgactgtcccgctctcccgtcc

SEQ ID NO: 147895 - DNA, 55 bp, Artificial
  Synthetic oligonucleotide
taccgcttcgcgatccgtttgttattagttacggttcttattctgatatgccttc

SEQ ID NO: 147896 - DNA, 55 bp, Artificial
  Synthetic oligonucleotide
taccgttggaacagttccgtagagaactccccatctcttgtccgtggaacgcgca

SEQ ID NO: 147897 - DNA, 55 bp, Artificial
  Synthetic oligonucleotide
tatacctgatggtgtaacaggagcatgtatttcgttccaaaatacagcaacaggc

SEQ ID NO: 147898 - DNA, 55 bp, Artificial
  Synthetic oligonucleotide
tataaacaactgcataatggagtaaatccatccgtatcagtagtacgggaactat

SEQ ID NO: 147899 - DNA, 55 bp, Artificial
  Synthetic oligonucleotide
tataaaaatggcgttccattgcatatcctgtcggaattactaaaccactcgtctg

SEQ ID NO: 147900 - DNA, 55 bp, Artificial
  Synthetic oligonucleotide
tacgcaaactgtttcgtacgttcatccttcacgtaatacccactttcaggatctg

SEQ ID NO: 147901 - DNA, 50 bp, Artificial
  Synthetic oligonucleotide
tacgtttacaggtccaatgggaaacggtaaaacattgggaatggttttgt

SEQ ID NO: 147902 - DNA, 55 bp, Artificial
  Synthetic oligonucleotide
tactacaccgtgtgcaataactgttggacgtttaaacaatccgcaacttgctaca

SEQ ID NO: 147903 - DNA, 55 bp, Artificial
  Synthetic oligonucleotide
gtgctgttcacctacttgcatttggccgccgacccagagttgacgcgcgtgttaa

SEQ ID NO: 147904 - DNA, 56 bp, Artificial
  Synthetic oligonucleotide
taaggttcctgtacgtgtaggagagtttgcatcagtaactagtttaggtcctgcgg

SEQ ID NO: 147905 - DNA, 55 bp, Artificial
  Synthetic oligonucleotide
gtgctttagttgatgggataacaaattggttcctggggatatggccgattgtggc

SEQ ID NO: 147906 - DNA, 55 bp, Artificial
  Synthetic oligonucleotide
gtggaacgaggattcctcctgctatgcgcatacagaataaagtaacgataccgat

SEQ ID NO: 147907 - DNA, 55 bp, Artificial
  Synthetic oligonucleotide
gtggaagaagatattgtgaccaatcgggaagcaaaacttatgctgagcgtattag

SEQ ID NO: 147908 - DNA, 55 bp, Artificial
  Synthetic oligonucleotide
gtggaagatagtcggatatgcatcctcttgtgctactgtttgttgtggacggtat

SEQ ID NO: 147909 - DNA, 55 bp, Artificial
  Synthetic oligonucleotide
gtggaagccggaagaaggaacagccgagattggctatgccctttctcctgagtac

SEQ ID NO: 147910 - DNA, 55 bp, Artificial
  Synthetic oligonucleotide
gtggataatgctatggtagccagtgactttgttatagtagtacaagagactcaac

SEQ ID NO: 147911 - DNA, 55 bp, Artificial
  Synthetic oligonucleotide
gtggcgtatatgtgaaaccgatagacgctacccctggtacatgatattctccacg

SEQ ID NO: 147912 - DNA, 55 bp, Artificial
  Synthetic oligonucleotide
tcctcatcacacaccatatcggtaagtaaaacgtacgccgatgctccaactggag

SEQ ID NO: 147913 - DNA, 55 bp, Artificial
  Synthetic oligonucleotide
gtggggtctcaccgatgccttccctcccgcaggagtctacgcatattaccggtgc

SEQ ID NO: 147914 - DNA, 54 bp, Artificial
  Synthetic oligonucleotide
gtggtacgtttacgggctaatcataccatctcagacccaactccccttccgtag

SEQ ID NO: 147915 - DNA, 55 bp, Artificial
  Synthetic oligonucleotide
taaaataaccagctacaccagtaaaagatagtaaattcatccttttccacggcac

SEQ ID NO: 147916 - DNA, 55 bp, Artificial
  Synthetic oligonucleotide
tccgtacgtaccaagacgccaaatgtactcaagtggcccgtattgataacgtgaa

SEQ ID NO: 147917 - DNA, 52 bp, Artificial
  Synthetic oligonucleotide
tccgggcctggaaaggggatcgtatgggaaatctcgtataccggaaaacggc

SEQ ID NO: 147918 - DNA, 55 bp, Artificial
  Synthetic oligonucleotide
gtggttgggacgaccgtaatcgagtcattacgaatcacttggtgtacttttatcg

SEQ ID NO: 147919 - DNA, 55 bp, Artificial
  Synthetic oligonucleotide
gtgtaattgattcatacgttttcggccaatcatactatgtgctgctcttggccaa

SEQ ID NO: 147920 - DNA, 55 bp, Artificial
  Synthetic oligonucleotide
tccgcccttatgacgcatgaatataatcacgtctgccggttagagcatgtgacaa

SEQ ID NO: 147921 - DNA, 55 bp, Artificial
  Synthetic oligonucleotide
gtgtactgaagtggaggctcaatggcgtggtgttctgacatctaacggtgcccag

SEQ ID NO: 147922 - DNA, 55 bp, Artificial
  Synthetic oligonucleotide
gtgaagcgcgccttgttttactatgaccgctataaaacgatctataaggatgaat

SEQ ID NO: 147923 - DNA, 52 bp, Artificial
  Synthetic oligonucleotide
gtgaagtaaactggggattaagtagaacttgtgtagttaacgttcccaacga

SEQ ID NO: 147924 - DNA, 55 bp, Artificial
  Synthetic oligonucleotide
tcgacagaaggtgcacggccttacatagcgatagggaacaaaacccactcatggc

SEQ ID NO: 147925 - DNA, 55 bp, Artificial
  Synthetic oligonucleotide
gtgaccgccattttattacggaaccacgtgaactgacgcttcgcatatctacggg

SEQ ID NO: 147926 - DNA, 54 bp, Artificial
  Synthetic oligonucleotide
taaaatagtttgtaaggtaaacgcaattcaaacaaacggaagacaggcagcgga

SEQ ID NO: 147927 - DNA, 55 bp, Artificial
  Synthetic oligonucleotide
tcgaagcattctatcattccatggttcgtatcacggtgcgacacatgccacgatg

SEQ ID NO: 147928 - DNA, 55 bp, Artificial
  Synthetic oligonucleotide
gtgagacacagcagaaacctgcggaacagccgaaagacgggaatcctcagcagcc

SEQ ID NO: 147929 - DNA, 55 bp, Artificial
  Synthetic oligonucleotide
gtgagctattaccatgaagcgcaggcgagacaagtttcagattggttagtcggac

SEQ ID NO: 147930 - DNA, 55 bp, Artificial
  Synthetic oligonucleotide
gtgattgtggcatggcaaaagttgacccgaaaattattcataagagcacagccct

SEQ ID NO: 147931 - DNA, 55 bp, Artificial
  Synthetic oligonucleotide
gtgcaaggatattcccaaaggtacacttcgctcaatctataagcaagcgtgttgg

SEQ ID NO: 147932 - DNA, 55 bp, Artificial
  Synthetic oligonucleotide
gtgcagcctggtttgatcacacaggaactcattcgccaagtagaggcgaaaggcc

SEQ ID NO: 147933 - DNA, 55 bp, Artificial
  Synthetic oligonucleotide
gtgccagctggtgtacaacaggaagtaagagagacacgcgcaacaccaaaaccgg

SEQ ID NO: 147934 - DNA, 55 bp, Artificial
  Synthetic oligonucleotide
gtgccatagaatgaacaacaatgaactttacgtcagtcttgacatcggtacgtcc

SEQ ID NO: 147935 - DNA, 55 bp, Artificial
  Synthetic oligonucleotide
gtgcccgcaaacatggtgctcttatcgttgtggaacgaaacgagacgcttgaatc

SEQ ID NO: 147936 - DNA, 55 bp, Artificial
  Synthetic oligonucleotide
gtgccgaccaaaggggatcgtccaaattacatccatgcgcctccaattctgtagc

SEQ ID NO: 147937 - DNA, 55 bp, Artificial
  Synthetic oligonucleotide
atacaggagctgttatgggtaattcattttatgggtttggtgtaggataatttta

SEQ ID NO: 147938 - DNA, 55 bp, Artificial
  Synthetic oligonucleotide
gtgcctccgcttgtgaatatgagctcttcagggttcgcaccgattaggtctgcca

SEQ ID NO: 147939 - DNA, 55 bp, Artificial
  Synthetic oligonucleotide
gtgcgtattcttcgggaatgctttcgtcctctatttctacgtgtccatatgcgag

SEQ ID NO: 147940 - DNA, 55 bp, Artificial
  Synthetic oligonucleotide
tccttagaacatcatacatgaagaatagtaggaattggggttcctatcctcttag

SEQ ID NO: 147941 - DNA, 55 bp, Artificial
  Synthetic oligonucleotide
tccaaaacggctccgtcgtttagccaaagatatcgtatcacattttaaccaagtc

SEQ ID NO: 147942 - DNA, 55 bp, Artificial
  Synthetic oligonucleotide
tcatgaacaagcgattctacatccaaatataaacgacgcttcgttaattgctccg

SEQ ID NO: 147943 - DNA, 55 bp, Artificial
  Synthetic oligonucleotide
tcagtagatggaggcgctaatcgaatctacttgaatgaacccgatcctagtggag

SEQ ID NO: 147944 - DNA, 55 bp, Artificial
  Synthetic oligonucleotide
gttcaccaccgtcaaagcttggggtgatggctattagttttagcatggacgtggg

SEQ ID NO: 147945 - DNA, 55 bp, Artificial
  Synthetic oligonucleotide
gttcacgttgagtttcggcgcgatgccattcaatcttaatccgttcttcagcttg

SEQ ID NO: 147946 - DNA, 55 bp, Artificial
  Synthetic oligonucleotide
gttcattcaatccgaagggtatgaatcatctactgatccaaacaaagattttgcc

SEQ ID NO: 147947 - DNA, 55 bp, Artificial
  Synthetic oligonucleotide
gttcctgactatgagctgggtaccattaaattcgattgctactcctatctttagc

SEQ ID NO: 147948 - DNA, 54 bp, Artificial
  Synthetic oligonucleotide
taaacgaacattattggtacttttactgtcataccaaggttgctggtcttaacg

SEQ ID NO: 147949 - DNA, 55 bp, Artificial
  Synthetic oligonucleotide
tcaggacgctttgctacttgttcctcaaatctgtcgcaaataagaccctgtgggg

SEQ ID NO: 147950 - DNA, 55 bp, Artificial
  Synthetic oligonucleotide
gttcggggatttagaagtgattggatcgcaagatagtttgattccgatccgccac

SEQ ID NO: 147951 - DNA, 55 bp, Artificial
  Synthetic oligonucleotide
gttctacttgcttaacgtctcttcaacggcacgatgtatgtatacgtgatttagg

SEQ ID NO: 147952 - DNA, 55 bp, Artificial
  Synthetic oligonucleotide
gttctttcgtttcacatataggccctccaggatatcagctaccgcaatggaagcc

SEQ ID NO: 147953 - DNA, 55 bp, Artificial
  Synthetic oligonucleotide
gttgcaccacgtacagcatccgatccaaataacgtctaaagccatactacgttgc

SEQ ID NO: 147954 - DNA, 55 bp, Artificial
  Synthetic oligonucleotide
gttgcagtgctttctaaacgatcacggacttgcgcgtttgtccaagtcgggtgct

SEQ ID NO: 147955 - DNA, 55 bp, Artificial
  Synthetic oligonucleotide
gttgcggcgactcatcctattttagtgactaccacgcgttattaaaggtttactc

SEQ ID NO: 147956 - DNA, 55 bp, Artificial
  Synthetic oligonucleotide
gttgcgtggatctacatctaagtagtcacctaacatgtaacggaaacgagcagag

SEQ ID NO: 147957 - DNA, 55 bp, Artificial
  Synthetic oligonucleotide
tcagattaccgaccaagcgcttccgatgggatatgtcctgaccgaagcatcctgc

SEQ ID NO: 147958 - DNA, 55 bp, Artificial
  Synthetic oligonucleotide
tcagacaggatatatgagctattaccgcagtttgacagactcccattcgaacgca

SEQ ID NO: 147959 - DNA, 54 bp, Artificial
  Synthetic oligonucleotide
atacaagtagggggcgaacagtttagctaacgggatcgagtcccacgggtgcga

SEQ ID NO: 147960 - DNA, 55 bp, Artificial
  Synthetic oligonucleotide
gtgtagaagatcacgggttacattatcgttctgccactgtacagattcatcccga

SEQ ID NO: 147961 - DNA, 55 bp, Artificial
  Synthetic oligonucleotide
gtgtagatcaattggacgtgaaccgatagcacatccgccaggcatcgcaacgttc

SEQ ID NO: 147962 - DNA, 52 bp, Artificial
  Synthetic oligonucleotide
gtgtagttaaaatactacggacagtagaacttttccccatgcccgtttgtcc

SEQ ID NO: 147963 - DNA, 55 bp, Artificial
  Synthetic oligonucleotide
gtgtatcgtttgcgatgcgaacctatggaataaacgtttgtaattcggatggaac

SEQ ID NO: 147964 - DNA, 55 bp, Artificial
  Synthetic oligonucleotide
gtgtcattgccgtttcgcctcctgttctctgatcggctgtagctgttgccttaaa

SEQ ID NO: 147965 - DNA, 55 bp, Artificial
  Synthetic oligonucleotide
tccgataataggtgcgagaacacctgaaagtgcctgaacgccattgacaatgccg

SEQ ID NO: 147966 - DNA, 55 bp, Artificial
  Synthetic oligonucleotide
gtgtgcaattcatggtattctacgcatcaagctggattatgctacagctgttcgg

SEQ ID NO: 147967 - DNA, 55 bp, Artificial
  Synthetic oligonucleotide
gtgtgggaggagatttactagctcctgctcaaaatggggattatgctaaagtctc

SEQ ID NO: 147968 - DNA, 55 bp, Artificial
  Synthetic oligonucleotide
gtgtgtatacgattgcagggcagctgttacaatctgcactctgcggaattgcttg

SEQ ID NO: 147969 - DNA, 55 bp, Artificial
  Synthetic oligonucleotide
gtgttgatctacaaaacggctacgaggatgtacggaatatttgaccttgtcattt

SEQ ID NO: 147970 - DNA, 60 bp, Artificial
  Synthetic oligonucleotide
gtcactcctgacttaatcgcggtgctagacagcgaaacagggctcccgatcacaacggaa

SEQ ID NO: 147971 - DNA, 60 bp, Artificial
  Synthetic oligonucleotide
ataatgcagtggctttgtggaagatagtcggatatgcatcctcttgtgctactgtttgtt

SEQ ID NO: 147972 - DNA, 55 bp, Artificial
  Synthetic oligonucleotide
tccatccgtgcacttgccgttccataaacccatccggctttaccatctgaacgag

SEQ ID NO: 147973 - DNA, 55 bp, Artificial
  Synthetic oligonucleotide
gtgtttaatgtagcacgacaggttgccaacttgttagtacggattcaactcccgt

SEQ ID NO: 147974 - DNA, 55 bp, Artificial
  Synthetic oligonucleotide
gttaactatgaacgctcagatgcctattatggaggcgatttacagggaatagcac

SEQ ID NO: 147975 - DNA, 55 bp, Artificial
  Synthetic oligonucleotide
gttaagaggatgctgagcctgtgccttcatcgtttccgtaatccctagctccaac

SEQ ID NO: 147976 - DNA, 55 bp, Artificial
  Synthetic oligonucleotide
gttaccgatgactttcggacaccatcttactcggattacaggactggaccgggta

SEQ ID NO: 147977 - DNA, 55 bp, Artificial
  Synthetic oligonucleotide
gttagacggtgttcagtctattggtgttgtgacaccttacagggcgcagtcacgc

SEQ ID NO: 147978 - DNA, 55 bp, Artificial
  Synthetic oligonucleotide
gcggtcttcctcaagttacgatacctgcaggagaactagacggtttgccaatcgg

SEQ ID NO: 147979 - DNA, 55 bp, Artificial
  Synthetic oligonucleotide
gcggtggctacgttaaatcatgcgccagctaacgcgatgtcttcgcaagttatgc

SEQ ID NO: 147980 - DNA, 55 bp, Artificial
  Synthetic oligonucleotide
gcggttcatacgcgcggaaataccgggacatccaaatgccgtgtgatccgatgtc

SEQ ID NO: 147981 - DNA, 55 bp, Artificial
  Synthetic oligonucleotide
tggtacgtatattgtggactctgctccacctttaggtacgccagatacgtccccg

SEQ ID NO: 147982 - DNA, 56 bp, Artificial
  Synthetic oligonucleotide
taaagagaccgaacttaaaaatcgtgacctagctgacgttacattatcaattagaa

SEQ ID NO: 147983 - DNA, 53 bp, Artificial
  Synthetic oligonucleotide
gcggtttgtcagggacgttagcgacgtatggaaaattgttaaaggatcgtttg

SEQ ID NO: 147984 - DNA, 55 bp, Artificial
  Synthetic oligonucleotide
gcgtaacaggaacttctttaccagagggtgttcgatacgtataaccggcatactc

SEQ ID NO: 147985 - DNA, 55 bp, Artificial
  Synthetic oligonucleotide
gcgtacaaagacagtcaggtggaggaagacaagtaagtggtcaacgtgctactga

SEQ ID NO: 147986 - DNA, 55 bp, Artificial
  Synthetic oligonucleotide
gcgtaccggcaagccgtcctttgcgaattagtgattaccttggagtgtttgctta

SEQ ID NO: 147987 - DNA, 55 bp, Artificial
  Synthetic oligonucleotide
gcgtatttaccgtattatgcacaaggatcatctcgtaacgaagattcgccgggcg

SEQ ID NO: 147988 - DNA, 55 bp, Artificial
  Synthetic oligonucleotide
gcgtcgccttgccttcttaagctgtattctatgcggcgctgttggcttaaaacta

SEQ ID NO: 147989 - DNA, 55 bp, Artificial
  Synthetic oligonucleotide
gcgtcggctgtgacaagtcacgtatatccattgtcgctaatccaccacttctcgt

SEQ ID NO: 147990 - DNA, 55 bp, Artificial
  Synthetic oligonucleotide
gcgtctagatgagtaacgttagctacactgaatgattctccatataccgaaacca

SEQ ID NO: 147991 - DNA, 55 bp, Artificial
  Synthetic oligonucleotide
gcgtctgccacgattatctttcttcacaacaaatttctcacgctgtaaaacttcc

SEQ ID NO: 147992 - DNA, 55 bp, Artificial
  Synthetic oligonucleotide
tgggagattaactgtccgtaaatgcccgattggtgagggctgataatcagtgggg

SEQ ID NO: 147993 - DNA, 54 bp, Artificial
  Synthetic oligonucleotide
taaagatagaagctgttttttttggagtacccatgccataaagttgggacgaaa

SEQ ID NO: 147994 - DNA, 55 bp, Artificial
  Synthetic oligonucleotide
gcgtgtagaagctgtatggattccacgttatggcggtaagaagcctgacttccca

SEQ ID NO: 147995 - DNA, 55 bp, Artificial
  Synthetic oligonucleotide
gcgatcgaacaagcgataagggcgaacgtgaaagtaacaggcgtcacgatccatt

SEQ ID NO: 147996 - DNA, 55 bp, Artificial
  Synthetic oligonucleotide
gcgcaggtgttgcactaatgaaagttgtaggaccaatcgtattgctagctttagc

SEQ ID NO: 147997 - DNA, 55 bp, Artificial
  Synthetic oligonucleotide
gcgccaatttgttcctgccttacgtgcagcgttagcattgtgaggtgagaaaacg

SEQ ID NO: 147998 - DNA, 55 bp, Artificial
  Synthetic oligonucleotide
gcgccccgtacaacccgatgcaaaataacataagcgcaaatacgagataggcgga

SEQ ID NO: 147999 - DNA, 55 bp, Artificial
  Synthetic oligonucleotide
gcgcctctttgtcaggagttccatccccctcccattctgaacgagccgcctccgc

SEQ ID NO: 148000 - DNA, 55 bp, Artificial
  Synthetic oligonucleotide
tggtgaaagaagctcgtccctcccttgtacttggattaacaattgcaacgattgg

SEQ ID NO: 148001 - DNA, 55 bp, Artificial
  Synthetic oligonucleotide
gcgctcttgcgatttctcgtctctctgcttttcgaatgctcacttctagtttcga

SEQ ID NO: 148002 - DNA, 55 bp, Artificial
  Synthetic oligonucleotide
gcgcttcgcaaatccggccgtctgataaataggcccggacaatcgtgaaacggcc

SEQ ID NO: 148003 - DNA, 55 bp, Artificial
  Synthetic oligonucleotide
gcggaacacttcgaggtagcagggctgactagcaaagcggaacgcatgcgagagt

SEQ ID NO: 148004 - DNA, 57 bp, Artificial
  Synthetic oligonucleotide
ataagtggcgaacgttcgctttatattattcgtggcgtatgtatgaagatttccgga

SEQ ID NO: 148005 - DNA, 55 bp, Artificial
  Synthetic oligonucleotide
gcggaacgtcatgagaatggaaaagaagtgattcgtgcaaaaggtattcctcgtg

SEQ ID NO: 148006 - DNA, 55 bp, Artificial
  Synthetic oligonucleotide
tggtcctccttatggtatcgtaatcaattgatcactcaggcgaactgtcgcttct

SEQ ID NO: 148007 - DNA, 55 bp, Artificial
  Synthetic oligonucleotide
gcggcaaccgtcactgtactaccgcctttacgaccaacatttgtaatgtacggga

SEQ ID NO: 148008 - DNA, 55 bp, Artificial
  Synthetic oligonucleotide
gcggcacaggagcagacggtacgacggattcaacttccggcggcacaggaacaga

SEQ ID NO: 148009 - DNA, 53 bp, Artificial
  Synthetic oligonucleotide
gcggcgattctatacggacgaacgcttcccctttaggcgccttaataaatttc

SEQ ID NO: 148010 - DNA, 55 bp, Artificial
  Synthetic oligonucleotide
tggtcattagagagctcgtagtgtttcatggatcgtaattgttcgatggcttgaa

SEQ ID NO: 148011 - DNA, 51 bp, Artificial
  Synthetic oligonucleotide
gcggctgcggctaacgaaaggttaggaacgttaagtaaggaaaagtcctta

SEQ ID NO: 148012 - DNA, 55 bp, Artificial
  Synthetic oligonucleotide
gcgggaatgctgtcagaacacttcaccgcaagcacaccatatacagtaggcggaa

SEQ ID NO: 148013 - DNA, 55 bp, Artificial
  Synthetic oligonucleotide
gctcagttgagtaagcgaggggcatagcgcctctaactaccctaagaactgtaca

SEQ ID NO: 148014 - DNA, 55 bp, Artificial
  Synthetic oligonucleotide
gctcatcgttgcttatcccgatttcctaccgtcagattcgtacttctcggtaccc

SEQ ID NO: 148015 - DNA, 58 bp, Artificial
  Synthetic oligonucleotide
ataaatcatcataatttcccgaaataacaaagtggcattgtatctggcggactttgta

SEQ ID NO: 148016 - DNA, 55 bp, Artificial
  Synthetic oligonucleotide
gctcattcgtttaggtggacctaactttcatgaaatcccaattaaccgacctgtc

SEQ ID NO: 148017 - DNA, 54 bp, Artificial
  Synthetic oligonucleotide
gctccacgtgcggttttccaattagtaaataggcttaacggggctgttggctcc

SEQ ID NO: 148018 - DNA, 55 bp, Artificial
  Synthetic oligonucleotide
gctcccgactggcataaaagactggtcgtcgaggacctttaaaagcgatacttgc

SEQ ID NO: 148019 - DNA, 55 bp, Artificial
  Synthetic oligonucleotide
tggagtgtagcgcaactccggatctctcgttaacctgccgaccaaaatgacgcgg

SEQ ID NO: 148020 - DNA, 55 bp, Artificial
  Synthetic oligonucleotide
gctctcgttggtaaggcgatggagcccgttcgtgtcgcgttgacagggatgatcg

SEQ ID NO: 148021 - DNA, 55 bp, Artificial
  Synthetic oligonucleotide
gctgacggacgaatacggtgagcggatctggtttcagccaaacgaagtgagcgtg

SEQ ID NO: 148022 - DNA, 55 bp, Artificial
  Synthetic oligonucleotide
gctgagctccggcggacaatcttcaagtgtcgctctgatcgcttcaagaatatgc

SEQ ID NO: 148023 - DNA, 55 bp, Artificial
  Synthetic oligonucleotide
gctgagtttgcggctttcctctcaaggattataccaggggagagcaccaagcagc

SEQ ID NO: 148024 - DNA, 55 bp, Artificial
  Synthetic oligonucleotide
gctgataatgttgcacgttcttcagcgttaagaggaatcattggtaaacgaacgg

SEQ ID NO: 148025 - DNA, 55 bp, Artificial
  Synthetic oligonucleotide
gctgattagtcgtgtagagcagctacgaaatgcccatagagaacagtggtttcgc

SEQ ID NO: 148026 - DNA, 55 bp, Artificial
  Synthetic oligonucleotide
ataaagtgccgaaatgggactttaatgttgaccaatcacatatggggactatttt

SEQ ID NO: 148027 - DNA, 55 bp, Artificial
  Synthetic oligonucleotide
gctgatttacgcttttctgtaagtgtacctctaacatagtgcggctttgctgaat

SEQ ID NO: 148028 - DNA, 55 bp, Artificial
  Synthetic oligonucleotide
gctgcgatcactgctccgtcagaggcggccacaagacgaatccctgtgacagcaa

SEQ ID NO: 148029 - DNA, 55 bp, Artificial
  Synthetic oligonucleotide
gctggatgatcgggttttcgccccagcttgtatcaggcgtttgggtcggatacga

SEQ ID NO: 148030 - DNA, 55 bp, Artificial
  Synthetic oligonucleotide
gctgggcctcgatcccatgaaatgttatctcgctgtggtaggcgatactgaacga

SEQ ID NO: 148031 - DNA, 55 bp, Artificial
  Synthetic oligonucleotide
gctgtctaaaagcttgcttcgcgtcattatcggaacagcactgttaagccatggc

SEQ ID NO: 148032 - DNA, 55 bp, Artificial
  Synthetic oligonucleotide
gcgttaaatacgtactctgcctacagaacgtacacgctgagaatcatccactgtg

SEQ ID NO: 148033 - DNA, 55 bp, Artificial
  Synthetic oligonucleotide
gcgttagcctccccttttggatcacccatcggatcaagggctgtgcaaggacaat

SEQ ID NO: 148034 - DNA, 55 bp, Artificial
  Synthetic oligonucleotide
gcgttccgccttctgtgcctactaatgcatgaaacggaaagacgtaaatcatgcc

SEQ ID NO: 148035 - DNA, 55 bp, Artificial
  Synthetic oligonucleotide
gctaaacgattcgagacagatctaaactctgcgattcctggtgatattcgtgaca

SEQ ID NO: 148036 - DNA, 55 bp, Artificial
  Synthetic oligonucleotide
gctaagaggggttggcttaaaagtagggtagacctccgctatatgccgttcaagc

SEQ ID NO: 148037 - DNA, 60 bp, Artificial
  Synthetic oligonucleotide
ataaacgctataacctgccaaatctttgtcactcactctatcccaagacgcaatcaaagc

SEQ ID NO: 148038 - DNA, 55 bp, Artificial
  Synthetic oligonucleotide
gctacaaatcgtccgtttcctgatttatacggtcgagaatgtattggggcgttag

SEQ ID NO: 148039 - DNA, 55 bp, Artificial
  Synthetic oligonucleotide
gctactagagaagagataccgaacaaagtcgtcactgtaattggtatcacgtggt

SEQ ID NO: 148040 - DNA, 55 bp, Artificial
  Synthetic oligonucleotide
tggcctaggtattgtaagaggtaagggtgacaatcaatacgaccctaaaggaaca

SEQ ID NO: 148041 - DNA, 55 bp, Artificial
  Synthetic oligonucleotide
gctagccgtttggacttgtatggtaacataagagaagggtaaaactagcaggagc

SEQ ID NO: 148042 - DNA, 55 bp, Artificial
  Synthetic oligonucleotide
tggcccaagtgttgcaatcactgaaggtgcggtgaagggactgccctttaatttg

SEQ ID NO: 148043 - DNA, 55 bp, Artificial
  Synthetic oligonucleotide
gctagcgatttctctaataacaagtttgaaccgaataaaccaatgactcgtggcg

SEQ ID NO: 148044 - DNA, 55 bp, Artificial
  Synthetic oligonucleotide
gctagctcgttcgtgacgtactaaagcacctgtgtagacgacgatataactgtaa

SEQ ID NO: 148045 - DNA, 55 bp, Artificial
  Synthetic oligonucleotide
gctaggcatcccgcaaatgattcaaagccgtgcccaattcggcgtaatcggagcg

SEQ ID NO: 148046 - DNA, 55 bp, Artificial
  Synthetic oligonucleotide
gctaggtgccgatccaaatcgttatcgtcactcagcagaaagccttatgcgtcga

SEQ ID NO: 148047 - DNA, 55 bp, Artificial
  Synthetic oligonucleotide
gctatcggattgcggtattgccgggagatggaatcggaaacgaagtgacaagggg

SEQ ID NO: 148048 - DNA, 60 bp, Artificial
  Synthetic oligonucleotide
ataaacagtaagtgtcaatggtaagcggactggaatggatcagcggtttatgctgatcca

SEQ ID NO: 148049 - DNA, 55 bp, Artificial
  Synthetic oligonucleotide
gctcaatccataagacaggcagagtacataagatcagaataaccgccaagcccca

SEQ ID NO: 148050 - DNA, 55 bp, Artificial
  Synthetic oligonucleotide
gctcaattgggtaccaattgtagagcttgccttattccgactgtttggtgtatta

SEQ ID NO: 148051 - DNA, 55 bp, Artificial
  Synthetic oligonucleotide
gcccatatttgtgaagtttgcgggaaccactgtttacatcacccagacgaagttt

SEQ ID NO: 148052 - DNA, 55 bp, Artificial
  Synthetic oligonucleotide
tgtagtttttccgtaccgtctagggttatccagctctcatcaacgctgtacgtga

SEQ ID NO: 148053 - DNA, 55 bp, Artificial
  Synthetic oligonucleotide
gcccatgttcaacgtaatgatcgttgtcaatgtccccgcagggtctaaaaggctc

SEQ ID NO: 148054 - DNA, 55 bp, Artificial
  Synthetic oligonucleotide
gcccattagcaggcatcgcacgctccaaattaaccggatcccctattgtcagctg

SEQ ID NO: 148055 - DNA, 55 bp, Artificial
  Synthetic oligonucleotide
gccccatttgagtaatgccgtttaaagccatcgttccacagtatagaattgtttc

SEQ ID NO: 148056 - DNA, 55 bp, Artificial
  Synthetic oligonucleotide
gcccctacaagcggccgctatgttcaacgttccatctcctcgtaccgttaggaag

SEQ ID NO: 148057 - DNA, 55 bp, Artificial
  Synthetic oligonucleotide
gcccgcaagtagcgagaggattttgtcgttcattgtcggtaagtcgatatatttc

SEQ ID NO: 148058 - DNA, 55 bp, Artificial
  Synthetic oligonucleotide
gcccgcctctgttaacatgtctgttagctctctgtctaactgtcccgaaacttgc

SEQ ID NO: 148059 - DNA, 57 bp, Artificial
  Synthetic oligonucleotide
agttttactcatccacagtagcgacactaattgtgtcagtaagcctttcgacttact

SEQ ID NO: 148060 - DNA, 55 bp, Artificial
  Synthetic oligonucleotide
gcccgcggtcatagtaaatctgggcccgataaagtaaaccatctaggtcatccgg

SEQ ID NO: 148061 - DNA, 55 bp, Artificial
  Synthetic oligonucleotide
gcccggcagtctgtcaggcatgcttccgaagtcacttgctccctgcacgttgtta

SEQ ID NO: 148062 - DNA, 55 bp, Artificial
  Synthetic oligonucleotide
gcccggctatcactcgctcacctatcctaagcacctatgcttttgggcacttccc

SEQ ID NO: 148063 - DNA, 55 bp, Artificial
  Synthetic oligonucleotide
gcccgtaacagttgctcacatgcaacaaacgatgattgaaggatacaaccttctc

SEQ ID NO: 148064 - DNA, 55 bp, Artificial
  Synthetic oligonucleotide
gcccttcagctgtcttaaactctttacagcgtgtagtttgtaagatagtgcctcc

SEQ ID NO: 148065 - DNA, 54 bp, Artificial
  Synthetic oligonucleotide
gccgaagcgacttttaagggtagagaggaaggtaaatcctatttatatggtaca

SEQ ID NO: 148066 - DNA, 55 bp, Artificial
  Synthetic oligonucleotide
gccgacatcataacactgtatacaattggttcaatatcctagaggaaaaggggtt

SEQ ID NO: 148067 - DNA, 55 bp, Artificial
  Synthetic oligonucleotide
gccgatcaatctacatgtttagtggggacgccgaatatcgataaacgcagttttc

SEQ ID NO: 148068 - DNA, 55 bp, Artificial
  Synthetic oligonucleotide
gccgattgaacggcttgctcgcagcggttgatacaattttcgactgcttcccgtg

SEQ ID NO: 148069 - DNA, 55 bp, Artificial
  Synthetic oligonucleotide
gcattgactgaacctccaaaagccgcccacatgccttcatctatattaatcgtct

SEQ ID NO: 148070 - DNA, 60 bp, Artificial
  Synthetic oligonucleotide
taacagggcattgcgatatggtactcggctattggtcatatgtactgacggcttggtata

SEQ ID NO: 148071 - DNA, 55 bp, Artificial
  Synthetic oligonucleotide
gcattggactcgttgtgaattacaacttgttgatgatgcggcaacaaattttgtt

SEQ ID NO: 148072 - DNA, 55 bp, Artificial
  Synthetic oligonucleotide
gccaaaatacgtagtgcggtattgggcatatagaaactaggtcgggattagtctc

SEQ ID NO: 148073 - DNA, 55 bp, Artificial
  Synthetic oligonucleotide
gccaacattaatcaccgctgggtgtggaatgaacaaccaaggcgatgagcgtaga

SEQ ID NO: 148074 - DNA, 55 bp, Artificial
  Synthetic oligonucleotide
gccaatgacacgcgagaaggtagtgggaacgaaataaagtgtgtcatagaagtgc

SEQ ID NO: 148075 - DNA, 55 bp, Artificial
  Synthetic oligonucleotide
gccacagccgtttcgatatgtcgttgtacgaagcgttttagtggtcttgccccga

SEQ ID NO: 148076 - DNA, 55 bp, Artificial
  Synthetic oligonucleotide
gccacgcggacaatattttgcatgctctacgaagtggactttatgcatcaattgg

SEQ ID NO: 148077 - DNA, 55 bp, Artificial
  Synthetic oligonucleotide
tgtatatcgatagctagcatcgcatcgtttgtagctgcaacgcgactgattaagg

SEQ ID NO: 148078 - DNA, 55 bp, Artificial
  Synthetic oligonucleotide
gccaggcaacacaactgttattgcgtcaacataagacgaagaaacgctaccaaca

SEQ ID NO: 148079 - DNA, 55 bp, Artificial
  Synthetic oligonucleotide
gccaggtcctggatgctgacgacagaatctcgtcatgaagcaggttagtggttac

SEQ ID NO: 148080 - DNA, 55 bp, Artificial
  Synthetic oligonucleotide
gccatacgatccctgtgtttgctgattcacctagttttcaattggtagggagtaa

SEQ ID NO: 148081 - DNA, 53 bp, Artificial
  Synthetic oligonucleotide
gtagttccgacggcagaaatggttacactcgtcttttcttctttacggtcgaa

SEQ ID NO: 148082 - DNA, 58 bp, Artificial
  Synthetic oligonucleotide
caaaatctgattagtcagcattatcgtattttagacaaacatgattaccgttggttta

SEQ ID NO: 148083 - DNA, 56 bp, Artificial
  Synthetic oligonucleotide
agttgttcccgttagtacgagcacttgctttacctgtctcgttggtaatcgtgatg

SEQ ID NO: 148084 - DNA, 55 bp, Artificial
  Synthetic oligonucleotide
gccatatgtggtagaagggaagtctatggatcccactttggttgattctgaaaga

SEQ ID NO: 148085 - DNA, 55 bp, Artificial
  Synthetic oligonucleotide
gccatcaaatgtgtttgctaaaccttctaacggtgctttaatcgcttcttgggac

SEQ ID NO: 148086 - DNA, 55 bp, Artificial
  Synthetic oligonucleotide
gccatgtagttctttggcgtccgcaaagcttcgctctatagttgaacagcgtact

SEQ ID NO: 148087 - DNA, 55 bp, Artificial
  Synthetic oligonucleotide
gccattgcttcgctaatagatggaacgagtgctgtcgaaagagcgtatgtaataa

SEQ ID NO: 148088 - DNA, 55 bp, Artificial
  Synthetic oligonucleotide
tgtatagaagagatccgcatgtcagcacgtatgcatttccatttgcgtgtatggg

SEQ ID NO: 148089 - DNA, 55 bp, Artificial
  Synthetic oligonucleotide
gccttccagccaatgtatgttaccccagctatgtttgaagagtcgagtgttgggg

SEQ ID NO: 148090 - DNA, 55 bp, Artificial
  Synthetic oligonucleotide
gcgaaaactcggcctcataaccgcattatttgcccttctatttagctcttttacc

SEQ ID NO: 148091 - DNA, 54 bp, Artificial
  Synthetic oligonucleotide
gcgaaagcgtcaaaatacgtatagggttacgttaattgacacaatttcgtcgcc

SEQ ID NO: 148092 - DNA, 55 bp, Artificial
  Synthetic oligonucleotide
gcgaacttattagtaataacgcgctgtggttctgaagccgctaattcggaacaac

SEQ ID NO: 148093 - DNA, 55 bp, Artificial
  Synthetic oligonucleotide
gcgaagcctgaagatcttggcaaaccatctagcgaggacaaagcgaagcctgaag

SEQ ID NO: 148094 - DNA, 56 bp, Artificial
  Synthetic oligonucleotide
agttgttaagcgaagagatactctatcgttcgttttaaggtgcctatcatccttaa

SEQ ID NO: 148095 - DNA, 55 bp, Artificial
  Synthetic oligonucleotide
gcgaaggcggaaccgaggattgctgaagttgcagcctattatgatgtgcccatta

SEQ ID NO: 148096 - DNA, 55 bp, Artificial
  Synthetic oligonucleotide
gcgaatcagttgggttaacttatggctcaactataaaaccgggtcaattgctgga

SEQ ID NO: 148097 - DNA, 55 bp, Artificial
  Synthetic oligonucleotide
gcgacctctgagcagctaacggcaagtagtatggaggtcacacaggcaacggagg

SEQ ID NO: 148098 - DNA, 55 bp, Artificial
  Synthetic oligonucleotide
gcgactgcaacttgtcctaagtacggctcaccacgagattctccatatactgcgt

SEQ ID NO: 148099 - DNA, 55 bp, Artificial
  Synthetic oligonucleotide
gcgagacatacaggagatacaacagtaggttatacatcatttccagcagttacac

SEQ ID NO: 148100 - DNA, 55 bp, Artificial
  Synthetic oligonucleotide
gcgagctaccttaatgttttgaggttttctcgcaaatacattcactgggtactcc

SEQ ID NO: 148101 - DNA, 55 bp, Artificial
  Synthetic oligonucleotide
tggtgacggatggaaacccaatggaattgtaacacgtgcagaagcagtacaattc

SEQ ID NO: 148102 - DNA, 55 bp, Artificial
  Synthetic oligonucleotide
gcgagtgattctttagtgcggctatgtagccaacttcatgctattacaggaactc

SEQ ID NO: 148103 - DNA, 55 bp, Artificial
  Synthetic oligonucleotide
gcgagtgtcatagcttgggaatagtgccactagatctaatactcctaacgttaga

SEQ ID NO: 148104 - DNA, 55 bp, Artificial
  Synthetic oligonucleotide
gcgataaggagagaaaataagtgattcagtacacgtgtcattgttggagcgtatg

SEQ ID NO: 148105 - DNA, 60 bp, Artificial
  Synthetic oligonucleotide
agttgcatagctatcccttaaatcagctgtgatatacccatttctcatagcccaattcat

SEQ ID NO: 148106 - DNA, 55 bp, Artificial
  Synthetic oligonucleotide
gcgatagttcactgtagagccaatcgccattccgagtacaggaatgccttggaat

SEQ ID NO: 148107 - DNA, 55 bp, Artificial
  Synthetic oligonucleotide
gcgatatctcgtgctgctagatggttagaaacggagcctgagtggttacggaagc

SEQ ID NO: 148108 - DNA, 55 bp, Artificial
  Synthetic oligonucleotide
gccgattgttgatatccgaagagtcaagggaagagctaaaattgatgccgaacag

SEQ ID NO: 148109 - DNA, 55 bp, Artificial
  Synthetic oligonucleotide
gccgcaaagatctacttttgttcgcatattcgattcctccggatgttattctctg

SEQ ID NO: 148110 - DNA, 55 bp, Artificial
  Synthetic oligonucleotide
gccggaatgaccgcttgcatcgagtcgttcaacagatgccccacactaatggcga

SEQ ID NO: 148111 - DNA, 52 bp, Artificial
  Synthetic oligonucleotide
gccggccaaaagcgttttaatatacggcccgataaacggtaccgaatccgca

SEQ ID NO: 148112 - DNA, 55 bp, Artificial
  Synthetic oligonucleotide
gccgtataacgacaagacaccgaaaattgaagtagacccgcaaacgtatgaagtg

SEQ ID NO: 148113 - DNA, 55 bp, Artificial
  Synthetic oligonucleotide
gccgtcagggatagacattcgattccgcttttgatcaagggaaacgagggaattg

SEQ ID NO: 148114 - DNA, 55 bp, Artificial
  Synthetic oligonucleotide
gccgtcgcatttgtaaagagtgcggtgcgacttaccacttagaattcaatccgcc

SEQ ID NO: 148115 - DNA, 55 bp, Artificial
  Synthetic oligonucleotide
gccgtttggggaagtcgtggcttcaggtaagccatcgtctttgtctagcagcccc

SEQ ID NO: 148116 - DNA, 57 bp, Artificial
  Synthetic oligonucleotide
taacccttcggctgttacagcttcaaatcaaactttcgtttctggatctgtcacatt

SEQ ID NO: 148117 - DNA, 55 bp, Artificial
  Synthetic oligonucleotide
gcctcaaaccgaactgcttacttatacgaaactatttattacacacggcgggatg

SEQ ID NO: 148118 - DNA, 55 bp, Artificial
  Synthetic oligonucleotide
gcctcacttgcgcctgcattcgttgacacttctttcgtcgttaagttcggaataa

SEQ ID NO: 148119 - DNA, 55 bp, Artificial
  Synthetic oligonucleotide
gcctctagcttcatttgcgtaaccacttgtttagcggcctcctggttcatatcgg

SEQ ID NO: 148120 - DNA, 55 bp, Artificial
  Synthetic oligonucleotide
gcctcttccgttgtgccatcccgcaagaatgcagcgcgtcaagcgatttcgaggg

SEQ ID NO: 148121 - DNA, 55 bp, Artificial
  Synthetic oligonucleotide
gcctgggcgacaccgattcacagtgcgatcagccgggataaagaaacgcttacgc

SEQ ID NO: 148122 - DNA, 55 bp, Artificial
  Synthetic oligonucleotide
gcctgtaccgcaaaccgacacaggtaggcgaggagagaatcctaaggtgtgcgag

SEQ ID NO: 148123 - DNA, 55 bp, Artificial
  Synthetic oligonucleotide
gcctgttagagatatgattactgctccgaggaatacgatggtggctacgaaaaca

SEQ ID NO: 148124 - DNA, 55 bp, Artificial
  Synthetic oligonucleotide
tgtactgcatgaaccgcacaaaggaaaattacgaaagccacggacctacagaaaa

SEQ ID NO: 148125 - DNA, 55 bp, Artificial
  Synthetic oligonucleotide
ggcgccagcatgggcaaacaatctagtcaagaacatagcgaaattaatcaaccca

SEQ ID NO: 148126 - DNA, 55 bp, Artificial
  Synthetic oligonucleotide
ggcgcccaaaggttccctcagaatggttggaaatcattcgtagagtgcaaaggca

SEQ ID NO: 148127 - DNA, 60 bp, Artificial
  Synthetic oligonucleotide
agttgacagcatccgcacgaatgttagcactatggcgcaaactcaaggggaacacggaga

SEQ ID NO: 148128 - DNA, 55 bp, Artificial
  Synthetic oligonucleotide
ggcgcgacacattgagaacatagtcatagaaggcggcgagacaatcggacatact

SEQ ID NO: 148129 - DNA, 53 bp, Artificial
  Synthetic oligonucleotide
ggcgcgacctaggggaagggtaccgattagagaggaaatgtaccccttcatgg

SEQ ID NO: 148130 - DNA, 55 bp, Artificial
  Synthetic oligonucleotide
ggcgtgggtataatatttgggtcatttggatgctgaccgtattatagtatatgct

SEQ ID NO: 148131 - DNA, 55 bp, Artificial
  Synthetic oligonucleotide
ggctagtagttgttgggttacttggactatttacgctctccttgacatggcttac

SEQ ID NO: 148132 - DNA, 55 bp, Artificial
  Synthetic oligonucleotide
ggctcacaccacccctgactcgcttaaactacgtcctactactactcgtcctttc

SEQ ID NO: 148133 - DNA, 55 bp, Artificial
  Synthetic oligonucleotide
tgatattgaattttggtacagtttgtacaggataggcgggagccattgaaaccgg

SEQ ID NO: 148134 - DNA, 55 bp, Artificial
  Synthetic oligonucleotide
ggctccatcactaccggaatgggacctagtaaacctggagccgcgatgaacaaaa

SEQ ID NO: 148135 - DNA, 55 bp, Artificial
  Synthetic oligonucleotide
ggctcgtagctgcggaaataacgtgacatccaaatggcgtgcgaaccgatatcgc

SEQ ID NO: 148136 - DNA, 55 bp, Artificial
  Synthetic oligonucleotide
ggctctgccatccagtggcttagagacggtttgagaatgttccaggattcatcgc

SEQ ID NO: 148137 - DNA, 55 bp, Artificial
  Synthetic oligonucleotide
ggctgatattctacttcataacccattgatttaagttgcataccaacgtagcgag

SEQ ID NO: 148138 - DNA, 60 bp, Artificial
  Synthetic oligonucleotide
agttatgcaatttgccgaatgcagaaatttaaaatgcgagatgtgaagggaattcagatt

SEQ ID NO: 148139 - DNA, 55 bp, Artificial
  Synthetic oligonucleotide
ggctggaatgtcgataaaccagctggtagtatgttcgtctgggctgaaatcccga

SEQ ID NO: 148140 - DNA, 55 bp, Artificial
  Synthetic oligonucleotide
ggctggacaagccggaaggcgctcccctgcatctgtgtacaggctttcagtaggc

SEQ ID NO: 148141 - DNA, 55 bp, Artificial
  Synthetic oligonucleotide
ggcttgtgccagtactacgtaatgctctatcgtagagtggtcagcgattgccttc

SEQ ID NO: 148142 - DNA, 55 bp, Artificial
  Synthetic oligonucleotide
ggctttacacaagccggtgttgacatcaatatatccggcggatcaaataaaaccg

SEQ ID NO: 148143 - DNA, 55 bp, Artificial
  Synthetic oligonucleotide
ggctttatgtaatgcatgatctgcttcctctcggaacgtatgctgcaccgttgtc

SEQ ID NO: 148144 - DNA, 55 bp, Artificial
  Synthetic oligonucleotide
ggcccactcttctgcaaggatattacaatcctccattactgcatggagctcacca

SEQ ID NO: 148145 - DNA, 53 bp, Artificial
  Synthetic oligonucleotide
ggccccgtataaaagcctcttatggtccaatcgtccctcccaccaaagttgtc

SEQ ID NO: 148146 - DNA, 55 bp, Artificial
  Synthetic oligonucleotide
ggccgctctatcaccgaaaacttacacacattaggagtcgccctttcacctgcca

SEQ ID NO: 148147 - DNA, 53 bp, Artificial
  Synthetic oligonucleotide
ggccggagcaaagtagttaagtgggagtcgggttaatagtcagcgggagggaa

SEQ ID NO: 148148 - DNA, 55 bp, Artificial
  Synthetic oligonucleotide
ggccgtagcattgtaggtgatgctggaacgacactttatacagtcggatctgtga

SEQ ID NO: 148149 - DNA, 57 bp, Artificial
  Synthetic oligonucleotide
tacgacagggttaggtggactctttactccggataagttgcgggatgcaacgcggca

SEQ ID NO: 148150 - DNA, 55 bp, Artificial
  Synthetic oligonucleotide
ggcctaaacaaaactgtagaacgcccagttatttcctggatcagacgttgcgtcg

SEQ ID NO: 148151 - DNA, 55 bp, Artificial
  Synthetic oligonucleotide
ggcctgacttgcactaaatgatgtagatgccccaagatctctcgccgtctgtgtt

SEQ ID NO: 148152 - DNA, 55 bp, Artificial
  Synthetic oligonucleotide
ggcctgtcacagcctaccaagtgagtaaagattcgggtgtcccaagagcgcgaat

SEQ ID NO: 148153 - DNA, 55 bp, Artificial
  Synthetic oligonucleotide
ggcgaatccattacgtataaatggtatgtcgatttccctgttggagcatgcggca

SEQ ID NO: 148154 - DNA, 53 bp, Artificial
  Synthetic oligonucleotide
ggcgaattgctacggaagattaaaagtacgttcagtaaagattcctccttaac

SEQ ID NO: 148155 - DNA, 55 bp, Artificial
  Synthetic oligonucleotide
ggcgacgaagcggttgaaacagcttctatcatactcgaaacattggggaaagtgg

SEQ ID NO: 148156 - DNA, 55 bp, Artificial
  Synthetic oligonucleotide
ggcgacgtggcagagcaattaggtatccaatctagcacattacgtaagtatgctg

SEQ ID NO: 148157 - DNA, 55 bp, Artificial
  Synthetic oligonucleotide
ggcgagttgctaacaggctttgatggttcgcggtacgcagttaactcttgaggcg

SEQ ID NO: 148158 - DNA, 55 bp, Artificial
  Synthetic oligonucleotide
tgcaaggcggttgatcggttacggcgggatcttgaaagagattcataaggaactg

SEQ ID NO: 148159 - DNA, 55 bp, Artificial
  Synthetic oligonucleotide
ggcgatgctggtaagcattggctaagaggcgttgtgattgatggtgctggagcga

SEQ ID NO: 148160 - DNA, 60 bp, Artificial
  Synthetic oligonucleotide
tacgagaagtacagtcttagttctaccagctaaatgacgcagttgcatcgatagggccgc

SEQ ID NO: 148161 - DNA, 55 bp, Artificial
  Synthetic oligonucleotide
ggcgcacaaatgggctatatagaagagctaaggaagattgttggccacaggccgc

SEQ ID NO: 148162 - DNA, 55 bp, Artificial
  Synthetic oligonucleotide
ggcgccaataacgttgacattgacgtcattgtaattgaaaggggcaaatcgcctt

SEQ ID NO: 148163 - DNA, 55 bp, Artificial
  Synthetic oligonucleotide
gggagcgacatgaatgaagtgaagtgcagacagaaggtaaggtgacggagtggac

SEQ ID NO: 148164 - DNA, 54 bp, Artificial
  Synthetic oligonucleotide
gggagcttcccttgtgcagaaagttttccgttatctgttacctcgtttaataca

SEQ ID NO: 148165 - DNA, 55 bp, Artificial
  Synthetic oligonucleotide
gggaggggttaacgatggatgctcaagcaatacaaatgcttatcggtagtgtagg

SEQ ID NO: 148166 - DNA, 55 bp, Artificial
  Synthetic oligonucleotide
gggagggtacataccttatattttggatggaggttccacaggcattgggttagaa

SEQ ID NO: 148167 - DNA, 55 bp, Artificial
  Synthetic oligonucleotide
gggagttaagtcgatgttaataagtatgagttctaaccattcaaagactcccttc

SEQ ID NO: 148168 - DNA, 55 bp, Artificial
  Synthetic oligonucleotide
gggataaattcaccgaaggctgcatgttattcggaccactctcatacgacagttc

SEQ ID NO: 148169 - DNA, 54 bp, Artificial
  Synthetic oligonucleotide
gggattgatacacgcgttgcttgcggtaaaataacacgttttaacgcttgtggg

SEQ ID NO: 148170 - DNA, 55 bp, Artificial
  Synthetic oligonucleotide
gggattgcaccacttttcccagaccaatggtactctatgttaatctttagtgcga

SEQ ID NO: 148171 - DNA, 60 bp, Artificial
  Synthetic oligonucleotide
tacgattgcacgtcgctgagtcctgccatgacattgcgtgcgaccgatattcccgttatg

SEQ ID NO: 148172 - DNA, 54 bp, Artificial
  Synthetic oligonucleotide
gggattggttttcgtgtttactcgtctatgttattccgtattgttatccgtata

SEQ ID NO: 148173 - DNA, 55 bp, Artificial
  Synthetic oligonucleotide
gggatttcatctggacgaggcacctgccttgcacgttcataattggtcaaatggc

SEQ ID NO: 148174 - DNA, 55 bp, Artificial
  Synthetic oligonucleotide
gggcagtaatgttaatgactgttacttgaaaggataaggtaaaagtagctccacc

SEQ ID NO: 148175 - DNA, 55 bp, Artificial
  Synthetic oligonucleotide
gggccgataaagacagggatgctcgggagacctgcattacctccgacgatatagg

SEQ ID NO: 148176 - DNA, 55 bp, Artificial
  Synthetic oligonucleotide
gggcgagaaacttctcatgccgtattgcgagacattggaggttgtgcgcccttgg

SEQ ID NO: 148177 - DNA, 55 bp, Artificial
  Synthetic oligonucleotide
gggcgtctctggagccgatgaaggagtttgaacgggactttcatcggattacctc

SEQ ID NO: 148178 - DNA, 53 bp, Artificial
  Synthetic oligonucleotide
gggcgtgtaacgtaagtcagggtccttagttagacgaccaacgaggataacac

SEQ ID NO: 148179 - DNA, 55 bp, Artificial
  Synthetic oligonucleotide
gggctaataaatagcgtgattgctactataccagttggggttgttccatctggta

SEQ ID NO: 148180 - DNA, 55 bp, Artificial
  Synthetic oligonucleotide
gggctatagccgcctactgacgcaacccgagccgtatgaccagcgtctagcatcc

SEQ ID NO: 148181 - DNA, 55 bp, Artificial
  Synthetic oligonucleotide
gggaacaacataaaacattaggattcacaaaccaagtacgagaactacaaatgcg

SEQ ID NO: 148182 - DNA, 53 bp, Artificial
  Synthetic oligonucleotide
agggttgtagagacggttaatcaacgtgagaacgttaagtggctattcctaac

SEQ ID NO: 148183 - DNA, 55 bp, Artificial
  Synthetic oligonucleotide
gggaacgaaaggattttctggtacgcagtccattttgtatcatcactatatgcca

SEQ ID NO: 148184 - DNA, 55 bp, Artificial
  Synthetic oligonucleotide
gggaagaacagtattttacgcgggatttcctacacgcatagcgctacagcaagac

SEQ ID NO: 148185 - DNA, 55 bp, Artificial
  Synthetic oligonucleotide
gggaagtctgttcactcgatagaggaagccattgacgctgaacggttaggagcag

SEQ ID NO: 148186 - DNA, 55 bp, Artificial
  Synthetic oligonucleotide
gggaatatgtatcagaaccgattgaaacgacaggccgccatgaaataaactgcgt

SEQ ID NO: 148187 - DNA, 55 bp, Artificial
  Synthetic oligonucleotide
gggaatgaggtgaaaatacggtgattgaatcagagctcgctttgctcagttttga

SEQ ID NO: 148188 - DNA, 55 bp, Artificial
  Synthetic oligonucleotide
gggacaaatgccgcaagttgggtacggtataatcaattccgtagagatctaacgt

SEQ ID NO: 148189 - DNA, 55 bp, Artificial
  Synthetic oligonucleotide
tgatagcttgcgatgtcgcttagcgatttcatctcaatgccaaggaacgggcgtt

SEQ ID NO: 148190 - DNA, 55 bp, Artificial
  Synthetic oligonucleotide
gggacccagaatttattgatgtaccttcagaaggactgttgcatccagattatgt

SEQ ID NO: 148191 - DNA, 55 bp, Artificial
  Synthetic oligonucleotide
gggacggtgagtacccttttcctaaaatcatggattcaaggtagttgcgaagctg

SEQ ID NO: 148192 - DNA, 55 bp, Artificial
  Synthetic oligonucleotide
gggactacgggcagagcctgctaagataactgttggatacatcggtgttcgcagg

SEQ ID NO: 148193 - DNA, 55 bp, Artificial
  Synthetic oligonucleotide
gtaagtaaaacgtacgtcgacgctccaagtggaggtatacataacagtacgttgc

SEQ ID NO: 148194 - DNA, 54 bp, Artificial
  Synthetic oligonucleotide
tactaacgattaataaaaagggatcgcaaaccttgcctgcgattaataaaatcg

SEQ ID NO: 148195 - DNA, 55 bp, Artificial
  Synthetic oligonucleotide
gggacttgccctttccccgcattttgccattgtttcatgggtcgttatgccgtgt

SEQ ID NO: 148196 - DNA, 53 bp, Artificial
  Synthetic oligonucleotide
gggagaaacattctcttactggcgtttaataggtaagcctactaggagaaaag

SEQ ID NO: 148197 - DNA, 55 bp, Artificial
  Synthetic oligonucleotide
gggagaaccgctcgcacttttagaaggatcgtacttaacgatgattcgaacaggc

SEQ ID NO: 148198 - DNA, 55 bp, Artificial
  Synthetic oligonucleotide
gggagaaggggtgctttcttaacggaaagccgcagtgaataggcccaagcgactg

SEQ ID NO: 148199 - DNA, 55 bp, Artificial
  Synthetic oligonucleotide
gggagccatcgtttctcacccatttggaagcgtgatgcgaagcatactggttgcg

SEQ ID NO: 148200 - DNA, 55 bp, Artificial
  Synthetic oligonucleotide
gggagccgcaaagctcgcaatattatccgcagctgttagaagcggtgtgcaacca

SEQ ID NO: 148201 - DNA, 55 bp, Artificial
  Synthetic oligonucleotide
gctttagcgcattagacacagcttcctgtgcgagcctgaagagcgcaacttcaaa

SEQ ID NO: 148202 - DNA, 55 bp, Artificial
  Synthetic oligonucleotide
gctttgatccgaagatttccgaatggggaaacccaccatacgtaatggtatggta

SEQ ID NO: 148203 - DNA, 55 bp, Artificial
  Synthetic oligonucleotide
tggacctgtgtttcccgttgctccggtgcttcctgtgggacccgtatctcctgtt

SEQ ID NO: 148204 - DNA, 52 bp, Artificial
  Synthetic oligonucleotide
ggaaacgtacatgataaagcgttccgtaagtcggctaaaacagtcggtaacg

SEQ ID NO: 148205 - DNA, 55 bp, Artificial
  Synthetic oligonucleotide
aggggtcctcatggcaaacgtacaaaaatatacaaaggcgaatgtacaaggattg

SEQ ID NO: 148206 - DNA, 55 bp, Artificial
  Synthetic oligonucleotide
ggaaagactataccgtcgttgagcgtttagcagatattgacgatgtagagacacg

SEQ ID NO: 148207 - DNA, 55 bp, Artificial
  Synthetic oligonucleotide
ggaaccagtgcccacttatgcacctaaataggtgctgtgtgttttctctccgttc

SEQ ID NO: 148208 - DNA, 55 bp, Artificial
  Synthetic oligonucleotide
ggaacgagtggatataggagattctatcttgtttcgccatagtaaagctggggag

SEQ ID NO: 148209 - DNA, 55 bp, Artificial
  Synthetic oligonucleotide
ggaacggaattaagacactttccgcgtatgagaggatgttcccttgaattaatcc

SEQ ID NO: 148210 - DNA, 55 bp, Artificial
  Synthetic oligonucleotide
ggaacggtagcggcaagttcagtgacgtctaggaacggtagcggcaagttcagtg

SEQ ID NO: 148211 - DNA, 55 bp, Artificial
  Synthetic oligonucleotide
ggaagtataggaatggcacaagtttcagcagacgttctaaaatggcgtccacttg

SEQ ID NO: 148212 - DNA, 55 bp, Artificial
  Synthetic oligonucleotide
ggaataacgatcgtgcataggatgtgtcttccgaatggaacaacatattggcgag

SEQ ID NO: 148213 - DNA, 55 bp, Artificial
  Synthetic oligonucleotide
ggaatcaatgcttgtaacattgagaacttgttaccctataagcctggggcgattg

SEQ ID NO: 148214 - DNA, 55 bp, Artificial
  Synthetic oligonucleotide
ggaatgcagcaataacgcaagaaacaccacttgtatcagaatcggttccagggac

SEQ ID NO: 148215 - DNA, 55 bp, Artificial
  Synthetic oligonucleotide
ggaattgataaggaattagcgagtgattacggattatgtatggtagatcgtcctg

SEQ ID NO: 148216 - DNA, 57 bp, Artificial
  Synthetic oligonucleotide
tactcatttagaatatccgtgcatgggtccctgaacaattaggaaacggcttttgta

SEQ ID NO: 148217 - DNA, 55 bp, Artificial
  Synthetic oligonucleotide
ggacaacacaagtgccggttggcgtcctgagcaacagccgattccgtatgcggga

SEQ ID NO: 148218 - DNA, 55 bp, Artificial
  Synthetic oligonucleotide
ggacaatatagcacattgcttgaagagcatggatttcgagtatcctatgcacatc

SEQ ID NO: 148219 - DNA, 55 bp, Artificial
  Synthetic oligonucleotide
ggacaatgcccaaccgtgaggaaggtttctatcgtgcctggcagcatctcattca

SEQ ID NO: 148220 - DNA, 55 bp, Artificial
  Synthetic oligonucleotide
gctgtggaaccaccgggtgttgttacttgttcgcggaggttagctggatcttgcg

SEQ ID NO: 148221 - DNA, 55 bp, Artificial
  Synthetic oligonucleotide
gctgtggtatctcagcctcttcgcttccgggaatgagatatgggatacctagact

SEQ ID NO: 148222 - DNA, 55 bp, Artificial
  Synthetic oligonucleotide
gctgtttcaatgactgtacgcagaagtgattcacacatgcggtcctgatacggcg

SEQ ID NO: 148223 - DNA, 55 bp, Artificial
  Synthetic oligonucleotide
gcttaagcctgaagaccgtgcgaactatggattagtaacaaatcctgaactgcac

SEQ ID NO: 148224 - DNA, 55 bp, Artificial
  Synthetic oligonucleotide
gcttatgtatttatacgccgaataaaggagtggaaacatgacggacatgcaaata

SEQ ID NO: 148225 - DNA, 55 bp, Artificial
  Synthetic oligonucleotide
gcttcaccaggggttggtcaaatagtatctacacttacccttacagccaatatta

SEQ ID NO: 148226 - DNA, 55 bp, Artificial
  Synthetic oligonucleotide
gcttcagccgtagaattcgtagcaggaatggaagagccgtgcttaacagctgtat

SEQ ID NO: 148227 - DNA, 55 bp, Artificial
  Synthetic oligonucleotide
aggcttactacctttcaaaccataattcgaatacaaagcacatccagtcttttgt

SEQ ID NO: 148228 - DNA, 55 bp, Artificial
  Synthetic oligonucleotide
gcttccaccattgcgaatggactccttacgacatttggtgctttcgctttagcga

SEQ ID NO: 148229 - DNA, 55 bp, Artificial
  Synthetic oligonucleotide
gcttcctgtcagccaaatgagtgcagcattcacgtcgcccggaaacttgaccatc

SEQ ID NO: 148230 - DNA, 55 bp, Artificial
  Synthetic oligonucleotide
gcttcgctctataatggaacagcgtactttatacaatcctttccctgtagctgtt

SEQ ID NO: 148231 - DNA, 53 bp, Artificial
  Synthetic oligonucleotide
gcttctcctgttagagtttcagggtttaggtttactaaagttggtggctctag

SEQ ID NO: 148232 - DNA, 55 bp, Artificial
  Synthetic oligonucleotide
gcttctgacgaaaagcacgaattaagtccggcacaatactagtcccaagagtgtg

SEQ ID NO: 148233 - DNA, 55 bp, Artificial
  Synthetic oligonucleotide
gcttgagatgcaacccagataccgtcgttaccatctttacgttgtccaactacga

SEQ ID NO: 148234 - DNA, 55 bp, Artificial
  Synthetic oligonucleotide
gcttggaatcctccaatatgtaaaggagcgggttgacgaaccatttcaggatgat

SEQ ID NO: 148235 - DNA, 55 bp, Artificial
  Synthetic oligonucleotide
gcttggatgcacggagctaaaagagtgattgcagtggattatctcgattaccgct

SEQ ID NO: 148236 - DNA, 55 bp, Artificial
  Synthetic oligonucleotide
gcttgtcaatcagttgcaagaaaggcattaccagacgaaagggtttcgaagtgtc

SEQ ID NO: 148237 - DNA, 55 bp, Artificial
  Synthetic oligonucleotide
gcttgttccgtattatgatggtagtgtagcaaggttagctaaaaccgagctgcac

SEQ ID NO: 148238 - DNA, 59 bp, Artificial
  Synthetic oligonucleotide
tacttaatgctcgattaggtggatctatatgagtagtcccttcaattgggcttggtaaa

SEQ ID NO: 148239 - DNA, 55 bp, Artificial
  Synthetic oligonucleotide
ggatactccgatttctagtagttcttttggtatacggttgttatctaatagccac

SEQ ID NO: 148240 - DNA, 55 bp, Artificial
  Synthetic oligonucleotide
ggatatccgtggcaactatcagatattctgcctgcagttcatacttcaggcgagc

SEQ ID NO: 148241 - DNA, 55 bp, Artificial
  Synthetic oligonucleotide
tgcggctctgtactgaaaggaacgacagcatacacactttcttcgctttctgaca

SEQ ID NO: 148242 - DNA, 55 bp, Artificial
  Synthetic oligonucleotide
ggatcgggttcattcaagtagattcgattagcgcctccatctactgattctgtgg

SEQ ID NO: 148243 - DNA, 55 bp, Artificial
  Synthetic oligonucleotide
ggatgggcttccgacaaccatacgtttacgattctcttttatacgaagaagttca

SEQ ID NO: 148244 - DNA, 55 bp, Artificial
  Synthetic oligonucleotide
ggattaattatccctcctgatgtaaatgccctagctgtatcactatatgctgact

SEQ ID NO: 148245 - DNA, 55 bp, Artificial
  Synthetic oligonucleotide
ggattgctttcggctgctttaaaacatcgtccactgaatcaaagagggccggggc

SEQ ID NO: 148246 - DNA, 55 bp, Artificial
  Synthetic oligonucleotide
ggattgtggacgcatagcgatgttacacatcaccttggtggtacagatcacgaag

SEQ ID NO: 148247 - DNA, 55 bp, Artificial
  Synthetic oligonucleotide
ggatttgcgaggggatcagtcaggccaagtctttgttaaagtgggagcgcacggc

SEQ ID NO: 148248 - DNA, 55 bp, Artificial
  Synthetic oligonucleotide
tgcctaaaattcgttcaataaacttgccaatttcacgcgtactcatgccactttg

SEQ ID NO: 148249 - DNA, 55 bp, Artificial
  Synthetic oligonucleotide
tacttattaccaggagtattattattaatcggcggattaatgggtatcttccgta

SEQ ID NO: 148250 - DNA, 55 bp, Artificial
  Synthetic oligonucleotide
tgccggtacacgatcgattggaaggcacgggagcaacggtttgcctcggcattgc

SEQ ID NO: 148251 - DNA, 55 bp, Artificial
  Synthetic oligonucleotide
tgccagatgtagagcaagatcatcgtattgcgagtattgcttcgagaatgacaca

SEQ ID NO: 148252 - DNA, 55 bp, Artificial
  Synthetic oligonucleotide
ggcaattgaccgcggtaagtgactatcttccacggcacattcttaaactttggtt

SEQ ID NO: 148253 - DNA, 55 bp, Artificial
  Synthetic oligonucleotide
tgcatatatcccgtactcacctaggttatattcaacttctaatttccgaagctcc

SEQ ID NO: 148254 - DNA, 55 bp, Artificial
  Synthetic oligonucleotide
ggcactccccatctcttcagatgtcgtgaccatgtcctgattggggcacagcaag

SEQ ID NO: 148255 - DNA, 55 bp, Artificial
  Synthetic oligonucleotide
ggcattccaacaggttttgccgatttagatcatatgacagcgggcttccagcgaa

SEQ ID NO: 148256 - DNA, 55 bp, Artificial
  Synthetic oligonucleotide
ggacagtgattatgagtaataacgtagcggagcgtggccgcatgctagcactgtt

SEQ ID NO: 148257 - DNA, 55 bp, Artificial
  Synthetic oligonucleotide
ggacatcgttgtcacgttctaggatgaaacagtagcgtcggtgggcgaataatct

SEQ ID NO: 148258 - DNA, 55 bp, Artificial
  Synthetic oligonucleotide
ggactaagtacgttgagaaagatagatgcagtgggtcgtatagtgattcctatcg

SEQ ID NO: 148259 - DNA, 55 bp, Artificial
  Synthetic oligonucleotide
ggactcatgagtgtagctgtatttgcataaagttgactacataatcgagtgaggg

SEQ ID NO: 148260 - DNA, 58 bp, Artificial
  Synthetic oligonucleotide
tactttacgagaattaagtggattggacgatgatgaatcgtaatcatatgacggtttt

SEQ ID NO: 148261 - DNA, 55 bp, Artificial
  Synthetic oligonucleotide
ggacttgagcactgttgtcggatcaagtcgatgatgcagcataccaataatcgtc

SEQ ID NO: 148262 - DNA, 55 bp, Artificial
  Synthetic oligonucleotide
ggagatttcattgctactacgagttattccgcccctatacatggtattggtactc

SEQ ID NO: 148263 - DNA, 55 bp, Artificial
  Synthetic oligonucleotide
ggagatttccaatgtaacttaactgttttatcagttgattccgctaccaaagacg

SEQ ID NO: 148264 - DNA, 55 bp, Artificial
  Synthetic oligonucleotide
ggagcgaaatgacaggtagacagcgttctcgcgttctttataaagcagctgaact

SEQ ID NO: 148265 - DNA, 55 bp, Artificial
  Synthetic oligonucleotide
ggagctggtcaaaggctagatgacctacctcgtgtatgctatgtcctttacgaag

SEQ ID NO: 148266 - DNA, 55 bp, Artificial
  Synthetic oligonucleotide
ggaggaatacatacagtacctgtcaacggtaagcggacggaatgaagcgatagcg

SEQ ID NO: 148267 - DNA, 55 bp, Artificial
  Synthetic oligonucleotide
ggaggaggaccaacatgaaactagcgctgtttaacgactttcaattaggtctcgt

SEQ ID NO: 148268 - DNA, 55 bp, Artificial
  Synthetic oligonucleotide
ggaggagggtatacaattgagtatcatcaccggtacgagtaatccctgttaagtc

SEQ ID NO: 148269 - DNA, 55 bp, Artificial
  Synthetic oligonucleotide
ggaggggcactgaatcttacgaacagtatcccgggattgatcatcatgtacttcg

SEQ ID NO: 148270 - DNA, 55 bp, Artificial
  Synthetic oligonucleotide
tgctgaaagatgcaacgttagaagagcttatcagtatacatggtgtcggggttgc

SEQ ID NO: 148271 - DNA, 58 bp, Artificial
  Synthetic oligonucleotide
tagaattattactaccgcgctcgaaaggatacccaacttcctccagagcaaggcaata

SEQ ID NO: 148272 - DNA, 55 bp, Artificial
  Synthetic oligonucleotide
tgctccgctttgtagtcaccatcatttcagcagtcccatcctcattccaaaagac

SEQ ID NO: 148273 - DNA, 55 bp, Artificial
  Synthetic oligonucleotide
ggagtcggtcgctccactgcacaagaaattctagcgaaagcgaatgtgtctgaga

SEQ ID NO: 148274 - DNA, 55 bp, Artificial
  Synthetic oligonucleotide
cacttcgttctttaattagtgacgatacaaccgttacatgtgacatcggttccca

SEQ ID NO: 148275 - DNA, 54 bp, Artificial
  Synthetic oligonucleotide
ccgttcttagatttaaacagtgcagccaaaggatcggaaacggacgactcgtta

SEQ ID NO: 148276 - DNA, 52 bp, Artificial
  Synthetic oligonucleotide
ccgttcgagtttgcgtatatcaaatgaaaccgaaccaaacttccgaacaaag

SEQ ID NO: 148277 - DNA, 55 bp, Artificial
  Synthetic oligonucleotide
aagaattggcggttcggctggtacaattgctagtccaagtcgagcaacttaaccc

SEQ ID NO: 148278 - DNA, 55 bp, Artificial
  Synthetic oligonucleotide
ccgttccaagctgcgttattccagctttctccaacgtgaacagtagaaattagct

SEQ ID NO: 148279 - DNA, 51 bp, Artificial
  Synthetic oligonucleotide
aagacattatttatgtaacccaattacgtaatagaaaaagactacttcttt

SEQ ID NO: 148280 - DNA, 55 bp, Artificial
  Synthetic oligonucleotide
ccgtgccctcagcagctttatcgagatccgcatgtttcgtgatgataaccggtgc

SEQ ID NO: 148281 - DNA, 55 bp, Artificial
  Synthetic oligonucleotide
ccgtgaagtacctggttatgtccctcgttacacgagaattacagtaaaggcaaca

SEQ ID NO: 148282 - DNA, 53 bp, Artificial
  Synthetic oligonucleotide
tagaggaacagaaacgttattttgagagttcactagtgtttattcaaaaacgt

SEQ ID NO: 148283 - DNA, 55 bp, Artificial
  Synthetic oligonucleotide
acgaatcttcagattctaattctgaagccgagacagatgaattaaacgacaccat

SEQ ID NO: 148284 - DNA, 51 bp, Artificial
  Synthetic oligonucleotide
ccgtgaaagaaattttaactccgggcgccaacgatgtatgggtggtaaaac

SEQ ID NO: 148285 - DNA, 55 bp, Artificial
  Synthetic oligonucleotide
ccgtcttaaattccgggtccattgaacccgacagcacggatttcagcgtatagcc

SEQ ID NO: 148286 - DNA, 55 bp, Artificial
  Synthetic oligonucleotide
cacttgggactgaaacacctcatgcggcgttttcccatccagcgaggcgtgaggc

SEQ ID NO: 148287 - DNA, 55 bp, Artificial
  Synthetic oligonucleotide
aagatctgacaggcttgaagggaatgctaatcactataactgcccgtcgaaatac

SEQ ID NO: 148288 - DNA, 55 bp, Artificial
  Synthetic oligonucleotide
cactttggtttaaacgagatttcctagttcatgctttaagcggtcagcatcaccg

SEQ ID NO: 148289 - DNA, 55 bp, Artificial
  Synthetic oligonucleotide
ccgtcgccagtcattacaagtttaatcgtagtaggcgatatctcaacgattgcat

SEQ ID NO: 148290 - DNA, 53 bp, Artificial
  Synthetic oligonucleotide
ccgtccggcccgcttcatatcccctcgttcctcccggcagaaggataaacgcg

SEQ ID NO: 148291 - DNA, 55 bp, Artificial
  Synthetic oligonucleotide
acctggataaaatctttccgtgtagaatactcgcttttgcgcatgtgttaagggg

SEQ ID NO: 148292 - DNA, 55 bp, Artificial
  Synthetic oligonucleotide
cagaaggaactgtccagtaacctacatagtgaccatctgaagtctcatgtaatgg

SEQ ID NO: 148293 - DNA, 60 bp, Artificial
  Synthetic oligonucleotide
tagatagcgcccgggattcgccctgggcgcaacatcatatctaattataacggtgacata

SEQ ID NO: 148294 - DNA, 55 bp, Artificial
  Synthetic oligonucleotide
acctcgtgactcaatgcatgggtacgctcatgctcggccgccaacgtttgctgca

SEQ ID NO: 148295 - DNA, 55 bp, Artificial
  Synthetic oligonucleotide
ccgtcaagaagctcccctgtctatgcaaggagaagttcttggttataatacgagc

SEQ ID NO: 148296 - DNA, 51 bp, Artificial
  Synthetic oligonucleotide
ccgtagccgttacttccgggtgtaatttaaccggtacattcgtgtagccta

SEQ ID NO: 148297 - DNA, 55 bp, Artificial
  Synthetic oligonucleotide
cagacatactccctaatggcacttcctttatacctggcactgtcacggtagataa

SEQ ID NO: 148298 - DNA, 55 bp, Artificial
  Synthetic oligonucleotide
cctcatcgtgctatggctgattatcattatgtttacggtcatggcaaaagttatc

SEQ ID NO: 148299 - DNA, 55 bp, Artificial
  Synthetic oligonucleotide
cctcatatgcacttgaattttgtgcctgtggcaagtggctataagcgaggacttg

SEQ ID NO: 148300 - DNA, 55 bp, Artificial
  Synthetic oligonucleotide
cctcagatattttccgataattttctacatacgattgactgaacccgtaaaccgc

SEQ ID NO: 148301 - DNA, 55 bp, Artificial
  Synthetic oligonucleotide
cctcactgtgcaagggactggatccgattatccaagactggaattatcgttccct

SEQ ID NO: 148302 - DNA, 55 bp, Artificial
  Synthetic oligonucleotide
cctcacgacaaatattttcctgcggatctgtggacttattcggacttaaaagagg

SEQ ID NO: 148303 - DNA, 55 bp, Artificial
  Synthetic oligonucleotide
cctcaattaacgacgttgtaataatacgattccccgctgccaattctataacacg

SEQ ID NO: 148304 - DNA, 57 bp, Artificial
  Synthetic oligonucleotide
caatcacttgtcaaagtgcccagttatacgcaccaaaaaatgcgcgtgtttttagaa

SEQ ID NO: 148305 - DNA, 60 bp, Artificial
  Synthetic oligonucleotide
tagcatttgtcacgctatggcgtgatttggcgaagccaacaaggtctcgcagagcccaca

SEQ ID NO: 148306 - DNA, 55 bp, Artificial
  Synthetic oligonucleotide
cactcgatccacaatagggtctaaagaatcagggttgtaccaaggctccttaatt

SEQ ID NO: 148307 - DNA, 55 bp, Artificial
  Synthetic oligonucleotide
cactctgccaagtttctctacttctttactcatagttgagacatgttctttctct

SEQ ID NO: 148308 - DNA, 55 bp, Artificial
  Synthetic oligonucleotide
cctatctacaaacgaactgttacttgaaacactactgacaacgagacgtgttcca

SEQ ID NO: 148309 - DNA, 55 bp, Artificial
  Synthetic oligonucleotide
cctaggggacaagcaatgttaaagtatgcggatttggttaatgaggttcgaccac

SEQ ID NO: 148310 - DNA, 55 bp, Artificial
  Synthetic oligonucleotide
cctagattcacgaaatagattggcatgcgatgatttgcccttcccccagcaacta

SEQ ID NO: 148311 - DNA, 55 bp, Artificial
  Synthetic oligonucleotide
cctacgtacggccgggcaaacgcaacaacggacggtcttatgagctcatcggact

SEQ ID NO: 148312 - DNA, 55 bp, Artificial
  Synthetic oligonucleotide
cactggacgagaagatccttatttgctatgaatacctctcactggggtggatggc

SEQ ID NO: 148313 - DNA, 55 bp, Artificial
  Synthetic oligonucleotide
cctacacgtctatcgtctggcccaggggtttcactccaacaccgattaaagtcac

SEQ ID NO: 148314 - DNA, 55 bp, Artificial
  Synthetic oligonucleotide
cacttaacgtccttacggactgtttgaagtggaagattcctgcgaacaccgatgt

SEQ ID NO: 148315 - DNA, 54 bp, Artificial
  Synthetic oligonucleotide
cctaacctagcagcaaacgctactcaccttatttcgttccaaattcttattaac

SEQ ID NO: 148316 - DNA, 58 bp, Artificial
  Synthetic oligonucleotide
aggcaatatttacgcaaagtacttgagccaatccctaaattcttggctacctcagatc

SEQ ID NO: 148317 - DNA, 55 bp, Artificial
  Synthetic oligonucleotide
cctaacacacctcatagccaacgttcatttgtgtcaaagttccgttgtacctgtc

SEQ ID NO: 148318 - DNA, 54 bp, Artificial
  Synthetic oligonucleotide
cctaaatatgagggattaacgttccaccaatttgcggtaactagacctggtata

SEQ ID NO: 148319 - DNA, 55 bp, Artificial
  Synthetic oligonucleotide
aactgggtttcgagacagagcttgaaacgtaagcggcgttacgaactcgcatgct

SEQ ID NO: 148320 - DNA, 55 bp, Artificial
  Synthetic oligonucleotide
aacttcttgttggataatatctaagcctatccctccaatgcgagaggctgtacca

SEQ ID NO: 148321 - DNA, 52 bp, Artificial
  Synthetic oligonucleotide
ccgtttggtaaccttctatgctttgattaccgaaataatcccgaagccccaa

SEQ ID NO: 148322 - DNA, 55 bp, Artificial
  Synthetic oligonucleotide
aagaacgagtccatctaagattagtgtaacgttgaatgtgtcgacgcaaactacg

SEQ ID NO: 148323 - DNA, 55 bp, Artificial
  Synthetic oligonucleotide
atcgtggcctctgatgaaggggtctctctgacaggcagcgattccgatatttcga

SEQ ID NO: 148324 - DNA, 55 bp, Artificial
  Synthetic oligonucleotide
atcggatcggaatgtctacctggtaaagaatgatctccgggaattatatgagcga

SEQ ID NO: 148325 - DNA, 55 bp, Artificial
  Synthetic oligonucleotide
atcgcttctccattgctaacatactctgattcatttcttgcgccataacgctgta

SEQ ID NO: 148326 - DNA, 55 bp, Artificial
  Synthetic oligonucleotide
ccgctagggtggattttgcggacagaagtatatgtgaacaatcgttggtggccac

SEQ ID NO: 148327 - DNA, 56 bp, Artificial
  Synthetic oligonucleotide
tagccgaaaatcgtgtacaaaatgacatgtttaataaaaataaggagcgggataga

SEQ ID NO: 148328 - DNA, 55 bp, Artificial
  Synthetic oligonucleotide
atacgctctttactgtcgaatacacgggctaagaacgtagcgaactcagcacgcg

SEQ ID NO: 148329 - DNA, 53 bp, Artificial
  Synthetic oligonucleotide
ccgcggttgatttccgggcaactgctagaagaaacgaaacacgtgaaacctac

SEQ ID NO: 148330 - DNA, 55 bp, Artificial
  Synthetic oligonucleotide
cagccggagacatgcttgttagtacgctgttggctgctaatatcgcagtcatgct

SEQ ID NO: 148331 - DNA, 55 bp, Artificial
  Synthetic oligonucleotide
atacggaagcgtcatatgaaacggctggtaatacatggtggatagcgtacctttc

SEQ ID NO: 148332 - DNA, 54 bp, Artificial
  Synthetic oligonucleotide
accccaggagcgactagatcgggcttcacttcccatgtttgtgttaccggtccc

SEQ ID NO: 148333 - DNA, 55 bp, Artificial
  Synthetic oligonucleotide
ccgcgctcgaaaggatacccaacttcctccagagcaaggcaatatttacgcaaag

SEQ ID NO: 148334 - DNA, 55 bp, Artificial
  Synthetic oligonucleotide
ccgcgattaaatgctgtgatccctgtacgggccaattctttgatcccatacggtc

SEQ ID NO: 148335 - DNA, 55 bp, Artificial
  Synthetic oligonucleotide
cagccgttctttggcgatgcgtccgactaaaacttcaccgctctcgtcaacactg

SEQ ID NO: 148336 - DNA, 55 bp, Artificial
  Synthetic oligonucleotide
agccaaatctgtgactacatcagttcctaatacctttcctggaaccttcttaccg

SEQ ID NO: 148337 - DNA, 55 bp, Artificial
  Synthetic oligonucleotide
ccgcgacgtaaatgatgcgttaataaccattgatccccgtaccggcatacaaccc

SEQ ID NO: 148338 - DNA, 59 bp, Artificial
  Synthetic oligonucleotide
tagctttcgccgagtttgaaagggatatgatcgttgaacgtacagctgaagggaaggca

SEQ ID NO: 148339 - DNA, 55 bp, Artificial
  Synthetic oligonucleotide
ccgccttatatcagaattctcgcgttgatttcactcgtcagtttgattggtgcga

SEQ ID NO: 148340 - DNA, 54 bp, Artificial
  Synthetic oligonucleotide
ccgccctgactgtattgaaattctaacctacgggtcttatcgacccgggagaca

SEQ ID NO: 148341 - DNA, 53 bp, Artificial
  Synthetic oligonucleotide
ccgcccggtcacaacggcccgtactttcacctttccgtaaggcgatgtcagcc

SEQ ID NO: 148342 - DNA, 55 bp, Artificial
  Synthetic oligonucleotide
accatattatcgagcgtaaggtgcactatacgagtccgactgatgcgccaaaacc

SEQ ID NO: 148343 - DNA, 55 bp, Artificial
  Synthetic oligonucleotide
accaccttcgggatgctgaaaccccgcaattccgctcaaccaggcgatagaatac

SEQ ID NO: 148344 - DNA, 55 bp, Artificial
  Synthetic oligonucleotide
cagctacacttacagatttgtgtctatgaggaacggttttccgtttctctgactg

SEQ ID NO: 148345 - DNA, 55 bp, Artificial
  Synthetic oligonucleotide
cagctattgtctcttggcgaagagtatcttttaaagcgataagtccaaggatgcc

SEQ ID NO: 148346 - DNA, 53 bp, Artificial
  Synthetic oligonucleotide
aaggaagcctgtccttaatgactgttaaagtgggaccggctaatccgtttaca

SEQ ID NO: 148347 - DNA, 55 bp, Artificial
  Synthetic oligonucleotide
ccgcatccaagatgcggatgttgcctgtcgttcccaacgggaccgatgccaggct

SEQ ID NO: 148348 - DNA, 55 bp, Artificial
  Synthetic oligonucleotide
ccgcagccatagaactaatatccgaagcgaaattcgaatacatgtcttctgagct

SEQ ID NO: 148349 - DNA, 60 bp, Artificial
  Synthetic oligonucleotide
tagcttttgaacggtatgactccgcgtactctcgatcatcagtaatcattacatctatct

SEQ ID NO: 148350 - DNA, 55 bp, Artificial
  Synthetic oligonucleotide
aaggagcgctgcatacctaaactagaggaaaaatccagtcatgacagggggctga

SEQ ID NO: 148351 - DNA, 55 bp, Artificial
  Synthetic oligonucleotide
cagacattctcaaatgtagcgaaccgtttagaccgtctccccatttcacgtgtgc

SEQ ID NO: 148352 - DNA, 55 bp, Artificial
  Synthetic oligonucleotide
cagaccggaaggactggtggagtgcttagaagtgagaatgccggtatgagtagcg

SEQ ID NO: 148353 - DNA, 55 bp, Artificial
  Synthetic oligonucleotide
ccgtaaggttgaacatctacctagcgatattgatttattattcgccagtgaacag

SEQ ID NO: 148354 - DNA, 55 bp, Artificial
  Synthetic oligonucleotide
ccgtaacaatcgtaccgtgcgtacacacttcaccgttaattgccacgaggtccgc

SEQ ID NO: 148355 - DNA, 55 bp, Artificial
  Synthetic oligonucleotide
ccggtgtctctgtagctgtttctcgttttacactaatacgataatagtctttgcc

SEQ ID NO: 148356 - DNA, 55 bp, Artificial
  Synthetic oligonucleotide
ccggtcctcatcctaccgcgatatttgccctgaacgatgtattagccattgggac

SEQ ID NO: 148357 - DNA, 55 bp, Artificial
  Synthetic oligonucleotide
cagagccacttcccacgatcttaggccaaatgttttgtacatccccagcattcgt

SEQ ID NO: 148358 - DNA, 55 bp, Artificial
  Synthetic oligonucleotide
ccggtaccaaattagccctatcccgattaggatttgatgtaactgaggtgactcc

SEQ ID NO: 148359 - DNA, 55 bp, Artificial
  Synthetic oligonucleotide
cagagcgcacgaagcttttacaaggtatcacggtatatatgacaaacattcctac

SEQ ID NO: 148360 - DNA, 54 bp, Artificial
  Synthetic oligonucleotide
taataactgacgctaagaggggttggcttaaaagtagggtagacctccgctata

SEQ ID NO: 148361 - DNA, 55 bp, Artificial
  Synthetic oligonucleotide
cagatactcttactcaaatggagtatacacgctccaagatagtcgtatagcctca

SEQ ID NO: 148362 - DNA, 55 bp, Artificial
  Synthetic oligonucleotide
ataccaccctcattttcatgtactaattccagtgaagagaagctatttcactggt

SEQ ID NO: 148363 - DNA, 55 bp, Artificial
  Synthetic oligonucleotide
ccgggagatgtgtttctccataatcacgttgttcccacgaagtgtcctccggaga

SEQ ID NO: 148364 - DNA, 52 bp, Artificial
  Synthetic oligonucleotide
ccggccgtctgataaataggcccggacaatcgtgaaacggccttttggaacg

SEQ ID NO: 148365 - DNA, 55 bp, Artificial
  Synthetic oligonucleotide
cagatcgacattctgcagttaaggacgaccgaccaacaccgattcggcaaatggg

SEQ ID NO: 148366 - DNA, 54 bp, Artificial
  Synthetic oligonucleotide
ccggagtcatccctaaacgatccgcaacaattttcggtgtatacatttccgatt

SEQ ID NO: 148367 - DNA, 55 bp, Artificial
  Synthetic oligonucleotide
cagatcggtggaaacacatcagttacacctggtagacaattgtctcaggggccga

SEQ ID NO: 148368 - DNA, 55 bp, Artificial
  Synthetic oligonucleotide
ccggaccaaccgggtcaactgaattaactggggcaatttcagtcgctactgccag

SEQ ID NO: 148369 - DNA, 55 bp, Artificial
  Synthetic oligonucleotide
ccggaaattggattagttcacaatggttagcggcggcgtttgctatcggtattcc

SEQ ID NO: 148370 - DNA, 55 bp, Artificial
  Synthetic oligonucleotide
ccggaaaagcatctataaacgcacgaccaatattagtagttcgaatctgactgtt

SEQ ID NO: 148371 - DNA, 60 bp, Artificial
  Synthetic oligonucleotide
taatagatcgcgattctccaggtccaataacaatccgcctattgctgtaccattaactgt

SEQ ID NO: 148372 - DNA, 55 bp, Artificial
  Synthetic oligonucleotide
aagcggatatgctaaaggaatcggaataggtttaggaaccttaacgatcactgca

SEQ ID NO: 148373 - DNA, 55 bp, Artificial
  Synthetic oligonucleotide
ccgctgtctacaaggagttgtcttacattcacgtggcacgcgaggctaggggaaa

SEQ ID NO: 148374 - DNA, 55 bp, Artificial
  Synthetic oligonucleotide
ccgctgtcatcgttacaataagcaatccgacagttggaataagcgtcacccaaac

SEQ ID NO: 148375 - DNA, 54 bp, Artificial
  Synthetic oligonucleotide
ccgctctgctgattcgaaccgaaagcggcgtccctaccgttccccgatagacgg

SEQ ID NO: 148376 - DNA, 55 bp, Artificial
  Synthetic oligonucleotide
cagcaattgagaataccgaggaagtctcctttgacggggtcctgtcctcttacac

SEQ ID NO: 148377 - DNA, 55 bp, Artificial
  Synthetic oligonucleotide
aagcggttaaacacaagaggcttcgtctcatcgtacatgttgatacctctctatc

SEQ ID NO: 148378 - DNA, 49 bp, Artificial
  Synthetic oligonucleotide
cgacctggaaaggtccgtcgtagagggtaacaaccccgtagtcgaaact

SEQ ID NO: 148379 - DNA, 55 bp, Artificial
  Synthetic oligonucleotide
caccgatgttagaaacgtttaccattccacctatgccggaagcgttccctgatat

SEQ ID NO: 148380 - DNA, 55 bp, Artificial
  Synthetic oligonucleotide
caccgccacggttactatgagcgaaacgcattgaccccacatggtgattatcgca

SEQ ID NO: 148381 - DNA, 55 bp, Artificial
  Synthetic oligonucleotide
aacgctacatgtggtgcgtcatacatataatttcgtccggcacttaacattgccc

SEQ ID NO: 148382 - DNA, 60 bp, Artificial
  Synthetic oligonucleotide
taatgtgcgtagaatctgtcatcagcgcacgtcctcccaccatccggtgctctgtcgctt

SEQ ID NO: 148383 - DNA, 55 bp, Artificial
  Synthetic oligonucleotide
cgacatttgagtggttttaatcgaggtgattggcaatgaatttacgggctacacg

SEQ ID NO: 148384 - DNA, 55 bp, Artificial
  Synthetic oligonucleotide
cgacacaacttatcgaccgctcgacaaataatgacacccttttctcaccgtaata

SEQ ID NO: 148385 - DNA, 55 bp, Artificial
  Synthetic oligonucleotide
cgacaatcgaccatcttattatcactcatgctcacgcagaccatgtaggcggtgc

SEQ ID NO: 148386 - DNA, 54 bp, Artificial
  Synthetic oligonucleotide
cgaatgttttaagcctaacgaatttccatgcttcccaaataagtgggagtagga

SEQ ID NO: 148387 - DNA, 55 bp, Artificial
  Synthetic oligonucleotide
caccgcgaataataaaccctctcgtcggattaagtatgccatctagacttcctcc

SEQ ID NO: 148388 - DNA, 54 bp, Artificial
  Synthetic oligonucleotide
cgaatggagaataatgagttagtcaaacgggtaaaagatacaggcgaccgtagg

SEQ ID NO: 148389 - DNA, 55 bp, Artificial
  Synthetic oligonucleotide
cgaatgaacatcaatgtttgcagctaataggatagatgcaatgtgggctgacggt

SEQ ID NO: 148390 - DNA, 55 bp, Artificial
  Synthetic oligonucleotide
cgaatccacttccgttaaccaaccgcttgaagtactaatctgtggtagtgaaggc

SEQ ID NO: 148391 - DNA, 55 bp, Artificial
  Synthetic oligonucleotide
cacctcaccggagaggttacaaaatgtacggactggcgaggtgtaagtggaggac

SEQ ID NO: 148392 - DNA, 55 bp, Artificial
  Synthetic oligonucleotide
cgaaggggttactgctgttattgaagcgaagcctacggagttgccagttcagtct

SEQ ID NO: 148393 - DNA, 56 bp, Artificial
  Synthetic oligonucleotide
taattcaaaccctacgaagaaatgatttccctctgcgtctctacctctaggtggta

SEQ ID NO: 148394 - DNA, 55 bp, Artificial
  Synthetic oligonucleotide
cgaaggatccgtcacagctaattcgatggcggtttcctccaataatggacggact

SEQ ID NO: 148395 - DNA, 55 bp, Artificial
  Synthetic oligonucleotide
cgaagccatggctacctaacgttcggttcatagatcatacggtgtctgtgccaac

SEQ ID NO: 148396 - DNA, 55 bp, Artificial
  Synthetic oligonucleotide
cacctggagcggattccattaacgctcgccatacggacgttgcgttccagtatat

SEQ ID NO: 148397 - DNA, 55 bp, Artificial
  Synthetic oligonucleotide
cgaagaaatgatttccctctgcgtctctacctctaggtggtaattgagctttggg

SEQ ID NO: 148398 - DNA, 55 bp, Artificial
  Synthetic oligonucleotide
cgaactatcatcaaacgcataggatgtccaagcatccgcaatatatctgcaggtc

SEQ ID NO: 148399 - DNA, 55 bp, Artificial
  Synthetic oligonucleotide
cgaaccgcggatcttaccaaaattgaaggaacgaatccttctcatgccctgaagg

SEQ ID NO: 148400 - DNA, 55 bp, Artificial
  Synthetic oligonucleotide
cgaaattagggcaggaaatgcactctaagcttgtccgattagcgattgaatgggg

SEQ ID NO: 148401 - DNA, 55 bp, Artificial
  Synthetic oligonucleotide
atctcgcacatcctggcgttcacaagctacatgaacgtcctgccatatatgtcgg

SEQ ID NO: 148402 - DNA, 55 bp, Artificial
  Synthetic oligonucleotide
cgaaattaattctcgaacgatcatcaaacgcataggatgtccaagcatccgcaat

SEQ ID NO: 148403 - DNA, 55 bp, Artificial
  Synthetic oligonucleotide
agttatcgcccgtcagtttcgctacgtacgtaatgacttctgacaatggatacac

SEQ ID NO: 148404 - DNA, 59 bp, Artificial
  Synthetic oligonucleotide
tacaagacacgtttaaaattagttatacacgtgcatcgagattaatagatgccttacaa

SEQ ID NO: 148405 - DNA, 55 bp, Artificial
  Synthetic oligonucleotide
cgaaacttgagcggaaagctccgcgtatcattgcgatacatgaattattcaggtt

SEQ ID NO: 148406 - DNA, 55 bp, Artificial
  Synthetic oligonucleotide
cgagtgactctgcgccgaaaatgtaccggggctaaatacaccaccgaagctgcgg

SEQ ID NO: 148407 - DNA, 55 bp, Artificial
  Synthetic oligonucleotide
caccaatcgtcccgagttcttccttttactaatgatacgatataaacgcaggctc

SEQ ID NO: 148408 - DNA, 55 bp, Artificial
  Synthetic oligonucleotide
caccacgcaatgctgcatgcaatcattccaagtgagcaggatttcaaaagttccg

SEQ ID NO: 148409 - DNA, 55 bp, Artificial
  Synthetic oligonucleotide
cgagtaagctttacaggtgcaatgagacctttcttaattcgcacaccgaatgatg

SEQ ID NO: 148410 - DNA, 55 bp, Artificial
  Synthetic oligonucleotide
cgaggtagttcgcgaagggatgctaatggttgctgtgagcgggactgctgtccgt

SEQ ID NO: 148411 - DNA, 55 bp, Artificial
  Synthetic oligonucleotide
atctgaacgtccaggtacaccccaagactttcatcctcatcgtgtattaccacgc

SEQ ID NO: 148412 - DNA, 55 bp, Artificial
  Synthetic oligonucleotide
cacccatagagcgcaggggcaccgtaacgcggctcataggacgcttggcaatcga

SEQ ID NO: 148413 - DNA, 55 bp, Artificial
  Synthetic oligonucleotide
cgagggttcttatctagtaaaggagaacagttagaattaatggcaccaggtgtag

SEQ ID NO: 148414 - DNA, 55 bp, Artificial
  Synthetic oligonucleotide
agcctattgttcggatctgtcaaagggagctatacaggcgcaattgatcgcaagg

SEQ ID NO: 148415 - DNA, 58 bp, Artificial
  Synthetic oligonucleotide
caatcaaatgagtgaaaaaacggctttgttgcttatcgatgttcaaaacatcatgttt

SEQ ID NO: 148416 - DNA, 53 bp, Artificial
  Synthetic oligonucleotide
agtatagggggtgacacctgcccggtgctggaaggttaaggagaggggttagc

SEQ ID NO: 148417 - DNA, 55 bp, Artificial
  Synthetic oligonucleotide
cgagcttcctgagggtattaaagtgattaaggcgccagaattgtgggcaaaaggg

SEQ ID NO: 148418 - DNA, 55 bp, Artificial
  Synthetic oligonucleotide
aaccgtgcgctgtcactttaaagaacacttcgttaacaccatacttcgcatcaac

SEQ ID NO: 148419 - DNA, 55 bp, Artificial
  Synthetic oligonucleotide
agtgtagtattcccatcatttgcaagtgcggagtataacgacattggttcagtaa

SEQ ID NO: 148420 - DNA, 55 bp, Artificial
  Synthetic oligonucleotide
cgagctatcgattctattcggccctatgcactcctagctaatttgtctatccaag

SEQ ID NO: 148421 - DNA, 55 bp, Artificial
  Synthetic oligonucleotide
cgagcgcgacaccaagggctggcgactctacaacaaagatgatttatccgctata

SEQ ID NO: 148422 - DNA, 55 bp, Artificial
  Synthetic oligonucleotide
cgagcgcaaatggaaccggcacatcaaaagcattcgaaatcggtcctgtagaagg

SEQ ID NO: 148423 - DNA, 55 bp, Artificial
  Synthetic oligonucleotide
cgagacaggttgcggattgaagcggtcatgcttggaggaggcgtcgtaaactgtg

SEQ ID NO: 148424 - DNA, 55 bp, Artificial
  Synthetic oligonucleotide
aacgaaaagattccgtcattttcgactggtcgcccacatgtaagaataaatgccc

SEQ ID NO: 148425 - DNA, 55 bp, Artificial
  Synthetic oligonucleotide
cgacttgatcagttctgccgctcccttcagttcacgctcgctcggctctttgcga

SEQ ID NO: 148426 - DNA, 55 bp, Artificial
  Synthetic oligonucleotide
cgactgtatgggcttgtacacaacgtccggcagagattcccgccattgttatggg

SEQ ID NO: 148427 - DNA, 54 bp, Artificial
  Synthetic oligonucleotide
tacacgttactttggagaatacttcccaaacaacaagatacctaaaaatcttga

SEQ ID NO: 148428 - DNA, 55 bp, Artificial
  Synthetic oligonucleotide
caccgacttagaaagtgccattatgtccagccgtgattttgtcttattccaccct

SEQ ID NO: 148429 - DNA, 55 bp, Artificial
  Synthetic oligonucleotide
cgactcctgacgctccgtgtgcccaaatcgcggaccatgtgtttacggccgccta

SEQ ID NO: 148430 - DNA, 55 bp, Artificial
  Synthetic oligonucleotide
cgactacacaacacgaaatgtatacctcttcgttctcatgctactaatctatcag

SEQ ID NO: 148431 - DNA, 55 bp, Artificial
  Synthetic oligonucleotide
caccgatgtatccaacagttatcttagcaggcactgcccgtagtccctacggtga

SEQ ID NO: 148432 - DNA, 55 bp, Artificial
  Synthetic oligonucleotide
cgacgtcttctaggtatgtgggtaactccattcgatcgacactatttcgatacgt

SEQ ID NO: 148433 - DNA, 55 bp, Artificial
  Synthetic oligonucleotide
cgacgaaatggtgtcaattagagtaaccctatacgtattttgacgctttcgcatc

SEQ ID NO: 148434 - DNA, 55 bp, Artificial
  Synthetic oligonucleotide
cctgtaggaagagaccctgtaatgagtagagacccgtttcttacgagagaccctg

SEQ ID NO: 148435 - DNA, 55 bp, Artificial
  Synthetic oligonucleotide
cctgtagctgcatgtaattggctacataatcgaacgagggaatcactcgctgtcc

SEQ ID NO: 148436 - DNA, 55 bp, Artificial
  Synthetic oligonucleotide
cacgtcatgacttttatgcgtctgaagacacaactgcttttcgcgtatttaatag

SEQ ID NO: 148437 - DNA, 55 bp, Artificial
  Synthetic oligonucleotide
cctggagatgcacttagttgtcttgttattgtccggcttccctttacgcctccgt

SEQ ID NO: 148438 - DNA, 56 bp, Artificial
  Synthetic oligonucleotide
agtacgcccagtaacactgtaggatttacgaaggtagtacgatatgtgtcgttagc

SEQ ID NO: 148439 - DNA, 55 bp, Artificial
  Synthetic oligonucleotide
cctgccaaatctttgtcactcactctatcccaagacgcaatcaaagcaccattag

SEQ ID NO: 148440 - DNA, 55 bp, Artificial
  Synthetic oligonucleotide
ataaagggcgctggtcgtatgtttagcggtgcgaagaacttaatgagtggtggaa

SEQ ID NO: 148441 - DNA, 55 bp, Artificial
  Synthetic oligonucleotide
cacgtgttcatgaagggaacggtaattccagtcttggataatcggatccagtccc

SEQ ID NO: 148442 - DNA, 55 bp, Artificial
  Synthetic oligonucleotide
cctgattatggaaagtacgtccattaggcaaacggaccatcgttccgtgaacggc

SEQ ID NO: 148443 - DNA, 55 bp, Artificial
  Synthetic oligonucleotide
cctgacaaaacaccatctataatggccataacactaatcggcaatccggtcaaaa

SEQ ID NO: 148444 - DNA, 55 bp, Artificial
  Synthetic oligonucleotide
aacgtgatattttcacttggtgcagccgacaggaacctatcggccataagatcgg

SEQ ID NO: 148445 - DNA, 55 bp, Artificial
  Synthetic oligonucleotide
atctccactgccgtaaagtcctacgtcaacacgagaagagtattcaacaggtgtg

SEQ ID NO: 148446 - DNA, 55 bp, Artificial
  Synthetic oligonucleotide
cctctggcttgcaagcaatataggctgtcagctcacgtccttttagcacttcagg

SEQ ID NO: 148447 - DNA, 55 bp, Artificial
  Synthetic oligonucleotide
ataaatttctttcgcttcgtttatgtttgtcgaatccatttcactgtacatggaa

SEQ ID NO: 148448 - DNA, 55 bp, Artificial
  Synthetic oligonucleotide
cctctgaatcgagagaaaagcgttctatgggcttcacaggagcccgaaaagtgga

SEQ ID NO: 148449 - DNA, 59 bp, Artificial
  Synthetic oligonucleotide
tacactatcccttgcctagactgggttcaagtcacttttaaatctgtacagaattcaca

SEQ ID NO: 148450 - DNA, 54 bp, Artificial
  Synthetic oligonucleotide
cctctcgaataacaaagaatgtttaagcgggtccacgtctgtaatgaaaaggga

SEQ ID NO: 148451 - DNA, 55 bp, Artificial
  Synthetic oligonucleotide
cactaatcgggatgctactcggcggtttacccgctttgctaattacggcatcgca

SEQ ID NO: 148452 - DNA, 55 bp, Artificial
  Synthetic oligonucleotide
cctcggctagccaccgttttccaatgttcaggagtcgtttgagtatctacttcca

SEQ ID NO: 148453 - DNA, 55 bp, Artificial
  Synthetic oligonucleotide
cctcggcctgaagtacaagcgggttgtgaacatcgggctcattatcgtgtccctg

SEQ ID NO: 148454 - DNA, 55 bp, Artificial
  Synthetic oligonucleotide
agccattgtaggcttagataaatatgtccatgaggctaatcataagggtactacc

SEQ ID NO: 148455 - DNA, 55 bp, Artificial
  Synthetic oligonucleotide
cctcgcagatacgtgtgccttcccaatcatgcgttttaatgtttcgactacatgc

SEQ ID NO: 148456 - DNA, 51 bp, Artificial
  Synthetic oligonucleotide
cctcgaagacgatttcgtatgtttcaccaggtttaacgtttaacgtatcct

SEQ ID NO: 148457 - DNA, 55 bp, Artificial
  Synthetic oligonucleotide
atctccaccaattgcccacgaaccgaatcctatctctgaaactattaacccggtg

SEQ ID NO: 148458 - DNA, 55 bp, Artificial
  Synthetic oligonucleotide
cctccgattaattgccatacttgttcaggggaaccgaagatttccatagatgtag

SEQ ID NO: 148459 - DNA, 55 bp, Artificial
  Synthetic oligonucleotide
cctccccgattggaaatactggtccgtcgctacacaccttcttgtaggaatgtcc

SEQ ID NO: 148460 - DNA, 59 bp, Artificial
  Synthetic oligonucleotide
tacatagaacttgatcgtgatcatcaccggaccccgccggaactgttcacggctaccca

SEQ ID NO: 148461 - DNA, 55 bp, Artificial
  Synthetic oligonucleotide
cctccagaactttcgatctgcccgcttgtttgaggaacaacgcttctaaaacgcc

SEQ ID NO: 148462 - DNA, 55 bp, Artificial
  Synthetic oligonucleotide
caccttcgcggatatgccgtccgaaagttctaatcttcataaccgtaatcccctc

SEQ ID NO: 148463 - DNA, 55 bp, Artificial
  Synthetic oligonucleotide
cacgacagaatgggcatcataaggctgacgtccgcgaatcactcaaagtgtggtg

SEQ ID NO: 148464 - DNA, 53 bp, Artificial
  Synthetic oligonucleotide
aacgggcgtttacttgatatgtaccagtaccttttctaaagagaatttcagcg

SEQ ID NO: 148465 - DNA, 55 bp, Artificial
  Synthetic oligonucleotide
aacggtgtttagctaccatgactaagccagaggtatctcggtcaagacgactaac

SEQ ID NO: 148466 - DNA, 55 bp, Artificial
  Synthetic oligonucleotide
ccttttgtatcaaggggcgagaggcattttgtttgcctagtgactgtcgaactcg

SEQ ID NO: 148467 - DNA, 55 bp, Artificial
  Synthetic oligonucleotide
cacgaggtcgggcaatgtccgatttaggggacgatgcaaagatgtgggtagcttc

SEQ ID NO: 148468 - DNA, 55 bp, Artificial
  Synthetic oligonucleotide
cacgcacgatgaagaagtagctactatcgcacatagacgcttccgcatgtacgat

SEQ ID NO: 148469 - DNA, 55 bp, Artificial
  Synthetic oligonucleotide
ccttggactgaattttcttccagctcccgtcccgtaatgctgacacatacggcgt

SEQ ID NO: 148470 - DNA, 55 bp, Artificial
  Synthetic oligonucleotide
cacgcataccatttgctcgtgcatgcatacgagtcacaattacaatattagcggg

SEQ ID NO: 148471 - DNA, 58 bp, Artificial
  Synthetic oligonucleotide
tacatgtgctagtgtttatagaggttaggttatcgaggagttatgattaattcgggag

SEQ ID NO: 148472 - DNA, 55 bp, Artificial
  Synthetic oligonucleotide
agaatctgttgtgattggaccacctaatttaaagcgttttacggatgaacagcgg

SEQ ID NO: 148473 - DNA, 55 bp, Artificial
  Synthetic oligonucleotide
agttgcaacacgtcttttgcactttgtccctgatgcatagcaacttgtcccagta

SEQ ID NO: 148474 - DNA, 55 bp, Artificial
  Synthetic oligonucleotide
ccttctccacatagctaggcttcagatggttcatgatcctatgattatgcgcttg

SEQ ID NO: 148475 - DNA, 55 bp, Artificial
  Synthetic oligonucleotide
ccttctatgcaattggtcggaagtggtggtgtaattatcactaaacagacgtttg

SEQ ID NO: 148476 - DNA, 55 bp, Artificial
  Synthetic oligonucleotide
ccttccccgggttcccatcttgtgtccggattcatggacgatgtcaaactgaaga

SEQ ID NO: 148477 - DNA, 55 bp, Artificial
  Synthetic oligonucleotide
ccttccactcgagcacttgatcaatgaatgggtgttcctctttacgaaagtgctg

SEQ ID NO: 148478 - DNA, 55 bp, Artificial
  Synthetic oligonucleotide
ccttcaaatcaggggagcagaggtagataggctggctcaagggtgtacgggtgtt

SEQ ID NO: 148479 - DNA, 55 bp, Artificial
  Synthetic oligonucleotide
cacggaacgatggtccgtttgcctaatggacgtactttccataatcaggggtagc

SEQ ID NO: 148480 - DNA, 55 bp, Artificial
  Synthetic oligonucleotide
ccttagattgattgacatgcgctattacctataagagacctaatactccaacgca

SEQ ID NO: 148481 - DNA, 55 bp, Artificial
  Synthetic oligonucleotide
ccttactcatatatggtgcaggcacagccacaaatttacaagcccgttatgccgg

SEQ ID NO: 148482 - DNA, 57 bp, Artificial
  Synthetic oligonucleotide
agtaagcaagccgtgtctacgtaagaacaggtcgatacctttgattgacggttgcga

SEQ ID NO: 148483 - DNA, 55 bp, Artificial
  Synthetic oligonucleotide
cctgttagtagacggatacaacatgattggagcttggccgcagctaaaggattta

SEQ ID NO: 148484 - DNA, 55 bp, Artificial
  Synthetic oligonucleotide
cctgtgtgctaataccaagttatataccttttcgcagaagtcattagatggctcg

SEQ ID NO: 148485 - DNA, 55 bp, Artificial
  Synthetic oligonucleotide
cacgggaccattgaccgcctgcagctgagtgctaaacgagacgaatatgaacatg

SEQ ID NO: 148486 - DNA, 55 bp, Artificial
  Synthetic oligonucleotide
aacgtaagaagaatgtacttgcttccgaatactcgccgtactcttctttgttcga

SEQ ID NO: 148487 - DNA, 55 bp, Artificial
  Synthetic oligonucleotide
cctgtcagatattatgaaagaacaggggtatgctatttataatgcggatggttct

SEQ ID NO: 148488 - DNA, 55 bp, Artificial
  Synthetic oligonucleotide
ccatccctagaagtttccgtactatacaaggattcggagtacatacatttcggct

SEQ ID NO: 148489 - DNA, 55 bp, Artificial
  Synthetic oligonucleotide
catatgtgaatcctccacttctcccacgagttattggtcttataacgaatgacgt

SEQ ID NO: 148490 - DNA, 55 bp, Artificial
  Synthetic oligonucleotide
ccatcacaaatgtggcaagcataacgattattagtaagtgctcgcgcttctgagc

SEQ ID NO: 148491 - DNA, 55 bp, Artificial
  Synthetic oligonucleotide
ccatagtatatgcgtattctacaccttgaccgtaagcaccagtgtgttcctttac

SEQ ID NO: 148492 - DNA, 55 bp, Artificial
  Synthetic oligonucleotide
ccatacgttcgcatgtttcaattaatggggcaataactgcatggccacctaaagc

SEQ ID NO: 148493 - DNA, 57 bp, Artificial
  Synthetic oligonucleotide
agtaacatgaacggtaccaaatgaatgatttggaggagcatatatcgaataaagttt

SEQ ID NO: 148494 - DNA, 55 bp, Artificial
  Synthetic oligonucleotide
ccatacacggttgtccgttgtgacccctatagcatacccgtaagaagttccgtgc

SEQ ID NO: 148495 - DNA, 55 bp, Artificial
  Synthetic oligonucleotide
ccatacaccccaataattgttgtaatggcaggaatcgtttgtgcccaaccaatgg

SEQ ID NO: 148496 - DNA, 55 bp, Artificial
  Synthetic oligonucleotide
ccataatcgcttatggtgacagtggatgtcccaaggcgagagtttctcacctgtt

SEQ ID NO: 148497 - DNA, 55 bp, Artificial
  Synthetic oligonucleotide
aatgacgagaaacgtcagcatcgacgtccattggtcgatcaagtagaccgccccg

SEQ ID NO: 148498 - DNA, 55 bp, Artificial
  Synthetic oligonucleotide
ccataagatgacatagcctaccttcatttcctgaatcccttcaatatataacgcg

SEQ ID NO: 148499 - DNA, 55 bp, Artificial
  Synthetic oligonucleotide
ccagttgtagatgattttgggcatggaactgcgatcgctggaattatagcggcca

SEQ ID NO: 148500 - DNA, 55 bp, Artificial
  Synthetic oligonucleotide
atcaaaagactgtgggacccaatggcataccatagtatctagacgttgaatttcc

SEQ ID NO: 148501 - DNA, 55 bp, Artificial
  Synthetic oligonucleotide
aatgattgtatccatagatacccgctactgttgcagcggctagacctaccgcaac

SEQ ID NO: 148502 - DNA, 55 bp, Artificial
  Synthetic oligonucleotide
ccagtattatgagtggacggattaacctcaaaatttgcaaggggttactctgtcc

SEQ ID NO: 148503 - DNA, 52 bp, Artificial
  Synthetic oligonucleotide
ccagtaccgtgagggaaaggtgaaaagcaccccggaaggggagtgaaagaga

SEQ ID NO: 148504 - DNA, 54 bp, Artificial
  Synthetic oligonucleotide
taccgttatcaccaacatatttactccaacctaaggaagcccccatttcaatac

SEQ ID NO: 148505 - DNA, 55 bp, Artificial
  Synthetic oligonucleotide
ccaggttttggaaacataacactatcttcgtcaattaaatcgtctggcaacccaa

SEQ ID NO: 148506 - DNA, 55 bp, Artificial
  Synthetic oligonucleotide
ccaggtgtgtctaccggaataatctcaaccgttcttcccgctttcggagagtgaa

SEQ ID NO: 148507 - DNA, 55 bp, Artificial
  Synthetic oligonucleotide
ccaggtattcagtttaaaggactaaagagccgaaatcttgctaatccgactccag

SEQ ID NO: 148508 - DNA, 55 bp, Artificial
  Synthetic oligonucleotide
catcatggaataattccgtatcttgtcggcatgtatcgctacttattccctctgc

SEQ ID NO: 148509 - DNA, 55 bp, Artificial
  Synthetic oligonucleotide
aatgattgtgcagatcggagaacaggatcagttccaggacaatgagcccaaccgg

SEQ ID NO: 148510 - DNA, 55 bp, Artificial
  Synthetic oligonucleotide
ccaggcggttatggatgcaaaacgtcgattgggtgctaatgccgctccccagcta

SEQ ID NO: 148511 - DNA, 55 bp, Artificial
  Synthetic oligonucleotide
ccaggcgaccacattcgcgtgtttagcacttaagcatatctctcgtcttacgtaa

SEQ ID NO: 148512 - DNA, 55 bp, Artificial
  Synthetic oligonucleotide
ccagctgaattgcttggacagcatgatggcgataacactagcaatgagcagccga

SEQ ID NO: 148513 - DNA, 55 bp, Artificial
  Synthetic oligonucleotide
atcaatcgggtaaggggatcgcttttgtactagatgttgaccgtgttgtaggaat

SEQ ID NO: 148514 - DNA, 55 bp, Artificial
  Synthetic oligonucleotide
catccacctcccttgcagtcgatccgctcgactttgaatatcgtggagtgcctgc

SEQ ID NO: 148515 - DNA, 57 bp, Artificial
  Synthetic oligonucleotide
aggtgtcggtcctgccggtaccacctctgtatggtctatggagtatgacaaaggcgg

SEQ ID NO: 148516 - DNA, 55 bp, Artificial
  Synthetic oligonucleotide
aatcgcaatagtctgcatcacacgccccacgagacgctccaaccgcaccgcctag

SEQ ID NO: 148517 - DNA, 53 bp, Artificial
  Synthetic oligonucleotide
cccataaacaaacgatcctttaacaattttccatacgtcgctaacgtccctga

SEQ ID NO: 148518 - DNA, 55 bp, Artificial
  Synthetic oligonucleotide
cataagtgaagaagggtatagaacggttcttaagttagcgaatagggacgctgga

SEQ ID NO: 148519 - DNA, 55 bp, Artificial
  Synthetic oligonucleotide
acataatacatcccattctgctttcgttctccgttttggctgatctgctacatag

SEQ ID NO: 148520 - DNA, 55 bp, Artificial
  Synthetic oligonucleotide
cataatccacctcaacaatgtgataacggccattatccgtgaataatgcatcagc

SEQ ID NO: 148521 - DNA, 55 bp, Artificial
  Synthetic oligonucleotide
cccacgcacctgaaagaatttgcttaataccttcccacgcaccacgccagtcacc

SEQ ID NO: 148522 - DNA, 55 bp, Artificial
  Synthetic oligonucleotide
cccacctgggcgtaaaatcgttggaacggcacttgtacaatcaattacagttgat

SEQ ID NO: 148523 - DNA, 55 bp, Artificial
  Synthetic oligonucleotide
cccaccgtactttaggagtcctgacgtcgttctcatcacatcatctaatgtgcaa

SEQ ID NO: 148524 - DNA, 55 bp, Artificial
  Synthetic oligonucleotide
catacagatatagatagtcgaaattctctttctaatgcggcgaaatattggtcgc

SEQ ID NO: 148525 - DNA, 55 bp, Artificial
  Synthetic oligonucleotide
cccacaaggtggttatacaccgattaatccgcatagtttagcaatggcggagagc

SEQ ID NO: 148526 - DNA, 60 bp, Artificial
  Synthetic oligonucleotide
gtaagtgtcaatggtaagcggactgaaatggatcagcggtttatgctgatccatgaaagg

SEQ ID NO: 148527 - DNA, 60 bp, Artificial
  Synthetic oligonucleotide
tacctgtcaacggtaagcggacggaatgaagcgatagcgaaatgatggagcattaaggag

SEQ ID NO: 148528 - DNA, 55 bp, Artificial
  Synthetic oligonucleotide
cccaacagggaaataagctacttaaccgaaagtgagagtgctggcacgactgacg

SEQ ID NO: 148529 - DNA, 53 bp, Artificial
  Synthetic oligonucleotide
cccaaaacgacaaatgaagttcatcgtcagaaagcggatttggacgttccccg

SEQ ID NO: 148530 - DNA, 55 bp, Artificial
  Synthetic oligonucleotide
ccattgaccgtcaaagcgggaatgacgtcctgaaagtaaatgaccttgccatcgg

SEQ ID NO: 148531 - DNA, 55 bp, Artificial
  Synthetic oligonucleotide
ccattcccgtaccgcaaagcctgctcatacgccggattaggaaacgtgagaatgg

SEQ ID NO: 148532 - DNA, 55 bp, Artificial
  Synthetic oligonucleotide
ccatgttcaataatgctttggtgatcatcgtccaattatcaatctcttgcgagag

SEQ ID NO: 148533 - DNA, 55 bp, Artificial
  Synthetic oligonucleotide
ccatgttatagactgccagattgggattccgctcttgaaacgcttcagcataccg

SEQ ID NO: 148534 - DNA, 55 bp, Artificial
  Synthetic oligonucleotide
cataccaggctgagacggccgcaaactgaaactcggtttccatcgtccggacaat

SEQ ID NO: 148535 - DNA, 55 bp, Artificial
  Synthetic oligonucleotide
atatgtggaaagcatacaaaacagcgattgaaaccgccttaccgcattgtgttag

SEQ ID NO: 148536 - DNA, 55 bp, Artificial
  Synthetic oligonucleotide
catacggcgtaatatactgcgtcgtacttctgccaatgcctgatgtggagagcgt

SEQ ID NO: 148537 - DNA, 55 bp, Artificial
  Synthetic oligonucleotide
acagtcgcatccccataactcggagataacgtgacgtccgattgtttccatcatg

SEQ ID NO: 148538 - DNA, 60 bp, Artificial
  Synthetic oligonucleotide
aggtgctccaatgacactatcatagtgcgaacttacaacgacagctttttcattacctgt

SEQ ID NO: 148539 - DNA, 55 bp, Artificial
  Synthetic oligonucleotide
catacgttgcgagtgcaccttgttgttttacgtcccataaaccaaattgtgctac

SEQ ID NO: 148540 - DNA, 55 bp, Artificial
  Synthetic oligonucleotide
catagtctaacgaataacggtcgttaggtagagacttgcaggccatatccccgcg

SEQ ID NO: 148541 - DNA, 55 bp, Artificial
  Synthetic oligonucleotide
ccatggcagttaactgtgtaaatgggcacttatttattaagtgtattcgacggag

SEQ ID NO: 148542 - DNA, 55 bp, Artificial
  Synthetic oligonucleotide
atattgataagaagcgcttgatccgttagatacgacatttgacgcgggtattgtg

SEQ ID NO: 148543 - DNA, 55 bp, Artificial
  Synthetic oligonucleotide
acagccggccgctttgggtgttggaagcagacggggagattgctgcctggatcag

SEQ ID NO: 148544 - DNA, 55 bp, Artificial
  Synthetic oligonucleotide
acacacggaggtgcaattgaacttacgcgagtgagaaacttagctgcggaaccag

SEQ ID NO: 148545 - DNA, 55 bp, Artificial
  Synthetic oligonucleotide
acaatcggtactacactgtagggagagaggttgtacaaagaaagcccgtccaggc

SEQ ID NO: 148546 - DNA, 55 bp, Artificial
  Synthetic oligonucleotide
catgctaatgggcgtactcaatgcggattccgttctccctactgttatggcgatt

SEQ ID NO: 148547 - DNA, 55 bp, Artificial
  Synthetic oligonucleotide
ccaatgatatatttcgctccgacaccaacgactaaagcagtgagtagtacgccga

SEQ ID NO: 148548 - DNA, 55 bp, Artificial
  Synthetic oligonucleotide
ccaatctgaacggcctgcaattgacagtttcagacctaggagctcgtattacgag

SEQ ID NO: 148549 - DNA, 59 bp, Artificial
  Synthetic oligonucleotide
taccttgataagggcatcaaattagctattaatctagacactttatacctactaggtga

SEQ ID NO: 148550 - DNA, 55 bp, Artificial
  Synthetic oligonucleotide
ccaatatccaaatgttttacgcatagtatgagtacctaaagattctactccggca

SEQ ID NO: 148551 - DNA, 55 bp, Artificial
  Synthetic oligonucleotide
agagcgatcaggacgtccaatgtagcccgttttcactttatctccagcaagttcg

SEQ ID NO: 148552 - DNA, 55 bp, Artificial
  Synthetic oligonucleotide
aattttcagcatctaatgtgataccgatgtactgcttcgtattacgattcgccac

SEQ ID NO: 148553 - DNA, 55 bp, Artificial
  Synthetic oligonucleotide
catggacgagagttaaatgatcgagagttagaacaaccaacgccagttgtaatta

SEQ ID NO: 148554 - DNA, 55 bp, Artificial
  Synthetic oligonucleotide
ccaagtctcaccatctgaaacgtattgcaatttatcctcttcaccatcaacacca

SEQ ID NO: 148555 - DNA, 55 bp, Artificial
  Synthetic oligonucleotide
catggagcacccctgttgtgggatttgccttatcggaagcggtaagattcgtgta

SEQ ID NO: 148556 - DNA, 55 bp, Artificial
  Synthetic oligonucleotide
ccaacgagccagtatcagtcgtgggatataagatgttggtaccggctagatgcga

SEQ ID NO: 148557 - DNA, 55 bp, Artificial
  Synthetic oligonucleotide
ccaacctgtaaacgatgactacgagcagttaacgaaacgcatgttagagcacgac

SEQ ID NO: 148558 - DNA, 55 bp, Artificial
  Synthetic oligonucleotide
atcccgcatgctgtacaatctcgtacccaaccgcttgtttagtagcttgctctac

SEQ ID NO: 148559 - DNA, 55 bp, Artificial
  Synthetic oligonucleotide
catgtattgcgtgagtctgctatgccatctatcttaacagagaacggctttattg

SEQ ID NO: 148560 - DNA, 57 bp, Artificial
  Synthetic oligonucleotide
tacgaataaagcacgaaccggattaggcgttggatctacacgcataaacataaccat

SEQ ID NO: 148561 - DNA, 55 bp, Artificial
  Synthetic oligonucleotide
atcccctctgctaccttaatgtgtacgaactgccctggttcgttcatttgctgta

SEQ ID NO: 148562 - DNA, 55 bp, Artificial
  Synthetic oligonucleotide
catgttcatatgcgagctattttttatcaactggctcttattaatttcaaaatgg

SEQ ID NO: 148563 - DNA, 55 bp, Artificial
  Synthetic oligonucleotide
acaatccattcggtcgcttcaagaacaacggcaagctttgcttgaggcgagtacg

SEQ ID NO: 148564 - DNA, 55 bp, Artificial
  Synthetic oligonucleotide
acaaaagcgttggacaagctctgaggatatgccgagaaaactctttgcgttgggg

SEQ ID NO: 148565 - DNA, 55 bp, Artificial
  Synthetic oligonucleotide
atcccgacctagtttctatatgcccaataccgcactacgtattttggcatgaacg

SEQ ID NO: 148566 - DNA, 49 bp, Artificial
  Synthetic oligonucleotide
catttacactcctttacggttttccttaccgaggttaaaaggatacgag

SEQ ID NO: 148567 - DNA, 55 bp, Artificial
  Synthetic oligonucleotide
acaataccgtgaattcgttacgattaatcggatatgtggtcagtatccattggca

SEQ ID NO: 148568 - DNA, 55 bp, Artificial
  Synthetic oligonucleotide
acaatagaactcgaagctaaccggaaaggatggatattaggtctaaacggtgatc

SEQ ID NO: 148569 - DNA, 55 bp, Artificial
  Synthetic oligonucleotide
cattggaaacaatagaatgtttaacgcaggtggaacacacttacactatgcagaa

SEQ ID NO: 148570 - DNA, 55 bp, Artificial
  Synthetic oligonucleotide
cattctgtcagagttacacttcataatcgcatcttgatctccactattcgcttgc

SEQ ID NO: 148571 - DNA, 53 bp, Artificial
  Synthetic oligonucleotide
aggtgaccgaggaaaatttggatacggtttattacttggatggtgctttagct

SEQ ID NO: 148572 - DNA, 55 bp, Artificial
  Synthetic oligonucleotide
aatgcggtcttccaagcgatgatacataggtcgcaattccaatgtagacttcaat

SEQ ID NO: 148573 - DNA, 55 bp, Artificial
  Synthetic oligonucleotide
ccagcagcctggtattgtgccgcccatgcaccctcgctccctcaacggattccat

SEQ ID NO: 148574 - DNA, 55 bp, Artificial
  Synthetic oligonucleotide
aatgtagaaagcggcacaattgaaacgccggcatccattatagtcaggctggaaa

SEQ ID NO: 148575 - DNA, 55 bp, Artificial
  Synthetic oligonucleotide
ccacttgttaaagaaataccgtaggatgtgaacataaaataaccagctacaccag

SEQ ID NO: 148576 - DNA, 55 bp, Artificial
  Synthetic oligonucleotide
ccactgatcggtgtcttaaccaacaggaagttcgcttctgaatcgtagtaacccc

SEQ ID NO: 148577 - DNA, 55 bp, Artificial
  Synthetic oligonucleotide
ccactcgagctatggcttgcatatgtggtcctcggagcccatattatcggctttg

SEQ ID NO: 148578 - DNA, 55 bp, Artificial
  Synthetic oligonucleotide
ccacgctaaaatgagaccggctaaggcgatacaggtttaaccatggcttgggtag

SEQ ID NO: 148579 - DNA, 55 bp, Artificial
  Synthetic oligonucleotide
atcagccgcaacctgtaagaagcggattttactccaagcggttccgccttgagct

SEQ ID NO: 148580 - DNA, 53 bp, Artificial
  Synthetic oligonucleotide
ccacctcgttgcggtctttagctctcacccggtttaatgtgttacgaaccttg

SEQ ID NO: 148581 - DNA, 55 bp, Artificial
  Synthetic oligonucleotide
aatgtcgattccgcagtcattcgtctgattctccgagacggcccggcagtggacg

SEQ ID NO: 148582 - DNA, 60 bp, Artificial
  Synthetic oligonucleotide
aggtgaagaacgtgtcagaaaacgaacgcgcatattggaatcatgaagtagctgaacaac

SEQ ID NO: 148583 - DNA, 55 bp, Artificial
  Synthetic oligonucleotide
ccacctcactagcgccacgtaccgtgacaatgccatttctagcatctatacctct

SEQ ID NO: 148584 - DNA, 54 bp, Artificial
  Synthetic oligonucleotide
catccggacttgcaccggggccctacgcttttatcgaaacaaaggcgccagccg

SEQ ID NO: 148585 - DNA, 52 bp, Artificial
  Synthetic oligonucleotide
ccaccgttagggaaatgcgttttaaagaagggttaggttgtgtgcattgcgg

SEQ ID NO: 148586 - DNA, 55 bp, Artificial
  Synthetic oligonucleotide
acagacaacggctatgaatcgatcaaacgcacgtatcgctgtacagcttgcatgg

SEQ ID NO: 148587 - DNA, 55 bp, Artificial
  Synthetic oligonucleotide
catcgaatggaaggtgtgacaagcgctacggtgaatttagcgacaaatagtgcgg

SEQ ID NO: 148588 - DNA, 55 bp, Artificial
  Synthetic oligonucleotide
atcatgaccattgtcagctaataccatcgctaacgctgtgccccagctacctgct

SEQ ID NO: 148589 - DNA, 55 bp, Artificial
  Synthetic oligonucleotide
catcgggatgaatatactgcctttcatcctcgcaaatcagacacgagttgggcgg

SEQ ID NO: 148590 - DNA, 55 bp, Artificial
  Synthetic oligonucleotide
catcgtccccgtaatatccatccattagatgaggcccgctaacaaccagttcacc

SEQ ID NO: 148591 - DNA, 55 bp, Artificial
  Synthetic oligonucleotide
catctaataaatactgctcatcaacttctgttccgtacggcacttttccgcctgc

SEQ ID NO: 148592 - DNA, 55 bp, Artificial
  Synthetic oligonucleotide
catctttcgctgactctcaaggccaatggtacactccattcatcgcagctgtaag

SEQ ID NO: 148593 - DNA, 60 bp, Artificial
  Synthetic oligonucleotide
gtgtcacaaaaggggatgactccgcaacatacgggatcatgtgtcctcggtgtcctcata

SEQ ID NO: 148594 - DNA, 55 bp, Artificial
  Synthetic oligonucleotide
catgaagcgggattttgaccgggcaggcttctgaacaagcagcgcacagtgaaga

SEQ ID NO: 148595 - DNA, 55 bp, Artificial
  Synthetic oligonucleotide
ccacatataaggagcagaaccgtataaaatcgagccaacaaatgtagcccatgcc

SEQ ID NO: 148596 - DNA, 55 bp, Artificial
  Synthetic oligonucleotide
atccatcacgaatcacctcgtaaaataggttcgctatggagaggccagacacctg

SEQ ID NO: 148597 - DNA, 55 bp, Artificial
  Synthetic oligonucleotide
acacgttctgtagtagacggagccgataagtttactcgttttgctaattcacgca

SEQ ID NO: 148598 - DNA, 55 bp, Artificial
  Synthetic oligonucleotide
acacctataggattatatgatgtgaaaagtagtaaggtagttgccccacccgtga

SEQ ID NO: 148599 - DNA, 55 bp, Artificial
  Synthetic oligonucleotide
ccctttccgaggccggctgcttgtagggccagccttaagtaagtggtgttgacac

SEQ ID NO: 148600 - DNA, 55 bp, Artificial
  Synthetic oligonucleotide
cccttggcacaagagcaacggacgcatacgagggtgcgagagagaaagttcgtgc

SEQ ID NO: 148601 - DNA, 55 bp, Artificial
  Synthetic oligonucleotide
cccttgccggaataacaaagtcgccgtctataaacagcacaatatcccctttagc

SEQ ID NO: 148602 - DNA, 55 bp, Artificial
  Synthetic oligonucleotide
caggacgtttcatcaagtctgtgccgcgaactccatctttcaattcgcttccgcc

SEQ ID NO: 148603 - DNA, 55 bp, Artificial
  Synthetic oligonucleotide
caggcactcgcttcagaatgtgatgcggctttcgttcatagttcaactgctacac

SEQ ID NO: 148604 - DNA, 60 bp, Artificial
  Synthetic oligonucleotide
atcttgtgtatgatgaaatcggtattaatatttgctagtggaaaacaggttatattcgca

SEQ ID NO: 148605 - DNA, 55 bp, Artificial
  Synthetic oligonucleotide
caggctcagctaagagctgcgtctgcccatactaatcaagacgctgttgttcgtg

SEQ ID NO: 148606 - DNA, 55 bp, Artificial
  Synthetic oligonucleotide
cccttcgtttcgtctacgattgatggtcggatatacttcagtgacatcagttacg

SEQ ID NO: 148607 - DNA, 55 bp, Artificial
  Synthetic oligonucleotide
cagggacaacttatgtagggaagaaccggcaagctacttatacttctacagtcac

SEQ ID NO: 148608 - DNA, 55 bp, Artificial
  Synthetic oligonucleotide
ccctgattcaaacaagtcaggtcccttcaacgcgccgatcgttaaatgtgtcatg

SEQ ID NO: 148609 - DNA, 55 bp, Artificial
  Synthetic oligonucleotide
ccctgacctatacaccagagggaggaagtgtcaccatctcagcaagaccgagaaa

SEQ ID NO: 148610 - DNA, 51 bp, Artificial
  Synthetic oligonucleotide
aaggtcgttcaatctacaattaggggttattaaaactttcttaatctctaa

SEQ ID NO: 148611 - DNA, 55 bp, Artificial
  Synthetic oligonucleotide
ccctctcattctggtgtactgagcgggtaaactgtatgctcgctttagccgttag

SEQ ID NO: 148612 - DNA, 55 bp, Artificial
  Synthetic oligonucleotide
cagggagattcctgaccctctgtccgtttgctttggttggcttacagggcaccga

SEQ ID NO: 148613 - DNA, 55 bp, Artificial
  Synthetic oligonucleotide
ccctcggttacccgtttcgtattcaactatatccgccgatagagtcatagaccca

SEQ ID NO: 148614 - DNA, 55 bp, Artificial
  Synthetic oligonucleotide
ccctcgaaaccgggcatagcggtagccatgtagttctttggcgtccgcaaagctt

SEQ ID NO: 148615 - DNA, 58 bp, Artificial
  Synthetic oligonucleotide
atcttgtctgctctatttacgctaaggaacgtcagaacacttgtaagaacaataagta

SEQ ID NO: 148616 - DNA, 55 bp, Artificial
  Synthetic oligonucleotide
aaggttctgattattgcaaaattcccgatttgctcggagatgctggttttacccc

SEQ ID NO: 148617 - DNA, 55 bp, Artificial
  Synthetic oligonucleotide
ccctattcacttaacagttttcaccgtacacgacctctgcctaagacttgtccac

SEQ ID NO: 148618 - DNA, 55 bp, Artificial
  Synthetic oligonucleotide
ccctagctaatcgtgccttgtaatctcctagatcaatgactccatccgaactcgg

SEQ ID NO: 148619 - DNA, 55 bp, Artificial
  Synthetic oligonucleotide
ccctacacaacgatttatacagggtttcaaatttgtttggagcgtagactcataa

SEQ ID NO: 148620 - DNA, 55 bp, Artificial
  Synthetic oligonucleotide
cagggcgatctacgagtaaattgtaagttagcccaattagtacgaaaatgccacc

SEQ ID NO: 148621 - DNA, 55 bp, Artificial
  Synthetic oligonucleotide
ccctaataacataatcgctacacccgacattttatgaagccccgacatcgcataa

SEQ ID NO: 148622 - DNA, 53 bp, Artificial
  Synthetic oligonucleotide
ccctaaactttcgctaagttccgcttttgtcgcactcccaagttctatcaaag

SEQ ID NO: 148623 - DNA, 55 bp, Artificial
  Synthetic oligonucleotide
aagtaaaggaaggccggcaaaatctgcgtctatcttaacatagggccgctctaag

SEQ ID NO: 148624 - DNA, 55 bp, Artificial
  Synthetic oligonucleotide
cccggtgtgaaatgattccctcgagaagcgcatatccggcgattcgttaaatgat

SEQ ID NO: 148625 - DNA, 55 bp, Artificial
  Synthetic oligonucleotide
aagtagcaatcactgtatgaatgacctcggcagctgcatagacaccgatcgcgta

SEQ ID NO: 148626 - DNA, 60 bp, Artificial
  Synthetic oligonucleotide
atcttgagtgcaatatagtttaatacatcttgagcaacttcaatggagtattatcaacaa

SEQ ID NO: 148627 - DNA, 55 bp, Artificial
  Synthetic oligonucleotide
ccgcaccctttataatgagaatccttgtgttagcctgtgcgggctagccagaccg

SEQ ID NO: 148628 - DNA, 55 bp, Artificial
  Synthetic oligonucleotide
ccgcaccctgtcctcgcataaaaccggctgatcagggatcacaatgccaaatcgg

SEQ ID NO: 148629 - DNA, 55 bp, Artificial
  Synthetic oligonucleotide
ccgcaatgtctccaccaacgtgtttactaatagttacgccatcccattcaccata

SEQ ID NO: 148630 - DNA, 55 bp, Artificial
  Synthetic oligonucleotide
ccgcaaatacataagacaatcattgtaccgatgcccagtgttacatccggttgat

SEQ ID NO: 148631 - DNA, 55 bp, Artificial
  Synthetic oligonucleotide
atacgttgtatgcgatggttcatatggatgaagcgacaccacatatgcatattgg

SEQ ID NO: 148632 - DNA, 55 bp, Artificial
  Synthetic oligonucleotide
ccgattgtgtcaatcggtccagtttgtagatcatgaatgagttaccggaacggaa

SEQ ID NO: 148633 - DNA, 55 bp, Artificial
  Synthetic oligonucleotide
ccgattgattaccttcgcagtcacggtgtatcagaatcacaattcagagcggacg

SEQ ID NO: 148634 - DNA, 54 bp, Artificial
  Synthetic oligonucleotide
ccgattaccggacttggcacaaactacgcttttcagatgttcggacgcggttac

SEQ ID NO: 148635 - DNA, 55 bp, Artificial
  Synthetic oligonucleotide
cagcttaattgcctctttagtagttgcgcttacagtcgttccgatgctagcaagt

SEQ ID NO: 148636 - DNA, 55 bp, Artificial
  Synthetic oligonucleotide
ccgatggtgggtagattgctaactgcgacttacctacaggaatcgggaagaagtc

SEQ ID NO: 148637 - DNA, 56 bp, Artificial
  Synthetic oligonucleotide
caatatttcacatcgtttatggatactccgatttctagtagttcttttggtatacg

SEQ ID NO: 148638 - DNA, 55 bp, Artificial
  Synthetic oligonucleotide
gtgtcctaaatatgattgtaaaacttctcttgtttgtaatcgtacattttttgga

SEQ ID NO: 148639 - DNA, 55 bp, Artificial
  Synthetic oligonucleotide
accaccgtctgatacgttatttggaattaataccgcttctaatccgtacgctgtg

SEQ ID NO: 148640 - DNA, 55 bp, Artificial
  Synthetic oligonucleotide
aaggattgattcgagtcaatataggccttggaatcaaacgtaactgtcgattcct

SEQ ID NO: 148641 - DNA, 55 bp, Artificial
  Synthetic oligonucleotide
aaggcgtgatgggagaccgaacaacgactcgcttcccaagacccattcatgggtc

SEQ ID NO: 148642 - DNA, 55 bp, Artificial
  Synthetic oligonucleotide
atactcgaaccaatatgttttcctaaggctacagccccttcgccgactgcagcaa

SEQ ID NO: 148643 - DNA, 55 bp, Artificial
  Synthetic oligonucleotide
ccgactgatattttagctggttactgcgcaggtggcattttgttaatcatcgcaa

SEQ ID NO: 148644 - DNA, 55 bp, Artificial
  Synthetic oligonucleotide
ccgacgtaatgagacatccagtcaaagaggttaggtgttgcgacataataagata

SEQ ID NO: 148645 - DNA, 55 bp, Artificial
  Synthetic oligonucleotide
cagcttcaaatcaaactttcgtttctggatctgtcacatttggattctatacacg

SEQ ID NO: 148646 - DNA, 55 bp, Artificial
  Synthetic oligonucleotide
ccgaccgagtttgtcataaagtcgaacttaaggatattgacgagacacgggccaa

SEQ ID NO: 148647 - DNA, 55 bp, Artificial
  Synthetic oligonucleotide
ccgacatcccttaccgctggtcggcgcaagatttaacgacgctcgataaagtgcc

SEQ ID NO: 148648 - DNA, 55 bp, Artificial
  Synthetic oligonucleotide
caggaatatgcgtacgttcaaaacgtaacctcgctaaacgatacgaatcagtagc

SEQ ID NO: 148649 - DNA, 60 bp, Artificial
  Synthetic oligonucleotide
gtgtcctcaacctatatcggcatggaaatgagcctaagagagttatctgaagctgcaaaa

SEQ ID NO: 148650 - DNA, 55 bp, Artificial
  Synthetic oligonucleotide
ccgaatagaccaactccgacgagaaaagattggatcgtgttagcgctccttggtt

SEQ ID NO: 148651 - DNA, 52 bp, Artificial
  Synthetic oligonucleotide
ccgaacgatggaccaaacggtggggcacaaattttccgtacgggtgcggata

SEQ ID NO: 148652 - DNA, 55 bp, Artificial
  Synthetic oligonucleotide
aagggtcttctgaaacacgaggcaatacagcaaacgtacgaaaatcgcctgtatt

SEQ ID NO: 148653 - DNA, 55 bp, Artificial
  Synthetic oligonucleotide
ccctttcttaatgtcgacttcttactccatccttccgagtatatctatgcggaaa

SEQ ID NO: 148654 - DNA, 55 bp, Artificial
  Synthetic oligonucleotide
cagtgagggatcacgatgaaacgtaaaatttgtattgtgactggtacgagagccg

SEQ ID NO: 148655 - DNA, 55 bp, Artificial
  Synthetic oligonucleotide
aatagcgtatggatctgccttcagcctgatctcaccgttattcgtcacaatttcg

SEQ ID NO: 148656 - DNA, 55 bp, Artificial
  Synthetic oligonucleotide
atatcacatcgcaggacactcttatactcagcccggcttttaggtgagatcgctg

SEQ ID NO: 148657 - DNA, 55 bp, Artificial
  Synthetic oligonucleotide
acatatacatggtcctggcgtcaactccagaggtgaattcacttccgtctaccat

SEQ ID NO: 148658 - DNA, 55 bp, Artificial
  Synthetic oligonucleotide
cagttacgaatagtataagtgtagcggaggtgagataaacggaccgccatccagc

SEQ ID NO: 148659 - DNA, 55 bp, Artificial
  Synthetic oligonucleotide
ccccgataagctgaactgaataatgacgtaatccaagcgcacgagtagctccctc

SEQ ID NO: 148660 - DNA, 60 bp, Artificial
  Synthetic oligonucleotide
atctgcagttatgctgggcctcgatcccatgaaatgttatctcgctgtggtaggcgatac

SEQ ID NO: 148661 - DNA, 55 bp, Artificial
  Synthetic oligonucleotide
aatatgttcgttttctgacaatagacacgctccgtattcggttcctgcaaggttg

SEQ ID NO: 148662 - DNA, 51 bp, Artificial
  Synthetic oligonucleotide
ccccgaaattcattgtgccaagtacgaaacgacttacttttaacccagtac

SEQ ID NO: 148663 - DNA, 55 bp, Artificial
  Synthetic oligonucleotide
ccccgaaatagctttagggctagccttaagtgtaagagtcttggaggtagagcac

SEQ ID NO: 148664 - DNA, 55 bp, Artificial
  Synthetic oligonucleotide
ccccattttgagcaggagctagtaaatctcctcccacacctatagctacacatcc

SEQ ID NO: 148665 - DNA, 55 bp, Artificial
  Synthetic oligonucleotide
atatcgaattaatcatgtaagagactacgcaaggtatacggcagaaatggtcgct

SEQ ID NO: 148666 - DNA, 55 bp, Artificial
  Synthetic oligonucleotide
ccccatagattttacacctatgagagctgcctaaagggttgtcgattctcttcta

SEQ ID NO: 148667 - DNA, 55 bp, Artificial
  Synthetic oligonucleotide
cagttgatggactttcgtcatgagcagatgcttgagtatgtaaatccttctcaaa

SEQ ID NO: 148668 - DNA, 55 bp, Artificial
  Synthetic oligonucleotide
ccccacttcgcttgcgaatcatacaaactactccgtaaggccgtgctatcaatta

SEQ ID NO: 148669 - DNA, 55 bp, Artificial
  Synthetic oligonucleotide
ccccacttaacgaccttgcggctcgtttgaagtgggagattcctgcgaacaccga

SEQ ID NO: 148670 - DNA, 55 bp, Artificial
  Synthetic oligonucleotide
ccccacgcatcgtattggtaacgggccacgatgtttccttgcgcatccgttaacg

SEQ ID NO: 148671 - DNA, 60 bp, Artificial
  Synthetic oligonucleotide
gtgtgctttgtaataggcttgtgctgcatatatctcttgtacggcactaatgccgactct

SEQ ID NO: 148672 - DNA, 55 bp, Artificial
  Synthetic oligonucleotide
cagttgcactgtctccgctagtgttaaatacacctctcatccactttgcgaaatt

SEQ ID NO: 148673 - DNA, 55 bp, Artificial
  Synthetic oligonucleotide
ccccacattccttcaatgctacttttaggttcgttacacaaagctttgcttgtgc

SEQ ID NO: 148674 - DNA, 55 bp, Artificial
  Synthetic oligonucleotide
cagttgtcagccggtcctgatgcgtccccctctttcttatacaagcggggcgggt

SEQ ID NO: 148675 - DNA, 55 bp, Artificial
  Synthetic oligonucleotide
aatcgatctttgatatagggatgcatcacatggccaattgaaatgccttcggcca

SEQ ID NO: 148676 - DNA, 55 bp, Artificial
  Synthetic oligonucleotide
cataagcgaaatacagaagttacagggcgtattcaagaagcgtttagggaacgcc

SEQ ID NO: 148677 - DNA, 55 bp, Artificial
  Synthetic oligonucleotide
cccattccccacttatacaagaatcactgtaacgacccgcaagtcgatttgcatt

SEQ ID NO: 148678 - DNA, 55 bp, Artificial
  Synthetic oligonucleotide
cccattaactcactcttcgtcttgcccatcgtcggcttaccgtactccttcagaa

SEQ ID NO: 148679 - DNA, 55 bp, Artificial
  Synthetic oligonucleotide
cccatgcggttcaaacttttgtcgaacagtcaggatacgcagtcgtacgtgagta

SEQ ID NO: 148680 - DNA, 55 bp, Artificial
  Synthetic oligonucleotide
atagaaggtgtatggtttgatcctttaccagaaaccattgcctctcttgaaacag

SEQ ID NO: 148681 - DNA, 55 bp, Artificial
  Synthetic oligonucleotide
acatgtagattgggtgaaaagtatggcgagagacggattgttttacggttcattc

SEQ ID NO: 148682 - DNA, 58 bp, Artificial
  Synthetic oligonucleotide
gtgttgctttgtctataccatcctttggactacaacacataatattaggatttacaaa

SEQ ID NO: 148683 - DNA, 52 bp, Artificial
  Synthetic oligonucleotide
cccgggtgaacgtaaacaaatcgcggcgcttaattaccaagagacagtaccg

SEQ ID NO: 148684 - DNA, 55 bp, Artificial
  Synthetic oligonucleotide
cccggatgatgtcaaacttttggccccttatacgcttggtcaccgcctcattctc

SEQ ID NO: 148685 - DNA, 55 bp, Artificial
  Synthetic oligonucleotide
atagccatgacctgaatacacggtaacccctctgcccattaaggtagtcaccttc

SEQ ID NO: 148686 - DNA, 55 bp, Artificial
  Synthetic oligonucleotide
agcatcggttcgatcgagcgtaaacagtctcggtttagggaggggaacggagtga

SEQ ID NO: 148687 - DNA, 55 bp, Artificial
  Synthetic oligonucleotide
cagggtaaaggcgaggttaatcatcttattgaagggatacggtggtgtatagaac

SEQ ID NO: 148688 - DNA, 55 bp, Artificial
  Synthetic oligonucleotide
agcagtattcgaagtgtgatttacacgagacgaatgccattgaacgaacgtttgg

SEQ ID NO: 148689 - DNA, 55 bp, Artificial
  Synthetic oligonucleotide
agagcaaaatggttcccattcggaccaatcttcgcttttgcactttgcgtcatcg

SEQ ID NO: 148690 - DNA, 55 bp, Artificial
  Synthetic oligonucleotide
cccgcactatggtccaccaaatagaggccctagattaaagccgggaatggtcatc

SEQ ID NO: 148691 - DNA, 55 bp, Artificial
  Synthetic oligonucleotide
cccgattgctgctgctaacgtagcaccaattgagcccatccctactttcgtacca

SEQ ID NO: 148692 - DNA, 55 bp, Artificial
  Synthetic oligonucleotide
aataaacgctgatcttgcaaacggccagctaaaataggaacgaggaacgtaatag

SEQ ID NO: 148693 - DNA, 57 bp, Artificial
  Synthetic oligonucleotide
atctaaaatccataaagtgagcctttctaatgtgattctttcgtttccaatcgaata

SEQ ID NO: 148694 - DNA, 54 bp, Artificial
  Synthetic oligonucleotide
cccgataataggcggcaaacaactccaagtcggacgttttcgctgtctcgtagt

SEQ ID NO: 148695 - DNA, 55 bp, Artificial
  Synthetic oligonucleotide
aataaagcgcgagagctgtttctaaatatgtcggtacaataggagtcggtttata

SEQ ID NO: 148696 - DNA, 55 bp, Artificial
  Synthetic oligonucleotide
ccccttgtttaattgtctccgccaataattccggcccgaaagcaatctctagagc

SEQ ID NO: 148697 - DNA, 55 bp, Artificial
  Synthetic oligonucleotide
acatgcctttagggaacctgtcttgtgcggttgtagcatatagccgtttgaggtg

SEQ ID NO: 148698 - DNA, 55 bp, Artificial
  Synthetic oligonucleotide
atagctcaacccgttaaggctcacaggtggctgtgagtaaagcgccctacccgtt

SEQ ID NO: 148699 - DNA, 55 bp, Artificial
  Synthetic oligonucleotide
cagtatcgttacctcggttatacaagctgtatacgcctagcgaggcccttcgtgg

SEQ ID NO: 148700 - DNA, 55 bp, Artificial
  Synthetic oligonucleotide
cagtatgaacgaaattcgaagcgttccacataacgctttaccacatccaacgccc

SEQ ID NO: 148701 - DNA, 55 bp, Artificial
  Synthetic oligonucleotide
cagtctgttcaaggttactcaaggaattctgctcctaagctcgaaaaggaggacg

SEQ ID NO: 148702 - DNA, 54 bp, Artificial
  Synthetic oligonucleotide
ccccttcgagtcttctgttgaacagcgaattatttcgtagaacgtcttagggcg

SEQ ID NO: 148703 - DNA, 55 bp, Artificial
  Synthetic oligonucleotide
cccctctacgctaacgctcgggccagctaaacactttggggagacattcacgatc

SEQ ID NO: 148704 - DNA, 60 bp, Artificial
  Synthetic oligonucleotide
atcgttgtacagcttctgtagcgagcatacgctcattgcttgtcatcttcattggttcaa

SEQ ID NO: 148705 - DNA, 55 bp, Artificial
  Synthetic oligonucleotide
atagttaagatatttgtggctttactacagtttttctgggcaattgctacaagcg

SEQ ID NO: 148706 - DNA, 55 bp, Artificial
  Synthetic oligonucleotide
cccctatcgtcaatggtattcctcccatagtaactgacattcacgtcctaacatt

SEQ ID NO: 148707 - DNA, 55 bp, Artificial
  Synthetic oligonucleotide
aatactttgacactcacaaaccggcgagatcttgtgttgaagttgcgagactccc

SEQ ID NO: 148708 - DNA, 52 bp, Artificial
  Synthetic oligonucleotide
cgtcctctttccaaccgttcttaacggaaacgctcattctgtttcgtaggaa

SEQ ID NO: 148709 - DNA, 55 bp, Artificial
  Synthetic oligonucleotide
caaacacggagggcgcgggatgtatcataataagctacaccctatatcctcaagg

SEQ ID NO: 148710 - DNA, 55 bp, Artificial
  Synthetic oligonucleotide
caaacactagggaaaatggtgttcggattacgtgtaatttcattaaagcacgatc

SEQ ID NO: 148711 - DNA, 55 bp, Artificial
  Synthetic oligonucleotide
caaacagagcacttcgatgaaacgttaggtgttaacgacagagtcgctctatcgc

SEQ ID NO: 148712 - DNA, 55 bp, Artificial
  Synthetic oligonucleotide
aaacacccgttaggcaacgctccctatcaagtatagactaacgcacagcgcgttc

SEQ ID NO: 148713 - DNA, 54 bp, Artificial
  Synthetic oligonucleotide
cgtccgcgttttccgaaattcgctacggtgactgtccgcaccccgtcttctgcc

SEQ ID NO: 148714 - DNA, 55 bp, Artificial
  Synthetic oligonucleotide
cgtccactaacaacagaggaactcgcaaggagtgtggcgaacgcctagtaggagg

SEQ ID NO: 148715 - DNA, 54 bp, Artificial
  Synthetic oligonucleotide
gtgtttaaagtcgcgcttgacggcggttttgactgcccgaatcgggacggcacg

SEQ ID NO: 148716 - DNA, 55 bp, Artificial
  Synthetic oligonucleotide
cgtcatttgcgttcccgcgctacaacttaggaacagcttaccggatgttacgctt

SEQ ID NO: 148717 - DNA, 55 bp, Artificial
  Synthetic oligonucleotide
aggggtcgtactaacattaaactctgttgcgagctctctttccctcaaatgctcc

SEQ ID NO: 148718 - DNA, 55 bp, Artificial
  Synthetic oligonucleotide
cgtcatcgcaccactataaagccacgcagctgacgtacccattgctactaataca

SEQ ID NO: 148719 - DNA, 55 bp, Artificial
  Synthetic oligonucleotide
aggagcacgagattcagaacagcacagggggcgcttgtaacggtgccgaactcta

SEQ ID NO: 148720 - DNA, 55 bp, Artificial
  Synthetic oligonucleotide
cgtcatccaagtacggccgtcggattcagtcaccattgtccggtcgtttgcacca

SEQ ID NO: 148721 - DNA, 55 bp, Artificial
  Synthetic oligonucleotide
cgtcacgctttctatcgtagcgacgctatttgaagttggattcttaaattcgttg

SEQ ID NO: 148722 - DNA, 55 bp, Artificial
  Synthetic oligonucleotide
cgtcaatgccgtatcaggcggagcgattgacacagatgcgctcaaacacttcccg

SEQ ID NO: 148723 - DNA, 55 bp, Artificial
  Synthetic oligonucleotide
cgtcaagcgtactgcttgccgtttgatacgcactataggaaaggacgatgattgg

SEQ ID NO: 148724 - DNA, 55 bp, Artificial
  Synthetic oligonucleotide
cgtatttgaaaacgggcatctctattctactcacagtatccctttgggcggagag

SEQ ID NO: 148725 - DNA, 55 bp, Artificial
  Synthetic oligonucleotide
caaactcggttcaggtgcaagcggaagtgaacattaaacagagcggggccaaccg

SEQ ID NO: 148726 - DNA, 59 bp, Artificial
  Synthetic oligonucleotide
gttaaaaattgcaagtcataataaattgatcgttgaagaagcaaataggcaatataagc

SEQ ID NO: 148727 - DNA, 55 bp, Artificial
  Synthetic oligonucleotide
cgtatcaattttggagtaagcactattttaggacgaatgatctaggcggttcggc

SEQ ID NO: 148728 - DNA, 55 bp, Artificial
  Synthetic oligonucleotide
cgtagtttgtcgccgacagttttatgccacggtcgtttgtcaagatgaacaagag

SEQ ID NO: 148729 - DNA, 55 bp, Artificial
  Synthetic oligonucleotide
cgtagtgccggactcaccgacagtgcctgctgtaataacgataagatcgccgtgt

SEQ ID NO: 148730 - DNA, 55 bp, Artificial
  Synthetic oligonucleotide
caaagcaacttctggtgctagcattcaaagtacaaatgctagttatggtacagag

SEQ ID NO: 148731 - DNA, 55 bp, Artificial
  Synthetic oligonucleotide
aaaccattcacgaatatgatgtgctgcaatattcggttgtaatatgagacgcgtt

SEQ ID NO: 148732 - DNA, 55 bp, Artificial
  Synthetic oligonucleotide
aaaccatttgcgacccttaatacagcaatggtcagtgtaatacgaacagcttctg

SEQ ID NO: 148733 - DNA, 52 bp, Artificial
  Synthetic oligonucleotide
aaaccgcagtcgataaaagggttaagattgtttaaagactgcaacggaaagc

SEQ ID NO: 148734 - DNA, 55 bp, Artificial
  Synthetic oligonucleotide
cgtgtccgttgctttgtacggaatgtggcgaattagattcataggaacgccagtc

SEQ ID NO: 148735 - DNA, 55 bp, Artificial
  Synthetic oligonucleotide
cgtgtagctgcgaagaaagcgcgtgaattaactcgtagaaagagtgcgttagagg

SEQ ID NO: 148736 - DNA, 55 bp, Artificial
  Synthetic oligonucleotide
actcgcaacatattatcctcggaaagcatgacaaaattgccccgtcgccaaatgc

SEQ ID NO: 148737 - DNA, 56 bp, Artificial
  Synthetic oligonucleotide
atcggatacgcacatcatcgggaagcacttgggagggaagaccgactggaaaagtt

SEQ ID NO: 148738 - DNA, 55 bp, Artificial
  Synthetic oligonucleotide
cgtgtagaagcacgagacttctggaatcgtggagataagagcgcgacagtctggg

SEQ ID NO: 148739 - DNA, 55 bp, Artificial
  Synthetic oligonucleotide
cgtgtacgctgagcattttatttacgctcggactaatattattcgctcccgttgt

SEQ ID NO: 148740 - DNA, 55 bp, Artificial
  Synthetic oligonucleotide
actccattcgcttttgacctaattatactacttgcccgatcgattgtcagctgcc

SEQ ID NO: 148741 - DNA, 55 bp, Artificial
  Synthetic oligonucleotide
cgtgggttttgtttagaccatgaatctaccccgacaagatttacgcctaatgaca

SEQ ID NO: 148742 - DNA, 55 bp, Artificial
  Synthetic oligonucleotide
cgtggctcgtcaatttaacattgatcttccaagtgcgaaggtctctgtttggagc

SEQ ID NO: 148743 - DNA, 55 bp, Artificial
  Synthetic oligonucleotide
attgcatacatgaagatcctttcaacgtgaactgtcgccatcgtatcacgcaaac

SEQ ID NO: 148744 - DNA, 55 bp, Artificial
  Synthetic oligonucleotide
attgcgtcaacataagacgaagaaacgctaccaacatgaatcaatgcgacgtggg

SEQ ID NO: 148745 - DNA, 55 bp, Artificial
  Synthetic oligonucleotide
attgtcgtggtttgtatcggaacagaccgttcaaccggtgactcattaggcccgc

SEQ ID NO: 148746 - DNA, 55 bp, Artificial
  Synthetic oligonucleotide
cgtgcagagtctgtaataaccgcaagagatgttgtttcactaccagtaccagctg

SEQ ID NO: 148747 - DNA, 55 bp, Artificial
  Synthetic oligonucleotide
atttatcggcatattcctcaacccagcattagcaggtgccgcaatggcctttagc

SEQ ID NO: 148748 - DNA, 57 bp, Artificial
  Synthetic oligonucleotide
caatatcctgcgtttcgcggtcgataacccgggcgcttttcgggctgagcaaatcgc

SEQ ID NO: 148749 - DNA, 51 bp, Artificial
  Synthetic oligonucleotide
gttaggggtacagacaaccaaacggaaaaattgtacgttaagaccagcaac

SEQ ID NO: 148750 - DNA, 53 bp, Artificial
  Synthetic oligonucleotide
cgtgatgaaaaggaccgtcgaatttactataaacgagatattttggcgttaac

SEQ ID NO: 148751 - DNA, 55 bp, Artificial
  Synthetic oligonucleotide
cgtgaggaaggtttctatcgtgcctggcagcatctcattcaatatgatccagcac

SEQ ID NO: 148752 - DNA, 53 bp, Artificial
  Synthetic oligonucleotide
atttcacacgtatatttactccgaaaattgtttcacaaggggcggaaggagga

SEQ ID NO: 148753 - DNA, 55 bp, Artificial
  Synthetic oligonucleotide
cgtgaattcgctgcaggtgtggaagtattaccagaatgggtaaatgttgcacgta

SEQ ID NO: 148754 - DNA, 55 bp, Artificial
  Synthetic oligonucleotide
agaaattcagtaggcacagcctatttcaccactttgaactagaagtgggatcgga

SEQ ID NO: 148755 - DNA, 55 bp, Artificial
  Synthetic oligonucleotide
atttgacgatactctcgcacatgattacgggtgcttaccggcgtagcctacttag

SEQ ID NO: 148756 - DNA, 55 bp, Artificial
  Synthetic oligonucleotide
cgtctgtgcgtgacatggcaagtcgtatgtatgtgagccacaaaaccgcacaccg

SEQ ID NO: 148757 - DNA, 55 bp, Artificial
  Synthetic oligonucleotide
cgtctactaactgggtactgaggaaagcttgttgttcgatcgagggagcaatcat

SEQ ID NO: 148758 - DNA, 55 bp, Artificial
  Synthetic oligonucleotide
cgtcggagagcctacctcttggcgcaatagacgataaatgtcattcataatccgg

SEQ ID NO: 148759 - DNA, 55 bp, Artificial
  Synthetic oligonucleotide
cgtcgcggaacatttcattatggatgcttaacacaagagcactgtctggtgaagc

SEQ ID NO: 148760 - DNA, 58 bp, Artificial
  Synthetic oligonucleotide
atcgcttcccgagccggtgctaaaaatttgcgaggatcaaacagcttagcatcgttat

SEQ ID NO: 148761 - DNA, 54 bp, Artificial
  Synthetic oligonucleotide
cgtcgaattgatgatttaggcagggtagtaatcccaaaggaaattcgtagaact

SEQ ID NO: 148762 - DNA, 55 bp, Artificial
  Synthetic oligonucleotide
cgtccttacggactgtttgaagtgggagattcctgcgaacaccgatgtatccaac

SEQ ID NO: 148763 - DNA, 55 bp, Artificial
  Synthetic oligonucleotide
cggtcttctcgattgtttggctgaaagggatctggctgagtaatttccgtatctg

SEQ ID NO: 148764 - DNA, 52 bp, Artificial
  Synthetic oligonucleotide
cggtctctgataagggtaaattcatatcgggtaaaatagtttgtaaggtaaa

SEQ ID NO: 148765 - DNA, 54 bp, Artificial
  Synthetic oligonucleotide
cggtcccaagggttgggctgttcgcccattaaagcggtacgcgagctgggttca

SEQ ID NO: 148766 - DNA, 55 bp, Artificial
  Synthetic oligonucleotide
cggtcaatgaaattataggcttgctaggtgttgacgcatcttggaagatgagagg

SEQ ID NO: 148767 - DNA, 55 bp, Artificial
  Synthetic oligonucleotide
cggtcaagatgctatcgggctaatcccttcccctaaaattccgactgacaaccat

SEQ ID NO: 148768 - DNA, 55 bp, Artificial
  Synthetic oligonucleotide
aaacgccttacaggccgtcgcatttgtaaagagtgcggtgcgacttaccacttag

SEQ ID NO: 148769 - DNA, 55 bp, Artificial
  Synthetic oligonucleotide
aggtatgtttcggttggacatagtactagtaggagtccgaacgcacttaaagtgc

SEQ ID NO: 148770 - DNA, 55 bp, Artificial
  Synthetic oligonucleotide
cggtactgctgtattgttagtgacgtccgctacgacttcccacgtcgtattgttc

SEQ ID NO: 148771 - DNA, 60 bp, Artificial
  Synthetic oligonucleotide
atcgctaatggtgcatttgaggtcatggcgaaatggcatatcggttttagagattatgtg

SEQ ID NO: 148772 - DNA, 55 bp, Artificial
  Synthetic oligonucleotide
cggtacgatgccgcaaatctccgggtgctgttccgccaaataaagcgtgagcgtc

SEQ ID NO: 148773 - DNA, 52 bp, Artificial
  Synthetic oligonucleotide
cggtaccggaccgagcccgaaagggatcgggaggataaggagtggacacgta

SEQ ID NO: 148774 - DNA, 55 bp, Artificial
  Synthetic oligonucleotide
agcttgcttcgtgttatcattccgatcaatggattcacgtacaagattaccctcg

SEQ ID NO: 148775 - DNA, 55 bp, Artificial
  Synthetic oligonucleotide
caaatcgccaacatacttacgccacgaacaagtcatggctgctcgtagccgccat

SEQ ID NO: 148776 - DNA, 55 bp, Artificial
  Synthetic oligonucleotide
cggtaccagtgcgtatataaaaggcttcggtatatcatgacggcaatatgtctca

SEQ ID NO: 148777 - DNA, 53 bp, Artificial
  Synthetic oligonucleotide
caaatggacgaacgacaacaccttttacgcttggacgttctaagtaaataagc

SEQ ID NO: 148778 - DNA, 55 bp, Artificial
  Synthetic oligonucleotide
cggtacaaccgttgcttctatgtcgcttggcgttacggttacaaatgaatgctcg

SEQ ID NO: 148779 - DNA, 55 bp, Artificial
  Synthetic oligonucleotide
caaatgtgctactaaaccttaaacgaacttctacagttaagtctcgtatagacgc

SEQ ID NO: 148780 - DNA, 55 bp, Artificial
  Synthetic oligonucleotide
cgggtaaaatgtctatcccaacttccgcagtgggacgtataacgcaacaaagtgc

SEQ ID NO: 148781 - DNA, 52 bp, Artificial
  Synthetic oligonucleotide
cggggttgtgagttacttccagacttcaaacccgaaaacagaaaatatgtcg

SEQ ID NO: 148782 - DNA, 60 bp, Artificial
  Synthetic oligonucleotide
gttagtacatcttatgctcgtctggaaggatggtgtgagtatataagcccgagtttactg

SEQ ID NO: 148783 - DNA, 55 bp, Artificial
  Synthetic oligonucleotide
cggggcaagcccattcagcggattacgtggtgttagctacaccgcacacggctgc

SEQ ID NO: 148784 - DNA, 55 bp, Artificial
  Synthetic oligonucleotide
caacacatggaaacctgccttagcaagataaattgccagggtagagccggcacat

SEQ ID NO: 148785 - DNA, 52 bp, Artificial
  Synthetic oligonucleotide
cggggatttaggtagtacgacttggactagtaattgtacctgccgaaccgcc

SEQ ID NO: 148786 - DNA, 55 bp, Artificial
  Synthetic oligonucleotide
cggggattctgatcagtcgatctatcgctggaggggtgcggatattgctaatatc

SEQ ID NO: 148787 - DNA, 55 bp, Artificial
  Synthetic oligonucleotide
aggacacggatgtggtgcgaggcagcaaggtaacggaagataatttgaacacggt

SEQ ID NO: 148788 - DNA, 55 bp, Artificial
  Synthetic oligonucleotide
acgtgtgctaagaggcccgttgtggacgtctttccgtgtgcgcccgttaccgcga

SEQ ID NO: 148789 - DNA, 55 bp, Artificial
  Synthetic oligonucleotide
caaaggatctgccctggagcgacgagtcctactattacggcggccaggtatcagc

SEQ ID NO: 148790 - DNA, 55 bp, Artificial
  Synthetic oligonucleotide
cgtaattctaaattgatgatctggcctagcaaacctccaatggctaaactcacga

SEQ ID NO: 148791 - DNA, 55 bp, Artificial
  Synthetic oligonucleotide
cgtaatgggcttggactctttactaaagatgatattcagggaaccgaagagttcg

SEQ ID NO: 148792 - DNA, 55 bp, Artificial
  Synthetic oligonucleotide
cgtaatgctagcaggccagttatactgccgagtcaaatcaatcgtccacgtatga

SEQ ID NO: 148793 - DNA, 60 bp, Artificial
  Synthetic oligonucleotide
gttatacaaatctagtatacataacgtctcattattggaagtgcatgtaagatcactatt

SEQ ID NO: 148794 - DNA, 55 bp, Artificial
  Synthetic oligonucleotide
cgtaatcgggctcaagcggatcaatctttcaaccatgcagctgatatgaacatag

SEQ ID NO: 148795 - DNA, 55 bp, Artificial
  Synthetic oligonucleotide
cgtaataaagtgacactggagttgcatagttccgaaccgacgataagtaccccac

SEQ ID NO: 148796 - DNA, 55 bp, Artificial
  Synthetic oligonucleotide
cgtaaccatgaaggaatgttgtgataacgtaccttacaatatacggggtctagtg

SEQ ID NO: 148797 - DNA, 55 bp, Artificial
  Synthetic oligonucleotide
cgtaacagctgcaggaacttcatttgaacaagtaaagaaggtaccgttgtacatg

SEQ ID NO: 148798 - DNA, 53 bp, Artificial
  Synthetic oligonucleotide
cgtaaagtgtactctactccgtcaattgggtctgttgttaattcaaaccctac

SEQ ID NO: 148799 - DNA, 55 bp, Artificial
  Synthetic oligonucleotide
cggttttcgtaaatgtgtctgatgacgcgtatttcgtttatactgcagagcgtgg

SEQ ID NO: 148800 - DNA, 55 bp, Artificial
  Synthetic oligonucleotide
cggtttgactaactggttaggagcatattggcctattatcgcattctcggttgcg

SEQ ID NO: 148801 - DNA, 55 bp, Artificial
  Synthetic oligonucleotide
cggttcgggcgatgttattagaggattttgcaattgaagtagcgagctcgtttgg

SEQ ID NO: 148802 - DNA, 55 bp, Artificial
  Synthetic oligonucleotide
caaagtccgaagttttcgcacttaagaaaatgattggcatatggtgcttcgcgcg

SEQ ID NO: 148803 - DNA, 55 bp, Artificial
  Synthetic oligonucleotide
caaatacgtgacaaggcggcaacgttacaccatacttgcttgctaatttacttgc

SEQ ID NO: 148804 - DNA, 60 bp, Artificial
  Synthetic oligonucleotide
gttatatagtcctggcgaagtggcagaacaattacatatccaatctagcacattacgtaa

SEQ ID NO: 148805 - DNA, 55 bp, Artificial
  Synthetic oligonucleotide
caaatcccgtctcaggtgttactccgccctgtttgtaaggcacttctccgacata

SEQ ID NO: 148806 - DNA, 55 bp, Artificial
  Synthetic oligonucleotide
cggttatgatgactctaagagaatgtgtacgtaagtatcatcgattaccacaatc

SEQ ID NO: 148807 - DNA, 55 bp, Artificial
  Synthetic oligonucleotide
cggttagagcggttgtttcatacattcgccaagactggggctcatttatttcagg

SEQ ID NO: 148808 - DNA, 55 bp, Artificial
  Synthetic oligonucleotide
cggttacatagacagggttcggcaccgtagcgaccatccatctgtctttattgag

SEQ ID NO: 148809 - DNA, 55 bp, Artificial
  Synthetic oligonucleotide
cggtgtttgggtatttggcgatgcaggtaagcattggctaagaggtgtggttgta

SEQ ID NO: 148810 - DNA, 55 bp, Artificial
  Synthetic oligonucleotide
cggtgttatgagattaccccatgatatggggatggaataggttaaaatgcgattc

SEQ ID NO: 148811 - DNA, 53 bp, Artificial
  Synthetic oligonucleotide
cggtgtgagcgttgttttaaacctgttgcaaggtacagtttacccgtttcatg

SEQ ID NO: 148812 - DNA, 55 bp, Artificial
  Synthetic oligonucleotide
cggtgtactgataagaagcgcttgatccgttagatacggcatttgacgcgggtat

SEQ ID NO: 148813 - DNA, 55 bp, Artificial
  Synthetic oligonucleotide
cggtgcttgaacaaatgaacgggaaagcgatactagcagatgaggtaggactcgg

SEQ ID NO: 148814 - DNA, 55 bp, Artificial
  Synthetic oligonucleotide
ctccgcaacatacgggatcatgtgtcctcggtgtcctcatatgcctataagcggc

SEQ ID NO: 148815 - DNA, 59 bp, Artificial
  Synthetic oligonucleotide
atgggggaagtagccaatgaagtgttgcgcttaggcggacgtgtcactggtgttatgcc

SEQ ID NO: 148816 - DNA, 55 bp, Artificial
  Synthetic oligonucleotide
ctcccgtcaagtgtatgccctactaggtttcctacgcgatacactgtggctgata

SEQ ID NO: 148817 - DNA, 55 bp, Artificial
  Synthetic oligonucleotide
ctccatacaagcacctacattagttattcacggaacagacgatacagcactccca

SEQ ID NO: 148818 - DNA, 55 bp, Artificial
  Synthetic oligonucleotide
attaatcaagtaccttgtattcgagaattgatttccttcatgtcgccccttgatc

SEQ ID NO: 148819 - DNA, 55 bp, Artificial
  Synthetic oligonucleotide
ctccacttctccataatcactctgcgcttccattaaataaaaccctactgcctca

SEQ ID NO: 148820 - DNA, 55 bp, Artificial
  Synthetic oligonucleotide
ctccaatcgttacacatgtaacattcatccaccttgcagtattgaagaggatccg

SEQ ID NO: 148821 - DNA, 55 bp, Artificial
  Synthetic oligonucleotide
ctcattcatgatgctgtgagtggagacgctacattctttgcgcattggagagaag

SEQ ID NO: 148822 - DNA, 55 bp, Artificial
  Synthetic oligonucleotide
ctcatagtcggacatttacggtgaccggtagaaacttgcgtgccatatccacgcg

SEQ ID NO: 148823 - DNA, 55 bp, Artificial
  Synthetic oligonucleotide
attacaggctgagaaactaagagtgggttatagtgagccgttatttccaggcttg

SEQ ID NO: 148824 - DNA, 55 bp, Artificial
  Synthetic oligonucleotide
ctcactcgacgaaacggtaaagcacatagcaagcttatatcgttctaaactgacc

SEQ ID NO: 148825 - DNA, 55 bp, Artificial
  Synthetic oligonucleotide
aggcgtccaggaagttttagttggcgtatttgatggacttccaggtctcgaagag

SEQ ID NO: 148826 - DNA, 57 bp, Artificial
  Synthetic oligonucleotide
atggggctaattttattaaactaaccagccgcagtatgactgaagagagctctttta

SEQ ID NO: 148827 - DNA, 55 bp, Artificial
  Synthetic oligonucleotide
aggcgtctgaaccttacttgctttaggtcgtcttctcatgatcgccttatctacc

SEQ ID NO: 148828 - DNA, 55 bp, Artificial
  Synthetic oligonucleotide
ctcacccgcattattattcaacgcaagtagaatgggccgagacatttgatgtacc

SEQ ID NO: 148829 - DNA, 55 bp, Artificial
  Synthetic oligonucleotide
ctcacaagtgccgaccgcttgatttagcaggttacgcagcgcgtgaaacgccact

SEQ ID NO: 148830 - DNA, 55 bp, Artificial
  Synthetic oligonucleotide
ctcacaacgtaccttatgagatagggtggtttgaatcacactcaaaatggagccc

SEQ ID NO: 148831 - DNA, 55 bp, Artificial
  Synthetic oligonucleotide
attacgcagggatataacaaccgttacaattaatgggatagaatatgcgcgaacg

SEQ ID NO: 148832 - DNA, 55 bp, Artificial
  Synthetic oligonucleotide
acttacgttttagcgttccaatacgagattcactgtaaaatggcaagcgaaaatc

SEQ ID NO: 148833 - DNA, 55 bp, Artificial
  Synthetic oligonucleotide
attatttaggagaacgtacttgtgcatttgtaatagctcgcggacaagctccggc

SEQ ID NO: 148834 - DNA, 55 bp, Artificial
  Synthetic oligonucleotide
ctcaaagtgaagcgggctcagccggtgtatgtgctcatggattcgtggtatccgt

SEQ ID NO: 148835 - DNA, 55 bp, Artificial
  Synthetic oligonucleotide
attcaatgccatttaacgcttgcgcaatagacgggtcattaattggatcattgcg

SEQ ID NO: 148836 - DNA, 55 bp, Artificial
  Synthetic oligonucleotide
actgggaatgaagcggcaagcgaacaaattgctccaaccgtaatcgcagctttcg

SEQ ID NO: 148837 - DNA, 59 bp, Artificial
  Synthetic oligonucleotide
gtgattcaacaactccgacgtttaggaatccatggattcaatccctggaatgcatttta

SEQ ID NO: 148838 - DNA, 55 bp, Artificial
  Synthetic oligonucleotide
ctatatagaagggaagcggacgtaatgaaaggtgacggttcttcgtggaagcgac

SEQ ID NO: 148839 - DNA, 55 bp, Artificial
  Synthetic oligonucleotide
ctatactaacaaatagaaggtcattaatccgtgcctgcctgtcactagtcaaccc

SEQ ID NO: 148840 - DNA, 55 bp, Artificial
  Synthetic oligonucleotide
attccacggttcgattgacaacgagcctccgcaccctcaaactcccaaaggcaac

SEQ ID NO: 148841 - DNA, 52 bp, Artificial
  Synthetic oligonucleotide
actttccaggatacggatgggtcccgttcgaaccaacaaagggtttcagcaa

SEQ ID NO: 148842 - DNA, 55 bp, Artificial
  Synthetic oligonucleotide
ctgatacattactggtaaaagcgttgcctctgggatacgatggcggatcaaaacg

SEQ ID NO: 148843 - DNA, 55 bp, Artificial
  Synthetic oligonucleotide
ctgatacaccagattgatgtcctataaacggtgtaattgttgcggcgaataagcc

SEQ ID NO: 148844 - DNA, 55 bp, Artificial
  Synthetic oligonucleotide
atggaggaatgtcgaaaatgactagacaagcaactacatacgtaatcggtaactt

SEQ ID NO: 148845 - DNA, 55 bp, Artificial
  Synthetic oligonucleotide
ctgacatgcttttccgaatgggctaatatatacatcgtttgcctccatcggtccg

SEQ ID NO: 148846 - DNA, 55 bp, Artificial
  Synthetic oligonucleotide
ctgacaagacgtaaaagcgcactggaagtctccagcttaccggggaaactagcgg

SEQ ID NO: 148847 - DNA, 55 bp, Artificial
  Synthetic oligonucleotide
ctgaagcgagacaaattgcggccatattaggcggaatggtatatagaccacaagc

SEQ ID NO: 148848 - DNA, 59 bp, Artificial
  Synthetic oligonucleotide
atgggaatcctggcatagatccatccaggttagaagagaatatctactttgttcaaaag

SEQ ID NO: 148849 - DNA, 55 bp, Artificial
  Synthetic oligonucleotide
atgggttcaatggtaacgcacatggtacagaaactttctactacaaagcaccaac

SEQ ID NO: 148850 - DNA, 53 bp, Artificial
  Synthetic oligonucleotide
aaaacgcgcgaaagacaaaattgtgtatgtctttaatgcccttaataacctcc

SEQ ID NO: 148851 - DNA, 55 bp, Artificial
  Synthetic oligonucleotide
ctctggcgtccaggcgttagatgtattcactgaatggaaggcgatttatgttgac

SEQ ID NO: 148852 - DNA, 53 bp, Artificial
  Synthetic oligonucleotide
ctctgaaaccaggcggactgtataagggaaatccttttcattcgggataaccg

SEQ ID NO: 148853 - DNA, 55 bp, Artificial
  Synthetic oligonucleotide
ctctccttctcgctggttgtgtttctggatccctgttattgcgtctttgtggaac

SEQ ID NO: 148854 - DNA, 55 bp, Artificial
  Synthetic oligonucleotide
ctctccctttcgttgggcgctcgttttacataatgagggtactggacatactgac

SEQ ID NO: 148855 - DNA, 55 bp, Artificial
  Synthetic oligonucleotide
atggagctggaaagaatctgatcttgctaccccgagaacaatgctgcggtcttca

SEQ ID NO: 148856 - DNA, 55 bp, Artificial
  Synthetic oligonucleotide
aaaacggacctcacaagtgccgaccgcttgatttagcaggttacgcagcgcgtga

SEQ ID NO: 148857 - DNA, 55 bp, Artificial
  Synthetic oligonucleotide
ctcggctgtcagcttagataaaccgtaataagagatgggtgctgtaggatccatc

SEQ ID NO: 148858 - DNA, 55 bp, Artificial
  Synthetic oligonucleotide
ctcggcggtcccgaattttatggaatccgttgagggagcgagggtgcatgggcgg

SEQ ID NO: 148859 - DNA, 54 bp, Artificial
  Synthetic oligonucleotide
caatagacaaaaaaagtagaatccctgtatttacaaggattctatgaaaagagt

SEQ ID NO: 148860 - DNA, 60 bp, Artificial
  Synthetic oligonucleotide
gtgccaatacataattatatctacgatacatctttcggagagctagctatagcgttatac

SEQ ID NO: 148861 - DNA, 55 bp, Artificial
  Synthetic oligonucleotide
ctcggaagttgacaccatatcgctcatcaaccttcttcacgtctatatctacacc

SEQ ID NO: 148862 - DNA, 55 bp, Artificial
  Synthetic oligonucleotide
atggtcatagtcagcaataatgcagtcgcgctcacagcgatgcagacggctgtcc

SEQ ID NO: 148863 - DNA, 53 bp, Artificial
  Synthetic oligonucleotide
ctcctttaaggttaacaattagctcgactgctagtttaaacccaccgtctgtg

SEQ ID NO: 148864 - DNA, 55 bp, Artificial
  Synthetic oligonucleotide
ctcctgtgaatgaaatcgatttatctaaggtaatgtctttcgaaagactcaaagg

SEQ ID NO: 148865 - DNA, 55 bp, Artificial
  Synthetic oligonucleotide
acttgtttatcgccttgatcaatgtcctcttgaacaatcgttgcagaaacaccca

SEQ ID NO: 148866 - DNA, 55 bp, Artificial
  Synthetic oligonucleotide
ctcctattagtgctggtatgatagaatagcctcccacttcaggaccaatgtctcc

SEQ ID NO: 148867 - DNA, 55 bp, Artificial
  Synthetic oligonucleotide
atgtcgtagctccgtatacgtcagcgtcaaagatagctcgatcgtatccgttagt

SEQ ID NO: 148868 - DNA, 55 bp, Artificial
  Synthetic oligonucleotide
ctcctacatgtccctctttcgagggctaaatggagaagagttacaagtgtgactc

SEQ ID NO: 148869 - DNA, 55 bp, Artificial
  Synthetic oligonucleotide
attcgtgcgggcatccagcatcgttagcaaaacgccttccagccgcaattcatta

SEQ ID NO: 148870 - DNA, 55 bp, Artificial
  Synthetic oligonucleotide
aaaagtgaacagcgacagtagggtcatgaaagataaaatcgctcgcataataaag

SEQ ID NO: 148871 - DNA, 60 bp, Artificial
  Synthetic oligonucleotide
gtgccttatcatcgctatctatgattaagagatctgacatacggcgctccctcctttttt

SEQ ID NO: 148872 - DNA, 55 bp, Artificial
  Synthetic oligonucleotide
cgttggcatgagatcggccatatgcgtgaatgtatactccccatccgtaaatcgg

SEQ ID NO: 148873 - DNA, 55 bp, Artificial
  Synthetic oligonucleotide
cgttgcttgcatataatccttgtggctgtgtcggagcttctgtatctggtttcgg

SEQ ID NO: 148874 - DNA, 54 bp, Artificial
  Synthetic oligonucleotide
cgttgcttatcccgatttcctaccgtcagattcgtacttctcggtaccctacca

SEQ ID NO: 148875 - DNA, 55 bp, Artificial
  Synthetic oligonucleotide
cgttgctacacggtattgtcggtcctgctgtttatgagggtaatgacttttatca

SEQ ID NO: 148876 - DNA, 55 bp, Artificial
  Synthetic oligonucleotide
aaaagttggcatctcccctactaccgaaaagcgctgtctatttagctcgcgaaaa

SEQ ID NO: 148877 - DNA, 48 bp, Artificial
  Synthetic oligonucleotide
attctcccctccggggagcccggtttatcgccttaacggctttaaacc

SEQ ID NO: 148878 - DNA, 55 bp, Artificial
  Synthetic oligonucleotide
cgttgacccggcagctcctccgattataggcacaataacttctaatagtgcttcc

SEQ ID NO: 148879 - DNA, 55 bp, Artificial
  Synthetic oligonucleotide
cgttcttttaaagcaacttgaatcgcagcacctaaagcaaccgtttcatcaggat

SEQ ID NO: 148880 - DNA, 55 bp, Artificial
  Synthetic oligonucleotide
cgttctttaattagtgacgatacaactgttacatgtgacatcggttcccattcta

SEQ ID NO: 148881 - DNA, 55 bp, Artificial
  Synthetic oligonucleotide
aggaggcgctgaagcgttatgctgaagcgtttcaggagcggaatccaaatctagt

SEQ ID NO: 148882 - DNA, 58 bp, Artificial
  Synthetic oligonucleotide
gtgcgggacgatgccgttttagtgagcgagtttttgattacggccagtcctgactaca

SEQ ID NO: 148883 - DNA, 55 bp, Artificial
  Synthetic oligonucleotide
cgttcgcttcttcatgatttcgtttcccaagacatttccgaagtgcgcgtcatcg

SEQ ID NO: 148884 - DNA, 55 bp, Artificial
  Synthetic oligonucleotide
cgttcgaagtcatatcgtgacttgacgactttctttcgaatccttgctcgctcga

SEQ ID NO: 148885 - DNA, 55 bp, Artificial
  Synthetic oligonucleotide
aaaatagtagtctccgatagagataagtacgtctgactgctgttggctaaacctg

SEQ ID NO: 148886 - DNA, 55 bp, Artificial
  Synthetic oligonucleotide
cgttccccactatatatactgcggggtctccacataattcacaggctgtgggata

SEQ ID NO: 148887 - DNA, 55 bp, Artificial
  Synthetic oligonucleotide
cgttccagcgcgaatcaaaacagccgcttgagtatccgtctgtcggcagtgtatt

SEQ ID NO: 148888 - DNA, 55 bp, Artificial
  Synthetic oligonucleotide
cgttcaccttcagaggccattctcttgctctaggggtacgtttagacattaatcg

SEQ ID NO: 148889 - DNA, 55 bp, Artificial
  Synthetic oligonucleotide
attgaaacaaaccgcatcctgataatacaaaagccgaagtaagacatgttgcagc

SEQ ID NO: 148890 - DNA, 55 bp, Artificial
  Synthetic oligonucleotide
agggattgcccgcagttaaccctcactactagccaatcacttgactagcagggct

SEQ ID NO: 148891 - DNA, 55 bp, Artificial
  Synthetic oligonucleotide
cgttagtagcgtgtagtggagatggggacaaggaaactggtggagattcgaaggg

SEQ ID NO: 148892 - DNA, 55 bp, Artificial
  Synthetic oligonucleotide
cgttagctaagtcaaaagatgtttgaccttgtgttgaatatgtgaattcgcgacc

SEQ ID NO: 148893 - DNA, 60 bp, Artificial
  Synthetic oligonucleotide
atggaacgttgaaaagcaaacacctgaattggcatgttgttacatggcaatatcaggtgt

SEQ ID NO: 148894 - DNA, 55 bp, Artificial
  Synthetic oligonucleotide
cgttaatggaatcgcaaccgagaatgcgataataggccaatatgctcctaaccag

SEQ ID NO: 148895 - DNA, 55 bp, Artificial
  Synthetic oligonucleotide
atgcgaatggtccgaggcagtacgatgaatggatacgcagggatgcagcccaagc

SEQ ID NO: 148896 - DNA, 55 bp, Artificial
  Synthetic oligonucleotide
cgtgttctaaagaacgtttctcgtaacgtaacactgcgataccgcttgatgaaag

SEQ ID NO: 148897 - DNA, 55 bp, Artificial
  Synthetic oligonucleotide
ctataaatcgcttaaacgttgatgctgtaacgtgcggatgggtaatcagccgttc

SEQ ID NO: 148898 - DNA, 55 bp, Artificial
  Synthetic oligonucleotide
ctagttcttctggcatatcccaattaaactccgtccaatgccataacagaccgtg

SEQ ID NO: 148899 - DNA, 55 bp, Artificial
  Synthetic oligonucleotide
actttcgcgttttgtcgttatttacgctgcttgcattcgtgttatcggcctgtgg

SEQ ID NO: 148900 - DNA, 55 bp, Artificial
  Synthetic oligonucleotide
ctagtgccattcctttctactggaatgattctcctacgtgaagtaccgctcccac

SEQ ID NO: 148901 - DNA, 55 bp, Artificial
  Synthetic oligonucleotide
ctaggcaatcgctaacaagcgaattagcaggatccaaatccatgcagcgcgtagg

SEQ ID NO: 148902 - DNA, 55 bp, Artificial
  Synthetic oligonucleotide
ctagctgaggatggagcagtacttatgcctttaggtgcctatccgtttagtaaaa

SEQ ID NO: 148903 - DNA, 55 bp, Artificial
  Synthetic oligonucleotide
attcggctctctcattaatggagcaacgatggttatgtacgaaggtgtacctgac

SEQ ID NO: 148904 - DNA, 57 bp, Artificial
  Synthetic oligonucleotide
gtgctatcacttattcctagtcgtttgtatacttcacttgcggaataaacaatttcg

SEQ ID NO: 148905 - DNA, 55 bp, Artificial
  Synthetic oligonucleotide
aggagtaaaattgattcgcctgtccgacgataatgaacatgagtatgttgcgaca

SEQ ID NO: 148906 - DNA, 55 bp, Artificial
  Synthetic oligonucleotide
actgcatatctgtagattgtagtcgccttagatgaggatggtgcgcttacataaa

SEQ ID NO: 148907 - DNA, 55 bp, Artificial
  Synthetic oligonucleotide
aaaagaagtttcttcctgtcgcgctatttgtgatggtgcaatcttcaatcggtat

SEQ ID NO: 148908 - DNA, 54 bp, Artificial
  Synthetic oligonucleotide
aaaaggaagcggttccaaaatgattcgaattcgacacacctacgaacgaagtgc

SEQ ID NO: 148909 - DNA, 55 bp, Artificial
  Synthetic oligonucleotide
ctactggatagtgaaattgggcatttattcgaggaatctgaagacggtcttgact

SEQ ID NO: 148910 - DNA, 55 bp, Artificial
  Synthetic oligonucleotide
ctactacctttctgtataacgtgagctcgtcactttcgttataatgaggcataag

SEQ ID NO: 148911 - DNA, 55 bp, Artificial
  Synthetic oligonucleotide
actttcgctcagcaagaaggtgtagcctgggcgaagcacgccttaactcttgcct

SEQ ID NO: 148912 - DNA, 54 bp, Artificial
  Synthetic oligonucleotide
ctacgtgcgggtcttaaatgcttactaattgggagcgtttggtacgttctaatg

SEQ ID NO: 148913 - DNA, 55 bp, Artificial
  Synthetic oligonucleotide
ctacgatacatctttcggagagctagctatagcgttatacgattaatacttacag

SEQ ID NO: 148914 - DNA, 55 bp, Artificial
  Synthetic oligonucleotide
ctacattcaattcaccattactggtgataggagtacctggtctccaattaacttc

SEQ ID NO: 148915 - DNA, 60 bp, Artificial
  Synthetic oligonucleotide
atgctatcattttaaatgaaggttcgctttctgcttggaaagctcctacattgcatgaat

SEQ ID NO: 148916 - DNA, 54 bp, Artificial
  Synthetic oligonucleotide
ctaatacaaccattttctctgccggatttggcgtatgttagagcccggttaacg

SEQ ID NO: 148917 - DNA, 55 bp, Artificial
  Synthetic oligonucleotide
ctaagaagtatacaaatctatgcaacgcctaatgtaggcaacgtggatagccgaa

SEQ ID NO: 148918 - DNA, 55 bp, Artificial
  Synthetic oligonucleotide
atgctatagcttcgattatcccgatagatccaatcgcttcggtagccgtcgtcac

SEQ ID NO: 148919 - DNA, 55 bp, Artificial
  Synthetic oligonucleotide
ctaaccggtattaaactgacagctacccatgaagaatgcattttaaccggcagtg

SEQ ID NO: 148920 - DNA, 55 bp, Artificial
  Synthetic oligonucleotide
aaaaggatagagaccgagtctgtgcaaagaaagtcgttagtagaaaggatttaca

SEQ ID NO: 148921 - DNA, 54 bp, Artificial
  Synthetic oligonucleotide
ctaaaccgtttattttagggtacagaatatcacctgacgaacatcaaacaggtg

SEQ ID NO: 148922 - DNA, 53 bp, Artificial
  Synthetic oligonucleotide
cgtttgtttctttaaacaaactaatagcttttgctgctaatacaaggtaacgc

SEQ ID NO: 148923 - DNA, 55 bp, Artificial
  Synthetic oligonucleotide
aaatagaaatgtaattgttttatatagtatggcaactatgagtattccagctcaa

SEQ ID NO: 148924 - DNA, 55 bp, Artificial
  Synthetic oligonucleotide
aaatcctgagcgtatccttccgggcggttatgtatatttaacggatatcttaggc

SEQ ID NO: 148925 - DNA, 55 bp, Artificial
  Synthetic oligonucleotide
cgcgccattacaaacggacctggaggacttgcggtctatcggtctattaagtcat

SEQ ID NO: 148926 - DNA, 58 bp, Artificial
  Synthetic oligonucleotide
atgcgtctcgtccgcgggagtactccgaagggttatgctggaattgctgtgaaacgcc

SEQ ID NO: 148927 - DNA, 55 bp, Artificial
  Synthetic oligonucleotide
cgcgcacgacagttacaagtgcacaatgaaacacagtctctagggcgagcgggtc

SEQ ID NO: 148928 - DNA, 55 bp, Artificial
  Synthetic oligonucleotide
aaatcgacaaatttcggttcatcataccagctttcgaccgattggatggcgggcc

SEQ ID NO: 148929 - DNA, 55 bp, Artificial
  Synthetic oligonucleotide
agtccacatcaattgaggcatgctttcgcaacgagacaaactgagacaggggtag

SEQ ID NO: 148930 - DNA, 55 bp, Artificial
  Synthetic oligonucleotide
aaatcggatacagctgttgatcatacaggcctaggtgcgataaaatggagcgcgt

SEQ ID NO: 148931 - DNA, 54 bp, Artificial
  Synthetic oligonucleotide
cgcctttaggattaggaagagccggacggaaactaggttctaatacacgagcta

SEQ ID NO: 148932 - DNA, 55 bp, Artificial
  Synthetic oligonucleotide
agtccatgtcaattccattgcctgcggttcagtcaagtccttatcttctacgtca

SEQ ID NO: 148933 - DNA, 55 bp, Artificial
  Synthetic oligonucleotide
cgcctgatggccgtattggtgctcttattacagttgcgatttgcgcaggtattgg

SEQ ID NO: 148934 - DNA, 55 bp, Artificial
  Synthetic oligonucleotide
cgcctcaatcatcgtttctacaccgtaatctctcatacgattctcgaagaatgtg

SEQ ID NO: 148935 - DNA, 55 bp, Artificial
  Synthetic oligonucleotide
cgcctattggtgttagcatagatagcaataaaagaacccttggaacaagggagtt

SEQ ID NO: 148936 - DNA, 55 bp, Artificial
  Synthetic oligonucleotide
cgcctaattgtacagattgtgctgcagccttttatagtcacctaattaaggggat

SEQ ID NO: 148937 - DNA, 56 bp, Artificial
  Synthetic oligonucleotide
atgccgaataaatcacttaaatcgataatcactccaatactgggatagtttttacc

SEQ ID NO: 148938 - DNA, 55 bp, Artificial
  Synthetic oligonucleotide
cgccgctattaaatggaatggtgctgatcgtaacagaatccttcacatcaggccc

SEQ ID NO: 148939 - DNA, 55 bp, Artificial
  Synthetic oligonucleotide
caatgatctatacacgatgagccaaggtacactctatccagcactcaaacggctg

SEQ ID NO: 148940 - DNA, 55 bp, Artificial
  Synthetic oligonucleotide
agtccgtgtaaatatagcaaccgctaatacaacaactgtagatgcaacgtttaca

SEQ ID NO: 148941 - DNA, 55 bp, Artificial
  Synthetic oligonucleotide
caatgttctcatgattacgattgctagtatcatcgttcttctcatagcggtgctg

SEQ ID NO: 148942 - DNA, 55 bp, Artificial
  Synthetic oligonucleotide
agaatcgcttttcgtgatatcaataagcaaacgaaaggtacagcacgatggactg

SEQ ID NO: 148943 - DNA, 55 bp, Artificial
  Synthetic oligonucleotide
cgcccataatcgttgtataatctcggtttgagatactgagtacaaagtgtgagcc

SEQ ID NO: 148944 - DNA, 55 bp, Artificial
  Synthetic oligonucleotide
aaattacgaattgcgtgagacgatcctatacacaggaacaatagcattaaacggc

SEQ ID NO: 148945 - DNA, 53 bp, Artificial
  Synthetic oligonucleotide
aaattccgaatgttttagaccatagaggaaagcccattcaccaaagaggggta

SEQ ID NO: 148946 - DNA, 55 bp, Artificial
  Synthetic oligonucleotide
aaattgctcggatacccgggacaaacgagcttagaagaaagtgtgacgccgagag

SEQ ID NO: 148947 - DNA, 55 bp, Artificial
  Synthetic oligonucleotide
cgctgccttctccgatttgcggttcatcacagacactgtgaatccagccttccgc

SEQ ID NO: 148948 - DNA, 60 bp, Artificial
  Synthetic oligonucleotide
gtggactcaatcgtggactcaatcaaggtacgaagcgagtggccgctatcgtggcgactg

SEQ ID NO: 148949 - DNA, 53 bp, Artificial
  Synthetic oligonucleotide
aaagtcggagactatattgagtttacacatttagagggtggaaaccgggcgac

SEQ ID NO: 148950 - DNA, 55 bp, Artificial
  Synthetic oligonucleotide
cgctcgtttcgtaaattcgcctggctctgcaagtcgtgccccgtggtttaacacg

SEQ ID NO: 148951 - DNA, 55 bp, Artificial
  Synthetic oligonucleotide
cgctcgttacttttgttccgtgtttatgtaataagtcataagcaatttcgcggcc

SEQ ID NO: 148952 - DNA, 55 bp, Artificial
  Synthetic oligonucleotide
caatccgtaaacaggtaaaacgatatgcttttgtccatactcttgcgacctatcg

SEQ ID NO: 148953 - DNA, 55 bp, Artificial
  Synthetic oligonucleotide
cgctcgctgcggttcatacgttggaaattgaagttgacctaggcactgcactcat

SEQ ID NO: 148954 - DNA, 55 bp, Artificial
  Synthetic oligonucleotide
atgacttatcatgcaatactcacgcccctcgttaccgttgttccaatacactcac

SEQ ID NO: 148955 - DNA, 55 bp, Artificial
  Synthetic oligonucleotide
cgctcgcgacactcgcatcagactgggaagtcgttgtcgtatcaaaagacagcac

SEQ ID NO: 148956 - DNA, 55 bp, Artificial
  Synthetic oligonucleotide
atgactcatcacgtgatccttgttactctagtagcgggtttgcaagacaaaagga

SEQ ID NO: 148957 - DNA, 55 bp, Artificial
  Synthetic oligonucleotide
cgctcgaattatagcagttgcggattcctatcatgctatggcgacaacaacctgt

SEQ ID NO: 148958 - DNA, 55 bp, Artificial
  Synthetic oligonucleotide
cgctccttgccactgtacgtatgtaacccagcataaagcatatgctacacacacg

SEQ ID NO: 148959 - DNA, 55 bp, Artificial
  Synthetic oligonucleotide
gtggcttcacaaagtaatcccccttctagcttatcgtaatatttaggaggcctct

SEQ ID NO: 148960 - DNA, 55 bp, Artificial
  Synthetic oligonucleotide
cgctccgatctgttgaatcgtcaccaatccttgagatatatagacccgatacagg

SEQ ID NO: 148961 - DNA, 55 bp, Artificial
  Synthetic oligonucleotide
cgctcaaccaatgggatacgagtactcctattgataagtaccgtgaaattatggg

SEQ ID NO: 148962 - DNA, 55 bp, Artificial
  Synthetic oligonucleotide
cgctagtaggtataggtggaagcaacacggcattaccgatgggtgttgtaatagc

SEQ ID NO: 148963 - DNA, 55 bp, Artificial
  Synthetic oligonucleotide
cgctagacgagctccatacgctaacacgagttgaagaacgcggttgacggaaacg

SEQ ID NO: 148964 - DNA, 51 bp, Artificial
  Synthetic oligonucleotide
cgctactgggaaccaaccaagttttacccctacgaaatattgtagtaaagc

SEQ ID NO: 148965 - DNA, 55 bp, Artificial
  Synthetic oligonucleotide
cgctaaaacatatgaacatgcaactatctgtacggtatggttatagtaccgtagc

SEQ ID NO: 148966 - DNA, 54 bp, Artificial
  Synthetic oligonucleotide
cgcgttcttttctaacagtccttcgtacaaatcgcctaaaccttcttgcttcgc

SEQ ID NO: 148967 - DNA, 55 bp, Artificial
  Synthetic oligonucleotide
acgccttcaatgcttttatccgcacttgagacaacaactcttgaaatgccggtgc

SEQ ID NO: 148968 - DNA, 55 bp, Artificial
  Synthetic oligonucleotide
cgcgtacgatttgaaataataccatgatacagcatttccacaaatccgcgcggtg

SEQ ID NO: 148969 - DNA, 55 bp, Artificial
  Synthetic oligonucleotide
cgcgctggaaagtacgcgatagcataacggaaggttatatttcattcggactcgg

SEQ ID NO: 148970 - DNA, 60 bp, Artificial
  Synthetic oligonucleotide
gtacaatgtcagactctgctattcggtttaccagaaatatatcatcttgtgttgaatgtt

SEQ ID NO: 148971 - DNA, 56 bp, Artificial
  Synthetic oligonucleotide
gtgggcacaggaaatatagagaaagtgatgtaatggtgttccgtaaggttataaac

SEQ ID NO: 148972 - DNA, 55 bp, Artificial
  Synthetic oligonucleotide
caatcggttgattcgtcagtgtataaccgcaatttgccggtatggagcacgtatg

SEQ ID NO: 148973 - DNA, 55 bp, Artificial
  Synthetic oligonucleotide
agaaggcgactccacgattacgaggtaatctgacatgctagtgcctccttaagag

SEQ ID NO: 148974 - DNA, 55 bp, Artificial
  Synthetic oligonucleotide
caatgaacgtgcgcggttttctagataatggcgggatacgcggcatgataatcgc

SEQ ID NO: 148975 - DNA, 55 bp, Artificial
  Synthetic oligonucleotide
atcttcgctccagccgaattttaaggtgggagttttactgcccgttaatgccaga

SEQ ID NO: 148976 - DNA, 55 bp, Artificial
  Synthetic oligonucleotide
cacacaaccgagcacaactaaaggagcagtcgaaaacgcatattcttcggcacct

SEQ ID NO: 148977 - DNA, 55 bp, Artificial
  Synthetic oligonucleotide
cgattatcaggacaactatgatgggtcagaaagagaacccgtcgttatgccttca

SEQ ID NO: 148978 - DNA, 53 bp, Artificial
  Synthetic oligonucleotide
cgattaggggtaattgaacgtacccagcagtattctcctacggtctacttacc

SEQ ID NO: 148979 - DNA, 55 bp, Artificial
  Synthetic oligonucleotide
cgattaagccgatcgttgcgattgttaatccgagtacaagggagggacgagcttc

SEQ ID NO: 148980 - DNA, 55 bp, Artificial
  Synthetic oligonucleotide
agtgaggggcagcggcatctttgttcgaagacacagacgcaagggctacatcagc

SEQ ID NO: 148981 - DNA, 55 bp, Artificial
  Synthetic oligonucleotide
atcttagaaacgaagcaattcgtctcttaaccataggaactaaggggatagccta

SEQ ID NO: 148982 - DNA, 60 bp, Artificial
  Synthetic oligonucleotide
atgattttcctagtgtagaagatcacgggttacattatcgttctgccactgtacagattc

SEQ ID NO: 148983 - DNA, 55 bp, Artificial
  Synthetic oligonucleotide
cacacggacgatgtatggtgttcgagcatgttgttttacgtaagtgatgtgacgg

SEQ ID NO: 148984 - DNA, 55 bp, Artificial
  Synthetic oligonucleotide
cgatcttgagcgaactcaagacgtacctttgctatattaccacttctatacactc

SEQ ID NO: 148985 - DNA, 55 bp, Artificial
  Synthetic oligonucleotide
cacagagttagcttgtcggtttacgattctcatttcaggggctgctgcacttggt

SEQ ID NO: 148986 - DNA, 55 bp, Artificial
  Synthetic oligonucleotide
cgatcgtctcttgttgtctggttaaattacgaagatttaagagttgaatccctcg

SEQ ID NO: 148987 - DNA, 55 bp, Artificial
  Synthetic oligonucleotide
cgatcatttggcgaaatgtacggttgaccgcttcgcgttcatcataagacagcgc

SEQ ID NO: 148988 - DNA, 55 bp, Artificial
  Synthetic oligonucleotide
cacagcatcatatggattgtctgttgctttaacgataggaggaagagaagtcgtc

SEQ ID NO: 148989 - DNA, 55 bp, Artificial
  Synthetic oligonucleotide
cacagcctgctttcatatcccttgcaccataaacgacacgtggtacacgggattg

SEQ ID NO: 148990 - DNA, 55 bp, Artificial
  Synthetic oligonucleotide
atctgctgtatccgctacagaaatttcgctacctccctctggcaagaagttgcgt

SEQ ID NO: 148991 - DNA, 55 bp, Artificial
  Synthetic oligonucleotide
cgatagcgaaatgatggagcattaaggagttgataggtaactttgaccaagaccc

SEQ ID NO: 148992 - DNA, 55 bp, Artificial
  Synthetic oligonucleotide
cacatccggtaaaagagctaaatagaagggcaaataatgcggttatgaggccgag

SEQ ID NO: 148993 - DNA, 60 bp, Artificial
  Synthetic oligonucleotide
atgataggctaggcggtgcctagctttcccatgctatcgctcaaacattcaaaatcacaa

SEQ ID NO: 148994 - DNA, 55 bp, Artificial
  Synthetic oligonucleotide
cgatacatcttgatcgtgcggctctgttattgattacggatggccaaaccactct

SEQ ID NO: 148995 - DNA, 55 bp, Artificial
  Synthetic oligonucleotide
acgccctccacttcattagaaatcgggtgtgaccattacatgggacactattcta

SEQ ID NO: 148996 - DNA, 55 bp, Artificial
  Synthetic oligonucleotide
cgagttgttgaagaatatgtggagatagatatcgctgtagctcttgagcgaacag

SEQ ID NO: 148997 - DNA, 55 bp, Artificial
  Synthetic oligonucleotide
cgagtgcttttccgagagattgtacgcgtcttataccgtaacattagcacccttc

SEQ ID NO: 148998 - DNA, 55 bp, Artificial
  Synthetic oligonucleotide
cgagtgcttcatatcatgctaggattgttgtgttatacgaggttatgatgcgttg

SEQ ID NO: 148999 - DNA, 53 bp, Artificial
  Synthetic oligonucleotide
caccaataggtccaattccctttgtacctcttcgttaatccgaatcacccctc

SEQ ID NO: 149000 - DNA, 55 bp, Artificial
  Synthetic oligonucleotide
cgccatatagggagagagtgccgtagactgaaagcattcttatggtagacggaag

SEQ ID NO: 149001 - DNA, 55 bp, Artificial
  Synthetic oligonucleotide
aacaacgtgatactgttatattccagagagtcgcgctctaaacaggcgaacgggg

SEQ ID NO: 149002 - DNA, 52 bp, Artificial
  Synthetic oligonucleotide
cgccagaacgtaatttacgaaacagcttacatagggtaggttaaccacaagt

SEQ ID NO: 149003 - DNA, 55 bp, Artificial
  Synthetic oligonucleotide
cacaaacgccacaaattccccgtacgataaggagccgcgaatgacaaaccacgtc

SEQ ID NO: 149004 - DNA, 60 bp, Artificial
  Synthetic oligonucleotide
atgatacgacagcaatggtttctccagtacaagttccagataaacgacaagacttcatgg

SEQ ID NO: 149005 - DNA, 55 bp, Artificial
  Synthetic oligonucleotide
cgccaataaaattccagagccaaatcgtttagtcgtggggcaagcactcgttatt

SEQ ID NO: 149006 - DNA, 55 bp, Artificial
  Synthetic oligonucleotide
aacaagctggcattatcacaggaatcaaccaattgctaggcggcctattttcagc

SEQ ID NO: 149007 - DNA, 54 bp, Artificial
  Synthetic oligonucleotide
aacaaggatttaggttgttcgacttggactagcaattgtaccagccgaaccgcc

SEQ ID NO: 149008 - DNA, 55 bp, Artificial
  Synthetic oligonucleotide
cacaagcagtatacaaacgaaactttggccgagatgaagacggccatcagagtgc

SEQ ID NO: 149009 - DNA, 55 bp, Artificial
  Synthetic oligonucleotide
cgcataaagttcacaacatgttctggtttcccagcgaatctcttccgtaacgctg

SEQ ID NO: 149010 - DNA, 55 bp, Artificial
  Synthetic oligonucleotide
cgcagttggttaaaaggatgatcagggctaaacgaatagccacgaaagtcatccg

SEQ ID NO: 149011 - DNA, 55 bp, Artificial
  Synthetic oligonucleotide
cgcaggggtgattggttatgttaaggggagtatactggacaagatgaatcgcaag

SEQ ID NO: 149012 - DNA, 55 bp, Artificial
  Synthetic oligonucleotide
atgaaacatttcagtggaggcttgagttcgaacgctaggtcttttcgtctatcgc

SEQ ID NO: 149013 - DNA, 55 bp, Artificial
  Synthetic oligonucleotide
cgcagcaaaaggaatccgagcgattacaggcggcttataattctacattagcgga

SEQ ID NO: 149014 - DNA, 55 bp, Artificial
  Synthetic oligonucleotide
cacaatagtctcccataaacgatagcgcctgcccgtaaagcaagtatttagagtt

SEQ ID NO: 149015 - DNA, 57 bp, Artificial
  Synthetic oligonucleotide
atgatacagggagacttaagggtatcgatacgctagaaaagatttactaagtagata

SEQ ID NO: 149016 - DNA, 55 bp, Artificial
  Synthetic oligonucleotide
cacaatatctacaatctccaaccggacagttcgttggactgtaaaggcaataacc

SEQ ID NO: 149017 - DNA, 55 bp, Artificial
  Synthetic oligonucleotide
cgcacccgtcttgtcatatccgagtgcaacaatcacaccacctgtaagtgttgct

SEQ ID NO: 149018 - DNA, 55 bp, Artificial
  Synthetic oligonucleotide
cgcacactgacgtataaggaactggatgagcggtcgaatcagcttgcacgactcc

SEQ ID NO: 149019 - DNA, 54 bp, Artificial
  Synthetic oligonucleotide
agtcgttacttttggtagctaacgaattcgtcctaaggcagccgagctaactcc

SEQ ID NO: 149020 - DNA, 55 bp, Artificial
  Synthetic oligonucleotide
aacactagcagctttaacgggtgtaggaatatctgcgttattaaatgctccacgc

SEQ ID NO: 149021 - DNA, 55 bp, Artificial
  Synthetic oligonucleotide
cgcaactagttatggtcttaatggcgctgaagctatcgcattcgtacaaagaacg

SEQ ID NO: 149022 - DNA, 55 bp, Artificial
  Synthetic oligonucleotide
cgcaacatcttcaggactctcagtctttccgtgtccaacaagatccactacaata

SEQ ID NO: 149023 - DNA, 54 bp, Artificial
  Synthetic oligonucleotide
cgcaaatccggccgtctgataaataggcccggacaatcgtgaaacggccttttg

SEQ ID NO: 149024 - DNA, 55 bp, Artificial
  Synthetic oligonucleotide
cgatttcaagtctaccgggtaatgtacatcaacaagcgtccgggcacaaggcagc

SEQ ID NO: 149025 - DNA, 55 bp, Artificial
  Synthetic oligonucleotide
agtctatgtactgtactaactgggagatgtgctctgtccgctatatcagaaatgg

SEQ ID NO: 149026 - DNA, 60 bp, Artificial
  Synthetic oligonucleotide
atgaggatgctggaaggtaaagcaccttatactcccggatcagagcagtatggagcacat

SEQ ID NO: 149027 - DNA, 55 bp, Artificial
  Synthetic oligonucleotide
cgattgtgcagccgacgccgattaaggagagctgccaccaagcgagatttccttt

SEQ ID NO: 149028 - DNA, 55 bp, Artificial
  Synthetic oligonucleotide
caacgttcgtcgctgccactgtgccattattaaagattaatacatcatacgttaa

SEQ ID NO: 149029 - DNA, 55 bp, Artificial
  Synthetic oligonucleotide
cggcatctgtgataaaggtaggtgggagctgggtttcccgtatatacccaattgg

SEQ ID NO: 149030 - DNA, 55 bp, Artificial
  Synthetic oligonucleotide
caacttcttgcccaattgttctaccgttcgcgttatttgtcgcacagcttcctcg

SEQ ID NO: 149031 - DNA, 55 bp, Artificial
  Synthetic oligonucleotide
cggcacttttccgcccgcaatgacatatgcaagtttcttagcaatgtgaagatcg

SEQ ID NO: 149032 - DNA, 55 bp, Artificial
  Synthetic oligonucleotide
cggatttgtcagcgttaatcgtgctgccctgaagcttttcgctatagtcttcagg

SEQ ID NO: 149033 - DNA, 55 bp, Artificial
  Synthetic oligonucleotide
cggattgataaattccaagtggctcgggttgttcgctaacggtaatgcgcgctga

SEQ ID NO: 149034 - DNA, 55 bp, Artificial
  Synthetic oligonucleotide
acgggtgtagttcttatgaatccaataacaggtggtgtaccagctctagtaggag

SEQ ID NO: 149035 - DNA, 55 bp, Artificial
  Synthetic oligonucleotide
cggatggacttgactaaccacaacttactacactaaaactgcgaaataaggacat

SEQ ID NO: 149036 - DNA, 55 bp, Artificial
  Synthetic oligonucleotide
caagaagcggaacaccgagcggatgcatttaacacaacaacgaatagtgcagctg

SEQ ID NO: 149037 - DNA, 60 bp, Artificial
  Synthetic oligonucleotide
gtgtagatttgatgcaggaggcttacgatggagttcacgatgcacaagagaagttattac

SEQ ID NO: 149038 - DNA, 55 bp, Artificial
  Synthetic oligonucleotide
aaactgatcctacccagaatggagttgatggtggaaggggtcctgtattgacgtc

SEQ ID NO: 149039 - DNA, 55 bp, Artificial
  Synthetic oligonucleotide
atgcaacttcaagcgtaatgccgattgtaagtcaaatcgaatcaagaacgtatgc

SEQ ID NO: 149040 - DNA, 55 bp, Artificial
  Synthetic oligonucleotide
cggaggaagccattcgctatgtattagccttcaggccgctctctatccggtactg

SEQ ID NO: 149041 - DNA, 55 bp, Artificial
  Synthetic oligonucleotide
agctggttcgctggatatacaccacaatatacgatggctgtgtggactggttacg

SEQ ID NO: 149042 - DNA, 55 bp, Artificial
  Synthetic oligonucleotide
caagagcgagtagctaatacggaagatctcttattacctttacgcgtcactttta

SEQ ID NO: 149043 - DNA, 55 bp, Artificial
  Synthetic oligonucleotide
agtagtgcgggcaatgttcaagccgtgtgatacatcaaatcgagaatttccctct

SEQ ID NO: 149044 - DNA, 55 bp, Artificial
  Synthetic oligonucleotide
aaagatgcgtcgctaatgatgaggtagcaccatgtgcacagtctaatgctacatg

SEQ ID NO: 149045 - DNA, 55 bp, Artificial
  Synthetic oligonucleotide
cggagcacagccctgttataactaaaatcgtccccatagaacgaatactcgatat

SEQ ID NO: 149046 - DNA, 55 bp, Artificial
  Synthetic oligonucleotide
cggagagctccctcctggtagcttactcccttcagaacgaaaattagctacgcat

SEQ ID NO: 149047 - DNA, 55 bp, Artificial
  Synthetic oligonucleotide
cggacggtcgtctgtacccgctagcttcgaattaaatcaaccgagtgatgagtta

SEQ ID NO: 149048 - DNA, 55 bp, Artificial
  Synthetic oligonucleotide
atatcgggaatcgtatttctagtagaactaacagacttagatggccgtaaaatgt

SEQ ID NO: 149049 - DNA, 55 bp, Artificial
  Synthetic oligonucleotide
caaggtgtgatagcacttcatccgctggttgtaaatgcggcttattagacgggtc

SEQ ID NO: 149050 - DNA, 55 bp, Artificial
  Synthetic oligonucleotide
cggacggtatagtagttttataggctataaccgtttgtcgtcaatgcaaccaatc

SEQ ID NO: 149051 - DNA, 55 bp, Artificial
  Synthetic oligonucleotide
caagtcatagtcacaacaaaggctgcccattatatatccgtttataaggcggcct

SEQ ID NO: 149052 - DNA, 55 bp, Artificial
  Synthetic oligonucleotide
cggacgcggttttgtacctatggattggtgcaagttttgcagcgttcacgctcgg

SEQ ID NO: 149053 - DNA, 55 bp, Artificial
  Synthetic oligonucleotide
cggggagacatcatcagtagtcgttacacaagacgagttaaatatgctacaagct

SEQ ID NO: 149054 - DNA, 52 bp, Artificial
  Synthetic oligonucleotide
atgcatggggcgaccgtaaccaacggcgtgaaagtccccgacaaccggttcg

SEQ ID NO: 149055 - DNA, 55 bp, Artificial
  Synthetic oligonucleotide
caacagctacagccgattagagaacaggaggcgaaacggcaatgacacataagcc

SEQ ID NO: 149056 - DNA, 55 bp, Artificial
  Synthetic oligonucleotide
cgggcgtacctattgagacagtaaacgtaggcggcatgcgttttgctaatgaccg

SEQ ID NO: 149057 - DNA, 55 bp, Artificial
  Synthetic oligonucleotide
atgcagtttcctttatcccgacgttcacacttggtggggttacaggaatcatgct

SEQ ID NO: 149058 - DNA, 55 bp, Artificial
  Synthetic oligonucleotide
cgggcatcattagaagacaaagacacattctgggcgcagtataaaggctggacgc

SEQ ID NO: 149059 - DNA, 60 bp, Artificial
  Synthetic oligonucleotide
atatcgcaacggaaacaatgggtatgatctccgaggatgtattatctggatactcaacaa

SEQ ID NO: 149060 - DNA, 55 bp, Artificial
  Synthetic oligonucleotide
caaccgggatgactcccattaatgagtgccacttacgaaacgtatactcgcggcc

SEQ ID NO: 149061 - DNA, 55 bp, Artificial
  Synthetic oligonucleotide
cgggcaatttgttccgtaatatcccgagtaaaacagaccatgtacggcatcgttc

SEQ ID NO: 149062 - DNA, 55 bp, Artificial
  Synthetic oligonucleotide
caaccgtgtcggaatggaagcgccatggaatatgggcgagttctacggacagtcc

SEQ ID NO: 149063 - DNA, 54 bp, Artificial
  Synthetic oligonucleotide
cgggcaagaaccgccttaccaacgcgggaccgtaaggacgctatggtgtcatta

SEQ ID NO: 149064 - DNA, 55 bp, Artificial
  Synthetic oligonucleotide
atgcactgagttcgtttcagcatcgtgaaccaaacgctgtaggagctgctcttac

SEQ ID NO: 149065 - DNA, 55 bp, Artificial
  Synthetic oligonucleotide
cgggatgtgattgactatgtccaacatggttatcattcgggcgagtagatgtatc

SEQ ID NO: 149066 - DNA, 55 bp, Artificial
  Synthetic oligonucleotide
cgggaggacgcgctgtcctttcagcacgagcatgctcatttctccaagtacgcct

SEQ ID NO: 149067 - DNA, 54 bp, Artificial
  Synthetic oligonucleotide
cgggaaacctcacgattggaaatgtgatagcggttagttttggggctttgttgc

SEQ ID NO: 149068 - DNA, 55 bp, Artificial
  Synthetic oligonucleotide
caacgaagtacaatcaggtattggtagcggagatgacttattagtaaccgcaccg

SEQ ID NO: 149069 - DNA, 55 bp, Artificial
  Synthetic oligonucleotide
caacgaatccgtattttagatgcgacgattttccaagtaccgaaacatttagcac

SEQ ID NO: 149070 - DNA, 59 bp, Artificial
  Synthetic oligonucleotide
gtttattgatgggaatcgcaggagcaagagaagggctgtccacgagtttattggcgcgt

SEQ ID NO: 149071 - DNA, 55 bp, Artificial
  Synthetic oligonucleotide
caacgagtattagcaagacgtgtgaaaggttcagagcgctggaataaacaacgca

SEQ ID NO: 149072 - DNA, 55 bp, Artificial
  Synthetic oligonucleotide
cggcgttgtgattgggatcaatacgattccggttatgctaaaacaaatcgagaag

SEQ ID NO: 149073 - DNA, 55 bp, Artificial
  Synthetic oligonucleotide
caacgataagcggacttcggcgttagccgatggagcattaaggagttgactcctt

SEQ ID NO: 149074 - DNA, 55 bp, Artificial
  Synthetic oligonucleotide
cggcgtcgatctttccagaaggggaatgctgctcaggtgccgccatatagatcaa

SEQ ID NO: 149075 - DNA, 55 bp, Artificial
  Synthetic oligonucleotide
cggcgctccaattgatcatgaatgtacaccgggataggttgtgtagctccgaccc

SEQ ID NO: 149076 - DNA, 55 bp, Artificial
  Synthetic oligonucleotide
caacgcctcttagccaatgcttacctgcatcgccaaatacccaaacaccgatatt

SEQ ID NO: 149077 - DNA, 52 bp, Artificial
  Synthetic oligonucleotide
acggtaaggctacaccaattttttcgcacctactaaagtaaggctactctaa

SEQ ID NO: 149078 - DNA, 54 bp, Artificial
  Synthetic oligonucleotide
cggccatatttccccttctccttggaacggaagtttgacatacaatcgaaagta

SEQ ID NO: 149079 - DNA, 52 bp, Artificial
  Synthetic oligonucleotide
cggaaacaaggccagagtttaatttgaccgctaatttcggcgataagtcttt

SEQ ID NO: 149080 - DNA, 55 bp, Artificial
  Synthetic oligonucleotide
cgctggcagtggtattggaacggacggtaataactacaatcaaggtacagcagac

SEQ ID NO: 149081 - DNA, 55 bp, Artificial
  Synthetic oligonucleotide
caagtcgagcaactatacctcgtttttggtctgttcggcttggtgaaagctaaaa

SEQ ID NO: 149082 - DNA, 57 bp, Artificial
  Synthetic oligonucleotide
atatagagggaacgtgttacggcgtggctagctgttagtcgtgcagggggtacagag

SEQ ID NO: 149083 - DNA, 55 bp, Artificial
  Synthetic oligonucleotide
caagtttgtctccctgtacgttgagaggttcttgtactacaacgttatctaatcc

SEQ ID NO: 149084 - DNA, 55 bp, Artificial
  Synthetic oligonucleotide
cgcttttccgcagctggcgtttaatttagcgcgcgatcagtatatgccgagaatg

SEQ ID NO: 149085 - DNA, 55 bp, Artificial
  Synthetic oligonucleotide
cgctggccccagcacatcgtatatttgtaacgcaacttccgagacagccgaagtg

SEQ ID NO: 149086 - DNA, 55 bp, Artificial
  Synthetic oligonucleotide
caatactaaaagatcatattgcaaaaggacacacctacgcataaccatagcggag

SEQ ID NO: 149087 - DNA, 55 bp, Artificial
  Synthetic oligonucleotide
cgctgtaactgtaatatgtgcagggaaatctgctgccgatagcttagatatctca

SEQ ID NO: 149088 - DNA, 55 bp, Artificial
  Synthetic oligonucleotide
acggccgcattcactttcacggattggtccaattggtgcacgcattaacgttgtc

SEQ ID NO: 149089 - DNA, 55 bp, Artificial
  Synthetic oligonucleotide
cgctgttacagggaagaagtggcgtcatagcggtgcaaagaataaccagccacgc

SEQ ID NO: 149090 - DNA, 55 bp, Artificial
  Synthetic oligonucleotide
agaacggtgatgctcagcaacctacgggagagcaaaagaacgacgatgctcagca

SEQ ID NO: 149091 - DNA, 55 bp, Artificial
  Synthetic oligonucleotide
cgcttcaccgttacgaaatgcttttacttcataaccgtcatttagttgccagttc

SEQ ID NO: 149092 - DNA, 55 bp, Artificial
  Synthetic oligonucleotide
aaagccgggaatggtcatctgtgttgagccgatggtgaatcaaggaagacgatat

SEQ ID NO: 149093 - DNA, 58 bp, Artificial
  Synthetic oligonucleotide
atagtgatctcacttattgaagctataattggtatcgttttggcttactataaaccac

SEQ ID NO: 149094 - DNA, 55 bp, Artificial
  Synthetic oligonucleotide
cgcttgtatctattacatgcgcgcggcataatttctttctaacgcgggtgcatag

SEQ ID NO: 149095 - DNA, 55 bp, Artificial
  Synthetic oligonucleotide
cgcttgcgacgctctgccttctttatgccgccatatacgagcggtagctcaacat

SEQ ID NO: 149096 - DNA, 55 bp, Artificial
  Synthetic oligonucleotide
cgcttgcaattcttctgtcgtcataaatcatcctcctctactacttgtcactcag

SEQ ID NO: 149097 - DNA, 55 bp, Artificial
  Synthetic oligonucleotide
agctcacttcgcatcctcttaactggcggtgaagcgttgaagacttgtaaatcgc

SEQ ID NO: 149098 - DNA, 55 bp, Artificial
  Synthetic oligonucleotide
cgcttcttacggcttacatccgctgaaatgagtagacgttccgctaccatcgttg

SEQ ID NO: 149099 - DNA, 55 bp, Artificial
  Synthetic oligonucleotide
aaagcctaatgagctggttgagtgatctctaaggggagtgatcaagcggtgagtg

SEQ ID NO: 149100 - DNA, 54 bp, Artificial
  Synthetic oligonucleotide
cggacacaattttggggctttgacgggaacgacgcgacgtatggttgcttgtgg

SEQ ID NO: 149101 - DNA, 55 bp, Artificial
  Synthetic oligonucleotide
agtatcaggatgatatttagggaagaaggtagcacgaaaatgccaatttaatcgc

SEQ ID NO: 149102 - DNA, 55 bp, Artificial
  Synthetic oligonucleotide
cggacatttacggtgaccggtagaaacttgcgtgccatatccacgcgattatatg

SEQ ID NO: 149103 - DNA, 55 bp, Artificial
  Synthetic oligonucleotide
caagtggtgagccgtgcgcatcagactttccacctttattcggtgagccgtatcc

SEQ ID NO: 149104 - DNA, 60 bp, Artificial
  Synthetic oligonucleotide
atagtacatagcaatgcaatagatgtgtatggctctacttgcttacatagttctgccaaa

SEQ ID NO: 149105 - DNA, 55 bp, Artificial
  Synthetic oligonucleotide
caagtgtcgctagcgtgccctttccatatacatttacctcacgaacaccgaggcg

SEQ ID NO: 149106 - DNA, 55 bp, Artificial
  Synthetic oligonucleotide
cggaattgacaataggattttgaacaggggtagaagtagcggtcacttgaaatgc

SEQ ID NO: 149107 - DNA, 55 bp, Artificial
  Synthetic oligonucleotide
cggaacatgtggcatgcagcgagcgaaccaccgactgacggtatagcgagccaca

SEQ ID NO: 149108 - DNA, 55 bp, Artificial
  Synthetic oligonucleotide
aaagcatatgcggtcatcgaaggaaacaaggcgtgaagccagacaatgccgctcc

SEQ ID NO: 149109 - DNA, 55 bp, Artificial
  Synthetic oligonucleotide
agtatgcgtgcgccgagatggggattacactcatccacacccagccgtatgaccc

SEQ ID NO: 149110 - DNA, 54 bp, Artificial
  Synthetic oligonucleotide
cactgcttgcggagtacggcaagatatcgcgggacacgggaaaatacgcatccc

SEQ ID NO: 149111 - DNA, 53 bp, Artificial
  Synthetic oligonucleotide
attttagtcgatagcaacgctaaaggggaagtacgtgggtatgtgacaaaccc

SEQ ID NO: 149112 - DNA, 54 bp, Artificial
  Synthetic oligonucleotide
tcctacgtgtccgagaatgcctccaactactccggttgtatgtaatgtttctct

SEQ ID NO: 149113 - DNA, 54 bp, Artificial
  Synthetic oligonucleotide
tctatatattcaggggagtttatgatcagcgcaaatattgaacgaacagtagca

SEQ ID NO: 149114 - DNA, 54 bp, Artificial
  Synthetic oligonucleotide
gtgtggaagtctcatagtgtttcgcttcgttggtcgttagcgactctgctgatt

SEQ ID NO: 149115 - DNA, 60 bp, Artificial
  Synthetic oligonucleotide
gtttcaagggcgaaatcctaatctagcagtttataacatggttttacatgatgatgaagc

SEQ ID NO: 149116 - DNA, 54 bp, Artificial
  Synthetic oligonucleotide
gtgtagaacttgattggacaggctctgatgatgaacgcgtgtattatcatgtct

SEQ ID NO: 149117 - DNA, 54 bp, Artificial
  Synthetic oligonucleotide
gtgcagattcgattccaggtttaacgaatacagagtgttgggataagtcagcgg

SEQ ID NO: 149118 - DNA, 54 bp, Artificial
  Synthetic oligonucleotide
gtaaggaccgcaaagacatcgtaggggtacaattagtaggagatcgtaagccat

SEQ ID NO: 149119 - DNA, 54 bp, Artificial
  Synthetic oligonucleotide
gtgaatttatagagattacgttaattctgttaatcgcaatacgtgctaatcctg

SEQ ID NO: 149120 - DNA, 54 bp, Artificial
  Synthetic oligonucleotide
atggcatgtacttaggaaaagtcataacgaatcgtcgattatcgaatgtacaac

SEQ ID NO: 149121 - DNA, 54 bp, Artificial
  Synthetic oligonucleotide
gtaacttgtaacacttgatgaggttaaagctatcgctactcttccatcacgtga

SEQ ID NO: 149122 - DNA, 54 bp, Artificial
  Synthetic oligonucleotide
tctactaggtgggtgccctcatagccgggtttagcgtcccaagaagggcgtgct

SEQ ID NO: 149123 - DNA, 54 bp, Artificial
  Synthetic oligonucleotide
atggattgcagtccgcctctgttgataattttagcggctgcctcattgtcagtt

SEQ ID NO: 149124 - DNA, 54 bp, Artificial
  Synthetic oligonucleotide
cagcgcgacgccagtccgtcataatgttgccttcttcgaattgcggcaaggcaa

SEQ ID NO: 149125 - DNA, 54 bp, Artificial
  Synthetic oligonucleotide
cactaattttgcgcgaactatcactaattttgcgcgaactatcactaattttgc

SEQ ID NO: 149126 - DNA, 60 bp, Artificial
  Synthetic oligonucleotide
gtttcatagtgcaagacataggaacgttctagtacaaggtagacatgataagtgcgaatt

SEQ ID NO: 149127 - DNA, 54 bp, Artificial
  Synthetic oligonucleotide
caaattatgctagcatttaacataaaaagggatgtcgaaggagagagatgtgat

SEQ ID NO: 149128 - DNA, 54 bp, Artificial
  Synthetic oligonucleotide
atgggtagagcgatcggtataagtggcacaatcattttgaattgggtaaaccaa

SEQ ID NO: 149129 - DNA, 54 bp, Artificial
  Synthetic oligonucleotide
tccagagtgcaatatatccatccaccgggttatagccgctgacaagcataatca

SEQ ID NO: 149130 - DNA, 54 bp, Artificial
  Synthetic oligonucleotide
gtatgtcctccgtgacttgcaatatgagtacttgccggaattgacaagggcgga

SEQ ID NO: 149131 - DNA, 54 bp, Artificial
  Synthetic oligonucleotide
tgacctattatccgtggcgtttattcttccctgccggatttatctgcgttacaa

SEQ ID NO: 149132 - DNA, 54 bp, Artificial
  Synthetic oligonucleotide
cactagcagggggactgctatgcctattaggtgaagtctatcctcatgttaatg

SEQ ID NO: 149133 - DNA, 54 bp, Artificial
  Synthetic oligonucleotide
atgcgaaacgacttatgatcgtacttctgcaaggtcctccccttatacatgtaa

SEQ ID NO: 149134 - DNA, 54 bp, Artificial
  Synthetic oligonucleotide
acgtatagatatagtagagaatacctatactgatttcaatctattatctttgcc

SEQ ID NO: 149135 - DNA, 54 bp, Artificial
  Synthetic oligonucleotide
atctgcagttgttatggatacgccagcacgtattaagcgttcaaaggtacgcat

SEQ ID NO: 149136 - DNA, 54 bp, Artificial
  Synthetic oligonucleotide
acagcgttcggagaattgctgtttcacgcctatgtgctgcgatttgtcactgtc

SEQ ID NO: 149137 - DNA, 53 bp, Artificial
  Synthetic oligonucleotide
gtttccgacacactccgcaaaggggatgacacgtcctcccccttgacccccac

SEQ ID NO: 149138 - DNA, 54 bp, Artificial
  Synthetic oligonucleotide
tgatgatccctgcgctagctcgctttccgtgggaggctggtgagcctcatcgac

SEQ ID NO: 149139 - DNA, 54 bp, Artificial
  Synthetic oligonucleotide
acgtttcacagatgtcccaccgtgtccaccttaatatagccacattttacgagg

SEQ ID NO: 149140 - DNA, 54 bp, Artificial
  Synthetic oligonucleotide
gtcacactaggacctgatacatcatcacgtgcaaatgggtctgtcggtggagaa

SEQ ID NO: 149141 - DNA, 54 bp, Artificial
  Synthetic oligonucleotide
tcccgccatatcctccctgacttagtggagcttctagtaatctacgattagaca

SEQ ID NO: 149142 - DNA, 54 bp, Artificial
  Synthetic oligonucleotide
ggggtcggagcttgtgcgaaaacttctgatgttgttatttgattggtgccagat

SEQ ID NO: 149143 - DNA, 54 bp, Artificial
  Synthetic oligonucleotide
tcgaatttgcgatgagatcttttttgcacatgatacaacaggtgtacaaacgct

SEQ ID NO: 149144 - DNA, 54 bp, Artificial
  Synthetic oligonucleotide
catacagccatcgtatattgtggtgtatatccagcgaaccagctatctctgttt

SEQ ID NO: 149145 - DNA, 54 bp, Artificial
  Synthetic oligonucleotide
tctttacccgtcaccgggcagacacaatagacttcccctttgtaggtatagacg

SEQ ID NO: 149146 - DNA, 54 bp, Artificial
  Synthetic oligonucleotide
ggtctaaggcttacataaagcactctaggcttgttatacgcaccgaacacatcg

SEQ ID NO: 149147 - DNA, 54 bp, Artificial
  Synthetic oligonucleotide
actggcaccactgcttgcggagtacggcaagatatcgcgggacacgggaaagta

SEQ ID NO: 149148 - DNA, 54 bp, Artificial
  Synthetic oligonucleotide
atagcctttggacgtaaagtgtactctactccgtcaattgggtctgttgttaat

SEQ ID NO: 149149 - DNA, 54 bp, Artificial
  Synthetic oligonucleotide
ggctccaagccttctacaacaggctgtgctgcatgagccgtacgtccgactggt

SEQ ID NO: 149150 - DNA, 54 bp, Artificial
  Synthetic oligonucleotide
acgagtcaagtttcgttccttttcgtgcttagcttgatgggtatgtgacgctac

SEQ ID NO: 149151 - DNA, 54 bp, Artificial
  Synthetic oligonucleotide
gtacaaggaaaaggaacggagctaattgcgaattggagacaattagaaacggct

SEQ ID NO: 149152 - DNA, 54 bp, Artificial
  Synthetic oligonucleotide
catcatttacgcataggagatacagcgttttttgtaccacctaccgcgattagt

SEQ ID NO: 149153 - DNA, 54 bp, Artificial
  Synthetic oligonucleotide
tccaacgcgccaataaactcgtggacagcccttctcttgctcctgcgattccca

SEQ ID NO: 149154 - DNA, 53 bp, Artificial
  Synthetic oligonucleotide
atgaaaatacgaggctgttcaaaggttttccgtacttttgggcagcctcaccc

SEQ ID NO: 149155 - DNA, 54 bp, Artificial
  Synthetic oligonucleotide
tcagaaatcataatccagcgtgggttatttcgtaaggcagccttaatcagatcc

SEQ ID NO: 149156 - DNA, 54 bp, Artificial
  Synthetic oligonucleotide
tctcccccttacattggagccagaacatgccgtcaaaaacacagtacgatcaag

SEQ ID NO: 149157 - DNA, 54 bp, Artificial
  Synthetic oligonucleotide
tcgacataggagtatctacttctgcacggctgttacgtaccgatcgaataatgg

SEQ ID NO: 149158 - DNA, 54 bp, Artificial
  Synthetic oligonucleotide
acgagcacctatattttgtcttaactgcgatggcaaagcttcattagttgggta

SEQ ID NO: 149159 - DNA, 60 bp, Artificial
  Synthetic oligonucleotide
gtttcgattgtcatggaatcgtttataggtactatgatgatttgtcttgtttacatgtcg

SEQ ID NO: 149160 - DNA, 54 bp, Artificial
  Synthetic oligonucleotide
acttcgataagtgggagaggttcatttttagtttagaagacaatgaatgataga

SEQ ID NO: 149161 - DNA, 54 bp, Artificial
  Synthetic oligonucleotide
actttgggcgggctacccgtcactttccttaggctatccgccactttgctcgcg

SEQ ID NO: 149162 - DNA, 54 bp, Artificial
  Synthetic oligonucleotide
tcctcgatcctttgatgagttatgcgctggcaactctttaatgagattgagtac

SEQ ID NO: 149163 - DNA, 54 bp, Artificial
  Synthetic oligonucleotide
caacgggaaaatttatcggtccgaggtgctgcagtatgcgtgcgccgagatggg

SEQ ID NO: 149164 - DNA, 54 bp, Artificial
  Synthetic oligonucleotide
acatgctaattctggtttagcgacattaatctctgatggaccgggaggatcaaa

SEQ ID NO: 149165 - DNA, 54 bp, Artificial
  Synthetic oligonucleotide
tgattgtacagtcaatcgctcaggaataatccgtcatggcgctatgatctaact

SEQ ID NO: 149166 - DNA, 54 bp, Artificial
  Synthetic oligonucleotide
agacgagaaatgaaccgaaaacgtaagcggcaccagttatactaacaagcatgc

SEQ ID NO: 149167 - DNA, 54 bp, Artificial
  Synthetic oligonucleotide
atgttgaaagccttctatacaacacccaatgaccctcttttcgcctatcagtat

SEQ ID NO: 149168 - DNA, 54 bp, Artificial
  Synthetic oligonucleotide
cagcaaaccgttgcccaccaattctccatacgacaatatggcagaagaacgggc

SEQ ID NO: 149169 - DNA, 54 bp, Artificial
  Synthetic oligonucleotide
tttctcgctgatgatctcagaaacgcttcaatagattgaacaaacagcgcgtac

SEQ ID NO: 149170 - DNA, 56 bp, Artificial
  Synthetic oligonucleotide
gtttcgctttaaaacatgctaatgggcgtactcaatgcggattccgttctccctac

SEQ ID NO: 149171 - DNA, 54 bp, Artificial
  Synthetic oligonucleotide
gaacgcgtgagacctggtgcagacggattattattccatccatacctcacaggg

SEQ ID NO: 149172 - DNA, 54 bp, Artificial
  Synthetic oligonucleotide
aagcgtggcagacgcgaatacacagacggcgacattatggttattgagagatta

SEQ ID NO: 149173 - DNA, 54 bp, Artificial
  Synthetic oligonucleotide
tgttgaaggtgaaggtaaaaagttgacgggtatcatggaatactacgttcactt

SEQ ID NO: 149174 - DNA, 54 bp, Artificial
  Synthetic oligonucleotide
tatttaggtagtgcgtatagaaaagggactctaataacagtgccctttcctagt

SEQ ID NO: 149175 - DNA, 54 bp, Artificial
  Synthetic oligonucleotide
tttctctaactgacatgcgcctagtattactcgggtggtgaataactactactc

SEQ ID NO: 149176 - DNA, 54 bp, Artificial
  Synthetic oligonucleotide
ccgcgacgttatacgcaccgagtccattgcccggtacagacccgtctttatagc

SEQ ID NO: 149177 - DNA, 54 bp, Artificial
  Synthetic oligonucleotide
gaacagcgaaatccggcaaagccaacgggtcaagatggaatgggagatacgcca

SEQ ID NO: 149178 - DNA, 53 bp, Artificial
  Synthetic oligonucleotide
cctttaacatccacttacaaaacgtatgccggaacatatggggcgtaagcttt

SEQ ID NO: 149179 - DNA, 54 bp, Artificial
  Synthetic oligonucleotide
ttgtcctgtaggattcgctagggatagtagcatcgcacgtaatgacgtacctgc

SEQ ID NO: 149180 - DNA, 54 bp, Artificial
  Synthetic oligonucleotide
ccgcccaatctcttgtggccaacggcttaggtgtgacaatggcgccgaatatgg

SEQ ID NO: 149181 - DNA, 58 bp, Artificial
  Synthetic oligonucleotide
atacttcgggtcgtctttaccttctccaatcgctacgaccaattctcgttgctcatgc

SEQ ID NO: 149182 - DNA, 54 bp, Artificial
  Synthetic oligonucleotide
agtcaaagcaagtcccgcagcacggctgacagtcgtaggaagcgagctagcagg

SEQ ID NO: 149183 - DNA, 54 bp, Artificial
  Synthetic oligonucleotide
gaaacaagtacctggttctcctgggtggaaatatcgtgttgataagccacatgt

SEQ ID NO: 149184 - DNA, 54 bp, Artificial
  Synthetic oligonucleotide
tgtgctgcggggaatgttaagcgcttcgcacagttctgattgtgtaaagtatag

SEQ ID NO: 149185 - DNA, 54 bp, Artificial
  Synthetic oligonucleotide
gcacgcttcgtcaattcgatcgaagcatacgtattgttgctccctgttccggca

SEQ ID NO: 149186 - DNA, 50 bp, Artificial
  Synthetic oligonucleotide
aaacaaaatccctcctaaaacgtttctatggtgcggcatttaaaccttta

SEQ ID NO: 149187 - DNA, 54 bp, Artificial
  Synthetic oligonucleotide
gcacgatttgaggtcgacgacaaaccctatcgtagcatagaaagttcttgctgg

SEQ ID NO: 149188 - DNA, 54 bp, Artificial
  Synthetic oligonucleotide
gcgtttagctgtacatgcacactcagccctcaaaacgactaacgctggactttc

SEQ ID NO: 149189 - DNA, 54 bp, Artificial
  Synthetic oligonucleotide
aggggagcgctcgaaaaccgatatagcgattgcttatattaaggatgtcgccag

SEQ ID NO: 149190 - DNA, 54 bp, Artificial
  Synthetic oligonucleotide
tgtcaatttcggttgggcaaattgcaatgacagcgcagaataatgcgacgagta

SEQ ID NO: 149191 - DNA, 54 bp, Artificial
  Synthetic oligonucleotide
cccttatatgaacgaaacaaagcgtcaacagattaacgaattgtacaattctag

SEQ ID NO: 149192 - DNA, 57 bp, Artificial
  Synthetic oligonucleotide
caaccgacttactgaggcaaccctatagcgccttgtctaaatacctatacagcgtgg

SEQ ID NO: 149193 - DNA, 59 bp, Artificial
  Synthetic oligonucleotide
gtacattaaggaatggttccatcaagaaaatgtctcttaaatcagtctgtcctactcga

SEQ ID NO: 149194 - DNA, 57 bp, Artificial
  Synthetic oligonucleotide
gtttgagtgccaagagggtttgggtctagtgcgtctatcaactccttaaattctcga

SEQ ID NO: 149195 - DNA, 54 bp, Artificial
  Synthetic oligonucleotide
cgtgatgtatttagcgccaatacggatgacagtgtagatatattgggccgtaca

SEQ ID NO: 149196 - DNA, 54 bp, Artificial
  Synthetic oligonucleotide
gctaggagtaacatgtagtaagtttgaaaggttgtgctaaagagtaatagactg

SEQ ID NO: 149197 - DNA, 54 bp, Artificial
  Synthetic oligonucleotide
gctatcggcgaagtggcctgtacgggggtccatggcgctaatcgtttagccagt

SEQ ID NO: 149198 - DNA, 54 bp, Artificial
  Synthetic oligonucleotide
agctagaaagcgccacgctccgagagagcgacagtatcgtagcgcagggtcgac

SEQ ID NO: 149199 - DNA, 54 bp, Artificial
  Synthetic oligonucleotide
agttaacggtctgcaattgactttcagttcagttaaattcgttgaacctaacga

SEQ ID NO: 149200 - DNA, 53 bp, Artificial
  Synthetic oligonucleotide
gtttatcggttgtgcaaggcgcaacctcgggggaatagcaaaaccccgcaccg

SEQ ID NO: 149201 - DNA, 54 bp, Artificial
  Synthetic oligonucleotide
cgcgcgtccggaaagaccatgcgccggaaaatgagaagcgggtcgaactccatc

SEQ ID NO: 149202 - DNA, 54 bp, Artificial
  Synthetic oligonucleotide
cgttctgggggtgatatgagcttttaacttgatgggtatgtagtgggactccac

SEQ ID NO: 149203 - DNA, 54 bp, Artificial
  Synthetic oligonucleotide
cggcattgccacagcgctaaatgagtgtgcggcccccgtaacacgaatcgtctt

SEQ ID NO: 149204 - DNA, 54 bp, Artificial
  Synthetic oligonucleotide
cggattatcgagtatctctccttgtacttcagtcacacgaataattggccgatc

SEQ ID NO: 149205 - DNA, 58 bp, Artificial
  Synthetic oligonucleotide
gttttgaaatgtgattctgttgattgtggttatattgagttagcgggagaattgaaaa

SEQ ID NO: 149206 - DNA, 54 bp, Artificial
  Synthetic oligonucleotide
gacgcttgggaaagggctcggggctggttatacaccaatggcagcgacggttat

SEQ ID NO: 149207 - DNA, 54 bp, Artificial
  Synthetic oligonucleotide
cctcctgtatgaccaggtccttgaacaaccttagaagcagtcccaagtgaattc

SEQ ID NO: 149208 - DNA, 54 bp, Artificial
  Synthetic oligonucleotide
tacattcttacacatgcgtctagcggagaaaccgtcttaatgcacgacatctat

SEQ ID NO: 149209 - DNA, 54 bp, Artificial
  Synthetic oligonucleotide
ttatcactcaatggtgtttgagtttgtcctatcacctgacatgatgtattaatt

SEQ ID NO: 149210 - DNA, 54 bp, Artificial
  Synthetic oligonucleotide
aactacacaagatgctgtgaggcatctaccactattcttacttgaattacgtcg

SEQ ID NO: 149211 - DNA, 54 bp, Artificial
  Synthetic oligonucleotide
cggctacttcccagcttttcggcacgcccgctcgtattaacgcatcccctgttg

SEQ ID NO: 149212 - DNA, 54 bp, Artificial
  Synthetic oligonucleotide
cggctccctccgacttggggcaagtggattacccgcacatattttcatgcccga

SEQ ID NO: 149213 - DNA, 52 bp, Artificial
  Synthetic oligonucleotide
aggtgtgggaatttaacaacacatgtgtgggaattttcccacaccctaccct

SEQ ID NO: 149214 - DNA, 54 bp, Artificial
  Synthetic oligonucleotide
gaccattactaatatatccagcatatagatccacacataatcttaaatcacaat

SEQ ID NO: 149215 - DNA, 54 bp, Artificial
  Synthetic oligonucleotide
taaacgtcccgctccgctaggggcatgtttgcgactacaaaatgaaggctcccg

SEQ ID NO: 149216 - DNA, 56 bp, Artificial
  Synthetic oligonucleotide
atacgtaagttagaggttacgactgaccaggagcaattaataacggacaagctata

SEQ ID NO: 149217 - DNA, 52 bp, Artificial
  Synthetic oligonucleotide
tattccgctaaatgaatgttggtggggggaatccttaaattaaggggcaatt

SEQ ID NO: 149218 - DNA, 54 bp, Artificial
  Synthetic oligonucleotide
aagcaaccttactcattaaagggttaggcccaattcctatcgtgcattcaattc

SEQ ID NO: 149219 - DNA, 54 bp, Artificial
  Synthetic oligonucleotide
tattcggacttaaaagaggttctgaaaatacacctaacaagcttagaacgagaa

SEQ ID NO: 149220 - DNA, 54 bp, Artificial
  Synthetic oligonucleotide
ccgtcccgattgtgcagccgacgccgattaaggagagctgccaccaagcgagat

SEQ ID NO: 149221 - DNA, 54 bp, Artificial
  Synthetic oligonucleotide
aacgtatgataacacttccaagccccgtttcacatgatggggttaaaagctacg

SEQ ID NO: 149222 - DNA, 54 bp, Artificial
  Synthetic oligonucleotide
tttatcgctacacggctagatcttcatatgagtgcatcttatacgcctatccta

SEQ ID NO: 149223 - DNA, 54 bp, Artificial
  Synthetic oligonucleotide
ccgtacagcggaggaactggcaccactgcttgcggagtacggcaagatatcgcg

SEQ ID NO: 149224 - DNA, 54 bp, Artificial
  Synthetic oligonucleotide
agcttgcgccctggtgacgcacgagaattgacgccgcatgaagtgaaacaactg

SEQ ID NO: 149225 - DNA, 54 bp, Artificial
  Synthetic oligonucleotide
gacaagttagtgaaaatggtcgttctgtaagccctagaacgtggattgtaaatc

SEQ ID NO: 149226 - DNA, 54 bp, Artificial
  Synthetic oligonucleotide
tagggttgacaccacaatcggtaggggtgctaggcggatatcgtgtccaaggga

SEQ ID NO: 149227 - DNA, 60 bp, Artificial
  Synthetic oligonucleotide
gttttgaacgatacaggcttgctatatgctttaccgtttcgtcgagtgagtgtccattga

SEQ ID NO: 149228 - DNA, 54 bp, Artificial
  Synthetic oligonucleotide
gcgaagcatgccttgctcgtgcagtgtggctaattccttggccggcaacatgca

SEQ ID NO: 149229 - DNA, 54 bp, Artificial
  Synthetic oligonucleotide
agttccgacagttggtattagatagtggaaacaaacgaaattatgcattggtta

SEQ ID NO: 149230 - DNA, 54 bp, Artificial
  Synthetic oligonucleotide
aaaccgttgaacggattgctaacctcacggcaaagtcatcattcgagacagtct

SEQ ID NO: 149231 - DNA, 54 bp, Artificial
  Synthetic oligonucleotide
ccggcggtcactgcgtgcgctaagcgttttgtctgatgcgttttacggacagcc

SEQ ID NO: 149232 - DNA, 52 bp, Artificial
  Synthetic oligonucleotide
aggtaacttacctattacaaagagggattaagaaaagtaggttcatactcag

SEQ ID NO: 149233 - DNA, 54 bp, Artificial
  Synthetic oligonucleotide
taaaacttcaccgctctcgtcaacactgatgacagatggtgtaagatattcgcc

SEQ ID NO: 149234 - DNA, 53 bp, Artificial
  Synthetic oligonucleotide
taatttccccataccccacgaccatttcacttaactaaagtagtagcctcttc

SEQ ID NO: 149235 - DNA, 52 bp, Artificial
  Synthetic oligonucleotide
gaactacgcaacgactacggaccaaccgttttccagcaccttacccacgggc

SEQ ID NO: 149236 - DNA, 54 bp, Artificial
  Synthetic oligonucleotide
atcaacaaggtagatcatatttgcaacgatcttctgtaaaaggtattgtgacga

SEQ ID NO: 149237 - DNA, 54 bp, Artificial
  Synthetic oligonucleotide
ggagagcagtgagctctttcgtatccttaatcgcacctccctatatagagaatc

SEQ ID NO: 149238 - DNA, 52 bp, Artificial
  Synthetic oligonucleotide
gttttgtttatgttacgtcctgttattattttaccatctggaaaaatagtta

SEQ ID NO: 149239 - DNA, 54 bp, Artificial
  Synthetic oligonucleotide
ggagcaactttgtctatggatttcccgataacatcctgggcagacacgcctagc

SEQ ID NO: 149240 - DNA, 54 bp, Artificial
  Synthetic oligonucleotide
agagtgcaaacaaaccagattaatggttagtagagagaggattacggacattcg

SEQ ID NO: 149241 - DNA, 54 bp, Artificial
  Synthetic oligonucleotide
cgcaggggcaccgtaacgcggctcataggacgcttggcaatcgactcatctcca

SEQ ID NO: 149242 - DNA, 54 bp, Artificial
  Synthetic oligonucleotide
ctcaacgttgagggctcacttactgagtagagcgcaatcttacgcttttctctc

SEQ ID NO: 149243 - DNA, 54 bp, Artificial
  Synthetic oligonucleotide
ttttcgctgattcgtacgctcttaatcactgcttggtacgtctgttgctctttc

SEQ ID NO: 149244 - DNA, 54 bp, Artificial
  Synthetic oligonucleotide
aatgttgttcatctatatcaggcaacaaagccccaaaactaaccgctatcacat

SEQ ID NO: 149245 - DNA, 54 bp, Artificial
  Synthetic oligonucleotide
tatgatgcactcttggctacattgcgcaggattcttcgatcctaatacaactag

SEQ ID NO: 149246 - DNA, 54 bp, Artificial
  Synthetic oligonucleotide
ctcagtcaagtacggagctccatacgggatcagttttctctgatactcaagccg

SEQ ID NO: 149247 - DNA, 54 bp, Artificial
  Synthetic oligonucleotide
agcctttaaggctctgcatcagtactatacaacgagacaagaaaaccctttacg

SEQ ID NO: 149248 - DNA, 54 bp, Artificial
  Synthetic oligonucleotide
ggatcataaatcgtcactgcaataccagaatgccctgcacgtgctgttcttgca

SEQ ID NO: 149249 - DNA, 60 bp, Artificial
  Synthetic oligonucleotide
atacgatcatacgatcacgtaatgtttaaggcggtggataccaatgtgacagcaaggaat

SEQ ID NO: 149250 - DNA, 54 bp, Artificial
  Synthetic oligonucleotide
agcgctactaatatgtagccactaatcagtacaataagcccaatgatgcgtaac

SEQ ID NO: 149251 - DNA, 54 bp, Artificial
  Synthetic oligonucleotide
aattctaacggattaacgaatggggctctcgaatgactgagcgctcgaaatcca

SEQ ID NO: 149252 - DNA, 54 bp, Artificial
  Synthetic oligonucleotide
ttgacttcgtagcatttacgatcagctgcttggtgaattctcctgtcttcgcaa

SEQ ID NO: 149253 - DNA, 53 bp, Artificial
  Synthetic oligonucleotide
agagggtggctcggttatagctgggaagacctttggaacgatgtaaaggggtg

SEQ ID NO: 149254 - DNA, 53 bp, Artificial
  Synthetic oligonucleotide
aggccattcccgtaaacaccgtaaacaaagaccataaaagcacggcaattgta

SEQ ID NO: 149255 - DNA, 54 bp, Artificial
  Synthetic oligonucleotide
ctgatcggatgcagcagtcaatccgggcagaaggagcccgctgaggaggtatcc

SEQ ID NO: 149256 - DNA, 54 bp, Artificial
  Synthetic oligonucleotide
ctgcaccagagcaacagttcaaagcattccaaggatacggattattcccatcca

SEQ ID NO: 149257 - DNA, 54 bp, Artificial
  Synthetic oligonucleotide
ctgcaggcgtactaagggcaaatgagaaccgtccctcttagtagtccctcttag

SEQ ID NO: 149258 - DNA, 54 bp, Artificial
  Synthetic oligonucleotide
aacatggcaagaggcacatgctgaacgagcattcttggcggctatggatggcgg

SEQ ID NO: 149259 - DNA, 54 bp, Artificial
  Synthetic oligonucleotide
tttttggaccagaaccaaaaagatcaccctaaggtgatcttcttatgtagggcg

SEQ ID NO: 149260 - DNA, 49 bp, Artificial
  Synthetic oligonucleotide
gtttttgaagtattccggctcctttaagtcgtgttttcccaaaaaagtc

SEQ ID NO: 149261 - DNA, 54 bp, Artificial
  Synthetic oligonucleotide
tgcgtccctaggctctatcactcttttaccgttcttcctcgtatcgaatattcg

SEQ ID NO: 149262 - DNA, 54 bp, Artificial
  Synthetic oligonucleotide
ccaaggatggaatattttcatagttatggagttaagtttataggtactgtaaag

SEQ ID NO: 149263 - DNA, 54 bp, Artificial
  Synthetic oligonucleotide
ctgcatgtttatcaaagaagttctgtcaaagttctgtgtccactgaagcaatct

SEQ ID NO: 149264 - DNA, 54 bp, Artificial
  Synthetic oligonucleotide
aggcacggacggccgacagcttttcttcggacgggatctcggcaatggaatcaa

SEQ ID NO: 149265 - DNA, 54 bp, Artificial
  Synthetic oligonucleotide
tgcgttcgctatgcccaacggaatgcacatgttcttcgattttaaatagcactc

SEQ ID NO: 149266 - DNA, 54 bp, Artificial
  Synthetic oligonucleotide
atcccaacactctgtgttcgttaaaccaggaatagaatctgcacggaagacagg

SEQ ID NO: 149267 - DNA, 54 bp, Artificial
  Synthetic oligonucleotide
ctggacggatactgtcggctctacaaacaatgacaggctcgaaagagcgcctac

SEQ ID NO: 149268 - DNA, 54 bp, Artificial
  Synthetic oligonucleotide
agtgctttattcctaaatggtgacggagaaccaatgtcagggaaagtgtacgat

SEQ ID NO: 149269 - DNA, 54 bp, Artificial
  Synthetic oligonucleotide
tcacgattatatgggtgcagttaagtatttctatattagaacaacagataacac

SEQ ID NO: 149270 - DNA, 54 bp, Artificial
  Synthetic oligonucleotide
ttttgtgtaaatgtccatcatctaagggttgaatacaggatttgctatacggtg

SEQ ID NO: 149271 - DNA, 60 bp, Artificial
  Synthetic oligonucleotide
gttatcacatgaatacggtcaatgaaattataggcttgctaggtgttgacgcatcttgga

SEQ ID NO: 149272 - DNA, 54 bp, Artificial
  Synthetic oligonucleotide
aattgaagttatctgtttgaggtagtcacgtgtaccgtcatgagagccgttatc

SEQ ID NO: 149273 - DNA, 54 bp, Artificial
  Synthetic oligonucleotide
aatccgttataaatgcgatgcattcgcgaatcatggtgtacaagtccgaataca

SEQ ID NO: 149274 - DNA, 54 bp, Artificial
  Synthetic oligonucleotide
aacgacaccgctcctagagtggatggcgcaacatatgctacgctgcagggggcg

SEQ ID NO: 149275 - DNA, 54 bp, Artificial
  Synthetic oligonucleotide
agcaatcggtgatgctagctctgccagaaatgcgaagcgccacattgacccggt

SEQ ID NO: 149276 - DNA, 54 bp, Artificial
  Synthetic oligonucleotide
gatttcctcgttactctgctttgcttgctcactcaatcgcttctcaatcgctaa

SEQ ID NO: 149277 - DNA, 54 bp, Artificial
  Synthetic oligonucleotide
cttgagcttgcaaacgagttacatgattgtatggtaacttgcgttcacaaccta

SEQ ID NO: 149278 - DNA, 54 bp, Artificial
  Synthetic oligonucleotide
cccattcgttgtcatatataccatgataccttgtaaaagcttcgtgcgctctgt

SEQ ID NO: 149279 - DNA, 54 bp, Artificial
  Synthetic oligonucleotide
tgggtgcacctgttaaggctaatgtatctattaacgcttatcaaaataaagcgt

SEQ ID NO: 149280 - DNA, 54 bp, Artificial
  Synthetic oligonucleotide
ctagccgtaccgttactatggaacataagattgcactagaagggaaggtcctat

SEQ ID NO: 149281 - DNA, 54 bp, Artificial
  Synthetic oligonucleotide
aaaactgttggaagccaatcatatcaagggattgagctgttttcgttttgaaac

SEQ ID NO: 149282 - DNA, 58 bp, Artificial
  Synthetic oligonucleotide
atcgagatgattataatccgcactttcacgtgctgattgcggtaaataaaagttattt

SEQ ID NO: 149283 - DNA, 54 bp, Artificial
  Synthetic oligonucleotide
ctagttcatttgcgatattggtgactactggcacccaattcgcgtttaagttcg

SEQ ID NO: 149284 - DNA, 54 bp, Artificial
  Synthetic oligonucleotide
tggggccggacttttaacattgccgcgagcgctgaccactaaggctaatacgcc

SEQ ID NO: 149285 - DNA, 51 bp, Artificial
  Synthetic oligonucleotide
aaatctccaccttcataataaaaaaagtcggttcgttaatcctcacctaaa

SEQ ID NO: 149286 - DNA, 54 bp, Artificial
  Synthetic oligonucleotide
tagctggtgtagggatactcattagagaacatctacgaaagaacgattcaccaa

SEQ ID NO: 149287 - DNA, 54 bp, Artificial
  Synthetic oligonucleotide
ggaatttcagattggctaacaccagaattgtttgtaggcgtagattcctctata

SEQ ID NO: 149288 - DNA, 54 bp, Artificial
  Synthetic oligonucleotide
ttcttcgaagaaggagaacaccaccgatcaacgcctcataggtatccctaatct

SEQ ID NO: 149289 - DNA, 54 bp, Artificial
  Synthetic oligonucleotide
ggaagaggtaatcgagagagcaaatcgttcgtcatatggacttgcagcgggcgt

SEQ ID NO: 149290 - DNA, 54 bp, Artificial
  Synthetic oligonucleotide
ctatcgtaagtgtacctctagctttcacgaactgaaaacgacagagtgttcccc

SEQ ID NO: 149291 - DNA, 54 bp, Artificial
  Synthetic oligonucleotide
cgccccaacgttcgcccataccgcttgagatatagcctcctacagctggccatg

SEQ ID NO: 149292 - DNA, 54 bp, Artificial
  Synthetic oligonucleotide
cttaatgatatggtcgcgagcggggaactgagtgcaccggtagtaatcggcagg

SEQ ID NO: 149293 - DNA, 59 bp, Artificial
  Synthetic oligonucleotide
atccttatttctcggaacatatgtaagtgcctttatatgtgactcatctttaattgtcg

SEQ ID NO: 149294 - DNA, 53 bp, Artificial
  Synthetic oligonucleotide
acgggtgaattaaacgcacatgagcatggtttactctcataccctcttgttct

SEQ ID NO: 149295 - DNA, 53 bp, Artificial
  Synthetic oligonucleotide
agctggagtattcgcctcgagatttggtgataaacgaatgatgacgattggtc

SEQ ID NO: 149296 - DNA, 53 bp, Artificial
  Synthetic oligonucleotide
gtaacgtaccatcacaggtaggaagcctatttgtttcattcgttactaacttg

SEQ ID NO: 149297 - DNA, 53 bp, Artificial
  Synthetic oligonucleotide
aaataagagacccgcgcgaggtgacaatccaagagatcgcgaaacaggcccat

SEQ ID NO: 149298 - DNA, 53 bp, Artificial
  Synthetic oligonucleotide
tcggggacgccagaatggatgggctggatagggaggattgcagcgccagtctt

SEQ ID NO: 149299 - DNA, 53 bp, Artificial
  Synthetic oligonucleotide
tttaaatcggtgacggttaccgttcgaagcgagccggatttatatgtgtacgg

SEQ ID NO: 149300 - DNA, 53 bp, Artificial
  Synthetic oligonucleotide
aaatacctccgatatttggcaaagggtctgctcctattacgtattgtatggca

SEQ ID NO: 149301 - DNA, 53 bp, Artificial
  Synthetic oligonucleotide
aacactttaccctcacttgattcacctcgcttacgatccattataccttaatc

SEQ ID NO: 149302 - DNA, 53 bp, Artificial
  Synthetic oligonucleotide
tttaacgttgttggtcttcgcgtgccggcgggagagtcgattgtgtttcctcg

SEQ ID NO: 149303 - DNA, 53 bp, Artificial
  Synthetic oligonucleotide
tatattcgcatatggtttttggtagggttatatgcgtattttaaatttcggca

SEQ ID NO: 149304 - DNA, 57 bp, Artificial
  Synthetic oligonucleotide
gtacgcacaagagggtttatcatactatccattccctgatctaaaccttgacctacg

SEQ ID NO: 149305 - DNA, 57 bp, Artificial
  Synthetic oligonucleotide
atccgtacctgccaaagcctgtccaacgcgccaataaactcgtggacagcccttctc

SEQ ID NO: 149306 - DNA, 53 bp, Artificial
  Synthetic oligonucleotide
ttgccgtaagggtaatgataacataggatgcatgatatatttcgccccattcg

SEQ ID NO: 149307 - DNA, 53 bp, Artificial
  Synthetic oligonucleotide
cgcatttctttctcgccgctaattctctctagcaaaaactgtactgtttcttc

SEQ ID NO: 149308 - DNA, 53 bp, Artificial
  Synthetic oligonucleotide
gatgatacattgctccgtaatctataatcgcctcacactggaaagaagcttcg

SEQ ID NO: 149309 - DNA, 53 bp, Artificial
  Synthetic oligonucleotide
caagaggggctcgatcatgtcattgcggttgattcagcaggaacgggcaattg

SEQ ID NO: 149310 - DNA, 53 bp, Artificial
  Synthetic oligonucleotide
agcgtgtcatgcgccaattgaattgtcgttacacccgtttcgcattacgagag

SEQ ID NO: 149311 - DNA, 48 bp, Artificial
  Synthetic oligonucleotide
aaagtcccataaattaaagagaaactcgtttttgggaataacttaacg

SEQ ID NO: 149312 - DNA, 53 bp, Artificial
  Synthetic oligonucleotide
agtatttatgtttacgccatcgagattgatggaagttgcgaatctcctttcac

SEQ ID NO: 149313 - DNA, 53 bp, Artificial
  Synthetic oligonucleotide
ttgcagaaaaacgctccgcaatacgatgtcgcgatatatgtgccgcttgatgt

SEQ ID NO: 149314 - DNA, 53 bp, Artificial
  Synthetic oligonucleotide
gactttgcgcactgcatgaacatctgctcacgctgtctgaggagaaaacggaa

SEQ ID NO: 149315 - DNA, 53 bp, Artificial
  Synthetic oligonucleotide
cgcgcgaaataactatgtcgaatgtttcgttagggtatgggatattatgtgca

SEQ ID NO: 149316 - DNA, 54 bp, Artificial
  Synthetic oligonucleotide
gttattaataatagggttttgggcagtaatgttaatgactgttacttgaaagga

SEQ ID NO: 149317 - DNA, 53 bp, Artificial
  Synthetic oligonucleotide
gatagattgcgtgattctatcgcctagttctctcgcaaaagtagagtcgtgct

SEQ ID NO: 149318 - DNA, 53 bp, Artificial
  Synthetic oligonucleotide
aacaagtattagcagaataccaacaattagtcctaaattcaatttgaattacc

SEQ ID NO: 149319 - DNA, 53 bp, Artificial
  Synthetic oligonucleotide
gagaaaatagccgtcagacgtatgtaagttcacatccttcgttcttagccacg

SEQ ID NO: 149320 - DNA, 53 bp, Artificial
  Synthetic oligonucleotide
ttgctgcaccttgactagcgaaatgagtagtcccacccgactctcctttgaag

SEQ ID NO: 149321 - DNA, 53 bp, Artificial
  Synthetic oligonucleotide
gagcgcgcacagctcttcgatgcggcatgtcagctcttccgaatacgggccgt

SEQ ID NO: 149322 - DNA, 53 bp, Artificial
  Synthetic oligonucleotide
gagaagcattatgtaaggagcaaggtaaacctttacaagaggcagtgactgaa

SEQ ID NO: 149323 - DNA, 53 bp, Artificial
  Synthetic oligonucleotide
cgtgccttcgggtaaagttgcagtactaaataactgacctggatatatagttg

SEQ ID NO: 149324 - DNA, 53 bp, Artificial
  Synthetic oligonucleotide
cgtggcacgggcgagtaacccacagcccattacaacgcttgcctgcgacacag

SEQ ID NO: 149325 - DNA, 53 bp, Artificial
  Synthetic oligonucleotide
cgtggtatcacggttaagctaggctctgcctagcctagcacagtatgtgatag

SEQ ID NO: 149326 - DNA, 53 bp, Artificial
  Synthetic oligonucleotide
ctttaaagggccctgtgctgcttgcccatctccgttctgctgccacccaaagg

SEQ ID NO: 149327 - DNA, 60 bp, Artificial
  Synthetic oligonucleotide
gttattgagcgctatacaatcgatacaggattcccagaagcttatagcgacgaattctag

SEQ ID NO: 149328 - DNA, 53 bp, Artificial
  Synthetic oligonucleotide
cgttcgcagctgggcgtatagcgaatagccgcaacgatcgccgtacccaacag

SEQ ID NO: 149329 - DNA, 53 bp, Artificial
  Synthetic oligonucleotide
aaaatacgcggaatcgacgtgcgcataaagaacgcgtagacccgcatcattgt

SEQ ID NO: 149330 - DNA, 53 bp, Artificial
  Synthetic oligonucleotide
attctatacgaggaatcttttagccggtgaattccactctctttcgcaagaag

SEQ ID NO: 149331 - DNA, 53 bp, Artificial
  Synthetic oligonucleotide
tttgtgtgcagaatgaatttttatcttcgtacaagatgggtctaattctactc

SEQ ID NO: 149332 - DNA, 53 bp, Artificial
  Synthetic oligonucleotide
cttcagccaatcctcaagttccgccagtaggatgtttgagatcggtacggtcc

SEQ ID NO: 149333 - DNA, 53 bp, Artificial
  Synthetic oligonucleotide
atggacgaactgtcccgcagtctccatctcattgacaagctcaccttttaagg

SEQ ID NO: 149334 - DNA, 53 bp, Artificial
  Synthetic oligonucleotide
attcctcactttacgcaaagctcgagaaatgatagggcggccatggtcccgtc

SEQ ID NO: 149335 - DNA, 53 bp, Artificial
  Synthetic oligonucleotide
atggagaatcaaattacggagataagtaagagattaccggatagcaagattac

SEQ ID NO: 149336 - DNA, 53 bp, Artificial
  Synthetic oligonucleotide
attccgcaggagccatcatatccgttaaggatgctggggttactagttactcc

SEQ ID NO: 149337 - DNA, 53 bp, Artificial
  Synthetic oligonucleotide
tagccggcacagcggacgtctcacaacgattagacccttcacaatcaaaggta

SEQ ID NO: 149338 - DNA, 57 bp, Artificial
  Synthetic oligonucleotide
gttcaacgatttgctaggcgagcggttcaattttgtcgtttgggcattggcttgccc

SEQ ID NO: 149339 - DNA, 51 bp, Artificial
  Synthetic oligonucleotide
acttagttggtccaactttaccgcctgtcccctcatttacattaccaacgg

SEQ ID NO: 149340 - DNA, 53 bp, Artificial
  Synthetic oligonucleotide
gtgcgctctttcacgctcccgtttcgccacctcctcacaaagttccaacaccc

SEQ ID NO: 149341 - DNA, 53 bp, Artificial
  Synthetic oligonucleotide
atggagatgacggcgcgtacagggtgaaatcggcgaaaatgctcgctaccgcc

SEQ ID NO: 149342 - DNA, 53 bp, Artificial
  Synthetic oligonucleotide
ttttgggcgatgttcaacctttgcggattgcaaagcaaatgccaaagaccagc

SEQ ID NO: 149343 - DNA, 53 bp, Artificial
  Synthetic oligonucleotide
gtgcctcttcgtcaaggcttccaacgccctcctgttctaaacgagccacctgc

SEQ ID NO: 149344 - DNA, 53 bp, Artificial
  Synthetic oligonucleotide
ctccgcaatttgaaaccggttgtgctcggcatttcgaccaatgatgcgctcgg

SEQ ID NO: 149345 - DNA, 53 bp, Artificial
  Synthetic oligonucleotide
tagagactcatttaagcccggaggagctacattttgcgctagggatcgtcgcc

SEQ ID NO: 149346 - DNA, 53 bp, Artificial
  Synthetic oligonucleotide
tagagcggatgagcatacaacatcagcccgaaaagtaaaccccattctctcat

SEQ ID NO: 149347 - DNA, 53 bp, Artificial
  Synthetic oligonucleotide
gtgatgcaaccgcggcctattatagcggcggccatactgatatcggattgttc

SEQ ID NO: 149348 - DNA, 53 bp, Artificial
  Synthetic oligonucleotide
tcctcagaccccaaaaggccaccaatcgcctgatcataacgtcccccactccc

SEQ ID NO: 149349 - DNA, 56 bp, Artificial
  Synthetic oligonucleotide
gttcaatagaactctgtacttaggaatcttccacttcaaacagtccgcaaggacgt

SEQ ID NO: 149350 - DNA, 53 bp, Artificial
  Synthetic oligonucleotide
gtgcagtcgatgagatatgtgactcacttaaagaatctcaaaagagaaatgta

SEQ ID NO: 149351 - DNA, 53 bp, Artificial
  Synthetic oligonucleotide
agtacatcaggatttagaagcgcagataacagcattaaggaatgagggttgcg

SEQ ID NO: 149352 - DNA, 53 bp, Artificial
  Synthetic oligonucleotide
gacgctggtacttcgggcactatgtagaaagtgaacctgtttggtatcatcac

SEQ ID NO: 149353 - DNA, 53 bp, Artificial
  Synthetic oligonucleotide
tttaccggtgcggtgacaccaacgggaaaaggccgcgacaaactagcaaccat

SEQ ID NO: 149354 - DNA, 53 bp, Artificial
  Synthetic oligonucleotide
acggtatgtccttatttgagacggcagctatctttaacattcctgccccttca

SEQ ID NO: 149355 - DNA, 53 bp, Artificial
  Synthetic oligonucleotide
gtagcggctcacttcttaggtcttaaagatttgcagaacggcggagagagtga

SEQ ID NO: 149356 - DNA, 53 bp, Artificial
  Synthetic oligonucleotide
tagtgaaacgtccttcaaggtatctagcttgatcggcactatattctgacgca

SEQ ID NO: 149357 - DNA, 53 bp, Artificial
  Synthetic oligonucleotide
agtaaatgccgaactctgtgcagccgtccattctcgcggaatcaagcaaatct

SEQ ID NO: 149358 - DNA, 53 bp, Artificial
  Synthetic oligonucleotide
aggtgttcgtaactgacttaaaacagctaatgtcaacgttcctcttctaagct

SEQ ID NO: 149359 - DNA, 53 bp, Artificial
  Synthetic oligonucleotide
tttagggggtacttcaaaatcttagcttgataggcatgatatggtgcccctat

SEQ ID NO: 149360 - DNA, 51 bp, Artificial
  Synthetic oligonucleotide
gttcgaccgaaaaacatttcgggattggttttcgtgtttactcgtctatgt

SEQ ID NO: 149361 - DNA, 53 bp, Artificial
  Synthetic oligonucleotide
gacatttccgcttgccgcaacgagtgcatcaatccagcgaatcgttccgcccc

SEQ ID NO: 149362 - DNA, 53 bp, Artificial
  Synthetic oligonucleotide
tcgctgcgcaaacacggctttacagtccgtgacgccccttctgatatagccgg

SEQ ID NO: 149363 - DNA, 53 bp, Artificial
  Synthetic oligonucleotide
aaacggtcaaacatcgcgccgccagacgcatcaagcggccgggctccccatgt

SEQ ID NO: 149364 - DNA, 51 bp, Artificial
  Synthetic oligonucleotide
tttcctttccaagtcggaaaaagtttctagtgtggaagtaactgtaaataa

SEQ ID NO: 149365 - DNA, 53 bp, Artificial
  Synthetic oligonucleotide
cgtacacaccaatcatggaatgggaagtactgtcctcatcgcatgttagcaga

SEQ ID NO: 149366 - DNA, 53 bp, Artificial
  Synthetic oligonucleotide
gaagaattcgctcctactcttaatgctacaatccaagacacgaaaactaaagt

SEQ ID NO: 149367 - DNA, 53 bp, Artificial
  Synthetic oligonucleotide
tactagtgagattagcctacgagctaagactgaagaggtttacactcgtacag

SEQ ID NO: 149368 - DNA, 53 bp, Artificial
  Synthetic oligonucleotide
cgtccggtatcctacgccagcaaaacaggcggcgacaccttaaactgggcagt

SEQ ID NO: 149369 - DNA, 53 bp, Artificial
  Synthetic oligonucleotide
cgtcttggtcatcaagtcaagacttaacgatggttcgttcaacccaaaatttg

SEQ ID NO: 149370 - DNA, 53 bp, Artificial
  Synthetic oligonucleotide
atttgtgcggatgctcgaagaatgggcccgcccgatccatcattcgatttccc

SEQ ID NO: 149371 - DNA, 55 bp, Artificial
  Synthetic oligonucleotide
atccaggtgcgatttcattttgtttatttcgaaatacgtatatatggttaagtaa

SEQ ID NO: 149372 - DNA, 53 bp, Artificial
  Synthetic oligonucleotide
gtcatcataggtcaaattactacccttaggcttgtcagatttacttgtaacag

SEQ ID NO: 149373 - DNA, 53 bp, Artificial
  Synthetic oligonucleotide
tcgcatccccatagtgtgatacaaaggcataacccctagcgtggattcgccgg

SEQ ID NO: 149374 - DNA, 53 bp, Artificial
  Synthetic oligonucleotide
tcgcatagtgaccaatcctaacgttgttacaggcaacggagctagacacgggg

SEQ ID NO: 149375 - DNA, 53 bp, Artificial
  Synthetic oligonucleotide
tccgaggcaaagtgcgcctctttgtcaggagttccatccccctcccattctga

SEQ ID NO: 149376 - DNA, 52 bp, Artificial
  Synthetic oligonucleotide
actacaacgttatctaatccttttttaagtttggcgtttgctttatcagtta

SEQ ID NO: 149377 - DNA, 53 bp, Artificial
  Synthetic oligonucleotide
agaaagacttggcaaccgcatacgttttacgactgttcgcctcgtctcactta

SEQ ID NO: 149378 - DNA, 53 bp, Artificial
  Synthetic oligonucleotide
gctgcgctacatactgagccactaatgatcccgtaccgccagtaccaacttga

SEQ ID NO: 149379 - DNA, 53 bp, Artificial
  Synthetic oligonucleotide
tggttatgagcttgttaaattgagcgatagatggtatcagggcgctgaacacg

SEQ ID NO: 149380 - DNA, 53 bp, Artificial
  Synthetic oligonucleotide
tcaaagcagaatgccagggcattgtaccgttggcatgaaagagtcaaaaatgg

SEQ ID NO: 149381 - DNA, 53 bp, Artificial
  Synthetic oligonucleotide
gctcgggattcgactctagtctagtctatgggcagggacaagctaatatgact

SEQ ID NO: 149382 - DNA, 60 bp, Artificial
  Synthetic oligonucleotide
atccacttgcagatctgactaatacccgtggagcattagaacggattagtgcacagggtg

SEQ ID NO: 149383 - DNA, 53 bp, Artificial
  Synthetic oligonucleotide
cccgcaagcgaagcgacaggggcaacgggttgttaaagtctgccccgcaagcg

SEQ ID NO: 149384 - DNA, 53 bp, Artificial
  Synthetic oligonucleotide
tgagtagcggcgagcgaaacggaacatagcccaaaccaagaggcttgcctctt

SEQ ID NO: 149385 - DNA, 53 bp, Artificial
  Synthetic oligonucleotide
atagcgaatatatttttgaggtgagacgctatgaagacgttatatagtcctgg

SEQ ID NO: 149386 - DNA, 53 bp, Artificial
  Synthetic oligonucleotide
tgtactcgaacaacgttaacacgacaaatggtcatgaattaggatgcggatgt

SEQ ID NO: 149387 - DNA, 53 bp, Artificial
  Synthetic oligonucleotide
tgactttttgtgacatccctagattatggtcttaggatcattttggggatttc

SEQ ID NO: 149388 - DNA, 53 bp, Artificial
  Synthetic oligonucleotide
gcgtttagcaaggagtaaccgattgacagcaaaagctatccctgattatacag

SEQ ID NO: 149389 - DNA, 53 bp, Artificial
  Synthetic oligonucleotide
ccgaatgcaatgcgtgctttcgtcttttacaattgccccaataacatcggtca

SEQ ID NO: 149390 - DNA, 53 bp, Artificial
  Synthetic oligonucleotide
atactgtactcctaaaccaccagatggccacttcatataatattctgtgtcat

SEQ ID NO: 149391 - DNA, 53 bp, Artificial
  Synthetic oligonucleotide
tgttagtttaggggcttgcaagttgtatatgcacctcagggatcgttacagac

SEQ ID NO: 149392 - DNA, 53 bp, Artificial
  Synthetic oligonucleotide
gtttggagcagcgaaagatcgatacaatgataagcagcaacgtcgggaccgaa

SEQ ID NO: 149393 - DNA, 56 bp, Artificial
  Synthetic oligonucleotide
gttgaaaagtgcggggatgaggtgtgggtagcggagaaattccaatcgaacctgga

SEQ ID NO: 149394 - DNA, 53 bp, Artificial
  Synthetic oligonucleotide
tgacgctcaattgccaaacgaattaattcttcaattaactctggatatggtaa

SEQ ID NO: 149395 - DNA, 53 bp, Artificial
  Synthetic oligonucleotide
gcggatcaattggtacacaaactttagatgtgttacgctcgcacccagaccaa

SEQ ID NO: 149396 - DNA, 53 bp, Artificial
  Synthetic oligonucleotide
tgttccgcacattgaacgatgactccgccggcatgcggcgagacagccaacgc

SEQ ID NO: 149397 - DNA, 53 bp, Artificial
  Synthetic oligonucleotide
gggcattggacggtgttgctggacatgccggggtttttagttcggcagaggat

SEQ ID NO: 149398 - DNA, 53 bp, Artificial
  Synthetic oligonucleotide
ccgctatggctaacggcacttatgaacaataaagatacgatttcaagtgtaga

SEQ ID NO: 149399 - DNA, 53 bp, Artificial
  Synthetic oligonucleotide
tgtttccgtatgttgttgcattgcgatgtctaagaatagtttcttagctgcta

SEQ ID NO: 149400 - DNA, 53 bp, Artificial
  Synthetic oligonucleotide
atacctggaatgccaggttttccgggtgtaccaagttttccaggacagcaaag

SEQ ID NO: 149401 - DNA, 53 bp, Artificial
  Synthetic oligonucleotide
aagcgacaggggcaacgggttgttaaagtctgccccgcaagcgataggggtaa

SEQ ID NO: 149402 - DNA, 52 bp, Artificial
  Synthetic oligonucleotide
tgaatttaaggagtaacggtatggtagttccttgggtagttcctgaaatttc

SEQ ID NO: 149403 - DNA, 53 bp, Artificial
  Synthetic oligonucleotide
tattgctagccctgtaagcttggagcgactcaaattgctataggcctatatgg

SEQ ID NO: 149404 - DNA, 57 bp, Artificial
  Synthetic oligonucleotide
gttgaataacacctgttaaaatggtggtcgcaaataaatactgaatcccatgatctt

SEQ ID NO: 149405 - DNA, 53 bp, Artificial
  Synthetic oligonucleotide
ttacgagggacaagacggtaagcgtgtctacacaacagatgttgtggctgata

SEQ ID NO: 149406 - DNA, 52 bp, Artificial
  Synthetic oligonucleotide
gccttgttggaattttaaaaaactatcgtaggtctgacagtttcgttttata

SEQ ID NO: 149407 - DNA, 53 bp, Artificial
  Synthetic oligonucleotide
ggggagaagattcggaactaagagtgattgagtcgcttcactatcatacaatc

SEQ ID NO: 149408 - DNA, 53 bp, Artificial
  Synthetic oligonucleotide
tcattacggctatcggaatcattcaaaactccccagaatcaatatctgaggga

SEQ ID NO: 149409 - DNA, 53 bp, Artificial
  Synthetic oligonucleotide
ccgtacttattctcgggcacaatcggatctaacgtgagtctggatgacgaaag

SEQ ID NO: 149410 - DNA, 53 bp, Artificial
  Synthetic oligonucleotide
cagacagaaacggtgctaaaccaatctcgtaagaaaccgtacctgttcgcggg

SEQ ID NO: 149411 - DNA, 52 bp, Artificial
  Synthetic oligonucleotide
ggcccggtttcacgatcgaactgggaaaagggatcaacccgcttccgttgtc

SEQ ID NO: 149412 - DNA, 53 bp, Artificial
  Synthetic oligonucleotide
acaagtgggaacgtatgagtcaagattcctctttccgacaagcctatgacgca

SEQ ID NO: 149413 - DNA, 53 bp, Artificial
  Synthetic oligonucleotide
tgcggtcaacgcggaccattccgcaagtcacccattttggcgagcccgatgcg

SEQ ID NO: 149414 - DNA, 53 bp, Artificial
  Synthetic oligonucleotide
ggcacatgctgaacgagcattcttggcggctatggatggcgggtgccaagtac

SEQ ID NO: 149415 - DNA, 55 bp, Artificial
  Synthetic oligonucleotide
caagcctttgaccgatgatttcacaaaaaaatcggaagtcaaaggtgtatttcac

SEQ ID NO: 149416 - DNA, 57 bp, Artificial
  Synthetic oligonucleotide
atcaccctggtgatagcatgtttaccttatgctcttgcagtttaaaagggttcggga

SEQ ID NO: 149417 - DNA, 53 bp, Artificial
  Synthetic oligonucleotide
catgtgctgtcactaatttcgttgagtctaactaagggtgttctaccgattaa

SEQ ID NO: 149418 - DNA, 53 bp, Artificial
  Synthetic oligonucleotide
ggccgttcttacgagatggttccaaaccactatttgatggtcaaagtaatttt

SEQ ID NO: 149419 - DNA, 53 bp, Artificial
  Synthetic oligonucleotide
ccaaatagctccttcttcacttcggccaatacctcgtccatagtgacatgcgc

SEQ ID NO: 149420 - DNA, 53 bp, Artificial
  Synthetic oligonucleotide
catgctctatctcattaggaaaagtccggtaaacagactgtcttccatagtta

SEQ ID NO: 149421 - DNA, 53 bp, Artificial
  Synthetic oligonucleotide
tcactgggtagggggtggcggacgcattgtgcaaatagcaccagttaatcgcg

SEQ ID NO: 149422 - DNA, 53 bp, Artificial
  Synthetic oligonucleotide
catgcggccctctgtgtttacgcggcgtaatcttacgtcagtcacttccatct

SEQ ID NO: 149423 - DNA, 53 bp, Artificial
  Synthetic oligonucleotide
ggatgtaaaccactctgccgctaccctttgagataatgaactggatccgtaat

SEQ ID NO: 149424 - DNA, 53 bp, Artificial
  Synthetic oligonucleotide
ggatgggaattttgtttaaaaaaggattattaagtactgtttgtgtaacagca

SEQ ID NO: 149425 - DNA, 53 bp, Artificial
  Synthetic oligonucleotide
aattgttgctcccgatcggtccgcacaagcaaatggtacaattcgttcatcgg

SEQ ID NO: 149426 - DNA, 53 bp, Artificial
  Synthetic oligonucleotide
tgcaccttctgtcgattacgtaccataagcgttactcaagcagttagctcggt

SEQ ID NO: 149427 - DNA, 57 bp, Artificial
  Synthetic oligonucleotide
gttgcgtgacgccgcaaacacaaaaaaacgctctcgctagggggcaaccaagcaaga

SEQ ID NO: 149428 - DNA, 53 bp, Artificial
  Synthetic oligonucleotide
agagtcatagacccaacgttagtggctttcgacgttccgttcagactatcgtt

SEQ ID NO: 149429 - DNA, 53 bp, Artificial
  Synthetic oligonucleotide
aattcatgctgtgcgttgatagtctcaacgattagtagattcggtcggtaaga

SEQ ID NO: 149430 - DNA, 53 bp, Artificial
  Synthetic oligonucleotide
ggatatggggaagtgaaccagtttaatactccaccatgtacacgcagtgagaa

SEQ ID NO: 149431 - DNA, 53 bp, Artificial
  Synthetic oligonucleotide
acagactgaaaacacggggattcatgatatgaatacgccttatcagccaaata

SEQ ID NO: 149432 - DNA, 53 bp, Artificial
  Synthetic oligonucleotide
tgattactcttaaagttttcgttgtcgctccattgaactaacatggtaggacg

SEQ ID NO: 149433 - DNA, 53 bp, Artificial
  Synthetic oligonucleotide
aatggtgtctgtaatatataaagctgacgttattgttgcagtgctaaggtttg

SEQ ID NO: 149434 - DNA, 53 bp, Artificial
  Synthetic oligonucleotide
aatgaaccatgaataacgcctacggttcctttcgacatagtagcggcatgaag

SEQ ID NO: 149435 - DNA, 53 bp, Artificial
  Synthetic oligonucleotide
tggccaatttcatcatagccgtacactttgaccttgcgtgagaaatctcccct

SEQ ID NO: 149436 - DNA, 53 bp, Artificial
  Synthetic oligonucleotide
tgggaaaagtgtaaccttggtttatgatcaaggaccaaaagaagacaagtacg

SEQ ID NO: 149437 - DNA, 53 bp, Artificial
  Synthetic oligonucleotide
ggctgacatgtctcgctatcccacgggagtcaagtaccttccgcgcaccccgt

SEQ ID NO: 149438 - DNA, 56 bp, Artificial
  Synthetic oligonucleotide
atattggttttcgttgcattaaaccatctgacgaaagcgaggtaaaggacacaagc

SEQ ID NO: 149439 - DNA, 53 bp, Artificial
  Synthetic oligonucleotide
ggaagcgagtgtccatgagtgcagccgaatccatgcgtttcacctgcggctcc

SEQ ID NO: 149440 - DNA, 53 bp, Artificial
  Synthetic oligonucleotide
ggaagaatccatcctgtaacgcgcctggcagcttctagtactaagagaaccgt

SEQ ID NO: 149441 - DNA, 53 bp, Artificial
  Synthetic oligonucleotide
aatcgtagctcgtttgataggagatagtaaagccaagtctcgacgtgaaagaa

SEQ ID NO: 149442 - DNA, 53 bp, Artificial
  Synthetic oligonucleotide
catacaagaaagcacccaatattccagttctaaaggtaagcggtatgcttgaa

SEQ ID NO: 149443 - DNA, 53 bp, Artificial
  Synthetic oligonucleotide
gttgtcacatcctttcgtgctagagcctctaatgcactttcacgtgcgaaacg

SEQ ID NO: 149444 - DNA, 53 bp, Artificial
  Synthetic oligonucleotide
gcttgtacactcttgaaggtcagagcaatagccattaaacgtagcaactcttg

SEQ ID NO: 149445 - DNA, 53 bp, Artificial
  Synthetic oligonucleotide
cagtttccctaatctacttggaggtcttctattcatttcggcccttgatgtag

SEQ ID NO: 149446 - DNA, 53 bp, Artificial
  Synthetic oligonucleotide
cactaagtattgttatatcacttacaatcatcacactatacacatcttggatc

SEQ ID NO: 149447 - DNA, 53 bp, Artificial
  Synthetic oligonucleotide
ataaagtgctggatcaatttatggagacaagagaagaagccttgcggttacgg

SEQ ID NO: 149448 - DNA, 53 bp, Artificial
  Synthetic oligonucleotide
agccgataaaccgaaaagcaggattcgaaatcgggcttgcgtaactcattatg

SEQ ID NO: 149449 - DNA, 56 bp, Artificial
  Synthetic oligonucleotide
gttggcttcgccaaaccatgccttgcatggcaaaaaaacctcggactttgtccgaa

SEQ ID NO: 149450 - DNA, 53 bp, Artificial
  Synthetic oligonucleotide
tatgggacttagtggaggtctgagagctataagtgaacgtttgcgtgatatga

SEQ ID NO: 149451 - DNA, 53 bp, Artificial
  Synthetic oligonucleotide
cctggctgcttaggatggacaatcgcaagtgcctcaggcagctcctcacttgg

SEQ ID NO: 149452 - DNA, 53 bp, Artificial
  Synthetic oligonucleotide
cacgggctaacggtgtaggagacagctgtacttgagtcacccattttaagatg

SEQ ID NO: 149453 - DNA, 53 bp, Artificial
  Synthetic oligonucleotide
agccggtccatgcgaagcatgccttgctcgtgcagtgtggctaattccttggc

SEQ ID NO: 149454 - DNA, 51 bp, Artificial
  Synthetic oligonucleotide
cctttaaatcaaattaatcccctttatttgagctttaaatagtttgcctta

SEQ ID NO: 149455 - DNA, 53 bp, Artificial
  Synthetic oligonucleotide
cgaaaaattcccctttcgtaatcatggaccatagattctctcatttacactat

SEQ ID NO: 149456 - DNA, 53 bp, Artificial
  Synthetic oligonucleotide
cgaaacaatgcgtctcgtatctataccaaaaatactccagaatcgtccattcc

SEQ ID NO: 149457 - DNA, 53 bp, Artificial
  Synthetic oligonucleotide
taacgctcatttagggctgttgaacgttgtcgtcgagcgtaattcctttggac

SEQ ID NO: 149458 - DNA, 53 bp, Artificial
  Synthetic oligonucleotide
taacggagattgggacgatgcgtgcacttggcttcaccaagcaacaagttcga

SEQ ID NO: 149459 - DNA, 53 bp, Artificial
  Synthetic oligonucleotide
tctatcggcggatatagttgaatacgaaacgggtaaccgagggaagtattctt

SEQ ID NO: 149460 - DNA, 60 bp, Artificial
  Synthetic oligonucleotide
atatgtttgtcgatctttttaatgtgcttcatgagttatatgtgacggtttcgcctagtg

SEQ ID NO: 149461 - DNA, 53 bp, Artificial
  Synthetic oligonucleotide
tctatcgcaggtatgcagcatagccaaggcggacagacgtattatccgaacgg

SEQ ID NO: 149462 - DNA, 53 bp, Artificial
  Synthetic oligonucleotide
taacgtcgctagtatcagctttcggaagagcgtatcatagtgaattcgatcgt

SEQ ID NO: 149463 - DNA, 53 bp, Artificial
  Synthetic oligonucleotide
ttcctgtgccaccactttgcgtatatttatgagttgcttccttcagtgaagta

SEQ ID NO: 149464 - DNA, 53 bp, Artificial
  Synthetic oligonucleotide
gcaataggaattgtgcatgagggacgtattgcttatacacttaactacggtta

SEQ ID NO: 149465 - DNA, 53 bp, Artificial
  Synthetic oligonucleotide
agcctaaagcgccttggcttgtatctgtcgggaagaactgagtcgccacaatt

SEQ ID NO: 149466 - DNA, 53 bp, Artificial
  Synthetic oligonucleotide
ttcggatcagccgtttttgggttggcctcgccaccttttcgtacactgtggcg

SEQ ID NO: 149467 - DNA, 53 bp, Artificial
  Synthetic oligonucleotide
gcaagagccggggcacagtatagcccttcgtttgctagagaaggatccgcttt

SEQ ID NO: 149468 - DNA, 53 bp, Artificial
  Synthetic oligonucleotide
gatttccctgctcaattcaggcaaatgtacgacattcatgccaagcgtacgga

SEQ ID NO: 149469 - DNA, 53 bp, Artificial
  Synthetic oligonucleotide
cgagtaatccctgttaagtcatgagagtactctaatctacggccgtttgattc

SEQ ID NO: 149470 - DNA, 53 bp, Artificial
  Synthetic oligonucleotide
agtggctgcaatcaattttttagtctcctgggtttcacggatcatagtcatta

SEQ ID NO: 149471 - DNA, 58 bp, Artificial
  Synthetic oligonucleotide
gttgtaacctgggatctctatacgtaaatatttcatgggttcactatccaatggaaca

SEQ ID NO: 149472 - DNA, 53 bp, Artificial
  Synthetic oligonucleotide
ttcttgaaatctcgaagtatccagtgaaagatacagatgtcatacgtgggaat

SEQ ID NO: 149473 - DNA, 53 bp, Artificial
  Synthetic oligonucleotide
gattgacgcctgtcttggtagtgagcacaatgtcggtcatatttccgttcaaa

SEQ ID NO: 149474 - DNA, 53 bp, Artificial
  Synthetic oligonucleotide
ttgaatcggagcaaacactctaactacgggttgccttcattatataccaaatc

SEQ ID NO: 149475 - DNA, 53 bp, Artificial
  Synthetic oligonucleotide
tcgtttggactgacgaaggaagcactattagcggcagtgagaaacgtaagggg

SEQ ID NO: 149476 - DNA, 53 bp, Artificial
  Synthetic oligonucleotide
ggtgtcgtattagcttcatccgttttgacagtaagagcggtaggttgtgattt

SEQ ID NO: 149477 - DNA, 53 bp, Artificial
  Synthetic oligonucleotide
ggttctatatcagttcgtaccgaaacctgttgccgtatagtaattcgtccttc

SEQ ID NO: 149478 - DNA, 50 bp, Artificial
  Synthetic oligonucleotide
ccgtatatgcgtttttaaggacgttcccttgtataaggtcagttttttat

SEQ ID NO: 149479 - DNA, 53 bp, Artificial
  Synthetic oligonucleotide
aagagtttcaggcgaatacacgttgtatccatactcaaaaccgagaaccgatc

SEQ ID NO: 149480 - DNA, 53 bp, Artificial
  Synthetic oligonucleotide
ccgttgtgatcgggagacctgtctcgctgtctagcaccgcgattaagtcagga

SEQ ID NO: 149481 - DNA, 53 bp, Artificial
  Synthetic oligonucleotide
ccgtttcaagctgtactgctctcgtttatcggcttactagctagttcatgggg

SEQ ID NO: 149482 - DNA, 55 bp, Artificial
  Synthetic oligonucleotide
gttgtgcgttcgccccaattttgttgtgcgttgaccccaattttgttgtgcgttc

SEQ ID NO: 149483 - DNA, 53 bp, Artificial
  Synthetic oligonucleotide
acgaatgatctaggcggttcggcttgtatacttactagtccaagtcgatcggc

SEQ ID NO: 149484 - DNA, 53 bp, Artificial
  Synthetic oligonucleotide
cacttcctttcgtttcaatataaaaagagccaatcttaggctctttttattaa

SEQ ID NO: 149485 - DNA, 53 bp, Artificial
  Synthetic oligonucleotide
cctaaagatggatacgttccaattaatacgacatctaaaactgttattgggaa

SEQ ID NO: 149486 - DNA, 53 bp, Artificial
  Synthetic oligonucleotide
gccctaactcataacttggcgtagcgtatgctccaatcatagaaactgctacg

SEQ ID NO: 149487 - DNA, 53 bp, Artificial
  Synthetic oligonucleotide
tctgacggagttgtcgacatgatgggtaaaattctagttaagtttatggaatc

SEQ ID NO: 149488 - DNA, 53 bp, Artificial
  Synthetic oligonucleotide
aactcgttacgtcatcatgggatcttttcagggaggctgctacatatgatgtt

SEQ ID NO: 149489 - DNA, 53 bp, Artificial
  Synthetic oligonucleotide
cctatgactactactgtaactcgtaatggaacgatattaacattagcttcccc

SEQ ID NO: 149490 - DNA, 53 bp, Artificial
  Synthetic oligonucleotide
agccacgagccaattcggttgtactttcagaatttgtagtaacagcttcgcct

SEQ ID NO: 149491 - DNA, 53 bp, Artificial
  Synthetic oligonucleotide
ttatgaacggtgtgagcgttgttttaaacctgttgcaaggtacagtttacccg

SEQ ID NO: 149492 - DNA, 53 bp, Artificial
  Synthetic oligonucleotide
gccacttctcacgttttaacaatacgtgctctacccctgataacagcgaactt

SEQ ID NO: 149493 - DNA, 58 bp, Artificial
  Synthetic oligonucleotide
atatctgccaggttaatttgtgttccagcagagttgcttgttgcaagaccgttaaaag

SEQ ID NO: 149494 - DNA, 53 bp, Artificial
  Synthetic oligonucleotide
tctctaacatggacgggatggataagctcctcgaaacgatgggtatggatttc

SEQ ID NO: 149495 - DNA, 52 bp, Artificial
  Synthetic oligonucleotide
tcacccccaactattcggacgtgggtccatgaggcatccgttgtgcttggta

SEQ ID NO: 149496 - DNA, 52 bp, Artificial
  Synthetic oligonucleotide
agtcatatggaactggcgggcagacaccatacaacagtagtgactatcgcat

SEQ ID NO: 149497 - DNA, 52 bp, Artificial
  Synthetic oligonucleotide
tagccgcacgaagtaagaggtaagccgcaccagatgaagggttaccgcacga

SEQ ID NO: 149498 - DNA, 52 bp, Artificial
  Synthetic oligonucleotide
taggaaacgtgagaatggattttaaccggtggtatagcggcttcggaatttc

SEQ ID NO: 149499 - DNA, 52 bp, Artificial
  Synthetic oligonucleotide
aggcacgatcatcaaagggttccgagtacattttaacggagatatacgctaa

SEQ ID NO: 149500 - DNA, 52 bp, Artificial
  Synthetic oligonucleotide
agccaacttgtatgctatcggcgaagtggcctgtacgggggtccatggcgct

SEQ ID NO: 149501 - DNA, 52 bp, Artificial
  Synthetic oligonucleotide
agccaccctcggagttgcagccgacgacttcccagagggatgcatcgccttt

SEQ ID NO: 149502 - DNA, 52 bp, Artificial
  Synthetic oligonucleotide
tccgaccgaagttttcagctgtcagattctcccgtgcaagtgatctacgggt

SEQ ID NO: 149503 - DNA, 52 bp, Artificial
  Synthetic oligonucleotide
aggttaatggctggttgctcgttgtactccgcgttttgctttatactgggca

SEQ ID NO: 149504 - DNA, 56 bp, Artificial
  Synthetic oligonucleotide
cgtaactagctagattcgaatcgtttctttctgataactaaccagtgcacgaaaaa

SEQ ID NO: 149505 - DNA, 52 bp, Artificial
  Synthetic oligonucleotide
ataatcaattacaacaaaccacaaactacatcgaaaaacagaatgaaacgtt

SEQ ID NO: 149506 - DNA, 52 bp, Artificial
  Synthetic oligonucleotide
atcggcgacgcaactggacctaagaccatcgtttgccgcgaacagtttgccc

SEQ ID NO: 149507 - DNA, 52 bp, Artificial
  Synthetic oligonucleotide
agaaccctaatgttggatagggttctttttagaggtaacagttgaagagtgg

SEQ ID NO: 149508 - DNA, 52 bp, Artificial
  Synthetic oligonucleotide
atcgcgttctgtagggatagaattaacacatataataggggttgaacctaag

SEQ ID NO: 149509 - DNA, 52 bp, Artificial
  Synthetic oligonucleotide
agtggctagtggtcggggagagcccgctagtacctagaggtgggcggaaatg

SEQ ID NO: 149510 - DNA, 51 bp, Artificial
  Synthetic oligonucleotide
tccccttgaagacgactgaacaataaaaggaaccgggacgtcttgtcccgg

SEQ ID NO: 149511 - DNA, 52 bp, Artificial
  Synthetic oligonucleotide
agctgtccatacgagcgcacctctgccgagtataatggcggctccgcctcta

SEQ ID NO: 149512 - DNA, 52 bp, Artificial
  Synthetic oligonucleotide
agaggaaattgggcgctcgatacgcctagcgaaagaaaataaccgtgatcct

SEQ ID NO: 149513 - DNA, 52 bp, Artificial
  Synthetic oligonucleotide
agtggaagccgcaccaaacttgggtcttaccgcacacccggacgtagtccac

SEQ ID NO: 149514 - DNA, 52 bp, Artificial
  Synthetic oligonucleotide
tagatgtagaaagtatccggcaaggatgcacattccattcgtaaaggacaat

SEQ ID NO: 149515 - DNA, 54 bp, Artificial
  Synthetic oligonucleotide
gaagtaaaaggaagtgtaagtattcctttcgttgcagatggtggggttactgta

SEQ ID NO: 149516 - DNA, 52 bp, Artificial
  Synthetic oligonucleotide
atctgtgtacaggctttcagtaggcagcggcttccggcaccagccgacaagc

SEQ ID NO: 149517 - DNA, 52 bp, Artificial
  Synthetic oligonucleotide
agcgcactgtggggtctcacctatgcctttcctcccgcaggagtctccgtat

SEQ ID NO: 149518 - DNA, 52 bp, Artificial
  Synthetic oligonucleotide
tcccatggacctacccatcatcttcccgacgcaacttccccgcttcattcgc

SEQ ID NO: 149519 - DNA, 52 bp, Artificial
  Synthetic oligonucleotide
gtttatttcgaagtttacaagcggctgtcgaagtgagagatgaattaagccc

SEQ ID NO: 149520 - DNA, 52 bp, Artificial
  Synthetic oligonucleotide
tagtggtcctaatacagcaaccatacctaaaattgctacgataccaatttgg

SEQ ID NO: 149521 - DNA, 52 bp, Artificial
  Synthetic oligonucleotide
ataagccatccaaatataagaccgaataacgcttgtgtagagggcgagtgtg

SEQ ID NO: 149522 - DNA, 52 bp, Artificial
  Synthetic oligonucleotide
tcaactccgttttgctcggtgagcgatagcacaagcgaatttaacacgacat

SEQ ID NO: 149523 - DNA, 52 bp, Artificial
  Synthetic oligonucleotide
atactattaactgaacgcagtaacgcactattgagtacaatcatatctaggt

SEQ ID NO: 149524 - DNA, 52 bp, Artificial
  Synthetic oligonucleotide
gttgtgataacacgtttctcactcgctaattctgttacgcgttccatctcaa

SEQ ID NO: 149525 - DNA, 52 bp, Artificial
  Synthetic oligonucleotide
tagttttatttcttggcgtgggtataatatttgggtcatttggatgctgacc

SEQ ID NO: 149526 - DNA, 60 bp, Artificial
  Synthetic oligonucleotide
caagccccgacaagtcgagtacacatggatggttgacgcacccactaagctatgcgcgaa

SEQ ID NO: 149527 - DNA, 60 bp, Artificial
  Synthetic oligonucleotide
gaagttaatcgacaaggcgcagcactatgcccaaacggatgctacaatcttgattcgtgg

SEQ ID NO: 149528 - DNA, 52 bp, Artificial
  Synthetic oligonucleotide
actttgaccttgaaacatgcatgttatgattcctaattcttttgcaggtagc

SEQ ID NO: 149529 - DNA, 52 bp, Artificial
  Synthetic oligonucleotide
tactgcaagcgtgatccttggaatttatgagcggccaccatgttgtatccca

SEQ ID NO: 149530 - DNA, 52 bp, Artificial
  Synthetic oligonucleotide
agatttatcgagtcataaagcgtggggatcgtacctcctatcaatttccgaa

SEQ ID NO: 149531 - DNA, 52 bp, Artificial
  Synthetic oligonucleotide
aggaggcatcccacccataataagttgcagataaaacgtatcttttccacga

SEQ ID NO: 149532 - DNA, 52 bp, Artificial
  Synthetic oligonucleotide
taggaaaaggcttgattacagtcgtatccgaaaagctatttccgactaaaaa

SEQ ID NO: 149533 - DNA, 52 bp, Artificial
  Synthetic oligonucleotide
agaaacgccgtcaaatcaaggtttattggactgttcgttttcaggtgtccaa

SEQ ID NO: 149534 - DNA, 52 bp, Artificial
  Synthetic oligonucleotide
tcaagggacctggtcatacagggggggatctagttgctcttacaagcaatgg

SEQ ID NO: 149535 - DNA, 52 bp, Artificial
  Synthetic oligonucleotide
agatgtgcggggcaaaacggcataatgaaatacgcgttccaataaacgcctg

SEQ ID NO: 149536 - DNA, 52 bp, Artificial
  Synthetic oligonucleotide
tccattttatcaggcaagctatcaatcattgtaagcgctccggacctcttag

SEQ ID NO: 149537 - DNA, 52 bp, Artificial
  Synthetic oligonucleotide
taatgttgcaagggtaagttgaggacgtcctaaatgcttaccttgagattta

SEQ ID NO: 149538 - DNA, 56 bp, Artificial
  Synthetic oligonucleotide
gaagttgcgagaaatagcggaacggtatggaatgagtattaattcggttgcgtcgt

SEQ ID NO: 149539 - DNA, 52 bp, Artificial
  Synthetic oligonucleotide
atcgattcccgaggggtctcagctaggcctatcccccacaggagtctccgta

SEQ ID NO: 149540 - DNA, 52 bp, Artificial
  Synthetic oligonucleotide
atcgcccacgtatgcccttgttcggtgaagccttttagctcacgtaaatgat

SEQ ID NO: 149541 - DNA, 52 bp, Artificial
  Synthetic oligonucleotide
tagcggtttataacatggttttacatgatgatgaagccaatccacatctaca

SEQ ID NO: 149542 - DNA, 52 bp, Artificial
  Synthetic oligonucleotide
agaaacggctagcgcttgctctgtacgtgcttcgttgacacgagtgccggta

SEQ ID NO: 149543 - DNA, 52 bp, Artificial
  Synthetic oligonucleotide
tagcggctgtttcctccacagtcgctgtcgtttgttcaacccctgctgcaga

SEQ ID NO: 149544 - DNA, 52 bp, Artificial
  Synthetic oligonucleotide
gttagcgagtgtacttgttagaaccgttgtggaaatgccagccacatttaat

SEQ ID NO: 149545 - DNA, 52 bp, Artificial
  Synthetic oligonucleotide
tatacaggcagactactattgggcagccgcatttggtggtactcatgatggt

SEQ ID NO: 149546 - DNA, 52 bp, Artificial
  Synthetic oligonucleotide
atcgcccagccataactactgacccagccggcaattaggataatgagccgtg

SEQ ID NO: 149547 - DNA, 52 bp, Artificial
  Synthetic oligonucleotide
ccatggggtcgcctgaaccgagctaactgcttaagtaacgcctggggtggct

SEQ ID NO: 149548 - DNA, 52 bp, Artificial
  Synthetic oligonucleotide
tgggatgacgttgagagcattgcgggcacttatactacgccgattatgatac

SEQ ID NO: 149549 - DNA, 60 bp, Artificial
  Synthetic oligonucleotide
gaatacacaataggagagtgcaaacatgttagatcaaaacgcagacagaatgtattgggt

SEQ ID NO: 149550 - DNA, 52 bp, Artificial
  Synthetic oligonucleotide
cgggttcatcattatggccatacatacatttgcgcctgtacaagttgaatcc

SEQ ID NO: 149551 - DNA, 52 bp, Artificial
  Synthetic oligonucleotide
cccagcatacggtgccaggtacagaagcggtgccggctgtgacgcagacgcc

SEQ ID NO: 149552 - DNA, 52 bp, Artificial
  Synthetic oligonucleotide
aatcgcctcctggatcttaacccacttatgcctcaccaatcgtttccgtgag

SEQ ID NO: 149553 - DNA, 52 bp, Artificial
  Synthetic oligonucleotide
cggggaggcttgaaatacatggacagcgtattgcctattggaacgaaacgtg

SEQ ID NO: 149554 - DNA, 52 bp, Artificial
  Synthetic oligonucleotide
ccccacgatgacctgtcgattgccggcgggtattcagctgtcagttatacct

SEQ ID NO: 149555 - DNA, 52 bp, Artificial
  Synthetic oligonucleotide
cggggaagtatcggaagagttgcaatctgtctactctgctgcgggaatggca

SEQ ID NO: 149556 - DNA, 52 bp, Artificial
  Synthetic oligonucleotide
ccccgcgcaccaccttttccgtatccggttctgtcggagttcgtcctggata

SEQ ID NO: 149557 - DNA, 52 bp, Artificial
  Synthetic oligonucleotide
ccccgcgcatattacacaattgtttactgagttggtgccaatacggccatcc

SEQ ID NO: 149558 - DNA, 52 bp, Artificial
  Synthetic oligonucleotide
gaccgcctgctgttaaccgttcactcatgcgctcccaaaattcgtccaagcc

SEQ ID NO: 149559 - DNA, 52 bp, Artificial
  Synthetic oligonucleotide
cccctccaaacggtataggaaccgtcgtcttccctaaagatataaatggcgc

SEQ ID NO: 149560 - DNA, 55 bp, Artificial
  Synthetic oligonucleotide
cggttgtaacttcgttaccacgaatcacatccgtttataagcgcataaaattcat

SEQ ID NO: 149561 - DNA, 52 bp, Artificial
  Synthetic oligonucleotide
ccccttctagcttatcgtaatatttaggaggcctcttgtttggatttggcga

SEQ ID NO: 149562 - DNA, 52 bp, Artificial
  Synthetic oligonucleotide
tggtttatgaatcgaatatagtgaaagtgatcccggctgaaacttcaggcgg

SEQ ID NO: 149563 - DNA, 52 bp, Artificial
  Synthetic oligonucleotide
gctcggttcctgggtcctctaaagtccacctgctcgcatgcatccatggcgt

SEQ ID NO: 149564 - DNA, 52 bp, Artificial
  Synthetic oligonucleotide
tgtaacaactgaacagctgtcctacctattggcgattgacctgttaacatgc

SEQ ID NO: 149565 - DNA, 52 bp, Artificial
  Synthetic oligonucleotide
aagttcccaggtctagctttacaactcttgcaatcacgcaataacctacccc

SEQ ID NO: 149566 - DNA, 52 bp, Artificial
  Synthetic oligonucleotide
aagtgcgagggctatatctaaagcccatccttgagattgtgagcgttgagtc

SEQ ID NO: 149567 - DNA, 52 bp, Artificial
  Synthetic oligonucleotide
catgcgttgctgccaccgttccgggcaagatgaaaatacccgtgcccacgat

SEQ ID NO: 149568 - DNA, 52 bp, Artificial
  Synthetic oligonucleotide
ggcgaaacgaatcgtcggttacgacgagccgcacttaggtttgatggacatt

SEQ ID NO: 149569 - DNA, 52 bp, Artificial
  Synthetic oligonucleotide
ggcctcgccaccttttcgtacactgtggcgaacaatcgcagcttcctcgcga

SEQ ID NO: 149570 - DNA, 52 bp, Artificial
  Synthetic oligonucleotide
ggccctgtttcacgtccggtatcctacgccagcaaaacaggcggcgacacct

SEQ ID NO: 149571 - DNA, 60 bp, Artificial
  Synthetic oligonucleotide
gaatcgacttgaacgatcaccttttgtctcatgtgccataacaagtgagtagcaagtcat

SEQ ID NO: 149572 - DNA, 52 bp, Artificial
  Synthetic oligonucleotide
tgcgtaatgaacgaatgcctttctccaggtgcgagtttcataacgttgaata

SEQ ID NO: 149573 - DNA, 52 bp, Artificial
  Synthetic oligonucleotide
ccaatggcaggcgtgacatcgcctaaatttgtggcggcttgtgctgaggcag

SEQ ID NO: 149574 - DNA, 52 bp, Artificial
  Synthetic oligonucleotide
ccaatgttggcccacggattagcgacgaaagaaaatgttcgtgaaaaggtaa

SEQ ID NO: 149575 - DNA, 52 bp, Artificial
  Synthetic oligonucleotide
gaataccctagcttatgacttggctaggcacgaacactacgaccatctcagg

SEQ ID NO: 149576 - DNA, 52 bp, Artificial
  Synthetic oligonucleotide
aattcttaagttgatgggcatggcctcaccataccatttcgggaaaattgta

SEQ ID NO: 149577 - DNA, 52 bp, Artificial
  Synthetic oligonucleotide
tggaaactcacttcaagctttgagtggtgtaaatgaattgaaagccagttat

SEQ ID NO: 149578 - DNA, 52 bp, Artificial
  Synthetic oligonucleotide
ccaccgttccgggcaagatgaaaatacccgtgcccacgatggcaccaactcc

SEQ ID NO: 149579 - DNA, 52 bp, Artificial
  Synthetic oligonucleotide
ggataagcgatatagcacgatccgttgcttgtttcgttgactccccgtctga

SEQ ID NO: 149580 - DNA, 52 bp, Artificial
  Synthetic oligonucleotide
cggtactgttctccaggctgcaacacgcggacaaacgtcagcgccccgtttt

SEQ ID NO: 149581 - DNA, 52 bp, Artificial
  Synthetic oligonucleotide
gacaaactgtcaccgtaacctttacaagagtgaacggtcaagtgagaataag

SEQ ID NO: 149582 - DNA, 55 bp, Artificial
  Synthetic oligonucleotide
gaatctgtaggaacaatttggtgtagtgcgttacaccaaaactgaaattttgtgt

SEQ ID NO: 149583 - DNA, 52 bp, Artificial
  Synthetic oligonucleotide
tggatcaatcatttaagtcgcacgggacttccttacatcgaagtgagctcct

SEQ ID NO: 149584 - DNA, 52 bp, Artificial
  Synthetic oligonucleotide
tggattaagtggattatcaattcgtgatctagcctcacgatatccagagtcc

SEQ ID NO: 149585 - DNA, 52 bp, Artificial
  Synthetic oligonucleotide
aatctttgcacccatagagcgcaggggcaccgtaacgcggctcataggacgc

SEQ ID NO: 149586 - DNA, 52 bp, Artificial
  Synthetic oligonucleotide
ttgggacttcgttatatcgccgttgtcagcattggaacgaaatcgttgtttt

SEQ ID NO: 149587 - DNA, 52 bp, Artificial
  Synthetic oligonucleotide
gagggtatcccgttactttatacgggcgatcacttcccttttgaggtacaag

SEQ ID NO: 149588 - DNA, 52 bp, Artificial
  Synthetic oligonucleotide
gcattcgcagagccattccaagagtttgctaagtcaattaccggttgtggct

SEQ ID NO: 149589 - DNA, 52 bp, Artificial
  Synthetic oligonucleotide
aacgtcaaaaatgccccctagcggtacgttgccacgcaatcgcagcacggtt

SEQ ID NO: 149590 - DNA, 52 bp, Artificial
  Synthetic oligonucleotide
cgcgctactcttcatacccctcgcgccaattcttatgttgcacgcgcgacct

SEQ ID NO: 149591 - DNA, 52 bp, Artificial
  Synthetic oligonucleotide
cgcgagtgggactatgttctgccgggaagggacaatgtactccgcaggtcgg

SEQ ID NO: 149592 - DNA, 52 bp, Artificial
  Synthetic oligonucleotide
cgccttgcataacgagcatcactagcagcttgtctcatacgctctattttgg

SEQ ID NO: 149593 - DNA, 60 bp, Artificial
  Synthetic oligonucleotide
gaatgttgtgattttgaatgtttgagcgatagcatgggaaagctaggcacccgcctagcc

SEQ ID NO: 149594 - DNA, 52 bp, Artificial
  Synthetic oligonucleotide
cgcccgagttaactgggcgtaaggtttgtccttcacgctacgtacaatagag

SEQ ID NO: 149595 - DNA, 52 bp, Artificial
  Synthetic oligonucleotide
gcagcatggcaacaattaagctgagtacgacgaaaaatgccaatgcgttact

SEQ ID NO: 149596 - DNA, 52 bp, Artificial
  Synthetic oligonucleotide
cgcagcctataaagggtgtagtgaactgggaattattccagtcgtgacaggt

SEQ ID NO: 149597 - DNA, 52 bp, Artificial
  Synthetic oligonucleotide
cgcaatcgctcaggactatatttcacaaggcggtttaaattacgcccgccaa

SEQ ID NO: 149598 - DNA, 52 bp, Artificial
  Synthetic oligonucleotide
gcacattcgcaatcttcgacatggtttcagaaagagtcgtcagcttagtgct

SEQ ID NO: 149599 - DNA, 52 bp, Artificial
  Synthetic oligonucleotide
cgaagtcgatttctaactttatcgccggtttacgtgcttctgggaatggttc

SEQ ID NO: 149600 - DNA, 52 bp, Artificial
  Synthetic oligonucleotide
aacggacctagtgaaacgaagggagtatttgacttgaccaactgaacgaaac

SEQ ID NO: 149601 - DNA, 52 bp, Artificial
  Synthetic oligonucleotide
cgagctcgaggaggctcactagccgcccgcgcaaggtagacactgcgaggtt

SEQ ID NO: 149602 - DNA, 52 bp, Artificial
  Synthetic oligonucleotide
aaccgtgagttccatttaatggaggttatgtacggtggtcttccaggtagac

SEQ ID NO: 149603 - DNA, 52 bp, Artificial
  Synthetic oligonucleotide
cgatgcaagcgcttaactgacgcatgggcaaggcaccctctccgccgctcga

SEQ ID NO: 149604 - DNA, 58 bp, Artificial
  Synthetic oligonucleotide
cggtatccgatatggtcagttttgaacgatataagcttgctatatgctttaccgtttc

SEQ ID NO: 149605 - DNA, 52 bp, Artificial
  Synthetic oligonucleotide
ttgagattacttgatgataatcatggttatgtgtatcacatttataacctag

SEQ ID NO: 149606 - DNA, 52 bp, Artificial
  Synthetic oligonucleotide
gatggcccgattgaattcttcttgtctttgaatgagatcggcgacatttaca

SEQ ID NO: 149607 - DNA, 52 bp, Artificial
  Synthetic oligonucleotide
tttaagtgattgcggccaaagtctacagctgcgtatggtccttcagaataaa

SEQ ID NO: 149608 - DNA, 52 bp, Artificial
  Synthetic oligonucleotide
cggcatcccaacgtttgtacgatctgccaatggtgctcttgtaacagatgtt

SEQ ID NO: 149609 - DNA, 52 bp, Artificial
  Synthetic oligonucleotide
cggagcggtattccctcctgatttctttctaaacggagccctaagcgtaact

SEQ ID NO: 149610 - DNA, 52 bp, Artificial
  Synthetic oligonucleotide
tgttatttggactatgcagtggaagtgtaacttcttttgcgagtgagttatc

SEQ ID NO: 149611 - DNA, 52 bp, Artificial
  Synthetic oligonucleotide
gcgcttagagttttatgggagtggcgggtccggacttattgcaacagacgct

SEQ ID NO: 149612 - DNA, 52 bp, Artificial
  Synthetic oligonucleotide
gactaatttaactcataccattaacgtgccgacggaccgtaatggctaccac

SEQ ID NO: 149613 - DNA, 52 bp, Artificial
  Synthetic oligonucleotide
ccgcgtttcatgtcagatgcacttacagctcttcctttacctacaagcgtat

SEQ ID NO: 149614 - DNA, 52 bp, Artificial
  Synthetic oligonucleotide
gcgatttggatgtcacgttatttccgcagctacgagccgttaacattaatga

SEQ ID NO: 149615 - DNA, 56 bp, Artificial
  Synthetic oligonucleotide
gaattttttgtttgagccatatgtggtagaagggaagtctatggatcccactttgg

SEQ ID NO: 149616 - DNA, 52 bp, Artificial
  Synthetic oligonucleotide
ttgtgtcagcgctttggcttcgttcttcgtcagccccaattgtgcccggaat

SEQ ID NO: 149617 - DNA, 52 bp, Artificial
  Synthetic oligonucleotide
ttgtctcaaattgaattaggccagcgccaagtaagcagggagagggccatgc

SEQ ID NO: 149618 - DNA, 52 bp, Artificial
  Synthetic oligonucleotide
ttagaagcatttttcacgtatgatactggaaaaggtgagcggggttggacga

SEQ ID NO: 149619 - DNA, 52 bp, Artificial
  Synthetic oligonucleotide
ccgtcgtcagaacaacggtcttagaacggtactccgcccctgtctgggttat

SEQ ID NO: 149620 - DNA, 52 bp, Artificial
  Synthetic oligonucleotide
cgcttgatggtgcaaatacgagtggaagtttaacgcagctttatacggttat

SEQ ID NO: 149621 - DNA, 52 bp, Artificial
  Synthetic oligonucleotide
cctcaactaagtactgagggccatctacgtattcctcgagtaagatttcctc

SEQ ID NO: 149622 - DNA, 52 bp, Artificial
  Synthetic oligonucleotide
cctcagtatgattgcccgctacgaaactgaatggtggtacgagctgctgtct

SEQ ID NO: 149623 - DNA, 52 bp, Artificial
  Synthetic oligonucleotide
gagcgttacgactgggcttgtgcttgttagcggagagattacgacatcgaca

SEQ ID NO: 149624 - DNA, 52 bp, Artificial
  Synthetic oligonucleotide
aaagtctgccccgcaagcgaagcgacaggggcaacgggttgttaaagtctgc

SEQ ID NO: 149625 - DNA, 52 bp, Artificial
  Synthetic oligonucleotide
aaaacggggtctggcaaacttccgttatttgcgctgggagcatattattgtc

SEQ ID NO: 149626 - DNA, 51 bp, Artificial
  Synthetic oligonucleotide
gacaaaccccaaaaacgatgtttttgacttggtaggagattcctacaacct

SEQ ID NO: 149627 - DNA, 52 bp, Artificial
  Synthetic oligonucleotide
ttttcttttcgtaataacagccggacagaagtgtcatttatccgtccttcac

SEQ ID NO: 149628 - DNA, 52 bp, Artificial
  Synthetic oligonucleotide
atttcgttccgccagtgtcctttccaggggccccgcttcactcacttccgtt

SEQ ID NO: 149629 - DNA, 52 bp, Artificial
  Synthetic oligonucleotide
caaatggtgccgatacagtattagtccaacgtctcttgaaggaggacgtgga

SEQ ID NO: 149630 - DNA, 52 bp, Artificial
  Synthetic oligonucleotide
tcgctgctgccacttcctctacattaatcgtcaagtaacggaataacttttc

SEQ ID NO: 149631 - DNA, 52 bp, Artificial
  Synthetic oligonucleotide
gtatagtggaagtatcattgcatatatccctaatctgtttcgctagctcact

SEQ ID NO: 149632 - DNA, 52 bp, Artificial
  Synthetic oligonucleotide
tcggagcgtcgccaagttcagtagggggaggcatacggacaacgactttcgc

SEQ ID NO: 149633 - DNA, 52 bp, Artificial
  Synthetic oligonucleotide
caaccgttattgtatgtacaattgcaattgtattagtaaaaaagaaggggaa

SEQ ID NO: 149634 - DNA, 52 bp, Artificial
  Synthetic oligonucleotide
tcgggcaaccgttcgataaatccgctcggattaggctcgtgtccttcctcgt

SEQ ID NO: 149635 - DNA, 52 bp, Artificial
  Synthetic oligonucleotide
gtactgtactaactgggagatggttcgtccgcaatccgaatgcaaaccactt

SEQ ID NO: 149636 - DNA, 52 bp, Artificial
  Synthetic oligonucleotide
aaaacgtcaatcgggctaatacctttccatctcgaaataccagtgatgtgct

SEQ ID NO: 149637 - DNA, 55 bp, Artificial
  Synthetic oligonucleotide
gtacgtagctttaaccccatcatgtgaaacggggcttggaagtgttatcatacgt

SEQ ID NO: 149638 - DNA, 56 bp, Artificial
  Synthetic oligonucleotide
gacaaactgcctactcgtattgtagtttataggtgtaccgaggagcaaaaactgaa

SEQ ID NO: 149639 - DNA, 52 bp, Artificial
  Synthetic oligonucleotide
cttaatgctccaacttcgtctgctacaaaaacgttggccttacgcaatattg

SEQ ID NO: 149640 - DNA, 52 bp, Artificial
  Synthetic oligonucleotide
acggctttcccaccatcgggttgcttcgcagaaggcggctcatcactcaacg

SEQ ID NO: 149641 - DNA, 52 bp, Artificial
  Synthetic oligonucleotide
ctagaagtagccatggttgcttcacttagtgaaagcgatagagatgacccca

SEQ ID NO: 149642 - DNA, 52 bp, Artificial
  Synthetic oligonucleotide
cttggcggccgttcattaggtcccgcggtaactgcgttaagtgcaggtgctg

SEQ ID NO: 149643 - DNA, 52 bp, Artificial
  Synthetic oligonucleotide
ctttacgacgcaaattaatccgttactaaagtagaagtcatgttagcacaag

SEQ ID NO: 149644 - DNA, 52 bp, Artificial
  Synthetic oligonucleotide
gtaagagcaccttctgttccaacacctgctcgaacatctagcttaccttgct

SEQ ID NO: 149645 - DNA, 52 bp, Artificial
  Synthetic oligonucleotide
aaaatcgtttcgattttagctttgcgctacatgagttgacaggcgcagaaaa

SEQ ID NO: 149646 - DNA, 52 bp, Artificial
  Synthetic oligonucleotide
tccgttcatgtgacgcaatgtagctggaagaccacggtcactatgaagatac

SEQ ID NO: 149647 - DNA, 52 bp, Artificial
  Synthetic oligonucleotide
tcctagggtttggtggaaaccccgcaggcttgccgtggactttgtaggcttc

SEQ ID NO: 149648 - DNA, 52 bp, Artificial
  Synthetic oligonucleotide
ctgatacttaaatcccgcgaaccaggttactactaacggagatatcatagat

SEQ ID NO: 149649 - DNA, 55 bp, Artificial
  Synthetic oligonucleotide
gacaattaattgtgtacgctggattgttaaaagattatgcgaaaaaatacgaaaa

SEQ ID NO: 149650 - DNA, 52 bp, Artificial
  Synthetic oligonucleotide
gtgagctgcaaggaggttccttcacgatcacaaacggaggtacattcggctc

SEQ ID NO: 149651 - DNA, 52 bp, Artificial
  Synthetic oligonucleotide
tcctcagggtccgttaaccgcaagtcagcttgtccacccccgaacagctctt

SEQ ID NO: 149652 - DNA, 52 bp, Artificial
  Synthetic oligonucleotide
atgttcatacgctaagatcgtgcggtttcgtccgcacaccacgagccagcct

SEQ ID NO: 149653 - DNA, 52 bp, Artificial
  Synthetic oligonucleotide
attataaccaccttaattcaatacaagaagcctcacgaactcgaaatctacc

SEQ ID NO: 149654 - DNA, 52 bp, Artificial
  Synthetic oligonucleotide
ctcgtgcggatttccaccattctcgtgcggcttccctaatcctgtgcggcta

SEQ ID NO: 149655 - DNA, 52 bp, Artificial
  Synthetic oligonucleotide
gtcgtgctcgggagcagatggttgcgccagtttctccactagggggaaatgc

SEQ ID NO: 149656 - DNA, 52 bp, Artificial
  Synthetic oligonucleotide
attcgtatctcgcaatgaattccggcgggctgacagggaatggcttaggcgg

SEQ ID NO: 149657 - DNA, 52 bp, Artificial
  Synthetic oligonucleotide
gtcggatctctgatggtggagtggtgcaaactgggtcattgatattcagtcc

SEQ ID NO: 149658 - DNA, 52 bp, Artificial
  Synthetic oligonucleotide
gtcggactttatgtttgtaacgagacacccactctacagggtcttgaccggc

SEQ ID NO: 149659 - DNA, 52 bp, Artificial
  Synthetic oligonucleotide
attcttggcggctatggatggcgggtgccaagtaccaatcgctggctatgct

SEQ ID NO: 149660 - DNA, 56 bp, Artificial
  Synthetic oligonucleotide
gacacggaggtgtgaccaaatggacacacacggaaattcctcaaaatttatccctg

SEQ ID NO: 149661 - DNA, 52 bp, Artificial
  Synthetic oligonucleotide
ctgtaaagttagtaatgacaaggggcgaaaagggttcgaacacaggaataac

SEQ ID NO: 149662 - DNA, 52 bp, Artificial
  Synthetic oligonucleotide
ttttggcgagccgaacagtagatgacctcacaagatcctcccttatactcgt

SEQ ID NO: 149663 - DNA, 52 bp, Artificial
  Synthetic oligonucleotide
attgagtctggtatggtgcatattaacaacggaactgtaagtgaaggacaca

SEQ ID NO: 149664 - DNA, 52 bp, Artificial
  Synthetic oligonucleotide
tcgagcacttcgcccaagaattcgagcactccgcagcacaaaccgagcacat

SEQ ID NO: 149665 - DNA, 52 bp, Artificial
  Synthetic oligonucleotide
gtccgaatagcaccacttgtcccaattgtgacagcaatctcccctttccgaa

SEQ ID NO: 149666 - DNA, 52 bp, Artificial
  Synthetic oligonucleotide
tctcatcaggatttcgcgttatgaccggcatatgcgtaatttctatcgccgg

SEQ ID NO: 149667 - DNA, 52 bp, Artificial
  Synthetic oligonucleotide
gaaaactattaaaagtccttcggattgtttaactggaggacttttcaacatc

SEQ ID NO: 149668 - DNA, 52 bp, Artificial
  Synthetic oligonucleotide
tctcggtccccaacacccgcaaagcggagtttttccggctcaaacggctgtg

SEQ ID NO: 149669 - DNA, 52 bp, Artificial
  Synthetic oligonucleotide
tttgaggcactgtatctttcgggtgccgcgtatacagcgagtagaggcctac

SEQ ID NO: 149670 - DNA, 52 bp, Artificial
  Synthetic oligonucleotide
tttgaaacagggatgaaatatgtaagagcaacccttggctttgagggcttag

SEQ ID NO: 149671 - DNA, 60 bp, Artificial
  Synthetic oligonucleotide
gaccaatttctagtcagatcggtggaaacacatcagttacacctggtagacaattgtctc

SEQ ID NO: 149672 - DNA, 52 bp, Artificial
  Synthetic oligonucleotide
gggctttaaccacttcatcgttgttaagtagttggctcaaatagttggctcc

SEQ ID NO: 149673 - DNA, 52 bp, Artificial
  Synthetic oligonucleotide
accccgaatccatctatcaccgattgggatgtgatgatctgtggaaatatta

SEQ ID NO: 149674 - DNA, 52 bp, Artificial
  Synthetic oligonucleotide
gaaccaggctaggccttcctctggcaccgcaaacttttcccataccgaggcg

SEQ ID NO: 149675 - DNA, 52 bp, Artificial
  Synthetic oligonucleotide
cgtacactgtggcgaacaatcgcagcttcctcgcgatgtgtcgggaaggcaa

SEQ ID NO: 149676 - DNA, 52 bp, Artificial
  Synthetic oligonucleotide
acccccgacgatacccattgtgggaccgatcggcttgggcaaacgaagtcca

SEQ ID NO: 149677 - DNA, 52 bp, Artificial
  Synthetic oligonucleotide
cgtacacgggaagcaggctatgtcgggcggactgttagcttggggctctctt

SEQ ID NO: 149678 - DNA, 52 bp, Artificial
  Synthetic oligonucleotide
acatgttgccacgtagttaacaagtttcgtctattccccactttgacattac

SEQ ID NO: 149679 - DNA, 52 bp, Artificial
  Synthetic oligonucleotide
tgagggtgccaagaaaattttcgccaaactcattcagaatgccctctatgga

SEQ ID NO: 149680 - DNA, 52 bp, Artificial
  Synthetic oligonucleotide
cagtagaccggactgtagatcgtaaggcggccggagttaaactgatgcaaga

SEQ ID NO: 149681 - DNA, 52 bp, Artificial
  Synthetic oligonucleotide
cagtagtaacagtgggagcgtatgatacaagtaagccgggtataatatcagt

SEQ ID NO: 149682 - DNA, 59 bp, Artificial
  Synthetic oligonucleotide
gaccacattgatttctcgaaatcggatcggaatgtctacctggtaaagaatgatctccg

SEQ ID NO: 149683 - DNA, 52 bp, Artificial
  Synthetic oligonucleotide
catacaaaagcttcacttagacctaacagagccaagagagaactctctaacc

SEQ ID NO: 149684 - DNA, 52 bp, Artificial
  Synthetic oligonucleotide
catagccacggcgctgaattgtatcgagggtcggtgcatatgtggacgggcg

SEQ ID NO: 149685 - DNA, 52 bp, Artificial
  Synthetic oligonucleotide
gtaaatctagttccattagcaacgttatacgctatttttgaactcgtacttg

SEQ ID NO: 149686 - DNA, 52 bp, Artificial
  Synthetic oligonucleotide
caattgtagctacacttttattcacgcttttcgttgcttgtatattaggtga

SEQ ID NO: 149687 - DNA, 52 bp, Artificial
  Synthetic oligonucleotide
ggtttaacgggcggaccataattttccgctgtgtaaatcgcgtcggaagcga

SEQ ID NO: 149688 - DNA, 52 bp, Artificial
  Synthetic oligonucleotide
cacaagcttggtttccagcgtccaattgtgattactcatgcgacacggcccc

SEQ ID NO: 149689 - DNA, 52 bp, Artificial
  Synthetic oligonucleotide
ggttgacatggtttcgagtaagactaaagagatgtaaacctccagtaaataa

SEQ ID NO: 149690 - DNA, 52 bp, Artificial
  Synthetic oligonucleotide
ctttgggacgaataccattaccccaggagggatgcacgcctacaaacgatct

SEQ ID NO: 149691 - DNA, 52 bp, Artificial
  Synthetic oligonucleotide
ggttcatctttagtccaaacgcctaaataatttaatcgtccagagcaacaac

SEQ ID NO: 149692 - DNA, 52 bp, Artificial
  Synthetic oligonucleotide
tcgttgcggcatgtcgaaaattttccgcaacaaagttatcaatccttctctt

SEQ ID NO: 149693 - DNA, 58 bp, Artificial
  Synthetic oligonucleotide
gaccattaggatcaattgagggtgcacgtattgtggctggtaatcaactttctttaag

SEQ ID NO: 149694 - DNA, 52 bp, Artificial
  Synthetic oligonucleotide
cttttttttaggcagtgatgcgagttgggggtgagtcaacggtaaccggacc

SEQ ID NO: 149695 - DNA, 52 bp, Artificial
  Synthetic oligonucleotide
cgtgcctgctgtagaggttggggctgcataggtcgcatttgttgccccgcta

SEQ ID NO: 149696 - DNA, 52 bp, Artificial
  Synthetic oligonucleotide
tctcaaaacaataagatgagtgcataaggtggctgccctttttgcacgatta

SEQ ID NO: 149697 - DNA, 52 bp, Artificial
  Synthetic oligonucleotide
ggtcttgctatcactatgttggttggtggttcatatctcaatcatacagaaa

SEQ ID NO: 149698 - DNA, 52 bp, Artificial
  Synthetic oligonucleotide
ggtgctggagtgaatgtaattgcgtggttaatcgttgcatgtgaaatagggt

SEQ ID NO: 149699 - DNA, 51 bp, Artificial
  Synthetic oligonucleotide
taggctatccttgattgcggatgctttgtcgcatgtaacactcgcaggaat

SEQ ID NO: 149700 - DNA, 51 bp, Artificial
  Synthetic oligonucleotide
aaaacacgcaaactttgtttcggcagagcgcaattttccgagtggagttaa

SEQ ID NO: 149701 - DNA, 51 bp, Artificial
  Synthetic oligonucleotide
aaagcagcggctccctttggcgtgcggttcagaccattgtgattgccgacc

SEQ ID NO: 149702 - DNA, 51 bp, Artificial
  Synthetic oligonucleotide
tttagacgtgtagcgttagcgggaacttgttttgcataatatagcgaggat

SEQ ID NO: 149703 - DNA, 51 bp, Artificial
  Synthetic oligonucleotide
aacatggacggaaatcgtcaacacgattcgcgcccatccgggagaaccgct

SEQ ID NO: 149704 - DNA, 54 bp, Artificial
  Synthetic oligonucleotide
cgggcgggaagtctggccattaccgacggaaaaccgattagctaggggatgaga

SEQ ID NO: 149705 - DNA, 51 bp, Artificial
  Synthetic oligonucleotide
ttgtctatgtattatatcgagcaggcgtatcatgcttataaagctcataaa

SEQ ID NO: 149706 - DNA, 51 bp, Artificial
  Synthetic oligonucleotide
aaaacagatcgaagatatgaaatggtccctaaaacgccactgttccgaacg

SEQ ID NO: 149707 - DNA, 51 bp, Artificial
  Synthetic oligonucleotide
ttgcacctagagaaatcgcttcttttggtccaatgcttccatcagtccata

SEQ ID NO: 149708 - DNA, 51 bp, Artificial
  Synthetic oligonucleotide
tttagaaatgcgtaaggcacttggttcgatggaacgcagacgaaggactcc

SEQ ID NO: 149709 - DNA, 51 bp, Artificial
  Synthetic oligonucleotide
aaaaggacagtcagcctaggcgccatacggcctttagcggcaaatccaagg

SEQ ID NO: 149710 - DNA, 51 bp, Artificial
  Synthetic oligonucleotide
aaaacggcaagggacaacgtctctactatgaaaaggacatcgtcgccctac

SEQ ID NO: 149711 - DNA, 51 bp, Artificial
  Synthetic oligonucleotide
aggaaacgtagcgattgacggaggttcgggccaggtgggaccgcgcgtagc

SEQ ID NO: 149712 - DNA, 51 bp, Artificial
  Synthetic oligonucleotide
agcggctgaaggcacacatcaagcacgtctagccccgctcgctcaacacag

SEQ ID NO: 149713 - DNA, 51 bp, Artificial
  Synthetic oligonucleotide
aaacgtttcgaaatcaaattccggataagccagtgtcaatgtcttatttgc

SEQ ID NO: 149714 - DNA, 51 bp, Artificial
  Synthetic oligonucleotide
ttttcatgcgtgtcgatcctgcctcaagcaaggcaaaccccgcttgcatgc

SEQ ID NO: 149715 - DNA, 58 bp, Artificial
  Synthetic oligonucleotide
gaccgaagggagcattaaggagttgacaaactcatgacactaagaccctcttggattg

SEQ ID NO: 149716 - DNA, 51 bp, Artificial
  Synthetic oligonucleotide
tagcacccgctcgaattaacgcctcgaaatgcgattgacacgccccagcaa

SEQ ID NO: 149717 - DNA, 51 bp, Artificial
  Synthetic oligonucleotide
aaactgagccaagttgctaatcactcctgctaaatactaatggttgcaatc

SEQ ID NO: 149718 - DNA, 51 bp, Artificial
  Synthetic oligonucleotide
tttatctcctacggctcagtccagtccgtacgtcgcaaagcgggcgccctg

SEQ ID NO: 149719 - DNA, 51 bp, Artificial
  Synthetic oligonucleotide
tagctgatagcgctatgtcggacaaaatcgcgttttattcgaaagacgtgt

SEQ ID NO: 149720 - DNA, 51 bp, Artificial
  Synthetic oligonucleotide
ttttccccatttccctaatggacgagcatactttggatcgttgcttgtttg

SEQ ID NO: 149721 - DNA, 51 bp, Artificial
  Synthetic oligonucleotide
aaacttcggttacattgtaaaaggcacggcaaactctgtgcatccgcgcgc

SEQ ID NO: 149722 - DNA, 51 bp, Artificial
  Synthetic oligonucleotide
aaaggagggcttactttggcacaggttcaatactatggcactggacgtcgt

SEQ ID NO: 149723 - DNA, 51 bp, Artificial
  Synthetic oligonucleotide
agcttttgtttacgctcgggattaatacagggctgcgaatcagcgacatcc

SEQ ID NO: 149724 - DNA, 51 bp, Artificial
  Synthetic oligonucleotide
agctaggaatcatacttgcaatagttgtggtgggaattttagtgttacccc

SEQ ID NO: 149725 - DNA, 51 bp, Artificial
  Synthetic oligonucleotide
tcgtgtaatcgccttcgctcatgaccacacggagcgtgccacgttcgctct

SEQ ID NO: 149726 - DNA, 50 bp, Artificial
  Synthetic oligonucleotide
cttttggttattactaaacgaaaaaacggtgtcttaattggacatgttta

SEQ ID NO: 149727 - DNA, 51 bp, Artificial
  Synthetic oligonucleotide
tcgttgcagcaacaattcttgcaacggggatgctgttaccgggtgtccagg

SEQ ID NO: 149728 - DNA, 51 bp, Artificial
  Synthetic oligonucleotide
acgcacgttctttattttctatgcgcaaataataaatgccctgcatgcgta

SEQ ID NO: 149729 - DNA, 51 bp, Artificial
  Synthetic oligonucleotide
acgatgtgtatgagagaggacagtaagcattgggtgataacacgaataaat

SEQ ID NO: 149730 - DNA, 51 bp, Artificial
  Synthetic oligonucleotide
tctcgcgtgagttttcttggtgcccgcgctactcttcatacccctcgcgcc

SEQ ID NO: 149731 - DNA, 51 bp, Artificial
  Synthetic oligonucleotide
acccctgctttaccggatgcttggctgcacagcttagctcctcgatgccga

SEQ ID NO: 149732 - DNA, 51 bp, Artificial
  Synthetic oligonucleotide
tcatattcgagatatagtctatgcattcgcaagtatagatcctaaatcgtc

SEQ ID NO: 149733 - DNA, 51 bp, Artificial
  Synthetic oligonucleotide
agacgaggactcgcaacaggcatggcagttctcggatttgggagcggcgca

SEQ ID NO: 149734 - DNA, 51 bp, Artificial
  Synthetic oligonucleotide
agactctaacccgtatttggacaagttctatgctgatttcacacgctggag

SEQ ID NO: 149735 - DNA, 51 bp, Artificial
  Synthetic oligonucleotide
tgaccacgggaaactggagtgagtacgacacgctcggtcgcaggactgccg

SEQ ID NO: 149736 - DNA, 51 bp, Artificial
  Synthetic oligonucleotide
acagcatgaattgtcccctgtgccccggctagcgttatagccgcccctact

SEQ ID NO: 149737 - DNA, 54 bp, Artificial
  Synthetic oligonucleotide
gaaaaacctgttacatcatattccttacctaaatcaaaaacaacaggcgagtcg

SEQ ID NO: 149738 - DNA, 51 bp, Artificial
  Synthetic oligonucleotide
tgcgtcccttacaactgtcgccgacctataatagtgttcagccaattcaag

SEQ ID NO: 149739 - DNA, 51 bp, Artificial
  Synthetic oligonucleotide
aattgcgtcctgagaaacgctatcttgtgaaaaatttagtctatcccgtcc

SEQ ID NO: 149740 - DNA, 51 bp, Artificial
  Synthetic oligonucleotide
aatgcgggccacgctcggaaatgcagctccaaaccgctcattttgcgtgcc

SEQ ID NO: 149741 - DNA, 51 bp, Artificial
  Synthetic oligonucleotide
tcacacaacagttcatgaccggatcatatttgtacatcttaggcacaaacc

SEQ ID NO: 149742 - DNA, 51 bp, Artificial
  Synthetic oligonucleotide
agatcccgtaattacatataactgtctatacgatggtaggattccatttga

SEQ ID NO: 149743 - DNA, 51 bp, Artificial
  Synthetic oligonucleotide
aatgcaactgcttgtattaataccattcacacccctccatcgaactggcaa

SEQ ID NO: 149744 - DNA, 51 bp, Artificial
  Synthetic oligonucleotide
aatcggcgattgtaactggatgtcatagcggtttaggcggaactggagatg

SEQ ID NO: 149745 - DNA, 51 bp, Artificial
  Synthetic oligonucleotide
tcctattggcagtctacgtattcgtgcatttatggttgctagtggtatttt

SEQ ID NO: 149746 - DNA, 51 bp, Artificial
  Synthetic oligonucleotide
tcctccacaaggatgtcggttccacactcgttgcccatttgctacagagtt

SEQ ID NO: 149747 - DNA, 51 bp, Artificial
  Synthetic oligonucleotide
tcgaaagaagatgttgaaatgacgaaacggctagcagaagccggaaggata

SEQ ID NO: 149748 - DNA, 54 bp, Artificial
  Synthetic oligonucleotide
gtactgaaaaaacttatcaaaccttatcttttgagaaagatgtacaaacaacag

SEQ ID NO: 149749 - DNA, 52 bp, Artificial
  Synthetic oligonucleotide
gaaaaacgctgttcgtgacggagggaacaaattttacactcctatttgggcg

SEQ ID NO: 149750 - DNA, 51 bp, Artificial
  Synthetic oligonucleotide
tcgaacaggaacaatcatcgcttcaggtaacccttctagaattggtcagtt

SEQ ID NO: 149751 - DNA, 51 bp, Artificial
  Synthetic oligonucleotide
actcgcttttcccgggtgtcggtgccttccgctacaaccaacggaggcaag

SEQ ID NO: 149752 - DNA, 51 bp, Artificial
  Synthetic oligonucleotide
actcattccttgagggcacaacttcttgcaaactaggccataaacggagtg

SEQ ID NO: 149753 - DNA, 50 bp, Artificial
  Synthetic oligonucleotide
actaatcggtttaaatcaaaatgtcctaagcctaagggtacagtacccgt

SEQ ID NO: 149754 - DNA, 51 bp, Artificial
  Synthetic oligonucleotide
acgtttcccgttgctcctttagcgaacggacatccgcctaacccgccagct

SEQ ID NO: 149755 - DNA, 51 bp, Artificial
  Synthetic oligonucleotide
tcgccaaaagaaacggggtgcttgacgatcatattgtttacaagtccagca

SEQ ID NO: 149756 - DNA, 51 bp, Artificial
  Synthetic oligonucleotide
tcccatccgcaaggaaaattccaaccaacgcccgatggagccgtctatagc

SEQ ID NO: 149757 - DNA, 51 bp, Artificial
  Synthetic oligonucleotide
acgggagcgatagttgaataaaaggttatcgccttcccttgtttaagtaac

SEQ ID NO: 149758 - DNA, 51 bp, Artificial
  Synthetic oligonucleotide
agaacgggggagcagtccgccgtcagaaccgatttgaataaacttcccgcc

SEQ ID NO: 149759 - DNA, 51 bp, Artificial
  Synthetic oligonucleotide
acggctctcacctcctggaattccgcccatcccgcgtaaaccgcctccctg

SEQ ID NO: 149760 - DNA, 53 bp, Artificial
  Synthetic oligonucleotide
gaaaaacgttctattgcagaatcgactacccaaatggtggttcgggggccaaa

SEQ ID NO: 149761 - DNA, 51 bp, Artificial
  Synthetic oligonucleotide
tccaggacggtctgagtggccgtagttatatatcattgcggcaacttcttg

SEQ ID NO: 149762 - DNA, 51 bp, Artificial
  Synthetic oligonucleotide
tcgtatagtactcattaacttttcgtcacgttcctctaatcgcttattgat

SEQ ID NO: 149763 - DNA, 51 bp, Artificial
  Synthetic oligonucleotide
acgcgtacagccaaccactactgtaccaaacgaagcctgcgttggaaaacg

SEQ ID NO: 149764 - DNA, 51 bp, Artificial
  Synthetic oligonucleotide
aagaatatgttaattgaattagctttgtatgagtttatgacaaagtataat

SEQ ID NO: 149765 - DNA, 51 bp, Artificial
  Synthetic oligonucleotide
aactactcgcaaccgttgtgcaagcgaaggcgggcttaccgctcccctctt

SEQ ID NO: 149766 - DNA, 51 bp, Artificial
  Synthetic oligonucleotide
agcccaagtgtaaccagggaataagctaacaatataccgtctagtgccact

SEQ ID NO: 149767 - DNA, 51 bp, Artificial
  Synthetic oligonucleotide
tatgtaagatgctatatttatgttaacaatttgacacgtttaacgtgccga

SEQ ID NO: 149768 - DNA, 51 bp, Artificial
  Synthetic oligonucleotide
ttatgggactggtgcaagcccccttccgcgcttcaatgcctgtgtggtccc

SEQ ID NO: 149769 - DNA, 51 bp, Artificial
  Synthetic oligonucleotide
ttatgggcgttaactttccacctgatattaattgactcatacgtgttgtgg

SEQ ID NO: 149770 - DNA, 51 bp, Artificial
  Synthetic oligonucleotide
ttattcgcgccactagcttggtgtcgcgtgagttttagcagagcccgcgcc

SEQ ID NO: 149771 - DNA, 57 bp, Artificial
  Synthetic oligonucleotide
gaaaagttggttagtatcaggatgatatttagggaagaaggtagcacgaaaatgcca

SEQ ID NO: 149772 - DNA, 51 bp, Artificial
  Synthetic oligonucleotide
tatggcgagacagctgtagtacatacttgggttgagagctatgacgggcta

SEQ ID NO: 149773 - DNA, 51 bp, Artificial
  Synthetic oligonucleotide
tatggaggtattataatgccagtagttcaaatcgaaggcgtatttatgggc

SEQ ID NO: 149774 - DNA, 51 bp, Artificial
  Synthetic oligonucleotide
ttcagtataatccgtttcgaaaattcggtcaatagagtgaatcgctgatgg

SEQ ID NO: 149775 - DNA, 51 bp, Artificial
  Synthetic oligonucleotide
agccgggtcattttcggccgtttatctcggaatcgccggatatgccgcgaa

SEQ ID NO: 149776 - DNA, 51 bp, Artificial
  Synthetic oligonucleotide
ttcatatttcgaggggagtattagagaggcggcaattaacgctatcagcaa

SEQ ID NO: 149777 - DNA, 51 bp, Artificial
  Synthetic oligonucleotide
aacgggcatgaggcaccgtactgctgaacgtgtagcgaagcagactggctg

SEQ ID NO: 149778 - DNA, 51 bp, Artificial
  Synthetic oligonucleotide
ttcccgcgcatcattatgacacatcgggaattgctaaatcagatagtatac

SEQ ID NO: 149779 - DNA, 51 bp, Artificial
  Synthetic oligonucleotide
aacgcgcttttaatgcgggccacgctcggaaatgcagctccaaaccgctca

SEQ ID NO: 149780 - DNA, 51 bp, Artificial
  Synthetic oligonucleotide
aaccgtcgctcccatttcgtagcttggggcagtaaatgaaccgagcgcgct

SEQ ID NO: 149781 - DNA, 51 bp, Artificial
  Synthetic oligonucleotide
aaccatctatagaaaatacaggtccataatttactttacccgtacttggtg

SEQ ID NO: 149782 - DNA, 57 bp, Artificial
  Synthetic oligonucleotide
gaaagggatattagcgaaagctgaaagtggaattgacgggaataatgcaaaagctta

SEQ ID NO: 149783 - DNA, 51 bp, Artificial
  Synthetic oligonucleotide
aaccagtcgtagggtgcccgttcgtacgcctaacccagaggccgcctcgtc

SEQ ID NO: 149784 - DNA, 51 bp, Artificial
  Synthetic oligonucleotide
ttgacgtagaaactctaacatacgatttaactcagaacggtctcggttgac

SEQ ID NO: 149785 - DNA, 51 bp, Artificial
  Synthetic oligonucleotide
aatccttgtgttagcctgtgcgggctagccagaccgagtagcggaagtttt

SEQ ID NO: 149786 - DNA, 51 bp, Artificial
  Synthetic oligonucleotide
aatccgacagtcggcttgattccaacaagcgagttttgacttgcgggactc

SEQ ID NO: 149787 - DNA, 51 bp, Artificial
  Synthetic oligonucleotide
aatactttgaccaggattgacagttccaatcggtatgccaatttcgggatt

SEQ ID NO: 149788 - DNA, 51 bp, Artificial
  Synthetic oligonucleotide
tcaacggttaatcgatacgcaggctttatattatagggacttagagaagcg

SEQ ID NO: 149789 - DNA, 51 bp, Artificial
  Synthetic oligonucleotide
aagttggctaccgaactacaaacgaatgttcttggtcgtattccgctgcaa

SEQ ID NO: 149790 - DNA, 51 bp, Artificial
  Synthetic oligonucleotide
tgtataggagcggagacgcggtgccacaagccgccagtttaaataggcccc

SEQ ID NO: 149791 - DNA, 51 bp, Artificial
  Synthetic oligonucleotide
tgtgaatagcaactgtctgtccctgttacaaggagaaaatcctaagtggcg

SEQ ID NO: 149792 - DNA, 51 bp, Artificial
  Synthetic oligonucleotide
tgtgacacgcgcctccttttctagctgtgccacccgctgtttcgccatgtc

SEQ ID NO: 149793 - DNA, 56 bp, Artificial
  Synthetic oligonucleotide
cgtcgtttgttaagtccctatgttttacagcacttaatgcttgataaccgtgagct

SEQ ID NO: 149794 - DNA, 51 bp, Artificial
  Synthetic oligonucleotide
aaggagggtttcctttgactgaagtatcgactataaactggtttgatgtga

SEQ ID NO: 149795 - DNA, 51 bp, Artificial
  Synthetic oligonucleotide
tgtgtctaacccgcgtttaaaatcatagtactcgttaaataagttcgtcgc

SEQ ID NO: 149796 - DNA, 51 bp, Artificial
  Synthetic oligonucleotide
tgttccgcctccgagtgtcataccgaacggtgcagcaacgactggacggtc

SEQ ID NO: 149797 - DNA, 51 bp, Artificial
  Synthetic oligonucleotide
aagctacaggccgtgtgcgcttcatgtggctctcctgcgagtcgtacgcag

SEQ ID NO: 149798 - DNA, 51 bp, Artificial
  Synthetic oligonucleotide
ttaaatggttcgaagaacaattccgtcttagtaagcaacgccaattcggta

SEQ ID NO: 149799 - DNA, 51 bp, Artificial
  Synthetic oligonucleotide
aagcccgcctaggtacaagggatcgttagagtgaacacttgttataccatg

SEQ ID NO: 149800 - DNA, 51 bp, Artificial
  Synthetic oligonucleotide
ttacaccgcttgtactcgctactacacaagcagaattacgacaagcggtaa

SEQ ID NO: 149801 - DNA, 51 bp, Artificial
  Synthetic oligonucleotide
aagcagggatcccgcagccgaaacaaggggcagtaacgaatgcccacggtg

SEQ ID NO: 149802 - DNA, 51 bp, Artificial
  Synthetic oligonucleotide
ttagcggaatcgggtggcgccgattcaataacgctagaccgaaaggttaac

SEQ ID NO: 149803 - DNA, 51 bp, Artificial
  Synthetic oligonucleotide
ttaggaaagcgattaggcgcttataattgctagaacaagccgattagcgta

SEQ ID NO: 149804 - DNA, 58 bp, Artificial
  Synthetic oligonucleotide
gaaatcgagtaagcaacaaaaaggctattctgctttatactcattccaccaagttgta

SEQ ID NO: 149805 - DNA, 51 bp, Artificial
  Synthetic oligonucleotide
aagagcgagcgtaatcgcaattgccccgcttcctgtacccacgtccactgc

SEQ ID NO: 149806 - DNA, 51 bp, Artificial
  Synthetic oligonucleotide
atgcccggggctgattgacggacacgtgcatatcgaatcatcaatggtgcc

SEQ ID NO: 149807 - DNA, 51 bp, Artificial
  Synthetic oligonucleotide
gtggagtagtagtggacgatgtggatattgtggcgagttcacaggtagacg

SEQ ID NO: 149808 - DNA, 51 bp, Artificial
  Synthetic oligonucleotide
gcaattgaacatggcccaagattcatggatatactgttaggtacatttcgt

SEQ ID NO: 149809 - DNA, 51 bp, Artificial
  Synthetic oligonucleotide
cgaagagaaatgaatttaacccaagatcaactagccgaaatgttggaagta

SEQ ID NO: 149810 - DNA, 51 bp, Artificial
  Synthetic oligonucleotide
atggcagcaccgtttaacgggtggtacatgggtacggagattggagcccgc

SEQ ID NO: 149811 - DNA, 51 bp, Artificial
  Synthetic oligonucleotide
gcatccgagttggcggggcaattgaagttggaaacgcaggaaaaggagtgc

SEQ ID NO: 149812 - DNA, 51 bp, Artificial
  Synthetic oligonucleotide
cctgctctcgacttgccaggcggatctcccaaggttcgagcattcgttgga

SEQ ID NO: 149813 - DNA, 51 bp, Artificial
  Synthetic oligonucleotide
gtgattgcattgaggacttcgttaatgatggactaaagttaccaacgacca

SEQ ID NO: 149814 - DNA, 51 bp, Artificial
  Synthetic oligonucleotide
atggtcaaacgaatcgcctttcaaataggttgccagttcttcattatacag

SEQ ID NO: 149815 - DNA, 54 bp, Artificial
  Synthetic oligonucleotide
gaaattccccaacgaaaccgattctttttacgtgggtgcgtgtgaatatggatg

SEQ ID NO: 149816 - DNA, 51 bp, Artificial
  Synthetic oligonucleotide
cctctgtctataatcaaacacgcttcttgcgtgtagttctcatgtttgatt

SEQ ID NO: 149817 - DNA, 51 bp, Artificial
  Synthetic oligonucleotide
atgtttccagtattgcccgtatcctctgataataggattaagcactcggat

SEQ ID NO: 149818 - DNA, 51 bp, Artificial
  Synthetic oligonucleotide
attacccggcatattcacaagcgtgcgggctgaattcgtcccttggccgta

SEQ ID NO: 149819 - DNA, 51 bp, Artificial
  Synthetic oligonucleotide
gccaaaggcgagttgtcgcttgtccgcccggacggaacggtgaaaatgttt

SEQ ID NO: 149820 - DNA, 51 bp, Artificial
  Synthetic oligonucleotide
cctctcattcagcgattatggcccgttcgttagagattcctgcagtagtcg

SEQ ID NO: 149821 - DNA, 51 bp, Artificial
  Synthetic oligonucleotide
gccaattcgtgcgcagtttgcagcgaaactattaaaaatgtgataactcaa

SEQ ID NO: 149822 - DNA, 51 bp, Artificial
  Synthetic oligonucleotide
cctaccatgtgaatactaatagagaccaggggaataggggttcatacctga

SEQ ID NO: 149823 - DNA, 51 bp, Artificial
  Synthetic oligonucleotide
cctaattatggggcgaattttaacgctaggtgagattatgcttcgtttatc

SEQ ID NO: 149824 - DNA, 49 bp, Artificial
  Synthetic oligonucleotide
cctaaaacttttggtacttatttttgtaggtgctaaaagtcttaccacc

SEQ ID NO: 149825 - DNA, 51 bp, Artificial
  Synthetic oligonucleotide
attcgcgcttacagaggccagacggtccgcattatcagcccttgcccggct

SEQ ID NO: 149826 - DNA, 48 bp, Artificial
  Synthetic oligonucleotide
gaaattctcccttgaccccttccaaaaaacctccccaacccctccaat

SEQ ID NO: 149827 - DNA, 51 bp, Artificial
  Synthetic oligonucleotide
attcgtactcattgtataacagaaacatttctaggcaagccaatgccgttc

SEQ ID NO: 149828 - DNA, 51 bp, Artificial
  Synthetic oligonucleotide
attctgctcgtttcacttcaagtcgaatcatcttttgtatagcaacctcag

SEQ ID NO: 149829 - DNA, 51 bp, Artificial
  Synthetic oligonucleotide
gtcgccattaatatttcggctaaacaatttcagtcggaagaacttgtcccg

SEQ ID NO: 149830 - DNA, 51 bp, Artificial
  Synthetic oligonucleotide
gtccttctttactccggcagatctatgggtcattatacgactctttgaccg

SEQ ID NO: 149831 - DNA, 51 bp, Artificial
  Synthetic oligonucleotide
gtttcgagacgctacgaaagcagtaaggacctatcgggtaccaaatcctaa

SEQ ID NO: 149832 - DNA, 51 bp, Artificial
  Synthetic oligonucleotide
atagcctttgcccatatgtcaaacgcggcaggtgcccttcagccagcaagg

SEQ ID NO: 149833 - DNA, 51 bp, Artificial
  Synthetic oligonucleotide
cgcgcaacttctcaaagtcgaccggctctaacagctcgcccggacgaacag

SEQ ID NO: 149834 - DNA, 51 bp, Artificial
  Synthetic oligonucleotide
atatagtggattttctcggcgtcaaaagccccttcaattaattatcgaagg

SEQ ID NO: 149835 - DNA, 51 bp, Artificial
  Synthetic oligonucleotide
atatccgccccgaaatttcggtttaacctcccgatacgtaatcgtatcgac

SEQ ID NO: 149836 - DNA, 51 bp, Artificial
  Synthetic oligonucleotide
gttgtcatgtggtagagaaatcatcattgttaccggtacagggaaattccc

SEQ ID NO: 149837 - DNA, 57 bp, Artificial
  Synthetic oligonucleotide
cgtcagggagttggttccatgagagttttacgtcgtcagtagttgcgacaacattta

SEQ ID NO: 149838 - DNA, 51 bp, Artificial
  Synthetic oligonucleotide
gatcaccttgctttaactcgtcacatgtattctccaatgctgttagcaatt

SEQ ID NO: 149839 - DNA, 51 bp, Artificial
  Synthetic oligonucleotide
atcatgcgtggcaggcgtgtaatcgacattactggtgtaaagcaagtagag

SEQ ID NO: 149840 - DNA, 51 bp, Artificial
  Synthetic oligonucleotide
gttcgcactacggcctaggtaagaacccggcttatccgcttgtaaataaag

SEQ ID NO: 149841 - DNA, 51 bp, Artificial
  Synthetic oligonucleotide
atcccgaggtatcaggtgttctgcctatttgtatcgggagagcaacgaaga

SEQ ID NO: 149842 - DNA, 51 bp, Artificial
  Synthetic oligonucleotide
gatcattttgccgattatgtttcaatcagaaagttgtgttcgatttcggac

SEQ ID NO: 149843 - DNA, 51 bp, Artificial
  Synthetic oligonucleotide
cgcagaatggttatacgtatgcggataataatccagttatgggcgttgacc

SEQ ID NO: 149844 - DNA, 51 bp, Artificial
  Synthetic oligonucleotide
atcgccgccacgcataagtggtgaccacgcctcgagttggatgtcgtgttg

SEQ ID NO: 149845 - DNA, 51 bp, Artificial
  Synthetic oligonucleotide
atcggacctaacttattgttgcgtgtccctaatcaccctaactatacaaag

SEQ ID NO: 149846 - DNA, 51 bp, Artificial
  Synthetic oligonucleotide
gatcgtttaaacggatgctgcggtttagatggcttagacggtatgaacaga

SEQ ID NO: 149847 - DNA, 51 bp, Artificial
  Synthetic oligonucleotide
cgattgtgcggccgcttggtggaataaaaccgttcgtgtggcgaggcgtct

SEQ ID NO: 149848 - DNA, 59 bp, Artificial
  Synthetic oligonucleotide
cgtcaaggtttaaaaaggcgcgacacattgagaacatagtcatagaaggcggcgagaca

SEQ ID NO: 149849 - DNA, 51 bp, Artificial
  Synthetic oligonucleotide
cgattgatctacaggggtgtaatataggacaagtcgccgatgacattaacg

SEQ ID NO: 149850 - DNA, 51 bp, Artificial
  Synthetic oligonucleotide
atcggagtccagctggagcgagttcttcggatggctgaaagaccggggact

SEQ ID NO: 149851 - DNA, 51 bp, Artificial
  Synthetic oligonucleotide
gatgcgttagcgtcaaaatacctatagggttacgtcaattgacacaatttc

SEQ ID NO: 149852 - DNA, 51 bp, Artificial
  Synthetic oligonucleotide
cgatatgcatcgctgcgattccttggcgcgttggcgtccgtgtccctacga

SEQ ID NO: 149853 - DNA, 51 bp, Artificial
  Synthetic oligonucleotide
gattgatgtattgaataaacgtttattcaagaatgaggcgacagttgaacg

SEQ ID NO: 149854 - DNA, 51 bp, Artificial
  Synthetic oligonucleotide
gtgtagagtaacccccttagaactagctgaactggctagagagtctaagtt

SEQ ID NO: 149855 - DNA, 51 bp, Artificial
  Synthetic oligonucleotide
cgagtacagccatgttaccacgtgagaatgaattgagattacttgatgata

SEQ ID NO: 149856 - DNA, 51 bp, Artificial
  Synthetic oligonucleotide
gtggatcatactcgaaattatgtccttcccatctacctggaacaaatctcc

SEQ ID NO: 149857 - DNA, 51 bp, Artificial
  Synthetic oligonucleotide
cccgcagttttggacggggatagtttttgcggctaaaccagtggcgtaagc

SEQ ID NO: 149858 - DNA, 51 bp, Artificial
  Synthetic oligonucleotide
gctcccgaagcactcagacgccacacaggcccttacacaagccgttcgatc

SEQ ID NO: 149859 - DNA, 52 bp, Artificial
  Synthetic oligonucleotide
gtacttaggaatctcccactttaaacagtccgtaaggaagttaagtggtgag

SEQ ID NO: 149860 - DNA, 55 bp, Artificial
  Synthetic oligonucleotide
cgtattacatacggagagctccctcctggtagcttactcccttcagaacgaaaat

SEQ ID NO: 149861 - DNA, 51 bp, Artificial
  Synthetic oligonucleotide
cccctacccagcctacgatagcaaaagccgccgtttctagacccgggcgcg

SEQ ID NO: 149862 - DNA, 51 bp, Artificial
  Synthetic oligonucleotide
ccccgtgattcttgcggctactccaggaaccttcagctatgcagggcgcga

SEQ ID NO: 149863 - DNA, 51 bp, Artificial
  Synthetic oligonucleotide
gcttaagccattcgtgaggtgaatatccatctaccctgtacatataactat

SEQ ID NO: 149864 - DNA, 51 bp, Artificial
  Synthetic oligonucleotide
cagaccctagttccgacagtatacttagcgaaggaaaggacacatgggaaa

SEQ ID NO: 149865 - DNA, 51 bp, Artificial
  Synthetic oligonucleotide
gcttcatcacatcactcgctgttaagccgctgtactgggtatcaggtctta

SEQ ID NO: 149866 - DNA, 51 bp, Artificial
  Synthetic oligonucleotide
ccccaaaatgggataagggactagggaagcggcttactaggtagccttgac

SEQ ID NO: 149867 - DNA, 51 bp, Artificial
  Synthetic oligonucleotide
gggcgatcacagacggcgttgaggtcttcggatactgcccgtggtctgcaa

SEQ ID NO: 149868 - DNA, 51 bp, Artificial
  Synthetic oligonucleotide
ccattgcctgtaaatcgagacctgcctgcgcccaaacggttgcccacatgg

SEQ ID NO: 149869 - DNA, 51 bp, Artificial
  Synthetic oligonucleotide
ggaagcgggagttacggtcgttgtcgttcatgatgcgtctagcattgatga

SEQ ID NO: 149870 - DNA, 51 bp, Artificial
  Synthetic oligonucleotide
ccatcttacgtacctttcctctaaaacatgcaacgtctttcccatttcgcg

SEQ ID NO: 149871 - DNA, 55 bp, Artificial
  Synthetic oligonucleotide
cgtatctccagtaggccccgtatctccagtaggtcccgtatctccagtaggtccc

SEQ ID NO: 149872 - DNA, 51 bp, Artificial
  Synthetic oligonucleotide
gggacagttacgtctgggatgtggaacacgacggatgcttcatggtccatc

SEQ ID NO: 149873 - DNA, 51 bp, Artificial
  Synthetic oligonucleotide
ggaccgacaccccgctattttctaccatggaaagcgattggcgaattgtat

SEQ ID NO: 149874 - DNA, 51 bp, Artificial
  Synthetic oligonucleotide
ggcttaaaggtaagcaattgatagtgtattctggtctgtttaaagaatcca

SEQ ID NO: 149875 - DNA, 51 bp, Artificial
  Synthetic oligonucleotide
catagaaagcagacctatcatgggtctgctttttttatgtcaatatggcag

SEQ ID NO: 149876 - DNA, 51 bp, Artificial
  Synthetic oligonucleotide
ggagcgcttggaacagctagtgcggaaatgcttgttcgtgctggcgttgga

SEQ ID NO: 149877 - DNA, 51 bp, Artificial
  Synthetic oligonucleotide
catcacgttgaagtaatttagcttgagcccttcctactctcgtcaatggtg

SEQ ID NO: 149878 - DNA, 51 bp, Artificial
  Synthetic oligonucleotide
catcctgctgtggtgatgctccatgcgggtgttctgctcaagattggagca

SEQ ID NO: 149879 - DNA, 51 bp, Artificial
  Synthetic oligonucleotide
catcctggaattcatgagcgtattcttgggccttttcaaaacattcttgtc

SEQ ID NO: 149880 - DNA, 51 bp, Artificial
  Synthetic oligonucleotide
ggatactatagtacacttctagtccttttcgattccctcttatcactttcc

SEQ ID NO: 149881 - DNA, 51 bp, Artificial
  Synthetic oligonucleotide
ggatcccagactgccattttatctaacgggatacctaaatcgtacgctgta

SEQ ID NO: 149882 - DNA, 58 bp, Artificial
  Synthetic oligonucleotide
cgtatacgaccgttgcggaacaccctggtccactagcgccagcgatgacaggttgccc

SEQ ID NO: 149883 - DNA, 51 bp, Artificial
  Synthetic oligonucleotide
ccaccccaggcgttacttaagcagttagctcggttcaggcgaccccatggc

SEQ ID NO: 149884 - DNA, 51 bp, Artificial
  Synthetic oligonucleotide
ccgtcgtatggaccttggctgcgtcgacccttcaatgtgccctcggcatct

SEQ ID NO: 149885 - DNA, 51 bp, Artificial
  Synthetic oligonucleotide
gcctcatgccatgtgacacgcgcctccttttctagctgtgccacccgctgt

SEQ ID NO: 149886 - DNA, 51 bp, Artificial
  Synthetic oligonucleotide
ccgtccctggcatgtacggtccctctgctgacgaacaaacctcatgagcga

SEQ ID NO: 149887 - DNA, 51 bp, Artificial
  Synthetic oligonucleotide
gtcacactagacccttacaaaaaagcgcgtaaatcatagtattcatgggag

SEQ ID NO: 149888 - DNA, 51 bp, Artificial
  Synthetic oligonucleotide
caaatgtgatgggcacataccgactggcggacgcggtgttacagggaaaag

SEQ ID NO: 149889 - DNA, 51 bp, Artificial
  Synthetic oligonucleotide
gtatggtgtgagcgcactgtatttagctgcacatgcaatcttaggatctgc

SEQ ID NO: 149890 - DNA, 51 bp, Artificial
  Synthetic oligonucleotide
ccggagggaattcagcgggcagctatacagaccctaaaggccccaacgcta

SEQ ID NO: 149891 - DNA, 51 bp, Artificial
  Synthetic oligonucleotide
caagacatgtacgaacggatgacagaagtgaataaccgcgtttgcgaattg

SEQ ID NO: 149892 - DNA, 51 bp, Artificial
  Synthetic oligonucleotide
gcgcaggctagaaaacacgcatccttgtccaccccatgttgtatagccgcc

SEQ ID NO: 149893 - DNA, 58 bp, Artificial
  Synthetic oligonucleotide
gaagcatagcatgatttaacttaaatctttaagtagattattttcccatggaacaaca

SEQ ID NO: 149894 - DNA, 51 bp, Artificial
  Synthetic oligonucleotide
gtaatgaatatcgccgccacagcagatcctataatcgctgcatagaacggg

SEQ ID NO: 149895 - DNA, 51 bp, Artificial
  Synthetic oligonucleotide
gcgctcatctagtcctaagctcacaaactttaattgtggagcacaagcccc

SEQ ID NO: 149896 - DNA, 51 bp, Artificial
  Synthetic oligonucleotide
caatccaaatgcgataatcaccatgtggggtcaatgcgtttcgctcatagt

SEQ ID NO: 149897 - DNA, 51 bp, Artificial
  Synthetic oligonucleotide
ccgcatgagtgtatgcaacgaggaggctcattggctgcccgcggaaagaga

SEQ ID NO: 149898 - DNA, 51 bp, Artificial
  Synthetic oligonucleotide
gtaaccttttcaacgatcggccatttgctaacgattgcaacgcctccatct

SEQ ID NO: 149899 - DNA, 51 bp, Artificial
  Synthetic oligonucleotide
ggtgtcaacaagatgtggtagtggttttaacctcttcatattgagagagtt

SEQ ID NO: 149900 - DNA, 51 bp, Artificial
  Synthetic oligonucleotide
cacatcgtcgaccagccatatcacccgtccggccaacttatggtccggccc

SEQ ID NO: 149901 - DNA, 51 bp, Artificial
  Synthetic oligonucleotide
ccgatgcgcttggccgtccacttcgctaaatgcacaggtagccccgtttgc

SEQ ID NO: 149902 - DNA, 51 bp, Artificial
  Synthetic oligonucleotide
ccgagtaacccaccattattgcgagccttatacaccaagttttctcctatt

SEQ ID NO: 149903 - DNA, 51 bp, Artificial
  Synthetic oligonucleotide
cacctaaacatctgaactaaacaccattcaaacaactgaacaattctatgt

SEQ ID NO: 149904 - DNA, 56 bp, Artificial
  Synthetic oligonucleotide
cgtaatttgttgcaaccatgtctgcgttaaagacacctaaaattcgatcacgttct

SEQ ID NO: 149905 - DNA, 51 bp, Artificial
  Synthetic oligonucleotide
ggtcgcttcatccatatgtaccgtggcatacaacatattttccgcagtgta

SEQ ID NO: 149906 - DNA, 51 bp, Artificial
  Synthetic oligonucleotide
gggttttgaccaacacatcttctgttatgggagccggatctttttccacga

SEQ ID NO: 149907 - DNA, 51 bp, Artificial
  Synthetic oligonucleotide
gggtaaaacgtaactgctcgtgggacttgatcccgtcaactaaacagtttg

SEQ ID NO: 149908 - DNA, 51 bp, Artificial
  Synthetic oligonucleotide
cagaaaaaaccgacctgttgagttacgcgtacgacgcgtctttcgggcatt

SEQ ID NO: 149909 - DNA, 51 bp, Artificial
  Synthetic oligonucleotide
cccgcgcaaggtagacactgcgaggttctttcgagcagatgtcgcccctgt

SEQ ID NO: 149910 - DNA, 51 bp, Artificial
  Synthetic oligonucleotide
cgtgaaagctgcgattgttatggtgttgttgcagtgtgagtatggggaagc

SEQ ID NO: 149911 - DNA, 51 bp, Artificial
  Synthetic oligonucleotide
cgtactaactgcctataaagagccgagtagtgtaggatgataaacgatcca

SEQ ID NO: 149912 - DNA, 51 bp, Artificial
  Synthetic oligonucleotide
ctcggttggaagcggaaatagatcactggcatcgagcggaaagatagtacc

SEQ ID NO: 149913 - DNA, 51 bp, Artificial
  Synthetic oligonucleotide
ctgtcacactccaatggatccaggatgaaccgcgaagacccatcgatttct

SEQ ID NO: 149914 - DNA, 51 bp, Artificial
  Synthetic oligonucleotide
taaaggatatgcgccactacatcgaacgaagacaccgactggtatacgaat

SEQ ID NO: 149915 - DNA, 60 bp, Artificial
  Synthetic oligonucleotide
gaaggcacttccccatttgaaactagctttacaggaatctattgcacttggccatgatta

SEQ ID NO: 149916 - DNA, 51 bp, Artificial
  Synthetic oligonucleotide
cgcttgtgacaccgcagttgatttccgtgcaagacttcgctttccgcggga

SEQ ID NO: 149917 - DNA, 49 bp, Artificial
  Synthetic oligonucleotide
cggaggttaaataccacacaaacgtgtaatttaatccgtaacccgaagg

SEQ ID NO: 149918 - DNA, 51 bp, Artificial
  Synthetic oligonucleotide
agtcgccttatgtgtatggatgaaccaaaatgtcgctacgacgtctttaac

SEQ ID NO: 149919 - DNA, 51 bp, Artificial
  Synthetic oligonucleotide
cgctttccaagggtgtcgatgagccccctcatcgcttacgctcctgcatgg

SEQ ID NO: 149920 - DNA, 51 bp, Artificial
  Synthetic oligonucleotide
agtggttacagcgatactcccgtaaccgaatacggatcccaaggcaatcgt

SEQ ID NO: 149921 - DNA, 51 bp, Artificial
  Synthetic oligonucleotide
gaacgtgtctggcaacttgttgaacgtgctgaagcgtggctgcgcacgcac

SEQ ID NO: 149922 - DNA, 51 bp, Artificial
  Synthetic oligonucleotide
taaagtagctgatgagcttgaacgggctgaattttactataagatgtcaga

SEQ ID NO: 149923 - DNA, 51 bp, Artificial
  Synthetic oligonucleotide
agttggtgccgaattcctctggttcgtaggagccgacacctgcgcatggtg

SEQ ID NO: 149924 - DNA, 51 bp, Artificial
  Synthetic oligonucleotide
ctggatcggtcatgggaatgcatgccgatcgccaatgtgactccgccatca

SEQ ID NO: 149925 - DNA, 51 bp, Artificial
  Synthetic oligonucleotide
taacacttccactcgttctacaacatccgctggcatcataaatctttggtc

SEQ ID NO: 149926 - DNA, 56 bp, Artificial
  Synthetic oligonucleotide
cgtaatattcaacgttctattaagggttatattagaaagctagaaatgacgtatga

SEQ ID NO: 149927 - DNA, 51 bp, Artificial
  Synthetic oligonucleotide
ctaaacctcgtgttataacagtggataagatctcttcctaccctgcggcat

SEQ ID NO: 149928 - DNA, 51 bp, Artificial
  Synthetic oligonucleotide
cgtttcaccgcctcaggagcgagttgcttagatacggctccgcctgcgcta

SEQ ID NO: 149929 - DNA, 51 bp, Artificial
  Synthetic oligonucleotide
aggtacagtcctacaaggatagagctcaagagtcagttgatctattaaaac

SEQ ID NO: 149930 - DNA, 51 bp, Artificial
  Synthetic oligonucleotide
agtacgacacgctcggtcgcaggactgccgctatccaagacagtgagctgg

SEQ ID NO: 149931 - DNA, 50 bp, Artificial
  Synthetic oligonucleotide
cggtatcccccggctggggaacgtccggtattgaaagtagcgtttttcac

SEQ ID NO: 149932 - DNA, 51 bp, Artificial
  Synthetic oligonucleotide
cggcgctcatgcttgctactaagctttcacccgcgttaccgccagacggct

SEQ ID NO: 149933 - DNA, 51 bp, Artificial
  Synthetic oligonucleotide
cggatcgtggagatccgaactcatgaatcgtggccgaaagtaagagacgaa

SEQ ID NO: 149934 - DNA, 51 bp, Artificial
  Synthetic oligonucleotide
cggttcctctggcgaatccagtttctgtcttccgattcacgtctaccactt

SEQ ID NO: 149935 - DNA, 51 bp, Artificial
  Synthetic oligonucleotide
gaatacatagtgaggaatttcgctcccaatccctgttggcgtcgtgaaacc

SEQ ID NO: 149936 - DNA, 51 bp, Artificial
  Synthetic oligonucleotide
cgctcgcgtcattacgcttggtgcttacaaccgtaacgaaagccgcggggc

SEQ ID NO: 149937 - DNA, 55 bp, Artificial
  Synthetic oligonucleotide
gaaggtctttccgttatacgcttagagtgttcagattcccccataatcgtttgta

SEQ ID NO: 149938 - DNA, 51 bp, Artificial
  Synthetic oligonucleotide
ctgtttaagtagtgcacacacacccttaaaccgttccccctagttacagta

SEQ ID NO: 149939 - DNA, 51 bp, Artificial
  Synthetic oligonucleotide
ctgatctaaaatggggttcacttctacaaattcagcagatgtcaccatgtc

SEQ ID NO: 149940 - DNA, 51 bp, Artificial
  Synthetic oligonucleotide
gaacacgtcaaaccaattgtaatcaagaacgtcagttatgcggaagtcata

SEQ ID NO: 149941 - DNA, 51 bp, Artificial
  Synthetic oligonucleotide
gagctaacgatatgggcttccaccgctgcttgaccaatcacaaccccacct

SEQ ID NO: 149942 - DNA, 51 bp, Artificial
  Synthetic oligonucleotide
taccttgctggcgctacttctagggaggttcccatgacgagcagaaggtcc

SEQ ID NO: 149943 - DNA, 51 bp, Artificial
  Synthetic oligonucleotide
gactgattcatgtccgacacattaaccgcttcatccgtacttttatgcacc

SEQ ID NO: 149944 - DNA, 51 bp, Artificial
  Synthetic oligonucleotide
tactcaacaacctggtcaaacgcaattaataatcgtaaggatttcaatcta

SEQ ID NO: 149945 - DNA, 51 bp, Artificial
  Synthetic oligonucleotide
tacccagcactaacggcggctttattagtagtggcagattacttctattac

SEQ ID NO: 149946 - DNA, 51 bp, Artificial
  Synthetic oligonucleotide
ctaactcatcgatatgaaaatgcagtgtagaaacgagtaaatgtggttcgc

SEQ ID NO: 149947 - DNA, 51 bp, Artificial
  Synthetic oligonucleotide
ctgcgcgaatattgtggagccgttggaaccataaatctttgttgcgctgca

SEQ ID NO: 149948 - DNA, 60 bp, Artificial
  Synthetic oligonucleotide
cgtaagtttaatatgtgcctgttgtgcttttcaaccaggatatgatgatgaagaactcgg

SEQ ID NO: 149949 - DNA, 51 bp, Artificial
  Synthetic oligonucleotide
ctagaacagaggtagacgtaacggcacctgcagatataaaagggttagttg

SEQ ID NO: 149950 - DNA, 51 bp, Artificial
  Synthetic oligonucleotide
gaacgcaagtacaatcttaaagagtgcaaatacaattagttctgaaattag

SEQ ID NO: 149951 - DNA, 51 bp, Artificial
  Synthetic oligonucleotide
atacaatcgtgtcaatgcctcggcgtctcagctgtaaatctaaatccgtgc

SEQ ID NO: 149952 - DNA, 51 bp, Artificial
  Synthetic oligonucleotide
gagcgaggggcaaatgtagagatcgcaaatgaagcgggggaaacgccgcta

SEQ ID NO: 149953 - DNA, 50 bp, Artificial
  Synthetic oligonucleotide
aagtatcgatacatcagaggacgctctgattagtcgcatgttataggtta

SEQ ID NO: 149954 - DNA, 50 bp, Artificial
  Synthetic oligonucleotide
cccgggtttcggccggataaggggcttgaaatcaaccgcgaaggctttct

SEQ ID NO: 149955 - DNA, 50 bp, Artificial
  Synthetic oligonucleotide
cccgttccgccggaactgaaccggcccgtcttcgctccattcggattgaa

SEQ ID NO: 149956 - DNA, 50 bp, Artificial
  Synthetic oligonucleotide
aaaaggccaccaagcgtagcgcggtagcccttcaccccaacatttgacgg

SEQ ID NO: 149957 - DNA, 50 bp, Artificial
  Synthetic oligonucleotide
ccctcaccaatcgggattttacgggcagttgagcaaatagcgggataaag

SEQ ID NO: 149958 - DNA, 50 bp, Artificial
  Synthetic oligonucleotide
gctacgcttgaaatcagttcgttaaagggcgatatacactatttaaaggc

SEQ ID NO: 149959 - DNA, 57 bp, Artificial
  Synthetic oligonucleotide
gagatcagtgaacgagtaaaacgaaagccacgagccaattcggttgtactttcagaa

SEQ ID NO: 149960 - DNA, 50 bp, Artificial
  Synthetic oligonucleotide
cccgggtgtcggtgccttccgctacaaccaacggaggcaaggtgttgtat

SEQ ID NO: 149961 - DNA, 50 bp, Artificial
  Synthetic oligonucleotide
aagtcaaccgccgctcgtttgtgaaaggggccgggatcctcagtgccatc

SEQ ID NO: 149962 - DNA, 50 bp, Artificial
  Synthetic oligonucleotide
aagtcgccggtaacgggcatacaagggatgcggctgcttggatcttggct

SEQ ID NO: 149963 - DNA, 50 bp, Artificial
  Synthetic oligonucleotide
tgtagtaaggcctaattctggcccgatgacatgtactataccgttattgg

SEQ ID NO: 149964 - DNA, 50 bp, Artificial
  Synthetic oligonucleotide
aagtgatacagtggtcatcaaaagaacacttggggcccccgcgcgtgcga

SEQ ID NO: 149965 - DNA, 50 bp, Artificial
  Synthetic oligonucleotide
cccggacagccggccgctttgggtgttggaagcagacggggagattgctg

SEQ ID NO: 149966 - DNA, 50 bp, Artificial
  Synthetic oligonucleotide
aagtggcggccagcttcaacgggtttcgattgcgctcgctctcttgcttt

SEQ ID NO: 149967 - DNA, 50 bp, Artificial
  Synthetic oligonucleotide
cccgctccattacaggagggaagacggcagacagatttgctcccggcgat

SEQ ID NO: 149968 - DNA, 50 bp, Artificial
  Synthetic oligonucleotide
cccgcggattccaacagtggccacgactgcccctccaaccgtcggtccta

SEQ ID NO: 149969 - DNA, 50 bp, Artificial
  Synthetic oligonucleotide
cttccgccgcaactttgggatttcctgcccagctgccgaagccatcctgt

SEQ ID NO: 149970 - DNA, 58 bp, Artificial
  Synthetic oligonucleotide
caacttaccgcagcattatccggaacgaagccccaaaggaatcattttgctcgatcaa

SEQ ID NO: 149971 - DNA, 60 bp, Artificial
  Synthetic oligonucleotide
gagcatagttaaaggctatattcgaaagttagaggttacatataatcaagatcgagatga

SEQ ID NO: 149972 - DNA, 50 bp, Artificial
  Synthetic oligonucleotide
tgtaatagcatgaagttgactacacagtcgaactaaagaatcactcgcga

SEQ ID NO: 149973 - DNA, 50 bp, Artificial
  Synthetic oligonucleotide
gcgcagacaaaccctcgcattcggtgtcagtcctgcgctccgatgctcgt

SEQ ID NO: 149974 - DNA, 50 bp, Artificial
  Synthetic oligonucleotide
aaacacaactagtaggccaaacgcctacctttattactcagggacatgtc

SEQ ID NO: 149975 - DNA, 50 bp, Artificial
  Synthetic oligonucleotide
gcgcctcaatcgttccatgttggtgcgggatgaccccatgcacaatcgct

SEQ ID NO: 149976 - DNA, 50 bp, Artificial
  Synthetic oligonucleotide
aagcgtttcgcgggtctttctagctaccccgccaagagtgccacctgcag

SEQ ID NO: 149977 - DNA, 50 bp, Artificial
  Synthetic oligonucleotide
ccgcggggtgatcattgaaagtttcgggaacggcggggtgccgtttgaag

SEQ ID NO: 149978 - DNA, 50 bp, Artificial
  Synthetic oligonucleotide
gcgctagcgcttcgactgccctccggctcataaggcgatagtcggcatga

SEQ ID NO: 149979 - DNA, 50 bp, Artificial
  Synthetic oligonucleotide
aaacaattgcccctacgggacatagattgtctgattcccatttctcttac

SEQ ID NO: 149980 - DNA, 50 bp, Artificial
  Synthetic oligonucleotide
ccgccccttctccacaagtggcgttccctctttcgcgtcttcaccgcaaa

SEQ ID NO: 149981 - DNA, 50 bp, Artificial
  Synthetic oligonucleotide
ccgcccatttggactacacactccgggccggttttaacgaaccgctgcag

SEQ ID NO: 149982 - DNA, 60 bp, Artificial
  Synthetic oligonucleotide
cgcttcacagaatgtaggttctctgcgtcctgagctttcatcgttccaatgattctatcc

SEQ ID NO: 149983 - DNA, 50 bp, Artificial
  Synthetic oligonucleotide
aagctgccgtttgggcacaggggcgcaaaccatccggtcattgaccgcaa

SEQ ID NO: 149984 - DNA, 50 bp, Artificial
  Synthetic oligonucleotide
gcggcatagagacaggatgcgggcgacctatcgaaaccgctccaagcagc

SEQ ID NO: 149985 - DNA, 50 bp, Artificial
  Synthetic oligonucleotide
cgtgttggcgctcggttgggacgttaaaccagccatcgaactaaccgcga

SEQ ID NO: 149986 - DNA, 50 bp, Artificial
  Synthetic oligonucleotide
gcgggaacatccctgtcgttgtattcggtccgggcactacggaagcagcc

SEQ ID NO: 149987 - DNA, 50 bp, Artificial
  Synthetic oligonucleotide
gcgggccggctgttgaaatgggtcccgcttttacgtcttgggatgctcat

SEQ ID NO: 149988 - DNA, 50 bp, Artificial
  Synthetic oligonucleotide
aaggagcgggctgatttcacgctgtccccaaaacgcggggcgcagctctt

SEQ ID NO: 149989 - DNA, 50 bp, Artificial
  Synthetic oligonucleotide
tgtgcttgacgttcgatgtttgccaccatgctttcgagtgtgaagaccgc

SEQ ID NO: 149990 - DNA, 50 bp, Artificial
  Synthetic oligonucleotide
ccgatggttacggtctccccgctgcctgattcacctgaaccgccagagtt

SEQ ID NO: 149991 - DNA, 50 bp, Artificial
  Synthetic oligonucleotide
cgttcctccttgtggatcggctgtcgtaaccggagcggtggtgtccgttt

SEQ ID NO: 149992 - DNA, 50 bp, Artificial
  Synthetic oligonucleotide
cgttgatcacgaatgttcacgtccaaaaggtacgaaccaatagcaaaaaa

SEQ ID NO: 149993 - DNA, 57 bp, Artificial
  Synthetic oligonucleotide
gagcgcatctgcgaaagcgaaaggggtacggaaacgatttgaggtatgagggggcca

SEQ ID NO: 149994 - DNA, 50 bp, Artificial
  Synthetic oligonucleotide
aaggcgcgtcctcgggcgattgacgcattggggagacgaactgtcccatt

SEQ ID NO: 149995 - DNA, 50 bp, Artificial
  Synthetic oligonucleotide
ccgagccgtcgccctgatattgcccgtctcggattacgcgcgatccttgc

SEQ ID NO: 149996 - DNA, 50 bp, Artificial
  Synthetic oligonucleotide
aaggcttaatgcgcctgctccaaatcccccgtgtccgtctgtcggatcgc

SEQ ID NO: 149997 - DNA, 50 bp, Artificial
  Synthetic oligonucleotide
ccgactgatgccgcattacaaacgatcgccacagggaatgcaagcccccg

SEQ ID NO: 149998 - DNA, 50 bp, Artificial
  Synthetic oligonucleotide
gcgtcccatgagccgcgttacggtgcccctgcgctctatgggtgcaaaga

SEQ ID NO: 149999 - DNA, 50 bp, Artificial
  Synthetic oligonucleotide
tttggtaatatgctttgcatattttgtagtggaattcagcgtgttcaatt

SEQ ID NO: 150000 - DNA, 50 bp, Artificial
  Synthetic oligonucleotide
gcgtgacgtgatgcctgacgggaaggaatttgcccttgtccgccctgaag

SEQ ID NO: 150001 - DNA, 50 bp, Artificial
  Synthetic oligonucleotide
aaggtacggcgaatgcaataggaagtcatgttggagtatctgatatccga

SEQ ID NO: 150002 - DNA, 50 bp, Artificial
  Synthetic oligonucleotide
cccttgacaagcgtgggaaggtgatggtaaccaaccctccggctgagcga

SEQ ID NO: 150003 - DNA, 50 bp, Artificial
  Synthetic oligonucleotide
ggacgcagcttaggaccgggcgtggcagcactgagtgccggagcatctga

SEQ ID NO: 150004 - DNA, 58 bp, Artificial
  Synthetic oligonucleotide
cgctgtggaagataacacgtaatagaaaactcttatctgtaagcttagctgcttttgg

SEQ ID NO: 150005 - DNA, 50 bp, Artificial
  Synthetic oligonucleotide
aatgatggcgggtgaggcaagcggcaaacgtaagcgtggtgggcgcgaaa

SEQ ID NO: 150006 - DNA, 50 bp, Artificial
  Synthetic oligonucleotide
ccagtcggtcccgtatccccagttggtccagtgactcctgttggcccggt

SEQ ID NO: 150007 - DNA, 50 bp, Artificial
  Synthetic oligonucleotide
ggagaaccggcttaccgtttcccatgcgagcgttttgtcaggctgcctcc

SEQ ID NO: 150008 - DNA, 50 bp, Artificial
  Synthetic oligonucleotide
ctcccgtccattgcggggatggcagccaaccagctgtctaaaggcacagc

SEQ ID NO: 150009 - DNA, 50 bp, Artificial
  Synthetic oligonucleotide
ggagatgccgattgaagagtgctgggcaggccttcgtccggcgacaaacg

SEQ ID NO: 150010 - DNA, 50 bp, Artificial
  Synthetic oligonucleotide
ttttgtccgaatcgtcatgggagtacgtccaggattgtaatacatttatg

SEQ ID NO: 150011 - DNA, 50 bp, Artificial
  Synthetic oligonucleotide
ccagcgtgcctgctgacacaatggcgccgtttccgatttccacaccgggt

SEQ ID NO: 150012 - DNA, 50 bp, Artificial
  Synthetic oligonucleotide
ccagcgagaaacgctccccgcaaataggctcgacgacagcatgtagcgct

SEQ ID NO: 150013 - DNA, 50 bp, Artificial
  Synthetic oligonucleotide
tggagatgagtcgattgccaagcgtcccatgagccgcgttacggtgcccc

SEQ ID NO: 150014 - DNA, 50 bp, Artificial
  Synthetic oligonucleotide
aatggatcggtgcttctaatcaacatttcgttcaaatgttcaacgatgcg

SEQ ID NO: 150015 - DNA, 58 bp, Artificial
  Synthetic oligonucleotide
gaggaaaaaaggtgagatcgtcgcttgtggcggctcattatgaaggacttgaaaagcg

SEQ ID NO: 150016 - DNA, 50 bp, Artificial
  Synthetic oligonucleotide
ctggagtttcaagagtggcggcatgtgtttaaattagacccgaacaaaga

SEQ ID NO: 150017 - DNA, 50 bp, Artificial
  Synthetic oligonucleotide
aatggtccgcgccaagagatcgtcccaagctctccgccaagcagcggtcc

SEQ ID NO: 150018 - DNA, 50 bp, Artificial
  Synthetic oligonucleotide
ccagcccacttgatgtcccaaccgcgccaaaccaatggccacattggact

SEQ ID NO: 150019 - DNA, 50 bp, Artificial
  Synthetic oligonucleotide
ccagacaatcgcggctccgaatgaaggagcaaaaagcgaagcaccgcgcc

SEQ ID NO: 150020 - DNA, 50 bp, Artificial
  Synthetic oligonucleotide
ctgcggctgaacggctttcccaccatcgggttgcttcgcagaaggcggct

SEQ ID NO: 150021 - DNA, 50 bp, Artificial
  Synthetic oligonucleotide
aatgtcgcccagcaggactatgtaccgcagggagccagtgtgaccatgct

SEQ ID NO: 150022 - DNA, 50 bp, Artificial
  Synthetic oligonucleotide
ggatatatgcaatcagccacttaccgggcggggagcagagttataacatg

SEQ ID NO: 150023 - DNA, 50 bp, Artificial
  Synthetic oligonucleotide
ccaccggcatgtgtttgggggcaaacgtacgtgaggaacatgtccgcctg

SEQ ID NO: 150024 - DNA, 50 bp, Artificial
  Synthetic oligonucleotide
ctgcaggggtatggggcacattgtcaaccggattctttgccaccccggaa

SEQ ID NO: 150025 - DNA, 50 bp, Artificial
  Synthetic oligonucleotide
ccacatccgaggccgcgctcccttggttgacacgagagaactgcaggctc

SEQ ID NO: 150026 - DNA, 60 bp, Artificial
  Synthetic oligonucleotide
gaggcgtcggcttatgattcagtaaatgacgagttgtatctattcagcccagtactagcg

SEQ ID NO: 150027 - DNA, 50 bp, Artificial
  Synthetic oligonucleotide
ccacatcccccggaagcgcccagacttgggacgcggcgacagtcgttccc

SEQ ID NO: 150028 - DNA, 50 bp, Artificial
  Synthetic oligonucleotide
ccacatacgcctcagctcgcgtcaaggcggaatccagcccttcgactcct

SEQ ID NO: 150029 - DNA, 50 bp, Artificial
  Synthetic oligonucleotide
aattgggcttggcgtaacagtcgttcctacattattttcacaacttccag

SEQ ID NO: 150030 - DNA, 50 bp, Artificial
  Synthetic oligonucleotide
ccacagccgccttaactgtcgcggcctttccctcgattaccggctctccc

SEQ ID NO: 150031 - DNA, 50 bp, Artificial
  Synthetic oligonucleotide
ggattgtcctacaatactgaccaccgtggcatgatgtaagacacgatcta

SEQ ID NO: 150032 - DNA, 50 bp, Artificial
  Synthetic oligonucleotide
ccaatatacacccctagcaccccgccggccatagagccgagtggcagtgc

SEQ ID NO: 150033 - DNA, 50 bp, Artificial
  Synthetic oligonucleotide
ccaatataatcgtccggagaactacccggaacgaaacgctgacgggacta

SEQ ID NO: 150034 - DNA, 50 bp, Artificial
  Synthetic oligonucleotide
ccaacacgagcaccgaaggcattgacagccggttgcttgctcaagcgagg

SEQ ID NO: 150035 - DNA, 50 bp, Artificial
  Synthetic oligonucleotide
ggcacacatcaagcacgtctagccccgctcgctcaacacagcgaagcacg

SEQ ID NO: 150036 - DNA, 50 bp, Artificial
  Synthetic oligonucleotide
ctactttacgtttactcatatcgtcctcacatgcgtaacgggtcatatcg

SEQ ID NO: 150037 - DNA, 57 bp, Artificial
  Synthetic oligonucleotide
gagtaccagggtttgctactagagaagagataccgaacaaagtcgtcactgtaattg

SEQ ID NO: 150038 - DNA, 50 bp, Artificial
  Synthetic oligonucleotide
aaaagcgctcgttgctgggaatatcggtacggcggcaagcgaagtggcca

SEQ ID NO: 150039 - DNA, 50 bp, Artificial
  Synthetic oligonucleotide
gctcctacccgtgaagaagcaatcgcccgcatgaagcgagcgttaagcga

SEQ ID NO: 150040 - DNA, 50 bp, Artificial
  Synthetic oligonucleotide
ccccttggctagcggaaagctgggatagtacggacgggcaacactggacg

SEQ ID NO: 150041 - DNA, 50 bp, Artificial
  Synthetic oligonucleotide
gctcttcaattgggatatccgcccctgttttcgtcgccaggtcgatcgtt

SEQ ID NO: 150042 - DNA, 50 bp, Artificial
  Synthetic oligonucleotide
ccccgttcccttcaacaccccgactacattcgggctgcccctgaactctg

SEQ ID NO: 150043 - DNA, 50 bp, Artificial
  Synthetic oligonucleotide
ccccgagcccgttgacaaggagcgcaaaccggtccccttctttccagttg

SEQ ID NO: 150044 - DNA, 50 bp, Artificial
  Synthetic oligonucleotide
gctgttaaaggtgtttgcgtggctggcttaataactaccgtgcatccgac

SEQ ID NO: 150045 - DNA, 50 bp, Artificial
  Synthetic oligonucleotide
ttttacgtgggtgcgtgtgaatatggatgttattgctgatgactttcgga

SEQ ID NO: 150046 - DNA, 50 bp, Artificial
  Synthetic oligonucleotide
ctaggagctcgtattacgagtttaaaggtaccaacaacaaatggtttacg

SEQ ID NO: 150047 - DNA, 50 bp, Artificial
  Synthetic oligonucleotide
ctatcctaaagcgtcttatgcttgtcagggctgaacaagccccctccgct

SEQ ID NO: 150048 - DNA, 57 bp, Artificial
  Synthetic oligonucleotide
gagtcgatttcccccacttcgcttgcgaatcatacaaactactccgtaaggccgtgc

SEQ ID NO: 150049 - DNA, 50 bp, Artificial
  Synthetic oligonucleotide
ctgtttcaatgggcggcgggtacgatggagcggcaggagtcttgtgcagc

SEQ ID NO: 150050 - DNA, 50 bp, Artificial
  Synthetic oligonucleotide
cccatcggccagcttccttccgctccattgcatggtcatttccgctgtcc

SEQ ID NO: 150051 - DNA, 50 bp, Artificial
  Synthetic oligonucleotide
cccagtgtgatttgtttcgtggcggttgcgatttttgaaaggaatgtgcc

SEQ ID NO: 150052 - DNA, 50 bp, Artificial
  Synthetic oligonucleotide
cccaggagcgatgcaccgtatttccgcgctagcttcgggtgggctagact

SEQ ID NO: 150053 - DNA, 50 bp, Artificial
  Synthetic oligonucleotide
aatcgcggcaggctcattacataatgtaagtttgcaacgttctgcttgtg

SEQ ID NO: 150054 - DNA, 50 bp, Artificial
  Synthetic oligonucleotide
cccaccacgattacgggacggagcccagagcgcaccgctgtttcaacaga

SEQ ID NO: 150055 - DNA, 50 bp, Artificial
  Synthetic oligonucleotide
ctcactacatacactctgctcacgagaaatattagtacgcacacttttag

SEQ ID NO: 150056 - DNA, 50 bp, Artificial
  Synthetic oligonucleotide
ccatgtctgaagtggcccgggagggggcttggcttaccactatcctgggc

SEQ ID NO: 150057 - DNA, 50 bp, Artificial
  Synthetic oligonucleotide
aatcggctattggatggacccgagcggttggggagaaggcaatccggtcg

SEQ ID NO: 150058 - DNA, 50 bp, Artificial
  Synthetic oligonucleotide
ggaacgtatcacccgcattttcacgttttactggcggttcctcatacata

SEQ ID NO: 150059 - DNA, 59 bp, Artificial
  Synthetic oligonucleotide
cgctaactctcacaattggttgatatttcaactctacatataaccctttctcctgcatt

SEQ ID NO: 150060 - DNA, 50 bp, Artificial
  Synthetic oligonucleotide
ttttctgttacgtaattgggtttcatgagtgatgcctcattgcatcttgg

SEQ ID NO: 150061 - DNA, 50 bp, Artificial
  Synthetic oligonucleotide
tggctgctaatatcgcagtcatgcttttatgcagactgttgagggatcgc

SEQ ID NO: 150062 - DNA, 50 bp, Artificial
  Synthetic oligonucleotide
tggctcgttcaacaaatcgccgccacgcataagtggtgaccacgcctcga

SEQ ID NO: 150063 - DNA, 50 bp, Artificial
  Synthetic oligonucleotide
ccatgactacgcctcacaagagcaggcttgccgctatcaaccctggggcc

SEQ ID NO: 150064 - DNA, 50 bp, Artificial
  Synthetic oligonucleotide
aatgaacaagggcccgccttaggtgcagcgatgcttgccgcagttggctg

SEQ ID NO: 150065 - DNA, 50 bp, Artificial
  Synthetic oligonucleotide
ctcactagccgcccgcgcaaggtagacactgcgaggttctttcgagcaga

SEQ ID NO: 150066 - DNA, 50 bp, Artificial
  Synthetic oligonucleotide
ccatcattatagctaccgtagcacgtggggagccaagcgaggctggggcg

SEQ ID NO: 150067 - DNA, 50 bp, Artificial
  Synthetic oligonucleotide
tggcacatggatatgggtaacaggtaatacatacccaatcagaaaagaac

SEQ ID NO: 150068 - DNA, 50 bp, Artificial
  Synthetic oligonucleotide
ctcactcccggccgccggtatacggttacactgaagtcctccgcaaacgc

SEQ ID NO: 150069 - DNA, 50 bp, Artificial
  Synthetic oligonucleotide
ttttgcacgattggaggtcgacgatacgggttagctttctaacaacgccc

SEQ ID NO: 150070 - DNA, 58 bp, Artificial
  Synthetic oligonucleotide
gagtggggcaaggctattgtgatagctgttatacttgctcttcttattcggaattttt

SEQ ID NO: 150071 - DNA, 50 bp, Artificial
  Synthetic oligonucleotide
gatgtaaattgggaggatctcttcgtataccgcagtgttttccggaatcg

SEQ ID NO: 150072 - DNA, 50 bp, Artificial
  Synthetic oligonucleotide
cggacatagccgcttcgcctcccataagggcatcgggggcttcacaccta

SEQ ID NO: 150073 - DNA, 50 bp, Artificial
  Synthetic oligonucleotide
gattaagtcgattcaggtaacctcaagcttatatcaagccgggtataagc

SEQ ID NO: 150074 - DNA, 50 bp, Artificial
  Synthetic oligonucleotide
gattaatgtatgggaagtgctccgtaatacgctgacaagagagaaagggc

SEQ ID NO: 150075 - DNA, 50 bp, Artificial
  Synthetic oligonucleotide
cgataagcattggcgcaccctagcgcgctccttgaccgcaatttgtcgcg

SEQ ID NO: 150076 - DNA, 50 bp, Artificial
  Synthetic oligonucleotide
aaccatgggtgtgttaaatgggaagacgaaacggcgtgtaaaaatatcga

SEQ ID NO: 150077 - DNA, 50 bp, Artificial
  Synthetic oligonucleotide
gattgccaagcgtcccatgagccgcgttacggtgcccctgcgctctatgg

SEQ ID NO: 150078 - DNA, 50 bp, Artificial
  Synthetic oligonucleotide
aaccccggtaggccctgtcacgcccgtaggtccggtatctcccgtaggcc

SEQ ID NO: 150079 - DNA, 50 bp, Artificial
  Synthetic oligonucleotide
aaccctgcccccgcccaacagttatcgccgtccatgcttgatctagtcga

SEQ ID NO: 150080 - DNA, 50 bp, Artificial
  Synthetic oligonucleotide
aaccggaacacttgctggtgacgggaaagcctccccgcttagcctggttt

SEQ ID NO: 150081 - DNA, 60 bp, Artificial
  Synthetic oligonucleotide
gtagacgacttaagggagcgacatgaatgaagtgaagtgcagacagaaggtaaggtgacg

SEQ ID NO: 150082 - DNA, 60 bp, Artificial
  Synthetic oligonucleotide
cgcggttggtatggcttcattcgcttgtgattgctacgaacgatctttacgccagtacag

SEQ ID NO: 150083 - DNA, 50 bp, Artificial
  Synthetic oligonucleotide
cgaggacattggcttagccagtccgcaggctggcccccgcgtgttaagcg

SEQ ID NO: 150084 - DNA, 50 bp, Artificial
  Synthetic oligonucleotide
cgagcttaaaagggctccaaccgccgtacccgccagtgcgagcttcactg

SEQ ID NO: 150085 - DNA, 50 bp, Artificial
  Synthetic oligonucleotide
cgagaacgaccgggcgaatccgcagacagagacaaacgcggatcacctcg

SEQ ID NO: 150086 - DNA, 50 bp, Artificial
  Synthetic oligonucleotide
ttcgggctggggagcaacgctttaggcactgcgtttagtttgcgtggaga

SEQ ID NO: 150087 - DNA, 50 bp, Artificial
  Synthetic oligonucleotide
cgactcttcctgagataattcaacatttccgcggtactttattgggtgaa

SEQ ID NO: 150088 - DNA, 50 bp, Artificial
  Synthetic oligonucleotide
cgactacattcgtatgggcgagcgatccgggcatcctcccggaaaggacc

SEQ ID NO: 150089 - DNA, 50 bp, Artificial
  Synthetic oligonucleotide
ttcgctcggtaaccctagcgcacgtacgagcaacaccgcaaattgcgcac

SEQ ID NO: 150090 - DNA, 50 bp, Artificial
  Synthetic oligonucleotide
aacgacagcaggtggctcctattctcatgcggaaggtaatcatacatcaa

SEQ ID NO: 150091 - DNA, 50 bp, Artificial
  Synthetic oligonucleotide
aacgcccctatgatcggttcaagtcctgcaagcgttgccccgtatgccgt

SEQ ID NO: 150092 - DNA, 50 bp, Artificial
  Synthetic oligonucleotide
cgacgtggctgctggtcattttcgtaacggcggggccgctcagtttgatc

SEQ ID NO: 150093 - DNA, 56 bp, Artificial
  Synthetic oligonucleotide
cgcggtgctagacagcgaaacaggtctcccgatcacaacggaaggtttgcggtacg

SEQ ID NO: 150094 - DNA, 50 bp, Artificial
  Synthetic oligonucleotide
gcaatcatggggacttctcaagggcgagagttagctcgtaagctagttcg

SEQ ID NO: 150095 - DNA, 50 bp, Artificial
  Synthetic oligonucleotide
aaactttcgcaatgtcgcgcgctaagccagggccgataacacgctccccc

SEQ ID NO: 150096 - DNA, 50 bp, Artificial
  Synthetic oligonucleotide
cggagccagtcatcccggcgataacactgaccgcgattgctcctccgatc

SEQ ID NO: 150097 - DNA, 50 bp, Artificial
  Synthetic oligonucleotide
gacgtttggaataggacagaaatacagttacgggatgatagagcgcatgt

SEQ ID NO: 150098 - DNA, 50 bp, Artificial
  Synthetic oligonucleotide
aacggacagcgtaaagagcgactgcggatggttcaacaagcgccccttgc

SEQ ID NO: 150099 - DNA, 50 bp, Artificial
  Synthetic oligonucleotide
ttccgttttcttaggtccacttgcattacgtgcctcattaatatattcag

SEQ ID NO: 150100 - DNA, 50 bp, Artificial
  Synthetic oligonucleotide
ttcccgttgctcccttagcgaatggacatccacctaaccccccagcggat

SEQ ID NO: 150101 - DNA, 50 bp, Artificial
  Synthetic oligonucleotide
cgaaatcgacggatggtctgcgctgcttccgcaggcgcttggaatggtga

SEQ ID NO: 150102 - DNA, 50 bp, Artificial
  Synthetic oligonucleotide
cgcgtgtttcatttgaagcgggaatggcgcagcttggcggaaatgcgctc

SEQ ID NO: 150103 - DNA, 50 bp, Artificial
  Synthetic oligonucleotide
ttggcgcaggagcgcttggaacagctagtgcggaaatgcttgttcgtgct

SEQ ID NO: 150104 - DNA, 59 bp, Artificial
  Synthetic oligonucleotide
gagttgctaccgataataggacgttatgttaaccaaccatgaataagtatacatcacaa

SEQ ID NO: 150105 - DNA, 50 bp, Artificial
  Synthetic oligonucleotide
gagttgggcatgttacagcgttttgtttgtcgtgatgctttaccttgtat

SEQ ID NO: 150106 - DNA, 50 bp, Artificial
  Synthetic oligonucleotide
cgcgccttctctgttcggttctccattggccgtccggcacaacagggaaa

SEQ ID NO: 150107 - DNA, 50 bp, Artificial
  Synthetic oligonucleotide
cgctcgacttctgctagcccacgagccatgtttgtcccgtggtccccatc

SEQ ID NO: 150108 - DNA, 50 bp, Artificial
  Synthetic oligonucleotide
gaggctaaactcaacgaagaagacccttctgttgaaggtaaactcactta

SEQ ID NO: 150109 - DNA, 50 bp, Artificial
  Synthetic oligonucleotide
ttggaaggcacgggagcaacggtttgcctcggcattgcaaaaggagcaca

SEQ ID NO: 150110 - DNA, 50 bp, Artificial
  Synthetic oligonucleotide
cgctgacctttgtcccgacggaaccgcctgtgagccgcttatccggaaga

SEQ ID NO: 150111 - DNA, 50 bp, Artificial
  Synthetic oligonucleotide
cgcgaaaacggcgatccaaacatgctggagggggcctgagagtgtcacga

SEQ ID NO: 150112 - DNA, 50 bp, Artificial
  Synthetic oligonucleotide
aaaggcggcaagacgtgtgtgttgcttggccggaaggtggacaagcgaaa

SEQ ID NO: 150113 - DNA, 50 bp, Artificial
  Synthetic oligonucleotide
cgcccgttcacgaatgcctagctttagcgaaagaggcacggcttgctccc

SEQ ID NO: 150114 - DNA, 50 bp, Artificial
  Synthetic oligonucleotide
cgcccctttcgtcgctccgtacccttcgccgtgtgacgcccagtagtaat

SEQ ID NO: 150115 - DNA, 54 bp, Artificial
  Synthetic oligonucleotide
gagtttgtttcggaatttaggagctgattatacgcaccaaatttttggagcggt

SEQ ID NO: 150116 - DNA, 50 bp, Artificial
  Synthetic oligonucleotide
gatatccttaccctattcactctaacttgcaacacgtttgcggtatcctt

SEQ ID NO: 150117 - DNA, 50 bp, Artificial
  Synthetic oligonucleotide
gatatctaagagacgccgacccttcatcactaaatcatgatttggagtat

SEQ ID NO: 150118 - DNA, 50 bp, Artificial
  Synthetic oligonucleotide
cgccatcataccgcccctttcgtcgctccgtacccttcgccgtgtgacgc

SEQ ID NO: 150119 - DNA, 50 bp, Artificial
  Synthetic oligonucleotide
aacaaccgggtgtttcggacggtcggatcgccgctcattctgcctgagca

SEQ ID NO: 150120 - DNA, 50 bp, Artificial
  Synthetic oligonucleotide
cgccactcgagctccgttccggtcgactacacgcgcgtccgctacgttaa

SEQ ID NO: 150121 - DNA, 50 bp, Artificial
  Synthetic oligonucleotide
cgcttcgcctcccataagggcatcgggggcttcacacctagtgctcttgc

SEQ ID NO: 150122 - DNA, 50 bp, Artificial
  Synthetic oligonucleotide
ttgccatttgtttatgcctaagattacggaagcatctgaaccgccgattc

SEQ ID NO: 150123 - DNA, 50 bp, Artificial
  Synthetic oligonucleotide
cgccaacaaagcgcccggcactttaggcatcaccttggcggatacaagca

SEQ ID NO: 150124 - DNA, 50 bp, Artificial
  Synthetic oligonucleotide
ttgtccagcttccgatcgatgtcccgggaatcacaacagcacctgcccct

SEQ ID NO: 150125 - DNA, 50 bp, Artificial
  Synthetic oligonucleotide
aacacggtgtttgcagttccgaggagcctgtccgctatccagcccccgat

SEQ ID NO: 150126 - DNA, 60 bp, Artificial
  Synthetic oligonucleotide
gataattaatgctgtatcaccatcgatgtatttcgacttgtaatcatagaagtctttttt

SEQ ID NO: 150127 - DNA, 50 bp, Artificial
  Synthetic oligonucleotide
cgcacctacataaaagggccagccgacaatgaactgaacaggcgctgcta

SEQ ID NO: 150128 - DNA, 50 bp, Artificial
  Synthetic oligonucleotide
cggaaaacacatcctagggtttggtggaaaccccgcaggcttgccgtgga

SEQ ID NO: 150129 - DNA, 50 bp, Artificial
  Synthetic oligonucleotide
cggaaactcggacccgaattttgctcacgcgcatctggggcaatggaccg

SEQ ID NO: 150130 - DNA, 50 bp, Artificial
  Synthetic oligonucleotide
cggaagtgcacgcaagtgggagaactccgcacgcaaagtgctcgaatccg

SEQ ID NO: 150131 - DNA, 50 bp, Artificial
  Synthetic oligonucleotide
cgatgtcttgccatacgcctgttgtcggaagccgtgttggcggactggct

SEQ ID NO: 150132 - DNA, 50 bp, Artificial
  Synthetic oligonucleotide
ttgagtaacgttgtgtttgaaaaggagcgcacctgcacacaaagaaaggg

SEQ ID NO: 150133 - DNA, 50 bp, Artificial
  Synthetic oligonucleotide
gatgcgcgagcctgcagcgacgtacccttacaaacggttccacccctgat

SEQ ID NO: 150134 - DNA, 50 bp, Artificial
  Synthetic oligonucleotide
aaccaaatggggcgaaacggagctcacccattagagcagtcgccacgcca

SEQ ID NO: 150135 - DNA, 50 bp, Artificial
  Synthetic oligonucleotide
ttgtgccacttcggttagtatttctgttcaaacactaagagatttaggga

SEQ ID NO: 150136 - DNA, 50 bp, Artificial
  Synthetic oligonucleotide
aagagatgtgctgttcgcgccgataacggcaactgcgtctttgcggccca

SEQ ID NO: 150137 - DNA, 60 bp, Artificial
  Synthetic oligonucleotide
gatacatatgtgtctccaaaaaatcacatttcatgggaataatcttcatggtcccggtac

SEQ ID NO: 150138 - DNA, 50 bp, Artificial
  Synthetic oligonucleotide
gccgtatcgatccgtttggcggtgaacctaaggtgggaatctgcggggct

SEQ ID NO: 150139 - DNA, 50 bp, Artificial
  Synthetic oligonucleotide
aagagctgccaggactgttatggtgctaacggggagtaatgtaccctagg

SEQ ID NO: 150140 - DNA, 50 bp, Artificial
  Synthetic oligonucleotide
gccgtgctccgatccgtaaattaggaccggaagaccgactcgttcgcccg

SEQ ID NO: 150141 - DNA, 50 bp, Artificial
  Synthetic oligonucleotide
cgtacgtcccaaccgcgccagaaatttttccgacacgcaccgtctctgcc

SEQ ID NO: 150142 - DNA, 50 bp, Artificial
  Synthetic oligonucleotide
gccgttgttgggttccgtgctctcgataaggatatgcataatctcgggcg

SEQ ID NO: 150143 - DNA, 50 bp, Artificial
  Synthetic oligonucleotide
cgtagcgaggaggacactcccggaatgaccgcagtagcgtgtgcctgcag

SEQ ID NO: 150144 - DNA, 50 bp, Artificial
  Synthetic oligonucleotide
gcctcgcaagttccgtagtctcccagagtgcctgatgcgcatctccccct

SEQ ID NO: 150145 - DNA, 50 bp, Artificial
  Synthetic oligonucleotide
ttacttgtgcggggcggtgtgcacgttgtggcatatgcaaaggcgcttga

SEQ ID NO: 150146 - DNA, 50 bp, Artificial
  Synthetic oligonucleotide
aagcaagcgatctctgctttaggggtgcccgtcgccccattttccccgat

SEQ ID NO: 150147 - DNA, 50 bp, Artificial
  Synthetic oligonucleotide
aagcaccgctccaacgggccgccttcatcgttgtgactgtgtaaaagcga

SEQ ID NO: 150148 - DNA, 60 bp, Artificial
  Synthetic oligonucleotide
cgcctgtgcgtagctgatcggttgaccgttaacaagatcataattgagatgcgaccggcc

SEQ ID NO: 150149 - DNA, 50 bp, Artificial
  Synthetic oligonucleotide
aagcagctcttgttatctcaaaaatggtaatggtgcttgctgaattccgt

SEQ ID NO: 150150 - DNA, 50 bp, Artificial
  Synthetic oligonucleotide
ccggtatggctgggaatacgggaacgcaggcccttgcagtggcagtccgt

SEQ ID NO: 150151 - DNA, 50 bp, Artificial
  Synthetic oligonucleotide
ccggggtggcccatgcagcaaaggatggcggactgatttccggtgacagc

SEQ ID NO: 150152 - DNA, 50 bp, Artificial
  Synthetic oligonucleotide
aagcagttcagaaagcggtcaggactcgcaaaccagcggcgggtccggaa

SEQ ID NO: 150153 - DNA, 50 bp, Artificial
  Synthetic oligonucleotide
ccgggcgtggcagcactgagtgccggagcatctgatatgagttcatggct

SEQ ID NO: 150154 - DNA, 50 bp, Artificial
  Synthetic oligonucleotide
aagcccacacgcatataggacccccacaacgcctgtagaggcgccaaggc

SEQ ID NO: 150155 - DNA, 50 bp, Artificial
  Synthetic oligonucleotide
ccggcactgtaccggcacgttcaggactgaaggggccttctccgtggagt

SEQ ID NO: 150156 - DNA, 50 bp, Artificial
  Synthetic oligonucleotide
aagccttaggttcacattgcaaaggaaaggcgaaggccgttggccggccc

SEQ ID NO: 150157 - DNA, 50 bp, Artificial
  Synthetic oligonucleotide
cgtcatcgggggatctccggatgccgggtggacatcgtacttcccgctgg

SEQ ID NO: 150158 - DNA, 50 bp, Artificial
  Synthetic oligonucleotide
ttaatgcacttacccttgatgccagtttcatacgattcacctctcctaac

SEQ ID NO: 150159 - DNA, 54 bp, Artificial
  Synthetic oligonucleotide
cgcctccaaccttagcttgtagaggtgtaataaatacagtacgaaaaaagacta

SEQ ID NO: 150160 - DNA, 50 bp, Artificial
  Synthetic oligonucleotide
aagcgagccatccaccgtcgaagaaccgaacggtgatgcactgaggggcg

SEQ ID NO: 150161 - DNA, 50 bp, Artificial
  Synthetic oligonucleotide
aagcgcacggctgtcgcagccattatgagggccgcgtggctcattccctt

SEQ ID NO: 150162 - DNA, 50 bp, Artificial
  Synthetic oligonucleotide
aagcgccgcgattgcacgagtagccggaccgccccatggcgtcattccgc

SEQ ID NO: 150163 - DNA, 50 bp, Artificial
  Synthetic oligonucleotide
aagcgccggagggacaacggaagcaggccttaggatgcttgacgaccatc

SEQ ID NO: 150164 - DNA, 50 bp, Artificial
  Synthetic oligonucleotide
ccggagatgaagccacttgggccccatcgggaatgagctacactgagggc

SEQ ID NO: 150165 - DNA, 50 bp, Artificial
  Synthetic oligonucleotide
ttaaaagtgcgcggggcaccagcgatcggcatgactgctgcctacggctt

SEQ ID NO: 150166 - DNA, 50 bp, Artificial
  Synthetic oligonucleotide
ttaaaacactacgcctgacctccataatctaaactaacccattcgatttc

SEQ ID NO: 150167 - DNA, 50 bp, Artificial
  Synthetic oligonucleotide
ccgctgtgcgacctcgttaaagccgactccccttttgggggtcaccttta

SEQ ID NO: 150168 - DNA, 50 bp, Artificial
  Synthetic oligonucleotide
aagcggctatggtgtggcccattccaaccatacgtgcattgccaccctgc

SEQ ID NO: 150169 - DNA, 50 bp, Artificial
  Synthetic oligonucleotide
gaacaggactcaccattgcccgcacatttcgggcactaggggcagacgta

SEQ ID NO: 150170 - DNA, 58 bp, Artificial
  Synthetic oligonucleotide
gatacgtgaattattaggaaaaagggtatatcattgctatagcgaatatatttttgag

SEQ ID NO: 150171 - DNA, 50 bp, Artificial
  Synthetic oligonucleotide
gcagacggagccatcctcttggcggatgagatttcaccggacacgtgccg

SEQ ID NO: 150172 - DNA, 50 bp, Artificial
  Synthetic oligonucleotide
aacggggacatgatgccgtttggtgagacgtccgccgtggaaagtccctt

SEQ ID NO: 150173 - DNA, 50 bp, Artificial
  Synthetic oligonucleotide
aacggtccgccggggctgaagcgaaacacttggtttgagcctggcctttg

SEQ ID NO: 150174 - DNA, 50 bp, Artificial
  Synthetic oligonucleotide
gcagacggtgctttaacggtcagaatgaataatcccacctgcggagaccg

SEQ ID NO: 150175 - DNA, 50 bp, Artificial
  Synthetic oligonucleotide
ccttgaagcccaggggctgcagtctgtatcgctttggacacgcggcgttg

SEQ ID NO: 150176 - DNA, 50 bp, Artificial
  Synthetic oligonucleotide
gcaggcagtaccgaaagcagcggaaacaaatggcccagccgccggtttat

SEQ ID NO: 150177 - DNA, 50 bp, Artificial
  Synthetic oligonucleotide
aacggttctgcctactaggacttgccgggtcggccgcatgaagcggagga

SEQ ID NO: 150178 - DNA, 50 bp, Artificial
  Synthetic oligonucleotide
ccttagcggagcagatcataccgctggaagcgacgcctctcagctcggca

SEQ ID NO: 150179 - DNA, 50 bp, Artificial
  Synthetic oligonucleotide
gcatcgcaagcggtcacgctcactgccggattagccatgatcaacggagc

SEQ ID NO: 150180 - DNA, 50 bp, Artificial
  Synthetic oligonucleotide
gacgaggaggctcatcggccacccgcggaaagagaagtcttgcacggaaa

SEQ ID NO: 150181 - DNA, 59 bp, Artificial
  Synthetic oligonucleotide
gacctaagccgaggccgacaggcgtaggcgatggacaacaggttgatattcctgtacca

SEQ ID NO: 150182 - DNA, 50 bp, Artificial
  Synthetic oligonucleotide
cctgcataagcttagcgcgctgcctcactgtgcccccggaagcggcttcg

SEQ ID NO: 150183 - DNA, 50 bp, Artificial
  Synthetic oligonucleotide
cggctaaagcctatgcggttgaaaccggggtggcccatgcagcaaaggat

SEQ ID NO: 150184 - DNA, 50 bp, Artificial
  Synthetic oligonucleotide
cctgaaacgttgctcgattggagtccggagacggaccctgatgcgcgctt

SEQ ID NO: 150185 - DNA, 50 bp, Artificial
  Synthetic oligonucleotide
gaccgtatgaggtcggtctcacaggaattagagtttgatagatacttaga

SEQ ID NO: 150186 - DNA, 50 bp, Artificial
  Synthetic oligonucleotide
gaccggaacagaatgaaaataagtttggtattaaggtgaatcgtaatgga

SEQ ID NO: 150187 - DNA, 50 bp, Artificial
  Synthetic oligonucleotide
gacccctgatgattacaatgtccattggttaattgcatcgtttttccgcc

SEQ ID NO: 150188 - DNA, 50 bp, Artificial
  Synthetic oligonucleotide
cggggactgcaagtgcacatgttgtcgtatatcctctggaagcgacacaa

SEQ ID NO: 150189 - DNA, 50 bp, Artificial
  Synthetic oligonucleotide
cggggcatgtttaatttggcgaaacacggcggagagttggcacgtgcgcg

SEQ ID NO: 150190 - DNA, 50 bp, Artificial
  Synthetic oligonucleotide
cggtaatgcgcgctgattttgtttcagcgtcttgaagctcccgattcgcc

SEQ ID NO: 150191 - DNA, 50 bp, Artificial
  Synthetic oligonucleotide
gcccatggggagaaccggcttaccgtttcccatgcgagcgttttgtcagg

SEQ ID NO: 150192 - DNA, 60 bp, Artificial
  Synthetic oligonucleotide
gtagagattgcaagagtaagatcaggtaaagagccacaaccaggacagaaaaatcgttca

SEQ ID NO: 150193 - DNA, 58 bp, Artificial
  Synthetic oligonucleotide
cggcttttatatgcgtgatgatcttagttttatgggtcgtggatctaattgtaagacc

SEQ ID NO: 150194 - DNA, 50 bp, Artificial
  Synthetic oligonucleotide
gacaacctttcgcaatagaatctgtttgaacaactcctaatcggctcttt

SEQ ID NO: 150195 - DNA, 50 bp, Artificial
  Synthetic oligonucleotide
aaacggctgagctccctaaggagggacgcattgcggacgtaggttgcggt

SEQ ID NO: 150196 - DNA, 50 bp, Artificial
  Synthetic oligonucleotide
gccgacaatgaactgcacaggcgctgctaacgccagctgtacccatggat

SEQ ID NO: 150197 - DNA, 50 bp, Artificial
  Synthetic oligonucleotide
gccgacgacttcccagagggatgcatcgcctttccgtgccaccaggttga

SEQ ID NO: 150198 - DNA, 50 bp, Artificial
  Synthetic oligonucleotide
aagaagggcggagaagcactgggtagcccgttgccttagcccggcagcaa

SEQ ID NO: 150199 - DNA, 50 bp, Artificial
  Synthetic oligonucleotide
aaacgaacaccgtcccgcatttgcccccgtttctcaggaggcgtgtctgc

SEQ ID NO: 150200 - DNA, 50 bp, Artificial
  Synthetic oligonucleotide
ccgtttagagttggcggtataaaaggcgaatatgaaggttattctgatat

SEQ ID NO: 150201 - DNA, 50 bp, Artificial
  Synthetic oligonucleotide
aagaatcgccggtccgatagctgaaccaaatccggcccacgcgtatccga

SEQ ID NO: 150202 - DNA, 50 bp, Artificial
  Synthetic oligonucleotide
ccgttccagtgggtacgtaacctcgggcgctgaaactagacgtcccgcta

SEQ ID NO: 150203 - DNA, 50 bp, Artificial
  Synthetic oligonucleotide
ccgttagcggttggacgcctgatcagctccgaacgggccccggtggaatt

SEQ ID NO: 150204 - DNA, 57 bp, Artificial
  Synthetic oligonucleotide
cggctaaagccgcaaatcctacgctttacggtgtaacagatcggattcttgaatgac

SEQ ID NO: 150205 - DNA, 50 bp, Artificial
  Synthetic oligonucleotide
aaaccggacgccccgcgagtttcggcaggacggctttaagcggctcaagc

SEQ ID NO: 150206 - DNA, 50 bp, Artificial
  Synthetic oligonucleotide
agagtccgttcgttgcccggaatacaccaccgcgtgcccctacatcttcc

SEQ ID NO: 150207 - DNA, 50 bp, Artificial
  Synthetic oligonucleotide
atcagccgccgtcacacgaaggtcgtatcaggaaaagggcagacccgggc

SEQ ID NO: 150208 - DNA, 50 bp, Artificial
  Synthetic oligonucleotide
gttctaacgttaactctggacgattcaagtatcctctcgctaggcctgct

SEQ ID NO: 150209 - DNA, 50 bp, Artificial
  Synthetic oligonucleotide
atcccctccggttacctgctgccatatacgccacccgggagccctcaggg

SEQ ID NO: 150210 - DNA, 50 bp, Artificial
  Synthetic oligonucleotide
agaggaatggcggcttccccgcgtaggccaatatagcccatcgccggtgc

SEQ ID NO: 150211 - DNA, 50 bp, Artificial
  Synthetic oligonucleotide
atccgccttccggggaagtcagccccgttgcgatcggtttcgatgccaca

SEQ ID NO: 150212 - DNA, 50 bp, Artificial
  Synthetic oligonucleotide
atccggaagtggctcaacgcggcacacgggagctctatttgcgtgacgga

SEQ ID NO: 150213 - DNA, 50 bp, Artificial
  Synthetic oligonucleotide
atccgggtacggcttttgggggccaccccttcgaattggttcacgctcag

SEQ ID NO: 150214 - DNA, 50 bp, Artificial
  Synthetic oligonucleotide
agagatcgtcccaagctctccgccaagcagcggtccaaccgaaatcccaa

SEQ ID NO: 150215 - DNA, 53 bp, Artificial
  Synthetic oligonucleotide
gacgcctcatttgtataagaaacaaacgaacctaccaaacaagaaattggaat

SEQ ID NO: 150216 - DNA, 50 bp, Artificial
  Synthetic oligonucleotide
agacgtggggagaggcatggcggcccacattgaccctcagtatgaaggct

SEQ ID NO: 150217 - DNA, 50 bp, Artificial
  Synthetic oligonucleotide
agacgccggtttggaccctgcaaaagacccgatcgctgtcgagtcgccaa

SEQ ID NO: 150218 - DNA, 50 bp, Artificial
  Synthetic oligonucleotide
tcaggagctacaggtcctgttcgtactcaattaagcgggacagttgcttg

SEQ ID NO: 150219 - DNA, 50 bp, Artificial
  Synthetic oligonucleotide
tcaggggaacctgccttagccgttgccacaaaacgtttccaagtctatcc

SEQ ID NO: 150220 - DNA, 50 bp, Artificial
  Synthetic oligonucleotide
atcggccctttaaaaaccgttatgctgaagcggcccggtcgggaactgga

SEQ ID NO: 150221 - DNA, 50 bp, Artificial
  Synthetic oligonucleotide
tcataggcatggcttttgctgcgggctggactccttgcacgggccctatt

SEQ ID NO: 150222 - DNA, 50 bp, Artificial
  Synthetic oligonucleotide
atcggtgggtgcacgtccccctcagctattccctatccccgagcatctga

SEQ ID NO: 150223 - DNA, 50 bp, Artificial
  Synthetic oligonucleotide
agacagaccggatcgaagttgtctttcctccgggcggagacgccgcattg

SEQ ID NO: 150224 - DNA, 50 bp, Artificial
  Synthetic oligonucleotide
tcatgcttagtatgcagcgtcctgacgcaaaagtattagacggtaagttg

SEQ ID NO: 150225 - DNA, 50 bp, Artificial
  Synthetic oligonucleotide
atcgtgctttggccacggcttccgtcctccggctgactccaagcttgccg

SEQ ID NO: 150226 - DNA, 54 bp, Artificial
  Synthetic oligonucleotide
cggccgtaaaaaaggatcgaaccgaatatcaatggttccttcagattcgttata

SEQ ID NO: 150227 - DNA, 50 bp, Artificial
  Synthetic oligonucleotide
taaagatcatcatggtgaaaactttggctccgctggctttgcattgctag

SEQ ID NO: 150228 - DNA, 50 bp, Artificial
  Synthetic oligonucleotide
tattccgtacagacaaacaaggaacgattatcgcgacaaccaatgggacg

SEQ ID NO: 150229 - DNA, 50 bp, Artificial
  Synthetic oligonucleotide
atacagtatattatatcaaacgaaattgccaaaacccttgatataactag

SEQ ID NO: 150230 - DNA, 50 bp, Artificial
  Synthetic oligonucleotide
agccaagcaacgagaaagtctcccagaccgcccgcggaaagtgttcgcct

SEQ ID NO: 150231 - DNA, 50 bp, Artificial
  Synthetic oligonucleotide
ataccacacggagtggccgtctgaccaggaaaacgcgcctgtttcacggg

SEQ ID NO: 150232 - DNA, 50 bp, Artificial
  Synthetic oligonucleotide
ataccggtcccctaaaggaacgagcagcggagctccaaccagcacagcta

SEQ ID NO: 150233 - DNA, 50 bp, Artificial
  Synthetic oligonucleotide
agccaaatggtacttccgccaaacgcaggagcggggactcccttcccgtg

SEQ ID NO: 150234 - DNA, 50 bp, Artificial
  Synthetic oligonucleotide
atacgggctcctgatgacaatcgaccaggagggaggcattgtcacccgcc

SEQ ID NO: 150235 - DNA, 50 bp, Artificial
  Synthetic oligonucleotide
atacgttcctgatggtgaaacgtggtatttgggttctcgttcaggtacac

SEQ ID NO: 150236 - DNA, 50 bp, Artificial
  Synthetic oligonucleotide
agcatttgtgcgtcggtgaacgaagagttggtgcacggcatacctggcga

SEQ ID NO: 150237 - DNA, 60 bp, Artificial
  Synthetic oligonucleotide
gacggaatgaagcgatagcgaaatgatggagcattaaggagttgataggtaactttgacc

SEQ ID NO: 150238 - DNA, 50 bp, Artificial
  Synthetic oligonucleotide
agcatggccccgacaagcaatgagctgacgaccagcccttctgtgaatgc

SEQ ID NO: 150239 - DNA, 50 bp, Artificial
  Synthetic oligonucleotide
ataggttattttaatatgtcagtcgcagtcatcgatttgataactgcgac

SEQ ID NO: 150240 - DNA, 50 bp, Artificial
  Synthetic oligonucleotide
agcacgggcatccgatgctcagggcgcggcacctgccacatgaagttacg

SEQ ID NO: 150241 - DNA, 50 bp, Artificial
  Synthetic oligonucleotide
atatgccgcttcgagcatgtctttatgcgcgccggcccccgtgtattcgc

SEQ ID NO: 150242 - DNA, 50 bp, Artificial
  Synthetic oligonucleotide
atatgtgcggctcccatccagtgaacgcatgcaccgctgttctgtccccg

SEQ ID NO: 150243 - DNA, 50 bp, Artificial
  Synthetic oligonucleotide
gttgtaaagtagccaaagctagcgccctgtattacttcccgataccacag

SEQ ID NO: 150244 - DNA, 50 bp, Artificial
  Synthetic oligonucleotide
atcacctgggagttggcccactgaacgtggagtaggtgtggccggagtga

SEQ ID NO: 150245 - DNA, 50 bp, Artificial
  Synthetic oligonucleotide
atcagacgtaccgccaatacttagaagaagggcaccagatgatagacgga

SEQ ID NO: 150246 - DNA, 50 bp, Artificial
  Synthetic oligonucleotide
atcagacgtggttctatccggaaggtgggggacagcctgcggacaagggt

SEQ ID NO: 150247 - DNA, 50 bp, Artificial
  Synthetic oligonucleotide
agaaccccctgcaactggtgaggtcggctggcgtaaaggactggcgaaag

SEQ ID NO: 150248 - DNA, 60 bp, Artificial
  Synthetic oligonucleotide
gacggtcacaggagtttctccgacatatacaatcaccacatgatcgttgctagtgaaacg

SEQ ID NO: 150249 - DNA, 50 bp, Artificial
  Synthetic oligonucleotide
tccctcggtccgcgaattacggattccgtcgatggctctgtgacagctcg

SEQ ID NO: 150250 - DNA, 50 bp, Artificial
  Synthetic oligonucleotide
agaacacttggggcccccgcgcgtgcgatttcaaacaaatggacggccga

SEQ ID NO: 150251 - DNA, 50 bp, Artificial
  Synthetic oligonucleotide
agaaagtctcccagaccgcccgcggaaagtgttcgcctgcagtggagatt

SEQ ID NO: 150252 - DNA, 50 bp, Artificial
  Synthetic oligonucleotide
tccgatttgcaaactttcgttctcttggtggatgcccaagaatattgggc

SEQ ID NO: 150253 - DNA, 50 bp, Artificial
  Synthetic oligonucleotide
atgccgtggctgaacacccttccgcctttcgatggtacagctccgggcgc

SEQ ID NO: 150254 - DNA, 50 bp, Artificial
  Synthetic oligonucleotide
atgcgaagcgcgttgtcaatcgcagccaagtaggcggacagtcaacgcat

SEQ ID NO: 150255 - DNA, 50 bp, Artificial
  Synthetic oligonucleotide
gtgctttgtgaaccccgctatcatccgatataaaatcgcccacacgaacc

SEQ ID NO: 150256 - DNA, 50 bp, Artificial
  Synthetic oligonucleotide
atgcggaattaatggggtagccagggacgggccaagccaactgtccgcca

SEQ ID NO: 150257 - DNA, 50 bp, Artificial
  Synthetic oligonucleotide
tccgcgatcggctcaggctaccaaggcggactggcccgtattgcgacaga

SEQ ID NO: 150258 - DNA, 50 bp, Artificial
  Synthetic oligonucleotide
atgcggtgtcccgtctctccatgagactgtgcaagccactgcggttccaa

SEQ ID NO: 150259 - DNA, 60 bp, Artificial
  Synthetic oligonucleotide
cggcatatcaaaaaattgaatgtaacagatgcggaaatgcttcgtgaagagattaaacgc

SEQ ID NO: 150260 - DNA, 50 bp, Artificial
  Synthetic oligonucleotide
atgcgtatgcctcgcttgaacaagtctgccggtaccagacatggggcccc

SEQ ID NO: 150261 - DNA, 50 bp, Artificial
  Synthetic oligonucleotide
tccgctgcaggtactcgcttttcccgggtgtcggtgccttccgctacaac

SEQ ID NO: 150262 - DNA, 50 bp, Artificial
  Synthetic oligonucleotide
atgctcactctgcccggctgtctgtcacccaacgccatttccctaggctt

SEQ ID NO: 150263 - DNA, 50 bp, Artificial
  Synthetic oligonucleotide
atgctctgcccctgtgcatcaggaagattgggccggtcgctctctgtcaa

SEQ ID NO: 150264 - DNA, 50 bp, Artificial
  Synthetic oligonucleotide
tccggggcacgttcggtaccttcaagcgcatagtaaagcgtgttggcgct

SEQ ID NO: 150265 - DNA, 50 bp, Artificial
  Synthetic oligonucleotide
atggccggtcgggtgcgcattaaataaccgtacttgcgaaagcggggccg

SEQ ID NO: 150266 - DNA, 50 bp, Artificial
  Synthetic oligonucleotide
atggcgggcgaatggagcgatgtgaaagacgagaacggtgcgatccggtt

SEQ ID NO: 150267 - DNA, 50 bp, Artificial
  Synthetic oligonucleotide
gtgttcagtttaacggctataccgaactcagacaaaggcctgtaagccaa

SEQ ID NO: 150268 - DNA, 50 bp, Artificial
  Synthetic oligonucleotide
atctcgggccatttgacagctggcttgcggtgagagggctgaagacgctg

SEQ ID NO: 150269 - DNA, 50 bp, Artificial
  Synthetic oligonucleotide
atgacaccacttctccgattcacgtccccagaaacgacaagggggcgccc

SEQ ID NO: 150270 - DNA, 60 bp, Artificial
  Synthetic oligonucleotide
cggattggacacagaaccatacagcgctggatatattgcgacctgggctaaagacattca

SEQ ID NO: 150271 - DNA, 50 bp, Artificial
  Synthetic oligonucleotide
atgacggcagaggaccgcagtgcgaaatacgcgggcttcggatttgacgc

SEQ ID NO: 150272 - DNA, 50 bp, Artificial
  Synthetic oligonucleotide
agaaggcactatagaagcgtttgagtcgtgtatgaatcatattaggcgtt

SEQ ID NO: 150273 - DNA, 50 bp, Artificial
  Synthetic oligonucleotide
tccacgcgtgttaacatctgcataggcacctcagcgccagcggcatagct

SEQ ID NO: 150274 - DNA, 50 bp, Artificial
  Synthetic oligonucleotide
tccactttcctgcgcgcggttgaaccgttgaacaaagtctgagtccgccg

SEQ ID NO: 150275 - DNA, 50 bp, Artificial
  Synthetic oligonucleotide
gtgtagaatcgggggcagcggataccaacctggacctaagggggctccgg

SEQ ID NO: 150276 - DNA, 50 bp, Artificial
  Synthetic oligonucleotide
atgagcggtccgcaaatcccacctgagacagcgcccgcttgaagaaaccc

SEQ ID NO: 150277 - DNA, 50 bp, Artificial
  Synthetic oligonucleotide
atgagctgccccgttcgctcgtcatagaggtgccgctctcgcaccccgaa

SEQ ID NO: 150278 - DNA, 50 bp, Artificial
  Synthetic oligonucleotide
atgaggcgcctggccttcaatctcgcctgcgtgagttcccggtctcccgc

SEQ ID NO: 150279 - DNA, 50 bp, Artificial
  Synthetic oligonucleotide
agaaccggggaacctgtcttctttcccggtgaccagcgggcttcgagacg

SEQ ID NO: 150280 - DNA, 50 bp, Artificial
  Synthetic oligonucleotide
atgagtcccggacatagccgcttcgcctcccataagggcatcgggggctt

SEQ ID NO: 150281 - DNA, 58 bp, Artificial
  Synthetic oligonucleotide
gactctctggcgactcaaaaacggtgtctggcgactctctggcgactcaaaaacggtg

SEQ ID NO: 150282 - DNA, 50 bp, Artificial
  Synthetic oligonucleotide
atgatcgcctctcaagcgggagtgagcaggacgtggatccggacatggcc

SEQ ID NO: 150283 - DNA, 50 bp, Artificial
  Synthetic oligonucleotide
atgcacgggggcttaagctccggacatggaaaagtaacgggtgcctcccg

SEQ ID NO: 150284 - DNA, 50 bp, Artificial
  Synthetic oligonucleotide
gtgggatgcaaccaatttgcacgtctactttctttcctgcacaagcgaca

SEQ ID NO: 150285 - DNA, 50 bp, Artificial
  Synthetic oligonucleotide
atgccattgttagtcattttgtttggggtactgtttggatttttcgtagc

SEQ ID NO: 150286 - DNA, 50 bp, Artificial
  Synthetic oligonucleotide
gtggatcggctgtcgtaaccggagcggtggtgtccgtttctccgtcacta

SEQ ID NO: 150287 - DNA, 50 bp, Artificial
  Synthetic oligonucleotide
agggctaagcggtttaacacgcgcacccaaagcggttcggttggaacgaa

SEQ ID NO: 150288 - DNA, 50 bp, Artificial
  Synthetic oligonucleotide
agggctaccgcgctacgcttggtggccttttattcggttgaaggctggta

SEQ ID NO: 150289 - DNA, 50 bp, Artificial
  Synthetic oligonucleotide
aggggtgtctttcgggatgccccttcgtgttggcccccttggctagactt

SEQ ID NO: 150290 - DNA, 50 bp, Artificial
  Synthetic oligonucleotide
aggacccccacaacgcctgtagaggcgccaaggccttattccccatcaac

SEQ ID NO: 150291 - DNA, 50 bp, Artificial
  Synthetic oligonucleotide
aggacactcccggaatgaccgcagtagcgtgtgcctgcagcggaaatcaa

SEQ ID NO: 150292 - DNA, 60 bp, Artificial
  Synthetic oligonucleotide
cggagcatatttcgctccgatctgttgaatcgtcaccaatccttgagatatatagacccg

SEQ ID NO: 150293 - DNA, 50 bp, Artificial
  Synthetic oligonucleotide
agggtaagggggccattattagttcgggagctgccgcctgagcggttgga

SEQ ID NO: 150294 - DNA, 50 bp, Artificial
  Synthetic oligonucleotide
aggtaaggccgctaagggaccgaagtgggcagtggctagcgctacaccta

SEQ ID NO: 150295 - DNA, 50 bp, Artificial
  Synthetic oligonucleotide
taggctatgggggtcgccgccacttctccactcaccccgtccgcacctag

SEQ ID NO: 150296 - DNA, 50 bp, Artificial
  Synthetic oligonucleotide
aggacacgcatccgccgtgcaatcagctgccgactgtgtcgaaggtagat

SEQ ID NO: 150297 - DNA, 50 bp, Artificial
  Synthetic oligonucleotide
aggaatctcgaccagaatgatctaatagcatcggaattataatgacgtga

SEQ ID NO: 150298 - DNA, 50 bp, Artificial
  Synthetic oligonucleotide
aggaagcggcccatggtttttgtcaggcggccgttccaggtgacaggaat

SEQ ID NO: 150299 - DNA, 50 bp, Artificial
  Synthetic oligonucleotide
aggtacggctaataccttacgttcctagatacaagcgactccctcaaagg

SEQ ID NO: 150300 - DNA, 50 bp, Artificial
  Synthetic oligonucleotide
aggaaaagccgccaactgggggcgccgtacgatccaaatcaccgtactgg

SEQ ID NO: 150301 - DNA, 50 bp, Artificial
  Synthetic oligonucleotide
aggtatggacggaacaaacatgcaggcgcgtaaccttctattaatgctcg

SEQ ID NO: 150302 - DNA, 50 bp, Artificial
  Synthetic oligonucleotide
aggtgcatggctttgtgaagggggtgtttgcccaacgcctgatggacgtg

SEQ ID NO: 150303 - DNA, 59 bp, Artificial
  Synthetic oligonucleotide
gtataagatggtcaagtctaagtaacttatattcttggttgggatcaatgctctaattc

SEQ ID NO: 150304 - DNA, 57 bp, Artificial
  Synthetic oligonucleotide
caacggagctcaagcgttacattgggcccgcctaaagcaactagtcacccatttata

SEQ ID NO: 150305 - DNA, 60 bp, Artificial
  Synthetic oligonucleotide
cggacgaatcttatggcagagcactatgaagctttacagagcaaaactggtataccttac

SEQ ID NO: 150306 - DNA, 50 bp, Artificial
  Synthetic oligonucleotide
tagtaaccccgtagaagcgttccatgcactcgggagggtaaaggtattca

SEQ ID NO: 150307 - DNA, 50 bp, Artificial
  Synthetic oligonucleotide
tagtactgcggggcttagaaagccggtaggagagctgtacccggacccgc

SEQ ID NO: 150308 - DNA, 50 bp, Artificial
  Synthetic oligonucleotide
aggtgcgtgacctcctgtgggattagcgggacgtctagtttcagcgcccg

SEQ ID NO: 150309 - DNA, 50 bp, Artificial
  Synthetic oligonucleotide
agctgtcagggtcaatcgtctcccgcccatttgggccaggtatccgctca

SEQ ID NO: 150310 - DNA, 50 bp, Artificial
  Synthetic oligonucleotide
aggcaggccacacggcaagctcacccaacatgtcctaccaagtggcgaat

SEQ ID NO: 150311 - DNA, 50 bp, Artificial
  Synthetic oligonucleotide
aggcctgacccccggccaaaaaggttttgtccgcagtcgcacggaatttc

SEQ ID NO: 150312 - DNA, 50 bp, Artificial
  Synthetic oligonucleotide
aggcagccttgagatgcccacaggaccagcccggaataaggtgcatggac

SEQ ID NO: 150313 - DNA, 50 bp, Artificial
  Synthetic oligonucleotide
aggcgcatgactatgccccggcagctaaacgggtccaactggctaattgc

SEQ ID NO: 150314 - DNA, 50 bp, Artificial
  Synthetic oligonucleotide
tagacttttggtaaagttgcccactggataacaagataaaccaacttccc

SEQ ID NO: 150315 - DNA, 50 bp, Artificial
  Synthetic oligonucleotide
tagcagctggtgcactaggtggcttgattatttgtgcagaaacaatggcg

SEQ ID NO: 150316 - DNA, 60 bp, Artificial
  Synthetic oligonucleotide
gagaactacgaagcgattaatggtgtactacagatctcttggaacggtgacatcacaatt

SEQ ID NO: 150317 - DNA, 50 bp, Artificial
  Synthetic oligonucleotide
aggcgcggtccgggggcatcccgaagagtcccaaccccacgatcctacta

SEQ ID NO: 150318 - DNA, 50 bp, Artificial
  Synthetic oligonucleotide
aggagtgtatggcaatgcaacaggaggcgtgagaggggctgtcgctgggg

SEQ ID NO: 150319 - DNA, 50 bp, Artificial
  Synthetic oligonucleotide
aggcgcgtgcgaaagggcggacgaccgaagcgatttcgaaactgttaagc

SEQ ID NO: 150320 - DNA, 50 bp, Artificial
  Synthetic oligonucleotide
aggcgtgaagccagacaatgccgctccattccgttccgtaagcgtcccgc

SEQ ID NO: 150321 - DNA, 50 bp, Artificial
  Synthetic oligonucleotide
tagcgctcgtaaaagttcgtcgcaccagccggcccatatccttcgtgcca

SEQ ID NO: 150322 - DNA, 50 bp, Artificial
  Synthetic oligonucleotide
aggctccacggcggtaacttcggcccctctctctgcaaatggcactgtaa

SEQ ID NO: 150323 - DNA, 50 bp, Artificial
  Synthetic oligonucleotide
aggctccgtgctcagcgctttaagcgaaaccggggaacaggccagctatt

SEQ ID NO: 150324 - DNA, 50 bp, Artificial
  Synthetic oligonucleotide
aggctcttgtgggtgcccagtctcctgctgtgaaacaggtggcggtttta

SEQ ID NO: 150325 - DNA, 50 bp, Artificial
  Synthetic oligonucleotide
aggctggtactgctgtcaagccgcactgtcagccgctcgtcccctgcgga

SEQ ID NO: 150326 - DNA, 50 bp, Artificial
  Synthetic oligonucleotide
agggaagaagcggttagtgggctgacgtgcatcgcagtgccaattcgcga

SEQ ID NO: 150327 - DNA, 56 bp, Artificial
  Synthetic oligonucleotide
cggacatgtaggacgcgaaattgcttatgacttattacataaacacggaacgaaag

SEQ ID NO: 150328 - DNA, 50 bp, Artificial
  Synthetic oligonucleotide
tactgaatcctatgataagcgtatgtcgcctcataaactaagacacacgt

SEQ ID NO: 150329 - DNA, 50 bp, Artificial
  Synthetic oligonucleotide
agggatttagagatacggcttgcgatctcgtaatattgaattacacctct

SEQ ID NO: 150330 - DNA, 50 bp, Artificial
  Synthetic oligonucleotide
aggagcagccgcctctacgtcgaacgtgtcactcccctgtgactgcacga

SEQ ID NO: 150331 - DNA, 50 bp, Artificial
  Synthetic oligonucleotide
agtgattgattccgggagcggaaatggggtctcgagtgttggcggctccg

SEQ ID NO: 150332 - DNA, 50 bp, Artificial
  Synthetic oligonucleotide
agcgagttttggcttgccgggctgagaatcgagcctgacgtctccgttcc

SEQ ID NO: 150333 - DNA, 50 bp, Artificial
  Synthetic oligonucleotide
agtggccagtagaaccggcggcgctatggtccgtgaagcaactgtgcaga

SEQ ID NO: 150334 - DNA, 50 bp, Artificial
  Synthetic oligonucleotide
agtggcccggacgatgggtctcccgtatccaggcggacctcacattgatc

SEQ ID NO: 150335 - DNA, 50 bp, Artificial
  Synthetic oligonucleotide
agcctgacggcgggacaactcctgacggcgcaccgtatacgtacagtgca

SEQ ID NO: 150336 - DNA, 50 bp, Artificial
  Synthetic oligonucleotide
agtgtatgccccgctccgagcaatgcaagggacaccgggattcccacatc

SEQ ID NO: 150337 - DNA, 50 bp, Artificial
  Synthetic oligonucleotide
agccgtacggggccttgctcgcattacacacaggtcgaccggtcaacatt

SEQ ID NO: 150338 - DNA, 60 bp, Artificial
  Synthetic oligonucleotide
gagagagtcctggcacgaaatgaaattccattagccagggatcgcgaaggacatttatac

SEQ ID NO: 150339 - DNA, 50 bp, Artificial
  Synthetic oligonucleotide
taacgagactgaagaagcggatagtgtcttatataattggaatacaaatg

SEQ ID NO: 150340 - DNA, 50 bp, Artificial
  Synthetic oligonucleotide
agttgatttagagaacattatgcacacgttaaaaccaggacaaacgtatg

SEQ ID NO: 150341 - DNA, 50 bp, Artificial
  Synthetic oligonucleotide
agccgcctttcaaacaagcaaggtaagccgcatacgcctctggcacgcgt

SEQ ID NO: 150342 - DNA, 50 bp, Artificial
  Synthetic oligonucleotide
agttgtcggcctaagccgcccaaggatgattgccgacgtcgcttcgtctt

SEQ ID NO: 150343 - DNA, 50 bp, Artificial
  Synthetic oligonucleotide
agtttacggggcagacgggccctgagttctggcacatggctaatcacccc

SEQ ID NO: 150344 - DNA, 50 bp, Artificial
  Synthetic oligonucleotide
agcccgggccacccgaatcgtcgtcattactgcttccgtccctgaattga

SEQ ID NO: 150345 - DNA, 50 bp, Artificial
  Synthetic oligonucleotide
agcccctttgatcaggaacgacgacacgatagcctgcctcggctaggggc

SEQ ID NO: 150346 - DNA, 50 bp, Artificial
  Synthetic oligonucleotide
agcccctcgaggtcgaataacctgcccgccacgaaaccaaaagacggctc

SEQ ID NO: 150347 - DNA, 50 bp, Artificial
  Synthetic oligonucleotide
agcccctcatctccgagggtcaccggttcctgaagccgcgaagcgccgag

SEQ ID NO: 150348 - DNA, 50 bp, Artificial
  Synthetic oligonucleotide
ataagagcgcgcttccgacagaagtcgcgtcacccagcacaagaccggac

SEQ ID NO: 150349 - DNA, 55 bp, Artificial
  Synthetic oligonucleotide
gagagccgggaataggtgggagcccggtacggtgccatatacggaatgggcttac

SEQ ID NO: 150350 - DNA, 50 bp, Artificial
  Synthetic oligonucleotide
tattattcagctttcgctccgttaccttctcaaaacttacagcatcagcc

SEQ ID NO: 150351 - DNA, 50 bp, Artificial
  Synthetic oligonucleotide
taaagatggctttgttccgtttagattcaggtaagttccggctagctagt

SEQ ID NO: 150352 - DNA, 50 bp, Artificial
  Synthetic oligonucleotide
tagtgctcacgaatgttcaattcgctccgcgccagtgctcgcccttccta

SEQ ID NO: 150353 - DNA, 50 bp, Artificial
  Synthetic oligonucleotide
agtaccggacgcgatccaaatgctggtcgtagcgcccgttgcactcctcg

SEQ ID NO: 150354 - DNA, 50 bp, Artificial
  Synthetic oligonucleotide
tacaggctttacggaaagctcggcgagaccacaaatatgcgccccgcctt

SEQ ID NO: 150355 - DNA, 50 bp, Artificial
  Synthetic oligonucleotide
agtatgttcctcgtgcgccgtataagcgggacaggcaattccgcggccgc

SEQ ID NO: 150356 - DNA, 50 bp, Artificial
  Synthetic oligonucleotide
taattatgtaggttacatgagaagccctattaacatccaggctgccccga

SEQ ID NO: 150357 - DNA, 50 bp, Artificial
  Synthetic oligonucleotide
agtcagcaacccgttgtgagtgtccggcagtgtatggatcccgggcatcc

SEQ ID NO: 150358 - DNA, 50 bp, Artificial
  Synthetic oligonucleotide
agtcagccccgttgcgatcggtttcgatgccacagcagacacggagcgca

SEQ ID NO: 150359 - DNA, 50 bp, Artificial
  Synthetic oligonucleotide
taatggccacctcagcgatcgggcccggctttttaacacagacagccgta

SEQ ID NO: 150360 - DNA, 58 bp, Artificial
  Synthetic oligonucleotide
cggaagctagatagaccgttgctttcccacggactttcacaggcagcaattcttcaaa

SEQ ID NO: 150361 - DNA, 50 bp, Artificial
  Synthetic oligonucleotide
agcgttaatagctctcgggttttcaaatcgagtccgttacgagtataaaa

SEQ ID NO: 150362 - DNA, 50 bp, Artificial
  Synthetic oligonucleotide
agtcatagctggcgccttgctgtacggcggtttgttcctaggacacggcg

SEQ ID NO: 150363 - DNA, 50 bp, Artificial
  Synthetic oligonucleotide
agcgtcggagctgtaatcttccaaaggaggcttcccgccctgtcatcgga

SEQ ID NO: 150364 - DNA, 50 bp, Artificial
  Synthetic oligonucleotide
agcggggcaaaactgcataggcgtgcagcgcttgtacgtccacgaagagg

SEQ ID NO: 150365 - DNA, 50 bp, Artificial
  Synthetic oligonucleotide
agtcattctcgctaaaggttggtagccgatagcatatgagagtggctttt

SEQ ID NO: 150366 - DNA, 50 bp, Artificial
  Synthetic oligonucleotide
agtccggcttggacggagattgctggacgcgtggcatcaggggaaggcgt

SEQ ID NO: 150367 - DNA, 50 bp, Artificial
  Synthetic oligonucleotide
agcggaaatggggtctcgagtgttggcggctccgtcgcaaggtccatgat

SEQ ID NO: 150368 - DNA, 50 bp, Artificial
  Synthetic oligonucleotide
agcgcgggaagcatgctgcggaccggaatacagaaatctcatgataaaca

SEQ ID NO: 150369 - DNA, 50 bp, Artificial
  Synthetic oligonucleotide
agcgcgacaatcgcctcccggccaagagagtcgcctcttaaaggaacgcg

SEQ ID NO: 150370 - DNA, 50 bp, Artificial
  Synthetic oligonucleotide
agcgccgctctcgcagattcgggatcaagtacggttcccgctccgacaag

SEQ ID NO: 150371 - DNA, 60 bp, Artificial
  Synthetic oligonucleotide
cggaacaatgcgcaatagtgtggtgggggctatgttaatgcgcgatgttcccttattcaa

SEQ ID NO: 150372 - DNA, 50 bp, Artificial
  Synthetic oligonucleotide
agcgccaacggacccgacggttccatcgtactccatggtccctgttcccg

SEQ ID NO: 150373 - DNA, 50 bp, Artificial
  Synthetic oligonucleotide
accggtcccgtcgggaatctggtacgtcgcctcttcaatgagccggctga

SEQ ID NO: 150374 - DNA, 50 bp, Artificial
  Synthetic oligonucleotide
accggtaaccacgccgtctccgggaaaaacgcgcttatgggcagggtagc

SEQ ID NO: 150375 - DNA, 50 bp, Artificial
  Synthetic oligonucleotide
accggctaccgagcccaacacaatgatgcagtaggcccgacaaaaggcgg

SEQ ID NO: 150376 - DNA, 50 bp, Artificial
  Synthetic oligonucleotide
accgcccttgggacacgaaggctgtgctgccgggccttaaaccgctgaag

SEQ ID NO: 150377 - DNA, 50 bp, Artificial
  Synthetic oligonucleotide
tgaaccgatattgtacatggccggtgaagcagtacccatgctgaaggcct

SEQ ID NO: 150378 - DNA, 50 bp, Artificial
  Synthetic oligonucleotide
accgcaaggaggactaagaagctcgccagctgctgtctcgtggggaccga

SEQ ID NO: 150379 - DNA, 50 bp, Artificial
  Synthetic oligonucleotide
acccggcatacttccctgcggctaaacccatgcaccccaaatggccacac

SEQ ID NO: 150380 - DNA, 50 bp, Artificial
  Synthetic oligonucleotide
accccgttgatgagacggaccgggacaacgttttccgctgcgacaaacgc

SEQ ID NO: 150381 - DNA, 50 bp, Artificial
  Synthetic oligonucleotide
cagatccccagatcctgtggtgaaatgcggccctgcgcagttacagcggt

SEQ ID NO: 150382 - DNA, 56 bp, Artificial
  Synthetic oligonucleotide
gagagtttggatatgcttggtatacctttaaaccttatgtaattgtgcttttagga

SEQ ID NO: 150383 - DNA, 50 bp, Artificial
  Synthetic oligonucleotide
cagcatagggccgccgattaatgacataaaccgcgagcctgacgcgtggc

SEQ ID NO: 150384 - DNA, 50 bp, Artificial
  Synthetic oligonucleotide
gggcgcgtttcccgcagtgccgatgaaggtcctgcgtttgcggagcatac

SEQ ID NO: 150385 - DNA, 50 bp, Artificial
  Synthetic oligonucleotide
cagccgggtgtccttattcccaccgcacggctgtcctcattcagagggcg

SEQ ID NO: 150386 - DNA, 50 bp, Artificial
  Synthetic oligonucleotide
gggccgacgatcgcactgcctccagcgcacatctcgtgaggggctgacac

SEQ ID NO: 150387 - DNA, 50 bp, Artificial
  Synthetic oligonucleotide
gggcacggggtgccgccagaagagcttgtgcacactggaccggacgattg

SEQ ID NO: 150388 - DNA, 50 bp, Artificial
  Synthetic oligonucleotide
accacgaaaaaaagcacactgtaatgataaaatatctgcgtttaagcgcg

SEQ ID NO: 150389 - DNA, 50 bp, Artificial
  Synthetic oligonucleotide
cagcggttggaggggacgggtgttagtgcttatagctttgacccggggct

SEQ ID NO: 150390 - DNA, 50 bp, Artificial
  Synthetic oligonucleotide
cagcgtaccgagcactcccggcgagctgagcggataattgtgagcgatcg

SEQ ID NO: 150391 - DNA, 50 bp, Artificial
  Synthetic oligonucleotide
gggataaccaatgaagtataaaacgcatcttacaacaagcctagcggttg

SEQ ID NO: 150392 - DNA, 50 bp, Artificial
  Synthetic oligonucleotide
caggcgcctgaggaccgggagcattccctcaaatgcagtgaacagctcgc

SEQ ID NO: 150393 - DNA, 56 bp, Artificial
  Synthetic oligonucleotide
cgctttcttagctccaatttgcttaagtcttgttcctacttcctttactgcaccgc

SEQ ID NO: 150394 - DNA, 50 bp, Artificial
  Synthetic oligonucleotide
cacgttttgagtgcctgagcgccaaccatattcctgtcccccgccatgga

SEQ ID NO: 150395 - DNA, 50 bp, Artificial
  Synthetic oligonucleotide
cactagcagatattggacgtgccttgacaggggcttcgtttgtcatcggc

SEQ ID NO: 150396 - DNA, 50 bp, Artificial
  Synthetic oligonucleotide
cactgtatcagctcattcgcaagacgcaaattcccttcactcactaattc

SEQ ID NO: 150397 - DNA, 50 bp, Artificial
  Synthetic oligonucleotide
gggtagccggtgtcactccgcagttaaacgatcgtaagactttcatcatg

SEQ ID NO: 150398 - DNA, 50 bp, Artificial
  Synthetic oligonucleotide
acgagcacccatcggggacacgggcattgcattgcgaagggctgtgactt

SEQ ID NO: 150399 - DNA, 50 bp, Artificial
  Synthetic oligonucleotide
acgacggcaagtgggcgcatggtatcacatcccccgctcggaaaataccg

SEQ ID NO: 150400 - DNA, 50 bp, Artificial
  Synthetic oligonucleotide
ggggtggatggcttattccgaatgaccctatggcggaaaccctttatttt

SEQ ID NO: 150401 - DNA, 50 bp, Artificial
  Synthetic oligonucleotide
ggggtacataactgaagcgggggcggtcatttggctcgctgtgggaacct

SEQ ID NO: 150402 - DNA, 50 bp, Artificial
  Synthetic oligonucleotide
acgaatcgtatcactaatctctgttccacttagcgatgcatataactccg

SEQ ID NO: 150403 - DNA, 50 bp, Artificial
  Synthetic oligonucleotide
cagaaacaggcggcattctcgctgtccaagggggccgtgattatgtgcgg

SEQ ID NO: 150404 - DNA, 60 bp, Artificial
  Synthetic oligonucleotide
gagatacattgtgcatagtaactttctcgatacagttattcttcacacaatagtccacga

SEQ ID NO: 150405 - DNA, 50 bp, Artificial
  Synthetic oligonucleotide
cagaaggccccttctgccattcgttcccccgaagatgcggccgcctactt

SEQ ID NO: 150406 - DNA, 50 bp, Artificial
  Synthetic oligonucleotide
acctcacccgcatcggacgccaccaagtccgggctgaaaaggcagattgg

SEQ ID NO: 150407 - DNA, 50 bp, Artificial
  Synthetic oligonucleotide
accgtttgcgtgcttcccgctgcagtctcggctacttctttgacgccgga

SEQ ID NO: 150408 - DNA, 50 bp, Artificial
  Synthetic oligonucleotide
ggggctaaccggggtgcttccacttttgatgacagccgaggaggctcgat

SEQ ID NO: 150409 - DNA, 50 bp, Artificial
  Synthetic oligonucleotide
cagaaggtaaatggataccaggatcggaaaggaaacttcgcttatcattg

SEQ ID NO: 150410 - DNA, 50 bp, Artificial
  Synthetic oligonucleotide
accgttccggctctgagtaagccggtcttccttccgaccgcgactctccc

SEQ ID NO: 150411 - DNA, 50 bp, Artificial
  Synthetic oligonucleotide
accgtgggtgtgcccccggtcatgcggacgaacggtgaacttgagaaggt

SEQ ID NO: 150412 - DNA, 50 bp, Artificial
  Synthetic oligonucleotide
accggttggcaggtatccccgtccaggcacccgggaataatggcctcccc

SEQ ID NO: 150413 - DNA, 50 bp, Artificial
  Synthetic oligonucleotide
acagagaacctcgccatccatttccgtcgttcccctgcggcagtgcacac

SEQ ID NO: 150414 - DNA, 50 bp, Artificial
  Synthetic oligonucleotide
ggcgcgggtgtggttttctccgctcgttttgtcccggttgttcgacatgc

SEQ ID NO: 150415 - DNA, 59 bp, Artificial
  Synthetic oligonucleotide
caacgatcgcaatatggttctaaagttataataggtagtacagggaattcagatggtgc

SEQ ID NO: 150416 - DNA, 56 bp, Artificial
  Synthetic oligonucleotide
ctcagtacggctaacattccacccttagtcttattacaagcttcacccattaggga

SEQ ID NO: 150417 - DNA, 50 bp, Artificial
  Synthetic oligonucleotide
acactccttttgtatccattgcgcatcttctacatgatcttgccctgtaa

SEQ ID NO: 150418 - DNA, 50 bp, Artificial
  Synthetic oligonucleotide
ggcgcacttctgatctccgcaccccagttggaatggtcccgtcacactct

SEQ ID NO: 150419 - DNA, 50 bp, Artificial
  Synthetic oligonucleotide
catgattgcgttagcacatgataaagaggtgaaagtccgtgtctgaacaa

SEQ ID NO: 150420 - DNA, 50 bp, Artificial
  Synthetic oligonucleotide
catgcaataagcgcacggctgtcgcagccattatgagggccgcgtggctc

SEQ ID NO: 150421 - DNA, 50 bp, Artificial
  Synthetic oligonucleotide
acacccttccgcctttcgatggtacagctccgggcgctagcccctcgagt

SEQ ID NO: 150422 - DNA, 50 bp, Artificial
  Synthetic oligonucleotide
ggcgactgagggcactacggcagtaacggaaccgcaccgttctcgcgatc

SEQ ID NO: 150423 - DNA, 50 bp, Artificial
  Synthetic oligonucleotide
catgccaggtctgccgatggcatccccttgggcaatgttcaggtgagtga

SEQ ID NO: 150424 - DNA, 50 bp, Artificial
  Synthetic oligonucleotide
tgcattgaaagaggactgtctgttgaagggcgttcgggtgtacatggtat

SEQ ID NO: 150425 - DNA, 50 bp, Artificial
  Synthetic oligonucleotide
acaatcgatacaggattcccagaagcttatagcgacgaattctagcgaag

SEQ ID NO: 150426 - DNA, 50 bp, Artificial
  Synthetic oligonucleotide
ggccgccatcgcctattctcgtgtttgccccgcttcagacggtgtggctt

SEQ ID NO: 150427 - DNA, 55 bp, Artificial
  Synthetic oligonucleotide
ctcactatgcaaccctcttgtggttgtcaaaaggtacccttttgaccctgccaac

SEQ ID NO: 150428 - DNA, 50 bp, Artificial
  Synthetic oligonucleotide
ggccagccgacaatgaactgaacgggtgctgctaacgccagctgaaccca

SEQ ID NO: 150429 - DNA, 50 bp, Artificial
  Synthetic oligonucleotide
catttcccgcgatggctagcggcctgcctttcagcgaagggtcatacgcc

SEQ ID NO: 150430 - DNA, 50 bp, Artificial
  Synthetic oligonucleotide
acaacggcgacgcttgctgacggtgtaaacggcatgattccacaggccgg

SEQ ID NO: 150431 - DNA, 50 bp, Artificial
  Synthetic oligonucleotide
cattttaatgatcatgattatttatgcggatacgttcgaagtttagctcg

SEQ ID NO: 150432 - DNA, 50 bp, Artificial
  Synthetic oligonucleotide
tgcgggctgtttagacccattccgaataagcgcaacaatagaagatgcga

SEQ ID NO: 150433 - DNA, 50 bp, Artificial
  Synthetic oligonucleotide
ggcacccatccctcggtaatcgttttggacaggcgccagcggggatttac

SEQ ID NO: 150434 - DNA, 50 bp, Artificial
  Synthetic oligonucleotide
gggagggaggaaaatgagctggtacggggtatgcatagttatagtcgtat

SEQ ID NO: 150435 - DNA, 50 bp, Artificial
  Synthetic oligonucleotide
tgaggaatgtgtgcagcactttcacttcatttatccgatattgtccctac

SEQ ID NO: 150436 - DNA, 50 bp, Artificial
  Synthetic oligonucleotide
caggggtacggcagcacagaagcatggacggtcagcgtatggcggcctga

SEQ ID NO: 150437 - DNA, 50 bp, Artificial
  Synthetic oligonucleotide
caggtatgcgactcagcggggcggtcggtgagcctcctcggctacgcctg

SEQ ID NO: 150438 - DNA, 57 bp, Artificial
  Synthetic oligonucleotide
ctgtctcctccttatgcgaatgttttaagcctaacgaatttccatgcttcccaaata

SEQ ID NO: 150439 - DNA, 50 bp, Artificial
  Synthetic oligonucleotide
caggtccggtatagcttcgaactttgaacccatcttctgtacgaactact

SEQ ID NO: 150440 - DNA, 50 bp, Artificial
  Synthetic oligonucleotide
caggtggtcggcggttctcttgatgcggttgccagggaaatgagcgccac

SEQ ID NO: 150441 - DNA, 50 bp, Artificial
  Synthetic oligonucleotide
gggacttccacgacgtgcacccacctgacctggcggtgaatccccttatg

SEQ ID NO: 150442 - DNA, 50 bp, Artificial
  Synthetic oligonucleotide
acatacctccgagcacacggctgcacagctcgcattgctccccgcctaac

SEQ ID NO: 150443 - DNA, 50 bp, Artificial
  Synthetic oligonucleotide
tgagttattctcgatgtattcctatttaggacttcccgtagtgattattg

SEQ ID NO: 150444 - DNA, 50 bp, Artificial
  Synthetic oligonucleotide
gggaacctttcggcgacgcattgctctgacacgtgcaactaatgggcgcc

SEQ ID NO: 150445 - DNA, 50 bp, Artificial
  Synthetic oligonucleotide
acagtcccctccgcttttgatccgtccagcttcagcgggcagcgcctagc

SEQ ID NO: 150446 - DNA, 50 bp, Artificial
  Synthetic oligonucleotide
acagggcgccttcaaagctgcgtgccgcatcaaaggctccgcggtcataa

SEQ ID NO: 150447 - DNA, 50 bp, Artificial
  Synthetic oligonucleotide
acagcgcgttaccgcacagccgggggacattttagtgtcaagcaggggaa

SEQ ID NO: 150448 - DNA, 50 bp, Artificial
  Synthetic oligonucleotide
acagccggcgcctcccattcggacggatcactcaggtcaccgctctgtgc

SEQ ID NO: 150449 - DNA, 60 bp, Artificial
  Synthetic oligonucleotide
ctgtgcagaaatacgcctatctaattctgctcgtttcacttcaagtcgaatcatcttttg

SEQ ID NO: 150450 - DNA, 50 bp, Artificial
  Synthetic oligonucleotide
catatccgccaccaattatgacacaagttagttcgctcattattcgcaac

SEQ ID NO: 150451 - DNA, 50 bp, Artificial
  Synthetic oligonucleotide
catccagtgaacgcatgcaccgctgttctgtccccggtatcgcaaccggg

SEQ ID NO: 150452 - DNA, 50 bp, Artificial
  Synthetic oligonucleotide
catccggtttggtatgagctgccccgttcgctcgtcatagaggtgccgct

SEQ ID NO: 150453 - DNA, 50 bp, Artificial
  Synthetic oligonucleotide
tgattcaaacgcatataccgcaccaatggatatacaccgctgaaccattc

SEQ ID NO: 150454 - DNA, 50 bp, Artificial
  Synthetic oligonucleotide
acagcacggttccgccaggtgtcagaccggctatggatgcggccaaatag

SEQ ID NO: 150455 - DNA, 50 bp, Artificial
  Synthetic oligonucleotide
attgagcgggcgtgtatagagggtggcgctacgtgcgaggggaggcgtga

SEQ ID NO: 150456 - DNA, 50 bp, Artificial
  Synthetic oligonucleotide
tcgactataaactggtttgatgtgatttataattattcagtgcttggagc

SEQ ID NO: 150457 - DNA, 50 bp, Artificial
  Synthetic oligonucleotide
attgccatctatgacgctgtgcaagccaaccggatgacggaggcgcacct

SEQ ID NO: 150458 - DNA, 50 bp, Artificial
  Synthetic oligonucleotide
gtccctccgaccgaagaatgtccgcacggcacggtggttgtccaagtcaa

SEQ ID NO: 150459 - DNA, 50 bp, Artificial
  Synthetic oligonucleotide
attgcgctgatcgcaactgttgtgccgtccgccctcgcactgattgtcct

SEQ ID NO: 150460 - DNA, 60 bp, Artificial
  Synthetic oligonucleotide
ctgttctctattttcagttgatggactttcgtcatgagcagatgcttgagtatgtaaatc

SEQ ID NO: 150461 - DNA, 50 bp, Artificial
  Synthetic oligonucleotide
gtccagaagggttccccgcgctcaggcggaacgaatagcatggtggcgat

SEQ ID NO: 150462 - DNA, 50 bp, Artificial
  Synthetic oligonucleotide
atttcacccgcgtggtctgtccactcgggctccggcacatccaactactg

SEQ ID NO: 150463 - DNA, 50 bp, Artificial
  Synthetic oligonucleotide
tcgcagtagcgtgtacagcagcgcttgtcagtccggcttggacggagatt

SEQ ID NO: 150464 - DNA, 50 bp, Artificial
  Synthetic oligonucleotide
atttcccgatgctcttgacggggcgcatgattcaggcagtcggtacggga

SEQ ID NO: 150465 - DNA, 50 bp, Artificial
  Synthetic oligonucleotide
gtcattgatctactagttccagctataacatcgtataaaactattattac

SEQ ID NO: 150466 - DNA, 50 bp, Artificial
  Synthetic oligonucleotide
caaaccctgatcccagcatggccccgacaagcaatgagctgacgaccagc

SEQ ID NO: 150467 - DNA, 50 bp, Artificial
  Synthetic oligonucleotide
tcgccagctacttgctctcatgccgcccgacattccgtgtctcgtgatcg

SEQ ID NO: 150468 - DNA, 50 bp, Artificial
  Synthetic oligonucleotide
gtcaaaggctgctcgttttttcgcgccggcgaaataaataatgctacgca

SEQ ID NO: 150469 - DNA, 50 bp, Artificial
  Synthetic oligonucleotide
tcgcccgatcgatcgtaagcggccagctttcaccgacgactttggcgtaa

SEQ ID NO: 150470 - DNA, 50 bp, Artificial
  Synthetic oligonucleotide
tcgctaagagtgtattaaccgcattttctaagtgagaacggaaaatttcc

SEQ ID NO: 150471 - DNA, 57 bp, Artificial
  Synthetic oligonucleotide
ctcaatccgttcatgtagtcaggactggccgtaatcaaaaactcactcactaaaacg

SEQ ID NO: 150472 - DNA, 50 bp, Artificial
  Synthetic oligonucleotide
acgtgatattcactgtaaatgtctcgctttgacacatctcggtcttttgc

SEQ ID NO: 150473 - DNA, 50 bp, Artificial
  Synthetic oligonucleotide
acgtgaaaacttccggccaggcgatgggagtcgggtctgcacctaaggcc

SEQ ID NO: 150474 - DNA, 50 bp, Artificial
  Synthetic oligonucleotide
atggctggtgcctccccgcttttggtcgtatccgccgatagaaatgcccg

SEQ ID NO: 150475 - DNA, 50 bp, Artificial
  Synthetic oligonucleotide
atgggcagtaccgaacgtgtcttctacaccccggtctttgcgatgcggct

SEQ ID NO: 150476 - DNA, 50 bp, Artificial
  Synthetic oligonucleotide
atgggcgcttcaaacgtgcaagtgtgcaccgctgccatgcaccatggctt

SEQ ID NO: 150477 - DNA, 50 bp, Artificial
  Synthetic oligonucleotide
atgtacggcggggacggccaagagatgaaatggaggcggggagtggacgt

SEQ ID NO: 150478 - DNA, 50 bp, Artificial
  Synthetic oligonucleotide
gtctgcgcgctagtgctcacgaatgttcaattcgctccgcgccagtgctc

SEQ ID NO: 150479 - DNA, 50 bp, Artificial
  Synthetic oligonucleotide
gtctgactcatctgtccggccgtctttatatgcgcgtatcgattgaataa

SEQ ID NO: 150480 - DNA, 50 bp, Artificial
  Synthetic oligonucleotide
acttccacgtaaactcaagcatggaatgacacctctttccgcctgcaggc

SEQ ID NO: 150481 - DNA, 50 bp, Artificial
  Synthetic oligonucleotide
attatccggcggcgcctccccatgccatgtcagcgtggattcggcaaaga

SEQ ID NO: 150482 - DNA, 60 bp, Artificial
  Synthetic oligonucleotide
ctgtttaaagagtatgcaaagtagctaatcgcaagagataatactgcgattagcacaccg

SEQ ID NO: 150483 - DNA, 50 bp, Artificial
  Synthetic oligonucleotide
tccttactctcacaagggatccgactttttattgttctatgattttatgc

SEQ ID NO: 150484 - DNA, 50 bp, Artificial
  Synthetic oligonucleotide
attattcctttttgcgtgccggccaaccctcgcattcgccgtacggccct

SEQ ID NO: 150485 - DNA, 50 bp, Artificial
  Synthetic oligonucleotide
actgggccaatcccctccggttacctgctgccatatacgccacccgggag

SEQ ID NO: 150486 - DNA, 50 bp, Artificial
  Synthetic oligonucleotide
attcatgcagctggtgtgactcggccttcacgtgggacggatcggcgaaa

SEQ ID NO: 150487 - DNA, 50 bp, Artificial
  Synthetic oligonucleotide
attccgcaggcacttcgagacctagcgcacgtctcagcgcgatagcctta

SEQ ID NO: 150488 - DNA, 50 bp, Artificial
  Synthetic oligonucleotide
attcctgccgaggccgagatgatattggacttgtcaccagggtagtgacc

SEQ ID NO: 150489 - DNA, 50 bp, Artificial
  Synthetic oligonucleotide
tcgaactgtgctctgtccattttgatgagcggcgaaggcccagcactccc

SEQ ID NO: 150490 - DNA, 50 bp, Artificial
  Synthetic oligonucleotide
actgcggcgtgtgtgatgcctgcgcgtctcgggacatacgtgagagaccg

SEQ ID NO: 150491 - DNA, 50 bp, Artificial
  Synthetic oligonucleotide
attcggcgatattggtcccagccaaaatgatcgtctgagcgagcggaata

SEQ ID NO: 150492 - DNA, 50 bp, Artificial
  Synthetic oligonucleotide
actcgtacggggcacccttagccgtacaaaatcatggccgctcgggccta

SEQ ID NO: 150493 - DNA, 59 bp, Artificial
  Synthetic oligonucleotide
ctcaaaggcgggtcagatgacaagagactcagcaattaacttaaacgcatttataaatc

SEQ ID NO: 150494 - DNA, 50 bp, Artificial
  Synthetic oligonucleotide
attgaagagtgctgggcaggccttcgtccggcgacaaacgatcggcatcc

SEQ ID NO: 150495 - DNA, 50 bp, Artificial
  Synthetic oligonucleotide
acggatggtctgcgctgcttccgcaggcgcttggaatggtgattggcggt

SEQ ID NO: 150496 - DNA, 50 bp, Artificial
  Synthetic oligonucleotide
tcgtgcaagccttcgctttccaagggtgtcgatgagccccctcatcgctt

SEQ ID NO: 150497 - DNA, 50 bp, Artificial
  Synthetic oligonucleotide
caatccagggctcgtagatgtggggcggaaggtgcctcagaaagggctga

SEQ ID NO: 150498 - DNA, 50 bp, Artificial
  Synthetic oligonucleotide
caatcgctccagcctgtgcccggtaaatcaggcctccacttgcgtagcca

SEQ ID NO: 150499 - DNA, 50 bp, Artificial
  Synthetic oligonucleotide
acgcctctaggggcgtggattattgttcgaaaagggtataccctagttga

SEQ ID NO: 150500 - DNA, 50 bp, Artificial
  Synthetic oligonucleotide
cacacccggcgtattggttgccataatcccccgctctgttagcaacggga

SEQ ID NO: 150501 - DNA, 50 bp, Artificial
  Synthetic oligonucleotide
cacagctgtcccttgtccaaatgctgtggatgccgcatcccgtagcgccc

SEQ ID NO: 150502 - DNA, 50 bp, Artificial
  Synthetic oligonucleotide
cacagcttcctgtgcgagcctgaagagcgcaacctcaaactgaggcgcta

SEQ ID NO: 150503 - DNA, 50 bp, Artificial
  Synthetic oligonucleotide
caccaaaatttttggtgcgtataactggcactccaccatgacgattcctt

SEQ ID NO: 150504 - DNA, 58 bp, Artificial
  Synthetic oligonucleotide
ctatttttaagcgattgatctaagcggttcggctggtataattgctagtccaagtcga

SEQ ID NO: 150505 - DNA, 50 bp, Artificial
  Synthetic oligonucleotide
tctacccagcgtgcgatgacacccgccatttgggcacgggtaattgtccc

SEQ ID NO: 150506 - DNA, 50 bp, Artificial
  Synthetic oligonucleotide
ggtggctggctcgcctctctcgtgggtccattattgacggtaaccgcagg

SEQ ID NO: 150507 - DNA, 50 bp, Artificial
  Synthetic oligonucleotide
cacccaaccggcccgttcctcgatcagctgatacgtttccccttggtgga

SEQ ID NO: 150508 - DNA, 50 bp, Artificial
  Synthetic oligonucleotide
acgatgccatggcgttaggggccatccgcgcttgtacggaagccgggtta

SEQ ID NO: 150509 - DNA, 50 bp, Artificial
  Synthetic oligonucleotide
ggtgcttcatccgaatacgtatataaaggacgagccgctgtatattaaag

SEQ ID NO: 150510 - DNA, 50 bp, Artificial
  Synthetic oligonucleotide
cacctcctggaattccgcccatcccgcgtaaaccgcctccctgtacagac

SEQ ID NO: 150511 - DNA, 50 bp, Artificial
  Synthetic oligonucleotide
acgatatgttccaagaccggccatcgctccaccgacacctgcaaaggcgc

SEQ ID NO: 150512 - DNA, 50 bp, Artificial
  Synthetic oligonucleotide
cacgccgccgtaaaacacggtgtttgcagttccgaggagcctgtccgcta

SEQ ID NO: 150513 - DNA, 50 bp, Artificial
  Synthetic oligonucleotide
cacgggtaaatgtcaacccacttgcaacgtggaggccggccccttgaagc

SEQ ID NO: 150514 - DNA, 50 bp, Artificial
  Synthetic oligonucleotide
cacgtggggagccaagcgaggctggggcggtaggcgcattcatgaaggga

SEQ ID NO: 150515 - DNA, 53 bp, Artificial
  Synthetic oligonucleotide
ctattccttttaaacgatccacaattaagttaacgtaagaaacatcaacatta

SEQ ID NO: 150516 - DNA, 50 bp, Artificial
  Synthetic oligonucleotide
acgtcctctgggtttcctggtccgttgcttaacaggacgccgtcaggccc

SEQ ID NO: 150517 - DNA, 50 bp, Artificial
  Synthetic oligonucleotide
acgtcccaatgagacctatgagattgtcttcgtggctgacaatccgggca

SEQ ID NO: 150518 - DNA, 50 bp, Artificial
  Synthetic oligonucleotide
caacaccaggtcatcgtcacacagtagctgaaaatggtttccatagatgg

SEQ ID NO: 150519 - DNA, 50 bp, Artificial
  Synthetic oligonucleotide
caaccaatgcagcagcgggaatcatttgcccgtggacatcacaacggcga

SEQ ID NO: 150520 - DNA, 50 bp, Artificial
  Synthetic oligonucleotide
acggtgaagggcaaaaacactggctccgcggcacggtcaggggtccggac

SEQ ID NO: 150521 - DNA, 50 bp, Artificial
  Synthetic oligonucleotide
acggtccccgagcacctccatctgggaaatgccgacacctgcgaggatat

SEQ ID NO: 150522 - DNA, 50 bp, Artificial
  Synthetic oligonucleotide
gtagccggagggtttatgatcggagcagtcatcacacctgatatgagccg

SEQ ID NO: 150523 - DNA, 50 bp, Artificial
  Synthetic oligonucleotide
caacgggaagggggcatgcgagtgaatgggcacaaagggacaacgctcca

SEQ ID NO: 150524 - DNA, 50 bp, Artificial
  Synthetic oligonucleotide
caacttggcgctaaactcacgaaatcctctagtcgttatttggctagcca

SEQ ID NO: 150525 - DNA, 50 bp, Artificial
  Synthetic oligonucleotide
gtactgtatatgaaattgtagattatgcgttgtataaccacactactgca

SEQ ID NO: 150526 - DNA, 54 bp, Artificial
  Synthetic oligonucleotide
attctgcaaaactccgtttagtgttacagtaccaagagtcaatatcgttccgtt

SEQ ID NO: 150527 - DNA, 56 bp, Artificial
  Synthetic oligonucleotide
ctatgtaccgaatttcgaaagtagtcgaggattaacgaggcgtgtcggaatggata

SEQ ID NO: 150528 - DNA, 50 bp, Artificial
  Synthetic oligonucleotide
tcgggcatgtgcttgacttgccggtacacgatcgattggaaggcacggga

SEQ ID NO: 150529 - DNA, 50 bp, Artificial
  Synthetic oligonucleotide
caagaggcggcacgctgattaacgcacacgcatgggggctttctagccaa

SEQ ID NO: 150530 - DNA, 50 bp, Artificial
  Synthetic oligonucleotide
acgggctaaagccagggcttcctctccgttaagctcctgcagtcccggtt

SEQ ID NO: 150531 - DNA, 50 bp, Artificial
  Synthetic oligonucleotide
tcggtcgcaggactgccgctatccaagacagtgagctgggtacgctggta

SEQ ID NO: 150532 - DNA, 50 bp, Artificial
  Synthetic oligonucleotide
tcggtgtgcggacaatgagtcccggacatagccgcttcgcctcccataag

SEQ ID NO: 150533 - DNA, 50 bp, Artificial
  Synthetic oligonucleotide
gtaattctgtactgatttccttcggaatccgatagcttctcatcgggatt

SEQ ID NO: 150534 - DNA, 50 bp, Artificial
  Synthetic oligonucleotide
caatcaaagcaccattagaaggcttagcaaaaacgttactaggtgcatga

SEQ ID NO: 150535 - DNA, 50 bp, Artificial
  Synthetic oligonucleotide
acggccaagcatgcccccgacgcttcctctcgagtcaaagaaacgagcca

SEQ ID NO: 150536 - DNA, 50 bp, Artificial
  Synthetic oligonucleotide
acggcaaccgcgcctactgcagcatcaacgagggactcgggaaagtgctt

SEQ ID NO: 150537 - DNA, 60 bp, Artificial
  Synthetic oligonucleotide
ctatgaatatgaataataggatgaacatatgttacttctttttctatataggtgctttaa

SEQ ID NO: 150538 - DNA, 55 bp, Artificial
  Synthetic oligonucleotide
ctatcttacaaatgctgaaaaggcttttttaatggatttagtaccttatgtagaa

SEQ ID NO: 150539 - DNA, 60 bp, Artificial
  Synthetic oligonucleotide
ctatctatgtattatgttgaacaggcgtatcatgcttataaggcacacagtatatatcaa

SEQ ID NO: 150540 - DNA, 55 bp, Artificial
  Synthetic oligonucleotide
ctgttttaactcgtctaattcagacataacggttgtgacgtgtttcgatataacc

SEQ ID NO: 150541 - DNA, 50 bp, Artificial
  Synthetic oligonucleotide
cttaaaaacccgaacaggatctatgttggccaaaaacttcgggttaggta

SEQ ID NO: 150542 - DNA, 60 bp, Artificial
  Synthetic oligonucleotide
ctatcatgcttttttgacatacgattgatatctggtgcagcctttttacaataatgacag

SEQ ID NO: 150543 - DNA, 55 bp, Artificial
  Synthetic oligonucleotide
ctatatgggaggacccacaccccattcgcctacagcgggtgtcccccaaacaatg

SEQ ID NO: 150544 - DNA, 60 bp, Artificial
  Synthetic oligonucleotide
cttaatgctttccgatagatgtctccgcacttctgaagaatcgtactccgtgatgtactg

SEQ ID NO: 150545 - DNA, 55 bp, Artificial
  Synthetic oligonucleotide
ctagggactgataaggacgtagaaccatatggaaaagaggcgaaaaaatgagtta

SEQ ID NO: 150546 - DNA, 53 bp, Artificial
  Synthetic oligonucleotide
attcgttaaaaatttagctaaaggtcggacagaatggcagagaaatttcgaat

SEQ ID NO: 150547 - DNA, 60 bp, Artificial
  Synthetic oligonucleotide
ctgaatagattctaacgcccactttgttggtgcaatagctgtcccccataatataacagc

SEQ ID NO: 150548 - DNA, 58 bp, Artificial
  Synthetic oligonucleotide
ctgaagatggtcgcatttgtagttcacgtacttggtttgtgaatcctaatgttttatg

SEQ ID NO: 150549 - DNA, 58 bp, Artificial
  Synthetic oligonucleotide
ctgaacggtggttatttctgtttagacgcaggtgtatacagagtaataatgtgaacca

SEQ ID NO: 150550 - DNA, 60 bp, Artificial
  Synthetic oligonucleotide
ctgaaagatatgcttgtcaatcagttgcaagaaaggcattaccagacgaaagggtttcga

SEQ ID NO: 150551 - DNA, 60 bp, Artificial
  Synthetic oligonucleotide
ctgctaggaaagattgaacaacgaatgattagttcaggagaggaagcagcgacggttagc

SEQ ID NO: 150552 - DNA, 60 bp, Artificial
  Synthetic oligonucleotide
ctctatcaataagttgtggcgtaacgacaatgtgtcatctttacgaatagatacattgct

SEQ ID NO: 150553 - DNA, 58 bp, Artificial
  Synthetic oligonucleotide
ctctacttgggcatccgggagatgtgtttctccataatcacgttgttcccacgaagtg

SEQ ID NO: 150554 - DNA, 60 bp, Artificial
  Synthetic oligonucleotide
ctctaccataatgattgctagcacatagggaacgagttctggtacaccttgcgctgcaca

SEQ ID NO: 150555 - DNA, 60 bp, Artificial
  Synthetic oligonucleotide
ctctaatagtcaaatcaagagttaattttagatgtaattgtgagaattagagtggctgac

SEQ ID NO: 150556 - DNA, 54 bp, Artificial
  Synthetic oligonucleotide
ctcggtcacgtaagcgtttcagtttttgctcctcggtacacctataaactacaa

SEQ ID NO: 150557 - DNA, 60 bp, Artificial
  Synthetic oligonucleotide
gtcgtcaagaacaagacgctaaaacatatgaacatgcaactatctgtacggtatggttat

SEQ ID NO: 150558 - DNA, 60 bp, Artificial
  Synthetic oligonucleotide
ctggaatgacgaaccctgtattggcatgcgtatagagactaatcccgacctagcttctat

SEQ ID NO: 150559 - DNA, 54 bp, Artificial
  Synthetic oligonucleotide
ctcgagaaggttttatggctccgtttggagatagcccaaccgttggaatcggag

SEQ ID NO: 150560 - DNA, 58 bp, Artificial
  Synthetic oligonucleotide
ctccttttttcgccgaccaaactatgcttcatgttgaagagtctgattacggagcacc

SEQ ID NO: 150561 - DNA, 53 bp, Artificial
  Synthetic oligonucleotide
ctccttttgaaccaggagtaacaggaccaacggggcccactgggccactagga

SEQ ID NO: 150562 - DNA, 60 bp, Artificial
  Synthetic oligonucleotide
ctcctctgacctagctggatcaatgccaggattcccatgaatattttccctattattgtg

SEQ ID NO: 150563 - DNA, 50 bp, Artificial
  Synthetic oligonucleotide
ctggctaccgccgagggagcccctccaaaattggaggggttggggaggtt

SEQ ID NO: 150564 - DNA, 54 bp, Artificial
  Synthetic oligonucleotide
ctccctagcaccgtaatgctaacgataaccacccgaaccttttagagaatcgtc

SEQ ID NO: 150565 - DNA, 57 bp, Artificial
  Synthetic oligonucleotide
ctgggtacaccttagacatacccaattatgtctatgaatctgtgaccggaattaaac

SEQ ID NO: 150566 - DNA, 55 bp, Artificial
  Synthetic oligonucleotide
ctccatctttaggggaacaacataaaacattaggattcacaaaccaagtacgaga

SEQ ID NO: 150567 - DNA, 57 bp, Artificial
  Synthetic oligonucleotide
ctgtagcctatgacccgaaaaaggatagagaccgagtctgtgcaaagaaagtcgtta

SEQ ID NO: 150568 - DNA, 60 bp, Artificial
  Synthetic oligonucleotide
attcctatgaaattcgcacttatcatgtctaccttgtactagaacgttcctatgtcttgc

SEQ ID NO: 150569 - DNA, 60 bp, Artificial
  Synthetic oligonucleotide
ctcataagagtacctgtagctgcatgtaattggctacataatcgaacgagggaatcactc

SEQ ID NO: 150570 - DNA, 52 bp, Artificial
  Synthetic oligonucleotide
cttgcagtactcccggaaccataagcgtaactaacccctttagtcataccgg

SEQ ID NO: 150571 - DNA, 60 bp, Artificial
  Synthetic oligonucleotide
cttgcgcataagcaagaccgaagacagggacagactgctttttcgttaggcgaggattga

SEQ ID NO: 150572 - DNA, 54 bp, Artificial
  Synthetic oligonucleotide
cgttctttttgggatagactattaacgtaataatcggagccgagtaagccagtc

SEQ ID NO: 150573 - DNA, 56 bp, Artificial
  Synthetic oligonucleotide
cgttctttgtaaggaataatcgcttagaaggatggctttctgagactgatttaaac

SEQ ID NO: 150574 - DNA, 51 bp, Artificial
  Synthetic oligonucleotide
cttggcagtttctcaaaacgaaccgttttggggacgccaaccggcgaggaa

SEQ ID NO: 150575 - DNA, 55 bp, Artificial
  Synthetic oligonucleotide
cgttctattttgtataagatggtcaagtctaagtaacttatattcttggttggga

SEQ ID NO: 150576 - DNA, 60 bp, Artificial
  Synthetic oligonucleotide
cgttcgtaacggtcatagatatatgtacttcgccatcacttcaccatataacgagacacg

SEQ ID NO: 150577 - DNA, 56 bp, Artificial
  Synthetic oligonucleotide
cttggcggcgaaagcactagataacattgtaacagcgtttgaaagtttatcggtta

SEQ ID NO: 150578 - DNA, 58 bp, Artificial
  Synthetic oligonucleotide
cttgttcgtaacccttataggagagcagtgagctctttcgtatccttaatcgcacctc

SEQ ID NO: 150579 - DNA, 53 bp, Artificial
  Synthetic oligonucleotide
gtctacagccaaggaataatattttaccggtgcggtgacaccaacgggaaaag

SEQ ID NO: 150580 - DNA, 55 bp, Artificial
  Synthetic oligonucleotide
cgttccagcaagcattacagaaattggggaattaattaatagttcaaggcaaaac

SEQ ID NO: 150581 - DNA, 57 bp, Artificial
  Synthetic oligonucleotide
cgttcatagacaattcaagtttgtctccctgtacgttgagaggttcttgtactacaa

SEQ ID NO: 150582 - DNA, 60 bp, Artificial
  Synthetic oligonucleotide
cgttcaatcgaaacacatcttagattgcttcaggaagggctaaataagcgtgcagaacgc

SEQ ID NO: 150583 - DNA, 60 bp, Artificial
  Synthetic oligonucleotide
cgttatgggaaacaaaatacgttgtatgcgatggttcatatggatgaagcgacaccacat

SEQ ID NO: 150584 - DNA, 60 bp, Artificial
  Synthetic oligonucleotide
ctttagcacgtgcgattttctttgggaaacaaggtgagctgcgagaacgaacaatgcagc

SEQ ID NO: 150585 - DNA, 56 bp, Artificial
  Synthetic oligonucleotide
cgttagatgctaaagatcaacgagggttcttatctagtaaaggagaacagttagaa

SEQ ID NO: 150586 - DNA, 58 bp, Artificial
  Synthetic oligonucleotide
ctttgatgtgaagtggtcactattgaagtgcccagttatacgcaccaaataaattggg

SEQ ID NO: 150587 - DNA, 60 bp, Artificial
  Synthetic oligonucleotide
ctttgatgtgatgtacctgcaggggcttataatattcatagctgttgttagaacctaaac

SEQ ID NO: 150588 - DNA, 60 bp, Artificial
  Synthetic oligonucleotide
ctttggcacgaactcataaatatcaatgggcaacacgatcagaccgattgctatgaaatg

SEQ ID NO: 150589 - DNA, 53 bp, Artificial
  Synthetic oligonucleotide
cttttaataaatccggagtcatccctaaacgatccgcaacaattttcggtgta

SEQ ID NO: 150590 - DNA, 52 bp, Artificial
  Synthetic oligonucleotide
attcccttcccctgtgcgtttcctcctttgcaagaagggccaacgggaccta

SEQ ID NO: 150591 - DNA, 57 bp, Artificial
  Synthetic oligonucleotide
cgtgggcataggaaatatagagaaagcgatgtaatggtattccgtaaggtcataaac

SEQ ID NO: 150592 - DNA, 57 bp, Artificial
  Synthetic oligonucleotide
ctagacaatttgcgaattgggtacgttcagagcgtgggataagaaatttgcacgaaa

SEQ ID NO: 150593 - DNA, 60 bp, Artificial
  Synthetic oligonucleotide
cttcagcgcgaatatctgcgcttaatcgataagatcccgcaaatgtgggaggaatttgtg

SEQ ID NO: 150594 - DNA, 59 bp, Artificial
  Synthetic oligonucleotide
cttcatgttaagacgaatagctattacagagattacgataaaccctactacatataaca

SEQ ID NO: 150595 - DNA, 52 bp, Artificial
  Synthetic oligonucleotide
ctactctatatgggtggaacattaaactcggtacacaaacggttttaagtag

SEQ ID NO: 150596 - DNA, 59 bp, Artificial
  Synthetic oligonucleotide
cttccgccatcttagcaccgcaaaacgataccggacatatctgtgccgaaattggagac

SEQ ID NO: 150597 - DNA, 56 bp, Artificial
  Synthetic oligonucleotide
cttccgtttgtaactgcgtatagtacacgttggataaagttgcttgcttcatccgt

SEQ ID NO: 150598 - DNA, 60 bp, Artificial
  Synthetic oligonucleotide
cttcctgtcgcttcatgaattcaaccaaaggattgtcctgtagcgatgtagcggtatccg

SEQ ID NO: 150599 - DNA, 58 bp, Artificial
  Synthetic oligonucleotide
ctacatctacgaatcctaacacacctcatagccaacgttcatttgtgtcaaagttccg

SEQ ID NO: 150600 - DNA, 52 bp, Artificial
  Synthetic oligonucleotide
ctacaacgttaagctcatttttctgacggtaccccctaaagaagttttgcat

SEQ ID NO: 150601 - DNA, 60 bp, Artificial
  Synthetic oligonucleotide
gtctattactatatgaaagagactcatttctcgatgaattatgctcagcgagcatattct

SEQ ID NO: 150602 - DNA, 56 bp, Artificial
  Synthetic oligonucleotide
ctacaaaacttacttcaaaagacgtgtcctcccgccttggcatagagaccgtcaca

SEQ ID NO: 150603 - DNA, 52 bp, Artificial
  Synthetic oligonucleotide
ctaatgaaaagctacaaaaaagtgttgaggctataaaaacggggggactcaa

SEQ ID NO: 150604 - DNA, 60 bp, Artificial
  Synthetic oligonucleotide
cttcgtcatcatgtaaaaccatgttatagactgccagattgggattccgctcttgaaacg

SEQ ID NO: 150605 - DNA, 53 bp, Artificial
  Synthetic oligonucleotide
ctaagataccttacggtatctagtcccattccagttatggtcggaaacaccgt

SEQ ID NO: 150606 - DNA, 60 bp, Artificial
  Synthetic oligonucleotide
ctaacaattcgtgagtgggactgcccttcttgtggaacacattatgatagagatagggat

SEQ ID NO: 150607 - DNA, 60 bp, Artificial
  Synthetic oligonucleotide
cttctgatcgttctatagctcttcttcgaagaaggagaacaccaccgatcaacgcctcat

SEQ ID NO: 150608 - DNA, 52 bp, Artificial
  Synthetic oligonucleotide
cgttttgagagaacacgcgagaccggacgattttatttttctcgacccgccg

SEQ ID NO: 150609 - DNA, 60 bp, Artificial
  Synthetic oligonucleotide
cttctgttaatgcgagtttcatacgtctcattatgaataacgactttcataatcgcggca

SEQ ID NO: 150610 - DNA, 55 bp, Artificial
  Synthetic oligonucleotide
cgtttggaagtggatctgttagttgaacgttattagcggttgcatttccactgtt

SEQ ID NO: 150611 - DNA, 53 bp, Artificial
  Synthetic oligonucleotide
cgtttcagaagattacgccggtaagtacacaaagaaaacatcctctacccaag

SEQ ID NO: 150612 - DNA, 60 bp, Artificial
  Synthetic oligonucleotide
attcagattcataatcagcgagaaaaagagagtcacacaaatcatgatattgaatcggag

SEQ ID NO: 150613 - DNA, 59 bp, Artificial
  Synthetic oligonucleotide
cttgatagcatctgcaaactgcccgcggtcatagtaaatctgggcccgataaagtaaac

SEQ ID NO: 150614 - DNA, 54 bp, Artificial
  Synthetic oligonucleotide
cgtttagggttcgctcttcggcttgtattaattcgttatcctggctggtcctta

SEQ ID NO: 150615 - DNA, 59 bp, Artificial
  Synthetic oligonucleotide
gcgtatttgaatgaggtgggcgggcgagtgcatttgattcctcatcaaggggacaaacc

SEQ ID NO: 150616 - DNA, 50 bp, Artificial
  Synthetic oligonucleotide
gcgtccttaaaggaggtatttaatgaaccttcctaatggagtaaccggtt

SEQ ID NO: 150617 - DNA, 57 bp, Artificial
  Synthetic oligonucleotide
gcgtcgcagacccctatctattttgatgcgttagcgtcaaaatacctatagggttac

SEQ ID NO: 150618 - DNA, 60 bp, Artificial
  Synthetic oligonucleotide
ccgaatacacctattaggtcagaacatgggacgtctgttagagattatcatagagttata

SEQ ID NO: 150619 - DNA, 58 bp, Artificial
  Synthetic oligonucleotide
ccgaacttaacgacgaaagaagtgtcaacgaatgcaggcgcaagtgaggcgagtgttg

SEQ ID NO: 150620 - DNA, 58 bp, Artificial
  Synthetic oligonucleotide
ccgaaaagagtcactagggaaccagtgcccacttatgcacctaaataggtgctgtgtg

SEQ ID NO: 150621 - DNA, 47 bp, Artificial
  Synthetic oligonucleotide
cccttcaagtaaactaaccaaggtgggccccggaggggtgtttttcc

SEQ ID NO: 150622 - DNA, 59 bp, Artificial
  Synthetic oligonucleotide
cccttagtatagtcagttttactagcaatagactgtatgatacccaaattatgaagaga

SEQ ID NO: 150623 - DNA, 56 bp, Artificial
  Synthetic oligonucleotide
caacaggttgaagataaacgggcgtctctggagccgatgaaggagtttgaacggga

SEQ ID NO: 150624 - DNA, 60 bp, Artificial
  Synthetic oligonucleotide
gtctcattggtcgaatacgagttttcgaggtgacttatggtgtgaatggattccatcctc

SEQ ID NO: 150625 - DNA, 53 bp, Artificial
  Synthetic oligonucleotide
gctacaaaaaactttggttcgtgaacgttaaggaccttgaccccatatgtata

SEQ ID NO: 150626 - DNA, 57 bp, Artificial
  Synthetic oligonucleotide
gctagaacaacaacattatccatctagatcaacccttttaaacttcgaaattctaca

SEQ ID NO: 150627 - DNA, 59 bp, Artificial
  Synthetic oligonucleotide
gctagatcatcgtcctttggagatttccaatgtaacttaactgttttatcagttgattc

SEQ ID NO: 150628 - DNA, 52 bp, Artificial
  Synthetic oligonucleotide
ccctcctcaaaacataaatgtcgcaaagaagtaaaataaggccccataaaag

SEQ ID NO: 150629 - DNA, 55 bp, Artificial
  Synthetic oligonucleotide
ccctattgattttgatgcgaaagcgtcaaaatacgtatagggttacgttaattga

SEQ ID NO: 150630 - DNA, 57 bp, Artificial
  Synthetic oligonucleotide
gctaggacaaatggttttgctccctctttatccatggtacatttgtactacgaaatg

SEQ ID NO: 150631 - DNA, 59 bp, Artificial
  Synthetic oligonucleotide
gctagggaaggctctcgatattccacccaacatttgtctcgattccattccatgaaacg

SEQ ID NO: 150632 - DNA, 57 bp, Artificial
  Synthetic oligonucleotide
ccctaaaatccccgctctatcaacgatgtataaaatcctgtataccaaatcaataga

SEQ ID NO: 150633 - DNA, 57 bp, Artificial
  Synthetic oligonucleotide
cccgttaagaagattttgatacaacacaatgtcatttgtgttgcattaggacgaaaa

SEQ ID NO: 150634 - DNA, 58 bp, Artificial
  Synthetic oligonucleotide
gctatacaggtcgttttcaacgtatgataacacttccaagccccgtttcacatgatgg

SEQ ID NO: 150635 - DNA, 54 bp, Artificial
  Synthetic oligonucleotide
gtctctcaaggaatcgactttttaatttagattgttgaactaaagcacccttta

SEQ ID NO: 150636 - DNA, 60 bp, Artificial
  Synthetic oligonucleotide
gctatgtacacgcgaaaactaagaagtatacaaatctatgcaacgcctaatgtaggcaac

SEQ ID NO: 150637 - DNA, 56 bp, Artificial
  Synthetic oligonucleotide
cccggctgtttcgatatctacactatcccttgcctagactgggttcaagtcacttt

SEQ ID NO: 150638 - DNA, 59 bp, Artificial
  Synthetic oligonucleotide
ccggtcgtggcaggatgcttcggtcaggacatatcccatcggaagcgcttggtcggtaa

SEQ ID NO: 150639 - DNA, 59 bp, Artificial
  Synthetic oligonucleotide
gcgaagaaagtgtactagagggcctatctaatgtaaagcatctagtcgctaaagcaaaa

SEQ ID NO: 150640 - DNA, 53 bp, Artificial
  Synthetic oligonucleotide
gcgaatacaccatttttagcgttactttctacttggtacaaactcgtttcaaa

SEQ ID NO: 150641 - DNA, 53 bp, Artificial
  Synthetic oligonucleotide
ccggcgataccttggttgtaacaaaactggaccgttttgccaggacggcagta

SEQ ID NO: 150642 - DNA, 60 bp, Artificial
  Synthetic oligonucleotide
ccggcacttgaaatggctgatattctacttcataacccattgatttaagttgcataccaa

SEQ ID NO: 150643 - DNA, 55 bp, Artificial
  Synthetic oligonucleotide
gcgagacgaaaggcgagcgtaggaacgagcctaaacaggtgaagttccgtgttac

SEQ ID NO: 150644 - DNA, 59 bp, Artificial
  Synthetic oligonucleotide
ccggaagtagacgacttaagggagcgacatgaatgaagtgaagtgcagacagaaggtaa

SEQ ID NO: 150645 - DNA, 60 bp, Artificial
  Synthetic oligonucleotide
gcgcatgtgtttcggttgccgaatacatacaatagcaaggttactgatagacacaaacgc

SEQ ID NO: 150646 - DNA, 60 bp, Artificial
  Synthetic oligonucleotide
gtctctgccgcttcctgatacagtccgtaagcgatagcagctgccgttggctcactaatg

SEQ ID NO: 150647 - DNA, 56 bp, Artificial
  Synthetic oligonucleotide
gcgcattaaaggtgcaacaaaaggttgcactttaatccaaatggctcgtttgttaa

SEQ ID NO: 150648 - DNA, 58 bp, Artificial
  Synthetic oligonucleotide
gcgctccgtaccgcaaaccttccgttgtgatcgggagacctgtttcgctgtctagcac

SEQ ID NO: 150649 - DNA, 60 bp, Artificial
  Synthetic oligonucleotide
gcgctcggcggatgttcgctacacattagctgaacagtcattacttgaaaaaggtgagtc

SEQ ID NO: 150650 - DNA, 57 bp, Artificial
  Synthetic oligonucleotide
ccgcgaaaccgtctctccaagagcttttcctcttcttctgtcagctccaaaccctca

SEQ ID NO: 150651 - DNA, 60 bp, Artificial
  Synthetic oligonucleotide
ccgcctgaagtcatgaggtggcaagcgatggtggaacaggaatgtgcagcgcaaggtgta

SEQ ID NO: 150652 - DNA, 59 bp, Artificial
  Synthetic oligonucleotide
ccgcccgtcaatctatgtcccccagtgataattgttccttcctggcgcccgatatcgca

SEQ ID NO: 150653 - DNA, 60 bp, Artificial
  Synthetic oligonucleotide
gcggacagaatgaagctgtaagcgaaatgaaggagcattaaggagttgacagacttacta

SEQ ID NO: 150654 - DNA, 54 bp, Artificial
  Synthetic oligonucleotide
gcggacgtttcaacgtcaacaggtaactggatttcaagtatttggttagcggcg

SEQ ID NO: 150655 - DNA, 58 bp, Artificial
  Synthetic oligonucleotide
gcggatgggtaatcagccgttctttggcgatgcgtccgactaaaacttcaccgctctc

SEQ ID NO: 150656 - DNA, 60 bp, Artificial
  Synthetic oligonucleotide
ccgcagctgtccggtcgtggcaggatgcttcggtcaggacatatcccatcggaagcgctt

SEQ ID NO: 150657 - DNA, 55 bp, Artificial
  Synthetic oligonucleotide
gtctggactaacatcatctaaagattgtttctttttacgagaacctaatttcacc

SEQ ID NO: 150658 - DNA, 52 bp, Artificial
  Synthetic oligonucleotide
gcgggaagccgaaacgcatttactcggacaacgggaaaatttatcggtccga

SEQ ID NO: 150659 - DNA, 60 bp, Artificial
  Synthetic oligonucleotide
ccgattcgaagcaaggagcagttgcaagatatgaaatgggcgctcaaacgtcattgcact

SEQ ID NO: 150660 - DNA, 60 bp, Artificial
  Synthetic oligonucleotide
gcggttgcaacgctgaaatcaaatgcagggacaatcgaaaaggatgcactgtcaccttat

SEQ ID NO: 150661 - DNA, 60 bp, Artificial
  Synthetic oligonucleotide
ccagtatgatttaaggcaatttatgagagatggctattcaaagaatgtcatgcttttacg

SEQ ID NO: 150662 - DNA, 60 bp, Artificial
  Synthetic oligonucleotide
ccagaacgaattgataatcatggtaaatatgttcacctacgatattggcacgatctagat

SEQ ID NO: 150663 - DNA, 60 bp, Artificial
  Synthetic oligonucleotide
ccactttgaacacgagagctattatctgcattcgaaattacactcgctcgaactgtctct

SEQ ID NO: 150664 - DNA, 52 bp, Artificial
  Synthetic oligonucleotide
ggaggggtggaaaagagacttagctctttatttagggggtctcttttctatc

SEQ ID NO: 150665 - DNA, 55 bp, Artificial
  Synthetic oligonucleotide
ccacttaacgtccttgcggactgtttgaagtgggagattcctaggtacagagttc

SEQ ID NO: 150666 - DNA, 59 bp, Artificial
  Synthetic oligonucleotide
ccactgatttaaaagtggataatgctatggtagccagtgactttgttatagtagtacaa

SEQ ID NO: 150667 - DNA, 56 bp, Artificial
  Synthetic oligonucleotide
ggagtccgtccagccaaggcaatcggccggtaacaatcttataaaaggatagttga

SEQ ID NO: 150668 - DNA, 56 bp, Artificial
  Synthetic oligonucleotide
atgtgtggttaacataacgtctcattatcggtagcaaataaaaagtcggatcctta

SEQ ID NO: 150669 - DNA, 58 bp, Artificial
  Synthetic oligonucleotide
ccactcactagagaccaggtgaccgtagaagtataagtagcttgccgattcttcccta

SEQ ID NO: 150670 - DNA, 58 bp, Artificial
  Synthetic oligonucleotide
ccaccttgtgcggaatgaatcttttgggcgattgacaacaggacgtctcatataaaaa

SEQ ID NO: 150671 - DNA, 59 bp, Artificial
  Synthetic oligonucleotide
ggatacggtctattatttagatggggcgctgagcgctaggcggttgatcggttatggtg

SEQ ID NO: 150672 - DNA, 55 bp, Artificial
  Synthetic oligonucleotide
ccacctacgtaaccgaacagaccacacataccaactgtcgtacctactgcaaatt

SEQ ID NO: 150673 - DNA, 56 bp, Artificial
  Synthetic oligonucleotide
ggatagacctaagttatttttacatggccatacaggttccccgctagtgtataaca

SEQ ID NO: 150674 - DNA, 58 bp, Artificial
  Synthetic oligonucleotide
ggatatgtaaagagtgccaaagaactcgtactcataaacccaaaatcctccattcatg

SEQ ID NO: 150675 - DNA, 56 bp, Artificial
  Synthetic oligonucleotide
ggatcccgccgctttttattccacggttcgattgacaacgagcctccgcaccctca

SEQ ID NO: 150676 - DNA, 55 bp, Artificial
  Synthetic oligonucleotide
ggatccgcgttaggttgtaaaacgccatcgacagttaatgtgttaggaacaaatg

SEQ ID NO: 150677 - DNA, 56 bp, Artificial
  Synthetic oligonucleotide
ccaattccattacacgggaattggtttttttgttgtgcactatcagataacgcgta

SEQ ID NO: 150678 - DNA, 58 bp, Artificial
  Synthetic oligonucleotide
ggattcccaaataatcaaatacaggaatataacaaagacaggagacatccctatggcc

SEQ ID NO: 150679 - DNA, 60 bp, Artificial
  Synthetic oligonucleotide
atgtgtaaatgtacacatggccacatggcaaagacacatagcttcgctatggattcccaa

SEQ ID NO: 150680 - DNA, 54 bp, Artificial
  Synthetic oligonucleotide
ggattctattctatacgacacttatggaatgtaaaaaaaccgtacaagtcgaaa

SEQ ID NO: 150681 - DNA, 57 bp, Artificial
  Synthetic oligonucleotide
ccaagttcaccacgttcagtaggtgaacataaggaggaataaagggatgagcgagac

SEQ ID NO: 150682 - DNA, 60 bp, Artificial
  Synthetic oligonucleotide
ggattgttatgcctagcataaccaagctcaattgggtaccaattgtagagcttgccttat

SEQ ID NO: 150683 - DNA, 58 bp, Artificial
  Synthetic oligonucleotide
gctcaaatacataacgcgccattacaaacggacctggaggacttgcggtctatcggtc

SEQ ID NO: 150684 - DNA, 60 bp, Artificial
  Synthetic oligonucleotide
gctcaggtacctatgctcctagttcagtatcaaatagacaatgggatacaaagggtaggc

SEQ ID NO: 150685 - DNA, 60 bp, Artificial
  Synthetic oligonucleotide
gctccattaacagcactaaaagtccatgtcaattccattgcctgcggttcagtcaagtcc

SEQ ID NO: 150686 - DNA, 56 bp, Artificial
  Synthetic oligonucleotide
cccgagcgcaccgactatttgtattcctacgacatcaggtacgggtagtgaagtaa

SEQ ID NO: 150687 - DNA, 56 bp, Artificial
  Synthetic oligonucleotide
gctcgacttggactcgtaattataccagccgaaccaccaagttctatcgttccaag

SEQ ID NO: 150688 - DNA, 57 bp, Artificial
  Synthetic oligonucleotide
gctgacaaaagagggggaagacaaggtgaattcgtttggaagggcatagcgatacgc

SEQ ID NO: 150689 - DNA, 50 bp, Artificial
  Synthetic oligonucleotide
cccctattacagaagtaaaaacttaaatttctacttctgtaatacttggg

SEQ ID NO: 150690 - DNA, 57 bp, Artificial
  Synthetic oligonucleotide
atgtgagtagtagaactgttcgaaatacagcgaatgaaagaagtttacttataggtc

SEQ ID NO: 150691 - DNA, 56 bp, Artificial
  Synthetic oligonucleotide
cccccactcaaacgtaatatcatcactttttcctaattcctcaataggccattctc

SEQ ID NO: 150692 - DNA, 60 bp, Artificial
  Synthetic oligonucleotide
cccccacgctcaagtattacgcgagtcatgattagccatgtgtcttgtcgagttgcatag

SEQ ID NO: 150693 - DNA, 58 bp, Artificial
  Synthetic oligonucleotide
gcttataagcatcaacgtaatttaggttattctagagcgaaatctataaagaaagcga

SEQ ID NO: 150694 - DNA, 60 bp, Artificial
  Synthetic oligonucleotide
ccccaacaagaaatgattgtgcagatcggagaacaggatcagttccaggacaatgagccc

SEQ ID NO: 150695 - DNA, 58 bp, Artificial
  Synthetic oligonucleotide
gcttgtttgatttgttattctaatggaactatggatatgaaagagttccctcgtagaa

SEQ ID NO: 150696 - DNA, 60 bp, Artificial
  Synthetic oligonucleotide
gctttgcgtcactcctgacttaatcgcggtgctagacagcgaaacaggtctcccgatcac

SEQ ID NO: 150697 - DNA, 57 bp, Artificial
  Synthetic oligonucleotide
gctttggtaagccaagaaatttaagtcgcaatgctttagttgaattagctttacata

SEQ ID NO: 150698 - DNA, 59 bp, Artificial
  Synthetic oligonucleotide
gcttttgggcggggcattgtaagtaccgctattctcatccattactcgagcgctagccc

SEQ ID NO: 150699 - DNA, 60 bp, Artificial
  Synthetic oligonucleotide
ccatgagctatctcatatgaaacgaagagatatagctgtaaattgggttatgtatagttt

SEQ ID NO: 150700 - DNA, 57 bp, Artificial
  Synthetic oligonucleotide
ccataggaactaaggggatagcctaatctattagagttcgatagaactctgtactta

SEQ ID NO: 150701 - DNA, 60 bp, Artificial
  Synthetic oligonucleotide
atgtagcggtatccgatatggtcagtttagaacgatataagcttgctatgtgctttaccg

SEQ ID NO: 150702 - DNA, 60 bp, Artificial
  Synthetic oligonucleotide
ccataatccagcagtaatataacgatagaaacattccgctctaagatcattgggcgtacg

SEQ ID NO: 150703 - DNA, 60 bp, Artificial
  Synthetic oligonucleotide
ggacgaatcttatggcagagcattacgaggcgttgcagaagaaaattggagcaccttact

SEQ ID NO: 150704 - DNA, 57 bp, Artificial
  Synthetic oligonucleotide
ggacgtagtaaagaagcgactgtatgggcttgtacacaacgtccggcagagattccc

SEQ ID NO: 150705 - DNA, 57 bp, Artificial
  Synthetic oligonucleotide
cgatactctagttttgaccacccataatgtttaactcttaagtcggagatgctattc

SEQ ID NO: 150706 - DNA, 60 bp, Artificial
  Synthetic oligonucleotide
gattaattgtctatgataacctagggaatctttacattgtctgtgttgaatagttacata

SEQ ID NO: 150707 - DNA, 54 bp, Artificial
  Synthetic oligonucleotide
cgataagctatatacggacggtatagtagttttataggctataaccgtttgtcg

SEQ ID NO: 150708 - DNA, 60 bp, Artificial
  Synthetic oligonucleotide
gattctatccactatatggtacccttaggtgccttctatgagcctgcgtgctagacagta

SEQ ID NO: 150709 - DNA, 60 bp, Artificial
  Synthetic oligonucleotide
cgagttctggtacaccttgcgctgcacattcctgttccaccatcgcttgccacctcatga

SEQ ID NO: 150710 - DNA, 55 bp, Artificial
  Synthetic oligonucleotide
gattgatccaacgtaactgaaactttttttgtcacaccaatagacggacgaccaa

SEQ ID NO: 150711 - DNA, 60 bp, Artificial
  Synthetic oligonucleotide
gattgatcgggagctcgtgggaacgaatgactatgaggacatgaatgacttcaaagcgaa

SEQ ID NO: 150712 - DNA, 58 bp, Artificial
  Synthetic oligonucleotide
atgtagcgggtttatatcgtgctagtttgcttatagcggaacccgatataacgctaca

SEQ ID NO: 150713 - DNA, 60 bp, Artificial
  Synthetic oligonucleotide
gattgtccattcactgggacagaaaaacagagattcatacgaataaagatatcgatgtgg

SEQ ID NO: 150714 - DNA, 58 bp, Artificial
  Synthetic oligonucleotide
cgagtatttattggatcatgtactaattcgcggattgaagacttacgtcaggccgcgg

SEQ ID NO: 150715 - DNA, 53 bp, Artificial
  Synthetic oligonucleotide
cgagtagacttcactacccgctttattttagattctcccgttctcttaaagct

SEQ ID NO: 150716 - DNA, 58 bp, Artificial
  Synthetic oligonucleotide
gatttaatatggctatatgtcaacggtaagcggacgaacgaagcaaagcgaagtgaag

SEQ ID NO: 150717 - DNA, 58 bp, Artificial
  Synthetic oligonucleotide
gatttacagcctgttctagtgttacgttcttcttgttcatagctgttaatagccgttc

SEQ ID NO: 150718 - DNA, 58 bp, Artificial
  Synthetic oligonucleotide
gatttctaaatatcctgttaaggacacggatgtggtgcgaggcagcaaggtaacggaa

SEQ ID NO: 150719 - DNA, 58 bp, Artificial
  Synthetic oligonucleotide
gattttagctgtggctgttgcgccggtttatggtttagcgacgcaagataacagcgtt

SEQ ID NO: 150720 - DNA, 59 bp, Artificial
  Synthetic oligonucleotide
gattttgagtaaaagacgccagttaaataagcatcataactgctagatactaatttgcc

SEQ ID NO: 150721 - DNA, 57 bp, Artificial
  Synthetic oligonucleotide
gcaaaggaatggatggggagtatggacccctatatacatatggggtcaaggtcctta

SEQ ID NO: 150722 - DNA, 58 bp, Artificial
  Synthetic oligonucleotide
cgacttactggagctaatcgtagtggtgtaatctataacctaatacgagtgtatgtac

SEQ ID NO: 150723 - DNA, 58 bp, Artificial
  Synthetic oligonucleotide
atggttcggagcaaaccgaagagcctcgcagagcacgtccaaatgaaatttggtataa

SEQ ID NO: 150724 - DNA, 60 bp, Artificial
  Synthetic oligonucleotide
cgacggagccggaagtagacgacttaagggagcgacatgaatgaagtgaagtgcagacag

SEQ ID NO: 150725 - DNA, 53 bp, Artificial
  Synthetic oligonucleotide
gcaagtctttttcaaagggtttcgtgtaccctttttgtatagtgaatatacaa

SEQ ID NO: 150726 - DNA, 55 bp, Artificial
  Synthetic oligonucleotide
cgaattcaggagtaagtaggtaaaaaatcctatcgctagacattagcctgtttag

SEQ ID NO: 150727 - DNA, 53 bp, Artificial
  Synthetic oligonucleotide
gatagagaatttaatacacacggtaccggaccgagcccgaaagggatcgggag

SEQ ID NO: 150728 - DNA, 60 bp, Artificial
  Synthetic oligonucleotide
gatagccaaaacagcctcgtagagccttttcattgtgtacatgaagcgtagcgtaatgtc

SEQ ID NO: 150729 - DNA, 60 bp, Artificial
  Synthetic oligonucleotide
gatagtagtaaatgagcgataaggagagaaaataagtgattcagtacacgtgtcattgtt

SEQ ID NO: 150730 - DNA, 56 bp, Artificial
  Synthetic oligonucleotide
gatatacacgtttgtatttcccactttaccaatagcgatcaatccgttttcttcta

SEQ ID NO: 150731 - DNA, 60 bp, Artificial
  Synthetic oligonucleotide
gatattaagagcgtcaaacagcttgtcatacgtgtccattgtcacgttgctgttcccgcc

SEQ ID NO: 150732 - DNA, 60 bp, Artificial
  Synthetic oligonucleotide
gatatttccaccgattacagttgcgttactttggcacgaactcataaatatcaatgggca

SEQ ID NO: 150733 - DNA, 60 bp, Artificial
  Synthetic oligonucleotide
cgcagatggcagattaaatctagatcgtgccaatatcgtaggtgaacatatttaccatga

SEQ ID NO: 150734 - DNA, 58 bp, Artificial
  Synthetic oligonucleotide
gtatacctgccgaaccgccagctcggccgtacaaaagtgctcatcttactccaaggta

SEQ ID NO: 150735 - DNA, 59 bp, Artificial
  Synthetic oligonucleotide
gtgagatcgttacttatggcggctcattatgaaggacttgaaaagcgtaccggtgcgcc

SEQ ID NO: 150736 - DNA, 60 bp, Artificial
  Synthetic oligonucleotide
gatcggtccgcatgaaattgcgtattggatgtatctcacgttagaacgaatgacagagga

SEQ ID NO: 150737 - DNA, 60 bp, Artificial
  Synthetic oligonucleotide
cgcaataacgcatagcattaacgaaagtgttggtagtgaagcaacaccatttcaacgcaa

SEQ ID NO: 150738 - DNA, 60 bp, Artificial
  Synthetic oligonucleotide
gatgataagacacatgagcaacgagaactcgttgtagcgataggagaaggtaaagacgac

SEQ ID NO: 150739 - DNA, 57 bp, Artificial
  Synthetic oligonucleotide
cgattcgttttaggatggcccgattgaattcctcttgtctttaaatgatcggcgagc

SEQ ID NO: 150740 - DNA, 56 bp, Artificial
  Synthetic oligonucleotide
cgattcacctcaccaccttcacttacgtttagaagtgggagtcctctcgaaaggca

SEQ ID NO: 150741 - DNA, 60 bp, Artificial
  Synthetic oligonucleotide
gatgatgatcgaacaagagctcgaacagatcaaacagacgagccaagacgtgcagcagga

SEQ ID NO: 150742 - DNA, 60 bp, Artificial
  Synthetic oligonucleotide
gatgcaccttctaatatgggtattcatttaatacttactggatctatgttgaaattgctt

SEQ ID NO: 150743 - DNA, 58 bp, Artificial
  Synthetic oligonucleotide
cgatgaagccgaaaataatagctgcggatacaccggcgcttgttactttaaacatgcc

SEQ ID NO: 150744 - DNA, 60 bp, Artificial
  Synthetic oligonucleotide
cgatcaacgcctcataggtatccctaatctgtctacttacgctcctaatgtcacgtactg

SEQ ID NO: 150745 - DNA, 60 bp, Artificial
  Synthetic oligonucleotide
gatgtagtatctgaggaaccagctattaaagctaaagatagaaaatcatcctctattaga

SEQ ID NO: 150746 - DNA, 59 bp, Artificial
  Synthetic oligonucleotide
atgggtcttcatccggtactggtaatttacctgcacgatgaatagaaagtatcccatca

SEQ ID NO: 150747 - DNA, 60 bp, Artificial
  Synthetic oligonucleotide
cgatatgagtcatcgttacacagccgcgagatagtgccgcgacttagctttgaccgcctt

SEQ ID NO: 150748 - DNA, 60 bp, Artificial
  Synthetic oligonucleotide
cgatatatccgctcaccggggcaatgcaagccccgatggcattcgcgtattgatggtagt

SEQ ID NO: 150749 - DNA, 59 bp, Artificial
  Synthetic oligonucleotide
cgatagatcaaggcggttcggcaggtacaattgctagtccaagtcgtgcaacttaaatc

SEQ ID NO: 150750 - DNA, 60 bp, Artificial
  Synthetic oligonucleotide
gccaactacagccaactttgtatgcatggggtcaagtcccattttgatgcaacttactga

SEQ ID NO: 150751 - DNA, 56 bp, Artificial
  Synthetic oligonucleotide
gccaagtggtggtacactagctagaagagtcattcccgctaaaggttggtagccgt

SEQ ID NO: 150752 - DNA, 55 bp, Artificial
  Synthetic oligonucleotide
gccagaaattaaaagttccggctaaaacttctgtgactaagaaagctgcctctaa

SEQ ID NO: 150753 - DNA, 54 bp, Artificial
  Synthetic oligonucleotide
cctcctcgcattttcttgggaattctgtacaaatttaaaagtgacttgaaccca

SEQ ID NO: 150754 - DNA, 58 bp, Artificial
  Synthetic oligonucleotide
cctccgacgtccacaacaagcgcatccgataatttcgcaagataggacgccccgcgga

SEQ ID NO: 150755 - DNA, 59 bp, Artificial
  Synthetic oligonucleotide
gcccaagaccggatgtcacgcagcttgttacagctacagggtatagttttccgagcggc

SEQ ID NO: 150756 - DNA, 60 bp, Artificial
  Synthetic oligonucleotide
gcccatcatgtcattcagtcgtttaaaccagatgaagtggattcccaccaagccaatgaa

SEQ ID NO: 150757 - DNA, 56 bp, Artificial
  Synthetic oligonucleotide
caaaagtacaagaaatgcctaaaacggaatctacttgtggaattgatgttggacta

SEQ ID NO: 150758 - DNA, 57 bp, Artificial
  Synthetic oligonucleotide
cctacagggataatgactactgttccaatggttgcaacagccttcttatggttgttt

SEQ ID NO: 150759 - DNA, 56 bp, Artificial
  Synthetic oligonucleotide
cctaataaaatcacctcaaattagaagtgtaacatccatgtttactcacagtcttt

SEQ ID NO: 150760 - DNA, 57 bp, Artificial
  Synthetic oligonucleotide
gccctccgggctaagtacagtacctgtaactgcgtgaagcctactacataatcgtac

SEQ ID NO: 150761 - DNA, 60 bp, Artificial
  Synthetic oligonucleotide
gccgccaagcgaatgcgaggccgtctcgacaaggaaggcgctgaaaagatcagctctctc

SEQ ID NO: 150762 - DNA, 59 bp, Artificial
  Synthetic oligonucleotide
ccgttcccgtcgaacaagcacagccgatgttcaccttggaggacatgcggaacattgta

SEQ ID NO: 150763 - DNA, 57 bp, Artificial
  Synthetic oligonucleotide
ccgttccagtacagtaggttctacatcaggagaagcaccagccaaaccaagaacaaa

SEQ ID NO: 150764 - DNA, 60 bp, Artificial
  Synthetic oligonucleotide
ccgtgtggaattgtcctgtgtgtgcagccaaaatcagcgagataagacgaaaagagttgc

SEQ ID NO: 150765 - DNA, 59 bp, Artificial
  Synthetic oligonucleotide
gccgtatagcattgtttcccaatacgtagatacggcagcaggacgttccgcagagaaaa

SEQ ID NO: 150766 - DNA, 60 bp, Artificial
  Synthetic oligonucleotide
gccgtatcagatattccgatttcgcaagctaatttcgaattgcttgtcattgaacaaata

SEQ ID NO: 150767 - DNA, 60 bp, Artificial
  Synthetic oligonucleotide
gcctgcggtcagacgcattcatttttgcttcgcgctgcgcttgaaccaaaaacaagctcg

SEQ ID NO: 150768 - DNA, 56 bp, Artificial
  Synthetic oligonucleotide
caaaagcacgaaaatcaaaaagccaacacccaacattattacaaccgcgcaagaca

SEQ ID NO: 150769 - DNA, 54 bp, Artificial
  Synthetic oligonucleotide
gcgaaaccccacgtattccgtatcaattttggagtaagcactattttaggacga

SEQ ID NO: 150770 - DNA, 60 bp, Artificial
  Synthetic oligonucleotide
gcgaaagatccaagcacaaatccaaaagatccaagcacagatccgaaagatccaagcaca

SEQ ID NO: 150771 - DNA, 53 bp, Artificial
  Synthetic oligonucleotide
gcaattcgtcccggaatttgcaaccctgaatttagggaaattgacgtaatttc

SEQ ID NO: 150772 - DNA, 60 bp, Artificial
  Synthetic oligonucleotide
gcacagatccgaaagatccaagcacaaatccaaaagatccaagcacagatgcgaaagatc

SEQ ID NO: 150773 - DNA, 59 bp, Artificial
  Synthetic oligonucleotide
cgaaggggaaggttatcggtgtaatcatacttattgcgctatgtataccatttactgca

SEQ ID NO: 150774 - DNA, 53 bp, Artificial
  Synthetic oligonucleotide
cgaacgactaaaatcgccggcaactgcctttacctcccgattcccgaacatcg

SEQ ID NO: 150775 - DNA, 56 bp, Artificial
  Synthetic oligonucleotide
cgaacctatttttagcccgcttcgcatagtcctggaaataatagctgcgttagaac

SEQ ID NO: 150776 - DNA, 53 bp, Artificial
  Synthetic oligonucleotide
gcacctactcaaaaattgtctaaaagagaacaggaaggacgactagggaaagt

SEQ ID NO: 150777 - DNA, 60 bp, Artificial
  Synthetic oligonucleotide
gcacgttgtaattgatgctgcattgttcgttctcgcagctcaccttgtttcccaaagaaa

SEQ ID NO: 150778 - DNA, 52 bp, Artificial
  Synthetic oligonucleotide
cgaaagggagtctacttctcgttgaaacccttactctcataagggttctttc

SEQ ID NO: 150779 - DNA, 60 bp, Artificial
  Synthetic oligonucleotide
attttgtgcctgtggcaagtggctataagcgaggacttgaaaagcaagtgtcgtttgatc

SEQ ID NO: 150780 - DNA, 57 bp, Artificial
  Synthetic oligonucleotide
cgaaaatatgaacgttaggaaagcgattaggtgcttataatggctagaacaagccga

SEQ ID NO: 150781 - DNA, 54 bp, Artificial
  Synthetic oligonucleotide
cctttaatcgtcgtcgtactaacacctgattttaagccggttgttagatctcca

SEQ ID NO: 150782 - DNA, 53 bp, Artificial
  Synthetic oligonucleotide
cctttaacaaatcgggtgtgattcctaaaagatccgcaacaattttcggtgtg

SEQ ID NO: 150783 - DNA, 60 bp, Artificial
  Synthetic oligonucleotide
gcagattgaccaccatatgacagccggagacatgcttgttagtacgctgttggctgctaa

SEQ ID NO: 150784 - DNA, 56 bp, Artificial
  Synthetic oligonucleotide
gcaggtactgtcttaaccgtacttagcgcggtgcttcctattctttggccgactaa

SEQ ID NO: 150785 - DNA, 59 bp, Artificial
  Synthetic oligonucleotide
ccttatgctccgtggcgcaacgctaaggcgttccgccactacgagctaacgcacattct

SEQ ID NO: 150786 - DNA, 60 bp, Artificial
  Synthetic oligonucleotide
gcatatggaagcgtttcatcgtttactggaggaggaatgtctaggaagaatggcgtttga

SEQ ID NO: 150787 - DNA, 60 bp, Artificial
  Synthetic oligonucleotide
gcatcttggaagatgagaggtaggcagatacttcgtgattttgttgaatcttatgtgcaa

SEQ ID NO: 150788 - DNA, 51 bp, Artificial
  Synthetic oligonucleotide
cctggcgtgggttttcgggttctcgtttgttactagattattagccaaaaa

SEQ ID NO: 150789 - DNA, 57 bp, Artificial
  Synthetic oligonucleotide
gcattactggagccaccggagttactggggcgacgggcattactggagccaccggag

SEQ ID NO: 150790 - DNA, 51 bp, Artificial
  Synthetic oligonucleotide
attttaggaggtcgaaaaaccatggtcgcccggcaaaaagaatccgtccga

SEQ ID NO: 150791 - DNA, 57 bp, Artificial
  Synthetic oligonucleotide
gcattataagtaattaactcaccaattgacatatttccctttaatacctggttagca

SEQ ID NO: 150792 - DNA, 60 bp, Artificial
  Synthetic oligonucleotide
cctgatttcgagtgaccacgaggggctgcgatgcctaagttcacgcccttacctgcatct

SEQ ID NO: 150793 - DNA, 60 bp, Artificial
  Synthetic oligonucleotide
cctgacgtatcaatatctagtcccattaagacaccgcctttgcaacgattaagtcataca

SEQ ID NO: 150794 - DNA, 60 bp, Artificial
  Synthetic oligonucleotide
tgaaatctcgaagtatcctgtcaaggatacggatgtgatacgtgggaatgaggtgaccga

SEQ ID NO: 150795 - DNA, 58 bp, Artificial
  Synthetic oligonucleotide
tgaacaaataaatctcttacaatcgcaaggtaaaaacgtcatgacgttaagcgtgata

SEQ ID NO: 150796 - DNA, 59 bp, Artificial
  Synthetic oligonucleotide
aaccctaatgtactaattgctggagtgccagggagcggaaaatcggtcatggatagaca

SEQ ID NO: 150797 - DNA, 60 bp, Artificial
  Synthetic oligonucleotide
tgaagacgttatatagtcctggcgacgtggcagagcaattaggtatccaatctagcacat

SEQ ID NO: 150798 - DNA, 58 bp, Artificial
  Synthetic oligonucleotide
accgcaaaccttccgttgtgatcgggagccctgtctcgctgtctagcaccgcgattaa

SEQ ID NO: 150799 - DNA, 60 bp, Artificial
  Synthetic oligonucleotide
accgatctcgagacttcatcctatcatgagtcactcctagataatttacacaaagatggt

SEQ ID NO: 150800 - DNA, 60 bp, Artificial
  Synthetic oligonucleotide
aaccgacagactcgttatcaagaatgccgtttcggatggagatcatctctgcgtctagat

SEQ ID NO: 150801 - DNA, 60 bp, Artificial
  Synthetic oligonucleotide
atttgtatggaaagcaattcaaggtggctatgatacaattctagctcgattcactaaagc

SEQ ID NO: 150802 - DNA, 60 bp, Artificial
  Synthetic oligonucleotide
accgagtcttctaccgacccgacataaacagatacaccatgcataatcaaacgctgcaat

SEQ ID NO: 150803 - DNA, 54 bp, Artificial
  Synthetic oligonucleotide
accctttagattaaaccgcacacttagaaaatctgccgcggtgtgaagagggta

SEQ ID NO: 150804 - DNA, 56 bp, Artificial
  Synthetic oligonucleotide
tgaattaaagtaccagtaatattctcatgttgtctcgtaagattacgtaagtttag

SEQ ID NO: 150805 - DNA, 53 bp, Artificial
  Synthetic oligonucleotide
accccataagttttacgagagagcacttaagttgggggagtgctctctttcgt

SEQ ID NO: 150806 - DNA, 60 bp, Artificial
  Synthetic oligonucleotide
aacgaagttagcgctcttgtgatttctcgtctctctgcttttcgaatgctcacttctagt

SEQ ID NO: 150807 - DNA, 58 bp, Artificial
  Synthetic oligonucleotide
acccaccttctaaaagttgcaacacgtcttttgcactttgtccctgatgcatagcaac

SEQ ID NO: 150808 - DNA, 57 bp, Artificial
  Synthetic oligonucleotide
accattcgtttgcgctaattgtttgagctcacgtaattcgcaattaatttgttccag

SEQ ID NO: 150809 - DNA, 60 bp, Artificial
  Synthetic oligonucleotide
accatatgtatctgggtcagtcaacgtacagcgagtgattctctcgttcgactatgcagt

SEQ ID NO: 150810 - DNA, 50 bp, Artificial
  Synthetic oligonucleotide
aacgaatttccgtttatcattaggttactactatagtactaactttttgt

SEQ ID NO: 150811 - DNA, 59 bp, Artificial
  Synthetic oligonucleotide
accatatcagtaggaacatctccagtaggagtgggagtaaatttatcaacgaatctgat

SEQ ID NO: 150812 - DNA, 55 bp, Artificial
  Synthetic oligonucleotide
gtcattggttcgtcggggtctgggaaaggtcaatcctttgtgttcccgaacatga

SEQ ID NO: 150813 - DNA, 59 bp, Artificial
  Synthetic oligonucleotide
ttgcatgaatctagtgtacccaaactttagattatgtagagaaaagaatccactgtagg

SEQ ID NO: 150814 - DNA, 59 bp, Artificial
  Synthetic oligonucleotide
tcttattacaaccgatataaaagtatctcctgcacttggtaaagccatattcgtcgcaa

SEQ ID NO: 150815 - DNA, 51 bp, Artificial
  Synthetic oligonucleotide
ttgcaccgtaaggccgaaacaaggtggaggaaatcgggcggttttcccgat

SEQ ID NO: 150816 - DNA, 52 bp, Artificial
  Synthetic oligonucleotide
acgaaaatcggtctcacttcttagatttatgtgaaaagaacggttttgaaaa

SEQ ID NO: 150817 - DNA, 55 bp, Artificial
  Synthetic oligonucleotide
accttgtaaatcagttcccgcaatttcacgaattttagaaattgatatatccgaa

SEQ ID NO: 150818 - DNA, 55 bp, Artificial
  Synthetic oligonucleotide
tcttgaaacgcttcagcataccgttttaacgcttctttcttagcttccctatact

SEQ ID NO: 150819 - DNA, 60 bp, Artificial
  Synthetic oligonucleotide
acctcctcgttcattgccttctgcaaatccgagagcatcttatctttcgaatctgcccgc

SEQ ID NO: 150820 - DNA, 56 bp, Artificial
  Synthetic oligonucleotide
aacagaggttcagaagaatattgaaagactcataaaaaaacgcctggattatgtac

SEQ ID NO: 150821 - DNA, 58 bp, Artificial
  Synthetic oligonucleotide
aacatcaaaggagatcgcctcaaaaaactttgtcacagcgaatatttagaagaacgca

SEQ ID NO: 150822 - DNA, 57 bp, Artificial
  Synthetic oligonucleotide
ttgcaagatacaaacagacagatagaaattagcgaactagaaaagaaaggacgttta

SEQ ID NO: 150823 - DNA, 56 bp, Artificial
  Synthetic oligonucleotide
atttattaagtgtattcgacggagccggaagtagacgacttaagggagcgacatga

SEQ ID NO: 150824 - DNA, 58 bp, Artificial
  Synthetic oligonucleotide
ttgaggatatcaggagatttagtgagaagtcaatatttaagggaaaatgaatgtaaac

SEQ ID NO: 150825 - DNA, 54 bp, Artificial
  Synthetic oligonucleotide
tctttccagtcaaaagaagtagtctttttctgttacgtaattgggtttcatgag

SEQ ID NO: 150826 - DNA, 58 bp, Artificial
  Synthetic oligonucleotide
ttgaccatttttataagcactaaaatgaattttatgcgcttataaacggatgtgattc

SEQ ID NO: 150827 - DNA, 58 bp, Artificial
  Synthetic oligonucleotide
ttgaatccttggtatcttgtaacactagcagctttaacgggtgtaggaatatctgcgt

SEQ ID NO: 150828 - DNA, 57 bp, Artificial
  Synthetic oligonucleotide
ttgaaaagggtgcatttcaaaaggagcgctgcatacctaaactagaggaaaaatcca

SEQ ID NO: 150829 - DNA, 58 bp, Artificial
  Synthetic oligonucleotide
tgaaactggactacacgccgattgttgatatccgaagagtcaagggaagagctaaaat

SEQ ID NO: 150830 - DNA, 58 bp, Artificial
  Synthetic oligonucleotide
ttcttccatgtccccaagtgtactgaaattattgcacggaatggtgcaatttattacg

SEQ ID NO: 150831 - DNA, 55 bp, Artificial
  Synthetic oligonucleotide
aacccgaaaggggcgggaggataaggagtggacacgtgcatcggatagttcatcc

SEQ ID NO: 150832 - DNA, 60 bp, Artificial
  Synthetic oligonucleotide
acatgaatctctaaactataatctcatgaacaaacgttggaaaatagccattatcataag

SEQ ID NO: 150833 - DNA, 60 bp, Artificial
  Synthetic oligonucleotide
tgagtggtatcaacatatcaaaaggttgaatgtgacagatgcagagattctccgtaacga

SEQ ID NO: 150834 - DNA, 60 bp, Artificial
  Synthetic oligonucleotide
atttatctccatcgactgcagataaacgagcgccgtcacgaataagcgtatagccctcgg

SEQ ID NO: 150835 - DNA, 60 bp, Artificial
  Synthetic oligonucleotide
tgagttagataatacagcgtcaggtaatgttcgtaatgttatgcaagttcatggcccaga

SEQ ID NO: 150836 - DNA, 57 bp, Artificial
  Synthetic oligonucleotide
aacgggagattggctagggttgacggtatattgataagaagcgcttgatccgttaga

SEQ ID NO: 150837 - DNA, 58 bp, Artificial
  Synthetic oligonucleotide
ttcccatccataagacttagtgacttatatctattaggtgcttcgaaaaaaggatata

SEQ ID NO: 150838 - DNA, 60 bp, Artificial
  Synthetic oligonucleotide
acataactgatgatgatagagtaatgtacagcaataaagtaaatgacaattaaggtattg

SEQ ID NO: 150839 - DNA, 60 bp, Artificial
  Synthetic oligonucleotide
ttccaccatacacatggaggagggtatacaattgagtatcatcaccggtacgagtaatcc

SEQ ID NO: 150840 - DNA, 56 bp, Artificial
  Synthetic oligonucleotide
ttcattttagtgcttataaaaatggtcaaggttgtaggaatctcctaccaagtcaa

SEQ ID NO: 150841 - DNA, 58 bp, Artificial
  Synthetic oligonucleotide
tgatatccaacccatccgtagcaaaaaacagatcgaagatatgaaatggtccctaaaa

SEQ ID NO: 150842 - DNA, 57 bp, Artificial
  Synthetic oligonucleotide
acagtatatttaaactatcctaagagcaaaccagtttatgtaactattcaacacaga

SEQ ID NO: 150843 - DNA, 60 bp, Artificial
  Synthetic oligonucleotide
acagtagcgttattcacttgagtagatacgatattggtcgtatcagtcccgcttactgcc

SEQ ID NO: 150844 - DNA, 58 bp, Artificial
  Synthetic oligonucleotide
tgatccaagggattattacaaaatgattgatagtttaactgtggttcgtttgcattta

SEQ ID NO: 150845 - DNA, 57 bp, Artificial
  Synthetic oligonucleotide
caaatgtcgttcaaacttaaaggcattatacattttcgtaacatgcgtatacttaga

SEQ ID NO: 150846 - DNA, 60 bp, Artificial
  Synthetic oligonucleotide
gtccaacgaaagtattggagcttgtgcaatctttatacgagaaaggatatgtatcgtatc

SEQ ID NO: 150847 - DNA, 60 bp, Artificial
  Synthetic oligonucleotide
ttcagaatttgtagtaacagcttcgcctgattacatgcattcattacgtttagaggaaca

SEQ ID NO: 150848 - DNA, 60 bp, Artificial
  Synthetic oligonucleotide
tgatctccgggaattatatgagcgagagtttggagcagcgaaagatcgatacaatgataa

SEQ ID NO: 150849 - DNA, 57 bp, Artificial
  Synthetic oligonucleotide
ttattagggtgtcgaagccaaataatagaacgctagattactagcacagaaaggagt

SEQ ID NO: 150850 - DNA, 56 bp, Artificial
  Synthetic oligonucleotide
aacgtcctacgtaggcattagcgaattattgtcgcatagtaaaaaggtgctacgtg

SEQ ID NO: 150851 - DNA, 57 bp, Artificial
  Synthetic oligonucleotide
tgatgagccgaaagccttttgtgtcaattgtcgagtagaagtttttgcgaagaaaaa

SEQ ID NO: 150852 - DNA, 60 bp, Artificial
  Synthetic oligonucleotide
tgatgaggcaagtcctcatatgcacttgaattttgtgcctgtggcaagtggctataagcg

SEQ ID NO: 150853 - DNA, 60 bp, Artificial
  Synthetic oligonucleotide
ttcgccagcatgtaaaggctgtcatggagcgattgattgcaaaaaggactgtggaagagc

SEQ ID NO: 150854 - DNA, 58 bp, Artificial
  Synthetic oligonucleotide
aacgaccggttgtgggtagcgctttggggaggatctcgagtcatctgtgttgatccac

SEQ ID NO: 150855 - DNA, 55 bp, Artificial
  Synthetic oligonucleotide
tgacttatactgtgaagttctaaaaaggagggtttcctttgactgaagtatcgac

SEQ ID NO: 150856 - DNA, 53 bp, Artificial
  Synthetic oligonucleotide
accaatttaaagctacaagggaaatatggggcaagaacggcggtatacaagcc

SEQ ID NO: 150857 - DNA, 54 bp, Artificial
  Synthetic oligonucleotide
atttacgtagattgacgttagtacctagaatgtacgccacacctgttacggtag

SEQ ID NO: 150858 - DNA, 60 bp, Artificial
  Synthetic oligonucleotide
aacgagccggtcactggcggatcagtgatggaaaatgatcgaccagttgtcaatcacttg

SEQ ID NO: 150859 - DNA, 57 bp, Artificial
  Synthetic oligonucleotide
accaattaggtctttacttaactgtgatagagtcgtcataatctatcgtttcacctc

SEQ ID NO: 150860 - DNA, 60 bp, Artificial
  Synthetic oligonucleotide
aacgcggcagtattatgagaatgcctttcctcttatcaagacctgggtagagctgtacat

SEQ ID NO: 150861 - DNA, 52 bp, Artificial
  Synthetic oligonucleotide
accaacaggttttttcttcgcaaaaacttctactcgacaattgacacaaaag

SEQ ID NO: 150862 - DNA, 60 bp, Artificial
  Synthetic oligonucleotide
acattgatggattatccaagcagtattcgaagtgtgatttacacgagacgaatgccattg

SEQ ID NO: 150863 - DNA, 55 bp, Artificial
  Synthetic oligonucleotide
tgagaagagcataagaggtttttgggcccaactaggggttgggactaggcggagc

SEQ ID NO: 150864 - DNA, 56 bp, Artificial
  Synthetic oligonucleotide
aacggaaattgaaacggcatgagagacaaatagaacttactattgagaagttgaaa

SEQ ID NO: 150865 - DNA, 60 bp, Artificial
  Synthetic oligonucleotide
tgagggagcgagggtgcatgggcggcacaataccaggctgctgggcattctcagaaccat

SEQ ID NO: 150866 - DNA, 59 bp, Artificial
  Synthetic oligonucleotide
tgagtcaagggaatcggaatcgagttggtgtgactctaagaaaaaggacatgagactgt

SEQ ID NO: 150867 - DNA, 57 bp, Artificial
  Synthetic oligonucleotide
tgagtggagggggacttttattattggtgcctggcattctgtttacagtggcgggcg

SEQ ID NO: 150868 - DNA, 54 bp, Artificial
  Synthetic oligonucleotide
atttaagtgagcgatactttcggtaaatgaatctcctatttcttgcgccctttt

SEQ ID NO: 150869 - DNA, 57 bp, Artificial
  Synthetic oligonucleotide
acatgagttgacaggcgcagaaaaaaacgtagtctttttgcgttggagagcccttca

SEQ ID NO: 150870 - DNA, 60 bp, Artificial
  Synthetic oligonucleotide
ttcctgaactcgcagggatgattggttatgttaaggggagtatactggacaagatgaatc

SEQ ID NO: 150871 - DNA, 60 bp, Artificial
  Synthetic oligonucleotide
acatgaatgaggtgaagtgcagacagaaggtaaggtgacggagtggactctcaaaggaca

SEQ ID NO: 150872 - DNA, 60 bp, Artificial
  Synthetic oligonucleotide
ttccgaattacgaagtacaagctgctgttgtccacaattttgataacttaatgctattca

SEQ ID NO: 150873 - DNA, 52 bp, Artificial
  Synthetic oligonucleotide
actcaggatttttagccttcaccatttccctacctaaattccgtaggtttgc

SEQ ID NO: 150874 - DNA, 56 bp, Artificial
  Synthetic oligonucleotide
ttggctcgcttttggttgaactttttgggcgatgttcaacctttgcggattgcaaa

SEQ ID NO: 150875 - DNA, 58 bp, Artificial
  Synthetic oligonucleotide
ttggctaatcccttagtatagtcagttttactagcaatagactgtatgatacccaaat

SEQ ID NO: 150876 - DNA, 59 bp, Artificial
  Synthetic oligonucleotide
actatagagagaatttcgctacggactcgattacacaaggcgttacagagacagttcga

SEQ ID NO: 150877 - DNA, 57 bp, Artificial
  Synthetic oligonucleotide
actagggaaagacaagaaattctctctatcgggcttaaaacgtcaatcagagcaatc

SEQ ID NO: 150878 - DNA, 60 bp, Artificial
  Synthetic oligonucleotide
ttggatgctatatgcgggtcttaaatgcttgttaatcgggagcgtgtggtatgttctatg

SEQ ID NO: 150879 - DNA, 56 bp, Artificial
  Synthetic oligonucleotide
atttaagacgtttagagggcttattaagaatgaattggatatgaagggtgtagaca

SEQ ID NO: 150880 - DNA, 55 bp, Artificial
  Synthetic oligonucleotide
ttggaaaagacggtgacacgcctttgtcacatggattagccggtaaaccgactaa

SEQ ID NO: 150881 - DNA, 57 bp, Artificial
  Synthetic oligonucleotide
actagcacaaacggatacacgtgttcatgaagggaacggtaattccagtcttggata

SEQ ID NO: 150882 - DNA, 57 bp, Artificial
  Synthetic oligonucleotide
actacattaacagtgaaatctgaagattcttgttcggacatttttaattcgtactca

SEQ ID NO: 150883 - DNA, 58 bp, Artificial
  Synthetic oligonucleotide
aaatcgtattccatacgctaatggcgttaataatgatatttagggcgctggcacgttg

SEQ ID NO: 150884 - DNA, 55 bp, Artificial
  Synthetic oligonucleotide
actaaggaaaggtagagaattctctctagagggcttaaaacgaaaatcagagcag

SEQ ID NO: 150885 - DNA, 57 bp, Artificial
  Synthetic oligonucleotide
actaagaccgtatcaagaacacgctttatcgcagtttattttcacacaagaaatcga

SEQ ID NO: 150886 - DNA, 58 bp, Artificial
  Synthetic oligonucleotide
acgtttctgtgattgatgggctaataaatagcgtgattgctactataccagttggggt

SEQ ID NO: 150887 - DNA, 50 bp, Artificial
  Synthetic oligonucleotide
aaatggggtcaaggggaagagttccccttgtaggttcggacaaagtccga

SEQ ID NO: 150888 - DNA, 59 bp, Artificial
  Synthetic oligonucleotide
tcgccaggcaatcaacgaaaggatcagtcaaattactgcaggaaaacacgtctctcccc

SEQ ID NO: 150889 - DNA, 58 bp, Artificial
  Synthetic oligonucleotide
tcgctccctcaacggattccataaaattcgggaccgccgagtagcaccaattggagca

SEQ ID NO: 150890 - DNA, 58 bp, Artificial
  Synthetic oligonucleotide
atttaaatcttctaaacctttgattgcgtagcctaagcaagcataattgctccattcc

SEQ ID NO: 150891 - DNA, 60 bp, Artificial
  Synthetic oligonucleotide
ttgtcagttcgaatcgctttaatgcgcgcatggggatacgggctacgcagaatggcaaca

SEQ ID NO: 150892 - DNA, 60 bp, Artificial
  Synthetic oligonucleotide
acttaaaacaccgccattcttatccctcatgtaacttcatcatagaagcaacaagctcat

SEQ ID NO: 150893 - DNA, 60 bp, Artificial
  Synthetic oligonucleotide
ttgtatccttccgtcagttacaacagacaaagcacaactacggattcgtgcaactgacag

SEQ ID NO: 150894 - DNA, 55 bp, Artificial
  Synthetic oligonucleotide
actgtttgttgtggacggtatattgctgattgtaataaccccgtatctttaacac

SEQ ID NO: 150895 - DNA, 60 bp, Artificial
  Synthetic oligonucleotide
aaagcgttgagcttcttgatgtgatgtacctgcagggcttataatattcatagctgttgt

SEQ ID NO: 150896 - DNA, 60 bp, Artificial
  Synthetic oligonucleotide
actgtcatctttttagctcgatgacacttccgaccgttctttgagagtagctgatacaag

SEQ ID NO: 150897 - DNA, 60 bp, Artificial
  Synthetic oligonucleotide
actgtcacgaatagaagctaccaatgggcccacagatgttaaaggggctctgagattagc

SEQ ID NO: 150898 - DNA, 59 bp, Artificial
  Synthetic oligonucleotide
tccttgtaactttccagaccaacttgtcaaagcagaactcacagagtcaaagaaatcat

SEQ ID NO: 150899 - DNA, 59 bp, Artificial
  Synthetic oligonucleotide
aaagcttccatccgttccatcatgctgtggttaaattcttcttgtcgcttcataaattc

SEQ ID NO: 150900 - DNA, 56 bp, Artificial
  Synthetic oligonucleotide
tcgaaatatagggaagccaaaaaggaagcgttaaaacagtatgcagaggcgtttca

SEQ ID NO: 150901 - DNA, 58 bp, Artificial
  Synthetic oligonucleotide
attgggtacagctgcgttacttcggaacgaacccataaatagcaacgaatcgcaatga

SEQ ID NO: 150902 - DNA, 55 bp, Artificial
  Synthetic oligonucleotide
ttgtatacacactttatgaacacgattacagctaaaaatcgttgattttttaggt

SEQ ID NO: 150903 - DNA, 56 bp, Artificial
  Synthetic oligonucleotide
actctaatactcattacgaccaattactaaagccatgtgttttattgtaccgctaa

SEQ ID NO: 150904 - DNA, 59 bp, Artificial
  Synthetic oligonucleotide
tcgacgagcatttttgctatcgaagtatgacctcaagtttagggtgtaccatcaccctc

SEQ ID NO: 150905 - DNA, 57 bp, Artificial
  Synthetic oligonucleotide
aaagtatagggaggccaaaaaggaggcgctgaagcgttatgctgaagcgtttcagga

SEQ ID NO: 150906 - DNA, 55 bp, Artificial
  Synthetic oligonucleotide
tcgacgttactagatggaagggtaataagaagtactccggcagccccgagtacaa

SEQ ID NO: 150907 - DNA, 58 bp, Artificial
  Synthetic oligonucleotide
ttgtaagggagaataagtcaaaaagacctgtagttgtgtgactacagatcttgtctct

SEQ ID NO: 150908 - DNA, 58 bp, Artificial
  Synthetic oligonucleotide
tcgacttggacaagcaagtatacgagccgaaccgcttagatcattcgttccaaaatag

SEQ ID NO: 150909 - DNA, 59 bp, Artificial
  Synthetic oligonucleotide
actcatttgaagatcctcacgacaaatattttcctgcggatctgtggacttattcggac

SEQ ID NO: 150910 - DNA, 60 bp, Artificial
  Synthetic oligonucleotide
tcgtatttattggataagtgcgagtgtcatagcttgggaatagtgccactagatctaata

SEQ ID NO: 150911 - DNA, 58 bp, Artificial
  Synthetic oligonucleotide
tcgtcgctgtatggctgtttccggccgttaaaaagccattcaatgcagtttaagaaga

SEQ ID NO: 150912 - DNA, 56 bp, Artificial
  Synthetic oligonucleotide
attggagacgttacagagagccgggaataggtgggagcccggtacggtgccatata

SEQ ID NO: 150913 - DNA, 60 bp, Artificial
  Synthetic oligonucleotide
acggagactcgctggtcatagcaatattgccacgacgtcgcgatacttaaaagacagtta

SEQ ID NO: 150914 - DNA, 59 bp, Artificial
  Synthetic oligonucleotide
acgcctataatacatttgctagtgcggacgcagttttgtacctatggattggtgcaagt

SEQ ID NO: 150915 - DNA, 58 bp, Artificial
  Synthetic oligonucleotide
acgctctttccaagcgtctagccacgttttacgcgtctgtagcgttgcttgtggcgta

SEQ ID NO: 150916 - DNA, 60 bp, Artificial
  Synthetic oligonucleotide
ttgccattagagcgatatgaagttgagcgctatgaagaacttgatttcaacgctacaccg

SEQ ID NO: 150917 - DNA, 60 bp, Artificial
  Synthetic oligonucleotide
ttgccaggccttagataggattttagatactcattatgcagatgatctactcgacttagt

SEQ ID NO: 150918 - DNA, 59 bp, Artificial
  Synthetic oligonucleotide
tcgtttgatcgggctattacgcaacaagatgcaacactagataaaactcgtccctttga

SEQ ID NO: 150919 - DNA, 55 bp, Artificial
  Synthetic oligonucleotide
tctaagccaacttacataaaaatcactagccgtaatatagtacttataccccttc

SEQ ID NO: 150920 - DNA, 54 bp, Artificial
  Synthetic oligonucleotide
aacaccaacgagtgaagcaatacttcctacaaacatctctcccaagaaacccgg

SEQ ID NO: 150921 - DNA, 59 bp, Artificial
  Synthetic oligonucleotide
acgatgtcggcagatgcgatatattagcgttatcggattttaaacagtggctaagaaaa

SEQ ID NO: 150922 - DNA, 58 bp, Artificial
  Synthetic oligonucleotide
tctcactttaagatagcgagtacttggaatcgtgtgaaaagtgggttgaaagctgtta

SEQ ID NO: 150923 - DNA, 56 bp, Artificial
  Synthetic oligonucleotide
gtccatggtaggggtagaaccagcatctccgagtgaaacggacatttttttgaatg

SEQ ID NO: 150924 - DNA, 54 bp, Artificial
  Synthetic oligonucleotide
aacacctaataataaaactaaaggatacataaaaatcctctgataccaacataa

SEQ ID NO: 150925 - DNA, 60 bp, Artificial
  Synthetic oligonucleotide
acgagccggtcactgacggatcagtgatgaaaaatgaccgactacttgccaatcacttgt

SEQ ID NO: 150926 - DNA, 60 bp, Artificial
  Synthetic oligonucleotide
tctgcatactggagacatgcaaataggggctgaatcttatctgcacgatgttctctgtat

SEQ ID NO: 150927 - DNA, 55 bp, Artificial
  Synthetic oligonucleotide
tctgtattattatgacgtttagttagaatgttataacagttataacgtattaacc

SEQ ID NO: 150928 - DNA, 56 bp, Artificial
  Synthetic oligonucleotide
tcttaacaatatctctcaaacccagagacattctagaccctcaccttcccccaaaa

SEQ ID NO: 150929 - DNA, 59 bp, Artificial
  Synthetic oligonucleotide
acgtgaggactccgcaaagatcggtcattacctcgcgatcttggatgtttacaaagaca

SEQ ID NO: 150930 - DNA, 58 bp, Artificial
  Synthetic oligonucleotide
tcgctccgttgataccgttggaacagctccgtagagaactccccatctcttgtccgtg

SEQ ID NO: 150931 - DNA, 60 bp, Artificial
  Synthetic oligonucleotide
ttgctatgcctccatatatcaaattcatactataagcatatcacctttagaatatatacg

SEQ ID NO: 150932 - DNA, 55 bp, Artificial
  Synthetic oligonucleotide
tcggaaatgcatacaccgaaaattgttgcggatcttttaggggtcacacccgatt

SEQ ID NO: 150933 - DNA, 51 bp, Artificial
  Synthetic oligonucleotide
acggtttttttatttaagggtcttctgaaacacgaggcaatacagcaaacg

SEQ ID NO: 150934 - DNA, 60 bp, Artificial
  Synthetic oligonucleotide
gtccgtcaatacaaggaatatgctgaagctgtttctaacatggagaatcaaattacggag

SEQ ID NO: 150935 - DNA, 55 bp, Artificial
  Synthetic oligonucleotide
tcggccccgctttttattccacggttcgattgacaacgagcctccgcaccctcaa

SEQ ID NO: 150936 - DNA, 56 bp, Artificial
  Synthetic oligonucleotide
aaattggggcgttactggcggaatgtacctgcaggggcttataatattcatagttg

SEQ ID NO: 150937 - DNA, 59 bp, Artificial
  Synthetic oligonucleotide
tcggctgtaagtttgcattccgacctaaaacagatggaactattacagatattctagac

SEQ ID NO: 150938 - DNA, 54 bp, Artificial
  Synthetic oligonucleotide
aaattttaagatcgtgaaaattaagtgatccggaccgaaagcgatattggaaca

SEQ ID NO: 150939 - DNA, 52 bp, Artificial
  Synthetic oligonucleotide
acggggttaagttgttcgacttggaccaggaattgtaccagccgaaccgcca

SEQ ID NO: 150940 - DNA, 60 bp, Artificial
  Synthetic oligonucleotide
ttgcgaagacgtccgccgaactctaaatggtcagcgctaatcgagccaaccttcaagcga

SEQ ID NO: 150941 - DNA, 58 bp, Artificial
  Synthetic oligonucleotide
acgggactttcatcggattacctctgaatcgagagaaaagcgttctatgggcttcaca

SEQ ID NO: 150942 - DNA, 57 bp, Artificial
  Synthetic oligonucleotide
acgggaatgactcagttctagtaattgctaccaacacttactagatataacctgtaa

SEQ ID NO: 150943 - DNA, 57 bp, Artificial
  Synthetic oligonucleotide
tcgtaagagcaagcttgcatttcacccgggtttcttgggagagatgtttgtaggaag

SEQ ID NO: 150944 - DNA, 53 bp, Artificial
  Synthetic oligonucleotide
aacaacgagagagcgtccagagtttcaaaagcttttaaataccttgaaatccg

SEQ ID NO: 150945 - DNA, 60 bp, Artificial
  Synthetic oligonucleotide
attgatggtatgggaactattgcagcgcctgtggttggtcagaagattaatgagtggtat

SEQ ID NO: 150946 - DNA, 58 bp, Artificial
  Synthetic oligonucleotide
tcgtaagcatacgggattggaggaactaacaccgcatgtacttagacatacttttggc

SEQ ID NO: 150947 - DNA, 59 bp, Artificial
  Synthetic oligonucleotide
aacaacggtctttgctgacagcggaacacttcgaggtagcagggctgactagcaaagcg

SEQ ID NO: 150948 - DNA, 52 bp, Artificial
  Synthetic oligonucleotide
tcgtatgacattgtttttaataggacgttaattactttatctaaacctttag

SEQ ID NO: 150949 - DNA, 57 bp, Artificial
  Synthetic oligonucleotide
tggtacgggtctatatcggaagtaagtcgaaaggcttactgacacaattagtgtcgc

SEQ ID NO: 150950 - DNA, 56 bp, Artificial
  Synthetic oligonucleotide
aatcgattagtccaaaaagaagctgtttcttaccagcaagataaagggcgtatgta

SEQ ID NO: 150951 - DNA, 50 bp, Artificial
  Synthetic oligonucleotide
ttaataccccttttcgggggacgggcaaagttatccatttaacgagcgat

SEQ ID NO: 150952 - DNA, 56 bp, Artificial
  Synthetic oligonucleotide
ttaagtggttcaaaagcctccagaactttcgatctgtccgcttgtttgaggaacaa

SEQ ID NO: 150953 - DNA, 55 bp, Artificial
  Synthetic oligonucleotide
tgtttgggggttacggatttgttatgaatgacgtactagaatccagtttattgga

SEQ ID NO: 150954 - DNA, 60 bp, Artificial
  Synthetic oligonucleotide
tgtttctagttggagtagatcgctgacacgtaatccagtatggatcccaataaggaagag

SEQ ID NO: 150955 - DNA, 56 bp, Artificial
  Synthetic oligonucleotide
aatcgacttatgaaatacaaaagggtcgatacagcggtacttggctattttagagc

SEQ ID NO: 150956 - DNA, 60 bp, Artificial
  Synthetic oligonucleotide
gtattattctcgctatcgtggactattgtgtgaagaataactgtatcgagaaagttacta

SEQ ID NO: 150957 - DNA, 60 bp, Artificial
  Synthetic oligonucleotide
attgatcgttgaagaagcgaatcgacaatataagcccgcatgggtatttctcacgttgac

SEQ ID NO: 150958 - DNA, 60 bp, Artificial
  Synthetic oligonucleotide
tgtttcgagttggagtagatcactcacgcgtaatccggtatggatgccgataagaaacag

SEQ ID NO: 150959 - DNA, 58 bp, Artificial
  Synthetic oligonucleotide
tgtttcacctcatccgatagataccttttctcgtttaatacttgttcatatggcgtct

SEQ ID NO: 150960 - DNA, 60 bp, Artificial
  Synthetic oligonucleotide
tggtataacgtgctagaccatatactatgagtcttactgattcccatgttatactaatta

SEQ ID NO: 150961 - DNA, 59 bp, Artificial
  Synthetic oligonucleotide
tgttgctccaataacaagatatattatacttagtccggccttccatgtttcaatctttg

SEQ ID NO: 150962 - DNA, 56 bp, Artificial
  Synthetic oligonucleotide
aatccccctgtttgttagagcgcacgtaagcacctgaaggtgcttacgtctaaata

SEQ ID NO: 150963 - DNA, 60 bp, Artificial
  Synthetic oligonucleotide
aatccatcatctgatagtacaatagggtgtcttgatcctcttccattctgtctaaatcct

SEQ ID NO: 150964 - DNA, 60 bp, Artificial
  Synthetic oligonucleotide
aatcatagaacgccgaacatgggtaagcttagtgaaactaagatatctgcactagcaaag

SEQ ID NO: 150965 - DNA, 60 bp, Artificial
  Synthetic oligonucleotide
tggtctagcacgttataccaaatttcatttggacgtgctctgcgaggctcgttggcttcg

SEQ ID NO: 150966 - DNA, 57 bp, Artificial
  Synthetic oligonucleotide
aatagcaagttagtgaataaattgttcatattttttcgagaggaggttaagcaatga

SEQ ID NO: 150967 - DNA, 57 bp, Artificial
  Synthetic oligonucleotide
aatagagtgtgtcttgctccaataaggaccagccccataaatgtccgtttatggggc

SEQ ID NO: 150968 - DNA, 59 bp, Artificial
  Synthetic oligonucleotide
attgatccatagctacattcgtagccactaacccattgggaatacgtggtccaatatac

SEQ ID NO: 150969 - DNA, 60 bp, Artificial
  Synthetic oligonucleotide
tggcacacaagctacggctggagcgacgtcagtgcaatctcgtcgaatgtgactaatgtg

SEQ ID NO: 150970 - DNA, 60 bp, Artificial
  Synthetic oligonucleotide
aatgacagtcaccaaccattgaagggatttagctagtttgacaagcggagctacatcagg

SEQ ID NO: 150971 - DNA, 60 bp, Artificial
  Synthetic oligonucleotide
tggcatcccagcacccctgtggggtgtgagaggcggagctaaaagtgtcggacacaatgt

SEQ ID NO: 150972 - DNA, 60 bp, Artificial
  Synthetic oligonucleotide
ttaccgaattcagtcaaactccgaatgccaatgacttatccttaggagtcagactgcgag

SEQ ID NO: 150973 - DNA, 60 bp, Artificial
  Synthetic oligonucleotide
ttacagtcttctcttggggatgatccattagtagtaatcgaaacaatggcccacaataga

SEQ ID NO: 150974 - DNA, 58 bp, Artificial
  Synthetic oligonucleotide
aatcttggttaatcggtcaaggtatctcatctactaccattgagaaattccgttcaga

SEQ ID NO: 150975 - DNA, 55 bp, Artificial
  Synthetic oligonucleotide
aatctgcccgtttccgggtctcttttaaacgacaattgctccgcacattcaaaca

SEQ ID NO: 150976 - DNA, 54 bp, Artificial
  Synthetic oligonucleotide
ttacaccaagacatatagggatggaacaaattagaatagtaaacttaatccctt

SEQ ID NO: 150977 - DNA, 54 bp, Artificial
  Synthetic oligonucleotide
aatctcgttctttgaccaactaaagtttgggtattgcattgtattctagacttt

SEQ ID NO: 150978 - DNA, 59 bp, Artificial
  Synthetic oligonucleotide
tgggagatgctggactacctgtttcacgttctacaataacattagtcttaaattccaca

SEQ ID NO: 150979 - DNA, 60 bp, Artificial
  Synthetic oligonucleotide
gtcgaccgccgaagagtacggacgccagtacaagcattcagcgtaagctgtatgcgcggt

SEQ ID NO: 150980 - DNA, 51 bp, Artificial
  Synthetic oligonucleotide
ttacaacccatatcttacgtataatttaaaaccgggaatttgtgccggaag

SEQ ID NO: 150981 - DNA, 53 bp, Artificial
  Synthetic oligonucleotide
aagccgaacataccaaaaacaaggatttaggttgttcgacttggactagcaat

SEQ ID NO: 150982 - DNA, 55 bp, Artificial
  Synthetic oligonucleotide
aagccgacatacccaaaacgaaggatatgggaatcggcttgtttaagcaagtata

SEQ ID NO: 150983 - DNA, 53 bp, Artificial
  Synthetic oligonucleotide
aagcctcacgaggcttgtcgcctttacctataacacgtaaccatagtttacct

SEQ ID NO: 150984 - DNA, 54 bp, Artificial
  Synthetic oligonucleotide
tgggggtctgaagtagctaagaacttagggattggttcaagtactttgcgtaaa

SEQ ID NO: 150985 - DNA, 51 bp, Artificial
  Synthetic oligonucleotide
tggggttagtaggtgttttgtttgttaaatccgaagaaaatttccagtcac

SEQ ID NO: 150986 - DNA, 57 bp, Artificial
  Synthetic oligonucleotide
aagcgaagagatactctatcgttcgttttaaggtgcctatcatccttaataagagac

SEQ ID NO: 150987 - DNA, 60 bp, Artificial
  Synthetic oligonucleotide
tgggtagctatgtgcggaagggataagtgctgaaagcatctaagcatgaagcccccctca

SEQ ID NO: 150988 - DNA, 53 bp, Artificial
  Synthetic oligonucleotide
tgtaggaagaataatttagactatggaatgaataactcttaacctccgttttt

SEQ ID NO: 150989 - DNA, 59 bp, Artificial
  Synthetic oligonucleotide
aaggctcttgaattggcttataaagtgatacaatagagttctaggcgaaggtgcgtagc

SEQ ID NO: 150990 - DNA, 60 bp, Artificial
  Synthetic oligonucleotide
catctccatacacaatgagtaatgtgtttacagtcgccgctcaacttgcattagtgcgag

SEQ ID NO: 150991 - DNA, 52 bp, Artificial
  Synthetic oligonucleotide
aaggctggtggaggggtagttggaggttgctgtccaccgaaggaggggaaac

SEQ ID NO: 150992 - DNA, 57 bp, Artificial
  Synthetic oligonucleotide
aagtgaaggagcattaaggagttgacatatttaccacacccaagaccctcttgtgtg

SEQ ID NO: 150993 - DNA, 53 bp, Artificial
  Synthetic oligonucleotide
aagtcgttagtagaaaggatttacagtcctttcatggggatttggatgccttt

SEQ ID NO: 150994 - DNA, 58 bp, Artificial
  Synthetic oligonucleotide
aagtcggcttcttctttacacgcttgacggaaatcgagagattttagcattcacacag

SEQ ID NO: 150995 - DNA, 50 bp, Artificial
  Synthetic oligonucleotide
aaggtacttcgtgtaatcgattttagtaagtcgagtaattaccgtttaat

SEQ ID NO: 150996 - DNA, 58 bp, Artificial
  Synthetic oligonucleotide
tgtcaagttaacataacgcaacattatcggtagcaactattttgttagaatccttgta

SEQ ID NO: 150997 - DNA, 54 bp, Artificial
  Synthetic oligonucleotide
aaggtctgcaaggagttagtgaagtaaactggggattaagtagaacttgtgtag

SEQ ID NO: 150998 - DNA, 58 bp, Artificial
  Synthetic oligonucleotide
tgtatagtttaatcattttaaattggttcaatccgattctttggtatgcctattcatg

SEQ ID NO: 150999 - DNA, 58 bp, Artificial
  Synthetic oligonucleotide
aagtagttgcggaacatttttcgctagagcatttaacactgcaccactggaagaacga

SEQ ID NO: 151000 - DNA, 60 bp, Artificial
  Synthetic oligonucleotide
aaggtgagtctagttggaaggatgaaattcggacggccatcgatcaagcgaaggagcaga

SEQ ID NO: 151001 - DNA, 60 bp, Artificial
  Synthetic oligonucleotide
catctagcgaggacaaagcgaagcctgaagatcttggcaaaccatctagcgaggacaaag

SEQ ID NO: 151002 - DNA, 60 bp, Artificial
  Synthetic oligonucleotide
aaggtgttgaagtgttgccattagagcggcatgaagttgagcgctatgaagaaccggatt

SEQ ID NO: 151003 - DNA, 59 bp, Artificial
  Synthetic oligonucleotide
aagtagatgcacggttccgcagcatacttttcggaattgaaaatttgacacacagaaca

SEQ ID NO: 151004 - DNA, 58 bp, Artificial
  Synthetic oligonucleotide
tgtatgactgaaaggaaacccatggcagttaactgtgtaaatgggcacttatttatta

SEQ ID NO: 151005 - DNA, 58 bp, Artificial
  Synthetic oligonucleotide
aagtaacggttatgtttcgaaaatgtagtcttattgattaggagatgcacatcgataa

SEQ ID NO: 151006 - DNA, 58 bp, Artificial
  Synthetic oligonucleotide
tgtatcatttgcgttaaagtggctgccaatacgaaaggcgttaaaatactcgtgccag

SEQ ID NO: 151007 - DNA, 55 bp, Artificial
  Synthetic oligonucleotide
aagtaaatataagcgaatccatttaagagggaagagataatctcttgttccttaa

SEQ ID NO: 151008 - DNA, 60 bp, Artificial
  Synthetic oligonucleotide
tgttatacgaggttatgatgcgttgtgctgcctcttttccgtatatgtgttgtaatgcgg

SEQ ID NO: 151009 - DNA, 60 bp, Artificial
  Synthetic oligonucleotide
tgtgttgagaaaatctgatcatttgagtgtgaatgaattacagattgaagaaccatctgt

SEQ ID NO: 151010 - DNA, 59 bp, Artificial
  Synthetic oligonucleotide
tggttaaggcaaagaaagatttgcgcgctgatgtgttaaaagtcggccatcacggggca

SEQ ID NO: 151011 - DNA, 58 bp, Artificial
  Synthetic oligonucleotide
tgtgtgggtaaattgtagaaatgtggcgaagacattttcggacattctaatagccgaa

SEQ ID NO: 151012 - DNA, 57 bp, Artificial
  Synthetic oligonucleotide
ggcgtatatagcttgtgttaacgcagtaaccttactgaactagatactaattaggta

SEQ ID NO: 151013 - DNA, 58 bp, Artificial
  Synthetic oligonucleotide
tgtggcgagtgtttgctgtcatttggacttcctccttggaatttgccacactattttt

SEQ ID NO: 151014 - DNA, 57 bp, Artificial
  Synthetic oligonucleotide
aatactaacatgcaatccacttgttaaagaaataccgtaggatgtgaacataaaata

SEQ ID NO: 151015 - DNA, 52 bp, Artificial
  Synthetic oligonucleotide
aatacccaggaacctttcggtaaggtggggaccaacattagattcctgaata

SEQ ID NO: 151016 - DNA, 56 bp, Artificial
  Synthetic oligonucleotide
aatacatcgccaacttccgcaaacgttttatctacagatttattaacatggagatt

SEQ ID NO: 151017 - DNA, 60 bp, Artificial
  Synthetic oligonucleotide
tggttttacatgatgatgaagcaaatccgcatctacatattaactatgtaccgaatttcg

SEQ ID NO: 151018 - DNA, 60 bp, Artificial
  Synthetic oligonucleotide
tggtttttatccacgctgtggcgtgatttggcgaagccaacaaggtctcgcagagcccac

SEQ ID NO: 151019 - DNA, 60 bp, Artificial
  Synthetic oligonucleotide
tgtacgtgtgtataatgtcctatgactgatggtaaagtgctgaaatacgagctgtaaaaa

SEQ ID NO: 151020 - DNA, 53 bp, Artificial
  Synthetic oligonucleotide
aagttccgcaaggaacaggtagtatttttgagtaaaaagcactcaaaaatctc

SEQ ID NO: 151021 - DNA, 59 bp, Artificial
  Synthetic oligonucleotide
aaggcatggtttggcgaagccaacgagcctcgcagagcacgtccaaatgaaatttggta

SEQ ID NO: 151022 - DNA, 60 bp, Artificial
  Synthetic oligonucleotide
tgtagcgatgtagcggtatccgatatggtcagttttgaacgatataagcttgctatatgc

SEQ ID NO: 151023 - DNA, 60 bp, Artificial
  Synthetic oligonucleotide
ggctatattcgaaagttagaggttacatataatcaagatcgagatgattataatccgcac

SEQ ID NO: 151024 - DNA, 54 bp, Artificial
  Synthetic oligonucleotide
aagtgctgcaccctttatttgagttgttttgtaaaagggtgcaattgaaaagga

SEQ ID NO: 151025 - DNA, 59 bp, Artificial
  Synthetic oligonucleotide
aagtgctatgctgaggcgtttcaagagcgaaatccaaatctagtagtttataacatggt

SEQ ID NO: 151026 - DNA, 60 bp, Artificial
  Synthetic oligonucleotide
aaggctcaaatgaatgctgatgatttattgcattggactcgttgtgaattacaacttgtt

SEQ ID NO: 151027 - DNA, 59 bp, Artificial
  Synthetic oligonucleotide
tgtagcgcagcggaaaaggtggagattttatgaagcatagcgtaagaaaatactacctg

SEQ ID NO: 151028 - DNA, 60 bp, Artificial
  Synthetic oligonucleotide
tgcctacccattcataaactccttcatatccccatgttagggacaattcaacataactga

SEQ ID NO: 151029 - DNA, 60 bp, Artificial
  Synthetic oligonucleotide
acaaggctcggatttacagcgatgatgctatcagattttcatatgatgttgccgcttgtg

SEQ ID NO: 151030 - DNA, 59 bp, Artificial
  Synthetic oligonucleotide
acaagaatcaatggatagtcgtaatgggcttggactctttactaaagatgatattcagg

SEQ ID NO: 151031 - DNA, 60 bp, Artificial
  Synthetic oligonucleotide
acaagaagcgtactcattgtaatgagtagcatttgatacgaacgtttcaacatgactaac

SEQ ID NO: 151032 - DNA, 57 bp, Artificial
  Synthetic oligonucleotide
tgcctccccattcaggaccccaatgaccaaataacgcactacctacccaagatccga

SEQ ID NO: 151033 - DNA, 60 bp, Artificial
  Synthetic oligonucleotide
aactgtctctgtaacgccttgtgtaactgaatcagtagcgaaattctctctatagtaata

SEQ ID NO: 151034 - DNA, 60 bp, Artificial
  Synthetic oligonucleotide
catcatatgagccagcagaactagaggcagcgctaaataacttgttaccaggagaagagt

SEQ ID NO: 151035 - DNA, 53 bp, Artificial
  Synthetic oligonucleotide
acaaatgggggaaggggttaactcccatcattgaagtgttcgttaaattctga

SEQ ID NO: 151036 - DNA, 60 bp, Artificial
  Synthetic oligonucleotide
acaaacagcatccgcggggcgtcctatcttgcgaaattatcggatgcgcttgttgtggac

SEQ ID NO: 151037 - DNA, 60 bp, Artificial
  Synthetic oligonucleotide
tgcgtgctgtgggtaccaatgtgaaccagattgcgagatggtgcaatgcacgagacattg

SEQ ID NO: 151038 - DNA, 58 bp, Artificial
  Synthetic oligonucleotide
tgctattagtttagtgaaagaggtatttgatactcactcaatggtaactccgttggaa

SEQ ID NO: 151039 - DNA, 55 bp, Artificial
  Synthetic oligonucleotide
aactgtgtaaatgggcacttatttattaagtgtattcgacggagccggaagtaga

SEQ ID NO: 151040 - DNA, 52 bp, Artificial
  Synthetic oligonucleotide
aattggggttaagatccatataataatacagaacggttttccaactagttac

SEQ ID NO: 151041 - DNA, 60 bp, Artificial
  Synthetic oligonucleotide
tgctattgcattgtggaattcggcaggtatggatatgtcgccaagtcgaacataccaaaa

SEQ ID NO: 151042 - DNA, 59 bp, Artificial
  Synthetic oligonucleotide
tgctcattccgacctatcatcaaattttcgaattcacgaggggtaagcgccataacctc

SEQ ID NO: 151043 - DNA, 52 bp, Artificial
  Synthetic oligonucleotide
aacttaatcggcgatttaactcgccttctgtagtcttttttcgtactgtatt

SEQ ID NO: 151044 - DNA, 58 bp, Artificial
  Synthetic oligonucleotide
aattctggtatagatccatccaggttagaagagaatatctactttgttcaaaaggaca

SEQ ID NO: 151045 - DNA, 54 bp, Artificial
  Synthetic oligonucleotide
catattttgtcggtatagttaaacgaaaagcaaagcaacgttatataactgaac

SEQ ID NO: 151046 - DNA, 56 bp, Artificial
  Synthetic oligonucleotide
ttatagtacctgtgaagatgcaggttacccgcgacaggacggaaagaccccgtgga

SEQ ID NO: 151047 - DNA, 57 bp, Artificial
  Synthetic oligonucleotide
tgatggtacgtttatatcgattaggggtaattgaacgtacccagcagtattctccta

SEQ ID NO: 151048 - DNA, 59 bp, Artificial
  Synthetic oligonucleotide
tgattttagcagcgttgctatacacttttcggtcatccattattgttccgaagttagaa

SEQ ID NO: 151049 - DNA, 54 bp, Artificial
  Synthetic oligonucleotide
tgcaaagtgtttggaagttagtccaggaggggtgacattactttttaattcctg

SEQ ID NO: 151050 - DNA, 59 bp, Artificial
  Synthetic oligonucleotide
tgcaactggtcggaagtggtggcgtgattatcatgaaacagacgtttgaaaatggttct

SEQ ID NO: 151051 - DNA, 60 bp, Artificial
  Synthetic oligonucleotide
tgcacatccccatgatctacataagagaaaccagctacgcctagcgttaatacccctaag

SEQ ID NO: 151052 - DNA, 58 bp, Artificial
  Synthetic oligonucleotide
tgcagcagtggcgatttttgaggtaatcacttcccgatcactactaaaaaacgagccg

SEQ ID NO: 151053 - DNA, 57 bp, Artificial
  Synthetic oligonucleotide
acacgctacgcaccggaaacctattactaggaaacatacaatctgatgcgcccaaaa

SEQ ID NO: 151054 - DNA, 60 bp, Artificial
  Synthetic oligonucleotide
ttatgtgtagatcttcgttcgttctatgcaagcgtatcgtgcatcaaaatgggactagac

SEQ ID NO: 151055 - DNA, 57 bp, Artificial
  Synthetic oligonucleotide
aacgttgtagctttctcgtcgaatactcgttaagatctgccaatcaacgaaaaagca

SEQ ID NO: 151056 - DNA, 56 bp, Artificial
  Synthetic oligonucleotide
ggctcgcccggaatacaagttcggacttggacgcttcgcgatgttcccggataatg

SEQ ID NO: 151057 - DNA, 60 bp, Artificial
  Synthetic oligonucleotide
ttatgcacctaaataggtgctgtgtgttttctctccgttcaaagcagaatgccagggcat

SEQ ID NO: 151058 - DNA, 60 bp, Artificial
  Synthetic oligonucleotide
tgcagtattaacgaatcctgctcagaaacatatatcaattggctgggattcatttcaatt

SEQ ID NO: 151059 - DNA, 58 bp, Artificial
  Synthetic oligonucleotide
tgcagttagatccagggacaacttatgtagggaagaaccggcaagctacttatacttc

SEQ ID NO: 151060 - DNA, 55 bp, Artificial
  Synthetic oligonucleotide
aactattaggtttttgattaaacgtgatattttcacttggtgcagccgacaggaa

SEQ ID NO: 151061 - DNA, 60 bp, Artificial
  Synthetic oligonucleotide
acaatgcagcatcaattacaacgtgccagcgccctaaatatcattattaacgccattagc

SEQ ID NO: 151062 - DNA, 60 bp, Artificial
  Synthetic oligonucleotide
tgcatcatatccgaaatcgtctgacggagctctcccccctcgacattccgaactgtcaac

SEQ ID NO: 151063 - DNA, 60 bp, Artificial
  Synthetic oligonucleotide
tgccaacgaagtgaatacaatgagtgcacgtagttcgttggtactccttctagagacgta

SEQ ID NO: 151064 - DNA, 56 bp, Artificial
  Synthetic oligonucleotide
acaagtgtataggtttagaatcgcttttcgtgatatcaataagcaaacgaaaggta

SEQ ID NO: 151065 - DNA, 54 bp, Artificial
  Synthetic oligonucleotide
tggactaaacgtccttattggaatacaaccgatacaattggcgtcgtttgggaa

SEQ ID NO: 151066 - DNA, 57 bp, Artificial
  Synthetic oligonucleotide
aatggtaagcggaccgtagggagcattaaggaattgacaatgtcactacaccaaaga

SEQ ID NO: 151067 - DNA, 60 bp, Artificial
  Synthetic oligonucleotide
gtatttgcattgaatggttgggatggtgattcctatactgattcttggaaatgtataggt

SEQ ID NO: 151068 - DNA, 60 bp, Artificial
  Synthetic oligonucleotide
ggcttcgccatgtcgctttcacttcatggcgcctctcaggctacgggagtggagtctatt

SEQ ID NO: 151069 - DNA, 56 bp, Artificial
  Synthetic oligonucleotide
ttaggggggatggtacttgatatgtcacgagtttagtcgtgggcctttatggtgtc

SEQ ID NO: 151070 - DNA, 52 bp, Artificial
  Synthetic oligonucleotide
tggagaagtgttggagaactataacgctaaacaaaaacgtaacgaccgaaaa

SEQ ID NO: 151071 - DNA, 50 bp, Artificial
  Synthetic oligonucleotide
aatggaattcctaaagtaccagttattcctgaggttacttttagttttgg

SEQ ID NO: 151072 - DNA, 60 bp, Artificial
  Synthetic oligonucleotide
ttaggcgagaagatcggagctaaagaggttgtacaagcttgttatgatttagccatcatt

SEQ ID NO: 151073 - DNA, 60 bp, Artificial
  Synthetic oligonucleotide
aagatgatcaggttgataggttcgaggtggaagcatggtgacatgtggagctgacgaata

SEQ ID NO: 151074 - DNA, 58 bp, Artificial
  Synthetic oligonucleotide
aatggaagtgccagatagagaacatttaaccgaggtctatgcaaggattttaagaggc

SEQ ID NO: 151075 - DNA, 53 bp, Artificial
  Synthetic oligonucleotide
tggaggtagaggtgtgttagttgagatttaagaagtgtttagcggtttttact

SEQ ID NO: 151076 - DNA, 60 bp, Artificial
  Synthetic oligonucleotide
aagattgctacagatatgaaagcgtcacatagccctgtaacaagcggtaacatatggcgt

SEQ ID NO: 151077 - DNA, 60 bp, Artificial
  Synthetic oligonucleotide
aagatttctgaagtaccaagttggaagcttgctattccatatgagtaaagctcatatgca

SEQ ID NO: 151078 - DNA, 58 bp, Artificial
  Synthetic oligonucleotide
tggatagagccttgcaacaacaaggtgtagaaggaacgggaagaaagttaattgcaca

SEQ ID NO: 151079 - DNA, 59 bp, Artificial
  Synthetic oligonucleotide
ggcttctaaccacaaggactgcggggagagcataatcaattagagttcgatagaactct

SEQ ID NO: 151080 - DNA, 53 bp, Artificial
  Synthetic oligonucleotide
aagcaagttgggcgtggtaatgtacaggtctttttaatccccccactataatc

SEQ ID NO: 151081 - DNA, 55 bp, Artificial
  Synthetic oligonucleotide
tggatagataaaccataggtaaaagcctacttgaccaactttatcaatcaaaagg

SEQ ID NO: 151082 - DNA, 55 bp, Artificial
  Synthetic oligonucleotide
tggatgtttgtattgccatccaaggggcttcccttggtcggcgtttgggggcgaa

SEQ ID NO: 151083 - DNA, 60 bp, Artificial
  Synthetic oligonucleotide
aatgagacgtttgaggttatggcgcattggcatgttggcattaagaattacatagtcaac

SEQ ID NO: 151084 - DNA, 55 bp, Artificial
  Synthetic oligonucleotide
ttactaaacatagtttgtaacgactctcaattcaacacaaggggagtattatacg

SEQ ID NO: 151085 - DNA, 55 bp, Artificial
  Synthetic oligonucleotide
aattcggcaggtatggatatgtcgccaagtcgaacataccaaaaacggggattta

SEQ ID NO: 151086 - DNA, 55 bp, Artificial
  Synthetic oligonucleotide
aattccataaaccggatcggattcgtttcctgaagatatttgagcgccatttttc

SEQ ID NO: 151087 - DNA, 57 bp, Artificial
  Synthetic oligonucleotide
aacttgtgagtttcgatatgccgataaatcaagttattcgctacgcttataatacgt

SEQ ID NO: 151088 - DNA, 56 bp, Artificial
  Synthetic oligonucleotide
ttatagcccttgcaccgtttttaattaagtcagcggctacttcagatttaggtgaa

SEQ ID NO: 151089 - DNA, 57 bp, Artificial
  Synthetic oligonucleotide
ttatacggcagtcaaaatagtagcgggggatagcgaggtttggctgggctgtcgcgg

SEQ ID NO: 151090 - DNA, 51 bp, Artificial
  Synthetic oligonucleotide
cataccaaaaacggggatttaggtagtacgacttggactagtaattgtacc

SEQ ID NO: 151091 - DNA, 56 bp, Artificial
  Synthetic oligonucleotide
ttatacgcaccaaataaattggggcgttactggcggaatgtacctgcaggggctta

SEQ ID NO: 151092 - DNA, 59 bp, Artificial
  Synthetic oligonucleotide
aattataacggtaatgctataattggacgagttatcgacagaggatcaaacagtgcttc

SEQ ID NO: 151093 - DNA, 58 bp, Artificial
  Synthetic oligonucleotide
aattagtatctagttcagtatcgttacctcggttatacaagctgtatacgcctagcga

SEQ ID NO: 151094 - DNA, 57 bp, Artificial
  Synthetic oligonucleotide
aattactacggcgaactggtcaattgtattcgaaatgcggttatatagagatacaac

SEQ ID NO: 151095 - DNA, 58 bp, Artificial
  Synthetic oligonucleotide
ttatacaactttattcagcgatcaaaaagcctcggaattagctctctatatccgcccc

SEQ ID NO: 151096 - DNA, 60 bp, Artificial
  Synthetic oligonucleotide
aattaagtccttctggactcatgagtgtagctgtatttgcataaagttgactacataatc

SEQ ID NO: 151097 - DNA, 60 bp, Artificial
  Synthetic oligonucleotide
ttataatgcggttattcacaatgatgaggcaagtcctcatatgcacttgaattttgtgcc

SEQ ID NO: 151098 - DNA, 60 bp, Artificial
  Synthetic oligonucleotide
tggaacgccttctaaggataagacacctgatagagatgggccatcaagcaaggataaaac

SEQ ID NO: 151099 - DNA, 56 bp, Artificial
  Synthetic oligonucleotide
aagacccgtgcaagtcccttttaagacacatcggctcaagcctcccattgtaggtc

SEQ ID NO: 151100 - DNA, 54 bp, Artificial
  Synthetic oligonucleotide
aagagaccctgtaatgagtagagacccgtttcttacgagagaccctgtacttag

SEQ ID NO: 151101 - DNA, 56 bp, Artificial
  Synthetic oligonucleotide
gggaaggtccttgcgtcgataaaaggtggacttaagtcaattccccaagcatgata

SEQ ID NO: 151102 - DNA, 52 bp, Artificial
  Synthetic oligonucleotide
aagagaggggaacctatgtagtgatacttgagtagaaaattaggtttttaat

SEQ ID NO: 151103 - DNA, 57 bp, Artificial
  Synthetic oligonucleotide
tggaatcctccttcgttatgagaatagcgcacgctaaatgaaacggtacgtcctact

SEQ ID NO: 151104 - DNA, 52 bp, Artificial
  Synthetic oligonucleotide
aagagttccccttgtaggttcggacaaagtccgaggtttttttgccatgcaa

SEQ ID NO: 151105 - DNA, 60 bp, Artificial
  Synthetic oligonucleotide
agagcaattaggtatccaatctagtacattacgtaagtatgctgatgtactagaaaaaga

SEQ ID NO: 151106 - DNA, 57 bp, Artificial
  Synthetic oligonucleotide
agagcatcattttataccttactcaaaagaacgactccgtttcatgaaactgattcc

SEQ ID NO: 151107 - DNA, 53 bp, Artificial
  Synthetic oligonucleotide
agagccaaacgagaacccccccagctaacaggggggtagtaatggatgagaaa

SEQ ID NO: 151108 - DNA, 57 bp, Artificial
  Synthetic oligonucleotide
agagcccacaccaaatgtaatttggtatagtgggctataccaaatctttggattcgc

SEQ ID NO: 151109 - DNA, 56 bp, Artificial
  Synthetic oligonucleotide
aaaaggctctccatctgcgcctaaaggtctgaagaagagtacgtttatttcgtata

SEQ ID NO: 151110 - DNA, 55 bp, Artificial
  Synthetic oligonucleotide
tcaccttgtttgatatttagagtagtgtaaaattcttgcggtaatgttaaaccta

SEQ ID NO: 151111 - DNA, 57 bp, Artificial
  Synthetic oligonucleotide
tcaccttatcaactgtattatctaaaaagtcagcccaaaatttcgctgtaggacgac

SEQ ID NO: 151112 - DNA, 58 bp, Artificial
  Synthetic oligonucleotide
cagtgtgaattcgaatacagtatgaacgaaattcgaagcgttccacataacgctttac

SEQ ID NO: 151113 - DNA, 60 bp, Artificial
  Synthetic oligonucleotide
agataggatgaaatagtgaacgagtgcttcatatcatgctaggattgttgtgttatacga

SEQ ID NO: 151114 - DNA, 58 bp, Artificial
  Synthetic oligonucleotide
agatagggatgcaagactaaatcttagaaacgaagcaattcgtctcttaaccatagga

SEQ ID NO: 151115 - DNA, 55 bp, Artificial
  Synthetic oligonucleotide
agatctaatactcctaacgttagatctctacggaattgattataccgtacccaac

SEQ ID NO: 151116 - DNA, 60 bp, Artificial
  Synthetic oligonucleotide
agcaccgccagttcctactaatatatcaacgtctacttcttcgagtgcagtacctattgc

SEQ ID NO: 151117 - DNA, 56 bp, Artificial
  Synthetic oligonucleotide
agcactcacgtattttcaacgaatccgtattttagatgcgacgattttccaagtac

SEQ ID NO: 151118 - DNA, 60 bp, Artificial
  Synthetic oligonucleotide
agcagagaccataagtgtgtatgtgatcagttagaaagattacaaccagggacacaagtc

SEQ ID NO: 151119 - DNA, 57 bp, Artificial
  Synthetic oligonucleotide
agcagggacgaaagtcgggcttagtgatccggtggttccgcatggaagggccatcgc

SEQ ID NO: 151120 - DNA, 60 bp, Artificial
  Synthetic oligonucleotide
agcagggcgtccaagcaactttaagaggcaaaaacatcacgtatgagcatctagaatcga

SEQ ID NO: 151121 - DNA, 59 bp, Artificial
  Synthetic oligonucleotide
tcaaagagagcgtattaattctaaattagcgaattatcactttttagttgaatacagca

SEQ ID NO: 151122 - DNA, 60 bp, Artificial
  Synthetic oligonucleotide
agcagttgcacaatcaggtgttacaactgaagatgggcgagtttgtactagccgtacatg

SEQ ID NO: 151123 - DNA, 60 bp, Artificial
  Synthetic oligonucleotide
cagtgaatgtggcttagcttgtctgggtatgatactaggttaccatgggtatcatgtaac

SEQ ID NO: 151124 - DNA, 53 bp, Artificial
  Synthetic oligonucleotide
tattttgaaagtcgggtttagtcaggtttggcatagtgtttaaaaattgaaca

SEQ ID NO: 151125 - DNA, 58 bp, Artificial
  Synthetic oligonucleotide
tattttccgctatgtatataaaaacatctagttgtttgttgtctatgattcctagaac

SEQ ID NO: 151126 - DNA, 60 bp, Artificial
  Synthetic oligonucleotide
agcattcccctatggtcttactcccgctcctattctcattcgccacgtgcgccttgtgcg

SEQ ID NO: 151127 - DNA, 53 bp, Artificial
  Synthetic oligonucleotide
ttttagccaggagtcttatttttgatttgataacccgaagggaaattggcaaa

SEQ ID NO: 151128 - DNA, 52 bp, Artificial
  Synthetic oligonucleotide
aaaacgtttcccaataaagcggtctctgataagggtaaattcatatcgggta

SEQ ID NO: 151129 - DNA, 60 bp, Artificial
  Synthetic oligonucleotide
tccgatactccacgagttctcctgccaatccatgaatgttgttcatctatatcaggcaac

SEQ ID NO: 151130 - DNA, 59 bp, Artificial
  Synthetic oligonucleotide
agaaaggtcataggtcacatactacctatcttttgcctttcagtgacactattcttata

SEQ ID NO: 151131 - DNA, 60 bp, Artificial
  Synthetic oligonucleotide
tccctgtcttctgaaggccattatttgccgcatatagcgtttttcttgtgtactgctata

SEQ ID NO: 151132 - DNA, 55 bp, Artificial
  Synthetic oligonucleotide
agaacatggactactgataagtggtgttatgttaacttggtaaaaacacgttata

SEQ ID NO: 151133 - DNA, 60 bp, Artificial
  Synthetic oligonucleotide
tcccgatagaatagtatttgctggataagctacaccacccacatatggagcactaactac

SEQ ID NO: 151134 - DNA, 57 bp, Artificial
  Synthetic oligonucleotide
cagtcgtttgacgaaagtgtttcgctcgcatatacagtgattagaaagggtgtcccg

SEQ ID NO: 151135 - DNA, 60 bp, Artificial
  Synthetic oligonucleotide
tccattcacgctcacgtttccgctatttactgatccttgattcttcacattgtcctgtac

SEQ ID NO: 151136 - DNA, 60 bp, Artificial
  Synthetic oligonucleotide
tttctcgaagcaacgtgcatatcgccatgatctacataagaaaaaccagctacgcctagc

SEQ ID NO: 151137 - DNA, 60 bp, Artificial
  Synthetic oligonucleotide
tccatacactcttcgaacggcttttgtatcataggctaaatgttgatcagtgaatggtaa

SEQ ID NO: 151138 - DNA, 60 bp, Artificial
  Synthetic oligonucleotide
aaacagttgctgattcgagctacgcaaacgaatttaatcgtatgaacagaatgaggatgc

SEQ ID NO: 151139 - DNA, 60 bp, Artificial
  Synthetic oligonucleotide
agaacgttagatcaagcggtttggctcgtataatgagtagctcaagccgatatgcataaa

SEQ ID NO: 151140 - DNA, 58 bp, Artificial
  Synthetic oligonucleotide
agaactctataatctccactgccgtaaagtcctacgtcaacacgagaagagtattcaa

SEQ ID NO: 151141 - DNA, 57 bp, Artificial
  Synthetic oligonucleotide
agaactggtaaaaattttgcatcgctcgtatcagctactctcaaagaacggtcggaa

SEQ ID NO: 151142 - DNA, 54 bp, Artificial
  Synthetic oligonucleotide
tccaagtgataaacttatccgataataaattacgttcttgggggctagccccca

SEQ ID NO: 151143 - DNA, 60 bp, Artificial
  Synthetic oligonucleotide
agaatatacgcgcaaaaacacgcgctagtgaatattcggatcagcacctggtcaaaggct

SEQ ID NO: 151144 - DNA, 60 bp, Artificial
  Synthetic oligonucleotide
tccaagcacaaatccaaaagatccaagcacagatgcgaaagatccaagcacaaatccaaa

SEQ ID NO: 151145 - DNA, 60 bp, Artificial
  Synthetic oligonucleotide
cagtcccgacatcacgaaagagcaacagacgtaccaagcagtgattaagagcgtgcgaat

SEQ ID NO: 151146 - DNA, 58 bp, Artificial
  Synthetic oligonucleotide
agaatggtaccctcgtattggtttccaatttgaggatcatcacgataagagaatgtta

SEQ ID NO: 151147 - DNA, 58 bp, Artificial
  Synthetic oligonucleotide
aaacagcaccgttgtgtgaaaccacgtttccatcaactgtccgatcgggctatgccgc

SEQ ID NO: 151148 - DNA, 60 bp, Artificial
  Synthetic oligonucleotide
tcagggtcatatgcttcataccacttctcagcatgtccttgtaactcctgttcatccatt

SEQ ID NO: 151149 - DNA, 51 bp, Artificial
  Synthetic oligonucleotide
agacggcgatcacaaaacgtttactctcaccgtttaccgtaagacgtttcc

SEQ ID NO: 151150 - DNA, 60 bp, Artificial
  Synthetic oligonucleotide
tttgatcctcaaacatgctcaggctattcctttgaatgggactcaggtggtgcaggagta

SEQ ID NO: 151151 - DNA, 58 bp, Artificial
  Synthetic oligonucleotide
agacgttgctaacggtttgactaactggttaggagcatattggcctattatcgcattc

SEQ ID NO: 151152 - DNA, 58 bp, Artificial
  Synthetic oligonucleotide
tttgatttcatctaccggaaaagcatctataaacgcacgaccaatattagtagttcga

SEQ ID NO: 151153 - DNA, 59 bp, Artificial
  Synthetic oligonucleotide
tcagcagcggtgatcggtcaaaagataaatgagtggtatcgacatataaaaaaacttaa

SEQ ID NO: 151154 - DNA, 52 bp, Artificial
  Synthetic oligonucleotide
aaaatttccccttgtaggttcggacaaagtccgaggtcttttagccatgcta

SEQ ID NO: 151155 - DNA, 56 bp, Artificial
  Synthetic oligonucleotide
agagaagttcaaatgtcgttcaaacttaaaggcattatacattttcgtaacatgcg

SEQ ID NO: 151156 - DNA, 60 bp, Artificial
  Synthetic oligonucleotide
gggactgcggaatagcaccagttggagcattcaaacatcatgatgacatactggctcgcg

SEQ ID NO: 151157 - DNA, 60 bp, Artificial
  Synthetic oligonucleotide
agcggatattcgtctttgtatgccagatgtagagcaagatcatcgtattgcgagtattgc

SEQ ID NO: 151158 - DNA, 60 bp, Artificial
  Synthetic oligonucleotide
agcggtaactcatctacagataacttgtggtgtaaggcgtaatggatctatatacatgag

SEQ ID NO: 151159 - DNA, 57 bp, Artificial
  Synthetic oligonucleotide
aaaaatccttggagagcattttaaagcatttagagggcttgttaagaatgatctgga

SEQ ID NO: 151160 - DNA, 58 bp, Artificial
  Synthetic oligonucleotide
agcgtggtcttactgataccagtcgccactgtaatttgcttaattgtatagtctttac

SEQ ID NO: 151161 - DNA, 58 bp, Artificial
  Synthetic oligonucleotide
aaaaatatgttgtgttgctttgtctataccatcctttggactacaacacataatatta

SEQ ID NO: 151162 - DNA, 59 bp, Artificial
  Synthetic oligonucleotide
agctctgcattattttagggaagcttattcgcatgaatggttgagggattcgcctaaag

SEQ ID NO: 151163 - DNA, 60 bp, Artificial
  Synthetic oligonucleotide
agctgcgtctattggacctggcggaagtttgactcaacttgttgatgttgatgcaggatg

SEQ ID NO: 151164 - DNA, 51 bp, Artificial
  Synthetic oligonucleotide
aaaaagcccccgccgaaaaatacagagacgcaccaaaatttttggtgcgta

SEQ ID NO: 151165 - DNA, 60 bp, Artificial
  Synthetic oligonucleotide
tagtcggcgcattacctgctacattgcgaagacgtccgccgaactctaaatggtcagcgc

SEQ ID NO: 151166 - DNA, 52 bp, Artificial
  Synthetic oligonucleotide
aaaaagcacacaaggggttacgagccgttaaggggtgttctgcatcccttta

SEQ ID NO: 151167 - DNA, 58 bp, Artificial
  Synthetic oligonucleotide
cagtacgagaacctaaataccaagtctcaccatctgaaacgtattgcaatttatcctc

SEQ ID NO: 151168 - DNA, 52 bp, Artificial
  Synthetic oligonucleotide
aaaaacggggttaagttgctcgacttggatcagcaattatacccgccgaacc

SEQ ID NO: 151169 - DNA, 57 bp, Artificial
  Synthetic oligonucleotide
agcttcttgttcagatatttttaattcgtactcattgtataacagaaacatttctag

SEQ ID NO: 151170 - DNA, 60 bp, Artificial
  Synthetic oligonucleotide
tagtaaggtacaccagttttactctgtaaagcttcataatgctctgccataagatttgcc

SEQ ID NO: 151171 - DNA, 55 bp, Artificial
  Synthetic oligonucleotide
taggttttatcgtctgtccataaacataacatttatgttacaaaccgaataacta

SEQ ID NO: 151172 - DNA, 59 bp, Artificial
  Synthetic oligonucleotide
taggtccatttgctgtcgtatcctcatcacacaccatatcggtaagtaaaacgtacgcc

SEQ ID NO: 151173 - DNA, 54 bp, Artificial
  Synthetic oligonucleotide
aaaaacgggatattgagttgctcgacttggactagcaattatacccgccgaacc

SEQ ID NO: 151174 - DNA, 52 bp, Artificial
  Synthetic oligonucleotide
aaaaacgaggatgtaggttgttcgacttggattagtaattatacccgccgaa

SEQ ID NO: 151175 - DNA, 54 bp, Artificial
  Synthetic oligonucleotide
aaaaacgaggagttaggttgctcgacttggattagcaattgtacctgccgaacc

SEQ ID NO: 151176 - DNA, 54 bp, Artificial
  Synthetic oligonucleotide
aaaaaccaaacaagcagccacaaaaaccaccaaaacaattgtggtcacagtaga

SEQ ID NO: 151177 - DNA, 53 bp, Artificial
  Synthetic oligonucleotide
tagggggtacttcaaaaccttaacttgatggcgatggggtcccgccaacataa

SEQ ID NO: 151178 - DNA, 59 bp, Artificial
  Synthetic oligonucleotide
gagttaagcctctcagcccaagactactcgaaactgttcggcctagagcttaaacatgc

SEQ ID NO: 151179 - DNA, 60 bp, Artificial
  Synthetic oligonucleotide
cgtaacaaaatcaaatgccgtaatacaagcgtcatataagttgaatctaaatgagcagag

SEQ ID NO: 151180 - DNA, 56 bp, Artificial
  Synthetic oligonucleotide
cgaatcctcaaatccactcctaagccttcctaaagcattggcccttgtatccactt

SEQ ID NO: 151181 - DNA, 56 bp, Artificial
  Synthetic oligonucleotide
ggagaatcttgcattacagaagcagtcttaaatagcttgttaaactctgggttatc

SEQ ID NO: 151182 - DNA, 55 bp, Artificial
  Synthetic oligonucleotide
cgtaggaggcttcaaagttgatcatgagagtaacggtcaaggaatagctagtgcc

SEQ ID NO: 151183 - DNA, 55 bp, Artificial
  Synthetic oligonucleotide
ctaaataggcttacaaattcctgaaaccataacacgatatgcatcaacggtttgc

SEQ ID NO: 151184 - DNA, 55 bp, Artificial
  Synthetic oligonucleotide
gaacgaattgctttacgagcctctgcgtatcttcattctctctggccattcccag

SEQ ID NO: 151185 - DNA, 55 bp, Artificial
  Synthetic oligonucleotide
gacccacatattatgacaactaatcttcatgcggacggctcttatgctaaggagt

SEQ ID NO: 151186 - DNA, 55 bp, Artificial
  Synthetic oligonucleotide
gagtactgattagagatgtcgatactcttgagcctgtcgaagagggaaagcctgg

SEQ ID NO: 151187 - DNA, 55 bp, Artificial
  Synthetic oligonucleotide
gatacattcagatctaacactgatagaaagccctccggctctgtcactattagcg

SEQ ID NO: 151188 - DNA, 55 bp, Artificial
  Synthetic oligonucleotide
ggaagaccgttggtgggagcatagagagcgttatacaattagaattccatgctct

SEQ ID NO: 151189 - DNA, 51 bp, Artificial
  Synthetic oligonucleotide
gaattccggtattaaagacgaggaattccggtattaaagacgaggaattcc

SEQ ID NO: 151190 - DNA, 55 bp, Artificial
  Synthetic oligonucleotide
gggcatcgatataaaattgagcagcgctagtaatttgctctgaattgccttcttt

SEQ ID NO: 151191 - DNA, 55 bp, Artificial
  Synthetic oligonucleotide
tcagggatgcatctgacaaccttttcgagagacacctttggttaacagcaaagaa

SEQ ID NO: 151192 - DNA, 55 bp, Artificial
  Synthetic oligonucleotide
tcctatagaaccacttttatccgcccctatagaaccaggctgacttgaatttgcc

SEQ ID NO: 151193 - DNA, 55 bp, Artificial
  Synthetic oligonucleotide
ttacacgctctagtctagcggactcagaaattgtccctaatgctaacctatgggt

SEQ ID NO: 151194 - DNA, 55 bp, Artificial
  Synthetic oligonucleotide
ttgtttatcttggcgccaatgtagaggcgagaacaattgtcgatactgtggaagc

SEQ ID NO: 151195 - DNA, 55 bp, Artificial
  Synthetic oligonucleotide
atagcttcgcatttcaaacgccctcccttgcacacccgactcaggctcctgcctt

SEQ ID NO: 151196 - DNA, 55 bp, Artificial
  Synthetic oligonucleotide
attccgcgcgcttagtgctctccgggtgtttaatcctattgccgagggcccattc

SEQ ID NO: 151197 - DNA, 55 bp, Artificial
  Synthetic oligonucleotide
aggaagtattgagtctagaactagcagtagtcgtatactccgtctcaacactgtg

SEQ ID NO: 151198 - DNA, 55 bp, Artificial
  Synthetic oligonucleotide
catatactgtggattgtactgcattgttgagaggactttcgcacaagactgtccc

SEQ ID NO: 151199 - DNA, 55 bp, Artificial
  Synthetic oligonucleotide
ccatctccgtagccgagagcgactatggccaccttccctttggacggacaaggtg

SEQ ID NO: 151200 - DNA, 56 bp, Artificial
  Synthetic oligonucleotide
gcggctccacaagtgttcgtaatcatgggttagagagtttaaagacgaggaattcc

SEQ ID NO: 151201 - DNA, 55 bp, Artificial
  Synthetic oligonucleotide
cccgatctaagtccacctgtaagctcagagataacttcctcaactggccctttac

SEQ ID NO: 151202 - DNA, 55 bp, Artificial
  Synthetic oligonucleotide
ccctaaagccaactagacttgagtgcttagacttttgtgagtaaaccacaactcc

SEQ ID NO: 151203 - DNA, 55 bp, Artificial
  Synthetic oligonucleotide
agcaatgtcacagagtccactccccctgagagcgcgacacaaattgactccccct

SEQ ID NO: 151204 - DNA, 55 bp, Artificial
  Synthetic oligonucleotide
agagagcattccactcattccaccacgattaagaagagagttaatcgtctcgtgt

SEQ ID NO: 151205 - DNA, 55 bp, Artificial
  Synthetic oligonucleotide
ccgtatggagtcatcacttcattctcgggtcagacgggtattaatattcgatctt

SEQ ID NO: 151206 - DNA, 55 bp, Artificial
  Synthetic oligonucleotide
cctgagagatgggatatcaccgaagcactggggagtgcgcttgcggcacaagcac

SEQ ID NO: 151207 - DNA, 55 bp, Artificial
  Synthetic oligonucleotide
ccttgtttacgtcttcatacttaagacaagatggaatcgcatcgtatacgaatgt

SEQ ID NO: 151208 - DNA, 55 bp, Artificial
  Synthetic oligonucleotide
aagataacagattcggcggaaagcccgctatcactgactttaaggtcgcttgcag

SEQ ID NO: 151209 - DNA, 53 bp, Artificial
  Synthetic oligonucleotide
aaagttattcatgtcgggggacatcccgatccagaaacgggggccgttatgcc

SEQ ID NO: 151210 - DNA, 54 bp, Artificial
  Synthetic oligonucleotide
agccgagagcgactatggccaccttccctttggacggacaaggtgtagctccgt

SEQ ID NO: 151211 - DNA, 59 bp, Artificial
  Synthetic oligonucleotide
atgaataataatctcgtaacaaaatcaaatgccgtaatacaagcgtcatataagttgaa

SEQ ID NO: 151212 - DNA, 54 bp, Artificial
  Synthetic oligonucleotide
agcctaagtgagtccggagcaaaccttattctaactgtccaatcagaggatcat

SEQ ID NO: 151213 - DNA, 54 bp, Artificial
  Synthetic oligonucleotide
ggtgccaccaagctacaccaaccagcgatagttctccgtgttccggccttcact

SEQ ID NO: 151214 - DNA, 54 bp, Artificial
  Synthetic oligonucleotide
cagctataagctctcgctactccttggaactatttcacctccatgggaagcgcc

SEQ ID NO: 151215 - DNA, 54 bp, Artificial
  Synthetic oligonucleotide
ccggccatcaagtttactggccccgtaaatttcgcaacccatgcatctgcggga

SEQ ID NO: 151216 - DNA, 54 bp, Artificial
  Synthetic oligonucleotide
cttcaatcgtacctgcagctgttccttcttgttcggccctcgccgctccgtcgt

SEQ ID NO: 151217 - DNA, 54 bp, Artificial
  Synthetic oligonucleotide
cgcgggaacaagcttcgttgacgatctaaaccttgattcactagacatcgttga

SEQ ID NO: 151218 - DNA, 53 bp, Artificial
  Synthetic oligonucleotide
gttggcccggcaattcactaaagcctgcctctgtccaacgatgatcaaagcgt

SEQ ID NO: 151219 - DNA, 53 bp, Artificial
  Synthetic oligonucleotide
gactctagtaatttctcgactgccatctcaagtgcaacatacgcccctgaaat

SEQ ID NO: 151220 - DNA, 53 bp, Artificial
  Synthetic oligonucleotide
taccagaccttgcaagacgttcttacaccaggcactccccatctcgcggcgag

SEQ ID NO: 151221 - DNA, 53 bp, Artificial
  Synthetic oligonucleotide
gacacctttggttaacagcaaagaatggtgacccaatcaagaccagatggata

SEQ ID NO: 151222 - DNA, 54 bp, Artificial
  Synthetic oligonucleotide
gtgggagaatacttactttgaataacaaagaatctccctcaggtaatcgtcttt

SEQ ID NO: 151223 - DNA, 52 bp, Artificial
  Synthetic oligonucleotide
gacccgagagtaacttattgggaaccggctaagtgggtggagagaattcgcg

SEQ ID NO: 151224 - DNA, 52 bp, Artificial
  Synthetic oligonucleotide
tctgactagatctctgtaacaacgtgaaagagggctagtcagatttcgtgcc

SEQ ID NO: 151225 - DNA, 51 bp, Artificial
  Synthetic oligonucleotide
gctctagttgtatcgccagctgtaccatcagttgcgctcttaaatcgcttc

SEQ ID NO: 151226 - DNA, 51 bp, Artificial
  Synthetic oligonucleotide
ttagctactctcctattatggaagttgcgaaggactttgctcgtgctccaa

SEQ ID NO: 151227 - DNA, 51 bp, Artificial
  Synthetic oligonucleotide
aaagtccgtaaacgaggctagcactcaagaatccgttatagagcccttgat

SEQ ID NO: 151228 - DNA, 50 bp, Artificial
  Synthetic oligonucleotide
ttaactctaagtagcggtactttagcttgagatcttcagtagcctcaatc

SEQ ID NO: 151229 - DNA, 60 bp, Artificial
  Synthetic oligonucleotide
taaacatgcttatcaagaaatcagggatgcatctgacaaccttttcgagagacacctttg

SEQ ID NO: 151230 - DNA, 60 bp, Artificial
  Synthetic oligonucleotide
taagttgaatctaaatgagcagagaattctactctcatgcatctcacaaaatgactcaag

SEQ ID NO: 151231 - DNA, 50 bp, Artificial
  Synthetic oligonucleotide
aattccggtattaaagacgaggaattccggtattaaagacgaggaattcc

SEQ ID NO: 151232 - DNA, 60 bp, Artificial
  Synthetic oligonucleotide
tggaggcataactctaacattcgctaaggatctgatcccatacctcacagaacttagctc

SEQ ID NO: 151233 - DNA, 60 bp, Artificial
  Synthetic oligonucleotide
tcggtttgcgctgaataatcaggatgtatcaattacacgatttagagatgaaacccattc

SEQ ID NO: 151234 - DNA, 59 bp, Artificial
  Synthetic oligonucleotide
gtctgaacgtgacttaggaatacccctatctaatagaaatatgcaatcagtaactatta

SEQ ID NO: 151235 - DNA, 59 bp, Artificial
  Synthetic oligonucleotide
ttcatgcgtagatgtaaccggatgtgggctgatggtataaggacgaaacacaagtttcg

SEQ ID NO: 151236 - DNA, 50 bp, Artificial
  Synthetic oligonucleotide
agccccggacggaaacggaaattcgggttagcccacgtctgccgcccgat

SEQ ID NO: 151237 - DNA, 50 bp, Artificial
  Synthetic oligonucleotide
agcaccgattccataatcaggctggtgcggagcgagccggtagttgcccc

SEQ ID NO: 151238 - DNA, 50 bp, Artificial
  Synthetic oligonucleotide
tccacgcctgcaggaaagttccacttcgacgcacccatgtctgcccggca

SEQ ID NO: 151239 - DNA, 50 bp, Artificial
  Synthetic oligonucleotide
agattcccgtgcaaggcatcggcgagtggtgtcatcccctgctgagtgcc

SEQ ID NO: 151240 - DNA, 50 bp, Artificial
  Synthetic oligonucleotide
tcccctaccgtggcggtggtaacagcaaacggggagtggactgttccgga

SEQ ID NO: 151241 - DNA, 50 bp, Artificial
  Synthetic oligonucleotide
agaattgcgtcccatcgggaaaagcggacagatgggggcaggtatccccg

SEQ ID NO: 151242 - DNA, 50 bp, Artificial
  Synthetic oligonucleotide
tcccgttcctgcggtgggattccacaaccggcatccacaacctgcaacat

SEQ ID NO: 151243 - DNA, 50 bp, Artificial
  Synthetic oligonucleotide
agaagtagaatgttcgggtgctagaacacgtgccaaaaccgccggagaat

SEQ ID NO: 151244 - DNA, 50 bp, Artificial
  Synthetic oligonucleotide
acttccggcgggcttgttccggcatgtgcaagggcttcaggcgagcggag

SEQ ID NO: 151245 - DNA, 50 bp, Artificial
  Synthetic oligonucleotide
tccggccataataacgagacaaccgatttaagacctctccaaccttacga

SEQ ID NO: 151246 - DNA, 60 bp, Artificial
  Synthetic oligonucleotide
cgggagcgagcaactcatctgtgagcacggagtgtttcagcggagcgtgaactacatgga

SEQ ID NO: 151247 - DNA, 50 bp, Artificial
  Synthetic oligonucleotide
caaagccgtccgctacccacccgtaggatggacgaaaccgcaacggacag

SEQ ID NO: 151248 - DNA, 50 bp, Artificial
  Synthetic oligonucleotide
gttggcggccctcttggaatcctaatagcgtgaaattcacggccgatttg

SEQ ID NO: 151249 - DNA, 50 bp, Artificial
  Synthetic oligonucleotide
atgcggtgcactccatgccctcgcaagctcttccggatggctgataggat

SEQ ID NO: 151250 - DNA, 50 bp, Artificial
  Synthetic oligonucleotide
atgcctggcagctttttctaccgcgatatgggggcaaacacccgtcgtgc

SEQ ID NO: 151251 - DNA, 50 bp, Artificial
  Synthetic oligonucleotide
taacctattcgggcaacctgtacgaccgggaaagaagaaagacgcatcaa

SEQ ID NO: 151252 - DNA, 50 bp, Artificial
  Synthetic oligonucleotide
atagacgccttgctgaatgccgcaggcggaaacatgcccggagcttccat

SEQ ID NO: 151253 - DNA, 50 bp, Artificial
  Synthetic oligonucleotide
tacatggttgccagttccatgcatgccatgcccggactaccgctgctacg

SEQ ID NO: 151254 - DNA, 50 bp, Artificial
  Synthetic oligonucleotide
agtgacgccctgctttaacgaccggtagagagtcccgccgccgctgcact

SEQ ID NO: 151255 - DNA, 50 bp, Artificial
  Synthetic oligonucleotide
aggtgtgatccccctcctcacgtccgttgacagccggggttaatgtcccc

SEQ ID NO: 151256 - DNA, 50 bp, Artificial
  Synthetic oligonucleotide
agggtcatcgagccatagtcttgcgtgcatccgcccactatccagtgcga

SEQ ID NO: 151257 - DNA, 58 bp, Artificial
  Synthetic oligonucleotide
cgaccatgtggggcactatttgcggactgccgttatcttgttccgcagggtaaagagc

SEQ ID NO: 151258 - DNA, 50 bp, Artificial
  Synthetic oligonucleotide
tacctcgcttaaacgggactataagttttaccttagcccgatctccgacg

SEQ ID NO: 151259 - DNA, 50 bp, Artificial
  Synthetic oligonucleotide
aggctggagagccatacatttcccctgcggatgggcaggtaagccgaagc

SEQ ID NO: 151260 - DNA, 50 bp, Artificial
  Synthetic oligonucleotide
aggcgcctcgaagcgtgttcgggcataccggctttacgggcacatgtgct

SEQ ID NO: 151261 - DNA, 50 bp, Artificial
  Synthetic oligonucleotide
aggcatacgccccgaacgcccttgtggtgtggcatccattgcctctcaag

SEQ ID NO: 151262 - DNA, 50 bp, Artificial
  Synthetic oligonucleotide
tactctctacggttcgggacgggtattgaaagatgcgtgtcctactgccg

SEQ ID NO: 151263 - DNA, 50 bp, Artificial
  Synthetic oligonucleotide
aggcaggaatgaccaccggaaccgtttcccaacgcccccgcatagagtta

SEQ ID NO: 151264 - DNA, 50 bp, Artificial
  Synthetic oligonucleotide
tagcgatatgaacgttacctcttacgggacggacgttctaagtacggggg

SEQ ID NO: 151265 - DNA, 50 bp, Artificial
  Synthetic oligonucleotide
aggatacgggcaacatccttgcgtgcctcctgaacggattccgcctctcc

SEQ ID NO: 151266 - DNA, 50 bp, Artificial
  Synthetic oligonucleotide
aggacggggaagactttggcggcggtcatatagcaccgcacggggcttta

SEQ ID NO: 151267 - DNA, 50 bp, Artificial
  Synthetic oligonucleotide
aggaagtttccatgtccgttgggcggaggtccccggttcgttcagcatcc

SEQ ID NO: 151268 - DNA, 55 bp, Artificial
  Synthetic oligonucleotide
ggctttggggatagacaaaggaatgggatttcaccgataggacaaatcgctactt

SEQ ID NO: 151269 - DNA, 50 bp, Artificial
  Synthetic oligonucleotide
tatagcgacggggcatggcagggatttatttcccgcgatcgtttggacgt

SEQ ID NO: 151270 - DNA, 50 bp, Artificial
  Synthetic oligonucleotide
agcgtgtttgcgcccctacggtaagcgatgccagcaggaagcatacggtc

SEQ ID NO: 151271 - DNA, 50 bp, Artificial
  Synthetic oligonucleotide
agcgtggggcgaaagtgaacgtggcgaatccttccgcggcttttgtgagc

SEQ ID NO: 151272 - DNA, 58 bp, Artificial
  Synthetic oligonucleotide
cttcattaggttcattatacatgatgtccattaaaagacattccacgtaattgtttag

SEQ ID NO: 151273 - DNA, 60 bp, Artificial
  Synthetic oligonucleotide
cggctgcacttcccggccgttcttcatgcgctccagatcctcatgctggagataggtcgt

SEQ ID NO: 151274 - DNA, 58 bp, Artificial
  Synthetic oligonucleotide
gcttcggaatacacacgtttcagatatacacccacaaggacgagggggcaaatgtctg

SEQ ID NO: 151275 - DNA, 58 bp, Artificial
  Synthetic oligonucleotide
aaaaggtgcggcagccgatacgggagcggcactcttgaaagccggcacgaccgtcatc

SEQ ID NO: 151276 - DNA, 55 bp, Artificial
  Synthetic oligonucleotide
cggagatacggtcccatccggggagtccgttgtccgggctaagttgcaccatgcc

SEQ ID NO: 151277 - DNA, 60 bp, Artificial
  Synthetic oligonucleotide
gacaacgaccatgcaggcatagaagctctccaacaaatccgcaaggaatacagcagagac

SEQ ID NO: 151278 - DNA, 53 bp, Artificial
  Synthetic oligonucleotide
agaagccggacaaaagggaaaaggacacaaggcacaataaaaaatcatcggtc

SEQ ID NO: 151279 - DNA, 60 bp, Artificial
  Synthetic oligonucleotide
acattcactaacttcgcacctatgcagtatggtgatagcacactagcaccctaaagagtg

SEQ ID NO: 151280 - DNA, 56 bp, Artificial
  Synthetic oligonucleotide
tgtacgtaaatccgattgctttaccgctactgtcgttggtcttaccaatgaactta

SEQ ID NO: 151281 - DNA, 60 bp, Artificial
  Synthetic oligonucleotide
ttctgcacacaattcgctatcctacaccgcttatgagttcgcaccccatcgtgagtgcca

SEQ ID NO: 151282 - DNA, 55 bp, Artificial
  Synthetic oligonucleotide
cggaaatgatttcgactttaacctgatagatccggaatgtccgaaattggttgtc

SEQ ID NO: 151283 - DNA, 55 bp, Artificial
  Synthetic oligonucleotide
ccaaccttgcggtatcgtttttatatcgcttcaagtctttgcgaaattggctacc

SEQ ID NO: 151284 - DNA, 57 bp, Artificial
  Synthetic oligonucleotide
cttgaccagacaccctccaggtatctcaactgttccggatgccctgtacccgtgtac

SEQ ID NO: 151285 - DNA, 51 bp, Artificial
  Synthetic oligonucleotide
aaagttataatgggggatgaaggcaaggtcgctaaccttaccccgattgtt

SEQ ID NO: 151286 - DNA, 55 bp, Artificial
  Synthetic oligonucleotide
cgggaactatggaacaagttacagagagcattaggacttaataacggcaggggat

SEQ ID NO: 151287 - DNA, 52 bp, Artificial
  Synthetic oligonucleotide
tttggtcgctcccctttgggcggggggggatagataaagttcctctatgtaa

SEQ ID NO: 151288 - DNA, 60 bp, Artificial
  Synthetic oligonucleotide
tgtgcggtgtttgtgataccacactctggcactggtctaagaaaaactatctgaagcctg

SEQ ID NO: 151289 - DNA, 55 bp, Artificial
  Synthetic oligonucleotide
tccattgagtgaaggcagggtttgtctttgtgtgctccccctttgggggacggga

SEQ ID NO: 151290 - DNA, 60 bp, Artificial
  Synthetic oligonucleotide
acaccataataggggctgcattgcgtctggagaccaggatcgtttccgtctctgccattt

SEQ ID NO: 151291 - DNA, 58 bp, Artificial
  Synthetic oligonucleotide
tgtggaatagatttatgtggcttttacattctacttccaagttgacttctgtacctgt

SEQ ID NO: 151292 - DNA, 60 bp, Artificial
  Synthetic oligonucleotide
gaagctcgcacaggacaggatcaatataacggttgaatccgtccggatcgggaacagcat

SEQ ID NO: 151293 - DNA, 55 bp, Artificial
  Synthetic oligonucleotide
acaaccgattgcgtaacgaaatcaaagttcttcaggagtataaggaaaaagcaca

SEQ ID NO: 151294 - DNA, 60 bp, Artificial
  Synthetic oligonucleotide
tgtgtacgaaaagcgtatcatttatcgtctcgtagaaatggctcaaggagagctgcaagg

SEQ ID NO: 151295 - DNA, 56 bp, Artificial
  Synthetic oligonucleotide
aggtcgtgaccttggggctacgtttctgtcgggtacagtggtggtaaatgcactga

SEQ ID NO: 151296 - DNA, 59 bp, Artificial
  Synthetic oligonucleotide
cgccgcacgaatagagtgcgtgagcgacaaccgggcagaccgattaaaatagagcgtgg

SEQ ID NO: 151297 - DNA, 57 bp, Artificial
  Synthetic oligonucleotide
tactctacgttccgcagcgacaaggaggggatcttgtttaacgaacggctgtatcaa

SEQ ID NO: 151298 - DNA, 59 bp, Artificial
  Synthetic oligonucleotide
ggcaaggggatttaatctgattgatgctatttgtgatattcttagccagcatataaatg

SEQ ID NO: 151299 - DNA, 55 bp, Artificial
  Synthetic oligonucleotide
gtgcccactgaggcggcgatacgaccgttcacccaagtcattgttgggtcgtttt

SEQ ID NO: 151300 - DNA, 56 bp, Artificial
  Synthetic oligonucleotide
agatagcggacgtgctggaggacataagggaaaagtacaaacaacataccgggcaa

SEQ ID NO: 151301 - DNA, 59 bp, Artificial
  Synthetic oligonucleotide
ctacggggataatgatgcaatccgaagcagtcatcgcgttgatagtcagtatagataag

SEQ ID NO: 151302 - DNA, 59 bp, Artificial
  Synthetic oligonucleotide
tatgcgttgaggacatagataaagttcagtctgatatagcacgagaaggcaagattctt

SEQ ID NO: 151303 - DNA, 58 bp, Artificial
  Synthetic oligonucleotide
agtacatattcccaacggttctacgaaatatgctgcatgtacaggaataaaggcaagt

SEQ ID NO: 151304 - DNA, 59 bp, Artificial
  Synthetic oligonucleotide
tgcctttatctgtctgtcggttgtttcctgtacccttcgcatctcgatgttgttggttc

SEQ ID NO: 151305 - DNA, 59 bp, Artificial
  Synthetic oligonucleotide
ggctcgattttggcactacgcaagcccaaatacgacgaattatggatatttgcagtaca

SEQ ID NO: 151306 - DNA, 59 bp, Artificial
  Synthetic oligonucleotide
tgaccacatttccacacccggatgagtcgggtcaatgtcggcggccatacaacgtccta

SEQ ID NO: 151307 - DNA, 59 bp, Artificial
  Synthetic oligonucleotide
agtgtgccgtgaaagccaccaaggatgcctatatgcccaatgcacagagaaagcggcag

SEQ ID NO: 151308 - DNA, 58 bp, Artificial
  Synthetic oligonucleotide
atgcggagaccattgcgaacgaactgaacctgcctccgagcaaagaacgcgttccgta

SEQ ID NO: 151309 - DNA, 56 bp, Artificial
  Synthetic oligonucleotide
acgcagtcaggaacgaggatcttagggagtgcctggcaaatcccgaataccggacg

SEQ ID NO: 151310 - DNA, 55 bp, Artificial
  Synthetic oligonucleotide
cccacggatgaatagttactaaattaaggtgggcattaaagctcaattcgtattg

SEQ ID NO: 151311 - DNA, 58 bp, Artificial
  Synthetic oligonucleotide
cgtctgttgtttttttaccagcccatgtaatatcacaaattaatgagattatgctttc

SEQ ID NO: 151312 - DNA, 58 bp, Artificial
  Synthetic oligonucleotide
ccgaaccgcaagttgatccacgcacaggtacattctccgtacgtgccgaaatgccgaa

SEQ ID NO: 151313 - DNA, 57 bp, Artificial
  Synthetic oligonucleotide
atgtggccgggcatattcaagtaagtcccgactggttgtcggcagccaatacggtgg

SEQ ID NO: 151314 - DNA, 58 bp, Artificial
  Synthetic oligonucleotide
cagaggtagaagatccaggatcattatatacatctgatgaaatgcgtagtattgattc

SEQ ID NO: 151315 - DNA, 58 bp, Artificial
  Synthetic oligonucleotide
tatggctcacgcatagggaacggcaacaccatttttccgggagctgttataggcgcta

SEQ ID NO: 151316 - DNA, 57 bp, Artificial
  Synthetic oligonucleotide
atacagctatccgggaagcggcgacacaacggtagtccacctttcacgcagccttcc

SEQ ID NO: 151317 - DNA, 58 bp, Artificial
  Synthetic oligonucleotide
gtcccatacgtttgcgccttcatccttatgggtgtagatttggaaggcgtgcactcca

SEQ ID NO: 151318 - DNA, 58 bp, Artificial
  Synthetic oligonucleotide
ggcactatttgcggactgccgttatcttgttccgcagggtaaagagccgcacagcaga

SEQ ID NO: 151319 - DNA, 57 bp, Artificial
  Synthetic oligonucleotide
tcctgtaatgggatcctttgcatcaaattcgactggtatagaaactaacttacgtaa

SEQ ID NO: 151320 - DNA, 58 bp, Artificial
  Synthetic oligonucleotide
ccggctgaaccggaaataccagcgcggcattatggagagcagcgcggacttggaggca

SEQ ID NO: 151321 - DNA, 54 bp, Artificial
  Synthetic oligonucleotide
cctaaacccggtctgaacttacacgttcacgtaatcgtttcacgcaagagcctg

SEQ ID NO: 151322 - DNA, 60 bp, Artificial
  Synthetic oligonucleotide
gtcggggagcgctgcacggcaagggggtgcaccaacactcccgacgagtgcagccattga

SEQ ID NO: 151323 - DNA, 51 bp, Artificial
  Synthetic oligonucleotide
ggactaaagaccgcttaaatcgtaaagggttttacgaaagagataaagata

SEQ ID NO: 151324 - DNA, 57 bp, Artificial
  Synthetic oligonucleotide
taccaaggcacgcccctgctgttcgttgagcccaagaagggcaatccctctccacgg

SEQ ID NO: 151325 - DNA, 57 bp, Artificial
  Synthetic oligonucleotide
aacctaccgagaaacagatgcgaggcgtgcttgagcttacgatcccggcccggcagc

SEQ ID NO: 151326 - DNA, 54 bp, Artificial
  Synthetic oligonucleotide
agtaaaggacaaggacgggcgaaaaataatctcttactggttcgatatacatac

SEQ ID NO: 151327 - DNA, 54 bp, Artificial
  Synthetic oligonucleotide
gcggaaatacccgcatttctttatttcctgacccaaagggaactatccacaaca

SEQ ID NO: 151328 - DNA, 57 bp, Artificial
  Synthetic oligonucleotide
cgatgcgtgtccttgatgagatttgcgacggtcgacactctcccgtgcttccggtgc

SEQ ID NO: 151329 - DNA, 57 bp, Artificial
  Synthetic oligonucleotide
cagatacgcacttatatttcccagctaaacgaattaacttattatactcgtcagcac

SEQ ID NO: 151330 - DNA, 55 bp, Artificial
  Synthetic oligonucleotide
gggtttaaagttagtggttgtgaattctttcagcccattataaatttggatatgc

SEQ ID NO: 151331 - DNA, 57 bp, Artificial
  Synthetic oligonucleotide
gtcgatttgagagctaatttcgccttttacagaggatattacgctttgtatgtaatc

SEQ ID NO: 151332 - DNA, 57 bp, Artificial
  Synthetic oligonucleotide
tctacggtaggactgctggttgcgttggtagccctgggaagaatacgtgcctggtca

SEQ ID NO: 151333 - DNA, 60 bp, Artificial
  Synthetic oligonucleotide
cgtgatacattgaatcgttcaatttctatagaaagtgatttcttcaactgccttgccata

SEQ ID NO: 151334 - DNA, 57 bp, Artificial
  Synthetic oligonucleotide
gacccccatactggcaatctatggaatcaatcgaaacattgacttaataggcataat

SEQ ID NO: 151335 - DNA, 57 bp, Artificial
  Synthetic oligonucleotide
tgaccaacgtgcctcatgggccgtacgtaagacctcaccgctactaggtgaagctgc

SEQ ID NO: 151336 - DNA, 56 bp, Artificial
  Synthetic oligonucleotide
gttccaatcatcattggatcaataacgatagattgtgccagtccttttatattgcc

SEQ ID NO: 151337 - DNA, 56 bp, Artificial
  Synthetic oligonucleotide
gcagatttcattagtccatttacggctttgttatgtgaatcaatatcggctaatcg

SEQ ID NO: 151338 - DNA, 54 bp, Artificial
  Synthetic oligonucleotide
ctatcggtgtagccagttaccgttatctaaagtcttttgtagtgtattccaaag

SEQ ID NO: 151339 - DNA, 56 bp, Artificial
  Synthetic oligonucleotide
ttgtgtacttatttgtgtacacgcgcggaaaattcgttcctcaaagaacgctgcgc

SEQ ID NO: 151340 - DNA, 56 bp, Artificial
  Synthetic oligonucleotide
ccaaccgccgcatttataacgcaaccgccgaagcaggtgtggtacagatgacgcgt

SEQ ID NO: 151341 - DNA, 56 bp, Artificial
  Synthetic oligonucleotide
atgattccttcgaaacgcaggcgttctatggcgggaggcacatcgtccgtggtacg

SEQ ID NO: 151342 - DNA, 56 bp, Artificial
  Synthetic oligonucleotide
gtccggtgagcatctatcagtccgccctaacctgtatgcctcagatacgtcaggca

SEQ ID NO: 151343 - DNA, 56 bp, Artificial
  Synthetic oligonucleotide
ttgtttaggcttctatgctcgcgcttagcagcacttttcagcgtatctaacaagtc

SEQ ID NO: 151344 - DNA, 56 bp, Artificial
  Synthetic oligonucleotide
cacaaacacgttttttcggtggtctgtcgcccgaataccaaacagacattagcaca

SEQ ID NO: 151345 - DNA, 56 bp, Artificial
  Synthetic oligonucleotide
atcgcacacagccaactgactgatggcatacgccatgccaattccgctgccttgat

SEQ ID NO: 151346 - DNA, 56 bp, Artificial
  Synthetic oligonucleotide
ataggctcccacatcagcacactgggatgattgcggtcccggcgtatcatctcacg

SEQ ID NO: 151347 - DNA, 56 bp, Artificial
  Synthetic oligonucleotide
gaggaaaggccaaccgccgcatttataacgcaaccgccgaagcaggtgtggtacag

SEQ ID NO: 151348 - DNA, 56 bp, Artificial
  Synthetic oligonucleotide
ctccccagctactagtctgcgtggtctcagctcccgctacggaggtaggacgtacg

SEQ ID NO: 151349 - DNA, 56 bp, Artificial
  Synthetic oligonucleotide
ccataaggcggcaatcataggtgctccctgaccgagagcgtaggagatggcagctc

SEQ ID NO: 151350 - DNA, 55 bp, Artificial
  Synthetic oligonucleotide
gggtgactacccgcagaggaaaggccaaccgccgcatttataacgcaaccgccga

SEQ ID NO: 151351 - DNA, 56 bp, Artificial
  Synthetic oligonucleotide
tcccgtccgaaaggcttaactttgcttgcatggttatagcacactataacccctaa

SEQ ID NO: 151352 - DNA, 49 bp, Artificial
  Synthetic oligonucleotide
ctacgctaacaccggccaccttaccggaaagggcgttacctaggttcgg

SEQ ID NO: 151353 - DNA, 56 bp, Artificial
  Synthetic oligonucleotide
ccgttatggagtaacactttcacttggacttcgtattgggatgcaaatgtacctgg

SEQ ID NO: 151354 - DNA, 56 bp, Artificial
  Synthetic oligonucleotide
tagtgcaccttgctccgggagtatcctcggacaaaaccttggacgcgctctatgca

SEQ ID NO: 151355 - DNA, 60 bp, Artificial
  Synthetic oligonucleotide
gatgaaatagtttcacggtcaatgtcagaattaaagtctggtaatatattggatgatcgc

SEQ ID NO: 151356 - DNA, 50 bp, Artificial
  Synthetic oligonucleotide
gtaccggtcgagttaccgcctacgctaacaccggccaccttaccggaaag

SEQ ID NO: 151357 - DNA, 55 bp, Artificial
  Synthetic oligonucleotide
taccggcgtttcggggtatggcgtggcataggtatttaggtgctcgacctcgtac

SEQ ID NO: 151358 - DNA, 56 bp, Artificial
  Synthetic oligonucleotide
tacgccagtgagtcaggttcctggacatggggaatcaccggtggttacagagcgtc

SEQ ID NO: 151359 - DNA, 56 bp, Artificial
  Synthetic oligonucleotide
gcctgttcgaagggaaactgccagaatgcattgtgaatatgagccggaagggaggt

SEQ ID NO: 151360 - DNA, 54 bp, Artificial
  Synthetic oligonucleotide
gttaccagaagagtatgttgtttttaatgatttactattcgaaagtaacggata

SEQ ID NO: 151361 - DNA, 55 bp, Artificial
  Synthetic oligonucleotide
tacggacgtgtgggacggctgggtatgccgcctccgttcctcggttggacgccac

SEQ ID NO: 151362 - DNA, 55 bp, Artificial
  Synthetic oligonucleotide
ggtgtggggatcaaagcatacgattacatggatggagtgaataaccattatggag

SEQ ID NO: 151363 - DNA, 55 bp, Artificial
  Synthetic oligonucleotide
ggttcggctacactatatgatacgtctacctgagaggaagttgctgacgagagtc

SEQ ID NO: 151364 - DNA, 55 bp, Artificial
  Synthetic oligonucleotide
ggttcgcaggctgactaactctgtccacttgcttatacttaagtcgaaccctcct

SEQ ID NO: 151365 - DNA, 55 bp, Artificial
  Synthetic oligonucleotide
ctcttccgatgtgaagccgcaggaataacggaggtactcgtacacatggctgtct

SEQ ID NO: 151366 - DNA, 60 bp, Artificial
  Synthetic oligonucleotide
tggtatatgtctgtgaaagataaggtggctgattggtataatatggaaactggggaggca

SEQ ID NO: 151367 - DNA, 55 bp, Artificial
  Synthetic oligonucleotide
ctcgtggacgcagtaacccggcagatacacgctacattcaaggataactgcctgc

SEQ ID NO: 151368 - DNA, 55 bp, Artificial
  Synthetic oligonucleotide
cttatgggagcaacaagtattcatgtacaagcagtgaagccggggagcgagattc

SEQ ID NO: 151369 - DNA, 55 bp, Artificial
  Synthetic oligonucleotide
cttcgcttgatttgtacctctgcacgttttccgtttattgtgatacgcatacaga

SEQ ID NO: 151370 - DNA, 55 bp, Artificial
  Synthetic oligonucleotide
ggttcatccgacatgtgtctgcaccagtctgcatttccacggggaattttggtcc

SEQ ID NO: 151371 - DNA, 55 bp, Artificial
  Synthetic oligonucleotide
ctcgtgcgtatggtcatcttccatgagtacggagaaaatgtcaatggcaccgagt

SEQ ID NO: 151372 - DNA, 55 bp, Artificial
  Synthetic oligonucleotide
ctcggaagttacggaagatatagcgcctgtgacatcactgcgtttctgtacaccg

SEQ ID NO: 151373 - DNA, 55 bp, Artificial
  Synthetic oligonucleotide
gaaatttgtcataactgtttaggttgattgcgtttcctggcagtgcacattcgaa

SEQ ID NO: 151374 - DNA, 55 bp, Artificial
  Synthetic oligonucleotide
ctgatgcctttatatccggaaccggacttggaagacgaaaacatactgctacccg

SEQ ID NO: 151375 - DNA, 55 bp, Artificial
  Synthetic oligonucleotide
ctgcatcataaaagaaacgataccgacaccattcaggaactatcgcccatcagca

SEQ ID NO: 151376 - DNA, 55 bp, Artificial
  Synthetic oligonucleotide
ctttgccggacgaatgtgcggaagatgtgaagataggctgccgtgtggtagttcc

SEQ ID NO: 151377 - DNA, 52 bp, Artificial
  Synthetic oligonucleotide
cctggttgatttccggaacctgggaaatattgtttccctgttgttggatttc

SEQ ID NO: 151378 - DNA, 60 bp, Artificial
  Synthetic oligonucleotide
cgaccatgcagacaagcaatgagggaacagaagcgattcgccaactactacaggcagtcc

SEQ ID NO: 151379 - DNA, 55 bp, Artificial
  Synthetic oligonucleotide
ctgccagtccacctcattgtagaagtctatgcggtcagcacggttgccttcatac

SEQ ID NO: 151380 - DNA, 52 bp, Artificial
  Synthetic oligonucleotide
ggttacgcaacggccttccgttacggtaaacgcacatttcatttaccaacca

SEQ ID NO: 151381 - DNA, 55 bp, Artificial
  Synthetic oligonucleotide
ggttgatccgattcccggattgaatgaagctgtaaaacaattcacatgagaaact

SEQ ID NO: 151382 - DNA, 55 bp, Artificial
  Synthetic oligonucleotide
gaaagcggaaacggaatgtctggatgaaacagatactccggtgagacttccccga

SEQ ID NO: 151383 - DNA, 55 bp, Artificial
  Synthetic oligonucleotide
ctgctgaacggccgaattctaaaccaactgaccgtggagtgaatcgtgaacaagc

SEQ ID NO: 151384 - DNA, 55 bp, Artificial
  Synthetic oligonucleotide
cttgtcgctaatcgttttgccgccattgtccactcgattaaagacgatgtggcaa

SEQ ID NO: 151385 - DNA, 55 bp, Artificial
  Synthetic oligonucleotide
ggttgcattagacttcggacaagaggaaaactttccaacaacattatacaactgt

SEQ ID NO: 151386 - DNA, 55 bp, Artificial
  Synthetic oligonucleotide
ctggattaccaggcgatacggtttgcccttccacttctcaacgagaatggagttc

SEQ ID NO: 151387 - DNA, 52 bp, Artificial
  Synthetic oligonucleotide
ctgtcaaaaccgcctttcacgtttccgcagttcttcttcccggtgtggttgg

SEQ ID NO: 151388 - DNA, 55 bp, Artificial
  Synthetic oligonucleotide
ctgtcaaccgcagacagctctttctatttataaccggctcttgtatatctgtgcc

SEQ ID NO: 151389 - DNA, 60 bp, Artificial
  Synthetic oligonucleotide
tgcgtatcaagttcggtcaacgttgagccttctatggctgtggaatgggtaatgagagaa

SEQ ID NO: 151390 - DNA, 55 bp, Artificial
  Synthetic oligonucleotide
ctgtcctggcaaatcgaccgcaaccaccgcttatacggttcgttcagcgtagccc

SEQ ID NO: 151391 - DNA, 55 bp, Artificial
  Synthetic oligonucleotide
ctgtggaatagaatcagtgtttgcaccacctattattcgtgttccttctggaagt

SEQ ID NO: 151392 - DNA, 55 bp, Artificial
  Synthetic oligonucleotide
ggttattggaaagtgttgcggcaaaccatcctacagccgacaaccttgaaacgct

SEQ ID NO: 151393 - DNA, 55 bp, Artificial
  Synthetic oligonucleotide
ctgtggcaagcctcacggctcgacctttcggaagactacgagagggcacccgaaa

SEQ ID NO: 151394 - DNA, 55 bp, Artificial
  Synthetic oligonucleotide
cttgtatcatcaaagtacgtgctttgctagcgatggtaggttccggagtggggcg

SEQ ID NO: 151395 - DNA, 55 bp, Artificial
  Synthetic oligonucleotide
cttgccttgtcgttaggagcggatgtgacacaaaatgtagcgaagaatggcagct

SEQ ID NO: 151396 - DNA, 52 bp, Artificial
  Synthetic oligonucleotide
cgggtaattttacgatgaaatctccgacgaaggtaccggatgtcgttaccga

SEQ ID NO: 151397 - DNA, 55 bp, Artificial
  Synthetic oligonucleotide
cgggtgacgggacatctcaatgccaaacgtatgccgctccggcagcacgaggata

SEQ ID NO: 151398 - DNA, 54 bp, Artificial
  Synthetic oligonucleotide
cggtaactacccctattgtgggtggtgcattagatcctaccggtatctatccgt

SEQ ID NO: 151399 - DNA, 53 bp, Artificial
  Synthetic oligonucleotide
cggtacaccggaatgtaatcttttcgttccgtcttagttccatgccacaaagg

SEQ ID NO: 151400 - DNA, 59 bp, Artificial
  Synthetic oligonucleotide
tgcgagaaggtgatacttttgttatctggaagctagatagattaggacgttctttgaaa

SEQ ID NO: 151401 - DNA, 55 bp, Artificial
  Synthetic oligonucleotide
cggtacggcaaagctgcatttcgaaccgatcgtactggctgcaaaggcgcatcac

SEQ ID NO: 151402 - DNA, 55 bp, Artificial
  Synthetic oligonucleotide
cggtagagagtgtaacggctacaacaagttgcaggaggctgtcgtggaccttgcc

SEQ ID NO: 151403 - DNA, 55 bp, Artificial
  Synthetic oligonucleotide
cggtagtagatgtgatccggcagctattatccaatcctgtcgctgagactatggt

SEQ ID NO: 151404 - DNA, 55 bp, Artificial
  Synthetic oligonucleotide
cggtataattaccagaaaccggggcatgtgcttgtgggtattgagttggaccagc

SEQ ID NO: 151405 - DNA, 55 bp, Artificial
  Synthetic oligonucleotide
cggtccggaatgcgaggatgacagcgtggtctaccggttcaagacgaccatcgga

SEQ ID NO: 151406 - DNA, 55 bp, Artificial
  Synthetic oligonucleotide
cggtcgtgaagtatacgatagcgtaaatgtgacttaccgatactccgacggaacg

SEQ ID NO: 151407 - DNA, 55 bp, Artificial
  Synthetic oligonucleotide
cggtgaacaaggaacagctatctctttattacggcatcggacgttatgtgtcgga

SEQ ID NO: 151408 - DNA, 55 bp, Artificial
  Synthetic oligonucleotide
cggtgatacccctcaacggtatttgtggtatagataagcttacggatgaccggag

SEQ ID NO: 151409 - DNA, 55 bp, Artificial
  Synthetic oligonucleotide
cggtgatgaagattggattcggacgcagattcatgcaggaggaatgttagagagc

SEQ ID NO: 151410 - DNA, 55 bp, Artificial
  Synthetic oligonucleotide
cggtgctcctgcccgccataagcacacacgtgccagaataccatatacggtgttc

SEQ ID NO: 151411 - DNA, 60 bp, Artificial
  Synthetic oligonucleotide
tgcacctgctcaaagttactctatgattatcggctgtcatggtatgggatggcttccagt

SEQ ID NO: 151412 - DNA, 55 bp, Artificial
  Synthetic oligonucleotide
cggtggtatggacggtcatccgggtgtatcctgtatggtgttccagacggcaggt

SEQ ID NO: 151413 - DNA, 54 bp, Artificial
  Synthetic oligonucleotide
gtaatgggtttctatccggtttgtcccggaacagacgagtatgtactgggagcc

SEQ ID NO: 151414 - DNA, 55 bp, Artificial
  Synthetic oligonucleotide
cggttgtcaagtgttgcattgttggtgttcggtaaactgatacctaatgccgctc

SEQ ID NO: 151415 - DNA, 55 bp, Artificial
  Synthetic oligonucleotide
cggacgcaacctgaaataaggcttcaggggcccggacttactctcgctcttccgc

SEQ ID NO: 151416 - DNA, 55 bp, Artificial
  Synthetic oligonucleotide
cggacgtcagtcgcggtcccttagtggagatcggttccttaacgatttgcaccac

SEQ ID NO: 151417 - DNA, 54 bp, Artificial
  Synthetic oligonucleotide
cggagtttaacggtctgcccgtccataagtgtttggtcgttatgaacacacgcc

SEQ ID NO: 151418 - DNA, 55 bp, Artificial
  Synthetic oligonucleotide
cggatgcttgctaagacaatcagtaacacgaaggccgtatacagaacgtaggcgg

SEQ ID NO: 151419 - DNA, 55 bp, Artificial
  Synthetic oligonucleotide
cggattgcccagtaaggtacgtgagaaaatcgttagcaatattcgtaaatctact

SEQ ID NO: 151420 - DNA, 55 bp, Artificial
  Synthetic oligonucleotide
cggatttgtgcgggcagtcctgtgccttcgtctatcgttatgctgcgcccgaggc

SEQ ID NO: 151421 - DNA, 55 bp, Artificial
  Synthetic oligonucleotide
cggcagattatgagttgaatgtgacaggctcggtgaagcgcaaagagcgtttccg

SEQ ID NO: 151422 - DNA, 55 bp, Artificial
  Synthetic oligonucleotide
accggatgtgggctgatggtataaggacgaaacacaagtttcgttcacttggtat

SEQ ID NO: 151423 - DNA, 53 bp, Artificial
  Synthetic oligonucleotide
gtagttaccgtacccggagtcagtcccgaacgggatacaggcgcaccgacttc

SEQ ID NO: 151424 - DNA, 55 bp, Artificial
  Synthetic oligonucleotide
cggcagtggagcctttcaccgccacagagatgtctccagccaaccgggaacaggt

SEQ ID NO: 151425 - DNA, 55 bp, Artificial
  Synthetic oligonucleotide
cggcctccgccgtaggttattatccggctttcggggaatatgacgagtatcatga

SEQ ID NO: 151426 - DNA, 55 bp, Artificial
  Synthetic oligonucleotide
gtacgaaattgatttccgcaggaatcctgtatgatggtgatgcctgggatttagt

SEQ ID NO: 151427 - DNA, 55 bp, Artificial
  Synthetic oligonucleotide
cggctcaatgactttccgtatgaaatctgccgtcagtttgtatttgtcggttacc

SEQ ID NO: 151428 - DNA, 55 bp, Artificial
  Synthetic oligonucleotide
cggctggtttccttgagcccgaacttcttcacttcaatcctttgcatgatggcct

SEQ ID NO: 151429 - DNA, 55 bp, Artificial
  Synthetic oligonucleotide
cgggaagatcagccacacgtcggatggagtcgcccgttccgtagatacagaagcc

SEQ ID NO: 151430 - DNA, 55 bp, Artificial
  Synthetic oligonucleotide
cgggactaaactacctgtgtgccggataccgcaagttcttcagacacgcagcccc

SEQ ID NO: 151431 - DNA, 55 bp, Artificial
  Synthetic oligonucleotide
cgggatgactggtacaagccttttggatttcactccgtgatagacccttacggca

SEQ ID NO: 151432 - DNA, 55 bp, Artificial
  Synthetic oligonucleotide
cgggatggtataggacatcacctgcgtaccgtctgacgccacaatagtgaacagc

SEQ ID NO: 151433 - DNA, 59 bp, Artificial
  Synthetic oligonucleotide
gctatgagtgcatggtggaacagggtgaggaactgaccaaaagaaaggatattcccacc

SEQ ID NO: 151434 - DNA, 54 bp, Artificial
  Synthetic oligonucleotide
cgggcaagtagggtggtatctaccgcccgatgaattccctgttgtccacaacgt

SEQ ID NO: 151435 - DNA, 54 bp, Artificial
  Synthetic oligonucleotide
cggggtgtcgaaagttcctcctacgcttaaggtcgggttgtgcacagtcattcc

SEQ ID NO: 151436 - DNA, 55 bp, Artificial
  Synthetic oligonucleotide
ctaacagttaccggagtcacggcatcaaacaagttaccaaccaattcgctagtcg

SEQ ID NO: 151437 - DNA, 55 bp, Artificial
  Synthetic oligonucleotide
ctacccctattgtgggtggtgcattagatcctaccggtatctatccgtttactga

SEQ ID NO: 151438 - DNA, 55 bp, Artificial
  Synthetic oligonucleotide
gtaacgagggaacctgtatgctgtccggaaggtatgtcagttctgcattattgcg

SEQ ID NO: 151439 - DNA, 55 bp, Artificial
  Synthetic oligonucleotide
ctacgtacgtacactctatgaagacaagcaaggacgccttttcataggatctctg

SEQ ID NO: 151440 - DNA, 55 bp, Artificial
  Synthetic oligonucleotide
ctatacacccggcacgatgagcaatgcggactataccactccggacatgggtgcc

SEQ ID NO: 151441 - DNA, 55 bp, Artificial
  Synthetic oligonucleotide
ctatatctcctgtaggtggagtatcagggtcgttgttatcgtctttactgcatcc

SEQ ID NO: 151442 - DNA, 55 bp, Artificial
  Synthetic oligonucleotide
ggttgctcatcttctgacagcatatcggtatggttcatactcgtatcaccagccc

SEQ ID NO: 151443 - DNA, 55 bp, Artificial
  Synthetic oligonucleotide
ctatgtgcgtctactgcgataactgcgtcacctccgtacaagagctgtgctccgg

SEQ ID NO: 151444 - DNA, 58 bp, Artificial
  Synthetic oligonucleotide
ctgtttatatcagcacaaaccttacttccagacttccttaatgaactcgccattctaa

SEQ ID NO: 151445 - DNA, 55 bp, Artificial
  Synthetic oligonucleotide
ctattccgggcataatagaatatacgtaatcatttctaccacgtaaatcaacgcc

SEQ ID NO: 151446 - DNA, 55 bp, Artificial
  Synthetic oligonucleotide
ctattgtcaaacagagaaacctatatattggcacatggagccgaatatcttgccg

SEQ ID NO: 151447 - DNA, 55 bp, Artificial
  Synthetic oligonucleotide
ctcaatgcctgatcctgcaaatcgtttatgtgtagaagatatagaccgtgtgcag

SEQ ID NO: 151448 - DNA, 55 bp, Artificial
  Synthetic oligonucleotide
ctcactggtatatacggccaatttcctgaagcgaaaacctgcactgtctatcgac

SEQ ID NO: 151449 - DNA, 55 bp, Artificial
  Synthetic oligonucleotide
ctcagtaccgccgcgtacattgagtgtatagcgatgactaaaggtgttcttccgg

SEQ ID NO: 151450 - DNA, 54 bp, Artificial
  Synthetic oligonucleotide
ctccaggtatctcaactgttccggatgccctgtacccgtgtacgggtgttcccg

SEQ ID NO: 151451 - DNA, 55 bp, Artificial
  Synthetic oligonucleotide
ctcccgtccacatgcgcgcccctttgatatctacgccaatgaaattcttgtcggg

SEQ ID NO: 151452 - DNA, 55 bp, Artificial
  Synthetic oligonucleotide
ctccgtaaaatgtaaaatacggtcgggcacaggatactggtcgccaatcaccgat

SEQ ID NO: 151453 - DNA, 55 bp, Artificial
  Synthetic oligonucleotide
ggttgcgaagcatacaccctcattggagagggaatccgactgtgaatggcaaatt

SEQ ID NO: 151454 - DNA, 55 bp, Artificial
  Synthetic oligonucleotide
ctcgcagagtctgccatgacacaggagacatggactgatttatggaggcgcactg

SEQ ID NO: 151455 - DNA, 58 bp, Artificial
  Synthetic oligonucleotide
gctataaccttttgcaaaggtaagccttccggacgggatttgcaagcgctctgccatg

SEQ ID NO: 151456 - DNA, 55 bp, Artificial
  Synthetic oligonucleotide
cgtacgattatctttgtgacacataatcccgaactttcgcaatatagcagccgga

SEQ ID NO: 151457 - DNA, 55 bp, Artificial
  Synthetic oligonucleotide
cgtagtcaatgtaattgtgcgggcttccgtattcgtcattgctcctacaaaccag

SEQ ID NO: 151458 - DNA, 55 bp, Artificial
  Synthetic oligonucleotide
cgtataattcggcagtaccttgactgcctttgttcatgtgccgtgcatggatgca

SEQ ID NO: 151459 - DNA, 55 bp, Artificial
  Synthetic oligonucleotide
gtaatgaaatagagcgtgttcacctcgatccaacgaccggtaaattcggttgcgt

SEQ ID NO: 151460 - DNA, 55 bp, Artificial
  Synthetic oligonucleotide
cgtccactcctatgccgtgattgtaattctcgcgcacgcaatcacgcagaatcca

SEQ ID NO: 151461 - DNA, 55 bp, Artificial
  Synthetic oligonucleotide
cgtccgggtgtagctacaatgatgtgtactcctcgtttgaggctgcgtatctggc

SEQ ID NO: 151462 - DNA, 55 bp, Artificial
  Synthetic oligonucleotide
cgtcggtttacatgaccttacaactcccaagacgcacagcccttgtgtcgccaca

SEQ ID NO: 151463 - DNA, 55 bp, Artificial
  Synthetic oligonucleotide
gtaagtcagtggcacgtactctgttggcgaaggtttatgctgaggaacctttgag

SEQ ID NO: 151464 - DNA, 55 bp, Artificial
  Synthetic oligonucleotide
gtaaggcgcattcccattattgtcatcgggctttttgtcctatttgtcagcgtat

SEQ ID NO: 151465 - DNA, 55 bp, Artificial
  Synthetic oligonucleotide
cgtctgagtaaagtaaccgtaacgatacaggaaacctaccgcacaaagatctaca

SEQ ID NO: 151466 - DNA, 53 bp, Artificial
  Synthetic oligonucleotide
cactatcctaatcggggtagtggcttttcgtttataatactgccgaaacggga

SEQ ID NO: 151467 - DNA, 55 bp, Artificial
  Synthetic oligonucleotide
cgtgaatgacacctactatataaaggcctccgtagcggacagtataatggacggg

SEQ ID NO: 151468 - DNA, 55 bp, Artificial
  Synthetic oligonucleotide
cgtgaattcttgcgtagtatatttactccgatgtacagggtagtggaagctgccg

SEQ ID NO: 151469 - DNA, 54 bp, Artificial
  Synthetic oligonucleotide
cgttataatctgacggcaactagaagaacccgtctattccgttattggccggtg

SEQ ID NO: 151470 - DNA, 55 bp, Artificial
  Synthetic oligonucleotide
gtaagatcagcaggtttggcaccattatccaacgacggattaagtgtttgcccgt

SEQ ID NO: 151471 - DNA, 55 bp, Artificial
  Synthetic oligonucleotide
cgttccggtgacaaatttcaggtagcattcggcaacgaacgcggcacagtaaacc

SEQ ID NO: 151472 - DNA, 55 bp, Artificial
  Synthetic oligonucleotide
cgttcgaatttgcgtgaaacccgttgtgcactcaggttcgttgaaatcgttacgc

SEQ ID NO: 151473 - DNA, 51 bp, Artificial
  Synthetic oligonucleotide
gtaacggcttttactccttattgtaacgacctttaccgcggcatgtaacgg

SEQ ID NO: 151474 - DNA, 55 bp, Artificial
  Synthetic oligonucleotide
cgttggaagtatcgccgggagcggtattggaactatcttacatcggttatcagcc

SEQ ID NO: 151475 - DNA, 55 bp, Artificial
  Synthetic oligonucleotide
ctaaatcacgtagcggtcttcgtaccaaaatgcactgggaatacgaaaatgtacc

SEQ ID NO: 151476 - DNA, 55 bp, Artificial
  Synthetic oligonucleotide
gggatgcactatacttccatcactacataagatactacccggctgtaatgatgtg

SEQ ID NO: 151477 - DNA, 56 bp, Artificial
  Synthetic oligonucleotide
tcttgttccgcagggtaaagagccgcacagcagactgggtaaacctgcgtaacctt

SEQ ID NO: 151478 - DNA, 55 bp, Artificial
  Synthetic oligonucleotide
gcggttggaagtcgaaatggcaagtacccgaagaagcacgggtatattccttgcg

SEQ ID NO: 151479 - DNA, 55 bp, Artificial
  Synthetic oligonucleotide
gcgtagcacgcaacccgcttgtgcgtttagccaaacccatcacggcaactatcgg

SEQ ID NO: 151480 - DNA, 55 bp, Artificial
  Synthetic oligonucleotide
gcgtatctcgtatcctcccgaacggttggggaagcctatagcatagtatggggtt

SEQ ID NO: 151481 - DNA, 55 bp, Artificial
  Synthetic oligonucleotide
gcgtgccgccatactgtgtgtgaattggcaaagtgactgcatatcagagcgggtc

SEQ ID NO: 151482 - DNA, 55 bp, Artificial
  Synthetic oligonucleotide
gcgttctctgtaaaacgtctatgggagccaattcggtatctacacaaaccgctgc

SEQ ID NO: 151483 - DNA, 55 bp, Artificial
  Synthetic oligonucleotide
gcgttgcagacccggtaaattataaaatccaagttggttatatggatggtacagg

SEQ ID NO: 151484 - DNA, 55 bp, Artificial
  Synthetic oligonucleotide
gggatgaaggcaaggtcgctaaccttaccccgattgtttatgcttcccagcattc

SEQ ID NO: 151485 - DNA, 55 bp, Artificial
  Synthetic oligonucleotide
gctacatcaaaacctgctacccgcgccatgcccgaagtaggcttactcagtccgc

SEQ ID NO: 151486 - DNA, 55 bp, Artificial
  Synthetic oligonucleotide
gggatagaccttaaaggtaacaacgactatgtttattcgataatgccaggaatgg

SEQ ID NO: 151487 - DNA, 55 bp, Artificial
  Synthetic oligonucleotide
gctaccgtacgcattacatccgagcatgtatcggaaaagctgatagttacggccc

SEQ ID NO: 151488 - DNA, 60 bp, Artificial
  Synthetic oligonucleotide
gtatggtgtgagttctatgtattctctattcatgaaaggatcgccaaattttccacttct

SEQ ID NO: 151489 - DNA, 59 bp, Artificial
  Synthetic oligonucleotide
cccaagactgacacataccgcagccttgcagaaaataatccgaagcaaccgcaaccgac

SEQ ID NO: 151490 - DNA, 55 bp, Artificial
  Synthetic oligonucleotide
gctacctaccagttcggtgtggactacatgcgcgatgtctggtactcttcatcgt

SEQ ID NO: 151491 - DNA, 55 bp, Artificial
  Synthetic oligonucleotide
gggagttaaggcacagtcgttagtattagatccagcgatgataacgacattgacc

SEQ ID NO: 151492 - DNA, 55 bp, Artificial
  Synthetic oligonucleotide
gctactgggacttatcgatgttaccatcgtaggacacctcggttctccggcctac

SEQ ID NO: 151493 - DNA, 55 bp, Artificial
  Synthetic oligonucleotide
gctaggtcccgatacaggcttcgactctatcggcgaatttacaacagccaaggcg

SEQ ID NO: 151494 - DNA, 55 bp, Artificial
  Synthetic oligonucleotide
gggagcgcaagtacatccggaatataccatcactccgcacgaatggcaatacagc

SEQ ID NO: 151495 - DNA, 55 bp, Artificial
  Synthetic oligonucleotide
gctatcctacaccgcttatgagttcgcaccccatcgtgagtgccactatgagccg

SEQ ID NO: 151496 - DNA, 55 bp, Artificial
  Synthetic oligonucleotide
gctatgctccggccgtacctggcaagaaggggcagttccgtggatggatgctcct

SEQ ID NO: 151497 - DNA, 55 bp, Artificial
  Synthetic oligonucleotide
gctatggaagtatcaggcagtcgctggatacccctatgggaaataccttgcgggg

SEQ ID NO: 151498 - DNA, 53 bp, Artificial
  Synthetic oligonucleotide
gccggataataacctacggcggaggccgaaataaacaactcaagtttcacgct

SEQ ID NO: 151499 - DNA, 55 bp, Artificial
  Synthetic oligonucleotide
gccggatacgttccctggacactgttagtcgtgctctccctgttcagcctgactt

SEQ ID NO: 151500 - DNA, 59 bp, Artificial
  Synthetic oligonucleotide
tctgttgtggatttagtagtgtatttgtgtcagaattgcgcagtcgggggaatgggggc

SEQ ID NO: 151501 - DNA, 55 bp, Artificial
  Synthetic oligonucleotide
gccggcaaaggttccgggatgctttacattcgcatccgcaccgcatgtaaaatta

SEQ ID NO: 151502 - DNA, 55 bp, Artificial
  Synthetic oligonucleotide
gggcagcatttgctgtgcgtgccgaagcatacgttgccgtcttcataccgaggaa

SEQ ID NO: 151503 - DNA, 55 bp, Artificial
  Synthetic oligonucleotide
gccgggactaaggcgagaatccgctacctctcttcgtctgactataggaacgggc

SEQ ID NO: 151504 - DNA, 55 bp, Artificial
  Synthetic oligonucleotide
gccgtccgtcactttcgacatgcatcctacgggagaaaatctcaaccggtttgtc

SEQ ID NO: 151505 - DNA, 55 bp, Artificial
  Synthetic oligonucleotide
gccgtgccggcatccattcggtagtcatgcgtgtacctgcatcaatggaggaact

SEQ ID NO: 151506 - DNA, 55 bp, Artificial
  Synthetic oligonucleotide
gcctaaagggagaagtaggtcctgaggggaatggataccaaggctggaagccgaa

SEQ ID NO: 151507 - DNA, 55 bp, Artificial
  Synthetic oligonucleotide
gcctagtcccaattttacatcagcgatttcgaaccagaagcggagaaatcttgca

SEQ ID NO: 151508 - DNA, 55 bp, Artificial
  Synthetic oligonucleotide
gggcacagttctctggcgacggtgaatgggcggaatcgaataatcatgtgcaacc

SEQ ID NO: 151509 - DNA, 55 bp, Artificial
  Synthetic oligonucleotide
gcctgcaatataggcagctcggaacgtcacaacttaagaagcaaggagctcgact

SEQ ID NO: 151510 - DNA, 55 bp, Artificial
  Synthetic oligonucleotide
gcgaacagaccatcgtcacagatatccatattcaaccgaatcagaattccggtga

SEQ ID NO: 151511 - DNA, 60 bp, Artificial
  Synthetic oligonucleotide
tctgccatttcgaagtatttcttctgattggcacgaaattcgcgtgttgtaacaatctgc

SEQ ID NO: 151512 - DNA, 55 bp, Artificial
  Synthetic oligonucleotide
gggcaagtacaggcaaactcaacggctactacgtgaaagcccggagcggaacgga

SEQ ID NO: 151513 - DNA, 55 bp, Artificial
  Synthetic oligonucleotide
gcgatagaagcggccaccggccaataacggaatagacgggttcttctagttgcca

SEQ ID NO: 151514 - DNA, 55 bp, Artificial
  Synthetic oligonucleotide
gcgatataacgaccacatttagctctaacctgttctacggtgtcactgtctgtaa

SEQ ID NO: 151515 - DNA, 55 bp, Artificial
  Synthetic oligonucleotide
gcgatttgttccgtgtcattacggcgtactgccaacaagtaacggaggactgcac

SEQ ID NO: 151516 - DNA, 55 bp, Artificial
  Synthetic oligonucleotide
gcgccctccgcatggaagtgaaacgctgtaaaacggaagctgccgatctggagga

SEQ ID NO: 151517 - DNA, 55 bp, Artificial
  Synthetic oligonucleotide
gcggactctacctatcgggtaaagcagtgccggctgaatcttccgaagaaaacgg

SEQ ID NO: 151518 - DNA, 55 bp, Artificial
  Synthetic oligonucleotide
gcggatggaaccggagtctacacagaaacagacgagatgtctaccgcaaaactga

SEQ ID NO: 151519 - DNA, 55 bp, Artificial
  Synthetic oligonucleotide
gcggcaacagatccgcgacgttttataacaccactctcgaaaagcatcgcttcca

SEQ ID NO: 151520 - DNA, 55 bp, Artificial
  Synthetic oligonucleotide
ggattatctggcaatacgacaggcttattcgttctaggatgccccttgcgtatcc

SEQ ID NO: 151521 - DNA, 55 bp, Artificial
  Synthetic oligonucleotide
ggattgcaggtatagaagccggttattctaaggtgggtgacaatagcgatcgttc

SEQ ID NO: 151522 - DNA, 52 bp, Artificial
  Synthetic oligonucleotide
cacgtaaacacccacgaaaaccgcacgcccggtacacaacagaaatacccaa

SEQ ID NO: 151523 - DNA, 55 bp, Artificial
  Synthetic oligonucleotide
ggcaatatagaatgcgatgtctgcatcagtaaggacagtgtcttctacgtactgc

SEQ ID NO: 151524 - DNA, 55 bp, Artificial
  Synthetic oligonucleotide
ggcaggactactctcgcgcgcatcacatgtacgctcacagtagaaaactcagact

SEQ ID NO: 151525 - DNA, 55 bp, Artificial
  Synthetic oligonucleotide
ggcagtggaggaaacagtgatttctttaagacttccgcagtcaacttactagcag

SEQ ID NO: 151526 - DNA, 55 bp, Artificial
  Synthetic oligonucleotide
ggccagtgcgccgtacaagttcttacccacgctgatcctggctaccatgtgaggc

SEQ ID NO: 151527 - DNA, 55 bp, Artificial
  Synthetic oligonucleotide
ggcctctccgcttagtttgacactgcgaatggtatctgtaaactctttctgatac

SEQ ID NO: 151528 - DNA, 55 bp, Artificial
  Synthetic oligonucleotide
ggccttagcgactacatacacatataatccagctatcttatctccaatagctgaa

SEQ ID NO: 151529 - DNA, 55 bp, Artificial
  Synthetic oligonucleotide
ggcgagtgccgtacggatgaaaggtcgggccgtacggcaggaatgaccgggaata

SEQ ID NO: 151530 - DNA, 55 bp, Artificial
  Synthetic oligonucleotide
ggcgcaagcatggtgcccctacaagaaatgtcttagcatgacaattcagtactgg

SEQ ID NO: 151531 - DNA, 55 bp, Artificial
  Synthetic oligonucleotide
ggcgtaggactgaatgacaactatgtaagcggtttggcccgtggcaacgaatggc

SEQ ID NO: 151532 - DNA, 55 bp, Artificial
  Synthetic oligonucleotide
ggcgtagttccatgtgtcggtcgaggtgtgttggtagtaccataggttaggaccg

SEQ ID NO: 151533 - DNA, 60 bp, Artificial
  Synthetic oligonucleotide
acggaaacagatatagcacgactgtttatcgcactggtggaataccgattcatgcggaag

SEQ ID NO: 151534 - DNA, 55 bp, Artificial
  Synthetic oligonucleotide
ggcgttcgatacgacaaccaatttcggacattccggatctatcaggttaaagtcg

SEQ ID NO: 151535 - DNA, 54 bp, Artificial
  Synthetic oligonucleotide
ggcgtttatggttgacaactaacaagggactggcttgctttaatacggaggagg

SEQ ID NO: 151536 - DNA, 55 bp, Artificial
  Synthetic oligonucleotide
ggctactttgaaacgcgcagcagccataaccggcagttccagataaacagcattc

SEQ ID NO: 151537 - DNA, 55 bp, Artificial
  Synthetic oligonucleotide
ggctggtacgtgaggatcgtctgagctcaccccttaccggtatcttcaatcagaa

SEQ ID NO: 151538 - DNA, 55 bp, Artificial
  Synthetic oligonucleotide
ggcttcaagataacagtcaattcactacgagcctgattgctacctacacggggac

SEQ ID NO: 151539 - DNA, 55 bp, Artificial
  Synthetic oligonucleotide
gggaaagaaaccccagatatgtatgctctaatttcgtcaatatctgagggaagaa

SEQ ID NO: 151540 - DNA, 55 bp, Artificial
  Synthetic oligonucleotide
gctccccagtggcataaccaacgttccaccatgcactatatcgaggattacaaga

SEQ ID NO: 151541 - DNA, 55 bp, Artificial
  Synthetic oligonucleotide
gctgactcccgtaaggcgtaactcatgttctcgcttgtaattcaggaaagcccgg

SEQ ID NO: 151542 - DNA, 55 bp, Artificial
  Synthetic oligonucleotide
gctggctgtagcatcgatgacggtagttccggctttcagcaaggctgtccccgtg

SEQ ID NO: 151543 - DNA, 55 bp, Artificial
  Synthetic oligonucleotide
gcttatatcgattcgctacaaaacccacagcgacaccaaaagccagttgtcaatg

SEQ ID NO: 151544 - DNA, 58 bp, Artificial
  Synthetic oligonucleotide
tctcattttgaggaaaggcaagtacggcactttctatggatgttcaaactttcccaca

SEQ ID NO: 151545 - DNA, 55 bp, Artificial
  Synthetic oligonucleotide
gcttcactttgttacgctccaatagttttgctatcagtaaacccacccacccttc

SEQ ID NO: 151546 - DNA, 55 bp, Artificial
  Synthetic oligonucleotide
gcttcaggggttgagaccgattagcataagcccggttaccagtcagcgacagaag

SEQ ID NO: 151547 - DNA, 55 bp, Artificial
  Synthetic oligonucleotide
gcttcgggcaattctccaagtttatcacgtaatatggcttcttccgctctttcta

SEQ ID NO: 151548 - DNA, 55 bp, Artificial
  Synthetic oligonucleotide
gcttgcacgtattcatcactaaactgcgtcacagattgtcacaagacgaacgcat

SEQ ID NO: 151549 - DNA, 55 bp, Artificial
  Synthetic oligonucleotide
gggagcaacgagtgtggaaggcacattaattagtgatagaagcgcgtggactgcc

SEQ ID NO: 151550 - DNA, 55 bp, Artificial
  Synthetic oligonucleotide
ggaagacaaacgttacggtacctaattatgataaatgcgtgatatgtgccgcacc

SEQ ID NO: 151551 - DNA, 52 bp, Artificial
  Synthetic oligonucleotide
ggaagattccgcttcatttaatacggccgccctaaccggagaaagtgttccc

SEQ ID NO: 151552 - DNA, 55 bp, Artificial
  Synthetic oligonucleotide
ggaagcaataacccgacgcgctgtatcctcatcacggtcagctaattcaagggcg

SEQ ID NO: 151553 - DNA, 55 bp, Artificial
  Synthetic oligonucleotide
ggaagcagatttacgtggtcaggttgtgaaattcctcgatagtgtaatgggaccg

SEQ ID NO: 151554 - DNA, 55 bp, Artificial
  Synthetic oligonucleotide
ggacctggagcgtgaacaggacgacagccaaaagatagagcttgaaccggacatg

SEQ ID NO: 151555 - DNA, 60 bp, Artificial
  Synthetic oligonucleotide
cggttcgcctcgcagcctcctcactcctatcccgatgacccgcatcattacgcatctgaa

SEQ ID NO: 151556 - DNA, 55 bp, Artificial
  Synthetic oligonucleotide
gggaatggcaacgtccccgcctgttctgtaccacagaagacttgttcacccaatc

SEQ ID NO: 151557 - DNA, 55 bp, Artificial
  Synthetic oligonucleotide
ggacggagtgcattctcgaaatcccgttcttttgaagtaagctgatgttcgcgta

SEQ ID NO: 151558 - DNA, 55 bp, Artificial
  Synthetic oligonucleotide
ggagcccgcctagcatagaaagtagccgccttcccatcttgaggaatccctttta

SEQ ID NO: 151559 - DNA, 55 bp, Artificial
  Synthetic oligonucleotide
ggataataaggtataggtggtcagactcgatgcacttcctcccaatttgtcggtt

SEQ ID NO: 151560 - DNA, 55 bp, Artificial
  Synthetic oligonucleotide
ggatagctggttatatccaagtcatttaggaatatatgcccctcattcggcacga

SEQ ID NO: 151561 - DNA, 55 bp, Artificial
  Synthetic oligonucleotide
gacgggcaacctgacggctctcggtggaaatcacggcttctacctcaggagatac

SEQ ID NO: 151562 - DNA, 55 bp, Artificial
  Synthetic oligonucleotide
gactgagttgtgagaaattgctccacccgcttatgatcacccatccgttgtatca

SEQ ID NO: 151563 - DNA, 55 bp, Artificial
  Synthetic oligonucleotide
gagacgctggacatgaaattccccaataagatagagtacgcctaccgtctgaaag

SEQ ID NO: 151564 - DNA, 55 bp, Artificial
  Synthetic oligonucleotide
gagataccactccacccaccggagcaacaggcacgcttccggcattatccaagtg

SEQ ID NO: 151565 - DNA, 55 bp, Artificial
  Synthetic oligonucleotide
gagattatccactatactactccaacggcagagcaatccgttaggttgtcttgct

SEQ ID NO: 151566 - DNA, 58 bp, Artificial
  Synthetic oligonucleotide
cacgattacgaccatgtggggcactatttgcggactgccgttatcttgttccgcaggg

SEQ ID NO: 151567 - DNA, 55 bp, Artificial
  Synthetic oligonucleotide
ggtcaccccggcggtattgcggattctgacagccggagtcttgtcaggcatatta

SEQ ID NO: 151568 - DNA, 55 bp, Artificial
  Synthetic oligonucleotide
gagggaacagaagcgattcgccaactactacaggcagtccgggaacagaccgcaa

SEQ ID NO: 151569 - DNA, 55 bp, Artificial
  Synthetic oligonucleotide
gaggtcaccgctaatagacaaacctttgtaaacaggcactgccagtccggcacgg

SEQ ID NO: 151570 - DNA, 55 bp, Artificial
  Synthetic oligonucleotide
gaggtcgatgagtcctcctacgatataccatccccagctcgggacacctttccgg

SEQ ID NO: 151571 - DNA, 55 bp, Artificial
  Synthetic oligonucleotide
gagtactttccgccagattgaacatccggattcgcatgattaactctccatgcgg

SEQ ID NO: 151572 - DNA, 55 bp, Artificial
  Synthetic oligonucleotide
gagtcagtacgctccattgattggcagaagtgctccattcgtagcgcggattggc

SEQ ID NO: 151573 - DNA, 55 bp, Artificial
  Synthetic oligonucleotide
gagtgttctgaacaacatggaatttatggatagggtaagattgcaacccgaatgg

SEQ ID NO: 151574 - DNA, 55 bp, Artificial
  Synthetic oligonucleotide
gagttccgggtatgcttgcatataagatgattaatacgctggactcaatgacggg

SEQ ID NO: 151575 - DNA, 55 bp, Artificial
  Synthetic oligonucleotide
ggtagaaagtgtagggtggtggaatctgggcattgggtccaatccttcggtaggc

SEQ ID NO: 151576 - DNA, 55 bp, Artificial
  Synthetic oligonucleotide
gataaacggcaacagactaccttggatgccggagtagtacgtataaaggctggaa

SEQ ID NO: 151577 - DNA, 56 bp, Artificial
  Synthetic oligonucleotide
caaacttataaatagagtttggggtaagcgcatgaatcttatttgtatcttcgaaa

SEQ ID NO: 151578 - DNA, 55 bp, Artificial
  Synthetic oligonucleotide
gatacgctatatccatgaacccacggaaaagatgcagctgctggtcgtcagacgg

SEQ ID NO: 151579 - DNA, 55 bp, Artificial
  Synthetic oligonucleotide
gatccgcttccgatcgtgcatcccgtactggcctcggatatagaggaaaattacc

SEQ ID NO: 151580 - DNA, 55 bp, Artificial
  Synthetic oligonucleotide
gatccgggtaagcacactttgactatcgatctccgacttaatacagatggcgcat

SEQ ID NO: 151581 - DNA, 53 bp, Artificial
  Synthetic oligonucleotide
ggtacaggggcagcacttaaacaggaagtggtggaaagtccttttaagttcga

SEQ ID NO: 151582 - DNA, 55 bp, Artificial
  Synthetic oligonucleotide
gatgcgtgaggtaacattaaaggtgcagtttacacttccgcaaggtactgaactc

SEQ ID NO: 151583 - DNA, 55 bp, Artificial
  Synthetic oligonucleotide
gaaccatttgccgatcgacacggagaatgccggtttcatgcgaccgaataggtcg

SEQ ID NO: 151584 - DNA, 55 bp, Artificial
  Synthetic oligonucleotide
gaacgccgaatgtacaggcacaacgaacctacgaggagatggaacaacttacggt

SEQ ID NO: 151585 - DNA, 55 bp, Artificial
  Synthetic oligonucleotide
gaacggcggagcgaacatcgtagccggggacgaattttcacaactgaaactgccg

SEQ ID NO: 151586 - DNA, 55 bp, Artificial
  Synthetic oligonucleotide
ggtgtctgtaatagctcattgtgcatggaattggatacaaggatcaattttgggg

SEQ ID NO: 151587 - DNA, 55 bp, Artificial
  Synthetic oligonucleotide
gaagaatataccatgctactgcggtgcgactcgggagccaagtcagccgtctgga

SEQ ID NO: 151588 - DNA, 59 bp, Artificial
  Synthetic oligonucleotide
gttcctataatttgtgggttatgccggtcataagctattttctgttgctgctcgaagtc

SEQ ID NO: 151589 - DNA, 55 bp, Artificial
  Synthetic oligonucleotide
gaataccagaatatcctcgtgctgccggagcggcatacgtttggcattgagatgt

SEQ ID NO: 151590 - DNA, 55 bp, Artificial
  Synthetic oligonucleotide
ggtgtccgctgaatccacaggcttaggcagaccaatggaggctgttatagacaag

SEQ ID NO: 151591 - DNA, 52 bp, Artificial
  Synthetic oligonucleotide
gaatcctaaagtcctaagggctaataacaattatcccttcaaaacgaccgaa

SEQ ID NO: 151592 - DNA, 55 bp, Artificial
  Synthetic oligonucleotide
ggtggtaggcttggttctccgccatatcccaagtcaggtttccgtcgctgtcaag

SEQ ID NO: 151593 - DNA, 53 bp, Artificial
  Synthetic oligonucleotide
gaattcggtttccggtcataacagcggtaattcccctaacggcagctacccca

SEQ ID NO: 151594 - DNA, 55 bp, Artificial
  Synthetic oligonucleotide
gacaatgggtaaaccaagatactgatattgttatggtagataccggacatagcta

SEQ ID NO: 151595 - DNA, 55 bp, Artificial
  Synthetic oligonucleotide
gaccgcaacggagagaaccacatacagcatagcatcatagctgactccatcgcct

SEQ ID NO: 151596 - DNA, 55 bp, Artificial
  Synthetic oligonucleotide
gaccgcgctcccgtactattacaaggaatggaagaacgcctcattacccgcttca

SEQ ID NO: 151597 - DNA, 55 bp, Artificial
  Synthetic oligonucleotide
ggtggaaacctcctactttaaccctccgatgggattgaacaacattctgctccgc

SEQ ID NO: 151598 - DNA, 55 bp, Artificial
  Synthetic oligonucleotide
ggtgatggcccttatcaatggatgcttgtatcatttcccacagattaagccggag

SEQ ID NO: 151599 - DNA, 58 bp, Artificial
  Synthetic oligonucleotide
tccttagaagttgcttacgaattgcgtaatgtaaccaaccatataatagcttgtccaa

SEQ ID NO: 151600 - DNA, 60 bp, Artificial
  Synthetic oligonucleotide
ctgatagataatgatgtcccgtttacggttattggtcatgtatgcaccgaagaatgtaat

SEQ ID NO: 151601 - DNA, 54 bp, Artificial
  Synthetic oligonucleotide
gacctaaggcccagtttgacccgtcacgtaacagcgttgttctatggagttccc

SEQ ID NO: 151602 - DNA, 55 bp, Artificial
  Synthetic oligonucleotide
gacgaatagacaatccgggaacacgtcctatcagtaaattagaaacctcagtagt

SEQ ID NO: 151603 - DNA, 54 bp, Artificial
  Synthetic oligonucleotide
gacgcaaagtgtgcgttatcggcaaacgtgtttacgagagccttttcaacccgg

SEQ ID NO: 151604 - DNA, 55 bp, Artificial
  Synthetic oligonucleotide
gacggactgttgaacttctatgccggacgcaatgctgtttgtgaccttccctttg

SEQ ID NO: 151605 - DNA, 55 bp, Artificial
  Synthetic oligonucleotide
gacggcggatcacaccgagagaggcccttagattggaattatcattaccgctcgt

SEQ ID NO: 151606 - DNA, 55 bp, Artificial
  Synthetic oligonucleotide
gcatggagacgacggttagaggttttcgtaccgattctatgtcttttaagtcgca

SEQ ID NO: 151607 - DNA, 55 bp, Artificial
  Synthetic oligonucleotide
gcatgtatatcggcgtgtccgaaagtatgttgtacaaactcacatcgaacaagga

SEQ ID NO: 151608 - DNA, 55 bp, Artificial
  Synthetic oligonucleotide
gcattggcaacgggttctccaatatcctctatttccagcgcaaagacagtggctg

SEQ ID NO: 151609 - DNA, 55 bp, Artificial
  Synthetic oligonucleotide
gcattttgcaatgcaggacgaacatttacagcagtttattccacatatcaccttg

SEQ ID NO: 151610 - DNA, 55 bp, Artificial
  Synthetic oligonucleotide
gccaaggccagatgtccgatgtgtaccggattgaatgacccgctgaagattccgg

SEQ ID NO: 151611 - DNA, 57 bp, Artificial
  Synthetic oligonucleotide
gtcccggtgtacttcggcaatggaacattctacccactgttcgttgcggtgtgtgag

SEQ ID NO: 151612 - DNA, 55 bp, Artificial
  Synthetic oligonucleotide
ggggaacataatgatgaaatacagatagtgatggaagttgagacacaaggaattc

SEQ ID NO: 151613 - DNA, 55 bp, Artificial
  Synthetic oligonucleotide
gccacttcaagcgaggaatggtgtaccaccagtatatcaggaaatatagtaaccg

SEQ ID NO: 151614 - DNA, 55 bp, Artificial
  Synthetic oligonucleotide
gggcttgcagccgataagggactgtttatgcctatgactgtcaaacctcttccgc

SEQ ID NO: 151615 - DNA, 55 bp, Artificial
  Synthetic oligonucleotide
gccattcccttgcgctatcagggagtatccagccggtttacttatggctacaagg

SEQ ID NO: 151616 - DNA, 55 bp, Artificial
  Synthetic oligonucleotide
gcccaacctgccgtatatctttgccgattccgacgtgacattctactggcgggac

SEQ ID NO: 151617 - DNA, 55 bp, Artificial
  Synthetic oligonucleotide
gggcggacttgcgaacggacaattaccgagtgatctgatcccctgggtatccggt

SEQ ID NO: 151618 - DNA, 55 bp, Artificial
  Synthetic oligonucleotide
gcccggcacatcgaccgtgaacatccgcattgccacatcgtctttaatcgagtgg

SEQ ID NO: 151619 - DNA, 55 bp, Artificial
  Synthetic oligonucleotide
gcccgggatagcaccactattggcgtctccggctcctgtataagtacaaagtccg

SEQ ID NO: 151620 - DNA, 55 bp, Artificial
  Synthetic oligonucleotide
gcccgtgagttcgcatcgggtacggagatgaccgtaagtccgggagagacattag

SEQ ID NO: 151621 - DNA, 50 bp, Artificial
  Synthetic oligonucleotide
gccgaaaaggaaaactggtcggttttatacggtaacgaaagaacaactga

SEQ ID NO: 151622 - DNA, 59 bp, Artificial
  Synthetic oligonucleotide
ctcaatgtaccagttggagcagaatacaggcttggagtatcccaattagaacgcgattt

SEQ ID NO: 151623 - DNA, 55 bp, Artificial
  Synthetic oligonucleotide
gccgacagaatatccggagagggcttggctacattaaaagcgatgtaactgtcat

SEQ ID NO: 151624 - DNA, 53 bp, Artificial
  Synthetic oligonucleotide
gggcccagcgtcggtttacctacaccggtaggcaggctttcacttacgacggc

SEQ ID NO: 151625 - DNA, 55 bp, Artificial
  Synthetic oligonucleotide
gccgcatcggtgaacaaggaacagctatctctttattacggcatcggacgttatg

SEQ ID NO: 151626 - DNA, 55 bp, Artificial
  Synthetic oligonucleotide
gccggacgcaaaaccgtgtggaaaggaatagacttcgcacgatgcgaacgtaagg

SEQ ID NO: 151627 - DNA, 55 bp, Artificial
  Synthetic oligonucleotide
gattcacttcaaaggtattcttgctccgttctatgccaaagacgccaaccgcccg

SEQ ID NO: 151628 - DNA, 55 bp, Artificial
  Synthetic oligonucleotide
gattgctattcgttcctcgggcgtgtacttccttaggacaaggaattcaaggtcc

SEQ ID NO: 151629 - DNA, 55 bp, Artificial
  Synthetic oligonucleotide
gatttccgcgagattattcatcctaagaaagatttccggatagctgatccagaat

SEQ ID NO: 151630 - DNA, 55 bp, Artificial
  Synthetic oligonucleotide
ggggctgcattgcgtctggagaccaggatcgtttccgtctctgccatttcgaagt

SEQ ID NO: 151631 - DNA, 55 bp, Artificial
  Synthetic oligonucleotide
gcacatcccagataatggatcgaagattgaacactgtaataatatcgtggctgca

SEQ ID NO: 151632 - DNA, 55 bp, Artificial
  Synthetic oligonucleotide
gcacatgccaggttaatgcaactttactccagtagtacaatgaataggtggcatt

SEQ ID NO: 151633 - DNA, 60 bp, Artificial
  Synthetic oligonucleotide
gcaaccgactggaaatagaaatgaccgagttgttgcttgacatcatgtcgaacatgaacg

SEQ ID NO: 151634 - DNA, 55 bp, Artificial
  Synthetic oligonucleotide
ggggcagggtgtgttatagctggattagttctttgtgcagtaatgtcgatggtcg

SEQ ID NO: 151635 - DNA, 55 bp, Artificial
  Synthetic oligonucleotide
gcaccttatgattagctataagtgtttccatgcaggttatatccaatactgcctt

SEQ ID NO: 151636 - DNA, 55 bp, Artificial
  Synthetic oligonucleotide
gcacgagataaatcctcaggaccgacttcaattacctccacagccttaactgcag

SEQ ID NO: 151637 - DNA, 55 bp, Artificial
  Synthetic oligonucleotide
gcactaagtaacgaggctgcatttattatgtatgttggcatgagttctggaggtg

SEQ ID NO: 151638 - DNA, 55 bp, Artificial
  Synthetic oligonucleotide
gcacttatctcacaccctgtggaccataaagatctgtggacaaaacgttgtctta

SEQ ID NO: 151639 - DNA, 55 bp, Artificial
  Synthetic oligonucleotide
ggggcaaatgtctgggacgggaacaccgaagcatggaagccgaactaccatgcgc

SEQ ID NO: 151640 - DNA, 55 bp, Artificial
  Synthetic oligonucleotide
gcagggcaagatcgtgcagtaagattagatttgaatagtgcgaatggattatata

SEQ ID NO: 151641 - DNA, 55 bp, Artificial
  Synthetic oligonucleotide
gcagggtgagcgacctgtaccgaatgaccaaactaaatgtggtcaatgaagccat

SEQ ID NO: 151642 - DNA, 55 bp, Artificial
  Synthetic oligonucleotide
gcagggtgtcaaactcaaaattgagccgtttgctttgaaagtcgtacatacgctg

SEQ ID NO: 151643 - DNA, 55 bp, Artificial
  Synthetic oligonucleotide
gcagtccgtcaggtttgactgtgcatccatatcaatgagcagtacccgtttcccc

SEQ ID NO: 151644 - DNA, 59 bp, Artificial
  Synthetic oligonucleotide
taaggtcattccgttgtctgttgcatatcgtttcagccggttgtggcgtgaagggtctg

SEQ ID NO: 151645 - DNA, 53 bp, Artificial
  Synthetic oligonucleotide
gcagttccggtttagcccgcaaaagtacatcggaggtctcttgcccgttcccg

SEQ ID NO: 151646 - DNA, 55 bp, Artificial
  Synthetic oligonucleotide
gcatcagtcatgatgcgaagcataccactgttgcggcttctccattcttcgcgga

SEQ ID NO: 151647 - DNA, 55 bp, Artificial
  Synthetic oligonucleotide
gcatcataaagtggagcgaatttcgagatcaaactgatagtaccggtgcgagaag

SEQ ID NO: 151648 - DNA, 55 bp, Artificial
  Synthetic oligonucleotide
gcatcatggtactattcaagccgacaacaatggagagcaccaaccgggatgccac

SEQ ID NO: 151649 - DNA, 55 bp, Artificial
  Synthetic oligonucleotide
taatgtggtgcgttctccgaaagcagtattgtatacttggttggttgcattcgga

SEQ ID NO: 151650 - DNA, 55 bp, Artificial
  Synthetic oligonucleotide
agttgtaaggtcatgtaaaccggcgctatgagagctgctcgctccatgtcggagg

SEQ ID NO: 151651 - DNA, 55 bp, Artificial
  Synthetic oligonucleotide
taatcgagtggacaatggcggcaaaacgattagcgacaagaatgactttcgcaag

SEQ ID NO: 151652 - DNA, 55 bp, Artificial
  Synthetic oligonucleotide
atacacggttacagtagtaggttatcccggcatcttcgtcaactggcatccggcc

SEQ ID NO: 151653 - DNA, 55 bp, Artificial
  Synthetic oligonucleotide
ataccgggtacatgcgatccgatttatttccgtaacctgcatgtggttccgcgcc

SEQ ID NO: 151654 - DNA, 55 bp, Artificial
  Synthetic oligonucleotide
taatagacctcctgagatattcacgcactcgtttgggtttgtcatttcccgtctc

SEQ ID NO: 151655 - DNA, 54 bp, Artificial
  Synthetic oligonucleotide
atcaagaatattatcggggacttcataaactgaaacgaccgcttttttaccatg

SEQ ID NO: 151656 - DNA, 55 bp, Artificial
  Synthetic oligonucleotide
atagcgacttgcgaacttgcatttaagccttgcacattggttaatgagaattgat

SEQ ID NO: 151657 - DNA, 55 bp, Artificial
  Synthetic oligonucleotide
atcatcaagattgtgaagattcggaccgtgcttctttaggtttaccctatgcaca

SEQ ID NO: 151658 - DNA, 55 bp, Artificial
  Synthetic oligonucleotide
taaccctgacgccaactcttagtacgcatccatgagccatttatttggaaggccg

SEQ ID NO: 151659 - DNA, 55 bp, Artificial
  Synthetic oligonucleotide
taaagacgatgtggcaatgcggatgttcacggtcgatgtgccgggcaatgatgta

SEQ ID NO: 151660 - DNA, 55 bp, Artificial
  Synthetic oligonucleotide
gtttacattcgatacggagtttaatacgatgtagtcctgtccgtccaactccgga

SEQ ID NO: 151661 - DNA, 55 bp, Artificial
  Synthetic oligonucleotide
gttgtaagcattcccgtgttctgtccgtcatccgtgaacagttgcaccgtgagcc

SEQ ID NO: 151662 - DNA, 55 bp, Artificial
  Synthetic oligonucleotide
atgtatacagcgtacacgttacaaagcaccacgatacttttagcacccttgtacg

SEQ ID NO: 151663 - DNA, 55 bp, Artificial
  Synthetic oligonucleotide
atgttgagatatgagataggtggccggggatatgtcgtttactcaccggagaagg

SEQ ID NO: 151664 - DNA, 55 bp, Artificial
  Synthetic oligonucleotide
gttcggcgctccactcgcttgatgtgcctgtcgtgatatgtagcggaacggcagg

SEQ ID NO: 151665 - DNA, 55 bp, Artificial
  Synthetic oligonucleotide
gttcgaggggacgttccgtaagtatcatacggaatatgggctgaaagagtcggcg

SEQ ID NO: 151666 - DNA, 60 bp, Artificial
  Synthetic oligonucleotide
ctgaaccagaacaacacgtatgaggacagcaacatacagaactcgtctttctctgtaact

SEQ ID NO: 151667 - DNA, 55 bp, Artificial
  Synthetic oligonucleotide
attatccactacgtaatcgccagtggcgacattatgatgcactcccgcataacga

SEQ ID NO: 151668 - DNA, 55 bp, Artificial
  Synthetic oligonucleotide
tattccgcatcggcgtatatctccggtgtttgcaaatcaaactcgaacgatacgg

SEQ ID NO: 151669 - DNA, 54 bp, Artificial
  Synthetic oligonucleotide
tattcccgtattgtcggataagggtcggaatgtctgtttccgtatcggactttc

SEQ ID NO: 151670 - DNA, 55 bp, Artificial
  Synthetic oligonucleotide
tatcttttatgactatggtgattatgttagggttttatgcgacaaagacacagaa

SEQ ID NO: 151671 - DNA, 55 bp, Artificial
  Synthetic oligonucleotide
tatcgtgcggaggtaggctaccaagtcctcatacacgtcgctgtagcgtccgttg

SEQ ID NO: 151672 - DNA, 55 bp, Artificial
  Synthetic oligonucleotide
tatcgggtggagtcggctatatcggatcctcaaatagaacttctgccgtttatcc

SEQ ID NO: 151673 - DNA, 55 bp, Artificial
  Synthetic oligonucleotide
tatcatagcggaaaggacacactataatatctgccgcatttaatatcacgcctaa

SEQ ID NO: 151674 - DNA, 55 bp, Artificial
  Synthetic oligonucleotide
aggaaaggcacggaaactatctctttacatgcaacctccgattgcgggctacccg

SEQ ID NO: 151675 - DNA, 55 bp, Artificial
  Synthetic oligonucleotide
tataccggatagcaggaacggatcagaaagaacgtattccccgttcgtattctac

SEQ ID NO: 151676 - DNA, 55 bp, Artificial
  Synthetic oligonucleotide
tagcttgcgcatggcttcagaaccgaaattttgggcctgtaaggctgatactgcc

SEQ ID NO: 151677 - DNA, 55 bp, Artificial
  Synthetic oligonucleotide
gttcgacctccgttggggtcgtggattgggaaggcacttcgacccgcacattgta

SEQ ID NO: 151678 - DNA, 55 bp, Artificial
  Synthetic oligonucleotide
tagcggatttcttgggagtatgcttacatgcactattggattgttccgaagaacg

SEQ ID NO: 151679 - DNA, 55 bp, Artificial
  Synthetic oligonucleotide
aggattgtggtactcgacaagggtcaggtagccgagacgggtacgcacaaggaac

SEQ ID NO: 151680 - DNA, 53 bp, Artificial
  Synthetic oligonucleotide
taccggtaggatctaatgcaccacccacaataggggtagttaccgtacccgga

SEQ ID NO: 151681 - DNA, 55 bp, Artificial
  Synthetic oligonucleotide
taccctccaagcgcgttccgtatggaatttctattccttcggccaacgtggagat

SEQ ID NO: 151682 - DNA, 55 bp, Artificial
  Synthetic oligonucleotide
agtatcgttcctaagcaaagaagcttctgctaacgcccatgtagcagacaggtgg

SEQ ID NO: 151683 - DNA, 55 bp, Artificial
  Synthetic oligonucleotide
agtcctcgtcctctgaatgatttgctgatagagcccaatatgcctaaactgacat

SEQ ID NO: 151684 - DNA, 55 bp, Artificial
  Synthetic oligonucleotide
tacccagtctgctgtgcggctctttaccctgcggaacaagataacggcagtccgc

SEQ ID NO: 151685 - DNA, 55 bp, Artificial
  Synthetic oligonucleotide
tacactgggaagcaccacctctgtatgtgatgcacaatggccggctttcaacgag

SEQ ID NO: 151686 - DNA, 55 bp, Artificial
  Synthetic oligonucleotide
agtgtacagaatgcatcgggagagatggtaccgttttcagcctttatgcgggtag

SEQ ID NO: 151687 - DNA, 55 bp, Artificial
  Synthetic oligonucleotide
agtgtaggctataatatggccaaggcgaacaacgatgttgcatcggaagaagcgc

SEQ ID NO: 151688 - DNA, 57 bp, Artificial
  Synthetic oligonucleotide
atccatggctacaatctatgtccgttttagaaacggaaggcagttagactccgttgc

SEQ ID NO: 151689 - DNA, 55 bp, Artificial
  Synthetic oligonucleotide
cacattccgatattatggccagacttatgcccctctatgagatgtcacccggacg

SEQ ID NO: 151690 - DNA, 55 bp, Artificial
  Synthetic oligonucleotide
caccccagctgaaagtaccgttgtcgctcatcccataagtagtctggaattcggg

SEQ ID NO: 151691 - DNA, 54 bp, Artificial
  Synthetic oligonucleotide
cacccggagccgttgtatatacctgatatcccaaaccaccggaagcttcggacg

SEQ ID NO: 151692 - DNA, 54 bp, Artificial
  Synthetic oligonucleotide
cacccgtgccccgtttccgtttctgcgttcctgaaccaatgtgcccgatacagg

SEQ ID NO: 151693 - DNA, 55 bp, Artificial
  Synthetic oligonucleotide
caccgaccgcgaaatgtccttctactgcgtacctcatacctttctgcctttcggg

SEQ ID NO: 151694 - DNA, 55 bp, Artificial
  Synthetic oligonucleotide
cacctgcattgctagttaagaaagcgtctactctaacaacaggagtacgtccgat

SEQ ID NO: 151695 - DNA, 55 bp, Artificial
  Synthetic oligonucleotide
cacgaacgctactcaaaggcaatgaatgcaggaccagacttgaacgaattgcgtc

SEQ ID NO: 151696 - DNA, 55 bp, Artificial
  Synthetic oligonucleotide
cacgagcagtataagggtcccaactccatacattacgttgggtttctgcatctct

SEQ ID NO: 151697 - DNA, 55 bp, Artificial
  Synthetic oligonucleotide
gtgtccgaggttcaagattagttttgtaatgtcttgcgcgtcctggacttcgttg

SEQ ID NO: 151698 - DNA, 55 bp, Artificial
  Synthetic oligonucleotide
cactacaccaaggtctcgtacttaggagggttatattgtcactgacatggaaacg

SEQ ID NO: 151699 - DNA, 60 bp, Artificial
  Synthetic oligonucleotide
atcctggattgtggcggttcgcctcgcagcctcctcactcctatcccgatgacccgcatc

SEQ ID NO: 151700 - DNA, 55 bp, Artificial
  Synthetic oligonucleotide
cactattacacaatgcataaggctgacagtagtcctttcagtctgctatcagtcc

SEQ ID NO: 151701 - DNA, 55 bp, Artificial
  Synthetic oligonucleotide
cactggtcgaaatcaggctcagattaggagttgttgttgtctgcagtacaggatg

SEQ ID NO: 151702 - DNA, 55 bp, Artificial
  Synthetic oligonucleotide
cagatagcggatggtagcgtggacgccataatcgccgacctaccttacggggtgt

SEQ ID NO: 151703 - DNA, 55 bp, Artificial
  Synthetic oligonucleotide
cagatggagaataggagcagacataggggctaacagaaaaggatttcaagcatcc

SEQ ID NO: 151704 - DNA, 55 bp, Artificial
  Synthetic oligonucleotide
cagcaaccgccactcacaactgcgcacccagctacggaagttctcttcgggttga

SEQ ID NO: 151705 - DNA, 55 bp, Artificial
  Synthetic oligonucleotide
cagccagatgttcattccggtaataactcataggacgtatatccgccagatacag

SEQ ID NO: 151706 - DNA, 55 bp, Artificial
  Synthetic oligonucleotide
gtgtacgatgtggacggacaagagggcttttatgttccagcttctgcatttaggg

SEQ ID NO: 151707 - DNA, 55 bp, Artificial
  Synthetic oligonucleotide
cagcgtaccagtatcttcattagggaccatacctgtcggagtagtgttcataaag

SEQ ID NO: 151708 - DNA, 55 bp, Artificial
  Synthetic oligonucleotide
attggcatagaggtggatatggtgagcttacagtacaagaaggattggcagctag

SEQ ID NO: 151709 - DNA, 55 bp, Artificial
  Synthetic oligonucleotide
attgtgcgggcttccgtattcgtcattgctcctacaaaccagtcattccccgaac

SEQ ID NO: 151710 - DNA, 60 bp, Artificial
  Synthetic oligonucleotide
actgattgaaagaattggcacacgattgaaaacccatgctacggaaacagatatagcacg

SEQ ID NO: 151711 - DNA, 56 bp, Artificial
  Synthetic oligonucleotide
ctcgaaacggtattcaatgaagggcaaagcgacttgtatttcacttacagagtaaa

SEQ ID NO: 151712 - DNA, 55 bp, Artificial
  Synthetic oligonucleotide
atttcggtggaaagccccgcaaaataatctatgaccaggacagggtacttatatc

SEQ ID NO: 151713 - DNA, 55 bp, Artificial
  Synthetic oligonucleotide
caaacctcgttgttcacacattccacgtccattcccttcacaagataaacctcgt

SEQ ID NO: 151714 - DNA, 55 bp, Artificial
  Synthetic oligonucleotide
gttccggtcacgtgtaagatacttccctatgtagaggtctccaaacagggcgtcg

SEQ ID NO: 151715 - DNA, 55 bp, Artificial
  Synthetic oligonucleotide
caaatatggtcccaagagtcccaataaactgaaatggtacgaaggccagatggct

SEQ ID NO: 151716 - DNA, 53 bp, Artificial
  Synthetic oligonucleotide
caacggtgcatacaacggttccgagaagtttagtcccgactatcgtttcgagt

SEQ ID NO: 151717 - DNA, 55 bp, Artificial
  Synthetic oligonucleotide
caacgttccaactatctactaattagcgtattacacgcttttcgttgcaggtggc

SEQ ID NO: 151718 - DNA, 55 bp, Artificial
  Synthetic oligonucleotide
caactccgaactgtcctctgtcggtacgttgagtatataccggcaaagtatgata

SEQ ID NO: 151719 - DNA, 53 bp, Artificial
  Synthetic oligonucleotide
gttcagtttggattttcttggggtagctgccgttacgggaattaccgctgtta

SEQ ID NO: 151720 - DNA, 55 bp, Artificial
  Synthetic oligonucleotide
caataaaagtcgtgccatgtcattctgcatacgatgtaccttgaatgccgagaat

SEQ ID NO: 151721 - DNA, 55 bp, Artificial
  Synthetic oligonucleotide
caatgaaccggcgacacgttcggaagaagtggctctgtccaatgcggtgtccctg

SEQ ID NO: 151722 - DNA, 57 bp, Artificial
  Synthetic oligonucleotide
gtttcgggaagagagtgaagcatcgttcaaagtgaataccgaacgtgaacaatggta

SEQ ID NO: 151723 - DNA, 55 bp, Artificial
  Synthetic oligonucleotide
gttactgccgttgtagcttgccgtacttctcaaacgtggatagcgggctcccgta

SEQ ID NO: 151724 - DNA, 55 bp, Artificial
  Synthetic oligonucleotide
caattgcgaagttgtagaaggtgaggtcggttcttccaagatcaatggagcttgc

SEQ ID NO: 151725 - DNA, 55 bp, Artificial
  Synthetic oligonucleotide
cacacggatcatctggttgccattcagcgtgtaggttaaggcatcgcacataccg

SEQ ID NO: 151726 - DNA, 55 bp, Artificial
  Synthetic oligonucleotide
cacactccgataccaggagaggtgcgatgaattccgtttaccactgggtgcgaag

SEQ ID NO: 151727 - DNA, 55 bp, Artificial
  Synthetic oligonucleotide
cacagcgaggttacgacgtagttacagcttcacagattcagtcactctttgctat

SEQ ID NO: 151728 - DNA, 55 bp, Artificial
  Synthetic oligonucleotide
gtgtgtggtgcggcacatatcacgcatttatcataattaggtaccgtaacgtttg

SEQ ID NO: 151729 - DNA, 55 bp, Artificial
  Synthetic oligonucleotide
cacattccgacagtgaagttctccacccgaatactcatagtaataatgccgctgt

SEQ ID NO: 151730 - DNA, 55 bp, Artificial
  Synthetic oligonucleotide
aagaaattgcataatagtacgcagactttggcaggtgcactgactaaagtgcccg

SEQ ID NO: 151731 - DNA, 55 bp, Artificial
  Synthetic oligonucleotide
ttcgttaagaccgtcccgttgtaggtcagcccctcgcatttctcatgtccgacga

SEQ ID NO: 151732 - DNA, 55 bp, Artificial
  Synthetic oligonucleotide
ttcctcctacgatgtaagctacattgtcgatgataaaggataagccgccggttct

SEQ ID NO: 151733 - DNA, 57 bp, Artificial
  Synthetic oligonucleotide
atgtaacccgttacatctcaaaactatcggatgcggggaagtacacgcatgacaggt

SEQ ID NO: 151734 - DNA, 55 bp, Artificial
  Synthetic oligonucleotide
ttccggataaaagaatcatgccgttgatggttccgaaatacagctctccgtcggg

SEQ ID NO: 151735 - DNA, 55 bp, Artificial
  Synthetic oligonucleotide
ttattactgtgcgagggtattccattcacctcgttgtgtgccatcataaaagtgt

SEQ ID NO: 151736 - DNA, 55 bp, Artificial
  Synthetic oligonucleotide
ttatgggccattccaaaaggcaagcagtcaggatagtacgctgttacatcgtgct

SEQ ID NO: 151737 - DNA, 55 bp, Artificial
  Synthetic oligonucleotide
ttacgcgtacatacggcaataatacctccgatagctactacccacaacaaacgac

SEQ ID NO: 151738 - DNA, 55 bp, Artificial
  Synthetic oligonucleotide
tgtttggtggctgcgacatagaaacggctgaaatatccgttaccttcggtcgggg

SEQ ID NO: 151739 - DNA, 55 bp, Artificial
  Synthetic oligonucleotide
aatgatgtaccaggactctatcgaaatcgtagtacacagaggagcgaaccatata

SEQ ID NO: 151740 - DNA, 55 bp, Artificial
  Synthetic oligonucleotide
aatggcgaacatcgtcctaaatcttcattaccgacccgcgaagaagtctgtatgg

SEQ ID NO: 151741 - DNA, 54 bp, Artificial
  Synthetic oligonucleotide
aattcggaaagtatcgaagtataaggttcgaggaaagcttccttagccacattc

SEQ ID NO: 151742 - DNA, 55 bp, Artificial
  Synthetic oligonucleotide
tgtcaagtatgacgattacgtgcttcttactttccagttgaacacccctttcacg

SEQ ID NO: 151743 - DNA, 55 bp, Artificial
  Synthetic oligonucleotide
acaggaaaccgcaggaatctatgggatagactatacaaccagaaggattccgttc

SEQ ID NO: 151744 - DNA, 59 bp, Artificial
  Synthetic oligonucleotide
atgtagttcatcagtaatcgagccgttcttccgttgccatccacccacggatgaatagt

SEQ ID NO: 151745 - DNA, 55 bp, Artificial
  Synthetic oligonucleotide
accaaccaagtatacaatactgctttcggagaacgcaccacattaaaccagttgg

SEQ ID NO: 151746 - DNA, 55 bp, Artificial
  Synthetic oligonucleotide
accacgatcgaagcaaccggtatacctgtcgtgactttggagctaattatctgat

SEQ ID NO: 151747 - DNA, 55 bp, Artificial
  Synthetic oligonucleotide
tgtaccagtggcactgtctgctgctccggatatggtcactcttaaattatgcgcc

SEQ ID NO: 151748 - DNA, 55 bp, Artificial
  Synthetic oligonucleotide
tgtaaacatacgctagctatgctgacgcaacttatccgggagaataaacactccg

SEQ ID NO: 151749 - DNA, 55 bp, Artificial
  Synthetic oligonucleotide
tggttggcaagtaagactcccgtccgcaaagaatacagagtaacagaaatccgtt

SEQ ID NO: 151750 - DNA, 53 bp, Artificial
  Synthetic oligonucleotide
aaaacatatctgctacgaaaatacgtttgtctccggcaaatggaacgggttcc

SEQ ID NO: 151751 - DNA, 55 bp, Artificial
  Synthetic oligonucleotide
aaacgtctttgtgtcagcggggtgattgtatcatagttctttccatcgaaatgcg

SEQ ID NO: 151752 - DNA, 55 bp, Artificial
  Synthetic oligonucleotide
aaactgagtgctaaggtgcctttgaaggaaatgtcatcctactctacggcactta

SEQ ID NO: 151753 - DNA, 55 bp, Artificial
  Synthetic oligonucleotide
aaagacaggctggcattcataccgacgacccaatctgattctctcctggctttag

SEQ ID NO: 151754 - DNA, 55 bp, Artificial
  Synthetic oligonucleotide
aaagcaattctgggtattgtaaacctcttgccgaatgatgcggcttcactgatac

SEQ ID NO: 151755 - DNA, 58 bp, Artificial
  Synthetic oligonucleotide
atgtcgtgtctgttcagctttacagtttttcctgtatggccgtccgtccagtcaaaga

SEQ ID NO: 151756 - DNA, 55 bp, Artificial
  Synthetic oligonucleotide
aaagcataaacctcgttggccgtaatcttcagcacgtcgggggtgtcagcagccg

SEQ ID NO: 151757 - DNA, 52 bp, Artificial
  Synthetic oligonucleotide
aaatataacggtcgcgtaacgggagaaatgctcgaccggaatacttataacc

SEQ ID NO: 151758 - DNA, 55 bp, Artificial
  Synthetic oligonucleotide
aaatgcgaaggagtcgtttatgaagatcctgtccgcgtatccaacgaaatagctg

SEQ ID NO: 151759 - DNA, 55 bp, Artificial
  Synthetic oligonucleotide
aacagataatacgggttccacaaaccaagtacatccaacaagtctttgcggtctc

SEQ ID NO: 151760 - DNA, 54 bp, Artificial
  Synthetic oligonucleotide
aaccgaatacacgatcacgttccgaaagaataacgaaggaattgacatctaccc

SEQ ID NO: 151761 - DNA, 55 bp, Artificial
  Synthetic oligonucleotide
aaccggcagtcatgtaaggctctaatatctgattaccgttttcgtagtatccggc

SEQ ID NO: 151762 - DNA, 55 bp, Artificial
  Synthetic oligonucleotide
aacgactcttttcattcgtagctacattgcgataagcagtccagtaagggttctg

SEQ ID NO: 151763 - DNA, 55 bp, Artificial
  Synthetic oligonucleotide
ttggctaacatctctttcacttccggttcgtcgcagttcaatgtcagtactgctt

SEQ ID NO: 151764 - DNA, 55 bp, Artificial
  Synthetic oligonucleotide
ttcttatcacaagatacttcttacttcactacgctattcgtcgcagggtccggga

SEQ ID NO: 151765 - DNA, 52 bp, Artificial
  Synthetic oligonucleotide
aacggacgaagtggaacgggtagggaaaaagctggaggacgctcaagagaaa

SEQ ID NO: 151766 - DNA, 60 bp, Artificial
  Synthetic oligonucleotide
gttgcgtaaatataaccatgcctatcgcctgcctgcttaatggagaggacgacaagaatt

SEQ ID NO: 151767 - DNA, 55 bp, Artificial
  Synthetic oligonucleotide
aactacataccacgatatcttctgtgcgggagatgaggtaggcggacctgtaggc

SEQ ID NO: 151768 - DNA, 55 bp, Artificial
  Synthetic oligonucleotide
aactcggattccgccctgacagccatgacaaccagtgtatgcgtagacctgctga

SEQ ID NO: 151769 - DNA, 55 bp, Artificial
  Synthetic oligonucleotide
aactctccaagccgatagctaatactgaaaccgtaataccggctcggatatttgc

SEQ ID NO: 151770 - DNA, 55 bp, Artificial
  Synthetic oligonucleotide
aactgccggcaaagtacatgaactttctcccacacaggcgcagacaggtccggct

SEQ ID NO: 151771 - DNA, 55 bp, Artificial
  Synthetic oligonucleotide
tccgtgagctaattcatagtcacgatggtacggcgattcacttaggttactcata

SEQ ID NO: 151772 - DNA, 55 bp, Artificial
  Synthetic oligonucleotide
tccgctgcaagtgcaactggctaccgagcctgaattacctgattatgcggaggca

SEQ ID NO: 151773 - DNA, 55 bp, Artificial
  Synthetic oligonucleotide
tccgcgcattgaaaagccgtttgcaatacaggaagccgaatcaatcctaaagcca

SEQ ID NO: 151774 - DNA, 55 bp, Artificial
  Synthetic oligonucleotide
tccgatcgggctggacataacagctccccgattcagttggcaactagcgtcagcg

SEQ ID NO: 151775 - DNA, 55 bp, Artificial
  Synthetic oligonucleotide
actttatgagttctccacacaagagttttcgatgactccgacggaactgacgtct

SEQ ID NO: 151776 - DNA, 55 bp, Artificial
  Synthetic oligonucleotide
tccgagctacttatggattgaccggaaatgatgcgcttgccactcgctttcccta

SEQ ID NO: 151777 - DNA, 60 bp, Artificial
  Synthetic oligonucleotide
gttcgtgtaatgataatgaagtaatagaacctgtggttagtgattctgtatctgatatgg

SEQ ID NO: 151778 - DNA, 55 bp, Artificial
  Synthetic oligonucleotide
agacttattattcagccggactatcagtccgtatctcagtgggctgcacattacg

SEQ ID NO: 151779 - DNA, 55 bp, Artificial
  Synthetic oligonucleotide
agagggaaagggtgtagctatttcagcaacgcctcaatgtgttccatatataact

SEQ ID NO: 151780 - DNA, 55 bp, Artificial
  Synthetic oligonucleotide
tcatgtcatagcaagcacgtgccatgaagttaagacgtccggcatcccaacccgt

SEQ ID NO: 151781 - DNA, 55 bp, Artificial
  Synthetic oligonucleotide
tcatcgatatatgttcgaccgtataaattggaacaaccgtctgatagggtaatcg

SEQ ID NO: 151782 - DNA, 55 bp, Artificial
  Synthetic oligonucleotide
agccaaagtcctgtagtatgttcgcactcttcctgccgtgccctatgcgaccatc

SEQ ID NO: 151783 - DNA, 55 bp, Artificial
  Synthetic oligonucleotide
tcatagacgcaggagaaacacgctactgggtgcggaagataatgccgttgcagag

SEQ ID NO: 151784 - DNA, 55 bp, Artificial
  Synthetic oligonucleotide
tcactgacgggcattacgagatacacacggggacttttatacacaccaagtgccg

SEQ ID NO: 151785 - DNA, 55 bp, Artificial
  Synthetic oligonucleotide
agccgatacgggagcggcactcttgaaagccggcacgaccgtcatcgatgcgaca

SEQ ID NO: 151786 - DNA, 55 bp, Artificial
  Synthetic oligonucleotide
tcacgtaccaaagcagaagatcgtccttacttcggtacttacggagcaatcgctc

SEQ ID NO: 151787 - DNA, 55 bp, Artificial
  Synthetic oligonucleotide
tcacgcatttatcataattaggtaccgtaacgtttgtcttccaccctaacaggcg

SEQ ID NO: 151788 - DNA, 60 bp, Artificial
  Synthetic oligonucleotide
caatgcggtacacatcttctggcggaacacatccaaggctgcgtcaatcggagaaacggc

SEQ ID NO: 151789 - DNA, 55 bp, Artificial
  Synthetic oligonucleotide
tcaccctattcaaatgcggaggagaatgcctggacgaatattacgtatcggaagg

SEQ ID NO: 151790 - DNA, 55 bp, Artificial
  Synthetic oligonucleotide
tcaagttcggtacaccggaatgtaatcttttcgttccgtcttagttccatgccac

SEQ ID NO: 151791 - DNA, 55 bp, Artificial
  Synthetic oligonucleotide
tattggtactcttccgacgggcaggagttttccggaagcagtgcaggcggcttct

SEQ ID NO: 151792 - DNA, 54 bp, Artificial
  Synthetic oligonucleotide
tggttcacggggtgcgtccggggtaattgtcgttacgactgccaagggtagagc

SEQ ID NO: 151793 - DNA, 55 bp, Artificial
  Synthetic oligonucleotide
tgctctggagcaggatcgtgccgataagaagcgttatccggctgtaaatccgatc

SEQ ID NO: 151794 - DNA, 55 bp, Artificial
  Synthetic oligonucleotide
accgcctgtatgttagcaggcacattgatgttgggagcatgtaccagtactcccc

SEQ ID NO: 151795 - DNA, 55 bp, Artificial
  Synthetic oligonucleotide
tgcacccgccaaagtctgcgtactgttatgcaatttcttcgcatcaatggctacc

SEQ ID NO: 151796 - DNA, 55 bp, Artificial
  Synthetic oligonucleotide
accggtcatcaaccgcgtaatggactttctgcaagcacactacggcatacgccgg

SEQ ID NO: 151797 - DNA, 55 bp, Artificial
  Synthetic oligonucleotide
accgtcttgcacgcatcttcgggagtgacccaaggtcctccaaacggccatcccg

SEQ ID NO: 151798 - DNA, 55 bp, Artificial
  Synthetic oligonucleotide
tgataacaacaccagcgaccttaccctttaccgcatccaaaggctccgtaacgac

SEQ ID NO: 151799 - DNA, 56 bp, Artificial
  Synthetic oligonucleotide
gccgtactaagttccttttggactgtggtgattttctcggttccggcagtgtatgc

SEQ ID NO: 151800 - DNA, 55 bp, Artificial
  Synthetic oligonucleotide
tgacgaacttttccccgacaccaagccctcacaggtcatccgtatgttcgggtca

SEQ ID NO: 151801 - DNA, 55 bp, Artificial
  Synthetic oligonucleotide
tcttagcatcgtcaggtggcaaattcaacccttcatcacttaattcgcaaagaag

SEQ ID NO: 151802 - DNA, 55 bp, Artificial
  Synthetic oligonucleotide
tctcgccgtaagcagccgataggagcattttctaccgtacttcatcagctcacgc

SEQ ID NO: 151803 - DNA, 55 bp, Artificial
  Synthetic oligonucleotide
acggaaaatggatctggagaacaaacatctatgttctttgcctatactatacacc

SEQ ID NO: 151804 - DNA, 55 bp, Artificial
  Synthetic oligonucleotide
acggcacatgaacaaaggcagtcaaggtactgccgaattacacgatagtacaccg

SEQ ID NO: 151805 - DNA, 55 bp, Artificial
  Synthetic oligonucleotide
tcgttcggaaacgatgcagtgatgctgttgataccttcgcgttgaatgtcagaac

SEQ ID NO: 151806 - DNA, 55 bp, Artificial
  Synthetic oligonucleotide
acgtagaccacggcaacggaatggactgctatgccgtaggccccacattaggcgg

SEQ ID NO: 151807 - DNA, 55 bp, Artificial
  Synthetic oligonucleotide
tcgcttgtccctgctggttacgtccccaagctgaactgaacgggtccagaaattc

SEQ ID NO: 151808 - DNA, 53 bp, Artificial
  Synthetic oligonucleotide
acgtcttgttgggtataaagcatcccgataccgttattaatcctccccagtaa

SEQ ID NO: 151809 - DNA, 55 bp, Artificial
  Synthetic oligonucleotide
tcgatgtacgcaagatggaggttggcgaaagcaaattactgatacaaccgtatgc

SEQ ID NO: 151810 - DNA, 56 bp, Artificial
  Synthetic oligonucleotide
agccttttgtacatcttggtcaccagagttccattttaaataaactcgcactgccc

SEQ ID NO: 151811 - DNA, 55 bp, Artificial
  Synthetic oligonucleotide
actctccggtttataattatatgcctcgtatgaaatctcccacggacgttttcca

SEQ ID NO: 151812 - DNA, 55 bp, Artificial
  Synthetic oligonucleotide
tcctgccatcatagggctggctatggccttccaagcttcttcaattattaatgcc

SEQ ID NO: 151813 - DNA, 55 bp, Artificial
  Synthetic oligonucleotide
ccgtctcagcgttaatgtagaaattccgagagaggagaacctgaagttgctggcc

SEQ ID NO: 151814 - DNA, 55 bp, Artificial
  Synthetic oligonucleotide
ccgtgaaggagaagtgttcggtctgcacaccatccggtacgaatcggatgtggac

SEQ ID NO: 151815 - DNA, 55 bp, Artificial
  Synthetic oligonucleotide
ccgtgcaaaagcagattctaacacagagggaatatctttatgtgcacttataaca

SEQ ID NO: 151816 - DNA, 55 bp, Artificial
  Synthetic oligonucleotide
ccgtgcaggtacataccccgcacctgtactccaataatcgccatccaaatggcac

SEQ ID NO: 151817 - DNA, 55 bp, Artificial
  Synthetic oligonucleotide
ccgtggatggtcacgttgtgccccacggatacatggtctcctatctcgatggtcg

SEQ ID NO: 151818 - DNA, 55 bp, Artificial
  Synthetic oligonucleotide
ccgttgaacttgacacaattgatccaatcacaggggcggacagttgggcggtgac

SEQ ID NO: 151819 - DNA, 55 bp, Artificial
  Synthetic oligonucleotide
ccgttggccagtttatgtagtctggcccagcggtgaaaattacggctgctcccac

SEQ ID NO: 151820 - DNA, 55 bp, Artificial
  Synthetic oligonucleotide
ccgtttctccgattgacgcagccttggatgtgttccgccagaagatgtgtaccgc

SEQ ID NO: 151821 - DNA, 60 bp, Artificial
  Synthetic oligonucleotide
tccggctgacgatgatatgtgcgtgcatgtcgtaccggtcggctcccttcctctcgaaat

SEQ ID NO: 151822 - DNA, 57 bp, Artificial
  Synthetic oligonucleotide
ctgcacgtgtgttcggaatttatgccggggggattttatgagaacgtgtgcaagccg

SEQ ID NO: 151823 - DNA, 55 bp, Artificial
  Synthetic oligonucleotide
cctagctgaaagcactcccgtggtgggagacgaacggcttgtcagagtgaaacag

SEQ ID NO: 151824 - DNA, 55 bp, Artificial
  Synthetic oligonucleotide
cctattcaatctctgacaatgccatctattcgattctcaaagaccgtgaaggcgg

SEQ ID NO: 151825 - DNA, 55 bp, Artificial
  Synthetic oligonucleotide
cctccagcacgtccgcaatcctcatttccgaccattgctcgttgcggtgggagag

SEQ ID NO: 151826 - DNA, 55 bp, Artificial
  Synthetic oligonucleotide
cctccattcagtcggttgcatgtagctgacgatgctttcaacggagctgtcttct

SEQ ID NO: 151827 - DNA, 54 bp, Artificial
  Synthetic oligonucleotide
cctcgttacgtgccaccaagatacgcaggttgcccggtttcctaccgccgacaa

SEQ ID NO: 151828 - DNA, 55 bp, Artificial
  Synthetic oligonucleotide
cctgtgcgaaactacatctactccgggcataactaccatcagggaacgagctacg

SEQ ID NO: 151829 - DNA, 55 bp, Artificial
  Synthetic oligonucleotide
ccttatatcggttatcggaagcaagtctgaatgcgagaccatcaaagcggacatc

SEQ ID NO: 151830 - DNA, 52 bp, Artificial
  Synthetic oligonucleotide
ccttgcaggcgggtaaacggtaagacggtagtatgaaacggcttgtttccgc

SEQ ID NO: 151831 - DNA, 55 bp, Artificial
  Synthetic oligonucleotide
cctttatcatccgggcgcaagacgataacctcggattgggcgaataatcccacgg

SEQ ID NO: 151832 - DNA, 55 bp, Artificial
  Synthetic oligonucleotide
gtatgcggcacaaccttgtaatcaggatgcaaaggggcagataataccttcgggg

SEQ ID NO: 151833 - DNA, 60 bp, Artificial
  Synthetic oligonucleotide
cccgtgcgtgtcccgtgtctgacattctcaaggcttcaggcataagcaaagccaccctgt

SEQ ID NO: 151834 - DNA, 53 bp, Artificial
  Synthetic oligonucleotide
cctttgttccccgttataggtacttgaaagagacctatatgaataatagggag

SEQ ID NO: 151835 - DNA, 55 bp, Artificial
  Synthetic oligonucleotide
ccggacaacacaaggcatccccggcacatcaatcacactgcaccgagcgtgcagt

SEQ ID NO: 151836 - DNA, 55 bp, Artificial
  Synthetic oligonucleotide
ccggagccaatacgatacgtgcctgcgtggctgaagaccagacagtgaccaccgg

SEQ ID NO: 151837 - DNA, 54 bp, Artificial
  Synthetic oligonucleotide
ccggaggttggaacaggggactaacaagtttgttcaagcagggctgttgcaggg

SEQ ID NO: 151838 - DNA, 55 bp, Artificial
  Synthetic oligonucleotide
ccggcacgtggtgtgtcgtaaatgctgttatggctaatcgtaatattgcgacaca

SEQ ID NO: 151839 - DNA, 55 bp, Artificial
  Synthetic oligonucleotide
gtcatgtaaaccggcgttatgagagctgctcgctccatgtcggagggtagaccgc

SEQ ID NO: 151840 - DNA, 55 bp, Artificial
  Synthetic oligonucleotide
ccgggctttctcagggctccagaagtgacataacggtccgttgccatgtccgata

SEQ ID NO: 151841 - DNA, 55 bp, Artificial
  Synthetic oligonucleotide
ccggtagcaggcatccaccaaaggacagatatcgtcggacaggcagttgacgttg

SEQ ID NO: 151842 - DNA, 51 bp, Artificial
  Synthetic oligonucleotide
ccggtataaacggacgtggatttattcccggtcattcctgccgtacggtcc

SEQ ID NO: 151843 - DNA, 55 bp, Artificial
  Synthetic oligonucleotide
ccggtctgagttccggccagcaaacccgtgagttctcatatggagaccgtgtgac

SEQ ID NO: 151844 - DNA, 52 bp, Artificial
  Synthetic oligonucleotide
ggtttcctcgctgattactattaccccttcccggattggggtagctttcttc

SEQ ID NO: 151845 - DNA, 55 bp, Artificial
  Synthetic oligonucleotide
gtcagttcgcaggtatagagttgaggctggtcgggactccacagaatcggattct

SEQ ID NO: 151846 - DNA, 55 bp, Artificial
  Synthetic oligonucleotide
gtcacagtatgactatgaagagctaattcgtgagaaagtgtttatccgcgatgga

SEQ ID NO: 151847 - DNA, 53 bp, Artificial
  Synthetic oligonucleotide
ccggttacggaacgcgtatcgatccgatttatggaacgacgaagtttcattcc

SEQ ID NO: 151848 - DNA, 55 bp, Artificial
  Synthetic oligonucleotide
ccgtaagggtggttttattgccagactcgttgttaagcagaaatgcctgtttcgc

SEQ ID NO: 151849 - DNA, 55 bp, Artificial
  Synthetic oligonucleotide
ccgtactgctcttttagtcaataaactcttcgtacagtacctccataaaatcggc

SEQ ID NO: 151850 - DNA, 55 bp, Artificial
  Synthetic oligonucleotide
ccgtacttatataattcatccggagtatgaggcgaataagggatatgcggacttc

SEQ ID NO: 151851 - DNA, 55 bp, Artificial
  Synthetic oligonucleotide
ccgtaggcataaagatttccggtaagcgcatgtagttctggctttctccgtaaga

SEQ ID NO: 151852 - DNA, 55 bp, Artificial
  Synthetic oligonucleotide
gtattgcgcttttcaactaggatagtcttatcaccggttacctgcactacgccac

SEQ ID NO: 151853 - DNA, 55 bp, Artificial
  Synthetic oligonucleotide
gtattcccggcatcggaagcggattggcacgtatgattgtcgcataccggaaccg

SEQ ID NO: 151854 - DNA, 54 bp, Artificial
  Synthetic oligonucleotide
ccgtctatctggttaagaatggggattcgttcgaagtttccggtagtgtggaga

SEQ ID NO: 151855 - DNA, 60 bp, Artificial
  Synthetic oligonucleotide
tatactgccatgcatgggatgcagcgcatgagtagtttcggacagttccgcaccatgatc

SEQ ID NO: 151856 - DNA, 55 bp, Artificial
  Synthetic oligonucleotide
cgcacgggttattcctacgtaatatcgacgcatcagatgggcatcctttacataa

SEQ ID NO: 151857 - DNA, 55 bp, Artificial
  Synthetic oligonucleotide
gtatccgccagttgaaatgggagttgggtaagaacgctctttgcgtacacctgac

SEQ ID NO: 151858 - DNA, 55 bp, Artificial
  Synthetic oligonucleotide
cgcatcagaccagtagactgccatacagagaagttctcacatgattggtagttcg

SEQ ID NO: 151859 - DNA, 55 bp, Artificial
  Synthetic oligonucleotide
cgcccatcggcaaaaggattccatctaattgataccttttctgcctgcactggag

SEQ ID NO: 151860 - DNA, 55 bp, Artificial
  Synthetic oligonucleotide
cgccgtaccatcgtgactatgaattagctcacggatatttatgggccattccaaa

SEQ ID NO: 151861 - DNA, 55 bp, Artificial
  Synthetic oligonucleotide
cgcctgttccgcgcctatatctatatgcagcggcgccagtacaaggaggcacgca

SEQ ID NO: 151862 - DNA, 55 bp, Artificial
  Synthetic oligonucleotide
cgccttcgacaaaccatttggttgcagtgaagttcttctgtacttgtattaacgc

SEQ ID NO: 151863 - DNA, 55 bp, Artificial
  Synthetic oligonucleotide
gtatccaccgggatacgataatccccgaatcgctgttcggaataacgcaacttcg

SEQ ID NO: 151864 - DNA, 54 bp, Artificial
  Synthetic oligonucleotide
gtatatgctagcggtacgaaaggaagtttccatgtccgttgggcggaggtcccc

SEQ ID NO: 151865 - DNA, 55 bp, Artificial
  Synthetic oligonucleotide
cgcgtctggcacaggaagtgctggcatgtggagtgaacggcgagacttatgattt

SEQ ID NO: 151866 - DNA, 55 bp, Artificial
  Synthetic oligonucleotide
agctgcccgaattatccggagttggacggacaggactacatcgtattaaactccg

SEQ ID NO: 151867 - DNA, 54 bp, Artificial
  Synthetic oligonucleotide
cgctaactaaccacagaaataccacgaacggagtaataaaaggtggctttgagc

SEQ ID NO: 151868 - DNA, 55 bp, Artificial
  Synthetic oligonucleotide
cgctcacgcgaacagtggaatccccaccatttacgggcatagcatcataatggtg

SEQ ID NO: 151869 - DNA, 55 bp, Artificial
  Synthetic oligonucleotide
cgctcggtgcagtgtgattgatgtgccggggatgccttgtgttgtccggtagagc

SEQ ID NO: 151870 - DNA, 55 bp, Artificial
  Synthetic oligonucleotide
cgcttgataagcgatacatccacgtccgtagatgccgtgccgaacaagtcctgtc

SEQ ID NO: 151871 - DNA, 54 bp, Artificial
  Synthetic oligonucleotide
cggaaagagttcgtttctctcgccctggaatactttgaacgcacaggtttcgac

SEQ ID NO: 151872 - DNA, 55 bp, Artificial
  Synthetic oligonucleotide
cggaacgtatgcgcttgtgcaattctacccaataataggggtcccatgtagagat

SEQ ID NO: 151873 - DNA, 55 bp, Artificial
  Synthetic oligonucleotide
cggacaaaccacaggcaccgaccttgcaggatgaacgccatgacaggtacctttg

SEQ ID NO: 151874 - DNA, 55 bp, Artificial
  Synthetic oligonucleotide
cggacctaatgtaatgtttccggttgtaggatcgaggtcaccgtaaatcgtgcgc

SEQ ID NO: 151875 - DNA, 55 bp, Artificial
  Synthetic oligonucleotide
cggaccttgggaggactcaccttacaaccccattgtgcatacgtatagcgcaacg

SEQ ID NO: 151876 - DNA, 55 bp, Artificial
  Synthetic oligonucleotide
cgaaacgtattatcgagctgaccagtggtgaagccggtatcgtgaaccatacgga

SEQ ID NO: 151877 - DNA, 60 bp, Artificial
  Synthetic oligonucleotide
gattgtcacaaaaatgttaacttatgggagcaacaagtattcatgtacaagcagtgaagc

SEQ ID NO: 151878 - DNA, 55 bp, Artificial
  Synthetic oligonucleotide
cgaacaggagttctaccgaggtgaaagccccaaagcccatgagatgtaccgtctg

SEQ ID NO: 151879 - DNA, 55 bp, Artificial
  Synthetic oligonucleotide
cgaatggtggactgggcagtcagtaccaaccagaaagtggtacagatcctaccga

SEQ ID NO: 151880 - DNA, 55 bp, Artificial
  Synthetic oligonucleotide
cgaattaatatactaactagttggtttacaagatagtatatttattcattataac

SEQ ID NO: 151881 - DNA, 55 bp, Artificial
  Synthetic oligonucleotide
cgaattcagcattgaagcggattacagtcacctgattatgatacgggcagaacgc

SEQ ID NO: 151882 - DNA, 55 bp, Artificial
  Synthetic oligonucleotide
cgacactgacctgtcggagtccgataatcccgtcaaacggggcacggagctcggt

SEQ ID NO: 151883 - DNA, 55 bp, Artificial
  Synthetic oligonucleotide
cgacatcctttatattccgagtattcatgacctggaagacagaggcaacgtcgta

SEQ ID NO: 151884 - DNA, 55 bp, Artificial
  Synthetic oligonucleotide
cgacttgattgatggtaagtggtacgtgaccgattgctataccggatggtatgga

SEQ ID NO: 151885 - DNA, 55 bp, Artificial
  Synthetic oligonucleotide
cgaggtgaggaaacgccaaatgtgctacaacagctaagtgaaaagcccgtagaag

SEQ ID NO: 151886 - DNA, 54 bp, Artificial
  Synthetic oligonucleotide
cgagttacttttatctcctccggttgccattcctttgaatccatagtttcttaa

SEQ ID NO: 151887 - DNA, 55 bp, Artificial
  Synthetic oligonucleotide
cgataaatgtgcacggtactaacttgcgtgccgttgagaaaataaacacccgtac

SEQ ID NO: 151888 - DNA, 60 bp, Artificial
  Synthetic oligonucleotide
ctactttgattaaaatacatgctattgtagaagatatagattttcgtatgcatggacttg

SEQ ID NO: 151889 - DNA, 54 bp, Artificial
  Synthetic oligonucleotide
cgataccccaaagcggagtcgtacgccattcgttgccacgggccaaaccgctta

SEQ ID NO: 151890 - DNA, 55 bp, Artificial
  Synthetic oligonucleotide
gtatgcagtttcgaacatgtcagatgtgacggaggaaatcgctcagaaacacggc

SEQ ID NO: 151891 - DNA, 55 bp, Artificial
  Synthetic oligonucleotide
cgatccgaatcctcaaaccgaaaacgatagatcgccgatttagcagcaggcgcaa

SEQ ID NO: 151892 - DNA, 55 bp, Artificial
  Synthetic oligonucleotide
cgatgtggatggagtcgttcaactcatgatataccgtgaacgggtatgagtgggc

SEQ ID NO: 151893 - DNA, 55 bp, Artificial
  Synthetic oligonucleotide
cgattcgcatcaatttctccggccacattttgtgcagtaagatgaccgtcaccgg

SEQ ID NO: 151894 - DNA, 55 bp, Artificial
  Synthetic oligonucleotide
cgattgtcattacaaaggggtgtaagattgttgccaacggtacggaggatgctcc

SEQ ID NO: 151895 - DNA, 55 bp, Artificial
  Synthetic oligonucleotide
cgcaagcgtcaaggctctaccgagctatcagacggattatgaagtttcggccctt

SEQ ID NO: 151896 - DNA, 55 bp, Artificial
  Synthetic oligonucleotide
cgcaatttgtcgccgcctacagatgcaatagatcccgttacatccgacttgcgtg

SEQ ID NO: 151897 - DNA, 55 bp, Artificial
  Synthetic oligonucleotide
gtatctcaacggggaatacggatagctgcgggagactgcatgtgtagcatcaacg

SEQ ID NO: 151898 - DNA, 55 bp, Artificial
  Synthetic oligonucleotide
ccactccttgaggcggatgaatccacccagatggatgagacacgcatcgctactg

SEQ ID NO: 151899 - DNA, 57 bp, Artificial
  Synthetic oligonucleotide
gccctggaatactttgaacgcacaggtttcgacctgaagagtaacgcacttgattac

SEQ ID NO: 151900 - DNA, 55 bp, Artificial
  Synthetic oligonucleotide
gtgcagccgaagctactacggagaaaggaatcttcgtccaagacacatcttccgg

SEQ ID NO: 151901 - DNA, 50 bp, Artificial
  Synthetic oligonucleotide
ccaggtacgggtgtagacaaagttgtattgttccgttttcggttgttccg

SEQ ID NO: 151902 - DNA, 55 bp, Artificial
  Synthetic oligonucleotide
cagtgcggtgctgaataccggtgtgtcaaaacttccacttacgcggatacggttg

SEQ ID NO: 151903 - DNA, 55 bp, Artificial
  Synthetic oligonucleotide
ccatatcgctgattatgctggcatataccaatcgttttctgtcatatgcccagtt

SEQ ID NO: 151904 - DNA, 55 bp, Artificial
  Synthetic oligonucleotide
ccatcaactttcaggtaatgaagagtaacggtcacagtttgtggctcggaagagg

SEQ ID NO: 151905 - DNA, 55 bp, Artificial
  Synthetic oligonucleotide
ccatccgggcgcaaggacgtttcgcataatactgaggagtgcgtgcttctggagt

SEQ ID NO: 151906 - DNA, 55 bp, Artificial
  Synthetic oligonucleotide
ccatgcctatcgcctgcctgcttaatggagaggacgacaagaattatgcgagagt

SEQ ID NO: 151907 - DNA, 55 bp, Artificial
  Synthetic oligonucleotide
ccattacactatcgaggaatttcacaacctgaccacgcaaatctgcttccgtgcg

SEQ ID NO: 151908 - DNA, 55 bp, Artificial
  Synthetic oligonucleotide
ccattccccggcaatcatgatactcgtcatattccccgaaagccggataataacc

SEQ ID NO: 151909 - DNA, 55 bp, Artificial
  Synthetic oligonucleotide
cagtgatgtgcgtagcgagttgtgtcgcctattcaagtgcgacttggacgcatct

SEQ ID NO: 151910 - DNA, 60 bp, Artificial
  Synthetic oligonucleotide
ctagaacattccaaacaaagctataattatgctatgatatactgcctgtacaatcctgac

SEQ ID NO: 151911 - DNA, 53 bp, Artificial
  Synthetic oligonucleotide
ccatttccagcgaagttcgtctggcacggagacccgccgttttgttccccttg

SEQ ID NO: 151912 - DNA, 55 bp, Artificial
  Synthetic oligonucleotide
gtgataaccacatgggaatgatgagtgtaactctgttggcgcatgaccgtgagga

SEQ ID NO: 151913 - DNA, 55 bp, Artificial
  Synthetic oligonucleotide
cccagcgattgggtaaactacagtaatagctgcgattgctagttttctagcattg

SEQ ID NO: 151914 - DNA, 55 bp, Artificial
  Synthetic oligonucleotide
cccataccgtttactaatatggagttatgggcacgggtattccggtaggcataca

SEQ ID NO: 151915 - DNA, 55 bp, Artificial
  Synthetic oligonucleotide
ccccacttcctggtctttgggcgaatacacccaagtatatgcataagccgtgtgg

SEQ ID NO: 151916 - DNA, 55 bp, Artificial
  Synthetic oligonucleotide
gtgaagtcgtcattaatttggcgggcgcttccattaataaacgttggacggaggc

SEQ ID NO: 151917 - DNA, 55 bp, Artificial
  Synthetic oligonucleotide
gtgaacggaagactatttcagggcgatgtgcttatatgtctgaacggctcggact

SEQ ID NO: 151918 - DNA, 55 bp, Artificial
  Synthetic oligonucleotide
cagtccgtctctcggatagcctttatccatgatatacagcagtgtcatccggtca

SEQ ID NO: 151919 - DNA, 55 bp, Artificial
  Synthetic oligonucleotide
cataagcggatgcgtgggccgcatataatgtacgagtcggattataatcgctcac

SEQ ID NO: 151920 - DNA, 55 bp, Artificial
  Synthetic oligonucleotide
cagttggacaactaaaggatgccatgtgtcttcgctcaattcgagccccgcttcc

SEQ ID NO: 151921 - DNA, 53 bp, Artificial
  Synthetic oligonucleotide
tacccttggcagtcgtaacgacaattaccccggacgcaccccgtgaaccatac

SEQ ID NO: 151922 - DNA, 55 bp, Artificial
  Synthetic oligonucleotide
catcttctggcggaacacatccaaggctgcgtcaatcggagaaacggcaggtgtc

SEQ ID NO: 151923 - DNA, 55 bp, Artificial
  Synthetic oligonucleotide
catgatgtccattaaaagacattccacgtaattgtttaggcttctatgctcgcgc

SEQ ID NO: 151924 - DNA, 55 bp, Artificial
  Synthetic oligonucleotide
catgcagaaaagcctgtgctttacaatcagcatcccgttgttcgaccggttttcc

SEQ ID NO: 151925 - DNA, 55 bp, Artificial
  Synthetic oligonucleotide
catgccataaacacgagaagcgtgaaacttgagttgtttatttcggcctccgccg

SEQ ID NO: 151926 - DNA, 55 bp, Artificial
  Synthetic oligonucleotide
catggtagttcggtttccattcgttctccagtccgttccatacggctgcaccctc

SEQ ID NO: 151927 - DNA, 55 bp, Artificial
  Synthetic oligonucleotide
cattagcatgtcaatcccaaatcttgcaaatcccgtccgaaaggcttaactttgc

SEQ ID NO: 151928 - DNA, 55 bp, Artificial
  Synthetic oligonucleotide
cattatgatatccttggctttgacggtagtgatcgaacctaccaggtcacgtcgc

SEQ ID NO: 151929 - DNA, 55 bp, Artificial
  Synthetic oligonucleotide
cattcagtgtaattcgttctgcggatatagatcccagtatatttgctcccagact

SEQ ID NO: 151930 - DNA, 55 bp, Artificial
  Synthetic oligonucleotide
cattcgcccaccgagggatacatggcaaactgcacaggtctatgcaccaccgccc

SEQ ID NO: 151931 - DNA, 55 bp, Artificial
  Synthetic oligonucleotide
gtgcctatctgtaccttataccatagggcggcagagatacgtggaatccatccgg

SEQ ID NO: 151932 - DNA, 59 bp, Artificial
  Synthetic oligonucleotide
actgtttttcaagaatacgcacattcttcctgtggtgcttcgataacaaacgcaccaca

SEQ ID NO: 151933 - DNA, 60 bp, Artificial
  Synthetic oligonucleotide
ctataatgtattgattcaacgagattgacggattgaataacatcatatatccatgctcgg

SEQ ID NO: 151934 - DNA, 55 bp, Artificial
  Synthetic oligonucleotide
ccaatctccaagcgtagtggtgatggcttgcacaatacccacaaccatggcgtgg

SEQ ID NO: 151935 - DNA, 55 bp, Artificial
  Synthetic oligonucleotide
ccacatacaattccatctgacggaaatatacactgtcagacaatacggtctgcgg

SEQ ID NO: 151936 - DNA, 53 bp, Artificial
  Synthetic oligonucleotide
gtgcgattacccaggggttttggtcttctcccgtacccgaaacaacgctgcgc

SEQ ID NO: 151937 - DNA, 55 bp, Artificial
  Synthetic oligonucleotide
ccaccataaaagctcgcagaaatcttactccttctctactttcagcacgcgcgcc

SEQ ID NO: 151938 - DNA, 55 bp, Artificial
  Synthetic oligonucleotide
ccacctattagtagcgggactaccggaaagatattgacgttcgggcataccatgc

SEQ ID NO: 151939 - DNA, 55 bp, Artificial
  Synthetic oligonucleotide
ccacggctgtcaatcttgtcgtgtatggagataatccgaaccactttcacacggc

SEQ ID NO: 151940 - DNA, 55 bp, Artificial
  Synthetic oligonucleotide
ccactataatttgccattgacaattgacggagcgccattgcctgcatgtcagcca

SEQ ID NO: 151941 - DNA, 55 bp, Artificial
  Synthetic oligonucleotide
ccgaacattccgctatcattctgataacatcatttatctacatggaagaagcgga

SEQ ID NO: 151942 - DNA, 55 bp, Artificial
  Synthetic oligonucleotide
ccgaacgcgggattaggcagccgacataatgtcagccattggggatgcggtgcca

SEQ ID NO: 151943 - DNA, 55 bp, Artificial
  Synthetic oligonucleotide
ccgaacgtttgatgttgacactgggtaccagagcagaatacttcggacgtgacaa

SEQ ID NO: 151944 - DNA, 60 bp, Artificial
  Synthetic oligonucleotide
caacgaatatctgcctatactcatagacgcaggagaaacacgctactgggtgcggaagat

SEQ ID NO: 151945 - DNA, 55 bp, Artificial
  Synthetic oligonucleotide
ccgaactgtttgattactaccatataggagaaggagtattttgtactgaatgcag

SEQ ID NO: 151946 - DNA, 55 bp, Artificial
  Synthetic oligonucleotide
cagcgtactatcctgactgcttgccttttggaatggcccataaatatccgtgagc

SEQ ID NO: 151947 - DNA, 53 bp, Artificial
  Synthetic oligonucleotide
ccgaagtccaccactaacgtctctcccggacttacggtcatctccgtacccga

SEQ ID NO: 151948 - DNA, 55 bp, Artificial
  Synthetic oligonucleotide
gtccgccgtcaaagtaaatctgggcgactttatatttggcctccgctccatatac

SEQ ID NO: 151949 - DNA, 55 bp, Artificial
  Synthetic oligonucleotide
ccgatttcaagcctataaacgaaaatcgcaacacagctctatttctcggcaatgc

SEQ ID NO: 151950 - DNA, 55 bp, Artificial
  Synthetic oligonucleotide
ccgcaatttatatcatactttgccggtatatactcgacgtaccgacagaggacag

SEQ ID NO: 151951 - DNA, 55 bp, Artificial
  Synthetic oligonucleotide
ccgcacagcagactgggtaaacctgcgtaacctttggacgctgcgcaactgtgtg

SEQ ID NO: 151952 - DNA, 55 bp, Artificial
  Synthetic oligonucleotide
gtcccgtttacggttattggtcatgtatgcaccgaagaatgtaatacaacatgct

SEQ ID NO: 151953 - DNA, 55 bp, Artificial
  Synthetic oligonucleotide
ccgcatggtagccgacagccgacaggttgcactaaaccataccgccggcctgtca

SEQ ID NO: 151954 - DNA, 55 bp, Artificial
  Synthetic oligonucleotide
ccgcctaccacagtctgcgtgacaaatatcccgtcgagctgttgagacttgccac

SEQ ID NO: 151955 - DNA, 55 bp, Artificial
  Synthetic oligonucleotide
agtattatagacaacaaatggacaacgcaaggacaaccagtaacctattaaggac

SEQ ID NO: 151956 - DNA, 55 bp, Artificial
  Synthetic oligonucleotide
ccgcgcagactgtttccatgggcaacgacaagcaggttgtccctatgcatcaatg

SEQ ID NO: 151957 - DNA, 55 bp, Artificial
  Synthetic oligonucleotide
ccgcgtgcggtaggcgaccttgaacggagtgccattaagaacgtcattcactgct

SEQ ID NO: 151958 - DNA, 55 bp, Artificial
  Synthetic oligonucleotide
ccgctgtcgtctgtagccgaatagatgatacccgtatagggtgttcccatgtaat

SEQ ID NO: 151959 - DNA, 55 bp, Artificial
  Synthetic oligonucleotide
ccggaagaggatgtgatagaggccagctctttatgcaaatttcgtaagctccgtc

SEQ ID NO: 151960 - DNA, 55 bp, Artificial
  Synthetic oligonucleotide
ccggaagcaccgatctcattcgtgagtgcctgttgggttagttgcaccccattgg

SEQ ID NO: 151961 - DNA, 55 bp, Artificial
  Synthetic oligonucleotide
ccccgccatgattgagtatgatttcccggctaagatacatacctactcccaccgc

SEQ ID NO: 151962 - DNA, 55 bp, Artificial
  Synthetic oligonucleotide
cccctaatgcaccaatagccgacttactctgccaagcaccagaagagtatgtctt

SEQ ID NO: 151963 - DNA, 55 bp, Artificial
  Synthetic oligonucleotide
gtgcttatggagtatgaaaccttgtttccgctctactggatatgcggggagtgga

SEQ ID NO: 151964 - DNA, 55 bp, Artificial
  Synthetic oligonucleotide
gtggacaactgttacaacgaatatgagccgactaaagccggacgcctgatttcgg

SEQ ID NO: 151965 - DNA, 53 bp, Artificial
  Synthetic oligonucleotide
gtcggtgcgcctatatcccgttcgggactgactccaggtacggtaactacccc

SEQ ID NO: 151966 - DNA, 56 bp, Artificial
  Synthetic oligonucleotide
agtcccagcgtataaaaacgggtatccacacgcgggtcgcgctgtttggcagctaa

SEQ ID NO: 151967 - DNA, 55 bp, Artificial
  Synthetic oligonucleotide
gtcgctgactggtaaccgggcttctgctaatcggtctcaacccctgaagcaactc

SEQ ID NO: 151968 - DNA, 55 bp, Artificial
  Synthetic oligonucleotide
cccgggcgaatggtcaagtaccgccatgctaacaggcagaggactgaacgacagc

SEQ ID NO: 151969 - DNA, 55 bp, Artificial
  Synthetic oligonucleotide
gtggggacccgtaatgcgacagactacgggaagcacatttgtgtcaacttcctgc

SEQ ID NO: 151970 - DNA, 55 bp, Artificial
  Synthetic oligonucleotide
caggaatccagcttattaaggcctccttgactgcatgtgatagacacgatgggtg

SEQ ID NO: 151971 - DNA, 55 bp, Artificial
  Synthetic oligonucleotide
cagcgtgcttggtggagttcttatccgggaatggatatgaatcatacggcccagt

SEQ ID NO: 151972 - DNA, 55 bp, Artificial
  Synthetic oligonucleotide
gtccgttttagaaacggaaggcagttagactccgttgctcctactcagttagcca

SEQ ID NO: 151973 - DNA, 54 bp, Artificial
  Synthetic oligonucleotide
cccgttcgaaccggtgatacagatcattttggcgttcgtgtaacgtccggcaaa

SEQ ID NO: 151974 - DNA, 54 bp, Artificial
  Synthetic oligonucleotide
gtccgtctactaacactaatggagatcccgttccgttataatcggtaccaccac

SEQ ID NO: 151975 - DNA, 55 bp, Artificial
  Synthetic oligonucleotide
ccctgtcgtacacggtcttttgcatctcatagatgctgttcccgatccggacgga

SEQ ID NO: 151976 - DNA, 55 bp, Artificial
  Synthetic oligonucleotide
ccctgtggaactcataggcatattccttcccgtcaatggtaaaactgaccgtcgc

SEQ ID NO: 151977 - DNA, 60 bp, Artificial
  Synthetic oligonucleotide
ccggaagctgaacaagcaggacatggcggaaatgcagaccatacttgcggaatgtctcgg

SEQ ID NO: 151978 - DNA, 55 bp, Artificial
  Synthetic oligonucleotide
ccctgtgtatcaattaaccgacagcaacggtaataagatagattccattgttgtc

SEQ ID NO: 151979 - DNA, 55 bp, Artificial
  Synthetic oligonucleotide
cccttcgatctggagggcgttcccttgacaacaacaagatagaggtgctatcggg

SEQ ID NO: 151980 - DNA, 54 bp, Artificial
  Synthetic oligonucleotide
ttttcgtggagcttatcgtttgtattgtgctgtgaataagcttttcccttcgct

SEQ ID NO: 151981 - DNA, 52 bp, Artificial
  Synthetic oligonucleotide
ttttcgggaaacgcggaggagtcactttctccggaggagaacctacgtttca

SEQ ID NO: 151982 - DNA, 54 bp, Artificial
  Synthetic oligonucleotide
ttgtgcagccactggctattggccggtgagatatggatttctcccaagggcagt

SEQ ID NO: 151983 - DNA, 54 bp, Artificial
  Synthetic oligonucleotide
ggtcattttcaggtatcctttgtgcgcaagccagctgtttatacttatatgttg

SEQ ID NO: 151984 - DNA, 54 bp, Artificial
  Synthetic oligonucleotide
ttcttcgggggtggcgcaggtatcttgcggtgccggatagggcttgtataggta

SEQ ID NO: 151985 - DNA, 54 bp, Artificial
  Synthetic oligonucleotide
ttagcggatttcatctgtcggcatacagcgtatgcaagcccgcgcattcgtcta

SEQ ID NO: 151986 - DNA, 54 bp, Artificial
  Synthetic oligonucleotide
tgttatggtcgaatattgtgtttactggttagagaacggcgagcctatgcacga

SEQ ID NO: 151987 - DNA, 54 bp, Artificial
  Synthetic oligonucleotide
tgtataaacgtttcaggtcatatcctaccgttcgtcctacttcatgtccgttaa

SEQ ID NO: 151988 - DNA, 55 bp, Artificial
  Synthetic oligonucleotide
gcaaacggcatattacggaaagagttcgtttctctcgccctggaatactttgaac

SEQ ID NO: 151989 - DNA, 54 bp, Artificial
  Synthetic oligonucleotide
tggtccagatgagcggaaatgattacatattcattgcacagtatagggtcactg

SEQ ID NO: 151990 - DNA, 54 bp, Artificial
  Synthetic oligonucleotide
tgaacgcacaggtttcgacctgaagagtaacgcacttgattactcccccttgga

SEQ ID NO: 151991 - DNA, 54 bp, Artificial
  Synthetic oligonucleotide
tgaaagcgcggggcggataagaagtatcgctgtttgcccttgacgtggcaggtc

SEQ ID NO: 151992 - DNA, 54 bp, Artificial
  Synthetic oligonucleotide
gttttcgataaaagatgtgtagcgtgccatgggcagaccggttctgcatcgggt

SEQ ID NO: 151993 - DNA, 54 bp, Artificial
  Synthetic oligonucleotide
gttttctgtgataaactcttttattcgccagcattccgaaaaggggtttgctat

SEQ ID NO: 151994 - DNA, 54 bp, Artificial
  Synthetic oligonucleotide
tcgctggcggttatcagtcccgactccacgctctgcctggaggtctatgtcacg

SEQ ID NO: 151995 - DNA, 52 bp, Artificial
  Synthetic oligonucleotide
taacgtcctttcgtagcaggtactttcacttcctgccaaccgttacctggtt

SEQ ID NO: 151996 - DNA, 54 bp, Artificial
  Synthetic oligonucleotide
tcgcagcccctcgtattagctgagtgaacactatctgagtgatggcatagtaag

SEQ ID NO: 151997 - DNA, 54 bp, Artificial
  Synthetic oligonucleotide
tccggcctacgattctccgtcactccctatcacttgggaccgtgtggaatacgt

SEQ ID NO: 151998 - DNA, 54 bp, Artificial
  Synthetic oligonucleotide
tccacgcttacaaaccgtgttcatacattgattccctccctggaaggtttgacg

SEQ ID NO: 151999 - DNA, 60 bp, Artificial
  Synthetic oligonucleotide
cgcttaccttgcaaaattgtgtaaccgatgatgcaagggtattgcgagatttcatgcgta

SEQ ID NO: 152000 - DNA, 54 bp, Artificial
  Synthetic oligonucleotide
tagacgtataagccgctttccagcctaacgtatttactttggtcaagtcgtaac

SEQ ID NO: 152001 - DNA, 54 bp, Artificial
  Synthetic oligonucleotide
gcaccaatgttacagcccggactccctctgttattcctctgtcaaagtcgtttt

SEQ ID NO: 152002 - DNA, 54 bp, Artificial
  Synthetic oligonucleotide
gcaaaggtcgttacgatcacccagtcgcttcattcctgcactctcgcgacaagt

SEQ ID NO: 152003 - DNA, 54 bp, Artificial
  Synthetic oligonucleotide
gattgtaatcaaagaacaatctttatgtatcttccttggtcaacaaacctgaca

SEQ ID NO: 152004 - DNA, 54 bp, Artificial
  Synthetic oligonucleotide
agcggtttggcccgtggcaacgaatggcgtacgactccgctttggggtatcgga

SEQ ID NO: 152005 - DNA, 54 bp, Artificial
  Synthetic oligonucleotide
ccgtatcacccactatattgcgggcaacatcccacttatacttccgagcggtca

SEQ ID NO: 152006 - DNA, 54 bp, Artificial
  Synthetic oligonucleotide
gaccgtatgtaggtctgccggaagccaatgcgatacgtattcccatttgttgta

SEQ ID NO: 152007 - DNA, 54 bp, Artificial
  Synthetic oligonucleotide
acttcgcccattatctttctcgacggtaggtgtagaatcagaagacgaccttgt

SEQ ID NO: 152008 - DNA, 54 bp, Artificial
  Synthetic oligonucleotide
atgctgggaatgtcctactaccggacgggtgtctactcgcaagttccggttacc

SEQ ID NO: 152009 - DNA, 54 bp, Artificial
  Synthetic oligonucleotide
gaacttactgtcactttctcacaaccggtaaagcacgaccgtacgatgattgta

SEQ ID NO: 152010 - DNA, 53 bp, Artificial
  Synthetic oligonucleotide
aacaaaaccgcacaacagaacgtgtccggaacaccacaaaaaactcatcggtc

SEQ ID NO: 152011 - DNA, 53 bp, Artificial
  Synthetic oligonucleotide
agttcccttaccaatgaaagttacattatacaacccgtccgccaattcaatac

SEQ ID NO: 152012 - DNA, 54 bp, Artificial
  Synthetic oligonucleotide
ctgccgaggcccgggcagaaaggacccgcaaccatcatactgacacagcccaga

SEQ ID NO: 152013 - DNA, 54 bp, Artificial
  Synthetic oligonucleotide
ctgatattattgtttgcccctttcggtatgataaattgacgatggatagtactg

SEQ ID NO: 152014 - DNA, 54 bp, Artificial
  Synthetic oligonucleotide
accggtatccggagtctatgcgcggaggtatatccccggcggcacaccccatac

SEQ ID NO: 152015 - DNA, 54 bp, Artificial
  Synthetic oligonucleotide
cgtcacactccctcaggtggtagaagagtatgctcccgaaagcttctattggcc

SEQ ID NO: 152016 - DNA, 54 bp, Artificial
  Synthetic oligonucleotide
aagcatgcagatacaatgctcacgggatgacagataccaataaccctgccgttc

SEQ ID NO: 152017 - DNA, 54 bp, Artificial
  Synthetic oligonucleotide
accagacgatagtaaaacagagcaagtgaatcaatacgtggcggaaaacatctt

SEQ ID NO: 152018 - DNA, 54 bp, Artificial
  Synthetic oligonucleotide
gctaccggagtgtcagagtcttcgctcgcagcatccattagattgacacgagta

SEQ ID NO: 152019 - DNA, 54 bp, Artificial
  Synthetic oligonucleotide
acaccgttatgtccatcgtacaagaccatgacggcatgctatggttcgccactt

SEQ ID NO: 152020 - DNA, 54 bp, Artificial
  Synthetic oligonucleotide
aatacggttctccaggtggttcacgtattcattatagaacttgtctccaattct

SEQ ID NO: 152021 - DNA, 56 bp, Artificial
  Synthetic oligonucleotide
ggaagtttgacaaccaatccgggtgctgacgatctggttactaaagggcaggccga

SEQ ID NO: 152022 - DNA, 54 bp, Artificial
  Synthetic oligonucleotide
aatacgcagatggtatccgttccgtatgcgctgtatgcggagaaagcggggaat

SEQ ID NO: 152023 - DNA, 54 bp, Artificial
  Synthetic oligonucleotide
aacaggcggaggggagtatcatgttggatgagttaacactggaccgttcgaaga

SEQ ID NO: 152024 - DNA, 54 bp, Artificial
  Synthetic oligonucleotide
ccctgcgtgaaggcatgcagatcatgctccagtacgaacgtgacacgagaggga

SEQ ID NO: 152025 - DNA, 54 bp, Artificial
  Synthetic oligonucleotide
cccgggcagaaaggacccgcaaccatcatactgacacagcccagaaggttcggt

SEQ ID NO: 152026 - DNA, 54 bp, Artificial
  Synthetic oligonucleotide
attaagtgggcggtgacatcctcaacgcaagaaccgccgcagaagtaaacgcat

SEQ ID NO: 152027 - DNA, 54 bp, Artificial
  Synthetic oligonucleotide
aaccgccaactgatgcatcgcagacgtttgcaacgaccaccccggaaaattatc

SEQ ID NO: 152028 - DNA, 54 bp, Artificial
  Synthetic oligonucleotide
gccgatacccggtccgtacattatgccctgccgtggaaaacgtccggtcatacg

SEQ ID NO: 152029 - DNA, 53 bp, Artificial
  Synthetic oligonucleotide
ttccgaaaagcttggcttggaacgcgaggagtatactacccagatatccaatt

SEQ ID NO: 152030 - DNA, 53 bp, Artificial
  Synthetic oligonucleotide
cacattagccgagaaagaactgttgggactagccttggcatcctgtctgtgac

SEQ ID NO: 152031 - DNA, 53 bp, Artificial
  Synthetic oligonucleotide
cgataggtagcgataaataacgtctttgttgccaatatgcacgacgttcttta

SEQ ID NO: 152032 - DNA, 60 bp, Artificial
  Synthetic oligonucleotide
gaaagctgtcgttcagtcctctgcctgttagcatggcggtacttgaccattcgcccgggc

SEQ ID NO: 152033 - DNA, 53 bp, Artificial
  Synthetic oligonucleotide
tcaccgtaaccgaccgcaaccactgtaacttcatccaacgtctgtgcgtcctc

SEQ ID NO: 152034 - DNA, 53 bp, Artificial
  Synthetic oligonucleotide
tccaagattgctaaagtccaagcattacgtgaagcttttccagcccaacttgg

SEQ ID NO: 152035 - DNA, 53 bp, Artificial
  Synthetic oligonucleotide
tatgagcacaccctctattgaatcatctacacgagaggaacgtttggattacg

SEQ ID NO: 152036 - DNA, 53 bp, Artificial
  Synthetic oligonucleotide
cggtattgtcacgtacaatgatttccggattcagctttatcggtggtcaggga

SEQ ID NO: 152037 - DNA, 53 bp, Artificial
  Synthetic oligonucleotide
cggcaggttgctcggaactgccacatgccattaacaggcagagggccgataag

SEQ ID NO: 152038 - DNA, 53 bp, Artificial
  Synthetic oligonucleotide
gtttgcagtctatctggcgtctgcgccctctactaaatccattccgctacggc

SEQ ID NO: 152039 - DNA, 53 bp, Artificial
  Synthetic oligonucleotide
tctagacgaaatggcttcatggacaatcggatttcaagccgccaacctgggta

SEQ ID NO: 152040 - DNA, 53 bp, Artificial
  Synthetic oligonucleotide
cggcacattaagtatccgaacacaaaatcgccaacggcatttcccggtgtttt

SEQ ID NO: 152041 - DNA, 53 bp, Artificial
  Synthetic oligonucleotide
cccggcagtccctctcgaatactgcctccggtctgaagaccagtatggagaat

SEQ ID NO: 152042 - DNA, 53 bp, Artificial
  Synthetic oligonucleotide
tactgccgtgtggaaatgtcctgttcgggtgaataacttctttagggaaatca

SEQ ID NO: 152043 - DNA, 59 bp, Artificial
  Synthetic oligonucleotide
gcgggctaatgcttataccgtgcttcgacaattaaagtcagcaaagcgtaatgggctac

SEQ ID NO: 152044 - DNA, 56 bp, Artificial
  Synthetic oligonucleotide
aatgagaataagaaaacgagggcgttgtcttatgtaacaggttcggattggcagga

SEQ ID NO: 152045 - DNA, 53 bp, Artificial
  Synthetic oligonucleotide
tgtttccggcatgtggtgagctactggagcctttgcggatggctcacgggagg

SEQ ID NO: 152046 - DNA, 53 bp, Artificial
  Synthetic oligonucleotide
cgcatacccgaaggatgtcaggcttccgataagaatgagtgaaccaagcaaaa

SEQ ID NO: 152047 - DNA, 53 bp, Artificial
  Synthetic oligonucleotide
agtgccggcatccacggcgtaaccgcagtatgccacatttatcggattcggtt

SEQ ID NO: 152048 - DNA, 53 bp, Artificial
  Synthetic oligonucleotide
agggcgtatttccaggtagtgacttccgcttgcgtagtgaccttcctggtact

SEQ ID NO: 152049 - DNA, 53 bp, Artificial
  Synthetic oligonucleotide
gaatattggggcacgattccttaccgtgaagcatgggaaaggcagacggcttt

SEQ ID NO: 152050 - DNA, 53 bp, Artificial
  Synthetic oligonucleotide
tctcctccgccacaggttccgtacgccacaatgccatgtcatgcaacttccgt

SEQ ID NO: 152051 - DNA, 53 bp, Artificial
  Synthetic oligonucleotide
ttggtaatactctgtctggttcagctcgtgcaccggaaactttagattggctg

SEQ ID NO: 152052 - DNA, 53 bp, Artificial
  Synthetic oligonucleotide
gaaacaaaacagggtctgccgatgtctatgaacgcctctgcgagcggtgcaac

SEQ ID NO: 152053 - DNA, 53 bp, Artificial
  Synthetic oligonucleotide
gccacgtcgccaggcttcaattgcgcataacatccggtcactaccacaaaagc

SEQ ID NO: 152054 - DNA, 53 bp, Artificial
  Synthetic oligonucleotide
agtttcccatgcttcgagtgctaaatcgtactgacgtttatcgtagtacaaat

SEQ ID NO: 152055 - DNA, 60 bp, Artificial
  Synthetic oligonucleotide
ttcgattggacgcagccgaatgggaaaagtgtgcgtttatcgcgtgatgacatggcagaa

SEQ ID NO: 152056 - DNA, 53 bp, Artificial
  Synthetic oligonucleotide
ttcgtcagcagatagagtgacgagatgatggtaaggacaagcctctgtccgta

SEQ ID NO: 152057 - DNA, 53 bp, Artificial
  Synthetic oligonucleotide
aacacctttcatcagcaatgcaaataccgcgtcggcagtagctaccggagagt

SEQ ID NO: 152058 - DNA, 52 bp, Artificial
  Synthetic oligonucleotide
caaacgacctatttatgaagtggcaagcagccatctggcaagacgtacgttt

SEQ ID NO: 152059 - DNA, 52 bp, Artificial
  Synthetic oligonucleotide
tccggatctcccggaaatcagctgtgcacggttgtgtctggtagcggtcggt

SEQ ID NO: 152060 - DNA, 52 bp, Artificial
  Synthetic oligonucleotide
aagtgattcgtcacagttcgacgctttcacccgcggacagattgaattgttc

SEQ ID NO: 152061 - DNA, 52 bp, Artificial
  Synthetic oligonucleotide
ggggacgacgtattgactgggaaacaatcggccgaagcgcaccactatggag

SEQ ID NO: 152062 - DNA, 52 bp, Artificial
  Synthetic oligonucleotide
acctgttgaggtccgccgtcggacagccgttcaataatgttgtttgtcgtaa

SEQ ID NO: 152063 - DNA, 52 bp, Artificial
  Synthetic oligonucleotide
gcaggatttagaaaaagttagtcctttgagtattgagaaatataagaataac

SEQ ID NO: 152064 - DNA, 52 bp, Artificial
  Synthetic oligonucleotide
atgttttggtccaacggtcgggagtcacgtctttctcggtaatgcccagacc

SEQ ID NO: 152065 - DNA, 50 bp, Artificial
  Synthetic oligonucleotide
gtgagtttcccgaaaggggaaagaaccgccttgatacctccgaacccgga

SEQ ID NO: 152066 - DNA, 56 bp, Artificial
  Synthetic oligonucleotide
ttgtgttcgttcttggcggggcggataccaaacgaaagccacatcaaaatttcata

SEQ ID NO: 152067 - DNA, 52 bp, Artificial
  Synthetic oligonucleotide
gcgagcgtcgtgacctgacctactatgaagtatcggagattaccctaactgc

SEQ ID NO: 152068 - DNA, 52 bp, Artificial
  Synthetic oligonucleotide
tcacgttgaattccgcacagataccgcctgccttttcaaatgtggccgccgt

SEQ ID NO: 152069 - DNA, 52 bp, Artificial
  Synthetic oligonucleotide
tgtgggcatactgcacccgaacaggcgtgctatgccgcctatcccgtacacg

SEQ ID NO: 152070 - DNA, 52 bp, Artificial
  Synthetic oligonucleotide
tcaagtttcacgcttctcgtgtttatggcatgcaccaactgtctggtcacgc

SEQ ID NO: 152071 - DNA, 52 bp, Artificial
  Synthetic oligonucleotide
ttgtttcgcacgaccggtggctttcttgtgaacgccgcctttatatccttcg

SEQ ID NO: 152072 - DNA, 52 bp, Artificial
  Synthetic oligonucleotide
agtcttgttccctcgtaagataaacggtcgttttgcgatgttgagccgcccg

SEQ ID NO: 152073 - DNA, 52 bp, Artificial
  Synthetic oligonucleotide
agtatcccatagcatagagtgaacctatgatagctcccatagaagtacccgt

SEQ ID NO: 152074 - DNA, 52 bp, Artificial
  Synthetic oligonucleotide
caggctaaacacaacaagaaagccaatatgtacgaagtgttggtatcaaaag

SEQ ID NO: 152075 - DNA, 52 bp, Artificial
  Synthetic oligonucleotide
gctacgccttcgttcttccagtcagtaagattccgagaagaatagcacatta

SEQ ID NO: 152076 - DNA, 52 bp, Artificial
  Synthetic oligonucleotide
tgcagatcgagccgtagatactcaataccttcttacaaaggaagatcgaaga

SEQ ID NO: 152077 - DNA, 53 bp, Artificial
  Synthetic oligonucleotide
aagagaaatggacttttgattcgtaagataaccattaagtcctcgcgtccgtt

SEQ ID NO: 152078 - DNA, 52 bp, Artificial
  Synthetic oligonucleotide
acctgatcggacagttaaccccctggatgctccagaaccttacccccgccgg

SEQ ID NO: 152079 - DNA, 52 bp, Artificial
  Synthetic oligonucleotide
tggacggaccgaaggagacggcatggatgagtgcaacaaccggctatgctcg

SEQ ID NO: 152080 - DNA, 52 bp, Artificial
  Synthetic oligonucleotide
atccaataattcctgtgcggtaaggacggagccatcttccggatagcgtact

SEQ ID NO: 152081 - DNA, 52 bp, Artificial
  Synthetic oligonucleotide
tccccagcgttttaaatgtctgggcaaaatgttgctaatttgtccctattaa

SEQ ID NO: 152082 - DNA, 52 bp, Artificial
  Synthetic oligonucleotide
ggttgtcagaagagcataaacttcgcaaatcggctgaacgtaagattaaatc

SEQ ID NO: 152083 - DNA, 52 bp, Artificial
  Synthetic oligonucleotide
ctatcggaagctgcccgaaattctgtgggtcataatgaacctgttgctgccc

SEQ ID NO: 152084 - DNA, 52 bp, Artificial
  Synthetic oligonucleotide
aggacacgcatgtgccatcgccgaatatatggccaaacgtgaggcggaggca

SEQ ID NO: 152085 - DNA, 52 bp, Artificial
  Synthetic oligonucleotide
ttcccgcatatcactccgtcgtttgtcgatgtcggacgatgtacgtgtcgtg

SEQ ID NO: 152086 - DNA, 52 bp, Artificial
  Synthetic oligonucleotide
gtaggccgggaaaccatgcggggtgcaggtcattgtgatcgtatgtacgatg

SEQ ID NO: 152087 - DNA, 52 bp, Artificial
  Synthetic oligonucleotide
atgattatcaaggtgtaacatgctatctctgtgcgagtcaagtggagggaac

SEQ ID NO: 152088 - DNA, 57 bp, Artificial
  Synthetic oligonucleotide
aacagtaatcaagaaacacttatacaacgaatggatggatatgaccccattatcttt

SEQ ID NO: 152089 - DNA, 52 bp, Artificial
  Synthetic oligonucleotide
cttacccgggcagctatttactgccatctcttgggatccgcagatggaagca

SEQ ID NO: 152090 - DNA, 52 bp, Artificial
  Synthetic oligonucleotide
tattgtcaccggtatgcagggctgctccatattctacgaatgaggacaactg

SEQ ID NO: 152091 - DNA, 52 bp, Artificial
  Synthetic oligonucleotide
atgggctactgaaatctttgacaccgggtacatttcgatatattaataattg

SEQ ID NO: 152092 - DNA, 52 bp, Artificial
  Synthetic oligonucleotide
tacagcctatttccgtggtacaactcagtcccgaagagggaggtatcgtgca

SEQ ID NO: 152093 - DNA, 52 bp, Artificial
  Synthetic oligonucleotide
cctttgcacgtcggtgcggattcccggtagttgccaaagtcgttggtcctgt

SEQ ID NO: 152094 - DNA, 52 bp, Artificial
  Synthetic oligonucleotide
ccgtcaaccaattacataccgatgggcaagtgtcttgaacgggtttgtcccc

SEQ ID NO: 152095 - DNA, 52 bp, Artificial
  Synthetic oligonucleotide
ccggtgtgcggaccggttcatcagcatgtatggttacaaggccacgcacagg

SEQ ID NO: 152096 - DNA, 52 bp, Artificial
  Synthetic oligonucleotide
gtcaggccgactcaatcgtcaagagcagctatgtaacttacatgaagaacga

SEQ ID NO: 152097 - DNA, 52 bp, Artificial
  Synthetic oligonucleotide
tagccgcattgtcttgcgactctttcgatgggtagcggaaacgacgggggat

SEQ ID NO: 152098 - DNA, 52 bp, Artificial
  Synthetic oligonucleotide
gatggacggatgggtgaacccgaaacagtatgagaacgaaacaatggtagcg

SEQ ID NO: 152099 - DNA, 60 bp, Artificial
  Synthetic oligonucleotide
aatacggtcaatgacgctataaaacggatcgcagccctgaaatcaacagccaagaagtga

SEQ ID NO: 152100 - DNA, 51 bp, Artificial
  Synthetic oligonucleotide
attgtatttgacctcagaattgaatgttgcgttctctaattcggtttcaat

SEQ ID NO: 152101 - DNA, 51 bp, Artificial
  Synthetic oligonucleotide
tgatgagcgttacaggcaattcatttccacacgcgaccgctcgttccatac

SEQ ID NO: 152102 - DNA, 51 bp, Artificial
  Synthetic oligonucleotide
atgtggcgtgaaacgtcacatcgcacggggtcgaggggacacccctcgcac

SEQ ID NO: 152103 - DNA, 51 bp, Artificial
  Synthetic oligonucleotide
caaatcgggtggtgggaagtagatttaacggcaggatgttatttatgttcc

SEQ ID NO: 152104 - DNA, 51 bp, Artificial
  Synthetic oligonucleotide
gttgagttatacgggaacgatgccccacaagcgattttaccacattccccg

SEQ ID NO: 152105 - DNA, 51 bp, Artificial
  Synthetic oligonucleotide
acgctttatattccaataatcgtcggatagtagtaaacagcctccggctgg

SEQ ID NO: 152106 - DNA, 51 bp, Artificial
  Synthetic oligonucleotide
attaaggatccgacactggtaccggctatgatatccggcttcagcccgcat

SEQ ID NO: 152107 - DNA, 51 bp, Artificial
  Synthetic oligonucleotide
atcagtcataccccaccaagtacgggcagcacggacgttattatgacgata

SEQ ID NO: 152108 - DNA, 51 bp, Artificial
  Synthetic oligonucleotide
gttgacataccggacacggcagcatcccctgtttccccacatccacacgtc

SEQ ID NO: 152109 - DNA, 51 bp, Artificial
  Synthetic oligonucleotide
aaacgggacttgcgctccaagcatggcaatccgaacggctaggctccggat

SEQ ID NO: 152110 - DNA, 58 bp, Artificial
  Synthetic oligonucleotide
tgttccggtgcccggtcataccctgtgcgcttgtcaaatgaggtttcacactttcgga

SEQ ID NO: 152111 - DNA, 51 bp, Artificial
  Synthetic oligonucleotide
gctagtacatgcggtaaatctgaatatttgccattctcgtatctagaccaa

SEQ ID NO: 152112 - DNA, 51 bp, Artificial
  Synthetic oligonucleotide
aaatcaagatcgctatgcgtaaagtaataggtatcggagaaaccatactgg

SEQ ID NO: 152113 - DNA, 51 bp, Artificial
  Synthetic oligonucleotide
tttcgggacgtactattactttaagaattgattatgcagatgtgttacatg

SEQ ID NO: 152114 - DNA, 51 bp, Artificial
  Synthetic oligonucleotide
gatgcagccaagtccttgggtatcgatccacagtctattgctatgaaaggc

SEQ ID NO: 152115 - DNA, 51 bp, Artificial
  Synthetic oligonucleotide
agctatctaagcagccttaccaacagtctaagcacgctcgccaacgaaaaa

SEQ ID NO: 152116 - DNA, 51 bp, Artificial
  Synthetic oligonucleotide
gactcttccactttatcgaaacggctgtaagatcctgtgagattcagattc

SEQ ID NO: 152117 - DNA, 51 bp, Artificial
  Synthetic oligonucleotide
actttatccgtaagttcctcacaccttataaatgcgaaggcagacaggggt

SEQ ID NO: 152118 - DNA, 51 bp, Artificial
  Synthetic oligonucleotide
tataccgtcaaatacatgtgggtcttccaactctccacacgaaagaagcat

SEQ ID NO: 152119 - DNA, 51 bp, Artificial
  Synthetic oligonucleotide
aagagaccgccagctctaccggaatgcgtagcacggcacccggggccttca

SEQ ID NO: 152120 - DNA, 51 bp, Artificial
  Synthetic oligonucleotide
ggtttgtaaaagcgcgtacgcatgatgacgggttacagcgttatgataacg

SEQ ID NO: 152121 - DNA, 52 bp, Artificial
  Synthetic oligonucleotide
ttcctttaggttctttcccgaacgagcctcttttatagctgcttgggtttct

SEQ ID NO: 152122 - DNA, 51 bp, Artificial
  Synthetic oligonucleotide
ctaccgcatccagtcccaatacccagtcgggacgaccgggcaacgtacctg

SEQ ID NO: 152123 - DNA, 51 bp, Artificial
  Synthetic oligonucleotide
cgttgcgtacggtttgtcaagctcagaattatgcctatactttggcggata

SEQ ID NO: 152124 - DNA, 51 bp, Artificial
  Synthetic oligonucleotide
cgtctatttgtacctttcgggctgttgcgtcctctatgcgcttcgtataga

SEQ ID NO: 152125 - DNA, 51 bp, Artificial
  Synthetic oligonucleotide
cggttccccacaaggcgtcggaacggcaagtcgtggcagtcaggttgccta

SEQ ID NO: 152126 - DNA, 51 bp, Artificial
  Synthetic oligonucleotide
gtaggcgttgaaccagtgccatgtccgagtttgatacatggtgcttgcgga

SEQ ID NO: 152127 - DNA, 51 bp, Artificial
  Synthetic oligonucleotide
acaggcaccgaaggagcacgccttctattcacgaattgctatattgagggg

SEQ ID NO: 152128 - DNA, 51 bp, Artificial
  Synthetic oligonucleotide
cagtcaggcagcgagtagtggtaacggaagtctgatcggcgacttgctttg

SEQ ID NO: 152129 - DNA, 51 bp, Artificial
  Synthetic oligonucleotide
ccaatagtttggaaggaatgtccatctctgccttcacagctgtatgtacat

SEQ ID NO: 152130 - DNA, 51 bp, Artificial
  Synthetic oligonucleotide
ccccagtcgagccatttcaccacctcgggtttcgtatcacatacaaactga

SEQ ID NO: 152131 - DNA, 51 bp, Artificial
  Synthetic oligonucleotide
aagggctgcataccaagaaagacgggcgcggggtgtatatctacgcccact

SEQ ID NO: 152132 - DNA, 59 bp, Artificial
  Synthetic oligonucleotide
aacatgaacgtggaaagcgtatcattctgcctgaacgaccttgtaaccttgctactcta

SEQ ID NO: 152133 - DNA, 51 bp, Artificial
  Synthetic oligonucleotide
ccgaagatatattgaaccactgcataattttcaccactgtcagacttatgc

SEQ ID NO: 152134 - DNA, 51 bp, Artificial
  Synthetic oligonucleotide
acgtatatggcgagtgtgggtttgcatacaatgcagaaacttctgaggatg

SEQ ID NO: 152135 - DNA, 51 bp, Artificial
  Synthetic oligonucleotide
gtccgaagaaacctgtatgcggctggcgtcccaaagctaccagttcataca

SEQ ID NO: 152136 - DNA, 51 bp, Artificial
  Synthetic oligonucleotide
acctttgagtacacaccgctcaaaacagggcgaaagataacggccataaag

SEQ ID NO: 152137 - DNA, 51 bp, Artificial
  Synthetic oligonucleotide
acgtttgttcttctggtcggctatgggttatatggcggtcggactgttatt

SEQ ID NO: 152138 - DNA, 51 bp, Artificial
  Synthetic oligonucleotide
cctgatcaccgtccaccgtgatacgtaccattattactacatgaccgtttt

SEQ ID NO: 152139 - DNA, 51 bp, Artificial
  Synthetic oligonucleotide
cgcggggcagagggtgcaggatacgcagattggggcgggtatgctccagca

SEQ ID NO: 152140 - DNA, 51 bp, Artificial
  Synthetic oligonucleotide
agatacatccggcccgagagtctgtgtagcacgttcccgtattttggtgag

SEQ ID NO: 152141 - DNA, 51 bp, Artificial
  Synthetic oligonucleotide
gtataatgtcttcgggacactctgccagcagtggtacatgcagcggaaact

SEQ ID NO: 152142 - DNA, 51 bp, Artificial
  Synthetic oligonucleotide
gtataaccatcttatcgacggggcacgttattggacgataggcaagcttct

SEQ ID NO: 152143 - DNA, 58 bp, Artificial
  Synthetic oligonucleotide
cgcagaacgaatagaggaacgcttcggaatacacacgtttcagatatacacccacaag

SEQ ID NO: 152144 - DNA, 50 bp, Artificial
  Synthetic oligonucleotide
acgccacactcagcatacccaatgcgtggctggcgtcacggaagatggaa

SEQ ID NO: 152145 - DNA, 50 bp, Artificial
  Synthetic oligonucleotide
tctgcgaggtagcgcaatacgatttgccccgccgagtcacccatcaaccg

SEQ ID NO: 152146 - DNA, 50 bp, Artificial
  Synthetic oligonucleotide
acgcacgggagtgaacggcattgccctatcgggaacgattctccgggcaa

SEQ ID NO: 152147 - DNA, 50 bp, Artificial
  Synthetic oligonucleotide
acgccgcgtgcctctatccaagacccgaacgacaacgaccgtatcagcga

SEQ ID NO: 152148 - DNA, 50 bp, Artificial
  Synthetic oligonucleotide
acggacaaaaccctttccgcgacggaaccgcacgcttcatccctacccac

SEQ ID NO: 152149 - DNA, 50 bp, Artificial
  Synthetic oligonucleotide
acggccgttcccctgtcaattccggcttttggggcggaagctttgaggtc

SEQ ID NO: 152150 - DNA, 50 bp, Artificial
  Synthetic oligonucleotide
tcgtttttcccaagcaaggtgacgggtcaggacaggccacatacggcggg

SEQ ID NO: 152151 - DNA, 50 bp, Artificial
  Synthetic oligonucleotide
acggggcatcgttgaaccatgtggcggacattgttcgtccgaaggggtgg

SEQ ID NO: 152152 - DNA, 50 bp, Artificial
  Synthetic oligonucleotide
acgtactgcgtatgccgcgacgggacgaatgggatgtcaagcgcagcatt

SEQ ID NO: 152153 - DNA, 50 bp, Artificial
  Synthetic oligonucleotide
tcggctacggaaccttggcacgcaaggagctgacatcagccgtgggttat

SEQ ID NO: 152154 - DNA, 58 bp, Artificial
  Synthetic oligonucleotide
gcggactgccgttatcttgttccgcagggtaaagagccgcacagcagactgggtaaac

SEQ ID NO: 152155 - DNA, 57 bp, Artificial
  Synthetic oligonucleotide
ggagttgaccgcatcgtaacaatcttagacccgttgacgcacaacgaaatcaaacga

SEQ ID NO: 152156 - DNA, 50 bp, Artificial
  Synthetic oligonucleotide
acgtcccaccggaaagtctgccgtaagcatttgccgcagtgacggctggt

SEQ ID NO: 152157 - DNA, 50 bp, Artificial
  Synthetic oligonucleotide
tcgccttatctcgctaactgggggcgtccggagtcatgggggacaggaga

SEQ ID NO: 152158 - DNA, 50 bp, Artificial
  Synthetic oligonucleotide
acgttggagacagaccccgtcagcgtcaccttacgctgctggccatagcc

SEQ ID NO: 152159 - DNA, 50 bp, Artificial
  Synthetic oligonucleotide
actggatggctccccgaagttaggggctccgggcgattggacctcagaac

SEQ ID NO: 152160 - DNA, 50 bp, Artificial
  Synthetic oligonucleotide
actggcggtacacgaaccttcgggcacgcagtatggggccgtgaccaaca

SEQ ID NO: 152161 - DNA, 50 bp, Artificial
  Synthetic oligonucleotide
actgggccatccgttccggcatattcccctccgtgggcggcacacgcaag

SEQ ID NO: 152162 - DNA, 50 bp, Artificial
  Synthetic oligonucleotide
actgtacgcggcaacagtcccggtgcatcaggtgctacgccatgctgtcc

SEQ ID NO: 152163 - DNA, 50 bp, Artificial
  Synthetic oligonucleotide
acttccgagcgggcaaattcatacggtttctcctcaccaactccgcgaaa

SEQ ID NO: 152164 - DNA, 50 bp, Artificial
  Synthetic oligonucleotide
aagggaaggcatcgggcgtgggagcatcgggcgtattcgacctgaacgga

SEQ ID NO: 152165 - DNA, 50 bp, Artificial
  Synthetic oligonucleotide
aaggctgccggtgtgaacattgttacccaaagtggtgctccgggtgctga

SEQ ID NO: 152166 - DNA, 57 bp, Artificial
  Synthetic oligonucleotide
cagtatttcgggtgccctctcgtagtcttccgaaaggtcgagccgtgaggcttgcca

SEQ ID NO: 152167 - DNA, 50 bp, Artificial
  Synthetic oligonucleotide
aaggagatgatacaaggccggctgcttgggtgtatgatccaacaagcggg

SEQ ID NO: 152168 - DNA, 50 bp, Artificial
  Synthetic oligonucleotide
aagcgggcagatgaccctcccaaatgccacactccagcgtccccaatgcc

SEQ ID NO: 152169 - DNA, 50 bp, Artificial
  Synthetic oligonucleotide
aagccgttcgtgcgtaatttacccgagttcgagtagggtgcctccgcgcc

SEQ ID NO: 152170 - DNA, 50 bp, Artificial
  Synthetic oligonucleotide
ttcagtggacggaccgaagggaccggcatggatgagtgtaacagacggct

SEQ ID NO: 152171 - DNA, 50 bp, Artificial
  Synthetic oligonucleotide
ttcatatgtgcaaagatagaacaaatataaccaactgcaaagaaagtccg

SEQ ID NO: 152172 - DNA, 50 bp, Artificial
  Synthetic oligonucleotide
aagccggagcgtgtacaacctgttttcggggcaaggcatcccgcgggtgt

SEQ ID NO: 152173 - DNA, 50 bp, Artificial
  Synthetic oligonucleotide
aagcccaaacattcatatacccccaaaacgattctatcctgacagaatat

SEQ ID NO: 152174 - DNA, 50 bp, Artificial
  Synthetic oligonucleotide
aagcagtgaagccacggcccggtttgtctttcacgtctgcccagtcgccg

SEQ ID NO: 152175 - DNA, 50 bp, Artificial
  Synthetic oligonucleotide
aagaccgcccgtatctcccgatgcgaaaggctgtgttaccggctgccctt

SEQ ID NO: 152176 - DNA, 50 bp, Artificial
  Synthetic oligonucleotide
aagaaattgcatggtagtacggttgctgatgcccgttttcagaaatataa

SEQ ID NO: 152177 - DNA, 54 bp, Artificial
  Synthetic oligonucleotide
ttacttttaaagtttcatctaatatggctgtgattagtgaagttttttgttctt

SEQ ID NO: 152178 - DNA, 50 bp, Artificial
  Synthetic oligonucleotide
aacgtgccgggtcgcgtatctcgtcatcacccgttgtccagctgggctta

SEQ ID NO: 152179 - DNA, 50 bp, Artificial
  Synthetic oligonucleotide
aacgcgtgcggagcaagggattctcaggcgcattctcccacggtcccatg

SEQ ID NO: 152180 - DNA, 50 bp, Artificial
  Synthetic oligonucleotide
aacgccgagaatatgctctccgtacaggtgacgccgggatggtggggtga

SEQ ID NO: 152181 - DNA, 50 bp, Artificial
  Synthetic oligonucleotide
aacgcccatacaggctgagacgaacggtcctaccgggcacgtcaagcggt

SEQ ID NO: 152182 - DNA, 50 bp, Artificial
  Synthetic oligonucleotide
aacccgaatcccgctatcgtgcctttgacgggtatcgagacggggcggaa

SEQ ID NO: 152183 - DNA, 50 bp, Artificial
  Synthetic oligonucleotide
aaaacacctttatcctacctcactggcagtcggttctcgacaaggggcgg

SEQ ID NO: 152184 - DNA, 50 bp, Artificial
  Synthetic oligonucleotide
acgcaaggtgccaaagaccgctggacagccgaagcacgtttcttccgtgc

SEQ ID NO: 152185 - DNA, 50 bp, Artificial
  Synthetic oligonucleotide
acgagcgggaatcaccacgggcattgtacttgcaccaccagatgccgtgc

SEQ ID NO: 152186 - DNA, 50 bp, Artificial
  Synthetic oligonucleotide
acgaacgcgcacgcgtcaaagcggacaacgaggacttccgaggagccgta

SEQ ID NO: 152187 - DNA, 50 bp, Artificial
  Synthetic oligonucleotide
accttggcggagcacacggcagtgttactcccgaccccactgcatcggca

SEQ ID NO: 152188 - DNA, 52 bp, Artificial
  Synthetic oligonucleotide
ctttcggaaaaaatctgttctgtcaaaaccgcctttcacgtttccgcagttc

SEQ ID NO: 152189 - DNA, 50 bp, Artificial
  Synthetic oligonucleotide
tgagagccctcgaacgtgtccccgtttcccggaggcgtgactcccgaatc

SEQ ID NO: 152190 - DNA, 50 bp, Artificial
  Synthetic oligonucleotide
accgctagccgcaccgattaccatcactcctaccgaggccaccgtagcga

SEQ ID NO: 152191 - DNA, 50 bp, Artificial
  Synthetic oligonucleotide
accgcccctgtataggcgcagacggcaggcatcggacgattatcttccga

SEQ ID NO: 152192 - DNA, 50 bp, Artificial
  Synthetic oligonucleotide
acccggttgtcccccgctataacgggcaacgtagccagcgcgtgcaatgt

SEQ ID NO: 152193 - DNA, 50 bp, Artificial
  Synthetic oligonucleotide
acccgcttgtgcgtttagccaaacccatcacggcaactatcggagcagac

SEQ ID NO: 152194 - DNA, 50 bp, Artificial
  Synthetic oligonucleotide
acccgctctggcttatcccttgcaaaggctgagggtcgctccagcggtca

SEQ ID NO: 152195 - DNA, 50 bp, Artificial
  Synthetic oligonucleotide
acccatgcataaataacgtccgcaccagcggaactcgtgcgggctctcga

SEQ ID NO: 152196 - DNA, 50 bp, Artificial
  Synthetic oligonucleotide
acccaagaagaatggctggcccgaatttgacattgtgctgttgggagcgg

SEQ ID NO: 152197 - DNA, 50 bp, Artificial
  Synthetic oligonucleotide
accatccgaacctccgccggcacatgaaatcccttgccgtcctcgcaggg

SEQ ID NO: 152198 - DNA, 50 bp, Artificial
  Synthetic oligonucleotide
accacgcttcagattcccgtgcaaggcatcggcgagtggtgtcatcccct

SEQ ID NO: 152199 - DNA, 60 bp, Artificial
  Synthetic oligonucleotide
gtatagaaatgaacagcagcgagatgtgtttttgtgcggacaaaaacaaacctcgcctga

SEQ ID NO: 152200 - DNA, 50 bp, Artificial
  Synthetic oligonucleotide
acaggactcctgctaaccccgtggccgttggcgaccctcgtcactgctcc

SEQ ID NO: 152201 - DNA, 50 bp, Artificial
  Synthetic oligonucleotide
acagaccggtagccaatgccacacaaagcctgcaaggtctggttccgggc

SEQ ID NO: 152202 - DNA, 50 bp, Artificial
  Synthetic oligonucleotide
acacacattagcatgtcaatcccaaatcttgcaaatcccgtccgaaaggc

SEQ ID NO: 152203 - DNA, 50 bp, Artificial
  Synthetic oligonucleotide
acaactgaacgcaaggctcgccaatcccgtgcttcaaggcgaccacctct

SEQ ID NO: 152204 - DNA, 50 bp, Artificial
  Synthetic oligonucleotide
cgcgtcattgatattgtgcgtgcttcgagcagtctgccgtttgtctgtcc

SEQ ID NO: 152205 - DNA, 50 bp, Artificial
  Synthetic oligonucleotide
gtcacgcgtcactttacgggggtcggcaccgataggctgtacccagccaa

SEQ ID NO: 152206 - DNA, 50 bp, Artificial
  Synthetic oligonucleotide
ccggtgctgcatctggacttgaatgcccgcaagtatgagacggcagccga

SEQ ID NO: 152207 - DNA, 50 bp, Artificial
  Synthetic oligonucleotide
ccgggaaaatgcgcttgtaaaccgcccctgtataggcgcagacggcaggc

SEQ ID NO: 152208 - DNA, 50 bp, Artificial
  Synthetic oligonucleotide
ccgcgagaagggattgcaaagtatcaaccgcgcttcggcccaagccgtcg

SEQ ID NO: 152209 - DNA, 50 bp, Artificial
  Synthetic oligonucleotide
ccgccaatggccatgcgttggatggcttgtgtgccccggacgtggcaggc

SEQ ID NO: 152210 - DNA, 59 bp, Artificial
  Synthetic oligonucleotide
ttccggacggatgtagtcgagctccttgcttcttaagttgtgacgttccgagctgccta

SEQ ID NO: 152211 - DNA, 50 bp, Artificial
  Synthetic oligonucleotide
ccgatatagcggcgcagatcgctaggcttcctccggcacattggatgccc

SEQ ID NO: 152212 - DNA, 50 bp, Artificial
  Synthetic oligonucleotide
cccggtgtagcattccgggacacccatacacgcacccaccctccttgtgt

SEQ ID NO: 152213 - DNA, 50 bp, Artificial
  Synthetic oligonucleotide
cccggcgaactgggataggctccggacagtacgcatgtggctgattcgat

SEQ ID NO: 152214 - DNA, 50 bp, Artificial
  Synthetic oligonucleotide
cccgacaaatactcgtcaaacagtgcatccacaaattcgtaaacctccgg

SEQ ID NO: 152215 - DNA, 50 bp, Artificial
  Synthetic oligonucleotide
gtctccaagccgtgcccacggttgtgctgtctgtacgccaatgtcacggc

SEQ ID NO: 152216 - DNA, 50 bp, Artificial
  Synthetic oligonucleotide
ccccgttgcggagcatatctataaacggtcacccggcaaggggcggggaa

SEQ ID NO: 152217 - DNA, 50 bp, Artificial
  Synthetic oligonucleotide
cccactgcacgggcataagcctgaaatcccatggagccatcacgtgctcc

SEQ ID NO: 152218 - DNA, 50 bp, Artificial
  Synthetic oligonucleotide
ccagcgtagttcccacggaattggcagaaccgccaatggccatgcgttgg

SEQ ID NO: 152219 - DNA, 50 bp, Artificial
  Synthetic oligonucleotide
ccacggaattggcagaaccgccaatggccatgcgttggatggcttgtgtg

SEQ ID NO: 152220 - DNA, 50 bp, Artificial
  Synthetic oligonucleotide
cagtggggaatggcgcccatccatgcccaaaaacgttcgttccggttgga

SEQ ID NO: 152221 - DNA, 57 bp, Artificial
  Synthetic oligonucleotide
ttatgcttcccagcattcaatctatccccgtttatgggtttctctttcaccctacaa

SEQ ID NO: 152222 - DNA, 50 bp, Artificial
  Synthetic oligonucleotide
caggctgcactgatgtctgcccgtctggcatacgcccctatgctgggact

SEQ ID NO: 152223 - DNA, 50 bp, Artificial
  Synthetic oligonucleotide
gtggcgcgacatacaagcacccagggcagtgagcgctcccaataacatga

SEQ ID NO: 152224 - DNA, 50 bp, Artificial
  Synthetic oligonucleotide
cagccagttgtctcctgagtccggcaatacgggattcgcgcacggctacg

SEQ ID NO: 152225 - DNA, 50 bp, Artificial
  Synthetic oligonucleotide
cacagatgcaccgtaccgcccaatggcatgacttccggcagcaaggctcc

SEQ ID NO: 152226 - DNA, 50 bp, Artificial
  Synthetic oligonucleotide
caatggggcgaccctgcatccgcctggtatcgcaagcaaggtttcggccg

SEQ ID NO: 152227 - DNA, 50 bp, Artificial
  Synthetic oligonucleotide
caagcaaggtgacgggtcaggacaggccacatacggcgggcgtattccaa

SEQ ID NO: 152228 - DNA, 50 bp, Artificial
  Synthetic oligonucleotide
ggacgcttatcagtggcaggcagcctatccgccccggtcgttttccgggg

SEQ ID NO: 152229 - DNA, 50 bp, Artificial
  Synthetic oligonucleotide
gcttgtccctgtacaccggtcagaaagcggctccacggttccagttgcga

SEQ ID NO: 152230 - DNA, 50 bp, Artificial
  Synthetic oligonucleotide
gcgttgccgcgggctattgcaccgactgcctcgctggtaggcatctgtga

SEQ ID NO: 152231 - DNA, 50 bp, Artificial
  Synthetic oligonucleotide
gcgggtaccaactgcacgtcgaagcctgcctttccaccgctccctatgac

SEQ ID NO: 152232 - DNA, 60 bp, Artificial
  Synthetic oligonucleotide
aaggaaatcgttctccacatggcattccatatgccctgcataatcccctgtaagcatatg

SEQ ID NO: 152233 - DNA, 50 bp, Artificial
  Synthetic oligonucleotide
gggattcgtgcggacaacggggctccaggtttttaccgcattgcttccgg

SEQ ID NO: 152234 - DNA, 50 bp, Artificial
  Synthetic oligonucleotide
gcctctgggagtcgaacccggactaagaccatcggcctccctgcccttat

SEQ ID NO: 152235 - DNA, 50 bp, Artificial
  Synthetic oligonucleotide
gccggctttgggatgtgcggtggcatatccgttgggcgtagtgggagtaa

SEQ ID NO: 152236 - DNA, 50 bp, Artificial
  Synthetic oligonucleotide
gcccccaggctacgatccatgagaggccgcgtagtggtagtgccattcgt

SEQ ID NO: 152237 - DNA, 50 bp, Artificial
  Synthetic oligonucleotide
gccatgcagacgaaagctggggaggatacgggtgcggacgtaagcacgaa

SEQ ID NO: 152238 - DNA, 50 bp, Artificial
  Synthetic oligonucleotide
ggggaggatacgggtgcggacgtaagcacgaatgggttccctgtccgggt

SEQ ID NO: 152239 - DNA, 50 bp, Artificial
  Synthetic oligonucleotide
gagtttattatatctcaaaggcaaatacaactccctgcaccggaaatcat

SEQ ID NO: 152240 - DNA, 50 bp, Artificial
  Synthetic oligonucleotide
gaccgtatcggtagtggggcgtccgcaacttgaagcgagccagcagactt

SEQ ID NO: 152241 - DNA, 50 bp, Artificial
  Synthetic oligonucleotide
gaatggattcctgccacagtaatagaagttgagaataacccattcgttgg

SEQ ID NO: 152242 - DNA, 50 bp, Artificial
  Synthetic oligonucleotide
gaacaatggagcgcatgagtctgtgggcgggcaaccatctgccggtcata

SEQ ID NO: 152243 - DNA, 60 bp, Artificial
  Synthetic oligonucleotide
catcatggtatattgacacacattagcatgtcaatcccaaatcttgcaaatcccgtccga

SEQ ID NO: 152244 - DNA, 50 bp, Artificial
  Synthetic oligonucleotide
cttgtcactttaacgcttattatgcgcgagttaggatatacggggcagat

SEQ ID NO: 152245 - DNA, 50 bp, Artificial
  Synthetic oligonucleotide
cttccggtagcagccattccgcgggcacgtactttaggcgagactgacgg

SEQ ID NO: 152246 - DNA, 50 bp, Artificial
  Synthetic oligonucleotide
ctgttccatcacagtcttggacacagtattggctataccgaaaccaccga

SEQ ID NO: 152247 - DNA, 50 bp, Artificial
  Synthetic oligonucleotide
ctcgaatcgcacattaccggtgaccctactctacgttttcaatctatcaa

SEQ ID NO: 152248 - DNA, 50 bp, Artificial
  Synthetic oligonucleotide
ctacgactaccaccggcagactgtgcccgccggattgcgaacacaggaac

SEQ ID NO: 152249 - DNA, 50 bp, Artificial
  Synthetic oligonucleotide
gtaaacgtccgttttggtgggcaggggtgccagtacgttttccgtgccga

SEQ ID NO: 152250 - DNA, 50 bp, Artificial
  Synthetic oligonucleotide
cgttcatgtgccctgttcccatgtggtaaaccagatatggaaattcgccg

SEQ ID NO: 152251 - DNA, 50 bp, Artificial
  Synthetic oligonucleotide
cgtctcgggtgcctcatccccgatcgtctcacacttcggcagcatggagg

SEQ ID NO: 152252 - DNA, 50 bp, Artificial
  Synthetic oligonucleotide
cggcgggggtaaggttctggagcatccagggggttaactgtccgatcagg

SEQ ID NO: 152253 - DNA, 50 bp, Artificial
  Synthetic oligonucleotide
agcgtatcttgccgctcgtcaccaagtcatccaaagcccggagcgtctcc

SEQ ID NO: 152254 - DNA, 53 bp, Artificial
  Synthetic oligonucleotide
cagtttaagacgttggacgacttgtatcagttttacaacgacgcaatttttaa

SEQ ID NO: 152255 - DNA, 50 bp, Artificial
  Synthetic oligonucleotide
agcggctcaggacataagcctggcattccgggtgagcggaactatccagc

SEQ ID NO: 152256 - DNA, 50 bp, Artificial
  Synthetic oligonucleotide
agcggattggcacgtatgattgtcgcataccggaaccgcttgggcggctt

SEQ ID NO: 152257 - DNA, 50 bp, Artificial
  Synthetic oligonucleotide
agcggagctacgaagaccgactggtgctatggtaccgccaacggggcttg

SEQ ID NO: 152258 - DNA, 50 bp, Artificial
  Synthetic oligonucleotide
agcgccctacggcggccttccccagctcgcacgtgggcatatccaccatt

SEQ ID NO: 152259 - DNA, 50 bp, Artificial
  Synthetic oligonucleotide
agcctgccgtgccacttgtttcaccgcaaaacgcttcaccgataccgtcc

SEQ ID NO: 152260 - DNA, 50 bp, Artificial
  Synthetic oligonucleotide
agcctatgggggtgaaaatgcggccggttaatgtcacggcatcgggaccg

SEQ ID NO: 152261 - DNA, 50 bp, Artificial
  Synthetic oligonucleotide
agccgtgagtctttccggcatgtatctatgatcgcctgcgcatgcaaagg

SEQ ID NO: 152262 - DNA, 50 bp, Artificial
  Synthetic oligonucleotide
agccgtagactttgcgtctaccacctgccccggtatggctttctcgccaa

SEQ ID NO: 152263 - DNA, 50 bp, Artificial
  Synthetic oligonucleotide
agccgcgcgaataattcaagtcgccccgcacatgttggtgactgggcata

SEQ ID NO: 152264 - DNA, 50 bp, Artificial
  Synthetic oligonucleotide
agcccgcttatggcacggtgcatcaagagtgaacgccaaggacgcccctt

SEQ ID NO: 152265 - DNA, 55 bp, Artificial
  Synthetic oligonucleotide
gctaaagccctttttgcggccggccgcaaaaaagcacttcctccttatcatgatt

SEQ ID NO: 152266 - DNA, 53 bp, Artificial
  Synthetic oligonucleotide
tcaaggtcgccgtgaggcgccccgaaggggttgccttgacccctaagaaccaa

SEQ ID NO: 152267 - DNA, 55 bp, Artificial
  Synthetic oligonucleotide
ctcccaaagatgcgatcaattcgaccattgcccacaccattatagagcaatgccc

SEQ ID NO: 152268 - DNA, 55 bp, Artificial
  Synthetic oligonucleotide
ctccaagtcgtcaccacaaagcttgatggctcaaagcgctcctatcaatttgaac

SEQ ID NO: 152269 - DNA, 55 bp, Artificial
  Synthetic oligonucleotide
gaccgtgtccagatatgttgaacactggatgacgagagttgataagctttcgcga

SEQ ID NO: 152270 - DNA, 55 bp, Artificial
  Synthetic oligonucleotide
ggacggtagtttacaaagcgatatcatcgcaactgtattaggtatggtagcacag

SEQ ID NO: 152271 - DNA, 55 bp, Artificial
  Synthetic oligonucleotide
ggagtctgttcgctatcagcattaggtgtttcacgttcacggtagcagtgttgca

SEQ ID NO: 152272 - DNA, 55 bp, Artificial
  Synthetic oligonucleotide
gtctaggagcgatgacagcaggccttattaattcatctgtacggcattattttcg

SEQ ID NO: 152273 - DNA, 55 bp, Artificial
  Synthetic oligonucleotide
ggatgagggattaccaaagatctctaaagattccagtaacgctacctctgccgcc

SEQ ID NO: 152274 - DNA, 55 bp, Artificial
  Synthetic oligonucleotide
ggcaaggtttatgggaatgctagcgttgggtgtcatactaatgtttatggctctg

SEQ ID NO: 152275 - DNA, 55 bp, Artificial
  Synthetic oligonucleotide
gtcacaagtggttgatttgggtctgcatcaattaatttcaccttagatccggctt

SEQ ID NO: 152276 - DNA, 55 bp, Artificial
  Synthetic oligonucleotide
ggcgcgcaacagtacgctgaatttcttcaattcgaattcgccttaactcacttga

SEQ ID NO: 152277 - DNA, 58 bp, Artificial
  Synthetic oligonucleotide
ttactacggcttcgtgatgaatagcgtttaaaattaccagaatcccgcatgacaacaa

SEQ ID NO: 152278 - DNA, 53 bp, Artificial
  Synthetic oligonucleotide
ggctttgaacgatggtttggaataactccacaggtaacaaaggctttacgaac

SEQ ID NO: 152279 - DNA, 55 bp, Artificial
  Synthetic oligonucleotide
tagaacgacttataagtatttcatctaatccacctaccttacgtgcggcatttag

SEQ ID NO: 152280 - DNA, 54 bp, Artificial
  Synthetic oligonucleotide
gggcggtcgcaccaaaattcgatagaaagaggcttaacacggaaaccagaccaa

SEQ ID NO: 152281 - DNA, 55 bp, Artificial
  Synthetic oligonucleotide
ggggcagcacgtcccgcccatatattaacgccttcagtaacttcacggggagttg

SEQ ID NO: 152282 - DNA, 55 bp, Artificial
  Synthetic oligonucleotide
gggtcttgatattggctcccttactgctttagagcgctatcaaagctggagacgt

SEQ ID NO: 152283 - DNA, 55 bp, Artificial
  Synthetic oligonucleotide
gggttcgctcaggcgccctagacctgattcattgcgctcagccattttgccgatt

SEQ ID NO: 152284 - DNA, 55 bp, Artificial
  Synthetic oligonucleotide
ggtactttgtgtcggtgaggttatttcatcactcataagttggtccattcctgtg

SEQ ID NO: 152285 - DNA, 55 bp, Artificial
  Synthetic oligonucleotide
ggtgcgcccgacacaatacatcaactgccatagcaggaacgcagccaaatttacg

SEQ ID NO: 152286 - DNA, 55 bp, Artificial
  Synthetic oligonucleotide
ggttagatgtttgttaatgacgctctaaatagagtgccgggtgctaacaaacacg

SEQ ID NO: 152287 - DNA, 55 bp, Artificial
  Synthetic oligonucleotide
gtaagcaaaagcagactccatactccttagtgtggctttgtctttaataccaagc

SEQ ID NO: 152288 - DNA, 53 bp, Artificial
  Synthetic oligonucleotide
cttttggaaggtcctcgtattggtattaacagatcttaccgccttaatccaaa

SEQ ID NO: 152289 - DNA, 55 bp, Artificial
  Synthetic oligonucleotide
gtaagcgcttaccaccggctttggtccatttctgtaattcggttgggatcgcttc

SEQ ID NO: 152290 - DNA, 55 bp, Artificial
  Synthetic oligonucleotide
gtagctatactcccctttggacgaccaagttttataccacgttgacgagcaacac

SEQ ID NO: 152291 - DNA, 55 bp, Artificial
  Synthetic oligonucleotide
gtacttactccgttcgtccataagtctacgaaatgagaggctaccgcctctcaaa

SEQ ID NO: 152292 - DNA, 55 bp, Artificial
  Synthetic oligonucleotide
tccaaactcacgcgctgctctcttgacttcttcacggtcaacggttgtttcgcgt

SEQ ID NO: 152293 - DNA, 55 bp, Artificial
  Synthetic oligonucleotide
gatggtgaggttgttccggtatctggattaatgccttttggttgataggcttcgt

SEQ ID NO: 152294 - DNA, 55 bp, Artificial
  Synthetic oligonucleotide
gcagagtggagatacactatttagtatcgcacagcaaaagggaatcagtgtcgag

SEQ ID NO: 152295 - DNA, 55 bp, Artificial
  Synthetic oligonucleotide
gccaaaccgtgttcagtggtccggtttgaatgatgcaacacattggacggttggg

SEQ ID NO: 152296 - DNA, 55 bp, Artificial
  Synthetic oligonucleotide
gccaaagaaaatcgaggaaagctttatctagaacgttctttctatgccctactca

SEQ ID NO: 152297 - DNA, 55 bp, Artificial
  Synthetic oligonucleotide
gcccagatgccgtaagtgtgaccgaacggattgaatagaaagcgagtctttagac

SEQ ID NO: 152298 - DNA, 55 bp, Artificial
  Synthetic oligonucleotide
gccccgaagcttcgcgctgtggctgtaaaccaatctctactttattgggatttgc

SEQ ID NO: 152299 - DNA, 58 bp, Artificial
  Synthetic oligonucleotide
atcacggtgtgtaaaaacatcgggtaaatgatcacaacgctcgacaattaatttggca

SEQ ID NO: 152300 - DNA, 54 bp, Artificial
  Synthetic oligonucleotide
gtgaccccacaagctacgggaatttctaagatgcgttggccggtacgagggcgt

SEQ ID NO: 152301 - DNA, 55 bp, Artificial
  Synthetic oligonucleotide
gcctcacaataccctttgatcgctccaacttgaaaacgatcccctaacacagcca

SEQ ID NO: 152302 - DNA, 55 bp, Artificial
  Synthetic oligonucleotide
gcgggacaatgagcaagtccagaatccccatgccaagaaccacgtaatgcgtaag

SEQ ID NO: 152303 - DNA, 55 bp, Artificial
  Synthetic oligonucleotide
gtgaacttgcacatgctaaacctgttacaattatagatgcagatccacgtcaccc

SEQ ID NO: 152304 - DNA, 55 bp, Artificial
  Synthetic oligonucleotide
gcgtattcctgctggggctcagtggtcccatgtgacaggatttgatgtgacctca

SEQ ID NO: 152305 - DNA, 55 bp, Artificial
  Synthetic oligonucleotide
gcgtggcaagatctgtatggctgtgtaaatcgagcgctaatgtaaagaggcgatc

SEQ ID NO: 152306 - DNA, 55 bp, Artificial
  Synthetic oligonucleotide
gctagtccaaagtggactttagctgaaacgccacgaatgcctaaatcacgttacc

SEQ ID NO: 152307 - DNA, 55 bp, Artificial
  Synthetic oligonucleotide
gctattaggcttgaaatggcaggtgtgagtacagcacgagcttggcttgctatgc

SEQ ID NO: 152308 - DNA, 55 bp, Artificial
  Synthetic oligonucleotide
gctgaagagtcgttttgtgattacggatcgccttatacataagcggttgtgtaaa

SEQ ID NO: 152309 - DNA, 55 bp, Artificial
  Synthetic oligonucleotide
gcttagccttgactgtattatcaccgataggagctctaaagattgaactttgcat

SEQ ID NO: 152310 - DNA, 57 bp, Artificial
  Synthetic oligonucleotide
ttattcaactgtatttactttgggcatcgcaaggcggtacctccggtgggcaccata

SEQ ID NO: 152311 - DNA, 55 bp, Artificial
  Synthetic oligonucleotide
gcttgtcattgggcgttcccttaagcgaagtattatggttgcacaagagcttggt

SEQ ID NO: 152312 - DNA, 55 bp, Artificial
  Synthetic oligonucleotide
ggaaatctttcctctaatgctggtggcacagctgttttagcttatggcaatatgc

SEQ ID NO: 152313 - DNA, 55 bp, Artificial
  Synthetic oligonucleotide
ggaaggttttccttgtataaagaatcgttcgcggcctgcttcacgatcagtgcct

SEQ ID NO: 152314 - DNA, 55 bp, Artificial
  Synthetic oligonucleotide
tatgccccttcactaaaggattccattcatagcgtatggtaggtcgaccgccttg

SEQ ID NO: 152315 - DNA, 55 bp, Artificial
  Synthetic oligonucleotide
atctgctagtatggtgagctaaatgtgttgatccggtaagagaggctcctccaga

SEQ ID NO: 152316 - DNA, 55 bp, Artificial
  Synthetic oligonucleotide
gtttagactgccaaccattcatgtagagaagattagcagcggttgcgagggcatc

SEQ ID NO: 152317 - DNA, 55 bp, Artificial
  Synthetic oligonucleotide
gttgatacagccaatcgtcgtatgatttcggctatcggttgtgaggatggttgcg

SEQ ID NO: 152318 - DNA, 55 bp, Artificial
  Synthetic oligonucleotide
tggtccaagtcctcgtgatcaggtggcagatcaacgcaatgtaagagctacggag

SEQ ID NO: 152319 - DNA, 55 bp, Artificial
  Synthetic oligonucleotide
gttcttcgctaaagcttcacgacttgaattgtaagcccaagcgtcacgattggtt

SEQ ID NO: 152320 - DNA, 55 bp, Artificial
  Synthetic oligonucleotide
caaagctatccatccgctttcatgagatgacaccccttacatcatccgtgcaaca

SEQ ID NO: 152321 - DNA, 60 bp, Artificial
  Synthetic oligonucleotide
atacatcctctttgtactagctcttgttagtaccattctatcgtattggagagcttgacg

SEQ ID NO: 152322 - DNA, 55 bp, Artificial
  Synthetic oligonucleotide
tgggcatcgcaaggcggtacctccggtgggcaccataaatggtggtaatcactag

SEQ ID NO: 152323 - DNA, 55 bp, Artificial
  Synthetic oligonucleotide
caaccatattggctacacgtctctttaaatcggtgatctctttatcgcgtcgctc

SEQ ID NO: 152324 - DNA, 55 bp, Artificial
  Synthetic oligonucleotide
tggcgtaatcaagcactcacaatgcacgcagagactttacgacgtatgccgcctg

SEQ ID NO: 152325 - DNA, 55 bp, Artificial
  Synthetic oligonucleotide
caagcagaggctttacaaacacaagctacttctatgattcaacaagctcaatctg

SEQ ID NO: 152326 - DNA, 55 bp, Artificial
  Synthetic oligonucleotide
tgctgtagcgcctacattaacgactgtaccgtggataacaccgaaacgttcaggc

SEQ ID NO: 152327 - DNA, 55 bp, Artificial
  Synthetic oligonucleotide
caccagccttgacatcaccaaagtctcttaatgcacggatacgataaagtgtaac

SEQ ID NO: 152328 - DNA, 55 bp, Artificial
  Synthetic oligonucleotide
caccctctgtcgctgttacaaaccctgtgtccgtccttgtactaaaaggattgcc

SEQ ID NO: 152329 - DNA, 55 bp, Artificial
  Synthetic oligonucleotide
cacctgccgcacggatgccacaagtcaaccgtaaaatagttaagatgcgtgctga

SEQ ID NO: 152330 - DNA, 55 bp, Artificial
  Synthetic oligonucleotide
cacgataaagcgtcgttaaatgtccacttgtacccataacagctaaacgccgttg

SEQ ID NO: 152331 - DNA, 55 bp, Artificial
  Synthetic oligonucleotide
cacgctggaaaatgcaggataatctgcgccgttctcttacaccactcatgtggct

SEQ ID NO: 152332 - DNA, 55 bp, Artificial
  Synthetic oligonucleotide
agttcatcacacaccattaagagaccacgggggttttctttcaacaattcgccta

SEQ ID NO: 152333 - DNA, 55 bp, Artificial
  Synthetic oligonucleotide
cactgcacgagcacgattgggcaaacgacgtataaaacctcgttgttctaaggct

SEQ ID NO: 152334 - DNA, 55 bp, Artificial
  Synthetic oligonucleotide
tgcacccgtcttggatgttcggttaatttcatcaaacagacgaaatctccccaga

SEQ ID NO: 152335 - DNA, 55 bp, Artificial
  Synthetic oligonucleotide
caggtcccaagcacttaacaatgaaattgactcgggcaaaatttgaatctctggt

SEQ ID NO: 152336 - DNA, 55 bp, Artificial
  Synthetic oligonucleotide
gttagaaggtgtattgtaccgtccagatcactcgcgtgttaatgcagttgatgac

SEQ ID NO: 152337 - DNA, 55 bp, Artificial
  Synthetic oligonucleotide
catccacaatagcacccaatcgctttacacaatccccttcacgaatatcgcgatc

SEQ ID NO: 152338 - DNA, 55 bp, Artificial
  Synthetic oligonucleotide
catcctcatgaataatatgacggggatcatcaataagtttaatcaaaggcgcaac

SEQ ID NO: 152339 - DNA, 55 bp, Artificial
  Synthetic oligonucleotide
catcgggtaaatgatcacaacgctcgacaattaatttggcacgctctgctattaa

SEQ ID NO: 152340 - DNA, 55 bp, Artificial
  Synthetic oligonucleotide
ccaataacaacagagcttcttcctacggaaatgagcgattctttgccgcgccttc

SEQ ID NO: 152341 - DNA, 51 bp, Artificial
  Synthetic oligonucleotide
aaaacggatccttacaacacagggtttaaactcgattcaagtgaacttccc

SEQ ID NO: 152342 - DNA, 55 bp, Artificial
  Synthetic oligonucleotide
aaagagcgtaaaaccgcactttacaatgtccctcttgctgtctctactatgagag

SEQ ID NO: 152343 - DNA, 56 bp, Artificial
  Synthetic oligonucleotide
agtcttggttcttagtgtcaaggaagccactacgtggcgcctaacggcgtccttga

SEQ ID NO: 152344 - DNA, 55 bp, Artificial
  Synthetic oligonucleotide
tttacctccatatgcagctctaccccataactatagacctgagaaactgggatcg

SEQ ID NO: 152345 - DNA, 55 bp, Artificial
  Synthetic oligonucleotide
aacaaccagcaatgttattccaacttgtctcaaatattccggtccactgatcgtt

SEQ ID NO: 152346 - DNA, 55 bp, Artificial
  Synthetic oligonucleotide
tttaccaatctgtaggacaacttgaacgtcacttcggttcatcaggtactatggc

SEQ ID NO: 152347 - DNA, 54 bp, Artificial
  Synthetic oligonucleotide
ttggaagtccaattcggaaaccgaagattcagcgtttagcgttgaaggggcttg

SEQ ID NO: 152348 - DNA, 55 bp, Artificial
  Synthetic oligonucleotide
aagagtgctgttgagccaagactctcactaactttgccagttattatgcagtctc

SEQ ID NO: 152349 - DNA, 55 bp, Artificial
  Synthetic oligonucleotide
ttgataggaacgttttgagccatcaagctttgtggtgacgacttggagattggta

SEQ ID NO: 152350 - DNA, 55 bp, Artificial
  Synthetic oligonucleotide
aatacccttatggggaaagcatagcgacggactatcgaccgtgtttcttagcgcc

SEQ ID NO: 152351 - DNA, 55 bp, Artificial
  Synthetic oligonucleotide
acatgagcattgccataaatatggccagccacaaccgccttgccataaacccttg

SEQ ID NO: 152352 - DNA, 55 bp, Artificial
  Synthetic oligonucleotide
ttctcgtatagctggttcttctcttgctgtcctagaaattctcaaagccgctagt

SEQ ID NO: 152353 - DNA, 55 bp, Artificial
  Synthetic oligonucleotide
acgcattttgcgaacgcaagtggtttaccagaccctcaaaactactccacagcgc

SEQ ID NO: 152354 - DNA, 55 bp, Artificial
  Synthetic oligonucleotide
aggttctttgtcaaggacgccgttaggcgccacgtagtggcttccttgacactaa

SEQ ID NO: 152355 - DNA, 55 bp, Artificial
  Synthetic oligonucleotide
acgttcctaatctatcatcgacagtagtccaggctaacccaaaattaacgcaacg

SEQ ID NO: 152356 - DNA, 55 bp, Artificial
  Synthetic oligonucleotide
agacaccagagaaagtttgcacagccatatttgtaaagacgccaagggtttcacg

SEQ ID NO: 152357 - DNA, 55 bp, Artificial
  Synthetic oligonucleotide
agaggctattccataacgacagcaatactctcgacattgctccaatagctgcccc

SEQ ID NO: 152358 - DNA, 55 bp, Artificial
  Synthetic oligonucleotide
agccatcgatgtaaattttatctcttcgatacgaagctgcaatcgacgacaaaca

SEQ ID NO: 152359 - DNA, 55 bp, Artificial
  Synthetic oligonucleotide
agccctagacgacgatattcttacgtcccttgatgagaatcaattgcacgtaact

SEQ ID NO: 152360 - DNA, 53 bp, Artificial
  Synthetic oligonucleotide
aggaagccactacgtggcgcctaacggcgtccttgacaaagaacctaacgtct

SEQ ID NO: 152361 - DNA, 55 bp, Artificial
  Synthetic oligonucleotide
ttcctcggtactgctcacaggtggtgtagtgtaaaatcgatggagattccctatt

SEQ ID NO: 152362 - DNA, 55 bp, Artificial
  Synthetic oligonucleotide
gtttccacccacacacacgttcgccctgcttgttatgctttaagatctctcttgc

SEQ ID NO: 152363 - DNA, 50 bp, Artificial
  Synthetic oligonucleotide
aggttttgaacggtggtttggagtaagaccacaggtaacaaaagcgttac

SEQ ID NO: 152364 - DNA, 55 bp, Artificial
  Synthetic oligonucleotide
ataatacccttacgggaaaagcataacaacagactttaggctgtgttttgagcac

SEQ ID NO: 152365 - DNA, 60 bp, Artificial
  Synthetic oligonucleotide
gagtagcagttacccaccattctggactagctgtcatgacatattcgatagctaacacag

SEQ ID NO: 152366 - DNA, 55 bp, Artificial
  Synthetic oligonucleotide
ttagaaggtttcatgaaccggctcactacagtaaccggaacaaaagcacttcttg

SEQ ID NO: 152367 - DNA, 55 bp, Artificial
  Synthetic oligonucleotide
atcccgctgaatggcgtaatcaagcacttacaatgcatgcagagactttacgacg

SEQ ID NO: 152368 - DNA, 55 bp, Artificial
  Synthetic oligonucleotide
cgaagcagaacgcatatcaacaaaagttgtatcaccttcattggttaaacggatc

SEQ ID NO: 152369 - DNA, 55 bp, Artificial
  Synthetic oligonucleotide
cgaggagagatccggcaagcgaaactttatacgcagaagttgctatgcaaagcac

SEQ ID NO: 152370 - DNA, 55 bp, Artificial
  Synthetic oligonucleotide
cgatagcattatcataaacgcgggcatgaccatagatatgaccacaagcgacagc

SEQ ID NO: 152371 - DNA, 55 bp, Artificial
  Synthetic oligonucleotide
cgatgatagatgtcatcatccaatgcaaacgccttgaaggcaaatttcgtgtaac

SEQ ID NO: 152372 - DNA, 55 bp, Artificial
  Synthetic oligonucleotide
cgcaagggatacgaggcagttctttagagaggttatcagcataacgagagcgata

SEQ ID NO: 152373 - DNA, 55 bp, Artificial
  Synthetic oligonucleotide
cgcacgtggtcgtcctctagagttatcgatagaacgtttagcgcgcctttgcggt

SEQ ID NO: 152374 - DNA, 55 bp, Artificial
  Synthetic oligonucleotide
cgcatataccgccatactcgcccctatctattattcaactgtatttactttgggc

SEQ ID NO: 152375 - DNA, 55 bp, Artificial
  Synthetic oligonucleotide
cgcattaaacgggctttcacccatctgcggtgtgatacgtctcgatgttccatcc

SEQ ID NO: 152376 - DNA, 60 bp, Artificial
  Synthetic oligonucleotide
gctctgtgggcgttttcgtggctttgagatgctattgcgattgtactggcaaattgttcg

SEQ ID NO: 152377 - DNA, 56 bp, Artificial
  Synthetic oligonucleotide
tcatgatctcagatccgcgtttatcgaaggaactaacaaacctttggttcttaggg

SEQ ID NO: 152378 - DNA, 55 bp, Artificial
  Synthetic oligonucleotide
cgcctgaattttctcgcatagctggttcttctcttgctgtcctagaaattctcaa

SEQ ID NO: 152379 - DNA, 55 bp, Artificial
  Synthetic oligonucleotide
cgcgaaatgctgctccagcctcaatgggttgcaactgcatattatcaccaacaag

SEQ ID NO: 152380 - DNA, 55 bp, Artificial
  Synthetic oligonucleotide
cgcgcggtatcgataggtcactttataactactgccggggagtggttcatcgccc

SEQ ID NO: 152381 - DNA, 55 bp, Artificial
  Synthetic oligonucleotide
cgctatttacgcgcttatggtccccatgcctttggctggacaatgcgagatctca

SEQ ID NO: 152382 - DNA, 55 bp, Artificial
  Synthetic oligonucleotide
cggataacacctgcgtcacctcctggtctaacaagactattcccttggatcagcg

SEQ ID NO: 152383 - DNA, 55 bp, Artificial
  Synthetic oligonucleotide
cgggcgttatcgtaaatatgtgcactaggagaaacattagcattatcacaaacca

SEQ ID NO: 152384 - DNA, 55 bp, Artificial
  Synthetic oligonucleotide
cggtatctacaaatcagaaacgactatttatgcgcaaaaggtttaccgagtggct

SEQ ID NO: 152385 - DNA, 53 bp, Artificial
  Synthetic oligonucleotide
cggtcgatagtccgtcgttacactttccccacaaagggtattgtatagcgtaa

SEQ ID NO: 152386 - DNA, 55 bp, Artificial
  Synthetic oligonucleotide
tctagatagagttctcctcgattttctttagcaatcataccgcgtagatatcccc

SEQ ID NO: 152387 - DNA, 55 bp, Artificial
  Synthetic oligonucleotide
cggtttcgaagttattttgcatttcttctacggcaaagccttcgcgtgcgcggac

SEQ ID NO: 152388 - DNA, 58 bp, Artificial
  Synthetic oligonucleotide
tcatgatctcaaagccgcgtttatcgaagggctaacaatcctaggttcttagggtcaa

SEQ ID NO: 152389 - DNA, 55 bp, Artificial
  Synthetic oligonucleotide
cgtcagctttcttacgttgttcagcttcaagttccttagcggcttgtcggacatt

SEQ ID NO: 152390 - DNA, 55 bp, Artificial
  Synthetic oligonucleotide
cgtcgtccaatgcttgctggtggagatggctacagattgtctcttgcgggtgcac

SEQ ID NO: 152391 - DNA, 55 bp, Artificial
  Synthetic oligonucleotide
cgtcttcatggagctattatggattcaacttcattaatggcgcgtacgctttcac

SEQ ID NO: 152392 - DNA, 52 bp, Artificial
  Synthetic oligonucleotide
cgtcttcttttgtcaacggttctacttttcgggtgaaatcgtgcgaacaaaa

SEQ ID NO: 152393 - DNA, 55 bp, Artificial
  Synthetic oligonucleotide
cgtgatcacaaacatgagcattgccatagatataacctgctacatgagcattccc

SEQ ID NO: 152394 - DNA, 55 bp, Artificial
  Synthetic oligonucleotide
cccctccggttgcgagcgccctcgcatggtattccgggagtaataaagtactgag

SEQ ID NO: 152395 - DNA, 55 bp, Artificial
  Synthetic oligonucleotide
cccgcgcctgatgataaacccaagcattataagaaagatgcgcattgtcataaac

SEQ ID NO: 152396 - DNA, 55 bp, Artificial
  Synthetic oligonucleotide
ccccatcagcaatcttacgcaatgccgaagccaaccataaaggattaccacatat

SEQ ID NO: 152397 - DNA, 55 bp, Artificial
  Synthetic oligonucleotide
cccataccttgcggcttatatggataactctaatttagaacagaaggcaatagac

SEQ ID NO: 152398 - DNA, 55 bp, Artificial
  Synthetic oligonucleotide
ccctctgcgatagatggtgctcgtattgaacttggtgataagatatccattcgtc

SEQ ID NO: 152399 - DNA, 60 bp, Artificial
  Synthetic oligonucleotide
gcacccttacaccacgatcagccgcctctactacttcgctgagtaacaagcggcctgtta

SEQ ID NO: 152400 - DNA, 55 bp, Artificial
  Synthetic oligonucleotide
ccgcaaatccccactttacttgcaacgcggctattgcacaccctactacctatgc

SEQ ID NO: 152401 - DNA, 51 bp, Artificial
  Synthetic oligonucleotide
ccgcgtttatcgaaggaactaacaaacctttggttcttagggtcaaggcaa

SEQ ID NO: 152402 - DNA, 53 bp, Artificial
  Synthetic oligonucleotide
ccggtggtgcaaggaaagttagatttccaacaaagcataagggtaaaagtgga

SEQ ID NO: 152403 - DNA, 55 bp, Artificial
  Synthetic oligonucleotide
tcttttggcaatagagcaagctggtcaacagctgccgtgatatcttgtctttccg

SEQ ID NO: 152404 - DNA, 55 bp, Artificial
  Synthetic oligonucleotide
cctaatgccatttcaaatgctacacaaggtgcagtttctgataagaatgtctggg

SEQ ID NO: 152405 - DNA, 55 bp, Artificial
  Synthetic oligonucleotide
ccagccttaaacgaatggtgcaagcagttgacttccaagcacggagaagcattct

SEQ ID NO: 152406 - DNA, 52 bp, Artificial
  Synthetic oligonucleotide
cctacggggcgcctaacggcgtccttgacccagaaccaaacggattgtttca

SEQ ID NO: 152407 - DNA, 55 bp, Artificial
  Synthetic oligonucleotide
tctggactagctgtcatgacatattcgatagctaacacagcgtctttacgccgtt

SEQ ID NO: 152408 - DNA, 55 bp, Artificial
  Synthetic oligonucleotide
ccacgatatagtgtccatgggagcgatcatacgtcgcaatggcttgcatagcggg

SEQ ID NO: 152409 - DNA, 55 bp, Artificial
  Synthetic oligonucleotide
cctattccatggtacgtatcgttttcagtccatctttatggtcacacgcattaag

SEQ ID NO: 152410 - DNA, 60 bp, Artificial
  Synthetic oligonucleotide
tgagctgtattgtgtaccaccatggcacgatgatttgtcgcgcacgggtggtttgcccag

SEQ ID NO: 152411 - DNA, 53 bp, Artificial
  Synthetic oligonucleotide
cctcgtattggtattaacagatcttaccgccttaatccaaacttcggttggaa

SEQ ID NO: 152412 - DNA, 55 bp, Artificial
  Synthetic oligonucleotide
cctggtttgccaccggctcagtctgagagtccctccttatcggattctcactcag

SEQ ID NO: 152413 - DNA, 55 bp, Artificial
  Synthetic oligonucleotide
ccttcaagcgcaataacggacataagagctcgtgaatccagcgcaatgatatgct

SEQ ID NO: 152414 - DNA, 55 bp, Artificial
  Synthetic oligonucleotide
ccacctgctcgtaactcctcacgttcagcatcagtcatataacttttgggtaatt

SEQ ID NO: 152415 - DNA, 54 bp, Artificial
  Synthetic oligonucleotide
aaatgtaggggtgacaaccgcactgcttgcccctgggctcatggtgtgaaaccg

SEQ ID NO: 152416 - DNA, 54 bp, Artificial
  Synthetic oligonucleotide
aagagccgtgacgccagagactaagagtgggggtcataagtagggggcccatgc

SEQ ID NO: 152417 - DNA, 54 bp, Artificial
  Synthetic oligonucleotide
aaaccgcatgtagcacccccgcgttccaagccacgaatcgaaaaaccagtgctt

SEQ ID NO: 152418 - DNA, 54 bp, Artificial
  Synthetic oligonucleotide
tcgataccaatggggtcaacaactgcgcccgagagaatatgtgcaccaacttcg

SEQ ID NO: 152419 - DNA, 54 bp, Artificial
  Synthetic oligonucleotide
taaccaagcccgtaccaatggagagctatagggcctaaacggataattacggga

SEQ ID NO: 152420 - DNA, 54 bp, Artificial
  Synthetic oligonucleotide
taacgggatgcatgattttgaaaagcgtggtattcacggtatagcaggcaacac

SEQ ID NO: 152421 - DNA, 55 bp, Artificial
  Synthetic oligonucleotide
ccggtgggccaccataaatggtgtactcactagactttattacataaagtcgttc

SEQ ID NO: 152422 - DNA, 54 bp, Artificial
  Synthetic oligonucleotide
caacctgcaagtcttgatttacgtttaggagataaggcatatcgtatacgagct

SEQ ID NO: 152423 - DNA, 54 bp, Artificial
  Synthetic oligonucleotide
cttttatcttatcctaacatgaatgtcgcacgccttacagacttttggccacaa

SEQ ID NO: 152424 - DNA, 54 bp, Artificial
  Synthetic oligonucleotide
atggttatacggcggacttgcggaccaattgattggatagaggggcgtgatttt

SEQ ID NO: 152425 - DNA, 54 bp, Artificial
  Synthetic oligonucleotide
gctgtaacactatcaacaacggtgagtaataatgctgaactgaagcgttcccac

SEQ ID NO: 152426 - DNA, 53 bp, Artificial
  Synthetic oligonucleotide
gtatgacaccccacgctagcattttcatagaccttgccataaattttcgctgc

SEQ ID NO: 152427 - DNA, 52 bp, Artificial
  Synthetic oligonucleotide
gtgacgacggacttaacgccgtgttttcaacgcccggcgcccttatagggtg

SEQ ID NO: 152428 - DNA, 53 bp, Artificial
  Synthetic oligonucleotide
gtggcaacacagcgtatggcagcaggcaatgctatcttggcaacgattggggc

SEQ ID NO: 152429 - DNA, 53 bp, Artificial
  Synthetic oligonucleotide
gtttgtcaggtgtacgttcttgacgcatgacacgcaagcgaccaagatctgaa

SEQ ID NO: 152430 - DNA, 53 bp, Artificial
  Synthetic oligonucleotide
agcacccccgcgttccaagccacgaatcgaaaaaccagtgcttgttaccccta

SEQ ID NO: 152431 - DNA, 53 bp, Artificial
  Synthetic oligonucleotide
ttcatctgtctataaactagtcgtaaagagcaaaagaaaccgctctactccca

SEQ ID NO: 152432 - DNA, 56 bp, Artificial
  Synthetic oligonucleotide
ccaaacggattgtttcagccttctcacgcggctccgaaatcatgaattaaaggtgg

SEQ ID NO: 152433 - DNA, 53 bp, Artificial
  Synthetic oligonucleotide
ttaggattactgttgccttttctttgacaaatataagctacgcgagtgttttt

SEQ ID NO: 152434 - DNA, 53 bp, Artificial
  Synthetic oligonucleotide
atgctcgtctggtgtaattactttccaaccgttttcgcatgtaataccaccaa

SEQ ID NO: 152435 - DNA, 53 bp, Artificial
  Synthetic oligonucleotide
cataggcttatggacttatgcgattaagagcagagaccgcattgctacaggtc

SEQ ID NO: 152436 - DNA, 53 bp, Artificial
  Synthetic oligonucleotide
tctgcctggtttcaattggagggcacgcgcgcatctgttgtagcttatcgcga

SEQ ID NO: 152437 - DNA, 53 bp, Artificial
  Synthetic oligonucleotide
cgggccaagagaggggcagtaggaggtatgggttaagagccgtgacgccagag

SEQ ID NO: 152438 - DNA, 53 bp, Artificial
  Synthetic oligonucleotide
gacgcacccctgcctgtgcagcactatcttgaagggactgagcaagagctgaa

SEQ ID NO: 152439 - DNA, 53 bp, Artificial
  Synthetic oligonucleotide
gacggaacacaagatgattaggcatagcacgcaggcaagccaaatgctccacg

SEQ ID NO: 152440 - DNA, 53 bp, Artificial
  Synthetic oligonucleotide
gattataaaaccttgctgtttttatgcattctctatagctgttatatgcttta

SEQ ID NO: 152441 - DNA, 53 bp, Artificial
  Synthetic oligonucleotide
gcgggcaacaggggtgaacccatgcatggctaaagcacaagggatccataccg

SEQ ID NO: 152442 - DNA, 53 bp, Artificial
  Synthetic oligonucleotide
tagtatatgcccctaaaagctctcccttctaatcatgatttcggagccgcgtg

SEQ ID NO: 152443 - DNA, 58 bp, Artificial
  Synthetic oligonucleotide
catgatttcggagccgcgtgagatggacgaaacaagacgttaggttctttgtcaagga

SEQ ID NO: 152444 - DNA, 53 bp, Artificial
  Synthetic oligonucleotide
ggcgcaatagcagaaatgctgcttccacaggggcgcagacgtggcaatgattg

SEQ ID NO: 152445 - DNA, 53 bp, Artificial
  Synthetic oligonucleotide
taccgggggtgctgcactgggagctatagcaggatcagcgttaacaggcacag

SEQ ID NO: 152446 - DNA, 53 bp, Artificial
  Synthetic oligonucleotide
ggggttgttgcacggcgtttgattgcgtggatttgtcatgcacacacgctctt

SEQ ID NO: 152447 - DNA, 53 bp, Artificial
  Synthetic oligonucleotide
gtaccgtacgcggcgatcttattcgcattctagaaagtctgatgcgacgctct

SEQ ID NO: 152448 - DNA, 52 bp, Artificial
  Synthetic oligonucleotide
tcacgccaagccaccattaatcttggtgcggggagcaattcgggtggttcga

SEQ ID NO: 152449 - DNA, 52 bp, Artificial
  Synthetic oligonucleotide
tgccacacgggtacgcattggttttgcagtggatcgtgtgatgccttatgtc

SEQ ID NO: 152450 - DNA, 52 bp, Artificial
  Synthetic oligonucleotide
tggtcacaaacacgcattttgtcaccttgtgcagtcatctccttaaccatcc

SEQ ID NO: 152451 - DNA, 52 bp, Artificial
  Synthetic oligonucleotide
tggtgggaggtcgtcgtgaacgtatccccctcacatgggggacgatagcgtc

SEQ ID NO: 152452 - DNA, 52 bp, Artificial
  Synthetic oligonucleotide
ttttgcaccgttgtaaatacaagcagagccagaaacctttgaatgaccatag

SEQ ID NO: 152453 - DNA, 52 bp, Artificial
  Synthetic oligonucleotide
caaaagcgacggtgtgccgccccctatatagatgctgcggatgggccctcta

SEQ ID NO: 152454 - DNA, 60 bp, Artificial
  Synthetic oligonucleotide
catgatcagttgaccacttctggatcagttctatatgcactaacaataaacccgagagga

SEQ ID NO: 152455 - DNA, 52 bp, Artificial
  Synthetic oligonucleotide
atgtgtcagatttgccatgccaggttgctgcgcgtatccccgtaggggatgg

SEQ ID NO: 152456 - DNA, 52 bp, Artificial
  Synthetic oligonucleotide
atggacagcttgcagagtgaaagcacggcgtaattggcggcgcaagaaggga

SEQ ID NO: 152457 - DNA, 52 bp, Artificial
  Synthetic oligonucleotide
atccttcgtggacataccagaacgccccttaccaccacgtcgctgtgcacga

SEQ ID NO: 152458 - DNA, 52 bp, Artificial
  Synthetic oligonucleotide
atcaaacaaggcttcaaacacgggacgcgtgacaagatgttgcgctaacatc

SEQ ID NO: 152459 - DNA, 52 bp, Artificial
  Synthetic oligonucleotide
gatttgccatgccaggttgctgcgcgtatccccgtaggggatggaacagagg

SEQ ID NO: 152460 - DNA, 52 bp, Artificial
  Synthetic oligonucleotide
caaccgattgttgttcgttttgcagttaagcccacatcatcgatcttagcct

SEQ ID NO: 152461 - DNA, 52 bp, Artificial
  Synthetic oligonucleotide
gccgcctgtgctggcatcttctttgtggcaaaacggtttcgggagcaacgct

SEQ ID NO: 152462 - DNA, 52 bp, Artificial
  Synthetic oligonucleotide
atagcttgtgcccgcattgtagtacatgttgcacctgggttaacacaattaa

SEQ ID NO: 152463 - DNA, 52 bp, Artificial
  Synthetic oligonucleotide
aggtcgttattctgttctcatgcccaacacagcacgcggtggtggtatttca

SEQ ID NO: 152464 - DNA, 52 bp, Artificial
  Synthetic oligonucleotide
ggaagttagcacaagcacgttcacaagctcatgttatagcgcagacagctag

SEQ ID NO: 152465 - DNA, 53 bp, Artificial
  Synthetic oligonucleotide
tgatttcggagccgtgcgggaacgtaaaaacaaaccgtattggttctgggtca

SEQ ID NO: 152466 - DNA, 52 bp, Artificial
  Synthetic oligonucleotide
ggagtgctcgggcattctttagcggggcgcgctttagagcggggaatatggt

SEQ ID NO: 152467 - DNA, 52 bp, Artificial
  Synthetic oligonucleotide
accgtttgcaatggaacgcttgccggatggttggttgccgtgtgatgggcgt

SEQ ID NO: 152468 - DNA, 52 bp, Artificial
  Synthetic oligonucleotide
aattctcgtaagataggagggtttcatacgctctgtgcggatgttggtacga

SEQ ID NO: 152469 - DNA, 52 bp, Artificial
  Synthetic oligonucleotide
aacatactcgacggctaacacagcatctttccgtcgcttttctggtaaaagc

SEQ ID NO: 152470 - DNA, 52 bp, Artificial
  Synthetic oligonucleotide
gtgctggtaggaagctcctataatgcgcaaagctatgatatgctgttagctc

SEQ ID NO: 152471 - DNA, 52 bp, Artificial
  Synthetic oligonucleotide
aaaaccccatgcgcacccccgcaatctccagttagcaacatggtgggcagaa

SEQ ID NO: 152472 - DNA, 51 bp, Artificial
  Synthetic oligonucleotide
tggaggcggctaataccacagcagtaaaagactattttaccttagatatgg

SEQ ID NO: 152473 - DNA, 51 bp, Artificial
  Synthetic oligonucleotide
cacgggcagttctgttacggctgatggcaaggtggggttgaaagccagcca

SEQ ID NO: 152474 - DNA, 51 bp, Artificial
  Synthetic oligonucleotide
caacattcttttaccgatacgcggggtcaaaatgataaacaatctagatcg

SEQ ID NO: 152475 - DNA, 51 bp, Artificial
  Synthetic oligonucleotide
cagagtgaaagcacggcgtaattggcggcgcaagaagggaccgaccaacgc

SEQ ID NO: 152476 - DNA, 56 bp, Artificial
  Synthetic oligonucleotide
gacactaaaaatagcaatcgtaagtaaaggatgaagatcttttaattcactggtct

SEQ ID NO: 152477 - DNA, 51 bp, Artificial
  Synthetic oligonucleotide
tgtcaacaagcacatcattgcgctggattcacgcgctctcatgagcattat

SEQ ID NO: 152478 - DNA, 51 bp, Artificial
  Synthetic oligonucleotide
atattcttggcgcatccgctcaaaagacgcacgcacatttcccattccttg

SEQ ID NO: 152479 - DNA, 51 bp, Artificial
  Synthetic oligonucleotide
aggagactgtcacgcagacgttttcgcataaaccggcggctcaggggatga

SEQ ID NO: 152480 - DNA, 51 bp, Artificial
  Synthetic oligonucleotide
aacggaacacacacgacgtcggcgaatcactgccccctcttctgctggacg

SEQ ID NO: 152481 - DNA, 51 bp, Artificial
  Synthetic oligonucleotide
aaagctcgcagacccctatgccgtcgttaatctggcaacgggtgagacaga

SEQ ID NO: 152482 - DNA, 51 bp, Artificial
  Synthetic oligonucleotide
ttttactcattgcatgagcagattgtcccaaatgaatggttggctctatag

SEQ ID NO: 152483 - DNA, 51 bp, Artificial
  Synthetic oligonucleotide
gtttcacgaatcatatgtgtaatacggttattatgcccttgttcacgcgta

SEQ ID NO: 152484 - DNA, 51 bp, Artificial
  Synthetic oligonucleotide
gtgcctaccatttgggcttctcccttcatgcaatccacttaatgcaactct

SEQ ID NO: 152485 - DNA, 51 bp, Artificial
  Synthetic oligonucleotide
tacattgggcacaggggttgctacgtctttaggcggtggcgccaagtatga

SEQ ID NO: 152486 - DNA, 51 bp, Artificial
  Synthetic oligonucleotide
gggacaaggcacgtcgttcagaggagtttgcgcgtggacttttggtagggg

SEQ ID NO: 152487 - DNA, 58 bp, Artificial
  Synthetic oligonucleotide
caaaagttgtcaatgaaagagggttgccgtttgagatgtatatttctaatgaggaaca

SEQ ID NO: 152488 - DNA, 58 bp, Artificial
  Synthetic oligonucleotide
cagatcatgaaaatttagtacttactccgttcgtccataagtctacgaaatgagaggc

SEQ ID NO: 152489 - DNA, 51 bp, Artificial
  Synthetic oligonucleotide
ggatattggcttttggaacctttctattttgaccggacgcgagggaccact

SEQ ID NO: 152490 - DNA, 51 bp, Artificial
  Synthetic oligonucleotide
ggaacataggtgcctggcaacgcaagcacactaacaagcccaacacgcgcg

SEQ ID NO: 152491 - DNA, 51 bp, Artificial
  Synthetic oligonucleotide
gctagcgtattgagtgcgcgtgataaatttattgcattgatgtggtcacga

SEQ ID NO: 152492 - DNA, 51 bp, Artificial
  Synthetic oligonucleotide
gatcccaaacccgtaacgcctcgacttccatcgatctgccgtataataatg

SEQ ID NO: 152493 - DNA, 51 bp, Artificial
  Synthetic oligonucleotide
tgcacagaatctagttagactacaagtttcgagaagtctgcaactgcttgt

SEQ ID NO: 152494 - DNA, 51 bp, Artificial
  Synthetic oligonucleotide
ccacaacgagccttatcaggtaaaagttgaccacaagccccaatagggctt

SEQ ID NO: 152495 - DNA, 51 bp, Artificial
  Synthetic oligonucleotide
cccagcattaccaatacggtcactagcccagcgtatagcacggatatagct

SEQ ID NO: 152496 - DNA, 51 bp, Artificial
  Synthetic oligonucleotide
cccgcagccataccaccgtgtggcggagccccataatggaatgcacgataa

SEQ ID NO: 152497 - DNA, 51 bp, Artificial
  Synthetic oligonucleotide
cgccgaccaaaaagcttccgaccggcattccagcatagccgatcacccgaa

SEQ ID NO: 152498 - DNA, 51 bp, Artificial
  Synthetic oligonucleotide
cggttgcgagcgccctcgcataagtattccgggagcctgaaagcactgacc

SEQ ID NO: 152499 - DNA, 55 bp, Artificial
  Synthetic oligonucleotide
gccgcgtgagatggacgaaacaagacgttaggttctttgtcaaggacgccgttag

SEQ ID NO: 152500 - DNA, 51 bp, Artificial
  Synthetic oligonucleotide
tcgtgcaaaaggtgtaacccgtgatagtaaacatgcgtattcgcaagatgg

SEQ ID NO: 152501 - DNA, 50 bp, Artificial
  Synthetic oligonucleotide
atcccgaggctgcaaagaaagttttccgtgagtccccacaagcccaaagg

SEQ ID NO: 152502 - DNA, 50 bp, Artificial
  Synthetic oligonucleotide
gattaacaagctggcgttcccgggctggggagcaatcgcaatgttggggg

SEQ ID NO: 152503 - DNA, 50 bp, Artificial
  Synthetic oligonucleotide
gccactcgtagacagcggcggggcaatagtgtgtggaaggtgccccatag

SEQ ID NO: 152504 - DNA, 50 bp, Artificial
  Synthetic oligonucleotide
caaacccgataaagctccaagccatgcaccgcggcgtacaagcgtgccat

SEQ ID NO: 152505 - DNA, 50 bp, Artificial
  Synthetic oligonucleotide
ctgtatcacctaatttgcgtggaaggctgacatctccatcattagggagt

SEQ ID NO: 152506 - DNA, 50 bp, Artificial
  Synthetic oligonucleotide
tgtttggggcgtccacttgctgcgcctagtgcgaatcaatcggggcgtct

SEQ ID NO: 152507 - DNA, 50 bp, Artificial
  Synthetic oligonucleotide
tagcgcttggccggaaatcactctgacgacttcatccaattatacgcgct

SEQ ID NO: 152508 - DNA, 50 bp, Artificial
  Synthetic oligonucleotide
ggctacataaagatgtgactgatgcctatgtcgagacattgcaacatagg

SEQ ID NO: 152509 - DNA, 50 bp, Artificial
  Synthetic oligonucleotide
gggaatccctatgacagacctggtgggacgccaagtaatgggcggcgtgc

SEQ ID NO: 152510 - DNA, 51 bp, Artificial
  Synthetic oligonucleotide
gccgttaggcgccccgtaggggttgccttgaccctaagaacctaggattgt

SEQ ID NO: 152511 - DNA, 50 bp, Artificial
  Synthetic oligonucleotide
ttgcacgccatgaaacgtggcaaaccgtagcttgcccttcttgtggtcaa

SEQ ID NO: 152512 - DNA, 50 bp, Artificial
  Synthetic oligonucleotide
atgctatgagtttgagctagctggactttgagcagatggtttatcgctga

SEQ ID NO: 152513 - DNA, 50 bp, Artificial
  Synthetic oligonucleotide
gaggttcgtaattgagaacgcttttcggaatagcaccaccgtaaacccaa

SEQ ID NO: 152514 - DNA, 50 bp, Artificial
  Synthetic oligonucleotide
aaattgttcgttcacttcctgagacaaacgattagcaatttgatctgttg

SEQ ID NO: 152515 - DNA, 50 bp, Artificial
  Synthetic oligonucleotide
ctgtcgtacgtttaactgctcatgacaaagttaatggaatcatcggaact

SEQ ID NO: 152516 - DNA, 50 bp, Artificial
  Synthetic oligonucleotide
cagtgcgtccgagtgatacaatgccttgtttggcagtgcgggcacgggtg

SEQ ID NO: 152517 - DNA, 60 bp, Artificial
  Synthetic oligonucleotide
gttcacggtagcagtgttgcaaagcagcagccacacagcccattgttgctagctttttac

SEQ ID NO: 152518 - DNA, 60 bp, Artificial
  Synthetic oligonucleotide
cctagtattgctgcgtgtcaaaccgttattttccagcatacattgcgtcctgctgttgat

SEQ ID NO: 152519 - DNA, 56 bp, Artificial
  Synthetic oligonucleotide
gcgcctaacggcgtccttgacaaagaacctaacgtcttgtttcgtccatctcacgc

SEQ ID NO: 152520 - DNA, 56 bp, Artificial
  Synthetic oligonucleotide
cctatctgttattcgactgtatttactgggggcatcgcaaggcggtacctccggtg

SEQ ID NO: 152521 - DNA, 56 bp, Artificial
  Synthetic oligonucleotide
caccataaatggtggtaatcactagactttattacataaagtcgttcgtggctaaa

SEQ ID NO: 152522 - DNA, 60 bp, Artificial
  Synthetic oligonucleotide
ttgagaggctattgcgattgtactggcaaattgttcgttcacttcctcagtcaaacgatt

SEQ ID NO: 152523 - DNA, 59 bp, Artificial
  Synthetic oligonucleotide
ctaggcataattttaatcgaagtgtaaagcggctgatagatatggatatccttttggaa

SEQ ID NO: 152524 - DNA, 59 bp, Artificial
  Synthetic oligonucleotide
cgatgactgcataatgccgtttaacagcttggtgttgtgctttactgccttgtaacccc

SEQ ID NO: 152525 - DNA, 60 bp, Artificial
  Synthetic oligonucleotide
aaattcacacgcatcatgccatgggttgaaagggacgcccataaatcaacgggctctgat

SEQ ID NO: 152526 - DNA, 60 bp, Artificial
  Synthetic oligonucleotide
ctacagatcttttcatccatgtcacaagtggttgatttgggtctgcatcaattaatttca

SEQ ID NO: 152527 - DNA, 54 bp, Artificial
  Synthetic oligonucleotide
tttatttacgttacattaggttagacccatacaatttctaactcaccataagga

SEQ ID NO: 152528 - DNA, 55 bp, Artificial
  Synthetic oligonucleotide
gggaaattggctaggtggtgagacgtttgtttcgtttgataaattagcaatagac

SEQ ID NO: 152529 - DNA, 52 bp, Artificial
  Synthetic oligonucleotide
ctgggtcaaggtcgccgttaggcgccccgtaggggttgccttgaccctaaga

SEQ ID NO: 152530 - DNA, 60 bp, Artificial
  Synthetic oligonucleotide
acttcacattgaagaggaaattgcaagcagaggaaaagattggcgcaagcgtaagcttgg

SEQ ID NO: 152531 - DNA, 53 bp, Artificial
  Synthetic oligonucleotide
agaaatgcttggtacccacgtaacaacctttaaaaaggtagatggacagcaat

SEQ ID NO: 152532 - DNA, 60 bp, Artificial
  Synthetic oligonucleotide
tagagttctcctcgattttctttagcaatcataccgcgtagatatcccccagatgacttc

SEQ ID NO: 152533 - DNA, 55 bp, Artificial
  Synthetic oligonucleotide
agatagcctaccgtcttgtgttaaaggtactacgaaagcgcttaaatgcgggcta

SEQ ID NO: 152534 - DNA, 57 bp, Artificial
  Synthetic oligonucleotide
gtttgcaccattctttgtagttttgtcgctctgtgggcgttttcgtggctttgagag

SEQ ID NO: 152535 - DNA, 57 bp, Artificial
  Synthetic oligonucleotide
atggggaaagcatagcgacggactatcgaccgtgtttcttagcgcccggcattcctc

SEQ ID NO: 152536 - DNA, 55 bp, Artificial
  Synthetic oligonucleotide
tcgcttcagtggaggtggccgaaactgtcccgtccttcaaaccagaaagtgtccg

SEQ ID NO: 152537 - DNA, 49 bp, Artificial
  Synthetic oligonucleotide
aacaatcctaggttcttagggtcaaggaaacccctacggggcgcctaac

SEQ ID NO: 152538 - DNA, 50 bp, Artificial
  Synthetic oligonucleotide
agggtcaaggaaacccctacggggcgcctaacggcgtccttgacccagaa

SEQ ID NO: 152539 - DNA, 59 bp, Artificial
  Synthetic oligonucleotide
agctttttacaacgcataatcgcatataccgccatactcgcccctatctattattcaac

SEQ ID NO: 152540 - DNA, 58 bp, Artificial
  Synthetic oligonucleotide
aggaatgtgaaacgtgctgttcgttgtttggtgtgcgttcactatcggcatttggtgt

SEQ ID NO: 152541 - DNA, 57 bp, Artificial
  Synthetic oligonucleotide
tagctagaatatcaggaagtttatcgcctttacccgctaaaattgtttgctcaatcc

SEQ ID NO: 152542 - DNA, 58 bp, Artificial
  Synthetic oligonucleotide
gatatcttatttagtgaggaatgaaatgccagttatatcctttgctaattccaaaggg

SEQ ID NO: 152543 - DNA, 57 bp, Artificial
  Synthetic oligonucleotide
cggtgtcacgaggcttatgtttcactccccggaggatgcgctatcggaactagaccc

SEQ ID NO: 152544 - DNA, 58 bp, Artificial
  Synthetic oligonucleotide
caggtgcctatctccacaaaccacgcaccttccccaacggatcaagcttttgcctcaa

SEQ ID NO: 152545 - DNA, 58 bp, Artificial
  Synthetic oligonucleotide
ccacaaaccacgcaccttccccaacggatcaagcttttgcctcaacagatcaggtgcc

SEQ ID NO: 152546 - DNA, 54 bp, Artificial
  Synthetic oligonucleotide
tgtaaccccctttcaagtccaagatcccttacagcctcagcaaaggttgtttgg

SEQ ID NO: 152547 - DNA, 58 bp, Artificial
  Synthetic oligonucleotide
tgtcctgcttgcgggggcacacattcagccagcatcattatcgagagggagccgcgaa

SEQ ID NO: 152548 - DNA, 53 bp, Artificial
  Synthetic oligonucleotide
taactccccaaagcacccgcaaggatcggccttacccccgcaaaacaccgcga

SEQ ID NO: 152549 - DNA, 58 bp, Artificial
  Synthetic oligonucleotide
taaagatcttgggggttgctgtcatatacagacgttttttgccttgaatgatgctgtt

SEQ ID NO: 152550 - DNA, 58 bp, Artificial
  Synthetic oligonucleotide
ctccgtcagcaaccacccttagcgaagcaggcccctcaccgacaactgcctcaccggc

SEQ ID NO: 152551 - DNA, 58 bp, Artificial
  Synthetic oligonucleotide
actgcttgcacggtgtcacgaggcttatgtttcactccccggaggatgcgctatcgga

SEQ ID NO: 152552 - DNA, 53 bp, Artificial
  Synthetic oligonucleotide
ttagggtcaaggcaacccctacggggcgcctaacggcgaccttgactcagaac

SEQ ID NO: 152553 - DNA, 57 bp, Artificial
  Synthetic oligonucleotide
cgagccttatcaggtaaaagttgaccacaagccccaatagggcttgatggacaactc

SEQ ID NO: 152554 - DNA, 57 bp, Artificial
  Synthetic oligonucleotide
caaccaggttttgcaagctgcataatcaaccgtgatatcctctctgacaatgggcgc

SEQ ID NO: 152555 - DNA, 57 bp, Artificial
  Synthetic oligonucleotide
tcagcataggctcctcggattgtcccccagagaaatttatcgcgcactgggcgtcta

SEQ ID NO: 152556 - DNA, 57 bp, Artificial
  Synthetic oligonucleotide
tcttacaaatggtggggctgtgattgcgcgagaagatttagggttagcggcggcttg

SEQ ID NO: 152557 - DNA, 60 bp, Artificial
  Synthetic oligonucleotide
atgctgttcgttgtttggagtctgttcgctatcagcattaggtgtttcacgttcacggta

SEQ ID NO: 152558 - DNA, 57 bp, Artificial
  Synthetic oligonucleotide
gcggttgcctgagttgccaatgcccccaattcatcggtgagcacaccggtatgtgct

SEQ ID NO: 152559 - DNA, 57 bp, Artificial
  Synthetic oligonucleotide
gcctcaacagatcaggtgcctgtctccacaaaccacgcaccttccccaacggatcaa

SEQ ID NO: 152560 - DNA, 56 bp, Artificial
  Synthetic oligonucleotide
aggcaaggcttgcacacaatattgcacacccaggcatcgctgctacccaccaacat

SEQ ID NO: 152561 - DNA, 56 bp, Artificial
  Synthetic oligonucleotide
ggtaatcgggccactgcttgcacggtgtcacgaggcttatgtttcactccccggag

SEQ ID NO: 152562 - DNA, 56 bp, Artificial
  Synthetic oligonucleotide
aatgcgtcaatttgcctcacgcaatggtattaagtggccatgtggggcttttgtta

SEQ ID NO: 152563 - DNA, 55 bp, Artificial
  Synthetic oligonucleotide
gtgctcccatagcttgcatgatggtgactgtacgcagaacgtcatcactttcaag

SEQ ID NO: 152564 - DNA, 55 bp, Artificial
  Synthetic oligonucleotide
gagaatgtgcctgatcgcgagaggatggaacattatcttggtcaaccgttgagcc

SEQ ID NO: 152565 - DNA, 55 bp, Artificial
  Synthetic oligonucleotide
gagacacgtatatacagacctgagcgtatagagatccagggtaagcttataggac

SEQ ID NO: 152566 - DNA, 55 bp, Artificial
  Synthetic oligonucleotide
ctaacgtaacacgcatatgatcgacgctagcgtctaatgcattttggacgtcttt

SEQ ID NO: 152567 - DNA, 55 bp, Artificial
  Synthetic oligonucleotide
cgttcagatttgcgtaaacgctctgaagccgatttaagctgtccacatgcagcta

SEQ ID NO: 152568 - DNA, 59 bp, Artificial
  Synthetic oligonucleotide
gaaacaaaatcttatcatggacggtagtttacaaagcgatatcatcgcaactgtattag

SEQ ID NO: 152569 - DNA, 55 bp, Artificial
  Synthetic oligonucleotide
cgttcaatagcagaaaatgcacgattcgtaataagggaagcacgattaggtaagc

SEQ ID NO: 152570 - DNA, 55 bp, Artificial
  Synthetic oligonucleotide
gagattgtaattccatgcgctcctggaaattaataggcttaaatggccgtttcca

SEQ ID NO: 152571 - DNA, 55 bp, Artificial
  Synthetic oligonucleotide
gagctgccgaaaccgcatgtgtcgtcccatcctgttcatgccctggtaagaatgg

SEQ ID NO: 152572 - DNA, 55 bp, Artificial
  Synthetic oligonucleotide
cgtggacttgtttctgattgggtttatcatgacaagcaaggtaatccacatgtgc

SEQ ID NO: 152573 - DNA, 55 bp, Artificial
  Synthetic oligonucleotide
ctgtggaccatattggtacatagcgtctaacgaccatcgcacttcacgtcccaac

SEQ ID NO: 152574 - DNA, 55 bp, Artificial
  Synthetic oligonucleotide
cttcgtaagggaacactcaagaaaatgcaatgggaggcaacataatcaagagatc

SEQ ID NO: 152575 - DNA, 54 bp, Artificial
  Synthetic oligonucleotide
cttgagcggaagccataggtacacggtaccgaatcgggttagccattttgggac

SEQ ID NO: 152576 - DNA, 55 bp, Artificial
  Synthetic oligonucleotide
cttgccaataagctcggcgctgctttaggcgctagtcgagcagcagtcgacgcgg

SEQ ID NO: 152577 - DNA, 55 bp, Artificial
  Synthetic oligonucleotide
tcgttgtttggtgtgcgttcactatcggcatttggtgtttctcgttcacggtagc

SEQ ID NO: 152578 - DNA, 55 bp, Artificial
  Synthetic oligonucleotide
ctgtacggcgtgttattgcttatgctgttttgttcacgcaatctaaagtcgttgc

SEQ ID NO: 152579 - DNA, 60 bp, Artificial
  Synthetic oligonucleotide
atgcaattgcaacccattgaggctggagcggcatttcgcgctgccgttgataatattggt

SEQ ID NO: 152580 - DNA, 55 bp, Artificial
  Synthetic oligonucleotide
gaagagttaagtcaagaccttatgcaaggcttagaagagtatgaagtccgtctgc

SEQ ID NO: 152581 - DNA, 55 bp, Artificial
  Synthetic oligonucleotide
gaagcgcgttctgctatggtgcatcgtaatgatatggttttacgctgcttgaccg

SEQ ID NO: 152582 - DNA, 55 bp, Artificial
  Synthetic oligonucleotide
gaagtgtaaagcggctgatagatatggatatccttttggaaggtcctcgtattgg

SEQ ID NO: 152583 - DNA, 55 bp, Artificial
  Synthetic oligonucleotide
gaataacttccgacgccaaccgcagataggcttggctaccagcacatttgagatc

SEQ ID NO: 152584 - DNA, 55 bp, Artificial
  Synthetic oligonucleotide
ctgccaaaccaatcgctgcagcctgtctagcctctttacgtgcaccttcaatccc

SEQ ID NO: 152585 - DNA, 55 bp, Artificial
  Synthetic oligonucleotide
gaataccacaatcgtcgacgaatctttaacagcgcttgcgacccggaaaggttac

SEQ ID NO: 152586 - DNA, 55 bp, Artificial
  Synthetic oligonucleotide
gaataggctgtgagtacgacggcaagaggttcatcggataaaagcttacgacagt

SEQ ID NO: 152587 - DNA, 55 bp, Artificial
  Synthetic oligonucleotide
gaattcgatgtatcggatttaccgtgccagattgctgcgcgtatccccttagggg

SEQ ID NO: 152588 - DNA, 55 bp, Artificial
  Synthetic oligonucleotide
ctctcctaatagttagcgttgataatcgtgctatatcacagacgtatatcccgcc

SEQ ID NO: 152589 - DNA, 55 bp, Artificial
  Synthetic oligonucleotide
ctcgttgtatgcgtgtagcatataaaggttttgtcgggtgtagctatgccataca

SEQ ID NO: 152590 - DNA, 55 bp, Artificial
  Synthetic oligonucleotide
cttggctccacgatgaatgaacggcgtcgtcaaaacattccagccgcctgtgtgg

SEQ ID NO: 152591 - DNA, 55 bp, Artificial
  Synthetic oligonucleotide
cgcctgaatcttgatggaactttggactcgtctttcggtagcagcggtaccactt

SEQ ID NO: 152592 - DNA, 55 bp, Artificial
  Synthetic oligonucleotide
gccgtagttagcagcggtcttaaggcgggagagcaagtgattctcttccccgggg

SEQ ID NO: 152593 - DNA, 55 bp, Artificial
  Synthetic oligonucleotide
cgacgtcctgtcaagagctcataccaaatcccgatctaatgcacatcaacgattc

SEQ ID NO: 152594 - DNA, 55 bp, Artificial
  Synthetic oligonucleotide
cgacggccttggggtacactccggtgaatgacgctggagacactatgaccgggga

SEQ ID NO: 152595 - DNA, 55 bp, Artificial
  Synthetic oligonucleotide
gctgggaggctgaattggcaataccactcatgcccgagtcattcttttcatcaca

SEQ ID NO: 152596 - DNA, 55 bp, Artificial
  Synthetic oligonucleotide
gctttaccgtcacggattgtgaaccaaacctggaaggcagagtcatctttgccgg

SEQ ID NO: 152597 - DNA, 55 bp, Artificial
  Synthetic oligonucleotide
ggcacacaggctttacgggaacttccgtttggtatgatccaaagatggacttgag

SEQ ID NO: 152598 - DNA, 55 bp, Artificial
  Synthetic oligonucleotide
ggcagcactacttgtatttccggtttggtgaatacgaatcataacggtggaacac

SEQ ID NO: 152599 - DNA, 55 bp, Artificial
  Synthetic oligonucleotide
ccacggtagcggttcatatccaggtacatgcccagatccaaacggtcattcccgt

SEQ ID NO: 152600 - DNA, 55 bp, Artificial
  Synthetic oligonucleotide
cataaagcacaaggacaccagggagcttccaccgtaactcaagaacggcagagtc

SEQ ID NO: 152601 - DNA, 55 bp, Artificial
  Synthetic oligonucleotide
gaacccctgacaccggctttaatgcgaccgggactctgatgttcacccacgcttc

SEQ ID NO: 152602 - DNA, 55 bp, Artificial
  Synthetic oligonucleotide
gtcatacgtctctggttacgtcccagtcattcctctgaagaattccgtactgttt

SEQ ID NO: 152603 - DNA, 55 bp, Artificial
  Synthetic oligonucleotide
gtcggacaacttttcatcgttggctttccccataaagacgtcgctccggatctgg

SEQ ID NO: 152604 - DNA, 55 bp, Artificial
  Synthetic oligonucleotide
tccccatccatcacagtttcttcggacaagccctccacagttgttggcgcggtcc

SEQ ID NO: 152605 - DNA, 55 bp, Artificial
  Synthetic oligonucleotide
cacgagtatcaaaggggttttagtgtttcaatcatgaaaggtgggatgtctaggt

SEQ ID NO: 152606 - DNA, 54 bp, Artificial
  Synthetic oligonucleotide
cacgagggacaatttatcgttcagttaacaaacgacctgagggtcgataaccgc

SEQ ID NO: 152607 - DNA, 55 bp, Artificial
  Synthetic oligonucleotide
gttggcactttccagtgcataggtggcgcgatcccgaaagtctctcgcaggcccg

SEQ ID NO: 152608 - DNA, 55 bp, Artificial
  Synthetic oligonucleotide
ataccgggatgaggagcacaagaaacgcacgatccagagcttcgttctttacgcg

SEQ ID NO: 152609 - DNA, 55 bp, Artificial
  Synthetic oligonucleotide
ataaggaccatgttgcggtccctgtctttgggacccaaaatctgtcacagtctgt

SEQ ID NO: 152610 - DNA, 55 bp, Artificial
  Synthetic oligonucleotide
actctgtggatggggaatcctgactttacaggccatcgcgacggtcctatgcctg

SEQ ID NO: 152611 - DNA, 55 bp, Artificial
  Synthetic oligonucleotide
actggacttgcgcggcactctttcctcctcgaactagatcccgagcttcccctca

SEQ ID NO: 152612 - DNA, 55 bp, Artificial
  Synthetic oligonucleotide
gcacgttgagagaatgaactgtgaatataccgaacgtgggagcgtataaatgaag

SEQ ID NO: 152613 - DNA, 54 bp, Artificial
  Synthetic oligonucleotide
ggtaattgcgcagaagtttctcgattgtggtttcttcaaggctagcggagcgct

SEQ ID NO: 152614 - DNA, 53 bp, Artificial
  Synthetic oligonucleotide
gtctttgccatcagaaggagtcatgctgtaacggtaaacgatcggatccacac

SEQ ID NO: 152615 - DNA, 53 bp, Artificial
  Synthetic oligonucleotide
cggagggtggattgattctcattctggaccaagggtctaaatagctcagatgt

SEQ ID NO: 152616 - DNA, 53 bp, Artificial
  Synthetic oligonucleotide
cgccgtcgatccatctggtgaacaagtttgatccgaacagcgtttatcagaaa

SEQ ID NO: 152617 - DNA, 52 bp, Artificial
  Synthetic oligonucleotide
tcccgtccggtctcaagcctgttgacggatctgttttcgtggcatgccgtgt

SEQ ID NO: 152618 - DNA, 52 bp, Artificial
  Synthetic oligonucleotide
cttcgtcaggcgcacggaccaagtccaagccccattccgtcagtaaatgggg

SEQ ID NO: 152619 - DNA, 52 bp, Artificial
  Synthetic oligonucleotide
ccgtccgggtcagcgggaatacagcggctcgattggtattccgggttcagag

SEQ ID NO: 152620 - DNA, 52 bp, Artificial
  Synthetic oligonucleotide
cgcagttgcgtacaacggacaacctgcgatggtacagccctaccagatcagc

SEQ ID NO: 152621 - DNA, 52 bp, Artificial
  Synthetic oligonucleotide
cgcggactgaacattcagagtggccagactttgaacgactgtttccatctta

SEQ ID NO: 152622 - DNA, 51 bp, Artificial
  Synthetic oligonucleotide
taacgctccggagtccctgtgtccttgtcacacttggcgaacaaccaaggg

SEQ ID NO: 152623 - DNA, 55 bp, Artificial
  Synthetic oligonucleotide
ctatcgagactttgcctacgggcggtcagtccacagcgattgactccactccgct

SEQ ID NO: 152624 - DNA, 51 bp, Artificial
  Synthetic oligonucleotide
agagcagctgcttcggtcacacgtacgaattctaaagccaggtttcgatcc

SEQ ID NO: 152625 - DNA, 50 bp, Artificial
  Synthetic oligonucleotide
ccgacttccgaggcatatcccgcacccacgcgcgagctcaaaagcaacgc

SEQ ID NO: 152626 - DNA, 50 bp, Artificial
  Synthetic oligonucleotide
cccgggaaaatccacgcggcatccacacggatcagctggagttcagcggg

SEQ ID NO: 152627 - DNA, 50 bp, Artificial
  Synthetic oligonucleotide
ggcagtttggcgggggatgtgaccggagcgcagagtgccacctccgtgga

SEQ ID NO: 152628 - DNA, 50 bp, Artificial
  Synthetic oligonucleotide
catgctgacccaggcgccatcggtcttcgggctgtgggccactttcgaac

SEQ ID NO: 152629 - DNA, 50 bp, Artificial
  Synthetic oligonucleotide
cagcaaaatcgcgtttgcagcttcgcagtgttcgctcgcccgtgttgtgg

SEQ ID NO: 152630 - DNA, 50 bp, Artificial
  Synthetic oligonucleotide
cacgcagtgagctgccgtcagaaccaactgcggagcaatcaaagtccccg

SEQ ID NO: 152631 - DNA, 50 bp, Artificial
  Synthetic oligonucleotide
gtgtcggcaaagacgttggcactttccagtgcataggtggcgcgatcccg

SEQ ID NO: 152632 - DNA, 50 bp, Artificial
  Synthetic oligonucleotide
gttgcgcagactccagtcctcgccgtaaatcagggtctcgcccgtttggc

SEQ ID NO: 152633 - DNA, 50 bp, Artificial
  Synthetic oligonucleotide
acggtcccgggtgatagcgcggggttttgacttccggagaccagtccttg

SEQ ID NO: 152634 - DNA, 55 bp, Artificial
  Synthetic oligonucleotide
ctaaacaacgctgtgtcatgagttgcggggacttttagagacttatgtgctacga

SEQ ID NO: 152635 - DNA, 50 bp, Artificial
  Synthetic oligonucleotide
gttgtcgggggacccttttcgcttcgacgtgcttggagcacgcctccgct

SEQ ID NO: 152636 - DNA, 50 bp, Artificial
  Synthetic oligonucleotide
acgccggggacttacagtctgcatcccaaaagcgcggacgagtgggtgac

SEQ ID NO: 152637 - DNA, 50 bp, Artificial
  Synthetic oligonucleotide
aatccacgcggcatccacacggatcagctggagttcagcgggcacctttg

SEQ ID NO: 152638 - DNA, 50 bp, Artificial
  Synthetic oligonucleotide
ggaatgccggcaaactccatcacgcggctgttttggaagcgccacacccg

SEQ ID NO: 152639 - DNA, 50 bp, Artificial
  Synthetic oligonucleotide
ccgggtacaggctggtcttgtcaatcaccgcggaagcgcggcagttgtat

SEQ ID NO: 152640 - DNA, 50 bp, Artificial
  Synthetic oligonucleotide
gcgcgtggctgtggcgaaaaggtgtcaacgtgtacaccggaacgggggct

SEQ ID NO: 152641 - DNA, 50 bp, Artificial
  Synthetic oligonucleotide
gcgagcaagggggctcgagcaagatagcaaggtttatgagtgcggcgcgt

SEQ ID NO: 152642 - DNA, 50 bp, Artificial
  Synthetic oligonucleotide
gccgccaacaaaattccgttcgtgatgtcccgcaaggcccaagccacgtt

SEQ ID NO: 152643 - DNA, 50 bp, Artificial
  Synthetic oligonucleotide
cgtgccgaaagttcttttgggcagcggccaaaatgtgccgtgcgctcaag

SEQ ID NO: 152644 - DNA, 50 bp, Artificial
  Synthetic oligonucleotide
gccaatccatgtacagcggcgccctttgtcggctgtctcaccgtgagact

SEQ ID NO: 152645 - DNA, 55 bp, Artificial
  Synthetic oligonucleotide
gccacgcagtgtgcctctttcgtctgtaaagacaaggtcgatgttccaccacgta

SEQ ID NO: 152646 - DNA, 50 bp, Artificial
  Synthetic oligonucleotide
ctcgcacgggacatgcccgctcgtccctggagcaattcaaacccttccag

SEQ ID NO: 152647 - DNA, 50 bp, Artificial
  Synthetic oligonucleotide
gcacggaccaagtccaagccccattccgtcagtaaatgggggacccgggg

SEQ ID NO: 152648 - DNA, 50 bp, Artificial
  Synthetic oligonucleotide
gcaaggccgtccccatcaatacgatgtagggtctccaggtgcgctgccag

SEQ ID NO: 152649 - DNA, 50 bp, Artificial
  Synthetic oligonucleotide
gcaaactccatcacgcggctgttttggaagcgccacacccggtccagaac

SEQ ID NO: 152650 - DNA, 50 bp, Artificial
  Synthetic oligonucleotide
gaccggagcgcagagtgccacctccgtggatcgcatcaagggaactcccg

SEQ ID NO: 152651 - DNA, 50 bp, Artificial
  Synthetic oligonucleotide
ctgcgttgtcaggggacctctttcgctccgacgtgcttggagcacgcctg

SEQ ID NO: 152652 - DNA, 55 bp, Artificial
  Synthetic oligonucleotide
cgtctgagagaattgtccgtacaagcagcttccgatactatcggtcctgtagaaa

SEQ ID NO: 152653 - DNA, 55 bp, Artificial
  Synthetic oligonucleotide
cgtaacggccaaagcaatccttattatggccttcgtgtggactgtgccgacacag

SEQ ID NO: 152654 - DNA, 53 bp, Artificial
  Synthetic oligonucleotide
gcccgtcggagttccctatcttgtttacaactcggtggtagggtcccactctg

SEQ ID NO: 152655 - DNA, 59 bp, Artificial
  Synthetic oligonucleotide
ataggtcgtctgatgcggctctttaagggacatctgaccctccaacccccgcgatgcta

SEQ ID NO: 152656 - DNA, 59 bp, Artificial
  Synthetic oligonucleotide
gtctgttacttctgcccctgtcagatccttctatcgaacccacctgcgcaacccgcctg

SEQ ID NO: 152657 - DNA, 51 bp, Artificial
  Synthetic oligonucleotide
atcccgcgtgtagacgtcaaggaggccaaaccctcgtcacaagggaccgtg

SEQ ID NO: 152658 - DNA, 51 bp, Artificial
  Synthetic oligonucleotide
gcacgacttcaggaaagggaaccggatagcgtccaagcgtcagggagaaca

SEQ ID NO: 152659 - DNA, 51 bp, Artificial
  Synthetic oligonucleotide
atggccccgagcggtgccgttctatcccgtcccttgaacgggcttgctccg

SEQ ID NO: 152660 - DNA, 51 bp, Artificial
  Synthetic oligonucleotide
ccgttggtgtgacagtaccggtggtaacacgaagcaaggcggaatgtactt

SEQ ID NO: 152661 - DNA, 51 bp, Artificial
  Synthetic oligonucleotide
taagcatcctcttccgtcatgtagggatggcgcccgcggctttcagtttgg

SEQ ID NO: 152662 - DNA, 50 bp, Artificial
  Synthetic oligonucleotide
acccgggggaccaatgtcctgtcgggagccaatcataaaccgctgctcgt

SEQ ID NO: 152663 - DNA, 50 bp, Artificial
  Synthetic oligonucleotide
accctccggtcattccctctgccggacaagcgcgctaagactctcgatcc

SEQ ID NO: 152664 - DNA, 50 bp, Artificial
  Synthetic oligonucleotide
aaggcggataggaaaggggcgagccaaatcagaccgtcgcatgggaagcc

SEQ ID NO: 152665 - DNA, 50 bp, Artificial
  Synthetic oligonucleotide
aacgggagggaccggcaaagcgggtgataacgtcaagcaggcggcataga

SEQ ID NO: 152666 - DNA, 50 bp, Artificial
  Synthetic oligonucleotide
acccttcgtcccgtggatttaagcacaggcgcttccagacgcaagcccta

SEQ ID NO: 152667 - DNA, 60 bp, Artificial
  Synthetic oligonucleotide
gatccaaagggagcgcgtctatgaatgtcgaatgcgctctattccactgtgggcgtatat

SEQ ID NO: 152668 - DNA, 50 bp, Artificial
  Synthetic oligonucleotide
aaggcaggatgaatcgcgcacgatcataagggctcgcagcattgctccga

SEQ ID NO: 152669 - DNA, 50 bp, Artificial
  Synthetic oligonucleotide
taccgctgagacacgcggggcatccgtgagaatgtccgtggtcgccgtat

SEQ ID NO: 152670 - DNA, 50 bp, Artificial
  Synthetic oligonucleotide
accggcggattaccggcataccagcggatcactgtcggtccctgttcgcc

SEQ ID NO: 152671 - DNA, 50 bp, Artificial
  Synthetic oligonucleotide
accggtatggaagtccaagtcgtgggaggacgcctggctggttgggttcc

SEQ ID NO: 152672 - DNA, 50 bp, Artificial
  Synthetic oligonucleotide
ttcaatctttgtatgagctccgcattgttcgtcttggcgtgttccgcata

SEQ ID NO: 152673 - DNA, 50 bp, Artificial
  Synthetic oligonucleotide
aagctgtcgccgcgagtgccgagactacaccctggcaaacaccgatgaca

SEQ ID NO: 152674 - DNA, 50 bp, Artificial
  Synthetic oligonucleotide
aagaccgcgtcttcctctgtcccagagcggccaggaaaattgcgtggggt

SEQ ID NO: 152675 - DNA, 50 bp, Artificial
  Synthetic oligonucleotide
aagcagcgcaattgacgggttctgggatggggccggtcgataccgcaaca

SEQ ID NO: 152676 - DNA, 50 bp, Artificial
  Synthetic oligonucleotide
aagacgcggtctctccattgggtgatggctttggtccaagggagccgggc

SEQ ID NO: 152677 - DNA, 50 bp, Artificial
  Synthetic oligonucleotide
aatgagcaggcgcgaacccacgagtgaagaaaaacagggggcgtcggcca

SEQ ID NO: 152678 - DNA, 55 bp, Artificial
  Synthetic oligonucleotide
aaagttgcgttaaaccgacttgagcggtcggactcaaggctagagtcagccggga

SEQ ID NO: 152679 - DNA, 50 bp, Artificial
  Synthetic oligonucleotide
aatcgtgggaagcgccgcaaaatcgtccaacgcacatacacgatcggcgg

SEQ ID NO: 152680 - DNA, 50 bp, Artificial
  Synthetic oligonucleotide
aattaccaatgctcccgccaactgccacgctgcgtcccgtctgcagtgtc

SEQ ID NO: 152681 - DNA, 50 bp, Artificial
  Synthetic oligonucleotide
aacctcgaagtcttcaggcccggaccaaacggtcgggcaaggcgtctttt

SEQ ID NO: 152682 - DNA, 50 bp, Artificial
  Synthetic oligonucleotide
gtctgttggaacacgcgcccttaaccatcaaggcgagtcgagaaacatta

SEQ ID NO: 152683 - DNA, 50 bp, Artificial
  Synthetic oligonucleotide
aatcgagaacccccgccttgaggtttcgcttggcccagacggagcgccgg

SEQ ID NO: 152684 - DNA, 50 bp, Artificial
  Synthetic oligonucleotide
aagtccaagtcgtgggaggacgcctggctggttgggttccgtgctgtggg

SEQ ID NO: 152685 - DNA, 50 bp, Artificial
  Synthetic oligonucleotide
aacctttcgtcccacgccaaatacctgccatcggctgcaagggaccgaga

SEQ ID NO: 152686 - DNA, 50 bp, Artificial
  Synthetic oligonucleotide
aaggttccttgaacgcggggcatcgtgatccgtcgggctttgcctttccc

SEQ ID NO: 152687 - DNA, 50 bp, Artificial
  Synthetic oligonucleotide
aaaccaacgttccgaccaagagcgcgggaaccgagcccttgagggggacc

SEQ ID NO: 152688 - DNA, 50 bp, Artificial
  Synthetic oligonucleotide
acaaacgacacgcgcgccctcacacgccttggaatgaccatccttgcgta

SEQ ID NO: 152689 - DNA, 58 bp, Artificial
  Synthetic oligonucleotide
tatcgaaggctccccgtggtgtactatgatgcaccatggctaactacgaactactcgt

SEQ ID NO: 152690 - DNA, 50 bp, Artificial
  Synthetic oligonucleotide
acaagcatggccgcactcgtgacgcctactgtcgaaacgctgatgcccct

SEQ ID NO: 152691 - DNA, 50 bp, Artificial
  Synthetic oligonucleotide
aaacaggcatcaggcgcgaggtttatgccgggagccaagtcgtcgtggta

SEQ ID NO: 152692 - DNA, 50 bp, Artificial
  Synthetic oligonucleotide
acatattgcgcgtcgccccaaaacaattggccgttggcttgcggaaccga

SEQ ID NO: 152693 - DNA, 50 bp, Artificial
  Synthetic oligonucleotide
acatgccaaaacggcacgcgagtcagatcgcccaaaggtcccaggggctt

SEQ ID NO: 152694 - DNA, 50 bp, Artificial
  Synthetic oligonucleotide
accccttgcaaggccgctatatccttgatgcggacactggcgaaggctgg

SEQ ID NO: 152695 - DNA, 50 bp, Artificial
  Synthetic oligonucleotide
acccgcaatccttttgttccctgagccggcgctccgatgacgcctcgccg

SEQ ID NO: 152696 - DNA, 50 bp, Artificial
  Synthetic oligonucleotide
tggcggcctgcagtccgatcccgcccaagaaaaattgcggacggtcacgc

SEQ ID NO: 152697 - DNA, 50 bp, Artificial
  Synthetic oligonucleotide
agactgccgggcggtaatgaagcggattgagggtcagcccccacggaagg

SEQ ID NO: 152698 - DNA, 50 bp, Artificial
  Synthetic oligonucleotide
agactgttgagaagcgcggagatcgcaggacttggcatgggaagcccccg

SEQ ID NO: 152699 - DNA, 50 bp, Artificial
  Synthetic oligonucleotide
agatcaccccgtccgacacgagcggggtcgcctgaaaggtcgccgcctta

SEQ ID NO: 152700 - DNA, 57 bp, Artificial
  Synthetic oligonucleotide
gccactcatggcggctgtcgattgtagcactttaccctattgcgttcagcgggccgg

SEQ ID NO: 152701 - DNA, 50 bp, Artificial
  Synthetic oligonucleotide
agcatgatcgagcacccaatgtccgagcgcgatagagacgcccgccttct

SEQ ID NO: 152702 - DNA, 50 bp, Artificial
  Synthetic oligonucleotide
agcccaaggcgtcttggccctcgctgtgagtctcatcccgcctctcgtcc

SEQ ID NO: 152703 - DNA, 50 bp, Artificial
  Synthetic oligonucleotide
agccggcgaatcaaaaagaacggcgagggcccgaggaactatgtcgggta

SEQ ID NO: 152704 - DNA, 50 bp, Artificial
  Synthetic oligonucleotide
agcttgcgagggtggtctgctttgtctgtttcgcaacagaacggcggcgg

SEQ ID NO: 152705 - DNA, 50 bp, Artificial
  Synthetic oligonucleotide
aggcaggctagtgtgacgacgcgcctccggacctcgagggatcttgaaat

SEQ ID NO: 152706 - DNA, 50 bp, Artificial
  Synthetic oligonucleotide
aggctatcggccgtcccaatttgacgcgggggcttcaggagttgcgtcga

SEQ ID NO: 152707 - DNA, 50 bp, Artificial
  Synthetic oligonucleotide
aggtcgcgacggccagagagagcaatcgtggcggatgaatagggcgccgc

SEQ ID NO: 152708 - DNA, 50 bp, Artificial
  Synthetic oligonucleotide
atctttggtggtcgcgcgggttttgccgtgtcaggcgatggtcttgatga

SEQ ID NO: 152709 - DNA, 50 bp, Artificial
  Synthetic oligonucleotide
atctggacgggtcagcaagccctgtaggcgtaacggcggcagacgtaggc

SEQ ID NO: 152710 - DNA, 50 bp, Artificial
  Synthetic oligonucleotide
atcgtgaaagttaatgcgcaaagccccctggctgttgcggcctccgctcc

SEQ ID NO: 152711 - DNA, 55 bp, Artificial
  Synthetic oligonucleotide
aaacgtcttgccgtgtccgtatacaaaatttgcaacgcgcccctatctgcgggga

SEQ ID NO: 152712 - DNA, 50 bp, Artificial
  Synthetic oligonucleotide
atcgccccatgccccagttgaatcgccgttctcttctcgctggcgtctcc

SEQ ID NO: 152713 - DNA, 50 bp, Artificial
  Synthetic oligonucleotide
atcgaaagttcgatctttggtggtcgcgcgggttttgccgtgtcaggcga

SEQ ID NO: 152714 - DNA, 50 bp, Artificial
  Synthetic oligonucleotide
agtccgatttcgagtcggcccgctttgtgtcgcgcacgaatcccgagacg

SEQ ID NO: 152715 - DNA, 50 bp, Artificial
  Synthetic oligonucleotide
atccgcaaatcccgctggacgggtgaacgcatcgcgagattgggctttct

SEQ ID NO: 152716 - DNA, 50 bp, Artificial
  Synthetic oligonucleotide
atccctctcgcgcgaatgtggcacgagaatgccaggagcgacgctgcgta

SEQ ID NO: 152717 - DNA, 50 bp, Artificial
  Synthetic oligonucleotide
atatttcggagccgcggagaattttgttacacggagcccctgcccgcgca

SEQ ID NO: 152718 - DNA, 50 bp, Artificial
  Synthetic oligonucleotide
agtctgccacccgccaagcccggctaccgtgtaatgcacgcgatccccat

SEQ ID NO: 152719 - DNA, 50 bp, Artificial
  Synthetic oligonucleotide
ataccaggtggccacttacacgagtcggctgctgcagaattggcccgccg

SEQ ID NO: 152720 - DNA, 50 bp, Artificial
  Synthetic oligonucleotide
atacgagacgcgacatgggccgcagcactgttgagcgctgggggagaagc

SEQ ID NO: 152721 - DNA, 50 bp, Artificial
  Synthetic oligonucleotide
accttgacccctggcgttctgagcgggtctcctcggtacgcggttctgtc

SEQ ID NO: 152722 - DNA, 56 bp, Artificial
  Synthetic oligonucleotide
acaattgatgagcatgagtgtgactccattatgtcgtgcatgtgtgagaggctcgt

SEQ ID NO: 152723 - DNA, 50 bp, Artificial
  Synthetic oligonucleotide
acgacgcgatgccatctcagtagacggaaacgcgacactgccggagggat

SEQ ID NO: 152724 - DNA, 50 bp, Artificial
  Synthetic oligonucleotide
gattgtccgaaggagtatggtcccttcaagacggtttacaatcgctttgt

SEQ ID NO: 152725 - DNA, 50 bp, Artificial
  Synthetic oligonucleotide
acgcgagtcagatcgcccaaaggtcccaggggcttccttttcatggggcc

SEQ ID NO: 152726 - DNA, 50 bp, Artificial
  Synthetic oligonucleotide
acgcgcgccctcacacgccttggaatgaccatccttgcgtagagccgtca

SEQ ID NO: 152727 - DNA, 50 bp, Artificial
  Synthetic oligonucleotide
acgcggggcatcgtgatccgtcgggctttgcctttccctagcaaatccga

SEQ ID NO: 152728 - DNA, 50 bp, Artificial
  Synthetic oligonucleotide
acggcgcccaccgctgccgtagctagaaccgacgtgttgcttcgctgatt

SEQ ID NO: 152729 - DNA, 50 bp, Artificial
  Synthetic oligonucleotide
acggttaagatcggctggagcctgcctgccagatgtccgcatcacttgcc

SEQ ID NO: 152730 - DNA, 50 bp, Artificial
  Synthetic oligonucleotide
acgtccaactgcttgagcggagccggaaaggcgttgtgccgacgcccgcc

SEQ ID NO: 152731 - DNA, 50 bp, Artificial
  Synthetic oligonucleotide
acgtgcgatctgatccgcctcgcaaccaatggaacaggcattctgccgga

SEQ ID NO: 152732 - DNA, 50 bp, Artificial
  Synthetic oligonucleotide
acgtggcctgcaagcattacgctgcctcgctggattgccgccccttcatt

SEQ ID NO: 152733 - DNA, 55 bp, Artificial
  Synthetic oligonucleotide
ctcgaccaagcctgaggattattttccgagcggcccagtggctatttcggggcac

SEQ ID NO: 152734 - DNA, 50 bp, Artificial
  Synthetic oligonucleotide
acgttcgcccgttttctggagtcgtcctttgctcgctgggccgggcatct

SEQ ID NO: 152735 - DNA, 50 bp, Artificial
  Synthetic oligonucleotide
actccaatgagtcctacacccgcgggccaaacgctcagcggcgatcatgc

SEQ ID NO: 152736 - DNA, 50 bp, Artificial
  Synthetic oligonucleotide
cttcgcggactggtagtggaacgtccgcccctgattttcgtggagcgccc

SEQ ID NO: 152737 - DNA, 50 bp, Artificial
  Synthetic oligonucleotide
actcgcgctgcgctgtcaaggtggcatgaaccgttccgcgtgtcagtgct

SEQ ID NO: 152738 - DNA, 50 bp, Artificial
  Synthetic oligonucleotide
actctgccgcgaaaccttgcatcagagagccgccaggcattttgctgcct

SEQ ID NO: 152739 - DNA, 50 bp, Artificial
  Synthetic oligonucleotide
actgcaagcgatgcgtgccggtctttcactccccacggggtgtgttcgtg

SEQ ID NO: 152740 - DNA, 50 bp, Artificial
  Synthetic oligonucleotide
actggttcagggtaagggcccgtcgcgcttcaggagccgcctgcatgttt

SEQ ID NO: 152741 - DNA, 50 bp, Artificial
  Synthetic oligonucleotide
actgtcgcgtgggcgaaccataacgtggtgcgtaccgaatgccactggcc

SEQ ID NO: 152742 - DNA, 50 bp, Artificial
  Synthetic oligonucleotide
agacccgtcgttgccgcgacataaaccaacgttccgaccaagagcgcggg

SEQ ID NO: 152743 - DNA, 50 bp, Artificial
  Synthetic oligonucleotide
agaccgccgattcatgagcggtagcaccccgcactaagcgcagacccgac

SEQ ID NO: 152744 - DNA, 55 bp, Artificial
  Synthetic oligonucleotide
ctccgcgccgtacgatgcaacgacgaataatctgaacttgctggcgtgtctcttc

SEQ ID NO: 152745 - DNA, 50 bp, Artificial
  Synthetic oligonucleotide
agacggatacgcgtcccaaacaagcgcgccgtcgatttgacccccgcctt

SEQ ID NO: 152746 - DNA, 50 bp, Artificial
  Synthetic oligonucleotide
agacggcatcagaataagcgcggcttgccacttccccaaaaccgtgccgg

SEQ ID NO: 152747 - DNA, 50 bp, Artificial
  Synthetic oligonucleotide
agacgggtctgagactgccgggcggtaatgaagcggattgagggtcagcc

SEQ ID NO: 152748 - DNA, 54 bp, Artificial
  Synthetic oligonucleotide
cgcaaggcaggctcatccgtaaggcgttgaccgttaaaataaggtttcgtcaac

SEQ ID NO: 152749 - DNA, 56 bp, Artificial
  Synthetic oligonucleotide
gacagattgagccaagtggccgcgttagaggaaggggccgatccatttggaacggt

SEQ ID NO: 152750 - DNA, 55 bp, Artificial
  Synthetic oligonucleotide
agaacaaaggtccattcaatgtctgacgagagcatgactgatctcaacatggatc

SEQ ID NO: 152751 - DNA, 54 bp, Artificial
  Synthetic oligonucleotide
cgaccccggtctgaacgcgtttacgatcgtggattggacctcgtcgagccgaaa

SEQ ID NO: 152752 - DNA, 55 bp, Artificial
  Synthetic oligonucleotide
ctctacgatccgaataatgccgcgcggtttactctcacgggatcaggctatcagg

SEQ ID NO: 152753 - DNA, 55 bp, Artificial
  Synthetic oligonucleotide
ctgtcccggagcggcggtctatcgtccaccaagggcggcgaattggaacactcac

SEQ ID NO: 152754 - DNA, 55 bp, Artificial
  Synthetic oligonucleotide
ctgtgcggaggccatcaaggctgggtgtgaccaaagcgatgcgccaagaccaacc

SEQ ID NO: 152755 - DNA, 55 bp, Artificial
  Synthetic oligonucleotide
gaagacatggggcaccatcaaggggatgcgaagatttaagaagattaatacgagt

SEQ ID NO: 152756 - DNA, 55 bp, Artificial
  Synthetic oligonucleotide
gaatatttcatgcactttctgcgcgctaatgccgagctggagacagacacgcccg

SEQ ID NO: 152757 - DNA, 55 bp, Artificial
  Synthetic oligonucleotide
gaccgcgctcacgaggcatacggacaatcagcgctctcaatgggcctcatcccaa

SEQ ID NO: 152758 - DNA, 55 bp, Artificial
  Synthetic oligonucleotide
atactcactgttcaaagggtttgtgcgcggaccaaaacgttattacatactagcg

SEQ ID NO: 152759 - DNA, 55 bp, Artificial
  Synthetic oligonucleotide
atccggccgcggcaggcatcaaacgcccgtggtcaacgcaattcaacatgcgcag

SEQ ID NO: 152760 - DNA, 60 bp, Artificial
  Synthetic oligonucleotide
gcgtccttccttctgtgtaccagctggtcgctcatcatcccagccagacaatctttactc

SEQ ID NO: 152761 - DNA, 55 bp, Artificial
  Synthetic oligonucleotide
caactatgttccgtcgctctatgccaattctgtcgtcgggtcggagcgtcctgac

SEQ ID NO: 152762 - DNA, 55 bp, Artificial
  Synthetic oligonucleotide
caagatcggttgaagcatcaggtttccgcttatccgtccatggcgaactcggatc

SEQ ID NO: 152763 - DNA, 55 bp, Artificial
  Synthetic oligonucleotide
caagcttcgtcaccatgcgggctctagcgatgcggtttcgtggtcttatgcgcag

SEQ ID NO: 152764 - DNA, 53 bp, Artificial
  Synthetic oligonucleotide
caccggaacgaacttattattgaaccaggaaccaaggaccttggaagccagac

SEQ ID NO: 152765 - DNA, 55 bp, Artificial
  Synthetic oligonucleotide
cagggcttagcgcgtatctgcccagctttaacgaagcaagaggcacgccatggct

SEQ ID NO: 152766 - DNA, 55 bp, Artificial
  Synthetic oligonucleotide
cagttgcgcaggtggggcgcgttgtgattccttcagattcatggatcgagagggc

SEQ ID NO: 152767 - DNA, 53 bp, Artificial
  Synthetic oligonucleotide
ccaaagaccggtttgccacggcccgccatataccccagttcgaagaccgagcc

SEQ ID NO: 152768 - DNA, 55 bp, Artificial
  Synthetic oligonucleotide
ccacatctgcgtgcgtcttattcttcgcggactggtagtggaacgtccgcccctg

SEQ ID NO: 152769 - DNA, 55 bp, Artificial
  Synthetic oligonucleotide
ccacttcggctccgtttgaacgggaagatgggctgacactcaaatttaccggctg

SEQ ID NO: 152770 - DNA, 55 bp, Artificial
  Synthetic oligonucleotide
cccgtcgtgaataaccaataactccggctcctgtgcgagaactcgtccgttggca

SEQ ID NO: 152771 - DNA, 57 bp, Artificial
  Synthetic oligonucleotide
tgccttcattacgaagattgggtaacgtcgtcccacttttccgcaattgatcgcgta

SEQ ID NO: 152772 - DNA, 55 bp, Artificial
  Synthetic oligonucleotide
ccggaaaacacgaacattcgaggctgttcgaatggccatgaaaatcgactattcg

SEQ ID NO: 152773 - DNA, 55 bp, Artificial
  Synthetic oligonucleotide
ccgggaaatccttgagacgatctggaatgatggctcgttgaaactatggttagcg

SEQ ID NO: 152774 - DNA, 55 bp, Artificial
  Synthetic oligonucleotide
ccggtgggcattgcgaacgggacgaactatccacagggtcgtctcggatactgac

SEQ ID NO: 152775 - DNA, 54 bp, Artificial
  Synthetic oligonucleotide
cctccctggcgaacagcatttgtaacgacccgcggcttgaaaaggtccacgacc

SEQ ID NO: 152776 - DNA, 55 bp, Artificial
  Synthetic oligonucleotide
cctgtgttttcggctccgagcccggatttgaggtctgagaaaatctcgcacccgg

SEQ ID NO: 152777 - DNA, 55 bp, Artificial
  Synthetic oligonucleotide
tggcacttgggtatggcccgccattgatgggatggacgtgccttcgccctgttag

SEQ ID NO: 152778 - DNA, 55 bp, Artificial
  Synthetic oligonucleotide
tgagaataggaaatcgcgtttggcgcggattaggcgatcatggcggaaaggtcgt

SEQ ID NO: 152779 - DNA, 55 bp, Artificial
  Synthetic oligonucleotide
tcgggtactcgcataagttttgagaggccgtgcaggcgcctaaattcgtgagagt

SEQ ID NO: 152780 - DNA, 55 bp, Artificial
  Synthetic oligonucleotide
aagcacgtaggtaagtgtacaacgtgattgttatgtgatgacgcgacctccagtc

SEQ ID NO: 152781 - DNA, 55 bp, Artificial
  Synthetic oligonucleotide
tcagtacgtgccggcagggaacttgtacgatacgtacaggatatgcgcaacacaa

SEQ ID NO: 152782 - DNA, 60 bp, Artificial
  Synthetic oligonucleotide
atcgatgagctgcgctaaactgccttggacctcggtaaaccgcgattcagatcctaaagc

SEQ ID NO: 152783 - DNA, 55 bp, Artificial
  Synthetic oligonucleotide
aagcggaacttttgagcaaggctagccgagagacgctgcaagcggaaccgtgctc

SEQ ID NO: 152784 - DNA, 55 bp, Artificial
  Synthetic oligonucleotide
taaatggggcactcactattccgcggcggccgtaagctcccgttggacacgcctc

SEQ ID NO: 152785 - DNA, 55 bp, Artificial
  Synthetic oligonucleotide
gttccgcgcaatgctgacaggcgtagaatgggcgatagacgaagcaggtgagacc

SEQ ID NO: 152786 - DNA, 55 bp, Artificial
  Synthetic oligonucleotide
gtggtagttcgacggccgctcctcaggagctcagcatatgacgccaaaccgcgtg

SEQ ID NO: 152787 - DNA, 55 bp, Artificial
  Synthetic oligonucleotide
gtgcgagtacggggctcagatggaacagaccccgatcagagaaataatccccgga

SEQ ID NO: 152788 - DNA, 55 bp, Artificial
  Synthetic oligonucleotide
gtcgttgcccagactatacctgaggtcccgagcgagacaaaggcatcaccagacc

SEQ ID NO: 152789 - DNA, 55 bp, Artificial
  Synthetic oligonucleotide
gtccgagcgccgccccttctatcgtgcttccgaactgacgagctaggagaagggt

SEQ ID NO: 152790 - DNA, 55 bp, Artificial
  Synthetic oligonucleotide
gtatgagtgcggggatcccacttgaagatgcggaccggctaccttggctcgacgc

SEQ ID NO: 152791 - DNA, 55 bp, Artificial
  Synthetic oligonucleotide
ggggttcagagaggctcttcttctgccggcttcgtctgcaagagaggcgaaaccg

SEQ ID NO: 152792 - DNA, 55 bp, Artificial
  Synthetic oligonucleotide
gagcaatgcgtgtgctggcacgagcgagcttagccgatgctccttgacggttggg

SEQ ID NO: 152793 - DNA, 60 bp, Artificial
  Synthetic oligonucleotide
gagctttgaaggacgcgcgaaaggccaatcgaaaatccgagccgcatcgcgggtcgcagc

SEQ ID NO: 152794 - DNA, 55 bp, Artificial
  Synthetic oligonucleotide
gagcaggatgcatagggccgcatggctccgtcggtgtgcgacgtacagttgtcgt

SEQ ID NO: 152795 - DNA, 55 bp, Artificial
  Synthetic oligonucleotide
gaggcgcctattccttgcgggtccattcatccggcgacaattcaatcgtctgcgg

SEQ ID NO: 152796 - DNA, 55 bp, Artificial
  Synthetic oligonucleotide
gataggtcacgagcgctgtttcgatcgtttgcgtccctgtgaggggttccgcgag

SEQ ID NO: 152797 - DNA, 55 bp, Artificial
  Synthetic oligonucleotide
gcaagcttgcgctgttacctaggtgatcacgtcaggttggatcttcgcagatatc

SEQ ID NO: 152798 - DNA, 55 bp, Artificial
  Synthetic oligonucleotide
gcggtttacttgcgccgattacgccgcaggaaaatgagacgatatcagttgaaca

SEQ ID NO: 152799 - DNA, 55 bp, Artificial
  Synthetic oligonucleotide
ggcatcggcaaagtgtattggacgaccacgtggattggttaatgagtatgcggac

SEQ ID NO: 152800 - DNA, 55 bp, Artificial
  Synthetic oligonucleotide
ggccccaggccgggataaagtcgagcgcccttattatctgtcgaagatatggcgc

SEQ ID NO: 152801 - DNA, 55 bp, Artificial
  Synthetic oligonucleotide
ggcgcccacgttgattctcctacagctatcatcgcgatgcaatgtcacttgtccc

SEQ ID NO: 152802 - DNA, 55 bp, Artificial
  Synthetic oligonucleotide
ggcgtcaaatccgtctacgttcttaactggatattggaggccgggatatgtaacc

SEQ ID NO: 152803 - DNA, 55 bp, Artificial
  Synthetic oligonucleotide
gggaggtagtgctcctacataccgagatccaggaacggaggccgcgctaaatacc

SEQ ID NO: 152804 - DNA, 59 bp, Artificial
  Synthetic oligonucleotide
tcgcagtgtcggatctttcggctgccttttctcaatccacggaccaatgaaggggtctc

SEQ ID NO: 152805 - DNA, 55 bp, Artificial
  Synthetic oligonucleotide
gggcatccgtgagaatgtccgtggtcgccgtatagatgggtggtgccacgagctg

SEQ ID NO: 152806 - DNA, 55 bp, Artificial
  Synthetic oligonucleotide
gggctctgggcaatgacacgccgatcacaaccgacaatctttggaaatgcgtaac

SEQ ID NO: 152807 - DNA, 55 bp, Artificial
  Synthetic oligonucleotide
ggggtcaggctgctttaaaaggcctgtcgttaggcaaggtcaattctgtgggtcg

SEQ ID NO: 152808 - DNA, 54 bp, Artificial
  Synthetic oligonucleotide
gcttattcggtccgccgatctgtccaaacgatcggggccacctcagattatgac

SEQ ID NO: 152809 - DNA, 54 bp, Artificial
  Synthetic oligonucleotide
attatctcttaaggcagggctcatgctgatccttcattcgaccgtcgccaaggg

SEQ ID NO: 152810 - DNA, 54 bp, Artificial
  Synthetic oligonucleotide
tggcataatggcaacttccgtttctatggattgatgccgtcggtccggctgaca

SEQ ID NO: 152811 - DNA, 54 bp, Artificial
  Synthetic oligonucleotide
tttcacggacaatccgtggccaaacatcgttaacctgaacctctggaccttacc

SEQ ID NO: 152812 - DNA, 53 bp, Artificial
  Synthetic oligonucleotide
ttgcataccacctcccgcctgcatcgggttaatgcagacagcggcttcggaga

SEQ ID NO: 152813 - DNA, 53 bp, Artificial
  Synthetic oligonucleotide
gattgacctttcggttcctaaaagcgtctgtcccgctatgatcccagatacaa

SEQ ID NO: 152814 - DNA, 53 bp, Artificial
  Synthetic oligonucleotide
gatcgtgtaatcgttaattgcaatccttacgctttacgatcatgcgcctgaaa

SEQ ID NO: 152815 - DNA, 56 bp, Artificial
  Synthetic oligonucleotide
tcgaacgtttgctctttaccggaaaacacgaacattcgaggctgttcgaatggcca

SEQ ID NO: 152816 - DNA, 53 bp, Artificial
  Synthetic oligonucleotide
tatcgccacttcctggtgtcatccctgcactttccaatgacgcggagttcttt

SEQ ID NO: 152817 - DNA, 52 bp, Artificial
  Synthetic oligonucleotide
gcgatgaggtagcggcggaggcctatcgtggcttcatcatgagctgacggca

SEQ ID NO: 152818 - DNA, 52 bp, Artificial
  Synthetic oligonucleotide
gcacaatgctgcaagacgcgcttgcctacaggatcgaagttccgatcgttca

SEQ ID NO: 152819 - DNA, 52 bp, Artificial
  Synthetic oligonucleotide
gacggattggggcgcgtaaattgactgcatattgttgcatccgcttgggcgt

SEQ ID NO: 152820 - DNA, 52 bp, Artificial
  Synthetic oligonucleotide
ggggcctatatccgggcaggatggccaatcggctgcaagtttgaggcgaaaa

SEQ ID NO: 152821 - DNA, 52 bp, Artificial
  Synthetic oligonucleotide
ggtctcgattattgatcatgaagacggtggtaaaagcaccgaacatgcgctc

SEQ ID NO: 152822 - DNA, 52 bp, Artificial
  Synthetic oligonucleotide
ccgttctatcccgtcccttgaacgggcttgctccgagcatcaggcaacgtct

SEQ ID NO: 152823 - DNA, 52 bp, Artificial
  Synthetic oligonucleotide
ccgcaggactttccgagcctgtttcagtcgggtgaaagcctcgaacctggcg

SEQ ID NO: 152824 - DNA, 52 bp, Artificial
  Synthetic oligonucleotide
tagtgagacaacacactcgactatattcttcgagggtagctggggtttagca

SEQ ID NO: 152825 - DNA, 52 bp, Artificial
  Synthetic oligonucleotide
caagacaggctggtggtaattgagcatatgagactactccttgggtgcgttt

SEQ ID NO: 152826 - DNA, 55 bp, Artificial
  Synthetic oligonucleotide
taacttcgttctaagcgcgggattatcgataaggagtttaatcgccttggcgatt

SEQ ID NO: 152827 - DNA, 52 bp, Artificial
  Synthetic oligonucleotide
aaaattcggacggttgcttgaattgatatcgtgtgccgtaacaaagaatcct

SEQ ID NO: 152828 - DNA, 52 bp, Artificial
  Synthetic oligonucleotide
tcggcccgctggtgacattatcgactttccagtttaccgcgccgaggaaggt

SEQ ID NO: 152829 - DNA, 52 bp, Artificial
  Synthetic oligonucleotide
tgttgcaactaagctcggagtctgcacgagaacgatatcacgcctttccgag

SEQ ID NO: 152830 - DNA, 51 bp, Artificial
  Synthetic oligonucleotide
aatggcaaaaccggttcgggacacagaccgacgcgcaatttgtgacgagcg

SEQ ID NO: 152831 - DNA, 51 bp, Artificial
  Synthetic oligonucleotide
cgcgcggcaaagcgggagcctcatgccatgcaaaaccaacgtgcggctgtc

SEQ ID NO: 152832 - DNA, 51 bp, Artificial
  Synthetic oligonucleotide
cgctgaatgggccagatgtccccattgatgcggaccatgatgagagcgcct

SEQ ID NO: 152833 - DNA, 51 bp, Artificial
  Synthetic oligonucleotide
cggggtgtctacagagcaggatgcatagggccgcatggctccgtcggtgtg

SEQ ID NO: 152834 - DNA, 51 bp, Artificial
  Synthetic oligonucleotide
ctattccgcggcggccgtaagctcccgttggacacgcctcggctgtaaggg

SEQ ID NO: 152835 - DNA, 51 bp, Artificial
  Synthetic oligonucleotide
actcgcttgctaccctgatcgccgaaagtcagactgctacccacgcggtgc

SEQ ID NO: 152836 - DNA, 51 bp, Artificial
  Synthetic oligonucleotide
gcttacgataggaattgtcaacttaagttatctgatacgcatccacgtcac

SEQ ID NO: 152837 - DNA, 55 bp, Artificial
  Synthetic oligonucleotide
gtagctcccaccccttgaaggagactcgccgtgaggattgattgcagtgtcgagg

SEQ ID NO: 152838 - DNA, 54 bp, Artificial
  Synthetic oligonucleotide
tcttcgggaccacccactgcggtcgattgagtaccggacgtacggttcggggca

SEQ ID NO: 152839 - DNA, 55 bp, Artificial
  Synthetic oligonucleotide
ggccgttcgggacccgcatgacacggtcggcgtcggacatcggattccagggtgt

SEQ ID NO: 152840 - DNA, 55 bp, Artificial
  Synthetic oligonucleotide
tgaaaggaccgacgaacgtgtgccactctgcgcgtcagccgagcaaccggttcct

SEQ ID NO: 152841 - DNA, 55 bp, Artificial
  Synthetic oligonucleotide
gcggaagcgttcacgagggaggttgtgctactcgcggaacggcacggagcaagat

SEQ ID NO: 152842 - DNA, 54 bp, Artificial
  Synthetic oligonucleotide
cgcgacgagacctccgtgttaccgaaccgatacatctcggccctacgttgacgg

SEQ ID NO: 152843 - DNA, 55 bp, Artificial
  Synthetic oligonucleotide
acacgggagcagccaggtccgaaggggtaccgacatgagactcgagctcgatcga

SEQ ID NO: 152844 - DNA, 55 bp, Artificial
  Synthetic oligonucleotide
atcgtcagggtgggtccgattggcgaggctagcgccgccggagagcctccgttgc

SEQ ID NO: 152845 - DNA, 55 bp, Artificial
  Synthetic oligonucleotide
ccttgtgcggcacaatggagcccgcaccacccatcgccgtcgcagaggagatcac

SEQ ID NO: 152846 - DNA, 54 bp, Artificial
  Synthetic oligonucleotide
gcgacacatctgtcgcatttcgcaacccgactgtccctcaatcggagatcggcg

SEQ ID NO: 152847 - DNA, 54 bp, Artificial
  Synthetic oligonucleotide
tccggttgtcaccggacgggcctacgttgggcgcacagccggactctcgcagag

SEQ ID NO: 152848 - DNA, 55 bp, Artificial
  Synthetic oligonucleotide
gtggcgcgtgtcgtgcctctgtgttacgggcaggtcgcgttgtgcgcacagtctg

SEQ ID NO: 152849 - DNA, 54 bp, Artificial
  Synthetic oligonucleotide
aataactgtcgcggtagaactaatcccggtcgcctgatgtgacccgagccaccc

SEQ ID NO: 152850 - DNA, 53 bp, Artificial
  Synthetic oligonucleotide
accctcatggcgtacctcgcgccacgcaccaccgtgtactgggtgggcaacga

SEQ ID NO: 152851 - DNA, 53 bp, Artificial
  Synthetic oligonucleotide
ccccttgcgcgtacgagacacatcgtgtgtatggtgtacacgttcatgtacgc

SEQ ID NO: 152852 - DNA, 53 bp, Artificial
  Synthetic oligonucleotide
ttgacttggctccgatcaggcacgacgaggtgcgtcagacctcggctccgacg

SEQ ID NO: 152853 - DNA, 52 bp, Artificial
  Synthetic oligonucleotide
tgcgatccgcgcactactccgcatggcgcgctagtgtgcgtgacgagacgga

SEQ ID NO: 152854 - DNA, 52 bp, Artificial
  Synthetic oligonucleotide
tgtaacttaccaaccatcgatcggcccaacgaagggaagagacggtgggaca

SEQ ID NO: 152855 - DNA, 52 bp, Artificial
  Synthetic oligonucleotide
ttgaggtgagtcaacgggctcaccacaagcacggtagtcatatccgtagtcg

SEQ ID NO: 152856 - DNA, 51 bp, Artificial
  Synthetic oligonucleotide
aggccgacccgtgccgcgtggtcgcatgtggcacgttgcagccgtgtccgt

SEQ ID NO: 152857 - DNA, 51 bp, Artificial
  Synthetic oligonucleotide
acgtcttcgacggggcccttgtcagtcgtgagagcgctcccgtaaggtgca

SEQ ID NO: 152858 - DNA, 51 bp, Artificial
  Synthetic oligonucleotide
ctcgaacccgggacggatcgcaccacccgactctcgatccagctggagcag

SEQ ID NO: 152859 - DNA, 55 bp, Artificial
  Synthetic oligonucleotide
gttgacgtccttgcatcattccgagtgcacggtattgaagtcaacgcctaaggcg

SEQ ID NO: 152860 - DNA, 51 bp, Artificial
  Synthetic oligonucleotide
cgtggcctgggtctcgcgtcctgtaggttccaacggccccgggcgcaccca

SEQ ID NO: 152861 - DNA, 50 bp, Artificial
  Synthetic oligonucleotide
cgaggcactgattcttgagtccaccaggctcaactcttgcgcgggtccgg

SEQ ID NO: 152862 - DNA, 50 bp, Artificial
  Synthetic oligonucleotide
cctctcgcggtcgtgcacagaacctctcgcggaagtgggggcgacgaggg

SEQ ID NO: 152863 - DNA, 50 bp, Artificial
  Synthetic oligonucleotide
cctcacgaccgcccgaagagacccagcgagcgttgccctcgcttgacgcc

SEQ ID NO: 152864 - DNA, 50 bp, Artificial
  Synthetic oligonucleotide
aacgtgtgccactctgcgcgtcagccgagcaaccggttcctgggacgagg

SEQ ID NO: 152865 - DNA, 50 bp, Artificial
  Synthetic oligonucleotide
accagcggagagtccggacgtatgctcgtaaacttcggcccttgggcggt

SEQ ID NO: 152866 - DNA, 50 bp, Artificial
  Synthetic oligonucleotide
acccgcatgacacggtcggcgtcggacatcggattccagggtgtgtgaag

SEQ ID NO: 152867 - DNA, 50 bp, Artificial
  Synthetic oligonucleotide
acccgttgtccacaaacgggcgccagagacccgtttccgagcccggaagg

SEQ ID NO: 152868 - DNA, 50 bp, Artificial
  Synthetic oligonucleotide
accgagagcctccgagatctgcagctcgtttcgccgtccgcattgatggg

SEQ ID NO: 152869 - DNA, 50 bp, Artificial
  Synthetic oligonucleotide
accgatgcggctcgactagttgacacgctagaacgggtgggcagactcgg

SEQ ID NO: 152870 - DNA, 55 bp, Artificial
  Synthetic oligonucleotide
taccggtacgtgatctcgagcctcgaggagagcgaacgcatggccggacgagcga

SEQ ID NO: 152871 - DNA, 50 bp, Artificial
  Synthetic oligonucleotide
acgagagttgtcgtccgttgcgagtccctcggccctccgggtcggctcac

SEQ ID NO: 152872 - DNA, 50 bp, Artificial
  Synthetic oligonucleotide
acgctgtccctcgctcccggagtcgtgcgccctaaggttggcacggttac

SEQ ID NO: 152873 - DNA, 50 bp, Artificial
  Synthetic oligonucleotide
agatgagaaccgatgtcaaaacagggtgggctccgtcaggacctgcgcgg

SEQ ID NO: 152874 - DNA, 50 bp, Artificial
  Synthetic oligonucleotide
agcacacgtctcccgactggatccgtgtggaggaagcgggacttgcaccg

SEQ ID NO: 152875 - DNA, 50 bp, Artificial
  Synthetic oligonucleotide
aggcgagagtctgaagtagctccatcgggagcgtccgtgtcccccggaca

SEQ ID NO: 152876 - DNA, 50 bp, Artificial
  Synthetic oligonucleotide
ataggcccacacgaccacgtgcaaccggtcccgcacacccaccttccggg

SEQ ID NO: 152877 - DNA, 50 bp, Artificial
  Synthetic oligonucleotide
atgaggaggccgcatggggtggcgtgagtccgtcaaccaggtcctacgac

SEQ ID NO: 152878 - DNA, 50 bp, Artificial
  Synthetic oligonucleotide
cactctgcgcgtcagccgagcaaccggttcctgggacgagggagggcttg

SEQ ID NO: 152879 - DNA, 50 bp, Artificial
  Synthetic oligonucleotide
cccgctgtgagttaggtcacaccctgtgatccgggaggggtacccgggaa

SEQ ID NO: 152880 - DNA, 50 bp, Artificial
  Synthetic oligonucleotide
cccgtccccgtacggtgggctttcggtagtgtccacgcacacctcggcaa

SEQ ID NO: 152881 - DNA, 55 bp, Artificial
  Synthetic oligonucleotide
actccgcgagaggttcgtggccccaccgcgagaggttcgtggccccaccgcgaga

SEQ ID NO: 152882 - DNA, 50 bp, Artificial
  Synthetic oligonucleotide
ccgaaccgatacatctcggccctacgttgacgggacctaggcatcccgga

SEQ ID NO: 152883 - DNA, 50 bp, Artificial
  Synthetic oligonucleotide
ccgagatctgcagctcgtttcgccgtccgcattgatgggcgcgaaagaca

SEQ ID NO: 152884 - DNA, 50 bp, Artificial
  Synthetic oligonucleotide
ccgatgtcaaaacagggtgggctccgtcaggacctgcgcgggggacacgg

SEQ ID NO: 152885 - DNA, 50 bp, Artificial
  Synthetic oligonucleotide
ccgtcaacggatcccgcgcaagcgactcggacgggtgtcgatccccctgc

SEQ ID NO: 152886 - DNA, 55 bp, Artificial
  Synthetic oligonucleotide
ctcgcggagcggttcatgggttcctctgcctaccccgacgacatgcctctcgagt

SEQ ID NO: 152887 - DNA, 54 bp, Artificial
  Synthetic oligonucleotide
gccacgaacctctcgcggtggggccacgaacctctcgcgaaggggccacgaacc

SEQ ID NO: 152888 - DNA, 55 bp, Artificial
  Synthetic oligonucleotide
tcgccggacacccgaagcgacctggaggttcttccgtgcccgcagtcatccccgt

SEQ ID NO: 152889 - DNA, 55 bp, Artificial
  Synthetic oligonucleotide
tctcgcgaacgcgcacacttcctctcgcggtcgtgcacagaacctctcgcggaag

SEQ ID NO: 152890 - DNA, 60 bp, Artificial
  Synthetic oligonucleotide
tgcaacccgtcgtgtcggaattcgataggttgaacgcactccctgcgcagccaatcgagc

SEQ ID NO: 152891 - DNA, 58 bp, Artificial
  Synthetic oligonucleotide
cagggcgttgcaggagtcggcccactcgcgcctgagcctttcgaggaactccttggag

SEQ ID NO: 152892 - DNA, 60 bp, Artificial
  Synthetic oligonucleotide
gagggcgctcagaagaaccagactggccaagaaacacgtgcacagcgccagtgcgccttt

SEQ ID NO: 152893 - DNA, 50 bp, Artificial
  Synthetic oligonucleotide
ccccgccttatggcacaatggcacgcggaaccaatagggagaaagagcga

SEQ ID NO: 152894 - DNA, 50 bp, Artificial
  Synthetic oligonucleotide
ccatctaagcagcgtggggcggtggtgtacagcggaatcgggcattgtgg

SEQ ID NO: 152895 - DNA, 50 bp, Artificial
  Synthetic oligonucleotide
ccatcaaggcacgggaaaagagagacgtccgtgcgccggcattacccggt

SEQ ID NO: 152896 - DNA, 50 bp, Artificial
  Synthetic oligonucleotide
ccactgacccgactgggggaggggaacccgatagttatcccacgctgctc

SEQ ID NO: 152897 - DNA, 50 bp, Artificial
  Synthetic oligonucleotide
ccaccgttctgcaacatgacccactccgcgcatccccgaatcagctcgta

SEQ ID NO: 152898 - DNA, 50 bp, Artificial
  Synthetic oligonucleotide
ccacaccacccctcgaagcggcgactcagtccatgcgccccatgcaatcc

SEQ ID NO: 152899 - DNA, 50 bp, Artificial
  Synthetic oligonucleotide
cattgcgtccggccgtgatgtgtcgcacagggattccggcctccatcaaa

SEQ ID NO: 152900 - DNA, 50 bp, Artificial
  Synthetic oligonucleotide
catgtggcgactgtattccgggctccttcggggatgcacccgtctcgagg

SEQ ID NO: 152901 - DNA, 50 bp, Artificial
  Synthetic oligonucleotide
catggttcctacctcccgccgcttgctgagaagagtccgggttcaggctc

SEQ ID NO: 152902 - DNA, 50 bp, Artificial
  Synthetic oligonucleotide
catggaccgatgttggcggcacgtccgatatgggtttcctgcacgcggga

SEQ ID NO: 152903 - DNA, 52 bp, Artificial
  Synthetic oligonucleotide
gccctccgcagccctactctcccaacgggtttcggacggtacttagtacaaa

SEQ ID NO: 152904 - DNA, 50 bp, Artificial
  Synthetic oligonucleotide
catccgaataggggagtccacctggtctacctgtgagccgcagccgggaa

SEQ ID NO: 152905 - DNA, 50 bp, Artificial
  Synthetic oligonucleotide
catccagaatctattcggtgtgcgcacttgtgtttcggccatcggctctc

SEQ ID NO: 152906 - DNA, 50 bp, Artificial
  Synthetic oligonucleotide
cataccgaaagcgagggaggcatcatcagctgggtccgccccaaacgggt

SEQ ID NO: 152907 - DNA, 50 bp, Artificial
  Synthetic oligonucleotide
caggttcggcttatgggagcgcgaatcatacaattcgtcagcggttatct

SEQ ID NO: 152908 - DNA, 50 bp, Artificial
  Synthetic oligonucleotide
cagggaccggggaaggggacggctgaaaagtcggatggtgggtctctcat

SEQ ID NO: 152909 - DNA, 50 bp, Artificial
  Synthetic oligonucleotide
caggcggagggagcggagcactgggaattaacctcctggaagctgttggc

SEQ ID NO: 152910 - DNA, 50 bp, Artificial
  Synthetic oligonucleotide
cagctcgttgcgcagtgtgcggcaagggaccgcagaccggttacaccgtt

SEQ ID NO: 152911 - DNA, 50 bp, Artificial
  Synthetic oligonucleotide
cagccagtaatccgctagcccttgcaaaccggacgcgtgggaccctttca

SEQ ID NO: 152912 - DNA, 50 bp, Artificial
  Synthetic oligonucleotide
cagacaatagaccgctgggttgacgagggttggcagtggggagtgccgat

SEQ ID NO: 152913 - DNA, 50 bp, Artificial
  Synthetic oligonucleotide
cactatcgccggcatttcgccagcgggacgcgtcgccaaggggtacagca

SEQ ID NO: 152914 - DNA, 58 bp, Artificial
  Synthetic oligonucleotide
agggccgaccacacggcagcgatccgtggaaaactcatgggagccaaggccgacgtga

SEQ ID NO: 152915 - DNA, 56 bp, Artificial
  Synthetic oligonucleotide
agggcgcacttacatgttaccggtggtaacattcagcgtaagtgcgccctcccgag

SEQ ID NO: 152916 - DNA, 60 bp, Artificial
  Synthetic oligonucleotide
tcgctgcgacgcaagaccctcgtgtagaggcttttaagctcaggccgcgcttccctcagc

SEQ ID NO: 152917 - DNA, 60 bp, Artificial
  Synthetic oligonucleotide
gccctcatgcggaacctgttggcctggtcccagtcgctcgggatgtcggtgtcttcgagc

SEQ ID NO: 152918 - DNA, 59 bp, Artificial
  Synthetic oligonucleotide
ttgtggatgtgccgttgttcgactgacgctgaacgttgccccaaacgcgaacacaacac

SEQ ID NO: 152919 - DNA, 60 bp, Artificial
  Synthetic oligonucleotide
ttggcttgaagatcgagcgccagtacgcgaagcgtcggctgtcgggcttcgtgttcacgt

SEQ ID NO: 152920 - DNA, 60 bp, Artificial
  Synthetic oligonucleotide
cctgaacagagtcgtgctgaagccgattgtcgaagagtgtggcccgctccttggcttgaa

SEQ ID NO: 152921 - DNA, 60 bp, Artificial
  Synthetic oligonucleotide
cctgaaactcagtcatcgagcacccccgtgatggagtccagaacctcgatgccatcggcg

SEQ ID NO: 152922 - DNA, 59 bp, Artificial
  Synthetic oligonucleotide
gcgcgagggagtgcgaggagaggtagataccctcgtctgaccgccattagaggggttca

SEQ ID NO: 152923 - DNA, 56 bp, Artificial
  Synthetic oligonucleotide
aacgctttgggtgacatgcagtttgcaggcaccggaacggcaacggggtcctggcc

SEQ ID NO: 152924 - DNA, 60 bp, Artificial
  Synthetic oligonucleotide
cctcgtcgtacacccgtcgcatgttcggcttcttcttgcctgattgtccggagtcgatga

SEQ ID NO: 152925 - DNA, 60 bp, Artificial
  Synthetic oligonucleotide
ttctgccgactgctcaacgtgtccaagtccacgtctgactcggtctcaaacctgaacaga

SEQ ID NO: 152926 - DNA, 57 bp, Artificial
  Synthetic oligonucleotide
aacgggcacgctcacgcgggctgggtgctcacctttccggtgcccagaaccgatctg

SEQ ID NO: 152927 - DNA, 60 bp, Artificial
  Synthetic oligonucleotide
gtgcgagaatcttcgggttgtgtttcaacgcctcgtcgtatggtgctgattcgattcgcc

SEQ ID NO: 152928 - DNA, 51 bp, Artificial
  Synthetic oligonucleotide
aacgttcgccctcgcggcttggatgtccaaaccggctccgttcttccgggt

SEQ ID NO: 152929 - DNA, 58 bp, Artificial
  Synthetic oligonucleotide
ggtacgggtcttcccggcaagccgattcgcaccgcgaatcgagtgattgtagctacaa

SEQ ID NO: 152930 - DNA, 55 bp, Artificial
  Synthetic oligonucleotide
cctacgacggcgaggcgggagaagcttccgcaactcccttggtgaaacctcctga

SEQ ID NO: 152931 - DNA, 47 bp, Artificial
  Synthetic oligonucleotide
cggttcgctccctttttgtccccggttcgctccctttttgtccccgg

SEQ ID NO: 152932 - DNA, 60 bp, Artificial
  Synthetic oligonucleotide
aagacgcggtgcgtagccgctgctaccgcgcgcgcaaggagcgtgcggccgaggcaaaag

SEQ ID NO: 152933 - DNA, 60 bp, Artificial
  Synthetic oligonucleotide
tgagcgcataggaagcgcatgagggtggatgatcgttcggtttggggtgtttttggccag

SEQ ID NO: 152934 - DNA, 56 bp, Artificial
  Synthetic oligonucleotide
cggtttatgtgaagacgttacccgctctttgggtgtcgtcctctgagttgctatac

SEQ ID NO: 152935 - DNA, 60 bp, Artificial
  Synthetic oligonucleotide
tacccacttctcgtgatctggagcgtcatcgtgcaaagcaccgtaagcagaggtgcggat

SEQ ID NO: 152936 - DNA, 56 bp, Artificial
  Synthetic oligonucleotide
ggggcgaaaagcacgtgcaggggtcccctccgctacgctccacccctgtcacagga

SEQ ID NO: 152937 - DNA, 51 bp, Artificial
  Synthetic oligonucleotide
ccggggtttcttctttctactaaaccaacagcctaaactacaggcttatta

SEQ ID NO: 152938 - DNA, 55 bp, Artificial
  Synthetic oligonucleotide
gggcgcacttacatgcaaccggaggttgcattttccgtaagcgcgccctccgggg

SEQ ID NO: 152939 - DNA, 60 bp, Artificial
  Synthetic oligonucleotide
ttcgataggttgaacgcactccctgcgcagccaatcgagccgtatctagctgacctcgga

SEQ ID NO: 152940 - DNA, 60 bp, Artificial
  Synthetic oligonucleotide
gggcgattagcttcctcactaatcgcgtatgagcgggcaccccacacgcgcgcattctca

SEQ ID NO: 152941 - DNA, 57 bp, Artificial
  Synthetic oligonucleotide
aagctcccttcgtgagttgtagctggggcacgggattgcgccccagcggactttcac

SEQ ID NO: 152942 - DNA, 56 bp, Artificial
  Synthetic oligonucleotide
ccgctcaacactaagcctggcgagtatacgcgtaccttaaaagcggtggatccttc

SEQ ID NO: 152943 - DNA, 59 bp, Artificial
  Synthetic oligonucleotide
ccgcgtcccgtgtcattccctaagtacgctgcggtcaagctcgtgaatccgatgctttc

SEQ ID NO: 152944 - DNA, 57 bp, Artificial
  Synthetic oligonucleotide
gacgccaatcgtatcggctaagatggaaacgtcggcggaggcgctgctaacttcccc

SEQ ID NO: 152945 - DNA, 60 bp, Artificial
  Synthetic oligonucleotide
gggccacaccattgcacggagatagtcccgtgtgcatgtgcgacccctcgccagttaata

SEQ ID NO: 152946 - DNA, 56 bp, Artificial
  Synthetic oligonucleotide
gggccaagcggataccagccaccctcatacgagccggtcaaccccgaacgcaggac

SEQ ID NO: 152947 - DNA, 52 bp, Artificial
  Synthetic oligonucleotide
aaaaagggagcgaaccggggacgttgctaaaatgtgtctcctttttgatcaa

SEQ ID NO: 152948 - DNA, 59 bp, Artificial
  Synthetic oligonucleotide
gtgtccgccttgacctttgggagaagctggacacctatcgaatcacacaccgcaccaaa

SEQ ID NO: 152949 - DNA, 58 bp, Artificial
  Synthetic oligonucleotide
cgcggtggctaaagtacacgctcattggtggctaaagtacacgcagttatccaccgaa

SEQ ID NO: 152950 - DNA, 58 bp, Artificial
  Synthetic oligonucleotide
cgcggttcctcacgtcggccttggctcccatgagttttccacggatcgctgccgtgtg

SEQ ID NO: 152951 - DNA, 59 bp, Artificial
  Synthetic oligonucleotide
gtggttccggcttcgtgttgtggttccatggccatttcatgcgaccactcccgtgatgg

SEQ ID NO: 152952 - DNA, 53 bp, Artificial
  Synthetic oligonucleotide
aaacaaggccgacgaaaccggacaagaccaaacaatcagcctccgaggggcac

SEQ ID NO: 152953 - DNA, 59 bp, Artificial
  Synthetic oligonucleotide
aaaccaatcaggaaatcacgcggctacgcatagagaacgccaccctaagagcagagaac

SEQ ID NO: 152954 - DNA, 60 bp, Artificial
  Synthetic oligonucleotide
cgctacgcgccgctcgcgtctcgcgtgtctcgatggcgggtgatacactggccatagcgc

SEQ ID NO: 152955 - DNA, 60 bp, Artificial
  Synthetic oligonucleotide
agagaaaccatgaaatcggcactggagtagcaagtgacgtgattggatatccaatcacgt

SEQ ID NO: 152956 - DNA, 59 bp, Artificial
  Synthetic oligonucleotide
cgagttttggcgtggttgtcacgtgcccctgatcgtcgtacgtcatcttctgccggata

SEQ ID NO: 152957 - DNA, 60 bp, Artificial
  Synthetic oligonucleotide
cgctatgcgccgcttatgtacgcgttgttctctgctggtctcatgttcccgatgaccgtt

SEQ ID NO: 152958 - DNA, 58 bp, Artificial
  Synthetic oligonucleotide
aaactcaaaagaggctggaaaattccagtcgagactctcgaggcactaggcgtactca

SEQ ID NO: 152959 - DNA, 60 bp, Artificial
  Synthetic oligonucleotide
cgctccagctacgccaaggagtgctacaggaggctcaagcagtaccgacaaaccggtgtg

SEQ ID NO: 152960 - DNA, 51 bp, Artificial
  Synthetic oligonucleotide
cgctccccttttgtactaagttcgctccccttttgtactaagttcgctccc

SEQ ID NO: 152961 - DNA, 60 bp, Artificial
  Synthetic oligonucleotide
cgctcgcaaccgcgaacatcatgcgcagaacgccggaaagctgttctagcggccgtgtcc

SEQ ID NO: 152962 - DNA, 49 bp, Artificial
  Synthetic oligonucleotide
aaaggggagcgaacttagtacaaaaggggagcgaacttagtacaaaagg

SEQ ID NO: 152963 - DNA, 55 bp, Artificial
  Synthetic oligonucleotide
cgcttggcccccacggagtccccctcgggagagcgcttacgctgaatgttaccac

SEQ ID NO: 152964 - DNA, 60 bp, Artificial
  Synthetic oligonucleotide
aaatgttacgtaccaagcatttgaagatggcagtggttccaatgactctgctggcgctcc

SEQ ID NO: 152965 - DNA, 60 bp, Artificial
  Synthetic oligonucleotide
tttgggaacgctgagcagtcggcagaactcgtcgcggctgatcttccagattccggagct

SEQ ID NO: 152966 - DNA, 52 bp, Artificial
  Synthetic oligonucleotide
agagggtgctacttagtacaaaaggggagcgaacctagtacaaaaggggagc

SEQ ID NO: 152967 - DNA, 58 bp, Artificial
  Synthetic oligonucleotide
cggaaaacattcgtcagcgaaccaccaaaactattacactatcagaatattagtgcga

SEQ ID NO: 152968 - DNA, 60 bp, Artificial
  Synthetic oligonucleotide
tttcacatcaccgcgcgccatctcgccggacacctcccatgtgtgagagtcttccgcctt

SEQ ID NO: 152969 - DNA, 60 bp, Artificial
  Synthetic oligonucleotide
gtggtacggtggaaccatgtccaacgagatcgtcagatattcgaaccagttcaacgctca

SEQ ID NO: 152970 - DNA, 52 bp, Artificial
  Synthetic oligonucleotide
gtgggaatccaaagggcaaggcccgtggcccccggagggcgcgcttacggaa

SEQ ID NO: 152971 - DNA, 53 bp, Artificial
  Synthetic oligonucleotide
cggctatttttttgaaaaatccccgcactgttagagcagccggggacgtggcc

SEQ ID NO: 152972 - DNA, 60 bp, Artificial
  Synthetic oligonucleotide
ccttcgcaatcaatggagttacatacacccctgtcgcagctggtccgtggatgcgcatcg

SEQ ID NO: 152973 - DNA, 51 bp, Artificial
  Synthetic oligonucleotide
tttaaagcccctcaaaacatatttaaagcccctcaaaacatatttaaagcc

SEQ ID NO: 152974 - DNA, 60 bp, Artificial
  Synthetic oligonucleotide
gtggcgaggattgtctgccttacggtaagtatccgcgcctattcgagctgtgggcgtgca

SEQ ID NO: 152975 - DNA, 56 bp, Artificial
  Synthetic oligonucleotide
aaccggtgtgtggaaggtcagccttgaggacttccgccgactgctcgacgtaccca

SEQ ID NO: 152976 - DNA, 60 bp, Artificial
  Synthetic oligonucleotide
taactccattgattgcgaaggtgatctgtcccgacttattgccggtcgtatagctgttgc

SEQ ID NO: 152977 - DNA, 57 bp, Artificial
  Synthetic oligonucleotide
agataaggaaatcgatgaggtcactttcactttcgaggaactccgccggttggctca

SEQ ID NO: 152978 - DNA, 60 bp, Artificial
  Synthetic oligonucleotide
ctggcgctcctgtcgacggcagtcccggtggcatctgctcaagaaaccactgacgagtcg

SEQ ID NO: 152979 - DNA, 60 bp, Artificial
  Synthetic oligonucleotide
ctggcggcaatgtacgacgtctccgtgcgcactattcagcgatgggcttcacaaacccgt

SEQ ID NO: 152980 - DNA, 59 bp, Artificial
  Synthetic oligonucleotide
ttactggtgcgaagccaaccccgaggagtggcagagcctcctcaacgaggccgtgacga

SEQ ID NO: 152981 - DNA, 60 bp, Artificial
  Synthetic oligonucleotide
tagaacagctttccggcgttctgcgcatgatgttcgcggttgcgagcgtcaaacgcgcag

SEQ ID NO: 152982 - DNA, 56 bp, Artificial
  Synthetic oligonucleotide
ggatttcgccattgatgaaccgaatggtacttcttttttcttgttcgtctgagaat

SEQ ID NO: 152983 - DNA, 60 bp, Artificial
  Synthetic oligonucleotide
tgttcactgtacaaatacgatgtatgctgtagctatgtctgaagagtattcgcagccgac

SEQ ID NO: 152984 - DNA, 60 bp, Artificial
  Synthetic oligonucleotide
ggattgtctgccttacggtaagtatccgcgcctattcgagctgtgggcgtgcacgatgat

SEQ ID NO: 152985 - DNA, 55 bp, Artificial
  Synthetic oligonucleotide
ccaccgaacgtacctaaagtacacgcatgtcggtggctaaagtacacacctgccc

SEQ ID NO: 152986 - DNA, 57 bp, Artificial
  Synthetic oligonucleotide
acatcgaatggctggacgataaggctccgattggtcgtggggtcgcccacaactggg

SEQ ID NO: 152987 - DNA, 53 bp, Artificial
  Synthetic oligonucleotide
ggagggtgtttggggagtcctgcgttcggggttgaccggctcgtatgagggtg

SEQ ID NO: 152988 - DNA, 59 bp, Artificial
  Synthetic oligonucleotide
agatctcaacaaacgagtcctcaagccgattatcgaggagtgtgggccactccttggac

SEQ ID NO: 152989 - DNA, 56 bp, Artificial
  Synthetic oligonucleotide
ccacacttcgcacaacgaggaagcgacagcgggtcgaagcctttactctcaccccc

SEQ ID NO: 152990 - DNA, 58 bp, Artificial
  Synthetic oligonucleotide
ccaagaccgacccgcacaagcgagccacatggcacgtggacgtggacggggaacgcgc

SEQ ID NO: 152991 - DNA, 58 bp, Artificial
  Synthetic oligonucleotide
ggagccgtcctcaagcaagccaaacgtaatgcgtccggccactgggtcaaacggcaga

SEQ ID NO: 152992 - DNA, 56 bp, Artificial
  Synthetic oligonucleotide
cttccccaatccccgtcagtagatgcgcttttcaccccatcgaggggcgaaaagca

SEQ ID NO: 152993 - DNA, 58 bp, Artificial
  Synthetic oligonucleotide
ccaaatacatcgtcacggcaacaagttggcctcagaaacagacctcgatacgtcactt

SEQ ID NO: 152994 - DNA, 50 bp, Artificial
  Synthetic oligonucleotide
cattttagcaacgtccccggttcgctccctttttgtccccggttcgctcc

SEQ ID NO: 152995 - DNA, 60 bp, Artificial
  Synthetic oligonucleotide
tgtcaaacacctgcacattcacgccggtatcaacaccggtttcgtcgatgaattgcaccg

SEQ ID NO: 152996 - DNA, 59 bp, Artificial
  Synthetic oligonucleotide
ggacgcgacaaaccaaacacaggtcgtggatatggggaatggcatcacgcgcgaagtct

SEQ ID NO: 152997 - DNA, 52 bp, Artificial
  Synthetic oligonucleotide
tgtactaagttcgctccccttttgtactaagttcgctccccttttgtactaa

SEQ ID NO: 152998 - DNA, 59 bp, Artificial
  Synthetic oligonucleotide
ggacaccctctcagccctacagcgagtaaggctgagagggtgtacagatatttaaagcc

SEQ ID NO: 152999 - DNA, 60 bp, Artificial
  Synthetic oligonucleotide
tgacttccggtcacgtcgagtcgctccgctgggagggcgaatcagattcggttggagtga

SEQ ID NO: 153000 - DNA, 59 bp, Artificial
  Synthetic oligonucleotide
ggacaagcgagaggccagggaacgggcggaatgagcagccggacagcgcaagcggggct

SEQ ID NO: 153001 - DNA, 60 bp, Artificial
  Synthetic oligonucleotide
ggaattgtacgatgacgcccaactggaaatcgccagcctacgcgccactatcgataagct

SEQ ID NO: 153002 - DNA, 57 bp, Artificial
  Synthetic oligonucleotide
acgaaccagccagcggataccagccgccctcatacgagcccgtcaaccccgaacgca

SEQ ID NO: 153003 - DNA, 60 bp, Artificial
  Synthetic oligonucleotide
tagctgttgcgatacggccaggaccccgttgccgttccggtgcctgcaaactgcatgtca

SEQ ID NO: 153004 - DNA, 58 bp, Artificial
  Synthetic oligonucleotide
ggaaccaagtggcgcacaataatgcggaacgaagaaacgccctcgaacttagctgcac

SEQ ID NO: 153005 - DNA, 58 bp, Artificial
  Synthetic oligonucleotide
tacgccaaggagttctaccgcagggccaaacaataccgcagctccggaatctggaaga

SEQ ID NO: 153006 - DNA, 60 bp, Artificial
  Synthetic oligonucleotide
gggaatgccgtttctgcgcgtttgacgctcgcaaccgcgaacatcatgcgcagaacgccg

SEQ ID NO: 153007 - DNA, 55 bp, Artificial
  Synthetic oligonucleotide
ttccaacgttccgaggcccgttgccaagggcttccgttaatcatcttcgtccagc

SEQ ID NO: 153008 - DNA, 54 bp, Artificial
  Synthetic oligonucleotide
ccgcgaccggatatgcggggaacgtccacgacgcgtcttccgtgtcctccgtcc

SEQ ID NO: 153009 - DNA, 60 bp, Artificial
  Synthetic oligonucleotide
cgtggagcctcgcaaaggctctgtgagtgaggctgtggggtattgctcgaaagagaaaac

SEQ ID NO: 153010 - DNA, 60 bp, Artificial
  Synthetic oligonucleotide
tcaaatcgaaggtaagcaagctagacggttcatgtacatgaaccgagcccgcagcctccc

SEQ ID NO: 153011 - DNA, 56 bp, Artificial
  Synthetic oligonucleotide
ggctgctgcgggagtactggattttaggccgaagccgtcgaatgggtttgtttctc

SEQ ID NO: 153012 - DNA, 56 bp, Artificial
  Synthetic oligonucleotide
aatcaacttggcagcgtggtacggcttgggtacagcttgcgaaaagtttggcgact

SEQ ID NO: 153013 - DNA, 60 bp, Artificial
  Synthetic oligonucleotide
tacgtaccaagcatttgaagatggcagtggttccaatgactctgctggcgctcctgtcga

SEQ ID NO: 153014 - DNA, 58 bp, Artificial
  Synthetic oligonucleotide
aatgccggtactgccggtatgacgctcgcaaccgcgagcggcacgccaggaacgcggg

SEQ ID NO: 153015 - DNA, 50 bp, Artificial
  Synthetic oligonucleotide
ttatttatttactagttcgctccccttttgtactaagttcgctccccttt

SEQ ID NO: 153016 - DNA, 57 bp, Artificial
  Synthetic oligonucleotide
aatggtgacgcatgcactggccggtgcccgtaggtcttcccgacgcgttgtcgggaa

SEQ ID NO: 153017 - DNA, 56 bp, Artificial
  Synthetic oligonucleotide
ctagtccactttcaggaaattctcagttttagtctctaccttgaaaatcgtccata

SEQ ID NO: 153018 - DNA, 57 bp, Artificial
  Synthetic oligonucleotide
ttactttacgtccattttatttacatgtcaatttgatagacatgtccattttcttta

SEQ ID NO: 153019 - DNA, 51 bp, Artificial
  Synthetic oligonucleotide
tacttagtacaaaaggggagcgaacttagtacaaaaggggagcgaacttag

SEQ ID NO: 153020 - DNA, 60 bp, Artificial
  Synthetic oligonucleotide
ctggccgtatcgcaacagctatacgaccggcaataagtcgggacagatcaccttcgcaat

SEQ ID NO: 153021 - DNA, 60 bp, Artificial
  Synthetic oligonucleotide
tgatttcgctcggccgatacgatttgggtacatcgagcagtcggcggaagtcctcaaggc

SEQ ID NO: 153022 - DNA, 60 bp, Artificial
  Synthetic oligonucleotide
tcagccgacgctttgctgggctgaactatctgacttggttcccgcgtatttgttcactgt

SEQ ID NO: 153023 - DNA, 60 bp, Artificial
  Synthetic oligonucleotide
ctgccctggtcctcgaggctcctgtggtcgattctcgcggtctcgtccagccgcgcgcgt

SEQ ID NO: 153024 - DNA, 56 bp, Artificial
  Synthetic oligonucleotide
ctgaatgcatcccctgttaggcgttgggccggtgtcttcgggcaccggccctttgc

SEQ ID NO: 153025 - DNA, 51 bp, Artificial
  Synthetic oligonucleotide
cccaccagttaatcgaggaaccgaacccgttgcaacccgtcgtgtcggaat

SEQ ID NO: 153026 - DNA, 60 bp, Artificial
  Synthetic oligonucleotide
ctcgacaagtgccgacggaagaagacggattatccaccgtcaggtgcagagtcaagaagc

SEQ ID NO: 153027 - DNA, 60 bp, Artificial
  Synthetic oligonucleotide
ctcctgtcgacggcagtcccggtggcatctgctcaagaaaccactgacgagtcgttctat

SEQ ID NO: 153028 - DNA, 60 bp, Artificial
  Synthetic oligonucleotide
acaaaggccatcgccgctcccatcggcccagtccagccgaggctttggctcagctgaaaa

SEQ ID NO: 153029 - DNA, 60 bp, Artificial
  Synthetic oligonucleotide
ctccgatctcgcggttgatggccatgcggtcggacggctggcctcgtttctccatctccc

SEQ ID NO: 153030 - DNA, 60 bp, Artificial
  Synthetic oligonucleotide
tacgtatatcctcaggcgcagatcttatgcgggcgcaattacgtgacaatctatccgtct

SEQ ID NO: 153031 - DNA, 59 bp, Artificial
  Synthetic oligonucleotide
ctacaagtccagtacggagcaggcgcatgagaacgcccggaaaatctatgagctgtctc

SEQ ID NO: 153032 - DNA, 58 bp, Artificial
  Synthetic oligonucleotide
gatatgcttctgccgtcggttagcgggacgccgttcgttgtgggcacgtttgtgtcga

SEQ ID NO: 153033 - DNA, 60 bp, Artificial
  Synthetic oligonucleotide
tcagcgtgccgatgacctccacggccagacacgaaacctcgtacctagtgccgagtatcc

SEQ ID NO: 153034 - DNA, 59 bp, Artificial
  Synthetic oligonucleotide
ctttcaccaaacagcatacaggcatacctgtatattgtcaacagtttaaactgtaggta

SEQ ID NO: 153035 - DNA, 54 bp, Artificial
  Synthetic oligonucleotide
cagcgtggtacggcttgggtacagcttgcgaaaagtttggcgacttggaaactt

SEQ ID NO: 153036 - DNA, 59 bp, Artificial
  Synthetic oligonucleotide
gaaatcggcactggagtagcaagtgacgtgattggatatccaatcacgtcacttgctac

SEQ ID NO: 153037 - DNA, 54 bp, Artificial
  Synthetic oligonucleotide
cgcgaactcctcgttgaccccaaccgcgagagtcgcctcctgcgggtcggtaac

SEQ ID NO: 153038 - DNA, 59 bp, Artificial
  Synthetic oligonucleotide
tcgcgagtcagacgattccctgcgtttgctgcagtgcgaagccaacggttgaagatatt

SEQ ID NO: 153039 - DNA, 57 bp, Artificial
  Synthetic oligonucleotide
tggtgacaatcagtgtggcgtcgtttccgttggcgagttttcccaccgtgatcccgc

SEQ ID NO: 153040 - DNA, 59 bp, Artificial
  Synthetic oligonucleotide
acggtcagcactcttggcggctggaagttcctgcatagcaggattggcggcaagtgatg

SEQ ID NO: 153041 - DNA, 59 bp, Artificial
  Synthetic oligonucleotide
tactggtgcaaccgcgcccgccgctaacaccatggatccgcctacgattcccctggcac

SEQ ID NO: 153042 - DNA, 58 bp, Artificial
  Synthetic oligonucleotide
tctcgcgagtgggattcttcccctcgtccttggctttgttctggtacttctgccactc

SEQ ID NO: 153043 - DNA, 59 bp, Artificial
  Synthetic oligonucleotide
gcatatactgtgcctgcgcgtgacgggtcatgtagcggtcgtgcaggtactcccacgct

SEQ ID NO: 153044 - DNA, 58 bp, Artificial
  Synthetic oligonucleotide
tcatacgcgcccgtcaaccccgaacgcaggaatccccaagcgccctccgacagcctga

SEQ ID NO: 153045 - DNA, 58 bp, Artificial
  Synthetic oligonucleotide
gcatttgaccacaccggcgtaggagccacggcctgattcgttcagcctgagttcggcg

SEQ ID NO: 153046 - DNA, 58 bp, Artificial
  Synthetic oligonucleotide
tacctcgcggccagacggcacgtcgtccacgggctgaatgccggataccagggcgaag

SEQ ID NO: 153047 - DNA, 58 bp, Artificial
  Synthetic oligonucleotide
ccgtgatggggcgatctagagcggtctggacggtttcgcctggcgaaagctgcaatgt

SEQ ID NO: 153048 - DNA, 57 bp, Artificial
  Synthetic oligonucleotide
cggacgttatccgccatcgtgctctatggagcccggaagttcctcagccgatcccaa

SEQ ID NO: 153049 - DNA, 57 bp, Artificial
  Synthetic oligonucleotide
ggactgattgcggagggtcagctcggcgggtgaaccgtcctcaagcaagccgacgcg

SEQ ID NO: 153050 - DNA, 57 bp, Artificial
  Synthetic oligonucleotide
gcgagccttggataatgcagcgttaatttgcgctctagctgctgcttcgcgggtagc

SEQ ID NO: 153051 - DNA, 57 bp, Artificial
  Synthetic oligonucleotide
ccgcgcccgccgctaacaccatggatccgcctacgattcccctggcaccgatgaaac

SEQ ID NO: 153052 - DNA, 57 bp, Artificial
  Synthetic oligonucleotide
gagccaagatgctacaaaacgcttattttgcaagtgattactagatatgtattgtgc

SEQ ID NO: 153053 - DNA, 57 bp, Artificial
  Synthetic oligonucleotide
gaaacattcgaactattcgcgagcgaggagatgacgtaatggttattcaaacgattc

SEQ ID NO: 153054 - DNA, 57 bp, Artificial
  Synthetic oligonucleotide
gtactatcgctcccgcgtgcagtacctatgtccggcttgccatgagaccttccagcc

SEQ ID NO: 153055 - DNA, 59 bp, Artificial
  Synthetic oligonucleotide
tgacctcggactgaccttgtaagcgttgtgccggagctatctgcaacttttataaattc

SEQ ID NO: 153056 - DNA, 57 bp, Artificial
  Synthetic oligonucleotide
tccgcctgaataacggtccggggatgaatcaggggcgagctaagggttgcatctcgt

SEQ ID NO: 153057 - DNA, 57 bp, Artificial
  Synthetic oligonucleotide
tacgcgccactatcgataagctgaacactactatcgctagcaagtccaagactatcg

SEQ ID NO: 153058 - DNA, 57 bp, Artificial
  Synthetic oligonucleotide
tacgacactctatcgatagtactgttcttcatatcgatattctttcaacttctatct

SEQ ID NO: 153059 - DNA, 57 bp, Artificial
  Synthetic oligonucleotide
ccgtgacgaagaccttgaaccagcttgagcagatactgaccggcaaggaggatgaaa

SEQ ID NO: 153060 - DNA, 57 bp, Artificial
  Synthetic oligonucleotide
ggcacccgcggatggtgcacactcggacgcgagacctccatccagaaagtcgaatgg

SEQ ID NO: 153061 - DNA, 57 bp, Artificial
  Synthetic oligonucleotide
gcgcccaaacttatgcgcagcgtcaaccacttgttgcacgcgatgaacgtgacttga

SEQ ID NO: 153062 - DNA, 57 bp, Artificial
  Synthetic oligonucleotide
cactcggacgcgagacctccatccagaaagtcgaatgggatgaggacggttggccgc

SEQ ID NO: 153063 - DNA, 57 bp, Artificial
  Synthetic oligonucleotide
tgagttctaactactctgatccaccctcatgcgttttcctatgcgctcgtatggata

SEQ ID NO: 153064 - DNA, 55 bp, Artificial
  Synthetic oligonucleotide
tccgggggcgtggcaaccactgaaacggagtgattacgttgagtaattctaagga

SEQ ID NO: 153065 - DNA, 56 bp, Artificial
  Synthetic oligonucleotide
cttcgaaatccaatgggcaccttcccgcgtgcgacgtttttctgccctaccagcat

SEQ ID NO: 153066 - DNA, 59 bp, Artificial
  Synthetic oligonucleotide
gcgaattgagtacaaaataggagcggactgagtacaaaataggagcgaattgagtacaa

SEQ ID NO: 153067 - DNA, 56 bp, Artificial
  Synthetic oligonucleotide
gatatgatcgacgacctgcacaacgacgacgcgaacaatggaatcctcttcgatac

SEQ ID NO: 153068 - DNA, 53 bp, Artificial
  Synthetic oligonucleotide
cgattcaccgccaccgtcgaacctaacgaacgtgtcgccgtcccgcttatagg

SEQ ID NO: 153069 - DNA, 49 bp, Artificial
  Synthetic oligonucleotide
aataccgccgttttgggttaccgccccatgagggttttaccgccccatg

SEQ ID NO: 153070 - DNA, 56 bp, Artificial
  Synthetic oligonucleotide
cggcggtgcttggatgtctcgtccgactccggttgattacggtccggtgctcgcta

SEQ ID NO: 153071 - DNA, 55 bp, Artificial
  Synthetic oligonucleotide
cgtccggcactctaccggtggctgttgctatgcggtgagcgctacggatggtgaa

SEQ ID NO: 153072 - DNA, 55 bp, Artificial
  Synthetic oligonucleotide
cgtcaggaaagaggcgattgcatatgcgcagttgcattgcgtcgccactggatta

SEQ ID NO: 153073 - DNA, 55 bp, Artificial
  Synthetic oligonucleotide
cgtcgtcgtctccgaacgctgatagccctgcctagcctcgcgctcaatcgaacac

SEQ ID NO: 153074 - DNA, 55 bp, Artificial
  Synthetic oligonucleotide
gtcctcctcgtccaataaaacagagcccgttgtctagatggaagtgcgataccct

SEQ ID NO: 153075 - DNA, 55 bp, Artificial
  Synthetic oligonucleotide
gggcaagcgataatctcgactctttcccgtgtatatgccctgtaaggtgcagccc

SEQ ID NO: 153076 - DNA, 55 bp, Artificial
  Synthetic oligonucleotide
gggccgcagacaacagtcctgagaaaacgaatagggtaaggaacacgagcactgc

SEQ ID NO: 153077 - DNA, 57 bp, Artificial
  Synthetic oligonucleotide
gcgaagtcttccccaatccccgtcagtagatgcgcttttcaccccatcgaggggcga

SEQ ID NO: 153078 - DNA, 55 bp, Artificial
  Synthetic oligonucleotide
cgtcaaccccgaacgcaggaatccccaagcgccctccgacagcctgatctgacta

SEQ ID NO: 153079 - DNA, 55 bp, Artificial
  Synthetic oligonucleotide
gggcctcaccaatgaaggtaaggcccctcttcgttcgggattatccgtcacagat

SEQ ID NO: 153080 - DNA, 55 bp, Artificial
  Synthetic oligonucleotide
gggcgcgatacggatgtgataccggctggactgagcggagaagagcggctaacag

SEQ ID NO: 153081 - DNA, 55 bp, Artificial
  Synthetic oligonucleotide
cgtattccctggcctcgcggcctttggtaccggcgatggattcacacatgttctt

SEQ ID NO: 153082 - DNA, 55 bp, Artificial
  Synthetic oligonucleotide
cgtatgacttccaacgcgtgtttcgtagcgaccgtaataaaacatgagcacttta

SEQ ID NO: 153083 - DNA, 55 bp, Artificial
  Synthetic oligonucleotide
cgtatcgcgaacgttccaccgtggtacaaacgcggcacatcaacaatcgcagttc

SEQ ID NO: 153084 - DNA, 55 bp, Artificial
  Synthetic oligonucleotide
ggggcaattcgttcaactccatgtgttcgattttacgtgtcgttcgcgatgtgtg

SEQ ID NO: 153085 - DNA, 55 bp, Artificial
  Synthetic oligonucleotide
gtgcagggtgagcagaccttgaagattgaggtcaagatctacttgtccgaatgtc

SEQ ID NO: 153086 - DNA, 55 bp, Artificial
  Synthetic oligonucleotide
cgtagatttgtcctattcacacgcctcgggcacactgccgcaacctcatgcgtgt

SEQ ID NO: 153087 - DNA, 55 bp, Artificial
  Synthetic oligonucleotide
ctcgcgaaccacatgcgagttcccctgcattacagtgccgacgctatgcgccaac

SEQ ID NO: 153088 - DNA, 60 bp, Artificial
  Synthetic oligonucleotide
gcgaacttgaccagtggtcaagtacgacgtacactagtgcccatgtctgacgagtattcg

SEQ ID NO: 153089 - DNA, 55 bp, Artificial
  Synthetic oligonucleotide
ctcgccctgtatgcacgggattgtgatctgcgatggcaattcacgcgagcgtgcg

SEQ ID NO: 153090 - DNA, 55 bp, Artificial
  Synthetic oligonucleotide
ctcgccatgcgcaataatcacaaggttatctgcagtaagcgcaacttcgctcatt

SEQ ID NO: 153091 - DNA, 55 bp, Artificial
  Synthetic oligonucleotide
ctcgacgtgttcgcagctcttcctgttgtcgttccaatacctcatgaggctcctt

SEQ ID NO: 153092 - DNA, 55 bp, Artificial
  Synthetic oligonucleotide
ggcctacgtacccgtggttcagtgtcgttcccttgcgggaagcactgtgagagag

SEQ ID NO: 153093 - DNA, 51 bp, Artificial
  Synthetic oligonucleotide
ggcgaccgtggacctttgccgtacgtccgaccgtttggacggttggactgg

SEQ ID NO: 153094 - DNA, 55 bp, Artificial
  Synthetic oligonucleotide
ggcgatgtacacaccacgtgataggtatgaagtcggtatacgacaggcctcggtc

SEQ ID NO: 153095 - DNA, 55 bp, Artificial
  Synthetic oligonucleotide
ctcccgcctgatgcctccatgcggcgaacgtttccataagaattaccagcacagg

SEQ ID NO: 153096 - DNA, 55 bp, Artificial
  Synthetic oligonucleotide
ggcggctacgctaacgtgattcaagctacgggcggagttaatgagcttgtacact

SEQ ID NO: 153097 - DNA, 55 bp, Artificial
  Synthetic oligonucleotide
ctcaagccgattatcgaggagtgtgggccactccttggactgaagatcgagcgcc

SEQ ID NO: 153098 - DNA, 55 bp, Artificial
  Synthetic oligonucleotide
ctatctctcgggccaagcaactgacgattatggagtctgcgtcacctcaccactg

SEQ ID NO: 153099 - DNA, 53 bp, Artificial
  Synthetic oligonucleotide
ggaaacattgggctcagaggatgttactggggacaaaaagggagcgaaccggg

SEQ ID NO: 153100 - DNA, 55 bp, Artificial
  Synthetic oligonucleotide
ctatcacacatgcaggtcagcgcaacactcgcatggtcaattgacacgcgtatgc

SEQ ID NO: 153101 - DNA, 55 bp, Artificial
  Synthetic oligonucleotide
ggcgggttctcccgacacgacaatcagatcgtaatcatcggggttcaatcgttgc

SEQ ID NO: 153102 - DNA, 55 bp, Artificial
  Synthetic oligonucleotide
ggctacttagagtgcggatcttacgtaattggcggtgacgctgcagataacgagc

SEQ ID NO: 153103 - DNA, 55 bp, Artificial
  Synthetic oligonucleotide
ctaaatgggcattaagtgggtaccttattaagtgggcaatccaccactctggccc

SEQ ID NO: 153104 - DNA, 55 bp, Artificial
  Synthetic oligonucleotide
ggctgactgcaatcacctgtcaaaccctctagggctgcttgtctctgagaagtcc

SEQ ID NO: 153105 - DNA, 54 bp, Artificial
  Synthetic oligonucleotide
ctaaaccggattcttgattccaagcgtcaaaattacgcgaaagagctccggaag

SEQ ID NO: 153106 - DNA, 55 bp, Artificial
  Synthetic oligonucleotide
cgttttcatgggataggtgggcataagcggaagagaaacctctgaactacggcac

SEQ ID NO: 153107 - DNA, 55 bp, Artificial
  Synthetic oligonucleotide
cgttgatccccttctgaggcgtgttagtgtttgtccggatgtgtcggtgtccgcc

SEQ ID NO: 153108 - DNA, 55 bp, Artificial
  Synthetic oligonucleotide
gtgcaacctggtacacacatgtaccgagcacgcttgcaggttgaggaccccgcgg

SEQ ID NO: 153109 - DNA, 55 bp, Artificial
  Synthetic oligonucleotide
cgttacccgctctttgggtgtcgtcctctgagttgctatactcatggttgtaacg

SEQ ID NO: 153110 - DNA, 60 bp, Artificial
  Synthetic oligonucleotide
tggtggctcacacgccgctacagctaccttcacgaacgccagagcattacatggcagcag

SEQ ID NO: 153111 - DNA, 55 bp, Artificial
  Synthetic oligonucleotide
cgtgttggagacgattgggtctttcttggacctccctcagtctgtcgtcgcatac

SEQ ID NO: 153112 - DNA, 55 bp, Artificial
  Synthetic oligonucleotide
cgtgttcgcagctcttcctgttgtcgttccaatacctcatggggctccttaagcg

SEQ ID NO: 153113 - DNA, 55 bp, Artificial
  Synthetic oligonucleotide
cgtgcgcttctgttacataagatgcgccgctggcacacacgagttatgaatgtac

SEQ ID NO: 153114 - DNA, 55 bp, Artificial
  Synthetic oligonucleotide
cgtgcgatatcttcagcgtttcccatatctcggttctaacggcgagacgcgacaa

SEQ ID NO: 153115 - DNA, 55 bp, Artificial
  Synthetic oligonucleotide
cgtcttgactgcatgcaaccgcatacacggcgccacataccagaacaagtagcgc

SEQ ID NO: 153116 - DNA, 55 bp, Artificial
  Synthetic oligonucleotide
cgtctgcgtcctcaaaagctatttgtgctgtagtcacgtattgtggggagcgcgc

SEQ ID NO: 153117 - DNA, 55 bp, Artificial
  Synthetic oligonucleotide
cgtctacgatctgccgaagtatgtgtcttacgatctgtatgcgcaaatctggtag

SEQ ID NO: 153118 - DNA, 55 bp, Artificial
  Synthetic oligonucleotide
ggtgtttgcatccgttagcgtgtatcttgacactaaatctgcttgctagtgcgca

SEQ ID NO: 153119 - DNA, 55 bp, Artificial
  Synthetic oligonucleotide
ggttatgccgataaagtgcattatctacgctatgacgattcaggtgccataacga

SEQ ID NO: 153120 - DNA, 55 bp, Artificial
  Synthetic oligonucleotide
cggaggttttgagtcggctatgtcggtcaagtatcacgtccaccaatatactcgg

SEQ ID NO: 153121 - DNA, 53 bp, Artificial
  Synthetic oligonucleotide
cttcgagtggcgggcgtttatcgggttggacgttccaatagttcgcggaacca

SEQ ID NO: 153122 - DNA, 55 bp, Artificial
  Synthetic oligonucleotide
cggagaagccggatcctgagactgacgcacaaaatcccaacgagacaggtattgc

SEQ ID NO: 153123 - DNA, 55 bp, Artificial
  Synthetic oligonucleotide
gtccgtggaatctcaatgaactggatccccgcagcaagtagactgagagcagatc

SEQ ID NO: 153124 - DNA, 55 bp, Artificial
  Synthetic oligonucleotide
ggttgtacatggaacgcggcattgtcagtcaatccgatatgaataaactgcaagt

SEQ ID NO: 153125 - DNA, 55 bp, Artificial
  Synthetic oligonucleotide
cgctgggaccactggtattcggcgtattgatgcagcttaccggcggtcgtcaggt

SEQ ID NO: 153126 - DNA, 55 bp, Artificial
  Synthetic oligonucleotide
gtccgtattggtgaactgctttgacgaatcgggtcgattccccgctgtggtcccc

SEQ ID NO: 153127 - DNA, 55 bp, Artificial
  Synthetic oligonucleotide
cgctcccgttgttcctaatacgggaatgaggagaggagttagaactacgcacgca

SEQ ID NO: 153128 - DNA, 54 bp, Artificial
  Synthetic oligonucleotide
gtacaaaaggggagcgaacctagtacaaaaggggagctacatacacctttgcac

SEQ ID NO: 153129 - DNA, 55 bp, Artificial
  Synthetic oligonucleotide
gtaggaagtatcgcggcctagcttttcacgcagatcggaaatctgcggaacggta

SEQ ID NO: 153130 - DNA, 55 bp, Artificial
  Synthetic oligonucleotide
gtaggtgctatccgcgaaggtgctcgtgttggtctgtgaccattctacggattgg

SEQ ID NO: 153131 - DNA, 55 bp, Artificial
  Synthetic oligonucleotide
gtcaatggcgttgacgtcgattggaacaccatcttgccaagggtgcatcgggtgg

SEQ ID NO: 153132 - DNA, 60 bp, Artificial
  Synthetic oligonucleotide
cagtggggattgagtcagccgtcggcttttgtgtcatgacgaagacgaggtagccagccg

SEQ ID NO: 153133 - DNA, 60 bp, Artificial
  Synthetic oligonucleotide
tgggcgctgtatccagctgcatgacccgtacggaatcggcggtcagagaccatgcgacgc

SEQ ID NO: 153134 - DNA, 55 bp, Artificial
  Synthetic oligonucleotide
gtcagccgtcggcttttgtgtcatgacgaagacgaggtagccagccgagcgacct

SEQ ID NO: 153135 - DNA, 55 bp, Artificial
  Synthetic oligonucleotide
cgcgtcgcctacaccaacacgcactatccgcagcagaacaacgaggctgctaatg

SEQ ID NO: 153136 - DNA, 55 bp, Artificial
  Synthetic oligonucleotide
gtgtagtatgcacggtatgtcgcatacctcaataccctcacgtatcgcacggtat

SEQ ID NO: 153137 - DNA, 55 bp, Artificial
  Synthetic oligonucleotide
cgcgtcagttcaggagaaaaccgacgcgtcaccatgaataagcaggcagatctca

SEQ ID NO: 153138 - DNA, 55 bp, Artificial
  Synthetic oligonucleotide
gtcaggggaagatggctcgaggatcaggggaaggtgtttagaggaggtgaggcgc

SEQ ID NO: 153139 - DNA, 55 bp, Artificial
  Synthetic oligonucleotide
gtcatcgcatgtttccccgtgtaagaagggacaggtggacgtgtgtatttgtccc

SEQ ID NO: 153140 - DNA, 55 bp, Artificial
  Synthetic oligonucleotide
cgcggtcggacaaatgcgtggctagagttctttggctcggtagatgcggatggct

SEQ ID NO: 153141 - DNA, 55 bp, Artificial
  Synthetic oligonucleotide
cgcggctgacaattctaggctccaatcgcacagccatagcgatattcgtaagagg

SEQ ID NO: 153142 - DNA, 55 bp, Artificial
  Synthetic oligonucleotide
cgcggccgttcctgacccacggaacgacgtgaacggagccggtcagctggatacg

SEQ ID NO: 153143 - DNA, 55 bp, Artificial
  Synthetic oligonucleotide
gtccaacgagatcgtcagatattcgaaccagttcaacgctcaggcattacgccgc

SEQ ID NO: 153144 - DNA, 59 bp, Artificial
  Synthetic oligonucleotide
gcttacgctgaatgttaccaccggtaacatgtaagtgcgccctcaatgaaattgaggga

SEQ ID NO: 153145 - DNA, 55 bp, Artificial
  Synthetic oligonucleotide
cgcgcgttgtaaatctgcacatcatacaagtgcgtcaaatcacgcaacggctcaa

SEQ ID NO: 153146 - DNA, 55 bp, Artificial
  Synthetic oligonucleotide
cgcgcgtcaagcgatggatcgagtaaagaagccgtgaccagctatgaatatacgg

SEQ ID NO: 153147 - DNA, 54 bp, Artificial
  Synthetic oligonucleotide
cgcgcaccggaataacccgaacgtaagggtccgcgcgcatacgctccaacaggt

SEQ ID NO: 153148 - DNA, 55 bp, Artificial
  Synthetic oligonucleotide
cgcgattttgcacgatacacaaacgacacaccaaacgacacacttaatcctcgta

SEQ ID NO: 153149 - DNA, 55 bp, Artificial
  Synthetic oligonucleotide
gtccaagtccacgtctgactcggtctcaaacctgaacagagtcgtgctgaagccg

SEQ ID NO: 153150 - DNA, 55 bp, Artificial
  Synthetic oligonucleotide
cgtacccgtggttcagtgtcgttcccttgcgggaagcactgtgagagagtgcctt

SEQ ID NO: 153151 - DNA, 55 bp, Artificial
  Synthetic oligonucleotide
ggggtaatcgggttcgcggcatcgcaggttgcaggagtgtccgattctgcagaat

SEQ ID NO: 153152 - DNA, 55 bp, Artificial
  Synthetic oligonucleotide
cgtaattctcgtgaagcaaagttttcacaagtcatgcaagtgcgtgagacgccag

SEQ ID NO: 153153 - DNA, 55 bp, Artificial
  Synthetic oligonucleotide
ggggttattattgggctcgagaaatgcgtgaactaaatcaggttaaggatcgcta

SEQ ID NO: 153154 - DNA, 54 bp, Artificial
  Synthetic oligonucleotide
gggtcatcgttcgggcggaagaaccggtaccgagactcggcgtgattctgttcg

SEQ ID NO: 153155 - DNA, 58 bp, Artificial
  Synthetic oligonucleotide
gctgggagggcgaatcagattcggttggagtgatcgattcggaagcccgttagttgcg

SEQ ID NO: 153156 - DNA, 55 bp, Artificial
  Synthetic oligonucleotide
gtgccggacagcgacccattggccaggctgagtgtatcgagcccggtgttgagat

SEQ ID NO: 153157 - DNA, 55 bp, Artificial
  Synthetic oligonucleotide
cggtcgcgtccgatgcggggaaacccgagatggatgtgggaatggtcatggatcc

SEQ ID NO: 153158 - DNA, 55 bp, Artificial
  Synthetic oligonucleotide
gtgcgacggggacaagggatattcggggctgatgaccaagaacccgctgcacgag

SEQ ID NO: 153159 - DNA, 55 bp, Artificial
  Synthetic oligonucleotide
ggtaatacgtgtgagtggcgcatgtgagtgatgcgtaagggtcgggcccgcggag

SEQ ID NO: 153160 - DNA, 55 bp, Artificial
  Synthetic oligonucleotide
cgggtttgtgccactttggagcccgaacccagtcagcgctacaaaatactagcgc

SEQ ID NO: 153161 - DNA, 55 bp, Artificial
  Synthetic oligonucleotide
ggtatgacgctcgcaaccgcgagcggcacgccaggaacgcggggacgctgttcta

SEQ ID NO: 153162 - DNA, 55 bp, Artificial
  Synthetic oligonucleotide
cgggttcttagtaagactcgtgccgctcataacagtaagagaattaccgccacca

SEQ ID NO: 153163 - DNA, 55 bp, Artificial
  Synthetic oligonucleotide
ggtatggttcgtaccgcgctatttaactgggcggaggctcgccatactcacggca

SEQ ID NO: 153164 - DNA, 55 bp, Artificial
  Synthetic oligonucleotide
cgggttacgacggcgtatgcgatctggcatattatgtgaccgcacgatggcagcg

SEQ ID NO: 153165 - DNA, 52 bp, Artificial
  Synthetic oligonucleotide
ggtcaaacacctatcgacactaagactcctggaaccgtaaacgttaaggtta

SEQ ID NO: 153166 - DNA, 57 bp, Artificial
  Synthetic oligonucleotide
acgcgcgacgaccttcatatcctggcgtaggtcttcccattggtagcggataccctg

SEQ ID NO: 153167 - DNA, 55 bp, Artificial
  Synthetic oligonucleotide
ggtcaagtacgacgtacactagtgcccatgtctgacgagtattcgcagccgacgc

SEQ ID NO: 153168 - DNA, 55 bp, Artificial
  Synthetic oligonucleotide
ggtcgtgtcaaatctgcctccgaacaatttgtatagttacgcaccagaaagccag

SEQ ID NO: 153169 - DNA, 55 bp, Artificial
  Synthetic oligonucleotide
ggtcttgcgctcggttttcgcccactcgttgtcgccggatgagatttccttgccc

SEQ ID NO: 153170 - DNA, 55 bp, Artificial
  Synthetic oligonucleotide
ggtggaaatgcgcgctactgttattcgcggttcctttgacaatttaggctagcac

SEQ ID NO: 153171 - DNA, 55 bp, Artificial
  Synthetic oligonucleotide
cggctgctcctgtccatatgcgggctgttcgtaagggttgccggagagctgtcca

SEQ ID NO: 153172 - DNA, 55 bp, Artificial
  Synthetic oligonucleotide
cggctcgagtggttggcttatcgtcactgccgaagaataggtcactcggatgtgc

SEQ ID NO: 153173 - DNA, 55 bp, Artificial
  Synthetic oligonucleotide
cggctcctctgttatatatgcgtttcacaggtaccaagtttcaagcatacctgcg

SEQ ID NO: 153174 - DNA, 55 bp, Artificial
  Synthetic oligonucleotide
ggtggcctttggccgctccgcacggtggaatccgctagctttgctgactcattcc

SEQ ID NO: 153175 - DNA, 55 bp, Artificial
  Synthetic oligonucleotide
cggcggagacgatatagaacacgccctgcttaacggtaacggcgaaacagatgcg

SEQ ID NO: 153176 - DNA, 55 bp, Artificial
  Synthetic oligonucleotide
cggcgctcgcaccatcaattcgcgacacgacgtaacgtacggtctacagcatctg

SEQ ID NO: 153177 - DNA, 60 bp, Artificial
  Synthetic oligonucleotide
ctttgcgttctctatctcgatgggcataaagaacgtcttagatgatctattgagttctaa

SEQ ID NO: 153178 - DNA, 55 bp, Artificial
  Synthetic oligonucleotide
cggcgcataagccttccaaaggcctaagggtcggcctatgatggaggcatgacta

SEQ ID NO: 153179 - DNA, 55 bp, Artificial
  Synthetic oligonucleotide
cggccgatacgatttgggtacgtcgagcagtcggcggaagtcctcaaggctgacc

SEQ ID NO: 153180 - DNA, 55 bp, Artificial
  Synthetic oligonucleotide
cggccccatagggacctcggatttatccatgtaatgctgaaacaccttagcttta

SEQ ID NO: 153181 - DNA, 55 bp, Artificial
  Synthetic oligonucleotide
cggcatgatacttagcattatcgcgtcaaaaggcggaaccgggaaaacgaccagc

SEQ ID NO: 153182 - DNA, 55 bp, Artificial
  Synthetic oligonucleotide
gagggcggccacaaaacttcgcctcataactgaaggcgcaaccacaaccaaccct

SEQ ID NO: 153183 - DNA, 55 bp, Artificial
  Synthetic oligonucleotide
gccctacagcgagtaaggctgagagggtgtacagatatttaaagcccctcaaaac

SEQ ID NO: 153184 - DNA, 55 bp, Artificial
  Synthetic oligonucleotide
gcccttcattgcgtaaggggagcttggatccatacgaatcttgccatcgtggtca

SEQ ID NO: 153185 - DNA, 55 bp, Artificial
  Synthetic oligonucleotide
gccgaaggaacacatgcgggatacccgaatcgaggaacaggcccgttggaagcca

SEQ ID NO: 153186 - DNA, 55 bp, Artificial
  Synthetic oligonucleotide
gaggcctgtcgcgccgacagataccgttcgacgatgtgcgttgacgtatcgttca

SEQ ID NO: 153187 - DNA, 55 bp, Artificial
  Synthetic oligonucleotide
gccggagtcgctcatcatcatgcgggcgttggacatcatcgggtacacggtctcc

SEQ ID NO: 153188 - DNA, 47 bp, Artificial
  Synthetic oligonucleotide
ctttttgtccccggttcgctccctttttgtccccggttcgctccctt

SEQ ID NO: 153189 - DNA, 55 bp, Artificial
  Synthetic oligonucleotide
gccggtaatatgcgcagctatattgtgtcaggcatatgtgcattgttgttgtctc

SEQ ID NO: 153190 - DNA, 54 bp, Artificial
  Synthetic oligonucleotide
gccggttttcgtgggaaccagcgagcttccgtaggaaccagcgagcttccgtag

SEQ ID NO: 153191 - DNA, 55 bp, Artificial
  Synthetic oligonucleotide
gaggagtcgaactacgccaggtgatgctcgaggactcggtaattcctgagcagga

SEQ ID NO: 153192 - DNA, 55 bp, Artificial
  Synthetic oligonucleotide
gccgtcgcacataggtggtctgcgaatccgatcgtttggcgaacgacaggtggag

SEQ ID NO: 153193 - DNA, 55 bp, Artificial
  Synthetic oligonucleotide
gccgtctcacaatgtaaggcgatcgcttgaaaggcacgtgttttggcacgtgcct

SEQ ID NO: 153194 - DNA, 55 bp, Artificial
  Synthetic oligonucleotide
gaggaggttacgagcagactcgcttttggaccatcgtttgatacctatgttgggc

SEQ ID NO: 153195 - DNA, 55 bp, Artificial
  Synthetic oligonucleotide
gcctgacaggtaactcgcttacgtgcggaacgaatggaccgccctatcctcccgc

SEQ ID NO: 153196 - DNA, 55 bp, Artificial
  Synthetic oligonucleotide
gcctgcatgtctggcgcgttcgtggaggctacttcactgtcatctcgtatcaggc

SEQ ID NO: 153197 - DNA, 55 bp, Artificial
  Synthetic oligonucleotide
gcctgttcacgttacctccacaagctataatcggccacggttctgattggatgcg

SEQ ID NO: 153198 - DNA, 55 bp, Artificial
  Synthetic oligonucleotide
gtcgtatcgtgaacattactacggaataaccgtcaatgactacgtacgttgcccc

SEQ ID NO: 153199 - DNA, 60 bp, Artificial
  Synthetic oligonucleotide
catgattcacagaccatgcccgatgatcggatggagcctggtatcgagccgactcttttc

SEQ ID NO: 153200 - DNA, 55 bp, Artificial
  Synthetic oligonucleotide
gagcggacttatacagaaaggaacgcatgatgaaaacgacccttttccacgatag

SEQ ID NO: 153201 - DNA, 55 bp, Artificial
  Synthetic oligonucleotide
gagcgctgtaaagctcgttactaccgatgacggtataacttatgggtccgacgca

SEQ ID NO: 153202 - DNA, 55 bp, Artificial
  Synthetic oligonucleotide
gagcagttctagtattaacaatgagtcagacaacacttaacgaatcttgcacacg

SEQ ID NO: 153203 - DNA, 55 bp, Artificial
  Synthetic oligonucleotide
gagattggggcgacgacccagattcgctggacggtgacaatcctgatagattgtc

SEQ ID NO: 153204 - DNA, 55 bp, Artificial
  Synthetic oligonucleotide
gagagtactgtgcgacgcctgtagtcaagacctcctatgaggttgcggtccttcc

SEQ ID NO: 153205 - DNA, 55 bp, Artificial
  Synthetic oligonucleotide
gcgagggtttcgattgtgcggatacatcactgcgctgtgtgtcggtgcgttgcga

SEQ ID NO: 153206 - DNA, 55 bp, Artificial
  Synthetic oligonucleotide
gagaaacggaagagtctacgccagaatcatcgatgtactgcacgggaacgcggta

SEQ ID NO: 153207 - DNA, 55 bp, Artificial
  Synthetic oligonucleotide
gcgatggatagatcgatacgcacaagaaactgtcctcgaagctaacgatagccgg

SEQ ID NO: 153208 - DNA, 55 bp, Artificial
  Synthetic oligonucleotide
gacttaacgctcggcttgaaactgtgcgaagttgcaataaccgtagctccaccct

SEQ ID NO: 153209 - DNA, 55 bp, Artificial
  Synthetic oligonucleotide
gactcgttatagcactcaacgcaatggaacgggcagccggaaacgtaaagcgagc

SEQ ID NO: 153210 - DNA, 60 bp, Artificial
  Synthetic oligonucleotide
gtcgatatctggaagcagatacgtgcgccgcagttgtcacggagctggcttggcaggcag

SEQ ID NO: 153211 - DNA, 55 bp, Artificial
  Synthetic oligonucleotide
gcacttgtacgatgtataccgagacatgcaccctcgaatagtgatcgtggcaggt

SEQ ID NO: 153212 - DNA, 55 bp, Artificial
  Synthetic oligonucleotide
gcagcctcccgcgccctacggcgctgaagcaacaacccgagtgccgaaggccgat

SEQ ID NO: 153213 - DNA, 55 bp, Artificial
  Synthetic oligonucleotide
gcacttggagtagataagccgaatgctataactagcgctcctttgggcttagttg

SEQ ID NO: 153214 - DNA, 55 bp, Artificial
  Synthetic oligonucleotide
gcacgtttggtggccgcgagtccgcaggccgaatccttattcagtaaatcggtgc

SEQ ID NO: 153215 - DNA, 55 bp, Artificial
  Synthetic oligonucleotide
gcacgttaaagcacatgagacggtacaaccgctcgcattcctctgtactgttgca

SEQ ID NO: 153216 - DNA, 55 bp, Artificial
  Synthetic oligonucleotide
gcagtcttgcgaagtcctctcgcgatcccatggtgttgccttgcacgcggatgtc

SEQ ID NO: 153217 - DNA, 55 bp, Artificial
  Synthetic oligonucleotide
gcatacattggcacataccacacgcgccgcgtccaagtcgggcggagtcgaaact

SEQ ID NO: 153218 - DNA, 50 bp, Artificial
  Synthetic oligonucleotide
gcacaaatttcgctccccttttgtactaagtaccgtccgaaacccgttgg

SEQ ID NO: 153219 - DNA, 55 bp, Artificial
  Synthetic oligonucleotide
gcatttgcgcggacaattagtgcattcgatcatcggattagtacatcagtgtgca

SEQ ID NO: 153220 - DNA, 55 bp, Artificial
  Synthetic oligonucleotide
gcaatgacggctttctgtattggtaatcacatttctcgttcggtgaaacaacgca

SEQ ID NO: 153221 - DNA, 58 bp, Artificial
  Synthetic oligonucleotide
acggggactaccagactacggatgacaaacagcaagtaattcttgcatcgccgcgtcc

SEQ ID NO: 153222 - DNA, 54 bp, Artificial
  Synthetic oligonucleotide
gccaaaattcgacatcattcccgacgaaacgaaccgggaacacaacaccagaac

SEQ ID NO: 153223 - DNA, 55 bp, Artificial
  Synthetic oligonucleotide
gccacccctaatccgggcggaaccactatccgtgaggtcaagtatgctcattggc

SEQ ID NO: 153224 - DNA, 55 bp, Artificial
  Synthetic oligonucleotide
gccaggttcgggtccaatgcgtcgtgcgattgtacggtaccgtttgctgtgatgg

SEQ ID NO: 153225 - DNA, 55 bp, Artificial
  Synthetic oligonucleotide
gattctacctgagagtcagcagtagtagccgcttgcatctaggcgagcgtctggg

SEQ ID NO: 153226 - DNA, 55 bp, Artificial
  Synthetic oligonucleotide
gatgtgcacgtttgtggtctacccttcagttgcctctggcgacagctcccctgtc

SEQ ID NO: 153227 - DNA, 54 bp, Artificial
  Synthetic oligonucleotide
gccatataggttctacggtcatcggataaaaccggataaatcgtttagcggtcg

SEQ ID NO: 153228 - DNA, 55 bp, Artificial
  Synthetic oligonucleotide
gccatgcgcggaaccgttctagcatgtcatcgtccaccttggtttcagcgaacag

SEQ ID NO: 153229 - DNA, 55 bp, Artificial
  Synthetic oligonucleotide
gccatgcggtcggacggctggcctcgtttctccatctcccggctggcgtagccct

SEQ ID NO: 153230 - DNA, 55 bp, Artificial
  Synthetic oligonucleotide
gatccgctgtatcagcgaatcgttctcaatagcgtttgtgcgagtactcctcaca

SEQ ID NO: 153231 - DNA, 55 bp, Artificial
  Synthetic oligonucleotide
gatcagtcgttgcgtaaaatcgcggtttatagtttgcggcacaatagacgtatgg

SEQ ID NO: 153232 - DNA, 51 bp, Artificial
  Synthetic oligonucleotide
gctccctttttgtccccggttcgctccctttttgtccccagtaacatcctc

SEQ ID NO: 153233 - DNA, 55 bp, Artificial
  Synthetic oligonucleotide
gcccatagtacccatgcctatgctctacgcgtattccagcgcactacgtcaacgg

SEQ ID NO: 153234 - DNA, 55 bp, Artificial
  Synthetic oligonucleotide
gatacggatacttggacgggatttacgatgtgtctgacgaaagttaacggcggtc

SEQ ID NO: 153235 - DNA, 55 bp, Artificial
  Synthetic oligonucleotide
gccccgattgttccgcctaacgagtcgaatcgcccatatccttcactcttcggct

SEQ ID NO: 153236 - DNA, 55 bp, Artificial
  Synthetic oligonucleotide
gccccggtctcttgcgaaaagtgggttcgctccccgcttctgcacatattccgaa

SEQ ID NO: 153237 - DNA, 55 bp, Artificial
  Synthetic oligonucleotide
gagtgggatagcgctttgaaggaccccttagggaaacacaacaatccactagtat

SEQ ID NO: 153238 - DNA, 55 bp, Artificial
  Synthetic oligonucleotide
gcccgacttgtgagcatgtagtcacatcccgacacaatgtacggaaaaccggcca

SEQ ID NO: 153239 - DNA, 55 bp, Artificial
  Synthetic oligonucleotide
gagtccggttcggctcttgctgcattggcggtccacttaatccccgcccatacgg

SEQ ID NO: 153240 - DNA, 55 bp, Artificial
  Synthetic oligonucleotide
gtctgcgtcttatccacaacctacggtgatgcatccacgagttgcccacggacga

SEQ ID NO: 153241 - DNA, 55 bp, Artificial
  Synthetic oligonucleotide
gaggtattagttagacattcggttcgggagaagttcagacgtaagggctcgacag

SEQ ID NO: 153242 - DNA, 55 bp, Artificial
  Synthetic oligonucleotide
gcttgacggtttgggcctggtcgtggatcccgggccgtctatatggacgactccg

SEQ ID NO: 153243 - DNA, 54 bp, Artificial
  Synthetic oligonucleotide
gcgggcgtttatcgggttggacgttccaatagttcgcggaaccataccgctgac

SEQ ID NO: 153244 - DNA, 58 bp, Artificial
  Synthetic oligonucleotide
tgcgcattccctcccgcaggacgtgggagggaatggccgcccactcgtgccggtcgta

SEQ ID NO: 153245 - DNA, 55 bp, Artificial
  Synthetic oligonucleotide
cttccgaacagttgtatatatcagttacggacacattaccggcgcgcattgcctc

SEQ ID NO: 153246 - DNA, 55 bp, Artificial
  Synthetic oligonucleotide
ggacgcggactgaattctttccccatggttcgatgcgaaggtattcgccgtcccc

SEQ ID NO: 153247 - DNA, 55 bp, Artificial
  Synthetic oligonucleotide
ggactccatgatagcctcgacctttgcactccacatggaccgatcaagtgagtgt

SEQ ID NO: 153248 - DNA, 55 bp, Artificial
  Synthetic oligonucleotide
cttattgtagaaaacacccatcactggcggagtggataccagtgccgcataacga

SEQ ID NO: 153249 - DNA, 55 bp, Artificial
  Synthetic oligonucleotide
ggagctacggttatcgcaacttcgcacagtttcaagccgagcgttaagtcttggg

SEQ ID NO: 153250 - DNA, 55 bp, Artificial
  Synthetic oligonucleotide
cttaaagacacgtatgcgtatcaggtcgataagatcactaccgttctgccgaccg

SEQ ID NO: 153251 - DNA, 55 bp, Artificial
  Synthetic oligonucleotide
ctgtcggcggcagtgaatgtgatctatgcgaggggtcggtgcgacatccagttgg

SEQ ID NO: 153252 - DNA, 55 bp, Artificial
  Synthetic oligonucleotide
ctgtcactatgaccggtcatgaatctcacgaatattcattcagagaagcgctgga

SEQ ID NO: 153253 - DNA, 55 bp, Artificial
  Synthetic oligonucleotide
gtcgacgactagccgcctgtgacgagttgtggtatgtggaaggggccgcctccaa

SEQ ID NO: 153254 - DNA, 55 bp, Artificial
  Synthetic oligonucleotide
ctggtatggcacgcaatccgcaacttgtctcatggatcgagataagagatatcgg

SEQ ID NO: 153255 - DNA, 54 bp, Artificial
  Synthetic oligonucleotide
gaacgcaggactccccaaacgccctccgacggcctgatctgacgtccggaaaaa

SEQ ID NO: 153256 - DNA, 55 bp, Artificial
  Synthetic oligonucleotide
ctgggtgctcacctttccggtgcccagaaccgatctggcgcgtctcaagccgttg

SEQ ID NO: 153257 - DNA, 52 bp, Artificial
  Synthetic oligonucleotide
ggatcctcgtaggcggcttgcgagggaaacaggaaatcgggtttctttccgt

SEQ ID NO: 153258 - DNA, 55 bp, Artificial
  Synthetic oligonucleotide
ggatgcttctacgcagagcttgattcgcttctatcgcgctcatcgcaagtaagat

SEQ ID NO: 153259 - DNA, 55 bp, Artificial
  Synthetic oligonucleotide
ggcacatcgcagaactttccattggccatcgctactgaccgaatcaggacgaggc

SEQ ID NO: 153260 - DNA, 55 bp, Artificial
  Synthetic oligonucleotide
ggcaccgcatgctgcaagcccaatgccggaccatgctcgacacgtacggacgatg

SEQ ID NO: 153261 - DNA, 55 bp, Artificial
  Synthetic oligonucleotide
ggcagactttacgcggtacgcaaccatggatgacaacttttggcgaatcaagaga

SEQ ID NO: 153262 - DNA, 55 bp, Artificial
  Synthetic oligonucleotide
ggcatgcatatgccgagcctcaggtcttgcgtcgtaatggactagcaaccctgcg

SEQ ID NO: 153263 - DNA, 55 bp, Artificial
  Synthetic oligonucleotide
gtgagacccatcgtatcgttcgattctacgacgaacgttttgcatcaagcgcaga

SEQ ID NO: 153264 - DNA, 55 bp, Artificial
  Synthetic oligonucleotide
ggccaaagtcgcgttcagctgagcccggtaggcctctcccacgcaattctcccaa

SEQ ID NO: 153265 - DNA, 55 bp, Artificial
  Synthetic oligonucleotide
ctgcagcgtcaccgccaattacgtaagatccgcactctaagtagccagttggctt

SEQ ID NO: 153266 - DNA, 56 bp, Artificial
  Synthetic oligonucleotide
tgcctacttggacagtgcacaaatttcgctccccttttgtactaagtaccgtccga

SEQ ID NO: 153267 - DNA, 55 bp, Artificial
  Synthetic oligonucleotide
ctgataccgccattttcgataaggggtacgaagggtccgccagctaccgcatccc

SEQ ID NO: 153268 - DNA, 55 bp, Artificial
  Synthetic oligonucleotide
ctgagcgtactgaccatcgttgagctggtgcggagcctgggtatcgaccacaagc

SEQ ID NO: 153269 - DNA, 55 bp, Artificial
  Synthetic oligonucleotide
ggcccgtatcgtgctcatattagctcctccggtttccataaacacggcatgcctg

SEQ ID NO: 153270 - DNA, 55 bp, Artificial
  Synthetic oligonucleotide
ctgacgaaggccgctttgcaatagttcgatctgccacgggcccatattgctgatt

SEQ ID NO: 153271 - DNA, 55 bp, Artificial
  Synthetic oligonucleotide
ggccgcttcacttaccgctactacccgtcgtcttttggattggttggctacaggc

SEQ ID NO: 153272 - DNA, 55 bp, Artificial
  Synthetic oligonucleotide
ggccggaagcatacctccgcagaggccaaaaccggcatcatgcatgtgggaggca

SEQ ID NO: 153273 - DNA, 55 bp, Artificial
  Synthetic oligonucleotide
ctctcgttgttcggccatgcgcagtgcgagggccttcacctgttcggggcttggc

SEQ ID NO: 153274 - DNA, 55 bp, Artificial
  Synthetic oligonucleotide
gacgttatttcttgccacacggttggttacatgaggttggttgctacgaggctgg

SEQ ID NO: 153275 - DNA, 55 bp, Artificial
  Synthetic oligonucleotide
gacggtcgccaatcccaccccagacgaacgtatcccaagcaaactcatcggagcc

SEQ ID NO: 153276 - DNA, 55 bp, Artificial
  Synthetic oligonucleotide
gacggtcaacgattcgcgcacctccttgaccaattcgctgcggcgagagccttcc

SEQ ID NO: 153277 - DNA, 60 bp, Artificial
  Synthetic oligonucleotide
acgtcgatgtctgttctaggattctgcggctattcgtgcagcattctcgctatggcttgg

SEQ ID NO: 153278 - DNA, 55 bp, Artificial
  Synthetic oligonucleotide
gacggcagcactattactgcagtatctaagaaccagacggacaaaccatctgatc

SEQ ID NO: 153279 - DNA, 55 bp, Artificial
  Synthetic oligonucleotide
gcgccgctattgccacgttggtactggcaactataaccctaagacggctcgcctt

SEQ ID NO: 153280 - DNA, 55 bp, Artificial
  Synthetic oligonucleotide
gacctagtgacaccgatggtcgtgctacctgaagcggcactcgcatagttgtttt

SEQ ID NO: 153281 - DNA, 55 bp, Artificial
  Synthetic oligonucleotide
gacctaccatgcggcacagaatgtggttcgggcgtatgtgcataagcatcgcgcc

SEQ ID NO: 153282 - DNA, 55 bp, Artificial
  Synthetic oligonucleotide
gaccatagacgtgctttcccgctacacgttattcacctgtcatgcgccgatatca

SEQ ID NO: 153283 - DNA, 55 bp, Artificial
  Synthetic oligonucleotide
gacaggaggtccgatgcaggaacttgaggaacgaatccagagcgagggaacggta

SEQ ID NO: 153284 - DNA, 55 bp, Artificial
  Synthetic oligonucleotide
gacagcgacagaaacgacgcccaacatacggtcgaacagattttaaccaaaggac

SEQ ID NO: 153285 - DNA, 55 bp, Artificial
  Synthetic oligonucleotide
gcgcgtattccccgcttcgctacacgtatatgcacatctcagcttcggttgcggt

SEQ ID NO: 153286 - DNA, 55 bp, Artificial
  Synthetic oligonucleotide
gcggatcatgggtaattgcacacattgtggtgctcagttatcaccgggagcggca

SEQ ID NO: 153287 - DNA, 55 bp, Artificial
  Synthetic oligonucleotide
gaattgctcggcacaaatgttgttttggctgcagacacttacggcgaagatgctc

SEQ ID NO: 153288 - DNA, 60 bp, Artificial
  Synthetic oligonucleotide
tgccgactgcttggcgttccaccgtcggcaataacccagacacgatatctgaatcagaag

SEQ ID NO: 153289 - DNA, 55 bp, Artificial
  Synthetic oligonucleotide
gcggccaaccgtcctcatcccattcgactttctggatggaggtctcgcgtccgag

SEQ ID NO: 153290 - DNA, 55 bp, Artificial
  Synthetic oligonucleotide
gcggtgaatagctgtcggcggcagtgcataccagttgtgagttcgcaccgacccc

SEQ ID NO: 153291 - DNA, 55 bp, Artificial
  Synthetic oligonucleotide
gaatcacccgcagtgtctccaatgtcgataccggccatagctgcgagcgccgcac

SEQ ID NO: 153292 - DNA, 55 bp, Artificial
  Synthetic oligonucleotide
gaagctcgatggcacggatattgctaccctgctacgcgaataccatgtgatctga

SEQ ID NO: 153293 - DNA, 55 bp, Artificial
  Synthetic oligonucleotide
gcggttttgtgaccggaaatgtatctatcctgaccacgctggtaagcgaggatgc

SEQ ID NO: 153294 - DNA, 55 bp, Artificial
  Synthetic oligonucleotide
gaagccgattgtcgaagagtgtggcccgctccttggcttgaagatcgagcgccag

SEQ ID NO: 153295 - DNA, 55 bp, Artificial
  Synthetic oligonucleotide
gtcggtcgtatccacgtcgcgctgtgctctcgctttcttaatcagcggggcgtac

SEQ ID NO: 153296 - DNA, 55 bp, Artificial
  Synthetic oligonucleotide
gcgttactcgcgcatcccgcaccgatgacgcgggaacaaatattgcgggacgcgt

SEQ ID NO: 153297 - DNA, 55 bp, Artificial
  Synthetic oligonucleotide
gctatcatgcgctgaaccatcaacttcgtaggccctcacacgatacagtcacgcg

SEQ ID NO: 153298 - DNA, 55 bp, Artificial
  Synthetic oligonucleotide
gaactcatctgagttgccgttgtagacctgtagaccactgagggcggttatcggg

SEQ ID NO: 153299 - DNA, 60 bp, Artificial
  Synthetic oligonucleotide
tgccatggctcgaagacaccgacatcccgagcgactgggaccaggccaacaggttccgca

SEQ ID NO: 153300 - DNA, 55 bp, Artificial
  Synthetic oligonucleotide
gaactcataagagctggggcagaccccagaggctcatatacgacttctaccgggt

SEQ ID NO: 153301 - DNA, 55 bp, Artificial
  Synthetic oligonucleotide
gaacatgtagatgtagtactgtccgtcctccagcgaggaatcgtactgcacagtg

SEQ ID NO: 153302 - DNA, 55 bp, Artificial
  Synthetic oligonucleotide
gctcggtcatattcagcttgaaaagggtaagggagatgcggaaaagtatgctgct

SEQ ID NO: 153303 - DNA, 55 bp, Artificial
  Synthetic oligonucleotide
gctgcaaggcggttatccacgcatttacgacacgagaatgccgctcaatctgttc

SEQ ID NO: 153304 - DNA, 55 bp, Artificial
  Synthetic oligonucleotide
gctgcgtccatgacggcctgctcacgtaccttttccatgccttcctcgactaggg

SEQ ID NO: 153305 - DNA, 55 bp, Artificial
  Synthetic oligonucleotide
cacctcacttggaggagggacgaggagtctgtttggtggcgtatggggcagccga

SEQ ID NO: 153306 - DNA, 55 bp, Artificial
  Synthetic oligonucleotide
caccccgtttgcgaatccccatccatcgatagtgaagccccttcaagcgagggac

SEQ ID NO: 153307 - DNA, 55 bp, Artificial
  Synthetic oligonucleotide
caccactccgtcgggcggggacatgattgtcggcgaacctggcacaacgattctc

SEQ ID NO: 153308 - DNA, 55 bp, Artificial
  Synthetic oligonucleotide
cacatagtcgttgaggtcggagcgtagttgttccaggctggtgtagtggttccgg

SEQ ID NO: 153309 - DNA, 55 bp, Artificial
  Synthetic oligonucleotide
cacatacgggttgtccctgtaatgttcggccatcgcacggcacagtctcagcgcg

SEQ ID NO: 153310 - DNA, 60 bp, Artificial
  Synthetic oligonucleotide
actaaacgatctagctgagattgtcgcagctagtgccgtcagcagacatgtatcgctaag

SEQ ID NO: 153311 - DNA, 55 bp, Artificial
  Synthetic oligonucleotide
aacagattgcatgccgccatcataaagacttttgcgcgactcaaccacaggagag

SEQ ID NO: 153312 - DNA, 55 bp, Artificial
  Synthetic oligonucleotide
caacccttagctcgcccctgattcatccccggaccgttattcaggcggagcgtat

SEQ ID NO: 153313 - DNA, 55 bp, Artificial
  Synthetic oligonucleotide
caaatccagaagcccggaattccgccgatgtgtgatggcggatattgcgcggtag

SEQ ID NO: 153314 - DNA, 55 bp, Artificial
  Synthetic oligonucleotide
caaaagccatactcatgaatctatcaagcgcagcgaacgaatcgggcgttcgagg

SEQ ID NO: 153315 - DNA, 51 bp, Artificial
  Synthetic oligonucleotide
atttcaatcgcgcggacgaaacccctgattttccaacgttccgaggcccgt

SEQ ID NO: 153316 - DNA, 54 bp, Artificial
  Synthetic oligonucleotide
atttatggaacccgacaccaggcttggaaacggcgtcggcgattgttcgtttgc

SEQ ID NO: 153317 - DNA, 55 bp, Artificial
  Synthetic oligonucleotide
atttatcccagtcgaccgcacccgaattcttattctgtgctggcgcactataaga

SEQ ID NO: 153318 - DNA, 55 bp, Artificial
  Synthetic oligonucleotide
aaccggtctgcggtcccttgccgcacactgcgcaacgagctgccataatggactc

SEQ ID NO: 153319 - DNA, 55 bp, Artificial
  Synthetic oligonucleotide
tccctgggatcgccgcaatgctatgcgatacacatctccttgagtcatgacggag

SEQ ID NO: 153320 - DNA, 55 bp, Artificial
  Synthetic oligonucleotide
attcgacgcagcgtttgggtacgaaataatgcatagttccccagtctattccacc

SEQ ID NO: 153321 - DNA, 58 bp, Artificial
  Synthetic oligonucleotide
tataaattcgtccgtttcggatggtgaacgctcaggagagtgtgccttgtgtaagtaa

SEQ ID NO: 153322 - DNA, 55 bp, Artificial
  Synthetic oligonucleotide
tccgaggttgagactcgtccgctgttggcttggctgctagcgtcaggaatccgcg

SEQ ID NO: 153323 - DNA, 55 bp, Artificial
  Synthetic oligonucleotide
attatgtcttccggtcattcggcatgaggaaactcagttgttggttcatgtcggc

SEQ ID NO: 153324 - DNA, 55 bp, Artificial
  Synthetic oligonucleotide
atgtggggcacgaaacccgcaactgtggcaacgtctgcgagcacgaagaccaaga

SEQ ID NO: 153325 - DNA, 54 bp, Artificial
  Synthetic oligonucleotide
atgggcaccttcccgcgtgcgacgtttttctgccctaccagcataccgttaccc

SEQ ID NO: 153326 - DNA, 55 bp, Artificial
  Synthetic oligonucleotide
atggatgaaaggagcctaacccgcacagtgccgaaccgcaataaccgcagtgccg

SEQ ID NO: 153327 - DNA, 55 bp, Artificial
  Synthetic oligonucleotide
ttgccttatgtttccgacgtccaggcaggaccaatacgtcgttcaaccgccgagc

SEQ ID NO: 153328 - DNA, 55 bp, Artificial
  Synthetic oligonucleotide
tcctgcgaaagctcgcgcatcttatcggataccgcactggaaccccattgccacg

SEQ ID NO: 153329 - DNA, 55 bp, Artificial
  Synthetic oligonucleotide
ttgaggatgggaatgcaacgttcgtccgccactgaatcactgtgagcgacgtagt

SEQ ID NO: 153330 - DNA, 55 bp, Artificial
  Synthetic oligonucleotide
atcgtcgaatgcgtgcagtgttggcctgatttggctgaggcttggttgcgtcgcc

SEQ ID NO: 153331 - DNA, 55 bp, Artificial
  Synthetic oligonucleotide
atccttcctacggcgtctggcagttcaagactcgcttcggcggattcgtggaaga

SEQ ID NO: 153332 - DNA, 60 bp, Artificial
  Synthetic oligonucleotide
gaagcccgacagcctgcgtttcacgtactggcgctcgatcttcaggccaaggagagggcc

SEQ ID NO: 153333 - DNA, 55 bp, Artificial
  Synthetic oligonucleotide
atccgtcacgataatgtccatgttggcgcatagcgtcggcactgtaatgcagggg

SEQ ID NO: 153334 - DNA, 55 bp, Artificial
  Synthetic oligonucleotide
tcgaatgcgaaatccacgaatccttcaagaatcgcttgcgggaactcgtcatccg

SEQ ID NO: 153335 - DNA, 55 bp, Artificial
  Synthetic oligonucleotide
tcgagctctcgccaggtgttgtattgggtgacgtatggcatggctgaatcggtgc

SEQ ID NO: 153336 - DNA, 55 bp, Artificial
  Synthetic oligonucleotide
atagtcgaggaaggtcatgaactctcagacgaactcatgaagtacggcgtacgac

SEQ ID NO: 153337 - DNA, 55 bp, Artificial
  Synthetic oligonucleotide
ttctaagcgcaatgcaggaatttctggcaaaaccctatctgcaataccagactcg

SEQ ID NO: 153338 - DNA, 54 bp, Artificial
  Synthetic oligonucleotide
tagaggacaagtccctgttcggtgaattccttcgggctccggtatccgagggcg

SEQ ID NO: 153339 - DNA, 55 bp, Artificial
  Synthetic oligonucleotide
ccaatctggactgattccaacatcaattcatgcaatcgtaccgtcggcaatacgc

SEQ ID NO: 153340 - DNA, 55 bp, Artificial
  Synthetic oligonucleotide
ccaacgtttcgttgagtagttgaatctgttaagtctcgctgccaacggctctcgg

SEQ ID NO: 153341 - DNA, 55 bp, Artificial
  Synthetic oligonucleotide
aaagaatcactcggcctgcgaaatccttccgctccacgcactggacaagacaggc

SEQ ID NO: 153342 - DNA, 55 bp, Artificial
  Synthetic oligonucleotide
ccaacgtatgtatcacgaaggcatgtgtcatgaaagcatgtattgcgctagaacc

SEQ ID NO: 153343 - DNA, 60 bp, Artificial
  Synthetic oligonucleotide
gcgtgcagtacctatgtccggcttgccatgagaccttccagccgggtatgcgagagttcg

SEQ ID NO: 153344 - DNA, 55 bp, Artificial
  Synthetic oligonucleotide
tagccgcatagtattcatgccagagcgcatcacgctgcgaatcagacaagccgag

SEQ ID NO: 153345 - DNA, 55 bp, Artificial
  Synthetic oligonucleotide
taggagcggactgagtacaaaataggagcgaattgagtacaaaataggagcggac

SEQ ID NO: 153346 - DNA, 55 bp, Artificial
  Synthetic oligonucleotide
catgcgtgtgacgtatgtcggggagatcattctgcggtacggattccagttagac

SEQ ID NO: 153347 - DNA, 55 bp, Artificial
  Synthetic oligonucleotide
catgcatgtttcgttagactgggcgctgtatgttcaccattcccatccggggatg

SEQ ID NO: 153348 - DNA, 55 bp, Artificial
  Synthetic oligonucleotide
catgaatcctccaatgtatgcgttcgtaacccgacttagggtagcaaaacgcccg

SEQ ID NO: 153349 - DNA, 55 bp, Artificial
  Synthetic oligonucleotide
catgaacccaaccgcatgccacacgcgagatgatacgaactcagccacactcggc

SEQ ID NO: 153350 - DNA, 55 bp, Artificial
  Synthetic oligonucleotide
catcgggaacatgagaccagcagagaacaacgcgtacataagcggcgcatagcgg

SEQ ID NO: 153351 - DNA, 55 bp, Artificial
  Synthetic oligonucleotide
catccggcgacaacgagtgggcgaaaaccgagcgcaagaccggttaccagtacca

SEQ ID NO: 153352 - DNA, 55 bp, Artificial
  Synthetic oligonucleotide
catccgatgtgcctccgaaggatctgcagggattcaacgaacgtttgatctcccg

SEQ ID NO: 153353 - DNA, 55 bp, Artificial
  Synthetic oligonucleotide
tatagtcgggagttgacacgggagctgccgttgggcggctgagaggagactcata

SEQ ID NO: 153354 - DNA, 60 bp, Artificial
  Synthetic oligonucleotide
gtgaacgccacctcgtccgtgcccttgtcccgcacgcgagacgcgatggccatcagcaaa

SEQ ID NO: 153355 - DNA, 60 bp, Artificial
  Synthetic oligonucleotide
catcacgccaccgtccccacgatgtcagtatcgagcgctgacggggcgacctccgaacga

SEQ ID NO: 153356 - DNA, 55 bp, Artificial
  Synthetic oligonucleotide
catcaatattacgatttgcgaaatactagcagaccggttgacgctttcagcgcgc

SEQ ID NO: 153357 - DNA, 55 bp, Artificial
  Synthetic oligonucleotide
cataatagacccatcgaccagaggtcgcgtgaaacatcagtactctttcgcagct

SEQ ID NO: 153358 - DNA, 55 bp, Artificial
  Synthetic oligonucleotide
cagtccttcagaaatgtacgcaccatcggtttgcgtagtgattggcatagattcg

SEQ ID NO: 153359 - DNA, 53 bp, Artificial
  Synthetic oligonucleotide
cagtatggcgtagcgtaacggcgttgttcggtataggtacccctttccgaggc

SEQ ID NO: 153360 - DNA, 55 bp, Artificial
  Synthetic oligonucleotide
tatccgaacctgctcacaggcaatcggcaagaacgggcgatagtctggccgcacg

SEQ ID NO: 153361 - DNA, 55 bp, Artificial
  Synthetic oligonucleotide
caggtcaacagggacaccgtgcaactcaatgttcccaacggaccaacgctcacgc

SEQ ID NO: 153362 - DNA, 55 bp, Artificial
  Synthetic oligonucleotide
tatggggagactaatctttgacaacgaaaacaattatgtgcgttgggtcgaatcc

SEQ ID NO: 153363 - DNA, 55 bp, Artificial
  Synthetic oligonucleotide
caggcacgtgattatcaggtcgctgaattatggatgacgaacgctgccggcttgc

SEQ ID NO: 153364 - DNA, 55 bp, Artificial
  Synthetic oligonucleotide
cagcgcatgcctctttgacatagaacgtttgttatctactatgtcgacgcgcgcg

SEQ ID NO: 153365 - DNA, 55 bp, Artificial
  Synthetic oligonucleotide
cagccaatggacgttccttatcgctcgcttaatcgtatcgatatgtttccccgga

SEQ ID NO: 153366 - DNA, 56 bp, Artificial
  Synthetic oligonucleotide
gaagcgcgtcaacgtgagcaacaaccccttggactccaaggagttcctcgaaaggc

SEQ ID NO: 153367 - DNA, 55 bp, Artificial
  Synthetic oligonucleotide
cagagtgaatccagggactcggcatcagacaagtccaagaagtccgagactgctg

SEQ ID NO: 153368 - DNA, 55 bp, Artificial
  Synthetic oligonucleotide
cagagaattacccttacgcgctacgctctaagcgcgacaacctgtctgagcgttc

SEQ ID NO: 153369 - DNA, 55 bp, Artificial
  Synthetic oligonucleotide
aacaccacggtcacacaagtggaacaccgttgtggcacaagccgcgcgagcggtc

SEQ ID NO: 153370 - DNA, 55 bp, Artificial
  Synthetic oligonucleotide
cacttcaaggcactcgctacattttactgggtttgacgggtttgtgccactttgg

SEQ ID NO: 153371 - DNA, 55 bp, Artificial
  Synthetic oligonucleotide
cactctgcttaaacgtttcacgcatagcagcagaaagaaccgtcgaaccggatcg

SEQ ID NO: 153372 - DNA, 55 bp, Artificial
  Synthetic oligonucleotide
cacgcgtcagtatgcttacacggtctgacatcaagctgacgtaagacgtaagtat

SEQ ID NO: 153373 - DNA, 55 bp, Artificial
  Synthetic oligonucleotide
ttcctgacccacggaacgacgtgaacggagccggtcagctggatacgggagagcg

SEQ ID NO: 153374 - DNA, 55 bp, Artificial
  Synthetic oligonucleotide
ttccgggctccatagagcacgatggcggataacgtccgcccagggcgacctgaga

SEQ ID NO: 153375 - DNA, 55 bp, Artificial
  Synthetic oligonucleotide
actgcataccgtgcgtaaatccgctgatgcgaccttcgacttctacatgccccgc

SEQ ID NO: 153376 - DNA, 55 bp, Artificial
  Synthetic oligonucleotide
aaggatcgactgcaggataaagatcagtcgaaccaggaggaagactccggccccg

SEQ ID NO: 153377 - DNA, 53 bp, Artificial
  Synthetic oligonucleotide
atttgagtccccaccttgatcaaaaaggagacacattttagcaacgtccccgg

SEQ ID NO: 153378 - DNA, 55 bp, Artificial
  Synthetic oligonucleotide
tgccacggctataaccgccacaagaaagatcattacctcgattatgggtttccca

SEQ ID NO: 153379 - DNA, 55 bp, Artificial
  Synthetic oligonucleotide
ttccgaccatgttggcgagaatcccatagcgcacggccttttcgccgtcacaggt

SEQ ID NO: 153380 - DNA, 55 bp, Artificial
  Synthetic oligonucleotide
tgctaccgcgcgcgcaaggagcgtgcggccgaggcaaaagccgcaaggccggagt

SEQ ID NO: 153381 - DNA, 55 bp, Artificial
  Synthetic oligonucleotide
ttccgaatgcgtcatggccccaagcctgtaccgaatggattcgatctcatgtgtc

SEQ ID NO: 153382 - DNA, 55 bp, Artificial
  Synthetic oligonucleotide
acgccagaagattccgacgacgaacaaggcagcaacgagggcggtgagtccccag

SEQ ID NO: 153383 - DNA, 55 bp, Artificial
  Synthetic oligonucleotide
acgattgacgtgcgaattcacgtacagagggcggctccatccaaccccagctcca

SEQ ID NO: 153384 - DNA, 55 bp, Artificial
  Synthetic oligonucleotide
acgaggcaagccgcgatcacccatgccgtgtcatcgccatctgcccaagccatag

SEQ ID NO: 153385 - DNA, 55 bp, Artificial
  Synthetic oligonucleotide
tggttaacgcttccggcgaccccgtaatcgaggccgcccacatctggtcagacac

SEQ ID NO: 153386 - DNA, 55 bp, Artificial
  Synthetic oligonucleotide
acgaatagggtaaggaacacgagcactgctatggcgcttagggacattgcgttgg

SEQ ID NO: 153387 - DNA, 55 bp, Artificial
  Synthetic oligonucleotide
tggttccatgtgaccgatgggcgttcgccacgatgcagtcgggagcgtttgtcgc

SEQ ID NO: 153388 - DNA, 59 bp, Artificial
  Synthetic oligonucleotide
gagtcgatgaacgcttgcgaccacagcagattcttacttttccaacgtcggatataacg

SEQ ID NO: 153389 - DNA, 55 bp, Artificial
  Synthetic oligonucleotide
tgtcatcgcatttgccgtgttgaaactacgcgtgcgatatcgctccaatgatacc

SEQ ID NO: 153390 - DNA, 55 bp, Artificial
  Synthetic oligonucleotide
tgtgctttctcgcacgggaacacactcagacgtattcaacgagtagcgctgcgag

SEQ ID NO: 153391 - DNA, 55 bp, Artificial
  Synthetic oligonucleotide
tgtgtgacgactcgctgtgcgcgctaacacgatttgcgttttgccagtggttgcg

SEQ ID NO: 153392 - DNA, 55 bp, Artificial
  Synthetic oligonucleotide
tgttaccggtggtaacattcagcgtaagtgcgccctcccgaggggccactccgtg

SEQ ID NO: 153393 - DNA, 55 bp, Artificial
  Synthetic oligonucleotide
ttccatcattgccgctctgtgtcgctgtagagagccgtgggagcttaacttcatt

SEQ ID NO: 153394 - DNA, 55 bp, Artificial
  Synthetic oligonucleotide
tgttgccacacggttcgccattgggtacgcggatggtcaccatagcgactggggt

SEQ ID NO: 153395 - DNA, 54 bp, Artificial
  Synthetic oligonucleotide
ttaccaccactccgtcgggcggggacatgattgtcggcgaaccggggacaacga

SEQ ID NO: 153396 - DNA, 55 bp, Artificial
  Synthetic oligonucleotide
acactcgcactcggtcctccgatccaattatatgtgactgtatacttctgcccag

SEQ ID NO: 153397 - DNA, 55 bp, Artificial
  Synthetic oligonucleotide
acactacactcggacggaacttgcgagtcagatcaactgcctcttcaccgttagc

SEQ ID NO: 153398 - DNA, 55 bp, Artificial
  Synthetic oligonucleotide
acacgcatgtcggtggctaaagtacacacctgccctgctagcatggtggctaaag

SEQ ID NO: 153399 - DNA, 60 bp, Artificial
  Synthetic oligonucleotide
gtctgccgtggcgatgcgcatccacggaccagctgcgacaggggtgtatgtaactccatt

SEQ ID NO: 153400 - DNA, 55 bp, Artificial
  Synthetic oligonucleotide
acacgacagtccgattctcgttgactaactctcctgcggagggaccggccccata

SEQ ID NO: 153401 - DNA, 52 bp, Artificial
  Synthetic oligonucleotide
acacctatcgacactaagactcctggaaccgtaaacgttaaggttactgtta

SEQ ID NO: 153402 - DNA, 55 bp, Artificial
  Synthetic oligonucleotide
acaccgcagctcgggacacgcccagctctcgtgccatatctgattgagatgcccc

SEQ ID NO: 153403 - DNA, 55 bp, Artificial
  Synthetic oligonucleotide
acaccaattctaccccgtcgccacgttagataccggcttgcccacgcagtgggca

SEQ ID NO: 153404 - DNA, 55 bp, Artificial
  Synthetic oligonucleotide
ttagatatccttgtacacacattacgtgacgcataaatgcccactgagtaacgag

SEQ ID NO: 153405 - DNA, 52 bp, Artificial
  Synthetic oligonucleotide
acaacgccaactatttccaataccgttccgccaaacacggtttcggcaaatc

SEQ ID NO: 153406 - DNA, 55 bp, Artificial
  Synthetic oligonucleotide
aattccagtcgagactctcgaggcactaggcgtactcaaaccggtgaccggtcag

SEQ ID NO: 153407 - DNA, 55 bp, Artificial
  Synthetic oligonucleotide
atactgaaccggcccatggtacccgcggatggtgcacactcggacgcgagacctc

SEQ ID NO: 153408 - DNA, 55 bp, Artificial
  Synthetic oligonucleotide
atacgaggagatgacgaagtaatccatcgccgccagctgtctgttacgggctagg

SEQ ID NO: 153409 - DNA, 55 bp, Artificial
  Synthetic oligonucleotide
atacccggctggaaggtctcatggcaagccggacataggtactgcacgcgggagc

SEQ ID NO: 153410 - DNA, 60 bp, Artificial
  Synthetic oligonucleotide
agtggtttcttgagcagatgccaccgggactgccgtcgacaggagcgccagcagagtcat

SEQ ID NO: 153411 - DNA, 55 bp, Artificial
  Synthetic oligonucleotide
atacccggaattcaccagattgctcaacgggaaatcgatgagtcggtatacgcca

SEQ ID NO: 153412 - DNA, 55 bp, Artificial
  Synthetic oligonucleotide
atacccaggctccgcaccagctcaacgatggccagtacgctcagcgtcgcgccac

SEQ ID NO: 153413 - DNA, 55 bp, Artificial
  Synthetic oligonucleotide
tcgcctctaggcgaggcggttgtatcagcgaatcgttctcaataagaaacgtgcg

SEQ ID NO: 153414 - DNA, 55 bp, Artificial
  Synthetic oligonucleotide
agtttcgtagcgagcacgtatagtgcgagtgtcgtctcgcaaatggagcgtagag

SEQ ID NO: 153415 - DNA, 55 bp, Artificial
  Synthetic oligonucleotide
agttgctcagtgctagaaatgcgccctaggaagtggcttttcacgccacgcgcct

SEQ ID NO: 153416 - DNA, 55 bp, Artificial
  Synthetic oligonucleotide
agttcaccagtcgttcgccgtatgccatcttgccggtaatccagtcgtaatagac

SEQ ID NO: 153417 - DNA, 55 bp, Artificial
  Synthetic oligonucleotide
tcgcgtgtctcgatggcgggtgatacactggccatagcgcacccctttcgggtga

SEQ ID NO: 153418 - DNA, 55 bp, Artificial
  Synthetic oligonucleotide
aagactgctcgcttgtacacggatttgggattgcttacttgcgatcctgtagtcg

SEQ ID NO: 153419 - DNA, 55 bp, Artificial
  Synthetic oligonucleotide
aagagcgtgtctgtactactttatgcaagtcaatgattgccagtccgccgtccgc

SEQ ID NO: 153420 - DNA, 55 bp, Artificial
  Synthetic oligonucleotide
tcggcttgaaactgtgcgaagttgcgataaccgtagctccacccttaagcaagcc

SEQ ID NO: 153421 - DNA, 60 bp, Artificial
  Synthetic oligonucleotide
gatacgccattctacaggtggggtgcagcgtgttgtggctcacacgtcatcgaccacgat

SEQ ID NO: 153422 - DNA, 55 bp, Artificial
  Synthetic oligonucleotide
tcgtagcgatcacgggtccatcccctgtaccgtggacggcgcacgataccgtcat

SEQ ID NO: 153423 - DNA, 55 bp, Artificial
  Synthetic oligonucleotide
ttcgcaagaagcgtccgcttcccgccaaggagctggcggcaatgtacgacgtctc

SEQ ID NO: 153424 - DNA, 55 bp, Artificial
  Synthetic oligonucleotide
aggaatctcatgaccgaagaggcaaggttggacaccgacttccatcaggtggccc

SEQ ID NO: 153425 - DNA, 55 bp, Artificial
  Synthetic oligonucleotide
tctagccgtcggcgccaccgttgcacaggctcataagaaggcccatgcatgcgat

SEQ ID NO: 153426 - DNA, 55 bp, Artificial
  Synthetic oligonucleotide
tctgcgtgtaccattcgattgtctgcttcagacccgattcgaagtcggtgtgcct

SEQ ID NO: 153427 - DNA, 55 bp, Artificial
  Synthetic oligonucleotide
tctggtgtagcaagtctgcatagatacttcactccagaatatacacacgcgtggt

SEQ ID NO: 153428 - DNA, 55 bp, Artificial
  Synthetic oligonucleotide
aagcccgtggctgttgtctccggcaggcatgattcccggtcggagccgttggaat

SEQ ID NO: 153429 - DNA, 55 bp, Artificial
  Synthetic oligonucleotide
ttcgattctcggcggtgcttggatgtctcgtccgactccggttgattacggtccg

SEQ ID NO: 153430 - DNA, 55 bp, Artificial
  Synthetic oligonucleotide
agccaatctgattgcttgctttctttatgcgtgcctgacggcactcttaaccgga

SEQ ID NO: 153431 - DNA, 55 bp, Artificial
  Synthetic oligonucleotide
agcagaagatccaaaagtccacccactgccgaagtgagcataccgagcaaggtcg

SEQ ID NO: 153432 - DNA, 60 bp, Artificial
  Synthetic oligonucleotide
attcgccgttgctggaatcaaagagaatcgttgtgccaggttcgccgacaatcatgtccc

SEQ ID NO: 153433 - DNA, 55 bp, Artificial
  Synthetic oligonucleotide
aagcgagccacatggcacgtggacgtggacggggaacgcgccaaggccttgattt

SEQ ID NO: 153434 - DNA, 55 bp, Artificial
  Synthetic oligonucleotide
agattcgccgcattacccacaaacccgttgaaatatggggacaattcgcgcaacc

SEQ ID NO: 153435 - DNA, 55 bp, Artificial
  Synthetic oligonucleotide
agatggcagtggttccaatgactctgctggcgctcctgtcgacggcagtcccggt

SEQ ID NO: 153436 - DNA, 55 bp, Artificial
  Synthetic oligonucleotide
agatgccaccgggactgccgtcgacaggagcgccagcagagtcattggaaccact

SEQ ID NO: 153437 - DNA, 55 bp, Artificial
  Synthetic oligonucleotide
agatgagggacacgcagtaaactggattattgacacaataatgagtcatgagcca

SEQ ID NO: 153438 - DNA, 53 bp, Artificial
  Synthetic oligonucleotide
agactaagcatgtagaaggacgagggtacggtcaccggaccggggttcaatcc

SEQ ID NO: 153439 - DNA, 55 bp, Artificial
  Synthetic oligonucleotide
tgatcgttcgacggctctcaagacggcgtaacctcatccaaccggccgatccccg

SEQ ID NO: 153440 - DNA, 53 bp, Artificial
  Synthetic oligonucleotide
acttcacaatataaaccgactccgcacccgacacgttaacttcggcgtccggc

SEQ ID NO: 153441 - DNA, 55 bp, Artificial
  Synthetic oligonucleotide
gttcggtgaattggatatgccctgagtgtacaacgcgatggttcccggcatgcct

SEQ ID NO: 153442 - DNA, 55 bp, Artificial
  Synthetic oligonucleotide
cgatggcttcaggccatacttcgaaatccaatgggcaccttcccgcgtgcgacgt

SEQ ID NO: 153443 - DNA, 60 bp, Artificial
  Synthetic oligonucleotide
agttgcgtagactgtcactatgaccggtcatgaatctcacgaatattcattcagagaagc

SEQ ID NO: 153444 - DNA, 55 bp, Artificial
  Synthetic oligonucleotide
cgattcggaaactcgcggaaatatggtgccgctacagtgtcggccatgacacaga

SEQ ID NO: 153445 - DNA, 55 bp, Artificial
  Synthetic oligonucleotide
ccgtgaggcaggtcttgatccgaaacttatcgggtacaagcgcgtggaacgttgc

SEQ ID NO: 153446 - DNA, 55 bp, Artificial
  Synthetic oligonucleotide
cgcaggcctcccgcgccgtgcagtggatcgcttacggttccaacccgttcaatac

SEQ ID NO: 153447 - DNA, 55 bp, Artificial
  Synthetic oligonucleotide
ccggtttcaaaatcctcaccagctaccgcaattccgtgaacctgtccgacaattg

SEQ ID NO: 153448 - DNA, 55 bp, Artificial
  Synthetic oligonucleotide
ccggtggaagattccagaagttactttcgccgtaattggctcgcatagaggcggt

SEQ ID NO: 153449 - DNA, 55 bp, Artificial
  Synthetic oligonucleotide
ccggctgggataatgaccgtgccctcgtaggattcccaatcgtcggaatggtccc

SEQ ID NO: 153450 - DNA, 55 bp, Artificial
  Synthetic oligonucleotide
ccggcaagcacctgtatggcgtcacggtggaagcgtttctacgaaagggactacc

SEQ ID NO: 153451 - DNA, 55 bp, Artificial
  Synthetic oligonucleotide
ccgctattcactcgtcctataaaggatgcggcacgtagatacgagcatactcgaa

SEQ ID NO: 153452 - DNA, 55 bp, Artificial
  Synthetic oligonucleotide
cgcatcaagactcctttcccatgacgggaccggtgagagccagttcgtagatgcg

SEQ ID NO: 153453 - DNA, 55 bp, Artificial
  Synthetic oligonucleotide
ccgccggacgaggacgatcacagctggtgggcttcgagtttgagttcgatccgga

SEQ ID NO: 153454 - DNA, 60 bp, Artificial
  Synthetic oligonucleotide
atgttccaatagttcgattgcccgtagtcggttcgcatagatgctaatcgccgtcgcatg

SEQ ID NO: 153455 - DNA, 55 bp, Artificial
  Synthetic oligonucleotide
ccgcagggccaaacaataccgcagctccggaatctggaagatcagccgcgacgag

SEQ ID NO: 153456 - DNA, 55 bp, Artificial
  Synthetic oligonucleotide
cgcatggagcgacgcatgctgtggtttccttggcgaataaggaattgagcgcttg

SEQ ID NO: 153457 - DNA, 55 bp, Artificial
  Synthetic oligonucleotide
ccgattcgggagaaacggacaagtaagcaccgtcaaacgcaccacaattgtccga

SEQ ID NO: 153458 - DNA, 55 bp, Artificial
  Synthetic oligonucleotide
cgccgaatactgaaacccatccgacgccgtagcgacctacagtggcagttgtgca

SEQ ID NO: 153459 - DNA, 55 bp, Artificial
  Synthetic oligonucleotide
ccgagttgcggtttcatagtgcgttcggctccgtgtgattggtgttcgagactgg

SEQ ID NO: 153460 - DNA, 55 bp, Artificial
  Synthetic oligonucleotide
ccgaggagtggcagagcctcctcaacgaggccgtgacgaagaccttgaaccagct

SEQ ID NO: 153461 - DNA, 55 bp, Artificial
  Synthetic oligonucleotide
cgccgaccaacgtctcatcaaactggcgctatatgcgcagaatcaattcacagtg

SEQ ID NO: 153462 - DNA, 55 bp, Artificial
  Synthetic oligonucleotide
aaacccggtcagcagtggctgggccggtcaatcgcacgataggtcagtgcactcc

SEQ ID NO: 153463 - DNA, 55 bp, Artificial
  Synthetic oligonucleotide
ccgacgatgaccgacgttccaaagaagagcaactcttgcacatgctgggaaacgc

SEQ ID NO: 153464 - DNA, 55 bp, Artificial
  Synthetic oligonucleotide
cgccgctataaccatcgctgaacctgatcgccacacggtggccgtccaacggaac

SEQ ID NO: 153465 - DNA, 60 bp, Artificial
  Synthetic oligonucleotide
gacaagtggccgatgcagcttcctgctcgatacagcaatcggtgggctgccttttctcgg

SEQ ID NO: 153466 - DNA, 60 bp, Artificial
  Synthetic oligonucleotide
gatgcagcttcctgctcgatacagcaatcggtgggctgccttttctcggatttgggtcgt

SEQ ID NO: 153467 - DNA, 55 bp, Artificial
  Synthetic oligonucleotide
ccgaactcgcatatctcgtacgtcgtacatgccgcgcttatagtcgcctactcgg

SEQ ID NO: 153468 - DNA, 53 bp, Artificial
  Synthetic oligonucleotide
ccgaaagtggcgtacccgaccttgcatatttatccgggcggtccacaagaaag

SEQ ID NO: 153469 - DNA, 55 bp, Artificial
  Synthetic oligonucleotide
cccttctctttctgtactcgtctatgagtattcgagccgtgtcgacgtcgtatct

SEQ ID NO: 153470 - DNA, 55 bp, Artificial
  Synthetic oligonucleotide
cccttcgaagacactagataacaggctaccaaaacgtatgtgcgtaagctgtgtc

SEQ ID NO: 153471 - DNA, 55 bp, Artificial
  Synthetic oligonucleotide
ccctaagtacggagacttaggccacataagtggacgattaggtgcacgatctccg

SEQ ID NO: 153472 - DNA, 55 bp, Artificial
  Synthetic oligonucleotide
cgaggcggcccgtcaactgaaaatccgtgtccccgaagatctgtccgttatcgga

SEQ ID NO: 153473 - DNA, 55 bp, Artificial
  Synthetic oligonucleotide
cgaggagatgacgaagtaatccatcgccgccagctgtctgttacgtaacggtatg

SEQ ID NO: 153474 - DNA, 55 bp, Artificial
  Synthetic oligonucleotide
cgaggctcatgagtctccaaagcgtgttgacgacgttacatttgtatgcggaact

SEQ ID NO: 153475 - DNA, 55 bp, Artificial
  Synthetic oligonucleotide
cgagcctgagacggggtatctgctttcaggaggtacatttggcctcttgcggaca

SEQ ID NO: 153476 - DNA, 55 bp, Artificial
  Synthetic oligonucleotide
cgagcataaagccttagatgagtatcacttagacatagataggtagcgcctggac

SEQ ID NO: 153477 - DNA, 60 bp, Artificial
  Synthetic oligonucleotide
tcctcaaggctgaccttccacacaccggtttgtcggtactgcttgagcctcctgtagcac

SEQ ID NO: 153478 - DNA, 55 bp, Artificial
  Synthetic oligonucleotide
cgagacttaaagccatctgatgccatcgctttctattcacgcttctgccatggca

SEQ ID NO: 153479 - DNA, 53 bp, Artificial
  Synthetic oligonucleotide
gttctggtggcgcccttcgaaaccgtgtacttgtcggcaccctttccgtaatc

SEQ ID NO: 153480 - DNA, 55 bp, Artificial
  Synthetic oligonucleotide
cgagaatgatttggttctagcgcaatacatgctttcacgacacatgctttcgtga

SEQ ID NO: 153481 - DNA, 55 bp, Artificial
  Synthetic oligonucleotide
cgactttcaagttatggccgatagcgcgaagtttggcgacagggcgctatcagcg

SEQ ID NO: 153482 - DNA, 55 bp, Artificial
  Synthetic oligonucleotide
cgacgtctccgtgcgcactattcagcgatgggcttcacaaacccgtaaggactgg

SEQ ID NO: 153483 - DNA, 55 bp, Artificial
  Synthetic oligonucleotide
cgacgcatgcttattgctgctcagcgcgcgtatattgcttcagagtctagtgaag

SEQ ID NO: 153484 - DNA, 55 bp, Artificial
  Synthetic oligonucleotide
cgacccgatgcgtgatgggtcaatccacgcgaaccagccgccaagaccagtgaca

SEQ ID NO: 153485 - DNA, 55 bp, Artificial
  Synthetic oligonucleotide
cgacaaaccattacaatgagcggcgaacatatatcacacggcgtaggaaacgcca

SEQ ID NO: 153486 - DNA, 55 bp, Artificial
  Synthetic oligonucleotide
cgaacttccacgtcgctcatacgaacgcgcccgcaaatcggcagaacgccgcgat

SEQ ID NO: 153487 - DNA, 55 bp, Artificial
  Synthetic oligonucleotide
cgaacagacatcacgggttcggttccgcgtagcatatcgagcgttcaaaccgagc

SEQ ID NO: 153488 - DNA, 57 bp, Artificial
  Synthetic oligonucleotide
gccatagcgcacccctttcgggtgagtggtattgcgtgcggtttctctcgccaaagg

SEQ ID NO: 153489 - DNA, 55 bp, Artificial
  Synthetic oligonucleotide
gttgaaatatggggacaattcgcgcaacctatccacatcggaacctgttgcggga

SEQ ID NO: 153490 - DNA, 55 bp, Artificial
  Synthetic oligonucleotide
gttgcaaagaccgcgaaatatgccatttgctgcatatacgagtagcatcgcaggc

SEQ ID NO: 153491 - DNA, 55 bp, Artificial
  Synthetic oligonucleotide
cgataatgtccatgttggcgcatagcgtcggcactgtaatgcaggggaactcgca

SEQ ID NO: 153492 - DNA, 55 bp, Artificial
  Synthetic oligonucleotide
cgaaaccgctgtgtcggtcaattgcaccataggtcaaattctccgtagattgaag

SEQ ID NO: 153493 - DNA, 55 bp, Artificial
  Synthetic oligonucleotide
gttgcctgacggttcgtttgatttcgtcgagtaggggttggcctgcttcggagac

SEQ ID NO: 153494 - DNA, 55 bp, Artificial
  Synthetic oligonucleotide
cgatgccctaagcaagtcggggaatatcagtgtttccggagtggctgccaccagg

SEQ ID NO: 153495 - DNA, 55 bp, Artificial
  Synthetic oligonucleotide
cctcttgcaacgaagatagatgtttgcaacggtccgaatatgtcccttgtcggcc

SEQ ID NO: 153496 - DNA, 54 bp, Artificial
  Synthetic oligonucleotide
cctcgagtccgtcgaacgttaatcgtgtgggagatgaggggcgggaacgtcctc

SEQ ID NO: 153497 - DNA, 55 bp, Artificial
  Synthetic oligonucleotide
cctccaccaccgatctgagtcgcaaagcgaatggcatgtagatgcacgacccggc

SEQ ID NO: 153498 - DNA, 55 bp, Artificial
  Synthetic oligonucleotide
aaaataccctacgaatacagcaataaccgcatacatgagcgcacgactgagccaa

SEQ ID NO: 153499 - DNA, 60 bp, Artificial
  Synthetic oligonucleotide
atggcagcagctgtatagccaattcggatcaacgaatatcctgccggcattcaagcagag

SEQ ID NO: 153500 - DNA, 55 bp, Artificial
  Synthetic oligonucleotide
ccgttcatcttgtatcgaagacatgctcgctgcttcgcactcaagcgccacgtaa

SEQ ID NO: 153501 - DNA, 55 bp, Artificial
  Synthetic oligonucleotide
taatcgcgtatgagcgggcaccccacacgcgcgcattctcagccaatcgcttcgc

SEQ ID NO: 153502 - DNA, 55 bp, Artificial
  Synthetic oligonucleotide
tactgcgttgcgcgttatgccgtaacgcatatgaaaacggtccgtgcgaacgaat

SEQ ID NO: 153503 - DNA, 55 bp, Artificial
  Synthetic oligonucleotide
ccccgcactgttagagcagccggggacgtggccgatcactgaaaaggagtgatta

SEQ ID NO: 153504 - DNA, 55 bp, Artificial
  Synthetic oligonucleotide
ccccgacggctggcaagatgtatgattccgagtctctgctgaggacgttggccct

SEQ ID NO: 153505 - DNA, 55 bp, Artificial
  Synthetic oligonucleotide
ccccatacatgacggaagcggccgaccctatcgttcgaatagccaatagcttgaa

SEQ ID NO: 153506 - DNA, 55 bp, Artificial
  Synthetic oligonucleotide
cccagtgcattacgaaggtcagactatggataagtcttggcgcgatactagcgac

SEQ ID NO: 153507 - DNA, 55 bp, Artificial
  Synthetic oligonucleotide
cccagtctgtcgttcatgatgtcccatgcgataggatgggagccgggccttccgg

SEQ ID NO: 153508 - DNA, 55 bp, Artificial
  Synthetic oligonucleotide
cccacgtgacgaatcatgggccgagggattccctcaatgaagctccgaagccgag

SEQ ID NO: 153509 - DNA, 55 bp, Artificial
  Synthetic oligonucleotide
cccaagttgtaagcgacttggtttcggcaagtctttacgctggcattgcatttgg

SEQ ID NO: 153510 - DNA, 60 bp, Artificial
  Synthetic oligonucleotide
ataccctatcgacaattcgtcggccactgaacggttcttaggctgctcgcctcgcatgcg

SEQ ID NO: 153511 - DNA, 55 bp, Artificial
  Synthetic oligonucleotide
cccaagaacaacgtcgcccctccggctacagtggtccgcgtgactaagaccgatg

SEQ ID NO: 153512 - DNA, 55 bp, Artificial
  Synthetic oligonucleotide
cgccgtatctgcgagtttgagagcacccaaatgcaaagagccggccgcaaccatc

SEQ ID NO: 153513 - DNA, 55 bp, Artificial
  Synthetic oligonucleotide
ttttagacatgttcgctttagtaactcttgatggatctcgaattacaggcggctc

SEQ ID NO: 153514 - DNA, 55 bp, Artificial
  Synthetic oligonucleotide
tactggtatccagcagtccatctttgaccatgcgaaagcgcaaaacccataatat

SEQ ID NO: 153515 - DNA, 55 bp, Artificial
  Synthetic oligonucleotide
ccagtgcatgccatagtcgccaagccaattcatcgttgccacagcattgccgtta

SEQ ID NO: 153516 - DNA, 55 bp, Artificial
  Synthetic oligonucleotide
cgcctcgccccaacgagaagaacccttgtgtggaataggcaaaatggcgtggagc

SEQ ID NO: 153517 - DNA, 54 bp, Artificial
  Synthetic oligonucleotide
cgcctgtatgggtccctggaatacgaaagtgggtcctgaaacctcaagcaaggt

SEQ ID NO: 153518 - DNA, 55 bp, Artificial
  Synthetic oligonucleotide
ccagtgatttccgcaacgaattcccgaccgtcatggtatcgcagccgtcgagtct

SEQ ID NO: 153519 - DNA, 55 bp, Artificial
  Synthetic oligonucleotide
aaactggcattgcgtggtcagggctcgctgtgcaacctgtttgacttgtctcttg

SEQ ID NO: 153520 - DNA, 55 bp, Artificial
  Synthetic oligonucleotide
ccagtacattgtggaccgcagtacccacctccgaagcagatggctcaacgtcgga

SEQ ID NO: 153521 - DNA, 56 bp, Artificial
  Synthetic oligonucleotide
gtcgttctatgaacttaccaccactccgtcgggcggggacatgattgtcggcgaac

SEQ ID NO: 153522 - DNA, 55 bp, Artificial
  Synthetic oligonucleotide
ccacgcgggtcatagctgatgactgtctttccgaaacttggagcctcggatattt

SEQ ID NO: 153523 - DNA, 55 bp, Artificial
  Synthetic oligonucleotide
ccaccattcgcaggaatggcgtgattccaacgtttctgagggtttcagacgggct

SEQ ID NO: 153524 - DNA, 55 bp, Artificial
  Synthetic oligonucleotide
ccacagggatatcaaccacctccataaataacatgacggcagtgttatagtagag

SEQ ID NO: 153525 - DNA, 55 bp, Artificial
  Synthetic oligonucleotide
ccacagcgccctgtcaaaccgacatgcaaagctcgcaacggtcacgacatgcccg

SEQ ID NO: 153526 - DNA, 55 bp, Artificial
  Synthetic oligonucleotide
cccgtcttgatcatgatccgttgctgcttgacatgctctttgacctgactcgcgc

SEQ ID NO: 153527 - DNA, 55 bp, Artificial
  Synthetic oligonucleotide
cccgggtgtgaacacatgtagcacggaggagggtcgtcatgtctaacggcggagg

SEQ ID NO: 153528 - DNA, 55 bp, Artificial
  Synthetic oligonucleotide
cccgacaatccctctataaggagggtctgcatgcacggcaacacgtcgaagaccc

SEQ ID NO: 153529 - DNA, 55 bp, Artificial
  Synthetic oligonucleotide
cccgaacatccgaatccttaccggctacttcacattaggatggcgatcactcgtc

SEQ ID NO: 153530 - DNA, 55 bp, Artificial
  Synthetic oligonucleotide
cccctccatgagtagaatatcaagcagtgtatgtaaacgcctagaaggggccttt

SEQ ID NO: 153531 - DNA, 55 bp, Artificial
  Synthetic oligonucleotide
cccgatgatcggatggagcctggtatcgagccgactcttttctgaacaaggggcc

SEQ ID NO: 153532 - DNA, 60 bp, Artificial
  Synthetic oligonucleotide
gcaacatgattaccaatcagatagtcgaggaaggtcatgaactctcagacgaactcatga

SEQ ID NO: 153533 - DNA, 55 bp, Artificial
  Synthetic oligonucleotide
cgccggaatcagagcatcgcatcggaacatcgcacgataatggaatcaagctcga

SEQ ID NO: 153534 - DNA, 49 bp, Artificial
  Synthetic oligonucleotide
ccccttttgtactaagttcgctccccttttgtactaagtaccgtccgaa

SEQ ID NO: 153535 - DNA, 54 bp, Artificial
  Synthetic oligonucleotide
ttatccgagtgcgtgctgtcccatcgtattcagatcagatgggcgaatggtcta

SEQ ID NO: 153536 - DNA, 54 bp, Artificial
  Synthetic oligonucleotide
gagaccgcggtgagtcgtatgtacccgggcgagtatcggttggactcgtcgcgt

SEQ ID NO: 153537 - DNA, 54 bp, Artificial
  Synthetic oligonucleotide
ggccccttccacataccacaactcgtcacaggcggctagtcgtcgaccaccgtt

SEQ ID NO: 153538 - DNA, 54 bp, Artificial
  Synthetic oligonucleotide
ctaccaataccaagcggtgaacgccatttccgaccgtgtccgcacctgcaaatg

SEQ ID NO: 153539 - DNA, 54 bp, Artificial
  Synthetic oligonucleotide
accgcggttgctgttggccgttcgttgcatgaggatgcgtttagggcgtttgtt

SEQ ID NO: 153540 - DNA, 54 bp, Artificial
  Synthetic oligonucleotide
tgtccagcataccgtatgatcagactgttgttattgacaccacaggaagcagtg

SEQ ID NO: 153541 - DNA, 54 bp, Artificial
  Synthetic oligonucleotide
agctcgcccaaacgttagcattccaatctggtgcggaatacgtggtgagtgtat

SEQ ID NO: 153542 - DNA, 54 bp, Artificial
  Synthetic oligonucleotide
ccatgatgaacacaacgaggctcacattggcgacctcgtgagtattatggagac

SEQ ID NO: 153543 - DNA, 56 bp, Artificial
  Synthetic oligonucleotide
atgcggggaacgtccacgacgcgtcttccgtgtcctccgtcctgccttgtgccgtc

SEQ ID NO: 153544 - DNA, 52 bp, Artificial
  Synthetic oligonucleotide
cggggttgggaaatcatcgacttcccgagccttggcccaacatttcggttac

SEQ ID NO: 153545 - DNA, 54 bp, Artificial
  Synthetic oligonucleotide
taatacttgctattggaaagggcgaacaaacgcttggaataaggtgccccaaaa

SEQ ID NO: 153546 - DNA, 54 bp, Artificial
  Synthetic oligonucleotide
tatcccagattcatatcgaatttcgcacataaacagcagggttatcaagccgat

SEQ ID NO: 153547 - DNA, 54 bp, Artificial
  Synthetic oligonucleotide
cgaatatgctccagtgtacctcaaactacggaattcgcgtctgagcgcatgtcg

SEQ ID NO: 153548 - DNA, 54 bp, Artificial
  Synthetic oligonucleotide
cggccaggtcatgtggtccatacggcggttgctacccattgcagtactccttta

SEQ ID NO: 153549 - DNA, 54 bp, Artificial
  Synthetic oligonucleotide
caaatcggaagtactgtggccgaagctccctgcttcataaatccgatgtagtca

SEQ ID NO: 153550 - DNA, 54 bp, Artificial
  Synthetic oligonucleotide
tgagcgaaaggatccatcatgggcaagaacgacgttggcaataacggccgtacg

SEQ ID NO: 153551 - DNA, 54 bp, Artificial
  Synthetic oligonucleotide
gcgcctgaagctctgcgtacgttttccgcgaaataaggcctcatctcgtgaaga

SEQ ID NO: 153552 - DNA, 54 bp, Artificial
  Synthetic oligonucleotide
cggcagcgatccgcggaaaactcatggacgcgagggccgacgtggggaaccggg

SEQ ID NO: 153553 - DNA, 54 bp, Artificial
  Synthetic oligonucleotide
agacctcagcaagtacaggtgactcctgcagctgatccgtcatagccatctccc

SEQ ID NO: 153554 - DNA, 60 bp, Artificial
  Synthetic oligonucleotide
tcctgagccaaatccctgagttccttgacggggcgaccatcatcgctggtcactcccttg

SEQ ID NO: 153555 - DNA, 54 bp, Artificial
  Synthetic oligonucleotide
tcccagcagtcgtcagacacgacgatggaacgatcaggcctacgtacataggcg

SEQ ID NO: 153556 - DNA, 54 bp, Artificial
  Synthetic oligonucleotide
tgcacataaccaaaatatatggttagcgccattgataacattgcaagcccaaac

SEQ ID NO: 153557 - DNA, 54 bp, Artificial
  Synthetic oligonucleotide
tgcagtctgttttgcggatggttccgtgagatagaccgtgatgatagtggtttg

SEQ ID NO: 153558 - DNA, 54 bp, Artificial
  Synthetic oligonucleotide
tcattaagcaaactattgatgagactcgcaaagtcgttgctcctcacggcaagg

SEQ ID NO: 153559 - DNA, 54 bp, Artificial
  Synthetic oligonucleotide
tgcgcggctctactgttagcgcatacgcggaaacgtggttaacgcccaggctca

SEQ ID NO: 153560 - DNA, 54 bp, Artificial
  Synthetic oligonucleotide
gtaccctgccagccgactctatcactctcctgcgtttcactgccaaattccgtt

SEQ ID NO: 153561 - DNA, 54 bp, Artificial
  Synthetic oligonucleotide
ctcaacacccaaggccatacgcgatgatgcctcttgacattagtccgtgatact

SEQ ID NO: 153562 - DNA, 53 bp, Artificial
  Synthetic oligonucleotide
tcctcatcgtcgggacacttacgcttcccgccgcttcggacacccaaccccgt

SEQ ID NO: 153563 - DNA, 54 bp, Artificial
  Synthetic oligonucleotide
gacgacgaagcacaggcactggtccacgatctggtgaagcgtcacgtcgaagag

SEQ ID NO: 153564 - DNA, 54 bp, Artificial
  Synthetic oligonucleotide
gatttcgcttctatacggatgacgaaatacgtgggtttcaacatgcgccgcgct

SEQ ID NO: 153565 - DNA, 60 bp, Artificial
  Synthetic oligonucleotide
atgcaagaaactatagataagctaacaactactatcgatagcatgaagccgacccgaaca

SEQ ID NO: 153566 - DNA, 54 bp, Artificial
  Synthetic oligonucleotide
gcaattgaactgggttgccgcgaacacgccatacgtcagattccataagggagc

SEQ ID NO: 153567 - DNA, 54 bp, Artificial
  Synthetic oligonucleotide
tattagcagtgcaagcgttttaggattgtgccttgaaagcccaatggaaactgt

SEQ ID NO: 153568 - DNA, 54 bp, Artificial
  Synthetic oligonucleotide
cgtataaatcggccattcggtgttgtacaggttgaattcgggcacataggaaat

SEQ ID NO: 153569 - DNA, 54 bp, Artificial
  Synthetic oligonucleotide
aacgttaatcgctaagtcaagagtcaacaaatcgccgtctttaaggttgtaatc

SEQ ID NO: 153570 - DNA, 54 bp, Artificial
  Synthetic oligonucleotide
ggcatccttgtgccgcgattctttgccaccggcgtacgtaaccttggccctgcc

SEQ ID NO: 153571 - DNA, 54 bp, Artificial
  Synthetic oligonucleotide
taccgttacgatggacggcgcatctccctacctgtcgtctgcagcccatcccga

SEQ ID NO: 153572 - DNA, 54 bp, Artificial
  Synthetic oligonucleotide
gtgccatttacgtcatattggatgggtcatgggcacgaatgtggtagcagatta

SEQ ID NO: 153573 - DNA, 54 bp, Artificial
  Synthetic oligonucleotide
ccccatcgtgtatgatggggactattcgttttacaaggagttagttcgatatgg

SEQ ID NO: 153574 - DNA, 54 bp, Artificial
  Synthetic oligonucleotide
tttgttcggtcgaagctgatgttccagagtccgttatcgtcaagaacctgtgct

SEQ ID NO: 153575 - DNA, 54 bp, Artificial
  Synthetic oligonucleotide
attgctcaaacagttcccatcttatacggaggatctgttacctctcagaacgct

SEQ ID NO: 153576 - DNA, 57 bp, Artificial
  Synthetic oligonucleotide
agaacattcattagtggagaatacaaagaaaaatccctctggccacgcgaataaatg

SEQ ID NO: 153577 - DNA, 60 bp, Artificial
  Synthetic oligonucleotide
tcgataagctgaacactactatcgctagcaagtccaagactatcgatgaaatgcaagaaa

SEQ ID NO: 153578 - DNA, 54 bp, Artificial
  Synthetic oligonucleotide
ccccatactcgtgcgtccattggtcatcctttgttgtgtggtatatgttgcgtc

SEQ ID NO: 153579 - DNA, 51 bp, Artificial
  Synthetic oligonucleotide
attggccacccttccgatgaaatgggtggaccggggattccgtagtttggg

SEQ ID NO: 153580 - DNA, 54 bp, Artificial
  Synthetic oligonucleotide
gaatcggcttgcatggggtctccttatgagtggatgagcgactatcatatgata

SEQ ID NO: 153581 - DNA, 53 bp, Artificial
  Synthetic oligonucleotide
ccggattttggaatccggcaagaggatcgtgaaactgatctcaatagactcga

SEQ ID NO: 153582 - DNA, 50 bp, Artificial
  Synthetic oligonucleotide
acgaaacccctgattttccaacgttccgaggcccgttgccaagggcttcc

SEQ ID NO: 153583 - DNA, 53 bp, Artificial
  Synthetic oligonucleotide
caggacgtgggagggaatggccgcccactcgtgccggtcgtatagccaggcat

SEQ ID NO: 153584 - DNA, 53 bp, Artificial
  Synthetic oligonucleotide
tgagtagaatatccagcagtgtatgtaaacgcctagaaggggcctttatttgc

SEQ ID NO: 153585 - DNA, 53 bp, Artificial
  Synthetic oligonucleotide
ttcggtccgctccttcttcggggtccgacgatgagccgagattcgaggttatg

SEQ ID NO: 153586 - DNA, 53 bp, Artificial
  Synthetic oligonucleotide
acttcgtacatccgctccggcgtggaccccagctccttcgcgttcagtgaaaa

SEQ ID NO: 153587 - DNA, 53 bp, Artificial
  Synthetic oligonucleotide
acttcacgatctcattggacatggccttagcatagctcctatgggggactcaa

SEQ ID NO: 153588 - DNA, 60 bp, Artificial
  Synthetic oligonucleotide
gcacccccagcaagcttcatatgtaatattacatcagtaatggtacataggtaaaatcac

SEQ ID NO: 153589 - DNA, 53 bp, Artificial
  Synthetic oligonucleotide
tagccgctctctcgctgtcgattaccctatattcccgcgaaagtcccatttgc

SEQ ID NO: 153590 - DNA, 53 bp, Artificial
  Synthetic oligonucleotide
tcaaaccgttcttaagattagcgatcatttgggcagtcatagcgcaacacctc

SEQ ID NO: 153591 - DNA, 53 bp, Artificial
  Synthetic oligonucleotide
ttggcagagtgctaacaatcgcgctacgatgtgtcctagcgcaaagggacaac

SEQ ID NO: 153592 - DNA, 53 bp, Artificial
  Synthetic oligonucleotide
attggtacgatccgccatattccttgccatactgctccgtactgaacgggtgc

SEQ ID NO: 153593 - DNA, 53 bp, Artificial
  Synthetic oligonucleotide
acgaacatattcatgttgatggctgtgttcattgtcgtgacagcagttctcgc

SEQ ID NO: 153594 - DNA, 53 bp, Artificial
  Synthetic oligonucleotide
gtctggcgcgttcgtggaggctacttcactgtcatctcgtatcaggctaatca

SEQ ID NO: 153595 - DNA, 53 bp, Artificial
  Synthetic oligonucleotide
cgcttacggaaaagtcacctatacgtataccgcacatcacaaattagccgacc

SEQ ID NO: 153596 - DNA, 53 bp, Artificial
  Synthetic oligonucleotide
ccacaaatctgcaaatccgagcaccaattcgaaagtgaccatatgaaatcccc

SEQ ID NO: 153597 - DNA, 53 bp, Artificial
  Synthetic oligonucleotide
ccccgttattcgcgttttagagcgtatcgcccgcagaacaacctttcatgacg

SEQ ID NO: 153598 - DNA, 53 bp, Artificial
  Synthetic oligonucleotide
gggactgcgccgctcctgcgacggagacgagggctattcgggacttctgatga

SEQ ID NO: 153599 - DNA, 59 bp, Artificial
  Synthetic oligonucleotide
atgacgattcaggtgccataacgaacacaatcacggacccgcaggattacgactgggtg

SEQ ID NO: 153600 - DNA, 53 bp, Artificial
  Synthetic oligonucleotide
cgggaacgatcgaatatgcgggtgacctcgaacacgggttgaccgccgaacgg

SEQ ID NO: 153601 - DNA, 53 bp, Artificial
  Synthetic oligonucleotide
ggacttcattgaggaccgcacattgcgccttaagcgccggaagcaggacagat

SEQ ID NO: 153602 - DNA, 53 bp, Artificial
  Synthetic oligonucleotide
ccttgatggaggttttcgaggcgagcatacgcagctgttcctcggggaacgcc

SEQ ID NO: 153603 - DNA, 53 bp, Artificial
  Synthetic oligonucleotide
aggaaaggtatgcgacgcgttcccgggaaagttgcgcaaagtgagcgtgtatg

SEQ ID NO: 153604 - DNA, 53 bp, Artificial
  Synthetic oligonucleotide
agctcaagctcacgaacaacgtaagcatccaagccctcgttgaacaaaatctt

SEQ ID NO: 153605 - DNA, 53 bp, Artificial
  Synthetic oligonucleotide
gggattgtgcgttccggccaccggagagtcaaatcttcaaaccgcgaggcggt

SEQ ID NO: 153606 - DNA, 53 bp, Artificial
  Synthetic oligonucleotide
catcgttggtctcccgtcgtgtgaaatgcgtagccaaatgcgtagccacaacg

SEQ ID NO: 153607 - DNA, 53 bp, Artificial
  Synthetic oligonucleotide
aaaagaaccatagcacaaccgcactcacgagcaatgccacaatgatggcgatt

SEQ ID NO: 153608 - DNA, 53 bp, Artificial
  Synthetic oligonucleotide
cactaacggcactgtgctcgttcatattccaggtgtgaaagatccagcggaag

SEQ ID NO: 153609 - DNA, 53 bp, Artificial
  Synthetic oligonucleotide
ggtatccagctgtaggtggcatgtcgtgagttgtaacagatgccaaagcgtat

SEQ ID NO: 153610 - DNA, 59 bp, Artificial
  Synthetic oligonucleotide
atccctcaggcgagccgtcagttttatacagcccttagacggggattgagctgtgtcac

SEQ ID NO: 153611 - DNA, 53 bp, Artificial
  Synthetic oligonucleotide
aaaagggtgcacgaaacgaaccgtaccttaagtggtgcgcccattcatgaacc

SEQ ID NO: 153612 - DNA, 53 bp, Artificial
  Synthetic oligonucleotide
gcaggcgcaagacgaatatgccgccgcgatgcatagcgttgatatgaaaaccc

SEQ ID NO: 153613 - DNA, 53 bp, Artificial
  Synthetic oligonucleotide
gtccattatggcagctcgttgcgcagtgtgcggcaagggaccgcagaccggtt

SEQ ID NO: 153614 - DNA, 53 bp, Artificial
  Synthetic oligonucleotide
cgaatttggccgcccgactccgacagtcagacatctgttgagcaacatcaccc

SEQ ID NO: 153615 - DNA, 53 bp, Artificial
  Synthetic oligonucleotide
atccaagcagatcggatgacggacctcctcgatcaaacgcttacggtcgtaaa

SEQ ID NO: 153616 - DNA, 53 bp, Artificial
  Synthetic oligonucleotide
gtatgcgtcacgcattccacgggtccgggttccacgggaggatgcgcgccgga

SEQ ID NO: 153617 - DNA, 52 bp, Artificial
  Synthetic oligonucleotide
cgcgcgaatctgtccaacattcgtccatggagcgccgaaaagccccacttgt

SEQ ID NO: 153618 - DNA, 52 bp, Artificial
  Synthetic oligonucleotide
aattcaggattcaactccgtgatgcgcaatgtcgactgcccatgtacgacat

SEQ ID NO: 153619 - DNA, 52 bp, Artificial
  Synthetic oligonucleotide
tgtgcatcttacgaatcgcatttgcgcaaacccgacgtaatgctttaccgca

SEQ ID NO: 153620 - DNA, 52 bp, Artificial
  Synthetic oligonucleotide
ttcacgtccaagcagatcggtaggcatatcgttcactttaccagttcaataa

SEQ ID NO: 153621 - DNA, 60 bp, Artificial
  Synthetic oligonucleotide
atcagatctgtgcatcatcaccacctcaccaacccagattgacgcccggagggcttggaa

SEQ ID NO: 153622 - DNA, 52 bp, Artificial
  Synthetic oligonucleotide
cgagtacgtccggaaccccatggtccaagctcgccaacggagacgatcacaa

SEQ ID NO: 153623 - DNA, 52 bp, Artificial
  Synthetic oligonucleotide
cgagggcgaaccgataggtgagcaataaataaaggaagcgatgacggaggga

SEQ ID NO: 153624 - DNA, 52 bp, Artificial
  Synthetic oligonucleotide
ttcagagctgggtggcaatgaagcgcgaggattggattgatgaacaagccgc

SEQ ID NO: 153625 - DNA, 52 bp, Artificial
  Synthetic oligonucleotide
ggatttcggtagatgctcgggccatggtgccggtagacctatgctgtttccg

SEQ ID NO: 153626 - DNA, 52 bp, Artificial
  Synthetic oligonucleotide
gcattgggcctaaagtggcccaatcgttactctccacactgacgccgagtca

SEQ ID NO: 153627 - DNA, 52 bp, Artificial
  Synthetic oligonucleotide
atgatttcattatcgttgaggtcatcgataccgaagtgttccttaagtccgg

SEQ ID NO: 153628 - DNA, 52 bp, Artificial
  Synthetic oligonucleotide
atggataagtcttggcgcgatactagcgacattgaaacacgcatgtatgctc

SEQ ID NO: 153629 - DNA, 52 bp, Artificial
  Synthetic oligonucleotide
gatcgtcgtataaacgcgaacgtgcattacgaattgaagccagcacatagcg

SEQ ID NO: 153630 - DNA, 52 bp, Artificial
  Synthetic oligonucleotide
tacgccggatgctagtgttgctggtttccttgaaacgacggcgcttgtggct

SEQ ID NO: 153631 - DNA, 52 bp, Artificial
  Synthetic oligonucleotide
cgtgcgaaggacgtgctgaaatccgggcgtatgcacgacatggccgtatcgt

SEQ ID NO: 153632 - DNA, 60 bp, Artificial
  Synthetic oligonucleotide
gcagagaacgatggactcaaacagcttctgtccgagcgggaaaaagtcgtcaagctcctc

SEQ ID NO: 153633 - DNA, 52 bp, Artificial
  Synthetic oligonucleotide
aacctcgtgtacgtcggggcaagatgggtcgagggcactccgaagaacagcg

SEQ ID NO: 153634 - DNA, 52 bp, Artificial
  Synthetic oligonucleotide
aaccatgctgcgctcgccatttacgccactagcaacaccccaagggtcactt

SEQ ID NO: 153635 - DNA, 52 bp, Artificial
  Synthetic oligonucleotide
tttacttgccgcttgttcatcactagcatacgtgtctaaccattgccgttcc

SEQ ID NO: 153636 - DNA, 52 bp, Artificial
  Synthetic oligonucleotide
ggttcgaggtcagcgatgcaatgaatacacctcgaccgttgttcagggcatc

SEQ ID NO: 153637 - DNA, 51 bp, Artificial
  Synthetic oligonucleotide
ggttctgcgttgtgcccgggatacggggaacgtgtgttccccgggccttcg

SEQ ID NO: 153638 - DNA, 52 bp, Artificial
  Synthetic oligonucleotide
gaacgcagataaatctggccgatggaaaggtagttggcaacgcgccagtact

SEQ ID NO: 153639 - DNA, 52 bp, Artificial
  Synthetic oligonucleotide
cttttagactccccgcagccttacggcagtaggggaaacgcactattaaagg

SEQ ID NO: 153640 - DNA, 52 bp, Artificial
  Synthetic oligonucleotide
catgcgtgggttgctcaagcgcacaaagcgacgaggagttacgccgttagta

SEQ ID NO: 153641 - DNA, 52 bp, Artificial
  Synthetic oligonucleotide
ctttctggagaagcctaccgcacgcttggaatagcttataggccgcttggag

SEQ ID NO: 153642 - DNA, 52 bp, Artificial
  Synthetic oligonucleotide
gtacggctctctttcggattcaccttgtcaagagcggccagcctgtagaact

SEQ ID NO: 153643 - DNA, 56 bp, Artificial
  Synthetic oligonucleotide
atcatgtccccgcccgacggagtggtggtaagttcatagaacgattcgtcagtggt

SEQ ID NO: 153644 - DNA, 52 bp, Artificial
  Synthetic oligonucleotide
ctggcgtttgaacagcccaattcgattgtccggaggatgtcgggcccatgac

SEQ ID NO: 153645 - DNA, 52 bp, Artificial
  Synthetic oligonucleotide
tgcgttcttgccgtcttctcgacgattgacgcccaacgggtgtggccccgcg

SEQ ID NO: 153646 - DNA, 52 bp, Artificial
  Synthetic oligonucleotide
gctcctaggcaggttgcggatgtttcaaacgaaacgattctaaagcggttct

SEQ ID NO: 153647 - DNA, 52 bp, Artificial
  Synthetic oligonucleotide
agacttgccccggaattggagagagaatacgcacatcagtacttgctacagc

SEQ ID NO: 153648 - DNA, 52 bp, Artificial
  Synthetic oligonucleotide
gcgacccagacgaccgattctcaatccacgggctcttctgacgggtcatccg

SEQ ID NO: 153649 - DNA, 52 bp, Artificial
  Synthetic oligonucleotide
gggcttgtgggtccgagtcccaccggaggcacaaacaaagcgctgcacagtt

SEQ ID NO: 153650 - DNA, 52 bp, Artificial
  Synthetic oligonucleotide
gcctgcgcacagtatacacactttaagccgcaacacacaaccggtaaacgtt

SEQ ID NO: 153651 - DNA, 52 bp, Artificial
  Synthetic oligonucleotide
agcgtgcgcagggcttgcttgcatcggttcgcgctaagttggacgcggctca

SEQ ID NO: 153652 - DNA, 52 bp, Artificial
  Synthetic oligonucleotide
gccggcctggagatttccgtagcaaaacgggacaatgtggtcgcatagtaac

SEQ ID NO: 153653 - DNA, 52 bp, Artificial
  Synthetic oligonucleotide
aggcttttagaccctcaagttacttctccaacattccgccaattgcagcaat

SEQ ID NO: 153654 - DNA, 60 bp, Artificial
  Synthetic oligonucleotide
tcgaaacggctccttacatggtctgcatcatccgtatggtgatatgattctaccagcaag

SEQ ID NO: 153655 - DNA, 52 bp, Artificial
  Synthetic oligonucleotide
gccctccccgcatatggaggtcgtgaaacctgacacacgataggcatttcga

SEQ ID NO: 153656 - DNA, 52 bp, Artificial
  Synthetic oligonucleotide
cggtcacactaatgcggacgcggcttttaggggagtggcggatgctgcagct

SEQ ID NO: 153657 - DNA, 52 bp, Artificial
  Synthetic oligonucleotide
cggttggaggcgtgctaacttcttcccattttcaaggcggtgcgcaacgact

SEQ ID NO: 153658 - DNA, 52 bp, Artificial
  Synthetic oligonucleotide
gccaccgtttgaaggggaaagtgacagcgccggagttttcgaccacatagcg

SEQ ID NO: 153659 - DNA, 52 bp, Artificial
  Synthetic oligonucleotide
tacatggttgcgaatgagtcgcgctctgtgcgctgtgttggtgaaccgtgcg

SEQ ID NO: 153660 - DNA, 51 bp, Artificial
  Synthetic oligonucleotide
aagcagcctgcaaacggttggaagcggtctcatctgggccgaagatacgga

SEQ ID NO: 153661 - DNA, 51 bp, Artificial
  Synthetic oligonucleotide
tttagcaacgtccacgctaggcacattcaaagtcaaagcgattcggtctgt

SEQ ID NO: 153662 - DNA, 51 bp, Artificial
  Synthetic oligonucleotide
gtagtaagtatttccgagctaggagacgataacgcgcatgatgttcactga

SEQ ID NO: 153663 - DNA, 51 bp, Artificial
  Synthetic oligonucleotide
aaacccgtcaaacccagtaaaatgtagcgagtgccttgaagtgagttcaag

SEQ ID NO: 153664 - DNA, 51 bp, Artificial
  Synthetic oligonucleotide
aaaatctgacgcccttacgggcttgtgggtccgagtcccaccggaggcaca

SEQ ID NO: 153665 - DNA, 60 bp, Artificial
  Synthetic oligonucleotide
atccacgcagattgcaataggttatgccgataaagtgcattatctacgctatgacgattc

SEQ ID NO: 153666 - DNA, 51 bp, Artificial
  Synthetic oligonucleotide
gtcatgcttcagaatcagatagtcggacggggtcacagagcattcgaaaac

SEQ ID NO: 153667 - DNA, 51 bp, Artificial
  Synthetic oligonucleotide
gcacgcaacccgcagggacgccgctactacactgaagagcaagtgctcgcg

SEQ ID NO: 153668 - DNA, 51 bp, Artificial
  Synthetic oligonucleotide
atggaactgggttgactcaagaattaaccgcactacttggcttactaatac

SEQ ID NO: 153669 - DNA, 51 bp, Artificial
  Synthetic oligonucleotide
gattccacggaacggtgcctagcatgtattgggctatgatatgcgaagagc

SEQ ID NO: 153670 - DNA, 51 bp, Artificial
  Synthetic oligonucleotide
gatactcgaagccgttcggacacacgccaaagaaaacctacgactatgcag

SEQ ID NO: 153671 - DNA, 51 bp, Artificial
  Synthetic oligonucleotide
attgtgggtcggtcacactaatgcggacgcggcttttaggggagtggcgga

SEQ ID NO: 153672 - DNA, 51 bp, Artificial
  Synthetic oligonucleotide
gagtctactgcggcgtgaaatggcgtgaaacagggaagtcccactctggcg

SEQ ID NO: 153673 - DNA, 51 bp, Artificial
  Synthetic oligonucleotide
tcccgcgcctcgagccatgccaactgcgagcgcaaccacgtttttaagcga

SEQ ID NO: 153674 - DNA, 51 bp, Artificial
  Synthetic oligonucleotide
atttgagctgtacgctgctcccatccttgaacagagggttgtcgtggtcca

SEQ ID NO: 153675 - DNA, 51 bp, Artificial
  Synthetic oligonucleotide
caaggtatgctcatcagccgcaagtggaccgataagcagggtcggaaccgg

SEQ ID NO: 153676 - DNA, 60 bp, Artificial
  Synthetic oligonucleotide
caatgacgattcagacgattcgcaagaagcgtccgcttcccgccaaggagctggcggcaa

SEQ ID NO: 153677 - DNA, 51 bp, Artificial
  Synthetic oligonucleotide
tcaacgcgattattctgctcatgatgggagtgtttgtgcttgcgcgtgtgg

SEQ ID NO: 153678 - DNA, 51 bp, Artificial
  Synthetic oligonucleotide
gaaggaaatcgcgtgcaaagattcgccaaatcacaatcgcctcccctgtcg

SEQ ID NO: 153679 - DNA, 51 bp, Artificial
  Synthetic oligonucleotide
tatcatcgcacagcatagaaacgcagctgccagagtcgtgccccgtccact

SEQ ID NO: 153680 - DNA, 51 bp, Artificial
  Synthetic oligonucleotide
ctgtgaccgttcacttggaagggccggggaccttcaacgcttcggggacga

SEQ ID NO: 153681 - DNA, 51 bp, Artificial
  Synthetic oligonucleotide
ccacgcgtgcgggcacggggattctcaaggggccggcccgaggccccttga

SEQ ID NO: 153682 - DNA, 51 bp, Artificial
  Synthetic oligonucleotide
tactgctggtagtaaggacactggtagtaaggacaacagcagggaccatct

SEQ ID NO: 153683 - DNA, 51 bp, Artificial
  Synthetic oligonucleotide
ccattcacgcaccacattcgtgtcggcgcccatgctgtaaatcaccttcga

SEQ ID NO: 153684 - DNA, 51 bp, Artificial
  Synthetic oligonucleotide
ctcggggagcatgtgcagcgcgtagtggacgggtccggttatgccgtggcc

SEQ ID NO: 153685 - DNA, 51 bp, Artificial
  Synthetic oligonucleotide
ctactcccagctgcaccgcaggagccgcgccgacgcgctcaaatgcaagca

SEQ ID NO: 153686 - DNA, 51 bp, Artificial
  Synthetic oligonucleotide
tacgcggcggcacatgaaccgcacactgagagccattatcatcgcacagca

SEQ ID NO: 153687 - DNA, 60 bp, Artificial
  Synthetic oligonucleotide
gacagcctgcgtttcacgtactggcgctcgatcttcagtccaaggagtggcccacactcc

SEQ ID NO: 153688 - DNA, 54 bp, Artificial
  Synthetic oligonucleotide
gaggaaccgaacccgttgcaacccgtcgtgtcggaattcgataggttgaacgca

SEQ ID NO: 153689 - DNA, 51 bp, Artificial
  Synthetic oligonucleotide
taagtcggtttgtgctcatggaactacggctttcgatgtgcccgtgtatgt

SEQ ID NO: 153690 - DNA, 51 bp, Artificial
  Synthetic oligonucleotide
cgagcgcgtgagaagtcagtaagccagcggagggaaagagtgtttgcgcga

SEQ ID NO: 153691 - DNA, 51 bp, Artificial
  Synthetic oligonucleotide
aatcacagatcgcgttcccttgccgccaaccggaagcgaagttccacgcaa

SEQ ID NO: 153692 - DNA, 51 bp, Artificial
  Synthetic oligonucleotide
ggcgaaggatccgtgcatcgtgctagctggccatgcgctaaggcgtatgag

SEQ ID NO: 153693 - DNA, 51 bp, Artificial
  Synthetic oligonucleotide
ggcacgcgcgtggcgaagttgcggaaccgttcggtctccaatcgttcaggg

SEQ ID NO: 153694 - DNA, 51 bp, Artificial
  Synthetic oligonucleotide
acaggcgctggccatgtcgtgatcccacaggtacagctctagcgctgggca

SEQ ID NO: 153695 - DNA, 51 bp, Artificial
  Synthetic oligonucleotide
tgtggcccgcatcagttgtcgttgcgtcataccgccattatcgcgcgttga

SEQ ID NO: 153696 - DNA, 51 bp, Artificial
  Synthetic oligonucleotide
acgctcagaccgtctcaccgtcggcagattgggacgacttccaaactaccg

SEQ ID NO: 153697 - DNA, 51 bp, Artificial
  Synthetic oligonucleotide
gctacatacacctttgcaccattttgtccctaaagtccctccaaaaggtgg

SEQ ID NO: 153698 - DNA, 51 bp, Artificial
  Synthetic oligonucleotide
tgcacgtacgccatccacaccgacaaggacggacgtaacccccacgcgcac

SEQ ID NO: 153699 - DNA, 59 bp, Artificial
  Synthetic oligonucleotide
tcattgagggcgcacttacatgttaccggtggtaacattcagcgtaagtgcgccctccc

SEQ ID NO: 153700 - DNA, 51 bp, Artificial
  Synthetic oligonucleotide
gcgtatccctcgtggatggtggggatgcgttcgatgccccgcgccttgaag

SEQ ID NO: 153701 - DNA, 51 bp, Artificial
  Synthetic oligonucleotide
gcgacgggtgggctgtgttagacgattcgcgctcggcacaaatcgcgtatg

SEQ ID NO: 153702 - DNA, 51 bp, Artificial
  Synthetic oligonucleotide
tcttactattcggactggaaggaccggtattctgcctcggctatggtgacg

SEQ ID NO: 153703 - DNA, 51 bp, Artificial
  Synthetic oligonucleotide
tcgaaagttcagcaattaaaccgagctgatcttagccgagttaatgtagct

SEQ ID NO: 153704 - DNA, 51 bp, Artificial
  Synthetic oligonucleotide
gcctgcgtactgcgaaatatcgtggcgatattgccggttcaactcgttctg

SEQ ID NO: 153705 - DNA, 51 bp, Artificial
  Synthetic oligonucleotide
agccctcatcgcatggcattgtccacggtgaatcgcgaggggacttccttc

SEQ ID NO: 153706 - DNA, 51 bp, Artificial
  Synthetic oligonucleotide
tcgcttgaaggctcgtgctgaggccggtgaaacggtcagccagatactgct

SEQ ID NO: 153707 - DNA, 51 bp, Artificial
  Synthetic oligonucleotide
agtccgctcctcagggcgtatgccgttaccccaatgttgaccagaccatgg

SEQ ID NO: 153708 - DNA, 51 bp, Artificial
  Synthetic oligonucleotide
agtcgagcgcccctcgtctgccacaatggaggcagtgacgtcgtacggaaa

SEQ ID NO: 153709 - DNA, 50 bp, Artificial
  Synthetic oligonucleotide
ttttgcagtaagcaaagtttgatctataggagcgtcaagactagttccag

SEQ ID NO: 153710 - DNA, 55 bp, Artificial
  Synthetic oligonucleotide
agccgttcacaccgtaggtgatttcaatcgcgcggacgaaacccctgattttcca

SEQ ID NO: 153711 - DNA, 50 bp, Artificial
  Synthetic oligonucleotide
gttccgcgcattacttccgggcgcacaagcgttggcgtaatcgcaagcgt

SEQ ID NO: 153712 - DNA, 50 bp, Artificial
  Synthetic oligonucleotide
taaccacccgcgcaaaccgacgaaagctccatattcgtcacgctgcacaa

SEQ ID NO: 153713 - DNA, 50 bp, Artificial
  Synthetic oligonucleotide
tcgcacggttcaccaacacagcgcacagagcgcgactcattcgcaaccat

SEQ ID NO: 153714 - DNA, 50 bp, Artificial
  Synthetic oligonucleotide
tacacaccaaacctaaacccggaagaacggagccggtttggacatccaag

SEQ ID NO: 153715 - DNA, 50 bp, Artificial
  Synthetic oligonucleotide
tcgcccaacatgtctctgggcaccacgacagtgacaagcgattccccgtc

SEQ ID NO: 153716 - DNA, 50 bp, Artificial
  Synthetic oligonucleotide
ttcgtggcgaagccgtgcgtaatatgcgggtgaacaggttctacagcaag

SEQ ID NO: 153717 - DNA, 50 bp, Artificial
  Synthetic oligonucleotide
tgtctggcgtctctgttggcctttccgtgtcactgtgcgcaatgtgtaca

SEQ ID NO: 153718 - DNA, 50 bp, Artificial
  Synthetic oligonucleotide
tgcgttcgcgcgtcactcgattgggcgtgcttgacatcggctccaacacg

SEQ ID NO: 153719 - DNA, 50 bp, Artificial
  Synthetic oligonucleotide
gtgactcacggcggaatgagtgttggcacggatccggttgcattgcaccg

SEQ ID NO: 153720 - DNA, 50 bp, Artificial
  Synthetic oligonucleotide
tcgtgctccataaccatcgctcccccagacttaagcagcgcaaaagccgc

SEQ ID NO: 153721 - DNA, 60 bp, Artificial
  Synthetic oligonucleotide
agcctcgtcgaatcatctcgactgacttccggtcacgtcgagtcgctccgctgggagggc

SEQ ID NO: 153722 - DNA, 50 bp, Artificial
  Synthetic oligonucleotide
tgaatccgcggttttgtcccacgtgagacccgacagtcccccgactcgaa

SEQ ID NO: 153723 - DNA, 50 bp, Artificial
  Synthetic oligonucleotide
tcaggccactgtaggtacggctgttccgagtttagctcaggcccagcctg

SEQ ID NO: 153724 - DNA, 50 bp, Artificial
  Synthetic oligonucleotide
tcaagaagccagttccgcgcattacttccgggcgcacaagcgttggcgta

SEQ ID NO: 153725 - DNA, 50 bp, Artificial
  Synthetic oligonucleotide
agaagccggttcacaacagaccgcaataagcagccccgcgcagtccaata

SEQ ID NO: 153726 - DNA, 50 bp, Artificial
  Synthetic oligonucleotide
acttatgccgaggcggacagacggctggatggggctttagccggagccct

SEQ ID NO: 153727 - DNA, 50 bp, Artificial
  Synthetic oligonucleotide
actggccccgacaagccggtttatgcctggccgcgttcgttatcagacct

SEQ ID NO: 153728 - DNA, 50 bp, Artificial
  Synthetic oligonucleotide
actggaggaagttccacgtgtcgtgtcgattgtgggaccgacggcctcgg

SEQ ID NO: 153729 - DNA, 50 bp, Artificial
  Synthetic oligonucleotide
actgctgcctgccggcgattccacgcaagtggcacccactgactgcgacg

SEQ ID NO: 153730 - DNA, 50 bp, Artificial
  Synthetic oligonucleotide
actgcgagactgctgccgtgaacctgtgcgtgcggtcacccgcattaaca

SEQ ID NO: 153731 - DNA, 50 bp, Artificial
  Synthetic oligonucleotide
actaggcagcaggcgtgctagagaggtggggattggcgacggttcggcgg

SEQ ID NO: 153732 - DNA, 57 bp, Artificial
  Synthetic oligonucleotide
caagttcgcaaaagtggccgccggacgaggacgatcacagctggtgggcttcgagtt

SEQ ID NO: 153733 - DNA, 50 bp, Artificial
  Synthetic oligonucleotide
acgttgccgatggtaccgccgcgcaagccattaaccagcgttccgacagt

SEQ ID NO: 153734 - DNA, 50 bp, Artificial
  Synthetic oligonucleotide
acgtgtcggtcgcgtccgtaaacgcgctgaacatttcggtggcgtctcgc

SEQ ID NO: 153735 - DNA, 50 bp, Artificial
  Synthetic oligonucleotide
acggtcccagcacgatcagtgtgcggtaggggagtgtggcgaagcgttga

SEQ ID NO: 153736 - DNA, 50 bp, Artificial
  Synthetic oligonucleotide
acgggttgctccctacgtgggttatgggaccacccagtacgtccgcttga

SEQ ID NO: 153737 - DNA, 50 bp, Artificial
  Synthetic oligonucleotide
acggggcagagcccaaggaacatgttggccgccgaggtatggctgctctg

SEQ ID NO: 153738 - DNA, 50 bp, Artificial
  Synthetic oligonucleotide
acgggccgtggtcggcatacacgagcaagcgcctcgggcacagaatcgca

SEQ ID NO: 153739 - DNA, 50 bp, Artificial
  Synthetic oligonucleotide
acgggactcgcgttccgtgtcgcatcgcacagcgcctttggtgcatacca

SEQ ID NO: 153740 - DNA, 50 bp, Artificial
  Synthetic oligonucleotide
acggatggggcgattcgcacgctgatgcgtagcggagggaagctcaatcc

SEQ ID NO: 153741 - DNA, 50 bp, Artificial
  Synthetic oligonucleotide
acggaaccaccagagcgcacgcatagccagccccttggaacgtctccaca

SEQ ID NO: 153742 - DNA, 50 bp, Artificial
  Synthetic oligonucleotide
acggaaaccgccgtgttgaaccggcctactttgcgagggaatcgcgtacg

SEQ ID NO: 153743 - DNA, 57 bp, Artificial
  Synthetic oligonucleotide
tctgaccggcctatcggtgtcgggtatcaaaaaagcgattgcggagaaacgtatcaa

SEQ ID NO: 153744 - DNA, 50 bp, Artificial
  Synthetic oligonucleotide
acgcttgagccccggacctgaaacggagagctgcgttgggatgttcgtcc

SEQ ID NO: 153745 - DNA, 50 bp, Artificial
  Synthetic oligonucleotide
acgcagataaggaggtgcgctacgggttggggcatacagccgcggttctg

SEQ ID NO: 153746 - DNA, 50 bp, Artificial
  Synthetic oligonucleotide
acgcactcgtaacacagtcttctttagcacgccaagtacacctttagtac

SEQ ID NO: 153747 - DNA, 50 bp, Artificial
  Synthetic oligonucleotide
acgcaccatgtcgtgggctgttcgtggcatatcgctgcgtcgcccttcta

SEQ ID NO: 153748 - DNA, 50 bp, Artificial
  Synthetic oligonucleotide
acgatccaaagtgcgcaacttttcgggcactaccgctattgttggactcg

SEQ ID NO: 153749 - DNA, 50 bp, Artificial
  Synthetic oligonucleotide
acgactgaccccgccttatggcacaatggcacgcggaaccaatagggaga

SEQ ID NO: 153750 - DNA, 50 bp, Artificial
  Synthetic oligonucleotide
ataggccaaaggatgccagaggctacggggccggtcgctggaatagcaac

SEQ ID NO: 153751 - DNA, 50 bp, Artificial
  Synthetic oligonucleotide
atagcgcttcggtaccgggctgatcgaaaacaccgcgttccttccgccta

SEQ ID NO: 153752 - DNA, 50 bp, Artificial
  Synthetic oligonucleotide
ataaatcgctggcaacggttccgatgcgtactgcggcgtccgcaatgacg

SEQ ID NO: 153753 - DNA, 50 bp, Artificial
  Synthetic oligonucleotide
agttcgtcgcgtagctcatcgtcaggtgcgtgcaaagagacggccagccg

SEQ ID NO: 153754 - DNA, 58 bp, Artificial
  Synthetic oligonucleotide
tccaagcggcgcacgcttggcccccacggagtggcccctcgggagagcgcgcttacgc

SEQ ID NO: 153755 - DNA, 50 bp, Artificial
  Synthetic oligonucleotide
agtgacccatttgacgttgggggagacatagcccggcccccgcatggtct

SEQ ID NO: 153756 - DNA, 50 bp, Artificial
  Synthetic oligonucleotide
aggggaccgtaacaggtttcgcctctggtcaggccggcaggtctgattct

SEQ ID NO: 153757 - DNA, 50 bp, Artificial
  Synthetic oligonucleotide
agggagcgcagccacgtatggaaacgggaggccataccgtcaaggccgtt

SEQ ID NO: 153758 - DNA, 50 bp, Artificial
  Synthetic oligonucleotide
aggctttgacccctcgtgacgatgtgccccatccaggagcgacgcagata

SEQ ID NO: 153759 - DNA, 50 bp, Artificial
  Synthetic oligonucleotide
aggcgactccaatcgctcccagtgggccacccttatgaaatgcgccacca

SEQ ID NO: 153760 - DNA, 50 bp, Artificial
  Synthetic oligonucleotide
aggcacaagcaagggcgcataacgattttggtgacccatcgggcctggac

SEQ ID NO: 153761 - DNA, 50 bp, Artificial
  Synthetic oligonucleotide
aggcaacacgggggaggtctgcccataatgggaagcatgagttcagcgca

SEQ ID NO: 153762 - DNA, 50 bp, Artificial
  Synthetic oligonucleotide
aggagatgtccaccgtccgcgaatctccggttttcatggctggcagggtg

SEQ ID NO: 153763 - DNA, 50 bp, Artificial
  Synthetic oligonucleotide
aggaaccggcgctggaatagtagaggctgctaccttgcgctcgcgtgcag

SEQ ID NO: 153764 - DNA, 50 bp, Artificial
  Synthetic oligonucleotide
agcggcccaaatcagccagccactggaacaatccacccgttcaaggccca

SEQ ID NO: 153765 - DNA, 60 bp, Artificial
  Synthetic oligonucleotide
gcctgaagatcgagcgccagtacgtgaaacgcaggctgtcgggcttcgtgttcacattcg

SEQ ID NO: 153766 - DNA, 50 bp, Artificial
  Synthetic oligonucleotide
agcggagggcagtctcagcgtctggctttggcaggagtgcttgccatgcg

SEQ ID NO: 153767 - DNA, 50 bp, Artificial
  Synthetic oligonucleotide
agcggagcgctgtcctcatggctaatcgccattcggctgagcttgcacgg

SEQ ID NO: 153768 - DNA, 50 bp, Artificial
  Synthetic oligonucleotide
agcccagccttatccaggcggacgtatcttgagggagacggccttcggaa

SEQ ID NO: 153769 - DNA, 50 bp, Artificial
  Synthetic oligonucleotide
agccagcggattttgcgcagagctcgtacctgagtcagggatagggcgtc

SEQ ID NO: 153770 - DNA, 50 bp, Artificial
  Synthetic oligonucleotide
agccacgtatggaaacgggaggccataccgtcaaggccgtttgcggagta

SEQ ID NO: 153771 - DNA, 50 bp, Artificial
  Synthetic oligonucleotide
agcaatcgcgttgtgcgcagtgtacggcagagatgagcggcgaaatgcgt

SEQ ID NO: 153772 - DNA, 50 bp, Artificial
  Synthetic oligonucleotide
agatcttccgcacagggattcgttcccctttgaccaggccggttggtgcg

SEQ ID NO: 153773 - DNA, 50 bp, Artificial
  Synthetic oligonucleotide
agacttgcgctttcccagtagaaccgacgggagaggcccgacacagcccg

SEQ ID NO: 153774 - DNA, 50 bp, Artificial
  Synthetic oligonucleotide
agactccggccccgtttttgaggtcacgaaagctccgcccctgtattcct

SEQ ID NO: 153775 - DNA, 50 bp, Artificial
  Synthetic oligonucleotide
agacgcgtggtatgtgatggggcgtttgcgtcaatcggctcatgttggga

SEQ ID NO: 153776 - DNA, 60 bp, Artificial
  Synthetic oligonucleotide
agcgtggtaagcgtgccggacagcgacccattggccaggctgagtgtatcgagcccggtg

SEQ ID NO: 153777 - DNA, 50 bp, Artificial
  Synthetic oligonucleotide
aaggcagcagcttgggtccgtgtcgcgctggagacagatatcccatgcgg

SEQ ID NO: 153778 - DNA, 50 bp, Artificial
  Synthetic oligonucleotide
aaggcacgtccagtacgcgcggataccacggatcgttgagcatcggcaac

SEQ ID NO: 153779 - DNA, 50 bp, Artificial
  Synthetic oligonucleotide
aaggaccgaccaaggggtcgggtggaaaacatcgcaatgctttacgcgga

SEQ ID NO: 153780 - DNA, 50 bp, Artificial
  Synthetic oligonucleotide
aagctggaccaacgcaagttgcctgcggaggtgttcgaacgcgtctcaca

SEQ ID NO: 153781 - DNA, 50 bp, Artificial
  Synthetic oligonucleotide
aagccggcttagaaagccaatccgtcggaggaggggtccccagccgaatc

SEQ ID NO: 153782 - DNA, 50 bp, Artificial
  Synthetic oligonucleotide
aagcccgttcaagctatggcgtcgtggaacgcacctccttgtgctcgggt

SEQ ID NO: 153783 - DNA, 50 bp, Artificial
  Synthetic oligonucleotide
aagatcaagctgggaaggacgacccttcgtctgactccggggcatccggg

SEQ ID NO: 153784 - DNA, 50 bp, Artificial
  Synthetic oligonucleotide
aagaccgaaggccttgagtccaagcggatcccccgtctgtcggggacttt

SEQ ID NO: 153785 - DNA, 50 bp, Artificial
  Synthetic oligonucleotide
aagacactgcgttgcatatgggagggggtgttccccgcggcaaagtaggc

SEQ ID NO: 153786 - DNA, 50 bp, Artificial
  Synthetic oligonucleotide
aactgtggtacgcatgccggttctcacggtttggcggcacgctgaagtga

SEQ ID NO: 153787 - DNA, 60 bp, Artificial
  Synthetic oligonucleotide
gccgttgattcggtgctcgcagtgtatccgcaggcgagaatcacctgcggaaggaactac

SEQ ID NO: 153788 - DNA, 50 bp, Artificial
  Synthetic oligonucleotide
aacggccaccgttcggtcgtgctgtctgacgagcaggcttcgattggtga

SEQ ID NO: 153789 - DNA, 50 bp, Artificial
  Synthetic oligonucleotide
aacggactttgcggagaggaggcgcggctttgcatggaattaaggggagc

SEQ ID NO: 153790 - DNA, 50 bp, Artificial
  Synthetic oligonucleotide
aacgcttcagttccgcaacacggtcactcccgcaacccgttcaggcatgc

SEQ ID NO: 153791 - DNA, 50 bp, Artificial
  Synthetic oligonucleotide
aacgagaggacggtcccagcacgatcagtgtgcggtaggggagtgtggcg

SEQ ID NO: 153792 - DNA, 50 bp, Artificial
  Synthetic oligonucleotide
aacgacgtaaggtcccgcgcacatgcttcgttgacacggccaggccacaa

SEQ ID NO: 153793 - DNA, 50 bp, Artificial
  Synthetic oligonucleotide
aacgaacagcgcgcaatatcgcccatcgtacgcaaacccaagcgtgccaa

SEQ ID NO: 153794 - DNA, 50 bp, Artificial
  Synthetic oligonucleotide
aaccgccacacagttattaccgcgcacacgggtcttgcggatgcaaccat

SEQ ID NO: 153795 - DNA, 50 bp, Artificial
  Synthetic oligonucleotide
aaccaggaggaagactccggccccgtttttgaggtcacgaaagctccgcc

SEQ ID NO: 153796 - DNA, 50 bp, Artificial
  Synthetic oligonucleotide
aaccactgccgcaatgcgttttcatccatttgcgtgccaccttcccctgc

SEQ ID NO: 153797 - DNA, 50 bp, Artificial
  Synthetic oligonucleotide
aacacggggaaaagtcgcctctccgttcgcgggaaccggtccataggagc

SEQ ID NO: 153798 - DNA, 60 bp, Artificial
  Synthetic oligonucleotide
gcgctcgatcttgatttgctgatggccatcgcgtctcgcgtgcgggacaagggcacggac

SEQ ID NO: 153799 - DNA, 60 bp, Artificial
  Synthetic oligonucleotide
tccagctacgcgaaggagacgtatcgccgtctgaagcagttcaggcagacgggagtatgg

SEQ ID NO: 153800 - DNA, 50 bp, Artificial
  Synthetic oligonucleotide
aacacaaagatgatgcacaggccctccttcctgacctggcccgccgcatt

SEQ ID NO: 153801 - DNA, 50 bp, Artificial
  Synthetic oligonucleotide
aaatgccttgtgcccatgctcggatggaccccggatgcacacgtgacgag

SEQ ID NO: 153802 - DNA, 50 bp, Artificial
  Synthetic oligonucleotide
aaacggaggcgcaagggaggtcccaaccagccgaaggatccgcaggagta

SEQ ID NO: 153803 - DNA, 50 bp, Artificial
  Synthetic oligonucleotide
aaaacccacttcctcgcagaattacgcaacatgattaccaatcagatagt

SEQ ID NO: 153804 - DNA, 50 bp, Artificial
  Synthetic oligonucleotide
accgggatttcgcacatgagaatgggctatcggtgggatcaacattccgt

SEQ ID NO: 153805 - DNA, 50 bp, Artificial
  Synthetic oligonucleotide
accgctaacggcggtcccacagacggagcatcgtcattcacactcccgat

SEQ ID NO: 153806 - DNA, 50 bp, Artificial
  Synthetic oligonucleotide
accgcggccctacgcacatgcaggcctccctactgaacagggtctccaaa

SEQ ID NO: 153807 - DNA, 50 bp, Artificial
  Synthetic oligonucleotide
accgcatcacgagcatgcgcccgctatagccgagccccagatacgtgccc

SEQ ID NO: 153808 - DNA, 50 bp, Artificial
  Synthetic oligonucleotide
acccgggaggggtgggtccgatgaccagggtcatgttactcgacaacgtg

SEQ ID NO: 153809 - DNA, 50 bp, Artificial
  Synthetic oligonucleotide
acccaattggacgcagtgtacgccgcatggtaccgcgtcggtttcatggc

SEQ ID NO: 153810 - DNA, 60 bp, Artificial
  Synthetic oligonucleotide
caactatgacactatcaactattacaccatgacactcatagttggcagatagtcccccgg

SEQ ID NO: 153811 - DNA, 50 bp, Artificial
  Synthetic oligonucleotide
accatttcgcactaaatcctgcgagcggcagttcccgagcggaccacggc

SEQ ID NO: 153812 - DNA, 50 bp, Artificial
  Synthetic oligonucleotide
accagagccttgcggaggtggtgttcgagtcccgttcggggcgcgtgaca

SEQ ID NO: 153813 - DNA, 50 bp, Artificial
  Synthetic oligonucleotide
acatgagtgcatcgaatgggtggagccttcgcagatgccccgtctgcgct

SEQ ID NO: 153814 - DNA, 50 bp, Artificial
  Synthetic oligonucleotide
acatcgggcgttgccaatcagagcggtccaaccagtgtctccacccatga

SEQ ID NO: 153815 - DNA, 50 bp, Artificial
  Synthetic oligonucleotide
acaggtgacctgagtttggaatccccgactggcagtcaccttgcggccct

SEQ ID NO: 153816 - DNA, 50 bp, Artificial
  Synthetic oligonucleotide
acaggggagcgtgatggctgctcacaatggatggcagggcgtgtagccgt

SEQ ID NO: 153817 - DNA, 50 bp, Artificial
  Synthetic oligonucleotide
acaggccctccttcctgacctggcccgccgcattcggcaacggggtttga

SEQ ID NO: 153818 - DNA, 50 bp, Artificial
  Synthetic oligonucleotide
acaggccaatgtgctcgcaggccccgtgccatacgacacatcacaccaag

SEQ ID NO: 153819 - DNA, 50 bp, Artificial
  Synthetic oligonucleotide
acagccgttggctgcccgtcttgctctatccgtgctctacccgtgctgag

SEQ ID NO: 153820 - DNA, 50 bp, Artificial
  Synthetic oligonucleotide
acagcaggcaacgaaagcggcgcacaccatgaaccggcgcatactgacct

SEQ ID NO: 153821 - DNA, 58 bp, Artificial
  Synthetic oligonucleotide
caacactgcggagaaaactgaacgaaaatggctcacaactaggagctaccaaactcaa

SEQ ID NO: 153822 - DNA, 50 bp, Artificial
  Synthetic oligonucleotide
acacggggcatgcgccttcacacacgccgcacaggatgcagttcgtcagg

SEQ ID NO: 153823 - DNA, 50 bp, Artificial
  Synthetic oligonucleotide
acacatgcttcggcagggagcgcagccacgtatggaaacgggaggccata

SEQ ID NO: 153824 - DNA, 50 bp, Artificial
  Synthetic oligonucleotide
aattgcacatggcccgaagtgtcgcctttgcgccagtattcctggcgtga

SEQ ID NO: 153825 - DNA, 50 bp, Artificial
  Synthetic oligonucleotide
aatggccgttgcgaccatactgcgcaagtcgacccacgagttggggttcg

SEQ ID NO: 153826 - DNA, 50 bp, Artificial
  Synthetic oligonucleotide
aatccagcgcaggcaacctgacatcccggacacgatacgcagccttcggc

SEQ ID NO: 153827 - DNA, 50 bp, Artificial
  Synthetic oligonucleotide
aatatgggcgtccggccgctggctacgctgcctctcaacccgtacatggt

SEQ ID NO: 153828 - DNA, 50 bp, Artificial
  Synthetic oligonucleotide
aagggctgattcagcatgcggtgggcccggtttacgtggttccacgcaag

SEQ ID NO: 153829 - DNA, 50 bp, Artificial
  Synthetic oligonucleotide
aagggattcgagccgtctggggagttcatcgagagtcgcagcaaggtgcc

SEQ ID NO: 153830 - DNA, 50 bp, Artificial
  Synthetic oligonucleotide
cgcgtgcttgaactggcgtaatgcggcgctctgattggcgtcgggtatga

SEQ ID NO: 153831 - DNA, 50 bp, Artificial
  Synthetic oligonucleotide
cgcggccatgtgcgaagcggccagtacatttatagagccggcccgggtca

SEQ ID NO: 153832 - DNA, 56 bp, Artificial
  Synthetic oligonucleotide
caacaaagaattacgcgactgggcaaaaacccacttcctcgcagaattacgcaaca

SEQ ID NO: 153833 - DNA, 50 bp, Artificial
  Synthetic oligonucleotide
cgccatgtgatagtcctcgtagcggttggcatcgcgggagccgtcccata

SEQ ID NO: 153834 - DNA, 50 bp, Artificial
  Synthetic oligonucleotide
cgcagtgagtcccgtgaactgggaacgattgtatcgccccctcccgtggg

SEQ ID NO: 153835 - DNA, 50 bp, Artificial
  Synthetic oligonucleotide
cgatggcgtcggtgggtcttgtagtggccggagtagtcgcaacccaaagc

SEQ ID NO: 153836 - DNA, 50 bp, Artificial
  Synthetic oligonucleotide
cgagacgaccgagactcagccccggcacactcgcatgcaagtcccaccgg

SEQ ID NO: 153837 - DNA, 50 bp, Artificial
  Synthetic oligonucleotide
cgaacaaagttagcaggggtaatccgtcggtgggtgtagccccggcggtt

SEQ ID NO: 153838 - DNA, 50 bp, Artificial
  Synthetic oligonucleotide
cgaaacgagctcgtggcccgctagcacagcacagcaatatacgttgcgga

SEQ ID NO: 153839 - DNA, 50 bp, Artificial
  Synthetic oligonucleotide
ccttaggtgtgggaccatgcccccgtagcttggcacgatgcttgccgcct

SEQ ID NO: 153840 - DNA, 50 bp, Artificial
  Synthetic oligonucleotide
cctgctccttcccgtgtgatggcagcggggtaagtctcggctcctcatgt

SEQ ID NO: 153841 - DNA, 50 bp, Artificial
  Synthetic oligonucleotide
cctgcgtcgcgtctccaatggcgaccctcaatgaagctccgaagccgaga

SEQ ID NO: 153842 - DNA, 50 bp, Artificial
  Synthetic oligonucleotide
cctatgctgcctgggctcacgggttttccctaactgaggccgctagggct

SEQ ID NO: 153843 - DNA, 59 bp, Artificial
  Synthetic oligonucleotide
gaggcaaaagccgcaaggccggagtagcaagtgacgtgaacgtatatacgttcactcga

SEQ ID NO: 153844 - DNA, 50 bp, Artificial
  Synthetic oligonucleotide
ccgttggttcgccagcgcacaatcaagaactggggcacaaccttgtggcc

SEQ ID NO: 153845 - DNA, 50 bp, Artificial
  Synthetic oligonucleotide
ccgtgtatcgcctgccctcgccgttttaggcagtgctgccgatgggttaa

SEQ ID NO: 153846 - DNA, 50 bp, Artificial
  Synthetic oligonucleotide
ccgtgatttcgtctccgcccgtgactgggatcagttccatacgccgggca

SEQ ID NO: 153847 - DNA, 50 bp, Artificial
  Synthetic oligonucleotide
ccgtccggcttacgggatacgtcgagcatacgcggtccgctccaatgcaa

SEQ ID NO: 153848 - DNA, 50 bp, Artificial
  Synthetic oligonucleotide
ccgtcccttgactgccagagcagctaggacaacggttgccagggttcccg

SEQ ID NO: 153849 - DNA, 50 bp, Artificial
  Synthetic oligonucleotide
ccggtggcctcgccagcatcggtgtgtcacgttgctgctattacccggta

SEQ ID NO: 153850 - DNA, 50 bp, Artificial
  Synthetic oligonucleotide
ccggggttcgcaggtcgtcagtgttatcaggcggtcctttgccgtttgct

SEQ ID NO: 153851 - DNA, 50 bp, Artificial
  Synthetic oligonucleotide
ccggaagcaggctttggccggtcctctggaagttgatctgaccggtggta

SEQ ID NO: 153852 - DNA, 50 bp, Artificial
  Synthetic oligonucleotide
ccgcggatgaggttcgcgtaacggaccatctcacttttggcgtcgacggc

SEQ ID NO: 153853 - DNA, 50 bp, Artificial
  Synthetic oligonucleotide
ccgcagcgaccggaccatccttggacacgcattgaccgtacaggtcctgt

SEQ ID NO: 153854 - DNA, 60 bp, Artificial
  Synthetic oligonucleotide
gagggaaacaccgaccggaaaagcctcttcgcaagctgcggcagcttgcgaagagcagcc

SEQ ID NO: 153855 - DNA, 50 bp, Artificial
  Synthetic oligonucleotide
ccgaggcgacctgaaggtcataggatgcaccttgcctcagcacatgcgcg

SEQ ID NO: 153856 - DNA, 50 bp, Artificial
  Synthetic oligonucleotide
gtatggtaatctcaaaacaccgtataacctcgaaccatccagaacatcga

SEQ ID NO: 153857 - DNA, 50 bp, Artificial
  Synthetic oligonucleotide
gtaagctagtcaatcgttcgatggcacctgtccggcattgtgcgaatggg

SEQ ID NO: 153858 - DNA, 50 bp, Artificial
  Synthetic oligonucleotide
ggttgcatccgcaagacccgtgtgcgcggtaataactgtgtggcggttct

SEQ ID NO: 153859 - DNA, 50 bp, Artificial
  Synthetic oligonucleotide
ggcttcggaccctgtgagagcgtaaccgaaatcttcgtgttatgaggcaa

SEQ ID NO: 153860 - DNA, 50 bp, Artificial
  Synthetic oligonucleotide
ggaggctcaaatgggtctcgcgtgcgattctccacaagcggagctggacc

SEQ ID NO: 153861 - DNA, 50 bp, Artificial
  Synthetic oligonucleotide
gctcgtaacgcgcatacacgtccgacggaaccccgaaacctgcaacgtga

SEQ ID NO: 153862 - DNA, 50 bp, Artificial
  Synthetic oligonucleotide
gcgtgaaatccgtcattcgaagcttatatcccaatgtgcccgacttggat

SEQ ID NO: 153863 - DNA, 50 bp, Artificial
  Synthetic oligonucleotide
gccttgcaccccgggccatacttcccctttcgccatcgcgtcccactaga

SEQ ID NO: 153864 - DNA, 50 bp, Artificial
  Synthetic oligonucleotide
gattgtcacgccaacccaccggacacctccacacgagaagcgaagcgcat

SEQ ID NO: 153865 - DNA, 60 bp, Artificial
  Synthetic oligonucleotide
tcgggcatagataaaaagacgcgcgaaacctctcaacatttgttgcagtcgctagatgaa

SEQ ID NO: 153866 - DNA, 50 bp, Artificial
  Synthetic oligonucleotide
gagtgttacactgttcttacccgcatgctcatacatactcgtataagctg

SEQ ID NO: 153867 - DNA, 50 bp, Artificial
  Synthetic oligonucleotide
gaggttcccacaacttgcgagtgagagccacattccgtacgcgtgccgca

SEQ ID NO: 153868 - DNA, 50 bp, Artificial
  Synthetic oligonucleotide
gacggaccccaaccagtatggcccacaggttccgccgcagtatggacagt

SEQ ID NO: 153869 - DNA, 50 bp, Artificial
  Synthetic oligonucleotide
gaatcacgcgggtcatcgttcgggcggaagaaccggtaccgagactcggc

SEQ ID NO: 153870 - DNA, 50 bp, Artificial
  Synthetic oligonucleotide
ctgcgcacgcgatattccgccgttttgttggtgtattactttaactcgcg

SEQ ID NO: 153871 - DNA, 50 bp, Artificial
  Synthetic oligonucleotide
ctgcgacaggtagtgtgaaagttgatacgttgtcacgtcttggctgaaaa

SEQ ID NO: 153872 - DNA, 50 bp, Artificial
  Synthetic oligonucleotide
cgttatccgtcctatatctaatcaggttactgtacatgttctcacatgcc

SEQ ID NO: 153873 - DNA, 50 bp, Artificial
  Synthetic oligonucleotide
cgtaggctgagccgctcgcttgccagagctcgattgaccaatgcgatggc

SEQ ID NO: 153874 - DNA, 50 bp, Artificial
  Synthetic oligonucleotide
cgtaccgcactgcaacggaaccccatgactcgttggccgtcatggcagta

SEQ ID NO: 153875 - DNA, 50 bp, Artificial
  Synthetic oligonucleotide
cggttattggcggattagcgggttataggaaagtaggcctcacccaactg

SEQ ID NO: 153876 - DNA, 57 bp, Artificial
  Synthetic oligonucleotide
tcgggaagacgggagggtggcgctaccgttatcgccaccagtggcgtgatacttgta

SEQ ID NO: 153877 - DNA, 50 bp, Artificial
  Synthetic oligonucleotide
cggtacgctaccccaccgagcagatagtggtcggctgacgcagaccatcc

SEQ ID NO: 153878 - DNA, 50 bp, Artificial
  Synthetic oligonucleotide
cgggcggacgtcgactacacgtacaacgaccggtggagcgaatcggacca

SEQ ID NO: 153879 - DNA, 50 bp, Artificial
  Synthetic oligonucleotide
cggcaatcatccccaagcacgcatccacatgccagctcccgatagcccca

SEQ ID NO: 153880 - DNA, 50 bp, Artificial
  Synthetic oligonucleotide
cggatagccggccatattgggtgtgcgccaggtcagtgcgacggattcct

SEQ ID NO: 153881 - DNA, 50 bp, Artificial
  Synthetic oligonucleotide
cacgtgcgcaggctcgcatctatgcttggcaaggaacgggcaattggacc

SEQ ID NO: 153882 - DNA, 50 bp, Artificial
  Synthetic oligonucleotide
cacgacttagggcacccaccatttggccataacggagaacgcgcgctcgc

SEQ ID NO: 153883 - DNA, 50 bp, Artificial
  Synthetic oligonucleotide
caccgcgcacccttgaacaacgcaaggtctgggtcgaatcgcaccaagat

SEQ ID NO: 153884 - DNA, 50 bp, Artificial
  Synthetic oligonucleotide
cacacgtgtgccttagcccggcccttccgaccgcaccgtcaacttgtctt

SEQ ID NO: 153885 - DNA, 50 bp, Artificial
  Synthetic oligonucleotide
caatcgctcccagtgggccacccttatgaaatgcgccaccacgcatctcg

SEQ ID NO: 153886 - DNA, 50 bp, Artificial
  Synthetic oligonucleotide
caatcagccgcctagtcggccagtcggttagccggttaatcacctcgccg

SEQ ID NO: 153887 - DNA, 60 bp, Artificial
  Synthetic oligonucleotide
aggctcgccgctacgcggctcgcacgcggccgcgctacgcggcttgacgccgctacgcgc

SEQ ID NO: 153888 - DNA, 50 bp, Artificial
  Synthetic oligonucleotide
caagtgggtggccagttacggtccccgcaccaacttctcctattcggcga

SEQ ID NO: 153889 - DNA, 50 bp, Artificial
  Synthetic oligonucleotide
caagagggtcatctgaagacgggttcctggaccgttcccaccagcgcgga

SEQ ID NO: 153890 - DNA, 50 bp, Artificial
  Synthetic oligonucleotide
caaattcgcctgtctgtgcccgaaccgaggaagcagcccatcgagggcaa

SEQ ID NO: 153891 - DNA, 50 bp, Artificial
  Synthetic oligonucleotide
atttccacgcagcccctacgcccgcagaggcacaccggtcccttgaaatt

SEQ ID NO: 153892 - DNA, 50 bp, Artificial
  Synthetic oligonucleotide
attgcgggcttccacggacttctgggcgtttcgtacccccttggagacgc

SEQ ID NO: 153893 - DNA, 50 bp, Artificial
  Synthetic oligonucleotide
attccgggctccttcggggatgcacccgtctcgagggtcgcaatcgtatt

SEQ ID NO: 153894 - DNA, 50 bp, Artificial
  Synthetic oligonucleotide
attcccaaggccgattccgacgcccgtttggccctccgctattcccatcc

SEQ ID NO: 153895 - DNA, 50 bp, Artificial
  Synthetic oligonucleotide
atgtcgaacggatagccggccatattgggtgtgcgccaggtcagtgcgac

SEQ ID NO: 153896 - DNA, 50 bp, Artificial
  Synthetic oligonucleotide
atggtttgcgccctgatggggtggcgtatgttggcgatgactggtggagc

SEQ ID NO: 153897 - DNA, 50 bp, Artificial
  Synthetic oligonucleotide
atggttggtccgaagcgcttgcgactgcacttctcgccgggtggcatacg

SEQ ID NO: 153898 - DNA, 59 bp, Artificial
  Synthetic oligonucleotide
tccccacgcgcaacgaagaggcacttgatttacgctagcaagtacagtctcaccgtccg

SEQ ID NO: 153899 - DNA, 50 bp, Artificial
  Synthetic oligonucleotide
atgcgcccgcccaggtttgatttcacgggaggagctgatagcccagctcg

SEQ ID NO: 153900 - DNA, 50 bp, Artificial
  Synthetic oligonucleotide
atgccgggctatctgcgcctctcgtactgcgtggagaccgagcatctgag

SEQ ID NO: 153901 - DNA, 50 bp, Artificial
  Synthetic oligonucleotide
atcccaagagggctcacgcctggtgggctgtatcggttcaggtgaccgat

SEQ ID NO: 153902 - DNA, 50 bp, Artificial
  Synthetic oligonucleotide
atcatgagccccatgcctccggcgaacaaccatcgacgtgggatcacacg

SEQ ID NO: 153903 - DNA, 50 bp, Artificial
  Synthetic oligonucleotide
atatttccgcctacgccttgaccgtggaaccccacacccgaatgggccgg

SEQ ID NO: 153904 - DNA, 50 bp, Artificial
  Synthetic oligonucleotide
atatacccttgcacgcggagttcctgcgtaccctcggtggcttgtcggta

SEQ ID NO: 153905 - DNA, 50 bp, Artificial
  Synthetic oligonucleotide
ataggtgcgggtttgaccattgcccaggaatccgggaagcatgcggaacg

SEQ ID NO: 153906 - DNA, 50 bp, Artificial
  Synthetic oligonucleotide
ccgactgggggaggggaacccgatagttatcccacgctgctccggagaaa

SEQ ID NO: 153907 - DNA, 50 bp, Artificial
  Synthetic oligonucleotide
cccgccttggtattcgcaaatatacgcaatgcggggcgcagtccagtgga

SEQ ID NO: 153908 - DNA, 50 bp, Artificial
  Synthetic oligonucleotide
ccccggggtcttgacccggacccgtagggcgtagttgtcctcatgcacgt

SEQ ID NO: 153909 - DNA, 60 bp, Artificial
  Synthetic oligonucleotide
cgcacccgtcacgcaagcgtgtgcctacgcgcgcacccatcacgcaagcgtgtgcctacg

SEQ ID NO: 153910 - DNA, 55 bp, Artificial
  Synthetic oligonucleotide
agagtcctgataaagggaagcatatcgtgttacgtaaggcgttacacgtaaatac

SEQ ID NO: 153911 - DNA, 60 bp, Artificial
  Synthetic oligonucleotide
attcaaataagaataagctgctgcatgaatagtctcaaaagatccaaaagcctgacccat

SEQ ID NO: 153912 - DNA, 60 bp, Artificial
  Synthetic oligonucleotide
ctacgcgcgcacccgtcacgcaagcgtgtgcctacgcgcgcacccatcacgcaagcgtgt

SEQ ID NO: 153913 - DNA, 54 bp, Artificial
  Synthetic oligonucleotide
cattacttcccgctttagtggtattaggaattgtgttatccttaggaggaaaca

SEQ ID NO: 153914 - DNA, 54 bp, Artificial
  Synthetic oligonucleotide
agtagttacctattatctctatctgcctaccccccggtatcaaccgagtcagtt

SEQ ID NO: 153915 - DNA, 60 bp, Artificial
  Synthetic oligonucleotide
atctcttggattttcaatatgtctagctgacatgatagctggaatagcgcaagctatact

SEQ ID NO: 153916 - DNA, 58 bp, Artificial
  Synthetic oligonucleotide
gttaatttttcagctatggatccatcgtttgtgagaagtaatactcctgtagttgaac

SEQ ID NO: 153917 - DNA, 59 bp, Artificial
  Synthetic oligonucleotide
gattatcatgtattttgctcctataggagtcggatccgctatagcttatacagtaggac

SEQ ID NO: 153918 - DNA, 58 bp, Artificial
  Synthetic oligonucleotide
gcatcaaacatgggattaagtttataggtcctcttccaaatcatataattcaaatggg

SEQ ID NO: 153919 - DNA, 59 bp, Artificial
  Synthetic oligonucleotide
gctaaagttgctatagcatgaacagctgctaatttcatttcatcgttgataatacttgc

SEQ ID NO: 153920 - DNA, 60 bp, Artificial
  Synthetic oligonucleotide
aagcgtgtgcctacgcgcgcacccatcacgcaagcgtgtgcctacgcgcgcagccatcac

SEQ ID NO: 153921 - DNA, 57 bp, Artificial
  Synthetic oligonucleotide
agatcaaatccagtatgtgtttgaatagcatccaatatagggatacgaggaaacggg

SEQ ID NO: 153922 - DNA, 56 bp, Artificial
  Synthetic oligonucleotide
aaatctaaggaagctactgatgctattcgtaaagctggggaacaggctaaacgaaa

SEQ ID NO: 153923 - DNA, 56 bp, Artificial
  Synthetic oligonucleotide
ggattattgcctcatatcaattgggaggaaaccttatacagaaaatcttggattag

SEQ ID NO: 153924 - DNA, 56 bp, Artificial
  Synthetic oligonucleotide
gccgtcccatactttactactccttccattaattttaacatcatatatgccacttc

SEQ ID NO: 153925 - DNA, 56 bp, Artificial
  Synthetic oligonucleotide
tatgtcagttcgaatttcaggagtagatcttcctagatctaaaagagggatcatag

SEQ ID NO: 153926 - DNA, 54 bp, Artificial
  Synthetic oligonucleotide
cttttgtccaaaacaaaaggacataaggatggtggatggttaaccattactata

SEQ ID NO: 153927 - DNA, 56 bp, Artificial
  Synthetic oligonucleotide
aatacaagtgtaattataaaaatacgtaacatatctggacatccagatccaaatta

SEQ ID NO: 153928 - DNA, 55 bp, Artificial
  Synthetic oligonucleotide
gatggatggctaattactttcccgcaaggaactactaaagcatttgctcctggac

SEQ ID NO: 153929 - DNA, 55 bp, Artificial
  Synthetic oligonucleotide
gagcccaattaggaagagaggtatacatgagatggtgtggtccagcccatatgta

SEQ ID NO: 153930 - DNA, 55 bp, Artificial
  Synthetic oligonucleotide
gaatgatcgatgatccaattactctttctaggaattcaacacttcgggatgcaca

SEQ ID NO: 153931 - DNA, 60 bp, Artificial
  Synthetic oligonucleotide
tgtgcctacgcgcgcacccatcacgcaagcgtgtgcctacgcgcgcacccgtcacgcaag

SEQ ID NO: 153932 - DNA, 55 bp, Artificial
  Synthetic oligonucleotide
gaacaagagctcgaatccctggagctataattccatcatcgtttgtcactaaaat

SEQ ID NO: 153933 - DNA, 55 bp, Artificial
  Synthetic oligonucleotide
gcagtaggtgccccatttaatcctaatatagtaatgggtttggaaggtcctgctg

SEQ ID NO: 153934 - DNA, 55 bp, Artificial
  Synthetic oligonucleotide
gcatctgcttctccttggtctaccatcattgctccaaaatgatcatttgttcgca

SEQ ID NO: 153935 - DNA, 55 bp, Artificial
  Synthetic oligonucleotide
cttccgtcactgcaggataatagtttactacggaagaaccagaagtacaactaag

SEQ ID NO: 153936 - DNA, 55 bp, Artificial
  Synthetic oligonucleotide
gctatacgtggagttccacgacttctagttgctatttcataagaagattctttgg

SEQ ID NO: 153937 - DNA, 55 bp, Artificial
  Synthetic oligonucleotide
ggagtaatcgaattatggatcggagtcaaacgttcacttctagtatggtcaatcc

SEQ ID NO: 153938 - DNA, 55 bp, Artificial
  Synthetic oligonucleotide
ggctgtaacaatctcaggggacgctataaaagcatgtgttttcggatttccatca

SEQ ID NO: 153939 - DNA, 55 bp, Artificial
  Synthetic oligonucleotide
gggaccttgcctagcactaaggatatagaaaatcctacaatggaagtaggatcgg

SEQ ID NO: 153940 - DNA, 55 bp, Artificial
  Synthetic oligonucleotide
gggcatatactcctatatctcgaattcttcgtgcaattatcttgctatattggga

SEQ ID NO: 153941 - DNA, 55 bp, Artificial
  Synthetic oligonucleotide
ggggcataaatccttgatattgattggaggagccactggtcttataggagatcca

SEQ ID NO: 153942 - DNA, 57 bp, Artificial
  Synthetic oligonucleotide
caatcacgtgattaaggaaaaccgttctattatatctcacatagaaggtactaccag

SEQ ID NO: 153943 - DNA, 55 bp, Artificial
  Synthetic oligonucleotide
ggtggttctgaggcagcaattacacaaagtggagtcggtgggtttaatgccttac

SEQ ID NO: 153944 - DNA, 55 bp, Artificial
  Synthetic oligonucleotide
gtctagaaatcattcgtacatccctcatatctctaagtgctttaatcgtcgcttt

SEQ ID NO: 153945 - DNA, 55 bp, Artificial
  Synthetic oligonucleotide
gtgctctagatatagcaagacaaatcgcttccgcttgtccattaaaccctcctcc

SEQ ID NO: 153946 - DNA, 55 bp, Artificial
  Synthetic oligonucleotide
gttcatggttccgctttattctcgagaggagaaactcaatcattaactactgtca

SEQ ID NO: 153947 - DNA, 55 bp, Artificial
  Synthetic oligonucleotide
tattacgtatggtaaataacgcaaattctggacatcctggtgggtccttaggatg

SEQ ID NO: 153948 - DNA, 55 bp, Artificial
  Synthetic oligonucleotide
tgcgatgagaagacggagttatgaaactgtcgcgtacggacggaagtgtacgttg

SEQ ID NO: 153949 - DNA, 55 bp, Artificial
  Synthetic oligonucleotide
tggaagggcgttgtatatactagcacgatatccacctaaagatctatgtccatcc

SEQ ID NO: 153950 - DNA, 55 bp, Artificial
  Synthetic oligonucleotide
aatacaaacaagcgattttgtaataaagaaccataatgtaatgagaatctaaacg

SEQ ID NO: 153951 - DNA, 53 bp, Artificial
  Synthetic oligonucleotide
aatggaacaggtttcccgaaacaaatggtagattgggtaagagaagggatatc

SEQ ID NO: 153952 - DNA, 55 bp, Artificial
  Synthetic oligonucleotide
aatgggccgatacttataccaaacatggatcctatgtggtagtacctaatcttcg

SEQ ID NO: 153953 - DNA, 60 bp, Artificial
  Synthetic oligonucleotide
gtcacgcaagcgtgtgcctacgcgcgcacccatcacgcaagcgtgtgcctacgcgcgcac

SEQ ID NO: 153954 - DNA, 55 bp, Artificial
  Synthetic oligonucleotide
acggatctcctttaattctaacaatttcttatgcatatattcggatgctcggtcc

SEQ ID NO: 153955 - DNA, 55 bp, Artificial
  Synthetic oligonucleotide
atactggagaaagaattacttttgctatatctgtgcaatagtggctagaacgtcc

SEQ ID NO: 153956 - DNA, 55 bp, Artificial
  Synthetic oligonucleotide
atgattcatgataagctttaattaccataagtccagcatactctccttgagcccc

SEQ ID NO: 153957 - DNA, 55 bp, Artificial
  Synthetic oligonucleotide
caaatcctcttaaatgaatatccaatcgtctacgaccaatcctgtcccctccagg

SEQ ID NO: 153958 - DNA, 55 bp, Artificial
  Synthetic oligonucleotide
caggattcaatcaagttagaagcataaggggctggagtatccaataaagtaattc

SEQ ID NO: 153959 - DNA, 55 bp, Artificial
  Synthetic oligonucleotide
catctgcatttactgaacgtgctcctccttcacaagatgctgcaattagactagc

SEQ ID NO: 153960 - DNA, 55 bp, Artificial
  Synthetic oligonucleotide
ccatattttagagctaatacgttgttccaatcgtttgccatcccttcctttaaga

SEQ ID NO: 153961 - DNA, 55 bp, Artificial
  Synthetic oligonucleotide
ccctccatgccagttcacctattgttgtatcgttcattgggttggatacctcctc

SEQ ID NO: 153962 - DNA, 55 bp, Artificial
  Synthetic oligonucleotide
ccggatgctttagaatatccaatagctgctggcacaccagaatctgggactccaa

SEQ ID NO: 153963 - DNA, 55 bp, Artificial
  Synthetic oligonucleotide
ccgtacgaagaccaagttgacttgaacgaatagcagatacataacctccgggacc

SEQ ID NO: 153964 - DNA, 58 bp, Artificial
  Synthetic oligonucleotide
ggagctatgatcaaaggttttctaaatgaggacatgttgaacagtcaaagaattttag

SEQ ID NO: 153965 - DNA, 55 bp, Artificial
  Synthetic oligonucleotide
ccgttgtagtttctccataatatacaggaattttgtgtacacttccttcagatgg

SEQ ID NO: 153966 - DNA, 55 bp, Artificial
  Synthetic oligonucleotide
cctacagagattcccatattaatgagtgcttgatttataatagggacccctacag

SEQ ID NO: 153967 - DNA, 55 bp, Artificial
  Synthetic oligonucleotide
cctcagatcgtttaccattagctttatggttggaatctgaaaggatgcttcatgc

SEQ ID NO: 153968 - DNA, 55 bp, Artificial
  Synthetic oligonucleotide
cttacctgtactatccactctccctaaggtttgcggtactatcatagatcagcaa

SEQ ID NO: 153969 - DNA, 55 bp, Artificial
  Synthetic oligonucleotide
ctgcatgaatagtctcaaaagatccaaaagcctgacccatcattttgatttctgg

SEQ ID NO: 153970 - DNA, 55 bp, Artificial
  Synthetic oligonucleotide
ctcttccataatccttagcgggtaatcctccaataatatctacaaattccactga

SEQ ID NO: 153971 - DNA, 53 bp, Artificial
  Synthetic oligonucleotide
ctatttcaacgtacacttccgtccgtacgcgacagtttcatttctccgtcccc

SEQ ID NO: 153972 - DNA, 55 bp, Artificial
  Synthetic oligonucleotide
cgttgtaaccttcagcacgtttatatctcgcataaatatcggaagcaatatatcc

SEQ ID NO: 153973 - DNA, 55 bp, Artificial
  Synthetic oligonucleotide
cctgaatacacacgaatcataatagcagcgatccctctaggtaacaaagcatcac

SEQ ID NO: 153974 - DNA, 55 bp, Artificial
  Synthetic oligonucleotide
cgatatggttcctcgtaatataactttctagagagagaacttttctggctacacc

SEQ ID NO: 153975 - DNA, 56 bp, Artificial
  Synthetic oligonucleotide
tgacactcctactttagcttttacccattatcaacccgctcaactaactactgtag

SEQ ID NO: 153976 - DNA, 54 bp, Artificial
  Synthetic oligonucleotide
tttatggctatagagaacaccatagctgggtctatattaactaactacagtctt

SEQ ID NO: 153977 - DNA, 54 bp, Artificial
  Synthetic oligonucleotide
ccgatctccaatctcttgtagacgcagaatccaccaccttttgagttgcagtag

SEQ ID NO: 153978 - DNA, 54 bp, Artificial
  Synthetic oligonucleotide
tgatattgttgaccactcctctatgtacacctatacttttagatctacctatcc

SEQ ID NO: 153979 - DNA, 54 bp, Artificial
  Synthetic oligonucleotide
ggagctgtagaaattgcccctggaataggattagccgattgtatttgtgatttg

SEQ ID NO: 153980 - DNA, 54 bp, Artificial
  Synthetic oligonucleotide
gtacacttccatccgtacgcgacagtttcataactccgtcccccctatcgcaat

SEQ ID NO: 153981 - DNA, 53 bp, Artificial
  Synthetic oligonucleotide
tgggacagaccatcctttataaaggactggacgagtataaacgggaggggcta

SEQ ID NO: 153982 - DNA, 53 bp, Artificial
  Synthetic oligonucleotide
agaaagtatttcatgtacaggtaaggcaactatatgtaacatgggggctgaaa

SEQ ID NO: 153983 - DNA, 53 bp, Artificial
  Synthetic oligonucleotide
tcacctacaagtaaagttccttccatagaagaagtagggatcacaaaaggttg

SEQ ID NO: 153984 - DNA, 53 bp, Artificial
  Synthetic oligonucleotide
gcaataggaataggaatgggtatgggaaaggatcctatgaccgtatatgcatt

SEQ ID NO: 153985 - DNA, 52 bp, Artificial
  Synthetic oligonucleotide
tggttactgcatagatcccaatttttgagcactctataatatggagaggatt

SEQ ID NO: 153986 - DNA, 60 bp, Artificial
  Synthetic oligonucleotide
tctatgacaaaagagcaagaatccggaatcacattatgttgtatccctccttgtatttga

SEQ ID NO: 153987 - DNA, 52 bp, Artificial
  Synthetic oligonucleotide
gatgatcccataaccgccgtcccactttctttaagtaccgttctagtatctc

SEQ ID NO: 153988 - DNA, 52 bp, Artificial
  Synthetic oligonucleotide
gcatctacccctgcacaggcagaagtacgaattatagatccaaaatttctga

SEQ ID NO: 153989 - DNA, 52 bp, Artificial
  Synthetic oligonucleotide
tacatgccatgattatgacctctcatccctatttcttatggatgaaaccgaa

SEQ ID NO: 153990 - DNA, 52 bp, Artificial
  Synthetic oligonucleotide
agcaccgtgatcggaaaaattcgcttctcctataacataacacccttttata

SEQ ID NO: 153991 - DNA, 52 bp, Artificial
  Synthetic oligonucleotide
gggccccaataggggtcacacatccacctcctaaagttttcaaaaattgacg

SEQ ID NO: 153992 - DNA, 52 bp, Artificial
  Synthetic oligonucleotide
acgtatccgttaaatttatgataacctgctcctaatcgcaaatagggatcaa

SEQ ID NO: 153993 - DNA, 51 bp, Artificial
  Synthetic oligonucleotide
tttaatggcgtgtacagcttctccttccagattagcttctatcatcacata

SEQ ID NO: 153994 - DNA, 51 bp, Artificial
  Synthetic oligonucleotide
ggctcgttcagttattgtagtaggtcctcatttgaaattacatgaatgtgg

SEQ ID NO: 153995 - DNA, 51 bp, Artificial
  Synthetic oligonucleotide
gcaactgtaatagccgatgtatgtattcttccttgagattcagtctttgga

SEQ ID NO: 153996 - DNA, 51 bp, Artificial
  Synthetic oligonucleotide
ctcttcagaaaagatgattgtgacagctggaagtgtagatagtcatgttca

SEQ ID NO: 153997 - DNA, 60 bp, Artificial
  Synthetic oligonucleotide
tcctcctataaccgggacacgaacagctgtagctgtaagggatatatctcgattattcat

SEQ ID NO: 153998 - DNA, 51 bp, Artificial
  Synthetic oligonucleotide
cgcaatattaggagcctcaaaagaagtccctaccattaatggaaaagcccg

SEQ ID NO: 153999 - DNA, 51 bp, Artificial
  Synthetic oligonucleotide
agcgccataaacgactcccgctgaactagctgcactggatcctattccact

SEQ ID NO: 154000 - DNA, 51 bp, Artificial
  Synthetic oligonucleotide
agttggagacactattagatttaccagcttatctccatatagaatatctat

SEQ ID NO: 154001 - DNA, 51 bp, Artificial
  Synthetic oligonucleotide
gaatccgtcatcatggaatctggattattaagtactccaggtaacaatctg

SEQ ID NO: 154002 - DNA, 51 bp, Artificial
  Synthetic oligonucleotide
gtccctcatgctatagtacgttatgggtcttatatttctcctggagttatc

SEQ ID NO: 154003 - DNA, 51 bp, Artificial
  Synthetic oligonucleotide
caatgctccggacaacactagactatcgaaagttttcttattcactatacg

SEQ ID NO: 154004 - DNA, 50 bp, Artificial
  Synthetic oligonucleotide
cctgatggaggatcaggtggtaaaggaggtaatattattatacgaggaaa

SEQ ID NO: 154005 - DNA, 50 bp, Artificial
  Synthetic oligonucleotide
atgagacccccagacaacaagtccaggataaatagatctgcaagcacttc

SEQ ID NO: 154006 - DNA, 50 bp, Artificial
  Synthetic oligonucleotide
ggatggcggaatcattagtgttatctcctattaacgcaacaggtttataa

SEQ ID NO: 154007 - DNA, 50 bp, Artificial
  Synthetic oligonucleotide
ctaaaatcgtatcccctatatgaattcccctccctatagcaaattctgag

SEQ ID NO: 154008 - DNA, 57 bp, Artificial
  Synthetic oligonucleotide
cactatttttgcctgcaattgtgaagggattcttatatatccttcagttcccttact

SEQ ID NO: 154009 - DNA, 56 bp, Artificial
  Synthetic oligonucleotide
ctcccccaactactcgcctagcttacgcactccatcaggtcgccctaaaggactcc

SEQ ID NO: 154010 - DNA, 52 bp, Artificial
  Synthetic oligonucleotide
acttctccaaatgcagttctttcgccacagcagacattcgtcataaaagaac

SEQ ID NO: 154011 - DNA, 52 bp, Artificial
  Synthetic oligonucleotide
tgccccctgcgaagcgtgcccttagggtacacacccccacttcttttacgac

SEQ ID NO: 154012 - DNA, 52 bp, Artificial
  Synthetic oligonucleotide
cgcaaaagaagtgggggtgtgtaccctaagggcacgcttcgcagggggctag

SEQ ID NO: 154013 - DNA, 52 bp, Artificial
  Synthetic oligonucleotide
tattggcacaggggaagccacctcacgaagtgtgcctttgccaagcgagaag

SEQ ID NO: 154014 - DNA, 52 bp, Artificial
  Synthetic oligonucleotide
ttggacttgtagttcctcctgttcgtatagtagacaaccaggctatagagcc

SEQ ID NO: 154015 - DNA, 52 bp, Artificial
  Synthetic oligonucleotide
gtttaactataggttctaaattattagcctgattaattaaagtatctctgtc

SEQ ID NO: 154016 - DNA, 52 bp, Artificial
  Synthetic oligonucleotide
gttatcctagcagctgcatgtaaaagtgcccctgttgctactggtccagaag

SEQ ID NO: 154017 - DNA, 52 bp, Artificial
  Synthetic oligonucleotide
gatatacggtgcggggaggtgctacagctcgtaggcgggaatacccccgacc

SEQ ID NO: 154018 - DNA, 52 bp, Artificial
  Synthetic oligonucleotide
tttgcgaccgaaggaagtactgcgactgaaaggagtacctttaggtatggta

SEQ ID NO: 154019 - DNA, 52 bp, Artificial
  Synthetic oligonucleotide
cccctgcgaagcgtgcccttagggtacacgaccccagttcttttacgaccaa

SEQ ID NO: 154020 - DNA, 58 bp, Artificial
  Synthetic oligonucleotide
gcttacgcactccatcaggtcgccctaaaggactccctcaggtcgggagcattccgca

SEQ ID NO: 154021 - DNA, 51 bp, Artificial
  Synthetic oligonucleotide
ttccatagcttctgggtgagtccatccaagtaaagctaagaagtttctcat

SEQ ID NO: 154022 - DNA, 51 bp, Artificial
  Synthetic oligonucleotide
ttcctacggtcgcacagactaagtgccttgccgcagtcacgcagagcgtcg

SEQ ID NO: 154023 - DNA, 51 bp, Artificial
  Synthetic oligonucleotide
taagactagcatgagtgtacgtaatattaggctcatacggcacctaataca

SEQ ID NO: 154024 - DNA, 51 bp, Artificial
  Synthetic oligonucleotide
gtacctggcaaagtctactgtatatgtagtagcgtattaccgcaagaagtt

SEQ ID NO: 154025 - DNA, 51 bp, Artificial
  Synthetic oligonucleotide
cgtctatctgtctgtatcttcccaaaacctgagcctctatcaaagttttac

SEQ ID NO: 154026 - DNA, 51 bp, Artificial
  Synthetic oligonucleotide
gcttatctattggtgctttaggaggactcagtgtaaaagctgataactttg

SEQ ID NO: 154027 - DNA, 51 bp, Artificial
  Synthetic oligonucleotide
aagtcaattgtaaaggtgttgagccgtagagattgtagcctattccgcctc

SEQ ID NO: 154028 - DNA, 51 bp, Artificial
  Synthetic oligonucleotide
caaggcttatcaggagtgattcctccagtccaaccagtagtttgtcctcct

SEQ ID NO: 154029 - DNA, 51 bp, Artificial
  Synthetic oligonucleotide
ttgtactatccgtaaggggttgcgttgccgtgcggaatgcccgtatggcga

SEQ ID NO: 154030 - DNA, 51 bp, Artificial
  Synthetic oligonucleotide
ctatcacaacgactgacacaactaatacttatgttacgtcaataggcgggg

SEQ ID NO: 154031 - DNA, 53 bp, Artificial
  Synthetic oligonucleotide
gcgaagcgtacccgaagggtaaccccagttcttttaccgacgctctgcgtgcc

SEQ ID NO: 154032 - DNA, 50 bp, Artificial
  Synthetic oligonucleotide
catcatagcctatatactcagtatacattccatatcttgcaccgaaagcc

SEQ ID NO: 154033 - DNA, 50 bp, Artificial
  Synthetic oligonucleotide
cagggctaatcatatactgaatgaatgccacagatgaagcagacactata

SEQ ID NO: 154034 - DNA, 50 bp, Artificial
  Synthetic oligonucleotide
acctgaatgcagattaattttgtggtcacatatttcaggtataaatccgc

SEQ ID NO: 154035 - DNA, 50 bp, Artificial
  Synthetic oligonucleotide
tggagttatacggtgctaatgtagtatccgttactaaaggaggacgcgga

SEQ ID NO: 154036 - DNA, 50 bp, Artificial
  Synthetic oligonucleotide
tcttcgctatagtcatgccataattagtgatagggacattctgctcttcg

SEQ ID NO: 154037 - DNA, 50 bp, Artificial
  Synthetic oligonucleotide
cacttactagcggttattgtctcaaacaccctaatggtcctaacaaagga

SEQ ID NO: 154038 - DNA, 50 bp, Artificial
  Synthetic oligonucleotide
agtatcagtttagtgaattttgatattgctaagtcaggtctctgtctctt

SEQ ID NO: 154039 - DNA, 50 bp, Artificial
  Synthetic oligonucleotide
gagtttaggttcagcggctcagaattatttgacggcggttatgacttaga

SEQ ID NO: 154040 - DNA, 48 bp, Artificial
  Synthetic oligonucleotide
gcaaaagaagtgggggtgtgtacccttatgggcacgcttcgcaggggg

SEQ ID NO: 154041 - DNA, 57 bp, Artificial
  Synthetic oligonucleotide
cagcgtaaatataccctcttttatatgatccaaaatcatattcttcatgacgtccat

SEQ ID NO: 154042 - DNA, 57 bp, Artificial
  Synthetic oligonucleotide
tactcgcctagcttacgcactccatcaggtcgccctaaaggactccctcaggtcggg

SEQ ID NO: 154043 - DNA, 57 bp, Artificial
  Synthetic oligonucleotide
gcacacactctgcggacttcgtcaaagtagctgcctcaggcacgcttcgcgaaaacg

SEQ ID NO: 154044 - DNA, 56 bp, Artificial
  Synthetic oligonucleotide
ccatcaggtcgccctaaaggactccctcaggtcgggagcattccgcacggtaacgc

SEQ ID NO: 154045 - DNA, 56 bp, Artificial
  Synthetic oligonucleotide
gcagtctactgttataataaggcttactcctgaattagcatattcctctataaccg

SEQ ID NO: 154046 - DNA, 56 bp, Artificial
  Synthetic oligonucleotide
cccatttcattattaactctaggaatataccaatggggagcaaaacttgcagattc

SEQ ID NO: 154047 - DNA, 56 bp, Artificial
  Synthetic oligonucleotide
gagcctattagagtatcaagatttccgcttataagatttccgatatctccattctg

SEQ ID NO: 154048 - DNA, 53 bp, Artificial
  Synthetic oligonucleotide
ccatataataggacgacctccaatttctactaggggtttaggtcttactattg

SEQ ID NO: 154049 - DNA, 55 bp, Artificial
  Synthetic oligonucleotide
gcgtaatgattctagcgttaagcccagtatacgctcaggatgaaactacagcaga

SEQ ID NO: 154050 - DNA, 55 bp, Artificial
  Synthetic oligonucleotide
gcgtaggtgagcataacaataaataagcgagccgaagcagatgacaactttagtt

SEQ ID NO: 154051 - DNA, 55 bp, Artificial
  Synthetic oligonucleotide
gcgtgcctgtagagtagcaccccacttcttttaccgacgctctgcgtgcctgcgg

SEQ ID NO: 154052 - DNA, 55 bp, Artificial
  Synthetic oligonucleotide
gcctgcaggtgatactgtacctatgaatgtaatagaaccagtctctccgttattt

SEQ ID NO: 154053 - DNA, 53 bp, Artificial
  Synthetic oligonucleotide
gccgccggggtaggaaaccttacaatgcttacgttttgcaagtaatggtccaa

SEQ ID NO: 154054 - DNA, 55 bp, Artificial
  Synthetic oligonucleotide
gccatagctaacggtcgcaggcggacagacgtcataaaagaactctacacgtacg

SEQ ID NO: 154055 - DNA, 55 bp, Artificial
  Synthetic oligonucleotide
gccacataactattaagtctgtagaacaagtaccgccagatacaggagccaaaga

SEQ ID NO: 154056 - DNA, 55 bp, Artificial
  Synthetic oligonucleotide
gccaattgattaacctgatttgtagtctgccaattgtaagcaccattagctccag

SEQ ID NO: 154057 - DNA, 55 bp, Artificial
  Synthetic oligonucleotide
gccaaaggcacaggacccggtatatccgttcttggattgaatctcgctcttgata

SEQ ID NO: 154058 - DNA, 55 bp, Artificial
  Synthetic oligonucleotide
gcacagactaagtgccttgccgcagtcacgcagagcgtcggcaaaagaactgggg

SEQ ID NO: 154059 - DNA, 59 bp, Artificial
  Synthetic oligonucleotide
ttgacatcacctataataagctttctttcccagtctaaataacaagcactggcaatacc

SEQ ID NO: 154060 - DNA, 55 bp, Artificial
  Synthetic oligonucleotide
gatatgctttgtaatcttcgtttgtaccgtaacatatccctaaagctccgaatgt

SEQ ID NO: 154061 - DNA, 55 bp, Artificial
  Synthetic oligonucleotide
gaatagcatgaaggacccggtaattttccgcttatagcacaaacctgcatactta

SEQ ID NO: 154062 - DNA, 55 bp, Artificial
  Synthetic oligonucleotide
cttacagtggacttcgtcaggtactcctttcagtcgcagtacttccttcggtcgc

SEQ ID NO: 154063 - DNA, 55 bp, Artificial
  Synthetic oligonucleotide
ctgctggaagaggacaaggatatcctattattggcagatatgaagaatggacgcc

SEQ ID NO: 154064 - DNA, 55 bp, Artificial
  Synthetic oligonucleotide
tttgtaaccagacttatctgtaaatccgtgaacctgtcctcttcttgaagctaag

SEQ ID NO: 154065 - DNA, 55 bp, Artificial
  Synthetic oligonucleotide
ttgcggctgtaggaagtcctgtgggttgacacaaagaaccttatatcctcgataa

SEQ ID NO: 154066 - DNA, 55 bp, Artificial
  Synthetic oligonucleotide
ttcttatagcaaaaccgctctgtccgctattgttacatactaaagctccgctaaa

SEQ ID NO: 154067 - DNA, 55 bp, Artificial
  Synthetic oligonucleotide
ttactcagcaaaagaccgcattcattaagcctttctaccattttagagagcaagc

SEQ ID NO: 154068 - DNA, 55 bp, Artificial
  Synthetic oligonucleotide
ttaaggcggcaccttgcttcgcaatgtggacttcgtcgcgaacatagcaacaacc

SEQ ID NO: 154069 - DNA, 54 bp, Artificial
  Synthetic oligonucleotide
tggacttagaaccggggatcttataacaggagaggttagacctcctaaagataa

SEQ ID NO: 154070 - DNA, 56 bp, Artificial
  Synthetic oligonucleotide
gtttgttatttaaataccaatctatagttatatcaatggcggtattgaaatcgtat

SEQ ID NO: 154071 - DNA, 55 bp, Artificial
  Synthetic oligonucleotide
tcgcagtgtatgggcggtctgtaaagaacttggggtgcggcttagtatggctagt

SEQ ID NO: 154072 - DNA, 55 bp, Artificial
  Synthetic oligonucleotide
tattcggtgttactatgcttttatggaatggagatgaaagagcacctttaagcgg

SEQ ID NO: 154073 - DNA, 55 bp, Artificial
  Synthetic oligonucleotide
tatctcagaatacggacgatatagtttctaaaactcaggatatgggcggtcagat

SEQ ID NO: 154074 - DNA, 55 bp, Artificial
  Synthetic oligonucleotide
tagtattcgcctatacccttacttcgttgcgggtacacttcgtgcgggcattccg

SEQ ID NO: 154075 - DNA, 55 bp, Artificial
  Synthetic oligonucleotide
tagcagctattagtgtagtatcacgttttgctcagtatattcctacttgtttggc

SEQ ID NO: 154076 - DNA, 55 bp, Artificial
  Synthetic oligonucleotide
tacttcagtgctttatgcggcggacatactgacagtgctgaaaatgtattcggtg

SEQ ID NO: 154077 - DNA, 55 bp, Artificial
  Synthetic oligonucleotide
gtgcggttcactactcgcctagctaacgcacttcctacggtcgccctaaaggcct

SEQ ID NO: 154078 - DNA, 55 bp, Artificial
  Synthetic oligonucleotide
gtcgatatatgtaagtataccactcgccgtcctacaacaccgcaataacaacgcc

SEQ ID NO: 154079 - DNA, 55 bp, Artificial
  Synthetic oligonucleotide
gtcccatacctatatcatgaccaccgtcaccagtaaccattatgaatgtaggatc

SEQ ID NO: 154080 - DNA, 55 bp, Artificial
  Synthetic oligonucleotide
gtcaggtactcctttcagtcgcagtacttccttcggtcgcaaaagaagtggggtg

SEQ ID NO: 154081 - DNA, 55 bp, Artificial
  Synthetic oligonucleotide
tccccacacccccagttcttttattgatataaggcgaagcccgcctcacgaagtg

SEQ ID NO: 154082 - DNA, 55 bp, Artificial
  Synthetic oligonucleotide
gtagatgagtcccggtgggctccgcgctcttcaaaagcgttggacgttatagcaa

SEQ ID NO: 154083 - DNA, 55 bp, Artificial
  Synthetic oligonucleotide
gtacccataaggtaccacacttcttttaccgacgctctgcgtgccgtaggcaagg

SEQ ID NO: 154084 - DNA, 55 bp, Artificial
  Synthetic oligonucleotide
ggattgataccgcctctatcctcttgcggcttagctgctccgcttaaagattggc

SEQ ID NO: 154085 - DNA, 55 bp, Artificial
  Synthetic oligonucleotide
ggatcaagtcctccgataggctgagcaccataaggaggtctgtcaaaataagtac

SEQ ID NO: 154086 - DNA, 55 bp, Artificial
  Synthetic oligonucleotide
ggacaaactctccgctaggcacatctgtagctatagtaccaatatgagtaccaac

SEQ ID NO: 154087 - DNA, 55 bp, Artificial
  Synthetic oligonucleotide
gctgctcactatttcatgcggacttccggatgttacaggcatcacgcttgaatta

SEQ ID NO: 154088 - DNA, 55 bp, Artificial
  Synthetic oligonucleotide
aagatcaagctctgccatactatatcaaataagcacgagtatggaagaagcctct

SEQ ID NO: 154089 - DNA, 55 bp, Artificial
  Synthetic oligonucleotide
aatagggactgaagcgtccgtttaaatctgcccctatataaagaccagcctgaag

SEQ ID NO: 154090 - DNA, 55 bp, Artificial
  Synthetic oligonucleotide
agcggagaggctaaagttacaatacttgctaaaggcggagaatatactgatgctg

SEQ ID NO: 154091 - DNA, 55 bp, Artificial
  Synthetic oligonucleotide
agcggagcagctaagccgcaagaggatagaggcggtatcaatcctcagcaggtag

SEQ ID NO: 154092 - DNA, 59 bp, Artificial
  Synthetic oligonucleotide
agtcacgcatagtggaaccatcaccaaatacaggtataggattattttcaagtatcagt

SEQ ID NO: 154093 - DNA, 55 bp, Artificial
  Synthetic oligonucleotide
atccgcgtttaagtatagatactgcagattttcttgcggcagactcgaaagctct

SEQ ID NO: 154094 - DNA, 55 bp, Artificial
  Synthetic oligonucleotide
atcgtacgcaaggaaggggcggagtaggtgtacaaggcggaaaatctcaaggcga

SEQ ID NO: 154095 - DNA, 55 bp, Artificial
  Synthetic oligonucleotide
atgccttctcttatatccccgtaaaccccagacattccggatcttatataatatc

SEQ ID NO: 154096 - DNA, 55 bp, Artificial
  Synthetic oligonucleotide
attgcctcacattatcaaacgccaactatacgcgaccgaaggaagtaccgtcagg

SEQ ID NO: 154097 - DNA, 55 bp, Artificial
  Synthetic oligonucleotide
caggcacgcagagcgtcggtaaaagaagtggggtgctaccctacgggcacgcttc

SEQ ID NO: 154098 - DNA, 55 bp, Artificial
  Synthetic oligonucleotide
catgtaaacgattttagtactaattttcagcgaagcgtatccgagcctgcagagg

SEQ ID NO: 154099 - DNA, 55 bp, Artificial
  Synthetic oligonucleotide
cccaatagtttacagtagttcttgaaactccaactattttcgccgcatctatagg

SEQ ID NO: 154100 - DNA, 55 bp, Artificial
  Synthetic oligonucleotide
cctactttcgtacagattcttggaatgtgtcctagcttagcagtaacaaatagtg

SEQ ID NO: 154101 - DNA, 55 bp, Artificial
  Synthetic oligonucleotide
cctatattaataataggagccatatcccctactctattgtcatctatcatgcctc

SEQ ID NO: 154102 - DNA, 55 bp, Artificial
  Synthetic oligonucleotide
cctcgacaggctcggatacgcttcacgaaaggctatatttgactaagtccacctt

SEQ ID NO: 154103 - DNA, 59 bp, Artificial
  Synthetic oligonucleotide
taaagcacatggacttacagtaccattagaatttatacatatagcataaaatggccaag

SEQ ID NO: 154104 - DNA, 55 bp, Artificial
  Synthetic oligonucleotide
ccttactacttcgcatttgggtaatggtcatactgaatatgttgttagtgttctg

SEQ ID NO: 154105 - DNA, 55 bp, Artificial
  Synthetic oligonucleotide
ctgaaggtatacctactaacgctgaagtagtattcttaggcagacctcctagact

SEQ ID NO: 154106 - DNA, 54 bp, Artificial
  Synthetic oligonucleotide
ctcccttcggtcgcaaaagaagtgggggtgtgtaccctaagggcacgcttcgca

SEQ ID NO: 154107 - DNA, 55 bp, Artificial
  Synthetic oligonucleotide
ctattctaggagctgctatattgcctcctactgtaatatctacatgcacaggtcc

SEQ ID NO: 154108 - DNA, 55 bp, Artificial
  Synthetic oligonucleotide
cgtatccgagtttattgaggatataggttatagttgtatagacattctgcacggc

SEQ ID NO: 154109 - DNA, 55 bp, Artificial
  Synthetic oligonucleotide
cggaagatggactaaagcttatgaccaaaacggagaccctataataactaatgga

SEQ ID NO: 154110 - DNA, 53 bp, Artificial
  Synthetic oligonucleotide
cgacctccaatttctactaggggtttaggtcttactattgtctcttcacctaa

SEQ ID NO: 154111 - DNA, 53 bp, Artificial
  Synthetic oligonucleotide
ctcgtaggcgggaatacccccgaccgtagggagtgcgtagctaggcgagtagt

SEQ ID NO: 154112 - DNA, 54 bp, Artificial
  Synthetic oligonucleotide
aatgcccccgaccgtagggagtgcgtagctaggcgagtagttgcaaaatgtgcg

SEQ ID NO: 154113 - DNA, 54 bp, Artificial
  Synthetic oligonucleotide
agaaggaccggctcttcctaacgaaataccgctagcaaaagatatcatactccc

SEQ ID NO: 154114 - DNA, 57 bp, Artificial
  Synthetic oligonucleotide
cgaagggtgccttgcctccggcacgcagagcgttggtcgccttaaagtagtgaataa

SEQ ID NO: 154115 - DNA, 54 bp, Artificial
  Synthetic oligonucleotide
tcatcaggccctgttgatggtattagtgttatggaaggtatacattgtgctgtt

SEQ ID NO: 154116 - DNA, 54 bp, Artificial
  Synthetic oligonucleotide
gaggtgctacagctcgtaggcgggaatacccccgaccgtagggagtgcgtagct

SEQ ID NO: 154117 - DNA, 54 bp, Artificial
  Synthetic oligonucleotide
tacacctaggaatccttatcagttttcagtgataccggttgagataatagggaa

SEQ ID NO: 154118 - DNA, 54 bp, Artificial
  Synthetic oligonucleotide
atggaaaggctggaggtttagtgcctacttctcatgagataatagataatgtga

SEQ ID NO: 154119 - DNA, 54 bp, Artificial
  Synthetic oligonucleotide
attgactcctccgtagctaaccataacatcaagcatagtcataggatcatgata

SEQ ID NO: 154120 - DNA, 54 bp, Artificial
  Synthetic oligonucleotide
caggcttattaagtcccaaaactctagcctctattgcccctgctgtaagtaaac

SEQ ID NO: 154121 - DNA, 54 bp, Artificial
  Synthetic oligonucleotide
gcccgcctcacgaagtgtgcctacggcaggcgagaaccatacaaagtacgccta

SEQ ID NO: 154122 - DNA, 54 bp, Artificial
  Synthetic oligonucleotide
ccgtaaggggttgcgttgccgtgcggaatgcccgtatggcgaatactcagtcgc

SEQ ID NO: 154123 - DNA, 54 bp, Artificial
  Synthetic oligonucleotide
ccctgcgaagcgtgcccgtagagtagcaccccacttcttttaccgacgctctgc

SEQ ID NO: 154124 - DNA, 54 bp, Artificial
  Synthetic oligonucleotide
ccagtagggtaaagctcgtaggctggaatgcccccgaccgtagggagtgcgtag

SEQ ID NO: 154125 - DNA, 57 bp, Artificial
  Synthetic oligonucleotide
atacccgcatttactaatccttcgctaatatctttagtcaataaagctccattagta

SEQ ID NO: 154126 - DNA, 53 bp, Artificial
  Synthetic oligonucleotide
gcagcaagttgtgtccaagttacagtgccgctagattcagtaccagttaaaac

SEQ ID NO: 154127 - DNA, 53 bp, Artificial
  Synthetic oligonucleotide
ttagaacacccatttggtacagatactttgggaagggacttacttgtacgctg

SEQ ID NO: 154128 - DNA, 53 bp, Artificial
  Synthetic oligonucleotide
acttctagtaggcatctcttgtctaggtatttcacctaattttgatcttgggg

SEQ ID NO: 154129 - DNA, 53 bp, Artificial
  Synthetic oligonucleotide
ccgccctctcttatcttaagttcagaagcataattgtccatatatgtgcgaaa

SEQ ID NO: 154130 - DNA, 53 bp, Artificial
  Synthetic oligonucleotide
gccacgaagtgtaccagtagggtaaagctcgtaggctggaatgcccccgaccg

SEQ ID NO: 154131 - DNA, 53 bp, Artificial
  Synthetic oligonucleotide
aggaagtactgcgactgaaaggagtacctgacgaagtccactgtaagtgtagg

SEQ ID NO: 154132 - DNA, 53 bp, Artificial
  Synthetic oligonucleotide
ccctgcgaagcgtgcccataagggtacacacccccacttcttttgccgacgct

SEQ ID NO: 154133 - DNA, 53 bp, Artificial
  Synthetic oligonucleotide
cgcacgtacattgtactatccgtaaggggttgcgttgccgtgcggaatgcccc

SEQ ID NO: 154134 - DNA, 53 bp, Artificial
  Synthetic oligonucleotide
gctttcataccccttagacaaaaccccgtattatgtaaacacagatagctatg

SEQ ID NO: 154135 - DNA, 52 bp, Artificial
  Synthetic oligonucleotide
ggtggttatgtatgcggagctagctttagtgaagactggcttagagtagaac

SEQ ID NO: 154136 - DNA, 60 bp, Artificial
  Synthetic oligonucleotide
gcaagagttctcacaagcttctgacggagtatcagtcgctcaggaagcgatactggggca

SEQ ID NO: 154137 - DNA, 60 bp, Artificial
  Synthetic oligonucleotide
catcccgtcgagcagagaacgcattccactgtcttcgttcgcatcgattgctatggcccg

SEQ ID NO: 154138 - DNA, 55 bp, Artificial
  Synthetic oligonucleotide
cgatagaaagccgctggaaagttatccgagaccctcgtagaccgcgatgaggagt

SEQ ID NO: 154139 - DNA, 55 bp, Artificial
  Synthetic oligonucleotide
cgatattggtctgcgcgtgacattacgggcgcatcctcgttagcgacgggagggc

SEQ ID NO: 154140 - DNA, 55 bp, Artificial
  Synthetic oligonucleotide
cgctgtcgatcatagctaggcaatgccagaacgattttagatctctcgagctcgt

SEQ ID NO: 154141 - DNA, 55 bp, Artificial
  Synthetic oligonucleotide
cgcgaaggttaggtgagcagcttacatagacaggcgcctcagcgcacgacctgct

SEQ ID NO: 154142 - DNA, 55 bp, Artificial
  Synthetic oligonucleotide
gcgcacgcacaccgcggctaccgtggcgatcctatcggccttccatcttacgatt

SEQ ID NO: 154143 - DNA, 55 bp, Artificial
  Synthetic oligonucleotide
gcgcccgattatgtaacgaccccggccgtagcgtaaaggaggacattatatgcgt

SEQ ID NO: 154144 - DNA, 55 bp, Artificial
  Synthetic oligonucleotide
cgccaagctccagaaataggggaattgatggcaacgtcttgacagcatccggaag

SEQ ID NO: 154145 - DNA, 55 bp, Artificial
  Synthetic oligonucleotide
gcgccgtgtagcaacaatcaattccgttgcgggaaaccggacgtcgtgtatttct

SEQ ID NO: 154146 - DNA, 50 bp, Artificial
  Synthetic oligonucleotide
gcgcgaggtaaggttccggtcaccttaaagggttcggtcaggtccgttac

SEQ ID NO: 154147 - DNA, 54 bp, Artificial
  Synthetic oligonucleotide
cgccaaggttggcgatcaaccaaggttatggggtcctaatcaccgacccagacg

SEQ ID NO: 154148 - DNA, 59 bp, Artificial
  Synthetic oligonucleotide
catcggcgcggaggtatagcggaaccgcacgagcgagacccagttgcgcgtaatgacgt

SEQ ID NO: 154149 - DNA, 55 bp, Artificial
  Synthetic oligonucleotide
gcgctgatcatcgtactgccattggacttgtgctgcaccgcacctaactcgaagc

SEQ ID NO: 154150 - DNA, 55 bp, Artificial
  Synthetic oligonucleotide
cgccctagaatagtttcagaccagactgttagctctcgaagcaactccctaatcg

SEQ ID NO: 154151 - DNA, 55 bp, Artificial
  Synthetic oligonucleotide
agaacatcgtatttcgcgtcagtcattcacgggccccgtttacggcgttttgcaa

SEQ ID NO: 154152 - DNA, 55 bp, Artificial
  Synthetic oligonucleotide
gctggccgctcagttcgttcgggcttgaggcgatcggatggcgagccacgtgtta

SEQ ID NO: 154153 - DNA, 55 bp, Artificial
  Synthetic oligonucleotide
cgccctccaattacgcgtggcttaatccagaggttctaagagcgacagttcgaca

SEQ ID NO: 154154 - DNA, 55 bp, Artificial
  Synthetic oligonucleotide
gcgttgcattctgttcattgagttcagaaagcgcgttacatgacatgaccgtggc

SEQ ID NO: 154155 - DNA, 55 bp, Artificial
  Synthetic oligonucleotide
agaggctcactatacgtgaataccttgacccgaaccgccctggcagggacgatac

SEQ ID NO: 154156 - DNA, 55 bp, Artificial
  Synthetic oligonucleotide
gcggcgctgagatgccaatggcacatgggtaacccatcaccaggacgctcagacc

SEQ ID NO: 154157 - DNA, 55 bp, Artificial
  Synthetic oligonucleotide
gcgggataatcaactatcaaggcagcttactccatctgaaaggcgtgctagctgg

SEQ ID NO: 154158 - DNA, 55 bp, Artificial
  Synthetic oligonucleotide
gcgttgcacgtggttggttccgcatagaagttctttctcgctccaaccgggacgc

SEQ ID NO: 154159 - DNA, 60 bp, Artificial
  Synthetic oligonucleotide
tcgggattggcgcaaccacgatttatgagacggtgcttgcccatgtttgacgcgcaccgc

SEQ ID NO: 154160 - DNA, 55 bp, Artificial
  Synthetic oligonucleotide
gcggggattcgcgggatggacaaatggttaacgaggccgggcaacaatcttgagg

SEQ ID NO: 154161 - DNA, 55 bp, Artificial
  Synthetic oligonucleotide
gctgccgttccagatgacaaaccggtaaagatcactgcggagctacccgcaagcg

SEQ ID NO: 154162 - DNA, 55 bp, Artificial
  Synthetic oligonucleotide
cgccgtgaatttggatcggacggatttgctatgaaggtcaccgtcgaacgcgcac

SEQ ID NO: 154163 - DNA, 55 bp, Artificial
  Synthetic oligonucleotide
gcggtccccgcctgaggtattcgcaatgtcaagacttgaagcttttcgcgttgcg

SEQ ID NO: 154164 - DNA, 55 bp, Artificial
  Synthetic oligonucleotide
cgcctatcatcaactcgaagtttgggcgctcgaccgttggcggatggccactggc

SEQ ID NO: 154165 - DNA, 55 bp, Artificial
  Synthetic oligonucleotide
gcggttgtcccgcgtggatagcgcaacacgaatgcaatacctggttggcggccac

SEQ ID NO: 154166 - DNA, 55 bp, Artificial
  Synthetic oligonucleotide
gcgtactgtcacgccatgaggttgaaccgtaatcgccctacttgtgcagaacgcg

SEQ ID NO: 154167 - DNA, 55 bp, Artificial
  Synthetic oligonucleotide
gcgtccgccgaggttttgattcggcctttacgacacgcggataaaccacgcacac

SEQ ID NO: 154168 - DNA, 55 bp, Artificial
  Synthetic oligonucleotide
agcctgcgacacgtcaacatgactctgtcgttggccttcctctctcccgtactca

SEQ ID NO: 154169 - DNA, 55 bp, Artificial
  Synthetic oligonucleotide
cgcaagtggttcccagtcagcttcggaaggtccgtcatgccgatttacggcttcg

SEQ ID NO: 154170 - DNA, 60 bp, Artificial
  Synthetic oligonucleotide
ctgtgatgatagtggcccctgccatccaggatgtatgccatccgaggggcgatctgaatc

SEQ ID NO: 154171 - DNA, 55 bp, Artificial
  Synthetic oligonucleotide
gatcgagtcatcggcgcactgggatactggatccctcaccttcgcgagggatgac

SEQ ID NO: 154172 - DNA, 55 bp, Artificial
  Synthetic oligonucleotide
gccggtcattttcctgtagcgggtgccccatgtcgtcagaggcgttctcatccag

SEQ ID NO: 154173 - DNA, 55 bp, Artificial
  Synthetic oligonucleotide
agccgatgtgcatgtcttcactctgccactcaatggtcgatcgacgaacgctttt

SEQ ID NO: 154174 - DNA, 55 bp, Artificial
  Synthetic oligonucleotide
cgcagatgcatccattctaggactgaaatcttaattgtcagcggccttcccagga

SEQ ID NO: 154175 - DNA, 55 bp, Artificial
  Synthetic oligonucleotide
cgcaggatagccggcccaacaaatgggcgttcgccgacttgaacgcatagggcga

SEQ ID NO: 154176 - DNA, 55 bp, Artificial
  Synthetic oligonucleotide
gcctcgcaatcgagtggcttccgttagcatggcagcattgtgtcatcgggctgcg

SEQ ID NO: 154177 - DNA, 55 bp, Artificial
  Synthetic oligonucleotide
cgcatatgtcgaaaaggctttctcaggagaacgaatgaagcgagaaaacggacgc

SEQ ID NO: 154178 - DNA, 55 bp, Artificial
  Synthetic oligonucleotide
gcgttgtatgtatatgcaacctcaaataaagatactcctcgctgattttgctcag

SEQ ID NO: 154179 - DNA, 55 bp, Artificial
  Synthetic oligonucleotide
gcctgcccgatttagagcgcctcagccgttaccatagcgtactaaacgatctcac

SEQ ID NO: 154180 - DNA, 55 bp, Artificial
  Synthetic oligonucleotide
gccttgccgtgacggtcttacgcaccgagttcatcgtgttttcggacgcggcgag

SEQ ID NO: 154181 - DNA, 56 bp, Artificial
  Synthetic oligonucleotide
ctgttgctgtttgacgcctcacggctttgatctccccgccggaattatgttcccgg

SEQ ID NO: 154182 - DNA, 54 bp, Artificial
  Synthetic oligonucleotide
agaagccctcgcgtagccatcgtccgacctttccgaagtagccgtcggttcctg

SEQ ID NO: 154183 - DNA, 55 bp, Artificial
  Synthetic oligonucleotide
gcgaatagttcgcaattattccgatctgagatgccgtcagccgagcctaactgcg

SEQ ID NO: 154184 - DNA, 55 bp, Artificial
  Synthetic oligonucleotide
gcgaatttgcgtgcgagaccagtcagcacgaatgagcccacccagtcgacgagcg

SEQ ID NO: 154185 - DNA, 55 bp, Artificial
  Synthetic oligonucleotide
gcgaccttgacgcttgggacgagaagaacaaagtgacgtgccctacgtcagcgcg

SEQ ID NO: 154186 - DNA, 55 bp, Artificial
  Synthetic oligonucleotide
gcgacgatagccagaccgccttgcagacacctatcgcaggagttcgatccataca

SEQ ID NO: 154187 - DNA, 55 bp, Artificial
  Synthetic oligonucleotide
agcagtcccatccgattcccctcctcgggagctcggctcgcactcgtaactagga

SEQ ID NO: 154188 - DNA, 55 bp, Artificial
  Synthetic oligonucleotide
gctggtcccgtcaacaacccgtatccggcttgggagtgcaccggtggatgccttt

SEQ ID NO: 154189 - DNA, 55 bp, Artificial
  Synthetic oligonucleotide
cgctcctataaagctgtgaacgactctactagtcacgccctaagcaccgctcacc

SEQ ID NO: 154190 - DNA, 55 bp, Artificial
  Synthetic oligonucleotide
cgcggttacgaacatgcttaggggcatcgtgttcactcccgttctcggcctggga

SEQ ID NO: 154191 - DNA, 55 bp, Artificial
  Synthetic oligonucleotide
gcgactcaggactcacgagcgttcgctgacatctcgtgcagtgggctccaatatt

SEQ ID NO: 154192 - DNA, 54 bp, Artificial
  Synthetic oligonucleotide
cccaaggacttctggtggtgggttccaggccggtcccgctatgagtaggaggcg

SEQ ID NO: 154193 - DNA, 55 bp, Artificial
  Synthetic oligonucleotide
cgcatcaccattccaacgtgctgtgtccaataccccggcagaccagacaggtgcg

SEQ ID NO: 154194 - DNA, 55 bp, Artificial
  Synthetic oligonucleotide
gcgagtgtgcgctggtaacaggttcgcgaaaggcgattcatgttcggtatcctcc

SEQ ID NO: 154195 - DNA, 52 bp, Artificial
  Synthetic oligonucleotide
ccccgggactaattcttggggacgcagtccatccttcgtgggtttggcacgg

SEQ ID NO: 154196 - DNA, 55 bp, Artificial
  Synthetic oligonucleotide
cccatgttttcgccggaatgcggtgtttaaggatttcccaaccatgtgacgccac

SEQ ID NO: 154197 - DNA, 55 bp, Artificial
  Synthetic oligonucleotide
cccagtgaaggcggtagaatgtcaaaatctacaaattcgaaatccgtgagtggct

SEQ ID NO: 154198 - DNA, 54 bp, Artificial
  Synthetic oligonucleotide
cccagcaagtccgggaaaacccgccagcttggaccaatgcaaaacctgttccga

SEQ ID NO: 154199 - DNA, 55 bp, Artificial
  Synthetic oligonucleotide
cccacggcagtgcatatgtggttcgctcccatgtctcggtctcgtaattgaatcg

SEQ ID NO: 154200 - DNA, 55 bp, Artificial
  Synthetic oligonucleotide
cccaaatcgccactacggcctagttccgcgctgttgactcaagctgttccggtag

SEQ ID NO: 154201 - DNA, 55 bp, Artificial
  Synthetic oligonucleotide
ccatttcattcgctaggcgttcgcgagctctcgaaagacgggacatgacagtccc

SEQ ID NO: 154202 - DNA, 55 bp, Artificial
  Synthetic oligonucleotide
ccatcacgactactgacttcgtaaagtcacataggcgaccgacctagtacccact

SEQ ID NO: 154203 - DNA, 60 bp, Artificial
  Synthetic oligonucleotide
cccctcattcacacgcatgagaacgtttgatttagcgcggcgtgttgattgatgtattcg

SEQ ID NO: 154204 - DNA, 55 bp, Artificial
  Synthetic oligonucleotide
ccatatgaaagaacgaccttgagaatcatcgggtcaatgcgagccgcgtgttctg

SEQ ID NO: 154205 - DNA, 55 bp, Artificial
  Synthetic oligonucleotide
ccagccaacgacggagagggttgggataaaccgatatcgtccattccatcacgag

SEQ ID NO: 154206 - DNA, 52 bp, Artificial
  Synthetic oligonucleotide
cctgagccaccttttgtcgaccgacgatcgtacctaaatacaggggaacccc

SEQ ID NO: 154207 - DNA, 55 bp, Artificial
  Synthetic oligonucleotide
ccacgatccctaaagacgctacaagagaccagacccggaggttgcatcacgcgag

SEQ ID NO: 154208 - DNA, 55 bp, Artificial
  Synthetic oligonucleotide
ccacgacagaagactggcttatagagacacgcgtttattgtccgtctgaggtcgc

SEQ ID NO: 154209 - DNA, 55 bp, Artificial
  Synthetic oligonucleotide
ccaacctagaagtcaggtgtgaacaatcaccaaatccgggcgatttcgatcgcaa

SEQ ID NO: 154210 - DNA, 55 bp, Artificial
  Synthetic oligonucleotide
ccaaaggggccgcaaggaaaagacatgcgggcatcggaatcgaaatataaggcga

SEQ ID NO: 154211 - DNA, 55 bp, Artificial
  Synthetic oligonucleotide
ccaaacgaaatctcgttgcgacctcagtcgtcaaaacggaataaatgcaagccgc

SEQ ID NO: 154212 - DNA, 55 bp, Artificial
  Synthetic oligonucleotide
ccaaaagccccgcgtcggaccacagatcgatggaccaatgaccgaagcatcgccg

SEQ ID NO: 154213 - DNA, 55 bp, Artificial
  Synthetic oligonucleotide
cattccgcacaatccctggcgtagatcttggaatgtttcagcgtgacagtgacgc

SEQ ID NO: 154214 - DNA, 60 bp, Artificial
  Synthetic oligonucleotide
aacgacgagcttgattggtatcggacacaatatggcgatacgcctcaaacataaaagcac

SEQ ID NO: 154215 - DNA, 55 bp, Artificial
  Synthetic oligonucleotide
cctgatttgaccgaaacctcaacctggttcacacagcccgtcaccatgacatcgc

SEQ ID NO: 154216 - DNA, 55 bp, Artificial
  Synthetic oligonucleotide
catctgccgcaagatttgctttcgtcctgaaagctggatcgcccctacaacgcat

SEQ ID NO: 154217 - DNA, 55 bp, Artificial
  Synthetic oligonucleotide
catcgttcacggaggctcgatcgatggacatagaaccaaaccaattcgtggcgag

SEQ ID NO: 154218 - DNA, 55 bp, Artificial
  Synthetic oligonucleotide
catcgggccccgagccgtattcgctgtccgattgcacgttccgcttcgtgtctct

SEQ ID NO: 154219 - DNA, 55 bp, Artificial
  Synthetic oligonucleotide
caggggagcgtcgttgatgtgatggacaacccaatgtccccagtttctgcgcccg

SEQ ID NO: 154220 - DNA, 55 bp, Artificial
  Synthetic oligonucleotide
caggacgctctcgtagcgccgttacgaattggctcaggttggaaaatgcgaggtc

SEQ ID NO: 154221 - DNA, 55 bp, Artificial
  Synthetic oligonucleotide
cagcttgacgcgttcctctccatgcacgtgaagcaaactggtgggctcactccca

SEQ ID NO: 154222 - DNA, 55 bp, Artificial
  Synthetic oligonucleotide
cctgcaagctcctgaatccggcgtatcctcccgtgagcttcgcacgccgttccat

SEQ ID NO: 154223 - DNA, 55 bp, Artificial
  Synthetic oligonucleotide
ccgtggttgacgactcgagcgttcatgacgacaccccttgcgctgcctcataaag

SEQ ID NO: 154224 - DNA, 55 bp, Artificial
  Synthetic oligonucleotide
ccgtgcaccgtgtcctgagacgcggcaatgatctgctaagtatgttcgctcagaa

SEQ ID NO: 154225 - DNA, 57 bp, Artificial
  Synthetic oligonucleotide
gcaaaggttcataagttctcctggtgaaaaaccaaacatgaagcacccatctattaa

SEQ ID NO: 154226 - DNA, 52 bp, Artificial
  Synthetic oligonucleotide
ccgtacgtacggttattatgaacgggagggattgtcaattagaccgtacgta

SEQ ID NO: 154227 - DNA, 55 bp, Artificial
  Synthetic oligonucleotide
ccggtcgcactccttatatcgttcgcgcgcattatcttacgcacatatgagcgga

SEQ ID NO: 154228 - DNA, 55 bp, Artificial
  Synthetic oligonucleotide
cctcgcactacaacttatctgtattgaatcggggcactttggcggacggggatta

SEQ ID NO: 154229 - DNA, 55 bp, Artificial
  Synthetic oligonucleotide
ccggagattgagagaacccgcttgggtcaacgcacctattctaaagtgcgtgagt

SEQ ID NO: 154230 - DNA, 55 bp, Artificial
  Synthetic oligonucleotide
ccgcttgaagtcgaaggaatcgtcgcggatttctgacaaaatcgtgtctagaccc

SEQ ID NO: 154231 - DNA, 55 bp, Artificial
  Synthetic oligonucleotide
ccgcgcttgcgacgatgcgagttcgaagagataaagcggtcccacgacagtccca

SEQ ID NO: 154232 - DNA, 55 bp, Artificial
  Synthetic oligonucleotide
gattcgaagataagtcatcctactcaagagcttttccggttctgatcgaatcacc

SEQ ID NO: 154233 - DNA, 55 bp, Artificial
  Synthetic oligonucleotide
ccgcatatgagagcggtttgacatgcctacaaatagccgctcatctttcgcccgc

SEQ ID NO: 154234 - DNA, 55 bp, Artificial
  Synthetic oligonucleotide
ccgcagacgatgcaaaacccagggaacgccaggaaaccttgaacgcgcgccgtct

SEQ ID NO: 154235 - DNA, 55 bp, Artificial
  Synthetic oligonucleotide
ccgatgcaccatagagatcgaaagcggatgttatcgttcgataggcttggtcgcg

SEQ ID NO: 154236 - DNA, 60 bp, Artificial
  Synthetic oligonucleotide
cgacttagtgagccaaacatcgtcacattgaagactgcgggtccggcacagtcgtgaggc

SEQ ID NO: 154237 - DNA, 55 bp, Artificial
  Synthetic oligonucleotide
ccgatcgacgcagattcgctcctggcgtgtgggtgccatgcagtccctacatgtc

SEQ ID NO: 154238 - DNA, 55 bp, Artificial
  Synthetic oligonucleotide
gattcgcgaagattaagaggtagtgttaacgcttgcgtaagccgatcgccgacag

SEQ ID NO: 154239 - DNA, 55 bp, Artificial
  Synthetic oligonucleotide
ccgacgcgcccagaactcgatctgacaagggaaaagacacgattccgcgatacaa

SEQ ID NO: 154240 - DNA, 55 bp, Artificial
  Synthetic oligonucleotide
ccgacgcattttcgtttagtctagcacccataacattttgactgacgggaggctg

SEQ ID NO: 154241 - DNA, 55 bp, Artificial
  Synthetic oligonucleotide
ccgacacctgcgttagtgccccgaatccgaagttcgcttcacgttcggcaccctc

SEQ ID NO: 154242 - DNA, 55 bp, Artificial
  Synthetic oligonucleotide
ccgaaacgattaagtctcgcagactttcgcggtttggcatgtgtcgaacaaaacc

SEQ ID NO: 154243 - DNA, 55 bp, Artificial
  Synthetic oligonucleotide
cccttggaattagccttttcaggactggtcatctaagtctcctgtggggcttgcc

SEQ ID NO: 154244 - DNA, 55 bp, Artificial
  Synthetic oligonucleotide
ccctcgggcggtggggctctgtcatggcgtactcacaactcgcaaagcactcaac

SEQ ID NO: 154245 - DNA, 55 bp, Artificial
  Synthetic oligonucleotide
gattgtggccgatgctagtgccctgacctggaattaaccttcgactaaggggtgg

SEQ ID NO: 154246 - DNA, 55 bp, Artificial
  Synthetic oligonucleotide
cccgttcgtcggctgaggcgtagctaatgtgcccggatttggctttgaacgtcac

SEQ ID NO: 154247 - DNA, 60 bp, Artificial
  Synthetic oligonucleotide
ctcactgagattgacgaagcgcgatgcctcgcgtgtggatcttgcacatgatcggtctcc

SEQ ID NO: 154248 - DNA, 60 bp, Artificial
  Synthetic oligonucleotide
gtctgagttggggcaactgggacgtccgcgtctacgctgccgaagcatacgtgtctttga

SEQ ID NO: 154249 - DNA, 55 bp, Artificial
  Synthetic oligonucleotide
cccgttaactcgtcaattccgactggcaggatcatacgccttaccagtggacgaa

SEQ ID NO: 154250 - DNA, 55 bp, Artificial
  Synthetic oligonucleotide
cccggggagccattggcgaaactcatgcctctttcatcctcgagtcgacgagttg

SEQ ID NO: 154251 - DNA, 55 bp, Artificial
  Synthetic oligonucleotide
gatttctcggatctcaataacagttccggtgccgagtgtacgtcttacgctcgac

SEQ ID NO: 154252 - DNA, 55 bp, Artificial
  Synthetic oligonucleotide
cccgaagcagagaatactgcgtgatcttcagaccagatgggataagcgcagcatc

SEQ ID NO: 154253 - DNA, 55 bp, Artificial
  Synthetic oligonucleotide
ccccttccggccttgcggtcgaatagctcagactttaggattgtgctggtgtgat

SEQ ID NO: 154254 - DNA, 55 bp, Artificial
  Synthetic oligonucleotide
atgtatttactgctgacggtctatactaccggttgtgtcgcgttcagccactcgg

SEQ ID NO: 154255 - DNA, 55 bp, Artificial
  Synthetic oligonucleotide
atggagccggaccgccgcaccaaaacggcatctgacggtcgtctacctgtacggg

SEQ ID NO: 154256 - DNA, 55 bp, Artificial
  Synthetic oligonucleotide
atggacgaccattcggacgacataagacgaccgttgtcaccgcgtattgaagtgt

SEQ ID NO: 154257 - DNA, 55 bp, Artificial
  Synthetic oligonucleotide
atgctcagttgatcagggtagttcaatacgtccatcggagaccctcggatgggac

SEQ ID NO: 154258 - DNA, 55 bp, Artificial
  Synthetic oligonucleotide
cgacggcaactcaggtggacacacaacgagagtacacgcacgttctttgagggga

SEQ ID NO: 154259 - DNA, 55 bp, Artificial
  Synthetic oligonucleotide
cgtgacgcgacaagtcagagctgggaccaggcgccattaaacgggtttcgccgtt

SEQ ID NO: 154260 - DNA, 55 bp, Artificial
  Synthetic oligonucleotide
atgaagacaagcccagaaagcctagctttagcaaagctgccgctgttgacttgcc

SEQ ID NO: 154261 - DNA, 55 bp, Artificial
  Synthetic oligonucleotide
cgacggctgtgcgaatcttggagcaggcatggattgagggtatcacattggaggg

SEQ ID NO: 154262 - DNA, 55 bp, Artificial
  Synthetic oligonucleotide
atcggccactttcgcccgagtgcgttggactccacgggaggagcggcaagtctga

SEQ ID NO: 154263 - DNA, 55 bp, Artificial
  Synthetic oligonucleotide
atcgcacgtgcttgggaattcgagcgttgcaacacccgacgagaatacggtgttc

SEQ ID NO: 154264 - DNA, 55 bp, Artificial
  Synthetic oligonucleotide
atccgcgtcgctctttcgatcgatgatccagagctagcccgccttcgggcagtgt

SEQ ID NO: 154265 - DNA, 54 bp, Artificial
  Synthetic oligonucleotide
atccgacgactggtgtcgcttgaccgtcccggccggtcggatttcctccgcgct

SEQ ID NO: 154266 - DNA, 55 bp, Artificial
  Synthetic oligonucleotide
atccagatgtacaccgcgttcaacatgtagaagcccattgctatcaggagcacgc

SEQ ID NO: 154267 - DNA, 55 bp, Artificial
  Synthetic oligonucleotide
atccaaaataccgggatgacattctgcgagctggcaccaactactcgagcctcgg

SEQ ID NO: 154268 - DNA, 55 bp, Artificial
  Synthetic oligonucleotide
atcactggtgcagtgcaacgcgtagaccaacgcgctgcggtaaaggcgccggtac

SEQ ID NO: 154269 - DNA, 55 bp, Artificial
  Synthetic oligonucleotide
cgacgtggcagcaactcgttgccttgcatcgacaatcccactccttacttaggga

SEQ ID NO: 154270 - DNA, 57 bp, Artificial
  Synthetic oligonucleotide
gtctgactgccgcgcacggaaaagggtacctgcacgtccgagttcggaaaggagata

SEQ ID NO: 154271 - DNA, 55 bp, Artificial
  Synthetic oligonucleotide
ataggcgggtttagcgatcgactgcgccaatcctttgattgaatcggattgagcg

SEQ ID NO: 154272 - DNA, 55 bp, Artificial
  Synthetic oligonucleotide
atactcgccaagaggcggatgcatcgtaactcaaccggtcccatattcatcagtg

SEQ ID NO: 154273 - DNA, 55 bp, Artificial
  Synthetic oligonucleotide
gcaccgatttgtcatggcaagatgaatgccctcgcatgatccgtcccgctgggcg

SEQ ID NO: 154274 - DNA, 55 bp, Artificial
  Synthetic oligonucleotide
cgactggaagtgctgtccgcactaaccaacgctgtcgtacttctcctactcacgg

SEQ ID NO: 154275 - DNA, 55 bp, Artificial
  Synthetic oligonucleotide
ataccgccgcgttctagcatagggcgaggggcgaaaagcaagcatcttgcgcgac

SEQ ID NO: 154276 - DNA, 55 bp, Artificial
  Synthetic oligonucleotide
gcaccttgctatcaactcggaacggctcccgccgtagtcaaccggtctgtgacct

SEQ ID NO: 154277 - DNA, 55 bp, Artificial
  Synthetic oligonucleotide
agttaattcctcctgaatatcgtttggccatcgtcaatagaacaaacagaccaat

SEQ ID NO: 154278 - DNA, 55 bp, Artificial
  Synthetic oligonucleotide
agtggccgtgagtgacagatcagccatcgcggattgacggcgaaccaacgtggcg

SEQ ID NO: 154279 - DNA, 55 bp, Artificial
  Synthetic oligonucleotide
gcacgaactatacactaggaactctgacgatgtcgcaacacaaatgcgttcgttt

SEQ ID NO: 154280 - DNA, 55 bp, Artificial
  Synthetic oligonucleotide
agtccgacgtatgtattcatggaagatctcttgggtgaaaacgatttgcagagcg

SEQ ID NO: 154281 - DNA, 54 bp, Artificial
  Synthetic oligonucleotide
ataactcgcgttcagttttcggaaagaggcggacccgattgtgtttcggcgcag

SEQ ID NO: 154282 - DNA, 55 bp, Artificial
  Synthetic oligonucleotide
cagcaatccactcacgagtgccttcaacatgtcattgtcgaattcgcctctcaga

SEQ ID NO: 154283 - DNA, 54 bp, Artificial
  Synthetic oligonucleotide
cagatgtcacggcctccgcccaaattaacggcaggacgtcccgagagggacggt

SEQ ID NO: 154284 - DNA, 55 bp, Artificial
  Synthetic oligonucleotide
cctgcggaaaagtcagtgtatccggtgaccgctacgagcgatctctttggcgccg

SEQ ID NO: 154285 - DNA, 55 bp, Artificial
  Synthetic oligonucleotide
cctgctggcgttcttcagactgactactaagcccggagctacatccgaacggacc

SEQ ID NO: 154286 - DNA, 55 bp, Artificial
  Synthetic oligonucleotide
cagacggtcggtgccacttgacgcacccttacggaccacagcgatacgcatccga

SEQ ID NO: 154287 - DNA, 55 bp, Artificial
  Synthetic oligonucleotide
cctggggtgagtgtgttgtgttggccgttcactcccggaagttgtgttccaggtc

SEQ ID NO: 154288 - DNA, 55 bp, Artificial
  Synthetic oligonucleotide
cagaacccgcaatttgttatcgcattccccgcatatcaccccggactggcgcgac

SEQ ID NO: 154289 - DNA, 55 bp, Artificial
  Synthetic oligonucleotide
cactgggatagcggcttagtcccactacggtgccgcgttgctccgcgtatcttgg

SEQ ID NO: 154290 - DNA, 55 bp, Artificial
  Synthetic oligonucleotide
gatctctccggtgtgtgtgcctgcgatgaggtcagcaattgtcgtaccagtttcg

SEQ ID NO: 154291 - DNA, 55 bp, Artificial
  Synthetic oligonucleotide
cactgacactcggcgtaccaaagggaagcgccgctgagtcactttcccgagaggc

SEQ ID NO: 154292 - DNA, 60 bp, Artificial
  Synthetic oligonucleotide
aggtgggatcgccgttcaagcctgaggttctcaagcattcgcttcgcggcgtgatcgcaa

SEQ ID NO: 154293 - DNA, 52 bp, Artificial
  Synthetic oligonucleotide
cgaaagacgggacgccgcgttagccgctcaagggttccgaacggtgcgttat

SEQ ID NO: 154294 - DNA, 55 bp, Artificial
  Synthetic oligonucleotide
cacgctacgactatctgtctcgaatcggggcactctcgccgacgccgattaacgc

SEQ ID NO: 154295 - DNA, 55 bp, Artificial
  Synthetic oligonucleotide
cacgatttgacgcagcccgttaacccgatcgtaatgtctggaccgcgctgtctaa

SEQ ID NO: 154296 - DNA, 55 bp, Artificial
  Synthetic oligonucleotide
cacgacgtcaatggctgagttccggaaagattcggatgatagcgcccctgagttc

SEQ ID NO: 154297 - DNA, 55 bp, Artificial
  Synthetic oligonucleotide
cacgacatctgcttgaggatcatacacaatctcgtaatgctccggaactaagggg

SEQ ID NO: 154298 - DNA, 55 bp, Artificial
  Synthetic oligonucleotide
cgaaagccgaacctttggtttggcggcccaccacgtaatcacagcaggccgggca

SEQ ID NO: 154299 - DNA, 55 bp, Artificial
  Synthetic oligonucleotide
cgaaagtcgatattgcggcgacgtgctatgcgtcgcgcataccttgcatcacgcc

SEQ ID NO: 154300 - DNA, 55 bp, Artificial
  Synthetic oligonucleotide
caatacgcggtgacaacggtcgtcttatgtcgtccgaatggtcgtccattatgag

SEQ ID NO: 154301 - DNA, 55 bp, Artificial
  Synthetic oligonucleotide
caagtcacctggaatccacaagtcacctggaatccacaagtcacctggaatccgc

SEQ ID NO: 154302 - DNA, 51 bp, Artificial
  Synthetic oligonucleotide
caaggaacgaccaatcggttcttgtcgggcggatagtttgggattttcggg

SEQ ID NO: 154303 - DNA, 59 bp, Artificial
  Synthetic oligonucleotide
gcacgtcaggaggtcggtggccgtaacatgcgttacaccacgacgtcctatgcggccga

SEQ ID NO: 154304 - DNA, 55 bp, Artificial
  Synthetic oligonucleotide
caagatcgccctcgttttgaagggatccggggcgcgtatttcaatgcctgtcgcc

SEQ ID NO: 154305 - DNA, 55 bp, Artificial
  Synthetic oligonucleotide
caacttatctgtattgaatcggggcactttggcggacggggattaatgcgctctt

SEQ ID NO: 154306 - DNA, 55 bp, Artificial
  Synthetic oligonucleotide
gcaacgttgcatctcgcgttggtatgcctaatctcctctactaagagccattcta

SEQ ID NO: 154307 - DNA, 55 bp, Artificial
  Synthetic oligonucleotide
cgaacggcctaaatccgattgtgaggcgattgcaacacgaaattaccgggttcgc

SEQ ID NO: 154308 - DNA, 55 bp, Artificial
  Synthetic oligonucleotide
cgaagcactcgatagcactctcggcttctggatggcggaactcgacaccggtcgg

SEQ ID NO: 154309 - DNA, 55 bp, Artificial
  Synthetic oligonucleotide
cgaccaaaattacgcattcgacgagagtccctatgcagtgactaattggcaggct

SEQ ID NO: 154310 - DNA, 55 bp, Artificial
  Synthetic oligonucleotide
cgaccgggacatcccgtcttaattcgactcaatttcgcctcaatcagcacgcaac

SEQ ID NO: 154311 - DNA, 55 bp, Artificial
  Synthetic oligonucleotide
tagtgctcggtcggctttggagcgatagggtgaggatatcagacaccgggcagcc

SEQ ID NO: 154312 - DNA, 52 bp, Artificial
  Synthetic oligonucleotide
tatacgccaaagccgttcggttgtcacccttttgtcgtgtcttttcgcgggt

SEQ ID NO: 154313 - DNA, 55 bp, Artificial
  Synthetic oligonucleotide
ctccgggccgttggctcgaattgtatcgcgtgcatttaccaagaagcgcgggacg

SEQ ID NO: 154314 - DNA, 60 bp, Artificial
  Synthetic oligonucleotide
cgactaattggattcattgcgttgtatgtatatgcaacctcaaataaagatactcctcgc

SEQ ID NO: 154315 - DNA, 53 bp, Artificial
  Synthetic oligonucleotide
ctccggtttccgcaccgttacatgaaggaaccgagcaagttcctggtcaaacc

SEQ ID NO: 154316 - DNA, 55 bp, Artificial
  Synthetic oligonucleotide
ctcgagaatcgtcacccggtttcctgagagtgccaagcgatacttttgcgaccga

SEQ ID NO: 154317 - DNA, 55 bp, Artificial
  Synthetic oligonucleotide
ctcgcaaggttcgcccacttgaaggacgtgtgggcgaagacgatcttactgccag

SEQ ID NO: 154318 - DNA, 55 bp, Artificial
  Synthetic oligonucleotide
ctcgcggctttcgagtatttgcgtgccatcactctctccgaggttgcccggagac

SEQ ID NO: 154319 - DNA, 55 bp, Artificial
  Synthetic oligonucleotide
tcacgcctcgcgccgataatgtggtgtgccagcgccattcacgtgtccgtgggtt

SEQ ID NO: 154320 - DNA, 55 bp, Artificial
  Synthetic oligonucleotide
ctcgggtcttaatgatcgagaacccgattcaacgtccgctctttcgcgcaaccac

SEQ ID NO: 154321 - DNA, 55 bp, Artificial
  Synthetic oligonucleotide
ctcgttaacctcatttcgctggacgcttagggagaatcgtggcctaccttagcgg

SEQ ID NO: 154322 - DNA, 55 bp, Artificial
  Synthetic oligonucleotide
tcaggcacctcgacaatggtgacaccttgctgtgacgaaaacgcgtggtggtttg

SEQ ID NO: 154323 - DNA, 55 bp, Artificial
  Synthetic oligonucleotide
tcatagggaagcttgcgaatgatagtataacgtgggccgcactgcgtgcaatttg

SEQ ID NO: 154324 - DNA, 55 bp, Artificial
  Synthetic oligonucleotide
aaggattattcttcgggcgatcatgcagagccattgcgcgtggacagtctcgtca

SEQ ID NO: 154325 - DNA, 55 bp, Artificial
  Synthetic oligonucleotide
gcaggacgtcccgagagggacggttgcgcaactgtggtttgaatcggttccaaac

SEQ ID NO: 154326 - DNA, 55 bp, Artificial
  Synthetic oligonucleotide
ctctaaacgcaaggggctatgggtcggcggcatggttcctctgggttatatcctc

SEQ ID NO: 154327 - DNA, 55 bp, Artificial
  Synthetic oligonucleotide
tccgactggaattggcgaacggttgcgagcgaagcctggctaggggacaagggtc

SEQ ID NO: 154328 - DNA, 55 bp, Artificial
  Synthetic oligonucleotide
tccgcccccgaaaatcggagagcgcggacaagaagactgcgtggctcgtcggctc

SEQ ID NO: 154329 - DNA, 55 bp, Artificial
  Synthetic oligonucleotide
tccgctcgaaaggttgaccgaactcgtgcaaacgaccggcaattgcctctggtgc

SEQ ID NO: 154330 - DNA, 55 bp, Artificial
  Synthetic oligonucleotide
tccggctagaccagatccaaatgcgccactcacatcacggtcggatagagcgaac

SEQ ID NO: 154331 - DNA, 55 bp, Artificial
  Synthetic oligonucleotide
ctctttgatctcgcgcctgtgcttgagccagtcagcgaaggtctcgatcaatcgt

SEQ ID NO: 154332 - DNA, 55 bp, Artificial
  Synthetic oligonucleotide
gacgtccgagcctgcgctagaattctcgacggcaatctgtcgaacgaatctttcg

SEQ ID NO: 154333 - DNA, 55 bp, Artificial
  Synthetic oligonucleotide
ctgcataaccatttagaaaacatctggcaatcggctgacaacaaacgaccgtacg

SEQ ID NO: 154334 - DNA, 55 bp, Artificial
  Synthetic oligonucleotide
ctgccagagtaacggcaagagcgaacagaacgaaggcggtactcaggacatagag

SEQ ID NO: 154335 - DNA, 55 bp, Artificial
  Synthetic oligonucleotide
tcgattacccgcatcaccattccaacgtgctgtgtccaataccccggcagaccag

SEQ ID NO: 154336 - DNA, 59 bp, Artificial
  Synthetic oligonucleotide
cgtttgattttgaatcgatttgcgagacgcatatctccgtactttgcaacctatcgtgg

SEQ ID NO: 154337 - DNA, 54 bp, Artificial
  Synthetic oligonucleotide
ctgcccacacgcttccggaggaaccaaccggagaataaacctatggcacttccc

SEQ ID NO: 154338 - DNA, 55 bp, Artificial
  Synthetic oligonucleotide
ctgccggctactcgcagtattccgtatccgccaaagctccctttccgggtgttgc

SEQ ID NO: 154339 - DNA, 55 bp, Artificial
  Synthetic oligonucleotide
tcgcggccgtttcgaggtattggagatcgtttgcgctcgatgcgtcagtcccgtc

SEQ ID NO: 154340 - DNA, 55 bp, Artificial
  Synthetic oligonucleotide
gagcaagccctgcggcgttttgcggcttcgactcatggtttcgagaggggaactg

SEQ ID NO: 154341 - DNA, 55 bp, Artificial
  Synthetic oligonucleotide
gtgctaaccgactcttgcgactcacccttcattctgaggggcgagcgtgctcagc

SEQ ID NO: 154342 - DNA, 55 bp, Artificial
  Synthetic oligonucleotide
gtgttccggcgaacttcccatcagaggacgcgcaatggacaagacgacgcacgac

SEQ ID NO: 154343 - DNA, 55 bp, Artificial
  Synthetic oligonucleotide
cgtgcgctataggctgcggggagaggcgcatccatctctcgaagcgtgatccgaa

SEQ ID NO: 154344 - DNA, 55 bp, Artificial
  Synthetic oligonucleotide
gttccctcaacttaatccgcagggcgccatcactcggtcgcgttgaagcgtagcg

SEQ ID NO: 154345 - DNA, 55 bp, Artificial
  Synthetic oligonucleotide
cgtgtctccacacgactaaactctccaaccggcagcgggtttcaatcgagtggcg

SEQ ID NO: 154346 - DNA, 55 bp, Artificial
  Synthetic oligonucleotide
cgtgtttgaactgcatagtttcctcgcgctatcggttcgcggttattccgcgctg

SEQ ID NO: 154347 - DNA, 55 bp, Artificial
  Synthetic oligonucleotide
gtttggaccgaggttccgaaggcattcgacagggcgggtataatcggcgccacca

SEQ ID NO: 154348 - DNA, 55 bp, Artificial
  Synthetic oligonucleotide
gttcgtgagattgccccgctatgggctgagatacaaaacgactgggacgttcgaa

SEQ ID NO: 154349 - DNA, 52 bp, Artificial
  Synthetic oligonucleotide
gttgaccggttaggttaagaccgtaatcgcgttgaccccatcggcccgcttg

SEQ ID NO: 154350 - DNA, 55 bp, Artificial
  Synthetic oligonucleotide
gttgatgatgtccgactccgcaagcacccaacctaaccgtagccccggtccggca

SEQ ID NO: 154351 - DNA, 55 bp, Artificial
  Synthetic oligonucleotide
gagatggcacaacatacaaggtcgatgcagccaattaccgacaagtaggtcagct

SEQ ID NO: 154352 - DNA, 55 bp, Artificial
  Synthetic oligonucleotide
cgttagagcggattggataacgattgggcctcggagcagcggcatgggcctcaca

SEQ ID NO: 154353 - DNA, 55 bp, Artificial
  Synthetic oligonucleotide
gttgtgaaggcgcaggcaagagggccgcttgtgtttatagaccgatcggtatagt

SEQ ID NO: 154354 - DNA, 55 bp, Artificial
  Synthetic oligonucleotide
ctaaccgaacgcgaagctgggaaacggcgatagctcggaccaagccccgcatcac

SEQ ID NO: 154355 - DNA, 54 bp, Artificial
  Synthetic oligonucleotide
taaagaccgacaagtcaggggccgtttcccaccttacctgctcttcagggcagg

SEQ ID NO: 154356 - DNA, 55 bp, Artificial
  Synthetic oligonucleotide
ctacaatagtccacaagccgctcgggttgcagccacttacttcacactggtgcga

SEQ ID NO: 154357 - DNA, 55 bp, Artificial
  Synthetic oligonucleotide
aattcattcaggagaattcgttgcacgcgacagtagacgtgtagcggcaggcttc

SEQ ID NO: 154358 - DNA, 60 bp, Artificial
  Synthetic oligonucleotide
attgatgtcggaccacctcgatccattttcatccggatactcgaaagcgactcgcgccat

SEQ ID NO: 154359 - DNA, 60 bp, Artificial
  Synthetic oligonucleotide
gcaccaggtgaacgttgcttgtgcacgtcgactgacggatcatcgactgtcaacgttgca

SEQ ID NO: 154360 - DNA, 55 bp, Artificial
  Synthetic oligonucleotide
gagactctatattgcgctgactctcacgaccacattcatggcagtcgaggtcgta

SEQ ID NO: 154361 - DNA, 55 bp, Artificial
  Synthetic oligonucleotide
aatggaaagagaccgttctcagcgccccgctcaaaggctggacgcgtttccccgc

SEQ ID NO: 154362 - DNA, 55 bp, Artificial
  Synthetic oligonucleotide
taccggtaactgcatggcggtctctcgggtgctgtcaccgttcgtgaagcgggta

SEQ ID NO: 154363 - DNA, 55 bp, Artificial
  Synthetic oligonucleotide
tacgacttcgaccgaaccgcgctcaccttcgcacgctgccgagcacagtcagcta

SEQ ID NO: 154364 - DNA, 55 bp, Artificial
  Synthetic oligonucleotide
tacgtgaccgccactagggagcgatggacgcgtgcctcgggacaagcccttattc

SEQ ID NO: 154365 - DNA, 55 bp, Artificial
  Synthetic oligonucleotide
ctcacgttggcgagagcgtgcgacacctaatttatgctcggaactccgctaggag

SEQ ID NO: 154366 - DNA, 55 bp, Artificial
  Synthetic oligonucleotide
aatctggcgccctgacgccgaaaacatgatcacagacatgctcgaaacctttggg

SEQ ID NO: 154367 - DNA, 55 bp, Artificial
  Synthetic oligonucleotide
tagcatggaggcgggatcacccgatgcgcgctatgccattctcgagcaacggagc

SEQ ID NO: 154368 - DNA, 55 bp, Artificial
  Synthetic oligonucleotide
taggctttccagctccgagcgtcgctcttgaactcgtgcaattgtcgctaccccc

SEQ ID NO: 154369 - DNA, 55 bp, Artificial
  Synthetic oligonucleotide
aatagtccgagccccaaacccgcactcccaggcattcatatcctgaacggctatt

SEQ ID NO: 154370 - DNA, 60 bp, Artificial
  Synthetic oligonucleotide
ctagaggcatgcaattgtttgcgatccgattggcaatgctgggtaacaggtgcggccacc

SEQ ID NO: 154371 - DNA, 55 bp, Artificial
  Synthetic oligonucleotide
aatagcggccggcatttgctgggatctcactcacttaatcggtccgcgctggaag

SEQ ID NO: 154372 - DNA, 55 bp, Artificial
  Synthetic oligonucleotide
tgcgagacgcatatctccgtactttgcaacctatcgtgggtacgccagagtcgct

SEQ ID NO: 154373 - DNA, 55 bp, Artificial
  Synthetic oligonucleotide
ctttctgtggcaattgccggcgcaacggtcgcggccttaggcattgcttttgccg

SEQ ID NO: 154374 - DNA, 55 bp, Artificial
  Synthetic oligonucleotide
tggagcggttccgaacgcaatggagccttctgaatgtccgatctcgataccagcg

SEQ ID NO: 154375 - DNA, 55 bp, Artificial
  Synthetic oligonucleotide
gaaaatcggggcaaactggttgttcaagtgtccgtcctctctagcagaaggccgg

SEQ ID NO: 154376 - DNA, 55 bp, Artificial
  Synthetic oligonucleotide
tggcgagcggtactaggatcgaccttcattccgcaaacagggtctactaccgtac

SEQ ID NO: 154377 - DNA, 55 bp, Artificial
  Synthetic oligonucleotide
gaaaccctcggacttgatcgcgagtaagcgttgcgtgagcgtatcgatgtcagtc

SEQ ID NO: 154378 - DNA, 55 bp, Artificial
  Synthetic oligonucleotide
tgggacatgtgcaagagcgccggcccagcgaagcttatctcctcgacgtgtcaca

SEQ ID NO: 154379 - DNA, 55 bp, Artificial
  Synthetic oligonucleotide
tggtccgctccacgcccctgcactttgtgtcgttgacggaggaagtgccgcgttc

SEQ ID NO: 154380 - DNA, 55 bp, Artificial
  Synthetic oligonucleotide
tgtaagacaaacggctcggaatgatggcgcgtctctgacggttcgaggctgttgg

SEQ ID NO: 154381 - DNA, 57 bp, Artificial
  Synthetic oligonucleotide
atctgcgtggctatttcgtcgaaggggcagaaaccccgttcgggagcctgctgaatc

SEQ ID NO: 154382 - DNA, 55 bp, Artificial
  Synthetic oligonucleotide
gaactgaggcatgcttctaaggtattgccttgggtcaggccagctccaacgcatc

SEQ ID NO: 154383 - DNA, 55 bp, Artificial
  Synthetic oligonucleotide
tgtcaggcgcagcggtgttgtggtccgaatggctagcgaggcgcaatccgaggtc

SEQ ID NO: 154384 - DNA, 55 bp, Artificial
  Synthetic oligonucleotide
tgttatagacacgcaacgcatgaagggcgcttgggtccgaccgaactgtccggat

SEQ ID NO: 154385 - DNA, 55 bp, Artificial
  Synthetic oligonucleotide
tgttgatcgtggctcgcggagttgcgtcacgcagtgtgggctcaaaccgagtgtg

SEQ ID NO: 154386 - DNA, 55 bp, Artificial
  Synthetic oligonucleotide
ttaccagcccgagcggctactcccataaccggcgaccgctattgaaaggtggcgg

SEQ ID NO: 154387 - DNA, 55 bp, Artificial
  Synthetic oligonucleotide
ttacgaaagtggagccgacttgatagcagtagtagacgcgcataacgtctacgtc

SEQ ID NO: 154388 - DNA, 55 bp, Artificial
  Synthetic oligonucleotide
gaccgctccactgtatgcgattacttatgatcaagctgtgatgcccgatgatcgg

SEQ ID NO: 154389 - DNA, 55 bp, Artificial
  Synthetic oligonucleotide
ttatgatccgaggggctaacttcacggggcagtgcggatgccgcagggatagcgc

SEQ ID NO: 154390 - DNA, 55 bp, Artificial
  Synthetic oligonucleotide
aaagcgacagagacactgacctacctttggcctagccctcttcgcgcggtaagcg

SEQ ID NO: 154391 - DNA, 55 bp, Artificial
  Synthetic oligonucleotide
gaatccactgatcgggcagatacgttctcagtccgtagtagggtggcgatgtaat

SEQ ID NO: 154392 - DNA, 60 bp, Artificial
  Synthetic oligonucleotide
agctctcaaccgccgtacgcgctgtcctcacggcatggaattatcctggagcccaagccg

SEQ ID NO: 154393 - DNA, 55 bp, Artificial
  Synthetic oligonucleotide
ttcgaacagatcaatccgctgccgtcctttcgatccgatgcgtccccagcatcgc

SEQ ID NO: 154394 - DNA, 55 bp, Artificial
  Synthetic oligonucleotide
ttcgcccgcggtcggactgtccacgtctcacctaccggctataccgccgcaactt

SEQ ID NO: 154395 - DNA, 55 bp, Artificial
  Synthetic oligonucleotide
ttctaaagcctccgacaccccatcgtaggcctccaagggacccggacgagatgcc

SEQ ID NO: 154396 - DNA, 55 bp, Artificial
  Synthetic oligonucleotide
gaatcgcgtaaaaccgcgccggagaagtgtgtcataagtcacataactttgcagc

SEQ ID NO: 154397 - DNA, 55 bp, Artificial
  Synthetic oligonucleotide
gaatgcgacgcgagcttgctggaaaaccacgtagcccgcgattgggacgccttct

SEQ ID NO: 154398 - DNA, 53 bp, Artificial
  Synthetic oligonucleotide
aaacacttccacaatcagtttcgggtagtccttggcggtagataaatcccgcc

SEQ ID NO: 154399 - DNA, 55 bp, Artificial
  Synthetic oligonucleotide
tttggggaagtagtaatctgggaagatggtcgactgcgacacatgggtcgggtcg

SEQ ID NO: 154400 - DNA, 55 bp, Artificial
  Synthetic oligonucleotide
gacagcaagacgcttcaatttcggagaaccgacatgcctagcccgtacatcaacg

SEQ ID NO: 154401 - DNA, 55 bp, Artificial
  Synthetic oligonucleotide
ctggatccacgcggtgctttggatacctcttgttcttgctgtcaccctgtggccg

SEQ ID NO: 154402 - DNA, 55 bp, Artificial
  Synthetic oligonucleotide
tcggacacaatatggcgatacgcctcaaacataaaagcacccgcatcaccgcccg

SEQ ID NO: 154403 - DNA, 60 bp, Artificial
  Synthetic oligonucleotide
tacctgcatggctatgcactcaagtgaatgaagtaagatttcagtctgcgatcaccataa

SEQ ID NO: 154404 - DNA, 55 bp, Artificial
  Synthetic oligonucleotide
tcggctcgcatgctggaggcccactcttgtcggacaattctggttaaagacaggt

SEQ ID NO: 154405 - DNA, 55 bp, Artificial
  Synthetic oligonucleotide
aagattcgggttcctccccacttcatttagtaatagtggccgcgacatgcccaaa

SEQ ID NO: 154406 - DNA, 55 bp, Artificial
  Synthetic oligonucleotide
tcggcttgagcgaaccagagacaactggacttttcgtggagcggtccaaagaagc

SEQ ID NO: 154407 - DNA, 55 bp, Artificial
  Synthetic oligonucleotide
gacgggctgtgtgaaccaggttgaggtttcggtcaaatcaggctgtgatgaccgc

SEQ ID NO: 154408 - DNA, 55 bp, Artificial
  Synthetic oligonucleotide
ctgtctcatcggccgaactctctgtgatttgagccgcgggagcgccgaaatgcgc

SEQ ID NO: 154409 - DNA, 55 bp, Artificial
  Synthetic oligonucleotide
tcgtctgatcttcgcatgggtcggcctggatcgcatgagcctgcgggaggtatgc

SEQ ID NO: 154410 - DNA, 55 bp, Artificial
  Synthetic oligonucleotide
tcgtcttcggcacttacgtccgctggtggcacgcacggctttccgtctcgagatg

SEQ ID NO: 154411 - DNA, 55 bp, Artificial
  Synthetic oligonucleotide
ctgtgggtattcccgggcacctatctcccgcgcgtcgtcagcaaacgatttgcgg

SEQ ID NO: 154412 - DNA, 55 bp, Artificial
  Synthetic oligonucleotide
tctgactgcgaagaagtttggtccgatcagaaatgaaggaccgccatcgaccggt

SEQ ID NO: 154413 - DNA, 55 bp, Artificial
  Synthetic oligonucleotide
tgaccgcgaatggcgggttgagaacgaaacggcgtcaaagtgcagggatcggcac

SEQ ID NO: 154414 - DNA, 54 bp, Artificial
  Synthetic oligonucleotide
ctattaacgtcagctgtgaacgcttcattagaagaaaataggtaaacccgggaa

SEQ ID NO: 154415 - DNA, 55 bp, Artificial
  Synthetic oligonucleotide
cttcaaccttagctcgcgctttcctggttccatacggtaagattgcggcgcgaat

SEQ ID NO: 154416 - DNA, 55 bp, Artificial
  Synthetic oligonucleotide
cttcaactcggggtatgatgcgcttcgttcgccggatgcgatcggtgcgaggttg

SEQ ID NO: 154417 - DNA, 55 bp, Artificial
  Synthetic oligonucleotide
tgagcggggagcccgcggctggacctgtatcgcgttcggccgtcttagcggttgg

SEQ ID NO: 154418 - DNA, 55 bp, Artificial
  Synthetic oligonucleotide
cttcgcaaatgcagcaaacaatcgtccgactcgactgccagacaccccggcacgg

SEQ ID NO: 154419 - DNA, 55 bp, Artificial
  Synthetic oligonucleotide
cttcgcgatcttccgagctcccacgccgatccgtgaacctaggcatggaaaggcg

SEQ ID NO: 154420 - DNA, 55 bp, Artificial
  Synthetic oligonucleotide
tgatgccgtcagagggatgagactgattcgctgatgaccgagcccaatcgcgtga

SEQ ID NO: 154421 - DNA, 55 bp, Artificial
  Synthetic oligonucleotide
tgatggcatcccgcgcactccgtcccgaaaagttcgcgatgcgtgtcctgattgc

SEQ ID NO: 154422 - DNA, 55 bp, Artificial
  Synthetic oligonucleotide
tgattccggtttacaacgttcgagaacaatggatcgcgcgctggaatcggataga

SEQ ID NO: 154423 - DNA, 55 bp, Artificial
  Synthetic oligonucleotide
tgcaacatccggcgttctggagggcatgtgcgttcctagtgatacactctcccgc

SEQ ID NO: 154424 - DNA, 55 bp, Artificial
  Synthetic oligonucleotide
aacgcgagccactccgagaatccaacgcgcggcattcgaggaccccaattcgttg

SEQ ID NO: 154425 - DNA, 60 bp, Artificial
  Synthetic oligonucleotide
tagagcccggagctgcaaccgcatgacggaaagcacacagcgactgctacgacgatccat

SEQ ID NO: 154426 - DNA, 55 bp, Artificial
  Synthetic oligonucleotide
cttctttccagcgctcgtttccgcgagtccaaaatagactaggcgtttctttgcg

SEQ ID NO: 154427 - DNA, 55 bp, Artificial
  Synthetic oligonucleotide
gacgcttttctgagtgggcgttacagttcgattcacgtcgagagcggtttagtcg

SEQ ID NO: 154428 - DNA, 55 bp, Artificial
  Synthetic oligonucleotide
tgcatcagcgtccctcgacgccccttacaccgacgcagggccgcacaatattcag

SEQ ID NO: 154429 - DNA, 55 bp, Artificial
  Synthetic oligonucleotide
ctttctcgttgcagagataacgcatgaagtgcctcgcggttcgaagcgccgcggg

SEQ ID NO: 154430 - DNA, 55 bp, Artificial
  Synthetic oligonucleotide
tgcctcgttcatttcgcgcacgcgatgcgacgggagttacccgcgtcgagcaatc

SEQ ID NO: 154431 - DNA, 55 bp, Artificial
  Synthetic oligonucleotide
aaccttgatatcgtagccttcatacggattttgagggtcgggaatgagcgtgggg

SEQ ID NO: 154432 - DNA, 55 bp, Artificial
  Synthetic oligonucleotide
cggcaaatcttaaccgactattaaccataggggcggcaaattctgcctaccagag

SEQ ID NO: 154433 - DNA, 55 bp, Artificial
  Synthetic oligonucleotide
ggctacagcaagtcgcaatcacaagcgggtaggacgtccttctcatgagcgacag

SEQ ID NO: 154434 - DNA, 55 bp, Artificial
  Synthetic oligonucleotide
ggctccgaagttcgatggcggaattatcacccggctcgattgtgtcgtgttcggc

SEQ ID NO: 154435 - DNA, 55 bp, Artificial
  Synthetic oligonucleotide
ggctgctttgttctcgattgcaccccaggtgtcggattgacacaacctcaagggg

SEQ ID NO: 154436 - DNA, 59 bp, Artificial
  Synthetic oligonucleotide
atggatgcgggaccgtatttccggccactcgaggatttcgcatcggacgagtcggagca

SEQ ID NO: 154437 - DNA, 55 bp, Artificial
  Synthetic oligonucleotide
cggccttcaagacgcagcgtgctccgactgatatttgatttgaacgactatcatc

SEQ ID NO: 154438 - DNA, 55 bp, Artificial
  Synthetic oligonucleotide
cggcgcgctctggcttattcctactgcctactccaggggttccgtagtaaatcga

SEQ ID NO: 154439 - DNA, 55 bp, Artificial
  Synthetic oligonucleotide
gggcaaagcatgaagaagaaactagatcggaagcgcaataacgtgacgaacgttc

SEQ ID NO: 154440 - DNA, 55 bp, Artificial
  Synthetic oligonucleotide
gggcctgttgcttgtggggcgagatgttagggctaatgcgtagcacactggtagg

SEQ ID NO: 154441 - DNA, 55 bp, Artificial
  Synthetic oligonucleotide
cggcgcgtgatgttttccgagatccgacgctcacttctcggtatcatgctgtagt

SEQ ID NO: 154442 - DNA, 55 bp, Artificial
  Synthetic oligonucleotide
gggcggcagtaggatacgggctctatgatattgcggcaattctaagtgtcgcgac

SEQ ID NO: 154443 - DNA, 55 bp, Artificial
  Synthetic oligonucleotide
gggctcgagatcctgaacgcaagcgacaaccgactaactagcctgccggacgctc

SEQ ID NO: 154444 - DNA, 55 bp, Artificial
  Synthetic oligonucleotide
cggctcgcaatgctcaagtctgcccaagagaagtctgttcacaacaagcctgctc

SEQ ID NO: 154445 - DNA, 55 bp, Artificial
  Synthetic oligonucleotide
cgggacatcgcggatgttccgctttcgtgccgctcttcagtggcaatcgcgcaac

SEQ ID NO: 154446 - DNA, 55 bp, Artificial
  Synthetic oligonucleotide
cgggacgatgaatgacgctcttcttttggaagtcgctcatctcggttagtcgatc

SEQ ID NO: 154447 - DNA, 53 bp, Artificial
  Synthetic oligonucleotide
ccgtttggaaaggtgaccaacagacggtcggtgccacttgacgcacccttacg

SEQ ID NO: 154448 - DNA, 55 bp, Artificial
  Synthetic oligonucleotide
ggggctgtgatccttgaaatcgacccttcgcttattgatccgtcacccctgtccg

SEQ ID NO: 154449 - DNA, 55 bp, Artificial
  Synthetic oligonucleotide
ggggtcctcgaatgccgcgcgttggattctcggagtggctcgcgttaacgaaggt

SEQ ID NO: 154450 - DNA, 55 bp, Artificial
  Synthetic oligonucleotide
acctgccggttgcacccctccgtggaatggtgaacgtatcgagcccttgatcggc

SEQ ID NO: 154451 - DNA, 55 bp, Artificial
  Synthetic oligonucleotide
gggtagtaatcttggcaaacccgcgctgctttgcgttacggccgtatcagacagc

SEQ ID NO: 154452 - DNA, 55 bp, Artificial
  Synthetic oligonucleotide
acctcgatcaaacatccagtgtaccgtgccggacaacgctaacccattgcgaacc

SEQ ID NO: 154453 - DNA, 55 bp, Artificial
  Synthetic oligonucleotide
gggtggtcctccgcatcgatatctaacgcagatccgtgagctctatccgctgtct

SEQ ID NO: 154454 - DNA, 55 bp, Artificial
  Synthetic oligonucleotide
ggtaaaatgctgtggccgcgtacaaccccgaaacggcatgcttttgaagctgggg

SEQ ID NO: 154455 - DNA, 55 bp, Artificial
  Synthetic oligonucleotide
gagctctccaacgctcttgatctttcgctccggtaacctccgattaaatcggtcg

SEQ ID NO: 154456 - DNA, 55 bp, Artificial
  Synthetic oligonucleotide
ggtcaatctgatacggaacggaaaatttacgcttcggtgtgcgctcggacgaatc

SEQ ID NO: 154457 - DNA, 55 bp, Artificial
  Synthetic oligonucleotide
ggtccgcattgcaccaactctttcagcttcctaccacctatgtagagcgcacacc

SEQ ID NO: 154458 - DNA, 60 bp, Artificial
  Synthetic oligonucleotide
tttgagcaaacaggcgcggacattcgtcatggcggtgataaggcctattacgcgacatcg

SEQ ID NO: 154459 - DNA, 55 bp, Artificial
  Synthetic oligonucleotide
cggtgccgatgtttcggagttctcaaaggtccgttccaatatcgcggagagcaag

SEQ ID NO: 154460 - DNA, 55 bp, Artificial
  Synthetic oligonucleotide
ggtctcaagagaacgggctcgagagatctaaaatcgttctggcattgcctagcta

SEQ ID NO: 154461 - DNA, 55 bp, Artificial
  Synthetic oligonucleotide
ggtctcgttgggacgagcttttccatcggacaacatgcgagaatgctccgttcgg

SEQ ID NO: 154462 - DNA, 55 bp, Artificial
  Synthetic oligonucleotide
ggtgacatgcggcgagcttcaacttcgggacgtcaaccctattggccgatcgtag

SEQ ID NO: 154463 - DNA, 55 bp, Artificial
  Synthetic oligonucleotide
ggacgcttgaacgtcattttattctactccgtaagtgttctggtgtgagcgcgaa

SEQ ID NO: 154464 - DNA, 55 bp, Artificial
  Synthetic oligonucleotide
ggacgttacaacggtaactgaattgaacggggtagacgctgatacgcacactgtc

SEQ ID NO: 154465 - DNA, 55 bp, Artificial
  Synthetic oligonucleotide
ggagacacgttgcagttgagccacactggacggtgctattcagtagttccgtgac

SEQ ID NO: 154466 - DNA, 55 bp, Artificial
  Synthetic oligonucleotide
gagttgggccgattggtgaatacgctcggttacgaggttgtcggcacgatatcgc

SEQ ID NO: 154467 - DNA, 55 bp, Artificial
  Synthetic oligonucleotide
ggaggcaagttgcgttagtccgccgatcaacagggccacgcctactgcgacggta

SEQ ID NO: 154468 - DNA, 55 bp, Artificial
  Synthetic oligonucleotide
ggattgcaccatccgcccgtttgctaccttgctgatacatccgggcgtcgcacga

SEQ ID NO: 154469 - DNA, 60 bp, Artificial
  Synthetic oligonucleotide
aaggatttcgtaacacagatctcgacggcaacaggatgtgtcgctttaaagcggcacatc

SEQ ID NO: 154470 - DNA, 56 bp, Artificial
  Synthetic oligonucleotide
ccgtagccatcgggtacgtggcgcaaaactacggacattctcacctcctggacgag

SEQ ID NO: 154471 - DNA, 55 bp, Artificial
  Synthetic oligonucleotide
cggacttaacggatagctgttaggttgaattttgacgcacctattgcgagttgcg

SEQ ID NO: 154472 - DNA, 55 bp, Artificial
  Synthetic oligonucleotide
ggcatcccgaggtcgccccgtaataggtggttcgcttaagtccctcgcgttcagc

SEQ ID NO: 154473 - DNA, 55 bp, Artificial
  Synthetic oligonucleotide
ggcccactccaatacggggtcaaacttcggcgccgattgacaactgctggcggac

SEQ ID NO: 154474 - DNA, 55 bp, Artificial
  Synthetic oligonucleotide
acggcgcaatattcgactttgaactgaggggaagccacctggacgaggcaggccg

SEQ ID NO: 154475 - DNA, 55 bp, Artificial
  Synthetic oligonucleotide
gagtgtggtccggagcgtcggattgcggaggttattagttcggctaaaagcgcga

SEQ ID NO: 154476 - DNA, 55 bp, Artificial
  Synthetic oligonucleotide
ggccggaagccactttagcgaactgtaatcgagatccatccggatattagctttc

SEQ ID NO: 154477 - DNA, 52 bp, Artificial
  Synthetic oligonucleotide
ggccggtctgacttctaaccgtgcccaggcgcccgaaatcccgggtcttttc

SEQ ID NO: 154478 - DNA, 55 bp, Artificial
  Synthetic oligonucleotide
cggagtaacccgctctggttcgctgtgcgtcatcccgtgtaccactcggtgtcct

SEQ ID NO: 154479 - DNA, 55 bp, Artificial
  Synthetic oligonucleotide
ggccgtaacatgcgttacaccacgacgtcctatgcggccgatcgccctgaaggtc

SEQ ID NO: 154480 - DNA, 55 bp, Artificial
  Synthetic oligonucleotide
gagtagtattgttctcactgcaccgacgaaaacatccgcgacagccgcagacccg

SEQ ID NO: 154481 - DNA, 57 bp, Artificial
  Synthetic oligonucleotide
ttgattttgcccgaatcgagtgcgtctacgccggtctcagaagccgtcgcgttaggg

SEQ ID NO: 154482 - DNA, 55 bp, Artificial
  Synthetic oligonucleotide
ggccgtttcaaatcatcacctccggggctggaggggtgaggttcatcagtgcgcg

SEQ ID NO: 154483 - DNA, 55 bp, Artificial
  Synthetic oligonucleotide
ggcctgctcgggactaattgagccgaatggtaggtcgatccgatcgtcttgagcg

SEQ ID NO: 154484 - DNA, 55 bp, Artificial
  Synthetic oligonucleotide
ggcgagcaacttggcctgcacgtctaacgtacggagatcgcattttctagccgtg

SEQ ID NO: 154485 - DNA, 55 bp, Artificial
  Synthetic oligonucleotide
gaggggcgtccacagccgaggctgcttagagtcttacttcaagctgcggcctgct

SEQ ID NO: 154486 - DNA, 55 bp, Artificial
  Synthetic oligonucleotide
ggcgcgcaaccaccttcttgcacatttcaggatagaaggcgctgtcttgccacgg

SEQ ID NO: 154487 - DNA, 55 bp, Artificial
  Synthetic oligonucleotide
ggcgctgtgatggtctccagagacggcgagacgatatttgcgacggccgaaggtt

SEQ ID NO: 154488 - DNA, 55 bp, Artificial
  Synthetic oligonucleotide
ggcggaaagaaggggcaatgaaccgccgatgcgagagctctgcaactgataagcg

SEQ ID NO: 154489 - DNA, 55 bp, Artificial
  Synthetic oligonucleotide
ggcggctgtctcttagtgaaatgaggcggttacgtgacgattcgcgctgtcatgg

SEQ ID NO: 154490 - DNA, 55 bp, Artificial
  Synthetic oligonucleotide
ggcgtacgcttgatcgtcggctgtcgcctagatctcacggacggcttttcgaccc

SEQ ID NO: 154491 - DNA, 55 bp, Artificial
  Synthetic oligonucleotide
ggcgttttgaagcccgttctacctgagtccccagtcggaaggtgccagcgggcaa

SEQ ID NO: 154492 - DNA, 58 bp, Artificial
  Synthetic oligonucleotide
gattcgcatgcgggtccgaggttccgtccctaggctacaggtcaacgataccgtgagc

SEQ ID NO: 154493 - DNA, 55 bp, Artificial
  Synthetic oligonucleotide
cggatggcacgaaggtaacatccgctaacgatagaacttgatgatagtcgtaccg

SEQ ID NO: 154494 - DNA, 55 bp, Artificial
  Synthetic oligonucleotide
gagcgtgattgtgaggtgtgccgcccgattggtagccggcgatagtttatgcgag

SEQ ID NO: 154495 - DNA, 55 bp, Artificial
  Synthetic oligonucleotide
cgtcctctatcgagacacggacattaccggaatatgacggcacaccgcctagcgc

SEQ ID NO: 154496 - DNA, 55 bp, Artificial
  Synthetic oligonucleotide
gtcaggaacggttcgagaccattcttgccgggtctagggaggtgatcggtcccag

SEQ ID NO: 154497 - DNA, 55 bp, Artificial
  Synthetic oligonucleotide
gtcatacatccggtgaccgccctcagtgcgctctgtcgctgctagcagtccagtg

SEQ ID NO: 154498 - DNA, 55 bp, Artificial
  Synthetic oligonucleotide
gtcatccagattgaggttcgcaagaaccagttggccattcatctaaggtctggcg

SEQ ID NO: 154499 - DNA, 55 bp, Artificial
  Synthetic oligonucleotide
cgtcgattcgcgaatatgagaatccttgcgtgcattacaacacgaaggggctttc

SEQ ID NO: 154500 - DNA, 55 bp, Artificial
  Synthetic oligonucleotide
gtcatggggaagcttgggcatcccgagtgacgctacgaacaacgcgctcacagtg

SEQ ID NO: 154501 - DNA, 55 bp, Artificial
  Synthetic oligonucleotide
accaaggatctgtaacaggacagacgccgcagagacatcaacacgtcaggctggc

SEQ ID NO: 154502 - DNA, 55 bp, Artificial
  Synthetic oligonucleotide
cgtcgtggatcagagaatcaagcgagctgcccgtccaaacgatctttccgcctcg

SEQ ID NO: 154503 - DNA, 60 bp, Artificial
  Synthetic oligonucleotide
tgtcgttacaatcctaagcctcgaatgcacggaatatttctcataccgcacgagacgcgc

SEQ ID NO: 154504 - DNA, 55 bp, Artificial
  Synthetic oligonucleotide
gtccggcaaatcgagctaagatggtggaaagcgtttaccatccctcggaattcgc

SEQ ID NO: 154505 - DNA, 55 bp, Artificial
  Synthetic oligonucleotide
gtcgaaacgaatgagccatgcgttatcctcgcgggatgtctcgttgaagcgtcac

SEQ ID NO: 154506 - DNA, 55 bp, Artificial
  Synthetic oligonucleotide
gtcgagaaggaactcagagtaatcaggcatgctacgcacctccgagatgtgcacg

SEQ ID NO: 154507 - DNA, 55 bp, Artificial
  Synthetic oligonucleotide
gtcgatctggggatcgcggcaacatctgtttgacctcgaccgcaattcggttgcg

SEQ ID NO: 154508 - DNA, 55 bp, Artificial
  Synthetic oligonucleotide
gtcgatgcttatcgtcagtccgctggccggcatgtttgcaagccgtttccttggc

SEQ ID NO: 154509 - DNA, 55 bp, Artificial
  Synthetic oligonucleotide
gtcgcgaagagaatagtaacctcgcaccctgccgacaggtcaattgcgcgatccg

SEQ ID NO: 154510 - DNA, 55 bp, Artificial
  Synthetic oligonucleotide
gtcggttcaaaccgaagcgcgataccgtcatcacatggactgaaccacacatacc

SEQ ID NO: 154511 - DNA, 55 bp, Artificial
  Synthetic oligonucleotide
gtcgttgccattccgctggataggtcgtcagcacacaggtttcagtcgatctaac

SEQ ID NO: 154512 - DNA, 55 bp, Artificial
  Synthetic oligonucleotide
gtctcgcctcggatgaacacgccacactcaaatgaccgttcgagcgccgaaccca

SEQ ID NO: 154513 - DNA, 53 bp, Artificial
  Synthetic oligonucleotide
cgtcgttattccaataacgcaccgttcggaacccttgagcggctaacgcggcg

SEQ ID NO: 154514 - DNA, 59 bp, Artificial
  Synthetic oligonucleotide
gaaacgccggcatttgcgaagccgaagactggcataatcaaataagacacgggccactg

SEQ ID NO: 154515 - DNA, 55 bp, Artificial
  Synthetic oligonucleotide
gtgaagtaatgacgtatatggagggttcgctccgtgacaaggatttctacctgcc

SEQ ID NO: 154516 - DNA, 55 bp, Artificial
  Synthetic oligonucleotide
gtgaatggcgcgtgcgaaggatggttcaacctctggaccgcggctcagcagccat

SEQ ID NO: 154517 - DNA, 55 bp, Artificial
  Synthetic oligonucleotide
gtgccagccagagttgtcgcgagaaccattgtcagacatcgtcgggcgctcagac

SEQ ID NO: 154518 - DNA, 55 bp, Artificial
  Synthetic oligonucleotide
ggtggaacctgcccaagcgacaggagccccatagagacgtttttgggggaggtgc

SEQ ID NO: 154519 - DNA, 55 bp, Artificial
  Synthetic oligonucleotide
cggttccgaacgcaagggagccttctgaatgtccgatctcgataccagcgtgctg

SEQ ID NO: 154520 - DNA, 55 bp, Artificial
  Synthetic oligonucleotide
ggtgtgcgggtccgttgtctctcagggagcttacttctatgtcgaccggctggat

SEQ ID NO: 154521 - DNA, 55 bp, Artificial
  Synthetic oligonucleotide
ggttagatcgggccgatcgttcggcgtgccattgggctgtcgatgcgcgatactc

SEQ ID NO: 154522 - DNA, 50 bp, Artificial
  Synthetic oligonucleotide
ggttaggggaggcgcgtttccaaaaggttaaacgtccgttgcggcaatcc

SEQ ID NO: 154523 - DNA, 55 bp, Artificial
  Synthetic oligonucleotide
ggttccgtccctaggctacaggtcaacgataccgtgagcgtgatgggcgcgaacg

SEQ ID NO: 154524 - DNA, 55 bp, Artificial
  Synthetic oligonucleotide
ggttcgcttgcttcagtcgaagtaagagtcggtcggttgtatgccgcccttaggg

SEQ ID NO: 154525 - DNA, 58 bp, Artificial
  Synthetic oligonucleotide
cctgaagatgaaccggccatcagatgtcacggcctccgcccaaattaacggcaggacg

SEQ ID NO: 154526 - DNA, 55 bp, Artificial
  Synthetic oligonucleotide
ggttgcgttccgctcacaaatccgcaggacttttgtcgtatcaagccgagcgacg

SEQ ID NO: 154527 - DNA, 55 bp, Artificial
  Synthetic oligonucleotide
ggtttcaatacgatccatgaggatatgcacggacgtatctccggcctccaaccgc

SEQ ID NO: 154528 - DNA, 55 bp, Artificial
  Synthetic oligonucleotide
cgtagggcctatcgcccggatgtcagcgttcatcctttgtcaacaatgaccgcgc

SEQ ID NO: 154529 - DNA, 55 bp, Artificial
  Synthetic oligonucleotide
gtacaagatcgctccggaggacattcgtgtcggcatgacggtcgatgatatgttc

SEQ ID NO: 154530 - DNA, 55 bp, Artificial
  Synthetic oligonucleotide
acccgcttcacgaacggtgacagcacccgagagaccgccatgcagttaccggtag

SEQ ID NO: 154531 - DNA, 55 bp, Artificial
  Synthetic oligonucleotide
cgtagtctgcccagctcagataaccctcgtggtggttcggaatcaatacctccca

SEQ ID NO: 154532 - DNA, 55 bp, Artificial
  Synthetic oligonucleotide
gtactccgttatgcgctggcgcgagtggccaagccctttggaaccgacgcaaacg

SEQ ID NO: 154533 - DNA, 55 bp, Artificial
  Synthetic oligonucleotide
gtagcccggcttatcgcttgaccgtaaggaaatgcgaatgcactgttgggagcgc

SEQ ID NO: 154534 - DNA, 55 bp, Artificial
  Synthetic oligonucleotide
cgtcatacatagaatttgcctccgtcacacatgggatattcctctcacgctcgcc

SEQ ID NO: 154535 - DNA, 54 bp, Artificial
  Synthetic oligonucleotide
gtatcccggttcttcgatgacccggcgttggaccgtaagaatctgtccgtcgag

SEQ ID NO: 154536 - DNA, 59 bp, Artificial
  Synthetic oligonucleotide
gaatggtcgatcgagatgcgaggaagcgtggccccgcttgctgcatagacaaccgacga

SEQ ID NO: 154537 - DNA, 54 bp, Artificial
  Synthetic oligonucleotide
acgtccataactccgagcgcgcccttatacgggattggtgttttgaagggacgc

SEQ ID NO: 154538 - DNA, 52 bp, Artificial
  Synthetic oligonucleotide
cggaactcgcttccccgtgcaactacgcggtcgtttgtgacgagggttaccc

SEQ ID NO: 154539 - DNA, 54 bp, Artificial
  Synthetic oligonucleotide
cgaagcccgtttcgtcgatgtgcacgttcacccgatcaggtgctacggcgaaat

SEQ ID NO: 154540 - DNA, 54 bp, Artificial
  Synthetic oligonucleotide
gtatggttctcgatattgcagggccagtcgcttagcggagcctccttcacaagc

SEQ ID NO: 154541 - DNA, 54 bp, Artificial
  Synthetic oligonucleotide
ggtgttcacaaaaccgattctgacgacagacattgaccctgaggctcaggaaaa

SEQ ID NO: 154542 - DNA, 54 bp, Artificial
  Synthetic oligonucleotide
gcgtgaacgctgacgatcgctgctgtacggcgctctgtgtcgagttgatcagtc

SEQ ID NO: 154543 - DNA, 54 bp, Artificial
  Synthetic oligonucleotide
cgcctcatcttcccggaatctaaagccgcgttgcacccttcgcttccgttccct

SEQ ID NO: 154544 - DNA, 54 bp, Artificial
  Synthetic oligonucleotide
gcacggcgagacgacggctgtgcgcaactaacgaacacaggggatatagattcc

SEQ ID NO: 154545 - DNA, 54 bp, Artificial
  Synthetic oligonucleotide
agacttaacagcgcgattctttaccggcagggcggtttgtggctgatcattcgc

SEQ ID NO: 154546 - DNA, 54 bp, Artificial
  Synthetic oligonucleotide
gttgatagttttctcaatcatccgatggcggacgatgcttctaaagtcgctcta

SEQ ID NO: 154547 - DNA, 59 bp, Artificial
  Synthetic oligonucleotide
ttctggagcggtgagacgcgtttcgctcgacggtcttcttaaggacgacctcgatgcac

SEQ ID NO: 154548 - DNA, 54 bp, Artificial
  Synthetic oligonucleotide
tgaagcgacgttactaatcctctcggcagattaggcgatatcaactgcgttaat

SEQ ID NO: 154549 - DNA, 54 bp, Artificial
  Synthetic oligonucleotide
tcgttacgcccgccccaagacctcttaggctatcccgaggtcacccgagactta

SEQ ID NO: 154550 - DNA, 54 bp, Artificial
  Synthetic oligonucleotide
agcctcggtcatagcgctcccgaaaccgtagccgcatggacgcgtgcccgacgg

SEQ ID NO: 154551 - DNA, 54 bp, Artificial
  Synthetic oligonucleotide
cccgtctcgcttcgctagaaaatccctcgatggctatggctgacctgactcttc

SEQ ID NO: 154552 - DNA, 54 bp, Artificial
  Synthetic oligonucleotide
taatcgaagcgatctcgcggtggcgtagtctgcaatgtgtggcgagcaccttta

SEQ ID NO: 154553 - DNA, 54 bp, Artificial
  Synthetic oligonucleotide
gctatcgtattcgttgaacagaacgcgatgtgggctcattggcagctttgaggc

SEQ ID NO: 154554 - DNA, 54 bp, Artificial
  Synthetic oligonucleotide
cgccttatgactcgtgatccctcggaaggctaggttagcgacatgtcagaggat

SEQ ID NO: 154555 - DNA, 54 bp, Artificial
  Synthetic oligonucleotide
caaaggccgctacgcaggttcgaactcctgtcgaccgatacggtattgccgggt

SEQ ID NO: 154556 - DNA, 54 bp, Artificial
  Synthetic oligonucleotide
aggcaagcctagaacctcgtgcagtgtaaccctggactgacaaggatcgcccgt

SEQ ID NO: 154557 - DNA, 54 bp, Artificial
  Synthetic oligonucleotide
tcggccgaatgcacgatgagggcccggactgtttcgggccaataagtcggtcgg

SEQ ID NO: 154558 - DNA, 59 bp, Artificial
  Synthetic oligonucleotide
tgaccgtctggagactaaggtccgcgtcaggttccccaacggattgatctgatgtgata

SEQ ID NO: 154559 - DNA, 53 bp, Artificial
  Synthetic oligonucleotide
ctagaatcgcactggcattgcctagctatgatcgacagcgtttgagcggcatt

SEQ ID NO: 154560 - DNA, 53 bp, Artificial
  Synthetic oligonucleotide
ctggagcctacctgcgaacactggtgcagcggggtagggacggcgaactgcat

SEQ ID NO: 154561 - DNA, 53 bp, Artificial
  Synthetic oligonucleotide
ctccgacgaaccctaacgacggtgcatagtagggattggcatagtagcgaggt

SEQ ID NO: 154562 - DNA, 53 bp, Artificial
  Synthetic oligonucleotide
cgaggaacccgcgcggtacatgcaaggcgccttttagggtgcccgtcttttgc

SEQ ID NO: 154563 - DNA, 53 bp, Artificial
  Synthetic oligonucleotide
gaactgccagtcaaaggcccaatgacggacttgaggcgcaaagctggcgtcac

SEQ ID NO: 154564 - DNA, 53 bp, Artificial
  Synthetic oligonucleotide
cttgcatgagcggtctgcacatgaaggagcgggtatccacacaagcctaagcc

SEQ ID NO: 154565 - DNA, 53 bp, Artificial
  Synthetic oligonucleotide
atagcgatgagcacggttgccctgtcgaaaacctcctcttacgaccggacgat

SEQ ID NO: 154566 - DNA, 53 bp, Artificial
  Synthetic oligonucleotide
atacgctgacccggatgggtcaactggtgtatttgccgcgcgaccagaaatat

SEQ ID NO: 154567 - DNA, 53 bp, Artificial
  Synthetic oligonucleotide
gcatctacaaatctttgaaggataatgagagccacttcgtcaagagttggcca

SEQ ID NO: 154568 - DNA, 53 bp, Artificial
  Synthetic oligonucleotide
gccacacaacggcgtcgttggctccgggtctgctgcttcgcgcacgacggtag

SEQ ID NO: 154569 - DNA, 55 bp, Artificial
  Synthetic oligonucleotide
cctaagctggagagcgttacaacgggcatgagtacgtgcgccccccaaaccgtcg

SEQ ID NO: 154570 - DNA, 53 bp, Artificial
  Synthetic oligonucleotide
agcgtaaatggtgttgtgtgaagcactcctgcgtcgcaattcgaacatgtttg

SEQ ID NO: 154571 - DNA, 53 bp, Artificial
  Synthetic oligonucleotide
actattccgagcgaggggagccggatgacaggaaaccttctccctttctggct

SEQ ID NO: 154572 - DNA, 53 bp, Artificial
  Synthetic oligonucleotide
ggcgttttgcacgcgtttcctcttcggtccagatctccatgcgtctcaacagt

SEQ ID NO: 154573 - DNA, 53 bp, Artificial
  Synthetic oligonucleotide
gggcttcacgcagcagtatgtcagcggtcttgaacgaggcaagcgcaacccga

SEQ ID NO: 154574 - DNA, 53 bp, Artificial
  Synthetic oligonucleotide
ggggccgcgcagcgaacatcgacgtccttaatgtgctccgatcttaactgatt

SEQ ID NO: 154575 - DNA, 53 bp, Artificial
  Synthetic oligonucleotide
gtaaagcgtatcgggaacaatctcggttgcgccctccagaatgatcacgtcat

SEQ ID NO: 154576 - DNA, 53 bp, Artificial
  Synthetic oligonucleotide
gtatgtgggagaataacacagagcacgcaagtcgttccgcgcggctgaatgtc

SEQ ID NO: 154577 - DNA, 53 bp, Artificial
  Synthetic oligonucleotide
gtattaaagcgcggagttctgattattgttcaaatgcggttcctgtcaaagcg

SEQ ID NO: 154578 - DNA, 52 bp, Artificial
  Synthetic oligonucleotide
gtccggattgccattttggttggggccgcggtatccctgttagcggtcgttt

SEQ ID NO: 154579 - DNA, 53 bp, Artificial
  Synthetic oligonucleotide
acaacgacgaatcactcggttctgcatcacacctgtgtagcaagcccgccaca

SEQ ID NO: 154580 - DNA, 55 bp, Artificial
  Synthetic oligonucleotide
tcatttcacgactttcgtataagattcgggttcctccccacttcatttagtaata

SEQ ID NO: 154581 - DNA, 58 bp, Artificial
  Synthetic oligonucleotide
ttcgagatctctccggaaaattatcagtacatgttcgacatccttccgccgctttgga

SEQ ID NO: 154582 - DNA, 53 bp, Artificial
  Synthetic oligonucleotide
acaaaccgcaatcctttgtcgccaagtatgagaacggtgagcgacgaattgac

SEQ ID NO: 154583 - DNA, 53 bp, Artificial
  Synthetic oligonucleotide
aattgaaactcctctcagcctctcgcgtgtcgctgttggcgttggcggtaaca

SEQ ID NO: 154584 - DNA, 53 bp, Artificial
  Synthetic oligonucleotide
tcctcgacccgaactgactcaacccaaccagcgaaccatgctggcacccgagg

SEQ ID NO: 154585 - DNA, 53 bp, Artificial
  Synthetic oligonucleotide
tcgattttcgatacagcgatgttcatcggggcgctcatatgacgtcagaggta

SEQ ID NO: 154586 - DNA, 53 bp, Artificial
  Synthetic oligonucleotide
tcgcaagatcgactgacttcgtctgctcaatcgaatccctcaagatcgaccaa

SEQ ID NO: 154587 - DNA, 53 bp, Artificial
  Synthetic oligonucleotide
tgatccaactttaccaagcacccgcatgccttgtgcatgtgagacgataaagt

SEQ ID NO: 154588 - DNA, 53 bp, Artificial
  Synthetic oligonucleotide
tgatccgttccaatgaaaggcgcgagctgggtacgcaccagcctctccaagga

SEQ ID NO: 154589 - DNA, 53 bp, Artificial
  Synthetic oligonucleotide
tgcacttcctcgaccaaatggtcactggtagtccaacaaagccgctttcgacc

SEQ ID NO: 154590 - DNA, 53 bp, Artificial
  Synthetic oligonucleotide
ttgtttcgagagttgaagacccggacgctatgccgcgagcggaaggcttgact

SEQ ID NO: 154591 - DNA, 53 bp, Artificial
  Synthetic oligonucleotide
ttttcgtcgtttcaggcgaccgctccctaccggatactacgcgacgtgtttgc

SEQ ID NO: 154592 - DNA, 58 bp, Artificial
  Synthetic oligonucleotide
actgcgtcagaaagccaattagcccttgcttcttccggggcgtccacagatgagccta

SEQ ID NO: 154593 - DNA, 53 bp, Artificial
  Synthetic oligonucleotide
gattcacttccaagtcagacacagcattgaagctggcgcgtctaacggccgtt

SEQ ID NO: 154594 - DNA, 53 bp, Artificial
  Synthetic oligonucleotide
cacggcaggagataggcgctcaaccactaagtgcctaattaaacagggagggg

SEQ ID NO: 154595 - DNA, 53 bp, Artificial
  Synthetic oligonucleotide
gcaaccagcgctagcctttccgcacgaaactcgtctaacgcgccctttacccc

SEQ ID NO: 154596 - DNA, 53 bp, Artificial
  Synthetic oligonucleotide
cacttattgacgctcatccacgttgttttgacgttgcccggatggcgtctggt

SEQ ID NO: 154597 - DNA, 52 bp, Artificial
  Synthetic oligonucleotide
gagacaagtcgttcaatcattgaagtgggcccagaaagaaacaacgcgcatt

SEQ ID NO: 154598 - DNA, 52 bp, Artificial
  Synthetic oligonucleotide
gataatcgtgacgtgacggaaagcgcatggtggtcgtcgtctaaaggacggt

SEQ ID NO: 154599 - DNA, 52 bp, Artificial
  Synthetic oligonucleotide
taatcaaccgttagcagaaacactcacgggtccatcctcgggcacaatcgcc

SEQ ID NO: 154600 - DNA, 52 bp, Artificial
  Synthetic oligonucleotide
taaacgaccgagcgttcaatgctatattggcacgctggctggcttcgaaacg

SEQ ID NO: 154601 - DNA, 52 bp, Artificial
  Synthetic oligonucleotide
ggaaaaagatccaaacgttaacatcacagataaacagaaacgtcgggtcgat

SEQ ID NO: 154602 - DNA, 52 bp, Artificial
  Synthetic oligonucleotide
cagaactcgtccactcgcgtcaggatatgccggtaggcgtttcggatcagaa

SEQ ID NO: 154603 - DNA, 58 bp, Artificial
  Synthetic oligonucleotide
agagggcctgattccgttgggcgtaacgacgagatctatggagagagacgtggtccga

SEQ ID NO: 154604 - DNA, 52 bp, Artificial
  Synthetic oligonucleotide
ggcactgcggaatcaggtgagcatagaggatcgagtgcacctcgttcttgat

SEQ ID NO: 154605 - DNA, 52 bp, Artificial
  Synthetic oligonucleotide
cgtggttttgtgacagctcgttcgctaacgttgcgttaacacatcgcgatga

SEQ ID NO: 154606 - DNA, 52 bp, Artificial
  Synthetic oligonucleotide
acggacgcaagtcacaatcggcggtattcggacatcaacgctgcgggatacg

SEQ ID NO: 154607 - DNA, 52 bp, Artificial
  Synthetic oligonucleotide
ggcgatagaagggatagatgcgataggtgcttcgttcaggagatcgcgaaaa

SEQ ID NO: 154608 - DNA, 52 bp, Artificial
  Synthetic oligonucleotide
acgcgccggaagtcgagcatgtcccgtgccctcattcgatttgcgcgacgca

SEQ ID NO: 154609 - DNA, 52 bp, Artificial
  Synthetic oligonucleotide
attctgtcggcgggcatgcgtgagcgtcgaagcctttgagtcgaagccttgg

SEQ ID NO: 154610 - DNA, 52 bp, Artificial
  Synthetic oligonucleotide
gggcgatatcgaggcaatccgcgcgttacctatcccgttgccgccaagggaa

SEQ ID NO: 154611 - DNA, 52 bp, Artificial
  Synthetic oligonucleotide
cacatcgaatacagcggagtaggtccctccgcgcttccacaggtatctctta

SEQ ID NO: 154612 - DNA, 52 bp, Artificial
  Synthetic oligonucleotide
gtaccacatgcattcgtgacctatgcaaggatcgtctatgtccactcttctg

SEQ ID NO: 154613 - DNA, 52 bp, Artificial
  Synthetic oligonucleotide
gcaacccggcagcgggaacgaacaccatgtgatccgtgtcttttagtggtaa

SEQ ID NO: 154614 - DNA, 58 bp, Artificial
  Synthetic oligonucleotide
cggatcggatccgacccacggtgtctctcgtcatttgatgaaagacgcggcgttgagc

SEQ ID NO: 154615 - DNA, 52 bp, Artificial
  Synthetic oligonucleotide
ggtacaaggtgccatgtccgcttgtcatggttcgatacgtgatgcgccggta

SEQ ID NO: 154616 - DNA, 52 bp, Artificial
  Synthetic oligonucleotide
cgggtttcgccgtttggaaaggtgaccaacagacggtcggtgccacttgacg

SEQ ID NO: 154617 - DNA, 52 bp, Artificial
  Synthetic oligonucleotide
atctgccaaaagactggccccactaaagaacaaggccgttgacgcagtatac

SEQ ID NO: 154618 - DNA, 52 bp, Artificial
  Synthetic oligonucleotide
ttccattgggacggcgcgtgtgactgcaacaggagaactccgtggctgaaag

SEQ ID NO: 154619 - DNA, 52 bp, Artificial
  Synthetic oligonucleotide
ttaccgccaatctagccgctccgcatcttggtcgtgtgccgttgcttggcgg

SEQ ID NO: 154620 - DNA, 52 bp, Artificial
  Synthetic oligonucleotide
gcaagctacctcgcgtcgtggttggaggtcttgtccagtgagaagcgcttta

SEQ ID NO: 154621 - DNA, 52 bp, Artificial
  Synthetic oligonucleotide
agctgggaccaggcgccattaaacgggtttcgccgtttggaaaggtgaccaa

SEQ ID NO: 154622 - DNA, 52 bp, Artificial
  Synthetic oligonucleotide
tgtttgccaggactgtccaagcgaggcctggacctacttcattggcttccag

SEQ ID NO: 154623 - DNA, 52 bp, Artificial
  Synthetic oligonucleotide
attaggaatcgtgtgcgtgagcaattccttggtgagacgtcctcgcgggccc

SEQ ID NO: 154624 - DNA, 52 bp, Artificial
  Synthetic oligonucleotide
ccacttgacgcacccttacggaccacagcgatacgcatccgagcgcccacgc

SEQ ID NO: 154625 - DNA, 58 bp, Artificial
  Synthetic oligonucleotide
ggctagaagcaccgcggttgttctggccgcagcatcaatgctcgttgtcaccgcagca

SEQ ID NO: 154626 - DNA, 52 bp, Artificial
  Synthetic oligonucleotide
tcgtcgacggagttcctgagacgaaacgaccttctacgcgtcgctgcgaacg

SEQ ID NO: 154627 - DNA, 52 bp, Artificial
  Synthetic oligonucleotide
tcgcttgccgtatctccggagcactcagaaagccttatgctcaccctgcgaa

SEQ ID NO: 154628 - DNA, 52 bp, Artificial
  Synthetic oligonucleotide
tcctggaccgagagccatatcacgcttggacgggacttgtttgttagagtat

SEQ ID NO: 154629 - DNA, 52 bp, Artificial
  Synthetic oligonucleotide
ctgcgttcaatcccgatattccacggttggcggggcccattccggatgatag

SEQ ID NO: 154630 - DNA, 51 bp, Artificial
  Synthetic oligonucleotide
ttgtcattactgcatcgttggctgtggctacaaagcctacacttggccgac

SEQ ID NO: 154631 - DNA, 51 bp, Artificial
  Synthetic oligonucleotide
aagcggagctgggcagaattggaacacgctgggggcaaggttggtagccga

SEQ ID NO: 154632 - DNA, 51 bp, Artificial
  Synthetic oligonucleotide
gaaggggcagaaaccccgttcgggagcctgctgaatcggcggttaggaggc

SEQ ID NO: 154633 - DNA, 51 bp, Artificial
  Synthetic oligonucleotide
aagcggttcaggacgggtgtggcgcggcgaaatctcatcagaatctccgta

SEQ ID NO: 154634 - DNA, 51 bp, Artificial
  Synthetic oligonucleotide
tccgtgaggccggcttgtcaggagactcgacgtgagtgtgactaaggacga

SEQ ID NO: 154635 - DNA, 51 bp, Artificial
  Synthetic oligonucleotide
cagccactgcgacaacggcccagcctcgagcccaatgcggctgacaggtaa

SEQ ID NO: 154636 - DNA, 55 bp, Artificial
  Synthetic oligonucleotide
cgggatgcgcgcttacttatttgtttggagaacgtccaggcggcaaaccggactc

SEQ ID NO: 154637 - DNA, 51 bp, Artificial
  Synthetic oligonucleotide
accacgggagtccggtcggagaggtggagcgcatggggaggcttggcgttt

SEQ ID NO: 154638 - DNA, 51 bp, Artificial
  Synthetic oligonucleotide
tccatgaagcggggttgcacggcagttcgcattatgacctgccaagcgtct

SEQ ID NO: 154639 - DNA, 51 bp, Artificial
  Synthetic oligonucleotide
acacgttccgtagtcctacgcgcctgcgttccgtagttctacgcggtgaca

SEQ ID NO: 154640 - DNA, 51 bp, Artificial
  Synthetic oligonucleotide
tgtaggccaagcgggtgggaccgcgttccttgccctgatggcattcgcccc

SEQ ID NO: 154641 - DNA, 51 bp, Artificial
  Synthetic oligonucleotide
gaacaagtctcaacgtcggattatccttgtggcggcccggtgccatcggcc

SEQ ID NO: 154642 - DNA, 51 bp, Artificial
  Synthetic oligonucleotide
cgtgacgcgtccctcgatgtcgcccggaacagatgcgcccgcataagcgga

SEQ ID NO: 154643 - DNA, 51 bp, Artificial
  Synthetic oligonucleotide
ctttcggtcatgaccacaaagtcgcgagagcacctttacggcacctcagtt

SEQ ID NO: 154644 - DNA, 51 bp, Artificial
  Synthetic oligonucleotide
cctctgctcggaggcgagcgtcaagatcgcggtacctccaaatggcgttcg

SEQ ID NO: 154645 - DNA, 51 bp, Artificial
  Synthetic oligonucleotide
gttcgattcgcatgggcaagcatccggtgacatgtgacgaacttctacgga

SEQ ID NO: 154646 - DNA, 51 bp, Artificial
  Synthetic oligonucleotide
acaccacgacgtcctatgcggccgatcgccctgaaggtcagcgctacaacg

SEQ ID NO: 154647 - DNA, 54 bp, Artificial
  Synthetic oligonucleotide
gctgtttgacgcctcacggctttagtctcccccgccggaattatgttcccggtc

SEQ ID NO: 154648 - DNA, 51 bp, Artificial
  Synthetic oligonucleotide
gttggactccacgggaggagcggcaagtctgagcggggaaggggtcagtcg

SEQ ID NO: 154649 - DNA, 51 bp, Artificial
  Synthetic oligonucleotide
cccgttgctcctcgatgccaggcgtggactacctttagaaagccggccggg

SEQ ID NO: 154650 - DNA, 51 bp, Artificial
  Synthetic oligonucleotide
aactatcttcgttgatctgcgtcaaactgtcggggcaaggagttagtaggg

SEQ ID NO: 154651 - DNA, 51 bp, Artificial
  Synthetic oligonucleotide
tagtcacgggaacgaacgcaggcgaagcatcgaatacattgttccgcggtg

SEQ ID NO: 154652 - DNA, 51 bp, Artificial
  Synthetic oligonucleotide
cagagccggatttcggaaggtccaatagcgcaaggcgggtttgcgattcta

SEQ ID NO: 154653 - DNA, 51 bp, Artificial
  Synthetic oligonucleotide
tagatgtcgaggagccgtgcgttagaggcgagtttagaaccccgccacggt

SEQ ID NO: 154654 - DNA, 51 bp, Artificial
  Synthetic oligonucleotide
gcttcagggattgcgccatgagccgtcccctatccacgccgcatgacggag

SEQ ID NO: 154655 - DNA, 51 bp, Artificial
  Synthetic oligonucleotide
cgcggttaaaaatcaaaaccgtagcacatcggccgagggatcactctcgcg

SEQ ID NO: 154656 - DNA, 51 bp, Artificial
  Synthetic oligonucleotide
agaataacccgtcactttagtaatcatagagttcgcatccgtaaaactgcg

SEQ ID NO: 154657 - DNA, 51 bp, Artificial
  Synthetic oligonucleotide
agaattggaacacgctgggggcaaggttggtagccgagctcaggcttggcg

SEQ ID NO: 154658 - DNA, 57 bp, Artificial
  Synthetic oligonucleotide
ataaaagcacccgcatcaccgcccgaacggcgaagcatagcggaaatcatccgcaca

SEQ ID NO: 154659 - DNA, 51 bp, Artificial
  Synthetic oligonucleotide
gctcgagacaacgactcggttgctgtgctcggaatgatagggagctaaaat

SEQ ID NO: 154660 - DNA, 51 bp, Artificial
  Synthetic oligonucleotide
cgcctgcgtcgccaatcgtttgcagcgacctacgtatgataccggatagtg

SEQ ID NO: 154661 - DNA, 51 bp, Artificial
  Synthetic oligonucleotide
gcgttgcaaagtacgggtcgtcaggcggtgaaaagccgaaggcaatcctgt

SEQ ID NO: 154662 - DNA, 51 bp, Artificial
  Synthetic oligonucleotide
gcgcgattctgaacgaatcatcgcgttccactgcgcggctgagaaccgtcg

SEQ ID NO: 154663 - DNA, 51 bp, Artificial
  Synthetic oligonucleotide
gcgccctagctgattccgctctataaccccggtatgtctgcgatacgcaca

SEQ ID NO: 154664 - DNA, 51 bp, Artificial
  Synthetic oligonucleotide
gccgccccgctcggtccatgagagctcaagccgacccttcttgaccgacca

SEQ ID NO: 154665 - DNA, 51 bp, Artificial
  Synthetic oligonucleotide
atgtgctgtccgaactcctctgctaagatccagttgcttggttgcgtcatg

SEQ ID NO: 154666 - DNA, 51 bp, Artificial
  Synthetic oligonucleotide
gccagaacggctcaggttggctcggaattgtcatgcgggcgtggccattcg

SEQ ID NO: 154667 - DNA, 51 bp, Artificial
  Synthetic oligonucleotide
atgatcttggcacgccaaacgttctcaataccgcgggggactcgggtcgat

SEQ ID NO: 154668 - DNA, 51 bp, Artificial
  Synthetic oligonucleotide
gcatattgacctcgcacgaacccacatacattgcgcgaactgaggctgaga

SEQ ID NO: 154669 - DNA, 56 bp, Artificial
  Synthetic oligonucleotide
cgtcggcgcccaaccattccacgatctgtttcacccgcgatatcttgtcgtcacga

SEQ ID NO: 154670 - DNA, 51 bp, Artificial
  Synthetic oligonucleotide
ataggcgtcgccccccaagcgaaagggtagatgtctcgctcagcgggtaag

SEQ ID NO: 154671 - DNA, 51 bp, Artificial
  Synthetic oligonucleotide
ggggtgatcgttaacggagtccggccaaccgagtctttgatttacccatga

SEQ ID NO: 154672 - DNA, 51 bp, Artificial
  Synthetic oligonucleotide
atttcgacttttagtcaccggttcgtgaggcaaaattgtgccgggaccgtc

SEQ ID NO: 154673 - DNA, 51 bp, Artificial
  Synthetic oligonucleotide
acgacgcttagcagatcgtcgctccccggcaacgacggagtcatttgcggt

SEQ ID NO: 154674 - DNA, 51 bp, Artificial
  Synthetic oligonucleotide
gggattcgaacgatcggtgcgccttggatcccgctcagagtcgctcggact

SEQ ID NO: 154675 - DNA, 51 bp, Artificial
  Synthetic oligonucleotide
acgctttcctgcaacctattggccgcaagcggaagacagctaaataggggt

SEQ ID NO: 154676 - DNA, 51 bp, Artificial
  Synthetic oligonucleotide
acgtagcccgcgattgggacgccttctgttccaaacggccgagacagtagg

SEQ ID NO: 154677 - DNA, 50 bp, Artificial
  Synthetic oligonucleotide
tcgttcgcatcgattgctatggcccgcatccgctgattcctccgtcgtgt

SEQ ID NO: 154678 - DNA, 50 bp, Artificial
  Synthetic oligonucleotide
tctccgcccctcgctcgttcccggtccaggggagcaatttacgtgaggca

SEQ ID NO: 154679 - DNA, 50 bp, Artificial
  Synthetic oligonucleotide
tgagcgggagcgttgcctgcttgccaaacttcgcggcgaccgttcagacc

SEQ ID NO: 154680 - DNA, 56 bp, Artificial
  Synthetic oligonucleotide
cgacgagcaagtgcgtcggaaacagagtgccgcgaacggaaacggagaatcttgtt

SEQ ID NO: 154681 - DNA, 50 bp, Artificial
  Synthetic oligonucleotide
gcctgaggttctcaagcattcgcttcgcggcgtgatcgcaacatcggcaa

SEQ ID NO: 154682 - DNA, 50 bp, Artificial
  Synthetic oligonucleotide
gtttcgcgcggggctttgggatgatagcttgcggatgtgccgccgtcccc

SEQ ID NO: 154683 - DNA, 50 bp, Artificial
  Synthetic oligonucleotide
gccggctcgaatccatcgaggtaagccgagagggcgagatcggttgctgt

SEQ ID NO: 154684 - DNA, 50 bp, Artificial
  Synthetic oligonucleotide
tgccatgcttagccaccccatctccgcccctcgctcgttcccggtccagg

SEQ ID NO: 154685 - DNA, 50 bp, Artificial
  Synthetic oligonucleotide
tgccggagggcggtcttattgcggtcgcacccgttgatttatccgcgtct

SEQ ID NO: 154686 - DNA, 50 bp, Artificial
  Synthetic oligonucleotide
tgctgcgtgctgcccgttgtccttcgtggctaggaacaagcgttacgcgg

SEQ ID NO: 154687 - DNA, 50 bp, Artificial
  Synthetic oligonucleotide
tggcttgaccccgccggttatgaggtggcgcgaagcgtaaagccaggcga

SEQ ID NO: 154688 - DNA, 50 bp, Artificial
  Synthetic oligonucleotide
tggggacgagtcagtctgctgggcatcctccgggatttcttgccgcagtt

SEQ ID NO: 154689 - DNA, 50 bp, Artificial
  Synthetic oligonucleotide
gcccgattgaggtctctcccagaacccggatggcgaccaacacgaatccg

SEQ ID NO: 154690 - DNA, 50 bp, Artificial
  Synthetic oligonucleotide
gccccactgcatctcctgagacgttcacctccgtcgtggcgacgtcgtga

SEQ ID NO: 154691 - DNA, 52 bp, Artificial
  Synthetic oligonucleotide
tcccggattggttcgactacgtgcctcgggagttacggttctttcgggactg

SEQ ID NO: 154692 - DNA, 56 bp, Artificial
  Synthetic oligonucleotide
atttttcgcgaaccacccacagcgaggctactcccatgcaactcacgcttggaccg

SEQ ID NO: 154693 - DNA, 50 bp, Artificial
  Synthetic oligonucleotide
gtatcggttcgcagttttgggtggggatgtcggctttcgcgcccgggagt

SEQ ID NO: 154694 - DNA, 50 bp, Artificial
  Synthetic oligonucleotide
gaggaggacaacgaggtttgggcgcgctgtctggcgactgcgatcgacta

SEQ ID NO: 154695 - DNA, 50 bp, Artificial
  Synthetic oligonucleotide
ggggatccctcaccaaagttcagggccgtagctggtagcctcgaggccgt

SEQ ID NO: 154696 - DNA, 50 bp, Artificial
  Synthetic oligonucleotide
ttagccaccccatctccgcccctcgctcgttcccggtccaggggagcaat

SEQ ID NO: 154697 - DNA, 50 bp, Artificial
  Synthetic oligonucleotide
ggtggctagccaagccgacgctagtgcgacaaccccgcccgaacgaggtc

SEQ ID NO: 154698 - DNA, 50 bp, Artificial
  Synthetic oligonucleotide
gcacatccgcaagctatcatcccaaagccccgcgcgaaacaggttgtcgg

SEQ ID NO: 154699 - DNA, 50 bp, Artificial
  Synthetic oligonucleotide
ttttcgcgcgagatcattatggcatcgcttaacgtcgacaaagccgctct

SEQ ID NO: 154700 - DNA, 50 bp, Artificial
  Synthetic oligonucleotide
taagccttgggtcactccaccgcagacgatgcaaaacccagggaacgcca

SEQ ID NO: 154701 - DNA, 50 bp, Artificial
  Synthetic oligonucleotide
gctgggcctcgatttggctgcgatttccacgttcgctcttgatgcgaccc

SEQ ID NO: 154702 - DNA, 50 bp, Artificial
  Synthetic oligonucleotide
gctgggcatcctccgggatttcttgccgcagtttcggcccttgattgagc

SEQ ID NO: 154703 - DNA, 56 bp, Artificial
  Synthetic oligonucleotide
cggctaccattgaggggtgcagaaaatgcgaaatgcactgcgaaaggggatacgta

SEQ ID NO: 154704 - DNA, 50 bp, Artificial
  Synthetic oligonucleotide
tacttcgtcgtgagtagaaaagatctacgcgtcctcatggtttagccccg

SEQ ID NO: 154705 - DNA, 50 bp, Artificial
  Synthetic oligonucleotide
ggccgtaaagttcgggtcgttgctctcgcaccaggacttgcgagccacca

SEQ ID NO: 154706 - DNA, 50 bp, Artificial
  Synthetic oligonucleotide
tataccgctatggcaggcctaacgcttcatccaatcgccggagtgccacc

SEQ ID NO: 154707 - DNA, 50 bp, Artificial
  Synthetic oligonucleotide
tatgaggcggtccgacgctacatcgaacgacccggtagtccgctcgaagg

SEQ ID NO: 154708 - DNA, 50 bp, Artificial
  Synthetic oligonucleotide
tcaacgataccgtgagcgtgatgggcgcgaacgaatgggggctcgccaaa

SEQ ID NO: 154709 - DNA, 50 bp, Artificial
  Synthetic oligonucleotide
tcaccgtttggtcgatgccgcacaacgactgccacgaaactgccactctg

SEQ ID NO: 154710 - DNA, 50 bp, Artificial
  Synthetic oligonucleotide
tcactccaccgcagacgatgcaaaacccagggaacgccaggaaaccttga

SEQ ID NO: 154711 - DNA, 50 bp, Artificial
  Synthetic oligonucleotide
tcactgtatcgctgccaattctcgccatgttcatatgccgcatttccgac

SEQ ID NO: 154712 - DNA, 50 bp, Artificial
  Synthetic oligonucleotide
gctatggcccgcatccgctgattcctccgtcgtgttcaggtgagcggagg

SEQ ID NO: 154713 - DNA, 50 bp, Artificial
  Synthetic oligonucleotide
gctacaggtcaacgataccgtgagcgtgatgggcgcgaacgaatgggggc

SEQ ID NO: 154714 - DNA, 55 bp, Artificial
  Synthetic oligonucleotide
gccgatgaccccatcgcaaagatgggtacgctcgttcgctatccacggggagcag

SEQ ID NO: 154715 - DNA, 50 bp, Artificial
  Synthetic oligonucleotide
ggctacaaagcgaattgacgtaattgactgaaggtcgtccgagtccaccg

SEQ ID NO: 154716 - DNA, 50 bp, Artificial
  Synthetic oligonucleotide
gtctcgcggcagaacgaagcgtgggccaacctaactgaggcgaccgcacg

SEQ ID NO: 154717 - DNA, 50 bp, Artificial
  Synthetic oligonucleotide
gcggccgatcgccctgaaggtcagcgctacaacggagcatgagcttgttg

SEQ ID NO: 154718 - DNA, 50 bp, Artificial
  Synthetic oligonucleotide
gcggcatggtggtccatattcgtaggcgtcgcagccgcgaagtctagcat

SEQ ID NO: 154719 - DNA, 50 bp, Artificial
  Synthetic oligonucleotide
ggctggccgtagttgtgatccgtcaccgtttggtcgatgccgcacaacga

SEQ ID NO: 154720 - DNA, 50 bp, Artificial
  Synthetic oligonucleotide
tcggaagatcgttctgggctacgagaggtcgttcacgagtgcgtgccggc

SEQ ID NO: 154721 - DNA, 50 bp, Artificial
  Synthetic oligonucleotide
tcgtcagcgccccactgcatctcctgagacgttcacctccgtcgtggcga

SEQ ID NO: 154722 - DNA, 50 bp, Artificial
  Synthetic oligonucleotide
ggaaaaccacgtagcccgcgattgggacgccttctgttccaaacggccga

SEQ ID NO: 154723 - DNA, 50 bp, Artificial
  Synthetic oligonucleotide
aattactgacacccgactgccctccggtggacacctgcccaccgctaccc

SEQ ID NO: 154724 - DNA, 50 bp, Artificial
  Synthetic oligonucleotide
aattcaaccgatgcgccatcgaggcacggcaattctacggtcgcgcccac

SEQ ID NO: 154725 - DNA, 55 bp, Artificial
  Synthetic oligonucleotide
cgctggagaccatgtccgcagcactctcgaatgacgccgaccctggagagatagg

SEQ ID NO: 154726 - DNA, 50 bp, Artificial
  Synthetic oligonucleotide
aattcgtcttggctgccatgaaactccctcccaacgcgtgttggcccctg

SEQ ID NO: 154727 - DNA, 50 bp, Artificial
  Synthetic oligonucleotide
aattgcattagcccgattcgctcggttcgcgccataccgcctacgtggcg

SEQ ID NO: 154728 - DNA, 50 bp, Artificial
  Synthetic oligonucleotide
aattggagcgctgcggacgctgaaacgacgtgcggggccatggatttagg

SEQ ID NO: 154729 - DNA, 50 bp, Artificial
  Synthetic oligonucleotide
aatttcccgcaacaactcccgggcacgaaggccaatatccccgcccaata

SEQ ID NO: 154730 - DNA, 50 bp, Artificial
  Synthetic oligonucleotide
acaaacgcgtcatgctgttggctccgggacgacctgattggctcaaggcg

SEQ ID NO: 154731 - DNA, 50 bp, Artificial
  Synthetic oligonucleotide
acaacaatgggcgcatcgtccgggtgcccaaggggctttcgattctcgag

SEQ ID NO: 154732 - DNA, 50 bp, Artificial
  Synthetic oligonucleotide
acaacggtggattacccaggctcgcccaccgggggtcttcgtcgaaccaa

SEQ ID NO: 154733 - DNA, 50 bp, Artificial
  Synthetic oligonucleotide
acaagccgtccttgggttgaggggtaatgctgcggtggccttaagcggcg

SEQ ID NO: 154734 - DNA, 50 bp, Artificial
  Synthetic oligonucleotide
acaaggcgaacttcggattcggggcactatgcgttcgcttcgctcgtcgc

SEQ ID NO: 154735 - DNA, 50 bp, Artificial
  Synthetic oligonucleotide
acaaggcttggcacccaatctgctgaatccgaccgtcgcccggagtttcc

SEQ ID NO: 154736 - DNA, 55 bp, Artificial
  Synthetic oligonucleotide
gctttgtaagacatggctcgaactccttacatccaaggtagtccttacacttcgg

SEQ ID NO: 154737 - DNA, 50 bp, Artificial
  Synthetic oligonucleotide
acaagtcgccagacgctgccaatcgtagccacaagaggctccccgctgag

SEQ ID NO: 154738 - DNA, 50 bp, Artificial
  Synthetic oligonucleotide
acacccgcagttccatgtgcgtccgcagcaaaatgcaaggctgacagggg

SEQ ID NO: 154739 - DNA, 50 bp, Artificial
  Synthetic oligonucleotide
acaccgatgccccgcgatttggtgtaaggcaggccaaacgtacggcttgg

SEQ ID NO: 154740 - DNA, 50 bp, Artificial
  Synthetic oligonucleotide
acaccgggagaccgatccgcagcaaactcatcgcgcctgctgtgtgttgt

SEQ ID NO: 154741 - DNA, 50 bp, Artificial
  Synthetic oligonucleotide
acaccgggatgcagtcgaacgagcggttgttgtagacgaggccacgcgag

SEQ ID NO: 154742 - DNA, 50 bp, Artificial
  Synthetic oligonucleotide
acacgcaggaattgcgtcggggccaacccgaatgctccctgaaagccgtc

SEQ ID NO: 154743 - DNA, 50 bp, Artificial
  Synthetic oligonucleotide
acacgcctcggctatggtccgtgcgccgccaatgatccccatcatcaggc

SEQ ID NO: 154744 - DNA, 50 bp, Artificial
  Synthetic oligonucleotide
acactcttcctgcccaggtctagcgtttccccatcgggcacgcactcggg

SEQ ID NO: 154745 - DNA, 50 bp, Artificial
  Synthetic oligonucleotide
acagaccgctatcgtccgcagacaccgctcattcgtgtgccgtcgctctc

SEQ ID NO: 154746 - DNA, 50 bp, Artificial
  Synthetic oligonucleotide
aaggcgcggcccaatcgtcaggtaagcctaacgcgcaagcatgcccactc

SEQ ID NO: 154747 - DNA, 55 bp, Artificial
  Synthetic oligonucleotide
agctcagctccgttcggaaaagggcgcgaattccatggcgggaacaattccgccg

SEQ ID NO: 154748 - DNA, 50 bp, Artificial
  Synthetic oligonucleotide
aagggctcaaggcaatttcccgcaacaactcccgggcacgaaggccaata

SEQ ID NO: 154749 - DNA, 50 bp, Artificial
  Synthetic oligonucleotide
aagggtggactgcggctgctcgactttgaaacccgtgcgaccaactccga

SEQ ID NO: 154750 - DNA, 50 bp, Artificial
  Synthetic oligonucleotide
aagggttatctcgcggcatatgccccgccgaccggttatgcatcgacgaa

SEQ ID NO: 154751 - DNA, 50 bp, Artificial
  Synthetic oligonucleotide
aagtatgagccctcccgcactgccgatgaaagcgccttgacccgccccga

SEQ ID NO: 154752 - DNA, 50 bp, Artificial
  Synthetic oligonucleotide
aagtcgccgcacccctggctttggcagaggatcaattgccgaagaagcta

SEQ ID NO: 154753 - DNA, 50 bp, Artificial
  Synthetic oligonucleotide
aagtcggctgtgacgacgcagcttgcctgagcgttcgagatatgcgagcg

SEQ ID NO: 154754 - DNA, 50 bp, Artificial
  Synthetic oligonucleotide
aagttcgtcaggacccgccaaaccggatcggaagtcacctacctcgccta

SEQ ID NO: 154755 - DNA, 50 bp, Artificial
  Synthetic oligonucleotide
aagttgccccgcgtgagagagcgcgtggtcggtttggatcctgatcccga

SEQ ID NO: 154756 - DNA, 50 bp, Artificial
  Synthetic oligonucleotide
aataaagctgggcggaaacctcatgcgccgtctcactcaatccaggcggc

SEQ ID NO: 154757 - DNA, 50 bp, Artificial
  Synthetic oligonucleotide
aatagggcgacatctccgccccgaagatgcgataaacctccgtcggctga

SEQ ID NO: 154758 - DNA, 55 bp, Artificial
  Synthetic oligonucleotide
gctttgaggcgctagcaggcgcaaaataaagtcgcgcgaatgcccaacctcgttc

SEQ ID NO: 154759 - DNA, 50 bp, Artificial
  Synthetic oligonucleotide
aatcccagcgtctgcccaattctgggctccttggccagaacaatggctcg

SEQ ID NO: 154760 - DNA, 50 bp, Artificial
  Synthetic oligonucleotide
aatcccgtccatagtcgtgtcaccggcacatggaccacgatcttcgcgcg

SEQ ID NO: 154761 - DNA, 50 bp, Artificial
  Synthetic oligonucleotide
aatcggtgcccccgtgaattacgctggcaaatctgacgccgcgcttttct

SEQ ID NO: 154762 - DNA, 50 bp, Artificial
  Synthetic oligonucleotide
aatgattgtcctgagatagcaacggagtcgcgccgaggcactgcacccga

SEQ ID NO: 154763 - DNA, 50 bp, Artificial
  Synthetic oligonucleotide
aatgcaggcattgtgcgtcccctcgtcgttgagttgaggcactccccgga

SEQ ID NO: 154764 - DNA, 50 bp, Artificial
  Synthetic oligonucleotide
aatgccgctgacgaacatgctggatgtggacgtcgcaacggagtgctgta

SEQ ID NO: 154765 - DNA, 50 bp, Artificial
  Synthetic oligonucleotide
aatgcctagcttgcaattgcgcagtcctgatcacacagccgcccgcaaga

SEQ ID NO: 154766 - DNA, 50 bp, Artificial
  Synthetic oligonucleotide
aatgcggcaatcgtcgctaggatggcgatccacggcacgtctacccacca

SEQ ID NO: 154767 - DNA, 50 bp, Artificial
  Synthetic oligonucleotide
aatgcggcccatattcggcctgtcgaggcgaatggaccggacctcgtgac

SEQ ID NO: 154768 - DNA, 50 bp, Artificial
  Synthetic oligonucleotide
aatgctgcgtcaccccgccaagaacccactgccgcaaccgtgagtgaccg

SEQ ID NO: 154769 - DNA, 55 bp, Artificial
  Synthetic oligonucleotide
cgatcgatccccgcgacgtccagtagagtgacgaaacgactggcttgggtaaggc

SEQ ID NO: 154770 - DNA, 50 bp, Artificial
  Synthetic oligonucleotide
aatgtcacgggcacggcgaccattaacggcggcacggttcgtgtgatcgc

SEQ ID NO: 154771 - DNA, 50 bp, Artificial
  Synthetic oligonucleotide
accccgagcgcacggcacgtccgccaggcagccgaatagcatttccggaa

SEQ ID NO: 154772 - DNA, 50 bp, Artificial
  Synthetic oligonucleotide
accccgccaacaccaagtattgcctcctgccttgcgcttacgcctatggg

SEQ ID NO: 154773 - DNA, 50 bp, Artificial
  Synthetic oligonucleotide
accccttggcgctcccgagccggttcctatatcctccgggccagtcatcc

SEQ ID NO: 154774 - DNA, 50 bp, Artificial
  Synthetic oligonucleotide
acccgaaccgcatcctggtgttgagcctcacctgcccggagggccgctat

SEQ ID NO: 154775 - DNA, 50 bp, Artificial
  Synthetic oligonucleotide
acccgactcaccggtctgcaacgacgaactttctgggcactcggtggtct

SEQ ID NO: 154776 - DNA, 50 bp, Artificial
  Synthetic oligonucleotide
acccgcccgaggggcttgaaccgggggctggctgaccctttcgagcgatg

SEQ ID NO: 154777 - DNA, 50 bp, Artificial
  Synthetic oligonucleotide
acccgcgtcccttcccagtataaaccgcgcacgactgcgaccgccaagat

SEQ ID NO: 154778 - DNA, 50 bp, Artificial
  Synthetic oligonucleotide
acccgttcgatgtggctctttggacctcttgtgacgtgttgcgcggcgcg

SEQ ID NO: 154779 - DNA, 50 bp, Artificial
  Synthetic oligonucleotide
accgaagacccgcatgttctctatgggccttacgatgccgaggggccacg

SEQ ID NO: 154780 - DNA, 55 bp, Artificial
  Synthetic oligonucleotide
gccatcgcagacaacacgtgtcagacaggatagttgctcccagcgtgaactagcc

SEQ ID NO: 154781 - DNA, 50 bp, Artificial
  Synthetic oligonucleotide
accgagatcccgcgcattcgcactcacccaaaggcaacacagcgtgccga

SEQ ID NO: 154782 - DNA, 50 bp, Artificial
  Synthetic oligonucleotide
accgatgctatcgcgcaaggcggcccaagcggtcgtcaatcgcattccgc

SEQ ID NO: 154783 - DNA, 50 bp, Artificial
  Synthetic oligonucleotide
accgcacattcgcgcaatcatcaagcgtatgaggctgatcgcgccctccc

SEQ ID NO: 154784 - DNA, 50 bp, Artificial
  Synthetic oligonucleotide
accgccacggaaggaccagccaacgcccaatccgtcttacggacgctgcc

SEQ ID NO: 154785 - DNA, 50 bp, Artificial
  Synthetic oligonucleotide
accgcgctctggcaagctctcacacatcgaccgggaacataattccggcg

SEQ ID NO: 154786 - DNA, 50 bp, Artificial
  Synthetic oligonucleotide
accgcggatgggtacgtgtccgaccattggcgtccggtttcgccgttaac

SEQ ID NO: 154787 - DNA, 50 bp, Artificial
  Synthetic oligonucleotide
accgcggctaactcgccgctgcgcgctctcaggcttgccccgatcgtacg

SEQ ID NO: 154788 - DNA, 50 bp, Artificial
  Synthetic oligonucleotide
accgcgtttttagcggtccgcgggacgttacccactgtcattggaggcta

SEQ ID NO: 154789 - DNA, 50 bp, Artificial
  Synthetic oligonucleotide
accgctggcatggttctctcccgaggggttcgaccttgggaccgacccta

SEQ ID NO: 154790 - DNA, 50 bp, Artificial
  Synthetic oligonucleotide
accgcttaggtcaggcccacgcccatctacgtggaccctgcgtatgtgtt

SEQ ID NO: 154791 - DNA, 55 bp, Artificial
  Synthetic oligonucleotide
gcttgttgggtcttctaggtcacacccgaaaggctaaggcgcaaaatcctccgtc

SEQ ID NO: 154792 - DNA, 50 bp, Artificial
  Synthetic oligonucleotide
accggaagatattcgacgccgcccccttgcgaccgtaccggctggggata

SEQ ID NO: 154793 - DNA, 50 bp, Artificial
  Synthetic oligonucleotide
accggcagtgacatccctcggcagatcacgcggtatgggtcccagcgttc

SEQ ID NO: 154794 - DNA, 50 bp, Artificial
  Synthetic oligonucleotide
acagaggtcactcaccatgcatcccgcgtttgcgacctcgtcagccgagg

SEQ ID NO: 154795 - DNA, 50 bp, Artificial
  Synthetic oligonucleotide
acagcacattgcccgatcagaacccccgccggaacgtcatatggcaccaa

SEQ ID NO: 154796 - DNA, 50 bp, Artificial
  Synthetic oligonucleotide
acagcgaagcccgcactcgcacttggctcctgcagcacggatacacgtcg

SEQ ID NO: 154797 - DNA, 50 bp, Artificial
  Synthetic oligonucleotide
acagcgaggggcatcttcgccgcgtgtcatcagaactccgggggtggcgc

SEQ ID NO: 154798 - DNA, 50 bp, Artificial
  Synthetic oligonucleotide
acaggcgcgatagggcgaagacgccgtggccagaggtggaaacaaagcga

SEQ ID NO: 154799 - DNA, 50 bp, Artificial
  Synthetic oligonucleotide
acaggcgcgctggcgtagagttatgcgtctcgactagctggctttgcgca

SEQ ID NO: 154800 - DNA, 50 bp, Artificial
  Synthetic oligonucleotide
acaggttcggccgggactccgaccttccctgcgcgatggtgttacgaatt

SEQ ID NO: 154801 - DNA, 50 bp, Artificial
  Synthetic oligonucleotide
acagtccggcgcagtgaggccaagatttgccccggttcctcccgtatcgt

SEQ ID NO: 154802 - DNA, 60 bp, Artificial
  Synthetic oligonucleotide
gatgcatatgcgtagctttcatggaatcgagcgtctagtctgccggctgcttcccctcct

SEQ ID NO: 154803 - DNA, 55 bp, Artificial
  Synthetic oligonucleotide
gcttcgcacgcataacggctaactccggcactacgctacaaacgcccgtaccgcg

SEQ ID NO: 154804 - DNA, 50 bp, Artificial
  Synthetic oligonucleotide
acagtttgcccaagccgggtccggccagtatgactgccctgcaggttgcg

SEQ ID NO: 154805 - DNA, 50 bp, Artificial
  Synthetic oligonucleotide
acatccatcaatcgcgcaaccactgtgggtcgggagtcaccggagcccac

SEQ ID NO: 154806 - DNA, 50 bp, Artificial
  Synthetic oligonucleotide
acatcgccctgagacacgctgaggccattcagggaccgccccgtggcgac

SEQ ID NO: 154807 - DNA, 50 bp, Artificial
  Synthetic oligonucleotide
acatgtctcgcggaagtcacgcctcgcgccgataatgtggtgtgccagcg

SEQ ID NO: 154808 - DNA, 50 bp, Artificial
  Synthetic oligonucleotide
acattcccagggtattgccacgcaaggatccggtctacggaaaggaagga

SEQ ID NO: 154809 - DNA, 50 bp, Artificial
  Synthetic oligonucleotide
acattccgcagcttctagagccggcgcaccaatggactggcgttatccga

SEQ ID NO: 154810 - DNA, 50 bp, Artificial
  Synthetic oligonucleotide
acattgctcccatgccgggcgcgtttggagccgtattggacatgccagac

SEQ ID NO: 154811 - DNA, 50 bp, Artificial
  Synthetic oligonucleotide
accaaccgcaggaggcgcgaagtgttcctgagaatagggctcgggaaccc

SEQ ID NO: 154812 - DNA, 50 bp, Artificial
  Synthetic oligonucleotide
accacatacgcccgccccatcacagacgcctgccgttgcgtccgcgcctt

SEQ ID NO: 154813 - DNA, 50 bp, Artificial
  Synthetic oligonucleotide
accacgccagtgccccagaacgcggcacccacccatgggctgacctgtgc

SEQ ID NO: 154814 - DNA, 55 bp, Artificial
  Synthetic oligonucleotide
gcccgccgttaacgctcgccgcagatgagagagggtcataatggcactccgtcga

SEQ ID NO: 154815 - DNA, 50 bp, Artificial
  Synthetic oligonucleotide
accagcacataaacccggcagcggattttaccagcccccgcgttccgcgc

SEQ ID NO: 154816 - DNA, 50 bp, Artificial
  Synthetic oligonucleotide
accagctgacccgcacgatctaggcgttcgcacgagtccgcaccggaaaa

SEQ ID NO: 154817 - DNA, 50 bp, Artificial
  Synthetic oligonucleotide
accagtgagcgtccacaacgaccgcgaaatgacctgcggaaccagaacgc

SEQ ID NO: 154818 - DNA, 50 bp, Artificial
  Synthetic oligonucleotide
acccagcgacccattcatcgccgcctgagccataatctgggctttgcgaa

SEQ ID NO: 154819 - DNA, 50 bp, Artificial
  Synthetic oligonucleotide
aacatgagcatgcccgcgctgtttgccccgcgaacgtcaaccaaaaccaa

SEQ ID NO: 154820 - DNA, 50 bp, Artificial
  Synthetic oligonucleotide
aacatggttgggctgcgcacggggacacaatggacagaaacctcgggctg

SEQ ID NO: 154821 - DNA, 50 bp, Artificial
  Synthetic oligonucleotide
aaccactgtgggtcgggagtcaccggagcccactcctgctttcagtcact

SEQ ID NO: 154822 - DNA, 50 bp, Artificial
  Synthetic oligonucleotide
aaccagacatcgacgagcaacgcggggtcatggggcacggagcaaacctg

SEQ ID NO: 154823 - DNA, 50 bp, Artificial
  Synthetic oligonucleotide
aaccccgtttcttgaggcggtcccggattggttcgactacgtgcctcggg

SEQ ID NO: 154824 - DNA, 50 bp, Artificial
  Synthetic oligonucleotide
aacccctcttgcgcgtcttcgaacgccagcctgtctggtctcagcagccg

SEQ ID NO: 154825 - DNA, 55 bp, Artificial
  Synthetic oligonucleotide
gcttagcgtccgggacacgcgaccttgctcgggtgatttctctcgcgagttcgca

SEQ ID NO: 154826 - DNA, 50 bp, Artificial
  Synthetic oligonucleotide
aacccgaaccggccgcttgggagagcagacggtttaacgaaccgccatcg

SEQ ID NO: 154827 - DNA, 50 bp, Artificial
  Synthetic oligonucleotide
aacccgccatggttcagcaagccgcatgccagacagcgacagtcagaaag

SEQ ID NO: 154828 - DNA, 50 bp, Artificial
  Synthetic oligonucleotide
aaccctggtccggtaccgaaggactggcaggttaagacgatcgcccgaga

SEQ ID NO: 154829 - DNA, 50 bp, Artificial
  Synthetic oligonucleotide
aaccgaaaacacttcgtcaaccaaccgcataggcagccaatccgcccgga

SEQ ID NO: 154830 - DNA, 50 bp, Artificial
  Synthetic oligonucleotide
aaccgcattgggcggcccttctgtcagtgcgtgccccgactattatcccg

SEQ ID NO: 154831 - DNA, 50 bp, Artificial
  Synthetic oligonucleotide
aaccgcgcacgactgcgaccgccaagataccagtcatgactccaccgagc

SEQ ID NO: 154832 - DNA, 50 bp, Artificial
  Synthetic oligonucleotide
aacctttggatgagggggaacggtgcctgtcgccgtgagcgtaccccgga

SEQ ID NO: 154833 - DNA, 50 bp, Artificial
  Synthetic oligonucleotide
aacgacatcgcggatcggagacgttgccacgactatcggcaaggtcgcaa

SEQ ID NO: 154834 - DNA, 50 bp, Artificial
  Synthetic oligonucleotide
aacgccatatcgcgccgcgccacttgaagttcctccgcgtgataagccga

SEQ ID NO: 154835 - DNA, 50 bp, Artificial
  Synthetic oligonucleotide
aacgccatccgcccagaaatcccatccggctatgacagaggtgcgacagg

SEQ ID NO: 154836 - DNA, 55 bp, Artificial
  Synthetic oligonucleotide
gccatcgtacccggcatttgttctggaacccgtactcctacgaagcattccgcat

SEQ ID NO: 154837 - DNA, 50 bp, Artificial
  Synthetic oligonucleotide
aacgccgatgttgcaacccccgcacctccaaagggcgcgtatgaatcgcg

SEQ ID NO: 154838 - DNA, 50 bp, Artificial
  Synthetic oligonucleotide
aacgcgagcaagcgaccttgccatggggagcggatttggctctattgccc

SEQ ID NO: 154839 - DNA, 50 bp, Artificial
  Synthetic oligonucleotide
aacggaagggcgtcgggctgagcaaagacaccgtcgaccgcatttggaag

SEQ ID NO: 154840 - DNA, 50 bp, Artificial
  Synthetic oligonucleotide
aacggatgccccagagggattgacgcgcatgtccgtgtccgacgtttccg

SEQ ID NO: 154841 - DNA, 50 bp, Artificial
  Synthetic oligonucleotide
aaaagccgcgctggtccccaaacagtctgggctcgatgataacggcctcg

SEQ ID NO: 154842 - DNA, 50 bp, Artificial
  Synthetic oligonucleotide
aaaaggcgaaggtgtgaggctcaggagcccgaaggcctaagcagccccaa

SEQ ID NO: 154843 - DNA, 50 bp, Artificial
  Synthetic oligonucleotide
aaaagggggacgtggttcaggcgagacgtgctttcagacgggacgcgtgt

SEQ ID NO: 154844 - DNA, 50 bp, Artificial
  Synthetic oligonucleotide
aaaccccctcgctggacaggccccaaaactaggccgactccgtctgaccc

SEQ ID NO: 154845 - DNA, 50 bp, Artificial
  Synthetic oligonucleotide
aaaccggcgccgtctcattcgcccctcacgagaccctattccgtcctacg

SEQ ID NO: 154846 - DNA, 50 bp, Artificial
  Synthetic oligonucleotide
aaacgactcgttcgcctctacgccgctcagtcgccattcgggtctcccac

SEQ ID NO: 154847 - DNA, 55 bp, Artificial
  Synthetic oligonucleotide
cgatgtacgtgccgtactacgatccggcagcggtttacgggacttggccctatgc

SEQ ID NO: 154848 - DNA, 50 bp, Artificial
  Synthetic oligonucleotide
aaacgatcgctccgcgaaagaaaggcaaccccggttcagggcggcaggcc

SEQ ID NO: 154849 - DNA, 50 bp, Artificial
  Synthetic oligonucleotide
aaacgcagccggaagctgccgttgcagagtcggtcgttacggaaactgcc

SEQ ID NO: 154850 - DNA, 50 bp, Artificial
  Synthetic oligonucleotide
aaacgggcggtccagacatcccaccgggatacgggttcccgcttgatacc

SEQ ID NO: 154851 - DNA, 50 bp, Artificial
  Synthetic oligonucleotide
aaacggtcgcctctggtgggtagcgctcgaacggatcattgcttccaccg

SEQ ID NO: 154852 - DNA, 50 bp, Artificial
  Synthetic oligonucleotide
aaacggtgagcgtacgatccggactgccggatgcagtaccaaggtgacgg

SEQ ID NO: 154853 - DNA, 50 bp, Artificial
  Synthetic oligonucleotide
aaactcacggttgtgtcgcgttcagcctcccgagagcggcgtagggcttc

SEQ ID NO: 154854 - DNA, 50 bp, Artificial
  Synthetic oligonucleotide
aaagcacactccacgctccgctcaagcgacacaaccggcgctccaaatgc

SEQ ID NO: 154855 - DNA, 50 bp, Artificial
  Synthetic oligonucleotide
aaagcagcatcatagtcgccgggagcggcatccgagggatcctccgggac

SEQ ID NO: 154856 - DNA, 50 bp, Artificial
  Synthetic oligonucleotide
aaaggcttgttcacggcagtctcactcacgctggggctccgcaaccctgt

SEQ ID NO: 154857 - DNA, 50 bp, Artificial
  Synthetic oligonucleotide
aaagtgtcgcagggggccttttacggcagcgcttgcttccccgtcgcagc

SEQ ID NO: 154858 - DNA, 55 bp, Artificial
  Synthetic oligonucleotide
cgctgcagagcaaatccgtcccgtaaggaggttcttggcaatggcgaaactcagt

SEQ ID NO: 154859 - DNA, 50 bp, Artificial
  Synthetic oligonucleotide
aaatacggatcgggagtgacgggttcaggatgcgcggaacaaccaggccg

SEQ ID NO: 154860 - DNA, 50 bp, Artificial
  Synthetic oligonucleotide
aaatcgcgccgtgcgtgggaacgatctcgagcatcggagccagatcagaa

SEQ ID NO: 154861 - DNA, 50 bp, Artificial
  Synthetic oligonucleotide
aaattctcctactacgcgcgcatcaaacgcccccgagcggtcccgaaggg

SEQ ID NO: 154862 - DNA, 50 bp, Artificial
  Synthetic oligonucleotide
aaattgtccgtccccatgaccccgggccccactctaccggccctgcgtga

SEQ ID NO: 154863 - DNA, 50 bp, Artificial
  Synthetic oligonucleotide
aacaccccagacgggggtcaaattctctcgcgcctgccataccgcatcca

SEQ ID NO: 154864 - DNA, 50 bp, Artificial
  Synthetic oligonucleotide
aacacgaccgacggataccacttgctcggcgagtgactcgggccaatgca

SEQ ID NO: 154865 - DNA, 50 bp, Artificial
  Synthetic oligonucleotide
aagcacgggatctctccgtggatgggtgaaagggccgcggaaacatacga

SEQ ID NO: 154866 - DNA, 50 bp, Artificial
  Synthetic oligonucleotide
aagcccagttcggcccattgattgacctcgtgcactcagcgttcgcgctc

SEQ ID NO: 154867 - DNA, 50 bp, Artificial
  Synthetic oligonucleotide
aagccggcgacactaggggatcgctacttgccgaagactggggccagaga

SEQ ID NO: 154868 - DNA, 50 bp, Artificial
  Synthetic oligonucleotide
aagccgttaagctggaggccggtgccttacccgcctcgacacagcctcgt

SEQ ID NO: 154869 - DNA, 55 bp, Artificial
  Synthetic oligonucleotide
gcccagcctcgagcccaatgcggctgacaggtaattccaactcgccgaaatagcc

SEQ ID NO: 154870 - DNA, 50 bp, Artificial
  Synthetic oligonucleotide
aagcctttgaaacagccgacagaatgcgatcccacacgcctgccttgcgc

SEQ ID NO: 154871 - DNA, 50 bp, Artificial
  Synthetic oligonucleotide
aagcgaggcgggcataactcgtcacggctaccgacatttgggatggcgat

SEQ ID NO: 154872 - DNA, 50 bp, Artificial
  Synthetic oligonucleotide
aagcgcgggcgcgatgttagaacgggctgggtttgatccaaccatggaga

SEQ ID NO: 154873 - DNA, 50 bp, Artificial
  Synthetic oligonucleotide
aagcggcagggatactggccttggccccgagcgttatcgggaccgttcca

SEQ ID NO: 154874 - DNA, 50 bp, Artificial
  Synthetic oligonucleotide
aagctaacacggagttggcttccgtcatagcgatgctccctcgcgcacct

SEQ ID NO: 154875 - DNA, 50 bp, Artificial
  Synthetic oligonucleotide
aagctggaggccggtgccttacccgcctcgacacagcctcgttcggccct

SEQ ID NO: 154876 - DNA, 50 bp, Artificial
  Synthetic oligonucleotide
aagctggcgctctggcgagggccgtgacagatgtggagttggacatgacg

SEQ ID NO: 154877 - DNA, 50 bp, Artificial
  Synthetic oligonucleotide
aaggaatggtggtttcgaatccatccgatccgcgattgggcgcgttggga

SEQ ID NO: 154878 - DNA, 50 bp, Artificial
  Synthetic oligonucleotide
aaggacccacaggatgctggctcgtggggaggccgtgagggccccaggtt

SEQ ID NO: 154879 - DNA, 50 bp, Artificial
  Synthetic oligonucleotide
aaggacggtctggaaagtccgttaggcgtctgcccggaatgtgccaccag

SEQ ID NO: 154880 - DNA, 55 bp, Artificial
  Synthetic oligonucleotide
gctaacagcggcccgggagtcaatcgaattggtgctcatccggattcgtaagctg

SEQ ID NO: 154881 - DNA, 50 bp, Artificial
  Synthetic oligonucleotide
aaggaggaataccatcgcgggttgataggtgtggccgttccgctgcgacg

SEQ ID NO: 154882 - DNA, 50 bp, Artificial
  Synthetic oligonucleotide
aaggcaatggactggttgtcgccccgcaaactcgacaagcccgcggtcgt

SEQ ID NO: 154883 - DNA, 50 bp, Artificial
  Synthetic oligonucleotide
aaggccaggcacggctagcgggaatcactcggacgagagacggacatgag

SEQ ID NO: 154884 - DNA, 50 bp, Artificial
  Synthetic oligonucleotide
aacggcaatcaaagccacgcacgttccgggcacgccagacgatagcgata

SEQ ID NO: 154885 - DNA, 50 bp, Artificial
  Synthetic oligonucleotide
aacggcgggtggcctctaggttgacggctcactccttcgtctcctgacac

SEQ ID NO: 154886 - DNA, 50 bp, Artificial
  Synthetic oligonucleotide
aacgtagcctccgccgaatgcccattcgtagcccgcaaactgcaacgatg

SEQ ID NO: 154887 - DNA, 50 bp, Artificial
  Synthetic oligonucleotide
aacgtcgccgcctacgttgcgtggctgaaggacgaccagcggagatcggt

SEQ ID NO: 154888 - DNA, 50 bp, Artificial
  Synthetic oligonucleotide
aacgtcgtgtgagcccgttcccgaccgcctgagtcccatttccgatcccg

SEQ ID NO: 154889 - DNA, 50 bp, Artificial
  Synthetic oligonucleotide
aactcctccgggtttcgcccgaacagtgccaggtagctcttgaccttcgc

SEQ ID NO: 154890 - DNA, 50 bp, Artificial
  Synthetic oligonucleotide
aactcgtcgctctggtcacggtcctgtcagcgacctgccttttggcaggc

SEQ ID NO: 154891 - DNA, 55 bp, Artificial
  Synthetic oligonucleotide
cgcaaccgagaaaggtcttggaaacaaggtctgttactgccgaatgccatggggc

SEQ ID NO: 154892 - DNA, 50 bp, Artificial
  Synthetic oligonucleotide
aactgcctcacgttgagtggcagttccgaccgatcaacggctcgctcctt

SEQ ID NO: 154893 - DNA, 50 bp, Artificial
  Synthetic oligonucleotide
aactggcgaacccgcgctccctatcgcccctcggatcaaccatggggtag

SEQ ID NO: 154894 - DNA, 50 bp, Artificial
  Synthetic oligonucleotide
aacttgcgcacccttagcggtcagttcgcagcgccgagacatggcgaaaa

SEQ ID NO: 154895 - DNA, 50 bp, Artificial
  Synthetic oligonucleotide
aagaatggcggcccgatttgcctgatgccctcggctaaccggatgcggtc

SEQ ID NO: 154896 - DNA, 50 bp, Artificial
  Synthetic oligonucleotide
aagaccccgctgcacccatgttcgccccgaaacagcccgttcgtcattcg

SEQ ID NO: 154897 - DNA, 50 bp, Artificial
  Synthetic oligonucleotide
aagaccgaggttacgccaatccacgccactgtgagactgcggacgcaacg

SEQ ID NO: 154898 - DNA, 50 bp, Artificial
  Synthetic oligonucleotide
aagacggcggactaggccacaaaagcggcacgcgggtcaatggggcggga

SEQ ID NO: 154899 - DNA, 50 bp, Artificial
  Synthetic oligonucleotide
aagagaggcactgcgaagaccgggaagcaccgcaaacacaagaatgccga

SEQ ID NO: 154900 - DNA, 50 bp, Artificial
  Synthetic oligonucleotide
aagagctaggggcaacgtcgtggctcttgcacgctcagcaccctaagcct

SEQ ID NO: 154901 - DNA, 50 bp, Artificial
  Synthetic oligonucleotide
aagatgcgcgtgcggtcttggaggcatgcttggaggcatatcgtgggcgg

SEQ ID NO: 154902 - DNA, 54 bp, Artificial
  Synthetic oligonucleotide
actctgctccgcggtggttcacgcggggtttccctgataccgctcggttccaaa

SEQ ID NO: 154903 - DNA, 50 bp, Artificial
  Synthetic oligonucleotide
aagatgcgtgcatgtggtacgtctacatcctccgcagctcggttcgccgg

SEQ ID NO: 154904 - DNA, 50 bp, Artificial
  Synthetic oligonucleotide
aagattacgggcgtccccgcgccgtcataacaacaggggtaatggcgctt

SEQ ID NO: 154905 - DNA, 50 bp, Artificial
  Synthetic oligonucleotide
aagcaagcggtgtgccattgtgtacaaaccgaaggggtgcccccgctcaa

SEQ ID NO: 154906 - DNA, 50 bp, Artificial
  Synthetic oligonucleotide
agccccgtttgaacccgccatggttcagcaagccgcatgccagacagcga

SEQ ID NO: 154907 - DNA, 50 bp, Artificial
  Synthetic oligonucleotide
agccgaatgggctccaagcgagtatcccccaccggcatcgtagggacatc

SEQ ID NO: 154908 - DNA, 50 bp, Artificial
  Synthetic oligonucleotide
agccgcctagctgacgtcgttcgctagacgcactttgctggagtaccccc

SEQ ID NO: 154909 - DNA, 50 bp, Artificial
  Synthetic oligonucleotide
agccgctcattttgtcgtctacccacgcttgactggtgggtttcgccgca

SEQ ID NO: 154910 - DNA, 50 bp, Artificial
  Synthetic oligonucleotide
agcgagatcggtgtggaaggcccgatggacgttcccctggctatggtctc

SEQ ID NO: 154911 - DNA, 50 bp, Artificial
  Synthetic oligonucleotide
agcgccccgaatctgctaacaccttcccatgacatcgccagagagcgtcg

SEQ ID NO: 154912 - DNA, 50 bp, Artificial
  Synthetic oligonucleotide
agcggaaccgcacgagcgagacccagttgcgcgtaatgacgttggtcgat

SEQ ID NO: 154913 - DNA, 54 bp, Artificial
  Synthetic oligonucleotide
tccgttcgtggatgtgtccgtttatcggcccctgtctctggtccaaaaattccc

SEQ ID NO: 154914 - DNA, 55 bp, Artificial
  Synthetic oligonucleotide
cgcaactggtaacgctacgagcgcgggcgacctctgcacagagcgaacatacgtc

SEQ ID NO: 154915 - DNA, 50 bp, Artificial
  Synthetic oligonucleotide
agcggccccttaaggtggacctatcagacgagacagaagtttcgtcgaat

SEQ ID NO: 154916 - DNA, 50 bp, Artificial
  Synthetic oligonucleotide
agcggtcccgaagggtagaaccatgggcgagcggtccgtctccgctcttc

SEQ ID NO: 154917 - DNA, 50 bp, Artificial
  Synthetic oligonucleotide
agcgtcttgggaaagctcgcacagctcgcttatcaggaagccggtcgcaa

SEQ ID NO: 154918 - DNA, 50 bp, Artificial
  Synthetic oligonucleotide
agcgttgttgatccagacgccagcatcgttctcgcgaccgggtcgaatgc

SEQ ID NO: 154919 - DNA, 50 bp, Artificial
  Synthetic oligonucleotide
agctcacaaggtcctccgcaagccgcctagctgacgtcgttcgctagacg

SEQ ID NO: 154920 - DNA, 50 bp, Artificial
  Synthetic oligonucleotide
agctgtcgcaaacgtcgcaagccccagacagccagtcgaacctcgtatcg

SEQ ID NO: 154921 - DNA, 50 bp, Artificial
  Synthetic oligonucleotide
agcttagcgccaggcctagttccaagcgcaccgagggtcggctcttctcg

SEQ ID NO: 154922 - DNA, 50 bp, Artificial
  Synthetic oligonucleotide
aggcaaccagaggttcgcacgggcaacgtaaggcttcgcagcacagacaa

SEQ ID NO: 154923 - DNA, 50 bp, Artificial
  Synthetic oligonucleotide
aggcgaaatggtccgggggcatcgacggtgcaggaggccaaaaccagaga

SEQ ID NO: 154924 - DNA, 50 bp, Artificial
  Synthetic oligonucleotide
agggccgcgcatttgccaagaagcgcctctgaccggtaagttcaccctcc

SEQ ID NO: 154925 - DNA, 55 bp, Artificial
  Synthetic oligonucleotide
gctcgcatatgattcgttctagggtccgcgcgtcggattgggtgggatcacaggt

SEQ ID NO: 154926 - DNA, 50 bp, Artificial
  Synthetic oligonucleotide
agggcgaatcgatcagactgccgccgctgtgcatgactgccggccacggt

SEQ ID NO: 154927 - DNA, 50 bp, Artificial
  Synthetic oligonucleotide
agggctccggatggtcaaagtgacccgttcgtgcggtgcaccaaaagcac

SEQ ID NO: 154928 - DNA, 50 bp, Artificial
  Synthetic oligonucleotide
agggcttcgcttctgattcgctcggacgcgaaaacgctctagtccggagc

SEQ ID NO: 154929 - DNA, 50 bp, Artificial
  Synthetic oligonucleotide
agagcgtggctcttagagaggccggtgcgagcctaagcccccttgtgaag

SEQ ID NO: 154930 - DNA, 50 bp, Artificial
  Synthetic oligonucleotide
agagctgccgcggtttgatcgggctaccccgcaaggaatggcccacacct

SEQ ID NO: 154931 - DNA, 50 bp, Artificial
  Synthetic oligonucleotide
agaggagggctttccggctgggggagcgatttactaatccggcagatcgc

SEQ ID NO: 154932 - DNA, 50 bp, Artificial
  Synthetic oligonucleotide
agagtgggcgcgaccgtagaattgccgtgcctcgatggcgcatcggttga

SEQ ID NO: 154933 - DNA, 50 bp, Artificial
  Synthetic oligonucleotide
agagttcgcagtggatttcccgagatcctgcgtcggtgcggagttttcat

SEQ ID NO: 154934 - DNA, 50 bp, Artificial
  Synthetic oligonucleotide
agatcggccagacatccgagccccgcctagctagcagaaatccgccgcac

SEQ ID NO: 154935 - DNA, 50 bp, Artificial
  Synthetic oligonucleotide
agatgcccgttgctccgagcagtgcgatagccggccagtatctcatgccg

SEQ ID NO: 154936 - DNA, 55 bp, Artificial
  Synthetic oligonucleotide
ggacgaaatcttcggaattctctcccatcgggcgatcgactatcgggagcgtcgc

SEQ ID NO: 154937 - DNA, 50 bp, Artificial
  Synthetic oligonucleotide
agatgcgtccgttgggcacggcggataatgtgaatccgtcactcagcccc

SEQ ID NO: 154938 - DNA, 50 bp, Artificial
  Synthetic oligonucleotide
agatgggtggctccgcctccgacgtacttagctcagcgaccgcaaccttc

SEQ ID NO: 154939 - DNA, 50 bp, Artificial
  Synthetic oligonucleotide
agatgtcaagggccgcataccggccgaacgcccctcgcctgctctcacga

SEQ ID NO: 154940 - DNA, 50 bp, Artificial
  Synthetic oligonucleotide
agcaacgaacggcggagggaagcagctatggcatcgcatgtagcacggga

SEQ ID NO: 154941 - DNA, 50 bp, Artificial
  Synthetic oligonucleotide
agcaccaaaattggctccgttcgccacgggctcggctgtcattgcagacg

SEQ ID NO: 154942 - DNA, 50 bp, Artificial
  Synthetic oligonucleotide
agcacgttggtgtcacgtcagattagtcgcccggccttatttgcgcggca

SEQ ID NO: 154943 - DNA, 50 bp, Artificial
  Synthetic oligonucleotide
agcagggcgaatcaaggcggggcggttgctcgcgctcgtctatatgttct

SEQ ID NO: 154944 - DNA, 50 bp, Artificial
  Synthetic oligonucleotide
agcagtaaatacatgcagcaggggacctacgcttaaggcgggccggggga

SEQ ID NO: 154945 - DNA, 50 bp, Artificial
  Synthetic oligonucleotide
agcatataggcacgcttggggtcctgcgattggtacccatccagtccgct

SEQ ID NO: 154946 - DNA, 50 bp, Artificial
  Synthetic oligonucleotide
agcatgtagcgtgtcggctttcggagggggacagcggaaaaatccggggg

SEQ ID NO: 154947 - DNA, 55 bp, Artificial
  Synthetic oligonucleotide
gcacggatacacgtcggctcttcgcccaaggttcgctagcttcccgttcaatgca

SEQ ID NO: 154948 - DNA, 50 bp, Artificial
  Synthetic oligonucleotide
agcatttgctgacggggcttaacgttgcgttaatgaacgccggggcggca

SEQ ID NO: 154949 - DNA, 50 bp, Artificial
  Synthetic oligonucleotide
agccaccggcaggccctaagctcgcctcacttgagcaaaacgcttctaga

SEQ ID NO: 154950 - DNA, 50 bp, Artificial
  Synthetic oligonucleotide
agccacgcttacggtcgcccgtggtttcacgcccgtagactcgcacaatt

SEQ ID NO: 154951 - DNA, 50 bp, Artificial
  Synthetic oligonucleotide
agccccatcatgccgtcagcacgtttctgcctttggttcggcagcacgca

SEQ ID NO: 154952 - DNA, 50 bp, Artificial
  Synthetic oligonucleotide
cgaaaccatttcgcgcacgctagggcagcttgagtccgccggctggatcg

SEQ ID NO: 154953 - DNA, 50 bp, Artificial
  Synthetic oligonucleotide
cgcacgtcgggaggagggataggttctcaagatttgcatcgcgggggaga

SEQ ID NO: 154954 - DNA, 50 bp, Artificial
  Synthetic oligonucleotide
cgcccgagtgcgttggactccacgggaggagcggcaagtctgagcgggga

SEQ ID NO: 154955 - DNA, 50 bp, Artificial
  Synthetic oligonucleotide
cgcgcaatgcccctggtgggcgcgaacccgcaaacgtccacgatcgatgc

SEQ ID NO: 154956 - DNA, 50 bp, Artificial
  Synthetic oligonucleotide
cggacgactatgattgctcgattaatcagacaactattgcgcgagatttt

SEQ ID NO: 154957 - DNA, 50 bp, Artificial
  Synthetic oligonucleotide
cggagttggcttccgtcatagcgatgctccctcgcgcacctctctcacta

SEQ ID NO: 154958 - DNA, 55 bp, Artificial
  Synthetic oligonucleotide
cgcggcagacctatcggccgcgaaggttgtgtttaggctttccaagaacgcgcgg

SEQ ID NO: 154959 - DNA, 50 bp, Artificial
  Synthetic oligonucleotide
cggatccagatcccccgagcggctactcatcaccaatccggacgttggtg

SEQ ID NO: 154960 - DNA, 50 bp, Artificial
  Synthetic oligonucleotide
cgggaaaccgcgagcccgaacgcttggcgaacgtgctccgcattggaagg

SEQ ID NO: 154961 - DNA, 50 bp, Artificial
  Synthetic oligonucleotide
cggtctccgccctccgggttacgatcctctcgcgatccagtgtccggctc

SEQ ID NO: 154962 - DNA, 50 bp, Artificial
  Synthetic oligonucleotide
cgtccggaaacgcccttgtcgtaatcgagcctatccgcctgcagaggcct

SEQ ID NO: 154963 - DNA, 50 bp, Artificial
  Synthetic oligonucleotide
cgtgagcgtgatgggcgcgaacgaatgggggctcgccaaaatcaagggca

SEQ ID NO: 154964 - DNA, 50 bp, Artificial
  Synthetic oligonucleotide
ctaggctcggtccaactgaaccccggctgattcggtgggcgcatatgggc

SEQ ID NO: 154965 - DNA, 50 bp, Artificial
  Synthetic oligonucleotide
ctcttcagagcccgatgtgtcgcaactttgagtgccgcaatggacattcc

SEQ ID NO: 154966 - DNA, 50 bp, Artificial
  Synthetic oligonucleotide
ctgacgaggcgcacaggattgccttcggcttttcaccgcctgacgacccg

SEQ ID NO: 154967 - DNA, 50 bp, Artificial
  Synthetic oligonucleotide
ctgggaccgtgcggacgacttgcgaggggaccgggcaaatgtccccggct

SEQ ID NO: 154968 - DNA, 50 bp, Artificial
  Synthetic oligonucleotide
cttgcaagcaatcaagggccaaaggcgcagttgagcgctaaccaccgcga

SEQ ID NO: 154969 - DNA, 55 bp, Artificial
  Synthetic oligonucleotide
gctgagcgttgttttgtccgatgcgccaagctccagaaataggggaattgatggc

SEQ ID NO: 154970 - DNA, 50 bp, Artificial
  Synthetic oligonucleotide
gaaccccggctgattcggtgggcgcatatgggcgagaccacgacaattca

SEQ ID NO: 154971 - DNA, 50 bp, Artificial
  Synthetic oligonucleotide
gaaggaccagccaacgcccaatccgtcttacggacgctgccagcttggac

SEQ ID NO: 154972 - DNA, 50 bp, Artificial
  Synthetic oligonucleotide
agggtagctccggttctgtgaaactcgaaatcatcggaaggctagccaaa

SEQ ID NO: 154973 - DNA, 50 bp, Artificial
  Synthetic oligonucleotide
aggtgagcagcttacatagacaggcgcctcagcgcacgacctgctttgct

SEQ ID NO: 154974 - DNA, 50 bp, Artificial
  Synthetic oligonucleotide
aggttatgggcgaggtgcccgcagccatcgtcgtcgcgtgtatccttcag

SEQ ID NO: 154975 - DNA, 50 bp, Artificial
  Synthetic oligonucleotide
aggttcaaatcggctggcaggtctttcggcgtcgcgaagctacgtccgag

SEQ ID NO: 154976 - DNA, 50 bp, Artificial
  Synthetic oligonucleotide
agtgaccaacaggcgcgctggcgtagagttatgcgtctcgactagctggc

SEQ ID NO: 154977 - DNA, 50 bp, Artificial
  Synthetic oligonucleotide
agttcgccgtttgggcaaccgagccccgagcaacactgtcttgccaagcc

SEQ ID NO: 154978 - DNA, 50 bp, Artificial
  Synthetic oligonucleotide
atacggcttgctggcgtatgaaccgccgacctcgatccatcccagcgtgt

SEQ ID NO: 154979 - DNA, 50 bp, Artificial
  Synthetic oligonucleotide
atgcgagagctatgccgcgcaagtccaaaggtgcccgactccatcttaaa

SEQ ID NO: 154980 - DNA, 55 bp, Artificial
  Synthetic oligonucleotide
cggaacagacaccaagggttgcgacaattaagcctccgttaaccacacccgcgca

SEQ ID NO: 154981 - DNA, 50 bp, Artificial
  Synthetic oligonucleotide
atgtcgaacgtgccgaacatgcacgacttgccgttcctgaagccaaaata

SEQ ID NO: 154982 - DNA, 50 bp, Artificial
  Synthetic oligonucleotide
caacgcccaatccgtcttacggacgctgccagcttggacatggctgcaaa

SEQ ID NO: 154983 - DNA, 50 bp, Artificial
  Synthetic oligonucleotide
caatgggggacggcggcacatccgcaagctatcatcccaaagccccgcgc

SEQ ID NO: 154984 - DNA, 50 bp, Artificial
  Synthetic oligonucleotide
cactgccggacattgctcccatgccgggcgcgtttggagccgtattggac

SEQ ID NO: 154985 - DNA, 50 bp, Artificial
  Synthetic oligonucleotide
cccctcgatgccggatttattatccgcgaggcatcatcgtttgtaaccga

SEQ ID NO: 154986 - DNA, 50 bp, Artificial
  Synthetic oligonucleotide
cccgacaacctgtttcgcgcggggctttgggatgatagcttgcggatgtg

SEQ ID NO: 154987 - DNA, 50 bp, Artificial
  Synthetic oligonucleotide
ccgacgctagtgcgacaaccccgcccgaacgaggtcacgaattggtatgc

SEQ ID NO: 154988 - DNA, 50 bp, Artificial
  Synthetic oligonucleotide
ccgcaattccagagtgtctattcgccgagccccggaccggaagtgatgct

SEQ ID NO: 154989 - DNA, 50 bp, Artificial
  Synthetic oligonucleotide
ccgcgcccgaaaacttgcaactatcgcggaggacccaaaacgggcatctg

SEQ ID NO: 154990 - DNA, 50 bp, Artificial
  Synthetic oligonucleotide
ccttcaccgaagggggccggtacagtcgaaaggtgcgtcgcggctcgttt

SEQ ID NO: 154991 - DNA, 55 bp, Artificial
  Synthetic oligonucleotide
cgactttcatcttgccacctcagaacaactagcctgacaatgagaccgcaacttc

SEQ ID NO: 154992 - DNA, 50 bp, Artificial
  Synthetic oligonucleotide
acgcagggccggtagagtggggcccggggtcatggggacggacaatttcg

SEQ ID NO: 154993 - DNA, 50 bp, Artificial
  Synthetic oligonucleotide
acgccaagctgattccccgagccccgaaaacaggctaccgagggcggatg

SEQ ID NO: 154994 - DNA, 50 bp, Artificial
  Synthetic oligonucleotide
acgccaccccaccacaactgcggggaccataagggaacgaccgtggcgtt

SEQ ID NO: 154995 - DNA, 50 bp, Artificial
  Synthetic oligonucleotide
acgccataagttcacggagcccgccggatacacgacttagggcaggcact

SEQ ID NO: 154996 - DNA, 50 bp, Artificial
  Synthetic oligonucleotide
acgcccgatttcaccagtgagcgtccacaacgaccgcgaaatgacctgcg

SEQ ID NO: 154997 - DNA, 50 bp, Artificial
  Synthetic oligonucleotide
acgcccttgtcgtaatcgagcctatccgcctgcagaggcctatcggaggc

SEQ ID NO: 154998 - DNA, 50 bp, Artificial
  Synthetic oligonucleotide
acgcctgatcccggcttgcgataccagtgtcctacacgcgctcgtcatcg

SEQ ID NO: 154999 - DNA, 50 bp, Artificial
  Synthetic oligonucleotide
acgcgaacgtaactcttatctgggtgcccggggaatagtcccgcgctgcc

SEQ ID NO: 155000 - DNA, 50 bp, Artificial
  Synthetic oligonucleotide
acgcgtcataggccactcggaaatcctggtcccggaacgacgtcatggcg

SEQ ID NO: 155001 - DNA, 50 bp, Artificial
  Synthetic oligonucleotide
acgctccaacgagtcgaaaaacccctcttgcgcgtcttcgaacgccagcc

SEQ ID NO: 155002 - DNA, 55 bp, Artificial
  Synthetic oligonucleotide
gctgatacggctcgtgaagtcaattgtattgggccttacttaatccctggcgatg

SEQ ID NO: 155003 - DNA, 50 bp, Artificial
  Synthetic oligonucleotide
acgctggcaggcctccgtatagagtcgagggtccggcttaagtgtgccga

SEQ ID NO: 155004 - DNA, 50 bp, Artificial
  Synthetic oligonucleotide
acgctggtttcgagcggcccctacggctctcatcgcgctatcgctattga

SEQ ID NO: 155005 - DNA, 50 bp, Artificial
  Synthetic oligonucleotide
acggaaacgtcggacacggacatgcgcgtcaatccctctggggcatccgt

SEQ ID NO: 155006 - DNA, 50 bp, Artificial
  Synthetic oligonucleotide
acggaaagcgcggtgggcttggcgcaaacaatgctgacggtcatcgtact

SEQ ID NO: 155007 - DNA, 50 bp, Artificial
  Synthetic oligonucleotide
acggaccctgtttagggcagcgttaggcaggttcacggtttgctcggggg

SEQ ID NO: 155008 - DNA, 50 bp, Artificial
  Synthetic oligonucleotide
acggactgtcacgagactgacatccaaagcccctgccagacggacccgcc

SEQ ID NO: 155009 - DNA, 50 bp, Artificial
  Synthetic oligonucleotide
acggagcgtgccgtgtcaggtttgcggcgaacgatcgggagcggatcttc

SEQ ID NO: 155010 - DNA, 50 bp, Artificial
  Synthetic oligonucleotide
acggatcgggagcccacggatgttcggctggcgctaggaagtaaggcgct

SEQ ID NO: 155011 - DNA, 50 bp, Artificial
  Synthetic oligonucleotide
acggattcgcatcaaccgcatgcttggctcaccagggagggaacgccatg

SEQ ID NO: 155012 - DNA, 50 bp, Artificial
  Synthetic oligonucleotide
acggccctccacgatcgctcgttgcggccagagccaatacccgacacagg

SEQ ID NO: 155013 - DNA, 55 bp, Artificial
  Synthetic oligonucleotide
gcagccgcgttgcgatctgttctcgcgtagctgtaagtctcgctgcatcgcaccg

SEQ ID NO: 155014 - DNA, 50 bp, Artificial
  Synthetic oligonucleotide
acggctgcagtggccattcgtggacacgaccgctcctactccaaccgatc

SEQ ID NO: 155015 - DNA, 50 bp, Artificial
  Synthetic oligonucleotide
accggcggccgatgtgcaatagggttaacaggcccgccccaatcctagga

SEQ ID NO: 155016 - DNA, 50 bp, Artificial
  Synthetic oligonucleotide
accgggacggcgtgagtcggtaagtctggcgtacatcgttggctccgttt

SEQ ID NO: 155017 - DNA, 50 bp, Artificial
  Synthetic oligonucleotide
accgggtcctgggttggggcatgcgcgtcccttgccgttctcacatcagt

SEQ ID NO: 155018 - DNA, 50 bp, Artificial
  Synthetic oligonucleotide
accggtttttagggctacggatgccgggagacaagtccgctgcaaccgcc

SEQ ID NO: 155019 - DNA, 50 bp, Artificial
  Synthetic oligonucleotide
accgtacagagggcgcggctaggacgaagcagcggtgaaaatacgccgga

SEQ ID NO: 155020 - DNA, 50 bp, Artificial
  Synthetic oligonucleotide
accgttggctcccggctccattgtgcgagacaaatccacataaccccgct

SEQ ID NO: 155021 - DNA, 50 bp, Artificial
  Synthetic oligonucleotide
acctcacgcacgcaaacggaccggagcgcttaccctcgacaccgtagctg

SEQ ID NO: 155022 - DNA, 50 bp, Artificial
  Synthetic oligonucleotide
acctgcatccgtccgcgagagctggacagcgcgatgggacctgactttcg

SEQ ID NO: 155023 - DNA, 50 bp, Artificial
  Synthetic oligonucleotide
acctgcgctatgctgcatgacagaggtggtctgtccgccggtcggactcg

SEQ ID NO: 155024 - DNA, 60 bp, Artificial
  Synthetic oligonucleotide
ctgcacccctctcacggaagaaggagatcgctcccatggtgcccggcgttaccacatggc

SEQ ID NO: 155025 - DNA, 55 bp, Artificial
  Synthetic oligonucleotide
ggaatcgtttctgactgtggacgaggaaaggaaccaactcaacattatcgcagcg

SEQ ID NO: 155026 - DNA, 50 bp, Artificial
  Synthetic oligonucleotide
acctggcacaggagtttcgtcggaccgagctttgaatgtctgcgggccgc

SEQ ID NO: 155027 - DNA, 50 bp, Artificial
  Synthetic oligonucleotide
accttgctgatcgccactggatgggacacacgtcccgtgccccgaatttc

SEQ ID NO: 155028 - DNA, 50 bp, Artificial
  Synthetic oligonucleotide
accttgggaccgaccctacccgagggcccctgacagctccctgacagcac

SEQ ID NO: 155029 - DNA, 50 bp, Artificial
  Synthetic oligonucleotide
acgaaggggcacgcgcgcttcattggagaacgtcgatactggctcgtccg

SEQ ID NO: 155030 - DNA, 50 bp, Artificial
  Synthetic oligonucleotide
acgacagcagcccgccccaaggcgacggagcaagctcacagtgatccgct

SEQ ID NO: 155031 - DNA, 50 bp, Artificial
  Synthetic oligonucleotide
acgacatgacttcgctcgcgcccctcagtgccaatcccgcagctattcgt

SEQ ID NO: 155032 - DNA, 50 bp, Artificial
  Synthetic oligonucleotide
acgaccgcgaaatgacctgcggaaccagaacgctccaggcgacagggttc

SEQ ID NO: 155033 - DNA, 50 bp, Artificial
  Synthetic oligonucleotide
acgagccagtatcgacgttctccaatgaagcgcgcgtgccccttcgtgct

SEQ ID NO: 155034 - DNA, 50 bp, Artificial
  Synthetic oligonucleotide
acgatccagatcgaaatcaccgagcccagcaattgtgtgctcgcgcccga

SEQ ID NO: 155035 - DNA, 50 bp, Artificial
  Synthetic oligonucleotide
acgatgcttatgagaggtcgggagccccctcacccgctcactacgttcgc

SEQ ID NO: 155036 - DNA, 55 bp, Artificial
  Synthetic oligonucleotide
cgcgagcaagagccgacgatgattgcgtctgatcgccaaacgagtccctatgtcc

SEQ ID NO: 155037 - DNA, 50 bp, Artificial
  Synthetic oligonucleotide
acgcagcaacgtccatctcgggggcatgaaggaggcgcgtagcccgcact

SEQ ID NO: 155038 - DNA, 50 bp, Artificial
  Synthetic oligonucleotide
acgcagcgcagctgtctaccatttcagcgtgcctatcggcccagtgctct

SEQ ID NO: 155039 - DNA, 50 bp, Artificial
  Synthetic oligonucleotide
actttcagagcgggcggggttccatgcatcaaccgatcgacaggcaccat

SEQ ID NO: 155040 - DNA, 50 bp, Artificial
  Synthetic oligonucleotide
agaacgcatcgcttgtccgcagcggtgagaaggggactggacagcacctc

SEQ ID NO: 155041 - DNA, 50 bp, Artificial
  Synthetic oligonucleotide
agaagacacggcggatgctttgccgccactcgttcagacgggccgacgct

SEQ ID NO: 155042 - DNA, 50 bp, Artificial
  Synthetic oligonucleotide
agaaggagcgagccgttgatcggtcggaactgccactcaacgtgaggcag

SEQ ID NO: 155043 - DNA, 50 bp, Artificial
  Synthetic oligonucleotide
agaaggcggttcacaccgcggcagccgattggggtcagtccacgagatag

SEQ ID NO: 155044 - DNA, 50 bp, Artificial
  Synthetic oligonucleotide
agaatcaagcctgtgaccccggaaaccatgacgacggagcgaaccgggct

SEQ ID NO: 155045 - DNA, 50 bp, Artificial
  Synthetic oligonucleotide
agacatgcaagatgcccgttgctccgagcagtgcgatagccggccagtat

SEQ ID NO: 155046 - DNA, 50 bp, Artificial
  Synthetic oligonucleotide
agaccaccgggcggaatgtcaatgcaatcaaggcgttttcgccccgtaga

SEQ ID NO: 155047 - DNA, 55 bp, Artificial
  Synthetic oligonucleotide
gcaggggcttaccacgatggagcactatcatggccgacttggtcgtttcgtccgg

SEQ ID NO: 155048 - DNA, 50 bp, Artificial
  Synthetic oligonucleotide
agaccggttaagaaggcacccgaacgaagggcagtgatagcgacgccgga

SEQ ID NO: 155049 - DNA, 50 bp, Artificial
  Synthetic oligonucleotide
agacctgatcaatgtcacgggcacggcgaccattaacggcggcacggttc

SEQ ID NO: 155050 - DNA, 50 bp, Artificial
  Synthetic oligonucleotide
agacgcaaatcccatccgaaacgctgatgcctcaggggcgccagccgtaa

SEQ ID NO: 155051 - DNA, 50 bp, Artificial
  Synthetic oligonucleotide
agacgccagtgacccgaaccgcatcctggtgttgagcctcacctgcccgg

SEQ ID NO: 155052 - DNA, 50 bp, Artificial
  Synthetic oligonucleotide
agactcccttgagggccgaacgaggctgtgtcgaggcgggtaaggcaccg

SEQ ID NO: 155053 - DNA, 50 bp, Artificial
  Synthetic oligonucleotide
agactgccgccgctgtgcatgactgccggccacggttacaagggattcga

SEQ ID NO: 155054 - DNA, 50 bp, Artificial
  Synthetic oligonucleotide
agagagacggctgggcacgctttgctataaggggctcatcgagtccgtgc

SEQ ID NO: 155055 - DNA, 50 bp, Artificial
  Synthetic oligonucleotide
agagccatgcttaatccggacggaccgatgcggctcgcctaatgcggacg

SEQ ID NO: 155056 - DNA, 50 bp, Artificial
  Synthetic oligonucleotide
agagccattgggccgccaaggacggtctggaaagtccgttaggcgtctgc

SEQ ID NO: 155057 - DNA, 50 bp, Artificial
  Synthetic oligonucleotide
agagccccaaggtccaacgcaaaccgcgaggaggaaaaccgaacacccct

SEQ ID NO: 155058 - DNA, 55 bp, Artificial
  Synthetic oligonucleotide
gcatacgtacaaagcccggatcggaatgtgacggtgtcatcgtgtcatactcccg

SEQ ID NO: 155059 - DNA, 50 bp, Artificial
  Synthetic oligonucleotide
agagcctcctgcactgccgacgccgaagcaagggtgtggccgtgacggtt

SEQ ID NO: 155060 - DNA, 50 bp, Artificial
  Synthetic oligonucleotide
agagcgaatttcgcgacgtactgggcaaagggctatctaacgcgcggcgc

SEQ ID NO: 155061 - DNA, 50 bp, Artificial
  Synthetic oligonucleotide
acgggccgtaaatggagcacgattgcgcttcggccttcacagcgaggcag

SEQ ID NO: 155062 - DNA, 50 bp, Artificial
  Synthetic oligonucleotide
acgggcgggacagcgctccatggatcggggatgaacgaaggtgacaagtc

SEQ ID NO: 155063 - DNA, 50 bp, Artificial
  Synthetic oligonucleotide
acgggtcgtggttataggcagcgtggcctcggatcgcctggtgagcggac

SEQ ID NO: 155064 - DNA, 50 bp, Artificial
  Synthetic oligonucleotide
acggtaaggctcggctctgacgtgaccggaaatctcccggttgcgaacct

SEQ ID NO: 155065 - DNA, 50 bp, Artificial
  Synthetic oligonucleotide
acggtcgaccaaaacgtgctcacccccattcgcaccgtcgccccagccga

SEQ ID NO: 155066 - DNA, 50 bp, Artificial
  Synthetic oligonucleotide
acggtgaccgctgatgagagccacctctggcacggaaaggccgtactcaa

SEQ ID NO: 155067 - DNA, 50 bp, Artificial
  Synthetic oligonucleotide
acggtgccggccctgcttcgcaagaccaaggcgtgggcggactacgacga

SEQ ID NO: 155068 - DNA, 50 bp, Artificial
  Synthetic oligonucleotide
acgtcacgtcgcactcgggaatggccggcgcggacagacctgtggtccgt

SEQ ID NO: 155069 - DNA, 55 bp, Artificial
  Synthetic oligonucleotide
aggctggcacgtctcggcaaccaaggggatgcacggcggaatgaagttctgccac

SEQ ID NO: 155070 - DNA, 50 bp, Artificial
  Synthetic oligonucleotide
acgtcgcaagccccagacagccagtcgaacctcgtatcgcccgccaagtc

SEQ ID NO: 155071 - DNA, 50 bp, Artificial
  Synthetic oligonucleotide
acgtggccggtaggccgggagttccaatcttggccggtccgtttaatcca

SEQ ID NO: 155072 - DNA, 50 bp, Artificial
  Synthetic oligonucleotide
acgttgccgccaggctccccgctcaggaagagcatatttccgtgttccta

SEQ ID NO: 155073 - DNA, 50 bp, Artificial
  Synthetic oligonucleotide
actacccacgtagcggcgatccgagggtgaggcgtcggctggaacaggct

SEQ ID NO: 155074 - DNA, 50 bp, Artificial
  Synthetic oligonucleotide
actacgcgcgcatcaaacgcccccgagcggtcccgaagggtagaaccatg

SEQ ID NO: 155075 - DNA, 50 bp, Artificial
  Synthetic oligonucleotide
actcaatgtaggccgatcacccccggtgtcaacgtgcctttcggcgggag

SEQ ID NO: 155076 - DNA, 50 bp, Artificial
  Synthetic oligonucleotide
actcagaccgtccggacagtcagaatcgtgccgccctagccgcgctcaga

SEQ ID NO: 155077 - DNA, 50 bp, Artificial
  Synthetic oligonucleotide
actcgcgatcgctctcacgcaggagcagccaccttacgcttggcccaagt

SEQ ID NO: 155078 - DNA, 50 bp, Artificial
  Synthetic oligonucleotide
actctacggcccgcccatgacattttgcgcagcggtgctgaaagacgccg

SEQ ID NO: 155079 - DNA, 50 bp, Artificial
  Synthetic oligonucleotide
actctgaaggcttgggggctgatgctggatggtgtcaatccggtggcccg

SEQ ID NO: 155080 - DNA, 55 bp, Artificial
  Synthetic oligonucleotide
gcatcaacgctctccgctggtgtccgcaactatggcagccgcttagccattgccc

SEQ ID NO: 155081 - DNA, 50 bp, Artificial
  Synthetic oligonucleotide
actgcccgcgcggccacgaatacgcaaccttcatggacgttattcgcgag

SEQ ID NO: 155082 - DNA, 50 bp, Artificial
  Synthetic oligonucleotide
actgctatgtcctaccccgctcgtcccgctttgacccgtagcgttgccaa

SEQ ID NO: 155083 - DNA, 50 bp, Artificial
  Synthetic oligonucleotide
acttacccgcgacctccagaccatcacagctcgggaaattggccgcgcat

SEQ ID NO: 155084 - DNA, 50 bp, Artificial
  Synthetic oligonucleotide
acttgtcgcctcccttcggctgcacgttctgagctcccgtcgacgcttcg

SEQ ID NO: 155085 - DNA, 55 bp, Artificial
  Synthetic oligonucleotide
cgcgagagtcacggcatattgtagcctttgacctgtcgggtacgacatctcgtgc

SEQ ID NO: 155086 - DNA, 55 bp, Artificial
  Synthetic oligonucleotide
agctttcgtcgccgttcacaacgaccggaggttgaattccgatgggatccgatcg

SEQ ID NO: 155087 - DNA, 55 bp, Artificial
  Synthetic oligonucleotide
cgcttggttcacgaagcctcaagcaccgtccggagcattgaccggcattccgcca

SEQ ID NO: 155088 - DNA, 55 bp, Artificial
  Synthetic oligonucleotide
cgagttcaccagggctccgacgggcacgggacatgcgcgaaacagcgctcatcct

SEQ ID NO: 155089 - DNA, 60 bp, Artificial
  Synthetic oligonucleotide
gaacaccaatcgagggcctcgccattgggtgcgaagtgctcgtgtacataatgcccctac

SEQ ID NO: 155090 - DNA, 59 bp, Artificial
  Synthetic oligonucleotide
acacgacctgcgaggtatgtggcgtctctgactcgactgttactacgagcggaccttac

SEQ ID NO: 155091 - DNA, 50 bp, Artificial
  Synthetic oligonucleotide
aacggcagaatccgcccaatcagcgacccagcagacctccgtgcataccg

SEQ ID NO: 155092 - DNA, 50 bp, Artificial
  Synthetic oligonucleotide
aacggcaggaggcccagcaatgactgtatttatgctgaaccggggcgcgt

SEQ ID NO: 155093 - DNA, 50 bp, Artificial
  Synthetic oligonucleotide
aacgggtggatgcgtattggtcacgccaaggtgggtaagcgcgcgttcct

SEQ ID NO: 155094 - DNA, 50 bp, Artificial
  Synthetic oligonucleotide
aacggtcgggcgttgccatagtttgaagcgcttaccggtcagcacggtgt

SEQ ID NO: 155095 - DNA, 49 bp, Artificial
  Synthetic oligonucleotide
aaccgcggggagacatacggggaaactcaacggacacctcgggacccct

SEQ ID NO: 155096 - DNA, 50 bp, Artificial
  Synthetic oligonucleotide
aacgttccgtgggcctgcgagaattatggggcgcggagtcctatggtggg

SEQ ID NO: 155097 - DNA, 50 bp, Artificial
  Synthetic oligonucleotide
aaccgcagcaccatctctgacgttattcgccgctccacgtcacgcgtgcc

SEQ ID NO: 155098 - DNA, 50 bp, Artificial
  Synthetic oligonucleotide
aactgcacgcaaccggatcctctctgtcctggcacgtgcgttgaatgcca

SEQ ID NO: 155099 - DNA, 50 bp, Artificial
  Synthetic oligonucleotide
aacccgcggggacctgactgcaattgaccctccgctcacagtggcatcga

SEQ ID NO: 155100 - DNA, 50 bp, Artificial
  Synthetic oligonucleotide
aactggagctcgctttcaacgttcggggcaaggcgtgcacggttacgcaa

SEQ ID NO: 155101 - DNA, 60 bp, Artificial
  Synthetic oligonucleotide
atcataagtgaagatagcgtgctctgagccttcgactttcgggctatcgaaccgcacgag

SEQ ID NO: 155102 - DNA, 50 bp, Artificial
  Synthetic oligonucleotide
aactggcgctcaccgaaaccagcacagactacgctgccgcactgtccaca

SEQ ID NO: 155103 - DNA, 50 bp, Artificial
  Synthetic oligonucleotide
aaccacaccctgtgagtgacaggcttcgctcgcaagccaccactgcacat

SEQ ID NO: 155104 - DNA, 50 bp, Artificial
  Synthetic oligonucleotide
acacggctgcctgcgggcgggcacctaagtacaccttgtacccattgtcc

SEQ ID NO: 155105 - DNA, 50 bp, Artificial
  Synthetic oligonucleotide
acacgtgggaccactaccagcactcgtatgggtcggccggtgacacggaa

SEQ ID NO: 155106 - DNA, 50 bp, Artificial
  Synthetic oligonucleotide
acagagctccggcccgacgctcgtatctcagggtggcgtgtaggtcgatc

SEQ ID NO: 155107 - DNA, 50 bp, Artificial
  Synthetic oligonucleotide
acagcggcgctcgtaggaacggaggctgccaacctctgtatcagtcccgg

SEQ ID NO: 155108 - DNA, 50 bp, Artificial
  Synthetic oligonucleotide
acagggctctcggtacgtcccgaattcacccatgagcgtgtggctcccaa

SEQ ID NO: 155109 - DNA, 50 bp, Artificial
  Synthetic oligonucleotide
acatcccggggtcctcgcagcactcccctcgagtacccggacgcatcccc

SEQ ID NO: 155110 - DNA, 50 bp, Artificial
  Synthetic oligonucleotide
accagtccgacctgacgaagctaacagacgcactcggcagcttccgaccc

SEQ ID NO: 155111 - DNA, 50 bp, Artificial
  Synthetic oligonucleotide
acgcctccgcaagggtgaaaacggggtgaggattcgcgtgaaagtgcgtg

SEQ ID NO: 155112 - DNA, 60 bp, Artificial
  Synthetic oligonucleotide
tggcaacgtcgcacacggggcagagaggttccagtgtggccggagtgagggaccgctgta

SEQ ID NO: 155113 - DNA, 50 bp, Artificial
  Synthetic oligonucleotide
acgccgtgtttgctggccactccgtacagtgtgtcaccgtcgcgggtctt

SEQ ID NO: 155114 - DNA, 50 bp, Artificial
  Synthetic oligonucleotide
acgccccgaggttggacgctcgctctcgctggctgaacgcccattccccg

SEQ ID NO: 155115 - DNA, 50 bp, Artificial
  Synthetic oligonucleotide
acgatggttgaccgtgggcgacgattccatttcacgcccgatgcgagccc

SEQ ID NO: 155116 - DNA, 50 bp, Artificial
  Synthetic oligonucleotide
acccccgaaaccgcgtgttcttggtcacgaacggccagttgtgcgtcttt

SEQ ID NO: 155117 - DNA, 50 bp, Artificial
  Synthetic oligonucleotide
acgaggcgcgagctctgcacacgtcccgtgttggttccgtccgcaaacgt

SEQ ID NO: 155118 - DNA, 50 bp, Artificial
  Synthetic oligonucleotide
acgactccacgcgatccccaaacgcacggtcatgggagtgcccggcgatt

SEQ ID NO: 155119 - DNA, 50 bp, Artificial
  Synthetic oligonucleotide
acgaccttccggcgataagaacccaagctggacactgtgcccggggaata

SEQ ID NO: 155120 - DNA, 50 bp, Artificial
  Synthetic oligonucleotide
accttcctaggcatcaatgtccgagatgaagcccccgcggccaacgcatt

SEQ ID NO: 155121 - DNA, 50 bp, Artificial
  Synthetic oligonucleotide
accgcgtgattgagaactcatcgtgtccgagcggcgtcggtagtagcggg

SEQ ID NO: 155122 - DNA, 50 bp, Artificial
  Synthetic oligonucleotide
accggtgaagggcagctccccgtgctctttctgcgtgttcgagatctgca

SEQ ID NO: 155123 - DNA, 57 bp, Artificial
  Synthetic oligonucleotide
acgagtgatgtctccacgcaccttggctgttagccgagccacgtcctcccggttggg

SEQ ID NO: 155124 - DNA, 50 bp, Artificial
  Synthetic oligonucleotide
accggtaggagctcagcctcgtatcgaccgcagacagggcacgcgaggcg

SEQ ID NO: 155125 - DNA, 50 bp, Artificial
  Synthetic oligonucleotide
accggcaccgaagctgggttggaccgatgtttcgaggttcagcgcactcg

SEQ ID NO: 155126 - DNA, 50 bp, Artificial
  Synthetic oligonucleotide
aagcggaggacaggccctctgccgaggggcgtcagtcaagccctgagtca

SEQ ID NO: 155127 - DNA, 50 bp, Artificial
  Synthetic oligonucleotide
aagcgggccggaagtcgttctcacgatgcccactcacgagcagtggttgg

SEQ ID NO: 155128 - DNA, 50 bp, Artificial
  Synthetic oligonucleotide
aagcgtgcgtagacggcgttggttcgcgtgatccgcgagttgaggagttc

SEQ ID NO: 155129 - DNA, 50 bp, Artificial
  Synthetic oligonucleotide
aaggagtacggcagaaggtcctgctcacgggtaccgatcccgggcagaag

SEQ ID NO: 155130 - DNA, 50 bp, Artificial
  Synthetic oligonucleotide
aaggatgcgtcccgggcgtagacccaaacggcgacttaaacccaggcaac

SEQ ID NO: 155131 - DNA, 50 bp, Artificial
  Synthetic oligonucleotide
aaggcctctgggtacaagttggggccggtgagtcggtcgtaggtgtgcag

SEQ ID NO: 155132 - DNA, 50 bp, Artificial
  Synthetic oligonucleotide
aagtcgaatgcgtcgcggtcctgggagactcgtccgaagccaagagtggg

SEQ ID NO: 155133 - DNA, 50 bp, Artificial
  Synthetic oligonucleotide
aagtcgtcggtcgcccctttgaaccactgcccttcgtcagcgttcacacg

SEQ ID NO: 155134 - DNA, 60 bp, Artificial
  Synthetic oligonucleotide
acggtgagaacaccaatcgagggcctcgccattgggtgcgaagtgctcgtgtacataatg

SEQ ID NO: 155135 - DNA, 50 bp, Artificial
  Synthetic oligonucleotide
aagtgcaatacggtgtccccgcttgtcctttgggcaagccccggattcga

SEQ ID NO: 155136 - DNA, 50 bp, Artificial
  Synthetic oligonucleotide
aagtggtcctgggcgtcgcagcctccaggtagatcgcgaatactgcaagg

SEQ ID NO: 155137 - DNA, 50 bp, Artificial
  Synthetic oligonucleotide
aatagacccgtggactgggtgactgagatgcccagtgtgttcgccagcga

SEQ ID NO: 155138 - DNA, 50 bp, Artificial
  Synthetic oligonucleotide
aataggggcatgacaaactcggacccgtcgccctcctagaacaccgccca

SEQ ID NO: 155139 - DNA, 50 bp, Artificial
  Synthetic oligonucleotide
aatccacaccgggtacgcgactactggttcgggaagacccgcacgtacca

SEQ ID NO: 155140 - DNA, 50 bp, Artificial
  Synthetic oligonucleotide
aatcctacgtgggcccacccgaagcactcgtcgcctcactggtcatcctg

SEQ ID NO: 155141 - DNA, 50 bp, Artificial
  Synthetic oligonucleotide
aatcctagcggctagagggctaagccacgccgagatcgcagttgctgccg

SEQ ID NO: 155142 - DNA, 50 bp, Artificial
  Synthetic oligonucleotide
aatctacctacgctcgcggcgccatgtgttccgcactgtttcgtacggga

SEQ ID NO: 155143 - DNA, 50 bp, Artificial
  Synthetic oligonucleotide
aatgcgatctatcgccgttaaccttggcgccctcgtggggccgtcaatcg

SEQ ID NO: 155144 - DNA, 50 bp, Artificial
  Synthetic oligonucleotide
acacaagtcgaggccccgtccacaacggaacggtgtacgagtcaccctga

SEQ ID NO: 155145 - DNA, 60 bp, Artificial
  Synthetic oligonucleotide
tgactggggccaggtctgctgattccggcaagtactcgctcactgaaggaaagatcatgc

SEQ ID NO: 155146 - DNA, 50 bp, Artificial
  Synthetic oligonucleotide
acacacccgcactatccccgcccctccacgcgaatcgttccgttcatggt

SEQ ID NO: 155147 - DNA, 50 bp, Artificial
  Synthetic oligonucleotide
acacctgggggaatcgctgggtggtcgacgattcgcacttggggtgtttg

SEQ ID NO: 155148 - DNA, 50 bp, Artificial
  Synthetic oligonucleotide
acacgatcgactccacactccccacgcccgtcacaacgagcgcagacaag

SEQ ID NO: 155149 - DNA, 60 bp, Artificial
  Synthetic oligonucleotide
tcgaacatagcgtttgagcttctccagctcatcttcgtcgccactaacgaccggttgatt

SEQ ID NO: 155150 - DNA, 58 bp, Artificial
  Synthetic oligonucleotide
tgaccggacacgtcgaccacaacggtatgaccgtggaggagcctgaccggtcagagtc

SEQ ID NO: 155151 - DNA, 58 bp, Artificial
  Synthetic oligonucleotide
ctatgcttgctccccttcacagcagacgcgcttcgtatcctcacctctcacattgaga

SEQ ID NO: 155152 - DNA, 58 bp, Artificial
  Synthetic oligonucleotide
cgcgtaatctaggtcttgccacacccgtgcggtgcttgctgtatcgagtttcaccctc

SEQ ID NO: 155153 - DNA, 60 bp, Artificial
  Synthetic oligonucleotide
gatatttgccacgccactgtgatcacctgctctcactgtttgttccggcatcatctgcat

SEQ ID NO: 155154 - DNA, 57 bp, Artificial
  Synthetic oligonucleotide
ataactgtcactagcaaaggagctatacgatgtctcatttaggatctagaactacac

SEQ ID NO: 155155 - DNA, 56 bp, Artificial
  Synthetic oligonucleotide
agggcctcgccattgggtgcgaagtgctcgtgtacataatgcccctactttggaga

SEQ ID NO: 155156 - DNA, 55 bp, Artificial
  Synthetic oligonucleotide
cgaagcttatcctcacaagcggtttctgcatcaataatgcatgatctaacgaatg

SEQ ID NO: 155157 - DNA, 55 bp, Artificial
  Synthetic oligonucleotide
cctcgtgtacgactttaccccgccctgcctcgataccacactctccctgccggaa

SEQ ID NO: 155158 - DNA, 55 bp, Artificial
  Synthetic oligonucleotide
ccgactggccaatcaccttgactccgccagggtaactaaacctgtgcaactcagg

SEQ ID NO: 155159 - DNA, 55 bp, Artificial
  Synthetic oligonucleotide
ccaagaggcatgttgtgtccttgactgtttcgaacagttccacagcgggaccgtc

SEQ ID NO: 155160 - DNA, 55 bp, Artificial
  Synthetic oligonucleotide
atgtggacgcttgttcatatcggttcgaccctagcctggacaagagccatcgcac

SEQ ID NO: 155161 - DNA, 54 bp, Artificial
  Synthetic oligonucleotide
cggttgtgccgtttgtagtcataccgatagtcggtgccgtaaaaggcgacgttg

SEQ ID NO: 155162 - DNA, 55 bp, Artificial
  Synthetic oligonucleotide
cgtaagggtggcatcgccagcggaatcgctcgccgcggtgacaaattcgagagag

SEQ ID NO: 155163 - DNA, 55 bp, Artificial
  Synthetic oligonucleotide
cgtgaggttgagcatttgcgtacccaagtgagtaccatgcagaacaaccttgatg

SEQ ID NO: 155164 - DNA, 57 bp, Artificial
  Synthetic oligonucleotide
gccgatacgctgcctgtttgcacttggccgagcagtatttttgtccctcaccccggg

SEQ ID NO: 155165 - DNA, 55 bp, Artificial
  Synthetic oligonucleotide
atgtagaggcgagctatgtcggtgatgtgttcgggaataacagtgactagccacg

SEQ ID NO: 155166 - DNA, 55 bp, Artificial
  Synthetic oligonucleotide
cgttgacgttcggacgattcccaagcctgagcgacatccgctcttcatggcggcc

SEQ ID NO: 155167 - DNA, 55 bp, Artificial
  Synthetic oligonucleotide
cacgttcatctcactagggtatcggcgagcgcaggtagtgttaagcgcatgagga

SEQ ID NO: 155168 - DNA, 55 bp, Artificial
  Synthetic oligonucleotide
ctcgcacaccacctgctagacgcaacaagttcagctaggtcgttcgtcctgcggc

SEQ ID NO: 155169 - DNA, 55 bp, Artificial
  Synthetic oligonucleotide
ctggtgggtgaccgcgctgtggagcttaggtggctcgttcaattcgccaccgtaa

SEQ ID NO: 155170 - DNA, 55 bp, Artificial
  Synthetic oligonucleotide
tgtgccgctcacgttgctcgaaggggctaccccggtcaaagttccgttgcgtgag

SEQ ID NO: 155171 - DNA, 55 bp, Artificial
  Synthetic oligonucleotide
tggatgcgggattgtgattgtgtgtcgccatgatgagacgactcctttctagagg

SEQ ID NO: 155172 - DNA, 55 bp, Artificial
  Synthetic oligonucleotide
tgagtgtggggtctctccggccacgatccgccgccgtctcaaggacgggtctctg

SEQ ID NO: 155173 - DNA, 55 bp, Artificial
  Synthetic oligonucleotide
tctccgatacagagaatgactacatcgtgggtacctcgactgaagtgatacccac

SEQ ID NO: 155174 - DNA, 55 bp, Artificial
  Synthetic oligonucleotide
tcgtccgttggacctcggagccgcgtgaggtttatctaagccgtgcgcaacagcg

SEQ ID NO: 155175 - DNA, 60 bp, Artificial
  Synthetic oligonucleotide
gccggtggcagtgtcaccaaacgctgcatcagtcccctctctggagatagcgcgtggtac

SEQ ID NO: 155176 - DNA, 55 bp, Artificial
  Synthetic oligonucleotide
tcggaagcaaacagggacgtgagccccagtgcggtgcgaagtatgggccgttgaa

SEQ ID NO: 155177 - DNA, 55 bp, Artificial
  Synthetic oligonucleotide
taagctggccacatggatccacagagcaagccgagtctttagcccacgcatgttg

SEQ ID NO: 155178 - DNA, 55 bp, Artificial
  Synthetic oligonucleotide
gttgcgtggatctcgtgagtggttgattctaagtgtgaggagtcacttttgcccc

SEQ ID NO: 155179 - DNA, 55 bp, Artificial
  Synthetic oligonucleotide
gtgccccgtggactgtatttatgaaggtgctcgctcactttacattcaccctgac

SEQ ID NO: 155180 - DNA, 55 bp, Artificial
  Synthetic oligonucleotide
gtccttgtcatgggtggaccgcgctcgtgtgtaccacgcgtattcgacgattccc

SEQ ID NO: 155181 - DNA, 55 bp, Artificial
  Synthetic oligonucleotide
ggtcgttgtgaaaacgcactagccgtgtgcggtgcgtttctctgtcctgtatctc

SEQ ID NO: 155182 - DNA, 55 bp, Artificial
  Synthetic oligonucleotide
ggtacatcgggtgtgccgcgtcgccaagtaatacgactcgtgagcgggaccactg

SEQ ID NO: 155183 - DNA, 55 bp, Artificial
  Synthetic oligonucleotide
ggggtatcccgagtcaccgctcgcaggtacttagaagcgatggccaactctgaaa

SEQ ID NO: 155184 - DNA, 53 bp, Artificial
  Synthetic oligonucleotide
ggcgctatgggtggttccggtacccacgaattcctgtacccatccgaggtggg

SEQ ID NO: 155185 - DNA, 55 bp, Artificial
  Synthetic oligonucleotide
ggcgcatgttgcacagttcgcgcatacactacgaaagtgtaacactaactgacag

SEQ ID NO: 155186 - DNA, 55 bp, Artificial
  Synthetic oligonucleotide
cgcactaaacgcaaaaacccagtgggactcggccgtaactgcaccctcttcgaga

SEQ ID NO: 155187 - DNA, 55 bp, Artificial
  Synthetic oligonucleotide
ggagtcacaatcacaacgcgcttgttcgcgttatacaccaagtggttaaacagcc

SEQ ID NO: 155188 - DNA, 55 bp, Artificial
  Synthetic oligonucleotide
ggaacggacggaaagatcgaattcagagcgatgcccgtgaatagatacgccaccg

SEQ ID NO: 155189 - DNA, 55 bp, Artificial
  Synthetic oligonucleotide
gcttccgtgcttttaatgcgcgtagcgagactgttgcggataaacccatgtttcg

SEQ ID NO: 155190 - DNA, 55 bp, Artificial
  Synthetic oligonucleotide
gcccagttatttccatgtggtgagtcacatgctccagtctaggctgtgacatggt

SEQ ID NO: 155191 - DNA, 55 bp, Artificial
  Synthetic oligonucleotide
gccaagtaccacgtggtgtgtgacagaccctctgacaacctacggaaggccacca

SEQ ID NO: 155192 - DNA, 55 bp, Artificial
  Synthetic oligonucleotide
gatgcgcatgagacttccagtgtaggtgctctaaaatggttcggtgctcttcatc

SEQ ID NO: 155193 - DNA, 55 bp, Artificial
  Synthetic oligonucleotide
gatagcgtgctctgagccttcgactttcgggctatcgaaccgcacgagctctgtc

SEQ ID NO: 155194 - DNA, 55 bp, Artificial
  Synthetic oligonucleotide
gagcggaccacttagcaccgaagggaccagttgcactgagctccctcgacgccaa

SEQ ID NO: 155195 - DNA, 55 bp, Artificial
  Synthetic oligonucleotide
gacttgacgagactgacgtgactcccacaggactgttctacgggtgggctggccc

SEQ ID NO: 155196 - DNA, 55 bp, Artificial
  Synthetic oligonucleotide
gaagttagcctacaatggatcaggcggtcaaacgaaggagcgcatatggactggt

SEQ ID NO: 155197 - DNA, 60 bp, Artificial
  Synthetic oligonucleotide
ggtcccattgcacgaaccacacactcacgtttcacaccagccattgcgcacttcattccg

SEQ ID NO: 155198 - DNA, 55 bp, Artificial
  Synthetic oligonucleotide
gaagctcatggacgttctcgtccttcccatcgacggcggacccttctgtccggtg

SEQ ID NO: 155199 - DNA, 53 bp, Artificial
  Synthetic oligonucleotide
gaactcacgccccgaacgaatccgtagatactccgtgttttccagcggtttta

SEQ ID NO: 155200 - DNA, 52 bp, Artificial
  Synthetic oligonucleotide
aaaacccagtgggactcggccgtaactgcaccctcttcgagaccgtccggtg

SEQ ID NO: 155201 - DNA, 54 bp, Artificial
  Synthetic oligonucleotide
gaactgagactgaaactcggaggactcgagtgagcgatcagctgcggaacatgt

SEQ ID NO: 155202 - DNA, 54 bp, Artificial
  Synthetic oligonucleotide
ctttcgaagtgcccacgcgtatccgctgttctcagtcactatccacgtgcgtaa

SEQ ID NO: 155203 - DNA, 54 bp, Artificial
  Synthetic oligonucleotide
ctcacagctgtgtagggtaggcgcgtaggctttggttagaagcgcgtccttgcc

SEQ ID NO: 155204 - DNA, 54 bp, Artificial
  Synthetic oligonucleotide
cgtgactcattagcttggttccaaactcgattgacagcagacacctcgcttcca

SEQ ID NO: 155205 - DNA, 54 bp, Artificial
  Synthetic oligonucleotide
catcagttgtctcgagagcgtggtccatatgtggaatggaacatgcggacccac

SEQ ID NO: 155206 - DNA, 54 bp, Artificial
  Synthetic oligonucleotide
agcgatcgccagtctgtgccagggaatgaatgccacgttcagcgaggcactacc

SEQ ID NO: 155207 - DNA, 53 bp, Artificial
  Synthetic oligonucleotide
gcgggctggtacccgatcattctggacctcgataacaagattggcagcatcga

SEQ ID NO: 155208 - DNA, 57 bp, Artificial
  Synthetic oligonucleotide
attccgggctgatgacgaaaaaccccacccacgagcagtgggaagcctcctggctga

SEQ ID NO: 155209 - DNA, 53 bp, Artificial
  Synthetic oligonucleotide
agatcttgtctgagtggcatgagtgctccttaggcctgtgcgacctgggaagt

SEQ ID NO: 155210 - DNA, 53 bp, Artificial
  Synthetic oligonucleotide
agagatgaacccgggaggagtctccccggagtcgtaggagttgtatgccgctg

SEQ ID NO: 155211 - DNA, 52 bp, Artificial
  Synthetic oligonucleotide
gattgggtcgcgcatcgtgtacgctcagcacccatccgacccagtcgtctgg

SEQ ID NO: 155212 - DNA, 52 bp, Artificial
  Synthetic oligonucleotide
gcacagcgagtacagagacgtggggccagatgtggttgcctctgtggccact

SEQ ID NO: 155213 - DNA, 52 bp, Artificial
  Synthetic oligonucleotide
cacgcaccttggctgttagccgagccacgtcttcccggttggggacccaccc

SEQ ID NO: 155214 - DNA, 52 bp, Artificial
  Synthetic oligonucleotide
tgaaaactccttcaattagtaataggtaactcctgttacctgttactatgtt

SEQ ID NO: 155215 - DNA, 51 bp, Artificial
  Synthetic oligonucleotide
gcggtagattgaaatccgaccatgacgaccgaactgggagtaacactgaaa

SEQ ID NO: 155216 - DNA, 51 bp, Artificial
  Synthetic oligonucleotide
ctcagaagacctgcgcgaagtccactgcggctcaaaattgtgttcggcgct

SEQ ID NO: 155217 - DNA, 50 bp, Artificial
  Synthetic oligonucleotide
aagacgggtggcgtggattgttggaggcagattacgccccgctgactacg

SEQ ID NO: 155218 - DNA, 50 bp, Artificial
  Synthetic oligonucleotide
aagacttcgagaactggcgccaaggccgcaagccttcacacgagaccagc

SEQ ID NO: 155219 - DNA, 60 bp, Artificial
  Synthetic oligonucleotide
ggtgctgattcttgagatcgcccatcgtctgggattcctcccggtcgagagtcatacgca

SEQ ID NO: 155220 - DNA, 50 bp, Artificial
  Synthetic oligonucleotide
aagaggttcacaatcacgaacatgcgccccacgcctaagcgacgccacgt

SEQ ID NO: 155221 - DNA, 50 bp, Artificial
  Synthetic oligonucleotide
aagatccgggggagcacggctgatctgcgcaactaccacgtgactgagta

SEQ ID NO: 155222 - DNA, 50 bp, Artificial
  Synthetic oligonucleotide
aaaggagctcacactcagcgaaccgtcgcgcattgcgttcgtcagggcag

SEQ ID NO: 155223 - DNA, 50 bp, Artificial
  Synthetic oligonucleotide
aagatgcgttccgcggttgtgaactcgcgtgccttagctggggttgcgcg

SEQ ID NO: 155224 - DNA, 50 bp, Artificial
  Synthetic oligonucleotide
aaacgctcatcaccgtacgggaacggttcagtctccccagtgggctcgta

SEQ ID NO: 155225 - DNA, 50 bp, Artificial
  Synthetic oligonucleotide
aaacgacgaatgacgggggcaacggaacctcgtcccgactgggggaatcc

SEQ ID NO: 155226 - DNA, 50 bp, Artificial
  Synthetic oligonucleotide
aagattccgtcccacagtgctccacgggccccaaaggtcatggcaattga

SEQ ID NO: 155227 - DNA, 50 bp, Artificial
  Synthetic oligonucleotide
aagcactcccgtgtccaggtggcatacggttggcacatctgccgaagcat

SEQ ID NO: 155228 - DNA, 50 bp, Artificial
  Synthetic oligonucleotide
aaacagagctgcacggtcgcagaggacggtcgggtgatgacctgtacggg

SEQ ID NO: 155229 - DNA, 50 bp, Artificial
  Synthetic oligonucleotide
aagcaggcgtgacagtcgctggggctcttactccgcaacgcacgcaagag

SEQ ID NO: 155230 - DNA, 54 bp, Artificial
  Synthetic oligonucleotide
gtatccgccacggacacttaccccaacgcaggccaccccacgtgcaccgaacgt

SEQ ID NO: 155231 - DNA, 50 bp, Artificial
  Synthetic oligonucleotide
aagcaggctgggtacggcaagtgggcggctgtgacatcgcctaagtccgt

SEQ ID NO: 155232 - DNA, 50 bp, Artificial
  Synthetic oligonucleotide
aaaaccggggcgtcaggaagatctgaccccaccgcgacaacgttgtaggg

SEQ ID NO: 155233 - DNA, 50 bp, Artificial
  Synthetic oligonucleotide
aagcgcgtggtcgcactggggtccgaggcgtcagcataggtcgattttgg

SEQ ID NO: 155234 - DNA, 50 bp, Artificial
  Synthetic oligonucleotide
aacgagcccgtagggatttgtcgctggtgtggccacccgatcaagcaacc

SEQ ID NO: 155235 - DNA, 50 bp, Artificial
  Synthetic oligonucleotide
aacgacggacacctcaggcacttccggtgcgtctgcctcgtctggtggca

SEQ ID NO: 155236 - DNA, 50 bp, Artificial
  Synthetic oligonucleotide
aacgacctcgggcactttcgaaggaactacctcacgcgacacccgacgct

SEQ ID NO: 155237 - DNA, 50 bp, Artificial
  Synthetic oligonucleotide
aaccgtctccactcctggcaacgcggatagcacgtccccgatttcgtctg

SEQ ID NO: 155238 - DNA, 50 bp, Artificial
  Synthetic oligonucleotide
aacgattgccgctactagcgcaccggcgaactctgcaccagtgcgtggca

SEQ ID NO: 155239 - DNA, 50 bp, Artificial
  Synthetic oligonucleotide
aacgccacatgcctgcacaccggatgggtgttcactcgcagcctggcaga

SEQ ID NO: 155240 - DNA, 50 bp, Artificial
  Synthetic oligonucleotide
aacggaggctgccaacctctgtatcagtcccggtcggtggcccaacggct

SEQ ID NO: 155241 - DNA, 60 bp, Artificial
  Synthetic oligonucleotide
gagacgtgtcaggccagatgggagcccgacttgctcaaaataacgatcttgccaagcaga

SEQ ID NO: 155242 - DNA, 56 bp, Artificial
  Synthetic oligonucleotide
gggaaaccggcttgtcgttcttcgtcatttcatccctcccgtttattgtcagcaga

SEQ ID NO: 155243 - DNA, 55 bp, Artificial
  Synthetic oligonucleotide
cgccatttcttcagagcgttgaggcctatatcgataatgctatgacgcatctgtc

SEQ ID NO: 155244 - DNA, 55 bp, Artificial
  Synthetic oligonucleotide
cgccatgtggcatagccagatgtttctggccgcttttgcgcgcccgctggaaaag

SEQ ID NO: 155245 - DNA, 55 bp, Artificial
  Synthetic oligonucleotide
cgccatcgaaacgacagtcgggaagtgacagttggccgggcattgcgtgtggtcc

SEQ ID NO: 155246 - DNA, 55 bp, Artificial
  Synthetic oligonucleotide
cgccaatgacttgctaggtcccagtattcccctagggctgagttactcgcctcag

SEQ ID NO: 155247 - DNA, 55 bp, Artificial
  Synthetic oligonucleotide
gtagtgttctcatcctacgtgggattgaccaccaaatacggtccgccagttgtac

SEQ ID NO: 155248 - DNA, 55 bp, Artificial
  Synthetic oligonucleotide
gtattctcgtcgcacggcgcggtattctcgccattgtccactggcactgacgggt

SEQ ID NO: 155249 - DNA, 55 bp, Artificial
  Synthetic oligonucleotide
cgcataatgcggtccagagtgcctttcaacgccccatatcgcagttaggccccta

SEQ ID NO: 155250 - DNA, 55 bp, Artificial
  Synthetic oligonucleotide
gtcacgtcgaagccaataggatcacgctgagatgagcaaacggatggatgcggcg

SEQ ID NO: 155251 - DNA, 55 bp, Artificial
  Synthetic oligonucleotide
cgcagatgcgcaaacttaaccccacgtgcgggccagaccgtctttcgcaggctta

SEQ ID NO: 155252 - DNA, 55 bp, Artificial
  Synthetic oligonucleotide
cgcaaattcgcgaaaagcttccgcttatcgcagacgatgctaaagtgcgcggggc

SEQ ID NO: 155253 - DNA, 60 bp, Artificial
  Synthetic oligonucleotide
ccaatgttaccgatgcagactgttgacgtgaaatacttccgtttctcctctgcccatgat

SEQ ID NO: 155254 - DNA, 55 bp, Artificial
  Synthetic oligonucleotide
cgttgagtccatgaaaccttgttcatagttcttagatgccgacaacgcaacaaga

SEQ ID NO: 155255 - DNA, 55 bp, Artificial
  Synthetic oligonucleotide
cgttcaaatccattgtgttagctttgacggaaagactgttatccgaactgttccc

SEQ ID NO: 155256 - DNA, 55 bp, Artificial
  Synthetic oligonucleotide
cgtgccaatttggaactgatccccgtatccgagctaccgatcgacgaccatcagt

SEQ ID NO: 155257 - DNA, 54 bp, Artificial
  Synthetic oligonucleotide
ggtgaagggtccagccagcaacagaagcgtaatattggaaacgggccccgtaac

SEQ ID NO: 155258 - DNA, 55 bp, Artificial
  Synthetic oligonucleotide
cgtctctaagccaattcctatgcagcttccaccattgcatcgaatatcctagcga

SEQ ID NO: 155259 - DNA, 55 bp, Artificial
  Synthetic oligonucleotide
ggtggttattacgcggctttcaggcatgcgatatcacgccagatgccacttaact

SEQ ID NO: 155260 - DNA, 49 bp, Artificial
  Synthetic oligonucleotide
cggtttcctttggagcaccttaacgaatttcccgtccccgttgtaacgc

SEQ ID NO: 155261 - DNA, 55 bp, Artificial
  Synthetic oligonucleotide
ggttatcctccgagagaacggagaaatagccctttatgacataggcggcactggg

SEQ ID NO: 155262 - DNA, 55 bp, Artificial
  Synthetic oligonucleotide
cggtcttaattttcggtcgggccttcacgatcgcttccacgctcacacgcctacc

SEQ ID NO: 155263 - DNA, 55 bp, Artificial
  Synthetic oligonucleotide
cgggttcccgtttgcgccccagatgctatataccggcactcaaatagacgaacgg

SEQ ID NO: 155264 - DNA, 60 bp, Artificial
  Synthetic oligonucleotide
acttacgggacgagtatcatggcggataaccttgcccgatcgcaggaaatgctcatgccg

SEQ ID NO: 155265 - DNA, 55 bp, Artificial
  Synthetic oligonucleotide
ggttcgacaggatgccggctctcgcgagctacatgctcggtggatcggcctatga

SEQ ID NO: 155266 - DNA, 55 bp, Artificial
  Synthetic oligonucleotide
cgggcagggtgtcgcaacaacgaggactgcaagtgctctgatgcgatcgccagac

SEQ ID NO: 155267 - DNA, 55 bp, Artificial
  Synthetic oligonucleotide
cgggataatccgtatagccctttgccccgccaccatacatatgtttctggtcgag

SEQ ID NO: 155268 - DNA, 55 bp, Artificial
  Synthetic oligonucleotide
ggtttctaattccgctgaaaatcgatatatgtggcgcaaccgctgaaggcgaggg

SEQ ID NO: 155269 - DNA, 54 bp, Artificial
  Synthetic oligonucleotide
gtaaccattcctttaccggcggagttaatcatatgcgttaggacttaaggctcg

SEQ ID NO: 155270 - DNA, 55 bp, Artificial
  Synthetic oligonucleotide
cggctcttgccaaggctacgattggagcggctgacacgaatgccgtgctcacggc

SEQ ID NO: 155271 - DNA, 55 bp, Artificial
  Synthetic oligonucleotide
cggcgctgtttatccagtagttggcgctgagaacgactgcactgtcgcccagttg

SEQ ID NO: 155272 - DNA, 55 bp, Artificial
  Synthetic oligonucleotide
cggcacatttacggcaagagcgtgtttcgatccaagtaaatcagatccgcgctct

SEQ ID NO: 155273 - DNA, 55 bp, Artificial
  Synthetic oligonucleotide
cggcaaacttgcgcgacgcaatcgtagacggattgcgctgtgcggcctcaatgcc

SEQ ID NO: 155274 - DNA, 55 bp, Artificial
  Synthetic oligonucleotide
ggcgtggagtgccgtaggcgcgacaggatttaaagaatgagcgatctagaacaac

SEQ ID NO: 155275 - DNA, 60 bp, Artificial
  Synthetic oligonucleotide
cctgcgcctgtcttgaagtccgcccaccagccgcagaaatatacgagcgatagcgctcca

SEQ ID NO: 155276 - DNA, 55 bp, Artificial
  Synthetic oligonucleotide
ggctgcaagttccaaacgcctgtcaataccggcaagtgcacaactcacgctgaca

SEQ ID NO: 155277 - DNA, 55 bp, Artificial
  Synthetic oligonucleotide
ggctgtggacgcttatttcgcagggcgggtcttacatatggcgcgaattgcgact

SEQ ID NO: 155278 - DNA, 55 bp, Artificial
  Synthetic oligonucleotide
gcggaaacagagcttaattcgaccggagtggaacgtgctccaagtgtagtcgggg

SEQ ID NO: 155279 - DNA, 55 bp, Artificial
  Synthetic oligonucleotide
gcgcggatttatggtctgtctcagtataggggaactagtgtctatcggtgaggac

SEQ ID NO: 155280 - DNA, 55 bp, Artificial
  Synthetic oligonucleotide
gcgcgccgccagagtgttgatatcacgcttcaaccgcgagagtttcgtcttctcg

SEQ ID NO: 155281 - DNA, 55 bp, Artificial
  Synthetic oligonucleotide
gcgaggcaaatcacgtctcccaacaacatgcgtttcaaggcgaaggtataggcgg

SEQ ID NO: 155282 - DNA, 55 bp, Artificial
  Synthetic oligonucleotide
ggcttcgtgtgtcttcgacaattcttgaacgtcgttgatgccagcacgcaaggga

SEQ ID NO: 155283 - DNA, 55 bp, Artificial
  Synthetic oligonucleotide
gccttcaccgatcattcaaatccagatcgcgcatacctatttgatattgcgtgat

SEQ ID NO: 155284 - DNA, 55 bp, Artificial
  Synthetic oligonucleotide
gcctcaaagaacgaggagcatggaactgtatccgccccatgccaaaccgtgtgaa

SEQ ID NO: 155285 - DNA, 55 bp, Artificial
  Synthetic oligonucleotide
gcctatgaaacgtctcgccgtgtgcccaagagcgaactgaatcggatcgttgccg

SEQ ID NO: 155286 - DNA, 55 bp, Artificial
  Synthetic oligonucleotide
ccttccttccgactagaagacttgaacgttccagaccgaggtctcacagcgttag

SEQ ID NO: 155287 - DNA, 55 bp, Artificial
  Synthetic oligonucleotide
gccggatctcttttcggcgggctggttggcacggtcgtcttcatgtggtttgagg

SEQ ID NO: 155288 - DNA, 55 bp, Artificial
  Synthetic oligonucleotide
gcccgctctccatcaattgccgtcaccttaccggagaggcgattgcgatatccca

SEQ ID NO: 155289 - DNA, 55 bp, Artificial
  Synthetic oligonucleotide
gcccgcaatattctgtttggcaactcgctgcgtggaatgatccgggcaaagctga

SEQ ID NO: 155290 - DNA, 55 bp, Artificial
  Synthetic oligonucleotide
gccccggtggctcattatggcgacctcgacttctgattctgagcagattgccgaa

SEQ ID NO: 155291 - DNA, 55 bp, Artificial
  Synthetic oligonucleotide
gcccacctgcggttatgagaaaaccggaaatttgcaagatgagcccacagtgaat

SEQ ID NO: 155292 - DNA, 55 bp, Artificial
  Synthetic oligonucleotide
gggaaagtaaggcccggaccttgctcccgctggacaaattgcacgccattatccg

SEQ ID NO: 155293 - DNA, 55 bp, Artificial
  Synthetic oligonucleotide
gggaaggcaatattggatcgcctgctcatcttgtcttgggcgcgacgcttaccgg

SEQ ID NO: 155294 - DNA, 55 bp, Artificial
  Synthetic oligonucleotide
gcatcggataacagggagtatcgtgtgatgggaagttatgacgacaactcgggca

SEQ ID NO: 155295 - DNA, 55 bp, Artificial
  Synthetic oligonucleotide
ggcccgcatgaggtacacaatcggtcgtatctcgaatgtcgctcattaacgctac

SEQ ID NO: 155296 - DNA, 55 bp, Artificial
  Synthetic oligonucleotide
ggcactctatcagacccggctcagcgatgcaatcatgagcactgcgccgtcctat

SEQ ID NO: 155297 - DNA, 60 bp, Artificial
  Synthetic oligonucleotide
gatatcagggataccggtaagcgagcggttctgtcggttagttgaatcgaatgctatgat

SEQ ID NO: 155298 - DNA, 55 bp, Artificial
  Synthetic oligonucleotide
ggatcgactttcggtcggataaagacgtggacgtgaagcgtcacacgcacaaccg

SEQ ID NO: 155299 - DNA, 55 bp, Artificial
  Synthetic oligonucleotide
ggatccactcgactcaggtctaccatgatcccttgcgtgctggcatcaacgacgt

SEQ ID NO: 155300 - DNA, 55 bp, Artificial
  Synthetic oligonucleotide
ggacgtatgattgcgtgaacattaaagctcctctggatctttagcgtcccgacat

SEQ ID NO: 155301 - DNA, 55 bp, Artificial
  Synthetic oligonucleotide
ggacgaggcatgcccagaacatgctcggctatgtatgagaggataaggttggtcg

SEQ ID NO: 155302 - DNA, 55 bp, Artificial
  Synthetic oligonucleotide
ggaacaggtcataaaggcgatcccggaccgcaaatctgcgaacctgcctccctgt

SEQ ID NO: 155303 - DNA, 55 bp, Artificial
  Synthetic oligonucleotide
ggcgacgcaaaatggtttacgcagaaatcagtagattacgccaaggagcgatcga

SEQ ID NO: 155304 - DNA, 55 bp, Artificial
  Synthetic oligonucleotide
ggaaaagcctaccgtttcagaattcggcacatccgaagcgacgttgctgtccgtt

SEQ ID NO: 155305 - DNA, 55 bp, Artificial
  Synthetic oligonucleotide
ggcgacggtcctgccttctatcgtgcttattcagtcgggaccgatctacagaaga

SEQ ID NO: 155306 - DNA, 55 bp, Artificial
  Synthetic oligonucleotide
ggcgtcatgggctgctaccaatcctgcgacccacgaaccgaggctcattccgagt

SEQ ID NO: 155307 - DNA, 55 bp, Artificial
  Synthetic oligonucleotide
ggcgtgatggcaattctctctattatgccggccctgctaatccgggatgcgagcg

SEQ ID NO: 155308 - DNA, 60 bp, Artificial
  Synthetic oligonucleotide
tgtgacccgcaggaatcatacgccaatttttcagtcgacggctgttttgaatctggcatc

SEQ ID NO: 155309 - DNA, 55 bp, Artificial
  Synthetic oligonucleotide
gctacagccacctggattggtaatgacgggttctatgttgacgctcaggggcagg

SEQ ID NO: 155310 - DNA, 53 bp, Artificial
  Synthetic oligonucleotide
gctaaggccttgtaagcgtggaattaacgggacccaaaggggtgcggctactc

SEQ ID NO: 155311 - DNA, 55 bp, Artificial
  Synthetic oligonucleotide
gcgttgtaacatctttgctgcaagacaccaaatcaggagtgcggttcgcgtgccc

SEQ ID NO: 155312 - DNA, 55 bp, Artificial
  Synthetic oligonucleotide
gcgttaacgtcatccgtgaattcgtcgcaccaagctacaggcccgagcgccatta

SEQ ID NO: 155313 - DNA, 53 bp, Artificial
  Synthetic oligonucleotide
gcgtgggaccggttaacgacaccttaatttctccgctcgaagtttacgcattc

SEQ ID NO: 155314 - DNA, 55 bp, Artificial
  Synthetic oligonucleotide
gcggttcatatctgaggcgaatttggtgcgttctgaggaatgtgcttcggttcag

SEQ ID NO: 155315 - DNA, 55 bp, Artificial
  Synthetic oligonucleotide
gcgggtagaatagacgggttttccgccgcgacagaggctgctccgatgccacaca

SEQ ID NO: 155316 - DNA, 54 bp, Artificial
  Synthetic oligonucleotide
gcgggcagcctttactccgattagagcaggtttaaccgggagtttacgattctg

SEQ ID NO: 155317 - DNA, 55 bp, Artificial
  Synthetic oligonucleotide
gaggcgtgacgtgccgtaggcacggcagggatttaaagaatgagcgatctagaac

SEQ ID NO: 155318 - DNA, 55 bp, Artificial
  Synthetic oligonucleotide
gaggccgcacagcgcaatccgtctacgattgcgtcgcgcaagtttgccgaagtgc

SEQ ID NO: 155319 - DNA, 58 bp, Artificial
  Synthetic oligonucleotide
cgaaaccaaaactcgctcttgctttcgttaccatgacgttaactatacgcgtgcatca

SEQ ID NO: 155320 - DNA, 55 bp, Artificial
  Synthetic oligonucleotide
gaggatgacaatggcaggctggtcgcaggcatcactgggcaatatggtacggcgc

SEQ ID NO: 155321 - DNA, 55 bp, Artificial
  Synthetic oligonucleotide
gagcccatataggtatcgcggccaaccgagtcgtaaacaacgtccacgccctcgc

SEQ ID NO: 155322 - DNA, 55 bp, Artificial
  Synthetic oligonucleotide
gggctgaaagtccagcgccaaaccgtggatgtggcttgcctaaagccagagcttg

SEQ ID NO: 155323 - DNA, 55 bp, Artificial
  Synthetic oligonucleotide
gacttcgcatttcaccggaccgcatgatggcgggcactgcttccgcccttaaccg

SEQ ID NO: 155324 - DNA, 55 bp, Artificial
  Synthetic oligonucleotide
gacagcgtcaatctgccacttgatacaccgtaccgataggcttttgataagtccg

SEQ ID NO: 155325 - DNA, 55 bp, Artificial
  Synthetic oligonucleotide
gacacccattacggatggatcatattgcccctcaagcgcacgatatttaaagggc

SEQ ID NO: 155326 - DNA, 55 bp, Artificial
  Synthetic oligonucleotide
ggggaaagccttctggattccacggtctcacgctcatcagagcaacttaggtctg

SEQ ID NO: 155327 - DNA, 55 bp, Artificial
  Synthetic oligonucleotide
gaagccacatcttgaagattgaaacgcattccccatgcgatacaaggagttaacc

SEQ ID NO: 155328 - DNA, 55 bp, Artificial
  Synthetic oligonucleotide
gaacgacgcagtttcacattggcggcggaagatctagggattccgcgttcgacag

SEQ ID NO: 155329 - DNA, 55 bp, Artificial
  Synthetic oligonucleotide
ggggcaaccgcaagaacgataacacccagaataaggccggttgagagtgcaccgg

SEQ ID NO: 155330 - DNA, 60 bp, Artificial
  Synthetic oligonucleotide
cgtctcggatcgtttttgcccgcagcactaattcacgagctgagacagacatgacatttt

SEQ ID NO: 155331 - DNA, 55 bp, Artificial
  Synthetic oligonucleotide
ctttcatgagagccaatgaaaactgtggattgttgagcccgtatgcagtttggcc

SEQ ID NO: 155332 - DNA, 55 bp, Artificial
  Synthetic oligonucleotide
cttgtgatcccaacatatgggtagtgaccggcgataaaccattcaccctagtggg

SEQ ID NO: 155333 - DNA, 55 bp, Artificial
  Synthetic oligonucleotide
cttgtcgccgggcactcggtttgccagagccataggggttgcatgttcgaattcc

SEQ ID NO: 155334 - DNA, 55 bp, Artificial
  Synthetic oligonucleotide
cttgtagccggaagctgatgcaaatccctttcgagctgtgaccttcccgtccccg

SEQ ID NO: 155335 - DNA, 55 bp, Artificial
  Synthetic oligonucleotide
cttctcgtctttcggttgccgtttcgactatcggttttaatcagacagcattcat

SEQ ID NO: 155336 - DNA, 55 bp, Artificial
  Synthetic oligonucleotide
cttattatacgaagcggctcagaccctcctgacgcttgtcaagaaatggtcgtgg

SEQ ID NO: 155337 - DNA, 55 bp, Artificial
  Synthetic oligonucleotide
ctgtggacccgcaatgcgatcactgtcgggcaggtttcgttcacgcttggtcttg

SEQ ID NO: 155338 - DNA, 55 bp, Artificial
  Synthetic oligonucleotide
ctgtcagatcgtcaccgaatgcgatcggtgccctacccgcaaacggctcttcctt

SEQ ID NO: 155339 - DNA, 55 bp, Artificial
  Synthetic oligonucleotide
gcagttgcacggtgagttgcaatctaccataattccttttgcccaagaaggtcgt

SEQ ID NO: 155340 - DNA, 55 bp, Artificial
  Synthetic oligonucleotide
gcagccggtttaggcccttcatactcttgtgacagcggcaacttggcccttgtca

SEQ ID NO: 155341 - DNA, 60 bp, Artificial
  Synthetic oligonucleotide
ccctgtcgacccgcatctgtcattggatcgcatgtatctgttactccccaacaccggggc

SEQ ID NO: 155342 - DNA, 55 bp, Artificial
  Synthetic oligonucleotide
gcagacttcagcttttccgtagcgctcaaccgtatctccttaaagcacaatcctg

SEQ ID NO: 155343 - DNA, 55 bp, Artificial
  Synthetic oligonucleotide
gcacgttcggtcatcgaatccgaaccagtggtccagaactcgtggtaagcgaccg

SEQ ID NO: 155344 - DNA, 55 bp, Artificial
  Synthetic oligonucleotide
gcacgccattatccgtcagaattgtatggatcctataagggacggttctgatcaa

SEQ ID NO: 155345 - DNA, 55 bp, Artificial
  Synthetic oligonucleotide
gggagcccgacttgctcaaaataacgatcttgccaagcagacatggcagcgcgat

SEQ ID NO: 155346 - DNA, 55 bp, Artificial
  Synthetic oligonucleotide
gcaattgcgggcaactatgatcgattcccgccagaggttatcgccaatattccgg

SEQ ID NO: 155347 - DNA, 55 bp, Artificial
  Synthetic oligonucleotide
gcaagagcgtgtttcgatccaagtaaatcagatccgcgctctatctgtttgtttg

SEQ ID NO: 155348 - DNA, 55 bp, Artificial
  Synthetic oligonucleotide
gcaacgtgcacgtataagtaaagtgagacgaaggttgcaactggcgtcgtttcgc

SEQ ID NO: 155349 - DNA, 55 bp, Artificial
  Synthetic oligonucleotide
gggatatccgccacctgtgaccattccaaggcagatagcgtatgaatgatactcg

SEQ ID NO: 155350 - DNA, 53 bp, Artificial
  Synthetic oligonucleotide
gatttacttatcgcgtgggaccggttaacgacgccttaatttctccgctcgaa

SEQ ID NO: 155351 - DNA, 55 bp, Artificial
  Synthetic oligonucleotide
gatgtgatgagctgctccgtatagggctcgtaaggcggttcgaagattgccttcg

SEQ ID NO: 155352 - DNA, 52 bp, Artificial
  Synthetic oligonucleotide
ctccgggaacggaacacgtccggtaagcccacggagcccagtaattcctcga

SEQ ID NO: 155353 - DNA, 58 bp, Artificial
  Synthetic oligonucleotide
cgtctcaagtctttttcgcgatcaagagcaccctgcaacaggttttttgcgtaattga

SEQ ID NO: 155354 - DNA, 55 bp, Artificial
  Synthetic oligonucleotide
gatggttgacgacagagtgccggagaaactctcatcctgacttccaccgagaatg

SEQ ID NO: 155355 - DNA, 54 bp, Artificial
  Synthetic oligonucleotide
gggattggcacttcaaggcgatacactcgtcggtaaaccggcggccgagggaaa

SEQ ID NO: 155356 - DNA, 55 bp, Artificial
  Synthetic oligonucleotide
gatgacgacaaacagtggaatgtttcaccgtcattactgagcttgacgggtggtc

SEQ ID NO: 155357 - DNA, 55 bp, Artificial
  Synthetic oligonucleotide
gggccgtgtttcgcgtctttcaatacgcatcagttcagccccttcgtgagattag

SEQ ID NO: 155358 - DNA, 55 bp, Artificial
  Synthetic oligonucleotide
gggcgcagggctgtttcctgagagtggttaggcggttaacagatccggccatagc

SEQ ID NO: 155359 - DNA, 55 bp, Artificial
  Synthetic oligonucleotide
gatcattcgccagaccagcgcactttatcggagcttttcgagcataaccgtcaat

SEQ ID NO: 155360 - DNA, 55 bp, Artificial
  Synthetic oligonucleotide
gggcgcgcaaaagcggccagaaacatctggctatgccacatggcgacaatgcagg

SEQ ID NO: 155361 - DNA, 55 bp, Artificial
  Synthetic oligonucleotide
gagggcgtaatgaacattcatgcgtccaatttggacatagagaaattccgcaagg

SEQ ID NO: 155362 - DNA, 55 bp, Artificial
  Synthetic oligonucleotide
tctgacagtggccgacgtccagaatcccgagcgcgaggtctctttcccggagtcc

SEQ ID NO: 155363 - DNA, 55 bp, Artificial
  Synthetic oligonucleotide
tctcgcgaggcgattagcaaacaaacaggtaggctcacaagcacccataccgacc

SEQ ID NO: 155364 - DNA, 57 bp, Artificial
  Synthetic oligonucleotide
atccaaccgacgcgacaaaaccaccatccgaaaacatggcattaaacgcatcagaaa

SEQ ID NO: 155365 - DNA, 55 bp, Artificial
  Synthetic oligonucleotide
tctccaaaggccgatatggaacctccggccgatttcggctcgcgcaaggttggtc

SEQ ID NO: 155366 - DNA, 55 bp, Artificial
  Synthetic oligonucleotide
tcgtaaatctaaagcttatgcgataatctgacagaaatttggactggttttcgcg

SEQ ID NO: 155367 - DNA, 55 bp, Artificial
  Synthetic oligonucleotide
atcgactcggtaccaacttgctaacgaacagaatagggcttccgagacggcgacg

SEQ ID NO: 155368 - DNA, 55 bp, Artificial
  Synthetic oligonucleotide
atcggcaaggagcggcgtatcgctgcctcctcgaacagggttcccggtgcttcaa

SEQ ID NO: 155369 - DNA, 55 bp, Artificial
  Synthetic oligonucleotide
atctccgtgccgacggacgtgcattcacgcacggttctgtcatcgcaacctgaca

SEQ ID NO: 155370 - DNA, 55 bp, Artificial
  Synthetic oligonucleotide
atctgaagacgcgacatggcgtggatccgacagtcatcgtcaggctgcaaacacg

SEQ ID NO: 155371 - DNA, 55 bp, Artificial
  Synthetic oligonucleotide
tcgcctttcagaggcacgtctatattggggttgtgagccataaggctccactagc

SEQ ID NO: 155372 - DNA, 55 bp, Artificial
  Synthetic oligonucleotide
atctgttgagacgggtaagtatgaggaaacaccaggttagacgagggtatggagt

SEQ ID NO: 155373 - DNA, 55 bp, Artificial
  Synthetic oligonucleotide
tccttgcggagtatcagcatgaacagtcgacatagaacctggatgaccggtgtta

SEQ ID NO: 155374 - DNA, 48 bp, Artificial
  Synthetic oligonucleotide
tccgtcaagaattaacaaacgaaaccccttagggtttgccgggccgtt

SEQ ID NO: 155375 - DNA, 60 bp, Artificial
  Synthetic oligonucleotide
ccgaaacgtcgaccagatttcagcgtcgcaattgcctattgcagaaacggcaacatctgt

SEQ ID NO: 155376 - DNA, 55 bp, Artificial
  Synthetic oligonucleotide
atggatttcgttaatggcgatcgggtggccaggctaacgtttgcatcaagctgcg

SEQ ID NO: 155377 - DNA, 55 bp, Artificial
  Synthetic oligonucleotide
tcattgaagcagcatcgtttgaaactctgataccgacaaacttgatgaggctgga

SEQ ID NO: 155378 - DNA, 55 bp, Artificial
  Synthetic oligonucleotide
tcatgacaagcaccaagatgaggccctgatagagcagccacgagcgtgtgacatc

SEQ ID NO: 155379 - DNA, 55 bp, Artificial
  Synthetic oligonucleotide
tcagcattcgtaaactcctgaaacagatagacgggaccccacgcagcaaagcccc

SEQ ID NO: 155380 - DNA, 55 bp, Artificial
  Synthetic oligonucleotide
cagcgctgaaaactgataattgtcttatgggattgcgccagtctgctacaggcag

SEQ ID NO: 155381 - DNA, 55 bp, Artificial
  Synthetic oligonucleotide
cagcgcgatatgccttatcgccccgtttattgtgagccttggaatcttcgtcggg

SEQ ID NO: 155382 - DNA, 55 bp, Artificial
  Synthetic oligonucleotide
cagccttaagcactctcggaatttgatggaacgtgatagaccgtgacacggcctg

SEQ ID NO: 155383 - DNA, 55 bp, Artificial
  Synthetic oligonucleotide
taggatcggaccgattcagtgcgccccgagcatgtccgctcacgggccagcaaaa

SEQ ID NO: 155384 - DNA, 55 bp, Artificial
  Synthetic oligonucleotide
tatgaccgaccggtggtctgcgcctttgaggcaacgggtaactatcatcgtccga

SEQ ID NO: 155385 - DNA, 55 bp, Artificial
  Synthetic oligonucleotide
cacggatttgtatgagactattcctgtcaatccgcacaagagtgaatgaatggtt

SEQ ID NO: 155386 - DNA, 53 bp, Artificial
  Synthetic oligonucleotide
cccagcaactccattgctgttttcaaacagggttcgccaaacgctttcccttt

SEQ ID NO: 155387 - DNA, 55 bp, Artificial
  Synthetic oligonucleotide
caccggtatcccgcacaaccttctcgacctcatccactgtcaggtcgctggatgc

SEQ ID NO: 155388 - DNA, 55 bp, Artificial
  Synthetic oligonucleotide
cacacggtggtatatgtgcgaagattcgcgtcctaggtattcacccgatatacgc

SEQ ID NO: 155389 - DNA, 55 bp, Artificial
  Synthetic oligonucleotide
caaccgataaacggctcagataggatggggattcgacggacgggtcgcgtcggta

SEQ ID NO: 155390 - DNA, 55 bp, Artificial
  Synthetic oligonucleotide
caaccaccaaatgacgggtcaattctgccgttgtaaacctatcaggcaagcttga

SEQ ID NO: 155391 - DNA, 55 bp, Artificial
  Synthetic oligonucleotide
caaacctgtcctcggcctcttctcaccgggcaacatgcctgtccgctggaaaggg

SEQ ID NO: 155392 - DNA, 55 bp, Artificial
  Synthetic oligonucleotide
attggggagaacgtgtgaataatatgcgggcaacccgcgtgccttctgattcccc

SEQ ID NO: 155393 - DNA, 55 bp, Artificial
  Synthetic oligonucleotide
attgagtgcagccccgatcaggtctccaacaaaatgaagcgagagattaggcttc

SEQ ID NO: 155394 - DNA, 55 bp, Artificial
  Synthetic oligonucleotide
tcacgagcacgcagctcgattgcccgatccgtttcggaggaagccctatccgcca

SEQ ID NO: 155395 - DNA, 55 bp, Artificial
  Synthetic oligonucleotide
attcgggctttacgcacagccgtcaacaggagggtaacaaaactgtgaccagacc

SEQ ID NO: 155396 - DNA, 55 bp, Artificial
  Synthetic oligonucleotide
tcagatttcccgccaaaggggaactcttcgattcagccttcccgcccgatgctct

SEQ ID NO: 155397 - DNA, 60 bp, Artificial
  Synthetic oligonucleotide
tcttctcacctggttcgacaggatgccggctctcgcgagctacatgctcggtggatcggc

SEQ ID NO: 155398 - DNA, 55 bp, Artificial
  Synthetic oligonucleotide
atgtgatctccgtaactttggccagcccctagcacatgaggggcgggaatcctat

SEQ ID NO: 155399 - DNA, 55 bp, Artificial
  Synthetic oligonucleotide
acgatgaccgtgagataaaccagagtgcagccgagggtcagtccaaatcccggca

SEQ ID NO: 155400 - DNA, 55 bp, Artificial
  Synthetic oligonucleotide
acgagccgatatttcggaaaatcacccgcatctttatttcctaggcattccgctc

SEQ ID NO: 155401 - DNA, 55 bp, Artificial
  Synthetic oligonucleotide
accgctgtagtgtcttatccatttcggcgaaggagtgacaaattgcgtattctgc

SEQ ID NO: 155402 - DNA, 55 bp, Artificial
  Synthetic oligonucleotide
ttaacatgcgctcataagatgcaggcttgcaacagccccgcttattttcgccgcg

SEQ ID NO: 155403 - DNA, 55 bp, Artificial
  Synthetic oligonucleotide
ttcacggctcaaacgccttttcccagggccgagacgtgtcaggccagatgggagc

SEQ ID NO: 155404 - DNA, 55 bp, Artificial
  Synthetic oligonucleotide
acacccgtatgccggatgcgacagggccacaggcacggatacgcaggattgctct

SEQ ID NO: 155405 - DNA, 55 bp, Artificial
  Synthetic oligonucleotide
acacatgcaagcccctatgcggactgtgcacgtacctgccgcggaacaggaaaca

SEQ ID NO: 155406 - DNA, 55 bp, Artificial
  Synthetic oligonucleotide
ttccgcggcgttgcagtattacgtccatcaacgcttgaacacggatccgggatgg

SEQ ID NO: 155407 - DNA, 55 bp, Artificial
  Synthetic oligonucleotide
aatgttcatcgcgtttgactggcgcagtcaggttatgatcgcacttggtgcggtg

SEQ ID NO: 155408 - DNA, 57 bp, Artificial
  Synthetic oligonucleotide
ataagtttcaacgtgcgcgaactgaaacgccattggcctttatctctatttcgcgac

SEQ ID NO: 155409 - DNA, 55 bp, Artificial
  Synthetic oligonucleotide
aatgcagtatcccagaccaaaatggcgaacggtttcgtggcgctgcatatggagc

SEQ ID NO: 155410 - DNA, 55 bp, Artificial
  Synthetic oligonucleotide
aagtccgccaggctgggccagttccgttccgcctcattttccaatagcaagcccc

SEQ ID NO: 155411 - DNA, 55 bp, Artificial
  Synthetic oligonucleotide
aacgtgattttatggtgttgaccaatccgtaaggcgcccttatgttccgccgcac

SEQ ID NO: 155412 - DNA, 55 bp, Artificial
  Synthetic oligonucleotide
ttctccgatatgtggacacgggccgctgtacaggcgttttcctgcaagaacgtcg

SEQ ID NO: 155413 - DNA, 55 bp, Artificial
  Synthetic oligonucleotide
aaccctgcacatttctgcataattgcgctgcgtggcactatccgggtcgcctcgg

SEQ ID NO: 155414 - DNA, 55 bp, Artificial
  Synthetic oligonucleotide
aaacgcaccggatggtctgccaaaggcaggcgctttgccgcctatgcgccattcg

SEQ ID NO: 155415 - DNA, 55 bp, Artificial
  Synthetic oligonucleotide
tttccgtaatttccgagagttgagaggcgcatatagcgacatggggaacctgcct

SEQ ID NO: 155416 - DNA, 55 bp, Artificial
  Synthetic oligonucleotide
aaaagcctgtctcacatcggctcagacgggctgctgatacgtgtttggaggcgtt

SEQ ID NO: 155417 - DNA, 55 bp, Artificial
  Synthetic oligonucleotide
tctgccgtcgaaacgcaattcataaaggtagcctcctatatatggagccggccga

SEQ ID NO: 155418 - DNA, 55 bp, Artificial
  Synthetic oligonucleotide
atacgatggcgatagaggttttctattgtctcgtcgaaataccagtccgctgtcc

SEQ ID NO: 155419 - DNA, 60 bp, Artificial
  Synthetic oligonucleotide
tcgcttcaggtgcatcaagaaaaatagacacgaccgtgtcgctacgctcccgcaccactc

SEQ ID NO: 155420 - DNA, 55 bp, Artificial
  Synthetic oligonucleotide
ataacacccagaataaggccggttgagagtgcaccggtacgccccagttccagcg

SEQ ID NO: 155421 - DNA, 55 bp, Artificial
  Synthetic oligonucleotide
tgaagcaattgcgacctggaatgattagaatcaatggctttagtttaccaccggc

SEQ ID NO: 155422 - DNA, 55 bp, Artificial
  Synthetic oligonucleotide
tgaattgctaagtccctgaaaacgtgtttcactttccaccgatgtcatttgtgac

SEQ ID NO: 155423 - DNA, 55 bp, Artificial
  Synthetic oligonucleotide
tgaccggattggtcggagtttattcaaatcgtttcacaaaccaagcctgtcaacg

SEQ ID NO: 155424 - DNA, 55 bp, Artificial
  Synthetic oligonucleotide
aggtcgtttcgttcggaacagctatgggtcaagcaagactgaccattgcgagcct

SEQ ID NO: 155425 - DNA, 55 bp, Artificial
  Synthetic oligonucleotide
tgatgtccgggattccatagacagccgtacgtcggtagtgaccgcgcactccact

SEQ ID NO: 155426 - DNA, 55 bp, Artificial
  Synthetic oligonucleotide
agcggcacgtgcgaattctccgcaaggttgttcaataccttatgcgaccagtgct

SEQ ID NO: 155427 - DNA, 55 bp, Artificial
  Synthetic oligonucleotide
tgccacggggctactccagatcacgtcctataggcggggagtccctcattatccg

SEQ ID NO: 155428 - DNA, 55 bp, Artificial
  Synthetic oligonucleotide
agcatcctaggcgcgcaaccagcttatttcgttcggtcgagacaataccgacgct

SEQ ID NO: 155429 - DNA, 55 bp, Artificial
  Synthetic oligonucleotide
agacatattcaccacggtaacaatcgggcggttacgctcggaccatctaggatcg

SEQ ID NO: 155430 - DNA, 60 bp, Artificial
  Synthetic oligonucleotide
gcatttttcgctgagacagtgccattgtgtccgtccgttatgccgatttgaagcgggcaa

SEQ ID NO: 155431 - DNA, 55 bp, Artificial
  Synthetic oligonucleotide
agacaaccggatgaatatcatgcccaagatcgggatggaacccttgcggcggcgc

SEQ ID NO: 155432 - DNA, 55 bp, Artificial
  Synthetic oligonucleotide
tggccgaacttgccccttacgcggaggcatcaggtgtgaaacttgggctcgagcc

SEQ ID NO: 155433 - DNA, 55 bp, Artificial
  Synthetic oligonucleotide
tggctctatccggagggcgtgtctcctgtcgggttctgtcacgaaagccccgaca

SEQ ID NO: 155434 - DNA, 55 bp, Artificial
  Synthetic oligonucleotide
tggggcgttgaaaggcactctggaccgcattatgcgttagggctagagttcgagc

SEQ ID NO: 155435 - DNA, 55 bp, Artificial
  Synthetic oligonucleotide
acgctcaatttctatatcgcccaatatggccagttatcgcataagcagatggccc

SEQ ID NO: 155436 - DNA, 55 bp, Artificial
  Synthetic oligonucleotide
cctgacggtatttccatcgaacttctgcaaatgggcgcacctttacctccatcgg

SEQ ID NO: 155437 - DNA, 55 bp, Artificial
  Synthetic oligonucleotide
cctcgttcagagcagaccagtgagcgggaagctttcctgttctcgtatctcggat

SEQ ID NO: 155438 - DNA, 55 bp, Artificial
  Synthetic oligonucleotide
gtcgcgcccagttcatataagtccaggcttcctcgccctctgacttaacttccgt

SEQ ID NO: 155439 - DNA, 53 bp, Artificial
  Synthetic oligonucleotide
cctcgagttaaggtcccaggatactgggcgtaccgaaacaaaagcctagaaga

SEQ ID NO: 155440 - DNA, 55 bp, Artificial
  Synthetic oligonucleotide
gtcgggccgcgacaatagaatcgattaggcacccagaaacggtgagcctcccgtg

SEQ ID NO: 155441 - DNA, 60 bp, Artificial
  Synthetic oligonucleotide
tgaagctaagtctggcaaacccggatatcagccttacgaggattgcccatctggattcaa

SEQ ID NO: 155442 - DNA, 55 bp, Artificial
  Synthetic oligonucleotide
gtcgtgcgtgacgtattggctgtcgtgaacgcagactgaaacgctgcgctcagcc

SEQ ID NO: 155443 - DNA, 55 bp, Artificial
  Synthetic oligonucleotide
ccgtaggggcagcgtttaccggcactcaaggctatgatttcaccacgccggaagc

SEQ ID NO: 155444 - DNA, 55 bp, Artificial
  Synthetic oligonucleotide
gtctatggccacacctatgtctggccgcaaaaggaagatcacccctgcaagccgc

SEQ ID NO: 155445 - DNA, 55 bp, Artificial
  Synthetic oligonucleotide
gtcttagtgagtttcgagtatggacgagttgaacatgcgtttaccaattttgcag

SEQ ID NO: 155446 - DNA, 55 bp, Artificial
  Synthetic oligonucleotide
gtgattggagcctatcatggcgaaaatctgggtgagctgaatgtctggggagatc

SEQ ID NO: 155447 - DNA, 55 bp, Artificial
  Synthetic oligonucleotide
ccgccgaggggcgtatctgacctcgaaagcaacgcggatggaaaaccgactggtc

SEQ ID NO: 155448 - DNA, 55 bp, Artificial
  Synthetic oligonucleotide
gtggagaggcgtttgtcatttatagggtcattcgctcgaactgagccgagctcag

SEQ ID NO: 155449 - DNA, 55 bp, Artificial
  Synthetic oligonucleotide
gttaccatagctcgagagggtgacaaaatcggtcggatttacatggtgaatgagg

SEQ ID NO: 155450 - DNA, 55 bp, Artificial
  Synthetic oligonucleotide
gttgaagacgatccagccagcctgataatcgggctatccaatatcgccagcgcgg

SEQ ID NO: 155451 - DNA, 55 bp, Artificial
  Synthetic oligonucleotide
ccctgtgcgtcctgggtattcatcactagtggattgaccggaacgaaagagtccg

SEQ ID NO: 155452 - DNA, 60 bp, Artificial
  Synthetic oligonucleotide
gccaagcagacatggcagcgcgatatgccttatcgccccgtttattgtgagccttggaat

SEQ ID NO: 155453 - DNA, 55 bp, Artificial
  Synthetic oligonucleotide
ccctgcaataattgtcgctgccatctattatgtaagaaggactgtaatcaatagg

SEQ ID NO: 155454 - DNA, 55 bp, Artificial
  Synthetic oligonucleotide
gttgagatcgcgtcaagacgctcgactgacgattagaaaaccctgaacctactcg

SEQ ID NO: 155455 - DNA, 55 bp, Artificial
  Synthetic oligonucleotide
cccgttcggacatgtgtgaactggtctgcaaatctggtccactcatgcacttccc

SEQ ID NO: 155456 - DNA, 55 bp, Artificial
  Synthetic oligonucleotide
cgcaaataggacattccgagcgtaaacatgaaatttcgacgtctcttctagggtg

SEQ ID NO: 155457 - DNA, 55 bp, Artificial
  Synthetic oligonucleotide
cgattcattctagtttggtcgagtcttagcccggtatttgtactgtgggccattc

SEQ ID NO: 155458 - DNA, 55 bp, Artificial
  Synthetic oligonucleotide
cgatgttgacgctaccggaaagtttctcgagctcgctgcgtcgtatatgcaggtg

SEQ ID NO: 155459 - DNA, 55 bp, Artificial
  Synthetic oligonucleotide
gtcatcgtcaggctgcaaacacgcacgtctcaacgcttttgcaatcaggtatcgt

SEQ ID NO: 155460 - DNA, 55 bp, Artificial
  Synthetic oligonucleotide
cgagtgtgcggctggggtcgaagccatagccacgaaccagatcgtcacacgcaga

SEQ ID NO: 155461 - DNA, 55 bp, Artificial
  Synthetic oligonucleotide
cgactcattctgggacgctgtgcaatggcaaggtccaggctggcccggtgaatgc

SEQ ID NO: 155462 - DNA, 55 bp, Artificial
  Synthetic oligonucleotide
cgacattacgatccagcacaatttcttccagaggcgtgacaaactggaatattcg

SEQ ID NO: 155463 - DNA, 60 bp, Artificial
  Synthetic oligonucleotide
tgatttgcggcactcagaatgcttttcgcctcagatcgcgctctagagagcgtttttgag

SEQ ID NO: 155464 - DNA, 60 bp, Artificial
  Synthetic oligonucleotide
ggttcaatcttctggccctcaccccatccgcaccgcgcagtatctatgaagccaccattt

SEQ ID NO: 155465 - DNA, 55 bp, Artificial
  Synthetic oligonucleotide
cgacatgagaccatagcgggacaggttatgctcgattgcaggcaccgaacgcgac

SEQ ID NO: 155466 - DNA, 55 bp, Artificial
  Synthetic oligonucleotide
cgacagcgacgctttgcgagacttccttacggcgcgtggcacgcaacgggtcatt

SEQ ID NO: 155467 - DNA, 55 bp, Artificial
  Synthetic oligonucleotide
cgaatgtggctcgttttggtagtgaaggccgcgcaatgttccttcttcgcgtgag

SEQ ID NO: 155468 - DNA, 55 bp, Artificial
  Synthetic oligonucleotide
cgaagcttgggccatgcaatatgtccgctcatgagacagctccctaaaaggcgtg

SEQ ID NO: 155469 - DNA, 54 bp, Artificial
  Synthetic oligonucleotide
gtcgaaataatgctcctcgaaacggattgccggttccatgtttcctttaaccgc

SEQ ID NO: 155470 - DNA, 55 bp, Artificial
  Synthetic oligonucleotide
cgaaatcccctgaagccgcagacttcaacatagtcgaacttcatgacttggctcc

SEQ ID NO: 155471 - DNA, 55 bp, Artificial
  Synthetic oligonucleotide
cgaaaggtgagcatgattgccacctgccctcgccaagtaaaacgctaatttacgt

SEQ ID NO: 155472 - DNA, 55 bp, Artificial
  Synthetic oligonucleotide
gtcgcaagcctcgcctagatttccatgccgtcacaattgggagcaaggatgtcat

SEQ ID NO: 155473 - DNA, 55 bp, Artificial
  Synthetic oligonucleotide
ccttgaaaaggccggagcaatcttcgccggtcggctgaacggccccaaagcacga

SEQ ID NO: 155474 - DNA, 55 bp, Artificial
  Synthetic oligonucleotide
gtcgcaatattcatcatagttgagcgggaaatcttcagtcggaatatcagtcaga

SEQ ID NO: 155475 - DNA, 60 bp, Artificial
  Synthetic oligonucleotide
ctcacgatacatcaagagagcctaagcgtatccttcggtaaacttgatcttgaccatccc

SEQ ID NO: 155476 - DNA, 55 bp, Artificial
  Synthetic oligonucleotide
cctgcagcctttcatcgcaacggctggtttcgcgctgcccggatttggtgaaggg

SEQ ID NO: 155477 - DNA, 55 bp, Artificial
  Synthetic oligonucleotide
cagcggcccaagaaggatcgaaggatgttcggggcgcgggaagaatatgaggaca

SEQ ID NO: 155478 - DNA, 55 bp, Artificial
  Synthetic oligonucleotide
caggtattacaacaagtgctgcacacactgtcgatgcaaacgcatacgtatcgcc

SEQ ID NO: 155479 - DNA, 55 bp, Artificial
  Synthetic oligonucleotide
cataattgcgctgcgtggcactatccgggtcgcctcggcttgttacgtcacgccc

SEQ ID NO: 155480 - DNA, 55 bp, Artificial
  Synthetic oligonucleotide
catatccgaagacgggcgttaccgcataacccgcatcccgcttctgcgtgatgcg

SEQ ID NO: 155481 - DNA, 55 bp, Artificial
  Synthetic oligonucleotide
catcctcgattagcgaatccgctcgcatgatagtagcgattaaggccggatggtg

SEQ ID NO: 155482 - DNA, 55 bp, Artificial
  Synthetic oligonucleotide
taccatgatcgtatattatgtgcggaattagggcgtgtctgccgcgcgacagtgg

SEQ ID NO: 155483 - DNA, 55 bp, Artificial
  Synthetic oligonucleotide
cattagctatgaaatcgtgacgtttccctgacataattgacgcgaaatcgcaaag

SEQ ID NO: 155484 - DNA, 53 bp, Artificial
  Synthetic oligonucleotide
catttggtctcctctgaccttttccagtgtccctcggcggtttgtaccgacgg

SEQ ID NO: 155485 - DNA, 55 bp, Artificial
  Synthetic oligonucleotide
ccaaagagcacttcaaggctaatgttattcaaaaggcaccgactccaatcggtgc

SEQ ID NO: 155486 - DNA, 60 bp, Artificial
  Synthetic oligonucleotide
tcaactgcgagatcatactaaggttaggcttcaagagaagttcacttggttgcgtcaatt

SEQ ID NO: 155487 - DNA, 55 bp, Artificial
  Synthetic oligonucleotide
ccaacggtgtggcgacccgaaacaggacgagccacctggcgattactcggatgaa

SEQ ID NO: 155488 - DNA, 55 bp, Artificial
  Synthetic oligonucleotide
ccaatgttgcaacgatagctcgtcggactgagaaattatgccgcagattcctcgt

SEQ ID NO: 155489 - DNA, 55 bp, Artificial
  Synthetic oligonucleotide
ccatgcgtgccgattttcgcaatcatcgcaaggcacaagggacggcggtactggc

SEQ ID NO: 155490 - DNA, 55 bp, Artificial
  Synthetic oligonucleotide
ccatttagtcccgtgaaatagaacgcgcgggagtgcgaaagtgtcgttgctaaaa

SEQ ID NO: 155491 - DNA, 50 bp, Artificial
  Synthetic oligonucleotide
cccggtaaaccgggattgtcgcgtgtttggggcttaagaacagacctacc

SEQ ID NO: 155492 - DNA, 54 bp, Artificial
  Synthetic oligonucleotide
taagtcctaacgcatatgattaactccgccggtaaaggaatggttaccaaacga

SEQ ID NO: 155493 - DNA, 55 bp, Artificial
  Synthetic oligonucleotide
taatggcgctcgggcctgtagcttggtgcgacgaattcacggatgacgttaacgc

SEQ ID NO: 155494 - DNA, 52 bp, Artificial
  Synthetic oligonucleotide
ccccgaccgcaaaggtcaaggagtctggtgccttacgggtggcaccaaccgg

SEQ ID NO: 155495 - DNA, 55 bp, Artificial
  Synthetic oligonucleotide
ccccgtgtgtgagaggactgccggctgaggctcctcccggttcagccactggtca

SEQ ID NO: 155496 - DNA, 55 bp, Artificial
  Synthetic oligonucleotide
cccgacgaaactcccataacccaatccggcgcataagtcatgcggaattattgtc

SEQ ID NO: 155497 - DNA, 53 bp, Artificial
  Synthetic oligonucleotide
tgaggtgaatagtgacgacccggccttttcccatccggaaaaacccatcggtc

SEQ ID NO: 155498 - DNA, 55 bp, Artificial
  Synthetic oligonucleotide
cccgcacgcccttataataaaacggtatatcctgcagtacgctccaatcggtcca

SEQ ID NO: 155499 - DNA, 55 bp, Artificial
  Synthetic oligonucleotide
taagtgacagccgacgagcaccccattccaagatagaatttcggatcagccacaa

SEQ ID NO: 155500 - DNA, 55 bp, Artificial
  Synthetic oligonucleotide
cccgcaacacacgcggaacgacgcggatttatcggcaggccgaagtgcaaacgct

SEQ ID NO: 155501 - DNA, 54 bp, Artificial
  Synthetic oligonucleotide
ttatcatccgggggaaatgtgacgtcacattttcatgccgcgactgacactata

SEQ ID NO: 155502 - DNA, 54 bp, Artificial
  Synthetic oligonucleotide
accagtgttggaacctgtaactcgtcgctattgtcctgtgccgtataatccgtt

SEQ ID NO: 155503 - DNA, 54 bp, Artificial
  Synthetic oligonucleotide
gaacttttcgagccaaagccacctgacgaccgcgcttcgcaaatatcggcgctt

SEQ ID NO: 155504 - DNA, 54 bp, Artificial
  Synthetic oligonucleotide
ttccattcaggaatcggctccaatctcgaaggacaaacgctgggtcgttctcac

SEQ ID NO: 155505 - DNA, 54 bp, Artificial
  Synthetic oligonucleotide
gctgagcgcagcgtttcagtctgcgttcacgacagccaatacgtcacgcacgac

SEQ ID NO: 155506 - DNA, 54 bp, Artificial
  Synthetic oligonucleotide
gaacgcatggcggacaagtctgtgtctgatgaccgttccacagccagcacgcct

SEQ ID NO: 155507 - DNA, 54 bp, Artificial
  Synthetic oligonucleotide
ctgatcgagataagcgctataggtcgtgcatttgacgtccggcttcgtgcaaac

SEQ ID NO: 155508 - DNA, 59 bp, Artificial
  Synthetic oligonucleotide
ccgtgccggaaatcacaccgccataattcaggacattgttgcgcttaaagaccagttgc

SEQ ID NO: 155509 - DNA, 52 bp, Artificial
  Synthetic oligonucleotide
gatgtcgttaccgttgggtctgacggaaaagggctctcccctactgtaaccg

SEQ ID NO: 155510 - DNA, 54 bp, Artificial
  Synthetic oligonucleotide
aatgcgtgttcgatcgtaccgtgccgtattggcaccgcacccatggcgtttgag

SEQ ID NO: 155511 - DNA, 54 bp, Artificial
  Synthetic oligonucleotide
cactgccgtattgatcgccctcacgcgggcaagcgacagcgtggtgtgaatatc

SEQ ID NO: 155512 - DNA, 54 bp, Artificial
  Synthetic oligonucleotide
gtcccctaatcctcacccagtattaagctagcacgaaatcgtgttcagaagaac

SEQ ID NO: 155513 - DNA, 54 bp, Artificial
  Synthetic oligonucleotide
aactagacttagtactggttaaatcaaagctagcggacggcggccgctgtaata

SEQ ID NO: 155514 - DNA, 54 bp, Artificial
  Synthetic oligonucleotide
cgcatagacaggaaccggacagtagcgcgtatgacttggagtaacaggacgata

SEQ ID NO: 155515 - DNA, 54 bp, Artificial
  Synthetic oligonucleotide
ctgtatgggcatctgctgcatgagtccgttgagggatgtgacaggctcaaacac

SEQ ID NO: 155516 - DNA, 54 bp, Artificial
  Synthetic oligonucleotide
ttggtccgctagaaactcgcagtttctcgttgctgtcgacagctcaggacaccc

SEQ ID NO: 155517 - DNA, 54 bp, Artificial
  Synthetic oligonucleotide
agtcaatgatgcgtcaaaagacctgccagtttatatagacatcccagagggtaa

SEQ ID NO: 155518 - DNA, 54 bp, Artificial
  Synthetic oligonucleotide
cccaaaactggtgcgctcttttgggaaacatgcactcgtctgggagttgggctg

SEQ ID NO: 155519 - DNA, 60 bp, Artificial
  Synthetic oligonucleotide
cgagacctcctgcgagctcggccatgaattgaaggttgtacctgcgccacgtttgagaca

SEQ ID NO: 155520 - DNA, 54 bp, Artificial
  Synthetic oligonucleotide
tgactgccgccatagcggcctgtaactctttgtcgcgctcatgacgcaacacaa

SEQ ID NO: 155521 - DNA, 54 bp, Artificial
  Synthetic oligonucleotide
ggtaataatccaagtgcgggagcactacagtattccatagttatcgcaacattc

SEQ ID NO: 155522 - DNA, 54 bp, Artificial
  Synthetic oligonucleotide
tgccgcaaggctgtggggtgcgtctttatcgcgttgacacgctaaaccgggtaa

SEQ ID NO: 155523 - DNA, 54 bp, Artificial
  Synthetic oligonucleotide
cggctctcgtcagctttccgacaactgactgggaaactgggagcgaagaaatac

SEQ ID NO: 155524 - DNA, 52 bp, Artificial
  Synthetic oligonucleotide
acggggaggatgccagtttaaccctttgttcatccaccgggctcgtccgtta

SEQ ID NO: 155525 - DNA, 54 bp, Artificial
  Synthetic oligonucleotide
caaggcgtcaaaccttccttgccctgttttgtagcaccagcattcgacacttcc

SEQ ID NO: 155526 - DNA, 54 bp, Artificial
  Synthetic oligonucleotide
caagtgcaattcaatcattgaggacgaagcatcagcgtcatcgctaaccccaga

SEQ ID NO: 155527 - DNA, 54 bp, Artificial
  Synthetic oligonucleotide
ggtccgacctttccatggtgacccgcgagaagaaagcggacgtcgccttgttct

SEQ ID NO: 155528 - DNA, 54 bp, Artificial
  Synthetic oligonucleotide
gcgtctgaatggtctacctctggatagacgattggaccgctgatgaacccatca

SEQ ID NO: 155529 - DNA, 54 bp, Artificial
  Synthetic oligonucleotide
caccgagcacctgcagatatcgtccctgcattcacaacatgcgaatccgccccc

SEQ ID NO: 155530 - DNA, 59 bp, Artificial
  Synthetic oligonucleotide
cgagcactgaatagcggcaaatcggtttcggatggcgaaatccgtatggtggtgggtga

SEQ ID NO: 155531 - DNA, 53 bp, Artificial
  Synthetic oligonucleotide
tgtaactcctgcgtccgagatcgcagtcgatttcagcatagcgttgtgaagca

SEQ ID NO: 155532 - DNA, 53 bp, Artificial
  Synthetic oligonucleotide
tgctgtgaggcagacttcctccgaaaccggcattgtggaatcaaccatgtaat

SEQ ID NO: 155533 - DNA, 53 bp, Artificial
  Synthetic oligonucleotide
gggcggtgcgacaggcatgatcgcgtcgggtgttgtggtttacgtgtcggctc

SEQ ID NO: 155534 - DNA, 53 bp, Artificial
  Synthetic oligonucleotide
tgctgaagacaatgcctggggcggtatcgttcgcttccagtgctcgttctaat

SEQ ID NO: 155535 - DNA, 53 bp, Artificial
  Synthetic oligonucleotide
tattggcagccagtattcaactttctcgctgacactgagggataacgggaaaa

SEQ ID NO: 155536 - DNA, 53 bp, Artificial
  Synthetic oligonucleotide
tcggatttgccgttgtagtgctccgcaacgcgaatgaagttcaatgccgtgcg

SEQ ID NO: 155537 - DNA, 53 bp, Artificial
  Synthetic oligonucleotide
tgatgagaataggcgctaaacatcgttccccgacggcttttcgcccttgcgga

SEQ ID NO: 155538 - DNA, 53 bp, Artificial
  Synthetic oligonucleotide
tcgcgacgttcttcattccggatcgtttcccaagcacggccaagctttccatg

SEQ ID NO: 155539 - DNA, 53 bp, Artificial
  Synthetic oligonucleotide
ctcgattgcctattccaatcgcaaggtgcgattgatggggttccttcctggca

SEQ ID NO: 155540 - DNA, 53 bp, Artificial
  Synthetic oligonucleotide
atgcgacagcaggagcgggcgcactgtcagacttcgttctacagggcaatgta

SEQ ID NO: 155541 - DNA, 60 bp, Artificial
  Synthetic oligonucleotide
cttcaacaagccgatttctgatgtcgcaatattcatcatagttgagcgggaaatcttcag

SEQ ID NO: 155542 - DNA, 53 bp, Artificial
  Synthetic oligonucleotide
ataccccaaagagagcttcaaacccgtcaccgcctgaagccagggattaacgg

SEQ ID NO: 155543 - DNA, 53 bp, Artificial
  Synthetic oligonucleotide
gagaatcctttttgccgtgtttcacggtcaaagtaacaaagacaatgcggcca

SEQ ID NO: 155544 - DNA, 53 bp, Artificial
  Synthetic oligonucleotide
aggcggaacctcgttcctacacggctcgcgtatcgaaatggggttggacgaag

SEQ ID NO: 155545 - DNA, 53 bp, Artificial
  Synthetic oligonucleotide
agcggggcctgcttcctgacgaaaggcccttcgcttcgcgaaccgaaggagct

SEQ ID NO: 155546 - DNA, 53 bp, Artificial
  Synthetic oligonucleotide
gatttcatgggcgtcaactttcattctggaaataaacggacacggggccgtac

SEQ ID NO: 155547 - DNA, 53 bp, Artificial
  Synthetic oligonucleotide
actgacgcgtgcagttaacgacgcctcggttctcacgtttactttggcggtcg

SEQ ID NO: 155548 - DNA, 53 bp, Artificial
  Synthetic oligonucleotide
acgaggccctaccggtgtccagtacgttgccagcacatatgcaccccacccgt

SEQ ID NO: 155549 - DNA, 53 bp, Artificial
  Synthetic oligonucleotide
accatgacgataggcagtctcaatcttacgatgcttaatctgccaaacgggaa

SEQ ID NO: 155550 - DNA, 53 bp, Artificial
  Synthetic oligonucleotide
gcggcttcggctgattcctgctggaagctacaagttataccatgattcacagc

SEQ ID NO: 155551 - DNA, 53 bp, Artificial
  Synthetic oligonucleotide
accaggcggagtggttctatccgaaacacgcaagatcgctttttatatgcgcc

SEQ ID NO: 155552 - DNA, 60 bp, Artificial
  Synthetic oligonucleotide
aatcttcgatgctacgggacagagcaccacactcaagcaaatgccgtgctgcgtgcttgt

SEQ ID NO: 155553 - DNA, 52 bp, Artificial
  Synthetic oligonucleotide
catctaaccgagcggtgtctaccaaactcggggctattcacaccaacccaaa

SEQ ID NO: 155554 - DNA, 52 bp, Artificial
  Synthetic oligonucleotide
ccccgacacccaccgagcacctgcagatatcgtccctgcattcacaacatgc

SEQ ID NO: 155555 - DNA, 52 bp, Artificial
  Synthetic oligonucleotide
tatcgcattaacacccaacttgggcactgtccgctgaatcctagaacggagt

SEQ ID NO: 155556 - DNA, 52 bp, Artificial
  Synthetic oligonucleotide
attactgtgtcggaattcaatcacgacgtggcagagacctccttccactatg

SEQ ID NO: 155557 - DNA, 52 bp, Artificial
  Synthetic oligonucleotide
atgggcgcataccctgtttacccgccctatcgtttaggcaacactgtaaacg

SEQ ID NO: 155558 - DNA, 52 bp, Artificial
  Synthetic oligonucleotide
cccgataatgccaaagtccgcgaaggcagctttttcctcgacagccaaaatt

SEQ ID NO: 155559 - DNA, 52 bp, Artificial
  Synthetic oligonucleotide
taagcagtacacggcactacagcatcgtgtgaaccgattggccctgcctgcc

SEQ ID NO: 155560 - DNA, 52 bp, Artificial
  Synthetic oligonucleotide
tcctctcctagccggcataagggttattcagggcgctggagggaattccgga

SEQ ID NO: 155561 - DNA, 52 bp, Artificial
  Synthetic oligonucleotide
ccgcgattacctcttcaatgactttgcaacacgactatgccgccgtaaactc

SEQ ID NO: 155562 - DNA, 52 bp, Artificial
  Synthetic oligonucleotide
tcgaatctatgatttgaacaagatcatatacgtcgcacagatacttagggct

SEQ ID NO: 155563 - DNA, 60 bp, Artificial
  Synthetic oligonucleotide
cgatttctgatgtcgcaatattcatcatagttgagcgggaaatcttcagtcggaatatca

SEQ ID NO: 155564 - DNA, 52 bp, Artificial
  Synthetic oligonucleotide
ccggcataagggttattcagggcgctggagggaattccggaaacgggtcggc

SEQ ID NO: 155565 - DNA, 52 bp, Artificial
  Synthetic oligonucleotide
atctggtttatgcggatatggaagaaccgcaataacccagcacgaactatcg

SEQ ID NO: 155566 - DNA, 52 bp, Artificial
  Synthetic oligonucleotide
atcccgcatcttatatcagcagtgtcctcaatgcgccccgtgcaggcaccga

SEQ ID NO: 155567 - DNA, 52 bp, Artificial
  Synthetic oligonucleotide
tctatcctcgtggattcaaacgcagagccgaaggagtttcccgtgctccaga

SEQ ID NO: 155568 - DNA, 52 bp, Artificial
  Synthetic oligonucleotide
tcttgtgctggcgcaaaaagggccgggaattcgcccctatgattggggaaac

SEQ ID NO: 155569 - DNA, 52 bp, Artificial
  Synthetic oligonucleotide
tgacctctggagaggaggtcggccttggttcgggatcgtttgatggatgcgg

SEQ ID NO: 155570 - DNA, 52 bp, Artificial
  Synthetic oligonucleotide
agggatatcgatgcgcagataaatcgccttttagcggcgtaggctgagacaa

SEQ ID NO: 155571 - DNA, 52 bp, Artificial
  Synthetic oligonucleotide
agcccgcccaacataccattgtcagacagaatggcggacgtatcccaaagcc

SEQ ID NO: 155572 - DNA, 52 bp, Artificial
  Synthetic oligonucleotide
agcacacctgaaatttcgagcatggggattgatccccatgctcgcactggaa

SEQ ID NO: 155573 - DNA, 52 bp, Artificial
  Synthetic oligonucleotide
tgtgtcgatgttcagcccaatcacatcggttgtagtggccgtatctgcattg

SEQ ID NO: 155574 - DNA, 60 bp, Artificial
  Synthetic oligonucleotide
tcaacaaagggatagtctgaaaattgcgtgaatagatcgtttgtgctgaatagagcaggt

SEQ ID NO: 155575 - DNA, 57 bp, Artificial
  Synthetic oligonucleotide
tacggcggcaactaactgccggggaaatcagggcgggcaagagcgtagacaagtgga

SEQ ID NO: 155576 - DNA, 52 bp, Artificial
  Synthetic oligonucleotide
ttgacgccattgaccgtgagcgaagttccgtcaagcgcgacagaccccttct

SEQ ID NO: 155577 - DNA, 52 bp, Artificial
  Synthetic oligonucleotide
tttcattcctcgtctgtcttcggatctcgtttccagcgaatactgacggcta

SEQ ID NO: 155578 - DNA, 52 bp, Artificial
  Synthetic oligonucleotide
aaaaggcaccgactccaatcggtgcctttttccatgatgaacaggttcgcag

SEQ ID NO: 155579 - DNA, 52 bp, Artificial
  Synthetic oligonucleotide
ttttcggtcggcccaacgattatgcttctcatcgatcattctccctgtttat

SEQ ID NO: 155580 - DNA, 52 bp, Artificial
  Synthetic oligonucleotide
ggaataaaagttcgcgcggttatccgtgatctgtctgatgaacaattagtcg

SEQ ID NO: 155581 - DNA, 52 bp, Artificial
  Synthetic oligonucleotide
gctgggtatgaggccgaataaatgcgacacgctttaatgcaggccagcgcag

SEQ ID NO: 155582 - DNA, 52 bp, Artificial
  Synthetic oligonucleotide
gcggcaagcgtgggactgatattatattcgcgcaggcgttttcattgacacg

SEQ ID NO: 155583 - DNA, 52 bp, Artificial
  Synthetic oligonucleotide
cgcgtcttggctggagatcacgacaaacagttgcctcaacgagcctttgtca

SEQ ID NO: 155584 - DNA, 52 bp, Artificial
  Synthetic oligonucleotide
ggtctaatggactgattttcccgcgtaggtgtttcacagttttggctcgaaa

SEQ ID NO: 155585 - DNA, 52 bp, Artificial
  Synthetic oligonucleotide
cgcatcgaccataacgaacgcttgttggatatgtccgagaaaattggaaagt

SEQ ID NO: 155586 - DNA, 60 bp, Artificial
  Synthetic oligonucleotide
ggaacgatatcacttcttgctcaggataaatcgaacggtctcgaatacaactcgcagtat

SEQ ID NO: 155587 - DNA, 51 bp, Artificial
  Synthetic oligonucleotide
tagcctcggcgtaaggggtaagcggagcgaggccaagttagacgaatattg

SEQ ID NO: 155588 - DNA, 51 bp, Artificial
  Synthetic oligonucleotide
caaccaggaaaatcctcgctcacgcggaaggctgatctgacagggccggtt

SEQ ID NO: 155589 - DNA, 51 bp, Artificial
  Synthetic oligonucleotide
attgaccggcgcatgggcagccccgaacaatgtcgcacgctcccctcggtc

SEQ ID NO: 155590 - DNA, 51 bp, Artificial
  Synthetic oligonucleotide
tcctgtcattgacggatctaatttgtccgaacgaacggtccgggatcaaaa

SEQ ID NO: 155591 - DNA, 51 bp, Artificial
  Synthetic oligonucleotide
tccttatacgtcagcagttcatagtcgcccggcactgtcacacctacatca

SEQ ID NO: 155592 - DNA, 51 bp, Artificial
  Synthetic oligonucleotide
atcccatccactgtcgccgccaagcgacaatgcgtcgaccaaccgaccgga

SEQ ID NO: 155593 - DNA, 51 bp, Artificial
  Synthetic oligonucleotide
atcagccagagaaaaccggcggctatgatcgcacccagcaccggcgagata

SEQ ID NO: 155594 - DNA, 51 bp, Artificial
  Synthetic oligonucleotide
atattgcccaacccagaaacgcaactattgccccgccaaacagcattccta

SEQ ID NO: 155595 - DNA, 51 bp, Artificial
  Synthetic oligonucleotide
gaacaaggtcgggattagtgatttcgacatcgaccgtgttccgattacata

SEQ ID NO: 155596 - DNA, 51 bp, Artificial
  Synthetic oligonucleotide
gacaataagtcttcctacaggcggaacgatagaaccggaacatcccgcggc

SEQ ID NO: 155597 - DNA, 60 bp, Artificial
  Synthetic oligonucleotide
ttcgattgcgcggaagggtatcttcgcaccattgttagcgagatggagaaacatgatagc

SEQ ID NO: 155598 - DNA, 51 bp, Artificial
  Synthetic oligonucleotide
gagcatacggtgaccttcgcctattgtggcaaccggcgccccatcgctctg

SEQ ID NO: 155599 - DNA, 51 bp, Artificial
  Synthetic oligonucleotide
agtcgtcagaatgaaaccaagtcgggaggcatggcaaatcaaccgatggcc

SEQ ID NO: 155600 - DNA, 51 bp, Artificial
  Synthetic oligonucleotide
gatagtttcctgcagcggcaatcccacgacgtttgtataggagccaaccag

SEQ ID NO: 155601 - DNA, 51 bp, Artificial
  Synthetic oligonucleotide
gatccgggccgcaatatggaactgtggtgcgccctataattcttatcaggc

SEQ ID NO: 155602 - DNA, 51 bp, Artificial
  Synthetic oligonucleotide
agcgaataacctccgggttgagtggctctccggcgctcgatactacgcgca

SEQ ID NO: 155603 - DNA, 51 bp, Artificial
  Synthetic oligonucleotide
gcacgattgtcgatgaatgggctaacctcgaagctctttcgacggtagata

SEQ ID NO: 155604 - DNA, 51 bp, Artificial
  Synthetic oligonucleotide
gccacttcgccaaccagtcgtaacccggattcagggcgcgcggtttttgcg

SEQ ID NO: 155605 - DNA, 51 bp, Artificial
  Synthetic oligonucleotide
actttcagcttcgcaagaactatgaaagctatgaccgtccaataacgcttc

SEQ ID NO: 155606 - DNA, 51 bp, Artificial
  Synthetic oligonucleotide
tggaatggttcaacgggcgcgcttccatggtgcacccggattatattgcaa

SEQ ID NO: 155607 - DNA, 51 bp, Artificial
  Synthetic oligonucleotide
gcgaactatcgttgtgcacacccctgccctgtcgccaatttctttcgcgga

SEQ ID NO: 155608 - DNA, 57 bp, Artificial
  Synthetic oligonucleotide
ggaactgggaccactcgcgccccccgacacccaccgagcacctgcagatatcgtccc

SEQ ID NO: 155609 - DNA, 51 bp, Artificial
  Synthetic oligonucleotide
gcttggacccggtcacgcgagtgtgttcgaatcccagatgcagacacgctt

SEQ ID NO: 155610 - DNA, 51 bp, Artificial
  Synthetic oligonucleotide
aaaatttgcgatagagtcccttcgtataacgtcccggtaagaacatgcaac

SEQ ID NO: 155611 - DNA, 51 bp, Artificial
  Synthetic oligonucleotide
ggaacactgcaatttggcggcggggcacaaagcacgatcaacagtctctcg

SEQ ID NO: 155612 - DNA, 51 bp, Artificial
  Synthetic oligonucleotide
ccgaattgggttaaagagcggattaagctattaaacattgcgcgcgttttg

SEQ ID NO: 155613 - DNA, 51 bp, Artificial
  Synthetic oligonucleotide
gtgatgtatggaaacttacccgaaaacaagtccttagtgtgaggataatga

SEQ ID NO: 155614 - DNA, 51 bp, Artificial
  Synthetic oligonucleotide
ccgttgtacaaagaacgcaatcggccgtacaaagcttcgcatcagggtgaa

SEQ ID NO: 155615 - DNA, 51 bp, Artificial
  Synthetic oligonucleotide
gtttctatagcctgtctgacagaagcggttaaggcccggcttacgcgaaaa

SEQ ID NO: 155616 - DNA, 51 bp, Artificial
  Synthetic oligonucleotide
cctccgggttgagtggctctccggcgctcgatactacgcgcaagcgaccct

SEQ ID NO: 155617 - DNA, 51 bp, Artificial
  Synthetic oligonucleotide
cgcattaaaacccggcccggaaatgaggggcatcatatcagcgacccgatc

SEQ ID NO: 155618 - DNA, 51 bp, Artificial
  Synthetic oligonucleotide
cgcggcaccgaggtctgtagcctgagcgctggcaaaatcgccctgaaagcc

SEQ ID NO: 155619 - DNA, 60 bp, Artificial
  Synthetic oligonucleotide
ggccgcaactttctccatcgaatctatcggggctggcattctggtgtaatgcgcatgtgg

SEQ ID NO: 155620 - DNA, 51 bp, Artificial
  Synthetic oligonucleotide
cgagctcgggagggcgcggttccgttttaccgggtatggaaatggcgttga

SEQ ID NO: 155621 - DNA, 51 bp, Artificial
  Synthetic oligonucleotide
cgcagctttcagcgaacacgctacgcctctatccggcgaacaagtgcaccg

SEQ ID NO: 155622 - DNA, 51 bp, Artificial
  Synthetic oligonucleotide
gtcactacgcctatcacccgagcaatgacgccattctggcccttgacgaaa

SEQ ID NO: 155623 - DNA, 51 bp, Artificial
  Synthetic oligonucleotide
cgggagatcgttaccgtctgcgttcttcgcacgaggcacgcgctacccgag

SEQ ID NO: 155624 - DNA, 50 bp, Artificial
  Synthetic oligonucleotide
gcgaaccgccgcttacttatcgcgagcctgcgtctactgcagctgtaggc

SEQ ID NO: 155625 - DNA, 50 bp, Artificial
  Synthetic oligonucleotide
actgtagtcctcgtgcatggagcatgggccgatggatcgacgtggagccg

SEQ ID NO: 155626 - DNA, 50 bp, Artificial
  Synthetic oligonucleotide
cctcgggttccccggtctatgcgccacgttccctctcgaacgatctgaca

SEQ ID NO: 155627 - DNA, 50 bp, Artificial
  Synthetic oligonucleotide
tggaaaagccgtgaaccggttccatgatccggtataatgttgcccgcgag

SEQ ID NO: 155628 - DNA, 50 bp, Artificial
  Synthetic oligonucleotide
aaacgcgcgtcacgcttgattccgcagccgttaccttgcgggcatttgct

SEQ ID NO: 155629 - DNA, 50 bp, Artificial
  Synthetic oligonucleotide
agacaagtgacacaccataggcgcgggcagcaacttctttaaggcccctt

SEQ ID NO: 155630 - DNA, 56 bp, Artificial
  Synthetic oligonucleotide
tactctcaacaacttcgtaacgctgaacaaatgaacctaagcccttattcaataac

SEQ ID NO: 155631 - DNA, 50 bp, Artificial
  Synthetic oligonucleotide
cgatctggccacgcaagtataccgtggttccacgagcgacaaccgcctga

SEQ ID NO: 155632 - DNA, 50 bp, Artificial
  Synthetic oligonucleotide
ccggagtacgactcaggtcgcgacgcaatatcagtgcagccgaacgccca

SEQ ID NO: 155633 - DNA, 50 bp, Artificial
  Synthetic oligonucleotide
gatgcgcattgcttgaggaagggtgaccagccacatggtttgcgagggcc

SEQ ID NO: 155634 - DNA, 50 bp, Artificial
  Synthetic oligonucleotide
tgatggactggggcgaatgggctcaccgcgttcctctcgccaaatggtcg

SEQ ID NO: 155635 - DNA, 50 bp, Artificial
  Synthetic oligonucleotide
aggcgctttcgggtgcaaacgtcgtgggggtccgggagcttattcaggat

SEQ ID NO: 155636 - DNA, 50 bp, Artificial
  Synthetic oligonucleotide
tgatattacgaggtttaccatgccgtcccagcataccgttcgcgcttatg

SEQ ID NO: 155637 - DNA, 50 bp, Artificial
  Synthetic oligonucleotide
gatctgatcctgagtgagtcgggcggggcaatcctgacaagcgatgccct

SEQ ID NO: 155638 - DNA, 50 bp, Artificial
  Synthetic oligonucleotide
gtatattcgctgcgataatcttcatggttgcgtcatatatcctgtatcgc

SEQ ID NO: 155639 - DNA, 50 bp, Artificial
  Synthetic oligonucleotide
aacacctcaagcgcacgcgccctgttcggcagacggcgaataaatccacg

SEQ ID NO: 155640 - DNA, 50 bp, Artificial
  Synthetic oligonucleotide
cgaacgacatgctacatcggatttgatgatgtgagcgaaccaatcggttc

SEQ ID NO: 155641 - DNA, 58 bp, Artificial
  Synthetic oligonucleotide
ttgctatatattgaacgctgcgcaaagactgtttgttccggcgcgacgttagggttta

SEQ ID NO: 155642 - DNA, 50 bp, Artificial
  Synthetic oligonucleotide
aacggggttgcggcgatgccttttgcctgagcacgatccgtgtccaaaac

SEQ ID NO: 155643 - DNA, 50 bp, Artificial
  Synthetic oligonucleotide
aaggtttcaaccccacaccgagggacaaattgcgggccgttcggacctca

SEQ ID NO: 155644 - DNA, 50 bp, Artificial
  Synthetic oligonucleotide
acaattggcgggtatcattcgggcggtgcgacaggcatgatcgcgtcggg

SEQ ID NO: 155645 - DNA, 50 bp, Artificial
  Synthetic oligonucleotide
acagcctctccgtgtccgtcatgttcgttcgcagattccggacgagcgcc

SEQ ID NO: 155646 - DNA, 50 bp, Artificial
  Synthetic oligonucleotide
acagctcacaggtttcaatctggctccattcctgttttctgtcgcaggca

SEQ ID NO: 155647 - DNA, 50 bp, Artificial
  Synthetic oligonucleotide
gctgccaaaagaacctttcgcgtctcacacccatcggtttcgtcgttagc

SEQ ID NO: 155648 - DNA, 50 bp, Artificial
  Synthetic oligonucleotide
gcggcagacattgaccgcatgctgataggcacggacgtaaccctgtgccg

SEQ ID NO: 155649 - DNA, 50 bp, Artificial
  Synthetic oligonucleotide
accgaggctaccaccatagccgtccagcttatcgtggtcgtgcctgctcc

SEQ ID NO: 155650 - DNA, 50 bp, Artificial
  Synthetic oligonucleotide
ccttggttttagaaacgaaggcatccttttgggcctctatctgacgagct

SEQ ID NO: 155651 - DNA, 50 bp, Artificial
  Synthetic oligonucleotide
aaactgcgcttcgaacccacgcatcggatgaggcggggccacttgcactt

SEQ ID NO: 155652 - DNA, 59 bp, Artificial
  Synthetic oligonucleotide
ttggctttgaagagatccgaccaaagagcacttcaaggctaatgttattcaaaaggcac

SEQ ID NO: 155653 - DNA, 50 bp, Artificial
  Synthetic oligonucleotide
cctgcctgaaacttgtcgtcggggcagggcttggaaccctgctgtcgttt

SEQ ID NO: 155654 - DNA, 50 bp, Artificial
  Synthetic oligonucleotide
acgctgcctgtgcatcgtcgagggaagcttgcgaagcggtgttgcggttg

SEQ ID NO: 155655 - DNA, 50 bp, Artificial
  Synthetic oligonucleotide
tgtcgcacgattttcgccgtatggatcgaaagcgatcggatcgaccatct

SEQ ID NO: 155656 - DNA, 50 bp, Artificial
  Synthetic oligonucleotide
acggcacgcgccgacttaagtgccttgccccaccaaaccaactgatccag

SEQ ID NO: 155657 - DNA, 50 bp, Artificial
  Synthetic oligonucleotide
acggttgggttgggggctagtccggctgtcatttcgtgtgtcccgccttc

SEQ ID NO: 155658 - DNA, 50 bp, Artificial
  Synthetic oligonucleotide
actcaggtcgcgacgcaatatcagtgcagccgaacgcccattggcggttt

SEQ ID NO: 155659 - DNA, 50 bp, Artificial
  Synthetic oligonucleotide
atgcgaccgggaatcgaaaatgagccgtggggccgcgtaatggcggtcat

SEQ ID NO: 155660 - DNA, 50 bp, Artificial
  Synthetic oligonucleotide
cgtgcactcggttccgcggcctatccatttatggggccttacatcgccta

SEQ ID NO: 155661 - DNA, 50 bp, Artificial
  Synthetic oligonucleotide
atgcggtcgagaccagaatgcggtcgcctgcaagttccgtgagcttgcaa

SEQ ID NO: 155662 - DNA, 50 bp, Artificial
  Synthetic oligonucleotide
atggtccggtagcgtccaacattcaggcagcattgccgcgtggtaacagc

SEQ ID NO: 155663 - DNA, 60 bp, Artificial
  Synthetic oligonucleotide
aaatcggcgcgacatgtgcaaaatttcacgtcgatacatgatccgatctacaacctaaat

SEQ ID NO: 155664 - DNA, 50 bp, Artificial
  Synthetic oligonucleotide
atgtaccgtcatgaactctccctgtgcgccgcacggctctgatatatctc

SEQ ID NO: 155665 - DNA, 50 bp, Artificial
  Synthetic oligonucleotide
cggttggcataggtccgcgtgaagatggcactggcttcgggcttgatgtg

SEQ ID NO: 155666 - DNA, 50 bp, Artificial
  Synthetic oligonucleotide
cattcgggcggtgcgacaggcatgatcgcgtcgggtgttgtggtttacgt

SEQ ID NO: 155667 - DNA, 50 bp, Artificial
  Synthetic oligonucleotide
atttccctgctggagttgaaggttacgccaacggctaacgctggctgcgc

SEQ ID NO: 155668 - DNA, 50 bp, Artificial
  Synthetic oligonucleotide
catgacagcacgggcaagtcaccccgcttcgcgatcaagtgtcggacgga

SEQ ID NO: 155669 - DNA, 50 bp, Artificial
  Synthetic oligonucleotide
caaggggtctggcgtgaacttcagaacatccgggcaggggagacgcgtag

SEQ ID NO: 155670 - DNA, 50 bp, Artificial
  Synthetic oligonucleotide
caccgtgattggaactcctccgcgcatgagtacgaaacctcgcgccgtga

SEQ ID NO: 155671 - DNA, 50 bp, Artificial
  Synthetic oligonucleotide
cactcctggcccgacattgttcacggatcgcccggattttgtttggggcc

SEQ ID NO: 155672 - DNA, 50 bp, Artificial
  Synthetic oligonucleotide
tatgaccaaccaccgacgcaaaccgaagcagacagaaaacacgttataat

SEQ ID NO: 155673 - DNA, 50 bp, Artificial
  Synthetic oligonucleotide
cgggtgcctgagggttgagcaccgatgtttcccttttggcgattgccgag

SEQ ID NO: 155674 - DNA, 56 bp, Artificial
  Synthetic oligonucleotide
ctggacattcttcggggacgagagccagacacgtacgctgttgaaaaccgtacacg

SEQ ID NO: 155675 - DNA, 50 bp, Artificial
  Synthetic oligonucleotide
cagccccgttggccccaccgtcgcgcagaagaagtgagctgccgccttcc

SEQ ID NO: 155676 - DNA, 50 bp, Artificial
  Synthetic oligonucleotide
cagggcgttaatcatgcccgcgtttgtggagcgctttccaaccggaacgg

SEQ ID NO: 155677 - DNA, 50 bp, Artificial
  Synthetic oligonucleotide
cagtgtcctcgcgctggagataccgacaacagcatcgcaggacagtcggg

SEQ ID NO: 155678 - DNA, 50 bp, Artificial
  Synthetic oligonucleotide
aggtctgtagcctgagcgctggcaaaatcgccctgaaagccacccatggg

SEQ ID NO: 155679 - DNA, 50 bp, Artificial
  Synthetic oligonucleotide
ccgattccataacccaccgcacgaaacaaggcgaaatgcggggagcgggt

SEQ ID NO: 155680 - DNA, 50 bp, Artificial
  Synthetic oligonucleotide
aggttgtcgcgttgcggcctccctatgccatgacagcacgggcaagtcac

SEQ ID NO: 155681 - DNA, 50 bp, Artificial
  Synthetic oligonucleotide
agtccatagcaggacggacatggcaacgtgcgctttgctcccgggcttat

SEQ ID NO: 155682 - DNA, 50 bp, Artificial
  Synthetic oligonucleotide
ccgacataaagaggcccccgtgcctgcacgactgcgcgtgtggcaaacac

SEQ ID NO: 155683 - DNA, 50 bp, Artificial
  Synthetic oligonucleotide
agtgccgtttgtgcctccgacaatgaaacgccggttccgatgacgccaaa

SEQ ID NO: 155684 - DNA, 50 bp, Artificial
  Synthetic oligonucleotide
ccctatgccatgacagcacgggcaagtcaccccgcttcgcgatcaagtgt

SEQ ID NO: 155685 - DNA, 55 bp, Artificial
  Synthetic oligonucleotide
gatttctccgcccgccattcttcacggctcaaacgccttttcccagggccgagac

SEQ ID NO: 155686 - DNA, 56 bp, Artificial
  Synthetic oligonucleotide
aaacggtttgacgggcagatgccatcttaattccgagccgttcagtgatttcctta

SEQ ID NO: 155687 - DNA, 50 bp, Artificial
  Synthetic oligonucleotide
atagcctcacccggacggaacaaagttgccgtaacgtaggcgcccgcacc

SEQ ID NO: 155688 - DNA, 50 bp, Artificial
  Synthetic oligonucleotide
ataggcgttcgccgcaaagcggtataaggcgggccgcgaaagtgagagtt

SEQ ID NO: 155689 - DNA, 50 bp, Artificial
  Synthetic oligonucleotide
atatattcttggatacctgattcgcatacttgccgtatcactacacgaac

SEQ ID NO: 155690 - DNA, 50 bp, Artificial
  Synthetic oligonucleotide
cccgtctgaccgctaggctgcttcgggtcctgagcgttctctgcacgatt

SEQ ID NO: 155691 - DNA, 50 bp, Artificial
  Synthetic oligonucleotide
taaagcgggctggggacaagcgccagcctctctcatgaaagcgctgaatt

SEQ ID NO: 155692 - DNA, 50 bp, Artificial
  Synthetic oligonucleotide
ggggcgaatgggctcaccgcgttcctctcgccaaatggtcgatcatccta

SEQ ID NO: 155693 - DNA, 50 bp, Artificial
  Synthetic oligonucleotide
atcattccgcataaacactcccgtttcgtgcagcaaaccgaagttacgat

SEQ ID NO: 155694 - DNA, 50 bp, Artificial
  Synthetic oligonucleotide
cccggccctgagcaggttgaaccgatcttccagcttccggtgttcaccgg

SEQ ID NO: 155695 - DNA, 50 bp, Artificial
  Synthetic oligonucleotide
ctgcctagtcccgcaccgaccgacaaagaaggtgcaaagattccgcccgg

SEQ ID NO: 155696 - DNA, 50 bp, Artificial
  Synthetic oligonucleotide
atcgggcgtaagcatcactggatgatgcgccgtgttcagacggatgcgga

SEQ ID NO: 155697 - DNA, 60 bp, Artificial
  Synthetic oligonucleotide
tttccatcgcagcgtgagggggcgtgacatggccgactatcattctcccaccgtggtaac

SEQ ID NO: 155698 - DNA, 50 bp, Artificial
  Synthetic oligonucleotide
atctggcagcaagttcacttagtcgagacatgtcacgaagtccgtgttcg

SEQ ID NO: 155699 - DNA, 50 bp, Artificial
  Synthetic oligonucleotide
ctctgcgcaggcaccgctttttgtcagcgcgatccttgctggcatggcag

SEQ ID NO: 155700 - DNA, 50 bp, Artificial
  Synthetic oligonucleotide
cgttcaggatggtccggtagcgtccaacattcaggcagcattgccgcgtg

SEQ ID NO: 155701 - DNA, 57 bp, Artificial
  Synthetic oligonucleotide
tgtgtcggaggtggtgtaggacaccgacatatcgtaattgcccgctttggtcgtttc

SEQ ID NO: 155702 - DNA, 60 bp, Artificial
  Synthetic oligonucleotide
catggcgttctacaagcgtattttcggcactaccgtcatggcagatgcgcgggaacacga

SEQ ID NO: 155703 - DNA, 56 bp, Artificial
  Synthetic oligonucleotide
catggagcaaatcgcccccggaagtgcggcggaacataagggcgccttacggattg

SEQ ID NO: 155704 - DNA, 60 bp, Artificial
  Synthetic oligonucleotide
cagagcaccacactcaagcaaatgccgtgctgcgtgcttgtaacgacttgagcgagcgtt

SEQ ID NO: 155705 - DNA, 57 bp, Artificial
  Synthetic oligonucleotide
tttggatccgccgattgtagtgttctcatcctacgtgggattgaccaccaaatacgg

SEQ ID NO: 155706 - DNA, 56 bp, Artificial
  Synthetic oligonucleotide
ttcacaagcgcgggacattttggtctcaccttcaattacgttcttcaggccccgac

SEQ ID NO: 155707 - DNA, 58 bp, Artificial
  Synthetic oligonucleotide
tacgctttcttcgggcggcgaacgaatgccggagcaaagcccggatgtcggcgcgcta

SEQ ID NO: 155708 - DNA, 52 bp, Artificial
  Synthetic oligonucleotide
tactcttttccgggggtccgacctttccatggtgacccgcgagaagaaagcg

SEQ ID NO: 155709 - DNA, 58 bp, Artificial
  Synthetic oligonucleotide
gacatatatcgttttgcgtggttactcggatgcggtaatcacgcgcccagctttttct

SEQ ID NO: 155710 - DNA, 60 bp, Artificial
  Synthetic oligonucleotide
cgccagtggcatggaggagcgcgccactggtgatatgacggggaggtcagaacatgcgct

SEQ ID NO: 155711 - DNA, 60 bp, Artificial
  Synthetic oligonucleotide
catctcacagtcagtctctatatgaattacaagccggccctcaggggatgacagagcgcc

SEQ ID NO: 155712 - DNA, 55 bp, Artificial
  Synthetic oligonucleotide
cgttttgtttcggtcagcccagacaccagtgtaagcttcaacgctggcctacctt

SEQ ID NO: 155713 - DNA, 56 bp, Artificial
  Synthetic oligonucleotide
tccttttcccggaaatcggcccggtagagaggggaagcggacgcactcatgacaca

SEQ ID NO: 155714 - DNA, 55 bp, Artificial
  Synthetic oligonucleotide
accggaacccacgatttgggtcaggcctcgagccttcgccccatgaattaggctg

SEQ ID NO: 155715 - DNA, 57 bp, Artificial
  Synthetic oligonucleotide
taaccactatcataaggggcattcccaaagtcgacgacctgtttccatggaacgtca

SEQ ID NO: 155716 - DNA, 59 bp, Artificial
  Synthetic oligonucleotide
catcgaatctatcggggctggcattctggtgtaatgcgcatgtgggttgtccgcggaaa

SEQ ID NO: 155717 - DNA, 59 bp, Artificial
  Synthetic oligonucleotide
ccgtgagcacggcattcgtgtcagccgctccaatcgtagccttggcaagagccgatacc

SEQ ID NO: 155718 - DNA, 57 bp, Artificial
  Synthetic oligonucleotide
aatcccatcgaagtatcggggttcaacagcgggtccatcgccttcaaaccagcggca

SEQ ID NO: 155719 - DNA, 56 bp, Artificial
  Synthetic oligonucleotide
cgatctttacgcgcaagacaggttttcacagaacggggctggaccatcgcggttcg

SEQ ID NO: 155720 - DNA, 60 bp, Artificial
  Synthetic oligonucleotide
tgcggcctgaccagcgtggagatttaagcatctcagatcgtcaggtaaggcataggcatg

SEQ ID NO: 155721 - DNA, 57 bp, Artificial
  Synthetic oligonucleotide
tggatacgcaggttactctttggctgacaccagagagaacgaaacgttttgcgggtc

SEQ ID NO: 155722 - DNA, 56 bp, Artificial
  Synthetic oligonucleotide
attgacggggcgcttgtaggccggtgtcgtccccacctctgacccgtcgatcaata

SEQ ID NO: 155723 - DNA, 57 bp, Artificial
  Synthetic oligonucleotide
gttgtgtcatggcttccctgacgtttctccccggctgcatcctccgacgatatgtcg

SEQ ID NO: 155724 - DNA, 57 bp, Artificial
  Synthetic oligonucleotide
tatgcagactcttcgcacagcgtgtcgtctgcgccgcttattcacggatgaccacac

SEQ ID NO: 155725 - DNA, 57 bp, Artificial
  Synthetic oligonucleotide
ataggagcagcacatgcctaataggttgcacagtggcagagctaacccggcgcagta

SEQ ID NO: 155726 - DNA, 57 bp, Artificial
  Synthetic oligonucleotide
ggtgcaacgtctttggaccttccgtgctgggcacactagaactctcagagcgaactg

SEQ ID NO: 155727 - DNA, 56 bp, Artificial
  Synthetic oligonucleotide
tcgtctgctccccctccgttggggagatagtcaggcgcagcgcttcaggtcggatc

SEQ ID NO: 155728 - DNA, 56 bp, Artificial
  Synthetic oligonucleotide
atcggaagcgagggctgggccggttgaatacggatgcaggagcgggggggccttgc

SEQ ID NO: 155729 - DNA, 56 bp, Artificial
  Synthetic oligonucleotide
tgatacgacgcttgagataatcattttcaaccgacagttttgcaatctctacagtc

SEQ ID NO: 155730 - DNA, 56 bp, Artificial
  Synthetic oligonucleotide
aagttgtcggcgagtttcctgaacttcagggcgcgatggggcgcaaatatgcgttg

SEQ ID NO: 155731 - DNA, 58 bp, Artificial
  Synthetic oligonucleotide
agagtggagccaattggcaatctgtcgaaaggcggaacctcgttcctacacggctcgc

SEQ ID NO: 155732 - DNA, 53 bp, Artificial
  Synthetic oligonucleotide
cgtttcagccacaaacaacctgctctctacgttgaaaccacccttttgggacc

SEQ ID NO: 155733 - DNA, 55 bp, Artificial
  Synthetic oligonucleotide
cgttgcgggcctatggccccgtcttccatccgtcgaatagtggtcaatgatagct

SEQ ID NO: 155734 - DNA, 55 bp, Artificial
  Synthetic oligonucleotide
ctaacggcgaggttatcgtcggcatcaagtcaaacagcaatgagctgcaacgcgc

SEQ ID NO: 155735 - DNA, 55 bp, Artificial
  Synthetic oligonucleotide
ctatgctcgcacccatagccgaaacaagcttggtcttgatgtcgtcaaccgattc

SEQ ID NO: 155736 - DNA, 55 bp, Artificial
  Synthetic oligonucleotide
ctccttgtatcgcatggggaatgcgtttcaatcttcaagatgtggcttcacgttt

SEQ ID NO: 155737 - DNA, 55 bp, Artificial
  Synthetic oligonucleotide
ctcgggagtagtagtaagtggatcggcctcttgggatcgaaacaagacagacgca

SEQ ID NO: 155738 - DNA, 53 bp, Artificial
  Synthetic oligonucleotide
gggtttggtaagttcgaatacgaatttcgctaaacacgatacggtagtctgga

SEQ ID NO: 155739 - DNA, 55 bp, Artificial
  Synthetic oligonucleotide
ctctggtgattgcagccaccgatcgaacggatgaacttgtttcgatagtgaatcg

SEQ ID NO: 155740 - DNA, 55 bp, Artificial
  Synthetic oligonucleotide
ctgaaccacgcaagggcgaagccattcctgtggagacgccaacgaccattcacgc

SEQ ID NO: 155741 - DNA, 55 bp, Artificial
  Synthetic oligonucleotide
ctgagcatgagcagacactaatcgctcactagtatctcgcaatgtcgcagacaca

SEQ ID NO: 155742 - DNA, 56 bp, Artificial
  Synthetic oligonucleotide
gccttggaatcttcgtcgggttcaggttccgccttcattattgcgttctttgcggc

SEQ ID NO: 155743 - DNA, 55 bp, Artificial
  Synthetic oligonucleotide
ggggtggacgaatgaacgatacggtagcaggaaacgcagcgagcggtagctctgc

SEQ ID NO: 155744 - DNA, 55 bp, Artificial
  Synthetic oligonucleotide
ctggaggtatggacccgtcgatagagatgcaggctctctacgtccgccgcccaaa

SEQ ID NO: 155745 - DNA, 55 bp, Artificial
  Synthetic oligonucleotide
gtaactccgagctagcgcgaagctgtgttccgcgccctccttcatatgcgttagg

SEQ ID NO: 155746 - DNA, 55 bp, Artificial
  Synthetic oligonucleotide
gtagaaaggagcggagtgcggtattcaaaaggggtccaatcattctgaattaccg

SEQ ID NO: 155747 - DNA, 55 bp, Artificial
  Synthetic oligonucleotide
cgcgccgtcatgacaagggccaagttgccgctgtcacaagagtatgaagggccta

SEQ ID NO: 155748 - DNA, 55 bp, Artificial
  Synthetic oligonucleotide
cgcgcccataaagacgaccggtctcttctctcaggcaaaagggatcggataacca

SEQ ID NO: 155749 - DNA, 55 bp, Artificial
  Synthetic oligonucleotide
cgcctgatggtctatggtaccggtggtttggcctatggtaaggtcaagacgtcgc

SEQ ID NO: 155750 - DNA, 55 bp, Artificial
  Synthetic oligonucleotide
cgccgcaaatgattatctgtctctgcttaaatctgttgcaaactagcgattatcg

SEQ ID NO: 155751 - DNA, 55 bp, Artificial
  Synthetic oligonucleotide
cgcccggacctcgaattctggccccatgcttgctatctaggcgcgtatgtcctgc

SEQ ID NO: 155752 - DNA, 55 bp, Artificial
  Synthetic oligonucleotide
cgcccaccagccgcagaaatatacgagcgatagcgctccatgagccactcacctg

SEQ ID NO: 155753 - DNA, 61 bp, Artificial
  Synthetic oligonucleotide
agagtcgtgaagtcacgacggggtgtgtgcaagatggggagcatcatggggtcggtcaata

SEQ ID NO: 155754 - DNA, 58 bp, Artificial
  Synthetic oligonucleotide
accaccccgaccccaggtgcatgcggtggaaggaaatgccgaggcttgataatgccac

SEQ ID NO: 155755 - DNA, 60 bp, Artificial
  Synthetic oligonucleotide
tctcggcatgataatgataaccgtagcgtgattttcccgcagactgggtgcagaaaaatt

SEQ ID NO: 155756 - DNA, 53 bp, Artificial
  Synthetic oligonucleotide
gttgacctacgcgtggccagtactacgccttgggcaaaacggaccccggtctg

SEQ ID NO: 155757 - DNA, 55 bp, Artificial
  Synthetic oligonucleotide
gttgagatcgtatcgcgttctagtccaaggttgcgcaaggtagtgttgtaatggc

SEQ ID NO: 155758 - DNA, 55 bp, Artificial
  Synthetic oligonucleotide
gttgctatgtgtacgaacgagcgaatcccgcaacggattggtctgtacgtcgttg

SEQ ID NO: 155759 - DNA, 55 bp, Artificial
  Synthetic oligonucleotide
gttgctccgccgtgccaacgaaacgcgaccaaatcaccccgcttgacgggttcag

SEQ ID NO: 155760 - DNA, 55 bp, Artificial
  Synthetic oligonucleotide
gttgcttctactcagtggaataacaccgcaactgaagcaagattggaattagcgc

SEQ ID NO: 155761 - DNA, 55 bp, Artificial
  Synthetic oligonucleotide
gttggagacgagtctcggcttaaatactattgcggtaaagtagtggcgttatcat

SEQ ID NO: 155762 - DNA, 55 bp, Artificial
  Synthetic oligonucleotide
tatcgggtggaaaagggcgggcaacgctcgaggcgaaggcatcagcccacgctcc

SEQ ID NO: 155763 - DNA, 55 bp, Artificial
  Synthetic oligonucleotide
tatctctcggcatcgcttgcacgtctgtcgactattgcggctccagttcagcaac

SEQ ID NO: 155764 - DNA, 55 bp, Artificial
  Synthetic oligonucleotide
tatcttcgtgagaatgcgcatgcctgaagctcgcgacacgcggacggctcgctga

SEQ ID NO: 155765 - DNA, 55 bp, Artificial
  Synthetic oligonucleotide
tatcttcgtttgcctcgtatagcgacacttcgtgccccaaactccgcagcttcag

SEQ ID NO: 155766 - DNA, 56 bp, Artificial
  Synthetic oligonucleotide
cccagggcctgttgcgaggccaggaaacctatcacctgatcggggtctgtgccccg

SEQ ID NO: 155767 - DNA, 55 bp, Artificial
  Synthetic oligonucleotide
tatgcgggtccgagaatcctcccggtgcgaggttctgccaggaatgtcaggccgt

SEQ ID NO: 155768 - DNA, 55 bp, Artificial
  Synthetic oligonucleotide
tatggcgtgcgcgttccatacttgcgcgcgttggtcgacgtcgttctcggttcgc

SEQ ID NO: 155769 - DNA, 55 bp, Artificial
  Synthetic oligonucleotide
tattgcatagcaacattgtaagcggggaacggtctatttcgtcaggtcttgtcgt

SEQ ID NO: 155770 - DNA, 55 bp, Artificial
  Synthetic oligonucleotide
tattgggcacaaaataagtaattacgtatgtacgtactcatgtgcatacgtaatt

SEQ ID NO: 155771 - DNA, 55 bp, Artificial
  Synthetic oligonucleotide
tcaaagccaggcgttgttcgccctagagtttgggctcagagtccgccttcccggc

SEQ ID NO: 155772 - DNA, 55 bp, Artificial
  Synthetic oligonucleotide
tcaactgcagtttccgaacgtagcctccggagcaacgcgtccgtcgtgccttgcc

SEQ ID NO: 155773 - DNA, 55 bp, Artificial
  Synthetic oligonucleotide
tcaaggtattcagcaccagcgagggcgcactgcaaaacctcaaggtggacaacaa

SEQ ID NO: 155774 - DNA, 55 bp, Artificial
  Synthetic oligonucleotide
tcaattcgcgtctgccgcatttatcgcaccggaacagatacctagagtaaaccct

SEQ ID NO: 155775 - DNA, 55 bp, Artificial
  Synthetic oligonucleotide
tcacaggcgccggggcgtgcatggcgtgtgcaacggccccggcaggagaacggat

SEQ ID NO: 155776 - DNA, 54 bp, Artificial
  Synthetic oligonucleotide
tcacgacccctggaataatccgccgtgcccggtcgttcaatcgtcgggtgaccc

SEQ ID NO: 155777 - DNA, 60 bp, Artificial
  Synthetic oligonucleotide
tcaatacagcgggacatatcagttgcttaagtccgaaaaatgaccggactagcttcgtca

SEQ ID NO: 155778 - DNA, 55 bp, Artificial
  Synthetic oligonucleotide
tcacgagacgcagcgagtcgtagatcgcaccgtggacgttgtgcatcgagatgca

SEQ ID NO: 155779 - DNA, 55 bp, Artificial
  Synthetic oligonucleotide
tcacggttactggtgataccgagctctcgggtacggaagttcatttcttggcgga

SEQ ID NO: 155780 - DNA, 55 bp, Artificial
  Synthetic oligonucleotide
tcagaccgtccgcaagacgcgtggtcagctcatttcgcgataccggctccataga

SEQ ID NO: 155781 - DNA, 55 bp, Artificial
  Synthetic oligonucleotide
tcagcaacggcccaatgccgcacgaagtccggtgcgagctctactgactcgttcg

SEQ ID NO: 155782 - DNA, 55 bp, Artificial
  Synthetic oligonucleotide
tcagcccacacgacgaaactgcattcatcgcgagaaacttatcgcgtcgcgtccg

SEQ ID NO: 155783 - DNA, 55 bp, Artificial
  Synthetic oligonucleotide
tcaggcgatctcggacaaatggctgaagtaagcgacagtacatgcatcggcggcc

SEQ ID NO: 155784 - DNA, 55 bp, Artificial
  Synthetic oligonucleotide
tcaggtcaatctggggtaccgttgcaatcagtcgtgcgtccattgccatgtggcc

SEQ ID NO: 155785 - DNA, 55 bp, Artificial
  Synthetic oligonucleotide
tcagtaaggcactgcaaaatagtgcggatgccgtatggattacgtgacctgcccc

SEQ ID NO: 155786 - DNA, 55 bp, Artificial
  Synthetic oligonucleotide
tcagtcgcccggcagggcatgtccaacgaaccagccgctaccctaaagcattcgg

SEQ ID NO: 155787 - DNA, 55 bp, Artificial
  Synthetic oligonucleotide
tcagtttggattgtggggtccgaagcgacatgaacgcaccgcgcatctcgcattc

SEQ ID NO: 155788 - DNA, 55 bp, Artificial
  Synthetic oligonucleotide
agccggtcacacacgtcgattgccgcgaaacaccagcgtcaaacgaaaaactccc

SEQ ID NO: 155789 - DNA, 55 bp, Artificial
  Synthetic oligonucleotide
taccctaggcaaccgcggtagaacccggaccatctcgtctaagatgtagtgcgac

SEQ ID NO: 155790 - DNA, 55 bp, Artificial
  Synthetic oligonucleotide
tacgaacaacaaagctgcaatcactccgccagtcaaccaagccgaaaccctccga

SEQ ID NO: 155791 - DNA, 55 bp, Artificial
  Synthetic oligonucleotide
tacgaaggctcctataagatcacctattcgacaacaagcaacccttgcggacgcg

SEQ ID NO: 155792 - DNA, 55 bp, Artificial
  Synthetic oligonucleotide
tacgccatgtgagtgtggggcagtgcctgcgttaacccactattggacgatcccc

SEQ ID NO: 155793 - DNA, 55 bp, Artificial
  Synthetic oligonucleotide
tacgtccgacgggaagtcccgttgagggacaagcgacgagcgatgttgcgatgcg

SEQ ID NO: 155794 - DNA, 55 bp, Artificial
  Synthetic oligonucleotide
tacgtgatcccctgccgcatcgcagaacccgccatttaaccgatattcgttgagc

SEQ ID NO: 155795 - DNA, 55 bp, Artificial
  Synthetic oligonucleotide
tacgttttacgcaggcgacgtgagtgcggatgtgcgctgaaagactaaccttccg

SEQ ID NO: 155796 - DNA, 55 bp, Artificial
  Synthetic oligonucleotide
tactgatgacaaccaggaggcaatgatggctctaccgccgagactggaagcccac

SEQ ID NO: 155797 - DNA, 55 bp, Artificial
  Synthetic oligonucleotide
tactggcgaccggccgtcagcgtaccgtacgccgcgttcgtcagaccgacccacg

SEQ ID NO: 155798 - DNA, 55 bp, Artificial
  Synthetic oligonucleotide
tactggcggcgagcgctaattccacgggcgtgaggacgcctccggacaggacaaa

SEQ ID NO: 155799 - DNA, 60 bp, Artificial
  Synthetic oligonucleotide
agtcgcgataggacttcgggttgggcacatgcaggtaggcgcagcacaaggcgacttgtt

SEQ ID NO: 155800 - DNA, 55 bp, Artificial
  Synthetic oligonucleotide
tacttgccgaaggtcattacgcaacagcaggttccggaggcccgagcgctgattc

SEQ ID NO: 155801 - DNA, 55 bp, Artificial
  Synthetic oligonucleotide
tagaaacgcgatgtgggcgcgacggaaactcggagacagtctggagcgtacaccc

SEQ ID NO: 155802 - DNA, 55 bp, Artificial
  Synthetic oligonucleotide
tagattgcattacatgaattactgcgcagttctagtgcgtcacggccaatgtctc

SEQ ID NO: 155803 - DNA, 54 bp, Artificial
  Synthetic oligonucleotide
tagccgcacgtgaggattgaacgccccgccgtttccgatcgggtacgaaaggac

SEQ ID NO: 155804 - DNA, 55 bp, Artificial
  Synthetic oligonucleotide
tagccggttcccataaccgtataccttcgcgcgctcccatggacggctcccctgg

SEQ ID NO: 155805 - DNA, 55 bp, Artificial
  Synthetic oligonucleotide
tagcctgccgcgccggattagacgttggagacatagtcggcgcatacgtgggagg

SEQ ID NO: 155806 - DNA, 55 bp, Artificial
  Synthetic oligonucleotide
tagcgtgtaggggttgtgcgtatcggcacagcggtgactcaaccggaaacatacc

SEQ ID NO: 155807 - DNA, 55 bp, Artificial
  Synthetic oligonucleotide
taggatggaaaatctgccctcagcgtcctactggcaggacgacaggagccgcccg

SEQ ID NO: 155808 - DNA, 55 bp, Artificial
  Synthetic oligonucleotide
tagggtggcgtagagttgcatagagtgtcatacggaaagtgtcctccatgtgtcc

SEQ ID NO: 155809 - DNA, 55 bp, Artificial
  Synthetic oligonucleotide
tagggttaacccgattatagccggattgcaccaacttgccagtgtgacctgcccc

SEQ ID NO: 155810 - DNA, 60 bp, Artificial
  Synthetic oligonucleotide
ccgttatcggctgtcgtcccgatcaagatgcggccggaggcagttactcggagtcgctca

SEQ ID NO: 155811 - DNA, 55 bp, Artificial
  Synthetic oligonucleotide
taggtttgcagacgcgagacgcaacccgcgggcaacggaatcgctcgcggtttct

SEQ ID NO: 155812 - DNA, 55 bp, Artificial
  Synthetic oligonucleotide
tatagagacgagcgaaaacggtacggcggggccaggagcgtaccccatggtccga

SEQ ID NO: 155813 - DNA, 55 bp, Artificial
  Synthetic oligonucleotide
tatagcctgcctagactctgggccactttccacacagtgtccctcccgtcatgtc

SEQ ID NO: 155814 - DNA, 54 bp, Artificial
  Synthetic oligonucleotide
tatcgctgccgacgggttaatccccgcggcgaacataaaagacctcctctcggg

SEQ ID NO: 155815 - DNA, 55 bp, Artificial
  Synthetic oligonucleotide
gtccatgtgcttaccgggtcgaatcggatgaatctgcgggcgcctcgctcgtacc

SEQ ID NO: 155816 - DNA, 55 bp, Artificial
  Synthetic oligonucleotide
gtccccagcctgtcatacgaccgtagatcaacttcggattgacggccaggcagac

SEQ ID NO: 155817 - DNA, 55 bp, Artificial
  Synthetic oligonucleotide
gtccgaacacgcatgccgacaaagtcttttggcgaactaatctcgcttcttgacc

SEQ ID NO: 155818 - DNA, 55 bp, Artificial
  Synthetic oligonucleotide
gtccgaggcatgatggggacgaagtcttaaacgattcttaagcggcattgtcctg

SEQ ID NO: 155819 - DNA, 55 bp, Artificial
  Synthetic oligonucleotide
gtccggtcaaaattgcgcgcacttattgcgggtatagcggcgtgattaacttcgc

SEQ ID NO: 155820 - DNA, 55 bp, Artificial
  Synthetic oligonucleotide
gtcctgaacgtataggtgaaagggctccgactctcggaaccccgcaccgtggagc

SEQ ID NO: 155821 - DNA, 59 bp, Artificial
  Synthetic oligonucleotide
gattcgcttgccactacgccaaatgaggcgtaacgtcaacattaattgcgtatggggac

SEQ ID NO: 155822 - DNA, 55 bp, Artificial
  Synthetic oligonucleotide
gtcctgtttctctgtcatcacggtctgagtgcatgtgtccactcggacacttagc

SEQ ID NO: 155823 - DNA, 55 bp, Artificial
  Synthetic oligonucleotide
gtcgaagactgcgttcagtctcgcgttagtttgccgattgttggaatagtgcttg

SEQ ID NO: 155824 - DNA, 55 bp, Artificial
  Synthetic oligonucleotide
gtcgaagcgggagtgaagcacgactctcgaacgtttgcgccccgactagacacgg

SEQ ID NO: 155825 - DNA, 55 bp, Artificial
  Synthetic oligonucleotide
gtcgaagtgccacaaggcgacagaagcgattggtatctgcacccgacttacgcgg

SEQ ID NO: 155826 - DNA, 55 bp, Artificial
  Synthetic oligonucleotide
gtcgatcgcatatttgaattcaaagcaatcgaagccagtcttgggctgggtacgg

SEQ ID NO: 155827 - DNA, 55 bp, Artificial
  Synthetic oligonucleotide
gtcgcaaccgggttataaatgatgaccgattgaacgtgctgttacttccagggtg

SEQ ID NO: 155828 - DNA, 55 bp, Artificial
  Synthetic oligonucleotide
gtcgccgaatcagggaaggcgatctcggggcgagactgtacggggttctcgtttc

SEQ ID NO: 155829 - DNA, 55 bp, Artificial
  Synthetic oligonucleotide
gtcgccttcactcgcccaccttcgtcggtgcaattcctctaggcgcacttcacgg

SEQ ID NO: 155830 - DNA, 55 bp, Artificial
  Synthetic oligonucleotide
gtcgcgatcagacggagtcggttcgagcgccgtgcgaaatctgccttttggtggg

SEQ ID NO: 155831 - DNA, 55 bp, Artificial
  Synthetic oligonucleotide
gtcggacagaggcgaatagggcaccagacaaaggcaggacaaaagcagcgtgccc

SEQ ID NO: 155832 - DNA, 60 bp, Artificial
  Synthetic oligonucleotide
gttgccgccgcgtgtcgattgtctttctgcggcttcgcttctagttcacatcttacccat

SEQ ID NO: 155833 - DNA, 55 bp, Artificial
  Synthetic oligonucleotide
gtcggatggtcactcgaccggactttcccttgttggaacctgcgaggcgcggcat

SEQ ID NO: 155834 - DNA, 55 bp, Artificial
  Synthetic oligonucleotide
gtcggattcgaggtctcaacttgcttgacccggatcagagcagcgatgtgaggtc

SEQ ID NO: 155835 - DNA, 55 bp, Artificial
  Synthetic oligonucleotide
gtcggatttaactgcacagtcataccactctgcctttgctagttgagcagagact

SEQ ID NO: 155836 - DNA, 55 bp, Artificial
  Synthetic oligonucleotide
gtcggcaagctattcatgtgctcggcgactgagctcggtccctgtcggctgaacg

SEQ ID NO: 155837 - DNA, 55 bp, Artificial
  Synthetic oligonucleotide
gtcggcaatcactgccgagtaatacggcgattcgggacaacacatgcgttcgtag

SEQ ID NO: 155838 - DNA, 55 bp, Artificial
  Synthetic oligonucleotide
gtcggctaagcacgcaagatccgtcggttctcacgtctcgcctctgatgacaagc

SEQ ID NO: 155839 - DNA, 55 bp, Artificial
  Synthetic oligonucleotide
gtcgtatccgaatgcaaagacgtatttacgtggccgatggtgataccatacgtcc

SEQ ID NO: 155840 - DNA, 55 bp, Artificial
  Synthetic oligonucleotide
gtagcgtcgcggaatgagttatgcaaacgcaggaggcgggcaaaagagttcttcg

SEQ ID NO: 155841 - DNA, 55 bp, Artificial
  Synthetic oligonucleotide
gtagctcaccacggtacgtagtgaaatgccgcgttccctgtttgcgatctcatct

SEQ ID NO: 155842 - DNA, 55 bp, Artificial
  Synthetic oligonucleotide
gtaggtggcggcggccggaccttgttatgatcgcgggatacgccaatttcgaaac

SEQ ID NO: 155843 - DNA, 60 bp, Artificial
  Synthetic oligonucleotide
ccgattgatcgcacgttggaaacggccgtcccttgcttagatcgtgatagagctggtcga

SEQ ID NO: 155844 - DNA, 55 bp, Artificial
  Synthetic oligonucleotide
gtataatccgcgtttcgctgaagtgtcccacctctacagtggcgctgcgcttggt

SEQ ID NO: 155845 - DNA, 55 bp, Artificial
  Synthetic oligonucleotide
gtatcgtcagtcgcaccttgcctaaagaagcgcggcgaaccgtcgttaacgcgag

SEQ ID NO: 155846 - DNA, 55 bp, Artificial
  Synthetic oligonucleotide
gtatggatttcgtccggaccgtagagcctgtaaccggcgtcgctccgcttgctgg

SEQ ID NO: 155847 - DNA, 55 bp, Artificial
  Synthetic oligonucleotide
gtatgtttatgtgcgggcagcatgcttgttgcgagtccagtgaggcaatccggtg

SEQ ID NO: 155848 - DNA, 55 bp, Artificial
  Synthetic oligonucleotide
gtattcattcaccgttcaggtgttgtccgactcggttgtcggggcaaaggtcgct

SEQ ID NO: 155849 - DNA, 55 bp, Artificial
  Synthetic oligonucleotide
gtattcgtctgtcgttggacccatcttgaggtaaatgccctgagccgaaagcgac

SEQ ID NO: 155850 - DNA, 55 bp, Artificial
  Synthetic oligonucleotide
gtcaaagtcgagtagcctgtcgcccaactggctcgatacctggccctgaacgcac

SEQ ID NO: 155851 - DNA, 55 bp, Artificial
  Synthetic oligonucleotide
gtcaatacggcacggtcacgttcggtcgccagtacgactcgattttcgactatgc

SEQ ID NO: 155852 - DNA, 55 bp, Artificial
  Synthetic oligonucleotide
gtcaatcccgtgcacacccggatgcctgcggattttcgaccggacgacaatggcg

SEQ ID NO: 155853 - DNA, 55 bp, Artificial
  Synthetic oligonucleotide
gtcacgtcatcctcgttacgtttattccgggtgaacgtctcgtgcagaccaagcg

SEQ ID NO: 155854 - DNA, 60 bp, Artificial
  Synthetic oligonucleotide
agtgcacatgccccgcagacgcaatctcgtgtgtccatgcgcgcttcgatcgttggcaat

SEQ ID NO: 155855 - DNA, 55 bp, Artificial
  Synthetic oligonucleotide
gtcagaacacgagtgcggcggtgcaggggtagcactgaatagccagtcgatcaaa

SEQ ID NO: 155856 - DNA, 55 bp, Artificial
  Synthetic oligonucleotide
gtcagagagcaccgacgggagtcgggcgccatagaaatacggcgcatccagactc

SEQ ID NO: 155857 - DNA, 55 bp, Artificial
  Synthetic oligonucleotide
gtcagccaaaatactgcgcgagctaccaatcaattggcctccttcttctattaac

SEQ ID NO: 155858 - DNA, 54 bp, Artificial
  Synthetic oligonucleotide
gtcaggcgttaccgggctccgcgccccgtatgtcaggctccgggagtagcgttt

SEQ ID NO: 155859 - DNA, 55 bp, Artificial
  Synthetic oligonucleotide
gtcaggtccggtcatcacgtgagcaggttcaaccgagcaagatccgcgtctgggg

SEQ ID NO: 155860 - DNA, 55 bp, Artificial
  Synthetic oligonucleotide
gtcagtgaccgtagcatcgagaaaattttcgcgggaaagaatcaagcggggtcga

SEQ ID NO: 155861 - DNA, 55 bp, Artificial
  Synthetic oligonucleotide
gtcatccacgttacgcaccagaagatttgccatgggtccctccatccagattgct

SEQ ID NO: 155862 - DNA, 55 bp, Artificial
  Synthetic oligonucleotide
gtcatgattggaatgcgatcgaagtgaaggtccggagatcgtagagaggcgctcg

SEQ ID NO: 155863 - DNA, 55 bp, Artificial
  Synthetic oligonucleotide
gtcatgtcgattaggattcgtagctccataggcaacacttcgggctgccccggga

SEQ ID NO: 155864 - DNA, 55 bp, Artificial
  Synthetic oligonucleotide
gtccagaatattgtccgcacaatgcacgagcgcacattcggcggctgcgagtctg

SEQ ID NO: 155865 - DNA, 60 bp, Artificial
  Synthetic oligonucleotide
tgccccgcagacgcaatctcgtgtgtccatgcgcgcttcgatcgttggcaatttgagtgc

SEQ ID NO: 155866 - DNA, 59 bp, Artificial
  Synthetic oligonucleotide
cggagcaaatctgttggccgctttcccgcaagggaaatgggccgctgctttgctctaga

SEQ ID NO: 155867 - DNA, 55 bp, Artificial
  Synthetic oligonucleotide
gtccatgccagtggaatcggtgtgagtctgcgagccctcgtgtgcaacctgctcg

SEQ ID NO: 155868 - DNA, 55 bp, Artificial
  Synthetic oligonucleotide
gtgcgtgagtgggtcaggaagttgaggaaacgttgcatgttgccttcggctcgga

SEQ ID NO: 155869 - DNA, 55 bp, Artificial
  Synthetic oligonucleotide
gtggaggctctggcagtgaatcgcctcacgctatacttcgaagagaccgggctga

SEQ ID NO: 155870 - DNA, 55 bp, Artificial
  Synthetic oligonucleotide
gtggagtctggtgtaaggggcgcgtatgaacgatttcgaacacattagacgccct

SEQ ID NO: 155871 - DNA, 55 bp, Artificial
  Synthetic oligonucleotide
gtggcaggaaatttcgtgcggacttcacaaaatgcatgcgacccgttcaaaaccg

SEQ ID NO: 155872 - DNA, 55 bp, Artificial
  Synthetic oligonucleotide
gtggcgctgcgcttggttttgcacccgcgcccggtcgcaaactgtagtcatacga

SEQ ID NO: 155873 - DNA, 55 bp, Artificial
  Synthetic oligonucleotide
gtgggatatcggccagttgtgtacactgagatacacatttcgacatgacggaatc

SEQ ID NO: 155874 - DNA, 55 bp, Artificial
  Synthetic oligonucleotide
gtgggcgggtaagccgaagtttcggagcattgtgctgcgagagcataccgaaggc

SEQ ID NO: 155875 - DNA, 55 bp, Artificial
  Synthetic oligonucleotide
gtgggctcggtaattgattcgctaagcggttcaccaagcagctgacccagcggtt

SEQ ID NO: 155876 - DNA, 55 bp, Artificial
  Synthetic oligonucleotide
gtgggtcagttctgcgtggacatcaacagtgctgcgtgaatgcgacaggcgattg

SEQ ID NO: 155877 - DNA, 60 bp, Artificial
  Synthetic oligonucleotide
agcaggcatggaagtcgtcgcaaccacagccgatacagatggcacattcgagcaggcccg

SEQ ID NO: 155878 - DNA, 55 bp, Artificial
  Synthetic oligonucleotide
gtggtaccagtacccaggtcctcaggccgaattttagcgactgagctctttagtg

SEQ ID NO: 155879 - DNA, 55 bp, Artificial
  Synthetic oligonucleotide
gtggtgattccttgcgaagctgccggtagatcttgtagaacatcctgcgcgcatg

SEQ ID NO: 155880 - DNA, 55 bp, Artificial
  Synthetic oligonucleotide
gtggttcttccgttccgctctcgaacggacagcagcttcccattcgttccgtagg

SEQ ID NO: 155881 - DNA, 55 bp, Artificial
  Synthetic oligonucleotide
gtgtaaagtccgcgatccggggccgtcagcccgattgcccggatagactgatcga

SEQ ID NO: 155882 - DNA, 55 bp, Artificial
  Synthetic oligonucleotide
gtgtacgagacttccgatggtatgaggacatggacatcggttacgcgcgcgtgag

SEQ ID NO: 155883 - DNA, 55 bp, Artificial
  Synthetic oligonucleotide
gtgtactgcatcgagcctaaacgatgcacgttcgaagtcaaccctagaccactct

SEQ ID NO: 155884 - DNA, 55 bp, Artificial
  Synthetic oligonucleotide
gtgtctcgaactgaagattcgagaaccgccatcgaatcagtgctgctaacgttgg

SEQ ID NO: 155885 - DNA, 55 bp, Artificial
  Synthetic oligonucleotide
gtgtgactggagtgtgactagatcgatctcagttggatagaaggcaagccagaca

SEQ ID NO: 155886 - DNA, 55 bp, Artificial
  Synthetic oligonucleotide
gtgtgcattgttgttaggagccgcgttttactgcgggctgggttggtatcgaacg

SEQ ID NO: 155887 - DNA, 55 bp, Artificial
  Synthetic oligonucleotide
gtgtgtcctctgtgtggacacatcctgtcgttatcgcggacatcatagctgcgca

SEQ ID NO: 155888 - DNA, 60 bp, Artificial
  Synthetic oligonucleotide
gcgctcgcttcaattcgccgacgggtatgtagccactgacgtggagcctcgatccgccgc

SEQ ID NO: 155889 - DNA, 54 bp, Artificial
  Synthetic oligonucleotide
gtgtgtcggtttgggtaccggggccgttgagtgcgaactgtctcgaaaagcgac

SEQ ID NO: 155890 - DNA, 55 bp, Artificial
  Synthetic oligonucleotide
gtgttcgtagcagagattgcccgagagacgacgagtgctgattctcgcggagggg

SEQ ID NO: 155891 - DNA, 55 bp, Artificial
  Synthetic oligonucleotide
gttaaaacgaccgtgccacgttgctttgtgaattagcttaggacgtaacttgcca

SEQ ID NO: 155892 - DNA, 55 bp, Artificial
  Synthetic oligonucleotide
gttacattgcgcctaaccgtactagctgacaattgaccctaatgaataccaaggt

SEQ ID NO: 155893 - DNA, 55 bp, Artificial
  Synthetic oligonucleotide
gttacctccgtaacgagttgcgatgggttgcgataaggcgctcatagcaagccgc

SEQ ID NO: 155894 - DNA, 55 bp, Artificial
  Synthetic oligonucleotide
gttacgcacagcgaatgtgacgcacaggaagaggggagcgtagccttgcagccgg

SEQ ID NO: 155895 - DNA, 55 bp, Artificial
  Synthetic oligonucleotide
gtcgtgactaaccgtgccactgaacgtcgccacgcggttataggcgaagttcggg

SEQ ID NO: 155896 - DNA, 48 bp, Artificial
  Synthetic oligonucleotide
gtcgttttaggggtttcccctaggtgccgaccctcctaaacttctact

SEQ ID NO: 155897 - DNA, 55 bp, Artificial
  Synthetic oligonucleotide
gtctcgcattgtcattcgattgcctcctgagtccgcaaaagatggccggaaccgg

SEQ ID NO: 155898 - DNA, 55 bp, Artificial
  Synthetic oligonucleotide
gtctctatctcccgctcctgctcttgctgaccatcccgatggcaacgtacgccgc

SEQ ID NO: 155899 - DNA, 55 bp, Artificial
  Synthetic oligonucleotide
aatacacgtacacgccgtgggatggacggaactactaccggcgcaccgtcgctta

SEQ ID NO: 155900 - DNA, 55 bp, Artificial
  Synthetic oligonucleotide
gtctgctgcgagctttcagcgacagaaggtgtccgggaccaattttccccactcg

SEQ ID NO: 155901 - DNA, 55 bp, Artificial
  Synthetic oligonucleotide
gtcttggctcccgtagagatggcaactgaactcgcctatcttcactgcgtgtagg

SEQ ID NO: 155902 - DNA, 55 bp, Artificial
  Synthetic oligonucleotide
gtctttcgagatcgactggttccatttgggcgcagacatcgagaatttcacgacg

SEQ ID NO: 155903 - DNA, 55 bp, Artificial
  Synthetic oligonucleotide
gtgaactagacccctttccatcgatcgcaacaggattcccatgcagaaaccgctg

SEQ ID NO: 155904 - DNA, 55 bp, Artificial
  Synthetic oligonucleotide
gtgaatcattgtagagagtttgccacgaccgcgataccttccgacacccgcaaaa

SEQ ID NO: 155905 - DNA, 55 bp, Artificial
  Synthetic oligonucleotide
gtgacaacccagtcccaacgatctatcgatacaatcgaccaactctacacatacg

SEQ ID NO: 155906 - DNA, 55 bp, Artificial
  Synthetic oligonucleotide
gtgacactcgagcagacaagttgctcgaacccaaccgcaaactgtgctgtatccc

SEQ ID NO: 155907 - DNA, 55 bp, Artificial
  Synthetic oligonucleotide
gtgacgattcggacctcgctagcgtcaatacggacgagcattcggtagccctcgg

SEQ ID NO: 155908 - DNA, 55 bp, Artificial
  Synthetic oligonucleotide
gtgacgcgtcccctgaatcaagcagtccagaacgaacacaccctatgaaaattct

SEQ ID NO: 155909 - DNA, 55 bp, Artificial
  Synthetic oligonucleotide
gtgacgtagcgtcttggattcatcgttcgctcctcccgcgtgtatcgacccgcct

SEQ ID NO: 155910 - DNA, 58 bp, Artificial
  Synthetic oligonucleotide
ttgaatcacggtcgcagcgtcgaacgtcggaataccagtcgcgaaggccggcaccgaa

SEQ ID NO: 155911 - DNA, 55 bp, Artificial
  Synthetic oligonucleotide
gtgagccacacaagtgcgcggggagtatctttctactacagttaccatcggcatg

SEQ ID NO: 155912 - DNA, 55 bp, Artificial
  Synthetic oligonucleotide
gtgagcgatgagaagcccacaccgatcgttgacgctccaatagaacgaccgggcg

SEQ ID NO: 155913 - DNA, 55 bp, Artificial
  Synthetic oligonucleotide
gtgcaaaaccaagcgcagcgccactgtagaggtgggacacttcagcgaaacgcgg

SEQ ID NO: 155914 - DNA, 55 bp, Artificial
  Synthetic oligonucleotide
gtgcacaaggcatccgtcagcgctgtgatttcgtgataccggtcttgcatggcga

SEQ ID NO: 155915 - DNA, 55 bp, Artificial
  Synthetic oligonucleotide
gtgcacgaacgaagtgcgggcgcgtaagttttcctacaatggaacgacgatgtac

SEQ ID NO: 155916 - DNA, 55 bp, Artificial
  Synthetic oligonucleotide
gtgccagacggcaggtcatgtcgttatagtgatttcacactgtacaccagcgttg

SEQ ID NO: 155917 - DNA, 55 bp, Artificial
  Synthetic oligonucleotide
gtgccgcgtataatagcgcgattcgccgagttaactgacaacttgcggggcgaat

SEQ ID NO: 155918 - DNA, 55 bp, Artificial
  Synthetic oligonucleotide
gtgccggttccaacgtctttcacgcaacgaaacggaggcagcatgccctacgagc

SEQ ID NO: 155919 - DNA, 55 bp, Artificial
  Synthetic oligonucleotide
gtgccgtgctcgttggcacattcatcgtttatctgatgctgcgccgctaagccgc

SEQ ID NO: 155920 - DNA, 55 bp, Artificial
  Synthetic oligonucleotide
gtgcgatcgtctattcgatgacgtacacccatgcgcgtaccggcaagaagaccga

SEQ ID NO: 155921 - DNA, 54 bp, Artificial
  Synthetic oligonucleotide
aaagacgaccgcacacttcgcattgaagtcgggtacgggttggaaggtgtccta

SEQ ID NO: 155922 - DNA, 55 bp, Artificial
  Synthetic oligonucleotide
gtgcggtgcatttcacactcgcatgtatgtcagagtatgagttacaagtcttggg

SEQ ID NO: 155923 - DNA, 55 bp, Artificial
  Synthetic oligonucleotide
tggtcgcgtcagactccggggctgcatcggtcggtggaatccgtacacggctaac

SEQ ID NO: 155924 - DNA, 55 bp, Artificial
  Synthetic oligonucleotide
tggtgcctcagagaagcgcagcgtattgggccttcctgccacgcgcttgttcacg

SEQ ID NO: 155925 - DNA, 55 bp, Artificial
  Synthetic oligonucleotide
tggttctcctgatgatcggacaaatctgaccggcgagtaagacaacaccggacag

SEQ ID NO: 155926 - DNA, 55 bp, Artificial
  Synthetic oligonucleotide
tgtaggaatgcagcacgtgacagcgcgaggctaacgtcgcgagattgtcggccgc

SEQ ID NO: 155927 - DNA, 55 bp, Artificial
  Synthetic oligonucleotide
tgtccaacaggccagccgcaaagctgttggcccccgctaccggagcgagggccaa

SEQ ID NO: 155928 - DNA, 55 bp, Artificial
  Synthetic oligonucleotide
tgtcctcgcgccaagcgaggtagccattcgtgaactcgcgcacacccacaatgcg

SEQ ID NO: 155929 - DNA, 55 bp, Artificial
  Synthetic oligonucleotide
tgtcgactacttgcgtgagcaattcggacgctatggccctacccatccgcgacag

SEQ ID NO: 155930 - DNA, 55 bp, Artificial
  Synthetic oligonucleotide
tgtcgagacacccgcggtttccgacattgctcctgtacggtcggtgctcgagggt

SEQ ID NO: 155931 - DNA, 55 bp, Artificial
  Synthetic oligonucleotide
tgtcgatttacgtcgtgctacaacgtcgggacagtcttgtactcgaggagtgtca

SEQ ID NO: 155932 - DNA, 57 bp, Artificial
  Synthetic oligonucleotide
agttgcccctgtaactcaggacacacggacaccgttaggttgatgacaccgcattac

SEQ ID NO: 155933 - DNA, 55 bp, Artificial
  Synthetic oligonucleotide
ttacagggctggcacccgcgattctgttggagcaacgcgaacgggcttgcttgcg

SEQ ID NO: 155934 - DNA, 55 bp, Artificial
  Synthetic oligonucleotide
ttacatcgcttgctactatgcatggcgccccatctttctcatcgagcgggcactt

SEQ ID NO: 155935 - DNA, 55 bp, Artificial
  Synthetic oligonucleotide
ttaccgcaggtttactgcgagcctgttgacgtagaccagtcatacattgctcgaa

SEQ ID NO: 155936 - DNA, 55 bp, Artificial
  Synthetic oligonucleotide
ttaccggctatcatccgcgcaatgtcgtgtcatcagaaattaggttcttgacgcg

SEQ ID NO: 155937 - DNA, 55 bp, Artificial
  Synthetic oligonucleotide
ttacctagcggaggggctcagcgctacagccattgcgacgtggccccgaaacctt

SEQ ID NO: 155938 - DNA, 55 bp, Artificial
  Synthetic oligonucleotide
ttacctcgaccaaactgagatgctggtacttactcactgctggtaccggaggtcc

SEQ ID NO: 155939 - DNA, 55 bp, Artificial
  Synthetic oligonucleotide
ttactccggccccatgcttcgcgctcgccccgagttggcgcttgagcgcttactc

SEQ ID NO: 155940 - DNA, 55 bp, Artificial
  Synthetic oligonucleotide
ttagccggccggatggtaggggacgcgcactttcagttcgctttcggaatgcagg

SEQ ID NO: 155941 - DNA, 55 bp, Artificial
  Synthetic oligonucleotide
ttagcggctcggatgaaacgacttctgcagtgcgatcggagtcggcttgcaaacg

SEQ ID NO: 155942 - DNA, 55 bp, Artificial
  Synthetic oligonucleotide
ttagctgaccgcgcccaaagaccgccgacaggcgatcaagttccgtctggatggc

SEQ ID NO: 155943 - DNA, 60 bp, Artificial
  Synthetic oligonucleotide
gcggacatgagcatcgtctataccgccgacgtgttttgtgatggcgacgactgctcgcaa

SEQ ID NO: 155944 - DNA, 55 bp, Artificial
  Synthetic oligonucleotide
ttaggcgaaccgtcctgtcttcgccttactcttgcagcgggctaccctcatatgc

SEQ ID NO: 155945 - DNA, 55 bp, Artificial
  Synthetic oligonucleotide
ttatcggatgtgaatcgccatcagcagttcgttcgatcgcttctccgtttacggc

SEQ ID NO: 155946 - DNA, 55 bp, Artificial
  Synthetic oligonucleotide
ttattttcgagctattcagttgcctaaataattaagttgcctaattccggtgcgg

SEQ ID NO: 155947 - DNA, 55 bp, Artificial
  Synthetic oligonucleotide
ttcactccagttcgcagacagaaacgattcaaggtgatcatccaatatggccgcg

SEQ ID NO: 155948 - DNA, 55 bp, Artificial
  Synthetic oligonucleotide
ttcccgtgctggtgtttcactagcggcatttcattagcccctttgtcttcacccc

SEQ ID NO: 155949 - DNA, 55 bp, Artificial
  Synthetic oligonucleotide
tgcggaccgtccgggttcggacttgcctcttgaaccggtctcggctaaggtatgc

SEQ ID NO: 155950 - DNA, 55 bp, Artificial
  Synthetic oligonucleotide
tgcggccctagaacaagcgcgtgagagcgtgaacgctgcggccaatggatttcat

SEQ ID NO: 155951 - DNA, 55 bp, Artificial
  Synthetic oligonucleotide
tgcggctgtgttcgcactagtcgcgctaggttggactatcttcgtgattggaacg

SEQ ID NO: 155952 - DNA, 55 bp, Artificial
  Synthetic oligonucleotide
tgcgtcgtctctgcaggggcgggcacttctctggtcgctggccggatcaaacgaa

SEQ ID NO: 155953 - DNA, 55 bp, Artificial
  Synthetic oligonucleotide
tgcgtgagtcccgcatttgattcaatcgggagcaggccgtaacccggccggcgta

SEQ ID NO: 155954 - DNA, 60 bp, Artificial
  Synthetic oligonucleotide
tcacgtcgaacacaagcagtgcatggttccggcctacatctaagcgtggcagaacatggt

SEQ ID NO: 155955 - DNA, 55 bp, Artificial
  Synthetic oligonucleotide
tgcgtgctaccctcccgtcgcctcgagttacccgaattcccccatccatgccaca

SEQ ID NO: 155956 - DNA, 55 bp, Artificial
  Synthetic oligonucleotide
tgcgtggtaaattccagcgtcggcaagacaactccaagaacgttcgggtgccctg

SEQ ID NO: 155957 - DNA, 55 bp, Artificial
  Synthetic oligonucleotide
tgctacgcacagcgcaagatgaatgcaaaacagcaagctgtatcacctccaaacc

SEQ ID NO: 155958 - DNA, 55 bp, Artificial
  Synthetic oligonucleotide
tgcttcttaagaatcgtttaagacttcgtccccatcatgcctcggacactaccgc

SEQ ID NO: 155959 - DNA, 55 bp, Artificial
  Synthetic oligonucleotide
tggaaatgagtagcgggtctctaccactcacagaggtcgcaatgtctcatgccct

SEQ ID NO: 155960 - DNA, 55 bp, Artificial
  Synthetic oligonucleotide
tggaatacggcacaacgcgagaactcaacctgtaacgtactttgtatcggatcct

SEQ ID NO: 155961 - DNA, 55 bp, Artificial
  Synthetic oligonucleotide
tggatgcaagcacgggcgcaaattccggccacggcacgtaatcctctcgcgcctt

SEQ ID NO: 155962 - DNA, 54 bp, Artificial
  Synthetic oligonucleotide
tggcaacctcgggactttggggcgtctcggtggcgtaaaagctgggccggcaat

SEQ ID NO: 155963 - DNA, 55 bp, Artificial
  Synthetic oligonucleotide
tggcacccgtttctcgtgggagaggcaacctacgacctgtctcacctgcacccac

SEQ ID NO: 155964 - DNA, 55 bp, Artificial
  Synthetic oligonucleotide
tggcatgcttggcctcggggttaaggccagcctcgccttgctcgataaggcatcg

SEQ ID NO: 155965 - DNA, 56 bp, Artificial
  Synthetic oligonucleotide
gagttccgttctggaagatacaaagaggcactcgaactcggtaagcgggccttgaa

SEQ ID NO: 155966 - DNA, 55 bp, Artificial
  Synthetic oligonucleotide
tggcgccccagcttaagagtaccgacactggcgctcgtgataccgacccacgact

SEQ ID NO: 155967 - DNA, 55 bp, Artificial
  Synthetic oligonucleotide
tggcgcgttaccccgaactgcgactccagacgttgcgcccagacggtgttgatct

SEQ ID NO: 155968 - DNA, 55 bp, Artificial
  Synthetic oligonucleotide
tggcgctatgcggtgaaatatcgacgatgcgacgcaacagagcctcgccatctat

SEQ ID NO: 155969 - DNA, 55 bp, Artificial
  Synthetic oligonucleotide
tggcgtcccgagtgctagcaaggggctagcaaggggcttccatcggatttccgga

SEQ ID NO: 155970 - DNA, 55 bp, Artificial
  Synthetic oligonucleotide
tggcgttgtgtgggacgagtatgtagagagccggaaggcgttctggggtgagcgc

SEQ ID NO: 155971 - DNA, 55 bp, Artificial
  Synthetic oligonucleotide
tggctcgacggatcaccgttcacggagactctcttgagcgttctgcataagcgga

SEQ ID NO: 155972 - DNA, 55 bp, Artificial
  Synthetic oligonucleotide
tgggagttcgacttaccagttacttaccgacctgagaatcgactataaacaacgc

SEQ ID NO: 155973 - DNA, 55 bp, Artificial
  Synthetic oligonucleotide
tgggctgaatcttcaacaggcaaggcggctagggcgacgtgccacgggatgttcc

SEQ ID NO: 155974 - DNA, 55 bp, Artificial
  Synthetic oligonucleotide
tgggctgactaaattagccatgacgcgtgcatcatctatttgtggagggcgctgg

SEQ ID NO: 155975 - DNA, 55 bp, Artificial
  Synthetic oligonucleotide
tggggtcgcacagatcggaaatccccgcaggggatcagaatagcgagccttgggc

SEQ ID NO: 155976 - DNA, 60 bp, Artificial
  Synthetic oligonucleotide
ctgtccgacatcatcgacatccagatggggccggaaatgagcgtgcccgcgcacttcctg

SEQ ID NO: 155977 - DNA, 60 bp, Artificial
  Synthetic oligonucleotide
ataaggtgaactgcgtgtcattcgcgctactgtaggccgagacgttattcgcaaacattc

SEQ ID NO: 155978 - DNA, 55 bp, Artificial
  Synthetic oligonucleotide
ttgcggccgcacagaatcattcccggagtgtagacgtgctgcgagcaagtgggct

SEQ ID NO: 155979 - DNA, 55 bp, Artificial
  Synthetic oligonucleotide
ttgcttcgccgctcccagcagaaccgaaaccgaacagtggtaattcgagttaccg

SEQ ID NO: 155980 - DNA, 55 bp, Artificial
  Synthetic oligonucleotide
ttggaattccgcatacgccattgcacacatgatgcttcgtctccgtgaatcggta

SEQ ID NO: 155981 - DNA, 55 bp, Artificial
  Synthetic oligonucleotide
ttggccaagtcgaatgcatgcttggagtccgtgtggtagagccgcgtaccgcccc

SEQ ID NO: 155982 - DNA, 55 bp, Artificial
  Synthetic oligonucleotide
ttgtcccgtgaccatctgtacgttcgaatgcccggactggttgttgacatacacg

SEQ ID NO: 155983 - DNA, 55 bp, Artificial
  Synthetic oligonucleotide
ttgtgattgcagaagtgcaacctgtagacagactcataacccgagaaaatgcgcc

SEQ ID NO: 155984 - DNA, 55 bp, Artificial
  Synthetic oligonucleotide
ttgttaagccacatcaggtcgaagacgacaagcgaaatccccgcagttcgacgtc

SEQ ID NO: 155985 - DNA, 55 bp, Artificial
  Synthetic oligonucleotide
tttacccatgtgcgttgggctcccgtcgatccgtcgacgcgtgaatggctgtccc

SEQ ID NO: 155986 - DNA, 55 bp, Artificial
  Synthetic oligonucleotide
tttagacgactttatgtgcggtgcatcaaatcgatgagcggtcgcctttgaatta

SEQ ID NO: 155987 - DNA, 55 bp, Artificial
  Synthetic oligonucleotide
tttaggactcttatcaggcacgcgaatcgcatagatgaagcggtattcattgcga

SEQ ID NO: 155988 - DNA, 55 bp, Artificial
  Synthetic oligonucleotide
ttctcacggaaacggatcgaagcgaagggatctggattcgtagggacggacgtcg

SEQ ID NO: 155989 - DNA, 55 bp, Artificial
  Synthetic oligonucleotide
tttatccgctgagtggacctaccagtacgtcgcaaactttcaaagtggaccgaga

SEQ ID NO: 155990 - DNA, 55 bp, Artificial
  Synthetic oligonucleotide
tttcatcttatctcgctccatcgtccatatgtatcgatgcgaagttgacttcgcg

SEQ ID NO: 155991 - DNA, 55 bp, Artificial
  Synthetic oligonucleotide
tttccacgattgagacgcgcaaggacgaacgttcctgataagttggcggctcgac

SEQ ID NO: 155992 - DNA, 55 bp, Artificial
  Synthetic oligonucleotide
tttccgatgtgaacttgaccgaattgttgctgcggaaactgtagttgaaattgtc

SEQ ID NO: 155993 - DNA, 55 bp, Artificial
  Synthetic oligonucleotide
tttccggtgagtttgacgacatcctggcacgtcggattgtcgtacattattccaa

SEQ ID NO: 155994 - DNA, 55 bp, Artificial
  Synthetic oligonucleotide
tttcgcgagccatgagctgcgatacaagttctccagtcaacggacctaaggtgag

SEQ ID NO: 155995 - DNA, 55 bp, Artificial
  Synthetic oligonucleotide
tttcttcggagtccgcaggttgttcgtcgaggtccaacgcaacatcacgcttttc

SEQ ID NO: 155996 - DNA, 55 bp, Artificial
  Synthetic oligonucleotide
tttgacttcggaaccatggccggcaaatacatgcatagcgggcggaaattgcgcc

SEQ ID NO: 155997 - DNA, 55 bp, Artificial
  Synthetic oligonucleotide
tttgatgcgcggagaactggttcgtggtatcggggtacatagaggctccgttgtg

SEQ ID NO: 155998 - DNA, 55 bp, Artificial
  Synthetic oligonucleotide
tttgcttgtggatgttgcggataccccatgactgatggcccctacaaagcggacg

SEQ ID NO: 155999 - DNA, 57 bp, Artificial
  Synthetic oligonucleotide
ttcgtggtcttttccgtataggcacctacggttagcgcattccacgcctgagcggga

SEQ ID NO: 156000 - DNA, 55 bp, Artificial
  Synthetic oligonucleotide
tttgggcggaattcaggcctgcggacatcgtgtgtggatgagtaatcgattgagg

SEQ ID NO: 156001 - DNA, 55 bp, Artificial
  Synthetic oligonucleotide
tttggggaggagtgggcgcactatgcgtcgcacaccccgcggttcatcccgaatt

SEQ ID NO: 156002 - DNA, 55 bp, Artificial
  Synthetic oligonucleotide
tttggttatgggatggccgcaaatgcgcgggccgcacaagcaaagatgcgcgggg

SEQ ID NO: 156003 - DNA, 55 bp, Artificial
  Synthetic oligonucleotide
tttgtgtcacgttgtactaagcttggtgtcgagtagccggctttctatgaaagcc

SEQ ID NO: 156004 - DNA, 55 bp, Artificial
  Synthetic oligonucleotide
ttttccctaacgcagcccctttggcgagaaagaacgcaatggacgcacgagcgaa

SEQ ID NO: 156005 - DNA, 53 bp, Artificial
  Synthetic oligonucleotide
ttccctgtaaccaaggggaacgttttggtacgatgcatgcttttccgacgacg

SEQ ID NO: 156006 - DNA, 55 bp, Artificial
  Synthetic oligonucleotide
ttccggtcgcatctatttcctgtcgcggtcagagcctgtcttcgcagctatgtcg

SEQ ID NO: 156007 - DNA, 55 bp, Artificial
  Synthetic oligonucleotide
ttcctctacaatcggggcgaacgattaagacgatctataggatggatatggtccc

SEQ ID NO: 156008 - DNA, 55 bp, Artificial
  Synthetic oligonucleotide
ttcctgactgcgagcccgattgatgaccaaaagtctgacgaaggtatggctgggc

SEQ ID NO: 156009 - DNA, 55 bp, Artificial
  Synthetic oligonucleotide
ttcgaaatattactgtgatttgcgattcctaacggaaccggcacaagggtcgggc

SEQ ID NO: 156010 - DNA, 58 bp, Artificial
  Synthetic oligonucleotide
gcggacgatttccgttaagcgacgtcgtgccgattaggcgagctgcgtcgactgttcg

SEQ ID NO: 156011 - DNA, 55 bp, Artificial
  Synthetic oligonucleotide
ttcgacaatttgggtggctttaacgatatggcagctagcgaaggcacgcgcgcaa

SEQ ID NO: 156012 - DNA, 55 bp, Artificial
  Synthetic oligonucleotide
ttcgacacttctggggaaattacgtccgacgttgacacgtcgtcgacgatttcac

SEQ ID NO: 156013 - DNA, 55 bp, Artificial
  Synthetic oligonucleotide
ttcgcggcaatggctatacagccaggcggcacgacctatatcgataccctcagcg

SEQ ID NO: 156014 - DNA, 55 bp, Artificial
  Synthetic oligonucleotide
ttcgcttgttgcgttcagcggttgattgcatcgtagcgatcgcgctaccggtcgg

SEQ ID NO: 156015 - DNA, 55 bp, Artificial
  Synthetic oligonucleotide
ttcggcgaggcaggtcgggtttccattgcgtgagtatagcgcagggcgggaggga

SEQ ID NO: 156016 - DNA, 55 bp, Artificial
  Synthetic oligonucleotide
ttcggctgacagaacaataattggcgatccattcaactgtgcctcgatcgcagcc

SEQ ID NO: 156017 - DNA, 55 bp, Artificial
  Synthetic oligonucleotide
ttctggatacagaggtcgagtccggttactgcgagcgaccgatattgcggttgct

SEQ ID NO: 156018 - DNA, 55 bp, Artificial
  Synthetic oligonucleotide
ttctttcggctatggagacagtgaacccaaaagtgccgtccacaatcgaggctgc

SEQ ID NO: 156019 - DNA, 55 bp, Artificial
  Synthetic oligonucleotide
ttgaaggcccggcgaacgatgcgcgtatgatgggcttatccgagcgatcagccgc

SEQ ID NO: 156020 - DNA, 55 bp, Artificial
  Synthetic oligonucleotide
ttgaagtgagcggcgtcttgtaaccgtttacccacatcgcctgcgaacaaccgcc

SEQ ID NO: 156021 - DNA, 60 bp, Artificial
  Synthetic oligonucleotide
tatcgggagaatcgatggattgactggagaggtgaacgcaggttatcggctgctcgggta

SEQ ID NO: 156022 - DNA, 55 bp, Artificial
  Synthetic oligonucleotide
ttgacggaaatcggagagggccgaagcgccgggaaaacacgagaagtgagccatg

SEQ ID NO: 156023 - DNA, 55 bp, Artificial
  Synthetic oligonucleotide
ttgagatgcgttgctacgacgttgtttcgggtcgattgcgaaaccttcgcgcccc

SEQ ID NO: 156024 - DNA, 55 bp, Artificial
  Synthetic oligonucleotide
ttgatatcggacgaatgaatcggctccgctcattcacaaagcgcggaacatagtg

SEQ ID NO: 156025 - DNA, 55 bp, Artificial
  Synthetic oligonucleotide
ttgcaaccaggtgcgtgttgagtttctacgttggcatggagcgtccgggagcggc

SEQ ID NO: 156026 - DNA, 55 bp, Artificial
  Synthetic oligonucleotide
ttgcagcaatagcgtgtgccggagcgtataaaagtgccccgctagcgagtgcgat

SEQ ID NO: 156027 - DNA, 55 bp, Artificial
  Synthetic oligonucleotide
ttgcagccggttacgttggagccttgcgagcgctctgccgggcctcccttggatt

SEQ ID NO: 156028 - DNA, 55 bp, Artificial
  Synthetic oligonucleotide
ttgcaggtccccacaagagggtgtgagaggcagaccaatcctgttgtccattccc

SEQ ID NO: 156029 - DNA, 55 bp, Artificial
  Synthetic oligonucleotide
ttgcatgatcggttgagtgtccatttcgtcctcgcagtggtgttgtgtgatctgt

SEQ ID NO: 156030 - DNA, 55 bp, Artificial
  Synthetic oligonucleotide
ttgccgcatggtagaatcgcacgttgcgtcgtgactacggcgtttacgcgaaagg

SEQ ID NO: 156031 - DNA, 55 bp, Artificial
  Synthetic oligonucleotide
ttgcgcccttgcacgctggtagcagtctttcaggatcgcgctaccggccttgagg

SEQ ID NO: 156032 - DNA, 59 bp, Artificial
  Synthetic oligonucleotide
gccagtattgcttgaggaagcctacggcgcgctttcgtcgtgagtttcttatagtctgt

SEQ ID NO: 156033 - DNA, 55 bp, Artificial
  Synthetic oligonucleotide
ttgcgctcggagtggtgaacgcgccctagcatccgcctaccgaacaaacttcggc

SEQ ID NO: 156034 - DNA, 55 bp, Artificial
  Synthetic oligonucleotide
tccgtttctgaaagaccggaccgcgcgttgcctggcggggcttgctccggttctc

SEQ ID NO: 156035 - DNA, 55 bp, Artificial
  Synthetic oligonucleotide
tcctaatctgtgtgaacaacaaaggttatgaggcatcgctggaagtccgtaagct

SEQ ID NO: 156036 - DNA, 55 bp, Artificial
  Synthetic oligonucleotide
tcctccgcatccacccggatctataacgctcgcagtagctctgcggtcgacttga

SEQ ID NO: 156037 - DNA, 55 bp, Artificial
  Synthetic oligonucleotide
tcctctcgatcaacacgctttgccgttcaaccgcgagtgagttggcgcttctcgc

SEQ ID NO: 156038 - DNA, 55 bp, Artificial
  Synthetic oligonucleotide
tcctgcaacaacggcaaccgatagcgaactggctgtgctccctgctactgccaca

SEQ ID NO: 156039 - DNA, 55 bp, Artificial
  Synthetic oligonucleotide
tcgaatcgtcgaacacatttgagcgctttcccgactatgcggcaacgcgattcag

SEQ ID NO: 156040 - DNA, 55 bp, Artificial
  Synthetic oligonucleotide
tcgaattgggatcgaacgactggctcgcggtatgtccggaatccatctacgaaac

SEQ ID NO: 156041 - DNA, 55 bp, Artificial
  Synthetic oligonucleotide
tcgacagtcgaggaagaatgcgacctttgccgtatcacctattcgatctactcaa

SEQ ID NO: 156042 - DNA, 55 bp, Artificial
  Synthetic oligonucleotide
tcgaggccaatgcgaaattaggggtgccatgaaacgctaactggacgattggccg

SEQ ID NO: 156043 - DNA, 56 bp, Artificial
  Synthetic oligonucleotide
aatggtagtagtcgggtccgcgcacgttgtcgtgcatgggggaatgccactcggtt

SEQ ID NO: 156044 - DNA, 55 bp, Artificial
  Synthetic oligonucleotide
tcgatcgttatacttttcattacacgcaatctcataattgattgaatgcggctgg

SEQ ID NO: 156045 - DNA, 55 bp, Artificial
  Synthetic oligonucleotide
tcgcaatccctttaacgcgtgtcgtcgcgtgtcgtcgcgtgtcgtcgcgtgtcgt

SEQ ID NO: 156046 - DNA, 55 bp, Artificial
  Synthetic oligonucleotide
tcgcagcgcgtcacttgcagcccggagtgcgtagctctcaccgtatcgcttgcaa

SEQ ID NO: 156047 - DNA, 55 bp, Artificial
  Synthetic oligonucleotide
tcgccttcctatacttaagagcatgcttaaccatgatgtttcgctcgatctgaca

SEQ ID NO: 156048 - DNA, 55 bp, Artificial
  Synthetic oligonucleotide
tcgcgtggcagcggcatcttacccatagcacctgagcaggagagttcgatgagca

SEQ ID NO: 156049 - DNA, 55 bp, Artificial
  Synthetic oligonucleotide
tcgctaaatcgagaatgcgtttgttaatcgcgcatacgtcttgctcagtgatagc

SEQ ID NO: 156050 - DNA, 55 bp, Artificial
  Synthetic oligonucleotide
tcggaagccgaccgacgcgcgtccagtgggaacctatgagtaacgcacccatgtc

SEQ ID NO: 156051 - DNA, 55 bp, Artificial
  Synthetic oligonucleotide
tcggagcgagcggaatgcacaatgcgatgttctgaacttggctctcgcagtggcg

SEQ ID NO: 156052 - DNA, 55 bp, Artificial
  Synthetic oligonucleotide
tcgggagccttaccatgactctcataccaagggacgactccacaactatctgggc

SEQ ID NO: 156053 - DNA, 54 bp, Artificial
  Synthetic oligonucleotide
tcggggactggaggcggagcgacccgtggcgaatgaacgggcccgttgggagta

SEQ ID NO: 156054 - DNA, 60 bp, Artificial
  Synthetic oligonucleotide
gcccttatcgcgaatgcgaaggctggtcattcaccgcattcgctgattggaaaggtccga

SEQ ID NO: 156055 - DNA, 55 bp, Artificial
  Synthetic oligonucleotide
tcggggcggatctacggatgccgcattccagagcaatgggtaacgggctgtttga

SEQ ID NO: 156056 - DNA, 55 bp, Artificial
  Synthetic oligonucleotide
tcgggtatacgtcacaccggacgactcaacccgtgtgctgatatttgcgcgacgg

SEQ ID NO: 156057 - DNA, 54 bp, Artificial
  Synthetic oligonucleotide
tcggtctgaagtccgccccgacattcctgaaaaggaacaccccggatgggcgga

SEQ ID NO: 156058 - DNA, 55 bp, Artificial
  Synthetic oligonucleotide
tcgtattgtacaataactcgctaatcgctaagacgccagtcgggcttgacccgtc

SEQ ID NO: 156059 - DNA, 55 bp, Artificial
  Synthetic oligonucleotide
tcgtcatgaaaccgctccttgctcgatgcgtcgtccatccagatagggacggacg

SEQ ID NO: 156060 - DNA, 55 bp, Artificial
  Synthetic oligonucleotide
tcatcgtcacatagagcgattgccctaccgcttgaacttcgaaatcctcagactg

SEQ ID NO: 156061 - DNA, 55 bp, Artificial
  Synthetic oligonucleotide
tcatctagtgcttgccacccaacggcccgaagcggctacctttccggggctcttg

SEQ ID NO: 156062 - DNA, 55 bp, Artificial
  Synthetic oligonucleotide
tcatgacaggcccaacagtatagggccggaaaggaagttgtaatgtgtcggacgg

SEQ ID NO: 156063 - DNA, 55 bp, Artificial
  Synthetic oligonucleotide
tcatgcacgacgccccagcgcacattgcggccaagttccagcgccctcgcgcgca

SEQ ID NO: 156064 - DNA, 55 bp, Artificial
  Synthetic oligonucleotide
tcatgggcttcacgcgaatgccacattgccgcgctagcatcgccacccggagggt

SEQ ID NO: 156065 - DNA, 55 bp, Artificial
  Synthetic oligonucleotide
catgcggagaaaccctcaaagcgccgatttgtcccaaatactaaaacaattgtcc

SEQ ID NO: 156066 - DNA, 55 bp, Artificial
  Synthetic oligonucleotide
tcatggtgtctccgatcttgtcttttggtgagggcgagcgtaagttttggagcgc

SEQ ID NO: 156067 - DNA, 55 bp, Artificial
  Synthetic oligonucleotide
tcattccggagtgtgctcatgtttggtctatatcctgccggcgtccgttgggcgc

SEQ ID NO: 156068 - DNA, 55 bp, Artificial
  Synthetic oligonucleotide
tccaagctcagcagactttgcgaacgaattagcggaacgggacactaggccggcc

SEQ ID NO: 156069 - DNA, 55 bp, Artificial
  Synthetic oligonucleotide
tccaagggtctgctgtcgtcagatgaggcccgcgtgccgctagtgtcggcaggcg

SEQ ID NO: 156070 - DNA, 55 bp, Artificial
  Synthetic oligonucleotide
tccaatccccacgctcttggcgctatcaataaagatcgtttagatgcgttatata

SEQ ID NO: 156071 - DNA, 55 bp, Artificial
  Synthetic oligonucleotide
tccagcgatcgagccttatctctgtcactgcgggccggatcaacacgggtccctc

SEQ ID NO: 156072 - DNA, 55 bp, Artificial
  Synthetic oligonucleotide
tcccaggagcgacctgatcgttccgattccgtcgaaggctgtctcgcaactcggt

SEQ ID NO: 156073 - DNA, 55 bp, Artificial
  Synthetic oligonucleotide
tcccatgtctttcgatactgggccgttcttaacaagatagttgccaaaggccccg

SEQ ID NO: 156074 - DNA, 55 bp, Artificial
  Synthetic oligonucleotide
tcccgctggacagattgatcccgaagttgcccgcgttgctattgctcccgagttg

SEQ ID NO: 156075 - DNA, 55 bp, Artificial
  Synthetic oligonucleotide
tcccgtagaagttgcggcacctgtcggcatcgcgccgcttgatgtgaagcgcgtt

SEQ ID NO: 156076 - DNA, 58 bp, Artificial
  Synthetic oligonucleotide
tacaacgctacctggatcgttcttggggaggggcctaagacattgatccctcagtcga

SEQ ID NO: 156077 - DNA, 55 bp, Artificial
  Synthetic oligonucleotide
tccgaggatcgttgtcgcatagtcggtacaggccactcggaacgtgtcctcagct

SEQ ID NO: 156078 - DNA, 55 bp, Artificial
  Synthetic oligonucleotide
tccgcactattttgcagtgccttactgatcgcgtataccgtattttccggcgcgt

SEQ ID NO: 156079 - DNA, 55 bp, Artificial
  Synthetic oligonucleotide
tccgcttcggtgaactactccgcattaaaatacactctgcgttagagctgtaacg

SEQ ID NO: 156080 - DNA, 55 bp, Artificial
  Synthetic oligonucleotide
tccggtttccaatggttgcgacgggatcgcaatcctcaatcttatgctgcgagcg

SEQ ID NO: 156081 - DNA, 55 bp, Artificial
  Synthetic oligonucleotide
tccgtagacccagtcacgttttgctgtgcgagcactgataacttttgaagctccg

SEQ ID NO: 156082 - DNA, 55 bp, Artificial
  Synthetic oligonucleotide
tccgtagcggcattggagcgcccctagcgtgctcgcgtcacttcatgaacaccca

SEQ ID NO: 156083 - DNA, 55 bp, Artificial
  Synthetic oligonucleotide
tccgtcgaatgtacccaatctgatgtacccaattgtacccaagaggcccgccaag

SEQ ID NO: 156084 - DNA, 55 bp, Artificial
  Synthetic oligonucleotide
tccgtcgattgcgtcgaacgaatgcccgtgacttgcgtgggtcaacggcccgtgt

SEQ ID NO: 156085 - DNA, 55 bp, Artificial
  Synthetic oligonucleotide
tccgtcgcatatgcgcaagctacgaggtgagcccttgccttcctacctggaaacc

SEQ ID NO: 156086 - DNA, 55 bp, Artificial
  Synthetic oligonucleotide
tgacgggttagtgcgtttgtgcaaagcgtctgctatactcgaaaacctttctccg

SEQ ID NO: 156087 - DNA, 60 bp, Artificial
  Synthetic oligonucleotide
ctgtcatgccgaacgacgtatctagatgtcgtgatcccagacacgctcgatccatcgagg

SEQ ID NO: 156088 - DNA, 60 bp, Artificial
  Synthetic oligonucleotide
tatgttccacgcaatggacaatctgggtgtagcgcagtatctcacacgactggcgctggt

SEQ ID NO: 156089 - DNA, 55 bp, Artificial
  Synthetic oligonucleotide
tgactcggtaacgtgccagcacgctcgtacttacggaccgtacgctcactcatac

SEQ ID NO: 156090 - DNA, 55 bp, Artificial
  Synthetic oligonucleotide
tgagacagaccagatagctaccgagcagcaagaagggtatggcgatcgcaggcca

SEQ ID NO: 156091 - DNA, 55 bp, Artificial
  Synthetic oligonucleotide
tgagggagcgtgtccggcgacagattgccggaggatccaaacgtcagagggcgat

SEQ ID NO: 156092 - DNA, 55 bp, Artificial
  Synthetic oligonucleotide
tgagttctgtcgatcgcgcattcgaatgagtcacgaagcatcggcacgtcggcaa

SEQ ID NO: 156093 - DNA, 55 bp, Artificial
  Synthetic oligonucleotide
tgatgctcgcgcggcagcgcagacgtatcgaagtgggaatgcggaggtttgctca

SEQ ID NO: 156094 - DNA, 55 bp, Artificial
  Synthetic oligonucleotide
tgattccgttggcggggaaggtggtatccatcaggaacacgtggtgcacgaacgc

SEQ ID NO: 156095 - DNA, 55 bp, Artificial
  Synthetic oligonucleotide
tgcaaatagtcccgcagcttagccaccgtggcctgttcaaacaggatcgcgctat

SEQ ID NO: 156096 - DNA, 55 bp, Artificial
  Synthetic oligonucleotide
tgcaacttaatcgcggtttacgagtctccttgatacggagggagaactcatgcga

SEQ ID NO: 156097 - DNA, 55 bp, Artificial
  Synthetic oligonucleotide
tgcacaagccggcctgtcgtgccgtacgtggggagtggcgacttgatatcgctga

SEQ ID NO: 156098 - DNA, 55 bp, Artificial
  Synthetic oligonucleotide
tgcacgtccggtacgaagcctctcggtaccagcgatcgtccatctgcgtgccacg

SEQ ID NO: 156099 - DNA, 60 bp, Artificial
  Synthetic oligonucleotide
gccgcgaacgggaacatatcagaagccgcacgtcttctcggattgacacgtgcgcaactc

SEQ ID NO: 156100 - DNA, 55 bp, Artificial
  Synthetic oligonucleotide
tgcatgaacctgactggattagcacgggcggcggctaccctagtggtctgcctcg

SEQ ID NO: 156101 - DNA, 55 bp, Artificial
  Synthetic oligonucleotide
tgccaatcgatgagggtacccattacgatgaattcgtcctgtgcaatgacaatgg

SEQ ID NO: 156102 - DNA, 55 bp, Artificial
  Synthetic oligonucleotide
tgccaatgcgactctgccgatagaggggtggaggctccgcgctcaagggtgatac

SEQ ID NO: 156103 - DNA, 55 bp, Artificial
  Synthetic oligonucleotide
tgccctgcgtgcagcgaaccggagaggtgtcggcaacactgcgagatctggccaa

SEQ ID NO: 156104 - DNA, 55 bp, Artificial
  Synthetic oligonucleotide
tgccgattccgttgccaaaaggagtggacgcgagaacgacgtttatcccattgag

SEQ ID NO: 156105 - DNA, 55 bp, Artificial
  Synthetic oligonucleotide
tgccgtatgtcataccgactgcgccggatgattcggggaagaatttacatctcgc

SEQ ID NO: 156106 - DNA, 55 bp, Artificial
  Synthetic oligonucleotide
tgccgtcgcttcataaattgagataaccgtcctgtcgccagcattcaaaaccact

SEQ ID NO: 156107 - DNA, 55 bp, Artificial
  Synthetic oligonucleotide
tgccgtgcaattaaatccgggcgattgtaagcgatagttgcaggcaattcaagac

SEQ ID NO: 156108 - DNA, 55 bp, Artificial
  Synthetic oligonucleotide
tgcctatcccgcgtttctaatcgtctacctgtacgcgttttgcgtgctgttcgga

SEQ ID NO: 156109 - DNA, 55 bp, Artificial
  Synthetic oligonucleotide
tgcctgcgtataacgtctgacccgtctgaaagatgggccattgcagttcattgcg

SEQ ID NO: 156110 - DNA, 60 bp, Artificial
  Synthetic oligonucleotide
gcatcacgccacatgacgagcctacaaaaccggtgtcgtgggccgagtaccttgcgtcag

SEQ ID NO: 156111 - DNA, 55 bp, Artificial
  Synthetic oligonucleotide
tgcgacgcgacatgcatccgttcgggagaggcatcatggttcggacggaactgag

SEQ ID NO: 156112 - DNA, 55 bp, Artificial
  Synthetic oligonucleotide
tgcgcgcggtgctagcgtaacttccatcggctcgttggcaagcaacagactccgg

SEQ ID NO: 156113 - DNA, 55 bp, Artificial
  Synthetic oligonucleotide
tgcgctttaggtcgctcacttattatctgcgccattcggggtgcgcctcgctggt

SEQ ID NO: 156114 - DNA, 55 bp, Artificial
  Synthetic oligonucleotide
tcgtcgcatgcttgctcagtccccagacgcgcgcgcgcttatcttcgcattggct

SEQ ID NO: 156115 - DNA, 55 bp, Artificial
  Synthetic oligonucleotide
tcgtgacgacgcgagcaaggctgcataccatgaatcgccagcgcccatgcttgcc

SEQ ID NO: 156116 - DNA, 55 bp, Artificial
  Synthetic oligonucleotide
tcgtgccgacaccagtctgcgtagatcggggaggccgtcgctcaagtcgaagtgc

SEQ ID NO: 156117 - DNA, 55 bp, Artificial
  Synthetic oligonucleotide
tcgtggcgcagcgcgacaatggggcggtatcgattttcaccctgagcggaaccac

SEQ ID NO: 156118 - DNA, 55 bp, Artificial
  Synthetic oligonucleotide
tcgttgccttttatcggacgcgagctgcaacccaacacgtcagctatattcaccg

SEQ ID NO: 156119 - DNA, 55 bp, Artificial
  Synthetic oligonucleotide
tctaccttgcgggcgtgacgtgcggccaggtcgattactcgcggctggtcacaac

SEQ ID NO: 156120 - DNA, 55 bp, Artificial
  Synthetic oligonucleotide
tctagtcctatggataattgctcttcgtcccaacggggcggggtgcttggtccat

SEQ ID NO: 156121 - DNA, 60 bp, Artificial
  Synthetic oligonucleotide
taaccctaaggcggtcgccacagaatcgcctggcatggtgaagatcgatgcgcccgggca

SEQ ID NO: 156122 - DNA, 55 bp, Artificial
  Synthetic oligonucleotide
tctcgcgaaaatactccagccgcgaagatacctaaatctggaacggttccgtatt

SEQ ID NO: 156123 - DNA, 55 bp, Artificial
  Synthetic oligonucleotide
tctcggccacgcactggcgtgggtacgtgatcgtcttggccatagctcgatcagt

SEQ ID NO: 156124 - DNA, 55 bp, Artificial
  Synthetic oligonucleotide
tctcgtcgaatgcgtacttcatgtcgcgcgagagatcgctgcgcagtttctcgag

SEQ ID NO: 156125 - DNA, 55 bp, Artificial
  Synthetic oligonucleotide
tctctcgcgattgtctaaccagatcggtcagtcgattaaagcgaactcaacacga

SEQ ID NO: 156126 - DNA, 55 bp, Artificial
  Synthetic oligonucleotide
tctgcgcagtagcagccttctgtgctggccgtacgtgaattgccctggctccgag

SEQ ID NO: 156127 - DNA, 55 bp, Artificial
  Synthetic oligonucleotide
tcttctgaggggtcgaacgggaactgcaatggagattcttcacatcaaaaccatt

SEQ ID NO: 156128 - DNA, 55 bp, Artificial
  Synthetic oligonucleotide
tcttggggaggggcctaagacattgatccctcagtcgaacaacctgtcgcccagc

SEQ ID NO: 156129 - DNA, 55 bp, Artificial
  Synthetic oligonucleotide
tgaaatccagcgtgagtcggaagcaacggcgatccgccgcgcctgacgaaacgcc

SEQ ID NO: 156130 - DNA, 55 bp, Artificial
  Synthetic oligonucleotide
tgaacacgatgacgggcgctacgcagtcgcatctaccgcagaagacgccacattc

SEQ ID NO: 156131 - DNA, 55 bp, Artificial
  Synthetic oligonucleotide
tgaaccgcgcgaagcattgccacggcggctcggaacgacaaatccgctcgcccac

SEQ ID NO: 156132 - DNA, 56 bp, Artificial
  Synthetic oligonucleotide
agctggtcgattgggggaacacattcgttgacgcctttagggccgccattcgacgc

SEQ ID NO: 156133 - DNA, 55 bp, Artificial
  Synthetic oligonucleotide
tgaagtgtgcctcgcacggcagtcgcgctctcgacaattcggctttccagcgtcc

SEQ ID NO: 156134 - DNA, 55 bp, Artificial
  Synthetic oligonucleotide
tgaatatttgaacctgtgctgggacgacaagctgaaggtaacgcatcttttctag

SEQ ID NO: 156135 - DNA, 55 bp, Artificial
  Synthetic oligonucleotide
tgaatgcatgcgcggctcggcctatattggaatcccaatttcgcgagggaaggtg

SEQ ID NO: 156136 - DNA, 55 bp, Artificial
  Synthetic oligonucleotide
tgacagaagcactccgaagggtggcactatggagccttaccatctactcgggcgg

SEQ ID NO: 156137 - DNA, 55 bp, Artificial
  Synthetic oligonucleotide
tgacaggctccatgcgggtacaacgcaaacggtacgcagtgggcctacccgtaag

SEQ ID NO: 156138 - DNA, 55 bp, Artificial
  Synthetic oligonucleotide
tgacaggtcgtccccgcactccctatgatgcgttgaacgttcgatacacgatctt

SEQ ID NO: 156139 - DNA, 55 bp, Artificial
  Synthetic oligonucleotide
tgaccccgtcacaatgcagacgagtagtcgtcactcatcatgctccatctgcgcg

SEQ ID NO: 156140 - DNA, 55 bp, Artificial
  Synthetic oligonucleotide
tgaccgaaacggggcgaggtcctcatgaattcacgatagaggatcgcagcatgcc

SEQ ID NO: 156141 - DNA, 55 bp, Artificial
  Synthetic oligonucleotide
gcgggtgaagtcaggcgcgatgcgactgagggcgcggtttagaacaggtgacgaa

SEQ ID NO: 156142 - DNA, 55 bp, Artificial
  Synthetic oligonucleotide
gcgggttccgcattcttaggatgcgttcaggacatcgcacgcattcatctgcagg

SEQ ID NO: 156143 - DNA, 58 bp, Artificial
  Synthetic oligonucleotide
aaaatgcccatcggtattcgacgagcggtcgcatacaacacgcacagtatagtcccgg

SEQ ID NO: 156144 - DNA, 55 bp, Artificial
  Synthetic oligonucleotide
gcggtctgcgaaagatccgcgtagcgcgtgaacggaaagccgctgttcgcgaaat

SEQ ID NO: 156145 - DNA, 55 bp, Artificial
  Synthetic oligonucleotide
gcggtgtacaccaaatcgcctacatacgggtggcgtgggtgaatgggcagttgcg

SEQ ID NO: 156146 - DNA, 55 bp, Artificial
  Synthetic oligonucleotide
gcgtaagtcgggtgcagatatagcccgcgttgcgcctcatacgacagcggtccca

SEQ ID NO: 156147 - DNA, 55 bp, Artificial
  Synthetic oligonucleotide
gcgtacagttgatcagattgggctaccgaccgcggtaagagaggttgcggcaggg

SEQ ID NO: 156148 - DNA, 55 bp, Artificial
  Synthetic oligonucleotide
gcgtatcggcgtcgtgtatgaaatgagccccgcgtggtcgttctatgcgaacacc

SEQ ID NO: 156149 - DNA, 55 bp, Artificial
  Synthetic oligonucleotide
gcgtcaccggaggaggacacctatcctcgctgccgcgtatagatttcggagaagc

SEQ ID NO: 156150 - DNA, 55 bp, Artificial
  Synthetic oligonucleotide
gcgtcccgtgaattcgatggtgccagtttcggcgacacgccactactgaaggctg

SEQ ID NO: 156151 - DNA, 55 bp, Artificial
  Synthetic oligonucleotide
gcgtcctcaggtgacgtgcgagccatatcttgttgttcccgctggtttagcctga

SEQ ID NO: 156152 - DNA, 55 bp, Artificial
  Synthetic oligonucleotide
gcgtcctgatcgcgacagacgatcaccagatttcccttcatgcgaatctcccgtt

SEQ ID NO: 156153 - DNA, 55 bp, Artificial
  Synthetic oligonucleotide
gcgtctgttgccacggatcgttgccacccgctttcgtcagcattgtttcgctccc

SEQ ID NO: 156154 - DNA, 59 bp, Artificial
  Synthetic oligonucleotide
gccggcgacgccagctccgtagcagtcagcggggccgcgcaggcacaacggcccccgtc

SEQ ID NO: 156155 - DNA, 55 bp, Artificial
  Synthetic oligonucleotide
gcgtgcccacgtcgtcaagacttcgagccagccattggttggttgcggctcaaat

SEQ ID NO: 156156 - DNA, 55 bp, Artificial
  Synthetic oligonucleotide
gcgtgcgagcggccattttcggaaaacggtgaccacaggtagacctcgtgaccgc

SEQ ID NO: 156157 - DNA, 55 bp, Artificial
  Synthetic oligonucleotide
gcgtgctgtgcggacaatcagcgatgaggctacataaatctcgaagcgggcgcac

SEQ ID NO: 156158 - DNA, 55 bp, Artificial
  Synthetic oligonucleotide
gcgtgtccctgcgaccccggttcaaaagggtctgtgcttgcaacgggcataaggg

SEQ ID NO: 156159 - DNA, 55 bp, Artificial
  Synthetic oligonucleotide
gcgtgttcccgtcaacggatcatcaatccagaacacgtcgagaagcttcccgcca

SEQ ID NO: 156160 - DNA, 55 bp, Artificial
  Synthetic oligonucleotide
gcgttcaaaccgatagcgctaaacaggatgcacgaaggatgaaactgcgacgcgc

SEQ ID NO: 156161 - DNA, 54 bp, Artificial
  Synthetic oligonucleotide
gcgttcgcggaatcgcctccccgatccacttaacgggtcgccaatggaagaagg

SEQ ID NO: 156162 - DNA, 55 bp, Artificial
  Synthetic oligonucleotide
gcgttcgcgtgataaggacgtcgccacgaaataattacgcaacaacacggagtac

SEQ ID NO: 156163 - DNA, 55 bp, Artificial
  Synthetic oligonucleotide
gcgtttcagcggtgcgacgcaattcgccgccgtgtgtcgcctcacgccggacgga

SEQ ID NO: 156164 - DNA, 55 bp, Artificial
  Synthetic oligonucleotide
gctaaatattggggatgcatgttgttcaaacctcatcgctttgtacctaagacag

SEQ ID NO: 156165 - DNA, 58 bp, Artificial
  Synthetic oligonucleotide
gtttagcggggaagagcttagacaggacgacgcagacgtctttcttgaagtgcttcac

SEQ ID NO: 156166 - DNA, 55 bp, Artificial
  Synthetic oligonucleotide
gctaacgacgaaaagttcgcattggccgcctaacagccgccttgggttgtaactg

SEQ ID NO: 156167 - DNA, 55 bp, Artificial
  Synthetic oligonucleotide
gctaccaagtacattccgtacagtaagcagatcactcccacgacttgcacgacag

SEQ ID NO: 156168 - DNA, 55 bp, Artificial
  Synthetic oligonucleotide
gcggaagaaaggtgatcggtgagaggatcgtggcacggaacattcgggaggaccg

SEQ ID NO: 156169 - DNA, 55 bp, Artificial
  Synthetic oligonucleotide
gcggaagcggtgtgaagagaaaacccatgcgtccatattactcgttgaacatcaa

SEQ ID NO: 156170 - DNA, 55 bp, Artificial
  Synthetic oligonucleotide
gcggaagtcgatatcgattgctctatccatgtcggttgctctcggttcaggcgga

SEQ ID NO: 156171 - DNA, 55 bp, Artificial
  Synthetic oligonucleotide
gcggaagtcggcatgtttctcctacctgttgtggtcagtgaattgcacgaagcgt

SEQ ID NO: 156172 - DNA, 55 bp, Artificial
  Synthetic oligonucleotide
gcggacattctcgtctcctgggtcctggaatgtgaggatcgctctcatgcagacg

SEQ ID NO: 156173 - DNA, 55 bp, Artificial
  Synthetic oligonucleotide
gcggacgaggatcgatggacatctgtgcaactgcgcaaaaccaagtgtagcggca

SEQ ID NO: 156174 - DNA, 55 bp, Artificial
  Synthetic oligonucleotide
gcggactggtcgttggttggggtacacctctgtttgcggtgccaaccatggggca

SEQ ID NO: 156175 - DNA, 55 bp, Artificial
  Synthetic oligonucleotide
gcggagcccggttatctggcttcggcactgaaaatgaggcggaccacggtgtcca

SEQ ID NO: 156176 - DNA, 60 bp, Artificial
  Synthetic oligonucleotide
gttgttgtagagagcggcccctggtggtgttgcagcaccaccaagagcctaaccagtcca

SEQ ID NO: 156177 - DNA, 55 bp, Artificial
  Synthetic oligonucleotide
gcggagtcgggtatgcgacggtcaaacgctacgtgaaacggcggaagatcgagcc

SEQ ID NO: 156178 - DNA, 55 bp, Artificial
  Synthetic oligonucleotide
gcggataacgcttcagagcactcgattgtaggcgacttggaataaccccgcaaac

SEQ ID NO: 156179 - DNA, 55 bp, Artificial
  Synthetic oligonucleotide
gcggcacgcaaaagtcgtgactggtatacgccgtccgctgactctcccgcactgt

SEQ ID NO: 156180 - DNA, 55 bp, Artificial
  Synthetic oligonucleotide
gcggcacgtagcgatacttgacccgggcaatcggataaggaccaggcgtcaccac

SEQ ID NO: 156181 - DNA, 55 bp, Artificial
  Synthetic oligonucleotide
gcggcagatccatgtaggcccgcgtctgatccgatgggtcatccatgtgcatttg

SEQ ID NO: 156182 - DNA, 55 bp, Artificial
  Synthetic oligonucleotide
gcggcagtcgtcctcagtgcgctcgcagaatcaggtacgctcgaaattttcccca

SEQ ID NO: 156183 - DNA, 55 bp, Artificial
  Synthetic oligonucleotide
gcggccttatatctgacgccagtacatcacacctatccggatgtgtcatctggcg

SEQ ID NO: 156184 - DNA, 55 bp, Artificial
  Synthetic oligonucleotide
gcggcgtctcactttcttgcgtccattccgtcaaagtctgggaaagtagcgacag

SEQ ID NO: 156185 - DNA, 55 bp, Artificial
  Synthetic oligonucleotide
gcggcgtgcgttggcatatactcgcgtcgtccaagaagaaagcggagcgatgggc

SEQ ID NO: 156186 - DNA, 55 bp, Artificial
  Synthetic oligonucleotide
gcggctcgcgtttgttcgccttttcgcatagcttttaccgttctaatgtgaccga

SEQ ID NO: 156187 - DNA, 57 bp, Artificial
  Synthetic oligonucleotide
gcagcccgtagaggtaccacccaaagggcgtgccgacccgctcatcgagtttcgtga

SEQ ID NO: 156188 - DNA, 55 bp, Artificial
  Synthetic oligonucleotide
gcgggaatgagtcgatgtactgcggaatctggtattccctcattcgagcgtctcc

SEQ ID NO: 156189 - DNA, 55 bp, Artificial
  Synthetic oligonucleotide
gcgggatctgactcagcttgtggctgtcgtcattcgctttcgacgtggctcctcc

SEQ ID NO: 156190 - DNA, 55 bp, Artificial
  Synthetic oligonucleotide
gcgggcctgtcgatgggattctcctttctcacaatggctgttctgcaagccggcc

SEQ ID NO: 156191 - DNA, 55 bp, Artificial
  Synthetic oligonucleotide
gcggggaatccatcatacgaattcgaaatcctgagcaatcgatatcagtcgacga

SEQ ID NO: 156192 - DNA, 55 bp, Artificial
  Synthetic oligonucleotide
gcggggaatccccgatgctacgcaagccggactcgcgtgccaaacgagttttcct

SEQ ID NO: 156193 - DNA, 55 bp, Artificial
  Synthetic oligonucleotide
gcggggtgagcgcgtagaaagtgaatgtcgctacccaatgatcctcagagtaggg

SEQ ID NO: 156194 - DNA, 55 bp, Artificial
  Synthetic oligonucleotide
gcgggtacaacgcaaacggtacacagtgggcctacccgtaagctcaggccgcaga

SEQ ID NO: 156195 - DNA, 55 bp, Artificial
  Synthetic oligonucleotide
gctgcagagttcaagcattcggatctccgcggtaaaagaagtctatggagggtac

SEQ ID NO: 156196 - DNA, 55 bp, Artificial
  Synthetic oligonucleotide
gctgcctgtcacgttgatgtctcggttgctgacaatgcttacgccgtcggccgac

SEQ ID NO: 156197 - DNA, 55 bp, Artificial
  Synthetic oligonucleotide
gctgctacgcaaccgtccgaagcgcaggcttaagacacactatttaagctaccag

SEQ ID NO: 156198 - DNA, 60 bp, Artificial
  Synthetic oligonucleotide
tgcatgagatcgctgtagctcgggagtccagcgtttgtcgcgtgggcgtctgcgttcgcg

SEQ ID NO: 156199 - DNA, 58 bp, Artificial
  Synthetic oligonucleotide
gcctagaccatacggtttcggtatgtctttccctagttgcgagaccgcaggtgcttgc

SEQ ID NO: 156200 - DNA, 55 bp, Artificial
  Synthetic oligonucleotide
gctgcttcgagaggccgggctatattatcgcggtgaattaaaccaggattcaatg

SEQ ID NO: 156201 - DNA, 55 bp, Artificial
  Synthetic oligonucleotide
gctgctttcgtcgtgagcttgatcgcctcgatttgggctttcaggtctggttcgc

SEQ ID NO: 156202 - DNA, 55 bp, Artificial
  Synthetic oligonucleotide
gctggagtcaggtcagccccttagattcgccgcaaaacgactacagacatcgcta

SEQ ID NO: 156203 - DNA, 55 bp, Artificial
  Synthetic oligonucleotide
gctgttacatcctttgccgtcagacaatcaggacaagcccaaccgctcatgcccg

SEQ ID NO: 156204 - DNA, 55 bp, Artificial
  Synthetic oligonucleotide
gcttaccaattgccgcccaacacaggttagcgcatgttgccagtgtgccccagcg

SEQ ID NO: 156205 - DNA, 55 bp, Artificial
  Synthetic oligonucleotide
gcttcactttacccatgaacggcagtgcgtgcgagcgggttttcacgtatggatg

SEQ ID NO: 156206 - DNA, 55 bp, Artificial
  Synthetic oligonucleotide
gcttgaaaccaactgtcccggtcgaagtagttatgccgggaatgccacccgtgcc

SEQ ID NO: 156207 - DNA, 55 bp, Artificial
  Synthetic oligonucleotide
gcttgcgtacaacaacggaccttttgcgttcggtgcagggtacctgttcgcgaaa

SEQ ID NO: 156208 - DNA, 55 bp, Artificial
  Synthetic oligonucleotide
gcttggcacgcacgacgctttccccgcaatcaaccgcaggagacgcacattgacg

SEQ ID NO: 156209 - DNA, 55 bp, Artificial
  Synthetic oligonucleotide
gcttggtaagacgaagatcagtcatgttcggggaatccttccgctacgccacggc

SEQ ID NO: 156210 - DNA, 53 bp, Artificial
  Synthetic oligonucleotide
aggtcctcagtacccgccgtatcggatgggggcaccgaacccgcggactgaac

SEQ ID NO: 156211 - DNA, 55 bp, Artificial
  Synthetic oligonucleotide
gctttcatggaggcctcttccagttcgagagacgggcgggacgcaggttccagtg

SEQ ID NO: 156212 - DNA, 55 bp, Artificial
  Synthetic oligonucleotide
gctttcgcaaatccctgtgctacaactccccgacgccaatcgggaagggtcctac

SEQ ID NO: 156213 - DNA, 55 bp, Artificial
  Synthetic oligonucleotide
ggaacaaagcgatgaggtttaaacaacgtgcttccccagtgtgtatagctgcatc

SEQ ID NO: 156214 - DNA, 55 bp, Artificial
  Synthetic oligonucleotide
ggaacgatgggacaagtactcgatctttgggccgtagccaggtggatccgagatg

SEQ ID NO: 156215 - DNA, 55 bp, Artificial
  Synthetic oligonucleotide
ggaaggccggttgatagcgatgcagtccgggaccataggcgtctcggccaatcac

SEQ ID NO: 156216 - DNA, 54 bp, Artificial
  Synthetic oligonucleotide
ggaagtaacggcgggaacccgatttggcaggcgttatccagtagccgctctttg

SEQ ID NO: 156217 - DNA, 55 bp, Artificial
  Synthetic oligonucleotide
ggaccaccgaaagattgctgcgcagttggctttctacaactgtcacaccatccgc

SEQ ID NO: 156218 - DNA, 51 bp, Artificial
  Synthetic oligonucleotide
ggacccaattgacccctttaccccagactacggccactttctcgtaggttc

SEQ ID NO: 156219 - DNA, 55 bp, Artificial
  Synthetic oligonucleotide
ggaccccagcgacctgactctatcgatcagacgtaccttgttatgcgaaacctac

SEQ ID NO: 156220 - DNA, 55 bp, Artificial
  Synthetic oligonucleotide
ggacgaggctgcccgagtcgtaaaggctatccttgtcgagcttatcgagacccgt

SEQ ID NO: 156221 - DNA, 60 bp, Artificial
  Synthetic oligonucleotide
cggaatttcgaaccatcagccagttggtccgccacgaaatccatgctccaggcatcgttc

SEQ ID NO: 156222 - DNA, 55 bp, Artificial
  Synthetic oligonucleotide
gctactacttgagcgcattgacgcgatttgcgaacctgatcggctttacccgtgt

SEQ ID NO: 156223 - DNA, 55 bp, Artificial
  Synthetic oligonucleotide
gctagattggatcggcagctggctcgtttgactgagaagtgatcgacgcagtgag

SEQ ID NO: 156224 - DNA, 55 bp, Artificial
  Synthetic oligonucleotide
gctagtcccgcatatttcccgcgacccgccgcagcagagtcattggaccgagttc

SEQ ID NO: 156225 - DNA, 55 bp, Artificial
  Synthetic oligonucleotide
gctatgggagccggccactggaaacgtcatacatacgctcactattccccgcggc

SEQ ID NO: 156226 - DNA, 55 bp, Artificial
  Synthetic oligonucleotide
gctcaaaagttatcagtgctcgcacagcaaaacgtgactgggtctacggatctgg

SEQ ID NO: 156227 - DNA, 55 bp, Artificial
  Synthetic oligonucleotide
gctcactcagatgcccaatcgcgctcggagcgtcggccgagcaccgttgtgactg

SEQ ID NO: 156228 - DNA, 55 bp, Artificial
  Synthetic oligonucleotide
gctccaggcgtgaattagtagcggcatgcttgcgtgcactttatgaccgcctcca

SEQ ID NO: 156229 - DNA, 55 bp, Artificial
  Synthetic oligonucleotide
gctccatgcgcatatttcgtttgttgagggattttgacaaacctagagtgcatcc

SEQ ID NO: 156230 - DNA, 51 bp, Artificial
  Synthetic oligonucleotide
gctcccctagggtacacccctaaactcacggttcccaaacgggcaaccatc

SEQ ID NO: 156231 - DNA, 54 bp, Artificial
  Synthetic oligonucleotide
gctccgccgcgcgaaaaggtataaagtccgctctcaataaggcaaccttacccg

SEQ ID NO: 156232 - DNA, 58 bp, Artificial
  Synthetic oligonucleotide
gcaattacgtatttacgtatgtacgtaagtaggctataataggccatgcagtgaggtt

SEQ ID NO: 156233 - DNA, 55 bp, Artificial
  Synthetic oligonucleotide
gctcgacgcgctacgggttgaaaccggacatcatcacgttcgcgaaaggaatcgc

SEQ ID NO: 156234 - DNA, 55 bp, Artificial
  Synthetic oligonucleotide
gctcgatgacaggaggagcgacatggtagtcgccgtgtacccgggtacgttcgat

SEQ ID NO: 156235 - DNA, 55 bp, Artificial
  Synthetic oligonucleotide
gctcgcactggggcctacacgcatgacctgggacgttattgggcataccgaacgc

SEQ ID NO: 156236 - DNA, 55 bp, Artificial
  Synthetic oligonucleotide
gctcgctgcgaagggtcgctctagactgcccatcaagtttgactccaacccgtgg

SEQ ID NO: 156237 - DNA, 55 bp, Artificial
  Synthetic oligonucleotide
gctcgcttggacccgtaggccagctgaacggctgtgtagccgtcttgttcgagtg

SEQ ID NO: 156238 - DNA, 55 bp, Artificial
  Synthetic oligonucleotide
gctcggaaaacgttatgaacgaatcttgccacaccgcttaatactacagccgtag

SEQ ID NO: 156239 - DNA, 55 bp, Artificial
  Synthetic oligonucleotide
gctcggcttgcaagctagcgtcggattatagcggcctttacctactgtgtgtagc

SEQ ID NO: 156240 - DNA, 55 bp, Artificial
  Synthetic oligonucleotide
gctcggtccccatttggaccagcgcgtatagggtcagatagtgagcggcggtgga

SEQ ID NO: 156241 - DNA, 55 bp, Artificial
  Synthetic oligonucleotide
gctcggtctacaagcgcccgtatcgggtaaccacggattcgacacatcgcctgct

SEQ ID NO: 156242 - DNA, 55 bp, Artificial
  Synthetic oligonucleotide
gctcgtcggaatccgtttcacgcatcggcgcttcgttgaccatcgttccgttgtg

SEQ ID NO: 156243 - DNA, 60 bp, Artificial
  Synthetic oligonucleotide
agcgcacacggcgctgattcaacatccctagccgtttcggacgcattttgtataatgcat

SEQ ID NO: 156244 - DNA, 55 bp, Artificial
  Synthetic oligonucleotide
gctcgttgaccatattggggcgccaattcacgaatactcttcgacagagacaccc

SEQ ID NO: 156245 - DNA, 55 bp, Artificial
  Synthetic oligonucleotide
gctctcgcagcacaatgctccgaaacttcggcttacccgcccactgaagctcgca

SEQ ID NO: 156246 - DNA, 55 bp, Artificial
  Synthetic oligonucleotide
gctctgcaaagttaagtcaagtcgcgatcgggcaaggcgacgaatgaattgcaca

SEQ ID NO: 156247 - DNA, 55 bp, Artificial
  Synthetic oligonucleotide
gctcttggggatcttcgcagggatctatttggggtacgacaagttcgcaccggga

SEQ ID NO: 156248 - DNA, 55 bp, Artificial
  Synthetic oligonucleotide
gctgaggggcgtcgttaaaagaccgcgtacgatacaccactccgatagaggggcc

SEQ ID NO: 156249 - DNA, 55 bp, Artificial
  Synthetic oligonucleotide
gctgatgtccgttcgagagcggaacggaagaaccacgacactgacctataacccg

SEQ ID NO: 156250 - DNA, 55 bp, Artificial
  Synthetic oligonucleotide
gccgggtgaatcttgagttctcgagaaagcttgtcgatggtctctggactcggat

SEQ ID NO: 156251 - DNA, 55 bp, Artificial
  Synthetic oligonucleotide
gccgtcagtggtcggcactcgtcaaatacgactccccatggttcggccttgcagc

SEQ ID NO: 156252 - DNA, 55 bp, Artificial
  Synthetic oligonucleotide
gccgtcggggtaatgtccagtttcatcctgacatccatcgcaggctacgaggtct

SEQ ID NO: 156253 - DNA, 55 bp, Artificial
  Synthetic oligonucleotide
gccgtgccactgacttcataggtcgcgcagaacgcctgttggacccactcgtgca

SEQ ID NO: 156254 - DNA, 60 bp, Artificial
  Synthetic oligonucleotide
tcaagaacccttgtgagtccgctttaatcatggtcaggtctggtcaaacatgaacgagtc

SEQ ID NO: 156255 - DNA, 55 bp, Artificial
  Synthetic oligonucleotide
gccgtggtaacgtctcaggtgcccttggatgttctcgtttcgaagcagacgcgtc

SEQ ID NO: 156256 - DNA, 55 bp, Artificial
  Synthetic oligonucleotide
gccgtgtcgaacctctacggtcgtgtcgcgccgatgatcaaacccgttcttgccg

SEQ ID NO: 156257 - DNA, 55 bp, Artificial
  Synthetic oligonucleotide
gcctaacacgtaaggctgccatacctccggtgaaataggttgagtccaggcattt

SEQ ID NO: 156258 - DNA, 55 bp, Artificial
  Synthetic oligonucleotide
gcctaaccccgtgtctggatgacaggcgataaagcgagagtcacgcctacttgcg

SEQ ID NO: 156259 - DNA, 55 bp, Artificial
  Synthetic oligonucleotide
gcctacccgggcaatcgctcggtttccgttgctccacgcatcaacgggcaattcg

SEQ ID NO: 156260 - DNA, 55 bp, Artificial
  Synthetic oligonucleotide
gcctagactccgaaccgtattcacatgacgcacgacacgtgcagggagtcgcgag

SEQ ID NO: 156261 - DNA, 54 bp, Artificial
  Synthetic oligonucleotide
gcctagccggtaaccgtccaacttcgtgggttcagttcattgcggcccggtggc

SEQ ID NO: 156262 - DNA, 55 bp, Artificial
  Synthetic oligonucleotide
gcctattctcgaggtcttgagaagaacgcggcaaaccacgttccattgacgcccc

SEQ ID NO: 156263 - DNA, 55 bp, Artificial
  Synthetic oligonucleotide
gcctcgagcgtgcgagagaatttagacggcgcaatgtcgctgaggtcgaaagacg

SEQ ID NO: 156264 - DNA, 55 bp, Artificial
  Synthetic oligonucleotide
gcctgactcaactggacacactgatcacacttgcgtcctcgatatgtaggaatcc

SEQ ID NO: 156265 - DNA, 60 bp, Artificial
  Synthetic oligonucleotide
agtattacgcctacatcgatggaacttcgcagagcgcggtgcaatccaggaatgtggggt

SEQ ID NO: 156266 - DNA, 55 bp, Artificial
  Synthetic oligonucleotide
gcctgattggttgagaacccacggctcgggcgcttgcacaatccgatgcatgacg

SEQ ID NO: 156267 - DNA, 55 bp, Artificial
  Synthetic oligonucleotide
gcctgtcggaagcggttggacgtgaatcggcaagtgactcggcaactgccattat

SEQ ID NO: 156268 - DNA, 55 bp, Artificial
  Synthetic oligonucleotide
gccttcttgaaagtgcgaagggacatcgcgcaattctccctgtaggaagtgaagc

SEQ ID NO: 156269 - DNA, 55 bp, Artificial
  Synthetic oligonucleotide
gccttgaatggcggagattcggccggagcgctcgtatggttccggaatgcgtacg

SEQ ID NO: 156270 - DNA, 55 bp, Artificial
  Synthetic oligonucleotide
gccttgctgacatgccacgcaatgttcagatgacgtcgtgtgccagtagtcatcg

SEQ ID NO: 156271 - DNA, 55 bp, Artificial
  Synthetic oligonucleotide
gcctttctattgagccagagtatgcccgggacgggttacgtgtgcaaaatcccag

SEQ ID NO: 156272 - DNA, 55 bp, Artificial
  Synthetic oligonucleotide
gcgaaacgtaaatcagttgtcgcgttgcgggttccattattcagatcctctcgtc

SEQ ID NO: 156273 - DNA, 55 bp, Artificial
  Synthetic oligonucleotide
gcgaaagcacagggtgggagctagtatcgaagcggcacatgtaactggttacgac

SEQ ID NO: 156274 - DNA, 54 bp, Artificial
  Synthetic oligonucleotide
gcgaacctttgacctgccctttacgcgcgatcctctaacgtttcaccggtccga

SEQ ID NO: 156275 - DNA, 55 bp, Artificial
  Synthetic oligonucleotide
gcgaaggctcggatgcatcctccccatgaacgtgcgcattcaggccgagtacgtc

SEQ ID NO: 156276 - DNA, 60 bp, Artificial
  Synthetic oligonucleotide
agcctcgcactgaaatgaaattgaggcatcagttgttcgggcgatcgtcctctcgtacta

SEQ ID NO: 156277 - DNA, 55 bp, Artificial
  Synthetic oligonucleotide
gcgaagtgctgtagggcaatcattagcgtgaacctgaagtccctcacctttaccg

SEQ ID NO: 156278 - DNA, 55 bp, Artificial
  Synthetic oligonucleotide
gccagtacttcgcggagatgtagcaagcccaggcatattgccgtctctagtagcg

SEQ ID NO: 156279 - DNA, 55 bp, Artificial
  Synthetic oligonucleotide
gccatagttacgggcgtatagcattcatggaaaccggtactgtcaggctccagtt

SEQ ID NO: 156280 - DNA, 55 bp, Artificial
  Synthetic oligonucleotide
gccatgccgcagatgggcacactttctcgattgccccggtagggtctacaccgtt

SEQ ID NO: 156281 - DNA, 55 bp, Artificial
  Synthetic oligonucleotide
gccatgtcgggttttccgagatcgctcataaagcgctttcgattccgttcgtagc

SEQ ID NO: 156282 - DNA, 55 bp, Artificial
  Synthetic oligonucleotide
gcccaccgagccattacactcgcaaaacggatgcgacgtggcgttgtagggtgcc

SEQ ID NO: 156283 - DNA, 55 bp, Artificial
  Synthetic oligonucleotide
gcccatgcggccaccttgaatacgatgtcctcttgctgcgagcctttcgccgtgt

SEQ ID NO: 156284 - DNA, 54 bp, Artificial
  Synthetic oligonucleotide
gccccgacacggtaccatcatggctcccgaatttaccgactttcccgacgcggc

SEQ ID NO: 156285 - DNA, 55 bp, Artificial
  Synthetic oligonucleotide
gcccgcacgactaccctcaagtcactggtaagaattccgttaactcggtcgggca

SEQ ID NO: 156286 - DNA, 55 bp, Artificial
  Synthetic oligonucleotide
gcccgcgtcgattaattccgatacggcgtggtttggctcgacgccgcaatgacgg

SEQ ID NO: 156287 - DNA, 59 bp, Artificial
  Synthetic oligonucleotide
ttggagcgtggcgcgggtcgcatagtcgaagacggggataaccttgacccatgcccatc

SEQ ID NO: 156288 - DNA, 55 bp, Artificial
  Synthetic oligonucleotide
gcccggcattcgaaagcgttcgcgctagttttaatgtcccacagcttgtgatggg

SEQ ID NO: 156289 - DNA, 54 bp, Artificial
  Synthetic oligonucleotide
gcccggcgtttgtgcggtaatttcgagaataactggcgcagggttggggtacgc

SEQ ID NO: 156290 - DNA, 55 bp, Artificial
  Synthetic oligonucleotide
gcccgtcatgcctacggagctcatcgacatgtcttccgatcggccggctacccgg

SEQ ID NO: 156291 - DNA, 55 bp, Artificial
  Synthetic oligonucleotide
gccctagcctatcggcaagctagtgcgaggacggcacgcaattaagcggccagct

SEQ ID NO: 156292 - DNA, 55 bp, Artificial
  Synthetic oligonucleotide
gccctttcgccagggacgaaaagggcgagcacctggaacgtgcgcgagtctaggg

SEQ ID NO: 156293 - DNA, 55 bp, Artificial
  Synthetic oligonucleotide
gccctttggatgacccaagagccatcctaggcgaccgaacggcgtgtaggccgtt

SEQ ID NO: 156294 - DNA, 55 bp, Artificial
  Synthetic oligonucleotide
gccgacgacctaccatacgcatcgcgtatatttcagagagcccagccgaccgatg

SEQ ID NO: 156295 - DNA, 55 bp, Artificial
  Synthetic oligonucleotide
gccgagacgcctatggtcccggactgcatcgctatcaaccggccttcctcgactt

SEQ ID NO: 156296 - DNA, 55 bp, Artificial
  Synthetic oligonucleotide
gccgagcgcgactctcgcccgctcgaattcggacatgggtgcgttactcataggt

SEQ ID NO: 156297 - DNA, 55 bp, Artificial
  Synthetic oligonucleotide
gccgcaacatacaacgcgaccggcaattcgaactaatattgcgctcggcaacgac

SEQ ID NO: 156298 - DNA, 58 bp, Artificial
  Synthetic oligonucleotide
gctccctgcacatgggaaagttttgtgtgcgtacaggcaaggtcaaatcgcccccgcc

SEQ ID NO: 156299 - DNA, 55 bp, Artificial
  Synthetic oligonucleotide
gccgcaaccgctactacaatggcaaattggctggctctgtgttcgaggtcatctt

SEQ ID NO: 156300 - DNA, 55 bp, Artificial
  Synthetic oligonucleotide
gccgcagtgcgagaggccgggcgtgagtttagccgtcacgcttgatcgtttgttg

SEQ ID NO: 156301 - DNA, 55 bp, Artificial
  Synthetic oligonucleotide
gccgctacggtggaccgaacgaacgtcattgaggcaattgttatgcacgccggcc

SEQ ID NO: 156302 - DNA, 55 bp, Artificial
  Synthetic oligonucleotide
gccgctcactatctgaccctatacgcgctggtccaaatggggaccgagcctgtgc

SEQ ID NO: 156303 - DNA, 55 bp, Artificial
  Synthetic oligonucleotide
gccggaatccgacgccaggcacattgctatcgtaaatgtgattccccagcggtga

SEQ ID NO: 156304 - DNA, 55 bp, Artificial
  Synthetic oligonucleotide
gccggccacagtggaatctgtgtcggatgagattgcgtttccacacccgcgctgc

SEQ ID NO: 156305 - DNA, 55 bp, Artificial
  Synthetic oligonucleotide
gcgcagcccgcaagccacaaagcgcctcctaacaaagaggcggtcattctgagcg

SEQ ID NO: 156306 - DNA, 55 bp, Artificial
  Synthetic oligonucleotide
gcgcaggcagttcgactacttgcgccgatatagtgctgatctaagtacctcgctg

SEQ ID NO: 156307 - DNA, 55 bp, Artificial
  Synthetic oligonucleotide
gcgcagtaaaccaaggcatacgcccatagaacgggcgtgaagcaagggcgtgccg

SEQ ID NO: 156308 - DNA, 55 bp, Artificial
  Synthetic oligonucleotide
gcgcagtaaggttcggtctgccgatttctggtgaacccgataggggctgtgcatc

SEQ ID NO: 156309 - DNA, 60 bp, Artificial
  Synthetic oligonucleotide
cgccagatgaggcgtaacgtcaagaataattgcgttcgggggcgcccatcatggattaca

SEQ ID NO: 156310 - DNA, 60 bp, Artificial
  Synthetic oligonucleotide
caggtatcgtttggtatgggctggaatcggagccaacccatatcgcgatgcaccggattg

SEQ ID NO: 156311 - DNA, 55 bp, Artificial
  Synthetic oligonucleotide
gcgcatttcgtcaacgctaacgcattgccaggcttgggcgggtgcaaccagggct

SEQ ID NO: 156312 - DNA, 55 bp, Artificial
  Synthetic oligonucleotide
gcgccattcgcaggcgtctatcccctgtttgtgctcaaggtcgtgtgctttgcct

SEQ ID NO: 156313 - DNA, 55 bp, Artificial
  Synthetic oligonucleotide
gcgcccattgcggttgactaccatcccaaaggtatttgaagttctccaactgatc

SEQ ID NO: 156314 - DNA, 55 bp, Artificial
  Synthetic oligonucleotide
gcgccggcttgggagaatgcgctaagacttgccattagttcgccttagagacggt

SEQ ID NO: 156315 - DNA, 55 bp, Artificial
  Synthetic oligonucleotide
gcgcgaagttgcgatgtagcattaatccatcgttgctcggaaccgcactgtctgg

SEQ ID NO: 156316 - DNA, 55 bp, Artificial
  Synthetic oligonucleotide
gcgcgcagtcattcaacaccacacggggaggcaacacatgagagcatcgaacggg

SEQ ID NO: 156317 - DNA, 55 bp, Artificial
  Synthetic oligonucleotide
gcgcgcgtacccaatcagcatgagactgccaaaagattcttgaaacccgtggaaa

SEQ ID NO: 156318 - DNA, 55 bp, Artificial
  Synthetic oligonucleotide
gcgcggctatcttcgcaacggcaatacaaccctgtccgagacgtggagctacatc

SEQ ID NO: 156319 - DNA, 55 bp, Artificial
  Synthetic oligonucleotide
gcgcgtccagtgggaacctatgagtaacgcacccatgtccgaattcgagcgggcg

SEQ ID NO: 156320 - DNA, 55 bp, Artificial
  Synthetic oligonucleotide
gcgcgtcgaacgactatgaggccatccagtcctggctttcgcttcacgagtcggc

SEQ ID NO: 156321 - DNA, 60 bp, Artificial
  Synthetic oligonucleotide
gtgtaatggcaatagccatgccggacagaatccaacaggcgttgcattaggagcgtcttg

SEQ ID NO: 156322 - DNA, 55 bp, Artificial
  Synthetic oligonucleotide
gcgcgtgacacggtaagttgttgaaaactaacgatagttggtcatagttgaccaa

SEQ ID NO: 156323 - DNA, 55 bp, Artificial
  Synthetic oligonucleotide
gcgctcccaagtctcagacttttcacccgacgttatcttgccgacacatcggacg

SEQ ID NO: 156324 - DNA, 55 bp, Artificial
  Synthetic oligonucleotide
gcgctcgtaccgtgcggctctgcggcttccatagtcgaatgccaagcctcaatgc

SEQ ID NO: 156325 - DNA, 55 bp, Artificial
  Synthetic oligonucleotide
gcgctcttccaatgtggggttgccgtatcattcgacgcggctcggcgcacagttg

SEQ ID NO: 156326 - DNA, 55 bp, Artificial
  Synthetic oligonucleotide
gcgctcttttcaaggggcaacgcgatttcgcgggacatttccggcttgtacggct

SEQ ID NO: 156327 - DNA, 55 bp, Artificial
  Synthetic oligonucleotide
gcgctgaacttccccgttcaaagcgtattcttcgagccaccgggtatcactatcc

SEQ ID NO: 156328 - DNA, 55 bp, Artificial
  Synthetic oligonucleotide
gcgctgcacgcaaattgtgagcgaggatcggtccctggcgaaccgcgtagacacc

SEQ ID NO: 156329 - DNA, 55 bp, Artificial
  Synthetic oligonucleotide
gcgctgcatgttggttcccctcaccgcgttgccggattcgagtccatagatgcga

SEQ ID NO: 156330 - DNA, 55 bp, Artificial
  Synthetic oligonucleotide
gcgcttagaatacaggcgtatctaaacaggagaacaccccatgaacgcagtcgca

SEQ ID NO: 156331 - DNA, 55 bp, Artificial
  Synthetic oligonucleotide
gcgctttccgtccgcgattccgtcccggttctcacaatgcagcaacacgacaacg

SEQ ID NO: 156332 - DNA, 52 bp, Artificial
  Synthetic oligonucleotide
cggcgtaactcattgatttaacgcgggaaaaatggcctcgttgggccttttc

SEQ ID NO: 156333 - DNA, 55 bp, Artificial
  Synthetic oligonucleotide
gcggaacgagtcatatcttatgctcctacctaccgattaacgcttgtgacggcgt

SEQ ID NO: 156334 - DNA, 55 bp, Artificial
  Synthetic oligonucleotide
gcgaatcaacgacatgcggtgctccggtcacaggacagtgggctgccggcattct

SEQ ID NO: 156335 - DNA, 55 bp, Artificial
  Synthetic oligonucleotide
gcgacactccttatttccgttggctcctggccgttcctgcgccttacgtggagct

SEQ ID NO: 156336 - DNA, 55 bp, Artificial
  Synthetic oligonucleotide
gcgacaggccgaagtattcccgaggctcgaatgttgccgccgcgtgtcgattgtc

SEQ ID NO: 156337 - DNA, 55 bp, Artificial
  Synthetic oligonucleotide
gcgaccatacccgctaacgtgacagcgccccttggcgtactcgcatagctacctc

SEQ ID NO: 156338 - DNA, 55 bp, Artificial
  Synthetic oligonucleotide
gcgacccattgaaggacttccatcgcgtagcacacgcgccttagcaacagagcgg

SEQ ID NO: 156339 - DNA, 54 bp, Artificial
  Synthetic oligonucleotide
gcgacgaaaacatgtcggttttcatgggtgttcggtagggagcggcgagagggt

SEQ ID NO: 156340 - DNA, 55 bp, Artificial
  Synthetic oligonucleotide
gcgacgccgccaatgaaaatgatccatccgaccagatagatgagtagggtcatcg

SEQ ID NO: 156341 - DNA, 55 bp, Artificial
  Synthetic oligonucleotide
gcgacgggacacaggttgggttggcgctcgcaatccactaggacgcgtgattcgt

SEQ ID NO: 156342 - DNA, 55 bp, Artificial
  Synthetic oligonucleotide
gcgactggtgtaacggaatgttgccgggttgcgctccgacgaacaacgatgcgca

SEQ ID NO: 156343 - DNA, 60 bp, Artificial
  Synthetic oligonucleotide
gctcgccaatcgagcctgccgcgtacggtacccattctttcgcaggggtcatatccttgc

SEQ ID NO: 156344 - DNA, 55 bp, Artificial
  Synthetic oligonucleotide
gcgagacgaaccgagagcttactccccattccgggaaaggtctcagaacaaagtg

SEQ ID NO: 156345 - DNA, 55 bp, Artificial
  Synthetic oligonucleotide
gcgagagagaccattatgctgaacgtctttgtctacggaacactgcgcgcgaatg

SEQ ID NO: 156346 - DNA, 55 bp, Artificial
  Synthetic oligonucleotide
gcgagccccgtctatcgggcatcttataccgggctgtttaagcatctgttcgacc

SEQ ID NO: 156347 - DNA, 55 bp, Artificial
  Synthetic oligonucleotide
gcgaggccgtgatagcgccgccctcgaattttcgccaacacgatcgggttgtatg

SEQ ID NO: 156348 - DNA, 55 bp, Artificial
  Synthetic oligonucleotide
gcgagtagctttcggaagtggcacaggcgacgcgtacgtctgatcggcagaaatt

SEQ ID NO: 156349 - DNA, 55 bp, Artificial
  Synthetic oligonucleotide
gcgagtcagcgctgcacatggataatccgccagagtcttgcatcctcacctggac

SEQ ID NO: 156350 - DNA, 55 bp, Artificial
  Synthetic oligonucleotide
gcgatcgaccgtccgaccgtatgcctaccgtcgtcaaatgtcctacctgcggtaa

SEQ ID NO: 156351 - DNA, 55 bp, Artificial
  Synthetic oligonucleotide
gcgatcgcaacaatggctcgattagcacctcgtctggcttttaacgcgagcgccc

SEQ ID NO: 156352 - DNA, 55 bp, Artificial
  Synthetic oligonucleotide
gcgattcctttcgcgaacgtgatgatgtccggtttcaacccgtagcgcgtcgagc

SEQ ID NO: 156353 - DNA, 55 bp, Artificial
  Synthetic oligonucleotide
gcgattcgtgttcatttgcggaccccgcgccgactcaaggagatttccatgcgca

SEQ ID NO: 156354 - DNA, 59 bp, Artificial
  Synthetic oligonucleotide
gctcgctccagggtgaaaaaagcgtggtgggtgtgagcaaatggtaggagttcggcaga

SEQ ID NO: 156355 - DNA, 55 bp, Artificial
  Synthetic oligonucleotide
gcgcaacccatgaaatccttgattccgcaacaatcgcaaaagctcgtgcgtcaca

SEQ ID NO: 156356 - DNA, 55 bp, Artificial
  Synthetic oligonucleotide
gcgcaagcgtcaatcactgagcgcgacatctatagcagcggcatgagcctcagag

SEQ ID NO: 156357 - DNA, 55 bp, Artificial
  Synthetic oligonucleotide
gcgcaatcgaacaacacccgtggacgaaacgacttggagcacgcccgagacggat

SEQ ID NO: 156358 - DNA, 55 bp, Artificial
  Synthetic oligonucleotide
gcgcacaacgatcaagcccgccccgctcaattcaatactgagcctggtccgtcgg

SEQ ID NO: 156359 - DNA, 55 bp, Artificial
  Synthetic oligonucleotide
gcgcacatcgctcgcacgcacggcgcaatacacagggattctcgatggacaccaa

SEQ ID NO: 156360 - DNA, 55 bp, Artificial
  Synthetic oligonucleotide
gcgcacgaacatgaacctttcgccgcgattagtattacggcatattacccacaca

SEQ ID NO: 156361 - DNA, 55 bp, Artificial
  Synthetic oligonucleotide
gcgcacgccatagcaactccctcaactcgccaactatgttgacgtgcgccctcga

SEQ ID NO: 156362 - DNA, 55 bp, Artificial
  Synthetic oligonucleotide
ggggatgcaagctgctcgcgtcgagaaaatgccagacgtacagttgatgagccca

SEQ ID NO: 156363 - DNA, 55 bp, Artificial
  Synthetic oligonucleotide
ggggcaggtcatcgctatgagcacttccgcaaaggtcttgcgttgcgctctgcgc

SEQ ID NO: 156364 - DNA, 54 bp, Artificial
  Synthetic oligonucleotide
ggggcctgtaaaagtggtgcaagcacctggcgaagttcgttcggtgtccctacg

SEQ ID NO: 156365 - DNA, 58 bp, Artificial
  Synthetic oligonucleotide
atcccgcgcgattgcgcgtgggcctggccgttcgggtcgcctggatctcgctccccga

SEQ ID NO: 156366 - DNA, 55 bp, Artificial
  Synthetic oligonucleotide
ggggcgtcgcgcgcccattgaacggacagcttatgttttaatccgcggtcgcctt

SEQ ID NO: 156367 - DNA, 55 bp, Artificial
  Synthetic oligonucleotide
ggggcttctattcaacgtttgcgcgaaaggggtgctcactagaatgcaaggcgta

SEQ ID NO: 156368 - DNA, 54 bp, Artificial
  Synthetic oligonucleotide
ggggtatgcaccaagtgagttaaacggttaaccgacgtacattcgctccgacac

SEQ ID NO: 156369 - DNA, 55 bp, Artificial
  Synthetic oligonucleotide
ggggtatgtacttacggtcggcgctccatagacaaatggacgtgagaatcctgag

SEQ ID NO: 156370 - DNA, 55 bp, Artificial
  Synthetic oligonucleotide
gggtagcaaatgaaccgctatccgaggtcgaaccctctcgacacgttgctgggcc

SEQ ID NO: 156371 - DNA, 55 bp, Artificial
  Synthetic oligonucleotide
gggtattaagtgcgagcagttcacggaaccagtcgacaacaaccggcgcgagcgg

SEQ ID NO: 156372 - DNA, 55 bp, Artificial
  Synthetic oligonucleotide
gggtcaccctcattagccacttagcatgaacgtatcgcgtttccgaacccctccg

SEQ ID NO: 156373 - DNA, 55 bp, Artificial
  Synthetic oligonucleotide
gggtcgtaggggtcatacacctgtcgcgcatagctcgatccgtcgttcccatccg

SEQ ID NO: 156374 - DNA, 55 bp, Artificial
  Synthetic oligonucleotide
gggtctctcctcgattgggtagcgaaactgtagcgtccgaggttaaatgacggac

SEQ ID NO: 156375 - DNA, 55 bp, Artificial
  Synthetic oligonucleotide
gggtcttccgcaatttgtgtgacgacggcgaatttgcgtcgaggacccttgcccc

SEQ ID NO: 156376 - DNA, 57 bp, Artificial
  Synthetic oligonucleotide
actgtcgacgggcccaactaatcgagaggcgtttggcgtctatccggggtgctatgc

SEQ ID NO: 156377 - DNA, 55 bp, Artificial
  Synthetic oligonucleotide
gggtgagtcaacacgttgaggaagcgttgcataggacgttcaggttccggtgcga

SEQ ID NO: 156378 - DNA, 55 bp, Artificial
  Synthetic oligonucleotide
gggtgcaagcagcgcttagcaggcaacgagtgtttctatcggagaaagtcgtgcg

SEQ ID NO: 156379 - DNA, 55 bp, Artificial
  Synthetic oligonucleotide
gggtggatccgattacgccatcacgtcgcggtcacgcgtggttggtaaccgtgct

SEQ ID NO: 156380 - DNA, 55 bp, Artificial
  Synthetic oligonucleotide
gggtggcatccccgcttaccctgattacgacgcttcgctcctctgcaagcaccga

SEQ ID NO: 156381 - DNA, 55 bp, Artificial
  Synthetic oligonucleotide
gggtgtttctatgttcacgtctcgttttgccaccaaggccatcattggcacgtcc

SEQ ID NO: 156382 - DNA, 55 bp, Artificial
  Synthetic oligonucleotide
gggttcctgtctgtttgcgacttgcgacaatttgccgcgctatatgtacggatga

SEQ ID NO: 156383 - DNA, 53 bp, Artificial
  Synthetic oligonucleotide
gggtttacccctaatgttgcgttgcggtacagtcgcgcccacgatgttttacg

SEQ ID NO: 156384 - DNA, 55 bp, Artificial
  Synthetic oligonucleotide
gggttttatcccacaaataatggccggtctccgacaagctgcctacagcgtgacg

SEQ ID NO: 156385 - DNA, 55 bp, Artificial
  Synthetic oligonucleotide
ggtaaacgtgtgtgttgtgattcgtccggagatttgcgaaatcgtgctagcgagc

SEQ ID NO: 156386 - DNA, 55 bp, Artificial
  Synthetic oligonucleotide
ggtacatcgctgcagtactcgctgcagtggagagtttcccgctggagaatcttcg

SEQ ID NO: 156387 - DNA, 55 bp, Artificial
  Synthetic oligonucleotide
tgttgatttccaccgagtcttaacccaccgatttcatctaaatctgacccacccc

SEQ ID NO: 156388 - DNA, 55 bp, Artificial
  Synthetic oligonucleotide
ggtaccgaccgccgtcgagaattcagaagtcgtgtgtgcaagagcaccgattgca

SEQ ID NO: 156389 - DNA, 55 bp, Artificial
  Synthetic oligonucleotide
ggtcacgactttcgccttccttggggtcaatatgtttcttgccggcctgcactcc

SEQ ID NO: 156390 - DNA, 55 bp, Artificial
  Synthetic oligonucleotide
gggatcctctcggacgggatcctttcaacaggcacaatatcgaccatgtcgacca

SEQ ID NO: 156391 - DNA, 55 bp, Artificial
  Synthetic oligonucleotide
gggatggcatggcggtgtgcggcacggaaaagcgatcctgcgaatctagcacagg

SEQ ID NO: 156392 - DNA, 55 bp, Artificial
  Synthetic oligonucleotide
gggatgttcgctgcaccgtaccgagattcgaccggaaaattgaggtttgaggggc

SEQ ID NO: 156393 - DNA, 55 bp, Artificial
  Synthetic oligonucleotide
gggattaggccggcttcagatgatttcgctcaggtagagcgattccatcacgacc

SEQ ID NO: 156394 - DNA, 55 bp, Artificial
  Synthetic oligonucleotide
gggcaaaattgcggagccctttgtcgtcagagtagatgcaagtcgcaccacggct

SEQ ID NO: 156395 - DNA, 55 bp, Artificial
  Synthetic oligonucleotide
gggcacacccaatatgcaaccagatgcattattcgcggccggaaacgctgcctcc

SEQ ID NO: 156396 - DNA, 55 bp, Artificial
  Synthetic oligonucleotide
gggcacgatccatggcagtgttgactcctatccgggaaaaccccggcagactagc

SEQ ID NO: 156397 - DNA, 55 bp, Artificial
  Synthetic oligonucleotide
gggcagcccgaagtgttgcctttggagctacgaatcctaatcgacatgactcggc

SEQ ID NO: 156398 - DNA, 60 bp, Artificial
  Synthetic oligonucleotide
tgtctttccctagttgcgagaccgcaggtgcttgctcacaatcgccttgtaacaggcagc

SEQ ID NO: 156399 - DNA, 55 bp, Artificial
  Synthetic oligonucleotide
gggcatgagtaggcatggctcatagctgtagggtcaacctctattggaggggctg

SEQ ID NO: 156400 - DNA, 55 bp, Artificial
  Synthetic oligonucleotide
gggcattggaccgtgcagctcgcttccgtagctatcccaaggcggtgcgaacaga

SEQ ID NO: 156401 - DNA, 55 bp, Artificial
  Synthetic oligonucleotide
gggccattgcccatgtctggatcatcacaaccgcccattggatatgcagctaaga

SEQ ID NO: 156402 - DNA, 55 bp, Artificial
  Synthetic oligonucleotide
gggcctggtaggcttcgttcgcactgccaaatggccccacacgaacgcggtttac

SEQ ID NO: 156403 - DNA, 55 bp, Artificial
  Synthetic oligonucleotide
gggcgaatattaagggacgcaggaccgactggcaagcgatttcgcgaaataattc

SEQ ID NO: 156404 - DNA, 55 bp, Artificial
  Synthetic oligonucleotide
gggcgcacggcttctatccgatccggcgactcccggcatgggtaatgtgtagaag

SEQ ID NO: 156405 - DNA, 55 bp, Artificial
  Synthetic oligonucleotide
gggcgcccgtggctgactatcgctctggacgttgcaaccaggtgcgtgttgagtt

SEQ ID NO: 156406 - DNA, 55 bp, Artificial
  Synthetic oligonucleotide
gggcgctgcaacgttataagcaaccgtgccagaggccgccacgaatgagaggagc

SEQ ID NO: 156407 - DNA, 55 bp, Artificial
  Synthetic oligonucleotide
gggcggacgcattcctggcccatctgaaacgcttgcagtcgagtgatgtggcgca

SEQ ID NO: 156408 - DNA, 55 bp, Artificial
  Synthetic oligonucleotide
gggcgtgggaacgtgcaaaataggcattccgcttcatgattggctccaaagaaag

SEQ ID NO: 156409 - DNA, 54 bp, Artificial
  Synthetic oligonucleotide
gacgaagtcccatccgaacaggttcttgaacgagggtccggtggacgccttgtc

SEQ ID NO: 156410 - DNA, 55 bp, Artificial
  Synthetic oligonucleotide
gggcgttgtctcaagaaccatgtcccggattgttatagtgctggttcagcagcta

SEQ ID NO: 156411 - DNA, 55 bp, Artificial
  Synthetic oligonucleotide
gggctatgtccgatttcctggctgttccgtgcaacgcggtaccaaggagggtctg

SEQ ID NO: 156412 - DNA, 50 bp, Artificial
  Synthetic oligonucleotide
gggcttgggaacgtaaaacccctccgtgtgggaggggtctgtgtaacatt

SEQ ID NO: 156413 - DNA, 55 bp, Artificial
  Synthetic oligonucleotide
ggggaacggctgcatttgccggtcgtttagcttttcgagcgtgctcgtggtaacg

SEQ ID NO: 156414 - DNA, 54 bp, Artificial
  Synthetic oligonucleotide
ggggagcaacgcgctttacgataaggaaggagtaaacccgatccagtccattcg

SEQ ID NO: 156415 - DNA, 53 bp, Artificial
  Synthetic oligonucleotide
ggggatcggccggtggaagtccggcgaggttggtatgtcacaaccgggtacta

SEQ ID NO: 156416 - DNA, 55 bp, Artificial
  Synthetic oligonucleotide
ggttcgacgaatgtatgagctgatggcacagtcaagtagtgttcaggggcgcgag

SEQ ID NO: 156417 - DNA, 55 bp, Artificial
  Synthetic oligonucleotide
ggttcgatgcggctctgtaacaatacgggtcgcgacggtacgtgaaccggtttca

SEQ ID NO: 156418 - DNA, 55 bp, Artificial
  Synthetic oligonucleotide
ggttgcaaaagcgtaagagactgacatcgatctgctgcgtatccttcgctcacca

SEQ ID NO: 156419 - DNA, 55 bp, Artificial
  Synthetic oligonucleotide
ggttgctttgcagaccgacgaatgcctggcggttgaagatcgtgtttgctgcgct

SEQ ID NO: 156420 - DNA, 58 bp, Artificial
  Synthetic oligonucleotide
ctggtctgactcaaagtgtttcgtattgaacacatcgaaccgagttgatcttagtccg

SEQ ID NO: 156421 - DNA, 60 bp, Artificial
  Synthetic oligonucleotide
atccgcggctcggtctgcttgctgtctcgatccacgcggaattgggccatcgcacaagat

SEQ ID NO: 156422 - DNA, 55 bp, Artificial
  Synthetic oligonucleotide
ggttggctgtctgggagggccgtgcgctgctaggcttgtgactctgtcccggcaa

SEQ ID NO: 156423 - DNA, 55 bp, Artificial
  Synthetic oligonucleotide
ggttgtgcgggctacgcagctcagattctctggagggtttaagacatggtcgcag

SEQ ID NO: 156424 - DNA, 55 bp, Artificial
  Synthetic oligonucleotide
ggtttaagtgcagccggcatctacattcgtagattgtctgagcgggtgagcgtat

SEQ ID NO: 156425 - DNA, 55 bp, Artificial
  Synthetic oligonucleotide
ggtttgcccagccggcaccgtatgcataataagttccgccttgtgaggctgtgcc

SEQ ID NO: 156426 - DNA, 55 bp, Artificial
  Synthetic oligonucleotide
gtaaaacggggcctggcaacagcggtagtccacaacacgcaagctcgactcgtgg

SEQ ID NO: 156427 - DNA, 55 bp, Artificial
  Synthetic oligonucleotide
gtaagacgtacataggccattgcaaatggaacttccactccgcgtcgcatcaccg

SEQ ID NO: 156428 - DNA, 55 bp, Artificial
  Synthetic oligonucleotide
gtaagaggcacttccgaaaatcaacgtgaaaaggaattgcaggcgactctcgcac

SEQ ID NO: 156429 - DNA, 51 bp, Artificial
  Synthetic oligonucleotide
gtaaggcttacgatccgtccttcgacgtggggaataccctacgttttgact

SEQ ID NO: 156430 - DNA, 55 bp, Artificial
  Synthetic oligonucleotide
gtaagtagcgttactgtcagagttttcatatataggccatgcgatcaggcacttc

SEQ ID NO: 156431 - DNA, 55 bp, Artificial
  Synthetic oligonucleotide
gtacaaccggtccatgctatatgactgtcgcacatcggacctcgcaggagtctgc

SEQ ID NO: 156432 - DNA, 60 bp, Artificial
  Synthetic oligonucleotide
gctgatgtcaggccggtatcatagcgcctaagggcatcccccaatatgccgaataacggg

SEQ ID NO: 156433 - DNA, 55 bp, Artificial
  Synthetic oligonucleotide
gtacatggcgcaatactagcacctcggcgtaccgtgtcaataatatttcgatgtc

SEQ ID NO: 156434 - DNA, 55 bp, Artificial
  Synthetic oligonucleotide
gtaccactggccgagtcggtcgtctttgcccgatagtgcctcgataacggaccac

SEQ ID NO: 156435 - DNA, 55 bp, Artificial
  Synthetic oligonucleotide
gtaccggtgtttacggcagggcgcagctatcgttccgggcggagttaagagtcgc

SEQ ID NO: 156436 - DNA, 55 bp, Artificial
  Synthetic oligonucleotide
gtacgaaaatctcgatgttcatcaatcgtccagctggtacgctacagtagcgctc

SEQ ID NO: 156437 - DNA, 55 bp, Artificial
  Synthetic oligonucleotide
gtacgagaaaccgaactcccaatcgctctctgcgatctgcgcgagccgaatctcg

SEQ ID NO: 156438 - DNA, 55 bp, Artificial
  Synthetic oligonucleotide
gtacgagtgatccgaaaacggcggtccaactggaagcgctcgcagtaacaagggg

SEQ ID NO: 156439 - DNA, 55 bp, Artificial
  Synthetic oligonucleotide
gtacgctcgatcgcagcgaatggacgaactgccggctcaatcaggtgcatgcggt

SEQ ID NO: 156440 - DNA, 55 bp, Artificial
  Synthetic oligonucleotide
gtacggataggccatccctccccgggattgcaaatactgaacgaccacggcccca

SEQ ID NO: 156441 - DNA, 53 bp, Artificial
  Synthetic oligonucleotide
gtacggtcgtgcgaatcctagggagaaaactctaacttacgagcttgtttggt

SEQ ID NO: 156442 - DNA, 54 bp, Artificial
  Synthetic oligonucleotide
gtagccgtgctcgtgacccttgtcggtttcgtagttgttttggtaaccaacatc

SEQ ID NO: 156443 - DNA, 59 bp, Artificial
  Synthetic oligonucleotide
gtgattggcaaggcgatcaattcacacacgtcacccaaaaatcaacgtcggcattaccg

SEQ ID NO: 156444 - DNA, 55 bp, Artificial
  Synthetic oligonucleotide
ggtcagcttgacttcgacccaaccgcagggaatttattgctcaccgggcagagcc

SEQ ID NO: 156445 - DNA, 55 bp, Artificial
  Synthetic oligonucleotide
ggtcagggcgtcaaatgcgtgcgagatatgcgaacgatcgacgcagacaggcaca

SEQ ID NO: 156446 - DNA, 55 bp, Artificial
  Synthetic oligonucleotide
ggtcatcatggctcgcgtatgtcaagtaacgggtaagcgcccgatggttggaaac

SEQ ID NO: 156447 - DNA, 55 bp, Artificial
  Synthetic oligonucleotide
ggtcattggtcgcgatcgacaagagaagcggagtggtctatccagtgccgatcga

SEQ ID NO: 156448 - DNA, 55 bp, Artificial
  Synthetic oligonucleotide
ggtccggccgtgttgttattctgccaaccaaccccatccctgatatgctgccgtc

SEQ ID NO: 156449 - DNA, 55 bp, Artificial
  Synthetic oligonucleotide
ggtcgccacagaatcgcctggcatggtgaagatcgatgcgcccgggcatctcaca

SEQ ID NO: 156450 - DNA, 55 bp, Artificial
  Synthetic oligonucleotide
ggtcgctgctaatgaagaccttggtttgcagggaagatgtcatcgtaacgtgtcc

SEQ ID NO: 156451 - DNA, 55 bp, Artificial
  Synthetic oligonucleotide
ggtcgcttacgcgctctactggtaatgcgtgctgtacaccaatgcctagatcagt

SEQ ID NO: 156452 - DNA, 55 bp, Artificial
  Synthetic oligonucleotide
ggtcggcggattcccgttttcccgttgagtgatgtctcgttcgttgccggctgga

SEQ ID NO: 156453 - DNA, 55 bp, Artificial
  Synthetic oligonucleotide
ggtcgtaccactcggagcagtgatagaaggttgcgacaatgaaccactcgccgtt

SEQ ID NO: 156454 - DNA, 60 bp, Artificial
  Synthetic oligonucleotide
tgtatgccagtgcgtgtggtagtacgattgcatgtgtctccgcgtggggaagattaaggg

SEQ ID NO: 156455 - DNA, 55 bp, Artificial
  Synthetic oligonucleotide
ggtcgtggcaatcgatgcatccacatttaagatcgtagcccgcatcccaggcggc

SEQ ID NO: 156456 - DNA, 51 bp, Artificial
  Synthetic oligonucleotide
ggtcttcttaaaaccctggtcggcagtcgaaacgaccgcctcttaaaacag

SEQ ID NO: 156457 - DNA, 55 bp, Artificial
  Synthetic oligonucleotide
ggtgaccggcccagatatagggtgggcctcacagtgcgccgggctattaaacacg

SEQ ID NO: 156458 - DNA, 55 bp, Artificial
  Synthetic oligonucleotide
ggtgcatggtgaaccaatcgtctgatttatacatgcgtgagtaaccactcccgaa

SEQ ID NO: 156459 - DNA, 55 bp, Artificial
  Synthetic oligonucleotide
ggtgccgccaatctgggaaggagaagccgtgttcgccatgagaagcctgtatcgg

SEQ ID NO: 156460 - DNA, 55 bp, Artificial
  Synthetic oligonucleotide
ggtgcgctcttgggctgatagaacgtttgacccgtcagatagacgatcggcgctt

SEQ ID NO: 156461 - DNA, 55 bp, Artificial
  Synthetic oligonucleotide
ggtgctttgggctctgtcaaacatacggtttccgttaagtgtgtacaggttgacc

SEQ ID NO: 156462 - DNA, 55 bp, Artificial
  Synthetic oligonucleotide
ggtggacatcgatgactccgagtaggttctggttatgcacgcgcactgcgtagcc

SEQ ID NO: 156463 - DNA, 54 bp, Artificial
  Synthetic oligonucleotide
ggtggttcgctttcctgggaaggtccgattcaatcgggaaagcgtttgcaccgc

SEQ ID NO: 156464 - DNA, 55 bp, Artificial
  Synthetic oligonucleotide
ggtgtgtggctccccgagcgacttggtagaggaatgcaatggcggaggtgcggat

SEQ ID NO: 156465 - DNA, 57 bp, Artificial
  Synthetic oligonucleotide
tgtatcggcgtttcgccgtcaactaaagttgtatcccgatgcgcgatttcaactaat

SEQ ID NO: 156466 - DNA, 50 bp, Artificial
  Synthetic oligonucleotide
ggtgttcgtttgacttccgtttggttcggttgaattcgggcggaatccgg

SEQ ID NO: 156467 - DNA, 55 bp, Artificial
  Synthetic oligonucleotide
ggttaaaggatcagttgtcaggcgattatattcgggacaatcgttcggctcacgg

SEQ ID NO: 156468 - DNA, 55 bp, Artificial
  Synthetic oligonucleotide
ggttacttgcccaactttgttttccttgcccgctaatccaaagtcatacatgcgc

SEQ ID NO: 156469 - DNA, 55 bp, Artificial
  Synthetic oligonucleotide
ggttcactggtctacccgctctgatcgcttacttcgccgaaaactgaggttccgc

SEQ ID NO: 156470 - DNA, 55 bp, Artificial
  Synthetic oligonucleotide
ggttcagttcatcgcaatagccgaacgtgtaggccacctcgtccacgctacccac

SEQ ID NO: 156471 - DNA, 55 bp, Artificial
  Synthetic oligonucleotide
ggattgcttttgtcgtggagtccacatcgcgccgttgttccgatctgacggagaa

SEQ ID NO: 156472 - DNA, 55 bp, Artificial
  Synthetic oligonucleotide
ggcaacgtacgcgccctccgcatacacgtctgtgcgcttggataatgcgtagtcg

SEQ ID NO: 156473 - DNA, 55 bp, Artificial
  Synthetic oligonucleotide
ggcaacttgagcgcctgcccagcggataaggctgacgtagtcgctgcttttccga

SEQ ID NO: 156474 - DNA, 53 bp, Artificial
  Synthetic oligonucleotide
ggcaccagttccttcggaaaagtccccggtaacgagaatgaaaccaatcgcaa

SEQ ID NO: 156475 - DNA, 55 bp, Artificial
  Synthetic oligonucleotide
ggcactgaaacgtgcggagttggatatgccggtagttgcattgtccgttcagcgg

SEQ ID NO: 156476 - DNA, 59 bp, Artificial
  Synthetic oligonucleotide
gacccccccggctatgcctaatgagaccccccttgctggcaaattcatgcctaatcaga

SEQ ID NO: 156477 - DNA, 55 bp, Artificial
  Synthetic oligonucleotide
ggcactgtcgtctactttctcgcctcgtttgttggctagcgattcggtagggccc

SEQ ID NO: 156478 - DNA, 55 bp, Artificial
  Synthetic oligonucleotide
ggcagaccactagggtagccgccgcccgtgctaatccagtcaggttcatgcatgg

SEQ ID NO: 156479 - DNA, 55 bp, Artificial
  Synthetic oligonucleotide
ggcagacgtgggagcgctgggaagcgtgccttccgattttctcgagtatccggga

SEQ ID NO: 156480 - DNA, 55 bp, Artificial
  Synthetic oligonucleotide
ggcaggagagctgtccatctggttattggtgaggagcgaatgagacatcgggcac

SEQ ID NO: 156481 - DNA, 54 bp, Artificial
  Synthetic oligonucleotide
ggcagtagaaagcacggcaggtcccgttaagagagaaatcgacggaaaaccgtg

SEQ ID NO: 156482 - DNA, 55 bp, Artificial
  Synthetic oligonucleotide
ggcagtccgtaacgaacttgacctcggtcgagcattgagtcgcgcgaagcatggg

SEQ ID NO: 156483 - DNA, 55 bp, Artificial
  Synthetic oligonucleotide
ggcatcagtgtattcggttaccccgccactctggagccactatcgactgctaaac

SEQ ID NO: 156484 - DNA, 55 bp, Artificial
  Synthetic oligonucleotide
ggcatcgcgggcaagaggatgaggggtagcaatcagtgctcctgtgctggttgga

SEQ ID NO: 156485 - DNA, 55 bp, Artificial
  Synthetic oligonucleotide
ggcatctttgctcgtgaattgcccgtcatgacctagctcggtagagatagtggcg

SEQ ID NO: 156486 - DNA, 55 bp, Artificial
  Synthetic oligonucleotide
ggccacgctatcggtgcggttgcgagtctcaatgtggagtctctaagggctctcg

SEQ ID NO: 156487 - DNA, 60 bp, Artificial
  Synthetic oligonucleotide
ccctattctcttccgccagtacttcgcggagatgtagcaagcccaggcatattgccgtct

SEQ ID NO: 156488 - DNA, 55 bp, Artificial
  Synthetic oligonucleotide
ggcccagccgagctacgcctatctacggggtgaagaatatatttcgccgggttgg

SEQ ID NO: 156489 - DNA, 55 bp, Artificial
  Synthetic oligonucleotide
ggccctgaaagagtggtcgattgagcaagaccccaccttcgtacaatttctagcc

SEQ ID NO: 156490 - DNA, 55 bp, Artificial
  Synthetic oligonucleotide
ggcccttttgcgggcacgtgcggatgtacccacacttgcgtgaactgcagcttcc

SEQ ID NO: 156491 - DNA, 55 bp, Artificial
  Synthetic oligonucleotide
ggccgcaaattgaagacgcatgcggaattctcgcccgttagcatgaactcaccgc

SEQ ID NO: 156492 - DNA, 55 bp, Artificial
  Synthetic oligonucleotide
ggccgcaccttgcttcgcgcttgtgaacatctctctcgccaagccgggtgtgttc

SEQ ID NO: 156493 - DNA, 55 bp, Artificial
  Synthetic oligonucleotide
ggccgcccaactttgctccccggtccaatgagaagagtccagttgcagtgcgagg

SEQ ID NO: 156494 - DNA, 55 bp, Artificial
  Synthetic oligonucleotide
ggccgcttgttctgagggattacccctaatcggccacttttcactctcctggtac

SEQ ID NO: 156495 - DNA, 55 bp, Artificial
  Synthetic oligonucleotide
ggcctcataccatgaactcgcgaaaatcacttacacggagccacgatgaacctgc

SEQ ID NO: 156496 - DNA, 55 bp, Artificial
  Synthetic oligonucleotide
ggcctgcacgaaaagattcaacgcggtcccacccttcatggcgaacaggggcgta

SEQ ID NO: 156497 - DNA, 55 bp, Artificial
  Synthetic oligonucleotide
ggacggcagcactcaataatagtacggccgttcgattttctttcggtcacattag

SEQ ID NO: 156498 - DNA, 60 bp, Artificial
  Synthetic oligonucleotide
atcgcaacgggcggctacagatcgtatccgagcaaacataacgtagggcgctgagcaagt

SEQ ID NO: 156499 - DNA, 55 bp, Artificial
  Synthetic oligonucleotide
ggactcgagtgtccgattggcgacaagtcgtgacattttggcgtgagacaggcag

SEQ ID NO: 156500 - DNA, 55 bp, Artificial
  Synthetic oligonucleotide
ggagataccgtctcgcccgtcaagcgattgcgacgtagttcgcccgataaggctg

SEQ ID NO: 156501 - DNA, 55 bp, Artificial
  Synthetic oligonucleotide
ggagcaaaacttcacgacgacagcgccgaatcacgtctggactagcgacatcacg

SEQ ID NO: 156502 - DNA, 55 bp, Artificial
  Synthetic oligonucleotide
ggagcgaaccaggagatgacatccatgcaggtgcgtagcgatttctatatcgacg

SEQ ID NO: 156503 - DNA, 55 bp, Artificial
  Synthetic oligonucleotide
ggagcgacgaatcacatcttggctagtaagaggtcatacacagccagcacccgct

SEQ ID NO: 156504 - DNA, 55 bp, Artificial
  Synthetic oligonucleotide
ggaggacactttccgtatgacactccatgcaactctacgccaccctatgcaacgt

SEQ ID NO: 156505 - DNA, 55 bp, Artificial
  Synthetic oligonucleotide
ggaggacgcttcacgaacctccgacgcagtatgttcagcgtaatgtgcgtgggcg

SEQ ID NO: 156506 - DNA, 55 bp, Artificial
  Synthetic oligonucleotide
ggagtgtactatttcgcgccagtcaagaccaacatataacgcgccaattctcgcg

SEQ ID NO: 156507 - DNA, 52 bp, Artificial
  Synthetic oligonucleotide
ggagttgagaggaaatacttcgtaacgggtccttttgttcgggataccgcta

SEQ ID NO: 156508 - DNA, 55 bp, Artificial
  Synthetic oligonucleotide
ggatagtagtcctgcaatgtgcgtacatggaatacacgtacacgccgtgggatgg

SEQ ID NO: 156509 - DNA, 60 bp, Artificial
  Synthetic oligonucleotide
tggtgagcttcctggctgtgcgcaagcaattctgattctggcccggacagcgattttgct

SEQ ID NO: 156510 - DNA, 55 bp, Artificial
  Synthetic oligonucleotide
ggatccaaccgattcggcaacatctgcccgatccccggtcaacatcgcttgccgt

SEQ ID NO: 156511 - DNA, 55 bp, Artificial
  Synthetic oligonucleotide
ggatcccttatcccgattcaaatcgcggagggttgacgcacgtcaattgttcgcg

SEQ ID NO: 156512 - DNA, 55 bp, Artificial
  Synthetic oligonucleotide
ggatcgggtttcactcgtttgttgcgcttcgctacggtcattgttgctcctagat

SEQ ID NO: 156513 - DNA, 55 bp, Artificial
  Synthetic oligonucleotide
ggatctgaataatggaacccgcaacgcggcaactgatttacgtttcgcgagagcc

SEQ ID NO: 156514 - DNA, 55 bp, Artificial
  Synthetic oligonucleotide
ggatgaccgaattttacggcattcactcttgaaatggaagtccgttcatcctcgc

SEQ ID NO: 156515 - DNA, 55 bp, Artificial
  Synthetic oligonucleotide
ggatgacttgtgttagcgactcttagatgaaatcggtgggttaagactcggtgga

SEQ ID NO: 156516 - DNA, 55 bp, Artificial
  Synthetic oligonucleotide
ggatgcctgcagcagatcgttgtactcgatgtgctcgcgcgtatgcatcgcttcc

SEQ ID NO: 156517 - DNA, 55 bp, Artificial
  Synthetic oligonucleotide
ggatgcgaagcatctgtgaccgccgtcgatagagcacgcgatgacactgtactga

SEQ ID NO: 156518 - DNA, 55 bp, Artificial
  Synthetic oligonucleotide
ggatgtacgcatcacccgtctccagtattattggacgcttgagtaccttacaaac

SEQ ID NO: 156519 - DNA, 55 bp, Artificial
  Synthetic oligonucleotide
ggatgtcaacacaacgcgactgcccacttccgaggcgatgcgtcaccaaggaccc

SEQ ID NO: 156520 - DNA, 60 bp, Artificial
  Synthetic oligonucleotide
gacatttcagcgatatggccacacagtcaagctgatgtcgcctaaacttgtggctcctta

SEQ ID NO: 156521 - DNA, 55 bp, Artificial
  Synthetic oligonucleotide
ggatgtcttcaccgcacgctacgtgtcgacgacctttcgtcatacggaccgcggg

SEQ ID NO: 156522 - DNA, 55 bp, Artificial
  Synthetic oligonucleotide
ggatgtcttgcgatcgcatgcactccgaaatgatcccttccgccggatggtggta

SEQ ID NO: 156523 - DNA, 55 bp, Artificial
  Synthetic oligonucleotide
ggattcaaaccgcctatggtgaatcgggcgatcagtccagttcaagaatcgggac

SEQ ID NO: 156524 - DNA, 55 bp, Artificial
  Synthetic oligonucleotide
ggattcgaatgcatggcggtcggttctccggatcggttgcggacgcaatggattg

SEQ ID NO: 156525 - DNA, 55 bp, Artificial
  Synthetic oligonucleotide
ggctcggcagtcgccattgtcttcgccgtcatacaggtatcgcaattttcggcag

SEQ ID NO: 156526 - DNA, 55 bp, Artificial
  Synthetic oligonucleotide
ggctcgtgcgggcaacaattatggcgttgccctcgaagtcagtaaaggcgcctgg

SEQ ID NO: 156527 - DNA, 55 bp, Artificial
  Synthetic oligonucleotide
ggctcgttggattcgggattggcgtacggtgcgggaactcgcgtcggaatcagac

SEQ ID NO: 156528 - DNA, 55 bp, Artificial
  Synthetic oligonucleotide
ggctctgtcaaacatacggtttccgttaagtgtgtacaggttgaccgaagtggcc

SEQ ID NO: 156529 - DNA, 55 bp, Artificial
  Synthetic oligonucleotide
ggctgacgcttgccattcaacgtatagcggaagcgccagatcttggtgccggtcg

SEQ ID NO: 156530 - DNA, 55 bp, Artificial
  Synthetic oligonucleotide
ggctgagccactgcctatatggaaaatcttggccgcagggttagtgatcactggc

SEQ ID NO: 156531 - DNA, 60 bp, Artificial
  Synthetic oligonucleotide
attatgtgattgcgagccgcgtatccgctcacgatggcgtactaggcgagtttctttatg

SEQ ID NO: 156532 - DNA, 57 bp, Artificial
  Synthetic oligonucleotide
tggtaggcgttcccgccctagtaaactatatgcaaacaatgcaggacaccggaacca

SEQ ID NO: 156533 - DNA, 55 bp, Artificial
  Synthetic oligonucleotide
ggctgccccgtcgctaaacggcagtgacgttgtgcgtgtgttgcaagccatcgtg

SEQ ID NO: 156534 - DNA, 55 bp, Artificial
  Synthetic oligonucleotide
ggctgcgaaggttggccgcgtccgtcgttgcgagagctttgtgggcaaataccgt

SEQ ID NO: 156535 - DNA, 55 bp, Artificial
  Synthetic oligonucleotide
ggctggactctcgacaatgagcttatcctttactgcgagcgacagtgcgctgcgc

SEQ ID NO: 156536 - DNA, 55 bp, Artificial
  Synthetic oligonucleotide
ggctgttctgtgcccagggctaaatcaagcagtcgcacgatgcctgagtagatcg

SEQ ID NO: 156537 - DNA, 55 bp, Artificial
  Synthetic oligonucleotide
ggctgttgaaaagccggcttgggaggtgcgttcatgttgcattcagaagtgctca

SEQ ID NO: 156538 - DNA, 55 bp, Artificial
  Synthetic oligonucleotide
ggcttactgataggcacaagactatcccttattttaagagagtcctcgtgtcctc

SEQ ID NO: 156539 - DNA, 55 bp, Artificial
  Synthetic oligonucleotide
ggcttccggcggtggactaacggggcaagaggcgctagtctgcgatgatcgcttg

SEQ ID NO: 156540 - DNA, 55 bp, Artificial
  Synthetic oligonucleotide
ggcttgcatcggacgcggccctccgtcgtgaatgaacgtggtgcgtggatcgtat

SEQ ID NO: 156541 - DNA, 55 bp, Artificial
  Synthetic oligonucleotide
ggcttgcgccgtcggtaaagatccggatagctaagtgttatcgccgcgtctactg

SEQ ID NO: 156542 - DNA, 54 bp, Artificial
  Synthetic oligonucleotide
gggaaagtcggtaaattcgggagccatgatggtaccgtgtcggggccggactgc

SEQ ID NO: 156543 - DNA, 60 bp, Artificial
  Synthetic oligonucleotide
gtgagttttttgccacgcaggatcagtgcacccacggagagtggtcgctggccgaaggtg

SEQ ID NO: 156544 - DNA, 55 bp, Artificial
  Synthetic oligonucleotide
gggaaggctccacagtccttaagccaagaggtcgcccttgcattcctggtcgcgc

SEQ ID NO: 156545 - DNA, 55 bp, Artificial
  Synthetic oligonucleotide
gggacacgaaacgacgattcacgcgaaacactcgaggagccgaaagcgtgcatcg

SEQ ID NO: 156546 - DNA, 55 bp, Artificial
  Synthetic oligonucleotide
gggacacgtgcagagtcttaagctcggataaatgcatacggagaacccgcaggag

SEQ ID NO: 156547 - DNA, 55 bp, Artificial
  Synthetic oligonucleotide
gggacgacggcatatcagaaaacccgctccgatcagttccactccttgtcgcccc

SEQ ID NO: 156548 - DNA, 55 bp, Artificial
  Synthetic oligonucleotide
gggacgggcagttctcgtttgagaggattgtgcactaaggctgttgctgggcttc

SEQ ID NO: 156549 - DNA, 55 bp, Artificial
  Synthetic oligonucleotide
gggagcccgcgatgtatctcgtgtatgtccgcagcgtatcggaatgtatctggcg

SEQ ID NO: 156550 - DNA, 55 bp, Artificial
  Synthetic oligonucleotide
gggagcctccgtatcgagttgcgtccacccttcagtttaggcgatgaaacgcggg

SEQ ID NO: 156551 - DNA, 55 bp, Artificial
  Synthetic oligonucleotide
gggagggatcgcaggcaagctgtttcatctcgcagttcatgggtacctcctttca

SEQ ID NO: 156552 - DNA, 55 bp, Artificial
  Synthetic oligonucleotide
gggagggcacagcagctatcactcgagcggcacgggtgagcattacgtcagtggt

SEQ ID NO: 156553 - DNA, 55 bp, Artificial
  Synthetic oligonucleotide
ggcctgctttacggtgtgcgcccctccggaatccaaatcgggtatggtccagcga

SEQ ID NO: 156554 - DNA, 58 bp, Artificial
  Synthetic oligonucleotide
actcgcatcgggaggggctagattgccgaaaggccgccgtggactgatctcggtccga

SEQ ID NO: 156555 - DNA, 55 bp, Artificial
  Synthetic oligonucleotide
ggcctgtgctgaaggattacaacgcgaaccttgtctgcgaacatccttgggcgga

SEQ ID NO: 156556 - DNA, 55 bp, Artificial
  Synthetic oligonucleotide
ggccttgcctcgcgtcatagtggtccagtccggtaagcgtggaatcaatcccggc

SEQ ID NO: 156557 - DNA, 55 bp, Artificial
  Synthetic oligonucleotide
ggcctttagcccgatattcttgagatccgtcggattggtcatggctaggcgtccc

SEQ ID NO: 156558 - DNA, 55 bp, Artificial
  Synthetic oligonucleotide
ggcgaaactttcaacacccaatcgcacgactgtgtacgtcgctccgtgtctcacg

SEQ ID NO: 156559 - DNA, 55 bp, Artificial
  Synthetic oligonucleotide
ggcgaaagctcagttcccggacgtctaattcgcggtcaaagccgctatacgagcg

SEQ ID NO: 156560 - DNA, 55 bp, Artificial
  Synthetic oligonucleotide
ggcgaaaggtagtcgtttatgggcatcagttcggcgctcgggatggtatccaagg

SEQ ID NO: 156561 - DNA, 55 bp, Artificial
  Synthetic oligonucleotide
ggcgaaccatggacccagtatgcgaaagcagccgtgcgtgatcgtgatagcgaga

SEQ ID NO: 156562 - DNA, 55 bp, Artificial
  Synthetic oligonucleotide
ggcgaattgtcgctgaacgatagcgtggctttaacatcagacggagtcatggcac

SEQ ID NO: 156563 - DNA, 55 bp, Artificial
  Synthetic oligonucleotide
ggcgagattgagtccttttcccgtgatggtctaagccggaaagtctgtagggagg

SEQ ID NO: 156564 - DNA, 55 bp, Artificial
  Synthetic oligonucleotide
ggcgcaaactggcatagtcatccgtgctgggatccgcttggtataattggacggc

SEQ ID NO: 156565 - DNA, 51 bp, Artificial
  Synthetic oligonucleotide
tccaaacagggtggggaattttacttcgacacttctggggaaattacgtcc

SEQ ID NO: 156566 - DNA, 55 bp, Artificial
  Synthetic oligonucleotide
ggcgcaagccggaatctaaacgcaatgtggtataagccgaagaaccacttgttcg

SEQ ID NO: 156567 - DNA, 55 bp, Artificial
  Synthetic oligonucleotide
ggcgcaagtgtagcagcgcgtcaccctctaatagaccagggatagaccagcggcc

SEQ ID NO: 156568 - DNA, 55 bp, Artificial
  Synthetic oligonucleotide
ggcgcgcgcggataaatgcctataatcggacatcactattagcgccggccgaaca

SEQ ID NO: 156569 - DNA, 55 bp, Artificial
  Synthetic oligonucleotide
ggcgcgttaggctgcgtccgatttgtgggtgcaccgtgaacgttaatgcggtgct

SEQ ID NO: 156570 - DNA, 55 bp, Artificial
  Synthetic oligonucleotide
ggcgcttccaagtgaatcccatgtcgactacaccgaactctcaagccggtcatgc

SEQ ID NO: 156571 - DNA, 55 bp, Artificial
  Synthetic oligonucleotide
ggcgggagtcaagtcgtggctctttcgttacatgcggaatggcaaagcgcgcggg

SEQ ID NO: 156572 - DNA, 55 bp, Artificial
  Synthetic oligonucleotide
ggcgggtcgtctgccttgatcggcatagggtgagcttcttcgggatacgtttcac

SEQ ID NO: 156573 - DNA, 55 bp, Artificial
  Synthetic oligonucleotide
ggcgtcattgacgttgcatctgggtcgtgcctggatacgttcgttcctagggctg

SEQ ID NO: 156574 - DNA, 55 bp, Artificial
  Synthetic oligonucleotide
ggcgtgatacgatggggccttgcgtcgatttgatttcagcttgcggacgcggggc

SEQ ID NO: 156575 - DNA, 55 bp, Artificial
  Synthetic oligonucleotide
ggcgtgctcattatgacgactgcgtttaaaaccaaacaagctcgtaagttagagt

SEQ ID NO: 156576 - DNA, 59 bp, Artificial
  Synthetic oligonucleotide
gacacacgcgtttcccgtgcccgtgcagttgtagacctactcgatgtgcccctcattct

SEQ ID NO: 156577 - DNA, 55 bp, Artificial
  Synthetic oligonucleotide
ggctaagtgcgggtacgcgatatgaccctgtatgccacgcacggttaacgtgcca

SEQ ID NO: 156578 - DNA, 55 bp, Artificial
  Synthetic oligonucleotide
ggctcacagaacagacgagtgccgtaaacagacgcaagatactcaaacactgcgc

SEQ ID NO: 156579 - DNA, 55 bp, Artificial
  Synthetic oligonucleotide
ggctcagcatagtccgcgcggatacatccgggtggcattggggtcccttggatca

SEQ ID NO: 156580 - DNA, 55 bp, Artificial
  Synthetic oligonucleotide
ggctcatagccgtcccagtgatagatcatggagacgtatttgtttggatcgtccc

SEQ ID NO: 156581 - DNA, 55 bp, Artificial
  Synthetic oligonucleotide
ggctcggaagacgcgaggcgacgaagatagcgcaacgcctgaacgagacgttctc

SEQ ID NO: 156582 - DNA, 55 bp, Artificial
  Synthetic oligonucleotide
agcccagcttaaatgaccgttagacatttgggctgagtacgggcaacgggcagag

SEQ ID NO: 156583 - DNA, 55 bp, Artificial
  Synthetic oligonucleotide
cagtgtggtttcatcgaacgaggagcccatgagtcttttcaagaccgtacgaccg

SEQ ID NO: 156584 - DNA, 55 bp, Artificial
  Synthetic oligonucleotide
cagtgcggttgcgccgcctaatccatgtatacccctaactagtccgaatattggg

SEQ ID NO: 156585 - DNA, 55 bp, Artificial
  Synthetic oligonucleotide
cagtgcaagggtttcgtgagctgtagtcatcagtgtcggccgtatccggaaacga

SEQ ID NO: 156586 - DNA, 55 bp, Artificial
  Synthetic oligonucleotide
agccctgttcgatagcgcattcgcagaacgcccagatgagcactagcgcacaagt

SEQ ID NO: 156587 - DNA, 60 bp, Artificial
  Synthetic oligonucleotide
acacagcagctaatctgtcctagtgagcccgaaaaatgtcccagttggccaagcaagaag

SEQ ID NO: 156588 - DNA, 55 bp, Artificial
  Synthetic oligonucleotide
agcctgaccagtacggtaaagtctgaacgtagccagactagaccgtgcagtttgt

SEQ ID NO: 156589 - DNA, 55 bp, Artificial
  Synthetic oligonucleotide
cagtctgctctattcgtcgctatgcggttcgacgtctgtctcctacagcggcgga

SEQ ID NO: 156590 - DNA, 55 bp, Artificial
  Synthetic oligonucleotide
cagtcgtcgcaaggacgaccatagcaatcgagagtaaacgggtaacatgcgatcc

SEQ ID NO: 156591 - DNA, 55 bp, Artificial
  Synthetic oligonucleotide
cagtcggattgagcgtaggaatggacatgtcaatcgatctcacttctgttgggga

SEQ ID NO: 156592 - DNA, 55 bp, Artificial
  Synthetic oligonucleotide
cagtcgccacagtcgctcccatactcttttcgttcgcccggaggtgaaggtcccc

SEQ ID NO: 156593 - DNA, 55 bp, Artificial
  Synthetic oligonucleotide
agcgattccgttgcccgcgggttgcgtctcgcgtctgcaaacctatcgacggttg

SEQ ID NO: 156594 - DNA, 55 bp, Artificial
  Synthetic oligonucleotide
agcgcgtggcaggaaggcccaatacgctgcgcttctctgaggcaccattgggtgt

SEQ ID NO: 156595 - DNA, 54 bp, Artificial
  Synthetic oligonucleotide
agcggggtaggtggacgacttataattccgcttctccaattttcccgatgcctc

SEQ ID NO: 156596 - DNA, 55 bp, Artificial
  Synthetic oligonucleotide
agcgtgagtgcgtctgataccggatcgccgcttacctcgcaggtaacgttcgcgc

SEQ ID NO: 156597 - DNA, 54 bp, Artificial
  Synthetic oligonucleotide
cagtacaacggctatgccgttcaaccctcggcccatcgtttgcccgacggtagt

SEQ ID NO: 156598 - DNA, 60 bp, Artificial
  Synthetic oligonucleotide
gttctcgcatggcgcactcagtgagattgagtaccgggagagtctcgggctgacgacata

SEQ ID NO: 156599 - DNA, 55 bp, Artificial
  Synthetic oligonucleotide
cagtaaaccatcgtattgtacaataactcgctaatcgctaagacgccagtcgggc

SEQ ID NO: 156600 - DNA, 55 bp, Artificial
  Synthetic oligonucleotide
agcgttaaacgctctggcagtgggctggttcaatacaagtagacgcgcggagagg

SEQ ID NO: 156601 - DNA, 55 bp, Artificial
  Synthetic oligonucleotide
catcaaagtacgcgatcttcccatcaacggatccctcaaggaagtctctttgcct

SEQ ID NO: 156602 - DNA, 55 bp, Artificial
  Synthetic oligonucleotide
catattcgcgccttcgcgttcagggcgtggcgtgccgcgacggatacgattggca

SEQ ID NO: 156603 - DNA, 55 bp, Artificial
  Synthetic oligonucleotide
catatcgtgctgttttgggacaccgattaccatctcatcgcacgctagttgctcg

SEQ ID NO: 156604 - DNA, 55 bp, Artificial
  Synthetic oligonucleotide
catagtcaacgctgtagctgccgctatgcccgaatacgcattgcgcgacactccg

SEQ ID NO: 156605 - DNA, 55 bp, Artificial
  Synthetic oligonucleotide
catagagttgtcgccatgcgttcctttccgaacaccctccgaattacctccggcc

SEQ ID NO: 156606 - DNA, 55 bp, Artificial
  Synthetic oligonucleotide
agcacaccgaatggagaatcatttgcaagtgacggccgaacgtagctgcaccgcg

SEQ ID NO: 156607 - DNA, 55 bp, Artificial
  Synthetic oligonucleotide
agcaccgtgagtccaatgcccgtacgtatgcgcgctcgatcactcgcgtcctcac

SEQ ID NO: 156608 - DNA, 55 bp, Artificial
  Synthetic oligonucleotide
catacccatgtgcgtcatacagcgccctggaccaaccgtcgggacgatttccgtg

SEQ ID NO: 156609 - DNA, 59 bp, Artificial
  Synthetic oligonucleotide
gagtaacggacaacctttgggctgcatatccgtgtgcctccaggctaagggcgattcta

SEQ ID NO: 156610 - DNA, 55 bp, Artificial
  Synthetic oligonucleotide
agcactctacggcgagtcgtcttggcgaagattccaacaaggatacgttcactgc

SEQ ID NO: 156611 - DNA, 55 bp, Artificial
  Synthetic oligonucleotide
agcagccgacgaagcagcttgctcggagctcttgttgcacgcagccagtgcaacg

SEQ ID NO: 156612 - DNA, 55 bp, Artificial
  Synthetic oligonucleotide
agcatcacaaacccgtcttggacactatgacgcaacaggtccattctctgttcaa

SEQ ID NO: 156613 - DNA, 54 bp, Artificial
  Synthetic oligonucleotide
cataaccccggtacgttccaccttgtcgtcatcacgcgacgaagtgaccccacg

SEQ ID NO: 156614 - DNA, 55 bp, Artificial
  Synthetic oligonucleotide
agcatcgctcgtggattatggatctcgttaccatatatagctctcaagttcccca

SEQ ID NO: 156615 - DNA, 55 bp, Artificial
  Synthetic oligonucleotide
cagttgacgcgacaacggattattgggcatcttgtgcgagtttccgcttgcggcg

SEQ ID NO: 156616 - DNA, 55 bp, Artificial
  Synthetic oligonucleotide
agccagccgccattccacgctagcttgtattccagttgacgcccgaactcgtacc

SEQ ID NO: 156617 - DNA, 55 bp, Artificial
  Synthetic oligonucleotide
cagttccggcgtatagtgcggctgccacggagtaacgacgatgatcccacccgac

SEQ ID NO: 156618 - DNA, 54 bp, Artificial
  Synthetic oligonucleotide
agggaccaagacgaccagaaaatccgacaattcttaaaactacgcgcgacttgc

SEQ ID NO: 156619 - DNA, 55 bp, Artificial
  Synthetic oligonucleotide
agggagggcgcgctcatgcttgctcccgcgtcgattggcgggattcgacccagtt

SEQ ID NO: 156620 - DNA, 60 bp, Artificial
  Synthetic oligonucleotide
cagtgctctgcacacgagcgacatcgacggcttgactgaaaccgttcagcgtgaaccgag

SEQ ID NO: 156621 - DNA, 55 bp, Artificial
  Synthetic oligonucleotide
agggctgtcgctgcgctacagaccaaatcgcaagcgacgtgcacagatgagccgc

SEQ ID NO: 156622 - DNA, 55 bp, Artificial
  Synthetic oligonucleotide
cagcgatgagtaacgcttcgtattcggcggggtgagatagtcgatcgaagtgtgc

SEQ ID NO: 156623 - DNA, 55 bp, Artificial
  Synthetic oligonucleotide
aggtcaggcacggcccgtgagcctcgcagaaatgggtacggtctgtcctggcagg

SEQ ID NO: 156624 - DNA, 55 bp, Artificial
  Synthetic oligonucleotide
aggtccgcgccttaccgtgcactactggccgaacagtcgacgcagctcgcctaat

SEQ ID NO: 156625 - DNA, 54 bp, Artificial
  Synthetic oligonucleotide
cagcgaccgctattttctcctatttagcggcacgtactttaaattctcgggtcc

SEQ ID NO: 156626 - DNA, 55 bp, Artificial
  Synthetic oligonucleotide
cagcgaagcgaaggcactgaatctcgtcaccgtgtccctgatctgatacgagtag

SEQ ID NO: 156627 - DNA, 55 bp, Artificial
  Synthetic oligonucleotide
aggttggggagataccggtcactcttgattacctcttttgggctatcgcgaagtc

SEQ ID NO: 156628 - DNA, 55 bp, Artificial
  Synthetic oligonucleotide
cagcccgtattcgtgctgcaacgcggagccgatcgtactgacgagaaagatctcg

SEQ ID NO: 156629 - DNA, 55 bp, Artificial
  Synthetic oligonucleotide
agtaagcctctcattcatccggaggtgctgaacatgcgtgtctttgttacgggag

SEQ ID NO: 156630 - DNA, 55 bp, Artificial
  Synthetic oligonucleotide
agtatcccttccaaatggcgtcctgacatgaagctcgtggtcaagtggcgacgcg

SEQ ID NO: 156631 - DNA, 59 bp, Artificial
  Synthetic oligonucleotide
agaccttccgccatgagttgttctggcttctcataggcgcggaagtaagtctccgaggc

SEQ ID NO: 156632 - DNA, 55 bp, Artificial
  Synthetic oligonucleotide
cagcccataggcggatcccttcgtctcaaaggccgatacacatgttacgcaacct

SEQ ID NO: 156633 - DNA, 55 bp, Artificial
  Synthetic oligonucleotide
cagcccacatcgttatgacgtccgacgcaggatcgattgtgtaactaaggattgc

SEQ ID NO: 156634 - DNA, 55 bp, Artificial
  Synthetic oligonucleotide
cagccagcgttcaggtgccgttcacgacaatgcttgccaaccgtatcaggagtcc

SEQ ID NO: 156635 - DNA, 55 bp, Artificial
  Synthetic oligonucleotide
cagcatcagaatgcgtacgaatacatgcctgtccagcagctatagggctatcaaa

SEQ ID NO: 156636 - DNA, 55 bp, Artificial
  Synthetic oligonucleotide
cagcaggtacatgatcgatctcgctattcaaaggttctggactagggttttcccg

SEQ ID NO: 156637 - DNA, 55 bp, Artificial
  Synthetic oligonucleotide
caggtcgcacacacaaggtgcatggaatggcggcgggacgggatcttgaaacagg

SEQ ID NO: 156638 - DNA, 55 bp, Artificial
  Synthetic oligonucleotide
agcgttcagaccgctgccacttcgtggggaaccgtcccgtcgatccgtgtgtaca

SEQ ID NO: 156639 - DNA, 55 bp, Artificial
  Synthetic oligonucleotide
agctatacgagcagtaccaggtgggagcgtggcccgacgcggaagcgataagcta

SEQ ID NO: 156640 - DNA, 55 bp, Artificial
  Synthetic oligonucleotide
aggacttgacttcgcaaatcgcgcggcagactgaaagcgtcacttcacttcaagg

SEQ ID NO: 156641 - DNA, 55 bp, Artificial
  Synthetic oligonucleotide
caggggacatgaattgtgttgccggattataggcatttatcccgatgtctgccgg

SEQ ID NO: 156642 - DNA, 57 bp, Artificial
  Synthetic oligonucleotide
tccgcgccctacagtcaaaaacttgggtggaagcggctacatgcgccgctttgttaa

SEQ ID NO: 156643 - DNA, 60 bp, Artificial
  Synthetic oligonucleotide
gcgtgaatggtcgcgtgtcgacacgttctcacagtccgtgaagcgcaaaggccattcgat

SEQ ID NO: 156644 - DNA, 55 bp, Artificial
  Synthetic oligonucleotide
cagggcgcgtccacacctgaaccttgatgacggggtaaattcgtccgtcgacgaa

SEQ ID NO: 156645 - DNA, 55 bp, Artificial
  Synthetic oligonucleotide
aggccgctcaaatgacagttccgtgacaacacgaaaacttctcataaccgctctg

SEQ ID NO: 156646 - DNA, 55 bp, Artificial
  Synthetic oligonucleotide
cagggcaatgtctccattgaagagatcgcgggcgcgtgcaatctgtcgcgcagtt

SEQ ID NO: 156647 - DNA, 55 bp, Artificial
  Synthetic oligonucleotide
cagggatacagtgtcacttgttcccatcaccgtgtctccgatgtagatagcctgt

SEQ ID NO: 156648 - DNA, 55 bp, Artificial
  Synthetic oligonucleotide
cagggagtgatcggggacgaaagcaatggaatcaacggggatccggcaacgttgc

SEQ ID NO: 156649 - DNA, 55 bp, Artificial
  Synthetic oligonucleotide
caggccacgggcttactcctccaataccgattacgtggttgaagctccagtcccg

SEQ ID NO: 156650 - DNA, 55 bp, Artificial
  Synthetic oligonucleotide
caggcaatcgaatttcattgagtccagcctgaggaccgctagatagtaaacgcag

SEQ ID NO: 156651 - DNA, 55 bp, Artificial
  Synthetic oligonucleotide
caggagccgtggtctggacgcctacttacctgcttccgttcaacatcgaagaatc

SEQ ID NO: 156652 - DNA, 55 bp, Artificial
  Synthetic oligonucleotide
aggcgcgttaactcaccgctctggacatggctcctagccctaaacaaatagcaat

SEQ ID NO: 156653 - DNA, 55 bp, Artificial
  Synthetic oligonucleotide
caggaagcggcaacgcgagcccaggtaaggactcagggcgatcttgtagatacgc

SEQ ID NO: 156654 - DNA, 60 bp, Artificial
  Synthetic oligonucleotide
gcgtgaccgtgggtactacgaggcaaagtcagtctaggttgctgtcgctgctacaagcgc

SEQ ID NO: 156655 - DNA, 55 bp, Artificial
  Synthetic oligonucleotide
cagcttccggatgggtatgccactcaccgaggtagtccattgtttcgcgctcggc

SEQ ID NO: 156656 - DNA, 55 bp, Artificial
  Synthetic oligonucleotide
cagcttaacgcccatctcctctcattgcgagctctctgacgacatccctattaat

SEQ ID NO: 156657 - DNA, 55 bp, Artificial
  Synthetic oligonucleotide
cagctcctgctatgccttgctttgttgtaggcgacgggatgacgtgcccgcaagg

SEQ ID NO: 156658 - DNA, 55 bp, Artificial
  Synthetic oligonucleotide
ccacagtcgatcagcgtgctcgaaactctggcggcacaaacacaatcattgtcaa

SEQ ID NO: 156659 - DNA, 55 bp, Artificial
  Synthetic oligonucleotide
acgtacgttacaagtcatttcgacgcatgaataacggcactttctgcgccgcaga

SEQ ID NO: 156660 - DNA, 55 bp, Artificial
  Synthetic oligonucleotide
acgtattggctgccgcgctaaatcgagggcggggcggaaatcatccgttgcgacg

SEQ ID NO: 156661 - DNA, 54 bp, Artificial
  Synthetic oligonucleotide
acgtgagcaaccccacggcggcaataagaagcggcgaacgggaaacccgagcac

SEQ ID NO: 156662 - DNA, 55 bp, Artificial
  Synthetic oligonucleotide
acgttcacgttatctccctcgagtcgtgattgattgagtgggatgcgcagcagtg

SEQ ID NO: 156663 - DNA, 55 bp, Artificial
  Synthetic oligonucleotide
ccacaaactttctcgttttcgggaagcgcaattggcacgctaaaccagtctggca

SEQ ID NO: 156664 - DNA, 55 bp, Artificial
  Synthetic oligonucleotide
ccaatgcgcggccacacaggcagcgagcacggtcgtcattaccgcacagccgggg

SEQ ID NO: 156665 - DNA, 55 bp, Artificial
  Synthetic oligonucleotide
cctctacaaccctttcgtcctcgtccgcctaacgcgggacatctggaatctcgtc

SEQ ID NO: 156666 - DNA, 54 bp, Artificial
  Synthetic oligonucleotide
ccaagtgagttaaacggttaaccgacgtacattcgctcgacacgtcatacgacg

SEQ ID NO: 156667 - DNA, 55 bp, Artificial
  Synthetic oligonucleotide
ccaaggtagagaacgctgcaagattggtcaaatagatcaaatgtgcgtcgctgca

SEQ ID NO: 156668 - DNA, 54 bp, Artificial
  Synthetic oligonucleotide
ccaaggcaagctcggtcacgattcaaacccctgccggttcagttgtacttacgg

SEQ ID NO: 156669 - DNA, 55 bp, Artificial
  Synthetic oligonucleotide
ccaacggaaaggcaccctagccttgcaacacgcctggggccttgatttctggcgc

SEQ ID NO: 156670 - DNA, 55 bp, Artificial
  Synthetic oligonucleotide
actccgctacatctcagcgcttagggaaggagccgccgggtagtacgttgcgcgt

SEQ ID NO: 156671 - DNA, 55 bp, Artificial
  Synthetic oligonucleotide
actcgatccgactctattcggctctattcggctctattcggctcgaatcaaatcg

SEQ ID NO: 156672 - DNA, 55 bp, Artificial
  Synthetic oligonucleotide
ccaacctacagtcggtagacccgatgtacgctcgagtaccgacgcatgacaacgg

SEQ ID NO: 156673 - DNA, 55 bp, Artificial
  Synthetic oligonucleotide
actcgcgcccatcacccctgtctcgacgcccacgcgtgcgtacgcattggctcca

SEQ ID NO: 156674 - DNA, 55 bp, Artificial
  Synthetic oligonucleotide
ccaaaaggatgcgattcgtttggggccggactgagatgcgtcggatcgacaacgc

SEQ ID NO: 156675 - DNA, 55 bp, Artificial
  Synthetic oligonucleotide
actcttgactccgatcggcggatgtcctggcgcatgcggtaacaagctacgcggc

SEQ ID NO: 156676 - DNA, 60 bp, Artificial
  Synthetic oligonucleotide
ttcatcgctagcctcaccgataccgaaccgctttttgaggccgcgcgaccagtgcaattg

SEQ ID NO: 156677 - DNA, 55 bp, Artificial
  Synthetic oligonucleotide
acgcgaatgtacgtcggttaatcgtttaactcacttggtgcatacccgtagagcc

SEQ ID NO: 156678 - DNA, 55 bp, Artificial
  Synthetic oligonucleotide
acgcgagacatcgatcgattccgcacacgaagctcctggtggtctacgagttcag

SEQ ID NO: 156679 - DNA, 55 bp, Artificial
  Synthetic oligonucleotide
ccagaatccatatgttttgtgccgccgggccattgaaacctcccggcacggaacg

SEQ ID NO: 156680 - DNA, 54 bp, Artificial
  Synthetic oligonucleotide
acgcggtctaccaacggtttgccgcgagtatccgccatgtcttccccgcttact

SEQ ID NO: 156681 - DNA, 55 bp, Artificial
  Synthetic oligonucleotide
acgctacgccgctcgccccgaacacatgcggaccactggccagcatagggcctca

SEQ ID NO: 156682 - DNA, 55 bp, Artificial
  Synthetic oligonucleotide
acggacgaatttaccccgtcatcaaggttcaggtgtggacgcgccctgagctcgc

SEQ ID NO: 156683 - DNA, 55 bp, Artificial
  Synthetic oligonucleotide
ccactcgataagctccgccgtgcaggctcgactttcggcgcagttgcccaatggc

SEQ ID NO: 156684 - DNA, 55 bp, Artificial
  Synthetic oligonucleotide
acggcgacagccgtgagacgcggattttctgtccgcgccgctatgcaatgtccag

SEQ ID NO: 156685 - DNA, 55 bp, Artificial
  Synthetic oligonucleotide
ccactacaacgagtcgcatccgcacagcgccctgaaatactgctcaccacgcgag

SEQ ID NO: 156686 - DNA, 55 bp, Artificial
  Synthetic oligonucleotide
ccacgtaacggggtgagctatgccttcaggaaagtaccttggcaatagaacagtc

SEQ ID NO: 156687 - DNA, 60 bp, Artificial
  Synthetic oligonucleotide
gagatcgagcccaggagtacagcttgatcgtcctgctttgctgccacttcttcatcgcta

SEQ ID NO: 156688 - DNA, 55 bp, Artificial
  Synthetic oligonucleotide
acgggacacgggacaggcctgtgctcacgtcctgcctacgggccaacccacgact

SEQ ID NO: 156689 - DNA, 55 bp, Artificial
  Synthetic oligonucleotide
ccacgcgtcgattgcgggaacgaccttccgctgtagtgttgtcggcgacaggttg

SEQ ID NO: 156690 - DNA, 55 bp, Artificial
  Synthetic oligonucleotide
ccacgcctgatgacagacgtcatacagagttacgaaactgctgatacctggagca

SEQ ID NO: 156691 - DNA, 55 bp, Artificial
  Synthetic oligonucleotide
ccaccgcttgccaccttccattacgccgcagcatcggttgggtgacacggtctgg

SEQ ID NO: 156692 - DNA, 55 bp, Artificial
  Synthetic oligonucleotide
ccaccgaagtctccttcggagtatttgactaccctttcggcgcaaggcctgacgc

SEQ ID NO: 156693 - DNA, 55 bp, Artificial
  Synthetic oligonucleotide
acgggtagctggtcttcatgacaacaatgtcgcgagtcctttcgtgagcccggtc

SEQ ID NO: 156694 - DNA, 51 bp, Artificial
  Synthetic oligonucleotide
acgtaccggatatcttctagtttcattggttaccccggtttactgttgttc

SEQ ID NO: 156695 - DNA, 55 bp, Artificial
  Synthetic oligonucleotide
agacgaattgacgctctatactgattcttagcgcggctgagcagccttccccggg

SEQ ID NO: 156696 - DNA, 55 bp, Artificial
  Synthetic oligonucleotide
catgcctgtgttgcgcctgccgtacccgcattccgactccaccggtctttccagt

SEQ ID NO: 156697 - DNA, 55 bp, Artificial
  Synthetic oligonucleotide
catgccgcctccgagagaaacgacatgccgtgccgacactatcccgccccaggag

SEQ ID NO: 156698 - DNA, 60 bp, Artificial
  Synthetic oligonucleotide
atcatgggaatacattcggaacgcgaagtgcaagccctgccgctgacgttcaagcgtcgc

SEQ ID NO: 156699 - DNA, 55 bp, Artificial
  Synthetic oligonucleotide
catgcatcggagcaacaagaatcgattatggtcgtagagagaaagtgtgaaaggg

SEQ ID NO: 156700 - DNA, 55 bp, Artificial
  Synthetic oligonucleotide
agactggcaattgtcccggtatcgttgaccgcaaagaaggttcaccgaggattga

SEQ ID NO: 156701 - DNA, 55 bp, Artificial
  Synthetic oligonucleotide
catcttacgcaaaatcatccggtgcgtaaagacaaagaacgtacggcaaaagaca

SEQ ID NO: 156702 - DNA, 55 bp, Artificial
  Synthetic oligonucleotide
catctgcacctccctgaagtgaacgattgaaagggcgtcgaaaagacgtgtaggg

SEQ ID NO: 156703 - DNA, 55 bp, Artificial
  Synthetic oligonucleotide
catctcgtcggacttggtcttgcgaccggtagcggtatacatgtccatgcctgcc

SEQ ID NO: 156704 - DNA, 55 bp, Artificial
  Synthetic oligonucleotide
catcgtcgttccattgtaggaaaacttacgcgcccgcacttcatacatgcacctt

SEQ ID NO: 156705 - DNA, 55 bp, Artificial
  Synthetic oligonucleotide
catcgcatgaggttcaactctacagcagatatcaggacgcggcatgcatcgcaac

SEQ ID NO: 156706 - DNA, 55 bp, Artificial
  Synthetic oligonucleotide
catcgagaacaatctgccactgtcggatcacgaagccagctttccgcatagcttg

SEQ ID NO: 156707 - DNA, 55 bp, Artificial
  Synthetic oligonucleotide
agagcactgggacgacaccgcggatcagtggacagggttccgagatccgctgttc

SEQ ID NO: 156708 - DNA, 55 bp, Artificial
  Synthetic oligonucleotide
catcgaatgacaggttgattaccggccgatccggaatgaacggcgcaatctctca

SEQ ID NO: 156709 - DNA, 60 bp, Artificial
  Synthetic oligonucleotide
ccgaacactgctcgaaactggatgcctgcggtagattgcacttcgcctgagaaccgacca

SEQ ID NO: 156710 - DNA, 55 bp, Artificial
  Synthetic oligonucleotide
agagttgcgcacgcgggtgcaagacgcagagaggaaggtgcgcgctgctgtcaat

SEQ ID NO: 156711 - DNA, 55 bp, Artificial
  Synthetic oligonucleotide
catccgatacaagacgctcctaatgcaacgcctgttggattctgtccggcatggc

SEQ ID NO: 156712 - DNA, 55 bp, Artificial
  Synthetic oligonucleotide
catcccgctcgcgtgcacatgcagcgcccattgataccgattgagccgcagcagt

SEQ ID NO: 156713 - DNA, 55 bp, Artificial
  Synthetic oligonucleotide
catcattgattggcaggttcatggcgtcttttcttgtatcgatggccaatggata

SEQ ID NO: 156714 - DNA, 55 bp, Artificial
  Synthetic oligonucleotide
actgtcgtgattgagtctcggcgatatttcgtcgaatgtaaacgcgacgttagac

SEQ ID NO: 156715 - DNA, 55 bp, Artificial
  Synthetic oligonucleotide
actgtttcgggcggctaccatcactaagccctatctttgcccgtcgcggattacg

SEQ ID NO: 156716 - DNA, 52 bp, Artificial
  Synthetic oligonucleotide
ccaaaacaacgacttaccatcgtgtaacagttagtagagggtccgccgggat

SEQ ID NO: 156717 - DNA, 55 bp, Artificial
  Synthetic oligonucleotide
catttcgatccttcaggagcatttcatgacagtcgtcaccaccgaatcgggcctc

SEQ ID NO: 156718 - DNA, 55 bp, Artificial
  Synthetic oligonucleotide
acttagcgggcgcgacttccatgcttcttgcggcccttaccaagcggacttgggg

SEQ ID NO: 156719 - DNA, 55 bp, Artificial
  Synthetic oligonucleotide
cattcgcgctactgtaggccgagacgttattcgcaaacattcccgtaccggctac

SEQ ID NO: 156720 - DNA, 60 bp, Artificial
  Synthetic oligonucleotide
cggcaagtgtcgtcattggtgtgcgaacgctcaatcggggccagtatagcgaaggtggaa

SEQ ID NO: 156721 - DNA, 55 bp, Artificial
  Synthetic oligonucleotide
cattcgcccgtgtattcgagcctcagtggcaccgtggtggaacgcaatgtggcgc

SEQ ID NO: 156722 - DNA, 55 bp, Artificial
  Synthetic oligonucleotide
acttgcgtgagcaattcggacgctatggccctacccatccgcgacaggccgaagt

SEQ ID NO: 156723 - DNA, 55 bp, Artificial
  Synthetic oligonucleotide
acttgggcgtccgcccttcgcgtcgctctcgtacatgcgcgaaaagaccgaatcc

SEQ ID NO: 156724 - DNA, 55 bp, Artificial
  Synthetic oligonucleotide
acttgggtggaagcggctacatgcgccgctttgttaagacgttcccaagattgcc

SEQ ID NO: 156725 - DNA, 54 bp, Artificial
  Synthetic oligonucleotide
catgtaacccctcgaaacccgaatccggacctgctctgttggcaagggtccggc

SEQ ID NO: 156726 - DNA, 55 bp, Artificial
  Synthetic oligonucleotide
agaaatcgaggcgttacttcgtgagacgcaccacgtagtagccagcgacctgtgc

SEQ ID NO: 156727 - DNA, 54 bp, Artificial
  Synthetic oligonucleotide
agaacgttgaaatccttgtcgtctaagggtcgattcggttacttcgcgtgattg

SEQ ID NO: 156728 - DNA, 55 bp, Artificial
  Synthetic oligonucleotide
agacatgcatgcgtttcatgagtcagagtatttgcggggcaagcttgattctcgc

SEQ ID NO: 156729 - DNA, 55 bp, Artificial
  Synthetic oligonucleotide
agaccaattgtcgcagtgcggagtccgacgatacccatgggtcgaccaacggcag

SEQ ID NO: 156730 - DNA, 55 bp, Artificial
  Synthetic oligonucleotide
agacccattatgagcagtcacatccttagcctcatctgattgtcgtagtagtcgc

SEQ ID NO: 156731 - DNA, 53 bp, Artificial
  Synthetic oligonucleotide
atcaagattcgctcaaaaacgactccccgaattttaacggccactacattctt

SEQ ID NO: 156732 - DNA, 55 bp, Artificial
  Synthetic oligonucleotide
atgcgtgaactggcagcggcttatgcaaacacgcgcatcgagggccccagaggct

SEQ ID NO: 156733 - DNA, 55 bp, Artificial
  Synthetic oligonucleotide
atgcgttgacagtcggtacgagatcacctggcgaaggctgtcgcctaccaggctg

SEQ ID NO: 156734 - DNA, 55 bp, Artificial
  Synthetic oligonucleotide
cacaccttcccataagagaatcgacgacaccgggtattgcctcgacgcatttaaa

SEQ ID NO: 156735 - DNA, 55 bp, Artificial
  Synthetic oligonucleotide
atggcctaggcatggcgggtggtgccattggcagcgcagccgagtcggctaaatc

SEQ ID NO: 156736 - DNA, 55 bp, Artificial
  Synthetic oligonucleotide
atggttggacaatagcagaacgatactcgatgacggagtaacgtgaattccgaaa

SEQ ID NO: 156737 - DNA, 55 bp, Artificial
  Synthetic oligonucleotide
atgtaccaaatcctggccgcggtatttcgaccgctgcgctcccctcttcgcgtgc

SEQ ID NO: 156738 - DNA, 55 bp, Artificial
  Synthetic oligonucleotide
atgtactttccggcaccgtttcaatgctgattcgacagagttaaagcgacctatt

SEQ ID NO: 156739 - DNA, 55 bp, Artificial
  Synthetic oligonucleotide
atgtataagcgtttcatgagcggcttacctttctgcaggcacaatcgctgagcct

SEQ ID NO: 156740 - DNA, 55 bp, Artificial
  Synthetic oligonucleotide
atgtcggtatacgaagccgaccgcgggaagctgaatccccacccgagctagcgag

SEQ ID NO: 156741 - DNA, 55 bp, Artificial
  Synthetic oligonucleotide
cacaacgccgctacgacgtctaacgaattcgcttgccacgcctagtacaaaccct

SEQ ID NO: 156742 - DNA, 59 bp, Artificial
  Synthetic oligonucleotide
ttcacaatcgcgcttgctcggttgtgccatcccgcttcacggggtaaattcgtcagacg

SEQ ID NO: 156743 - DNA, 55 bp, Artificial
  Synthetic oligonucleotide
cacaaatcagtcacttaccccaccccaagaatgtcgatccgggtataatcgccgg

SEQ ID NO: 156744 - DNA, 55 bp, Artificial
  Synthetic oligonucleotide
atgtggccgtcccgctgcgtctgcccaatacggaggagaccgcgtttcgcgatca

SEQ ID NO: 156745 - DNA, 55 bp, Artificial
  Synthetic oligonucleotide
caatttcgaatttgcaggccgttatcccctgctgatgccacgtaagggtcatccc

SEQ ID NO: 156746 - DNA, 55 bp, Artificial
  Synthetic oligonucleotide
caatttacaaatgcgtttgcacctgaatctgtatcaacttgagactgcgtttgac

SEQ ID NO: 156747 - DNA, 55 bp, Artificial
  Synthetic oligonucleotide
atgtgttgcgccaatgtacgtcggttaatcgtttaactcacttggtgcatacccc

SEQ ID NO: 156748 - DNA, 55 bp, Artificial
  Synthetic oligonucleotide
caatggagggagtcgtcgggccattgcatcgtttcgcgtgaaatttactcacacg

SEQ ID NO: 156749 - DNA, 55 bp, Artificial
  Synthetic oligonucleotide
atcttgtcgcgggcggaagcgttcgaggccggatgcgatgcaatggaacgcggtt

SEQ ID NO: 156750 - DNA, 55 bp, Artificial
  Synthetic oligonucleotide
atgaatttcgttgcacgtactttagccgttgctagcctactgttggtaccaatcg

SEQ ID NO: 156751 - DNA, 55 bp, Artificial
  Synthetic oligonucleotide
atgactgaaaggtagctaaagtcggccgaagaattgccgctaatgccggggcatt

SEQ ID NO: 156752 - DNA, 55 bp, Artificial
  Synthetic oligonucleotide
atgagattgggtatcctacgtaagggtgagcggtaagctatcgaagctcgagcgc

SEQ ID NO: 156753 - DNA, 54 bp, Artificial
  Synthetic oligonucleotide
tgcaagtggaacgtcgtactgacgtcgttactcgaaacctggacttgtccccgg

SEQ ID NO: 156754 - DNA, 60 bp, Artificial
  Synthetic oligonucleotide
ttatgaacaacaggggattggcgagtcagcgctgcacatggataatccgccagagtcttg

SEQ ID NO: 156755 - DNA, 55 bp, Artificial
  Synthetic oligonucleotide
atgcacagcccctatcgggttcaccagaaatcggcagaccgaaccttactgcgct

SEQ ID NO: 156756 - DNA, 55 bp, Artificial
  Synthetic oligonucleotide
atgcaccgctcgacgactacaccaggatgtacgatcaggcggaccgggaccgatg

SEQ ID NO: 156757 - DNA, 55 bp, Artificial
  Synthetic oligonucleotide
caccagagccgttcgtcatggtgtcctatgacccaaggacgcgcacggtctacgc

SEQ ID NO: 156758 - DNA, 55 bp, Artificial
  Synthetic oligonucleotide
atgcctggattcattgtatgcggtcgtacgcagagccaactctcgcggtgtatcc

SEQ ID NO: 156759 - DNA, 55 bp, Artificial
  Synthetic oligonucleotide
cacatgcggccgggcatttcatcgtccggtactaaatttcggcgcaccgaggccg

SEQ ID NO: 156760 - DNA, 55 bp, Artificial
  Synthetic oligonucleotide
cacatcggttcatgcccggcgtcctgttgcctcaccctgtgcagcggactacgac

SEQ ID NO: 156761 - DNA, 55 bp, Artificial
  Synthetic oligonucleotide
atgcgaaacgcacgtataccgaagcaaaaggcaaacgcaatccggtgacaacggg

SEQ ID NO: 156762 - DNA, 55 bp, Artificial
  Synthetic oligonucleotide
cacatcgaaacaactgccgagccccggctcactcaccaggcgaatggaaccgttc

SEQ ID NO: 156763 - DNA, 55 bp, Artificial
  Synthetic oligonucleotide
atgcgaagagcgttgctgcgatgattcgggaattggatccggcgcatatctagag

SEQ ID NO: 156764 - DNA, 55 bp, Artificial
  Synthetic oligonucleotide
cacagcttcgcgaacctatcctcaatcgctccactgtgaatccagaggcttgccg

SEQ ID NO: 156765 - DNA, 56 bp, Artificial
  Synthetic oligonucleotide
gcgttgcacagttcggtcgggttgagttttgcgagggccatacgggctccttgttg

SEQ ID NO: 156766 - DNA, 55 bp, Artificial
  Synthetic oligonucleotide
atgcgccggagcttcacccaacctctcgctaaccgcaagccgctctgagattggc

SEQ ID NO: 156767 - DNA, 55 bp, Artificial
  Synthetic oligonucleotide
cacagatcatgcggaatgatggaggtttcgatctagagcgccgcaggacattagt

SEQ ID NO: 156768 - DNA, 55 bp, Artificial
  Synthetic oligonucleotide
cacactcgtccccaccgatgtgtctccgctcgaaatgtggagcaatcaggggatg

SEQ ID NO: 156769 - DNA, 53 bp, Artificial
  Synthetic oligonucleotide
atttccccagaagtgtcgaagtaaaattccccaccctgttgggacggtgatca

SEQ ID NO: 156770 - DNA, 55 bp, Artificial
  Synthetic oligonucleotide
caagccccaaagagcgcagatgctccgtcatttgtgcacgatcaaacgccctatc

SEQ ID NO: 156771 - DNA, 52 bp, Artificial
  Synthetic oligonucleotide
atttcctccgggaaacgcgaattccatgaaaccgctacactcgggacttccc

SEQ ID NO: 156772 - DNA, 55 bp, Artificial
  Synthetic oligonucleotide
atttcggcactgcgcaacctccgtttgttcgctgctgaaaggcgattgccatcga

SEQ ID NO: 156773 - DNA, 55 bp, Artificial
  Synthetic oligonucleotide
caagacatttactggctgcacgcactatcccgttcgcctggatcgaaagaaccag

SEQ ID NO: 156774 - DNA, 55 bp, Artificial
  Synthetic oligonucleotide
caacttcggaacggcttatcgcaactggtcggacacaaccctgggcgcggccaaa

SEQ ID NO: 156775 - DNA, 55 bp, Artificial
  Synthetic oligonucleotide
caacggcaccactcgacactgcgcgacaagcacaggtcggcatcacggaatccgt

SEQ ID NO: 156776 - DNA, 59 bp, Artificial
  Synthetic oligonucleotide
tacgaaggctgctcctacgataagtcgaaggattctctcagtacgacctgtcgtcataa

SEQ ID NO: 156777 - DNA, 55 bp, Artificial
  Synthetic oligonucleotide
caaaacgtatacaacatatctcctgaatcgcgttgccgcatagtcgggaaagcgc

SEQ ID NO: 156778 - DNA, 55 bp, Artificial
  Synthetic oligonucleotide
caaaagtctgttggagatcggctttgtcagcggggttatataaccttgccgtgac

SEQ ID NO: 156779 - DNA, 55 bp, Artificial
  Synthetic oligonucleotide
caacctcgcgggaacatgtctccctaccggggacgtgactcgcacgtatcggaga

SEQ ID NO: 156780 - DNA, 55 bp, Artificial
  Synthetic oligonucleotide
caaccgagcgagcgattcatcggcgcgccaccagacagcagtcgcacgctaatga

SEQ ID NO: 156781 - DNA, 55 bp, Artificial
  Synthetic oligonucleotide
caacccacgaagacaccctgatcctggcaatgccattggaagcacgccgagatac

SEQ ID NO: 156782 - DNA, 55 bp, Artificial
  Synthetic oligonucleotide
caaacaagtcgagtatggtataccgtccccatgggcaacacaatgcacctctcgg

SEQ ID NO: 156783 - DNA, 55 bp, Artificial
  Synthetic oligonucleotide
caaaccttcgctgttatacataaaagagtcgcgcaaatcgcattagcgcttgtag

SEQ ID NO: 156784 - DNA, 55 bp, Artificial
  Synthetic oligonucleotide
caaagcgaacacggattccacaccatcgcgaacaaacaggacgcagcgacgcggg

SEQ ID NO: 156785 - DNA, 54 bp, Artificial
  Synthetic oligonucleotide
caacaccggtcatacgccacactcaaacccgttccggaggagtctgttcggtgg

SEQ ID NO: 156786 - DNA, 55 bp, Artificial
  Synthetic oligonucleotide
caaaggcgcctgttatcggctttcgtggtgcgagtggcgtgggctccatcgttcg

SEQ ID NO: 156787 - DNA, 59 bp, Artificial
  Synthetic oligonucleotide
tccgctttcgcgcaatttcgagacacgggttaacactcatggcatgccgtaacatggta

SEQ ID NO: 156788 - DNA, 55 bp, Artificial
  Synthetic oligonucleotide
atgttttaacgaacagtgtgtacccgatgagcacgccctccgttggcacgaccgc

SEQ ID NO: 156789 - DNA, 55 bp, Artificial
  Synthetic oligonucleotide
caatgcgtggagcggtatcgcgaccgttcgtagaatttataccgattcaagtggt

SEQ ID NO: 156790 - DNA, 55 bp, Artificial
  Synthetic oligonucleotide
attagcaacacacgccacgactgcaaaagatcgttccacgataatcctcgtgacc

SEQ ID NO: 156791 - DNA, 55 bp, Artificial
  Synthetic oligonucleotide
caatgcgcgagctacggccggcttgacgtatggcgtgtcaaggacgattgcggag

SEQ ID NO: 156792 - DNA, 55 bp, Artificial
  Synthetic oligonucleotide
caatgactgcaatgcgataagtcatttggatctccttccgttcagtaggtaatcg

SEQ ID NO: 156793 - DNA, 55 bp, Artificial
  Synthetic oligonucleotide
attcctggcagaacctcgcaccgggaggattctcggacccgcatagtgtgcagcg

SEQ ID NO: 156794 - DNA, 55 bp, Artificial
  Synthetic oligonucleotide
caatcgtcgcgcggctttacgaattggcggttcggtcgcgcatcccggctagctt

SEQ ID NO: 156795 - DNA, 55 bp, Artificial
  Synthetic oligonucleotide
attcgaaccgcgctgaagcacggaaagtgttcattggatgcaacgcgggatctgc

SEQ ID NO: 156796 - DNA, 55 bp, Artificial
  Synthetic oligonucleotide
attcgggaaaagtgtatgccctctatcagattactcccagtgtccttggcggact

SEQ ID NO: 156797 - DNA, 55 bp, Artificial
  Synthetic oligonucleotide
attctgacgcactggaacacataccgtccggtcccgtgctgccgattgttggcag

SEQ ID NO: 156798 - DNA, 59 bp, Artificial
  Synthetic oligonucleotide
aagccggatgctatcgccccataggcaagtcgtcttggttgaaaaagcgtgcaagcgtc

SEQ ID NO: 156799 - DNA, 55 bp, Artificial
  Synthetic oligonucleotide
attgaaacgcgattgcaccgcctagtgttgtgggcgttgcctgcctaaatttgtc

SEQ ID NO: 156800 - DNA, 55 bp, Artificial
  Synthetic oligonucleotide
attgccgtctctagtagcgtgttgaagtcttggttctgtattgacgcgactgtgt

SEQ ID NO: 156801 - DNA, 55 bp, Artificial
  Synthetic oligonucleotide
caagtgcatatgtaacatggcccttcgactccccaaagaggtggttttaacgtcc

SEQ ID NO: 156802 - DNA, 55 bp, Artificial
  Synthetic oligonucleotide
caagtacaatacgcgatagcgttgctgcgtctcaacatggcgttttcccctacgc

SEQ ID NO: 156803 - DNA, 55 bp, Artificial
  Synthetic oligonucleotide
caaggcctacccagcgatcaccgagcaagatagtgatttgatttatacgcgtgaa

SEQ ID NO: 156804 - DNA, 55 bp, Artificial
  Synthetic oligonucleotide
caagcgaggtagccattcgtgaactcgcgcacacccacaatgcgacgcgcgacca

SEQ ID NO: 156805 - DNA, 55 bp, Artificial
  Synthetic oligonucleotide
attgtagaaccgtgcgcgccgtatagtggctcgcatctcgataaagatcgttgcg

SEQ ID NO: 156806 - DNA, 55 bp, Artificial
  Synthetic oligonucleotide
atttagcacgaccgttcacaaaatttcgattcgcggataatatagcttttgacgg

SEQ ID NO: 156807 - DNA, 55 bp, Artificial
  Synthetic oligonucleotide
atacgcccgatcgtaatgcgtttggcacgacccattcgaaatctgacgcccagca

SEQ ID NO: 156808 - DNA, 55 bp, Artificial
  Synthetic oligonucleotide
cagaaacgatagcggcagatggaacccacaccatcaacgtcgggtcacttgggcc

SEQ ID NO: 156809 - DNA, 59 bp, Artificial
  Synthetic oligonucleotide
gtcattcaattttttaggaaatacccatgacagaactgagcgaaagcacgacgagcaaa

SEQ ID NO: 156810 - DNA, 55 bp, Artificial
  Synthetic oligonucleotide
cacttgttcgtcgcagaaacgaacggttcaaatcaggcattcaggagacgacatg

SEQ ID NO: 156811 - DNA, 55 bp, Artificial
  Synthetic oligonucleotide
atacgcgcttgtccggcattcggccagccgccctctgtgacctacccagcacagt

SEQ ID NO: 156812 - DNA, 55 bp, Artificial
  Synthetic oligonucleotide
atacggcggcatcggatcaggcttcggatagccgggattgaactgttgatagagc

SEQ ID NO: 156813 - DNA, 55 bp, Artificial
  Synthetic oligonucleotide
atacgggctccttaccggaacggattgacgtcaggctgcttatacgtcggcgggc

SEQ ID NO: 156814 - DNA, 55 bp, Artificial
  Synthetic oligonucleotide
atacgtgagggtagccggctcgtttcgagggcttgtagggcgcgatagcgagcag

SEQ ID NO: 156815 - DNA, 55 bp, Artificial
  Synthetic oligonucleotide
atacttcaccaccagagctggtgggcagagcttcgccaacaggcggtcagcggct

SEQ ID NO: 156816 - DNA, 55 bp, Artificial
  Synthetic oligonucleotide
cactgacggaacggaggggttggtcagtaggttcggattcacctgcaactagcgg

SEQ ID NO: 156817 - DNA, 55 bp, Artificial
  Synthetic oligonucleotide
cactgaagggttcgcaaagtgcctgtcgtgtacttgggcccttgaggcgccggac

SEQ ID NO: 156818 - DNA, 55 bp, Artificial
  Synthetic oligonucleotide
atagcgcgtactcccgatactgaaagccgcgacaggctttgagccggcaaccggg

SEQ ID NO: 156819 - DNA, 55 bp, Artificial
  Synthetic oligonucleotide
cactctagtggccaacattggacgaaccctgtccgtgacgctttcccatggcgcg

SEQ ID NO: 156820 - DNA, 56 bp, Artificial
  Synthetic oligonucleotide
taccggggtttgtatacgcatctgaggtagccggttgccgcgccacgaagggaaca

SEQ ID NO: 156821 - DNA, 55 bp, Artificial
  Synthetic oligonucleotide
cactctacccagcgaagttcgttaattctgctaacacccctttgcagggcgttat

SEQ ID NO: 156822 - DNA, 55 bp, Artificial
  Synthetic oligonucleotide
atagtctgcaaaggcatccgagccggctacgcacaggtctccgctgcgcagttcc

SEQ ID NO: 156823 - DNA, 55 bp, Artificial
  Synthetic oligonucleotide
cactcccgcagcgcaacttgcgagtccatcgtcagggcaccatcactccgggttt

SEQ ID NO: 156824 - DNA, 55 bp, Artificial
  Synthetic oligonucleotide
atatgaaagttcgagtgattgcagcagtggtcgtctgtgccgcgcttctgtcggc

SEQ ID NO: 156825 - DNA, 55 bp, Artificial
  Synthetic oligonucleotide
atcaaaccaattcgacgggacaacccagcgagaggacttcatgaaactcattacc

SEQ ID NO: 156826 - DNA, 55 bp, Artificial
  Synthetic oligonucleotide
agtatctgggccctaacaccgcccagaactgcaagtgagcccgcgaagcgggttg

SEQ ID NO: 156827 - DNA, 55 bp, Artificial
  Synthetic oligonucleotide
agtcgaatgcatgcttggagtccgtgtggtagagccgcgtaccgcccgctacgtc

SEQ ID NO: 156828 - DNA, 55 bp, Artificial
  Synthetic oligonucleotide
cagcacgtacgcacacgtctgaaatgacctcgcgccacaacatctgttgccgatg

SEQ ID NO: 156829 - DNA, 53 bp, Artificial
  Synthetic oligonucleotide
agtcttcgtgaatcgcgttcggggaagtccacgcgttttacgaggtgcggcgg

SEQ ID NO: 156830 - DNA, 55 bp, Artificial
  Synthetic oligonucleotide
cagcaactacgctgttggcgtacgtcacactttctaatttaacgctagcgtcagc

SEQ ID NO: 156831 - DNA, 57 bp, Artificial
  Synthetic oligonucleotide
aagccttgacggagtcacgacgtccgggtcgaaaatctagtgaatcgccgtagtgca

SEQ ID NO: 156832 - DNA, 55 bp, Artificial
  Synthetic oligonucleotide
cagcaacaccctcgtggcagaccccgaggcgtaacaaggttcgaattcgatgcga

SEQ ID NO: 156833 - DNA, 55 bp, Artificial
  Synthetic oligonucleotide
agtggcccagagagaccgctcaggcgattgggcaggcctatgccaccctgaatag

SEQ ID NO: 156834 - DNA, 55 bp, Artificial
  Synthetic oligonucleotide
cagatccagcaatcggagcgctcatgcgtaacaaccaacctgtcacccaacgcga

SEQ ID NO: 156835 - DNA, 55 bp, Artificial
  Synthetic oligonucleotide
agttacgtggcagcgcgttcgcgagtgggtgtctgccggctaaaagccttgcgga

SEQ ID NO: 156836 - DNA, 55 bp, Artificial
  Synthetic oligonucleotide
cagagcttttgtctgaagctgagcgtgggcgtccgggcattcctggtagtgcggc

SEQ ID NO: 156837 - DNA, 55 bp, Artificial
  Synthetic oligonucleotide
agttagtcgagcgctggtcgcctcgagcgttcacattggatcctatcgatgagcg

SEQ ID NO: 156838 - DNA, 55 bp, Artificial
  Synthetic oligonucleotide
agttcatgtcggaacgacgccgataccgactggcctccgaacaggcccacgcgta

SEQ ID NO: 156839 - DNA, 53 bp, Artificial
  Synthetic oligonucleotide
agtttgtccgggtgacgggctccttgcttcccgcgcgcacctacgaacgggaa

SEQ ID NO: 156840 - DNA, 55 bp, Artificial
  Synthetic oligonucleotide
ataaaatcgtgaattctcaatgactgcgttcatgcctacagtgcacacaagcgct

SEQ ID NO: 156841 - DNA, 55 bp, Artificial
  Synthetic oligonucleotide
atacacaggtacggtgggatgcgatttcatcacgcgtcaacattgggtgcagtcg

SEQ ID NO: 156842 - DNA, 59 bp, Artificial
  Synthetic oligonucleotide
acaatacggattccgtgatgccgacctgtgcttgtcgcgcagtgtcgagtggtgccgtt

SEQ ID NO: 156843 - DNA, 53 bp, Artificial
  Synthetic oligonucleotide
atacagggcagacaccacgggaaaaggagaggtccggaaccggccctataggc

SEQ ID NO: 156844 - DNA, 55 bp, Artificial
  Synthetic oligonucleotide
cacgcgccctaccctatctaaacaatcaatcgcctaacgtatagacgcgatgaac

SEQ ID NO: 156845 - DNA, 55 bp, Artificial
  Synthetic oligonucleotide
cacgcgcaccaagggaaatccctgagcctcgcaatgcactgcaaacccggggtta

SEQ ID NO: 156846 - DNA, 55 bp, Artificial
  Synthetic oligonucleotide
atcctgtgagcgtcgctgagacaacagcgatccgggttggaagccggcaaattcc

SEQ ID NO: 156847 - DNA, 55 bp, Artificial
  Synthetic oligonucleotide
atcgcatcattcgctggttattgctcggtatgtttgcttgcaccgtaggtgctgc

SEQ ID NO: 156848 - DNA, 55 bp, Artificial
  Synthetic oligonucleotide
atcgccccgtcttgatacttggagtgttccgtgaacaccgatgcgagttgtagtc

SEQ ID NO: 156849 - DNA, 55 bp, Artificial
  Synthetic oligonucleotide
atcgcgccgaggcttcgcacggtggcctcgcgtgggcgaaacgcgccgcgtcagg

SEQ ID NO: 156850 - DNA, 55 bp, Artificial
  Synthetic oligonucleotide
atcggccgacgcatcccgctcggctgtcatttcgtcgctatgacgcaagctcggc

SEQ ID NO: 156851 - DNA, 55 bp, Artificial
  Synthetic oligonucleotide
cacgagcttcgtgtgcgacacgctgcagagcgcttccttgaacaggatatggttc

SEQ ID NO: 156852 - DNA, 55 bp, Artificial
  Synthetic oligonucleotide
atcggggtcggctcagaaggcgctgtgccccgcttaccgactctgcgggaagttg

SEQ ID NO: 156853 - DNA, 59 bp, Artificial
  Synthetic oligonucleotide
gtgatcgtcgtgccaatctgaaccgagtagttatccggcttgctgccgctcgaaattgc

SEQ ID NO: 156854 - DNA, 55 bp, Artificial
  Synthetic oligonucleotide
cacgagcggcaggcatcaacgaatcgttcagcacggagagcatatgagtcacggg

SEQ ID NO: 156855 - DNA, 55 bp, Artificial
  Synthetic oligonucleotide
atcggtgacgttatcaggacaattcaggaacgcacacggacatttgcgcggcgat

SEQ ID NO: 156856 - DNA, 55 bp, Artificial
  Synthetic oligonucleotide
cacgagcaagacgccgcaagttcttgaagcgtcacggtgcgccttacggggtgtt

SEQ ID NO: 156857 - DNA, 55 bp, Artificial
  Synthetic oligonucleotide
cacgacggggtgtgcaagatggggagcatcatggggtcggtcaatacgcagtcgc

SEQ ID NO: 156858 - DNA, 55 bp, Artificial
  Synthetic oligonucleotide
atcgtatcggatgggaatattgcttctgttcgcacgcctacgtttcgcgtcgctc

SEQ ID NO: 156859 - DNA, 55 bp, Artificial
  Synthetic oligonucleotide
atcgtgggtcggactgtgtccgcgcaatgatgagagctggtaagcgccgcagtac

SEQ ID NO: 156860 - DNA, 55 bp, Artificial
  Synthetic oligonucleotide
atctcgataatcgacaaaataggattccacgccaacctcaattaagcgacccaac

SEQ ID NO: 156861 - DNA, 55 bp, Artificial
  Synthetic oligonucleotide
atctgatgagttccggccagcctccgtctgtgaacgaaggtgcgagccagcccga

SEQ ID NO: 156862 - DNA, 55 bp, Artificial
  Synthetic oligonucleotide
cacgttggcggatagtgtagtgaaaggcgaaagtaaagcaacatagggaatcgcc

SEQ ID NO: 156863 - DNA, 55 bp, Artificial
  Synthetic oligonucleotide
cacgttggaaacggccgtcccttgcttagatcgtgatagagctggtcgattgggg

SEQ ID NO: 156864 - DNA, 58 bp, Artificial
  Synthetic oligonucleotide
agtcgctacttacaacgagcacgctcgaaaagctaaacgaccggcatactgcagccgt

SEQ ID NO: 156865 - DNA, 58 bp, Artificial
  Synthetic oligonucleotide
ccagtgcgtgtggtagtacgattgcatgtgtctccgcgtggggaagattaagggttcc

SEQ ID NO: 156866 - DNA, 59 bp, Artificial
  Synthetic oligonucleotide
gtcgtttgactgcgaacatgcgttcgggtgcagacgattatgccacgcgaagcccgccc

SEQ ID NO: 156867 - DNA, 55 bp, Artificial
  Synthetic oligonucleotide
cacgtgcgttgtcgacatatcgtgatagcgcttacattttggaacgagttgcgcg

SEQ ID NO: 156868 - DNA, 55 bp, Artificial
  Synthetic oligonucleotide
atcaaccgctgaacgcaacaagcgaagcgcgaaatctacgaaaaccggaggtcac

SEQ ID NO: 156869 - DNA, 55 bp, Artificial
  Synthetic oligonucleotide
cacgtgaccgctcgctccgaaaatgacgaacacgttgtgctccgtttgaggatcg

SEQ ID NO: 156870 - DNA, 55 bp, Artificial
  Synthetic oligonucleotide
atcaatatgaccgatcagaatcgggcgagcgcgtcttccgttcctttcgtctgtt

SEQ ID NO: 156871 - DNA, 55 bp, Artificial
  Synthetic oligonucleotide
cacgtcgccccagtacgattcctgtccagtaaccggctgcattccaacacgcata

SEQ ID NO: 156872 - DNA, 55 bp, Artificial
  Synthetic oligonucleotide
atcacttcgttcggtacagcggacattctcgtctcctgggtcctggaatgtgagg

SEQ ID NO: 156873 - DNA, 55 bp, Artificial
  Synthetic oligonucleotide
atcagcacacgggttgagtcgtccggtgtgacgtatacccgattggacgtcggct

SEQ ID NO: 156874 - DNA, 55 bp, Artificial
  Synthetic oligonucleotide
atcccgaattatagcgagagcgcaccagtttgctaatgaaatgcacgaatggatg

SEQ ID NO: 156875 - DNA, 55 bp, Artificial
  Synthetic oligonucleotide
cacggggaaggacgccgagtacatggagtttcgccccgaggtggccgattatcag

SEQ ID NO: 156876 - DNA, 55 bp, Artificial
  Synthetic oligonucleotide
atcccgacatgaaatggctccggtcagtgacaaaggcagggaagccacctctctg

SEQ ID NO: 156877 - DNA, 57 bp, Artificial
  Synthetic oligonucleotide
cggataagatacggcccgcccaagcggcctgatgaacaaacggagcgttttcagtga

SEQ ID NO: 156878 - DNA, 55 bp, Artificial
  Synthetic oligonucleotide
cacggccgaaacattcgcaggcaactttccgtcccaacgccgcagagcatcggtc

SEQ ID NO: 156879 - DNA, 55 bp, Artificial
  Synthetic oligonucleotide
atccggggcatttaccgtaacctgcgtagttcggacctcaccatgagcaagaggc

SEQ ID NO: 156880 - DNA, 55 bp, Artificial
  Synthetic oligonucleotide
cacggatgtgtatccgggcgttgctgtcgttgaaacagtattgggtcaagtgatg

SEQ ID NO: 156881 - DNA, 55 bp, Artificial
  Synthetic oligonucleotide
cacggagacgaggcaagcatgagcgaagcaccccacgaatctcccgtcaaaaccc

SEQ ID NO: 156882 - DNA, 54 bp, Artificial
  Synthetic oligonucleotide
cacggacaggccaaaccgttataatggacgtttacttgtcgtaccgttgcgtgc

SEQ ID NO: 156883 - DNA, 55 bp, Artificial
  Synthetic oligonucleotide
cacggacagactgtagcgagtcggctgggatattccgctttcggagcaatagcac

SEQ ID NO: 156884 - DNA, 55 bp, Artificial
  Synthetic oligonucleotide
cccgcgcatcatgtgttcccatgaacatttcgttcccgagccggaattgaaacgt

SEQ ID NO: 156885 - DNA, 55 bp, Artificial
  Synthetic oligonucleotide
cccgcgcgagttgatgcgcagtggataacgaggttctctcccctctgagtatccg

SEQ ID NO: 156886 - DNA, 55 bp, Artificial
  Synthetic oligonucleotide
cccgcttgtgcgcagtctcaaaacgaactattcaatctgtctgaatctatgagtt

SEQ ID NO: 156887 - DNA, 55 bp, Artificial
  Synthetic oligonucleotide
aagtagcgaacggcgtctgcatacatgccacgtcgactcagttccccgatgaacg

SEQ ID NO: 156888 - DNA, 59 bp, Artificial
  Synthetic oligonucleotide
cgtcctcagtattcaagagcgggacacgcaagtcccaggtcgcacaggtaaagcagccg

SEQ ID NO: 156889 - DNA, 55 bp, Artificial
  Synthetic oligonucleotide
cccggacattaccagcgccagtcgtgtgagatactgcgctacacccagattgtcc

SEQ ID NO: 156890 - DNA, 54 bp, Artificial
  Synthetic oligonucleotide
aaggtgaatttcattcggagttagcgcccattataatttcgacaacttttccga

SEQ ID NO: 156891 - DNA, 55 bp, Artificial
  Synthetic oligonucleotide
aaggagggtcccgtcatgggtatgcgtccagatcccacgttccacgcatcgccga

SEQ ID NO: 156892 - DNA, 55 bp, Artificial
  Synthetic oligonucleotide
aagctccggccgttacttgatccggcacgcttctccctgacggatgtgagtgccg

SEQ ID NO: 156893 - DNA, 55 bp, Artificial
  Synthetic oligonucleotide
cccggctaacgatttacaaggcgtaacagccgtacagcttattgcaactttggtc

SEQ ID NO: 156894 - DNA, 55 bp, Artificial
  Synthetic oligonucleotide
aagcgttccgtatgtaaccgcagaaacactttgtgcagatttcttagaagtccgc

SEQ ID NO: 156895 - DNA, 55 bp, Artificial
  Synthetic oligonucleotide
cccggtacaagttaccgatttatcctggtataagcggcaccagcctgtcatgccc

SEQ ID NO: 156896 - DNA, 55 bp, Artificial
  Synthetic oligonucleotide
cccggtctaccgcctgtcttctgtatgatgcgcaagtgcaattcaaccacagagc

SEQ ID NO: 156897 - DNA, 55 bp, Artificial
  Synthetic oligonucleotide
cccggtgagaacgcagcgatcatgtcggatgctccgagatctagtgtccgcgtac

SEQ ID NO: 156898 - DNA, 50 bp, Artificial
  Synthetic oligonucleotide
cccggttcaacggataacccggcaaaagtcagggttgctctcccgggaac

SEQ ID NO: 156899 - DNA, 59 bp, Artificial
  Synthetic oligonucleotide
tcgaccacctttgcaacttccgcgtacttgcttgtcacaaccggctgcatgtcattccg

SEQ ID NO: 156900 - DNA, 54 bp, Artificial
  Synthetic oligonucleotide
cccggttgacgttcgttccggttgctccgggttgaatcgcccaagtgcattcga

SEQ ID NO: 156901 - DNA, 55 bp, Artificial
  Synthetic oligonucleotide
cccggtttacacactcccggttcggtaaagtgcgttcacgctcacgatcaatcga

SEQ ID NO: 156902 - DNA, 55 bp, Artificial
  Synthetic oligonucleotide
cccgtacgcttcgccagtcagcagtagtaccgaaacttcgggtttggattggcgc

SEQ ID NO: 156903 - DNA, 55 bp, Artificial
  Synthetic oligonucleotide
cccgtgacgctatttgtgtacccgtctgccatctcgaatgctccatacgcgatga

SEQ ID NO: 156904 - DNA, 55 bp, Artificial
  Synthetic oligonucleotide
cccgttattgcatacatgttcattctctccgtgaatcggtgggtgaggctcccag

SEQ ID NO: 156905 - DNA, 55 bp, Artificial
  Synthetic oligonucleotide
cccgttcacccgcgtcagacaggaagcctcatgtccactaccgcctcgaatcacg

SEQ ID NO: 156906 - DNA, 53 bp, Artificial
  Synthetic oligonucleotide
cccgttggcccttttgggtccacccttggattcgagtgagagagcgagtgggg

SEQ ID NO: 156907 - DNA, 53 bp, Artificial
  Synthetic oligonucleotide
ccctaacgggcgaatatttatcgtagtgggctgagggtgttgtacgggtatgg

SEQ ID NO: 156908 - DNA, 55 bp, Artificial
  Synthetic oligonucleotide
ccctatcggtcaccgggcgtcgaactacatagtcctgatccggtgttgtaaggtg

SEQ ID NO: 156909 - DNA, 55 bp, Artificial
  Synthetic oligonucleotide
ccctgacgatgttcggcaataaccagaatcccgctcattacgcttctccccgaag

SEQ ID NO: 156910 - DNA, 56 bp, Artificial
  Synthetic oligonucleotide
gtcgactttggaacgggctcttcaccgctaccgtactaaacgcggagtgcaggtca

SEQ ID NO: 156911 - DNA, 55 bp, Artificial
  Synthetic oligonucleotide
aagcatccacacctatccaggtaggtaggtggcgcaaagattcagaatgcataag

SEQ ID NO: 156912 - DNA, 55 bp, Artificial
  Synthetic oligonucleotide
aagcaccgtgcaacacagcgcgagacttcgcgttcgccatgattcccgcgccgga

SEQ ID NO: 156913 - DNA, 55 bp, Artificial
  Synthetic oligonucleotide
ccctgccaatcggttcgtggaagtgccatcgatgacacgataggctcgcttctat

SEQ ID NO: 156914 - DNA, 53 bp, Artificial
  Synthetic oligonucleotide
aagattcaggggctttcggccgtttctgttccagacgtcacggcgtttgggcg

SEQ ID NO: 156915 - DNA, 55 bp, Artificial
  Synthetic oligonucleotide
ccctgctacgctatgtgagtcaggggcggtgcctgcgatcacccacttttgaacg

SEQ ID NO: 156916 - DNA, 55 bp, Artificial
  Synthetic oligonucleotide
ccctggcgcctagttcacaagtgcttgccttgcattgttcgcctagttttgcggc

SEQ ID NO: 156917 - DNA, 55 bp, Artificial
  Synthetic oligonucleotide
acaaaggcctcgtagttatcgtcgaacagtgcgtttggacacagatgggactgga

SEQ ID NO: 156918 - DNA, 55 bp, Artificial
  Synthetic oligonucleotide
acaaaccggccgcaagaaccggtcaatcgccgtcgctccgactgaagtcgaacgc

SEQ ID NO: 156919 - DNA, 55 bp, Artificial
  Synthetic oligonucleotide
aattggtcgcagttagcagcacttcgggtacatcagacagagtgacgcgcacacc

SEQ ID NO: 156920 - DNA, 55 bp, Artificial
  Synthetic oligonucleotide
aattgggcttgtgcccggaagcagcgtccagcctgttgttacccatttccgccgg

SEQ ID NO: 156921 - DNA, 59 bp, Artificial
  Synthetic oligonucleotide
gtctcgggcgtgctccaagtcgtttcgtccacgggtgttgttcgattgcgcaagtcatg

SEQ ID NO: 156922 - DNA, 54 bp, Artificial
  Synthetic oligonucleotide
ccccggacatttctcagctgttactccactacgtaccgttgtactatttggacc

SEQ ID NO: 156923 - DNA, 55 bp, Artificial
  Synthetic oligonucleotide
ccccggcgtcagaattgttgtcgtgtcacctgatttcgattgacccagtctgggg

SEQ ID NO: 156924 - DNA, 54 bp, Artificial
  Synthetic oligonucleotide
aatggatagaggccgccgttcccctggtagcgaacggtcaacgcccgaccacag

SEQ ID NO: 156925 - DNA, 54 bp, Artificial
  Synthetic oligonucleotide
cccctaaaatttcttcccgcaagctttcgtgtcccggctctgcatttggcgccc

SEQ ID NO: 156926 - DNA, 55 bp, Artificial
  Synthetic oligonucleotide
aatgccgccgagactacggcgtaccgtagcgttttgtaccgagccatcgtccggc

SEQ ID NO: 156927 - DNA, 55 bp, Artificial
  Synthetic oligonucleotide
aatgagcgctcgagacggatccttcacgatttgcgcgctccgctacggccccatg

SEQ ID NO: 156928 - DNA, 55 bp, Artificial
  Synthetic oligonucleotide
aatcggttggcgctagtctgcggtcagccgcaacataagagaagctaattcgcct

SEQ ID NO: 156929 - DNA, 54 bp, Artificial
  Synthetic oligonucleotide
ccccttcaccccattagtttaacgcctgtcgcgccctattctcttccgccagta

SEQ ID NO: 156930 - DNA, 55 bp, Artificial
  Synthetic oligonucleotide
aatcggataggggtcgacctgttgaccctctcgcctgttctgccgactgcaacgc

SEQ ID NO: 156931 - DNA, 55 bp, Artificial
  Synthetic oligonucleotide
aatcgaacgcgaatcgaaacaggtactcgtcgtacacgccccagatcgtgcgttt

SEQ ID NO: 156932 - DNA, 55 bp, Artificial
  Synthetic oligonucleotide
acacaaggtgcgtaggggcgttttctggtcgttgtctggctatgtagggcgaccg

SEQ ID NO: 156933 - DNA, 55 bp, Artificial
  Synthetic oligonucleotide
cccgaacaacccctggccaatcccacgacatgacgacatttgaccgcgagcactg

SEQ ID NO: 156934 - DNA, 55 bp, Artificial
  Synthetic oligonucleotide
cccgaacgtgttttgcttgcgctgtagcgtgaacaagcaccccggcagcgcacta

SEQ ID NO: 156935 - DNA, 55 bp, Artificial
  Synthetic oligonucleotide
cccgacagccgaaagacagaggcggggactgtttccaaaaccgtgtgatgcacgc

SEQ ID NO: 156936 - DNA, 55 bp, Artificial
  Synthetic oligonucleotide
cccgacctgacgacctagtaggccatcaatcgagactagcgtaatcagaatggaa

SEQ ID NO: 156937 - DNA, 55 bp, Artificial
  Synthetic oligonucleotide
cccgagagaatcaatgctcaagtgaagaaagcgagggttcgcggcagcgtgagat

SEQ ID NO: 156938 - DNA, 55 bp, Artificial
  Synthetic oligonucleotide
aatcagttgtcgcgttgcgggttccattattcagatcctctcgtcaacgaacgtt

SEQ ID NO: 156939 - DNA, 55 bp, Artificial
  Synthetic oligonucleotide
cccgaggtggaaattgtcgtcatcgatttctcctggatgaattgagcctgccctg

SEQ ID NO: 156940 - DNA, 55 bp, Artificial
  Synthetic oligonucleotide
cccgatcattctcgcggccgggtcatacgcatcggatagaggcatgtgcatccgc

SEQ ID NO: 156941 - DNA, 55 bp, Artificial
  Synthetic oligonucleotide
aatatggcggtctatgcaaatgtgcgcatttcccacgacgatcccattcaggcgc

SEQ ID NO: 156942 - DNA, 55 bp, Artificial
  Synthetic oligonucleotide
aatataccagcaagcctattggaccttattcgattccatcggagcttcggagggc

SEQ ID NO: 156943 - DNA, 56 bp, Artificial
  Synthetic oligonucleotide
gtccgatactagtgaagattacaggttcggtcgacagaggtcctcgcggtctttaa

SEQ ID NO: 156944 - DNA, 55 bp, Artificial
  Synthetic oligonucleotide
aagttcgtaattagaacaaaactgacgcacttctgttggaacacgtcttggctag

SEQ ID NO: 156945 - DNA, 55 bp, Artificial
  Synthetic oligonucleotide
cccgccaagtccaccagtgccctgtaatgttcgacgggatgcatctcctcgccac

SEQ ID NO: 156946 - DNA, 55 bp, Artificial
  Synthetic oligonucleotide
aagtgctctgaggcctcctgcatcgttcatcgaaaggaaaccatccgtggcaaac

SEQ ID NO: 156947 - DNA, 54 bp, Artificial
  Synthetic oligonucleotide
cccgcgaaccttaatatgagaaccccttatcctaaacgacaacagagcgggaga

SEQ ID NO: 156948 - DNA, 55 bp, Artificial
  Synthetic oligonucleotide
cccgcgcaacaagcatgccatacggctaaaccctgatcgctacgtacgtcggggc

SEQ ID NO: 156949 - DNA, 55 bp, Artificial
  Synthetic oligonucleotide
cccgcgcaatattccctccctcaccacgcgacaaatcctggaacgaaggacttgc

SEQ ID NO: 156950 - DNA, 55 bp, Artificial
  Synthetic oligonucleotide
ccgcaagcctggtcggagagctctttgtgaggcgctcacacgtgataatccgcca

SEQ ID NO: 156951 - DNA, 55 bp, Artificial
  Synthetic oligonucleotide
ccgcaccaacacgctcttggggttggatgcacgtagcataaccaatcatcctcag

SEQ ID NO: 156952 - DNA, 55 bp, Artificial
  Synthetic oligonucleotide
aaccgcaaccagtagtggcgccttgatactcctcagattcttggcggctttactg

SEQ ID NO: 156953 - DNA, 55 bp, Artificial
  Synthetic oligonucleotide
aaccctgaagctgcaatagttgactaggcagcagtataggcacaattgcttgccg

SEQ ID NO: 156954 - DNA, 59 bp, Artificial
  Synthetic oligonucleotide
gtgcgtgtacacgctctatatttttcactccgagcgcttttttggaccacatcgaccca

SEQ ID NO: 156955 - DNA, 55 bp, Artificial
  Synthetic oligonucleotide
aacccagcgcgatggtcattgtcactgcgtggtccttgacgcgttgcttgagcgt

SEQ ID NO: 156956 - DNA, 55 bp, Artificial
  Synthetic oligonucleotide
ccgcagatgggcacactttctctattgccccggtagggtctacaccgtttggaag

SEQ ID NO: 156957 - DNA, 55 bp, Artificial
  Synthetic oligonucleotide
aaccacctctttggggagtcgaagggccatgttacatatgcacttgcagtttggt

SEQ ID NO: 156958 - DNA, 54 bp, Artificial
  Synthetic oligonucleotide
aaccaaggggaacgttttggtacgatgcatgcttttccgacgacggtaatgcca

SEQ ID NO: 156959 - DNA, 55 bp, Artificial
  Synthetic oligonucleotide
aacagtacgggttcacgcttgaaacacgaacgcatcgattatcgcacgggcatcc

SEQ ID NO: 156960 - DNA, 55 bp, Artificial
  Synthetic oligonucleotide
ccgcataaaagcaataccgcgtctacgctctctcatggacgtcgtcatttaatcg

SEQ ID NO: 156961 - DNA, 55 bp, Artificial
  Synthetic oligonucleotide
ccgcataaggttgtaggcaagtacgttcaggctcatctcggtacctacattgggt

SEQ ID NO: 156962 - DNA, 55 bp, Artificial
  Synthetic oligonucleotide
ccgcatcgcacctggtgttgcaaggccatgccgcatcggtctacgactcctcttc

SEQ ID NO: 156963 - DNA, 55 bp, Artificial
  Synthetic oligonucleotide
ccgccatcctgcatcgtctttgctaaaatccgaactatgtccaagagtaccgatc

SEQ ID NO: 156964 - DNA, 55 bp, Artificial
  Synthetic oligonucleotide
ccgccccgcgggcagtagccctctgcatgacggtaacacggcgtggatgacttcc

SEQ ID NO: 156965 - DNA, 59 bp, Artificial
  Synthetic oligonucleotide
cacctattgttcgcgtgatagatcaagcctcatttagttgcggggtcgggattccagga

SEQ ID NO: 156966 - DNA, 55 bp, Artificial
  Synthetic oligonucleotide
ccgccggactaccggtcgatcacggtacgttagccagatgaggtccatcatgggc

SEQ ID NO: 156967 - DNA, 53 bp, Artificial
  Synthetic oligonucleotide
ccgcgaatcgcttcaagacttgaattgtaacccggttaaacagtttgttcaac

SEQ ID NO: 156968 - DNA, 55 bp, Artificial
  Synthetic oligonucleotide
aaagggttcgtctgttcacaataccttaacagttgacttatcgagatcggttcga

SEQ ID NO: 156969 - DNA, 55 bp, Artificial
  Synthetic oligonucleotide
aaagctccgacttgggacgagcctagcgcaagatagcccttatgggtcaacaggt

SEQ ID NO: 156970 - DNA, 55 bp, Artificial
  Synthetic oligonucleotide
aaagcgcgtaccttctaaggcacacgcacaagtcaaaggaccccacaaaatggcc

SEQ ID NO: 156971 - DNA, 55 bp, Artificial
  Synthetic oligonucleotide
ccgctacatacacgccgagcagtacgtttctgatgtggttcgcgcctatcaacaa

SEQ ID NO: 156972 - DNA, 55 bp, Artificial
  Synthetic oligonucleotide
aaactgctgtgcctcgacgttccgctgcccggtgcgagtccggaagcctatcaac

SEQ ID NO: 156973 - DNA, 55 bp, Artificial
  Synthetic oligonucleotide
ccgctaccaacgatgcgtctggagacaaatccccggcacattccgtcccaccgtc

SEQ ID NO: 156974 - DNA, 55 bp, Artificial
  Synthetic oligonucleotide
aaacgcccgcgcccgtagatactcggtcacaggcatagcgcactcattcgctcgc

SEQ ID NO: 156975 - DNA, 55 bp, Artificial
  Synthetic oligonucleotide
ccgctagcaggtggtgttcccacaggaattttgacacaaccctaatcagcgcgag

SEQ ID NO: 156976 - DNA, 60 bp, Artificial
  Synthetic oligonucleotide
ctgcctacaccccgcaaaaacagcatcagaatgcgtacgaatacatgcctgtccagcagc

SEQ ID NO: 156977 - DNA, 53 bp, Artificial
  Synthetic oligonucleotide
attcccgagcaaggggactggttacgccgcgtggttcaagggtacttcaacta

SEQ ID NO: 156978 - DNA, 55 bp, Artificial
  Synthetic oligonucleotide
ccgctcagttacatctgtgttgcagtgcctcattcctccgccttactggaacaac

SEQ ID NO: 156979 - DNA, 55 bp, Artificial
  Synthetic oligonucleotide
ccgctcgaaagaccgaagcctttacgccttcgactcttcctttgcgagactcgca

SEQ ID NO: 156980 - DNA, 55 bp, Artificial
  Synthetic oligonucleotide
aaacctcgccgtccgtgtggcgtggatcgtagcacgacgagcaagagtcggcacg

SEQ ID NO: 156981 - DNA, 54 bp, Artificial
  Synthetic oligonucleotide
aaaccgtcgacggacggttagcctggcagggagccaagtggaactggcaaggac

SEQ ID NO: 156982 - DNA, 55 bp, Artificial
  Synthetic oligonucleotide
ccgctgcatccccgtatccgattcgaatggagaccgcagtgacgaccgtcgacca

SEQ ID NO: 156983 - DNA, 55 bp, Artificial
  Synthetic oligonucleotide
aaaccgcgaggctcgatgcgtactcgacactgattccacgtcacccgggcaagcg

SEQ ID NO: 156984 - DNA, 55 bp, Artificial
  Synthetic oligonucleotide
ccgcttaagccatcgttcgccgagcgttaccaaccgcttatgagcgtcacttgcc

SEQ ID NO: 156985 - DNA, 53 bp, Artificial
  Synthetic oligonucleotide
ccctggctctttaaccgcttagaaatgccttccttgagaggttttataccgga

SEQ ID NO: 156986 - DNA, 55 bp, Artificial
  Synthetic oligonucleotide
ccctggggtcttgaatgagtgaccagcaaaacgtggacaagggtcgccgcaatct

SEQ ID NO: 156987 - DNA, 55 bp, Artificial
  Synthetic oligonucleotide
cccttttcaggcgtggtaatggatttgtcttcgttacttgtacggccaatagctc

SEQ ID NO: 156988 - DNA, 59 bp, Artificial
  Synthetic oligonucleotide
ctaaacggcagtgacgttgtgcgtgtgttgcaagccatcgtgatccgacgaggcatggt

SEQ ID NO: 156989 - DNA, 55 bp, Artificial
  Synthetic oligonucleotide
cccttttgaataggctcattgcaccgggacgagtctgccgagctttaggagtcgg

SEQ ID NO: 156990 - DNA, 54 bp, Artificial
  Synthetic oligonucleotide
ccgaaatgtggcgttacctttattacgggcgggatatgcggtgacaggtacgtg

SEQ ID NO: 156991 - DNA, 55 bp, Artificial
  Synthetic oligonucleotide
aactggcagttacccgagagatcggtgctcgcatacgcttagcgcgctctcgtcc

SEQ ID NO: 156992 - DNA, 53 bp, Artificial
  Synthetic oligonucleotide
ccgaacacgtttcgaacaacccaaggaacggcccttgcgacattcaggctccc

SEQ ID NO: 156993 - DNA, 55 bp, Artificial
  Synthetic oligonucleotide
ccgaacgatgcctggagcatggatttcgtggcggaccaactggctgatggttcga

SEQ ID NO: 156994 - DNA, 55 bp, Artificial
  Synthetic oligonucleotide
ccgaacgtcctccgaaacaaatggagatgccgctaaatccctgatccgacaaggc

SEQ ID NO: 156995 - DNA, 55 bp, Artificial
  Synthetic oligonucleotide
aactcacagggcgctcgcttaggagcgtgcggctcattcgatggcagctctggac

SEQ ID NO: 156996 - DNA, 54 bp, Artificial
  Synthetic oligonucleotide
aactatcgttttccgtcaaacgtagtgtcgcccttgaacaatgggcgaatgccg

SEQ ID NO: 156997 - DNA, 55 bp, Artificial
  Synthetic oligonucleotide
ccgaatctagctaagccaaacatccctcaagcccagccagtagggtgtccttagg

SEQ ID NO: 156998 - DNA, 55 bp, Artificial
  Synthetic oligonucleotide
ccgaccagtcagagaagtgcacctattcggacaaacgacgggcaccctctgcagc

SEQ ID NO: 156999 - DNA, 59 bp, Artificial
  Synthetic oligonucleotide
cgacccgggatgcactgacacacgaatccggaacgcaactgtccttgtgaatcggcaat

SEQ ID NO: 157000 - DNA, 55 bp, Artificial
  Synthetic oligonucleotide
ccgaccggcggataacggttgctttcccagctgaactggtaataagcctcggtgc

SEQ ID NO: 157001 - DNA, 55 bp, Artificial
  Synthetic oligonucleotide
aacgttggtattcgtccgacacaatcgcacttgaaccggggcgcgcatgaatcac

SEQ ID NO: 157002 - DNA, 55 bp, Artificial
  Synthetic oligonucleotide
aacgctaggcacgcttggaacgcagtcgcaacaccgaacaaacgagcgcgggtta

SEQ ID NO: 157003 - DNA, 55 bp, Artificial
  Synthetic oligonucleotide
ccgactctctatagcagctcgcgacactgtgcgaacttgcgcctcaggcaggtgg

SEQ ID NO: 157004 - DNA, 55 bp, Artificial
  Synthetic oligonucleotide
ccgacttcgcgagactcgacccgctggaaggggtagcaatgcgttagctgtgacc

SEQ ID NO: 157005 - DNA, 55 bp, Artificial
  Synthetic oligonucleotide
ccgagacgcttgggagtatcgtgtccacctaacgaataagcggacacgtgaacac

SEQ ID NO: 157006 - DNA, 55 bp, Artificial
  Synthetic oligonucleotide
aacgccactgatttcaagctcggcccgtttcgatttcaagtcgctacacatagcg

SEQ ID NO: 157007 - DNA, 55 bp, Artificial
  Synthetic oligonucleotide
ccgagatgacccgggacataccaacctcgctgaaacggtgattcgagacgccgca

SEQ ID NO: 157008 - DNA, 55 bp, Artificial
  Synthetic oligonucleotide
ccgagtccaacttggggatcgttcaaaagtcgtaccgcgccaggcacaggttctg

SEQ ID NO: 157009 - DNA, 55 bp, Artificial
  Synthetic oligonucleotide
ccgagtcggcctacttccaacgtatcggttcgcaggcttaaaccatggctaccaa

SEQ ID NO: 157010 - DNA, 57 bp, Artificial
  Synthetic oligonucleotide
atagccggtatcgttcacaaggaatgtccccggcgtatacatggcccaaggcgtgcc

SEQ ID NO: 157011 - DNA, 55 bp, Artificial
  Synthetic oligonucleotide
ccgagttacgaacagggttgctcgtagcaggacaaagcaaaatctggaggtagag

SEQ ID NO: 157012 - DNA, 55 bp, Artificial
  Synthetic oligonucleotide
aacgaataggaagcacatcacggcgcgaacctaaagcaccagatggtgtggccgt

SEQ ID NO: 157013 - DNA, 55 bp, Artificial
  Synthetic oligonucleotide
ccgagtttattagtcgagaaagtgtgaaccgaataattcaaggcgtgaatagcag

SEQ ID NO: 157014 - DNA, 55 bp, Artificial
  Synthetic oligonucleotide
ccgataagcatgcacacctatccaggtaggtaggtggcggaacgattcaaaatgc

SEQ ID NO: 157015 - DNA, 55 bp, Artificial
  Synthetic oligonucleotide
ccgataccaccagaactgatggccaggcgcgttcgttctcgcaccggcacagtct

SEQ ID NO: 157016 - DNA, 55 bp, Artificial
  Synthetic oligonucleotide
ccgatatgaccaaaattgacagacctttcccgcgcaatcgtctaacttttaagtc

SEQ ID NO: 157017 - DNA, 55 bp, Artificial
  Synthetic oligonucleotide
aacctgccgcataaaccacgccgcaatggatccattcgcaaaagaaacccttccg

SEQ ID NO: 157018 - DNA, 55 bp, Artificial
  Synthetic oligonucleotide
aaccgtgccccgccatgcgaaccggccagacgaccacaaggcgttgagcagaact

SEQ ID NO: 157019 - DNA, 55 bp, Artificial
  Synthetic oligonucleotide
ccgcaacatcgtcaccagcccgccagaacccgtcgtgatggactcggaaatttcg

SEQ ID NO: 157020 - DNA, 55 bp, Artificial
  Synthetic oligonucleotide
acctaacggtgtccgcgtgtcctgagttacaggggcaactccagtgcgtcatacg

SEQ ID NO: 157021 - DNA, 59 bp, Artificial
  Synthetic oligonucleotide
tgcaatgggaaggcggttcatcgtagtgccccgttcggaatcgatcggcaagagatgcc

SEQ ID NO: 157022 - DNA, 55 bp, Artificial
  Synthetic oligonucleotide
acctcgaatcctcgttttcattcctgcctatcgatgcgaagcgcaagtcgtgcga

SEQ ID NO: 157023 - DNA, 55 bp, Artificial
  Synthetic oligonucleotide
accagttggttgccttagcggcgggtgcggagtgtgtaaggtcgcggtgtgcaga

SEQ ID NO: 157024 - DNA, 55 bp, Artificial
  Synthetic oligonucleotide
ccatggacctggctctttcacacgataaatgatgcttcgcgcgccgtgaacgagc

SEQ ID NO: 157025 - DNA, 55 bp, Artificial
  Synthetic oligonucleotide
ccatgtctgtgttgtctgcagtgagtgaacatcaacctgggtacgagcaagaagc

SEQ ID NO: 157026 - DNA, 55 bp, Artificial
  Synthetic oligonucleotide
ccattattttcctgacccagtgcacatttgactagctaatcaccgctgattgcgc

SEQ ID NO: 157027 - DNA, 55 bp, Artificial
  Synthetic oligonucleotide
ccattcaccggcactccgactcatagcgctccccaatttctatgtaagcccgatg

SEQ ID NO: 157028 - DNA, 55 bp, Artificial
  Synthetic oligonucleotide
ccagtagacatcgagtctcactcccttgtcgtttgccaactgcgagatggcattt

SEQ ID NO: 157029 - DNA, 55 bp, Artificial
  Synthetic oligonucleotide
acctgtgggctgcgtatcagccttgacgggtgacgtcagcgtcgcacccgtaact

SEQ ID NO: 157030 - DNA, 55 bp, Artificial
  Synthetic oligonucleotide
acatttctcaagatgctccgctgaattatttccaaggacggataggggctgtcga

SEQ ID NO: 157031 - DNA, 55 bp, Artificial
  Synthetic oligonucleotide
acgacaaactgaggaattggcttatgcgtgaagctgtcattgtttctactgcgcg

SEQ ID NO: 157032 - DNA, 58 bp, Artificial
  Synthetic oligonucleotide
aaaacacgtcaatatggcgaccccggccatacgcattcacaagatgccgcggcccaaa

SEQ ID NO: 157033 - DNA, 55 bp, Artificial
  Synthetic oligonucleotide
ccaggtagcaacaccgcaaatcagcatcccatgcagacaagcgctccactaacga

SEQ ID NO: 157034 - DNA, 55 bp, Artificial
  Synthetic oligonucleotide
acatggtcttttcggtgaaatgagtgacgggtgcagggagtcgtgttcatcaggc

SEQ ID NO: 157035 - DNA, 55 bp, Artificial
  Synthetic oligonucleotide
acatgggtcgacgcgcagacatacgtgcgcgccacctacgagctcagtgggtcgc

SEQ ID NO: 157036 - DNA, 55 bp, Artificial
  Synthetic oligonucleotide
ccattttcgacatacgtgcactccggcgtcgtgacattgatcacggcggagccac

SEQ ID NO: 157037 - DNA, 55 bp, Artificial
  Synthetic oligonucleotide
acgacctagtaggccatcaatcgagactagcgtaatcagaatggaaatcgggcgc

SEQ ID NO: 157038 - DNA, 55 bp, Artificial
  Synthetic oligonucleotide
acaggttcggctcgccgcagatatgggttcggcctttcgcagaatcgagtacgct

SEQ ID NO: 157039 - DNA, 55 bp, Artificial
  Synthetic oligonucleotide
ccagggcacgtgtacaacgtcatctcaaactgactgaccaagtgaaacgattcct

SEQ ID NO: 157040 - DNA, 55 bp, Artificial
  Synthetic oligonucleotide
acgacggactgtggaccgattacgaaatcggcaagtggcggctgatcggttatgt

SEQ ID NO: 157041 - DNA, 55 bp, Artificial
  Synthetic oligonucleotide
ccagcggatgccgagccataccatcagccggtgccaatactcgccgggatttgca

SEQ ID NO: 157042 - DNA, 55 bp, Artificial
  Synthetic oligonucleotide
acagctaccccaatctagagagggcagcaccgggtgacgtcggtctggaggctac

SEQ ID NO: 157043 - DNA, 58 bp, Artificial
  Synthetic oligonucleotide
ggcacgaaatttcggtactgtgcaaaggtgatgccccccctcagcgcctgagaccgtc

SEQ ID NO: 157044 - DNA, 55 bp, Artificial
  Synthetic oligonucleotide
ccagcgcagcgcgagtgggcatgctgcgatcgcaaacgtcatgatcaatacgacg

SEQ ID NO: 157045 - DNA, 53 bp, Artificial
  Synthetic oligonucleotide
cccaacccctaggttgagtggttgttccatccgtattaaccgcctgtcctgta

SEQ ID NO: 157046 - DNA, 55 bp, Artificial
  Synthetic oligonucleotide
acagactgaagtggtcaagccgaagtaagtgactcagataagcaacctttgacgt

SEQ ID NO: 157047 - DNA, 55 bp, Artificial
  Synthetic oligonucleotide
cccaacgacacgacaggcactttgcgaacccttcagtgggatgggcaaacttccc

SEQ ID NO: 157048 - DNA, 55 bp, Artificial
  Synthetic oligonucleotide
cccaccgattcacggagagaatgaacatgtatgcaataacgggagcatccgggca

SEQ ID NO: 157049 - DNA, 55 bp, Artificial
  Synthetic oligonucleotide
ccagttttgcagtgctgagacgtactgacgcacctccgtggagaacctctctgcc

SEQ ID NO: 157050 - DNA, 55 bp, Artificial
  Synthetic oligonucleotide
ccagtttaaagcgttccctaccttgtcctcgcgccaagcgaggtagccattcgtg

SEQ ID NO: 157051 - DNA, 55 bp, Artificial
  Synthetic oligonucleotide
ccatatccgagggccgagctagaacctgagagacaagttcatcttaccgaacgtg

SEQ ID NO: 157052 - DNA, 55 bp, Artificial
  Synthetic oligonucleotide
ccatcactggccacgagagcgtactcgccggtgtcccgacactcatcaaggacct

SEQ ID NO: 157053 - DNA, 54 bp, Artificial
  Synthetic oligonucleotide
ccagttcaaagggttcactccaatttgggtggacacccatactccgcttccaac

SEQ ID NO: 157054 - DNA, 57 bp, Artificial
  Synthetic oligonucleotide
ccccgcgtccgcaagctgaaatcaaatcgacgcaaggccccatcgtatcacgccttt

SEQ ID NO: 157055 - DNA, 55 bp, Artificial
  Synthetic oligonucleotide
ccatcatgaccatcgattccgcacttgaacgctatcttcaaacgttgccccgtga

SEQ ID NO: 157056 - DNA, 55 bp, Artificial
  Synthetic oligonucleotide
accgcacacaaggatcgtctcggtattacctgtgagtacgacatagacgcactca

SEQ ID NO: 157057 - DNA, 55 bp, Artificial
  Synthetic oligonucleotide
accgactgcccggattcgcaagccaccacgccgacgcatcccgaggcaaccacag

SEQ ID NO: 157058 - DNA, 55 bp, Artificial
  Synthetic oligonucleotide
ccatccttcagaaagtggctctgctatgcaaagttatttctgggacagaacacta

SEQ ID NO: 157059 - DNA, 55 bp, Artificial
  Synthetic oligonucleotide
accggcaaccgaaagtgcaatgattaacgcatgccatagcggcatgggaagcacg

SEQ ID NO: 157060 - DNA, 55 bp, Artificial
  Synthetic oligonucleotide
ccagtgggtgacgggcgatcaatgggtcaagtacttcgtcacgcgcgtacccaca

SEQ ID NO: 157061 - DNA, 55 bp, Artificial
  Synthetic oligonucleotide
accgacggttgccgggccgaatgcgtacgaaccagcaacgccgaattcacgctga

SEQ ID NO: 157062 - DNA, 55 bp, Artificial
  Synthetic oligonucleotide
accgtccgccaccatgcgaccagccattagatcctcccggctggcaagaaccccg

SEQ ID NO: 157063 - DNA, 55 bp, Artificial
  Synthetic oligonucleotide
ccatcgaatgagccgcacgctcctaagcgagcgccctgtgagttgcggccatagt

SEQ ID NO: 157064 - DNA, 55 bp, Artificial
  Synthetic oligonucleotide
ccatcgcactcgctagcggggcacttttatacgctccggcacacgctattgctgc

SEQ ID NO: 157065 - DNA, 59 bp, Artificial
  Synthetic oligonucleotide
ataatcgaaagcaccggcttcgataacagaccagttcaagaagtctgcacgtggatcat

SEQ ID NO: 157066 - DNA, 54 bp, Artificial
  Synthetic oligonucleotide
accgtccgtcagttcggattcgaaacgcagaacgcgccgactactggttttcac

SEQ ID NO: 157067 - DNA, 55 bp, Artificial
  Synthetic oligonucleotide
ccatgcaagggcttcgctcttggtcgcaaacttctttgaagtggcagggtagccc

SEQ ID NO: 157068 - DNA, 55 bp, Artificial
  Synthetic oligonucleotide
accgtcgctatcgctcgaggacggatcttgctctggcggtcctgatcgaaggggt

SEQ ID NO: 157069 - DNA, 55 bp, Artificial
  Synthetic oligonucleotide
acccgttcagtcagggcaagcctcccggaagggtacacgcgtcctgcagagtgga

SEQ ID NO: 157070 - DNA, 55 bp, Artificial
  Synthetic oligonucleotide
ccatgcgacaaccgtcacggcaagcaacaccctgcggtgcgccgtaagaagtctg

SEQ ID NO: 157071 - DNA, 55 bp, Artificial
  Synthetic oligonucleotide
acccggcatatcgcgcaagcaagcccgttcgcgttgctccaacagaatcgcgggt

SEQ ID NO: 157072 - DNA, 54 bp, Artificial
  Synthetic oligonucleotide
accgtctttggaacaaagcgatgaggtttaaacaacgtgcttccccagtgtgta

SEQ ID NO: 157073 - DNA, 55 bp, Artificial
  Synthetic oligonucleotide
ccagtgccctggtatgggttgtctcgttatagtgatttcactatgtacaccagcg

SEQ ID NO: 157074 - DNA, 55 bp, Artificial
  Synthetic oligonucleotide
ccatgctatcgcgaatcgtaccagccgcatgcctgcgcggacgtactgtttcggc

SEQ ID NO: 157075 - DNA, 55 bp, Artificial
  Synthetic oligonucleotide
ccagtgatgttatggtggatagtaggaagccgatatagtggcgtcaaggacggac

SEQ ID NO: 157076 - DNA, 59 bp, Artificial
  Synthetic oligonucleotide
gataccgcggcgtgcaatacgagccttgatgccgcgctgtctcagataacgtcgacaac

SEQ ID NO: 157077 - DNA, 55 bp, Artificial
  Synthetic oligonucleotide
acacgaaacagccacggtctcgactggccagctctggcctgcatagcgcctcatg

SEQ ID NO: 157078 - DNA, 55 bp, Artificial
  Synthetic oligonucleotide
acgccattgggcaactgcgccgaaagtcgagcctgcacggcggagcttatcgagt

SEQ ID NO: 157079 - DNA, 55 bp, Artificial
  Synthetic oligonucleotide
acaccgctaaacgatccgtagccgaaccctgcaaggccggcgattaccgcagtcg

SEQ ID NO: 157080 - DNA, 55 bp, Artificial
  Synthetic oligonucleotide
ccccactcgatacaggtatggttgtgtggaagggcaatcagtcgacacgggctgc

SEQ ID NO: 157081 - DNA, 55 bp, Artificial
  Synthetic oligonucleotide
acgccagcgcggaaacgagaatgaaccgtccgaaagtggcgcgttgtggtcggac

SEQ ID NO: 157082 - DNA, 55 bp, Artificial
  Synthetic oligonucleotide
ccagcctgactttgggatttcccgcctttccaaattcagcgacaacgtcttgtgc

SEQ ID NO: 157083 - DNA, 55 bp, Artificial
  Synthetic oligonucleotide
ccagagcggaagcggtgtgaaaagaaaacccatgcgtccatattactcgttgagc

SEQ ID NO: 157084 - DNA, 55 bp, Artificial
  Synthetic oligonucleotide
cccagtggacgagcttggcggtcaagatggcctcaaatgttcggaatgcgcccaa

SEQ ID NO: 157085 - DNA, 55 bp, Artificial
  Synthetic oligonucleotide
ccccacgtatctgaggacacgaggactctcttaaaataagggatagtcttgtgcc

SEQ ID NO: 157086 - DNA, 55 bp, Artificial
  Synthetic oligonucleotide
acgcatggcactgctcccgcttgcttcctactacccatccgaatcactgaaccgg

SEQ ID NO: 157087 - DNA, 60 bp, Artificial
  Synthetic oligonucleotide
cagcacgcgctagcagcgcgggtgtggaaacgcaatctcatccgacacagattccactgt

SEQ ID NO: 157088 - DNA, 58 bp, Artificial
  Synthetic oligonucleotide
caaaaggcccgtgcatggctaagccgggttctctccgacttcttggcttccgcatatc

SEQ ID NO: 157089 - DNA, 55 bp, Artificial
  Synthetic oligonucleotide
acgcaaccccgtcgccggtagtggcattactgtgcgcgatactggtgtcttcgcc

SEQ ID NO: 157090 - DNA, 55 bp, Artificial
  Synthetic oligonucleotide
acacaaaacttgacatctaggtcatgttaccattatgctatgcgtccttaggacg

SEQ ID NO: 157091 - DNA, 55 bp, Artificial
  Synthetic oligonucleotide
ccagcaaagcgagacacggcaaatcgcgcgtgaggccaaggtctgtgcgttggtc

SEQ ID NO: 157092 - DNA, 55 bp, Artificial
  Synthetic oligonucleotide
acgcaagcaatgaattgtgaaatcacttcaaacgtggcgagggaagaacagccga

SEQ ID NO: 157093 - DNA, 51 bp, Artificial
  Synthetic oligonucleotide
ccccacggaaaccctttccaccattgggttttcgcacaacggacacaatcg

SEQ ID NO: 157094 - DNA, 55 bp, Artificial
  Synthetic oligonucleotide
cccatcgcgtaaaccggcaagtctttctaggatagatacaccgcgcatgcacacg

SEQ ID NO: 157095 - DNA, 55 bp, Artificial
  Synthetic oligonucleotide
ccagccagaatgctcgagcccctcttcggtcgtgtagtaattgtccttggagaaa

SEQ ID NO: 157096 - DNA, 55 bp, Artificial
  Synthetic oligonucleotide
ccccacgataaacgctgaacagcgctcatgtcgcaatccagaagactgcgccgaa

SEQ ID NO: 157097 - DNA, 55 bp, Artificial
  Synthetic oligonucleotide
ccagcaggcgccgacatgcaaagccactcgcatacgtcatttgcatgccgtatcg

SEQ ID NO: 157098 - DNA, 55 bp, Artificial
  Synthetic oligonucleotide
cccatgcggtatgcgatgggtctcggggcggaaagacaaacgtcgtttcggtgta

SEQ ID NO: 157099 - DNA, 58 bp, Artificial
  Synthetic oligonucleotide
gtcgggacaccggcgagtacgctctcgtggccagtgatggtcgatgcggctagtctgg

SEQ ID NO: 157100 - DNA, 55 bp, Artificial
  Synthetic oligonucleotide
ccagcattttagcgcggaataacgcgcaatccgacatctgtaacgtttccagtcg

SEQ ID NO: 157101 - DNA, 51 bp, Artificial
  Synthetic oligonucleotide
ccccgaaacgagcattctatctataaccccgacccttttcagggacaaccc

SEQ ID NO: 157102 - DNA, 55 bp, Artificial
  Synthetic oligonucleotide
cccacgcatagcaacgtcgcaaggttgttcaacgcgtgtagttacaactacgcgg

SEQ ID NO: 157103 - DNA, 55 bp, Artificial
  Synthetic oligonucleotide
acactcgtttgtcgcaagcgagcggtttacttgttgccgcgtcatgccgtatgct

SEQ ID NO: 157104 - DNA, 55 bp, Artificial
  Synthetic oligonucleotide
acgccgcatagagcaattccgtacgcccttcagtcacgtgctgtccctcaaatcc

SEQ ID NO: 157105 - DNA, 55 bp, Artificial
  Synthetic oligonucleotide
acacgtctgcccaccagaacgggcgaacgctcgggtccccaattccattgcgcat

SEQ ID NO: 157106 - DNA, 55 bp, Artificial
  Synthetic oligonucleotide
ccccatcgtgcacgtggagcaacggggcgacatctcggtaatgggaacggatgga

SEQ ID NO: 157107 - DNA, 51 bp, Artificial
  Synthetic oligonucleotide
cccagaataccgggtagggagttccattcgtaacgccctttagatcttttc

SEQ ID NO: 157108 - DNA, 54 bp, Artificial
  Synthetic oligonucleotide
cccagacagcgcttttctgaccgcctcgaaaggggcgtagcccgaaagttgtcc

SEQ ID NO: 157109 - DNA, 55 bp, Artificial
  Synthetic oligonucleotide
acacgcgacgacacgcgacgacacgcgacgacacgcgacgacacgcgacgacacg

SEQ ID NO: 157110 - DNA, 58 bp, Artificial
  Synthetic oligonucleotide
tgcatcggattggccccgccacgcgtcacgatcacttattgagcccggcggttgaatc

SEQ ID NO: 157111 - DNA, 53 bp, Artificial
  Synthetic oligonucleotide
ccccgaactacccgtaattaagcagatcagggatatcccttggttgtccggac

SEQ ID NO: 157112 - DNA, 55 bp, Artificial
  Synthetic oligonucleotide
cccagagtgtcctatgtcccgaaccttcgcatacgcacgtgttagcacgacagac

SEQ ID NO: 157113 - DNA, 55 bp, Artificial
  Synthetic oligonucleotide
acacgatggttcaggattaatcgtttgatcgggtgcttaagctccgccaatatgg

SEQ ID NO: 157114 - DNA, 55 bp, Artificial
  Synthetic oligonucleotide
ccagacgaggtcttgtctctcaacggcgtatggggagctgagtttctacgtagaa

SEQ ID NO: 157115 - DNA, 54 bp, Artificial
  Synthetic oligonucleotide
gaactggttggtttccataaagcgggtgatttcactcctcgctatattccattg

SEQ ID NO: 157116 - DNA, 54 bp, Artificial
  Synthetic oligonucleotide
ttttgcgttgtgccattgatgacctcagtgcttccgacgcatgtcgaaatcact

SEQ ID NO: 157117 - DNA, 54 bp, Artificial
  Synthetic oligonucleotide
ttttgcgagggacgttcaccaagtagacaggagtcctgacactacgcgacaaaa

SEQ ID NO: 157118 - DNA, 54 bp, Artificial
  Synthetic oligonucleotide
tgcttaaattcaccccgttggatgaaacaggggtgccgtacggatgggccgtgc

SEQ ID NO: 157119 - DNA, 54 bp, Artificial
  Synthetic oligonucleotide
ttgggtccgctgctgacgtcgaattcgaaattcccctcaagatcggcattcgag

SEQ ID NO: 157120 - DNA, 54 bp, Artificial
  Synthetic oligonucleotide
gaacgatcaagtcactctccatggccaacgtcagtactttctgttcgtcgaacg

SEQ ID NO: 157121 - DNA, 51 bp, Artificial
  Synthetic oligonucleotide
atggttgcccgttatgggaaccgtgagtttaggggtgtaccctagggccgc

SEQ ID NO: 157122 - DNA, 54 bp, Artificial
  Synthetic oligonucleotide
atgcgagatgcgcggtgcgttcatgtcgcttcggaccccacaatccaaactgag

SEQ ID NO: 157123 - DNA, 54 bp, Artificial
  Synthetic oligonucleotide
ggaacatctaattgccggaatttggacatcgagacaatgcgagacagtttcgca

SEQ ID NO: 157124 - DNA, 54 bp, Artificial
  Synthetic oligonucleotide
ttttcgccggtccacaagaccagcgactttgcatgcccagcggtcaatcgaaac

SEQ ID NO: 157125 - DNA, 54 bp, Artificial
  Synthetic oligonucleotide
gcttccggatgccgtcctgaagtgcggcgaaactcgatcggtcggaactcgagt

SEQ ID NO: 157126 - DNA, 54 bp, Artificial
  Synthetic oligonucleotide
gtacagactgccatccggcgctccccagataccatggggatagataccaaaagt

SEQ ID NO: 157127 - DNA, 54 bp, Artificial
  Synthetic oligonucleotide
cttttctcccaaccgactgagcagcatgcaaacgagacacgtctacttcggagg

SEQ ID NO: 157128 - DNA, 54 bp, Artificial
  Synthetic oligonucleotide
gcttacgaactcatgtcggttctgtttaatggaaaagcgacggccgagcgatgg

SEQ ID NO: 157129 - DNA, 54 bp, Artificial
  Synthetic oligonucleotide
gaaacagcgttcgcacgcgtggtggaaggaccggttactgctcttgtcagctgc

SEQ ID NO: 157130 - DNA, 54 bp, Artificial
  Synthetic oligonucleotide
tttctcgcgtcattcgtggcatagttcgatcgattaccacataaggagcaatca

SEQ ID NO: 157131 - DNA, 54 bp, Artificial
  Synthetic oligonucleotide
ttcaccatgcgtaatgctgtccgaaacactctgccgaacaccatattggatatt

SEQ ID NO: 157132 - DNA, 56 bp, Artificial
  Synthetic oligonucleotide
atgggaaccgggcattcgttacaatctggctttcgtctttgaccgccaggcacggc

SEQ ID NO: 157133 - DNA, 54 bp, Artificial
  Synthetic oligonucleotide
ttcaatcggcgaaactcgcgtaagaacaacgtaggctgggatttccccactctc

SEQ ID NO: 157134 - DNA, 54 bp, Artificial
  Synthetic oligonucleotide
aaatttaagcggtggtcgcacgacttctctccttcagtcgctcgttaaacgcat

SEQ ID NO: 157135 - DNA, 54 bp, Artificial
  Synthetic oligonucleotide
ttcatacgcagaaacgggtacgccccggcatttatcggtcccgcagaaatgggt

SEQ ID NO: 157136 - DNA, 54 bp, Artificial
  Synthetic oligonucleotide
ctgccccttttcacgcacggatgaattatcactttccgaaaggcggtcaacaat

SEQ ID NO: 157137 - DNA, 54 bp, Artificial
  Synthetic oligonucleotide
attcggtcatggagtcggattacaagcccgcgaacgcggaatcggaggtcgaac

SEQ ID NO: 157138 - DNA, 54 bp, Artificial
  Synthetic oligonucleotide
ttccttcgcgaggcgtacccatttctgcgcaagcggagtggttggcggcagaag

SEQ ID NO: 157139 - DNA, 54 bp, Artificial
  Synthetic oligonucleotide
ttcgcaccggaaaaggtaagtgcgtgcgccatggttagggcctcagaatacgca

SEQ ID NO: 157140 - DNA, 54 bp, Artificial
  Synthetic oligonucleotide
acgtaatgcgatgtcggatggtcatgtgaatccccgtagcagccatgtgtgtga

SEQ ID NO: 157141 - DNA, 54 bp, Artificial
  Synthetic oligonucleotide
ttatcgatcacgacccgtacttccgcactccggagacacagcgcacgcatcctg

SEQ ID NO: 157142 - DNA, 54 bp, Artificial
  Synthetic oligonucleotide
ggggcaggtcaacaggcgtttagtctgcgcgagtgctgctgccgaactgcggcg

SEQ ID NO: 157143 - DNA, 58 bp, Artificial
  Synthetic oligonucleotide
gaacaaggctcgaaccctgcactagctgcaaagagcgcccatcgtttgcctaagtagg

SEQ ID NO: 157144 - DNA, 54 bp, Artificial
  Synthetic oligonucleotide
atgtgggaggctgcttacgacgaggggactggcgggacctttgagtccgccagt

SEQ ID NO: 157145 - DNA, 54 bp, Artificial
  Synthetic oligonucleotide
tgtcagcggattctagaggccatgcacgcgccgtcaaagcaaggcacgggcaaa

SEQ ID NO: 157146 - DNA, 54 bp, Artificial
  Synthetic oligonucleotide
ctcgttgaaaagacgggtgtcgagcgttgcacccagatgcgaagtcaggaagtc

SEQ ID NO: 157147 - DNA, 54 bp, Artificial
  Synthetic oligonucleotide
ctcgtctggcatacggaatcccgatacacgcgctatcggatcgatcttccgcgt

SEQ ID NO: 157148 - DNA, 54 bp, Artificial
  Synthetic oligonucleotide
attggcgtgaacaggccctagcccgcagtcaaccggaagcaatcgatatgagcc

SEQ ID NO: 157149 - DNA, 54 bp, Artificial
  Synthetic oligonucleotide
tgggctgttctcggtagctggggcttgagtgtaagtgcggcgcgtgtttccgtg

SEQ ID NO: 157150 - DNA, 54 bp, Artificial
  Synthetic oligonucleotide
ggggcaggcggacaatatgagcccggtgatacgggcggatcggacacagtgacg

SEQ ID NO: 157151 - DNA, 54 bp, Artificial
  Synthetic oligonucleotide
ggcccctatttatgcgaaacctggcccctaattatgcgtggataacttctctta

SEQ ID NO: 157152 - DNA, 54 bp, Artificial
  Synthetic oligonucleotide
ggggaatgttcgggcttaaccgctcgtcatgtattgcagtaccaacaacctatc

SEQ ID NO: 157153 - DNA, 54 bp, Artificial
  Synthetic oligonucleotide
acgtttaaccaaacgggataatctgcattcgccgtcgcttctgcatatgtcgat

SEQ ID NO: 157154 - DNA, 52 bp, Artificial
  Synthetic oligonucleotide
ggcacaccggtaaccccttggcaggggaacgtaagcggcgtgttgctaaaaa

SEQ ID NO: 157155 - DNA, 54 bp, Artificial
  Synthetic oligonucleotide
ttgaaattaccggactgtatgacgccttgcttcatgaggctcgcgagcgtgcga

SEQ ID NO: 157156 - DNA, 53 bp, Artificial
  Synthetic oligonucleotide
aaccgggagtcaaactcccgccctgtaattgaccggaggcgagatgggtctag

SEQ ID NO: 157157 - DNA, 54 bp, Artificial
  Synthetic oligonucleotide
ggacggtcgctgacgcatggacgtcaaccgcgttcgctttgtccccgcgcatcg

SEQ ID NO: 157158 - DNA, 54 bp, Artificial
  Synthetic oligonucleotide
cttcgttttgacagcaaggggagaaacagccatgcgagctaagtaccttatcgc

SEQ ID NO: 157159 - DNA, 54 bp, Artificial
  Synthetic oligonucleotide
cttgagatccgtcggattggtcatggctaggcatccctagagtacaatgcaggg

SEQ ID NO: 157160 - DNA, 54 bp, Artificial
  Synthetic oligonucleotide
tggactcatcggagcagacttagttgcgaaatcacctgcagatagctacaccct

SEQ ID NO: 157161 - DNA, 54 bp, Artificial
  Synthetic oligonucleotide
ttgcgcgcgtgccttcgctagctgccatatcgttaaagccacccaaattgtcga

SEQ ID NO: 157162 - DNA, 54 bp, Artificial
  Synthetic oligonucleotide
cttgttagccagaagcactcttaaaggggagcggatcctcaattaagggtcgaa

SEQ ID NO: 157163 - DNA, 54 bp, Artificial
  Synthetic oligonucleotide
gttgaattgaatgagtccacgctaatcgatccttccgcttggaaatcaattggc

SEQ ID NO: 157164 - DNA, 54 bp, Artificial
  Synthetic oligonucleotide
gcacccgacaggttctgccggcgtgagtcacttatgtgagcaggtcagacggac

SEQ ID NO: 157165 - DNA, 58 bp, Artificial
  Synthetic oligonucleotide
ttcgagcgggggaacagcatgcatagtgtggagcctccgtgcacgtgcggatagagta

SEQ ID NO: 157166 - DNA, 54 bp, Artificial
  Synthetic oligonucleotide
tcaaccccgtgagctttacgagattcccaaggatcgcggattttgcctgcccta

SEQ ID NO: 157167 - DNA, 54 bp, Artificial
  Synthetic oligonucleotide
aggttccagcacggcctcgataaactcgccttgcaaaaccttgtacggcaggtt

SEQ ID NO: 157168 - DNA, 54 bp, Artificial
  Synthetic oligonucleotide
aggttgcaaacgaagcagacgaagcaaacgaaagtgcgcgttactgcgcattca

SEQ ID NO: 157169 - DNA, 54 bp, Artificial
  Synthetic oligonucleotide
tcaagtcgaggccgcctatcaccgcacggacctattggagcaacgtcggccact

SEQ ID NO: 157170 - DNA, 54 bp, Artificial
  Synthetic oligonucleotide
tcagcaggaatagtcgccacatcttcgcatcctgtttgttccggacagaacata

SEQ ID NO: 157171 - DNA, 54 bp, Artificial
  Synthetic oligonucleotide
agcacgcacatcagggcgctgacgtacaagactagaaggcactgatagtggtaa

SEQ ID NO: 157172 - DNA, 54 bp, Artificial
  Synthetic oligonucleotide
acactggcgcgaaaacgagcactaatggccggcattctaaggttgcccttccgt

SEQ ID NO: 157173 - DNA, 54 bp, Artificial
  Synthetic oligonucleotide
agtgagcgggcccggtttgtcatcgagcggattacgtgtggcggggcgcttacg

SEQ ID NO: 157174 - DNA, 54 bp, Artificial
  Synthetic oligonucleotide
tcagtgacggaatagtccagacacctcaggtgtatacgcaggaaaccatcccga

SEQ ID NO: 157175 - DNA, 54 bp, Artificial
  Synthetic oligonucleotide
agtgcatccggttacagggctggcacccgcgattctgttggagcaacgcgaacg

SEQ ID NO: 157176 - DNA, 58 bp, Artificial
  Synthetic oligonucleotide
actgcgaccatgtcttaaaccctccagagaatctgagctgcgtagcccgcacaaccga

SEQ ID NO: 157177 - DNA, 54 bp, Artificial
  Synthetic oligonucleotide
tcattgagcccccccgccaacaaacttcgagagacggtcaatcagagcggacaa

SEQ ID NO: 157178 - DNA, 54 bp, Artificial
  Synthetic oligonucleotide
gatatttccgggtaaacccgtgacgtcatcctcggtccatcggcgtaccatgtc

SEQ ID NO: 157179 - DNA, 54 bp, Artificial
  Synthetic oligonucleotide
gcggacatatgtcgcttctcgctgggtcggatggatggacaggttgccactatc

SEQ ID NO: 157180 - DNA, 54 bp, Artificial
  Synthetic oligonucleotide
tccaattgatccgtcccaattggaaccccgtgatgcgattccctcgactctttc

SEQ ID NO: 157181 - DNA, 54 bp, Artificial
  Synthetic oligonucleotide
tcccgtaaatggggacagccgggccacaaccagttgcaggtctggaatcccgtg

SEQ ID NO: 157182 - DNA, 54 bp, Artificial
  Synthetic oligonucleotide
agatgagacatggcgaaccaaggtgcgtccgctaggcgactcgcatccgatgcg

SEQ ID NO: 157183 - DNA, 54 bp, Artificial
  Synthetic oligonucleotide
gtgggcgcgacctacaagttctgatggcgattgcgatgcactgacaggttttag

SEQ ID NO: 157184 - DNA, 54 bp, Artificial
  Synthetic oligonucleotide
acaggtctggttcgcggcgatgtgcggattcccagtcggcggttgcttcccatt

SEQ ID NO: 157185 - DNA, 54 bp, Artificial
  Synthetic oligonucleotide
taaacgaaccgcctgtattagtctattgccgggcgctacatacttagtggtcag

SEQ ID NO: 157186 - DNA, 54 bp, Artificial
  Synthetic oligonucleotide
taacaccgcgacatcttttaccgggcgattatttcgcgaggtcctcttatagtt

SEQ ID NO: 157187 - DNA, 58 bp, Artificial
  Synthetic oligonucleotide
cagcgctgcacatggataatccgccagagtcttgcatcctcacctggacggcgttgct

SEQ ID NO: 157188 - DNA, 54 bp, Artificial
  Synthetic oligonucleotide
gccgtcgcccatgatcgaagtcgagttcggctggggaccgcgcacggtggattc

SEQ ID NO: 157189 - DNA, 54 bp, Artificial
  Synthetic oligonucleotide
aggcaccctttacgggtggagaagacgggctgcaaggtgtgcctcgtggaaagt

SEQ ID NO: 157190 - DNA, 54 bp, Artificial
  Synthetic oligonucleotide
acaagatgtctgtcaacgtcgaatcggacgagtcacaatggcacaccgtcgtga

SEQ ID NO: 157191 - DNA, 54 bp, Artificial
  Synthetic oligonucleotide
tacattcgcgccgtactgtcgcgcccaggtgcgtaccgagggagcgatatcgac

SEQ ID NO: 157192 - DNA, 54 bp, Artificial
  Synthetic oligonucleotide
agcgattggggaggcccgtggttctcgtattgcatcttagtattccttacgttt

SEQ ID NO: 157193 - DNA, 54 bp, Artificial
  Synthetic oligonucleotide
aatggtcgcctgataaccgccggactaccggtcgatcacggtacgttagccaga

SEQ ID NO: 157194 - DNA, 54 bp, Artificial
  Synthetic oligonucleotide
agcgatcttcccgtcttccgaggtcttgctcgcgaacacccattcggatggcac

SEQ ID NO: 157195 - DNA, 54 bp, Artificial
  Synthetic oligonucleotide
gccagtatgtccgcgacaaaggaccgatccccgttggcctgtatgaaattacgg

SEQ ID NO: 157196 - DNA, 54 bp, Artificial
  Synthetic oligonucleotide
gttgggaaacgattggtaatccgtcagaatcgcaccggcatgtactcgcacatg

SEQ ID NO: 157197 - DNA, 54 bp, Artificial
  Synthetic oligonucleotide
gttgcacgtcaatcacaaggtatggaacccgagcaagcgctgaagcgctaactc

SEQ ID NO: 157198 - DNA, 56 bp, Artificial
  Synthetic oligonucleotide
attcccttaaccccaactggacggctaggctggacatcggcacgcccgtcaagaca

SEQ ID NO: 157199 - DNA, 58 bp, Artificial
  Synthetic oligonucleotide
ccttgatgagtgtcgggacaccggcgagtacgctctcgtggccagtgatggtcgatgc

SEQ ID NO: 157200 - DNA, 54 bp, Artificial
  Synthetic oligonucleotide
gccagacttggggaaaggcgtaccgatgccgagggcttagcgcgcatacagaag

SEQ ID NO: 157201 - DNA, 54 bp, Artificial
  Synthetic oligonucleotide
gcgagtgtcggtcgaaggctggcgctgagacacggaaggacagcggcacagtag

SEQ ID NO: 157202 - DNA, 54 bp, Artificial
  Synthetic oligonucleotide
gccagaattcgctatatacacgccgaacaatacgtttcggacgtcgttagagcc

SEQ ID NO: 157203 - DNA, 54 bp, Artificial
  Synthetic oligonucleotide
gccactgcccatgaataccgcaggcacagccgcgactgagagcggggacgacct

SEQ ID NO: 157204 - DNA, 54 bp, Artificial
  Synthetic oligonucleotide
gcgcatcggccaatccgtattcgccgcagacgcacgagaaacgaagcgccctcc

SEQ ID NO: 157205 - DNA, 54 bp, Artificial
  Synthetic oligonucleotide
aatccggggttcagcgatcttcccgtcttccgaggtcttgctcgcgaacaccca

SEQ ID NO: 157206 - DNA, 54 bp, Artificial
  Synthetic oligonucleotide
aatccggacgcggcatacaacgaggaaaccgggaggtggaacaaggcggctcac

SEQ ID NO: 157207 - DNA, 54 bp, Artificial
  Synthetic oligonucleotide
gcactgcaacccatttcaacctgtctgtttgggaacccgaacgatggttcgcgt

SEQ ID NO: 157208 - DNA, 54 bp, Artificial
  Synthetic oligonucleotide
gcgtagggaaaaggagagcatgatgcctcgcgacgggttaaactgccgcgtagc

SEQ ID NO: 157209 - DNA, 54 bp, Artificial
  Synthetic oligonucleotide
tcgttacctgtccgtcgacgcatgggtcaccaaccgcgatttgccccgactgat

SEQ ID NO: 157210 - DNA, 58 bp, Artificial
  Synthetic oligonucleotide
aagccctgagtccacgaaaaatccttcaaggagataccacatgaccgttgtcgccatg

SEQ ID NO: 157211 - DNA, 54 bp, Artificial
  Synthetic oligonucleotide
gtattgcagcttcgttctctcggctgacacgtcttctgggcaagcgtctagcgt

SEQ ID NO: 157212 - DNA, 54 bp, Artificial
  Synthetic oligonucleotide
agaattcgttgcgacatatgcaagcggatctggcacacgtgacgcggcttacga

SEQ ID NO: 157213 - DNA, 54 bp, Artificial
  Synthetic oligonucleotide
atcctctcacgcaggaccgaatgtgcggcgtgcttggtcctcgcttcgctaact

SEQ ID NO: 157214 - DNA, 54 bp, Artificial
  Synthetic oligonucleotide
tcgtttccctacttcggagtggatacgttttacagttgggtgcgttattcgcac

SEQ ID NO: 157215 - DNA, 54 bp, Artificial
  Synthetic oligonucleotide
tctatcgtcgagaacgcgcctgtaggattcactccggtggtcactgtgacgacg

SEQ ID NO: 157216 - DNA, 54 bp, Artificial
  Synthetic oligonucleotide
agaaacgaaggtgcacgcgtgatcgcggaaaagataggcgtgagcaggccgacg

SEQ ID NO: 157217 - DNA, 54 bp, Artificial
  Synthetic oligonucleotide
tctgcctgcgggattttcgtcgaccaatgccttcggtcaaacctggctactaca

SEQ ID NO: 157218 - DNA, 54 bp, Artificial
  Synthetic oligonucleotide
gacaggataagctgggaacgctgcttcgagattcgatcgcgcatgacggcctca

SEQ ID NO: 157219 - DNA, 54 bp, Artificial
  Synthetic oligonucleotide
acttttaccggctaccatgagagtcttgcaaaccaggtgtatgcacgacatgtt

SEQ ID NO: 157220 - DNA, 54 bp, Artificial
  Synthetic oligonucleotide
tcttgtcagcaatgctccgaatgcgccgtcgtccccagtgttgaagcagacagc

SEQ ID NO: 157221 - DNA, 54 bp, Artificial
  Synthetic oligonucleotide
caccgtgaaacgttcgtcctcagtcggacgaggctagggcgaaaagtcgtagcg

SEQ ID NO: 157222 - DNA, 54 bp, Artificial
  Synthetic oligonucleotide
gtatcgattttcgaggcgattgacgcattcctcacggcgcgtcgattttagcaa

SEQ ID NO: 157223 - DNA, 54 bp, Artificial
  Synthetic oligonucleotide
aacgttgtcaaccgtggcgcgatcacatccaacacgaatcttcacgtttcgggc

SEQ ID NO: 157224 - DNA, 54 bp, Artificial
  Synthetic oligonucleotide
gaatgcggattgccagcaacgcgccttcgccttttatcctgcatgagagattgt

SEQ ID NO: 157225 - DNA, 54 bp, Artificial
  Synthetic oligonucleotide
atcgtctagattccgctgcatccccgtatccgattcgaatggagaccgcagtga

SEQ ID NO: 157226 - DNA, 54 bp, Artificial
  Synthetic oligonucleotide
tgaggaagaacggacgatcgtgaatccgttgcgaatcaagaactgggttctttg

SEQ ID NO: 157227 - DNA, 54 bp, Artificial
  Synthetic oligonucleotide
tgatgttcccaggagaccaatcgatgcgcagactaccgcttgccgtggtgctca

SEQ ID NO: 157228 - DNA, 54 bp, Artificial
  Synthetic oligonucleotide
atcttgtgtaggttgtgcatgatcgttccagtgcagtgggtgggacgcctggtt

SEQ ID NO: 157229 - DNA, 54 bp, Artificial
  Synthetic oligonucleotide
acttcgacacttctggggaaattacgtccgacgttgacacatgtaaccgctgtg

SEQ ID NO: 157230 - DNA, 54 bp, Artificial
  Synthetic oligonucleotide
acatcaggagggccatggcttggatacgagaccactacaccgagcgtctcgact

SEQ ID NO: 157231 - DNA, 54 bp, Artificial
  Synthetic oligonucleotide
agatactcaaggaagccagtttgatatcccggagcacgtccgaggtgggacgcc

SEQ ID NO: 157232 - DNA, 58 bp, Artificial
  Synthetic oligonucleotide
aagagggtgtgcgtgcactaggcgttcaacttcgctggcaacctcgtcgcgttgtttg

SEQ ID NO: 157233 - DNA, 54 bp, Artificial
  Synthetic oligonucleotide
tcgaacgggcatccacttcacgcgcacttttggccccgtgacgtagtaggtgtt

SEQ ID NO: 157234 - DNA, 54 bp, Artificial
  Synthetic oligonucleotide
atacgtgctcacgaagctcggaccgctcttaggcttgacgatgcgagaagccca

SEQ ID NO: 157235 - DNA, 54 bp, Artificial
  Synthetic oligonucleotide
gtgactgggttgtgcggtaatcgcccgtcgttcagcgttgtttagcgctgatag

SEQ ID NO: 157236 - DNA, 54 bp, Artificial
  Synthetic oligonucleotide
tcgaccaatccgaacgaatatgcgaagctttcgccgacgttccgcgatcccgtt

SEQ ID NO: 157237 - DNA, 54 bp, Artificial
  Synthetic oligonucleotide
tcgatcgcattgtagtcgatttgatcggcacatgccagttagccccggcccgcc

SEQ ID NO: 157238 - DNA, 54 bp, Artificial
  Synthetic oligonucleotide
gagatttgagccatttgtgccatcgctacaatatacacgaaaaccggaatccgg

SEQ ID NO: 157239 - DNA, 54 bp, Artificial
  Synthetic oligonucleotide
tcgatgcacaacgtccacggtgcgatctacgactcgctgcgtctcgtgaaggag

SEQ ID NO: 157240 - DNA, 54 bp, Artificial
  Synthetic oligonucleotide
tcgcggaaagggagagcacgatcgcgaaacctttcatccagtgagcgagcctaa

SEQ ID NO: 157241 - DNA, 54 bp, Artificial
  Synthetic oligonucleotide
gcgggtcggagacccgcgaaagcgcgatcttcgtcaacgtgtcgtacggaatgc

SEQ ID NO: 157242 - DNA, 54 bp, Artificial
  Synthetic oligonucleotide
gagacatcgctcccgcttgcgcaacacacccgcaccacaatacgccaatcacac

SEQ ID NO: 157243 - DNA, 58 bp, Artificial
  Synthetic oligonucleotide
tcgagccaagatcggccgtacagagggcgaatgcactctttgggtcggtggcaagcgt

SEQ ID NO: 157244 - DNA, 54 bp, Artificial
  Synthetic oligonucleotide
tcgcgggccacgcacgtcgtgtggctcaacttcggccgatggacggtgttttcc

SEQ ID NO: 157245 - DNA, 54 bp, Artificial
  Synthetic oligonucleotide
tcggaccttccgggtgtcgccttgcgtgctgacgtaatgcccgattacagaggc

SEQ ID NO: 157246 - DNA, 54 bp, Artificial
  Synthetic oligonucleotide
gtcgcgaagagactattgatcttctgacggagggcgaacagcttctttattcgt

SEQ ID NO: 157247 - DNA, 54 bp, Artificial
  Synthetic oligonucleotide
gactcgattgcgcttgctgtagatcgtagtctttagccgttttcgcctcgcccc

SEQ ID NO: 157248 - DNA, 54 bp, Artificial
  Synthetic oligonucleotide
tcggtgaatcagcctcgtcgtgcaatggcgtccttcaaagagcgcttacgttca

SEQ ID NO: 157249 - DNA, 54 bp, Artificial
  Synthetic oligonucleotide
gcggtattcgctggctcgatcgaataggttacgtcggacaggtctgttccgatt

SEQ ID NO: 157250 - DNA, 54 bp, Artificial
  Synthetic oligonucleotide
gtcgcacagtcgaacaccgaccaaggccgcttggttgaaatgggatacgccacg

SEQ ID NO: 157251 - DNA, 54 bp, Artificial
  Synthetic oligonucleotide
gacgtattccaattcttacaggctaaacaaccaagcatgtctgccgtattcaaa

SEQ ID NO: 157252 - DNA, 54 bp, Artificial
  Synthetic oligonucleotide
cgtcgataccgtgtacgcgtagcgaagggtccaccacggagtcgctatcggtgc

SEQ ID NO: 157253 - DNA, 54 bp, Artificial
  Synthetic oligonucleotide
cggttcgcggagtgcagaaaatgatggttcgttatgaatatgccaataacgcgc

SEQ ID NO: 157254 - DNA, 58 bp, Artificial
  Synthetic oligonucleotide
caatcaggccggggttagtcgcgctcagagtctcgtaagagagcccccagcgttccaa

SEQ ID NO: 157255 - DNA, 54 bp, Artificial
  Synthetic oligonucleotide
cgcgtgaatgttcgtcacagacgattcttgcgaatctcatctgcaaaacccgga

SEQ ID NO: 157256 - DNA, 54 bp, Artificial
  Synthetic oligonucleotide
caagttcggctggtagagatggcacacgcggcagcacgagcgcaatccgcacac

SEQ ID NO: 157257 - DNA, 53 bp, Artificial
  Synthetic oligonucleotide
cccctttccaatcaacgacttaagttgcttgtcccggcaatgtccacaaccgt

SEQ ID NO: 157258 - DNA, 54 bp, Artificial
  Synthetic oligonucleotide
cgttagatgtaatcccgttggcgcttcccgataggaacgaaaagtatacgatac

SEQ ID NO: 157259 - DNA, 54 bp, Artificial
  Synthetic oligonucleotide
ccaacgaggctggtagcggcaagagctcggctttgctgcgtggtcgcttcgtat

SEQ ID NO: 157260 - DNA, 54 bp, Artificial
  Synthetic oligonucleotide
cgatagatccgaacattcagatcagtcgaaatcacgagaggcgtatcagcgtag

SEQ ID NO: 157261 - DNA, 54 bp, Artificial
  Synthetic oligonucleotide
ccgacaccgtctgccgagttaagtgctgctgtctacaacttaaccgaggattcc

SEQ ID NO: 157262 - DNA, 54 bp, Artificial
  Synthetic oligonucleotide
ccacaagatttcctcgaagtataattaattgacacgggtgcgaagcatcgctca

SEQ ID NO: 157263 - DNA, 54 bp, Artificial
  Synthetic oligonucleotide
ctacctgtttactccctctccgaattccaggctaaatcgcagctaactgcggta

SEQ ID NO: 157264 - DNA, 54 bp, Artificial
  Synthetic oligonucleotide
cccctcttatccccagcatcgttcgccccgatattcggtccatgcaaacgctcc

SEQ ID NO: 157265 - DNA, 58 bp, Artificial
  Synthetic oligonucleotide
aactgacgggcgcaatgctcgattactgggttgcgcgcggatgggaactgacggaccc

SEQ ID NO: 157266 - DNA, 54 bp, Artificial
  Synthetic oligonucleotide
ccgacgcataagcagcctgacgtcaatccgttccggtaaggagcccgtatgcgc

SEQ ID NO: 157267 - DNA, 54 bp, Artificial
  Synthetic oligonucleotide
cacggttcaaccgaaagaccaatcgaagcgcgcctacaaattcaagtacgcgga

SEQ ID NO: 157268 - DNA, 54 bp, Artificial
  Synthetic oligonucleotide
cgggctacgcagctcagattctctggagggtttaagacatggtcgcagtcaaga

SEQ ID NO: 157269 - DNA, 54 bp, Artificial
  Synthetic oligonucleotide
cagcgatccatcgacccataccggggcgcccgaattcgtgtacgtgggtttcgc

SEQ ID NO: 157270 - DNA, 54 bp, Artificial
  Synthetic oligonucleotide
cacaggatatccctcggtagccatgccggactacagtcccgtcgcgccccagca

SEQ ID NO: 157271 - DNA, 54 bp, Artificial
  Synthetic oligonucleotide
cagcgtttcgagtaagtttgccgtcgggatatccacaccccgaccgttactgcg

SEQ ID NO: 157272 - DNA, 54 bp, Artificial
  Synthetic oligonucleotide
cgagcaagctggactatcccgcgctggacttcactccgctgaagtatcagcccg

SEQ ID NO: 157273 - DNA, 54 bp, Artificial
  Synthetic oligonucleotide
ccagacgtcgacgcaagcgaatcaatatctgtatcgcgtgaacgttccggggca

SEQ ID NO: 157274 - DNA, 54 bp, Artificial
  Synthetic oligonucleotide
cgttgccgaaagcagaagctggccggaactaccagcggcagacgttgcgttgta

SEQ ID NO: 157275 - DNA, 54 bp, Artificial
  Synthetic oligonucleotide
cgcaacgcagcgaatcgcgacgtggacggtaaaccgatgagccttcttgcatcc

SEQ ID NO: 157276 - DNA, 58 bp, Artificial
  Synthetic oligonucleotide
gcccaccaatacggaccgtagcgaaggtattgcttcttgtcgcgcgtgagcaccttcg

SEQ ID NO: 157277 - DNA, 54 bp, Artificial
  Synthetic oligonucleotide
cctagacgtcacgcgtctcgtgacccgcctttaccagggtctactgccgacggg

SEQ ID NO: 157278 - DNA, 54 bp, Artificial
  Synthetic oligonucleotide
catacgcactcacaattcagaaagaacggacttccatggcatatccctggaggc

SEQ ID NO: 157279 - DNA, 54 bp, Artificial
  Synthetic oligonucleotide
cccaaacacgcgctctgcaagttgagagcgtgtttatagtggtctagccgatct

SEQ ID NO: 157280 - DNA, 54 bp, Artificial
  Synthetic oligonucleotide
cgatgtggcatccggaagccgataacaccgcattccttgagacatgcattcgcg

SEQ ID NO: 157281 - DNA, 54 bp, Artificial
  Synthetic oligonucleotide
cggcaaaccgtcagcgatctagcggctcgccaggcgctttacagcgtcattgca

SEQ ID NO: 157282 - DNA, 54 bp, Artificial
  Synthetic oligonucleotide
cgaagtatatatcggaattttacgatatgcatggaggcactactcgcggtgggg

SEQ ID NO: 157283 - DNA, 54 bp, Artificial
  Synthetic oligonucleotide
cgaagtccagactattctccgctgagtgttcgctggcggatgcagtgcaaggca

SEQ ID NO: 157284 - DNA, 54 bp, Artificial
  Synthetic oligonucleotide
cgattgcaaaagtgccgcttagtaatcaatgcgcatcagcaggagcgcagcacg

SEQ ID NO: 157285 - DNA, 54 bp, Artificial
  Synthetic oligonucleotide
ctaaggttgataaagtggtcctgcgtcgtaactgtatcgctcgagccaattgct

SEQ ID NO: 157286 - DNA, 54 bp, Artificial
  Synthetic oligonucleotide
cggtcacatcaacgttgtagcgccgatcatggttgggtgcgcaccatactttcg

SEQ ID NO: 157287 - DNA, 58 bp, Artificial
  Synthetic oligonucleotide
ttgcccatcccactgaagggttcgcaaagtgcctgtcgtgtacttgggcccttgaggc

SEQ ID NO: 157288 - DNA, 54 bp, Artificial
  Synthetic oligonucleotide
cccgatgggtgattgagtccggaagcgcgaatgcgaccggattggtgtgcctag

SEQ ID NO: 157289 - DNA, 53 bp, Artificial
  Synthetic oligonucleotide
gttcgcgtgtattggggagcggtcgttcacttccacttcaatacccggtgcac

SEQ ID NO: 157290 - DNA, 53 bp, Artificial
  Synthetic oligonucleotide
cgtaccgaaagattgagagcggcgtcgctggtagcaagggctgccgaggcacg

SEQ ID NO: 157291 - DNA, 53 bp, Artificial
  Synthetic oligonucleotide
cactgagaatgcgggtccttgcacatatcgctggtccatccaagcgtcatact

SEQ ID NO: 157292 - DNA, 53 bp, Artificial
  Synthetic oligonucleotide
gttgcaccgcctcgatagtagtgcataatcgtccacgcccggtgcatgattat

SEQ ID NO: 157293 - DNA, 53 bp, Artificial
  Synthetic oligonucleotide
gttgccgcgcatgttctgcatcgcggaatcgatttgctctgccgacgcgcccc

SEQ ID NO: 157294 - DNA, 53 bp, Artificial
  Synthetic oligonucleotide
gtctactgaaattgctctatgacaacaaatgggtctgctgtgtttgtcgttca

SEQ ID NO: 157295 - DNA, 53 bp, Artificial
  Synthetic oligonucleotide
gaggcggaacccaggttcgatccgaacctcaggtttgtcagcgttaccgccat

SEQ ID NO: 157296 - DNA, 53 bp, Artificial
  Synthetic oligonucleotide
gatcggcagtcagtcgtgacgccttgggagcaactacggctaccgcacgagat

SEQ ID NO: 157297 - DNA, 53 bp, Artificial
  Synthetic oligonucleotide
acacgcattcgcaccaaggcatcctcggatttgccagacacgacttcccagcg

SEQ ID NO: 157298 - DNA, 58 bp, Artificial
  Synthetic oligonucleotide
gggcaaggcggcatgacttgcgcaatcgaacaacacccgtggacgaaacgacttggag

SEQ ID NO: 157299 - DNA, 53 bp, Artificial
  Synthetic oligonucleotide
cggttgccgggcgatttcgagcacactgggcggcactggaatatgcgctttga

SEQ ID NO: 157300 - DNA, 53 bp, Artificial
  Synthetic oligonucleotide
cagatatcagcgggtgcattgccggcgatccacgttgccagccaaggtacgag

SEQ ID NO: 157301 - DNA, 53 bp, Artificial
  Synthetic oligonucleotide
cgatggatgttgaccttcgggtcgggacgtacgaactgcacgcgacgaggcgt

SEQ ID NO: 157302 - DNA, 53 bp, Artificial
  Synthetic oligonucleotide
agttcgcaaacgcgaggtccaatgtgtgacgcccgttgcgatcgcgtaacaag

SEQ ID NO: 157303 - DNA, 53 bp, Artificial
  Synthetic oligonucleotide
gtggcgtatcccatttcaaccaagcggccttggtcggtgttcgactgtgcgac

SEQ ID NO: 157304 - DNA, 53 bp, Artificial
  Synthetic oligonucleotide
gtgtttgaattcgggagtgaatgggccgcgcagtaaggctgagggagcttttc

SEQ ID NO: 157305 - DNA, 53 bp, Artificial
  Synthetic oligonucleotide
gaggttgcgcatgcgtggggcgggagaggcaaatggggcgacattgtagtccg

SEQ ID NO: 157306 - DNA, 53 bp, Artificial
  Synthetic oligonucleotide
gtgggcaggaacctatcgaccattccccatgtaataagggttggggcgacgat

SEQ ID NO: 157307 - DNA, 53 bp, Artificial
  Synthetic oligonucleotide
ataccgggtagtgtccgacatcgaagtcgtcaagaagctcgattgctcatctt

SEQ ID NO: 157308 - DNA, 53 bp, Artificial
  Synthetic oligonucleotide
acacgtagaaattccttaacccgagcatatactgcgtgggttgtccaggggtg

SEQ ID NO: 157309 - DNA, 60 bp, Artificial
  Synthetic oligonucleotide
tgatatgcagatcgaaagtgcggaactcgtttctgtgctctgacgggcgggtatgcgccg

SEQ ID NO: 157310 - DNA, 55 bp, Artificial
  Synthetic oligonucleotide
aagcttacttgtccacatgggacatttttcggggtattgggacttgttgactcga

SEQ ID NO: 157311 - DNA, 53 bp, Artificial
  Synthetic oligonucleotide
gtggttgcgaggctgatcttcaggattacgtcagtgatacgcccgcagcaact

SEQ ID NO: 157312 - DNA, 53 bp, Artificial
  Synthetic oligonucleotide
acactcgccgtgcgttgccttcataaatcttgtagcgctgttcgggattcata

SEQ ID NO: 157313 - DNA, 53 bp, Artificial
  Synthetic oligonucleotide
gagtggctccgggaaatgtacgaggacgaccaagaatcgatccaacggcgcct

SEQ ID NO: 157314 - DNA, 53 bp, Artificial
  Synthetic oligonucleotide
tcaaaattgttaagaagggtttgcacacatgcgtttagatcgactcaccacca

SEQ ID NO: 157315 - DNA, 53 bp, Artificial
  Synthetic oligonucleotide
tcaaggagcataaggaggggctaagtttctgtcgggacaacggccttcctgag

SEQ ID NO: 157316 - DNA, 53 bp, Artificial
  Synthetic oligonucleotide
gaccgctgccagattcttatggcgtttcatggatgccggagcctcacgaccga

SEQ ID NO: 157317 - DNA, 53 bp, Artificial
  Synthetic oligonucleotide
gaccgcatgcttatcaggcatgggtgacgggtgggagtggaagaattcgcaag

SEQ ID NO: 157318 - DNA, 53 bp, Artificial
  Synthetic oligonucleotide
cccgcatccgatagacgactttcgcagtccgacaggagttcatgcatggcggt

SEQ ID NO: 157319 - DNA, 53 bp, Artificial
  Synthetic oligonucleotide
tcatggtcatacagtggcgcaaagttgtagttccggaggtaggcccgctgtac

SEQ ID NO: 157320 - DNA, 53 bp, Artificial
  Synthetic oligonucleotide
tcatgtctccaggcgtgatcgcgagacaaatataggctcgactcgcaaacgtt

SEQ ID NO: 157321 - DNA, 57 bp, Artificial
  Synthetic oligonucleotide
gctggcgacaggcgcaggtaagaaaaatcggtcttgcatcccggacgcccggtaggc

SEQ ID NO: 157322 - DNA, 53 bp, Artificial
  Synthetic oligonucleotide
cgaagatagtggatgatcacctgtgttggtcatttgatcacgtatttcgatcc

SEQ ID NO: 157323 - DNA, 53 bp, Artificial
  Synthetic oligonucleotide
tcccgagatgcaagcttcacggttgagtagtcgtcgttgaattgcagacagtg

SEQ ID NO: 157324 - DNA, 53 bp, Artificial
  Synthetic oligonucleotide
gaattaacggacacgattagcgttgcagcggacgccattagcacaaacttcga

SEQ ID NO: 157325 - DNA, 53 bp, Artificial
  Synthetic oligonucleotide
tccttgaatgtcgggtggcagcgcgtgagcgccgatgcaactccagcgtaccg

SEQ ID NO: 157326 - DNA, 53 bp, Artificial
  Synthetic oligonucleotide
cacgagcgaagcttccctggcgagagtcgagcgcgattatagccgcacgcctc

SEQ ID NO: 157327 - DNA, 53 bp, Artificial
  Synthetic oligonucleotide
cgaaagtgttgatgggcggtgagcgacagcacttagtcgtggagtgggcatgg

SEQ ID NO: 157328 - DNA, 53 bp, Artificial
  Synthetic oligonucleotide
ccttttgctttcacgaggagggccaataatgtcgttgattatcgacgcaacgc

SEQ ID NO: 157329 - DNA, 53 bp, Artificial
  Synthetic oligonucleotide
tcgagtgcttataaacgggagggcgtccccatggaaccctctggcatgttcgc

SEQ ID NO: 157330 - DNA, 53 bp, Artificial
  Synthetic oligonucleotide
tcgccgcgcaaatgtccgtgtgcgttcctgaattgtcctgataacgtcaccga

SEQ ID NO: 157331 - DNA, 53 bp, Artificial
  Synthetic oligonucleotide
atctcgtgcggtagccgtagttgctcccaaggcgtcacgactgactgccgatc

SEQ ID NO: 157332 - DNA, 54 bp, Artificial
  Synthetic oligonucleotide
gtgcgggggttcgcaccatcaaacaagcggccatctaccccctacgaaggttta

SEQ ID NO: 157333 - DNA, 53 bp, Artificial
  Synthetic oligonucleotide
gttgttctagtcgaccttgggtcgcacgttgaacggctagacagtccaggcgc

SEQ ID NO: 157334 - DNA, 53 bp, Artificial
  Synthetic oligonucleotide
acaacggaatcgcgacattcagccagacgttgtggcttttgctcgtattcact

SEQ ID NO: 157335 - DNA, 53 bp, Artificial
  Synthetic oligonucleotide
gtttgagtcgagggtacgattaccttgcaggttcggtatgcgtcccagacgca

SEQ ID NO: 157336 - DNA, 53 bp, Artificial
  Synthetic oligonucleotide
cgagaactcaacctgtagcgagacggtgtccttgagacacacttgttataggg

SEQ ID NO: 157337 - DNA, 53 bp, Artificial
  Synthetic oligonucleotide
tacctaccccttgctggcacccgtgtttcccgcgccacatgcagcgtgcctgt

SEQ ID NO: 157338 - DNA, 53 bp, Artificial
  Synthetic oligonucleotide
gactgtgatcctgaatccgctcacgatctttcccgcaacggctcacgctgccc

SEQ ID NO: 157339 - DNA, 53 bp, Artificial
  Synthetic oligonucleotide
aatgcggtgtgggacagccatccgagcaaccgtcgctcatgacggcatcagaa

SEQ ID NO: 157340 - DNA, 53 bp, Artificial
  Synthetic oligonucleotide
tagacgcgacagccaaccgtgcgaacgaagccaggcagggccggtcatgagca

SEQ ID NO: 157341 - DNA, 53 bp, Artificial
  Synthetic oligonucleotide
atcatggagagcaagcgcatgggtctgatgtcgaagcccatgctcgtcgttcc

SEQ ID NO: 157342 - DNA, 53 bp, Artificial
  Synthetic oligonucleotide
tatacggttttccccgatagcccgcttatcgctcgttcgggcgttgcgctacc

SEQ ID NO: 157343 - DNA, 57 bp, Artificial
  Synthetic oligonucleotide
ccaaacgcaggaggcatctggccgtttaacgcaggatgctcggaacgaatttcgaca

SEQ ID NO: 157344 - DNA, 53 bp, Artificial
  Synthetic oligonucleotide
cgtcgaacatcagttctttctggctcaccgattcgtaggccgagcgagagtaa

SEQ ID NO: 157345 - DNA, 53 bp, Artificial
  Synthetic oligonucleotide
cgacaggcaggtcgtgcttcgaattcgtcgtggccttgaaccggcgtttctgc

SEQ ID NO: 157346 - DNA, 53 bp, Artificial
  Synthetic oligonucleotide
tattgacctagccgcgtatgctaatacagaacggcagaagcgggtggtatctc

SEQ ID NO: 157347 - DNA, 53 bp, Artificial
  Synthetic oligonucleotide
atccgagctcaagattggcagactcacagaaccacagtgcggacattgattaa

SEQ ID NO: 157348 - DNA, 53 bp, Artificial
  Synthetic oligonucleotide
actgatctacggggaagcgaaggacatgtctgaccaaacctccggtacgcatt

SEQ ID NO: 157349 - DNA, 53 bp, Artificial
  Synthetic oligonucleotide
gctgcgcgcgctatccacccactcctggatcgatcccatgtgacgtctccgct

SEQ ID NO: 157350 - DNA, 53 bp, Artificial
  Synthetic oligonucleotide
actgaatgcaggtgcactgtatggcatgaatggcagcatgtcaaccatggttc

SEQ ID NO: 157351 - DNA, 53 bp, Artificial
  Synthetic oligonucleotide
agcttcgcattccggcgacgaattacggaccagaatcggcatttatcagaata

SEQ ID NO: 157352 - DNA, 53 bp, Artificial
  Synthetic oligonucleotide
aggaacggtcatcggtcggctgggctctctgaaatatacgcgatgcgtatggt

SEQ ID NO: 157353 - DNA, 53 bp, Artificial
  Synthetic oligonucleotide
gcttgactctcacatcagtgtaagggttgagagtaagcgtaccgacactctcc

SEQ ID NO: 157354 - DNA, 57 bp, Artificial
  Synthetic oligonucleotide
atccaccatttcatgctgcaagccaacaccatagacgacgtgggctatgccttcgat

SEQ ID NO: 157355 - DNA, 53 bp, Artificial
  Synthetic oligonucleotide
ggaaagacaaatgtaactacgacgcccgggtggcttgctgaagaacgctaggt

SEQ ID NO: 157356 - DNA, 53 bp, Artificial
  Synthetic oligonucleotide
ggacttgttctttcgggcacgtacggatccaccattcagagttgccggtgtcg

SEQ ID NO: 157357 - DNA, 53 bp, Artificial
  Synthetic oligonucleotide
actagatttccttcgtcacaaggcagttgctaacatgtcggcaacactgcgct

SEQ ID NO: 157358 - DNA, 53 bp, Artificial
  Synthetic oligonucleotide
actagatgcggggaaatcgtacgaccaaaacactatatgtagtttgacggcgc

SEQ ID NO: 157359 - DNA, 53 bp, Artificial
  Synthetic oligonucleotide
ggattacgcggcgtgccgaccgtttgaaaagtaatcgccgtggactggccacc

SEQ ID NO: 157360 - DNA, 53 bp, Artificial
  Synthetic oligonucleotide
ccacagagcagtagctgctttggaacgttgttcacggtaattcgcctcgacgc

SEQ ID NO: 157361 - DNA, 53 bp, Artificial
  Synthetic oligonucleotide
gcccatacgggccgtggtgccgtccgaaatgacttcaagcacgttggcattga

SEQ ID NO: 157362 - DNA, 53 bp, Artificial
  Synthetic oligonucleotide
ggcacacgcaccgatcgttcggcacactaagcgagactgcgtcatgaacatgc

SEQ ID NO: 157363 - DNA, 53 bp, Artificial
  Synthetic oligonucleotide
acggcctgacattcctggcagaacctcgcaccgggaggattctcggacccgca

SEQ ID NO: 157364 - DNA, 53 bp, Artificial
  Synthetic oligonucleotide
ggcgaatttcgcacactggtgaatgcgattggacaacgctctccttggccgcg

SEQ ID NO: 157365 - DNA, 57 bp, Artificial
  Synthetic oligonucleotide
gcaaagtcgaggaaggccggttgatagcgatgcagtccgggaccataggcgtctcgg

SEQ ID NO: 157366 - DNA, 53 bp, Artificial
  Synthetic oligonucleotide
gcgcaatccaccagtttaaagcgttccctaccttgtcctcgcgccaagcgagg

SEQ ID NO: 157367 - DNA, 53 bp, Artificial
  Synthetic oligonucleotide
cagtgatcgtgttcatacgagctccacctggtcaaacatcacgccttcgtacg

SEQ ID NO: 157368 - DNA, 53 bp, Artificial
  Synthetic oligonucleotide
cataaggatcggcatgcgcctcggagtctgttactacccggaacactggccgg

SEQ ID NO: 157369 - DNA, 53 bp, Artificial
  Synthetic oligonucleotide
agcatacgacggcagggatattccgcgattgatcgggaacttgcgacccgctt

SEQ ID NO: 157370 - DNA, 53 bp, Artificial
  Synthetic oligonucleotide
gcgctacgccgattactggagatgcgttgggtgagttggctcgggcttatctg

SEQ ID NO: 157371 - DNA, 53 bp, Artificial
  Synthetic oligonucleotide
cataatccttggtctggcccgccaagggcccaacgtgcatgcggtgggccttg

SEQ ID NO: 157372 - DNA, 53 bp, Artificial
  Synthetic oligonucleotide
agcacttattgagtcgcccctgaatctcgccgcgccggcatcacatcgtcgtg

SEQ ID NO: 157373 - DNA, 53 bp, Artificial
  Synthetic oligonucleotide
agcacgtggagttcgatgtatgaggaaccctcgccacagggcaagtcttgccg

SEQ ID NO: 157374 - DNA, 53 bp, Artificial
  Synthetic oligonucleotide
cagtcatccgagaggctcgcgcgttgacggctaagcccattggcgtcaacctt

SEQ ID NO: 157375 - DNA, 53 bp, Artificial
  Synthetic oligonucleotide
agatgcgaatactcgcgctatgcagcaaggctgaaccgactcgcgcaaaatca

SEQ ID NO: 157376 - DNA, 57 bp, Artificial
  Synthetic oligonucleotide
gctccgctttcttcttggacgacgcgagtatatgccaacgcacgccgcaaagggtca

SEQ ID NO: 157377 - DNA, 53 bp, Artificial
  Synthetic oligonucleotide
catatgaccttccgctttgacctgtttcccgtgatcgcgcctgacgacaatcc

SEQ ID NO: 157378 - DNA, 53 bp, Artificial
  Synthetic oligonucleotide
agagactgtcgttgtgttcacgcttgaactccgagtagagatacgggacggta

SEQ ID NO: 157379 - DNA, 53 bp, Artificial
  Synthetic oligonucleotide
cgcttcgtgcatcaagtcgtgtacagggtcgcgggacactccggacaacggag

SEQ ID NO: 157380 - DNA, 53 bp, Artificial
  Synthetic oligonucleotide
catggcagccgcgaaggtctgaagcagcgtgggaaacgtcacacgcaatcccg

SEQ ID NO: 157381 - DNA, 53 bp, Artificial
  Synthetic oligonucleotide
gcgtgcgtggcttaacggtatttgcccacaaagctctcgcaacgacggacgcg

SEQ ID NO: 157382 - DNA, 53 bp, Artificial
  Synthetic oligonucleotide
cgctcgattgagaatgcgcccggattccttcgccaacgaatggcaacgggcca

SEQ ID NO: 157383 - DNA, 53 bp, Artificial
  Synthetic oligonucleotide
gctaggcagtccggccccgacacggtaccatcatggctcccgaatttaccgac

SEQ ID NO: 157384 - DNA, 53 bp, Artificial
  Synthetic oligonucleotide
agaacgaattacgaagcgtacaatggttttcatggtgatcgggagttgagcga

SEQ ID NO: 157385 - DNA, 53 bp, Artificial
  Synthetic oligonucleotide
agcgttccctaccttgtcctcgcgccaagcgaggtagccattcgtgaactcgc

SEQ ID NO: 157386 - DNA, 53 bp, Artificial
  Synthetic oligonucleotide
acttatggccatggcccgaatgccagtgccttcagtcgacccgcatagcggcc

SEQ ID NO: 157387 - DNA, 57 bp, Artificial
  Synthetic oligonucleotide
cgcgatacgttgaggtcactatatgcgtccgaatcgcgttaggattcgtgtgcggca

SEQ ID NO: 157388 - DNA, 53 bp, Artificial
  Synthetic oligonucleotide
ggttcgaaacgagcacgaatgccctaaaggatgttgcgcacgatgacgtaaac

SEQ ID NO: 157389 - DNA, 53 bp, Artificial
  Synthetic oligonucleotide
agtactacgctcattcgctgctcatgccgactccaacgttcgtctggtggtca

SEQ ID NO: 157390 - DNA, 53 bp, Artificial
  Synthetic oligonucleotide
accgggaaccaggtcactcgcaaattcggccggtgttctgtggcatccgcagt

SEQ ID NO: 157391 - DNA, 53 bp, Artificial
  Synthetic oligonucleotide
gcaatcgccgggtcagaatcgagctggtttgaagggcacacggagcgcgaact

SEQ ID NO: 157392 - DNA, 53 bp, Artificial
  Synthetic oligonucleotide
gtaagcgctgaagcgctaacttgggccgaccgcgaagcatggggcccaagtaa

SEQ ID NO: 157393 - DNA, 53 bp, Artificial
  Synthetic oligonucleotide
cgggtccgttagggtgcgtcgctcacgccatttgccgccgctaaacgcacacg

SEQ ID NO: 157394 - DNA, 53 bp, Artificial
  Synthetic oligonucleotide
cggtacgatgcggctctcgcgtcttggtctacgattagcgaataggtccacat

SEQ ID NO: 157395 - DNA, 53 bp, Artificial
  Synthetic oligonucleotide
gtagacgaagcagcgccgccatctagtgccgccaagcggcatgattagcgata

SEQ ID NO: 157396 - DNA, 53 bp, Artificial
  Synthetic oligonucleotide
accgatcttgtggcggataacgttttggttgagactactcacggggttactcc

SEQ ID NO: 157397 - DNA, 53 bp, Artificial
  Synthetic oligonucleotide
ccatcgaagactattgcgcggcgaataccgattcgcgcgacatgccagaccat

SEQ ID NO: 157398 - DNA, 57 bp, Artificial
  Synthetic oligonucleotide
cattctccacgtgaagaattaccgtgtaccggacctgaagcaattgcgttagccata

SEQ ID NO: 157399 - DNA, 53 bp, Artificial
  Synthetic oligonucleotide
ccatgcatccgcacatgaaggtccgtcgggattgcatcgtacgatctccttgc

SEQ ID NO: 157400 - DNA, 53 bp, Artificial
  Synthetic oligonucleotide
accctgttccgacgattgacactccaaggcgctaaacctatgctcttttcacc

SEQ ID NO: 157401 - DNA, 53 bp, Artificial
  Synthetic oligonucleotide
gattctgttggagcaacgcgaacgggcttgcttgcgcgatatgccgggttacg

SEQ ID NO: 157402 - DNA, 53 bp, Artificial
  Synthetic oligonucleotide
acccgatcagcttgggtaaatctggccccacccctcatcatgattcatcgaag

SEQ ID NO: 157403 - DNA, 53 bp, Artificial
  Synthetic oligonucleotide
gattcgaagtggaccaaggcgatgcgagcgatcgtcgacagcattcgtgtaac

SEQ ID NO: 157404 - DNA, 53 bp, Artificial
  Synthetic oligonucleotide
acccacgccgaggggctcactcgtgtccagcggcgcgtgatgagtgcaatcga

SEQ ID NO: 157405 - DNA, 53 bp, Artificial
  Synthetic oligonucleotide
gatgcgcgcgccacggacaacggacgctatgacctggcggtctacgggcctaa

SEQ ID NO: 157406 - DNA, 53 bp, Artificial
  Synthetic oligonucleotide
gtctacagcgcccgcccgcatatagcgatctccctgtcaacgcagcgagtaga

SEQ ID NO: 157407 - DNA, 53 bp, Artificial
  Synthetic oligonucleotide
acggaggcagcccatgcgaaccgacgcactcgacggaaaggatctcgattact

SEQ ID NO: 157408 - DNA, 53 bp, Artificial
  Synthetic oligonucleotide
acggagacgaatgacagtgacgacttccgcggaacccgtgcggagcgcttccg

SEQ ID NO: 157409 - DNA, 57 bp, Artificial
  Synthetic oligonucleotide
tacgcattcctggctccacaatttccgtcgcctacgcactcgcttcgagcgacgtgc

SEQ ID NO: 157410 - DNA, 53 bp, Artificial
  Synthetic oligonucleotide
ggctagcggcgattcggtcattcttccgattcgttgcggatcgtgagccgttg

SEQ ID NO: 157411 - DNA, 53 bp, Artificial
  Synthetic oligonucleotide
ggctgcaatagttgactaggcagcagtataggcacaattgtttgccgcggcaa

SEQ ID NO: 157412 - DNA, 53 bp, Artificial
  Synthetic oligonucleotide
ggctgtgcatctaagaaggtgtgtgagtacgaggtttgtccaccgtctgtact

SEQ ID NO: 157413 - DNA, 53 bp, Artificial
  Synthetic oligonucleotide
ggcttaacggtatttgcccacaaagctctcgcaacgacggacgcggccaacct

SEQ ID NO: 157414 - DNA, 53 bp, Artificial
  Synthetic oligonucleotide
gcatcgaatactcgtacgacgatcaatcgatcgcggcagtgaagcaacgcatt

SEQ ID NO: 157415 - DNA, 53 bp, Artificial
  Synthetic oligonucleotide
ggggcagacgaataacggcgtgtcgcaagcaggggaagccgtgcgttggttcc

SEQ ID NO: 157416 - DNA, 50 bp, Artificial
  Synthetic oligonucleotide
ccagcgaaactttccggttccgggccgttggcttcacaaccaatttccgg

SEQ ID NO: 157417 - DNA, 53 bp, Artificial
  Synthetic oligonucleotide
ggggctccatcgtgactcttgtcatgctacaggtgatccatcagccaaggcgg

SEQ ID NO: 157418 - DNA, 53 bp, Artificial
  Synthetic oligonucleotide
cgccccggggacacggacaccccgctatgcactcaagctggcgggacttcccg

SEQ ID NO: 157419 - DNA, 53 bp, Artificial
  Synthetic oligonucleotide
gcagacataagccggatgctatcgccccataggcaagtcgtcttggttgaaaa

SEQ ID NO: 157420 - DNA, 58 bp, Artificial
  Synthetic oligonucleotide
ctgccaacgtgagcccttctttgcatgggaccttcttcggtgcgagggactcctcgta

SEQ ID NO: 157421 - DNA, 57 bp, Artificial
  Synthetic oligonucleotide
tatctcgcaacgcatctgtcgtcctacacgacgggcagccatatcgacgtttctgga

SEQ ID NO: 157422 - DNA, 53 bp, Artificial
  Synthetic oligonucleotide
aggtcatacacagccagcacccgcttgactccctgggtgatgtgtttgcatga

SEQ ID NO: 157423 - DNA, 53 bp, Artificial
  Synthetic oligonucleotide
cgcccaagcgcgcgacaaactgcacggtctagtctggctacgttcagacttta

SEQ ID NO: 157424 - DNA, 53 bp, Artificial
  Synthetic oligonucleotide
acctgtggcatttctcacgaacggtgcgatcgaaaccttcagtccgcacggca

SEQ ID NO: 157425 - DNA, 53 bp, Artificial
  Synthetic oligonucleotide
ggtcctcaaacggcatgcgctgtccgtctcgccccaaggcgtccgtagcatct

SEQ ID NO: 157426 - DNA, 53 bp, Artificial
  Synthetic oligonucleotide
cgcatggaaatctccttgagtcggcgcggggtccgcaaatgaacacgaatcgc

SEQ ID NO: 157427 - DNA, 53 bp, Artificial
  Synthetic oligonucleotide
ctcgcccgtcaagcgattgcgacgtagttcgcccgataaggctgtcgtgtctt

SEQ ID NO: 157428 - DNA, 53 bp, Artificial
  Synthetic oligonucleotide
tggcacccgcgattctgttggagcaacgcgaacgggcttgcttgcgcgatatg

SEQ ID NO: 157429 - DNA, 53 bp, Artificial
  Synthetic oligonucleotide
ccgcaatagggtggcgatatttcgcattgggtcactagcgcccgacgcgtagc

SEQ ID NO: 157430 - DNA, 53 bp, Artificial
  Synthetic oligonucleotide
tggccagttccacacggaccggcccacaacactcacggagaccaagccatgtc

SEQ ID NO: 157431 - DNA, 53 bp, Artificial
  Synthetic oligonucleotide
ctcgcgatgcccgctgcgattttgtcatcattcttgcatccggttacacgcgc

SEQ ID NO: 157432 - DNA, 57 bp, Artificial
  Synthetic oligonucleotide
gcgaaagacatgcccattaaattgacttatttcggatgttgaataacaattcgatcg

SEQ ID NO: 157433 - DNA, 53 bp, Artificial
  Synthetic oligonucleotide
attaacagccgcgtcgtggagcctcgcatacatcagaatgacaaacgcgaggc

SEQ ID NO: 157434 - DNA, 53 bp, Artificial
  Synthetic oligonucleotide
ttggccccatttacgcgaacccagaccactcggcccatcctcgcgataacgta

SEQ ID NO: 157435 - DNA, 53 bp, Artificial
  Synthetic oligonucleotide
ctcttctccgttgcaacatgagggtcgccgcatgctgagggtgatctatcgcg

SEQ ID NO: 157436 - DNA, 53 bp, Artificial
  Synthetic oligonucleotide
tgtgccggcgtagcctatggttgcgatgccgatcgtacttcgcaaggggcttg

SEQ ID NO: 157437 - DNA, 53 bp, Artificial
  Synthetic oligonucleotide
tctggattaatgtgtctaatgtatagatacagaggccatgcgccgtcagtttt

SEQ ID NO: 157438 - DNA, 53 bp, Artificial
  Synthetic oligonucleotide
ttccatatagctttcgggctagccgatcactggtaggacgacgccgcgtgcca

SEQ ID NO: 157439 - DNA, 53 bp, Artificial
  Synthetic oligonucleotide
aaacgcttgagcactattcccgtccgatcgaagatacgcaccgaacgttcgct

SEQ ID NO: 157440 - DNA, 53 bp, Artificial
  Synthetic oligonucleotide
aacgcccgagtgcggcttgcgttgtgcgggaatagactggtggccaccccacg

SEQ ID NO: 157441 - DNA, 53 bp, Artificial
  Synthetic oligonucleotide
ctgctttgggcgaccgacgacggactctggctgctcgcaaagcgattggagcg

SEQ ID NO: 157442 - DNA, 53 bp, Artificial
  Synthetic oligonucleotide
gaacgggctaggatcatgcggctcttgggacgggtcattcgatggtaggcgtg

SEQ ID NO: 157443 - DNA, 57 bp, Artificial
  Synthetic oligonucleotide
ttgaaaagcgaagacattcgagttttcgattcccagattccgcagagagaagcttgg

SEQ ID NO: 157444 - DNA, 53 bp, Artificial
  Synthetic oligonucleotide
ctctcgtatcgggcggtgccagttacggcatggcgccagcggactttctgcat

SEQ ID NO: 157445 - DNA, 53 bp, Artificial
  Synthetic oligonucleotide
ccgaacttagaccggacggatgttcgcagcttgcagacccttcgggcccgtct

SEQ ID NO: 157446 - DNA, 53 bp, Artificial
  Synthetic oligonucleotide
atgatcgtcagcttgttgctgtacttgcctggacgcttccagaccgactggaa

SEQ ID NO: 157447 - DNA, 53 bp, Artificial
  Synthetic oligonucleotide
cctcttactagccaagatgtgattcgtcgctccaaaccgctattggggacttt

SEQ ID NO: 157448 - DNA, 53 bp, Artificial
  Synthetic oligonucleotide
tgattctaggagagcgatcccgtagcaggtgcaaccgcgctgtggtttgtgta

SEQ ID NO: 157449 - DNA, 53 bp, Artificial
  Synthetic oligonucleotide
ttctacgtagaaacctacttcgtgggagacatatggcagcgaagatcattgca

SEQ ID NO: 157450 - DNA, 53 bp, Artificial
  Synthetic oligonucleotide
atgcatcgccgggcgttattttttcatcggccgactatgacgactcgacctgt

SEQ ID NO: 157451 - DNA, 53 bp, Artificial
  Synthetic oligonucleotide
ttcccgtcacttaaacgacggcgaaagcgttgtacgtgtacgagcaattgaat

SEQ ID NO: 157452 - DNA, 53 bp, Artificial
  Synthetic oligonucleotide
ccgcccgtaattccgcgcgcaaggcagttaaaaggcgttagctggagatttcg

SEQ ID NO: 157453 - DNA, 53 bp, Artificial
  Synthetic oligonucleotide
tgcttcgaattcgtcgtggccttgaaccggcgtttctgcttgcagcgcagtcc

SEQ ID NO: 157454 - DNA, 57 bp, Artificial
  Synthetic oligonucleotide
gccgtgcctggcggtcaaagacgaaagccagattgtaacgaatgcccggttcccatg

SEQ ID NO: 157455 - DNA, 53 bp, Artificial
  Synthetic oligonucleotide
ttttatcgagccgacgggaagggatgaatcggttcgtcgattatcggaccaaa

SEQ ID NO: 157456 - DNA, 53 bp, Artificial
  Synthetic oligonucleotide
ttttccgcgtaatcagttcgtgggagcgccggcatttactgctgcacgtctaa

SEQ ID NO: 157457 - DNA, 53 bp, Artificial
  Synthetic oligonucleotide
aaaacctcacctttggaccggaatccttcatacgacaaccgtatgtcagcccc

SEQ ID NO: 157458 - DNA, 53 bp, Artificial
  Synthetic oligonucleotide
ccgacgctgtcgtgcattcgggcgacacccagtctaggtatatggcgaaagac

SEQ ID NO: 157459 - DNA, 53 bp, Artificial
  Synthetic oligonucleotide
tgcttgcagcgcagtcccagttttctacgcagtcgcctgatccggtgcacgcc

SEQ ID NO: 157460 - DNA, 53 bp, Artificial
  Synthetic oligonucleotide
aacaacaagacggggtaataggctgcgaggttcaaggcaatcctctatcggtt

SEQ ID NO: 157461 - DNA, 53 bp, Artificial
  Synthetic oligonucleotide
caacctgggagcggatcgggagtcggcctcgggtgatagacgggccgccggct

SEQ ID NO: 157462 - DNA, 53 bp, Artificial
  Synthetic oligonucleotide
aagcaagcttcgggaccgcaacgatgagctcgcgtgggttcgacgaatcgacg

SEQ ID NO: 157463 - DNA, 53 bp, Artificial
  Synthetic oligonucleotide
aacgagacgactttctctttctcgtagaacgacgcaataagcgagtgaagggc

SEQ ID NO: 157464 - DNA, 53 bp, Artificial
  Synthetic oligonucleotide
cctaagtaccgtcaggtacgttgaggcacccttaggcgcttgcgtctgatgca

SEQ ID NO: 157465 - DNA, 57 bp, Artificial
  Synthetic oligonucleotide
gcccttccgaccgagttaatcaatcgcatcgccagtcctgccgtccggtaggagatg

SEQ ID NO: 157466 - DNA, 53 bp, Artificial
  Synthetic oligonucleotide
aacacgcggggattattttcgctgtgacacggaagtcatgcgttttccgtgca

SEQ ID NO: 157467 - DNA, 53 bp, Artificial
  Synthetic oligonucleotide
attcgaacgaatgcggacgccggatgcgtcaaattgggtgcgaagcagcaggt

SEQ ID NO: 157468 - DNA, 53 bp, Artificial
  Synthetic oligonucleotide
ttagctaaattgccgcaacctgtgcgtcatgggcgtagcgactctccttgtac

SEQ ID NO: 157469 - DNA, 53 bp, Artificial
  Synthetic oligonucleotide
aaaatctcgtgaccctctccgaacaagcgacgccacctcttaaggtagcgttg

SEQ ID NO: 157470 - DNA, 53 bp, Artificial
  Synthetic oligonucleotide
tgcgccactctccgcgggtattcagggccaaccggcaccagttaaccctacat

SEQ ID NO: 157471 - DNA, 53 bp, Artificial
  Synthetic oligonucleotide
cctaagagtggggttacattcccgagttttgaaaagctaagcgctgctttcga

SEQ ID NO: 157472 - DNA, 53 bp, Artificial
  Synthetic oligonucleotide
atttcgacatggagtaataaccgggttgggaagttttgaccgaatgtgtcgtg

SEQ ID NO: 157473 - DNA, 53 bp, Artificial
  Synthetic oligonucleotide
tggagcgtcaactgctcgcagtacgcaatcgcatgtcccgacgcgaggaggtc

SEQ ID NO: 157474 - DNA, 53 bp, Artificial
  Synthetic oligonucleotide
ttcaactgacgcgcaaggcaaaccatccgccaatgggtatccaaattcggcaa

SEQ ID NO: 157475 - DNA, 53 bp, Artificial
  Synthetic oligonucleotide
ttttctcgaatttgagacgctcacgctttgcccaatcgatacgcgctgtattg

SEQ ID NO: 157476 - DNA, 57 bp, Artificial
  Synthetic oligonucleotide
agctgtcgctcgaagattgcctcgggatgtacaaagctgcgcgcatgatcaggaccc

SEQ ID NO: 157477 - DNA, 53 bp, Artificial
  Synthetic oligonucleotide
ctcccttaccgagtcgttgccatgttttcgtccatccggacccgtattcttgc

SEQ ID NO: 157478 - DNA, 53 bp, Artificial
  Synthetic oligonucleotide
cttaccaaccgttacacaaaccacagcgcggttgcacctgctacgggagcgct

SEQ ID NO: 157479 - DNA, 53 bp, Artificial
  Synthetic oligonucleotide
ctgagcaatacgaattccttgtgacccagctcggttcgctgagggtcgctcat

SEQ ID NO: 157480 - DNA, 53 bp, Artificial
  Synthetic oligonucleotide
cttccgttccgcgagccctagatgggcagttgcaatcaggtccaccccgcact

SEQ ID NO: 157481 - DNA, 52 bp, Artificial
  Synthetic oligonucleotide
ggtggcgatatttcgcattgggtcactagcgcccgacgcgtagcctcaacgt

SEQ ID NO: 157482 - DNA, 52 bp, Artificial
  Synthetic oligonucleotide
accgtcggacggtttacggttgatttgtatcaaccggaggttggacatccgc

SEQ ID NO: 157483 - DNA, 52 bp, Artificial
  Synthetic oligonucleotide
gggtcaatggccggcttccactttgttctgctatcgatttcgtgcgagagaa

SEQ ID NO: 157484 - DNA, 52 bp, Artificial
  Synthetic oligonucleotide
ggtcgcaatggcacacgcaagtccgcgtggtcgaattgaagtccgagtaata

SEQ ID NO: 157485 - DNA, 52 bp, Artificial
  Synthetic oligonucleotide
gcacgaacacaaggtgcgtcggggcgttttctggtcgttgtctggctatgtc

SEQ ID NO: 157486 - DNA, 52 bp, Artificial
  Synthetic oligonucleotide
aacaagtgaatccgggtcttgcaagtgtcggcgtcagccgtccacctggctt

SEQ ID NO: 157487 - DNA, 57 bp, Artificial
  Synthetic oligonucleotide
agtggcctccgcctttctgctctaccgcaatcgcaatgagcggcaaatggacatttt

SEQ ID NO: 157488 - DNA, 52 bp, Artificial
  Synthetic oligonucleotide
gggtgtctccttcccggcaagttcgaagctcgaccgggtatcgcggcttgac

SEQ ID NO: 157489 - DNA, 52 bp, Artificial
  Synthetic oligonucleotide
gcactaggcgttcaacttcgctggcaacctcgtcgcgttgtttgcgcaaaga

SEQ ID NO: 157490 - DNA, 52 bp, Artificial
  Synthetic oligonucleotide
ccagtagaaacccgagagcgatcgagcatagcaccgtgagtcgtttgctgca

SEQ ID NO: 157491 - DNA, 52 bp, Artificial
  Synthetic oligonucleotide
ggtacgcgcgagttgcgggatccaggttgcaccgtgggaaacattcgacgag

SEQ ID NO: 157492 - DNA, 52 bp, Artificial
  Synthetic oligonucleotide
attataggcgggttcaatggcatccacaagcaagcggctatcggcccgcgag

SEQ ID NO: 157493 - DNA, 52 bp, Artificial
  Synthetic oligonucleotide
cgattcacgaactgatccgagaactcttgataggtattccgagttgcgccac

SEQ ID NO: 157494 - DNA, 52 bp, Artificial
  Synthetic oligonucleotide
ctgttaggtccgcaggcgataattcgcgcggactaccgatttaccgagaggt

SEQ ID NO: 157495 - DNA, 52 bp, Artificial
  Synthetic oligonucleotide
ctgtgtcgtatccgaacacagatacgttgggatacaaagcgtccgaatggtt

SEQ ID NO: 157496 - DNA, 52 bp, Artificial
  Synthetic oligonucleotide
tggaacgggattgccgcagcgattgaaaccgtcatcggctttgcctcacgcg

SEQ ID NO: 157497 - DNA, 52 bp, Artificial
  Synthetic oligonucleotide
gatgcggccagttttggtgtggccgggtgcattccgccgcatatccgactca

SEQ ID NO: 157498 - DNA, 57 bp, Artificial
  Synthetic oligonucleotide
agctctgcgctagtggcgattaacgcgctaatgctcaagcgaacccggctgactgga

SEQ ID NO: 157499 - DNA, 52 bp, Artificial
  Synthetic oligonucleotide
agtctttccaccgagtgagccgtgtggccgaggccagttgtagtcgaactgc

SEQ ID NO: 157500 - DNA, 52 bp, Artificial
  Synthetic oligonucleotide
gtcgcggataacgggacgcagcacgcaacgctctatgacggcaatggcgtac

SEQ ID NO: 157501 - DNA, 52 bp, Artificial
  Synthetic oligonucleotide
agtcttatatcgtggcaaacgcggattcggctgcgcctagtcaggtgccgag

SEQ ID NO: 157502 - DNA, 52 bp, Artificial
  Synthetic oligonucleotide
cgcaaggaattcctgccagcgagctgtatctcgtcagccgaaccatggcgcg

SEQ ID NO: 157503 - DNA, 52 bp, Artificial
  Synthetic oligonucleotide
tggagggctgcgcatcttggatcgcttgtttgagagcgtctgggtcaatagt

SEQ ID NO: 157504 - DNA, 52 bp, Artificial
  Synthetic oligonucleotide
cggtagttggtgcccgcgtcgtagctctggaacgtgtccgaatagccgttgg

SEQ ID NO: 157505 - DNA, 52 bp, Artificial
  Synthetic oligonucleotide
gattgtcggtgactgactaacgtgtctcggggcattttggctctcggttatc

SEQ ID NO: 157506 - DNA, 52 bp, Artificial
  Synthetic oligonucleotide
agtcaggtagaacgagcttgctaggttcggcggcacagatacgcaggggtgg

SEQ ID NO: 157507 - DNA, 52 bp, Artificial
  Synthetic oligonucleotide
ccgttgattcgcccggaccacctaacgcaagcgccgtgccatgtcggcccga

SEQ ID NO: 157508 - DNA, 52 bp, Artificial
  Synthetic oligonucleotide
gcaaccagcagaagtttcgcgccacgtctggctaacgcataggcgaactcgc

SEQ ID NO: 157509 - DNA, 57 bp, Artificial
  Synthetic oligonucleotide
gtattatcagggctattcatgccccgattctccgggcgcctctggctactgcccgtg

SEQ ID NO: 157510 - DNA, 52 bp, Artificial
  Synthetic oligonucleotide
tggcgtcgcactgtttcgtccggaaatgaacgcccgtcgattcagggaaagt

SEQ ID NO: 157511 - DNA, 52 bp, Artificial
  Synthetic oligonucleotide
gtagcgttgcactaacgtgggaatcgctaaggccataaccgggctggtaacc

SEQ ID NO: 157512 - DNA, 52 bp, Artificial
  Synthetic oligonucleotide
atgtgctgccatacccgagtttcatcggattttcctcgtatgccgttcttgt

SEQ ID NO: 157513 - DNA, 52 bp, Artificial
  Synthetic oligonucleotide
accgcgtaacccggcatatcgcgcaagcaagcccgttcgcgttgctccaaca

SEQ ID NO: 157514 - DNA, 52 bp, Artificial
  Synthetic oligonucleotide
ggtttggacggggcccccggcgcatttggcaccacatcgtgcttacccgtat

SEQ ID NO: 157515 - DNA, 52 bp, Artificial
  Synthetic oligonucleotide
ggttgagatgccttgctacggcattgtttcgggttgattgccaaaccttcgc

SEQ ID NO: 157516 - DNA, 52 bp, Artificial
  Synthetic oligonucleotide
ctgctgacattgcacggggccaagtccttaactatagcaaagcatggttgct

SEQ ID NO: 157517 - DNA, 52 bp, Artificial
  Synthetic oligonucleotide
gcacacgagaccgcatccgtgttgaaaccgttgaggcccattgtgggcgaat

SEQ ID NO: 157518 - DNA, 52 bp, Artificial
  Synthetic oligonucleotide
ggttgacgctatagcgctctgtcgctgtttggcagtgcgcggctttgtctta

SEQ ID NO: 157519 - DNA, 52 bp, Artificial
  Synthetic oligonucleotide
cgggtacaagactgtcccgacgttgtagcacgacgtaaatcgacaataaaag

SEQ ID NO: 157520 - DNA, 57 bp, Artificial
  Synthetic oligonucleotide
ggtccaatgctgcttcgagtatcgcggcacgcgtctgttcgccttttcgcatagctt

SEQ ID NO: 157521 - DNA, 52 bp, Artificial
  Synthetic oligonucleotide
aaacgctccggcgtactccccgcaatgcattgccgtacggccgtaagcagcc

SEQ ID NO: 157522 - DNA, 52 bp, Artificial
  Synthetic oligonucleotide
ctcacgggcaaaaaccgaaagggaggaatcggaaaggcggcaagcgcacgtg

SEQ ID NO: 157523 - DNA, 52 bp, Artificial
  Synthetic oligonucleotide
actgaatcgtcgggcgctaaagtacggcccagccacatccgttggtcgcccg

SEQ ID NO: 157524 - DNA, 52 bp, Artificial
  Synthetic oligonucleotide
ttggccgtatcgtgttggacgcatcatttagccctgttaagcgtgtttcata

SEQ ID NO: 157525 - DNA, 52 bp, Artificial
  Synthetic oligonucleotide
cgcgtgcgcagcattcacgttatgacgacgcaattcgagtgcgcgctgcgtg

SEQ ID NO: 157526 - DNA, 52 bp, Artificial
  Synthetic oligonucleotide
atttcctacttcacgacacaaggacacgttcaatgcgcacgaccggttcttc

SEQ ID NO: 157527 - DNA, 52 bp, Artificial
  Synthetic oligonucleotide
ctcgcccgttagcatgaactcaccgctgacacctgacgagagtcccgccttc

SEQ ID NO: 157528 - DNA, 52 bp, Artificial
  Synthetic oligonucleotide
caggtatgcgtttccgataggccgtaggccgcttcatagatgcggcattgcg

SEQ ID NO: 157529 - DNA, 52 bp, Artificial
  Synthetic oligonucleotide
acttggcgcttatgaggatcggtagcgcgaccctgtgccagttgcgggccac

SEQ ID NO: 157530 - DNA, 52 bp, Artificial
  Synthetic oligonucleotide
agaagacatacagcgtgcccttgttgcccttcgaaaactggaccgcgtattt

SEQ ID NO: 157531 - DNA, 58 bp, Artificial
  Synthetic oligonucleotide
gaattcgtcgtggccttgaaccggcgtttctgcttgcagcgcagtcccagttttctac

SEQ ID NO: 157532 - DNA, 57 bp, Artificial
  Synthetic oligonucleotide
tctcgtatgtcatctcgtgtgtttttgtcagtcaaatttggtcacacagatgtcgct

SEQ ID NO: 157533 - DNA, 52 bp, Artificial
  Synthetic oligonucleotide
gcctcgacacttggaagcgaccaggcgtagttcaagacccgtccggcctcaa

SEQ ID NO: 157534 - DNA, 52 bp, Artificial
  Synthetic oligonucleotide
agcgtaacaacggacgatcaacttcgcgagcgcggtagtgggatgccagcgt

SEQ ID NO: 157535 - DNA, 52 bp, Artificial
  Synthetic oligonucleotide
gcctcgtgatccgtccctgtggataactcccttgcgggtccgttttggcgtt

SEQ ID NO: 157536 - DNA, 52 bp, Artificial
  Synthetic oligonucleotide
gcgttccgctacttgcccggggagaagcgaatgcagagtcgcgtgttccgaa

SEQ ID NO: 157537 - DNA, 52 bp, Artificial
  Synthetic oligonucleotide
gcctgggtctcgcagcgtagggactcgcatcgtgtggctccgtgaacatgtc

SEQ ID NO: 157538 - DNA, 52 bp, Artificial
  Synthetic oligonucleotide
aaacatgcgtgcgggggttcgcaccatcaaacaagcggccatctacccccta

SEQ ID NO: 157539 - DNA, 52 bp, Artificial
  Synthetic oligonucleotide
gccttgcttgtcggtgctacgcgatgaagaataagcggtttgtccaatctca

SEQ ID NO: 157540 - DNA, 52 bp, Artificial
  Synthetic oligonucleotide
agcgcttcgagtgaattcggctgcgagatatccacaccgcgatacgggtccg

SEQ ID NO: 157541 - DNA, 52 bp, Artificial
  Synthetic oligonucleotide
agagaccaacgcggttcggaaacatggtgcataccttgaatcatgtctatgt

SEQ ID NO: 157542 - DNA, 52 bp, Artificial
  Synthetic oligonucleotide
aaaagctcgcaagacagcgggcctgaacgagggagaaatgcgcgtgctcaca

SEQ ID NO: 157543 - DNA, 57 bp, Artificial
  Synthetic oligonucleotide
ctcatctcgcgttcatgtcggggaccggaatgatgcgtcggtatttcagtccgatta

SEQ ID NO: 157544 - DNA, 52 bp, Artificial
  Synthetic oligonucleotide
gcgggagcgtacctcaatgacggagctcacggtgcgtaccaggtctttccgg

SEQ ID NO: 157545 - DNA, 52 bp, Artificial
  Synthetic oligonucleotide
gcgaatcacatcggagcagttgtcgcatcatcgacctcatatcgatcctaag

SEQ ID NO: 157546 - DNA, 52 bp, Artificial
  Synthetic oligonucleotide
gcgcttgctgtagatcgtagtctttagccgttttcgcctcgcccccttggcg

SEQ ID NO: 157547 - DNA, 52 bp, Artificial
  Synthetic oligonucleotide
ctccgtgctaaatgacgaggtctcacaggacgcgatgacgatgcgtcgacaa

SEQ ID NO: 157548 - DNA, 52 bp, Artificial
  Synthetic oligonucleotide
gcgagcgcaggtcaaaacgcgctgacgcgagccactgtgtgagtaattgcgg

SEQ ID NO: 157549 - DNA, 52 bp, Artificial
  Synthetic oligonucleotide
ctcccgaggaaagttctcagcagcctactcgctgagaggtgggggtgaccat

SEQ ID NO: 157550 - DNA, 52 bp, Artificial
  Synthetic oligonucleotide
ccggaaagacctggtacgcaccgtgagctccgtcattgaggtacgctcccgc

SEQ ID NO: 157551 - DNA, 51 bp, Artificial
  Synthetic oligonucleotide
ccggaaggcagaactaacccgcccaaggcgacccattccgacccggccttc

SEQ ID NO: 157552 - DNA, 52 bp, Artificial
  Synthetic oligonucleotide
ttacggcgcaagggaactgtaatgcgccgtaacccgccggccactccgcgta

SEQ ID NO: 157553 - DNA, 52 bp, Artificial
  Synthetic oligonucleotide
gggcgggaatggtggtttaacggccggcgcatagggtgtttatctcaagcac

SEQ ID NO: 157554 - DNA, 57 bp, Artificial
  Synthetic oligonucleotide
gggctgcaatatcgctaaccgagagagagcgacaggtattgcggtggaccgtggaag

SEQ ID NO: 157555 - DNA, 52 bp, Artificial
  Synthetic oligonucleotide
gcatacgcgggtgcgaggagcccgcgcgacaggttcaacggtgcaagaacac

SEQ ID NO: 157556 - DNA, 52 bp, Artificial
  Synthetic oligonucleotide
ttattccatcacgacggcaaattttccttagcgcgacgcgtatcggatctga

SEQ ID NO: 157557 - DNA, 52 bp, Artificial
  Synthetic oligonucleotide
acgcgttgaaggaagcctaaccggacagtattggtcgcataagacgagcttt

SEQ ID NO: 157558 - DNA, 52 bp, Artificial
  Synthetic oligonucleotide
ggcggtgttgtccggaaacatacagcgaatgtcgcgacgagtaaccataact

SEQ ID NO: 157559 - DNA, 52 bp, Artificial
  Synthetic oligonucleotide
gccacagcatcattgctgatcggctcgccacgtgccttcagacgctcgagtg

SEQ ID NO: 157560 - DNA, 52 bp, Artificial
  Synthetic oligonucleotide
ggcggggctgttatgagacagattgcacccgcgaagtctcaaccgacgcttg

SEQ ID NO: 157561 - DNA, 52 bp, Artificial
  Synthetic oligonucleotide
ccactctgccggtatcgcaaaccgagtggcattcccccatgcacgacaacgt

SEQ ID NO: 157562 - DNA, 52 bp, Artificial
  Synthetic oligonucleotide
ccgtagtccgagccgagatagccgttcactggcgtttcgagccagtgcgaaa

SEQ ID NO: 157563 - DNA, 52 bp, Artificial
  Synthetic oligonucleotide
gccacgcggggatacaccgggcaaataacaaggtcgtaccgttcgaagaatg

SEQ ID NO: 157564 - DNA, 52 bp, Artificial
  Synthetic oligonucleotide
ttccaacaagggacttgcgagtctgtgcttcgagttgatgcttctcacgttc

SEQ ID NO: 157565 - DNA, 52 bp, Artificial
  Synthetic oligonucleotide
attgggggaacacattcgttgacgcctttagggccgccattcgacgcggggt

SEQ ID NO: 157566 - DNA, 52 bp, Artificial
  Synthetic oligonucleotide
cagcttcgcgccaggaaaacgccaacgcaccgcaaacacacaacgagtacac

SEQ ID NO: 157567 - DNA, 52 bp, Artificial
  Synthetic oligonucleotide
ggcctcatatggtcgcaggcgcaatccaccgatgttctttcgtacggcagcg

SEQ ID NO: 157568 - DNA, 52 bp, Artificial
  Synthetic oligonucleotide
cggcgtcactatggagcgaccctcttcgcactgaatgtgaccgcccgtaagg

SEQ ID NO: 157569 - DNA, 52 bp, Artificial
  Synthetic oligonucleotide
ggcactcatcgccgttgctcgcgcgaaaagttttactcgagctgccgtgcag

SEQ ID NO: 157570 - DNA, 52 bp, Artificial
  Synthetic oligonucleotide
ggcacgcacttctctcagacggactccggggtttttcgacggtcgcatgcca

SEQ ID NO: 157571 - DNA, 52 bp, Artificial
  Synthetic oligonucleotide
ccacacagacacctcttcgagcgttaaatgcaagccggttcgctcgtattcc

SEQ ID NO: 157572 - DNA, 52 bp, Artificial
  Synthetic oligonucleotide
aaagggcgcggtctggcgtaagtcgcattgcgcagatgattgctccgagtca

SEQ ID NO: 157573 - DNA, 52 bp, Artificial
  Synthetic oligonucleotide
caggggccgatgagcggccttttctggggcactgtctgtcacgtaacgtcta

SEQ ID NO: 157574 - DNA, 52 bp, Artificial
  Synthetic oligonucleotide
ttcttaacaacgtgaggttccttggatgcaccatgtggactgactatcatgc

SEQ ID NO: 157575 - DNA, 52 bp, Artificial
  Synthetic oligonucleotide
acgtgggctgcgcttgaaaagacgattgtttcgtaccagagcgagagccgtt

SEQ ID NO: 157576 - DNA, 55 bp, Artificial
  Synthetic oligonucleotide
accccgagacagcgtagtacatctattccggtgtggataactcttcgttacccgc

SEQ ID NO: 157577 - DNA, 52 bp, Artificial
  Synthetic oligonucleotide
acgtgtcttgtccattgatcgccgcgctacatgaccgatagccgttcgtcga

SEQ ID NO: 157578 - DNA, 52 bp, Artificial
  Synthetic oligonucleotide
acgttgtcgtgcatgggggaatgccactcggtttgcgataccggcagagtgg

SEQ ID NO: 157579 - DNA, 52 bp, Artificial
  Synthetic oligonucleotide
ggagcgtgtgctgattcatccctatgtgatcggtgagatttcgcttggtagt

SEQ ID NO: 157580 - DNA, 52 bp, Artificial
  Synthetic oligonucleotide
actatccatccctgtaccgcaacgtaacgtgacgtcccgaggttgaaccttg

SEQ ID NO: 157581 - DNA, 52 bp, Artificial
  Synthetic oligonucleotide
gccgaatgttgcgcccctgctgcgacattcgagcacgtgaggcatcgcggcg

SEQ ID NO: 157582 - DNA, 52 bp, Artificial
  Synthetic oligonucleotide
ttgatgtactggggcccaacgacatttcacgcatgcaacccaaaggaagcca

SEQ ID NO: 157583 - DNA, 52 bp, Artificial
  Synthetic oligonucleotide
gccgatatctgttgatatcactctgactggctcaatcgccaatgacaaaagt

SEQ ID NO: 157584 - DNA, 52 bp, Artificial
  Synthetic oligonucleotide
ttgcatgttgaacggaaacccaagtccatatgaaacggatgatgctctatac

SEQ ID NO: 157585 - DNA, 51 bp, Artificial
  Synthetic oligonucleotide
cgtgtttttccaaggggtgtctccttcccggcaagttcgaagctcgaccgg

SEQ ID NO: 157586 - DNA, 52 bp, Artificial
  Synthetic oligonucleotide
tatttcgcgcctcggtgaaccattcggcgggtacggtcgtttaccgcagatc

SEQ ID NO: 157587 - DNA, 57 bp, Artificial
  Synthetic oligonucleotide
accatgtcgggcagctctgcgctagtggcgattaacgcgctaatgctcaagcgaacc

SEQ ID NO: 157588 - DNA, 52 bp, Artificial
  Synthetic oligonucleotide
atccgatacctgcggaaattcccgacattgaatccaccgttcattggcatcg

SEQ ID NO: 157589 - DNA, 52 bp, Artificial
  Synthetic oligonucleotide
tatcaactgggatgccgtacagacgaggcagtggcaatcggaccgcgaaggc

SEQ ID NO: 157590 - DNA, 52 bp, Artificial
  Synthetic oligonucleotide
aatcgcgtcccacacgccgatatacgtggcgggacaggaccgcggcgtctta

SEQ ID NO: 157591 - DNA, 52 bp, Artificial
  Synthetic oligonucleotide
aatctcggtcacggaagcagcacgctccaaatacacggtgtggcataggttt

SEQ ID NO: 157592 - DNA, 52 bp, Artificial
  Synthetic oligonucleotide
atgcattaactacctgacttagtacaaccaacgacggccccattccagtctg

SEQ ID NO: 157593 - DNA, 52 bp, Artificial
  Synthetic oligonucleotide
aacgttgtattcctcactccgcagaacattgcttcggttctcatggagcaac

SEQ ID NO: 157594 - DNA, 52 bp, Artificial
  Synthetic oligonucleotide
gactatccatgcgcgcttgtgctctgcgtgcttaaaccgactgactcaaagt

SEQ ID NO: 157595 - DNA, 50 bp, Artificial
  Synthetic oligonucleotide
aacgttccgcccaatccggcccgttcacgttggtaccttcggtcaccaac

SEQ ID NO: 157596 - DNA, 52 bp, Artificial
  Synthetic oligonucleotide
gaaacgcttttcgcgtccccacggtgtgggaggtatccggaattccgtgtgt

SEQ ID NO: 157597 - DNA, 52 bp, Artificial
  Synthetic oligonucleotide
gactgagggcgctactgcctgcactgagatgaaaacttcgattgcgattgtg

SEQ ID NO: 157598 - DNA, 57 bp, Artificial
  Synthetic oligonucleotide
gggataatgcctctaaaccggtgatgttgccgggtcatgacacttcgtggagggggc

SEQ ID NO: 157599 - DNA, 52 bp, Artificial
  Synthetic oligonucleotide
aatgcgttatctgcgtcggcggggcattagcttacccgaggctccccggcaa

SEQ ID NO: 157600 - DNA, 52 bp, Artificial
  Synthetic oligonucleotide
tgacgcgcgcgtagacctcttgacgcacaaggctgtgcgggacgctgtaata

SEQ ID NO: 157601 - DNA, 52 bp, Artificial
  Synthetic oligonucleotide
atcacccggccgcggggtacagcggaacatcgttgtcaaccacgtagccatc

SEQ ID NO: 157602 - DNA, 52 bp, Artificial
  Synthetic oligonucleotide
cgacgcggtgcgcctagggttcacaagttgcgtgcgataggaattgcaagca

SEQ ID NO: 157603 - DNA, 52 bp, Artificial
  Synthetic oligonucleotide
cgttatcggtagtggataacagaacaagcttttggggcgggaatgaagcgat

SEQ ID NO: 157604 - DNA, 52 bp, Artificial
  Synthetic oligonucleotide
cacattgtgaacattaatcggcttattccagccgaagaatgttggagcgacg

SEQ ID NO: 157605 - DNA, 52 bp, Artificial
  Synthetic oligonucleotide
cgtcatgacagcccggtccgcgggactgatctcgttccactgtcggtggaat

SEQ ID NO: 157606 - DNA, 52 bp, Artificial
  Synthetic oligonucleotide
cgtcaccactttagttttcgggtgtcctgatgtcaaatagcgaaatggagaa

SEQ ID NO: 157607 - DNA, 52 bp, Artificial
  Synthetic oligonucleotide
taatgccagttggggtcgcgtcacgcaacggaggacagagtacgctaagcct

SEQ ID NO: 157608 - DNA, 52 bp, Artificial
  Synthetic oligonucleotide
taaatggcgctccaaaaactcgatcgtctcgagaatcgaatgcaggactagc

SEQ ID NO: 157609 - DNA, 57 bp, Artificial
  Synthetic oligonucleotide
gggaagcgggttgtggtgtttcgggcacaacaacgatctctcaaccgtgtgcgtgtc

SEQ ID NO: 157610 - DNA, 52 bp, Artificial
  Synthetic oligonucleotide
tgaggcgttctcagcacgtagccgcatcatcgaggaagcacttgcgaacgaa

SEQ ID NO: 157611 - DNA, 52 bp, Artificial
  Synthetic oligonucleotide
tgatacatctcccagacttgggcgacccaatccagcgtccaaccgctcttga

SEQ ID NO: 157612 - DNA, 52 bp, Artificial
  Synthetic oligonucleotide
tgatgcgtcttcagatacggccgcaacttgtcgcacatgtcctgtgccgcaa

SEQ ID NO: 157613 - DNA, 52 bp, Artificial
  Synthetic oligonucleotide
gagccgacgtcttcaccgctcgcactagccggcctttttcgtcagacctgtc

SEQ ID NO: 157614 - DNA, 52 bp, Artificial
  Synthetic oligonucleotide
acacacgtactaccttacgtcgacacaatcttcacgtacgtacactacgtcc

SEQ ID NO: 157615 - DNA, 52 bp, Artificial
  Synthetic oligonucleotide
gttctgcgggcgaactgtctcgagaacaatctcgtgcttttcaaatacgtgc

SEQ ID NO: 157616 - DNA, 52 bp, Artificial
  Synthetic oligonucleotide
gaatactggggaagcctatggcctatctatcgacgggctcggagtggacttt

SEQ ID NO: 157617 - DNA, 52 bp, Artificial
  Synthetic oligonucleotide
aagccgacgaagtcgcgcattggaactacccgacatggtggatcgatgcagt

SEQ ID NO: 157618 - DNA, 52 bp, Artificial
  Synthetic oligonucleotide
caccgagtgagccgtgtggccgaggccagttgtagtcgaactgccactcttc

SEQ ID NO: 157619 - DNA, 52 bp, Artificial
  Synthetic oligonucleotide
tcgattcattgccgacattggagacgcgatgtcgaaagtgcaattctccggc

SEQ ID NO: 157620 - DNA, 57 bp, Artificial
  Synthetic oligonucleotide
tcccgcttgcgcaacacacccgcaccacaatacgccaatcacactatttcggaagat

SEQ ID NO: 157621 - DNA, 52 bp, Artificial
  Synthetic oligonucleotide
gaatcgcgcattttaaccctatcggcctttgcgtgctttaccgttcctgacg

SEQ ID NO: 157622 - DNA, 52 bp, Artificial
  Synthetic oligonucleotide
tcgaagctcgtgtcgctatcgtttcgcacgtacgcatacgaagtgccgaacg

SEQ ID NO: 157623 - DNA, 52 bp, Artificial
  Synthetic oligonucleotide
aagaggctgccacttccaggtaggagacaacttcatgccatatcccgcgcaa

SEQ ID NO: 157624 - DNA, 52 bp, Artificial
  Synthetic oligonucleotide
tccttcaacaacttacgtctcaactggagcttcgtttccttacttatggcta

SEQ ID NO: 157625 - DNA, 52 bp, Artificial
  Synthetic oligonucleotide
tccgcttgtgagctccactacaactggcgtgcggttcctcacgttgtaaaac

SEQ ID NO: 157626 - DNA, 52 bp, Artificial
  Synthetic oligonucleotide
aaggcctggtacggagttatagagcccgatccgaaggctcatgagacgtacg

SEQ ID NO: 157627 - DNA, 52 bp, Artificial
  Synthetic oligonucleotide
aaggcggctaccttctctcgatcgatcactaatacgtcttgtggcttatcaa

SEQ ID NO: 157628 - DNA, 52 bp, Artificial
  Synthetic oligonucleotide
atcgctcgcgagaaggccgcgattaattccgtgtggttgatacagtctttcg

SEQ ID NO: 157629 - DNA, 52 bp, Artificial
  Synthetic oligonucleotide
tcccaactgcgtttgacgcgtcgatgcgtcgcccaaaaacgtgcctttaccg

SEQ ID NO: 157630 - DNA, 52 bp, Artificial
  Synthetic oligonucleotide
aaggtaaaggtcggggtgttgcgatcgggtgcgagcaacttgtctgctcggg

SEQ ID NO: 157631 - DNA, 57 bp, Artificial
  Synthetic oligonucleotide
tccacgcgttccccgacatgtcggtgaaaacgaatgtcgacagcgttccctgccaca

SEQ ID NO: 157632 - DNA, 52 bp, Artificial
  Synthetic oligonucleotide
atcgcgcaagcaagcccgttcgcgttgctccaacagaatcgcgggtgccagc

SEQ ID NO: 157633 - DNA, 52 bp, Artificial
  Synthetic oligonucleotide
aactgtgcggtgacctgaaaaccaaccgtcacgcgtgccgtaggaaacccgg

SEQ ID NO: 157634 - DNA, 52 bp, Artificial
  Synthetic oligonucleotide
tcatagcgcctaagggcatcccccaatatgccgaataacgggcagagcggta

SEQ ID NO: 157635 - DNA, 52 bp, Artificial
  Synthetic oligonucleotide
tcagtctcggttgttccgatgcctgaggttaacagctcaccgcgaaagttaa

SEQ ID NO: 157636 - DNA, 52 bp, Artificial
  Synthetic oligonucleotide
tctgcaactcggcattgtggccaagttcgtacagatcataggctagctgaac

SEQ ID NO: 157637 - DNA, 52 bp, Artificial
  Synthetic oligonucleotide
aatacgtcgcgcgtattacagagacgccaccgattcgccgggtatcaagcca

SEQ ID NO: 157638 - DNA, 52 bp, Artificial
  Synthetic oligonucleotide
tcacgatgcctccgatgggaacaggttccgcaatcagagaccgccgtgcgtg

SEQ ID NO: 157639 - DNA, 52 bp, Artificial
  Synthetic oligonucleotide
tctgcgttacccggtaacacaccgttctgcaacgttaccgggtaacaatcga

SEQ ID NO: 157640 - DNA, 52 bp, Artificial
  Synthetic oligonucleotide
tctgctcgcgtgggcttccggtctcgagcaattcgagtcgcttggtgcggat

SEQ ID NO: 157641 - DNA, 52 bp, Artificial
  Synthetic oligonucleotide
atgagacagattgcacccgcgaagtctcaaccgacgcttgtggtgggccgtt

SEQ ID NO: 157642 - DNA, 60 bp, Artificial
  Synthetic oligonucleotide
atcgtcacgcggtgctatagcggcctgaagtgcgagtggcaaaggtaaacggctgcaatc

SEQ ID NO: 157643 - DNA, 57 bp, Artificial
  Synthetic oligonucleotide
actcggaagtagtcgatgcgcgtagcgcgcaatcgggaaatcgaaagtaccgcgtaa

SEQ ID NO: 157644 - DNA, 52 bp, Artificial
  Synthetic oligonucleotide
tcttatggagtcgcacattcggctgtcgtatcgtcgattcatgaaagaacgt

SEQ ID NO: 157645 - DNA, 52 bp, Artificial
  Synthetic oligonucleotide
tctttagggcgatcggaacaacctgtgtcgtcgcagatccgtaccgtgttcc

SEQ ID NO: 157646 - DNA, 52 bp, Artificial
  Synthetic oligonucleotide
ccgagagatcagatagaccggtccccacacgggtgccgtcacgatgacgagt

SEQ ID NO: 157647 - DNA, 52 bp, Artificial
  Synthetic oligonucleotide
gtggttcgcacaagccagctgccacgaccgcacacctcgctcgttcggccat

SEQ ID NO: 157648 - DNA, 52 bp, Artificial
  Synthetic oligonucleotide
cttgcaactgactgtgagcatacggcaggttaccgccctttccgagttggtt

SEQ ID NO: 157649 - DNA, 52 bp, Artificial
  Synthetic oligonucleotide
gtggtcgcgcccaggcatctcgcttcttgaacaggatccactgttctgattg

SEQ ID NO: 157650 - DNA, 52 bp, Artificial
  Synthetic oligonucleotide
cgagttgtgtggcatacccaagctgtcgcacatgtgcgttcggcggcagacg

SEQ ID NO: 157651 - DNA, 52 bp, Artificial
  Synthetic oligonucleotide
gagtttgcgcctctgcactgccttattcgcggtccgagtgataccggtaagt

SEQ ID NO: 157652 - DNA, 52 bp, Artificial
  Synthetic oligonucleotide
cagaacaagcgcacctcgcatcgatgtttgcgaacacggctcaagcccgcgt

SEQ ID NO: 157653 - DNA, 52 bp, Artificial
  Synthetic oligonucleotide
gataaaccgctattttacggtttggacggggcccccggcgcatttggcacca

SEQ ID NO: 157654 - DNA, 57 bp, Artificial
  Synthetic oligonucleotide
gaacgttcgcgcgcgcatctaaactggactcgtcatttcacgctccgagtccctcgc

SEQ ID NO: 157655 - DNA, 52 bp, Artificial
  Synthetic oligonucleotide
gagggtctttcgcgaacatgtggtgcccgttgcagagactgctgcttgatcc

SEQ ID NO: 157656 - DNA, 52 bp, Artificial
  Synthetic oligonucleotide
cgatgcccgtatccggaggtgaatccgtgtatgtcggtcgagtgccgggcgc

SEQ ID NO: 157657 - DNA, 52 bp, Artificial
  Synthetic oligonucleotide
gaggctgatgtcgagggtcacctttgcgctttgttcggttaggtccgaccct

SEQ ID NO: 157658 - DNA, 52 bp, Artificial
  Synthetic oligonucleotide
aacgccctttatttataacgctgctacccgacaccgggtgcgcgcctgtcgt

SEQ ID NO: 157659 - DNA, 52 bp, Artificial
  Synthetic oligonucleotide
cagaatttccggcttcctcgaaacccgcgtcagtcggagtccgccaacttat

SEQ ID NO: 157660 - DNA, 52 bp, Artificial
  Synthetic oligonucleotide
tgcatgttcgatgtcgtgttgggtacgtcaagtcgagaggacgtccacttca

SEQ ID NO: 157661 - DNA, 52 bp, Artificial
  Synthetic oligonucleotide
tgcggaagtgggttaggtcggtgcctgagacaggcgtaagaacgcgtgctca

SEQ ID NO: 157662 - DNA, 52 bp, Artificial
  Synthetic oligonucleotide
tgcgtaaaccatatcggtaccgaaattcgcctcgccaatagcttgcctgtcc

SEQ ID NO: 157663 - DNA, 52 bp, Artificial
  Synthetic oligonucleotide
cccagccggttgtgactcgcccttctgaggccgaatcaggattcgtatagcg

SEQ ID NO: 157664 - DNA, 52 bp, Artificial
  Synthetic oligonucleotide
cggtgtgatctgctctagaaagaccgaacactaacgctcggtactgtccaag

SEQ ID NO: 157665 - DNA, 56 bp, Artificial
  Synthetic oligonucleotide
acattcgttgacgcctttagggccgccattcgacgcggggttagcaaggcaaagca

SEQ ID NO: 157666 - DNA, 52 bp, Artificial
  Synthetic oligonucleotide
atggcaaatcacccgaatcaaagaggagcgtctaccgtgagccatccccgtt

SEQ ID NO: 157667 - DNA, 52 bp, Artificial
  Synthetic oligonucleotide
gatagaccaaatagcctgtcatgtcccgcagtcgcaatatctgtgagggcaa

SEQ ID NO: 157668 - DNA, 52 bp, Artificial
  Synthetic oligonucleotide
cgatatggcagctagcgaaggcacgcgtccggatccgtccgagtacattgcg

SEQ ID NO: 157669 - DNA, 52 bp, Artificial
  Synthetic oligonucleotide
cttcggcagcgcattcaggtttgcttaatcttacggtccgtaatcctggcgg

SEQ ID NO: 157670 - DNA, 51 bp, Artificial
  Synthetic oligonucleotide
cgcaattactcacacagtggctcgcgtcagcgcgttttgacctgcgctcgc

SEQ ID NO: 157671 - DNA, 51 bp, Artificial
  Synthetic oligonucleotide
gtgtcatgttctcaatgctatacgccccgttagcgtcacccgatacttagt

SEQ ID NO: 157672 - DNA, 51 bp, Artificial
  Synthetic oligonucleotide
cgaactgcgactccagacgttgcgcccagacggtgttgatctgcatcggac

SEQ ID NO: 157673 - DNA, 51 bp, Artificial
  Synthetic oligonucleotide
gcttaccagccgtactcaatcttttgccgcggacaatgtcacgcaaaccag

SEQ ID NO: 157674 - DNA, 51 bp, Artificial
  Synthetic oligonucleotide
aagacacggcgtgctccgtcatgtttgtgggtccagatccgcccagacgct

SEQ ID NO: 157675 - DNA, 51 bp, Artificial
  Synthetic oligonucleotide
ttgtgttagcgactcttaactccgcccggaacgatagctgcgccctgccgt

SEQ ID NO: 157676 - DNA, 57 bp, Artificial
  Synthetic oligonucleotide
cgaaatggaccttccaagcggaaccagcttggcctactggctcgttccacgaatgcg

SEQ ID NO: 157677 - DNA, 51 bp, Artificial
  Synthetic oligonucleotide
actcgcgccacaggctatcgtttgttgcttcgggtctttccgacccaggct

SEQ ID NO: 157678 - DNA, 51 bp, Artificial
  Synthetic oligonucleotide
actctgtcatggaattcataaaatgtgctgacttcctaaccgggtgctgag

SEQ ID NO: 157679 - DNA, 51 bp, Artificial
  Synthetic oligonucleotide
ccgggcaatcggataaggaccaggcgtcaccacatagccttgcatgtcggg

SEQ ID NO: 157680 - DNA, 51 bp, Artificial
  Synthetic oligonucleotide
tctaaacgtgttgacgagaaacggtcgtcaaacaagcgtgggccaaacggc

SEQ ID NO: 157681 - DNA, 51 bp, Artificial
  Synthetic oligonucleotide
cattgggctagccgccgtgtgtgcataggactcctgaacgtgacgtgtcag

SEQ ID NO: 157682 - DNA, 51 bp, Artificial
  Synthetic oligonucleotide
tctccttgagtcggcgcggggtccgcaaatgaacacgaatcgcattctgta

SEQ ID NO: 157683 - DNA, 51 bp, Artificial
  Synthetic oligonucleotide
acttcgaaatgcgttgatgttgcatggttcgtctccctactgggtcggtaa

SEQ ID NO: 157684 - DNA, 51 bp, Artificial
  Synthetic oligonucleotide
cattggggagccgtccgtctgattgcgcaggatgtagcgtgcttgataccc

SEQ ID NO: 157685 - DNA, 51 bp, Artificial
  Synthetic oligonucleotide
tcagaccctccttggtaccgcgttgcacggaacagccaggaaatcggacat

SEQ ID NO: 157686 - DNA, 51 bp, Artificial
  Synthetic oligonucleotide
actgttaacgtagtcgtgcaagtcacgtttaacccgaaagtggggcgttac

SEQ ID NO: 157687 - DNA, 57 bp, Artificial
  Synthetic oligonucleotide
ggataatccgccagagtcttgcatcctcacctggacggcgttgcttgcaggcccgcg

SEQ ID NO: 157688 - DNA, 51 bp, Artificial
  Synthetic oligonucleotide
ttgtctaagccggaagaactctgtcgcctggtagccagtgcgtcgctaacg

SEQ ID NO: 157689 - DNA, 51 bp, Artificial
  Synthetic oligonucleotide
gtccttggcaagccgaatcaaattcttgctcgggcatgtgtcaccggaaaa

SEQ ID NO: 157690 - DNA, 51 bp, Artificial
  Synthetic oligonucleotide
actgagcgagatcgagcaaaccatcccggctcccttgtggcgactgttgtc

SEQ ID NO: 157691 - DNA, 51 bp, Artificial
  Synthetic oligonucleotide
ccggctggcactaaccaagggggcaggtcatcgctatgagcacttccgcaa

SEQ ID NO: 157692 - DNA, 51 bp, Artificial
  Synthetic oligonucleotide
aaaagcaccaccgtatgcgcagcatgtatagcaagacgcgcgtgccgaggt

SEQ ID NO: 157693 - DNA, 51 bp, Artificial
  Synthetic oligonucleotide
tcggtcgtgaggctccggcatccatgaaacgccataagaatctggcagcgg

SEQ ID NO: 157694 - DNA, 51 bp, Artificial
  Synthetic oligonucleotide
aaaagatcgtcctatgaagcggccaccgggaatgcgacagtctaggctgat

SEQ ID NO: 157695 - DNA, 51 bp, Artificial
  Synthetic oligonucleotide
catacccggaacgcgctcgcccattttccatagagatgactgccggaaggc

SEQ ID NO: 157696 - DNA, 51 bp, Artificial
  Synthetic oligonucleotide
gtctaactgtaggggaccctttccgcgaagacgtcgcaatcggcccgatta

SEQ ID NO: 157697 - DNA, 51 bp, Artificial
  Synthetic oligonucleotide
aaaacggtggaacgggcacacacgcgtaactgatttcgttcgaagcgtagc

SEQ ID NO: 157698 - DNA, 57 bp, Artificial
  Synthetic oligonucleotide
tccaagtcgtttcgtccacgggtgttgttcgattgcgcaagtcatgccgccttgccc

SEQ ID NO: 157699 - DNA, 51 bp, Artificial
  Synthetic oligonucleotide
tcggactgaagaccgctttctggcttccgccttcccggaattcgccgaata

SEQ ID NO: 157700 - DNA, 51 bp, Artificial
  Synthetic oligonucleotide
gcgctgatgccagcgtaaacaatggcaccacgaagccgttccaactgacac

SEQ ID NO: 157701 - DNA, 51 bp, Artificial
  Synthetic oligonucleotide
tcggacgcatggtttgcgaatgtgttcgcgcgccggttgtcgttacgtgta

SEQ ID NO: 157702 - DNA, 51 bp, Artificial
  Synthetic oligonucleotide
tcgcgcttccttccaggggctcgttagacacgaaagcctccattatccgcg

SEQ ID NO: 157703 - DNA, 51 bp, Artificial
  Synthetic oligonucleotide
acatgagcgatgactttcccgtgaccgccgcttggtcagtgccttccagca

SEQ ID NO: 157704 - DNA, 51 bp, Artificial
  Synthetic oligonucleotide
gtctcgataacccaggagcgttccatttacgacacgatggggcctaacgac

SEQ ID NO: 157705 - DNA, 51 bp, Artificial
  Synthetic oligonucleotide
cagtttcatgtggccgggtgcattccgccgcatatccgactcagcttgcat

SEQ ID NO: 157706 - DNA, 51 bp, Artificial
  Synthetic oligonucleotide
agccaaaactaccgatacactgaagtgaatgcgcgtactcgtcccgagaaa

SEQ ID NO: 157707 - DNA, 51 bp, Artificial
  Synthetic oligonucleotide
gcgcatcacgtcgatcggcgatccatagaggcgcgacagcacgggcttcgt

SEQ ID NO: 157708 - DNA, 51 bp, Artificial
  Synthetic oligonucleotide
gcgcagcaaatcccgcaaatcaatccatgaattgcgatccatccataatcc

SEQ ID NO: 157709 - DNA, 56 bp, Artificial
  Synthetic oligonucleotide
gacacccaatggtgcctcagagaagcgcagcgtattgggccttcctgccacgcgct

SEQ ID NO: 157710 - DNA, 51 bp, Artificial
  Synthetic oligonucleotide
tgcttcgtagcgcgaagcatcctgctgcggccgataaggcgttttcgtctg

SEQ ID NO: 157711 - DNA, 51 bp, Artificial
  Synthetic oligonucleotide
ccatttccgacgggttcttcgtgaccttgataccgcatgcgtccatgattt

SEQ ID NO: 157712 - DNA, 51 bp, Artificial
  Synthetic oligonucleotide
catggctcacttctcgtgttttcccggcgcttcggccctctccgatttccg

SEQ ID NO: 157713 - DNA, 51 bp, Artificial
  Synthetic oligonucleotide
gcgtgtacttgtcgtctagcgtgacgttcaatggatcggattgttcagatg

SEQ ID NO: 157714 - DNA, 51 bp, Artificial
  Synthetic oligonucleotide
agaccacgccgttcggaatacccgggcagtcgtattgcgtcgagccgacac

SEQ ID NO: 157715 - DNA, 51 bp, Artificial
  Synthetic oligonucleotide
gtggcagttcgactacaactggcctcggccacacggctcactcggtggaaa

SEQ ID NO: 157716 - DNA, 51 bp, Artificial
  Synthetic oligonucleotide
gcgtatacatggcccaaggcgtgccgccgggacaactatctttggcgaagg

SEQ ID NO: 157717 - DNA, 51 bp, Artificial
  Synthetic oligonucleotide
tcccttcgtggatagcgtagtgcatggcaggttatagtcgtgcgtgttcga

SEQ ID NO: 157718 - DNA, 51 bp, Artificial
  Synthetic oligonucleotide
tccgaacctggtggcaaccacggtactgaccagacgccaggtgcaattcgc

SEQ ID NO: 157719 - DNA, 51 bp, Artificial
  Synthetic oligonucleotide
tccgatagcgacgaaactcactgatcacgaattggctgctcacacgaaccg

SEQ ID NO: 157720 - DNA, 56 bp, Artificial
  Synthetic oligonucleotide
cgtcggcgccaatcgcgcatacccaagtcgtcggattcagcgagcaaatcgggaaa

SEQ ID NO: 157721 - DNA, 51 bp, Artificial
  Synthetic oligonucleotide
gcggttattagtctccctgacaggcccgatagcgggtcgccggatctctcc

SEQ ID NO: 157722 - DNA, 51 bp, Artificial
  Synthetic oligonucleotide
tttcgctccgtgcgaaagcgcacccgtcctgtgcttgccttgcacgtctat

SEQ ID NO: 157723 - DNA, 51 bp, Artificial
  Synthetic oligonucleotide
agagacagcggctcggaaaatgtggtttatcccggtccgcctgctattgaa

SEQ ID NO: 157724 - DNA, 51 bp, Artificial
  Synthetic oligonucleotide
gtgcgtgacgcgcctcgaacgcagtgaccggctcgaacatcggtgaccata

SEQ ID NO: 157725 - DNA, 51 bp, Artificial
  Synthetic oligonucleotide
tccgtgcttctacagcaatagcctcgtgcggatcgttccagtaagtgtcgt

SEQ ID NO: 157726 - DNA, 51 bp, Artificial
  Synthetic oligonucleotide
tgctgctgcagcactggtggcgtaaggatgagttgccattcccaaccaagg

SEQ ID NO: 157727 - DNA, 51 bp, Artificial
  Synthetic oligonucleotide
gcggctaatatcagcatcgaggatccaccagatattgcgtcccttgattcc

SEQ ID NO: 157728 - DNA, 51 bp, Artificial
  Synthetic oligonucleotide
aacctgtttcgcgcgaacctctcgcaaattctgactgacgtcgatacccga

SEQ ID NO: 157729 - DNA, 51 bp, Artificial
  Synthetic oligonucleotide
catccgaatcggtagctatcgctttactatcctccagttgagcacattgga

SEQ ID NO: 157730 - DNA, 51 bp, Artificial
  Synthetic oligonucleotide
cgcccgctgccgtaccacatacgacgattacaccacctggtaatgtccggc

SEQ ID NO: 157731 - DNA, 56 bp, Artificial
  Synthetic oligonucleotide
accctgctacgccatgtgagtgtggggcagtgcctgcgttaacccactattgaacg

SEQ ID NO: 157732 - DNA, 51 bp, Artificial
  Synthetic oligonucleotide
tgaggccccaccaccgcagcacttcgatccacatgtcgacatagcagttgg

SEQ ID NO: 157733 - DNA, 51 bp, Artificial
  Synthetic oligonucleotide
taaagcggagatggacacggctcgctggattcacgaccccgtcggtgcgtt

SEQ ID NO: 157734 - DNA, 51 bp, Artificial
  Synthetic oligonucleotide
ggggcaggtcacgttcgctcacgcattcacgattgactcactcacgaactc

SEQ ID NO: 157735 - DNA, 51 bp, Artificial
  Synthetic oligonucleotide
ttatccgacaaacgaagatcgatttccgatcgagtccatagtcgcccacac

SEQ ID NO: 157736 - DNA, 51 bp, Artificial
  Synthetic oligonucleotide
cgccgattcctcactaagatggcgcaggctcgcaatcagccgctcgccccc

SEQ ID NO: 157737 - DNA, 51 bp, Artificial
  Synthetic oligonucleotide
acgcaaggccctcgtctggagaggtgcgcatgtctgagctcgcctatcagc

SEQ ID NO: 157738 - DNA, 51 bp, Artificial
  Synthetic oligonucleotide
taagcagagtaggacattttgcgtcgtcccgcgtctgcgtccgttgcgttg

SEQ ID NO: 157739 - DNA, 51 bp, Artificial
  Synthetic oligonucleotide
aatttggctcatagaccgattatggcttatcaagtaaccgtcatgcccagc

SEQ ID NO: 157740 - DNA, 51 bp, Artificial
  Synthetic oligonucleotide
acgcacaaccccagtcgtcgtgagttaggtgatacgaagggataccggcgt

SEQ ID NO: 157741 - DNA, 51 bp, Artificial
  Synthetic oligonucleotide
ccagagcggttttgtagtctgcgaatgacatggtagtcctgtgcgataact

SEQ ID NO: 157742 - DNA, 56 bp, Artificial
  Synthetic oligonucleotide
gccagcctatcccgcgcacgaggagggaactcagcctttcacgctactcgaagttt

SEQ ID NO: 157743 - DNA, 51 bp, Artificial
  Synthetic oligonucleotide
aacaaagaatttaccgcacatctaataagacggaatccggcggaataatca

SEQ ID NO: 157744 - DNA, 51 bp, Artificial
  Synthetic oligonucleotide
tgcatgactggcatagttggaatccgccagtcccattaagcgcgtgttgtg

SEQ ID NO: 157745 - DNA, 51 bp, Artificial
  Synthetic oligonucleotide
cgcctatgcctcgctcaggcctcaccaagggtcggggactgtgtcactgca

SEQ ID NO: 157746 - DNA, 51 bp, Artificial
  Synthetic oligonucleotide
gggatccgaagcgcgggacgcactcctgaaacgggcacgctatggggcgag

SEQ ID NO: 157747 - DNA, 51 bp, Artificial
  Synthetic oligonucleotide
acgcccgttatcgcccgctgccgtaccacatacgacgattacaccacctgg

SEQ ID NO: 157748 - DNA, 51 bp, Artificial
  Synthetic oligonucleotide
cgcctgcggttctaacgattcctgcgatgcaattgacgctgccgccgctat

SEQ ID NO: 157749 - DNA, 51 bp, Artificial
  Synthetic oligonucleotide
tacaagtagcccgtcgtaaggtgccggatccatcatttcgtgcgcatacat

SEQ ID NO: 157750 - DNA, 51 bp, Artificial
  Synthetic oligonucleotide
tacacattcgtgctgtctcccaactcgcttgtgacggagaacccgtacagc

SEQ ID NO: 157751 - DNA, 51 bp, Artificial
  Synthetic oligonucleotide
aacggcccaccacaagcgtcggttgagacttcgcgggtgcaatctgtctca

SEQ ID NO: 157752 - DNA, 51 bp, Artificial
  Synthetic oligonucleotide
ggtgaaagctctgtgaaaactaatcgcgcggagtacgcggctgagtcgaac

SEQ ID NO: 157753 - DNA, 57 bp, Artificial
  Synthetic oligonucleotide
ggagcgtcgttagacgacccacgaatggcaggacgtctaaagacaggttccagtcta

SEQ ID NO: 157754 - DNA, 56 bp, Artificial
  Synthetic oligonucleotide
aggctagtccaattccgacgcacaatgcggtccgatgggacgcagaattccgacag

SEQ ID NO: 157755 - DNA, 51 bp, Artificial
  Synthetic oligonucleotide
ccagtagcggtgcatctccaggaagtacagggctatggttgatcagagagt

SEQ ID NO: 157756 - DNA, 51 bp, Artificial
  Synthetic oligonucleotide
gttctagatgctgttggcagggtggccagtctttatggacaccgcctctga

SEQ ID NO: 157757 - DNA, 51 bp, Artificial
  Synthetic oligonucleotide
tgtgcaagcgcaagcgcggagaaatctgatgagctctgtgacgcattcgag

SEQ ID NO: 157758 - DNA, 51 bp, Artificial
  Synthetic oligonucleotide
cgccaggacgtcaggtcagcaacggcccaatgccgcacgaagtccggtgcg

SEQ ID NO: 157759 - DNA, 51 bp, Artificial
  Synthetic oligonucleotide
ggtatccgaactatttacacctggccggatagccaacgcacgtaccggtcc

SEQ ID NO: 157760 - DNA, 51 bp, Artificial
  Synthetic oligonucleotide
cccagttaatctggttccacgcttgcccataggctggaggcgcaccagtgc

SEQ ID NO: 157761 - DNA, 51 bp, Artificial
  Synthetic oligonucleotide
acaattggttcgacaacgctccgcgcgataccgagggatagccggccaaaa

SEQ ID NO: 157762 - DNA, 51 bp, Artificial
  Synthetic oligonucleotide
tgtgcgttgctcgtcgacgttacgagcctgtacgtgaatcagtgcaaccat

SEQ ID NO: 157763 - DNA, 51 bp, Artificial
  Synthetic oligonucleotide
gttccgttcgagctactacacaccaacgtagacccgaagatactcgctggc

SEQ ID NO: 157764 - DNA, 51 bp, Artificial
  Synthetic oligonucleotide
ccgacgggtatgtagccactgacgtggagcctcgatccgccgcaaacgtat

SEQ ID NO: 157765 - DNA, 56 bp, Artificial
  Synthetic oligonucleotide
gcattcagcgcgaagaaaggctcgattccgattcgtcccgacgtggacgccagcag

SEQ ID NO: 157766 - DNA, 51 bp, Artificial
  Synthetic oligonucleotide
tgatgtgcgtcattccgtatccgatttactgtcgttctaaatttggaacta

SEQ ID NO: 157767 - DNA, 51 bp, Artificial
  Synthetic oligonucleotide
ccgtgaacggccgcccaactttgctccccggtccaatgagaagagtccagt

SEQ ID NO: 157768 - DNA, 51 bp, Artificial
  Synthetic oligonucleotide
acgaatccggaaagccacgctaacgatacggatgcgtgcgacgtgcgcgca

SEQ ID NO: 157769 - DNA, 51 bp, Artificial
  Synthetic oligonucleotide
tgatcgttgggccgacgattaacgggttgttcaccacgccatacgggcgct

SEQ ID NO: 157770 - DNA, 51 bp, Artificial
  Synthetic oligonucleotide
accgtagtcgatgttcagattcgccggatcaatcccgttgctcgtgcttgc

SEQ ID NO: 157771 - DNA, 51 bp, Artificial
  Synthetic oligonucleotide
ccgcagcagacgggttgctccggttttcgcaacgaaactcaatccagacgc

SEQ ID NO: 157772 - DNA, 51 bp, Artificial
  Synthetic oligonucleotide
gtttgtgcttcacgctatttatcgcctaagacgagcaggtagggaactttt

SEQ ID NO: 157773 - DNA, 51 bp, Artificial
  Synthetic oligonucleotide
aatgcacggcgtttacgttcgtcgaactacgacttccccgcattcagaggc

SEQ ID NO: 157774 - DNA, 51 bp, Artificial
  Synthetic oligonucleotide
gtatgcgttggctgcgcaaatcagcttgcgggcatagcaacaagatcgatg

SEQ ID NO: 157775 - DNA, 51 bp, Artificial
  Synthetic oligonucleotide
aaatagggcagcccgagatctagccaggaggacgatccgaagtgacccgcg

SEQ ID NO: 157776 - DNA, 56 bp, Artificial
  Synthetic oligonucleotide
gccgagtgagacctgcatttcctcgcgagcgaaatgccagctgtatcgttgcgcac

SEQ ID NO: 157777 - DNA, 51 bp, Artificial
  Synthetic oligonucleotide
aatgaaatgccggcccgcactgtccagcaccaaggccgggaatggggtctt

SEQ ID NO: 157778 - DNA, 51 bp, Artificial
  Synthetic oligonucleotide
ggattcacagcaatcacttggacaccgacgttacctccctggggcttgcta

SEQ ID NO: 157779 - DNA, 51 bp, Artificial
  Synthetic oligonucleotide
tagcagcctgcctaagcgccttctctgaaatccgtataaagcccttcatac

SEQ ID NO: 157780 - DNA, 51 bp, Artificial
  Synthetic oligonucleotide
tagttcgggattcatcgtggaccttttacgctcacgggtcggttacatcaa

SEQ ID NO: 157781 - DNA, 51 bp, Artificial
  Synthetic oligonucleotide
tgaacggtacggctggcaatttaaccagctgcgcttgagcctcaccgaata

SEQ ID NO: 157782 - DNA, 51 bp, Artificial
  Synthetic oligonucleotide
aacgcatccgaaatgtgtcgcgcgtgaaagttggcaccggcgctatcccaa

SEQ ID NO: 157783 - DNA, 51 bp, Artificial
  Synthetic oligonucleotide
tattcgctcgcgatcagctttgcttattgcacctactatccgttcatcgcg

SEQ ID NO: 157784 - DNA, 51 bp, Artificial
  Synthetic oligonucleotide
tctttcggtcgaaacatccgaggctcgacgctatacccctgggtacttcgg

SEQ ID NO: 157785 - DNA, 51 bp, Artificial
  Synthetic oligonucleotide
tggcgattcgccccgcgctttaaccctcatgctattagtttgggtgatgtg

SEQ ID NO: 157786 - DNA, 51 bp, Artificial
  Synthetic oligonucleotide
gtcaagccactaccgcacgttgacccttcacagaacgccgctgtgacacga

SEQ ID NO: 157787 - DNA, 56 bp, Artificial
  Synthetic oligonucleotide
gaagctccctggtgatgcgcgacgcccatacctcggatggactagcctgttgaact

SEQ ID NO: 157788 - DNA, 51 bp, Artificial
  Synthetic oligonucleotide
aaagaacagcatgccccgctcatccgaaatacagattcaaccttgtaaatt

SEQ ID NO: 157789 - DNA, 51 bp, Artificial
  Synthetic oligonucleotide
tgcgagtcataagcgtgtgcacctacgcacagcctgttctgcgcaactgac

SEQ ID NO: 157790 - DNA, 51 bp, Artificial
  Synthetic oligonucleotide
ccaacgcgaatcgcaagttggtggactaccgtgtcagttgccatcgaatta

SEQ ID NO: 157791 - DNA, 51 bp, Artificial
  Synthetic oligonucleotide
gtcacgcggatcaatattgggaagacattctgagtgcgctgcgtggaacgg

SEQ ID NO: 157792 - DNA, 51 bp, Artificial
  Synthetic oligonucleotide
ggaaggcctcgctggaagaccacctcaacacgttgtttacaacactggtct

SEQ ID NO: 157793 - DNA, 51 bp, Artificial
  Synthetic oligonucleotide
gtgtgggccaaagtcacaccgcaatggctcgcgaatctgcggactggcgag

SEQ ID NO: 157794 - DNA, 51 bp, Artificial
  Synthetic oligonucleotide
ttcaccaagtggttctatcggaattcgtgaattggttcttagtcgcgaacc

SEQ ID NO: 157795 - DNA, 51 bp, Artificial
  Synthetic oligonucleotide
cgcgaacgggcttgcttgcgcgatatgccgggttacgcggtgccccgattg

SEQ ID NO: 157796 - DNA, 51 bp, Artificial
  Synthetic oligonucleotide
ccgcccggaacgatagctgcgccctgccgtaaacaccggtacttgtgagaa

SEQ ID NO: 157797 - DNA, 51 bp, Artificial
  Synthetic oligonucleotide
ggcgtgccctttcgcgggaactaaccgaatttcacataactcaattcccgt

SEQ ID NO: 157798 - DNA, 56 bp, Artificial
  Synthetic oligonucleotide
atccaacccctgtggggcatacccgtgacctcagaaaccgtgcatcatccggacat

SEQ ID NO: 157799 - DNA, 51 bp, Artificial
  Synthetic oligonucleotide
ggcgtcggcgccaatcggataaggccggttcgacagacgggctgcagaacg

SEQ ID NO: 157800 - DNA, 51 bp, Artificial
  Synthetic oligonucleotide
tgagattcatcgcaagggttatgggtcctgtcggtatggcggccactttca

SEQ ID NO: 157801 - DNA, 51 bp, Artificial
  Synthetic oligonucleotide
ccgtggatggctgaggcgctatcgcatctggtggtacggtgcgaaagtgaa

SEQ ID NO: 157802 - DNA, 51 bp, Artificial
  Synthetic oligonucleotide
tacagtgtcgcctctgcatcgaaccagtaaggcgcaaggccttggattccg

SEQ ID NO: 157803 - DNA, 51 bp, Artificial
  Synthetic oligonucleotide
ggttgccatttatgtcctggtcgcaatcatgtggatcattccggatccgcg

SEQ ID NO: 157804 - DNA, 51 bp, Artificial
  Synthetic oligonucleotide
ttcagaacgtacacatcggctgactatgcccgttgatctttctcgatccaa

SEQ ID NO: 157805 - DNA, 51 bp, Artificial
  Synthetic oligonucleotide
ttcataggcgtaaatcggaatgttatactccgagccattctaacaaaacgt

SEQ ID NO: 157806 - DNA, 51 bp, Artificial
  Synthetic oligonucleotide
aacccgtccctttggtgcctcaccggtgccttggacgggccaggaaaactg

SEQ ID NO: 157807 - DNA, 51 bp, Artificial
  Synthetic oligonucleotide
gtaatggcgtagccggctgcgcttgcgtatgctgtcggtcggacgagttgc

SEQ ID NO: 157808 - DNA, 51 bp, Artificial
  Synthetic oligonucleotide
ccgttcgcgttgctccaacagaatcgcgggtgccagccctgtaaccggatg

SEQ ID NO: 157809 - DNA, 55 bp, Artificial
  Synthetic oligonucleotide
acgcatttagcaggacgcgtcgggtagggtgtccaagccgtcaccttcgggttgc

SEQ ID NO: 157810 - DNA, 51 bp, Artificial
  Synthetic oligonucleotide
ccactacgaatggacaaaattaatccgggtgtaatcaagttgacgacatta

SEQ ID NO: 157811 - DNA, 51 bp, Artificial
  Synthetic oligonucleotide
cccctaagcgggcttgcgccgtaatgggaaaaccgggcctcgacgcacccc

SEQ ID NO: 157812 - DNA, 51 bp, Artificial
  Synthetic oligonucleotide
gttaatcggcgtgcgttatatgcgcggcaacaaatgactgttcgtgtcaat

SEQ ID NO: 157813 - DNA, 51 bp, Artificial
  Synthetic oligonucleotide
ccacggcggcacactacgcggagtcgagtgcggatccactgatcggcgtgc

SEQ ID NO: 157814 - DNA, 51 bp, Artificial
  Synthetic oligonucleotide
acggggaccgtggaaatagacgctggcggttgctgaacgaccggttgggat

SEQ ID NO: 157815 - DNA, 51 bp, Artificial
  Synthetic oligonucleotide
ggcaggtgctcgtcagcgaacgcgtcgcaccgtttctccgctatccgacca

SEQ ID NO: 157816 - DNA, 51 bp, Artificial
  Synthetic oligonucleotide
cggggcactcagagtcatttgagacatccgcgctggacgcttggcgtacga

SEQ ID NO: 157817 - DNA, 51 bp, Artificial
  Synthetic oligonucleotide
gcacatcgattccgttcgggtgggtagtcatctgctggtcctcctaggagc

SEQ ID NO: 157818 - DNA, 51 bp, Artificial
  Synthetic oligonucleotide
gcaataggtccgacggagtccagtgaacgcgacaggggcagcacgccatca

SEQ ID NO: 157819 - DNA, 51 bp, Artificial
  Synthetic oligonucleotide
agtcagacgctctgacgctgtctgttgggtctcgtccagccttatacatcc

SEQ ID NO: 157820 - DNA, 56 bp, Artificial
  Synthetic oligonucleotide
gcgagcgacgtagcaatgccacgcacgagtcgactactgatccggaggcgcgattg

SEQ ID NO: 157821 - DNA, 51 bp, Artificial
  Synthetic oligonucleotide
gatgttccggaatggcctggtacgccctcacgatacacgagccccggccgc

SEQ ID NO: 157822 - DNA, 51 bp, Artificial
  Synthetic oligonucleotide
gatgtatgcgacaacgcgtggcatgaaggcaagcagtcgtttgcacaaagc

SEQ ID NO: 157823 - DNA, 51 bp, Artificial
  Synthetic oligonucleotide
cggtgacgatttgcgccgcattgcgacacctgtcgctcgatagacttcccc

SEQ ID NO: 157824 - DNA, 51 bp, Artificial
  Synthetic oligonucleotide
gatacgccaaccgagagagcgtgttcgtgcggttttggcgatagcctttga

SEQ ID NO: 157825 - DNA, 51 bp, Artificial
  Synthetic oligonucleotide
agtttagtaggttggtgctcgttattgcccaacagcgattccgatgcagac

SEQ ID NO: 157826 - DNA, 51 bp, Artificial
  Synthetic oligonucleotide
cgtaagttcgccgggttgttctcgttggcaagctactgttattgtcaggtg

SEQ ID NO: 157827 - DNA, 51 bp, Artificial
  Synthetic oligonucleotide
gagcctgttgcacacattccttcccgagcatcagttcagcgagcggcacca

SEQ ID NO: 157828 - DNA, 51 bp, Artificial
  Synthetic oligonucleotide
gagcatcgctatggactacgaaacgcactacgctgacctcgtctatcttgt

SEQ ID NO: 157829 - DNA, 51 bp, Artificial
  Synthetic oligonucleotide
gagacctccgcggacgtggattcacggctccagcacgaatacgcactgagg

SEQ ID NO: 157830 - DNA, 51 bp, Artificial
  Synthetic oligonucleotide
gagaacttgaaatgcgtggtcgatgtggagggggtacagggccccggcacc

SEQ ID NO: 157831 - DNA, 56 bp, Artificial
  Synthetic oligonucleotide
catcagccagttggtccgccacgaaatccatgctccaggcatcgttcggtttgact

SEQ ID NO: 157832 - DNA, 51 bp, Artificial
  Synthetic oligonucleotide
atcagtgctgctcattggattcctcggcgtaactttcgccaatcgcacgca

SEQ ID NO: 157833 - DNA, 51 bp, Artificial
  Synthetic oligonucleotide
gacgcgtcgggtagggtgtccaagccgtcaccttcgggttgcgtcccgtac

SEQ ID NO: 157834 - DNA, 51 bp, Artificial
  Synthetic oligonucleotide
atccgcctatatgtctgcggtgttctctgttgatttgcgcgtgcgtggagg

SEQ ID NO: 157835 - DNA, 51 bp, Artificial
  Synthetic oligonucleotide
gccttgtgcacgtcgaattgcgcttccgcgtacgaagcattgcaactccaa

SEQ ID NO: 157836 - DNA, 51 bp, Artificial
  Synthetic oligonucleotide
gcctctgacttccacgcttggacatcctgagttgcagtgctccgcatggct

SEQ ID NO: 157837 - DNA, 51 bp, Artificial
  Synthetic oligonucleotide
agcgtcggttgagacttcgcgggtgcaatctgtctcataacagccccgccc

SEQ ID NO: 157838 - DNA, 51 bp, Artificial
  Synthetic oligonucleotide
gccgtgcccgtttcacgaccgtccgacaagtgtccgatcgtgagccggttc

SEQ ID NO: 157839 - DNA, 51 bp, Artificial
  Synthetic oligonucleotide
caggtactgccgctacttctggtgcctacgaccggaacatgatttgtgcga

SEQ ID NO: 157840 - DNA, 51 bp, Artificial
  Synthetic oligonucleotide
aggaacttcgtaggctgctattaggcattgaccagctagtgctgaatgcgt

SEQ ID NO: 157841 - DNA, 51 bp, Artificial
  Synthetic oligonucleotide
aggaatttccggctacgtatacggcttcctcacctatccgagctacgtcac

SEQ ID NO: 157842 - DNA, 56 bp, Artificial
  Synthetic oligonucleotide
gctcacggccggatcgaccaatccgaacgaatatgcgaagctttcgccgacgttcc

SEQ ID NO: 157843 - DNA, 51 bp, Artificial
  Synthetic oligonucleotide
caggtacagctcgtcattcgtgagcgcgcgccattgcccgtcctcgcgtcg

SEQ ID NO: 157844 - DNA, 51 bp, Artificial
  Synthetic oligonucleotide
gccctgccgtatgtccgtcagatgtccggaatcgatgcaagagcaaccgaa

SEQ ID NO: 157845 - DNA, 51 bp, Artificial
  Synthetic oligonucleotide
gcccgctaaaggcggacctatccagcctggcgaatacttcgtggccacgcc

SEQ ID NO: 157846 - DNA, 51 bp, Artificial
  Synthetic oligonucleotide
gccccgtgagcgatcccataggagagtgcgacgcatgcgcaagcgaggcgt

SEQ ID NO: 157847 - DNA, 51 bp, Artificial
  Synthetic oligonucleotide
gccaacattggacgaaccctgtccgtgacgctttcccatggcgcgaaacta

SEQ ID NO: 157848 - DNA, 51 bp, Artificial
  Synthetic oligonucleotide
gcattctgtaccgcaagatatccgaaggattcaacggcatagaaagcgcga

SEQ ID NO: 157849 - DNA, 51 bp, Artificial
  Synthetic oligonucleotide
gcagtcccagttttctacgcagtcgcctgatccggtgcacgccgattcgca

SEQ ID NO: 157850 - DNA, 51 bp, Artificial
  Synthetic oligonucleotide
gcaggacttttcccgcgctttacaactggcaagcgataccccattgaacga

SEQ ID NO: 157851 - DNA, 51 bp, Artificial
  Synthetic oligonucleotide
aggggcttaggatgcggaccgtccgggttcggacttgcctcttgaaccggt

SEQ ID NO: 157852 - DNA, 51 bp, Artificial
  Synthetic oligonucleotide
agggtacgcaacgggagcgtcgatttacgaagcgacgggcctaccggtggt

SEQ ID NO: 157853 - DNA, 56 bp, Artificial
  Synthetic oligonucleotide
agtcgttgtcatgtcggttgagcgtagtgaaaggaagccggcaaacgagccggacg

SEQ ID NO: 157854 - DNA, 51 bp, Artificial
  Synthetic oligonucleotide
cgggccgataaacgcctaattgttgccgtgagccgatcgtggggctggacc

SEQ ID NO: 157855 - DNA, 51 bp, Artificial
  Synthetic oligonucleotide
aggtattcagggcggcgtgaggacgcaatgatggtagcccggatacgacct

SEQ ID NO: 157856 - DNA, 51 bp, Artificial
  Synthetic oligonucleotide
cttataccgcccaatagacaaagcgaagacagattcatctcatagacttta

SEQ ID NO: 157857 - DNA, 51 bp, Artificial
  Synthetic oligonucleotide
atggcgggactgctgcttagcccaagctgagacggcgacttccggtaggta

SEQ ID NO: 157858 - DNA, 51 bp, Artificial
  Synthetic oligonucleotide
atggctaacggaactggccgtaaagaggccatggagcggtgagctgacgtc

SEQ ID NO: 157859 - DNA, 51 bp, Artificial
  Synthetic oligonucleotide
atggtccggttctttgacccgcgtaacaccggggtggtctttgacgcatgg

SEQ ID NO: 157860 - DNA, 51 bp, Artificial
  Synthetic oligonucleotide
ctgtacctcggggtgcttatgggttgcatagttgtcagcgatcaaatgcag

SEQ ID NO: 157861 - DNA, 51 bp, Artificial
  Synthetic oligonucleotide
ctacacgcgacgccttgccattcgcgtcgaccaatgcgacgttcgaaattt

SEQ ID NO: 157862 - DNA, 51 bp, Artificial
  Synthetic oligonucleotide
ctggatctttctggtttccgtgacgtgacgcgtttgcgctccaatctggta

SEQ ID NO: 157863 - DNA, 51 bp, Artificial
  Synthetic oligonucleotide
ctacgttgaatcactatgattggtttctaatcgacatgattggatgacgcc

SEQ ID NO: 157864 - DNA, 53 bp, Artificial
  Synthetic oligonucleotide
cgggccgaaacggcctgtaacaacccttaccgaccgttctctggattgcaaca

SEQ ID NO: 157865 - DNA, 56 bp, Artificial
  Synthetic oligonucleotide
gcgcctcgagccactacgccgcggatcagtgtcaaggtgcccgtcacattcacctg

SEQ ID NO: 157866 - DNA, 51 bp, Artificial
  Synthetic oligonucleotide
caatctgcctcgcgcgggtggtgcgacggacattgcgtggtatggaatttg

SEQ ID NO: 157867 - DNA, 51 bp, Artificial
  Synthetic oligonucleotide
ctatactgagtcgattgttgcttgctattacttatgtcgatccaacacgcc

SEQ ID NO: 157868 - DNA, 51 bp, Artificial
  Synthetic oligonucleotide
ctcttgcgttcccatgaacgtggatgtgcccgtccacccgttgctgcccca

SEQ ID NO: 157869 - DNA, 51 bp, Artificial
  Synthetic oligonucleotide
ctatcatactggctgcctcgttattctgagcgaatttgatgccaggtgctt

SEQ ID NO: 157870 - DNA, 51 bp, Artificial
  Synthetic oligonucleotide
ctatcggcagggtggccgacattgaggggtggacggacgattacaggacgg

SEQ ID NO: 157871 - DNA, 51 bp, Artificial
  Synthetic oligonucleotide
attgcgggtaaagcacatggacgtgcaaaccattagagcgcaggacgcgcg

SEQ ID NO: 157872 - DNA, 51 bp, Artificial
  Synthetic oligonucleotide
ctcggtgttcctaccgcgctagccggccgttcgcctaagtcccctcccatt

SEQ ID NO: 157873 - DNA, 51 bp, Artificial
  Synthetic oligonucleotide
ctccgagagcggcccaccttcgcgcttacggcccgcgttaatggccgttga

SEQ ID NO: 157874 - DNA, 51 bp, Artificial
  Synthetic oligonucleotide
caaattccggttcgcaatagctaacggctgcgttgcgcgttcgtcgggagt

SEQ ID NO: 157875 - DNA, 51 bp, Artificial
  Synthetic oligonucleotide
atcctccattgcaaggaatagtagtggctacgccgtggaatttgctcggat

SEQ ID NO: 157876 - DNA, 56 bp, Artificial
  Synthetic oligonucleotide
gagcgaaaatcgcggctgacgcagtccaagcaacgcgcccgtaaataattctacaa

SEQ ID NO: 157877 - DNA, 51 bp, Artificial
  Synthetic oligonucleotide
cgtcggtaatcatctggcgcgttaccccgaactgcgactccagacgttgcg

SEQ ID NO: 157878 - DNA, 51 bp, Artificial
  Synthetic oligonucleotide
atcgagcacttcccctagcgccttacgcacttcgttgcgccacctggtcag

SEQ ID NO: 157879 - DNA, 51 bp, Artificial
  Synthetic oligonucleotide
gacagcctaacgggcgctattgtgagccgtctgtcatcgaaacgacagagt

SEQ ID NO: 157880 - DNA, 51 bp, Artificial
  Synthetic oligonucleotide
atcgcgcgtctaagggagcgcaccggattcgtacgtgatcggttgttgggg

SEQ ID NO: 157881 - DNA, 51 bp, Artificial
  Synthetic oligonucleotide
atcggcgcgatacagtggacggcgttggctgggagtacctgttcgtcgcag

SEQ ID NO: 157882 - DNA, 51 bp, Artificial
  Synthetic oligonucleotide
atcgtcagcgatcagcgacgttcgctcaataacgggggttctcgggcggat

SEQ ID NO: 157883 - DNA, 51 bp, Artificial
  Synthetic oligonucleotide
gaaggactaccgagattcgacggatgccctggttgacccgatcaaactggg

SEQ ID NO: 157884 - DNA, 51 bp, Artificial
  Synthetic oligonucleotide
caccgaaaagtaggcggacaacttgcgaagttctgcattcaactggagttc

SEQ ID NO: 157885 - DNA, 51 bp, Artificial
  Synthetic oligonucleotide
atcttacgcgaccatacccgctaacgtgacagcgccccttggcgtactcgc

SEQ ID NO: 157886 - DNA, 51 bp, Artificial
  Synthetic oligonucleotide
gaacgttgcgcgaagccttaggggtagcacgcctcggacgtgaactctgac

SEQ ID NO: 157887 - DNA, 56 bp, Artificial
  Synthetic oligonucleotide
acgctatggccctacccatccgcgacaggccgaagtattcccgaggctcgaatgtt

SEQ ID NO: 157888 - DNA, 51 bp, Artificial
  Synthetic oligonucleotide
ctttcggttccaggcggtgttttagtaaccttatgaacgagctaggtttcc

SEQ ID NO: 157889 - DNA, 51 bp, Artificial
  Synthetic oligonucleotide
cgttgaaacccgattcacgaatcacgaccagagggagataacgtgaaatac

SEQ ID NO: 157890 - DNA, 51 bp, Artificial
  Synthetic oligonucleotide
atgcgtaagccgcgagaaagttcacctggttccacttgggactgattccat

SEQ ID NO: 157891 - DNA, 51 bp, Artificial
  Synthetic oligonucleotide
cacacggaacctcacctttgacacagctaacctcacctttgagaggttaag

SEQ ID NO: 157892 - DNA, 51 bp, Artificial
  Synthetic oligonucleotide
cttgattcaagtgccatagagagtcgtcacctagtacttgagcgacactgg

SEQ ID NO: 157893 - DNA, 51 bp, Artificial
  Synthetic oligonucleotide
atggcccgtatacccaggcgaccgcaaccgctagttggacagatgcatctg

SEQ ID NO: 157894 - DNA, 51 bp, Artificial
  Synthetic oligonucleotide
agccgcgcttgccttattcatcgtttcgttccgtttgatgcacgccgccga

SEQ ID NO: 157895 - DNA, 51 bp, Artificial
  Synthetic oligonucleotide
cggcagttatccacgcctaatccgacccccccggctatgcctaatgagacc

SEQ ID NO: 157896 - DNA, 51 bp, Artificial
  Synthetic oligonucleotide
agccgtgcgttgcacgcaatgcggttctgccatgaagcaattaggcgaaga

SEQ ID NO: 157897 - DNA, 50 bp, Artificial
  Synthetic oligonucleotide
aaggccgcccctttaccgatgggccggcgcgaccatagcacctactcgat

SEQ ID NO: 157898 - DNA, 56 bp, Artificial
  Synthetic oligonucleotide
acggcgcacggctccgtgatggcatacgtatttccgacactgatcgctatggggtt

SEQ ID NO: 157899 - DNA, 50 bp, Artificial
  Synthetic oligonucleotide
aaggccggtccgagcatgtatgcggggcattatccggatggagtgggttt

SEQ ID NO: 157900 - DNA, 50 bp, Artificial
  Synthetic oligonucleotide
cacgcaaccggctcagagcccatttcacccggtcccggacatgatcagga

SEQ ID NO: 157901 - DNA, 50 bp, Artificial
  Synthetic oligonucleotide
aaggcctgagtcatgccggctctcgtcacgccatagcttgtcgcgaccag

SEQ ID NO: 157902 - DNA, 50 bp, Artificial
  Synthetic oligonucleotide
atcggcacgaccaactcgttcaccgctcccgcagagcacctggaaacgag

SEQ ID NO: 157903 - DNA, 50 bp, Artificial
  Synthetic oligonucleotide
atcggatgcgctgcggattacggtgccccgactacacgtgagcgcttgtt

SEQ ID NO: 157904 - DNA, 50 bp, Artificial
  Synthetic oligonucleotide
gacaagcgccccgcggcaaccaaacgccactttgctcaacaccacaaact

SEQ ID NO: 157905 - DNA, 50 bp, Artificial
  Synthetic oligonucleotide
gacaagcgtccccgcagcggagcagctaagcccgcgcactccaatgagcg

SEQ ID NO: 157906 - DNA, 50 bp, Artificial
  Synthetic oligonucleotide
aaggccttactcttgctgtcaccaggcgccgtcgttacggctcctaccta

SEQ ID NO: 157907 - DNA, 50 bp, Artificial
  Synthetic oligonucleotide
aaggcgcgatacatcggctgcgatctcgaatacgagcgaaccggcggaag

SEQ ID NO: 157908 - DNA, 50 bp, Artificial
  Synthetic oligonucleotide
atcggagcaagccggagtgcacccctctgcgtgagcgtgctgagacggta

SEQ ID NO: 157909 - DNA, 56 bp, Artificial
  Synthetic oligonucleotide
atgccaaagcacgggaatccacgttgcacgcgtctccaagttgtctgtcagacagc

SEQ ID NO: 157910 - DNA, 50 bp, Artificial
  Synthetic oligonucleotide
tcccgctgcaagcaggggaaacgggattcactgcgacagcattcttcgac

SEQ ID NO: 157911 - DNA, 50 bp, Artificial
  Synthetic oligonucleotide
atcggaagccgatcgaggcatgtaccgatcaggagaggcagcgggttggg

SEQ ID NO: 157912 - DNA, 50 bp, Artificial
  Synthetic oligonucleotide
gacaccgcggggcgcatggttacctatcggcgcaattccaacgggcatgt

SEQ ID NO: 157913 - DNA, 50 bp, Artificial
  Synthetic oligonucleotide
tcccgaacggtggtgcgatcgacacttcaggagcgacaaagcctcgcgac

SEQ ID NO: 157914 - DNA, 50 bp, Artificial
  Synthetic oligonucleotide
atcgctcgacggtctcacgaagcgaggtgcggatagcctgatcgtctggc

SEQ ID NO: 157915 - DNA, 50 bp, Artificial
  Synthetic oligonucleotide
aaggcggtacgcgacttcttcgggacacgcgacaacaagtccctgacgct

SEQ ID NO: 157916 - DNA, 50 bp, Artificial
  Synthetic oligonucleotide
cccgggccttttgccgttcaggggtggtgtgacccgtagtcaaccagcgt

SEQ ID NO: 157917 - DNA, 50 bp, Artificial
  Synthetic oligonucleotide
aagctcagccacccagccgaccaaatttgcgccgggagccacatgggcta

SEQ ID NO: 157918 - DNA, 50 bp, Artificial
  Synthetic oligonucleotide
cgaacgcaattgctggggatgcgaccgatattgttccgtcgatgcgctat

SEQ ID NO: 157919 - DNA, 50 bp, Artificial
  Synthetic oligonucleotide
aagctccggtaagttcgacgggaaccacgggacgttgactcgccatgccc

SEQ ID NO: 157920 - DNA, 55 bp, Artificial
  Synthetic oligonucleotide
ccggaattaggcaacttaattatttaggcaactgaatagctctaaaataactcgc

SEQ ID NO: 157921 - DNA, 50 bp, Artificial
  Synthetic oligonucleotide
aagctgccgcctgcagggtaatctcgcttcgcacgattcggcggttactg

SEQ ID NO: 157922 - DNA, 50 bp, Artificial
  Synthetic oligonucleotide
aagctgcgctagccgagttgtcagccttcgagcaaggggaatggggtcaa

SEQ ID NO: 157923 - DNA, 50 bp, Artificial
  Synthetic oligonucleotide
aagcttcgcacggttccatagccgcagcatgtgtccgcgagcgagactac

SEQ ID NO: 157924 - DNA, 50 bp, Artificial
  Synthetic oligonucleotide
aaggaaggacacaacgggcgtgagaccggtcaccactcggacaacgcgtt

SEQ ID NO: 157925 - DNA, 50 bp, Artificial
  Synthetic oligonucleotide
cccggcgtacgcatgccggcttacccctctccaggacactgctatggcac

SEQ ID NO: 157926 - DNA, 50 bp, Artificial
  Synthetic oligonucleotide
aaggattcgtaacggccactctgtcgttcacgcttcgcgccgtgtcgtcc

SEQ ID NO: 157927 - DNA, 50 bp, Artificial
  Synthetic oligonucleotide
tccgggcaccatgtagacagcggtatgcttcccctcggtgtcgttaagga

SEQ ID NO: 157928 - DNA, 50 bp, Artificial
  Synthetic oligonucleotide
tccgggagacggggcagaccgggaatgaataccttcggttctcgttcacg

SEQ ID NO: 157929 - DNA, 50 bp, Artificial
  Synthetic oligonucleotide
aaggcacaaatgacctcaccttcattcgcaacacggtgggcggagccggc

SEQ ID NO: 157930 - DNA, 50 bp, Artificial
  Synthetic oligonucleotide
aaggccacgagacgcgacaacttgcgctcgacccgggtttcattccagtt

SEQ ID NO: 157931 - DNA, 56 bp, Artificial
  Synthetic oligonucleotide
tcttgataagacgcaccggtaaatcctgcgcttcccgatgtttcgctatccgatat

SEQ ID NO: 157932 - DNA, 50 bp, Artificial
  Synthetic oligonucleotide
aaggcccagttgacggaatccgagcgcggcactaaactcggtgcctccct

SEQ ID NO: 157933 - DNA, 50 bp, Artificial
  Synthetic oligonucleotide
aagtcgcggggaatcgctccctcatcgaaatgtggggaatgacgccgtcc

SEQ ID NO: 157934 - DNA, 50 bp, Artificial
  Synthetic oligonucleotide
tcatgggacacgggtgggtgagagtgcgccgtggaggcatcgttgacgga

SEQ ID NO: 157935 - DNA, 50 bp, Artificial
  Synthetic oligonucleotide
aagtcggacatgggtcgctgttacatacggccccggtggcacacagggct

SEQ ID NO: 157936 - DNA, 50 bp, Artificial
  Synthetic oligonucleotide
aagtcggcactgccgccactaagtcaccctcagtcatccgcctgggtcaa

SEQ ID NO: 157937 - DNA, 50 bp, Artificial
  Synthetic oligonucleotide
aagtcggccgatagcgggacgccaattcagtcgtgcggcaacgctaatcc

SEQ ID NO: 157938 - DNA, 50 bp, Artificial
  Synthetic oligonucleotide
aagtgaaccatgcccaacatcggcatggggtgctcagggcggctcagcaa

SEQ ID NO: 157939 - DNA, 50 bp, Artificial
  Synthetic oligonucleotide
cgtgaggccggccgtttggctagcgaagtattggatcatgtggcacccca

SEQ ID NO: 157940 - DNA, 50 bp, Artificial
  Synthetic oligonucleotide
aagtgaccccaacccgcatgtgaggcgattgtgtagtgagggcactcgcc

SEQ ID NO: 157941 - DNA, 50 bp, Artificial
  Synthetic oligonucleotide
cgaagcgccgcccgtactgcgtcgggtgtatttgagaaagtcacggacct

SEQ ID NO: 157942 - DNA, 55 bp, Artificial
  Synthetic oligonucleotide
tcgtttcatctgagtctccaggtaaatgaaagggtcgacggggcgttaccagacg

SEQ ID NO: 157943 - DNA, 50 bp, Artificial
  Synthetic oligonucleotide
atcgcatcggaaggcaatggcaatcctgggttcgccagagacagggggtc

SEQ ID NO: 157944 - DNA, 50 bp, Artificial
  Synthetic oligonucleotide
aagtgcgcctgtcgcaaggtccgctgaagaccgtgggtgaccatccggtg

SEQ ID NO: 157945 - DNA, 50 bp, Artificial
  Synthetic oligonucleotide
aagtgcgttcgcgagtttcctgacgggcttgcggggatacatcgggactt

SEQ ID NO: 157946 - DNA, 50 bp, Artificial
  Synthetic oligonucleotide
cgtcttaggtgggtcaggctgtttgaagtctggccctaccgcgcacgcag

SEQ ID NO: 157947 - DNA, 50 bp, Artificial
  Synthetic oligonucleotide
aagttactacgacggcgcaggtctttgtatgctggccgccgcgggatgaa

SEQ ID NO: 157948 - DNA, 50 bp, Artificial
  Synthetic oligonucleotide
aagttccgcgctaccgccccggtgctcgcttgagacggagtcaatcttag

SEQ ID NO: 157949 - DNA, 50 bp, Artificial
  Synthetic oligonucleotide
gaccacctcggcagaccagatcatgagtgggcctttcacccgcttggcta

SEQ ID NO: 157950 - DNA, 50 bp, Artificial
  Synthetic oligonucleotide
aagttccgcgtgggtgcgatgcgtgcgagcaagagccgtccggactgggg

SEQ ID NO: 157951 - DNA, 50 bp, Artificial
  Synthetic oligonucleotide
cgaatccagcgcgccttggctaaactcgcttaagcccccaacgcctccag

SEQ ID NO: 157952 - DNA, 50 bp, Artificial
  Synthetic oligonucleotide
aaggcgtctgaccttcgctggccggtcactaagccgcgctgccagactaa

SEQ ID NO: 157953 - DNA, 55 bp, Artificial
  Synthetic oligonucleotide
ttgttgccgtaggactgcaccttggcgagttgtgcggaaaggaccgggtacgtcg

SEQ ID NO: 157954 - DNA, 50 bp, Artificial
  Synthetic oligonucleotide
cggagctggctcgcctcgcacgcacatctgtacgacccccgcgtgcatac

SEQ ID NO: 157955 - DNA, 50 bp, Artificial
  Synthetic oligonucleotide
tccatctcgtccagaaatatctgcttgcgtgtgcgtcggttgctcaactc

SEQ ID NO: 157956 - DNA, 50 bp, Artificial
  Synthetic oligonucleotide
tccatcggttgattcgaaccgtaccttcacgatcgtattggtaccgaagc

SEQ ID NO: 157957 - DNA, 50 bp, Artificial
  Synthetic oligonucleotide
aagggaatgaggtgtcagggatcggagactggggcaagtccgtgtcgcgc

SEQ ID NO: 157958 - DNA, 50 bp, Artificial
  Synthetic oligonucleotide
aagggacttacacgctcccactagcactgctgcacgccctcctcaaggcg

SEQ ID NO: 157959 - DNA, 50 bp, Artificial
  Synthetic oligonucleotide
aagggctacgacacggacgcgttgttgcggcaccatgggcttttgtctgc

SEQ ID NO: 157960 - DNA, 50 bp, Artificial
  Synthetic oligonucleotide
aaggggcgctcagagtgcgacatcgcgagcccggtggatttagttgacca

SEQ ID NO: 157961 - DNA, 50 bp, Artificial
  Synthetic oligonucleotide
cacgcactatccaggcatcggcagagacgctacgccggcagaagttgcgg

SEQ ID NO: 157962 - DNA, 50 bp, Artificial
  Synthetic oligonucleotide
cagtccgacgtatttcaacgatgcgatcgaatggtcgaccgtgacgtttc

SEQ ID NO: 157963 - DNA, 50 bp, Artificial
  Synthetic oligonucleotide
cacgcaggaagtcaaacgcgaacgtgcgcaagaccacagaagcggttccg

SEQ ID NO: 157964 - DNA, 56 bp, Artificial
  Synthetic oligonucleotide
tttcccgatttgctcgctgaatccgacgacttgggtatgcgcgattggcgccgacg

SEQ ID NO: 157965 - DNA, 50 bp, Artificial
  Synthetic oligonucleotide
aaggtaggttcccgggatgccagattgcgcacttacgtcagttgcgcccg

SEQ ID NO: 157966 - DNA, 50 bp, Artificial
  Synthetic oligonucleotide
cccggatggctccactcaactttggagatccatcatgactcagacgtatg

SEQ ID NO: 157967 - DNA, 50 bp, Artificial
  Synthetic oligonucleotide
cgaagaacgaggtacgcaaccccgtcgccggtagtggcattgctgtgcgc

SEQ ID NO: 157968 - DNA, 50 bp, Artificial
  Synthetic oligonucleotide
aagtcagcggttgaactgtgtcggtgacgggatcgtactgtcggcccagc

SEQ ID NO: 157969 - DNA, 50 bp, Artificial
  Synthetic oligonucleotide
atcgcgatagcagcacgtcaccgttggacgagcgcgtgagtgtggcgcag

SEQ ID NO: 157970 - DNA, 50 bp, Artificial
  Synthetic oligonucleotide
aagtcgcccagtacctcgcggtttcacagcagggggtatttccgcggcgc

SEQ ID NO: 157971 - DNA, 50 bp, Artificial
  Synthetic oligonucleotide
atcgcgaaggcaaaccgaatgatggggctggggaacgcaattctcgtgcc

SEQ ID NO: 157972 - DNA, 50 bp, Artificial
  Synthetic oligonucleotide
ccttcagagctccggaccattgcgctcgattgcactcccctcaggccact

SEQ ID NO: 157973 - DNA, 50 bp, Artificial
  Synthetic oligonucleotide
tcgtactgtcccactgtcacgttcgtgagcccaagcggcttctgcgagta

SEQ ID NO: 157974 - DNA, 50 bp, Artificial
  Synthetic oligonucleotide
ccttcagcggcattcctgtgcgcctacgacgcaatacggtttcgccgacg

SEQ ID NO: 157975 - DNA, 57 bp, Artificial
  Synthetic oligonucleotide
cttgcggcgccctcccagttgattgatataacaatccggacacaacttctcccttcg

SEQ ID NO: 157976 - DNA, 58 bp, Artificial
  Synthetic oligonucleotide
cagccgcggatatcggcgactccgtacagttcggctacgacacagagacctccccaac

SEQ ID NO: 157977 - DNA, 55 bp, Artificial
  Synthetic oligonucleotide
gacaagacaggtataacacgccgtgggtccaattggtcctgttctagtagccgga

SEQ ID NO: 157978 - DNA, 50 bp, Artificial
  Synthetic oligonucleotide
aagcacgtgcggctccttcagtacacgcagacgggctgtctccgcgatat

SEQ ID NO: 157979 - DNA, 50 bp, Artificial
  Synthetic oligonucleotide
atctggaaagagccacaaatgctccgacggaaactgaagcgccgcgctga

SEQ ID NO: 157980 - DNA, 50 bp, Artificial
  Synthetic oligonucleotide
tcgggtttcgcggatgttttcgcacgcccgttcgtcgcctccaaacacct

SEQ ID NO: 157981 - DNA, 50 bp, Artificial
  Synthetic oligonucleotide
aagcagttccgggaggactatgcgaaggcgcgggggaagggcgcctgatc

SEQ ID NO: 157982 - DNA, 50 bp, Artificial
  Synthetic oligonucleotide
aagcatagtcgctcgcttgcgcaggtgttagtcatgcacggaggcggccg

SEQ ID NO: 157983 - DNA, 50 bp, Artificial
  Synthetic oligonucleotide
ccctgatgacacagagtagtacggcagccgtcacgtgcaagcgcgcccca

SEQ ID NO: 157984 - DNA, 50 bp, Artificial
  Synthetic oligonucleotide
aagcatgtcgcaacctgccgcttgtaaccggtggatcaggcatcgcgctt

SEQ ID NO: 157985 - DNA, 50 bp, Artificial
  Synthetic oligonucleotide
agcagggacgcgcaatccccctggaaatacgtggtcgcctggttgcggat

SEQ ID NO: 157986 - DNA, 50 bp, Artificial
  Synthetic oligonucleotide
aagccaccgatccatacgacactgccgcgacggacgatatgccctcgccg

SEQ ID NO: 157987 - DNA, 50 bp, Artificial
  Synthetic oligonucleotide
agcagcgccagctttcaccagccgtgcgactgccgtggcaatgtcttccc

SEQ ID NO: 157988 - DNA, 55 bp, Artificial
  Synthetic oligonucleotide
cctttcaggccccttcaacctcgctccgaaaccgcaactgagtgcaggtttacga

SEQ ID NO: 157989 - DNA, 50 bp, Artificial
  Synthetic oligonucleotide
atctctgcgcttacacaggtggccctatcggggttggggacgccagccaa

SEQ ID NO: 157990 - DNA, 50 bp, Artificial
  Synthetic oligonucleotide
ccctctcagaaaggtctgttggcagaaatcgaggaagtgcattctccgtt

SEQ ID NO: 157991 - DNA, 50 bp, Artificial
  Synthetic oligonucleotide
aagccaccgcagaactgccgatgactgccgtaccccaatccgccgagacc

SEQ ID NO: 157992 - DNA, 50 bp, Artificial
  Synthetic oligonucleotide
tcggaaaaaggaaggccacacggagagctgacgatggcaaacgggtcggt

SEQ ID NO: 157993 - DNA, 50 bp, Artificial
  Synthetic oligonucleotide
tcgctgctgtgtttgtgccgtggtggttgcacgctttctttccgaagccc

SEQ ID NO: 157994 - DNA, 50 bp, Artificial
  Synthetic oligonucleotide
aacttgctcacgccggcactcctgtgcgtcaagtcggtgttcgcagcttg

SEQ ID NO: 157995 - DNA, 50 bp, Artificial
  Synthetic oligonucleotide
caccccggcttgggttctaaagcctcgccgcctgacttcagtcatcgcag

SEQ ID NO: 157996 - DNA, 50 bp, Artificial
  Synthetic oligonucleotide
aacttgctcccgaggtgcacctgacgtactccccggcgtgtccgatcggg

SEQ ID NO: 157997 - DNA, 50 bp, Artificial
  Synthetic oligonucleotide
cctggtccggaacgtaattgtcgggggccttttgcatagcacgcgctcct

SEQ ID NO: 157998 - DNA, 50 bp, Artificial
  Synthetic oligonucleotide
aagaacgctgccgtgcccccgcctagttcttcgcgtccgcgcatgccaac

SEQ ID NO: 157999 - DNA, 55 bp, Artificial
  Synthetic oligonucleotide
cctttacgcgggaaatggccgtcaacgtcatcaagtactgcatttcgaccggcat

SEQ ID NO: 158000 - DNA, 50 bp, Artificial
  Synthetic oligonucleotide
aagacacgacgcgtgcggggcgcttcctcagtatcggcgttgactaccgt

SEQ ID NO: 158001 - DNA, 50 bp, Artificial
  Synthetic oligonucleotide
cgtgtgcgctgacgggactctggggccatgcagcctttaaagttccagcc

SEQ ID NO: 158002 - DNA, 50 bp, Artificial
  Synthetic oligonucleotide
cctggtggcgccaagaaaaggcttcggtgccctgtggatgcacgaatggc

SEQ ID NO: 158003 - DNA, 50 bp, Artificial
  Synthetic oligonucleotide
cgtgtcgtactccattcacgaggcggcacactggttagcgggacgggcgt

SEQ ID NO: 158004 - DNA, 50 bp, Artificial
  Synthetic oligonucleotide
aagacggagaacgcgcacggctacatccgcttgtcgtgcagtgccccgcc

SEQ ID NO: 158005 - DNA, 50 bp, Artificial
  Synthetic oligonucleotide
cctgtctcattggcatggaggcatgcggcggctcacagcactgggcacgc

SEQ ID NO: 158006 - DNA, 50 bp, Artificial
  Synthetic oligonucleotide
aagactagcgtgtgacggactcgcgtgctttgagcgctgtcccgatggct

SEQ ID NO: 158007 - DNA, 50 bp, Artificial
  Synthetic oligonucleotide
tcgtggcgacatgttgaaggggtccgcaaccacccctgaacagctagtga

SEQ ID NO: 158008 - DNA, 50 bp, Artificial
  Synthetic oligonucleotide
atcttcgtcctctggccagcccgatatacgcgccactcaacgcggcactt

SEQ ID NO: 158009 - DNA, 50 bp, Artificial
  Synthetic oligonucleotide
aagagcccgtactccgaggcgaacccctgaaaggtcatggcttcggggac

SEQ ID NO: 158010 - DNA, 55 bp, Artificial
  Synthetic oligonucleotide
gacacgccgttcagaccgctacttgttcgatgcatggcaggaaacacttgcggcg

SEQ ID NO: 158011 - DNA, 50 bp, Artificial
  Synthetic oligonucleotide
agcgaacctcgatgcgtaacggggcgtcaatagcgcatgtgtcgcgcgtg

SEQ ID NO: 158012 - DNA, 50 bp, Artificial
  Synthetic oligonucleotide
tcgtcgccggtgttttgagcctccgtgagcgtaatgaaattcggcttaat

SEQ ID NO: 158013 - DNA, 50 bp, Artificial
  Synthetic oligonucleotide
ccctgccttggagttccggataacccgggcgggagtaaacaacgttcgcg

SEQ ID NO: 158014 - DNA, 50 bp, Artificial
  Synthetic oligonucleotide
gcgctcatttggagcgggcaaagccacgaccttacacacgcggggattga

SEQ ID NO: 158015 - DNA, 50 bp, Artificial
  Synthetic oligonucleotide
cccgtagggcgctgcgtaaagtcgtacgcacagagaacggtaccggtcca

SEQ ID NO: 158016 - DNA, 50 bp, Artificial
  Synthetic oligonucleotide
agcgacgggtcatgcatgtcgatgcgcctctttctcgtgtcggccgggtg

SEQ ID NO: 158017 - DNA, 50 bp, Artificial
  Synthetic oligonucleotide
aagcgccaccattctatgcggtccaagtgttccctgctgacgcggcaagt

SEQ ID NO: 158018 - DNA, 50 bp, Artificial
  Synthetic oligonucleotide
tcgagcccacgctacgacacgcggtggaagaggtgctaaacgaaagcgag

SEQ ID NO: 158019 - DNA, 50 bp, Artificial
  Synthetic oligonucleotide
aagcggaccctatgcctcgtccggctgaaatgacggctctcgccccatta

SEQ ID NO: 158020 - DNA, 50 bp, Artificial
  Synthetic oligonucleotide
aagcggcagactggctacgtgggcactctcaagtggaggccccggcaccc

SEQ ID NO: 158021 - DNA, 55 bp, Artificial
  Synthetic oligonucleotide
ccttgcggcgtgttgatcgtgtatcgaacgccttgaaccccgtcttccgtagttc

SEQ ID NO: 158022 - DNA, 50 bp, Artificial
  Synthetic oligonucleotide
aagcggcgtatgcgcttgcgggcgtaccctcatcaatcagtgcacgaaag

SEQ ID NO: 158023 - DNA, 50 bp, Artificial
  Synthetic oligonucleotide
caccggacttctccccgagcggagccgtcatcttcaggtaggaaagccgg

SEQ ID NO: 158024 - DNA, 50 bp, Artificial
  Synthetic oligonucleotide
aagcggtgcctctacccgttgtgtgcatccacaggatcgcaggtgggaac

SEQ ID NO: 158025 - DNA, 50 bp, Artificial
  Synthetic oligonucleotide
aagcgtcggcaccacgtatgcgcccatctccgccattaagcttgccgtgg

SEQ ID NO: 158026 - DNA, 50 bp, Artificial
  Synthetic oligonucleotide
aagcgtcgtggcgcgaacggccactgggcatgaaagtgcgattgccagac

SEQ ID NO: 158027 - DNA, 50 bp, Artificial
  Synthetic oligonucleotide
tcgaaggcggccgtttgtggggagatcaggtctcgatctctgtctcaaaa

SEQ ID NO: 158028 - DNA, 50 bp, Artificial
  Synthetic oligonucleotide
caccttggcgtattggctcagtgtcgctttgtgcccgccgtagcggatcg

SEQ ID NO: 158029 - DNA, 50 bp, Artificial
  Synthetic oligonucleotide
atcggttgcggtagccagagaagccagcacgattggcgctgcgcagaagt

SEQ ID NO: 158030 - DNA, 50 bp, Artificial
  Synthetic oligonucleotide
aagcgtgaacctgaggcgtggtcctgacgtgtccagtcgtgcccgcacat

SEQ ID NO: 158031 - DNA, 50 bp, Artificial
  Synthetic oligonucleotide
gaatgtgtatcgcgctacgatggacagagatgcagtcaacctgagccaac

SEQ ID NO: 158032 - DNA, 55 bp, Artificial
  Synthetic oligonucleotide
gacacgcttcggttcatagaacggccaattcaccgatcgtcccggggctcccatc

SEQ ID NO: 158033 - DNA, 50 bp, Artificial
  Synthetic oligonucleotide
agcagagcacgcatgggcactgattctcgcgtgcgccaaatccgtcccgc

SEQ ID NO: 158034 - DNA, 50 bp, Artificial
  Synthetic oligonucleotide
aagcgtgcagggttgcgcgactggggtttgtccgggcgtcacagcctgag

SEQ ID NO: 158035 - DNA, 50 bp, Artificial
  Synthetic oligonucleotide
tcgctacgggacggactcacgtaggtcgaacacgtgacgcggtatttgcc

SEQ ID NO: 158036 - DNA, 50 bp, Artificial
  Synthetic oligonucleotide
aagccaggcgaacgaccaccgtccagtatgcgaggtgtcccaagttggga

SEQ ID NO: 158037 - DNA, 50 bp, Artificial
  Synthetic oligonucleotide
aagccctcatattcgagcggtacacacgtgagcacggccacttgcccagg

SEQ ID NO: 158038 - DNA, 50 bp, Artificial
  Synthetic oligonucleotide
tcgcggctgttatcaacgaaccgggctgggagcacatgaaggtcgtgacc

SEQ ID NO: 158039 - DNA, 50 bp, Artificial
  Synthetic oligonucleotide
ccctatccccatactccgcctagcgggcgggcaagccatgagagatttgc

SEQ ID NO: 158040 - DNA, 50 bp, Artificial
  Synthetic oligonucleotide
atctcgtgtccactccgtcttcgttcggttcgcgcgccagttacggcgca

SEQ ID NO: 158041 - DNA, 50 bp, Artificial
  Synthetic oligonucleotide
gaagtcggtctcatgccacatcgattgtccgacccgaggtattcatgact

SEQ ID NO: 158042 - DNA, 50 bp, Artificial
  Synthetic oligonucleotide
atctcggaaccctgtccactgatccgcggtgtcgtcccagtgctctccga

SEQ ID NO: 158043 - DNA, 55 bp, Artificial
  Synthetic oligonucleotide
gacacggggaaagctagagacaacgagcatgccgcgaccttacggtgcggagttt

SEQ ID NO: 158044 - DNA, 50 bp, Artificial
  Synthetic oligonucleotide
atctccagtgcactgtggatggaccccatgttggcgtgcttcgtgacgcg

SEQ ID NO: 158045 - DNA, 50 bp, Artificial
  Synthetic oligonucleotide
aagccgccgctcatggatctaccgctacaaatcccccattgacgaccgga

SEQ ID NO: 158046 - DNA, 50 bp, Artificial
  Synthetic oligonucleotide
tcgcataggcgtgttcgtaccaggaatcttcctatacagcgcatcttggc

SEQ ID NO: 158047 - DNA, 50 bp, Artificial
  Synthetic oligonucleotide
aagccgcggactgagggagcgatgttgcaaggcgcgataggggagttccg

SEQ ID NO: 158048 - DNA, 50 bp, Artificial
  Synthetic oligonucleotide
tcgcactgaggtcacgatgagctatcaattcgactggtcctccattccgc

SEQ ID NO: 158049 - DNA, 50 bp, Artificial
  Synthetic oligonucleotide
aagcgacgcgcagctgccttaccaggacggatacccgaatgacgggaatc

SEQ ID NO: 158050 - DNA, 50 bp, Artificial
  Synthetic oligonucleotide
aagcgcagtccacttatgcagccgccccaaacgggtctgtagactcggtt

SEQ ID NO: 158051 - DNA, 50 bp, Artificial
  Synthetic oligonucleotide
cgtgtcccccggccgttgtgccctgatgacacagagtagtacggcagccg

SEQ ID NO: 158052 - DNA, 50 bp, Artificial
  Synthetic oligonucleotide
caccgcctaggccgacgccccaaagtgaagccgcatagatgaccatgggc

SEQ ID NO: 158053 - DNA, 50 bp, Artificial
  Synthetic oligonucleotide
aagcgcatcgtagcatgcgagcaagcgtcgacattcgggataggccacca

SEQ ID NO: 158054 - DNA, 55 bp, Artificial
  Synthetic oligonucleotide
gacagcattcgggttttgcatcgcgtttcgctctcggtcggtctcaatcggctga

SEQ ID NO: 158055 - DNA, 50 bp, Artificial
  Synthetic oligonucleotide
tacaaatttgcctctatgtgccgggtagtatgaaaaggagacgcccactg

SEQ ID NO: 158056 - DNA, 50 bp, Artificial
  Synthetic oligonucleotide
aattggcggttcggtcgcgcatcccggctagcttaacgtagagcgtgctc

SEQ ID NO: 158057 - DNA, 50 bp, Artificial
  Synthetic oligonucleotide
cgtcaagcatcgagcacttcccctagcgccttacgcacttcgttgcgcca

SEQ ID NO: 158058 - DNA, 50 bp, Artificial
  Synthetic oligonucleotide
cgacgtgacggggatgagcacatgacaccgaccagaacggaacttgccgc

SEQ ID NO: 158059 - DNA, 50 bp, Artificial
  Synthetic oligonucleotide
cgactcacggcattttcagcttacgaaaagacaaagccccgtcaatacgg

SEQ ID NO: 158060 - DNA, 50 bp, Artificial
  Synthetic oligonucleotide
taaggcgggggtcgtgcatggtgcgagcgcattctttgaggacgcagcgc

SEQ ID NO: 158061 - DNA, 50 bp, Artificial
  Synthetic oligonucleotide
aatttccgagggaaaccctccgccacgtttgacgcgcagtgcgggaattt

SEQ ID NO: 158062 - DNA, 50 bp, Artificial
  Synthetic oligonucleotide
aatttgcgccgggagccacatgggctatcagcgggtgttcagtaggccgg

SEQ ID NO: 158063 - DNA, 50 bp, Artificial
  Synthetic oligonucleotide
aatttggcccgctacgagggggagctagcaattccggccccggtctggca

SEQ ID NO: 158064 - DNA, 50 bp, Artificial
  Synthetic oligonucleotide
gagatcctgaaagttggcgtcgctcgccgcattcacaaccgtgtgcgtgg

SEQ ID NO: 158065 - DNA, 55 bp, Artificial
  Synthetic oligonucleotide
gacaggcaaacgtttgagtcgaactgatctcaatcggcgatacagagccaacccg

SEQ ID NO: 158066 - DNA, 50 bp, Artificial
  Synthetic oligonucleotide
atatcttgcggtggatggcctcccaacctgccgacgggttaaacggcctg

SEQ ID NO: 158067 - DNA, 50 bp, Artificial
  Synthetic oligonucleotide
taacggccctaacccggaaagctcgactaaaccgtatagctttcgccgga

SEQ ID NO: 158068 - DNA, 50 bp, Artificial
  Synthetic oligonucleotide
acaaaatgcccgcccagtatggtttgcaccacaccgcccgattgcggatc

SEQ ID NO: 158069 - DNA, 50 bp, Artificial
  Synthetic oligonucleotide
taacgcatcgagtgaccacgtgccaccggacagtttggcggaacgggtta

SEQ ID NO: 158070 - DNA, 50 bp, Artificial
  Synthetic oligonucleotide
taacgacgggagccgctgtgtttgcgagttttgaaccgacccatacagga

SEQ ID NO: 158071 - DNA, 50 bp, Artificial
  Synthetic oligonucleotide
ccccgctcacaatacgctgctcggtacatgggccgtttgagcaaacgccg

SEQ ID NO: 158072 - DNA, 50 bp, Artificial
  Synthetic oligonucleotide
cggagcccatatgaaggtaagccgccgcactacagcgctcttccttggct

SEQ ID NO: 158073 - DNA, 50 bp, Artificial
  Synthetic oligonucleotide
aatgtccaacgaagcgctcttgtggtctggacgcccgtcgcaggccgcta

SEQ ID NO: 158074 - DNA, 50 bp, Artificial
  Synthetic oligonucleotide
taccggcgcatcacggcaagatagacaggcatcgatataacaacgctcgc

SEQ ID NO: 158075 - DNA, 50 bp, Artificial
  Synthetic oligonucleotide
aatgtgcccgattcgcgcaccaacatgaaacggtcgcccactgcgtctga

SEQ ID NO: 158076 - DNA, 55 bp, Artificial
  Synthetic oligonucleotide
ccttgcagtgtttcaaccgcccctgtcgctgtttccagcttcagtgcgaatgaag

SEQ ID NO: 158077 - DNA, 50 bp, Artificial
  Synthetic oligonucleotide
aatgtgttccgctcctcgctttcgtgacgtggcttttcatcgcgcggctt

SEQ ID NO: 158078 - DNA, 50 bp, Artificial
  Synthetic oligonucleotide
taccaccatgcatgaacctgactggattagcacgggcggcggctacccta

SEQ ID NO: 158079 - DNA, 50 bp, Artificial
  Synthetic oligonucleotide
ccccgcttctgcccgaaggtactagtgatcgcgcttgggttcgatcgcta

SEQ ID NO: 158080 - DNA, 50 bp, Artificial
  Synthetic oligonucleotide
aattcccggggaaagcgttgccgcctgaggaaactcgaggtacgtcggaa

SEQ ID NO: 158081 - DNA, 50 bp, Artificial
  Synthetic oligonucleotide
aattgatcgccgcctggttagccacaatgcgatccgcgtgtgcgaaacct

SEQ ID NO: 158082 - DNA, 50 bp, Artificial
  Synthetic oligonucleotide
atcaacactggcgcatgccggcagttgtcagcgtctaggcgattactact

SEQ ID NO: 158083 - DNA, 50 bp, Artificial
  Synthetic oligonucleotide
agcacgaaccgtggagcgggaaaggccgatctgggtcgcaagcgagatct

SEQ ID NO: 158084 - DNA, 50 bp, Artificial
  Synthetic oligonucleotide
aattgcagttaccagcgcccaacgctccccgtttttgccagacgtcccta

SEQ ID NO: 158085 - DNA, 50 bp, Artificial
  Synthetic oligonucleotide
atatggcgcgccgggatggtgtatatccccgtgaatggccgcaacgcatc

SEQ ID NO: 158086 - DNA, 50 bp, Artificial
  Synthetic oligonucleotide
aattgcgagggtccgctcggttttacgattgcgttcggatgcgccccact

SEQ ID NO: 158087 - DNA, 58 bp, Artificial
  Synthetic oligonucleotide
tggccctacccatccgcgacaggccgaagtattcccgaggctcgaatgttgccgccgc

SEQ ID NO: 158088 - DNA, 55 bp, Artificial
  Synthetic oligonucleotide
gacatcgtgtcctccataccctaattgggaaccactatagccagattgccatcca

SEQ ID NO: 158089 - DNA, 50 bp, Artificial
  Synthetic oligonucleotide
aattgcggcgcgcatcatggggtgaaccggcagcagtgtgtggctgttgg

SEQ ID NO: 158090 - DNA, 50 bp, Artificial
  Synthetic oligonucleotide
atatgccggctgtctctcggctctgccacccgtagtcggtggggtgttgg

SEQ ID NO: 158091 - DNA, 50 bp, Artificial
  Synthetic oligonucleotide
aattgcgggcctgccgttcgactgcgttgtgcctctaccgacgagtcaac

SEQ ID NO: 158092 - DNA, 50 bp, Artificial
  Synthetic oligonucleotide
cgaggcacaaggcgatcgactcaccaggtgaaacacactggttataggat

SEQ ID NO: 158093 - DNA, 50 bp, Artificial
  Synthetic oligonucleotide
acaaggaagcggtcagccgattcgtcaccgcattgcttcgcggacaacgc

SEQ ID NO: 158094 - DNA, 50 bp, Artificial
  Synthetic oligonucleotide
acaaggttattccgtgcgaagagacctgtcgtgcgccgtccacgccccag

SEQ ID NO: 158095 - DNA, 50 bp, Artificial
  Synthetic oligonucleotide
acaatccgctaggcattggcgggacggagctccatcagtggctcatcccg

SEQ ID NO: 158096 - DNA, 50 bp, Artificial
  Synthetic oligonucleotide
acaatgcggctacatggcgtcaggtgccagtgcccgtcagcgtgacgctg

SEQ ID NO: 158097 - DNA, 50 bp, Artificial
  Synthetic oligonucleotide
ataggcgaggcagccaaccgggcttgatccgccgaacgggcagacataga

SEQ ID NO: 158098 - DNA, 50 bp, Artificial
  Synthetic oligonucleotide
acaattcaacgcccccgaacaatccaggctgcgtctgcccacgaggcagc

SEQ ID NO: 158099 - DNA, 55 bp, Artificial
  Synthetic oligonucleotide
gacatggatgaactcggtcgatgaatcggtgacgaaaacgcgacgcgcccacggg

SEQ ID NO: 158100 - DNA, 50 bp, Artificial
  Synthetic oligonucleotide
cccattgacgcctcggcgggaccttgaccattgtcgcccattgcatgttg

SEQ ID NO: 158101 - DNA, 50 bp, Artificial
  Synthetic oligonucleotide
gagcccggttgggagcgccgaggttgcccatacgaattgcgtgtccccaa

SEQ ID NO: 158102 - DNA, 50 bp, Artificial
  Synthetic oligonucleotide
agcgcgacgcagtttcttgcgtagttgcaggcgggtgttcagtcgttgtg

SEQ ID NO: 158103 - DNA, 50 bp, Artificial
  Synthetic oligonucleotide
acacaattggcttgttccagcccatgcaacgcaagcgagccgcaccctct

SEQ ID NO: 158104 - DNA, 50 bp, Artificial
  Synthetic oligonucleotide
atagcctgccactccgagtcacctctccggagccccttcatgccgaatct

SEQ ID NO: 158105 - DNA, 50 bp, Artificial
  Synthetic oligonucleotide
cccagggaggccgcacatggcgcaagtccagctcgccgaaacctcacaag

SEQ ID NO: 158106 - DNA, 50 bp, Artificial
  Synthetic oligonucleotide
acacaggggcggtggggcttccctagtctccggttactgcggacggctgt

SEQ ID NO: 158107 - DNA, 50 bp, Artificial
  Synthetic oligonucleotide
acacatgactgcgcaaacacaccgcaaacgtccgcgccacgtcgggtatg

SEQ ID NO: 158108 - DNA, 50 bp, Artificial
  Synthetic oligonucleotide
acaccacctgccgaggccttcacaagaggctcaggacggtcggccccatg

SEQ ID NO: 158109 - DNA, 50 bp, Artificial
  Synthetic oligonucleotide
cgtcaaagcgtgcgtccagccgcgaaatctcggataacgcgctgtccaac

SEQ ID NO: 158110 - DNA, 55 bp, Artificial
  Synthetic oligonucleotide
gacatgtgagcgcaagcaatcgggtcaaaatggggtcgcttctattattagcgac

SEQ ID NO: 158111 - DNA, 50 bp, Artificial
  Synthetic oligonucleotide
atatcgtgcgccgatcatgtgttcgctgcagacgttggcccgcacacaaa

SEQ ID NO: 158112 - DNA, 50 bp, Artificial
  Synthetic oligonucleotide
atatcggttgtcggggcgcgtttcggcacgcagaattgggtacgctttgg

SEQ ID NO: 158113 - DNA, 50 bp, Artificial
  Synthetic oligonucleotide
gagcaaccggcacgatggcctcctgtttggtcgtgtttcgttcagatgaa

SEQ ID NO: 158114 - DNA, 50 bp, Artificial
  Synthetic oligonucleotide
atatcaggcgttggtccccaaactgtgcccggcatgctgcgaacccgcag

SEQ ID NO: 158115 - DNA, 50 bp, Artificial
  Synthetic oligonucleotide
gtttggtgtccatcgagaatccctgtgtattgcgccgtgcgtgcgagcga

SEQ ID NO: 158116 - DNA, 50 bp, Artificial
  Synthetic oligonucleotide
acaacaggtccatcgatccggcgtcgtagcagattcgatgcgctgcgccg

SEQ ID NO: 158117 - DNA, 50 bp, Artificial
  Synthetic oligonucleotide
acaacatcctcgtgacaccgccgatttacccaccgcggcccgcattggcc

SEQ ID NO: 158118 - DNA, 50 bp, Artificial
  Synthetic oligonucleotide
gtttggagccgccgcgtgtagtggatcgcgtaccgttcgcactggcaggg

SEQ ID NO: 158119 - DNA, 50 bp, Artificial
  Synthetic oligonucleotide
atagtgtgcagcacaaggctggtccatgagatgcaagcgcgggaccacct

SEQ ID NO: 158120 - DNA, 50 bp, Artificial
  Synthetic oligonucleotide
acaacgcgtgacgcagccagatcgaacgaacgccggatgcagacacgaaa

SEQ ID NO: 158121 - DNA, 55 bp, Artificial
  Synthetic oligonucleotide
gacattcttcatcccttggtagtactggtacagatcgggatttcgcaatgcatcg

SEQ ID NO: 158122 - DNA, 50 bp, Artificial
  Synthetic oligonucleotide
agcgcccacacgctatcggacagacgccgatttaacggttctgcccatgg

SEQ ID NO: 158123 - DNA, 50 bp, Artificial
  Synthetic oligonucleotide
acaacggttgcacagcgcgcagtatcgacgcagggtggctacgtgttcgc

SEQ ID NO: 158124 - DNA, 50 bp, Artificial
  Synthetic oligonucleotide
acaagacagtcggcacgtcggatgaaggcttgcacagccggcatgagtgg

SEQ ID NO: 158125 - DNA, 50 bp, Artificial
  Synthetic oligonucleotide
agcacacctggctgcggtttccgtatcgccatcacgttccccctggagac

SEQ ID NO: 158126 - DNA, 50 bp, Artificial
  Synthetic oligonucleotide
acaagccgggttcgctctcacccgcatcacaacgagacgtgcaacttcga

SEQ ID NO: 158127 - DNA, 50 bp, Artificial
  Synthetic oligonucleotide
aatcattcgaaccggtcatggcgaaccctccacgtgcaccgcgcgttgac

SEQ ID NO: 158128 - DNA, 50 bp, Artificial
  Synthetic oligonucleotide
gcgcttaaacgggcgcgatgtcgatactcccaggtaggcccacccatggg

SEQ ID NO: 158129 - DNA, 50 bp, Artificial
  Synthetic oligonucleotide
agcacggctcggtctacgcctactgacgcgcaccactcgtagtgtttcga

SEQ ID NO: 158130 - DNA, 50 bp, Artificial
  Synthetic oligonucleotide
aatccagctccgtaggtgccggtcccttcaaccccggcgcggcgtaaaag

SEQ ID NO: 158131 - DNA, 50 bp, Artificial
  Synthetic oligonucleotide
aatccgcattcgtacctgttcctgccttgccgttggccggcgaatcggtc

SEQ ID NO: 158132 - DNA, 55 bp, Artificial
  Synthetic oligonucleotide
ccttgacaccgagggagtttcataggacactgcggtttctgaggtccggcgtgtc

SEQ ID NO: 158133 - DNA, 50 bp, Artificial
  Synthetic oligonucleotide
tattgaggccttggaacagttgctcggcgcccgtttcactcagtacgaac

SEQ ID NO: 158134 - DNA, 50 bp, Artificial
  Synthetic oligonucleotide
atccgacgaacgacaggtttacccatgtgcgttgggctcccgtcgatccg

SEQ ID NO: 158135 - DNA, 50 bp, Artificial
  Synthetic oligonucleotide
atcccgtgctacgctcaggtgtacccaagcacccggagacgagccatgga

SEQ ID NO: 158136 - DNA, 50 bp, Artificial
  Synthetic oligonucleotide
cccgaatcgcatgcgctggctacacgcgagtttgcagttcccaaagacct

SEQ ID NO: 158137 - DNA, 50 bp, Artificial
  Synthetic oligonucleotide
cgtcgagtcccgggccttttgccgttcaggggtggtgtgacccgtagtca

SEQ ID NO: 158138 - DNA, 50 bp, Artificial
  Synthetic oligonucleotide
tatggccgctccaagtcggaggttgtcgtaaccttgctttcgcgagaatt

SEQ ID NO: 158139 - DNA, 50 bp, Artificial
  Synthetic oligonucleotide
atccccggtaccgagccacacgggcactaagccttatcagcgcctccttg

SEQ ID NO: 158140 - DNA, 50 bp, Artificial
  Synthetic oligonucleotide
aatcgaccaccgagtcgtattggcgtcccagggtcaacgcgccatactga

SEQ ID NO: 158141 - DNA, 50 bp, Artificial
  Synthetic oligonucleotide
aatcgagaatccgcctgtcgcgcaccaaccggtcaagtcggttgaccctc

SEQ ID NO: 158142 - DNA, 50 bp, Artificial
  Synthetic oligonucleotide
aatcgagcccgccgtcaaacctgccagtatgctgaccaaaaccggtgtgg

SEQ ID NO: 158143 - DNA, 55 bp, Artificial
  Synthetic oligonucleotide
ccttcgctatactggccccgattgagcgttcgcacaccaatgacgacacttgccg

SEQ ID NO: 158144 - DNA, 50 bp, Artificial
  Synthetic oligonucleotide
aatcgagcccgggcgttcaacctgagtccgcaacgacgacaacacactga

SEQ ID NO: 158145 - DNA, 50 bp, Artificial
  Synthetic oligonucleotide
aatcgaggtctcgcctacgtacgagcgcgtgtgccaaccatgcgcccgag

SEQ ID NO: 158146 - DNA, 50 bp, Artificial
  Synthetic oligonucleotide
aatcgcatgttctgctcctcgatcaagccgcgagtggcgtcagtcgggaa

SEQ ID NO: 158147 - DNA, 50 bp, Artificial
  Synthetic oligonucleotide
gaccacgtgccaccggacagtttggcggaacgggttaacacgcggctgag

SEQ ID NO: 158148 - DNA, 50 bp, Artificial
  Synthetic oligonucleotide
tcacgtggggtcgcacagatcggaaatccccgcaggggatcagaatagcg

SEQ ID NO: 158149 - DNA, 50 bp, Artificial
  Synthetic oligonucleotide
aagttgacgctgcatggtccgcaccgctcagatgaagatggagcgcccct

SEQ ID NO: 158150 - DNA, 50 bp, Artificial
  Synthetic oligonucleotide
aataccccggagctgcgcgggatgcttgaggacatgctgctgccgccaag

SEQ ID NO: 158151 - DNA, 50 bp, Artificial
  Synthetic oligonucleotide
atcgataccgaacaccgtcccacgttccgtacccgactccacccacgcat

SEQ ID NO: 158152 - DNA, 50 bp, Artificial
  Synthetic oligonucleotide
atcgagggcctgaacggaaacgtttgcgggtgtctttcacgcgtccgggt

SEQ ID NO: 158153 - DNA, 50 bp, Artificial
  Synthetic oligonucleotide
cggcactttctagccccatgggattacgtcccgccgggcgttgttcacgg

SEQ ID NO: 158154 - DNA, 55 bp, Artificial
  Synthetic oligonucleotide
ccttcgagcgctagcacgtcctcgcgtctaccggtaatggtatggatgcacgggg

SEQ ID NO: 158155 - DNA, 50 bp, Artificial
  Synthetic oligonucleotide
cccgcaactttaagacggtgcgccgatagtgctgagccggtcgggtcgtc

SEQ ID NO: 158156 - DNA, 50 bp, Artificial
  Synthetic oligonucleotide
atcgaagtacatccgaaacgaaggctgctacgactggttcaacgctctcg

SEQ ID NO: 158157 - DNA, 50 bp, Artificial
  Synthetic oligonucleotide
aatatggggctggggcccatgattcaccggtcgcaggcgaacctccggac

SEQ ID NO: 158158 - DNA, 50 bp, Artificial
  Synthetic oligonucleotide
aatcaacacgcgctaagggcctcgggaggcggttgcaatgcaggaaaacc

SEQ ID NO: 158159 - DNA, 50 bp, Artificial
  Synthetic oligonucleotide
cacgcccctgcgcctgtgggaagtcatgcaccgattcttcaggctcgcag

SEQ ID NO: 158160 - DNA, 50 bp, Artificial
  Synthetic oligonucleotide
aatcaggccttcgacgcaaactgacgcttggtttggcgcggtcccttggg

SEQ ID NO: 158161 - DNA, 50 bp, Artificial
  Synthetic oligonucleotide
agcacgtcaccgttggacgagcgcgtgagtgtggcgcagcacacggaatg

SEQ ID NO: 158162 - DNA, 50 bp, Artificial
  Synthetic oligonucleotide
tcaagcaatcggggaccgcatgtcagcgaacggcgttgccactcgcatgt

SEQ ID NO: 158163 - DNA, 50 bp, Artificial
  Synthetic oligonucleotide
cccgagcgtcccatgagtaatgctcctcgaactggggtagcgcccgacgg

SEQ ID NO: 158164 - DNA, 50 bp, Artificial
  Synthetic oligonucleotide
aatcatcgcgtgtgtaaaacgcaggcgtttcgcagcttccggccgtcact

SEQ ID NO: 158165 - DNA, 55 bp, Artificial
  Synthetic oligonucleotide
gaaggctccagtcacggcattccagcaaggagccccaacatgaacatcccgcgtc

SEQ ID NO: 158166 - DNA, 50 bp, Artificial
  Synthetic oligonucleotide
cccgactcgcctgaaccggggccgcgtgttaacagaccacgctcagatga

SEQ ID NO: 158167 - DNA, 50 bp, Artificial
  Synthetic oligonucleotide
aatgaccgcgcatccgctaatcgacaatcctctacctgtccgccgcggca

SEQ ID NO: 158168 - DNA, 50 bp, Artificial
  Synthetic oligonucleotide
cacggtcatcttggttggactctgtcggctgcgactgccgaactcctggc

SEQ ID NO: 158169 - DNA, 50 bp, Artificial
  Synthetic oligonucleotide
aatgcactgcgagcctccgacatgcatgtgtgacctccatctggcggcca

SEQ ID NO: 158170 - DNA, 50 bp, Artificial
  Synthetic oligonucleotide
aatgcccagcacatacgtgcggagcccctgcgaagccagatagtcgccga

SEQ ID NO: 158171 - DNA, 50 bp, Artificial
  Synthetic oligonucleotide
atcactggtagacgctaatggagcgccgatcattgtcgacggctgccccg

SEQ ID NO: 158172 - DNA, 50 bp, Artificial
  Synthetic oligonucleotide
aatgccgtctatgcggtcccggcacctgagacaatctgagcgcacacagc

SEQ ID NO: 158173 - DNA, 50 bp, Artificial
  Synthetic oligonucleotide
cgtccgtccgaggagggagcagctagccgttggtccaaggcgccaagtga

SEQ ID NO: 158174 - DNA, 50 bp, Artificial
  Synthetic oligonucleotide
tacgggtaatcagcatcggtggttcctcagttcgccggggtaggcagagc

SEQ ID NO: 158175 - DNA, 50 bp, Artificial
  Synthetic oligonucleotide
atcacgtccccagcgtagcgcaatccgcgttgttgttgcgttcccgactg

SEQ ID NO: 158176 - DNA, 55 bp, Artificial
  Synthetic oligonucleotide
gaaggctgaccgactaattcgaacttgaccgacgggcggtcttacaattgccgcc

SEQ ID NO: 158177 - DNA, 50 bp, Artificial
  Synthetic oligonucleotide
tacgctcctgttccggtcacgcgtccagcgtcaattccactgggccggct

SEQ ID NO: 158178 - DNA, 50 bp, Artificial
  Synthetic oligonucleotide
tacgcggcgccacgtcaaacgtcacactgtccagaccgattctctcgtgc

SEQ ID NO: 158179 - DNA, 50 bp, Artificial
  Synthetic oligonucleotide
aatgctggagtctcgcgactcgtaaggcctggacctgcccgcaattacgg

SEQ ID NO: 158180 - DNA, 50 bp, Artificial
  Synthetic oligonucleotide
cgtccggctcagtagcgccaccttgttgggggttgcggccgtgcgggaca

SEQ ID NO: 158181 - DNA, 50 bp, Artificial
  Synthetic oligonucleotide
aatggcgtgggaccgcacgctgactttcttcggacgcacgctttgggaaa

SEQ ID NO: 158182 - DNA, 50 bp, Artificial
  Synthetic oligonucleotide
aatgggtcgaccaaaccgacagtcatgctcgtcggtggcgaaacacggcc

SEQ ID NO: 158183 - DNA, 50 bp, Artificial
  Synthetic oligonucleotide
cacgtgagcaggttcaaccgagcaagatccgcgtctgggggcgggagccg

SEQ ID NO: 158184 - DNA, 50 bp, Artificial
  Synthetic oligonucleotide
aatggttggcccggcgagaacctatagggcgctaccctgggggtaaatgg

SEQ ID NO: 158185 - DNA, 50 bp, Artificial
  Synthetic oligonucleotide
aatcgccgatttcgttcaagggccaccgctttccacccgacgtaatcgcc

SEQ ID NO: 158186 - DNA, 50 bp, Artificial
  Synthetic oligonucleotide
atccaggccggtgcatggtcgctcgcttgtgactggccgcgccccatatg

SEQ ID NO: 158187 - DNA, 55 bp, Artificial
  Synthetic oligonucleotide
gaagtgacacgatcatcccatcgtgcataatcgagcggaattcccgttacacgcc

SEQ ID NO: 158188 - DNA, 50 bp, Artificial
  Synthetic oligonucleotide
aatcgccgcaagcaccgggccaagctcccgaatgatcgacagcccgagaa

SEQ ID NO: 158189 - DNA, 50 bp, Artificial
  Synthetic oligonucleotide
agcgcaccgagcttgctgcgacaaagggccctcaactcctcagctaacgc

SEQ ID NO: 158190 - DNA, 50 bp, Artificial
  Synthetic oligonucleotide
atccactgcgatacgcaggcacaaagcggtccggtcttcggtctgtcgta

SEQ ID NO: 158191 - DNA, 50 bp, Artificial
  Synthetic oligonucleotide
tataaaagcgaccaagatgcaatatcgaagcaccgcctacgcgtagtcga

SEQ ID NO: 158192 - DNA, 50 bp, Artificial
  Synthetic oligonucleotide
atcatgtgttcgctgcagacgttggcccgcacacaaaggcgctcgtacac

SEQ ID NO: 158193 - DNA, 50 bp, Artificial
  Synthetic oligonucleotide
aatcgcgttgtcccgacctggcgtaattcaccaccgctcgtatcgcgaga

SEQ ID NO: 158194 - DNA, 50 bp, Artificial
  Synthetic oligonucleotide
aatcggacaggcggtgtctcatcagagagcgcagcgacaaacggcggtag

SEQ ID NO: 158195 - DNA, 50 bp, Artificial
  Synthetic oligonucleotide
aatcggagagcgtttctgggcggggctgcgtcggtcattacgtgggctac

SEQ ID NO: 158196 - DNA, 50 bp, Artificial
  Synthetic oligonucleotide
cgaccctgagcattcaattgctgagcgttcggatcgaaccgatagatgtg

SEQ ID NO: 158197 - DNA, 50 bp, Artificial
  Synthetic oligonucleotide
aatcggtgcgtgcgatgccgtgacgccgtgctacttccgctggtagttcg

SEQ ID NO: 158198 - DNA, 59 bp, Artificial
  Synthetic oligonucleotide
gaagccctcttacgttcgggtaggcgcgatatatatcgccctcgatcgatgaacggcga

SEQ ID NO: 158199 - DNA, 55 bp, Artificial
  Synthetic oligonucleotide
gaatagtcaaaagatcagatttcttcgctcacgaattcccaagttcgagtgcacc

SEQ ID NO: 158200 - DNA, 50 bp, Artificial
  Synthetic oligonucleotide
cccctgaatgcggagccactccacccactcaggacgggcacttagccagc

SEQ ID NO: 158201 - DNA, 50 bp, Artificial
  Synthetic oligonucleotide
tagcctgacaccttacgcgcatcgagatagccccagtaccgcgagtcgtt

SEQ ID NO: 158202 - DNA, 50 bp, Artificial
  Synthetic oligonucleotide
aatcgttcagagtccgccatagctgccagtcaccgtttgcgggcaacgca

SEQ ID NO: 158203 - DNA, 50 bp, Artificial
  Synthetic oligonucleotide
aatcgttcgtgtggacccacccgagccaaatgcgctcggacttgcgttgc

SEQ ID NO: 158204 - DNA, 50 bp, Artificial
  Synthetic oligonucleotide
atcatgactgcgactgggggcgagaatcgttccgggcctagttggccaaa

SEQ ID NO: 158205 - DNA, 50 bp, Artificial
  Synthetic oligonucleotide
atcatcagggcggtacacccaccggacatcgcaggcaggaaacccggaac

SEQ ID NO: 158206 - DNA, 50 bp, Artificial
  Synthetic oligonucleotide
atcagtttgctcgcctcagcaatgcagcgctcggcaggcaactcgacgcg

SEQ ID NO: 158207 - DNA, 50 bp, Artificial
  Synthetic oligonucleotide
aaatctcacatggagggcggggcacccaaccgaatgcgattgcgtacgca

SEQ ID NO: 158208 - DNA, 50 bp, Artificial
  Synthetic oligonucleotide
ctatccgtcttgccctgattcccgccctcgcagcggcttccctcaccggc

SEQ ID NO: 158209 - DNA, 50 bp, Artificial
  Synthetic oligonucleotide
ttccagtgtaacccgcgcgaggcgtcacctccttggtggaaacctgcgag

SEQ ID NO: 158210 - DNA, 55 bp, Artificial
  Synthetic oligonucleotide
gaatccgccagatttccaacattctgtatctgtcacccgtcctggcatgggtgct

SEQ ID NO: 158211 - DNA, 50 bp, Artificial
  Synthetic oligonucleotide
gcgcagaattcgagcacgcactatccaggcatcggcagagacgctacgcc

SEQ ID NO: 158212 - DNA, 50 bp, Artificial
  Synthetic oligonucleotide
aaatgcatgtacgagcgtgccatcagcggagctgcacccgtcgcagacat

SEQ ID NO: 158213 - DNA, 50 bp, Artificial
  Synthetic oligonucleotide
agccgtaccggcagtatgttggataccctaccggggacgcatcggcccat

SEQ ID NO: 158214 - DNA, 50 bp, Artificial
  Synthetic oligonucleotide
ctcttgggctattgcctggaaggcgctacgggccgtctcaccatactcgg

SEQ ID NO: 158215 - DNA, 50 bp, Artificial
  Synthetic oligonucleotide
caatcgctgcgtctgcaacgtgctgggaagatgcggggcgggggtatggt

SEQ ID NO: 158216 - DNA, 50 bp, Artificial
  Synthetic oligonucleotide
aaatgccttacgctcgggcgttccagttccacgcaccatgtcctgccgtg

SEQ ID NO: 158217 - DNA, 50 bp, Artificial
  Synthetic oligonucleotide
caatcgggacccatgtcaccttgcctcctagcgaaaccggcgcatcaagc

SEQ ID NO: 158218 - DNA, 50 bp, Artificial
  Synthetic oligonucleotide
attcgctggctcggcaatcatgcgagacagtctggcagcgcgacgcttaa

SEQ ID NO: 158219 - DNA, 50 bp, Artificial
  Synthetic oligonucleotide
aaattcagtccacggggcgggaaatggacgtggccattcaaggcgagggc

SEQ ID NO: 158220 - DNA, 50 bp, Artificial
  Synthetic oligonucleotide
ccgcccgcggtgcagctacgttcggccgtcacttgcaaatgattctccat

SEQ ID NO: 158221 - DNA, 55 bp, Artificial
  Synthetic oligonucleotide
gaatccgtatcgtgtttggcgtgaggtttcgtgcgggagcgctggcttgcaccgc

SEQ ID NO: 158222 - DNA, 50 bp, Artificial
  Synthetic oligonucleotide
attcgcggcggccgattgcaagtagtgggccaggctcgacagatgactct

SEQ ID NO: 158223 - DNA, 50 bp, Artificial
  Synthetic oligonucleotide
attcgagtccctttggtccgccactcgtgacctcgcgcacaccggaatgt

SEQ ID NO: 158224 - DNA, 50 bp, Artificial
  Synthetic oligonucleotide
ttatgcgcataaaggagtcgcatgaaaccctcccagtttgcaaaaggatt

SEQ ID NO: 158225 - DNA, 50 bp, Artificial
  Synthetic oligonucleotide
agccgtatcggcacaactggaacctattgccttgtctcgtcggggcggtt

SEQ ID NO: 158226 - DNA, 50 bp, Artificial
  Synthetic oligonucleotide
aaaggcttggggttggctgacagcttcttgggtgcagtgctgcccaatcc

SEQ ID NO: 158227 - DNA, 50 bp, Artificial
  Synthetic oligonucleotide
agccgaacggcacggttacccatgacccatagcatcgatcaaagccccgc

SEQ ID NO: 158228 - DNA, 50 bp, Artificial
  Synthetic oligonucleotide
ttcgcgtgggaggagatccgattctacacgcccggagagcgggaatggcg

SEQ ID NO: 158229 - DNA, 50 bp, Artificial
  Synthetic oligonucleotide
ccgcgccgaatcgggtcaatgcagcttcgtagagcgtccagacagcgggc

SEQ ID NO: 158230 - DNA, 50 bp, Artificial
  Synthetic oligonucleotide
ccgtaaagttgtgacgtcagaggtgtttggcaagtagtgatcttgcgacg

SEQ ID NO: 158231 - DNA, 50 bp, Artificial
  Synthetic oligonucleotide
aaagtgaagtccttgcgctcatgcggtccgaactcatcgggcaagccggg

SEQ ID NO: 158232 - DNA, 55 bp, Artificial
  Synthetic oligonucleotide
gaatcgccggagatcgtcctcggtaaacggagagtccgctggattaatccccggc

SEQ ID NO: 158233 - DNA, 50 bp, Artificial
  Synthetic oligonucleotide
aaagtgcgcgcaggcatttctaccacacatccggcgttctcgcctacggg

SEQ ID NO: 158234 - DNA, 50 bp, Artificial
  Synthetic oligonucleotide
aaataccacacggtgcgcgctgacctttgcgacagcacgcagctacatga

SEQ ID NO: 158235 - DNA, 50 bp, Artificial
  Synthetic oligonucleotide
agccggtgcgaggggcgatccattggacaagaatcgcaggcgcttgtcta

SEQ ID NO: 158236 - DNA, 50 bp, Artificial
  Synthetic oligonucleotide
aaataggaggccccatggcgccacccgtagttgacctgtccaacccagaa

SEQ ID NO: 158237 - DNA, 50 bp, Artificial
  Synthetic oligonucleotide
attgccaggcttgggcgggtgcaaccagggcttgtaatgaaggattggga

SEQ ID NO: 158238 - DNA, 50 bp, Artificial
  Synthetic oligonucleotide
ttcctcccagctcgcctttaactccgtcagcacggtaggctgagccgcgc

SEQ ID NO: 158239 - DNA, 50 bp, Artificial
  Synthetic oligonucleotide
aaatccctgagcctcgcaatgcactgcaaacccggggttattcagccccc

SEQ ID NO: 158240 - DNA, 50 bp, Artificial
  Synthetic oligonucleotide
aaatcgcctgcgcccgccctgggaacgtctcgtcgtaatccgcaccgtat

SEQ ID NO: 158241 - DNA, 50 bp, Artificial
  Synthetic oligonucleotide
aaatcggctggggcaagattcgccccggagaatgggcggagttcgaaacg

SEQ ID NO: 158242 - DNA, 50 bp, Artificial
  Synthetic oligonucleotide
attgacccgagacgacgcaagccataatgctgcggatgtgaccgcgaggc

SEQ ID NO: 158243 - DNA, 55 bp, Artificial
  Synthetic oligonucleotide
gaatgaaatattcggtcgggagagtttcagccatgagggtacccaagtgacggcc

SEQ ID NO: 158244 - DNA, 50 bp, Artificial
  Synthetic oligonucleotide
tgttcgccacgcggacttgaagccggccgacgtgtagttaaacaccgggc

SEQ ID NO: 158245 - DNA, 50 bp, Artificial
  Synthetic oligonucleotide
attacggctaattgggggcgttcattggcggtccctgttcccgccaccca

SEQ ID NO: 158246 - DNA, 50 bp, Artificial
  Synthetic oligonucleotide
tgtgcctcgcgtgttcgtggtaacggcgcccttgtacacccagtgcccgt

SEQ ID NO: 158247 - DNA, 50 bp, Artificial
  Synthetic oligonucleotide
agcccccgacacagattggcccaagaaacccatcacggcgatcctcccct

SEQ ID NO: 158248 - DNA, 50 bp, Artificial
  Synthetic oligonucleotide
atgtgggtcgtgccgactgggggaccgcgcaccgtcgctggctaagcgcg

SEQ ID NO: 158249 - DNA, 50 bp, Artificial
  Synthetic oligonucleotide
aacacgtcagcatcacgtttctccacccacacgctaccccgacacaggcg

SEQ ID NO: 158250 - DNA, 50 bp, Artificial
  Synthetic oligonucleotide
aacactaatcatacgatcactgcccaccgggccgtgagccctccgagggg

SEQ ID NO: 158251 - DNA, 50 bp, Artificial
  Synthetic oligonucleotide
aacactggccacggtcatcttggttggactctgtcggctgcgactgccga

SEQ ID NO: 158252 - DNA, 50 bp, Artificial
  Synthetic oligonucleotide
aacagactacggtcctcgctcgcccaacgcgagagatggcaactgccgca

SEQ ID NO: 158253 - DNA, 50 bp, Artificial
  Synthetic oligonucleotide
aacaggagcgctgtgcacacatttcgtgcctaagccccgcccggacgaag

SEQ ID NO: 158254 - DNA, 55 bp, Artificial
  Synthetic oligonucleotide
cgaaaacaggtagttgacgggtgcgtttgctgtgcgcaggatggtgacaggtccg

SEQ ID NO: 158255 - DNA, 50 bp, Artificial
  Synthetic oligonucleotide
ctgcgttggagacccattcgacgcttcgcaagggcggtgtttcgcctgta

SEQ ID NO: 158256 - DNA, 50 bp, Artificial
  Synthetic oligonucleotide
ccgcagtgaagcggccacctcagccttccttataagttctatctcgagta

SEQ ID NO: 158257 - DNA, 50 bp, Artificial
  Synthetic oligonucleotide
aacagttgcagcgtgtcagcggggacactcggtacaggcagatcgagtga

SEQ ID NO: 158258 - DNA, 50 bp, Artificial
  Synthetic oligonucleotide
aacatcgtcgagttttgcgtcaatgcaggcgacgtgctgcttcgccaggg

SEQ ID NO: 158259 - DNA, 50 bp, Artificial
  Synthetic oligonucleotide
aacatctcgctccagttctcgcgctaatccccgcaagctgattggcccga

SEQ ID NO: 158260 - DNA, 50 bp, Artificial
  Synthetic oligonucleotide
aacattagacgtcccccacgcgaatccccgacttgacgcttggacgaccc

SEQ ID NO: 158261 - DNA, 50 bp, Artificial
  Synthetic oligonucleotide
atgtggggatgatgcatacgttctgagcggcgcaacgccagacacgcaaa

SEQ ID NO: 158262 - DNA, 50 bp, Artificial
  Synthetic oligonucleotide
caatgggcgctgcgaaacgtgtatggcaacccacccacacgcttgtcgcg

SEQ ID NO: 158263 - DNA, 50 bp, Artificial
  Synthetic oligonucleotide
ctagcggacgttattgtccgagcggcccggttagcagcttagcgccctac

SEQ ID NO: 158264 - DNA, 50 bp, Artificial
  Synthetic oligonucleotide
ccgtcgtgtatgtgccgcatactgaaacgtcgactcggccggccttccag

SEQ ID NO: 158265 - DNA, 55 bp, Artificial
  Synthetic oligonucleotide
gaatgcacagcttccgtcggatcctcgggcagctaaagccatacagaccgaactc

SEQ ID NO: 158266 - DNA, 50 bp, Artificial
  Synthetic oligonucleotide
agcccctgtgtaaggtagcgccattggggttctcccgaagctgcccggaa

SEQ ID NO: 158267 - DNA, 50 bp, Artificial
  Synthetic oligonucleotide
aacaacacggagtacagataattaatgatccgcttttgtcaaggtcgccc

SEQ ID NO: 158268 - DNA, 50 bp, Artificial
  Synthetic oligonucleotide
aacaactccgcgagtgttccaatcttgaacacccgctgtcacgcgctggc

SEQ ID NO: 158269 - DNA, 50 bp, Artificial
  Synthetic oligonucleotide
attccaggatcgaacccccagcagcaaatgtcgaccgttccctgcgcacc

SEQ ID NO: 158270 - DNA, 50 bp, Artificial
  Synthetic oligonucleotide
aacaactgaccgcgagctttcgtcccgccgctcgaacatgcattcacgca

SEQ ID NO: 158271 - DNA, 50 bp, Artificial
  Synthetic oligonucleotide
aacaactgtccgcgaacttcccgcaacgatccgttcgctgcctacgctcc

SEQ ID NO: 158272 - DNA, 50 bp, Artificial
  Synthetic oligonucleotide
aacaaggaggctccgatgatttccgctcacctgctggccgtctacgtggc

SEQ ID NO: 158273 - DNA, 50 bp, Artificial
  Synthetic oligonucleotide
ttacgtcacaccagctgcgcccgtccaagcctccgcacccgcgtctaagc

SEQ ID NO: 158274 - DNA, 50 bp, Artificial
  Synthetic oligonucleotide
attcagtacatgacggagtgtttctacgtcagacggacgcacatcgtccc

SEQ ID NO: 158275 - DNA, 50 bp, Artificial
  Synthetic oligonucleotide
attatcacgtcacgcgcatgtagtcagcgaaactccacgtttaccctggt

SEQ ID NO: 158276 - DNA, 55 bp, Artificial
  Synthetic oligonucleotide
cctttgtgtcgaaatggctatgccttggaagaaaagtcctacaacgctctgaagg

SEQ ID NO: 158277 - DNA, 50 bp, Artificial
  Synthetic oligonucleotide
aacaatcggctcccgtcgaaggcatcccccggagcaaacggtgtacggca

SEQ ID NO: 158278 - DNA, 50 bp, Artificial
  Synthetic oligonucleotide
aacaatgagcagcggcgggttcccgtaactttcacggtagggacagcggg

SEQ ID NO: 158279 - DNA, 50 bp, Artificial
  Synthetic oligonucleotide
aacaccccgaggatcatgactgcgactgggggcgagaatcgttccgggcc

SEQ ID NO: 158280 - DNA, 50 bp, Artificial
  Synthetic oligonucleotide
aacaccctcgcttagtgcaacaacctcggttcggttggcgccgtctgcta

SEQ ID NO: 158281 - DNA, 50 bp, Artificial
  Synthetic oligonucleotide
ctgcctgggcttccgtcaaacgcgctgcttgtactgaagacgccggacga

SEQ ID NO: 158282 - DNA, 50 bp, Artificial
  Synthetic oligonucleotide
ctactgaagcttcccgcgccgtgcctaccgtcgctccgcaaagtgcgcat

SEQ ID NO: 158283 - DNA, 50 bp, Artificial
  Synthetic oligonucleotide
aacacgctgtgcgaaagctcccggacggcaggggtgcaacacgagcctga

SEQ ID NO: 158284 - DNA, 50 bp, Artificial
  Synthetic oligonucleotide
tttccgagtatagcagcctagctctgcacacctgttcccatatggcttca

SEQ ID NO: 158285 - DNA, 50 bp, Artificial
  Synthetic oligonucleotide
aaacactggctggcctgcccttcgtcttattcccgcgcgcttcacaactc

SEQ ID NO: 158286 - DNA, 50 bp, Artificial
  Synthetic oligonucleotide
tttccatcggccttcagccgagccacaacggtaagcctggcggccggacg

SEQ ID NO: 158287 - DNA, 55 bp, Artificial
  Synthetic oligonucleotide
gaatggcaccgcccttatagcggggattgttagcaatgatagcgaccgcgcttcc

SEQ ID NO: 158288 - DNA, 50 bp, Artificial
  Synthetic oligonucleotide
caagacgatgcctgactcggaacgccaacctggtacgcgcggggctacgt

SEQ ID NO: 158289 - DNA, 50 bp, Artificial
  Synthetic oligonucleotide
aaaccaacgacgggcgtcagtgaaactaattttgttcccgtcatggacac

SEQ ID NO: 158290 - DNA, 50 bp, Artificial
  Synthetic oligonucleotide
aaaccacgaagtcggaactggcgtcatggccggacaacgtgtcgaagggg

SEQ ID NO: 158291 - DNA, 50 bp, Artificial
  Synthetic oligonucleotide
aaaccagtcagcacgacggtgtatggcatcgcataatcccgttgcggatc

SEQ ID NO: 158292 - DNA, 50 bp, Artificial
  Synthetic oligonucleotide
aaacccaagccgattgggcagttaacgcaccgcgagagatcggagcccaa

SEQ ID NO: 158293 - DNA, 50 bp, Artificial
  Synthetic oligonucleotide
aaacccgcaaaccgcctggcttatggggcgcacgggattcttgctttgca

SEQ ID NO: 158294 - DNA, 50 bp, Artificial
  Synthetic oligonucleotide
aaacccggttttgatgggtgttcgccccaatgcaacagccgacacgccgc

SEQ ID NO: 158295 - DNA, 50 bp, Artificial
  Synthetic oligonucleotide
ccggagcatggtacgtgagcaatcgcggcacgtttgttcggcctgtctcc

SEQ ID NO: 158296 - DNA, 50 bp, Artificial
  Synthetic oligonucleotide
ctcaggaaacgccgtggatggctgaggcgctatcgcatctggtggtacgg

SEQ ID NO: 158297 - DNA, 50 bp, Artificial
  Synthetic oligonucleotide
atttccggaggatctacccacttcgcgggcattggacaccgttggcgcgt

SEQ ID NO: 158298 - DNA, 55 bp, Artificial
  Synthetic oligonucleotide
gaatgggaagctgctgtccgttcgagagcggaacggaagaaccacgacactgacc

SEQ ID NO: 158299 - DNA, 50 bp, Artificial
  Synthetic oligonucleotide
ccggcaaggtagtaacactgctgaaccacggggcaatgcgcaaaggtgcg

SEQ ID NO: 158300 - DNA, 50 bp, Artificial
  Synthetic oligonucleotide
ctcgcgcgggctgccacctagagactgaacgaccgtagcgatcggtacaa

SEQ ID NO: 158301 - DNA, 50 bp, Artificial
  Synthetic oligonucleotide
caagccggctgccgtccccaaccccatcgtgcggctcatagcgccgtaac

SEQ ID NO: 158302 - DNA, 50 bp, Artificial
  Synthetic oligonucleotide
attgtagcggcgccctgcctcgcgttctgtcatgaattgtcaggccggga

SEQ ID NO: 158303 - DNA, 50 bp, Artificial
  Synthetic oligonucleotide
caaatcgtgcacggaaggccaagccttgtctggtacgggcgaccgcacac

SEQ ID NO: 158304 - DNA, 50 bp, Artificial
  Synthetic oligonucleotide
agccgcgatcgctgatgctgaggccatgcggagcactcccaaactgcgct

SEQ ID NO: 158305 - DNA, 50 bp, Artificial
  Synthetic oligonucleotide
ccggaccattgcgctcgattgcactcccctcaggccactggctcatcgag

SEQ ID NO: 158306 - DNA, 50 bp, Artificial
  Synthetic oligonucleotide
aaaaccatccttttggccattcagtctgcccgccgcgctacccgcctcgt

SEQ ID NO: 158307 - DNA, 50 bp, Artificial
  Synthetic oligonucleotide
ctccggcagtactccctttattccgaagctatccgaactcttgccactgc

SEQ ID NO: 158308 - DNA, 50 bp, Artificial
  Synthetic oligonucleotide
aaaacccgtagttgaccgatgggaggccgcctaaaccgtcagcgccctca

SEQ ID NO: 158309 - DNA, 60 bp, Artificial
  Synthetic oligonucleotide
tggcatcttcgctcgttcatccggcgtcatacctcgcgctcgcagcccaaagtagatgaa

SEQ ID NO: 158310 - DNA, 55 bp, Artificial
  Synthetic oligonucleotide
gaatgtagcggcccagagtccggcattctcttgatcagatactgcccatgaacct

SEQ ID NO: 158311 - DNA, 50 bp, Artificial
  Synthetic oligonucleotide
ctccatcccgcgtgggtgcaggatcgcactttgtcggcgaaccttcgtct

SEQ ID NO: 158312 - DNA, 50 bp, Artificial
  Synthetic oligonucleotide
ctccagacgttgcgcccagacggtgttgatctgcatcggaccgtagtccg

SEQ ID NO: 158313 - DNA, 50 bp, Artificial
  Synthetic oligonucleotide
caacgattcctgtcgccacgtgcttccacgaacccgtccctttggggata

SEQ ID NO: 158314 - DNA, 50 bp, Artificial
  Synthetic oligonucleotide
aaaagccggtttgactacggcctccagtggtcgcgggcacaattcgaccc

SEQ ID NO: 158315 - DNA, 50 bp, Artificial
  Synthetic oligonucleotide
ctcgaccggaggagggtactcgggctggttcctcgagctccaagggcaat

SEQ ID NO: 158316 - DNA, 50 bp, Artificial
  Synthetic oligonucleotide
aaaagtgcgcgcaagtataacaagcagcccgactgttgccgattctgcag

SEQ ID NO: 158317 - DNA, 50 bp, Artificial
  Synthetic oligonucleotide
ccgctgcatcgattccgctctggcttagtctgtccttatttgacgaatat

SEQ ID NO: 158318 - DNA, 50 bp, Artificial
  Synthetic oligonucleotide
aaaatacgcctgtgcgggagtgctgccttgcagtgcgccttgcttccata

SEQ ID NO: 158319 - DNA, 50 bp, Artificial
  Synthetic oligonucleotide
aaaatagggggcctgacgactcattagccgccatcggagtgcccgcgttg

SEQ ID NO: 158320 - DNA, 50 bp, Artificial
  Synthetic oligonucleotide
ctcgacggtcacggaccactacctccaacggttcgggctttcgccggaac

SEQ ID NO: 158321 - DNA, 55 bp, Artificial
  Synthetic oligonucleotide
cctttggtgcgaaatctggtgcttggaagctggaaagctgcttgccgcaaggctt

SEQ ID NO: 158322 - DNA, 50 bp, Artificial
  Synthetic oligonucleotide
caatcgacaccggcctacgaaagcgttgcagatccccatcaatgccgcgg

SEQ ID NO: 158323 - DNA, 50 bp, Artificial
  Synthetic oligonucleotide
ccgggttcggacttgcctcttgaaccggtctcggctaaggtatgcgcact

SEQ ID NO: 158324 - DNA, 50 bp, Artificial
  Synthetic oligonucleotide
aaactggacattcgcggcggccgattgcaagtagtgggccaggctcgaca

SEQ ID NO: 158325 - DNA, 50 bp, Artificial
  Synthetic oligonucleotide
attgctggcccctgatacgcattacgggaggcccggtcatcgcaagtggc

SEQ ID NO: 158326 - DNA, 50 bp, Artificial
  Synthetic oligonucleotide
aaagaacgctgccggcccactgttcccgcctgctggaactcgttcgcggg

SEQ ID NO: 158327 - DNA, 50 bp, Artificial
  Synthetic oligonucleotide
aaagcacgtgtggcaacgcgcattgaggctgcttgacggcagcagtacag

SEQ ID NO: 158328 - DNA, 50 bp, Artificial
  Synthetic oligonucleotide
attgctcgcggtgttggtccgcgtatctgcgtgctgtcacctcggtgatt

SEQ ID NO: 158329 - DNA, 50 bp, Artificial
  Synthetic oligonucleotide
aaagcctggtgcgatcttcgcgtgccttcgggcgccactcgacgatcaag

SEQ ID NO: 158330 - DNA, 50 bp, Artificial
  Synthetic oligonucleotide
ccggtaggacggaaaatctgccctcagcgtcctactggcaggacgacagg

SEQ ID NO: 158331 - DNA, 50 bp, Artificial
  Synthetic oligonucleotide
ccgcgcggcggatctaggggaaacaggaaccgaactgccaggagagttca

SEQ ID NO: 158332 - DNA, 55 bp, Artificial
  Synthetic oligonucleotide
gaattctcacagtaagtgagtaaaagtcgcggccagcctcgcagtgactgggtgc

SEQ ID NO: 158333 - DNA, 50 bp, Artificial
  Synthetic oligonucleotide
aaagctcccgcgtcgctgcgtcctgtttgttcgcgatggtgtggaatccg

SEQ ID NO: 158334 - DNA, 50 bp, Artificial
  Synthetic oligonucleotide
attgctagctcggcaggacggcatgtgggtggtcagccccgttgacttgg

SEQ ID NO: 158335 - DNA, 50 bp, Artificial
  Synthetic oligonucleotide
ccgcgcgatttattcccaattcgcacagacgagacctccccgaccagcgc

SEQ ID NO: 158336 - DNA, 50 bp, Artificial
  Synthetic oligonucleotide
ttctctacgcgtggagacacgtcgactcatttccggcacctctctattca

SEQ ID NO: 158337 - DNA, 50 bp, Artificial
  Synthetic oligonucleotide
aaagctccgcgttctcggcgcgtgcagcgtagaactcacacatgactccc

SEQ ID NO: 158338 - DNA, 50 bp, Artificial
  Synthetic oligonucleotide
caatcgctgcgacccgttgagccggtgagagttggctcgcgagttcgcct

SEQ ID NO: 158339 - DNA, 50 bp, Artificial
  Synthetic oligonucleotide
ttcgtttccaggccactttgggtaacgacaatatatccacggttgtgggg

SEQ ID NO: 158340 - DNA, 50 bp, Artificial
  Synthetic oligonucleotide
aaagctcgtaagccagaagcggaggccgcacttaccctcccagagttcga

SEQ ID NO: 158341 - DNA, 50 bp, Artificial
  Synthetic oligonucleotide
aaacgacacctcgtactgggctaaacgcatgtgcaggccccggaccatcg

SEQ ID NO: 158342 - DNA, 50 bp, Artificial
  Synthetic oligonucleotide
aaacgatgaccaggcggcagtaaatggcgacaacggtgcgcgtcgatcgc

SEQ ID NO: 158343 - DNA, 55 bp, Artificial
  Synthetic oligonucleotide
gaattggggcaggtggggcgtatctctgcatgagacacggttcggtaccacatcc

SEQ ID NO: 158344 - DNA, 50 bp, Artificial
  Synthetic oligonucleotide
aaacgccaggatgccaacgcggtctccgagtccaattacgccacgctttg

SEQ ID NO: 158345 - DNA, 50 bp, Artificial
  Synthetic oligonucleotide
ttgctgggaagtccggattcgagcatgtggaccgacaaggagcacgcgca

SEQ ID NO: 158346 - DNA, 50 bp, Artificial
  Synthetic oligonucleotide
ttgcgctgagcttgcgcaaagttgcgaacttgagcctgtgcaaacttgat

SEQ ID NO: 158347 - DNA, 50 bp, Artificial
  Synthetic oligonucleotide
caagccgtacccctggaactcagtcaatacacgcgcagtgctccccacgc

SEQ ID NO: 158348 - DNA, 50 bp, Artificial
  Synthetic oligonucleotide
ccggggtggtgtcccccgtatcgggtttgtctttcgacgatgccagccgt

SEQ ID NO: 158349 - DNA, 50 bp, Artificial
  Synthetic oligonucleotide
aaacgcggcaaactcgaacgcaaacagttccgcaccacctcacgggcacc

SEQ ID NO: 158350 - DNA, 50 bp, Artificial
  Synthetic oligonucleotide
agccgccgcgtacatttggccgataactgggaacaggcaattgacgaggc

SEQ ID NO: 158351 - DNA, 50 bp, Artificial
  Synthetic oligonucleotide
ttgccacggactgttctctggtgcacaaacgtgtatgaacgcggcacggc

SEQ ID NO: 158352 - DNA, 50 bp, Artificial
  Synthetic oligonucleotide
agccgagaagcagatccccaagcagccgcccacgcatggatgcgtaccga

SEQ ID NO: 158353 - DNA, 50 bp, Artificial
  Synthetic oligonucleotide
attggaggttcgcgaccagtcccatgcacaacacgccgatcgcgagttgc

SEQ ID NO: 158354 - DNA, 55 bp, Artificial
  Synthetic oligonucleotide
gaatttagcgctggtaaaacgtgaaaggctgggctaaactaacgggctcgctgcg

SEQ ID NO: 158355 - DNA, 50 bp, Artificial
  Synthetic oligonucleotide
aaacgcttgtgctcgaatcgcaacacaacaagtgcggggtgagccacgcg

SEQ ID NO: 158356 - DNA, 50 bp, Artificial
  Synthetic oligonucleotide
aaacggccccataggtcaacctcgaagctggggactgcggcctcgcttcg

SEQ ID NO: 158357 - DNA, 50 bp, Artificial
  Synthetic oligonucleotide
aaacggcgatgctccggctcgtcattgcctgtgcgactcaccacgtccca

SEQ ID NO: 158358 - DNA, 50 bp, Artificial
  Synthetic oligonucleotide
aaacgtggcacatgctcaacgcggcaacgggcctctttcgtcaatgcggg

SEQ ID NO: 158359 - DNA, 50 bp, Artificial
  Synthetic oligonucleotide
aacggctgccgtcgctggggtgttatggacgggcgcacgatagaacgtcc

SEQ ID NO: 158360 - DNA, 50 bp, Artificial
  Synthetic oligonucleotide
gcgagtctggcaagatagcgcgtcgtttcgtgcgcttcgggccctgttta

SEQ ID NO: 158361 - DNA, 50 bp, Artificial
  Synthetic oligonucleotide
aacgggttgcacaaatatagcgacgcccctccttaaatgcaacgcgttgc

SEQ ID NO: 158362 - DNA, 50 bp, Artificial
  Synthetic oligonucleotide
agcctccaatcgccggacaatcgcatcgtcgggttcccagggtacatgaa

SEQ ID NO: 158363 - DNA, 50 bp, Artificial
  Synthetic oligonucleotide
aacggtggcaaacggaggcaaacgatggcacgcgttcgcgttaacggctt

SEQ ID NO: 158364 - DNA, 50 bp, Artificial
  Synthetic oligonucleotide
aacggttgcagcctccgtccagatgtcgaaggggcatttcctgcgtgtgt

SEQ ID NO: 158365 - DNA, 55 bp, Artificial
  Synthetic oligonucleotide
gacaaccggagaggtgtcagtatagagaacattcatcagttgcccgcagaccctt

SEQ ID NO: 158366 - DNA, 50 bp, Artificial
  Synthetic oligonucleotide
ctttctttgcccctgaatgcggagccactccacccactcaggacgggcac

SEQ ID NO: 158367 - DNA, 50 bp, Artificial
  Synthetic oligonucleotide
cgttcctgtcgtccgcatgttcctattgacctactcgtagctagttcagg

SEQ ID NO: 158368 - DNA, 50 bp, Artificial
  Synthetic oligonucleotide
aacgtaatccgccgacgcacgagactggctggcaagagccccgcctgatg

SEQ ID NO: 158369 - DNA, 50 bp, Artificial
  Synthetic oligonucleotide
tgagcagagctgatcgttctgacgcagccaaattggacgccagcctccgc

SEQ ID NO: 158370 - DNA, 50 bp, Artificial
  Synthetic oligonucleotide
gaaaacggttccgctcgaatatgtcgcgaaggacgatcaaaacaatgaaa

SEQ ID NO: 158371 - DNA, 50 bp, Artificial
  Synthetic oligonucleotide
aacgtatcgccaccccggttacttccgtgtcccagcgacgcgacgcaagt

SEQ ID NO: 158372 - DNA, 50 bp, Artificial
  Synthetic oligonucleotide
aacgtcagggccgacctcatactccacctggtcaaccacgatcctcgcga

SEQ ID NO: 158373 - DNA, 50 bp, Artificial
  Synthetic oligonucleotide
aacgtgaacggcgcgcgatacccatacgcggtgagcgattgggtcacaaa

SEQ ID NO: 158374 - DNA, 50 bp, Artificial
  Synthetic oligonucleotide
atgcctactacgtacccagatcgccggacggtcactactacgtggcgggg

SEQ ID NO: 158375 - DNA, 50 bp, Artificial
  Synthetic oligonucleotide
tgaccgggccccaagattcggagcccttcgtaggggtttcctttcggcgg

SEQ ID NO: 158376 - DNA, 51 bp, Artificial
  Synthetic oligonucleotide
cctgtagaggtcgggtttaacgatacctttggacaaggagaccgcggtacc

SEQ ID NO: 158377 - DNA, 50 bp, Artificial
  Synthetic oligonucleotide
cttgcgcgatggggtgtgcaggagcacgaatggctacggtatcttggccc

SEQ ID NO: 158378 - DNA, 50 bp, Artificial
  Synthetic oligonucleotide
aacgcgggcagtcccatttgcaacggcgccacggctatcggggcactcac

SEQ ID NO: 158379 - DNA, 50 bp, Artificial
  Synthetic oligonucleotide
gcgcgcggcacatgtgttgagcagacaggtttgcactttccgcaacgcaa

SEQ ID NO: 158380 - DNA, 50 bp, Artificial
  Synthetic oligonucleotide
aacgcgtgcacaagctcgctgcgcttccaaccattttggtggggccactt

SEQ ID NO: 158381 - DNA, 50 bp, Artificial
  Synthetic oligonucleotide
aacgctaacgcattgccaggcttgggcgggtgcaaccagggcttgtaatg

SEQ ID NO: 158382 - DNA, 50 bp, Artificial
  Synthetic oligonucleotide
tgcagccgcgatgagcgatccgagggatgaagcggagcgtgaatacgact

SEQ ID NO: 158383 - DNA, 50 bp, Artificial
  Synthetic oligonucleotide
ccgacgtggctaacaggtcagtaatcgggagaggcaatcgacgcgcaggg

SEQ ID NO: 158384 - DNA, 50 bp, Artificial
  Synthetic oligonucleotide
aacgctcgccctaggtcaccaaggtggagcatgattccgtaccacgcgac

SEQ ID NO: 158385 - DNA, 50 bp, Artificial
  Synthetic oligonucleotide
aacgctctcgatcgcccgttccgacacgaccacgtacgcgagccgtaagc

SEQ ID NO: 158386 - DNA, 50 bp, Artificial
  Synthetic oligonucleotide
aacgctgtgtcacaacgtgcgtcattcgcgctcctgaatgctggcaaggc

SEQ ID NO: 158387 - DNA, 55 bp, Artificial
  Synthetic oligonucleotide
gacgcgtcgttcttgtatgcgtcttcgatcgactgtgtgcccagtccgaagatgc

SEQ ID NO: 158388 - DNA, 50 bp, Artificial
  Synthetic oligonucleotide
aacggaacacccgaaccaacgcaacgctaggccgtaggtgccaagaatgc

SEQ ID NO: 158389 - DNA, 50 bp, Artificial
  Synthetic oligonucleotide
cttgcggtgaaattacgcccgctagcctgtgcggccatcctgctaaaggc

SEQ ID NO: 158390 - DNA, 50 bp, Artificial
  Synthetic oligonucleotide
cttgctgtctcgcaagctggtcggcctcagacttggcgggaatatgggcc

SEQ ID NO: 158391 - DNA, 50 bp, Artificial
  Synthetic oligonucleotide
agcatgtgaagcagcgagccatcgagcgacttacgcttgtgccgcatgta

SEQ ID NO: 158392 - DNA, 50 bp, Artificial
  Synthetic oligonucleotide
tgattcccgccctcgcagcggcttccctcaccggctgtatcgacccgcaa

SEQ ID NO: 158393 - DNA, 50 bp, Artificial
  Synthetic oligonucleotide
atgcgggccggtgaaatggaagtccactcagtgtagacgcaacgccacct

SEQ ID NO: 158394 - DNA, 50 bp, Artificial
  Synthetic oligonucleotide
aacggctccaggcgaccaccctcgcgcaaagtcaagatatcgcggtgacc

SEQ ID NO: 158395 - DNA, 50 bp, Artificial
  Synthetic oligonucleotide
cgttgccactcgcatgttcgcgacaggggctaggcggaggcgttatctta

SEQ ID NO: 158396 - DNA, 50 bp, Artificial
  Synthetic oligonucleotide
tcttgattctggcgtctgtgtatcttctggacggatgaagcgcgtagata

SEQ ID NO: 158397 - DNA, 50 bp, Artificial
  Synthetic oligonucleotide
aactccgggccacatcgtgcttcgtgaccagaaacccatgccgcccgacc

SEQ ID NO: 158398 - DNA, 55 bp, Artificial
  Synthetic oligonucleotide
cctggtgtatgtgtttgcctgggccgtcgcagacacgagctcctttacagagccg

SEQ ID NO: 158399 - DNA, 50 bp, Artificial
  Synthetic oligonucleotide
aactcggggcaccaagctatgttgcgtggacagccaaccctgactgccgg

SEQ ID NO: 158400 - DNA, 50 bp, Artificial
  Synthetic oligonucleotide
gaactccccgccaagacgatacgcccgcttgtagacgcaaacatgccccg

SEQ ID NO: 158401 - DNA, 50 bp, Artificial
  Synthetic oligonucleotide
tcttagtgatttgccacataattcgcaaaaactatattgcaatttccaat

SEQ ID NO: 158402 - DNA, 50 bp, Artificial
  Synthetic oligonucleotide
aactcttgtgcctgcgcgcttgtgatttgcgtggcaacggacgcattgta

SEQ ID NO: 158403 - DNA, 50 bp, Artificial
  Synthetic oligonucleotide
gaactggctcgccctccggcgtagcactccaaatcttgcgcgctaagcga

SEQ ID NO: 158404 - DNA, 50 bp, Artificial
  Synthetic oligonucleotide
cacccatgcgcgttgaaacgagtcgcttcatcatttggcgggctccccat

SEQ ID NO: 158405 - DNA, 50 bp, Artificial
  Synthetic oligonucleotide
cacccccgacgagtcatgagcccccttctgagcccgcctttgctcgtcca

SEQ ID NO: 158406 - DNA, 50 bp, Artificial
  Synthetic oligonucleotide
aactgcagcgaaagcggacccggttcgtagcggcccgacagatgatcgcg

SEQ ID NO: 158407 - DNA, 50 bp, Artificial
  Synthetic oligonucleotide
atgaccggggcagcaccctgttgattcggtggcgttgcatggttgccgga

SEQ ID NO: 158408 - DNA, 50 bp, Artificial
  Synthetic oligonucleotide
atgacagggcgtgctcacccctcggttccggactgtcgcgtacctggacc

SEQ ID NO: 158409 - DNA, 55 bp, Artificial
  Synthetic oligonucleotide
cctggcgtcgctgcgaatgcgatctacgcatctaaccctgtcatctatcccgagg

SEQ ID NO: 158410 - DNA, 50 bp, Artificial
  Synthetic oligonucleotide
cctggaaggcgctacgggccgtctcaccatactcggaacgcaagcgagat

SEQ ID NO: 158411 - DNA, 50 bp, Artificial
  Synthetic oligonucleotide
aactggcctgccgagcaattgactgcgcaccacagcatgtgcccttgctg

SEQ ID NO: 158412 - DNA, 50 bp, Artificial
  Synthetic oligonucleotide
aactggcgacttgcggacccctcgcatgaagcagcgtgggccaagcttcg

SEQ ID NO: 158413 - DNA, 50 bp, Artificial
  Synthetic oligonucleotide
atgacactgaacgtccgtatgaatctgcccgccgtccggtgttcggagga

SEQ ID NO: 158414 - DNA, 50 bp, Artificial
  Synthetic oligonucleotide
aacttccggggacttcaggccacggcgaaaagtgccgaagccgcaatttt

SEQ ID NO: 158415 - DNA, 50 bp, Artificial
  Synthetic oligonucleotide
tgaccggagagctgttcagttgccgctcggtcataaagagcttgtgacac

SEQ ID NO: 158416 - DNA, 50 bp, Artificial
  Synthetic oligonucleotide
aacgtgaatcgctaactcgcgccccgtcccgagtgcgagaggatagggtg

SEQ ID NO: 158417 - DNA, 50 bp, Artificial
  Synthetic oligonucleotide
atgcccgtttctgaacgcaaaccagccgtcgtctgtgtctgcatcgcccg

SEQ ID NO: 158418 - DNA, 50 bp, Artificial
  Synthetic oligonucleotide
aacgttcggaatcgtccgagcactaatgcgaacgccccgccccctgctat

SEQ ID NO: 158419 - DNA, 50 bp, Artificial
  Synthetic oligonucleotide
aacgttgcgcgaagccttgggggtagcactacctacgcctcggacgtgaa

SEQ ID NO: 158420 - DNA, 56 bp, Artificial
  Synthetic oligonucleotide
gaagccccaaactcgttcatagaggaaccgtgcatacgggtacagcagggtgttta

SEQ ID NO: 158421 - DNA, 55 bp, Artificial
  Synthetic oligonucleotide
cctggaagtgcgtgggatcgacgaaagatttgaagccagcgagtttgatcgagct

SEQ ID NO: 158422 - DNA, 50 bp, Artificial
  Synthetic oligonucleotide
gaaacttgtcgtgttccgccataccggctatggttgggtgccgtttacct

SEQ ID NO: 158423 - DNA, 50 bp, Artificial
  Synthetic oligonucleotide
atgcccaggcattggctgatcaagtgaccgcacgcgctcaattggccggc

SEQ ID NO: 158424 - DNA, 50 bp, Artificial
  Synthetic oligonucleotide
atgcatgggcgccgctcgtgtagatccccgccacaagatagcaccgatac

SEQ ID NO: 158425 - DNA, 50 bp, Artificial
  Synthetic oligonucleotide
aactacgagacggcttcggtgtatggtttcggccatccgttgtactatca

SEQ ID NO: 158426 - DNA, 50 bp, Artificial
  Synthetic oligonucleotide
cacccactccatcgcaccgggcatcacacgcgcgtcccacgtatgcaaac

SEQ ID NO: 158427 - DNA, 50 bp, Artificial
  Synthetic oligonucleotide
atgcaaatgacgtatgcgagtggctttgcatgtcggcgcctgctggcaca

SEQ ID NO: 158428 - DNA, 50 bp, Artificial
  Synthetic oligonucleotide
aactcacgggggcagcagatcaatgaccccagacgcgacccggcattgac

SEQ ID NO: 158429 - DNA, 50 bp, Artificial
  Synthetic oligonucleotide
tctttgtcgccggcagatgggctatccgaacgcgcaggtcgatgttttcc

SEQ ID NO: 158430 - DNA, 50 bp, Artificial
  Synthetic oligonucleotide
atgagcgacaacttgggcggcacctcttgccaggccatttgcaatgcaca

SEQ ID NO: 158431 - DNA, 50 bp, Artificial
  Synthetic oligonucleotide
agcaggtctgagcacccgatctgcaacggtatagccccgctgcaagactg

SEQ ID NO: 158432 - DNA, 55 bp, Artificial
  Synthetic oligonucleotide
gacgcgtgcaatccttgcggggaatactaacgggcatcctgccgcctggcaatcg

SEQ ID NO: 158433 - DNA, 50 bp, Artificial
  Synthetic oligonucleotide
ccgaacgctcagacgcgcacggagggctgtggttacattcgcaacagacg

SEQ ID NO: 158434 - DNA, 50 bp, Artificial
  Synthetic oligonucleotide
aactccaaccccgttcactgggtttagccagcgtaccgcttgccccgagg

SEQ ID NO: 158435 - DNA, 50 bp, Artificial
  Synthetic oligonucleotide
tggcccaaccttctgcggaggattgtccttcccccggatgtggatctccc

SEQ ID NO: 158436 - DNA, 50 bp, Artificial
  Synthetic oligonucleotide
ctaagcgattggtggagactggtgggcaactggcaagagcgcgcacctta

SEQ ID NO: 158437 - DNA, 50 bp, Artificial
  Synthetic oligonucleotide
aaccggcttcggatacgcacgttactgtgggagcgcctagatgccgacgc

SEQ ID NO: 158438 - DNA, 50 bp, Artificial
  Synthetic oligonucleotide
cacaactggcgtttgccccttgagtgcgaagctcgtgccgctgatgtgat

SEQ ID NO: 158439 - DNA, 50 bp, Artificial
  Synthetic oligonucleotide
tggcacgcagatggacgatcgctggtaccgagaggcttcgtaccggacgt

SEQ ID NO: 158440 - DNA, 50 bp, Artificial
  Synthetic oligonucleotide
aaccgggcttcgtgcccgtaggaacaaagcggggcaatcacttccagagc

SEQ ID NO: 158441 - DNA, 50 bp, Artificial
  Synthetic oligonucleotide
cggatagaccctgcccttccgaaacctcggctacggcatctgaggcaccc

SEQ ID NO: 158442 - DNA, 50 bp, Artificial
  Synthetic oligonucleotide
aaccgtctgcccctgtgtccgttgccgagcccgataggggtttcaaccct

SEQ ID NO: 158443 - DNA, 55 bp, Artificial
  Synthetic oligonucleotide
cctgcgcatccgtacgagctcttggcggtaatgatgcgctacttcaggggactcc

SEQ ID NO: 158444 - DNA, 50 bp, Artificial
  Synthetic oligonucleotide
ccgatgacggtgctgtgaacggagttgtagtccggaaagaggacggccgg

SEQ ID NO: 158445 - DNA, 50 bp, Artificial
  Synthetic oligonucleotide
aacctcattctgaagtgtccgaaagacgtcaatccggagctgctactccg

SEQ ID NO: 158446 - DNA, 50 bp, Artificial
  Synthetic oligonucleotide
cacaagcctcaaacgcggcgtcctctatcgggtgcaactcgacccgaccg

SEQ ID NO: 158447 - DNA, 50 bp, Artificial
  Synthetic oligonucleotide
cacaccgccagaagtcatccgggcaacctatgccgcatctacgatgcgta

SEQ ID NO: 158448 - DNA, 50 bp, Artificial
  Synthetic oligonucleotide
ccgatgacgggtcgccggatctctcctgcggtcatgattatccccgttga

SEQ ID NO: 158449 - DNA, 50 bp, Artificial
  Synthetic oligonucleotide
atggttgccggaatccgcattcgtacctgttcctgccttgccgttggccg

SEQ ID NO: 158450 - DNA, 50 bp, Artificial
  Synthetic oligonucleotide
agccatgagatgtcgccaagcggggcaaaattgtgccgttccgtgcctaa

SEQ ID NO: 158451 - DNA, 50 bp, Artificial
  Synthetic oligonucleotide
agccatacatacgcaatcagcgcgccccaaagcggggccgttgcattcag

SEQ ID NO: 158452 - DNA, 50 bp, Artificial
  Synthetic oligonucleotide
cagttgaatccacccggtcgcacgccctcgatcgtccggcctcgcatgtt

SEQ ID NO: 158453 - DNA, 50 bp, Artificial
  Synthetic oligonucleotide
ctgtgcacggggcttacagcctgggcggatgtatataagtgcccggcgga

SEQ ID NO: 158454 - DNA, 55 bp, Artificial
  Synthetic oligonucleotide
cctgcgagcgacctttgggctcaatacggtcgacgcgatgacagcgagcaagacg

SEQ ID NO: 158455 - DNA, 50 bp, Artificial
  Synthetic oligonucleotide
aacccccagcagcaaatgtcgaccgttccctgcgcacccatcaggtctgt

SEQ ID NO: 158456 - DNA, 50 bp, Artificial
  Synthetic oligonucleotide
aaccccgccgcgtgacagctgtggaacagccctaaggccattacgatgcg

SEQ ID NO: 158457 - DNA, 50 bp, Artificial
  Synthetic oligonucleotide
tgggggcgttcattggcggtccctgttcccgccacccaatccgcttggaa

SEQ ID NO: 158458 - DNA, 50 bp, Artificial
  Synthetic oligonucleotide
ccgcaccctgattgatcgcttgctcgtcgcgtgtggaagtgcgtcgtagc

SEQ ID NO: 158459 - DNA, 50 bp, Artificial
  Synthetic oligonucleotide
tgggctggaatcggagccaacccatatcgcgatgcaccggattggtcggg

SEQ ID NO: 158460 - DNA, 50 bp, Artificial
  Synthetic oligonucleotide
aacccgcatgtgaggcgattgtgtagtgagggcactcgccccaagctgcc

SEQ ID NO: 158461 - DNA, 50 bp, Artificial
  Synthetic oligonucleotide
aacccggggataccggtggtggaagccgcctccacgatatcgttgtgcgc

SEQ ID NO: 158462 - DNA, 50 bp, Artificial
  Synthetic oligonucleotide
ctggatggtggcgaaaccggtatcacgcccctgcgcctgtgggaagtcat

SEQ ID NO: 158463 - DNA, 50 bp, Artificial
  Synthetic oligonucleotide
aacccgtcgcgaggcatcatgctctccttatccctacgcaggacgtcgcc

SEQ ID NO: 158464 - DNA, 50 bp, Artificial
  Synthetic oligonucleotide
atgtgccgttggaccccagctaccccgcagagcgcactgcctatatcttg

SEQ ID NO: 158465 - DNA, 55 bp, Artificial
  Synthetic oligonucleotide
gacgctaatgtgaataacgctcgtgaccaaatcgaggaagatccggttatggtgt

SEQ ID NO: 158466 - DNA, 50 bp, Artificial
  Synthetic oligonucleotide
aaccgacgtgctggacgaaaacagacgtcacgctaaccgcaatcgggcgc

SEQ ID NO: 158467 - DNA, 50 bp, Artificial
  Synthetic oligonucleotide
aaccgatctgcgcggaggggcgtaaattcgcaagggtgtgaatacgcgcg

SEQ ID NO: 158468 - DNA, 50 bp, Artificial
  Synthetic oligonucleotide
cagtgcatggttccggcctacatctaagcgtggcagaacatggttgaact

SEQ ID NO: 158469 - DNA, 50 bp, Artificial
  Synthetic oligonucleotide
aaccggatgcgatccaggctgtagcggggtggagaccgccacgacctcag

SEQ ID NO: 158470 - DNA, 50 bp, Artificial
  Synthetic oligonucleotide
atgtccgaactgaacacctgtttgggctcaactagcgtgaactcgcgatt

SEQ ID NO: 158471 - DNA, 50 bp, Artificial
  Synthetic oligonucleotide
aaccggcagatgaatccgcttggagcattcggtcgccctcaattgcggta

SEQ ID NO: 158472 - DNA, 50 bp, Artificial
  Synthetic oligonucleotide
aacgcaaacagttccgcaccacctcacgggcaccatctagccaacgcata

SEQ ID NO: 158473 - DNA, 50 bp, Artificial
  Synthetic oligonucleotide
tgcgcccggctcctttccagtgtaacccgcgcgaggcgtcacctccttgg

SEQ ID NO: 158474 - DNA, 50 bp, Artificial
  Synthetic oligonucleotide
cttccgacgtacggtcccatcgacgaacgtggcaacgcagaaggccaacg

SEQ ID NO: 158475 - DNA, 50 bp, Artificial
  Synthetic oligonucleotide
atgctggacaacggtgcgtacttgcggtcgggcacgaagagttaccgtgc

SEQ ID NO: 158476 - DNA, 55 bp, Artificial
  Synthetic oligonucleotide
gacgctcggcagcattcaacacagcctccctacatactcaacgaaggaattcgcc

SEQ ID NO: 158477 - DNA, 50 bp, Artificial
  Synthetic oligonucleotide
cgtttaaccggttgatcgcgcccctcggctaccggcctcctgttggatcc

SEQ ID NO: 158478 - DNA, 50 bp, Artificial
  Synthetic oligonucleotide
aacgcaccttgaggcagattcgtgccgtcgccgcaagcgttgtcgagttg

SEQ ID NO: 158479 - DNA, 50 bp, Artificial
  Synthetic oligonucleotide
tgccttagcggcgggtgcggagtgtgtaaggtcgcggtgtgcagaggcag

SEQ ID NO: 158480 - DNA, 50 bp, Artificial
  Synthetic oligonucleotide
atgctatgccgtagtccgttcggcggtgcgttcaacaggccagcgaacga

SEQ ID NO: 158481 - DNA, 50 bp, Artificial
  Synthetic oligonucleotide
agccgttcttaagcgcgtcattgtgcaaaacgtagcccctacaggcgccg

SEQ ID NO: 158482 - DNA, 50 bp, Artificial
  Synthetic oligonucleotide
aacgcccccacgcattgccgttcatgcgctccgtctgcacccgtcgggaa

SEQ ID NO: 158483 - DNA, 50 bp, Artificial
  Synthetic oligonucleotide
aacgcccctcacgacatgtcccgacaaagcgctcttacccttgcccgtac

SEQ ID NO: 158484 - DNA, 50 bp, Artificial
  Synthetic oligonucleotide
cacacgcgcgtcccacgtatgcaaaccgtctgccacctgactagccacgg

SEQ ID NO: 158485 - DNA, 50 bp, Artificial
  Synthetic oligonucleotide
cttgcagaggagcgaagcgtcgtaatcagggtaagcggggatgccaccct

SEQ ID NO: 158486 - DNA, 50 bp, Artificial
  Synthetic oligonucleotide
aacgccgtctgataacatatttagtctccagttacacatgcgcagttgca

SEQ ID NO: 158487 - DNA, 55 bp, Artificial
  Synthetic oligonucleotide
gacggccaatgtcaccacggtgcactggagattcgcgctggagtacagcacgctg

SEQ ID NO: 158488 - DNA, 50 bp, Artificial
  Synthetic oligonucleotide
tgccccgtgttgctttcgggtatgtaaaggactctcccatgtacaagaca

SEQ ID NO: 158489 - DNA, 50 bp, Artificial
  Synthetic oligonucleotide
aacgcctccgcctagggcaaccagcatggtttgacgatctgcgccgaatt

SEQ ID NO: 158490 - DNA, 50 bp, Artificial
  Synthetic oligonucleotide
aacgcgcactaaacaactgaccgcgagctttcgtcccgccgctcgaacat

SEQ ID NO: 158491 - DNA, 50 bp, Artificial
  Synthetic oligonucleotide
aacgcgcatgttcgctgccgacaaacccccacacgatgcgtaacaccacg

SEQ ID NO: 158492 - DNA, 50 bp, Artificial
  Synthetic oligonucleotide
aaccttcgtgtccagacgcttccgacgcctgctcggactcctatcctgcg

SEQ ID NO: 158493 - DNA, 50 bp, Artificial
  Synthetic oligonucleotide
atggcgctcgcctggtcgcaagcgtagagaggggcagccatgcacaaatc

SEQ ID NO: 158494 - DNA, 50 bp, Artificial
  Synthetic oligonucleotide
tgcttcggatacagtgcggacgcttggaggcggtagaacgggcatcgcgt

SEQ ID NO: 158495 - DNA, 50 bp, Artificial
  Synthetic oligonucleotide
cttagacgcgggtgcggaggcttggacgggcgcagctggtgtgacgtaag

SEQ ID NO: 158496 - DNA, 50 bp, Artificial
  Synthetic oligonucleotide
cctacgtggtgggcacggaggagaagctgccgtcaacagaggatgggttc

SEQ ID NO: 158497 - DNA, 50 bp, Artificial
  Synthetic oligonucleotide
cttagtggcgactatgcccctagccagctcctgccaaatgcgctctgccg

SEQ ID NO: 158498 - DNA, 55 bp, Artificial
  Synthetic oligonucleotide
cctgcctacaagcgccatacgcaccacttgccgtctcaaccttcaaccagggagc

SEQ ID NO: 158499 - DNA, 50 bp, Artificial
  Synthetic oligonucleotide
tgctgaggccatgcggagcactcccaaactgcgctccttgcaactcgtag

SEQ ID NO: 158500 - DNA, 50 bp, Artificial
  Synthetic oligonucleotide
aaccttggccgccctctgtgcctcacttcgaacgcgaaacagaccgtacg

SEQ ID NO: 158501 - DNA, 50 bp, Artificial
  Synthetic oligonucleotide
agccagcagcgaacgtgtgcacccggctagcggaagaacctctcaagttc

SEQ ID NO: 158502 - DNA, 50 bp, Artificial
  Synthetic oligonucleotide
aacgacccctgctgtctactggcgggtcgtatggacgctccctgttctga

SEQ ID NO: 158503 - DNA, 50 bp, Artificial
  Synthetic oligonucleotide
atggccgaacgaacccaccaggcgatagcgcgtacccggtacatacgcag

SEQ ID NO: 158504 - DNA, 50 bp, Artificial
  Synthetic oligonucleotide
aacgagccgcatggtatgacattgcacgtgccaccaactggaccccaaga

SEQ ID NO: 158505 - DNA, 50 bp, Artificial
  Synthetic oligonucleotide
agccacgggtcccaacgtgacggctgaattcacccgcaagatcactttgc

SEQ ID NO: 158506 - DNA, 50 bp, Artificial
  Synthetic oligonucleotide
aacgagcgaaaaccatccttttggccattcagtctgcccgccgcgctacc

SEQ ID NO: 158507 - DNA, 50 bp, Artificial
  Synthetic oligonucleotide
aacgagcgttccgagacccggcgacttcgtgcttcccgtcgttccgccct

SEQ ID NO: 158508 - DNA, 50 bp, Artificial
  Synthetic oligonucleotide
tgcggagtgtgtaaggtcgcggtgtgcagaggcagcgtgcgcaaaactgg

SEQ ID NO: 158509 - DNA, 55 bp, Artificial
  Synthetic oligonucleotide
gacggcttggcggggcatgctctgagggctcgtaagcgacagcgcaagtgtaaac

SEQ ID NO: 158510 - DNA, 50 bp, Artificial
  Synthetic oligonucleotide
aacgataagaagccggcgagtgccttgcgcccgaccagtccgctgcgagt

SEQ ID NO: 158511 - DNA, 50 bp, Artificial
  Synthetic oligonucleotide
atggcacagcgtggggtggcatgcggcagtgacgaacttgtggtgacgac

SEQ ID NO: 158512 - DNA, 50 bp, Artificial
  Synthetic oligonucleotide
aacgatcgaaggcacccgtagacgctggtccgtcgaacgaatcgccccga

SEQ ID NO: 158513 - DNA, 50 bp, Artificial
  Synthetic oligonucleotide
cagctggacccaatgaaccagcgccccaacgggaatggtcgaaggcacgc

SEQ ID NO: 158514 - DNA, 50 bp, Artificial
  Synthetic oligonucleotide
aggcggtgtctcatcagagagcgcagcgacaaacggcggtagcacgttga

SEQ ID NO: 158515 - DNA, 50 bp, Artificial
  Synthetic oligonucleotide
aggcgggcggtgcttcgctacctctgtccagcatgcgtcgggaaaccaga

SEQ ID NO: 158516 - DNA, 50 bp, Artificial
  Synthetic oligonucleotide
acggcgcactctcacccacccgtgtcccatgatcgaaagcagccctccgg

SEQ ID NO: 158517 - DNA, 50 bp, Artificial
  Synthetic oligonucleotide
acggcgtagtggaaagagcgggcagtgtaaccgacgctccgaccctccga

SEQ ID NO: 158518 - DNA, 50 bp, Artificial
  Synthetic oligonucleotide
acggcgtgtaggggtttgcccttgaacggccgggacgggtctgtccttag

SEQ ID NO: 158519 - DNA, 50 bp, Artificial
  Synthetic oligonucleotide
acggcgttccagccacatcgctgtccggtagtggtgcgaaagacaccaga

SEQ ID NO: 158520 - DNA, 52 bp, Artificial
  Synthetic oligonucleotide
gacgtggaattttgggacccgagagggataaccgataacaagtcgttcaggt

SEQ ID NO: 158521 - DNA, 50 bp, Artificial
  Synthetic oligonucleotide
acggcgtttggccgtgatttgagcccgtttgtgcggcgcctagatcagca

SEQ ID NO: 158522 - DNA, 50 bp, Artificial
  Synthetic oligonucleotide
aggcggcgtctgcggtctgtcggatagagagcccggtactcgtcgagtcc

SEQ ID NO: 158523 - DNA, 50 bp, Artificial
  Synthetic oligonucleotide
acggctgcatcgaagcagggttgctcgctgtttgccgctctattcggcgc

SEQ ID NO: 158524 - DNA, 50 bp, Artificial
  Synthetic oligonucleotide
ggccgttgtgccctgatgacacagagtagtacggcagccgtcacgtgcaa

SEQ ID NO: 158525 - DNA, 50 bp, Artificial
  Synthetic oligonucleotide
acggcttgcacgcttttccgtcgtacatggacgcccctcggcttgccaag

SEQ ID NO: 158526 - DNA, 50 bp, Artificial
  Synthetic oligonucleotide
acggcttgcctactcccttgcgaccctcggccgaaaccatccaggcctat

SEQ ID NO: 158527 - DNA, 50 bp, Artificial
  Synthetic oligonucleotide
acgggaaaaagcacggcaatctgtctggcccacccatctggtggagcgag

SEQ ID NO: 158528 - DNA, 50 bp, Artificial
  Synthetic oligonucleotide
acgggaaccacgggacgttgactcgccatgcccacagcaaccagtccgtg

SEQ ID NO: 158529 - DNA, 50 bp, Artificial
  Synthetic oligonucleotide
ggccgaatacaagggatccgtgaaatcgtgatgcgccgctaaccgccacc

SEQ ID NO: 158530 - DNA, 50 bp, Artificial
  Synthetic oligonucleotide
ggccgaacagtcgacgcagctcgcctaatcggcacgacgtcgcttaacgg

SEQ ID NO: 158531 - DNA, 55 bp, Artificial
  Synthetic oligonucleotide
aagggggagcacgtcgacatttgccggcggcccaaaaggcgaggaggcctcacga

SEQ ID NO: 158532 - DNA, 55 bp, Artificial
  Synthetic oligonucleotide
gactatctccggcacgattgcgcgtttattcgatgggcaccgctttcagaccgtg

SEQ ID NO: 158533 - DNA, 50 bp, Artificial
  Synthetic oligonucleotide
aggcgaaggcatcagcccacgctcccgccaccgtcatgcagggacgcatg

SEQ ID NO: 158534 - DNA, 50 bp, Artificial
  Synthetic oligonucleotide
acgctcgccgtcgcaggaggagtatccggtgccatgagcggccacgaccc

SEQ ID NO: 158535 - DNA, 50 bp, Artificial
  Synthetic oligonucleotide
agaggccaggtctctcgattgcacgtcactacgccaagcattgcgtcgga

SEQ ID NO: 158536 - DNA, 50 bp, Artificial
  Synthetic oligonucleotide
acgctcgtccgccacagtattcattccgcccatcacggcgtgaaagccgc

SEQ ID NO: 158537 - DNA, 50 bp, Artificial
  Synthetic oligonucleotide
agggacgcgtaagctgccctgactcggggattcaatttacgccgcaaccg

SEQ ID NO: 158538 - DNA, 50 bp, Artificial
  Synthetic oligonucleotide
acgcttccaacgtcactgttctggttggaccacgcagcgtcaactggcgc

SEQ ID NO: 158539 - DNA, 50 bp, Artificial
  Synthetic oligonucleotide
agggaagcgtatgggtccattcgacgacgccacatgtacgcagctcacgc

SEQ ID NO: 158540 - DNA, 50 bp, Artificial
  Synthetic oligonucleotide
acggaacgtctgtgcgggcgtaactcggcggatagccagtcacgggatca

SEQ ID NO: 158541 - DNA, 50 bp, Artificial
  Synthetic oligonucleotide
aggctgtaacggggatatcgagtgcggtgggcccggtaagatgggcttgt

SEQ ID NO: 158542 - DNA, 50 bp, Artificial
  Synthetic oligonucleotide
acggaagcgcggcggtcctaggccaaggcgaagacatgcttgcttacttg

SEQ ID NO: 158543 - DNA, 55 bp, Artificial
  Synthetic oligonucleotide
gactcaattggaatacggcacaacgcgagaactcaacctgtagcggctgtcgaga

SEQ ID NO: 158544 - DNA, 50 bp, Artificial
  Synthetic oligonucleotide
acggacaaccctaaaccccgacgcctcagacgctcgatgagttgcaccgc

SEQ ID NO: 158545 - DNA, 50 bp, Artificial
  Synthetic oligonucleotide
acggacccgggagatagacaagcagctgggctgctcgtgctgtaccgtgc

SEQ ID NO: 158546 - DNA, 50 bp, Artificial
  Synthetic oligonucleotide
ggcgcgaattgagtccatactcgcggacattggatacgcatgtttcgcgt

SEQ ID NO: 158547 - DNA, 50 bp, Artificial
  Synthetic oligonucleotide
aggctgaatggcttgttgagcgcgggggttggcgtgttgcgaccacgaat

SEQ ID NO: 158548 - DNA, 50 bp, Artificial
  Synthetic oligonucleotide
aggcgtgtacggaatgaccggggcagcaccctgttgattcggtggcgttg

SEQ ID NO: 158549 - DNA, 50 bp, Artificial
  Synthetic oligonucleotide
acggagatacaagcgttcatcgagggtcaaggtcgggccctgccagaggc

SEQ ID NO: 158550 - DNA, 50 bp, Artificial
  Synthetic oligonucleotide
cagctcatcacaacgggtgcaccaatcaagagtgcggcgctagccagtga

SEQ ID NO: 158551 - DNA, 50 bp, Artificial
  Synthetic oligonucleotide
aggcgtcgaatacgggtaatcagcatcggtggttcctcagttcgccgggg

SEQ ID NO: 158552 - DNA, 50 bp, Artificial
  Synthetic oligonucleotide
acggagtgtcccgcacaatggcaggcctgattcgtatgagaggcgcggtt

SEQ ID NO: 158553 - DNA, 50 bp, Artificial
  Synthetic oligonucleotide
acggcaacgggtgcagaaacttggtcacgctgtagcaggcgaccgttcta

SEQ ID NO: 158554 - DNA, 55 bp, Artificial
  Synthetic oligonucleotide
gactgccgtttgtttcctgcgtacgtttcgccatggtggtggagttcggttgctg

SEQ ID NO: 158555 - DNA, 50 bp, Artificial
  Synthetic oligonucleotide
aggccgcttacacggctgagcggacctctggcggcgtaatcaccccaaca

SEQ ID NO: 158556 - DNA, 50 bp, Artificial
  Synthetic oligonucleotide
cagggcgatcgctgagttggcatgggtcggcggagggctaatagggccta

SEQ ID NO: 158557 - DNA, 50 bp, Artificial
  Synthetic oligonucleotide
acggtttggtacaacatcctcgtgacaccgccgatttacccaccgcggcc

SEQ ID NO: 158558 - DNA, 50 bp, Artificial
  Synthetic oligonucleotide
cgcgccgttgccttcagcggcattcctgtgcgcctacgacgcaatacggt

SEQ ID NO: 158559 - DNA, 50 bp, Artificial
  Synthetic oligonucleotide
aggccgaagcggaccacactcatctcacacgcaacgttatgccgcgctag

SEQ ID NO: 158560 - DNA, 50 bp, Artificial
  Synthetic oligonucleotide
ccacatttgccaaccctaccggcgcgacacttacgctggagcgtcgcatc

SEQ ID NO: 158561 - DNA, 50 bp, Artificial
  Synthetic oligonucleotide
aggcccgcttaactcctcatgccggcgatatcccggagtctgttgaacga

SEQ ID NO: 158562 - DNA, 50 bp, Artificial
  Synthetic oligonucleotide
acgtagatgcagccagcagcgaacgtgtgcacccggctagcggaagaacc

SEQ ID NO: 158563 - DNA, 50 bp, Artificial
  Synthetic oligonucleotide
ggcaaaagcgggttcccgacgaggtaagcgatcagctgacttttccgcgc

SEQ ID NO: 158564 - DNA, 50 bp, Artificial
  Synthetic oligonucleotide
aggcccattcacctgccttaactctgcacgctacggcatagcctggggtg

SEQ ID NO: 158565 - DNA, 55 bp, Artificial
  Synthetic oligonucleotide
gacttagaaatttagtcggcaatcataccttataattcgggcgattcgcgggcgt

SEQ ID NO: 158566 - DNA, 50 bp, Artificial
  Synthetic oligonucleotide
acgtcagcctgaatcgccacgccgacgtttcctgtgccaatgacaccgca

SEQ ID NO: 158567 - DNA, 50 bp, Artificial
  Synthetic oligonucleotide
acgtccgaacagatccggctcccagctagccgcaacgcccgtcgaataat

SEQ ID NO: 158568 - DNA, 50 bp, Artificial
  Synthetic oligonucleotide
agcgcgttgatacctcatagctcgggtcccaaggtgggggaccagcatct

SEQ ID NO: 158569 - DNA, 50 bp, Artificial
  Synthetic oligonucleotide
acgtccggcgctacactcgctggttgagccgctgcatcgatcgttgccac

SEQ ID NO: 158570 - DNA, 50 bp, Artificial
  Synthetic oligonucleotide
aggcagttcagtgggacggtagctatgggtgatgcggcgcttcaggacgg

SEQ ID NO: 158571 - DNA, 50 bp, Artificial
  Synthetic oligonucleotide
acgtcgacaccggaaccgtgtgctcgcaatcgcacattcaccgctcgctt

SEQ ID NO: 158572 - DNA, 50 bp, Artificial
  Synthetic oligonucleotide
acgtcgaccccaacccaggctgtctgtcgtgtcccgactggcgcaggacg

SEQ ID NO: 158573 - DNA, 50 bp, Artificial
  Synthetic oligonucleotide
acgtcggctttctgcggattgaggcgttttgtgttgaggggtgccgagct

SEQ ID NO: 158574 - DNA, 50 bp, Artificial
  Synthetic oligonucleotide
acgggcgttatgcatgattactccacgacgggattagggcgtcgtagtcg

SEQ ID NO: 158575 - DNA, 50 bp, Artificial
  Synthetic oligonucleotide
ccacgcgcattggtatcgccagtcacacgggtcgatgcaagccgtgacgg

SEQ ID NO: 158576 - DNA, 55 bp, Artificial
  Synthetic oligonucleotide
gacttgtaccacgtgtgcggcacgattcctaccgcgagacgcacgctaacggaac

SEQ ID NO: 158577 - DNA, 50 bp, Artificial
  Synthetic oligonucleotide
acgggggccgccaatcgggaatgcgaggaggtcagattcctcaagaggga

SEQ ID NO: 158578 - DNA, 50 bp, Artificial
  Synthetic oligonucleotide
ggccaggcaaataccgcgtcacgtgttcgacctacgtgagtccgtcccgt

SEQ ID NO: 158579 - DNA, 50 bp, Artificial
  Synthetic oligonucleotide
acgggggttacattgcctatgctaggccgctccgactacgcgacggctat

SEQ ID NO: 158580 - DNA, 50 bp, Artificial
  Synthetic oligonucleotide
ggccaccatgaatgcacccgcggtcgctcagggcaacgtgagccaagcgc

SEQ ID NO: 158581 - DNA, 50 bp, Artificial
  Synthetic oligonucleotide
ggcattaacgatatggcagctagcgaaggcacgcgtccggatccgtccga

SEQ ID NO: 158582 - DNA, 50 bp, Artificial
  Synthetic oligonucleotide
ccacccctgcgtatctgtgccgccgaacctagcaagctcgttctacctga

SEQ ID NO: 158583 - DNA, 50 bp, Artificial
  Synthetic oligonucleotide
acgggtgcgtggtcaatgccgtgcaatccgcttcaagcgctgtcgtgaat

SEQ ID NO: 158584 - DNA, 50 bp, Artificial
  Synthetic oligonucleotide
acgggtgctccaggggcattcgacgaacggggcatcgtctgtgcgcaaat

SEQ ID NO: 158585 - DNA, 50 bp, Artificial
  Synthetic oligonucleotide
acgggtggcgtcacgacgacagtgcttgcatctgggctggcacgcaggca

SEQ ID NO: 158586 - DNA, 50 bp, Artificial
  Synthetic oligonucleotide
acgggttcgctggaaccgcgtcgactgttgccgttaagacaacacgctga

SEQ ID NO: 158587 - DNA, 55 bp, Artificial
  Synthetic oligonucleotide
cctgacgatccgccacgagacgtcctatcgttacgaagcgactgtccattactcg

SEQ ID NO: 158588 - DNA, 50 bp, Artificial
  Synthetic oligonucleotide
aggcctgctcacgctatgtgagtcagaacctgtgcctggcgcggcacgac

SEQ ID NO: 158589 - DNA, 50 bp, Artificial
  Synthetic oligonucleotide
acggtagttttcagttgggcctctgcccgacggtccccatccgttagcga

SEQ ID NO: 158590 - DNA, 50 bp, Artificial
  Synthetic oligonucleotide
acggtcaagaaaggcgccgacagcgggaacattcgcccctagccaggttg

SEQ ID NO: 158591 - DNA, 50 bp, Artificial
  Synthetic oligonucleotide
acggtcctctcctgtcgagtcggttccctacgccaacgccgtgcagtgtc

SEQ ID NO: 158592 - DNA, 50 bp, Artificial
  Synthetic oligonucleotide
acggtgttgcgaaagcataggacttggcaaatccgcccggtaggccggaa

SEQ ID NO: 158593 - DNA, 50 bp, Artificial
  Synthetic oligonucleotide
acggttggcggttggtgtttccgtggcctaccctgggtgagcgcctaggc

SEQ ID NO: 158594 - DNA, 50 bp, Artificial
  Synthetic oligonucleotide
acgcacggcgcaatcgaacgactcatcttccaccgtgcagcgaccgtcta

SEQ ID NO: 158595 - DNA, 50 bp, Artificial
  Synthetic oligonucleotide
acgcacgttactgtgggagcgcctagatgccgacgccaccatgaagcctg

SEQ ID NO: 158596 - DNA, 50 bp, Artificial
  Synthetic oligonucleotide
acgcagttgtttccggctgtgatttgcagtcttgcgccgcgcactcgtgc

SEQ ID NO: 158597 - DNA, 50 bp, Artificial
  Synthetic oligonucleotide
acgcatcgcgagagctgtggtcattgagaggtgcaggtagtgagccgcgc

SEQ ID NO: 158598 - DNA, 55 bp, Artificial
  Synthetic oligonucleotide
cctgaattggagtgggcattctaattgcgccactggtgtggggaatcgcacaaca

SEQ ID NO: 158599 - DNA, 50 bp, Artificial
  Synthetic oligonucleotide
acgcatgccgatgcctgggagtagccgggaactcgttctgaccgaggtga

SEQ ID NO: 158600 - DNA, 50 bp, Artificial
  Synthetic oligonucleotide
aggggaaccgtaatgcagccaatgcgcgctcacgtccagccacgttgcaa

SEQ ID NO: 158601 - DNA, 50 bp, Artificial
  Synthetic oligonucleotide
acgcatgtgtcggtgggtgggcagcaagcccttgttcagtgtgccggctt

SEQ ID NO: 158602 - DNA, 50 bp, Artificial
  Synthetic oligonucleotide
acgccaccctcaggtggattgccataggtcaagtcgagcccagtggtggc

SEQ ID NO: 158603 - DNA, 50 bp, Artificial
  Synthetic oligonucleotide
acgccagattaccgggcggcttagcgccttgcagttgggaccaaaggggc

SEQ ID NO: 158604 - DNA, 50 bp, Artificial
  Synthetic oligonucleotide
cagcgccatttctcgtccgcctaccgaccaacctgacagtaccggacagc

SEQ ID NO: 158605 - DNA, 50 bp, Artificial
  Synthetic oligonucleotide
agggctcgcctggctatgcgggcaaggtacggcagcgcgtcaaacccaat

SEQ ID NO: 158606 - DNA, 50 bp, Artificial
  Synthetic oligonucleotide
acgcccaggtcgctcgagagcaacatcgcggggccaggatcccgtgtatc

SEQ ID NO: 158607 - DNA, 50 bp, Artificial
  Synthetic oligonucleotide
agggctcaaattcggaccacggacacaacaggtccatcgatccggcgtcg

SEQ ID NO: 158608 - DNA, 50 bp, Artificial
  Synthetic oligonucleotide
acgccccgcgctcacaaagtcgccgcatcgtaagatcggctgggcacgcc

SEQ ID NO: 158609 - DNA, 55 bp, Artificial
  Synthetic oligonucleotide
gaccctatccggctgtgaagatcgtcctcacgacatcctggttgcagaggctgtc

SEQ ID NO: 158610 - DNA, 50 bp, Artificial
  Synthetic oligonucleotide
acgcccggtgcatgattatgagccgcgaaatggaacacaaaggccgctgc

SEQ ID NO: 158611 - DNA, 50 bp, Artificial
  Synthetic oligonucleotide
agggcgggggtcgtcgcttcccccaaagtgaatcattcgcagacacaata

SEQ ID NO: 158612 - DNA, 50 bp, Artificial
  Synthetic oligonucleotide
acgccgatgggacctcgacgatccacgcatgccccgtacacgctttgtaa

SEQ ID NO: 158613 - DNA, 50 bp, Artificial
  Synthetic oligonucleotide
acgatgcagtcgcaaccaagtgcgggatctccgaggaggctcgggaagca

SEQ ID NO: 158614 - DNA, 50 bp, Artificial
  Synthetic oligonucleotide
acgattgcgcgacgtataaaggctggacgcactatctgccgcccgcgtcg

SEQ ID NO: 158615 - DNA, 50 bp, Artificial
  Synthetic oligonucleotide
acgattgtagtgcgccggaatgtcgtgcaagccttgcctgcgggcatgtc

SEQ ID NO: 158616 - DNA, 50 bp, Artificial
  Synthetic oligonucleotide
ccagccgctatacctcttggcgtgcaggcgcattctttagatgggcgcta

SEQ ID NO: 158617 - DNA, 50 bp, Artificial
  Synthetic oligonucleotide
acgcaaaccaggccagatccattccagagctcacaacaagcgcagccccc

SEQ ID NO: 158618 - DNA, 50 bp, Artificial
  Synthetic oligonucleotide
gcagttgttcggggactggaggcggagcgacccgtggcgaatgaacgggc

SEQ ID NO: 158619 - DNA, 50 bp, Artificial
  Synthetic oligonucleotide
acgcaacccgaaccagtcgtatttcaccagtacgcccaccaacgtggccg

SEQ ID NO: 158620 - DNA, 55 bp, Artificial
  Synthetic oligonucleotide
gaccgggcttcatttcaggtctgacgccgccgcgtcttatgcagcaagccgggta

SEQ ID NO: 158621 - DNA, 50 bp, Artificial
  Synthetic oligonucleotide
ccagccgagcagcttagacaaaaggtccggatggctggcgaaacgcctga

SEQ ID NO: 158622 - DNA, 50 bp, Artificial
  Synthetic oligonucleotide
aggggccacggacagtttcggggctcgttcaatcagcgctgtattccctc

SEQ ID NO: 158623 - DNA, 50 bp, Artificial
  Synthetic oligonucleotide
gggcgttggaaagcggtttcgggcaccatctcccagccggcagcaataat

SEQ ID NO: 158624 - DNA, 50 bp, Artificial
  Synthetic oligonucleotide
acgcaagtttgtgcggcgtcaaccttcggtgtcacggcacgccccaacat

SEQ ID NO: 158625 - DNA, 50 bp, Artificial
  Synthetic oligonucleotide
aggggcaatgggcgcttgcgcggtttcgacctcagtttccgcattaatct

SEQ ID NO: 158626 - DNA, 50 bp, Artificial
  Synthetic oligonucleotide
acgcaattcaatgcgcccggtccaacgcgtgacgaacggagggagtgtga

SEQ ID NO: 158627 - DNA, 50 bp, Artificial
  Synthetic oligonucleotide
aggggagcgtcctggcctcggttttccgtagcctaacacgcgcgttcggg

SEQ ID NO: 158628 - DNA, 50 bp, Artificial
  Synthetic oligonucleotide
acgcacaacgcgagggtctgggccctgcaccacgaactgcacgggataag

SEQ ID NO: 158629 - DNA, 50 bp, Artificial
  Synthetic oligonucleotide
acgcacctgtggtcgggcacgcgagagcctgctcgtgagtgtttggagag

SEQ ID NO: 158630 - DNA, 50 bp, Artificial
  Synthetic oligonucleotide
acgcacgagggggcggctttattccaccgcgaatcggaattcttcagcga

SEQ ID NO: 158631 - DNA, 55 bp, Artificial
  Synthetic oligonucleotide
gaccggggctgtcagattagttagtgcagttggcgcttcaggtcagcaagttccg

SEQ ID NO: 158632 - DNA, 50 bp, Artificial
  Synthetic oligonucleotide
gggcccgttcattcgccacgggtcgctccgcctccagtccccgaacaact

SEQ ID NO: 158633 - DNA, 50 bp, Artificial
  Synthetic oligonucleotide
acgcgcgctgagtgtgggctgctccagacaagccgttttcagtaggccat

SEQ ID NO: 158634 - DNA, 50 bp, Artificial
  Synthetic oligonucleotide
acgcgctcgcccgattctgatcggtcatattgatgggagcacgcaccggg

SEQ ID NO: 158635 - DNA, 50 bp, Artificial
  Synthetic oligonucleotide
ggctgccaggctcgcccgaaacgcacagtcccccgatttggtagccagtc

SEQ ID NO: 158636 - DNA, 50 bp, Artificial
  Synthetic oligonucleotide
agggcccggaccgctccgtcaagatgcggttcaaccgagatgtggatata

SEQ ID NO: 158637 - DNA, 50 bp, Artificial
  Synthetic oligonucleotide
acgcggacaaccggaacgtgctggtaccatacagcgaggccatgcgatcg

SEQ ID NO: 158638 - DNA, 50 bp, Artificial
  Synthetic oligonucleotide
acgcggacagactcccctcgccactcgcgtcgacgaagcatgcggcctgt

SEQ ID NO: 158639 - DNA, 50 bp, Artificial
  Synthetic oligonucleotide
acgcggcgaccgaagcgtgatgacgtggactgcaagcagttttcgagcca

SEQ ID NO: 158640 - DNA, 50 bp, Artificial
  Synthetic oligonucleotide
acgcggtagcaattctcccctgccggttgccgaagatcgatgggagcagc

SEQ ID NO: 158641 - DNA, 50 bp, Artificial
  Synthetic oligonucleotide
agggcaaccgcttgtccgtgacccctgtaacggcccaggagtggaagagg

SEQ ID NO: 158642 - DNA, 60 bp, Artificial
  Synthetic oligonucleotide
tggatgcccatccgcaccacgcttcataagcgcgacagccacaaggaatacgttcctgcc

SEQ ID NO: 158643 - DNA, 55 bp, Artificial
  Synthetic oligonucleotide
gaccggttcaagcaacggactcaccgaaccggactgaatcacctgcggaaagcaa

SEQ ID NO: 158644 - DNA, 50 bp, Artificial
  Synthetic oligonucleotide
acgcgtctaacacgtaggccctggcgttatccagtggcgtgcctatcgga

SEQ ID NO: 158645 - DNA, 50 bp, Artificial
  Synthetic oligonucleotide
acgcgtgcccacgcccagaatgctgtcgagcgagatacgcccgcccatcc

SEQ ID NO: 158646 - DNA, 50 bp, Artificial
  Synthetic oligonucleotide
cgcgaagtggaaccgcccacaaccatcgttgcaggctcgtatgctcccca

SEQ ID NO: 158647 - DNA, 50 bp, Artificial
  Synthetic oligonucleotide
cagcgcgccccatgtgcgcacgaggttgacatctgccagcatcggaaagc

SEQ ID NO: 158648 - DNA, 50 bp, Artificial
  Synthetic oligonucleotide
acgctcctggcgtccaggtgaaggatgcgaccgatcccgacaggactgac

SEQ ID NO: 158649 - DNA, 50 bp, Artificial
  Synthetic oligonucleotide
acgctcgcatacatcgatccgcccacggttgctcgcgatggcttgtgcgg

SEQ ID NO: 158650 - DNA, 50 bp, Artificial
  Synthetic oligonucleotide
agggagcgatgttgcaaggcgcgataggggagttccggagccaggtgaga

SEQ ID NO: 158651 - DNA, 50 bp, Artificial
  Synthetic oligonucleotide
agggcgagtcctaagaggtcttgggtccgtagcgggggctacgggaaatc

SEQ ID NO: 158652 - DNA, 50 bp, Artificial
  Synthetic oligonucleotide
acgccgccaggtctcaacggttaatttacccgcgcatcgcactcgccaga

SEQ ID NO: 158653 - DNA, 50 bp, Artificial
  Synthetic oligonucleotide
acgccgctttccctcagagcgtcgattcgccgtttgacctccgaccagtc

SEQ ID NO: 158654 - DNA, 55 bp, Artificial
  Synthetic oligonucleotide
gacctcgacactccacaagatgattcccgtccgatcgcttgttgttgtcacatgg

SEQ ID NO: 158655 - DNA, 50 bp, Artificial
  Synthetic oligonucleotide
acgccgtcgtgcaggttcgcctcgattctcgacgtgtcaagatcggcact

SEQ ID NO: 158656 - DNA, 50 bp, Artificial
  Synthetic oligonucleotide
acgcctcggtcggcgattgctacaagtaccgcatcctgtcggcccccacc

SEQ ID NO: 158657 - DNA, 50 bp, Artificial
  Synthetic oligonucleotide
acgcctctgcctccgctgttcgacacccgagaaaatcgggacccggatgt

SEQ ID NO: 158658 - DNA, 50 bp, Artificial
  Synthetic oligonucleotide
acgcctgtttggcacagtggacacacacgctttgcaggccgcgttgaatg

SEQ ID NO: 158659 - DNA, 50 bp, Artificial
  Synthetic oligonucleotide
acgcgaaacggagacacgcgcaacagatcgcacgcaggagaaagccgtac

SEQ ID NO: 158660 - DNA, 50 bp, Artificial
  Synthetic oligonucleotide
gggaaaatcaaggattcggcggcaggctatttcatgagcatcttcgagag

SEQ ID NO: 158661 - DNA, 50 bp, Artificial
  Synthetic oligonucleotide
cgcctggcatcattgtgtgcggaagctgccgatgcagtacgctctggtta

SEQ ID NO: 158662 - DNA, 50 bp, Artificial
  Synthetic oligonucleotide
acgcgacacgccattgaggcaaggcgagttgacgtgatgccccgatttct

SEQ ID NO: 158663 - DNA, 50 bp, Artificial
  Synthetic oligonucleotide
cgccttgtaggcagcgaattggtctgcagggtgcgggggtacgtgcaagt

SEQ ID NO: 158664 - DNA, 50 bp, Artificial
  Synthetic oligonucleotide
acgcgcattgaggctgcttgacggcagcagtacagcggaactgctaaggg

SEQ ID NO: 158665 - DNA, 55 bp, Artificial
  Synthetic oligonucleotide
gaccttcagaccgccgaatgcatacgatgcgccgacgctatacgcgcggttgtcc

SEQ ID NO: 158666 - DNA, 50 bp, Artificial
  Synthetic oligonucleotide
agggccttacggatgcctcgaccggaggagggtactcgggctggttcctc

SEQ ID NO: 158667 - DNA, 50 bp, Artificial
  Synthetic oligonucleotide
acgcgcccgtcgaacgattcgctgtccccgtcgccaacgggactcaagcc

SEQ ID NO: 158668 - DNA, 50 bp, Artificial
  Synthetic oligonucleotide
acgcgccctagcatccgcctaccgaacaaacttcggcgccgcctcgagtc

SEQ ID NO: 158669 - DNA, 50 bp, Artificial
  Synthetic oligonucleotide
agggccgccgctcgatcaagtgcctgtagacgacccgtcttgaaagagta

SEQ ID NO: 158670 - DNA, 50 bp, Artificial
  Synthetic oligonucleotide
acgcgccgagcagaggtgcacttgcgagggtgacgagtccatacggagac

SEQ ID NO: 158671 - DNA, 50 bp, Artificial
  Synthetic oligonucleotide
ggctgctgtaccgggtgtcaacggtggcggagaggccgttcattgctatg

SEQ ID NO: 158672 - DNA, 50 bp, Artificial
  Synthetic oligonucleotide
cgctattgtagcacgatcccgtgtatcattgcgattgaacccttacacga

SEQ ID NO: 158673 - DNA, 50 bp, Artificial
  Synthetic oligonucleotide
catgtgtttctcccccggatggatcgtattggcatgggccgtggcgggtc

SEQ ID NO: 158674 - DNA, 50 bp, Artificial
  Synthetic oligonucleotide
actttcccatagccgccgatctgccttggcgcgtaccacgaaacgctggc

SEQ ID NO: 158675 - DNA, 50 bp, Artificial
  Synthetic oligonucleotide
catgtccgcgcttgcgaatcagcagtggagccccaatgcggtcttcgagt

SEQ ID NO: 158676 - DNA, 55 bp, Artificial
  Synthetic oligonucleotide
ccttccgattatttctgcatgttccgcgtctgatcaacgactatcgactcaactg

SEQ ID NO: 158677 - DNA, 50 bp, Artificial
  Synthetic oligonucleotide
gctccacaaaatgcggacaccccgtgtgacggctccacgcgtagctgtgg

SEQ ID NO: 158678 - DNA, 50 bp, Artificial
  Synthetic oligonucleotide
agaaaccagtcggtgccgcccaagactatcggctaatcgctcccggccaa

SEQ ID NO: 158679 - DNA, 50 bp, Artificial
  Synthetic oligonucleotide
catggtcgcagaggttacgcccaatctccggtcgagcgccggttttgtct

SEQ ID NO: 158680 - DNA, 50 bp, Artificial
  Synthetic oligonucleotide
catgggccctcgcacctcgaatacgaccgcccaagtctgaccgatggtga

SEQ ID NO: 158681 - DNA, 50 bp, Artificial
  Synthetic oligonucleotide
caggttcaaccgagcaagatccgcgtctgggggcgggagccgcgaaacgt

SEQ ID NO: 158682 - DNA, 50 bp, Artificial
  Synthetic oligonucleotide
agaacgacgggggacgcacaccacccgaatgggtagccgggtagatgaag

SEQ ID NO: 158683 - DNA, 50 bp, Artificial
  Synthetic oligonucleotide
gcgaactccaatggacgtacgcattaaatgcgaaatggaggacgcgtcga

SEQ ID NO: 158684 - DNA, 50 bp, Artificial
  Synthetic oligonucleotide
gctagaatgccgcaaatcgggtgccgcgaattgatgcgggttgcctacga

SEQ ID NO: 158685 - DNA, 50 bp, Artificial
  Synthetic oligonucleotide
agaactagtggatgccgcgtgaatgccgcgccgatacggcactggtgtca

SEQ ID NO: 158686 - DNA, 50 bp, Artificial
  Synthetic oligonucleotide
gctacgacggatttgagcgtggcccaggttgctcgccagagtgttccgtc

SEQ ID NO: 158687 - DNA, 55 bp, Artificial
  Synthetic oligonucleotide
gacgaaatcgtggacaactggcgtgcccgagtcactgaagagtggacggtggtca

SEQ ID NO: 158688 - DNA, 50 bp, Artificial
  Synthetic oligonucleotide
agaactctgagcctacgtcggtcaaggcaaactggcgcgaggtccggtta

SEQ ID NO: 158689 - DNA, 50 bp, Artificial
  Synthetic oligonucleotide
agcgtccgtcttctgggtgcggaagctgggtaacacacccgggcttcggt

SEQ ID NO: 158690 - DNA, 50 bp, Artificial
  Synthetic oligonucleotide
actgctctggtcgttggcggttatggctcaacgcgactcgctggtgcaca

SEQ ID NO: 158691 - DNA, 50 bp, Artificial
  Synthetic oligonucleotide
gctcttaatggctggatccgtgatgtggaactcgtatgctcggtcgatac

SEQ ID NO: 158692 - DNA, 50 bp, Artificial
  Synthetic oligonucleotide
actggacacctgattgtggtcgcaaggcctcgcacccgaatgcccgtttc

SEQ ID NO: 158693 - DNA, 50 bp, Artificial
  Synthetic oligonucleotide
actggacggtagcgccgtgccaaccaccgagccatggtccgcgaacgtgt

SEQ ID NO: 158694 - DNA, 50 bp, Artificial
  Synthetic oligonucleotide
actggatgcctcgcatccacacccgcgataacgctaaatgtgccggggtt

SEQ ID NO: 158695 - DNA, 50 bp, Artificial
  Synthetic oligonucleotide
actgggctgttattcaagccccgcacccggtaaattctctgcgtggcccg

SEQ ID NO: 158696 - DNA, 50 bp, Artificial
  Synthetic oligonucleotide
caggtaccggcaagccttcagccgcgtactgacccgactttccttcgcct

SEQ ID NO: 158697 - DNA, 50 bp, Artificial
  Synthetic oligonucleotide
agctcgcctttaactccgtcagcacggtaggctgagccgcgcaataggcg

SEQ ID NO: 158698 - DNA, 55 bp, Artificial
  Synthetic oligonucleotide
ccttagattatttccagtctcaacgtaatcagacaccgcttgactatttcaagtc

SEQ ID NO: 158699 - DNA, 50 bp, Artificial
  Synthetic oligonucleotide
agagagccgggctggatggttcaaggggcagcatcccagctatccggaac

SEQ ID NO: 158700 - DNA, 50 bp, Artificial
  Synthetic oligonucleotide
gcgaaggcgctctaaaagctcgcggcgatattgggaggtggatgccagga

SEQ ID NO: 158701 - DNA, 50 bp, Artificial
  Synthetic oligonucleotide
acttatgcgcgagagtcggtgtacgaatgacccaacgtcagtgggactat

SEQ ID NO: 158702 - DNA, 50 bp, Artificial
  Synthetic oligonucleotide
agctaggcgtcgggccttggtttctgagtggaccgttcgagacgaccgga

SEQ ID NO: 158703 - DNA, 50 bp, Artificial
  Synthetic oligonucleotide
gctcgcccgaaacgcacagtcccccgatttggtagccagtcggcccttcg

SEQ ID NO: 158704 - DNA, 50 bp, Artificial
  Synthetic oligonucleotide
agctaggcggtcatcgggcattccaacgtccctggagtcatcggcatcgc

SEQ ID NO: 158705 - DNA, 50 bp, Artificial
  Synthetic oligonucleotide
acttcgaacggcccgggagttggacttcccgttggtcggatggtgctggc

SEQ ID NO: 158706 - DNA, 50 bp, Artificial
  Synthetic oligonucleotide
agcgttccatcggctttctgaggtcgcccagcagtttgtatcgggcgctt

SEQ ID NO: 158707 - DNA, 50 bp, Artificial
  Synthetic oligonucleotide
cattggacaagaatcgcaggcgcttgtctatgcaaccgctgtgggggcgc

SEQ ID NO: 158708 - DNA, 50 bp, Artificial
  Synthetic oligonucleotide
cgctaccctcaccgcctcatcgaatctccccgctttcgggcaggttatga

SEQ ID NO: 158709 - DNA, 55 bp, Artificial
  Synthetic oligonucleotide
ccttaacggcccaacgacacgacaggcactttgcgaacccttcagtgggatgggc

SEQ ID NO: 158710 - DNA, 50 bp, Artificial
  Synthetic oligonucleotide
agcggcagacccggcaagtactgcccggcgcagatcggtggacacgacga

SEQ ID NO: 158711 - DNA, 50 bp, Artificial
  Synthetic oligonucleotide
agacgacggcgctctcaactaagagcgtaccggcatgccactacacgcgt

SEQ ID NO: 158712 - DNA, 50 bp, Artificial
  Synthetic oligonucleotide
agacgatgaacggtcggcccgtcacgattcgcactttcgatgcgggtgca

SEQ ID NO: 158713 - DNA, 50 bp, Artificial
  Synthetic oligonucleotide
agacgcctctggacgcccgtttttatttcggtgcggactggggctttgca

SEQ ID NO: 158714 - DNA, 50 bp, Artificial
  Synthetic oligonucleotide
gcgtccagcggagcagcaaagccaaacttggtatgaccgccagatgggca

SEQ ID NO: 158715 - DNA, 50 bp, Artificial
  Synthetic oligonucleotide
agacgcgccagttttcgggcagccgtaacgagatcaggcgtcaagccgcg

SEQ ID NO: 158716 - DNA, 50 bp, Artificial
  Synthetic oligonucleotide
agacgctcgatgagttgcaccgccagtagcgaatggcccccgagtgcaaa

SEQ ID NO: 158717 - DNA, 50 bp, Artificial
  Synthetic oligonucleotide
agcggacttgtaatcgacctgcacagcaataccccagacgatagaaattt

SEQ ID NO: 158718 - DNA, 50 bp, Artificial
  Synthetic oligonucleotide
agacggcaaggattctgtcgcgcatggtgagggagtgcgggatcgtgcgt

SEQ ID NO: 158719 - DNA, 50 bp, Artificial
  Synthetic oligonucleotide
agacgtgccaccgagcgaagttgcgtttgttcttacgctcagtgcgccgg

SEQ ID NO: 158720 - DNA, 55 bp, Artificial
  Synthetic oligonucleotide
cctgtttggagtctcgctgttcggtgcttacgccttgcgccccgatcatcggagc

SEQ ID NO: 158721 - DNA, 50 bp, Artificial
  Synthetic oligonucleotide
agcggacaacgtgctgccgcaactgccttggggttaactaccccgcaaac

SEQ ID NO: 158722 - DNA, 50 bp, Artificial
  Synthetic oligonucleotide
agcgctgcttgcagctgagtggctaaccgcgccttgtcacctgactgctg

SEQ ID NO: 158723 - DNA, 50 bp, Artificial
  Synthetic oligonucleotide
agactacggcgtaccgtagcgttttgtaccgagccatcgtccggcggctt

SEQ ID NO: 158724 - DNA, 50 bp, Artificial
  Synthetic oligonucleotide
agactctcgcgttccgctgcagacagcacccaacgacgcggcatggctgc

SEQ ID NO: 158725 - DNA, 50 bp, Artificial
  Synthetic oligonucleotide
agcgctgacgttctttcccggaccgaatggcttgtccggcccaccacgtg

SEQ ID NO: 158726 - DNA, 50 bp, Artificial
  Synthetic oligonucleotide
agactgcgaggggagcgggatcctgtcgatgtcatttgaggccgacgctt

SEQ ID NO: 158727 - DNA, 50 bp, Artificial
  Synthetic oligonucleotide
catcttttcaacggttgcgtcagcgcctacgtgggtgcgtggatcctcgc

SEQ ID NO: 158728 - DNA, 50 bp, Artificial
  Synthetic oligonucleotide
agaaggcgcgcgaaaccggaccccggtaaggcctcaacatgaaggcatgt

SEQ ID NO: 158729 - DNA, 50 bp, Artificial
  Synthetic oligonucleotide
agaataccaggcgggtgaatttccgggcaacaggggcaacgcgtgacgat

SEQ ID NO: 158730 - DNA, 50 bp, Artificial
  Synthetic oligonucleotide
gcgttgtcgccgcttagccagcgccctacaaaagcgtggcattggtctag

SEQ ID NO: 158731 - DNA, 55 bp, Artificial
  Synthetic oligonucleotide
gacgacccacgaatggcaggacgtctaaagacaggttccagtctatggagcactt

SEQ ID NO: 158732 - DNA, 50 bp, Artificial
  Synthetic oligonucleotide
agaatcgcagcccgcgttctgtccgcaacatctagcgttcccttcccgat

SEQ ID NO: 158733 - DNA, 50 bp, Artificial
  Synthetic oligonucleotide
agaatcggttgccccgtgaaagcgtgacacaatgcgtcggccaagccaag

SEQ ID NO: 158734 - DNA, 50 bp, Artificial
  Synthetic oligonucleotide
agcgtcacgccattgggcaactgcgccgaaagtcgagcctgcacggcgga

SEQ ID NO: 158735 - DNA, 50 bp, Artificial
  Synthetic oligonucleotide
agcgctgacctggatcgcatttctcacctggctggcgatcggactatcgg

SEQ ID NO: 158736 - DNA, 50 bp, Artificial
  Synthetic oligonucleotide
agacacaagttgcaacgttcgcccaggggtccgaagtggccccggatgtt

SEQ ID NO: 158737 - DNA, 50 bp, Artificial
  Synthetic oligonucleotide
agacagaggccttttaacgggaggcctggcccaacggatcgcccctctct

SEQ ID NO: 158738 - DNA, 50 bp, Artificial
  Synthetic oligonucleotide
catggctggattatagccacgtcactccggggctccgtccgagccgcccc

SEQ ID NO: 158739 - DNA, 50 bp, Artificial
  Synthetic oligonucleotide
cggcatcaaggcatattacgacacgcctcgacatgtctgtacttgcgtat

SEQ ID NO: 158740 - DNA, 50 bp, Artificial
  Synthetic oligonucleotide
agcgggggctacgggaaatcatcttatcgcggaaccgacgcagtccatcc

SEQ ID NO: 158741 - DNA, 50 bp, Artificial
  Synthetic oligonucleotide
agcgggcaaagccacgaccttacacacgcggggattgagtcgctgagtaa

SEQ ID NO: 158742 - DNA, 55 bp, Artificial
  Synthetic oligonucleotide
gacgaggggcggcattcaaatctcgcagaaaccgcagcgaatttccgggccatcg

SEQ ID NO: 158743 - DNA, 50 bp, Artificial
  Synthetic oligonucleotide
cgctctgcctaccccggcgaactgaggaaccaccgatgctgattacccgt

SEQ ID NO: 158744 - DNA, 50 bp, Artificial
  Synthetic oligonucleotide
agacccattcgacgcttcgcaagggcggtgtttcgcctgtagagctaggc

SEQ ID NO: 158745 - DNA, 50 bp, Artificial
  Synthetic oligonucleotide
gcgtgcaccggatcaggcgactgcgtagaaaactgggactgcgctgcaag

SEQ ID NO: 158746 - DNA, 50 bp, Artificial
  Synthetic oligonucleotide
agaccccaagacggggcgcctgcgacgtgtggtatcacagggcgtagata

SEQ ID NO: 158747 - DNA, 50 bp, Artificial
  Synthetic oligonucleotide
agaccggcactgaacgaacacgaaacgcaaagccgcgcaatcgagtcgcc

SEQ ID NO: 158748 - DNA, 50 bp, Artificial
  Synthetic oligonucleotide
aggatcacgagatgttgttgccgtgtcatcggtcgggaccgggccttgtg

SEQ ID NO: 158749 - DNA, 50 bp, Artificial
  Synthetic oligonucleotide
actaaagttgtagctgcacgcggccaacccaagtcccctccccaaagcgc

SEQ ID NO: 158750 - DNA, 50 bp, Artificial
  Synthetic oligonucleotide
ggagcggacgtgggaaggcaccgcactggattgctaatgcgaagaaccgc

SEQ ID NO: 158751 - DNA, 50 bp, Artificial
  Synthetic oligonucleotide
actacccgttgccggcctgggatgacgctgatctcccgaacgcgcggtat

SEQ ID NO: 158752 - DNA, 50 bp, Artificial
  Synthetic oligonucleotide
catcgacgggagtgctctcgccagcggaactagaaggcgcgttacgcaag

SEQ ID NO: 158753 - DNA, 56 bp, Artificial
  Synthetic oligonucleotide
aacctaaaagcgcacgaaggaccgatagcagacctgaagcgaacgggtgaattgtc

SEQ ID NO: 158754 - DNA, 55 bp, Artificial
  Synthetic oligonucleotide
gacgcattggtcaccccaccgggtacattgcagccattttgaacgagcgccgcca

SEQ ID NO: 158755 - DNA, 50 bp, Artificial
  Synthetic oligonucleotide
actaggctccgtgctttgcggaggcatgtagccgacaggcatgccagtca

SEQ ID NO: 158756 - DNA, 50 bp, Artificial
  Synthetic oligonucleotide
ggactgggaccgcctcgttaagcgagctgctgagcgcagcgttctttgcc

SEQ ID NO: 158757 - DNA, 50 bp, Artificial
  Synthetic oligonucleotide
aggagcggaacgtcaaagtgcgcggcggaccatagagcagtgttgcccat

SEQ ID NO: 158758 - DNA, 50 bp, Artificial
  Synthetic oligonucleotide
ccaaggccggtcatgaaagctatccgtcttgccctgattcccgccctcgc

SEQ ID NO: 158759 - DNA, 50 bp, Artificial
  Synthetic oligonucleotide
actatcggacagcgccccgggaaaggcacccataccgtacgcactacgac

SEQ ID NO: 158760 - DNA, 50 bp, Artificial
  Synthetic oligonucleotide
actcacccccaatcgcaaggccaaacctcgctcagcatcctcgtgcttga

SEQ ID NO: 158761 - DNA, 50 bp, Artificial
  Synthetic oligonucleotide
actcccgcacggcggatcacgccaggagacggcaacatgacaacgcaacg

SEQ ID NO: 158762 - DNA, 50 bp, Artificial
  Synthetic oligonucleotide
aggagattcgccaaggagcgttcgacgcatggggtaaagccgcgagccac

SEQ ID NO: 158763 - DNA, 50 bp, Artificial
  Synthetic oligonucleotide
actccggacagtcgtgtcgaccctcaggcgatgcgggcggatatcaggta

SEQ ID NO: 158764 - DNA, 50 bp, Artificial
  Synthetic oligonucleotide
actccggcgtcacgagactgccccacgcacgataacgcctacgccatacg

SEQ ID NO: 158765 - DNA, 55 bp, Artificial
  Synthetic oligonucleotide
gacgccaatgattcgtgcggtgttatggcttcccgccatgtcatccccttacggc

SEQ ID NO: 158766 - DNA, 50 bp, Artificial
  Synthetic oligonucleotide
agaggcatcgggcaagggagtcgtgttcgtcgctccgctacagggagaca

SEQ ID NO: 158767 - DNA, 50 bp, Artificial
  Synthetic oligonucleotide
acgtgcgcaaaagggtcctgggccgcctgtatgcaaacgtgcgaaacctt

SEQ ID NO: 158768 - DNA, 50 bp, Artificial
  Synthetic oligonucleotide
acgtgctagcgaagccccttcaaagcggaaccccgacacgcgtggctcac

SEQ ID NO: 158769 - DNA, 50 bp, Artificial
  Synthetic oligonucleotide
ggatgcaattcaggacatgtggaacgacgcgcttttacaagccgcggaag

SEQ ID NO: 158770 - DNA, 50 bp, Artificial
  Synthetic oligonucleotide
acgtgcttggtccgtgctgtgcagccttcggtgctaactcaaccgctgaa

SEQ ID NO: 158771 - DNA, 50 bp, Artificial
  Synthetic oligonucleotide
acgtgctttccccatccggcaggcctcgtgactgttggctggagcgaccg

SEQ ID NO: 158772 - DNA, 50 bp, Artificial
  Synthetic oligonucleotide
acgtggctccagcccgacagaacccgcggacaaaggaacgcatcgcctga

SEQ ID NO: 158773 - DNA, 50 bp, Artificial
  Synthetic oligonucleotide
aggcaagcggagacccccggtcgacctttgaactacggctgtatcctgct

SEQ ID NO: 158774 - DNA, 50 bp, Artificial
  Synthetic oligonucleotide
acgtggggtcttgcagaccacgccgttcggaatacccgggcagtcgtatt

SEQ ID NO: 158775 - DNA, 50 bp, Artificial
  Synthetic oligonucleotide
ggatccactcccgcaggagcggaagaatatttcgcatatgtaccaagggg

SEQ ID NO: 158776 - DNA, 55 bp, Artificial
  Synthetic oligonucleotide
cctgtggccgttcgcccgcggtcggccttgcacgggtccgcaggtgcgctctcct

SEQ ID NO: 158777 - DNA, 50 bp, Artificial
  Synthetic oligonucleotide
acgtggtggccagacagttcgccgctggggcaggcaaagcgcgtaggccc

SEQ ID NO: 158778 - DNA, 50 bp, Artificial
  Synthetic oligonucleotide
aggatcgtcaatcgatgacttgctgcggagtagcgatgtgcgcccctcga

SEQ ID NO: 158779 - DNA, 50 bp, Artificial
  Synthetic oligonucleotide
acgtgtgatgacgcgtccggcgcataacgaaaccacgcccggagaatgcg

SEQ ID NO: 158780 - DNA, 50 bp, Artificial
  Synthetic oligonucleotide
ccacaacggtaagcctggcggccggacggtcggagagaaaatcgacgcct

SEQ ID NO: 158781 - DNA, 50 bp, Artificial
  Synthetic oligonucleotide
acgttcggcgctttctgggcggactcgataccccgtctcaactcatccgc

SEQ ID NO: 158782 - DNA, 50 bp, Artificial
  Synthetic oligonucleotide
aggatccggctgcaccattgcgcattgtctggatcggttccccctctacg

SEQ ID NO: 158783 - DNA, 50 bp, Artificial
  Synthetic oligonucleotide
ccaatgcataggcggcctcgcgtagccttccaggcactaagcgcaacatg

SEQ ID NO: 158784 - DNA, 50 bp, Artificial
  Synthetic oligonucleotide
actcgggggcggagggcgaactatatatcggcgggccgagcgttgcacag

SEQ ID NO: 158785 - DNA, 50 bp, Artificial
  Synthetic oligonucleotide
actcgtgtctatcgcggtacccgccggttctctgcttgagcgggggcatg

SEQ ID NO: 158786 - DNA, 50 bp, Artificial
  Synthetic oligonucleotide
gcttaggagaatacttggccgagtcgaaacggagtctgtactgtagccgc

SEQ ID NO: 158787 - DNA, 55 bp, Artificial
  Synthetic oligonucleotide
cctgtctttataggctggttcttgaactcggacgcacacgtatcgaagcagggcc

SEQ ID NO: 158788 - DNA, 50 bp, Artificial
  Synthetic oligonucleotide
ccaacattggctaaggaatgttccggtttcacggcatcccttcgacaatg

SEQ ID NO: 158789 - DNA, 50 bp, Artificial
  Synthetic oligonucleotide
gccgcactctaaaatgccgcgcacatcgatacgtgccggatcagcaagcg

SEQ ID NO: 158790 - DNA, 50 bp, Artificial
  Synthetic oligonucleotide
aggaaggtacccggctcccggggcgtacttcatcgaaggcacttctcgcc

SEQ ID NO: 158791 - DNA, 50 bp, Artificial
  Synthetic oligonucleotide
actctgtcgccggcgcatcctgaactggtgcctcctcgggacttaccgaa

SEQ ID NO: 158792 - DNA, 50 bp, Artificial
  Synthetic oligonucleotide
agagattcttgcgcggggcgtcaacggctaatgcggcccctcccattttt

SEQ ID NO: 158793 - DNA, 50 bp, Artificial
  Synthetic oligonucleotide
actgaaatggcgccatgtgggcctaccgtgattgcattggtccgaccgct

SEQ ID NO: 158794 - DNA, 50 bp, Artificial
  Synthetic oligonucleotide
agcttccgtacgtcctccttcagtgcgctaatttctcgcgcctgctccgc

SEQ ID NO: 158795 - DNA, 50 bp, Artificial
  Synthetic oligonucleotide
agctgtccccgtgcatgacaaggttcatttgcgccgtgcgcacaaggaag

SEQ ID NO: 158796 - DNA, 50 bp, Artificial
  Synthetic oligonucleotide
actgacgctagcaagcacccgcaaccgtgcgcctggaatattgtgtgcga

SEQ ID NO: 158797 - DNA, 50 bp, Artificial
  Synthetic oligonucleotide
gctgcgtcctcaaagaatgcgctcgcaccatgcacgacccccgccttagg

SEQ ID NO: 158798 - DNA, 55 bp, Artificial
  Synthetic oligonucleotide
gacgccgttatgaccatagatttagtgtctgcggcactaccgggtcgacagaatg

SEQ ID NO: 158799 - DNA, 50 bp, Artificial
  Synthetic oligonucleotide
agctgggtcctcacgatcgggcacatggtgacggaacgctcgttacgagc

SEQ ID NO: 158800 - DNA, 50 bp, Artificial
  Synthetic oligonucleotide
agctgacggggatgacaggaatggcacgtcgcaacgagggaaaggcccgc

SEQ ID NO: 158801 - DNA, 50 bp, Artificial
  Synthetic oligonucleotide
actgagcggccacgctgcaatggagaccccttgcactgacgacattcctg

SEQ ID NO: 158802 - DNA, 50 bp, Artificial
  Synthetic oligonucleotide
actgccgaactcccaatgcggtgcttgcttctcgggagtgcgattgtccc

SEQ ID NO: 158803 - DNA, 50 bp, Artificial
  Synthetic oligonucleotide
actgccgagcggcgttcagcgtagtcattgcacggtgtcacgtttggtgg

SEQ ID NO: 158804 - DNA, 50 bp, Artificial
  Synthetic oligonucleotide
aggacttggcaaatccgcccggtaggccggaaaatctgccctcagcgtcc

SEQ ID NO: 158805 - DNA, 50 bp, Artificial
  Synthetic oligonucleotide
agcgctgaacgcagcgtccaagactaacgaacgccgggctcaggcatggt

SEQ ID NO: 158806 - DNA, 50 bp, Artificial
  Synthetic oligonucleotide
ggaagctcgacatcacggagtgccggattctgacgcaggcgtatggcgat

SEQ ID NO: 158807 - DNA, 50 bp, Artificial
  Synthetic oligonucleotide
ggaacgtgtcacctcgttttgatgggtcgggaatccacacacccggcgca

SEQ ID NO: 158808 - DNA, 50 bp, Artificial
  Synthetic oligonucleotide
actcgatcgcaacgctgcgctggcggattgctgcacacatctccaggcga

SEQ ID NO: 158809 - DNA, 55 bp, Artificial
  Synthetic oligonucleotide
gacgcgatattggagtggtggcgagccgcatccggagagtcgtgagtgtttaacc

SEQ ID NO: 158810 - DNA, 50 bp, Artificial
  Synthetic oligonucleotide
ccaaccggccccgacctcaataccgaaactgtctcgccagacgtgaagcg

SEQ ID NO: 158811 - DNA, 50 bp, Artificial
  Synthetic oligonucleotide
actcgcacgccatgctcccagaacctgcgaattgccgattgtgcggctcg

SEQ ID NO: 158812 - DNA, 50 bp, Artificial
  Synthetic oligonucleotide
gccgcaaatcgggtgccgcgaattgatgcgggttgcctacgaagtttgta

SEQ ID NO: 158813 - DNA, 50 bp, Artificial
  Synthetic oligonucleotide
agagcactgacgtaccaacgggcacatcaagtgaccccgcgactctccgc

SEQ ID NO: 158814 - DNA, 50 bp, Artificial
  Synthetic oligonucleotide
actcgcgggcaactttgtcgcgtgatcggtctgccacagcacaacgctcg

SEQ ID NO: 158815 - DNA, 50 bp, Artificial
  Synthetic oligonucleotide
actcgcgttacaggactcgccgtcgaaaactggctccggcctgcgtagcg

SEQ ID NO: 158816 - DNA, 50 bp, Artificial
  Synthetic oligonucleotide
actcggactccgctgttatcgcgggtggggaacggacgacggatcccagc

SEQ ID NO: 158817 - DNA, 50 bp, Artificial
  Synthetic oligonucleotide
gcttgctgtaatccgtcagcccaatatcgagcagcgtaggcttacggata

SEQ ID NO: 158818 - DNA, 50 bp, Artificial
  Synthetic oligonucleotide
actcggcgggttgtccaacgcggcatgtctcgtgcgcagcgggtctagcc

SEQ ID NO: 158819 - DNA, 50 bp, Artificial
  Synthetic oligonucleotide
aggaatgcgatgcgcaaatagaacagaccctggccttgcttgcggcggag

SEQ ID NO: 158820 - DNA, 55 bp, Artificial
  Synthetic oligonucleotide
gacgcgggctgggtgacgtctgcatgtcaatacgaatagcagccgcgaattcgcc

SEQ ID NO: 158821 - DNA, 50 bp, Artificial
  Synthetic oligonucleotide
actcggggcgggacgcagtcaggagtaacgcacttacgccaggaggtacg

SEQ ID NO: 158822 - DNA, 50 bp, Artificial
  Synthetic oligonucleotide
ccaaccccgcaagcggaatcgcaccgatatgcgcgttacgccagctagaa

SEQ ID NO: 158823 - DNA, 50 bp, Artificial
  Synthetic oligonucleotide
accagaaacccatgccgcccgaccgattggagcgtgccttgattgacggg

SEQ ID NO: 158824 - DNA, 50 bp, Artificial
  Synthetic oligonucleotide
accaggcacagctgtctgcggtgggcacgctcaagagttcgctatccacc

SEQ ID NO: 158825 - DNA, 50 bp, Artificial
  Synthetic oligonucleotide
agtgccgggatagctaactgcgacatatgaccggcggaaaccgacccgtg

SEQ ID NO: 158826 - DNA, 50 bp, Artificial
  Synthetic oligonucleotide
gatccagcgatacggaaatgacgtgtgcgctgacgggactctggggccat

SEQ ID NO: 158827 - DNA, 50 bp, Artificial
  Synthetic oligonucleotide
agtgccgccccactttgagcgaagcgtaggtgtttgctccgcgatactta

SEQ ID NO: 158828 - DNA, 50 bp, Artificial
  Synthetic oligonucleotide
cggtcgtccgcgtgcgtcgattgcggtgattacggtccctcgggaatcgt

SEQ ID NO: 158829 - DNA, 50 bp, Artificial
  Synthetic oligonucleotide
accagtcactgcataccacgctggtcggcccattcggcacgcccatcgag

SEQ ID NO: 158830 - DNA, 50 bp, Artificial
  Synthetic oligonucleotide
agtgcaattctcgctgacgcggagccaggatcttgtcgtactgacggggc

SEQ ID NO: 158831 - DNA, 55 bp, Artificial
  Synthetic oligonucleotide
gacgcgtcaaggggcgtgcagggttggattaggaaagcttacggcgatagagtct

SEQ ID NO: 158832 - DNA, 50 bp, Artificial
  Synthetic oligonucleotide
accagtcgcgcactgtgtcgcgccatgcggatgatgacgtcaaccgggcc

SEQ ID NO: 158833 - DNA, 50 bp, Artificial
  Synthetic oligonucleotide
agtgagccgcaactgggctgcatgagccgattcgaactgtcctccgcgac

SEQ ID NO: 158834 - DNA, 50 bp, Artificial
  Synthetic oligonucleotide
accagtctggtatcaggccccaccagcaagacattagcgccggcctcgcg

SEQ ID NO: 158835 - DNA, 50 bp, Artificial
  Synthetic oligonucleotide
agtgaccctccgccgggcactaccgtgatgtggcgtgggatgcgacgtct

SEQ ID NO: 158836 - DNA, 50 bp, Artificial
  Synthetic oligonucleotide
cgcaacgagggtctgatctcgacagcggaccatgaggagcgcaaggccaa

SEQ ID NO: 158837 - DNA, 50 bp, Artificial
  Synthetic oligonucleotide
accatcatttccggcaggtgtttgtgcgtcagcccaagcgcgtaggggcg

SEQ ID NO: 158838 - DNA, 50 bp, Artificial
  Synthetic oligonucleotide
gtcggcgaaaccgtattgcgtcgtaggcgcacaggaatgccgctgaaggc

SEQ ID NO: 158839 - DNA, 50 bp, Artificial
  Synthetic oligonucleotide
accatccagcggcgagcaggggcgatctctacccgtcggcattcttgact

SEQ ID NO: 158840 - DNA, 50 bp, Artificial
  Synthetic oligonucleotide
accatgattttgcggttccggtccaggtggctcgcaacggcttacgtgct

SEQ ID NO: 158841 - DNA, 50 bp, Artificial
  Synthetic oligonucleotide
accatgcggaccatgcggacatgccgtctcctgatctgcgcagccttaca

SEQ ID NO: 158842 - DNA, 55 bp, Artificial
  Synthetic oligonucleotide
cctgtccgggtcggacaatactgtcaagaaacgtacctcagaagatatgatgcga

SEQ ID NO: 158843 - DNA, 50 bp, Artificial
  Synthetic oligonucleotide
acatgaagcgcatttgcgtccgagcatcgtgtgcagcccttgcgtgccgt

SEQ ID NO: 158844 - DNA, 50 bp, Artificial
  Synthetic oligonucleotide
gatatacgcgaaggaatggcacgctaaccgtttctatcacagacctaagc

SEQ ID NO: 158845 - DNA, 50 bp, Artificial
  Synthetic oligonucleotide
cagatcggaaatccccgcaggggatcagaatagcgagccttgggccggcc

SEQ ID NO: 158846 - DNA, 50 bp, Artificial
  Synthetic oligonucleotide
agcgcgatccacaagatatcttcgtgcgcatttccgtgcacaaccgcggg

SEQ ID NO: 158847 - DNA, 50 bp, Artificial
  Synthetic oligonucleotide
gatcaatactatcgtcctgaccttaatccgaaggggtctccactctcctt

SEQ ID NO: 158848 - DNA, 50 bp, Artificial
  Synthetic oligonucleotide
acattgggggagcccaccgataccttcaggtttccgaacggcacgtcccg

SEQ ID NO: 158849 - DNA, 50 bp, Artificial
  Synthetic oligonucleotide
agtgctgagccggtcgggtcgtctacgctcaaccgacgtaccacgttcca

SEQ ID NO: 158850 - DNA, 50 bp, Artificial
  Synthetic oligonucleotide
accaaagcaagcccgctggacattcacagcgcaagcagcaccctggaatg

SEQ ID NO: 158851 - DNA, 50 bp, Artificial
  Synthetic oligonucleotide
accaacggaccgtcgtgggtggaaaatgtcgggctcctatcctctccgga

SEQ ID NO: 158852 - DNA, 50 bp, Artificial
  Synthetic oligonucleotide
accaactaccaaccggctccgagccaagtccaatggcggcatcagctcta

SEQ ID NO: 158853 - DNA, 55 bp, Artificial
  Synthetic oligonucleotide
cgacagcacgtcgccatgatgacaacggatcgccgaagggtccgtttgatcggcc

SEQ ID NO: 158854 - DNA, 50 bp, Artificial
  Synthetic oligonucleotide
accaagtgcgggatctccgaggaggctcgggaagcaaccgtccgtgtagg

SEQ ID NO: 158855 - DNA, 50 bp, Artificial
  Synthetic oligonucleotide
accaatgacttccgattgcattgcggcacgcgattcacgtcgcgcaaccc

SEQ ID NO: 158856 - DNA, 50 bp, Artificial
  Synthetic oligonucleotide
accacaagagcgtaccggtagatgcaggagccgcgtccgattacggcctg

SEQ ID NO: 158857 - DNA, 50 bp, Artificial
  Synthetic oligonucleotide
accacactgggtcgacgtcccaggaacgcacgtcgttagcaatcccgaga

SEQ ID NO: 158858 - DNA, 50 bp, Artificial
  Synthetic oligonucleotide
gtctggacaaagtcgggttccgcgctgggccttcctatatactttcagtg

SEQ ID NO: 158859 - DNA, 50 bp, Artificial
  Synthetic oligonucleotide
accaccgcccgttcgcaatgcctccacggtagtcctccgtcgcgatgaca

SEQ ID NO: 158860 - DNA, 50 bp, Artificial
  Synthetic oligonucleotide
gtctgcgtttgccaagatatacgattgcaattcaggattattgggagccg

SEQ ID NO: 158861 - DNA, 50 bp, Artificial
  Synthetic oligonucleotide
accaccgttctcgagacccgaccacacgagcgggcacaacagcctcgtca

SEQ ID NO: 158862 - DNA, 50 bp, Artificial
  Synthetic oligonucleotide
agtctaggagccttccgccccggggttaacctctagtattcgaaggcatt

SEQ ID NO: 158863 - DNA, 50 bp, Artificial
  Synthetic oligonucleotide
acccgactttggcgccacccctgaagggtagtcgccgacaaccccgtatt

SEQ ID NO: 158864 - DNA, 60 bp, Artificial
  Synthetic oligonucleotide
gaagaggatctacgccgtgtatctggagaaccttcttgtgccgcctgattgggtgaaggc

SEQ ID NO: 158865 - DNA, 55 bp, Artificial
  Synthetic oligonucleotide
cgacagatagtaagcctctcattcatccggaggtgctgaacatgcgtgtctttgt

SEQ ID NO: 158866 - DNA, 50 bp, Artificial
  Synthetic oligonucleotide
acccgataaagccgggttcgcttccaaacggtcaggatggcaagtccgcg

SEQ ID NO: 158867 - DNA, 50 bp, Artificial
  Synthetic oligonucleotide
agtcgtcctctggagacaggagtctccctgcgattgagtgagctgcgccg

SEQ ID NO: 158868 - DNA, 50 bp, Artificial
  Synthetic oligonucleotide
agtcggtgcttctgaacggcccccagtgggacagtgcgggattggtacta

SEQ ID NO: 158869 - DNA, 50 bp, Artificial
  Synthetic oligonucleotide
acccgcacgcttaaagtctcccgctgggtctatgcgcttagcgcgctccg

SEQ ID NO: 158870 - DNA, 50 bp, Artificial
  Synthetic oligonucleotide
acccgccattcaccgcgagaacccgcatgcaatcagcccaagaaacccct

SEQ ID NO: 158871 - DNA, 50 bp, Artificial
  Synthetic oligonucleotide
acccgcgctttgccggcgcagtcaaggtatggtggggcgatgtcgatacg

SEQ ID NO: 158872 - DNA, 50 bp, Artificial
  Synthetic oligonucleotide
acccgctcattctgggcaacttggccgattcggggcgcactacttgacat

SEQ ID NO: 158873 - DNA, 50 bp, Artificial
  Synthetic oligonucleotide
gtccccgaagccatgacctttcaggggttcgcctcggagtacgggctctt

SEQ ID NO: 158874 - DNA, 50 bp, Artificial
  Synthetic oligonucleotide
acccgcttcccgtaatgcggtccgccaatgcgccagtcaattgcgatggg

SEQ ID NO: 158875 - DNA, 50 bp, Artificial
  Synthetic oligonucleotide
acccggcaagtactgcccggcgcagatcggtggacacgacgattagctgt

SEQ ID NO: 158876 - DNA, 54 bp, Artificial
  Synthetic oligonucleotide
cgacacgatttctctttcggatcaggacgttaggggaatgccgggagacacccg

SEQ ID NO: 158877 - DNA, 50 bp, Artificial
  Synthetic oligonucleotide
agtcgaatgccgaccgacgcgagtggattcagcccaccgaaactcaccat

SEQ ID NO: 158878 - DNA, 50 bp, Artificial
  Synthetic oligonucleotide
acccgggatgcatcggcttgcattcgaagacgcgcggcctaccattgact

SEQ ID NO: 158879 - DNA, 50 bp, Artificial
  Synthetic oligonucleotide
acccgggcaatgcgtccccctgcgaccgattcacgactgcaaccggaaac

SEQ ID NO: 158880 - DNA, 50 bp, Artificial
  Synthetic oligonucleotide
acccgggcggcaaactaactcggtagcgctgcgtcgcatgaacatagggc

SEQ ID NO: 158881 - DNA, 50 bp, Artificial
  Synthetic oligonucleotide
accatggactcagcccatccgggttgcctgggtattaacggtgcgctcgc

SEQ ID NO: 158882 - DNA, 50 bp, Artificial
  Synthetic oligonucleotide
accattgcctcaccctcgcaaattgacgactagtgcgcggcctgcctcga

SEQ ID NO: 158883 - DNA, 50 bp, Artificial
  Synthetic oligonucleotide
acccaccaggcgatagcgcgtacccggtacatacgcagagagcgggcgac

SEQ ID NO: 158884 - DNA, 50 bp, Artificial
  Synthetic oligonucleotide
gatggtcgctcggtcgtgtaccaggatgctcggggtgtcgcccgcttcat

SEQ ID NO: 158885 - DNA, 50 bp, Artificial
  Synthetic oligonucleotide
cagcacgccctacgtcagcatgtgaaaggcgactcccatatcgccgctga

SEQ ID NO: 158886 - DNA, 50 bp, Artificial
  Synthetic oligonucleotide
agcgcgctacggtagttttcagttgggcctctgcccgacggtccccatcc

SEQ ID NO: 158887 - DNA, 55 bp, Artificial
  Synthetic oligonucleotide
ctgtcgggcctctttggcatatatgcgtgcgatcttctcaaaaccgcgtgtcgcg

SEQ ID NO: 158888 - DNA, 50 bp, Artificial
  Synthetic oligonucleotide
acccatgcagctccgagctcgtttgcctccgtagcagtcgcttgaccgag

SEQ ID NO: 158889 - DNA, 50 bp, Artificial
  Synthetic oligonucleotide
accccaccccaaaccggccttctagatccccggcgatacctcgccttaga

SEQ ID NO: 158890 - DNA, 50 bp, Artificial
  Synthetic oligonucleotide
agtctggaaaccggtagttgccgcggtgaatggatactgcctcggcggag

SEQ ID NO: 158891 - DNA, 50 bp, Artificial
  Synthetic oligonucleotide
accccactgcgtcgcgttcaatggtcgatgtttagccgcagccgttcgca

SEQ ID NO: 158892 - DNA, 50 bp, Artificial
  Synthetic oligonucleotide
gtcgattcaacaaggccaaattgcggtgttcaagaaaaccatggacatcg

SEQ ID NO: 158893 - DNA, 50 bp, Artificial
  Synthetic oligonucleotide
acccccatccaaccgccgcttacctgtcgtaagtgcggctatgtctcgct

SEQ ID NO: 158894 - DNA, 50 bp, Artificial
  Synthetic oligonucleotide
accccgaccgcgcacacgtttccgatttaaggaaagcgttggatccccgc

SEQ ID NO: 158895 - DNA, 50 bp, Artificial
  Synthetic oligonucleotide
agatccggaagcggaccctatgcctcgtccggctgaaatgacggctctcg

SEQ ID NO: 158896 - DNA, 50 bp, Artificial
  Synthetic oligonucleotide
accccgcccacagagtctgcttcgcgtaagaaccgggtaagcgggcgctc

SEQ ID NO: 158897 - DNA, 50 bp, Artificial
  Synthetic oligonucleotide
accccgcccttcttcggaggggtcaaactttgcggaacctcgccgttagc

SEQ ID NO: 158898 - DNA, 55 bp, Artificial
  Synthetic oligonucleotide
cgaatgggtgttcgcgagcaagacctcggaagacgggaagatcgctgaaccccgg

SEQ ID NO: 158899 - DNA, 50 bp, Artificial
  Synthetic oligonucleotide
acccctacgaagggctccgaatcttggggcccggtcagcaaacatccacg

SEQ ID NO: 158900 - DNA, 50 bp, Artificial
  Synthetic oligonucleotide
accccttgcactgacgacattcctggtatcgcaccggccctggagcacac

SEQ ID NO: 158901 - DNA, 50 bp, Artificial
  Synthetic oligonucleotide
atacgggcgttaccgccatagtaggcactcgctcacgaacggcaggtcgt

SEQ ID NO: 158902 - DNA, 50 bp, Artificial
  Synthetic oligonucleotide
atacgcggccttacagaaaagcgtctgggcatgcctcccggagcggaagt

SEQ ID NO: 158903 - DNA, 50 bp, Artificial
  Synthetic oligonucleotide
acacgcgggaggtggtatgtgggcagccaaattgggaaaagcagcggtta

SEQ ID NO: 158904 - DNA, 50 bp, Artificial
  Synthetic oligonucleotide
acacgctagcaccgtgcatgctgctgtgagacgaggtggggactggccga

SEQ ID NO: 158905 - DNA, 50 bp, Artificial
  Synthetic oligonucleotide
acacggacacgcaggccgcgcgctcatactaatggaaatcgccccgtctg

SEQ ID NO: 158906 - DNA, 50 bp, Artificial
  Synthetic oligonucleotide
atacgcaatcagcgcgccccaaagcggggccgttgcattcagaatcgact

SEQ ID NO: 158907 - DNA, 50 bp, Artificial
  Synthetic oligonucleotide
acacggcaagtgcgtgtaacgccgcttggtgaggcctactatgcccgctg

SEQ ID NO: 158908 - DNA, 50 bp, Artificial
  Synthetic oligonucleotide
ataccttcaggcctctatctcgcgctttggcacggacgcaggacaccgga

SEQ ID NO: 158909 - DNA, 55 bp, Artificial
  Synthetic oligonucleotide
ctgtcggttacactctgagtttagtgcggcattctagagcgtgcagcgggcggca

SEQ ID NO: 158910 - DNA, 50 bp, Artificial
  Synthetic oligonucleotide
atacccaagccgatacctcccgcctgtattgcaaccgctggcaggtccct

SEQ ID NO: 158911 - DNA, 50 bp, Artificial
  Synthetic oligonucleotide
acacgtcgtgctagccgcccctccaaaagacgcctcggttgtcaatccgg

SEQ ID NO: 158912 - DNA, 50 bp, Artificial
  Synthetic oligonucleotide
ataccaacagcgacaagtgggggccacacgatgacaccgaacggggaagg

SEQ ID NO: 158913 - DNA, 50 bp, Artificial
  Synthetic oligonucleotide
cagaacgaatcctgtgccggtcgatcccgttgcgtgggcccggttcggtt

SEQ ID NO: 158914 - DNA, 50 bp, Artificial
  Synthetic oligonucleotide
acacgttacccggctagcctaacccctttcaggtgccctgtccgctgact

SEQ ID NO: 158915 - DNA, 50 bp, Artificial
  Synthetic oligonucleotide
acactccgtcagttgcgggtgttcctcgcagtcgcggaaacgggtggttt

SEQ ID NO: 158916 - DNA, 50 bp, Artificial
  Synthetic oligonucleotide
gagtgaatgcgacgggggaagccgacagcctgcatgaataacccccagcg

SEQ ID NO: 158917 - DNA, 50 bp, Artificial
  Synthetic oligonucleotide
ataatggaggcgtgctaccctgctgggatctgtgtcccgcaaaccgtcct

SEQ ID NO: 158918 - DNA, 50 bp, Artificial
  Synthetic oligonucleotide
cccactccccggcaaggtagtaacactgctgaaccacggggcaatgcgca

SEQ ID NO: 158919 - DNA, 50 bp, Artificial
  Synthetic oligonucleotide
ataatcccgagcggcccgcactgaaccggtatatcccgtcgtgggagggc

SEQ ID NO: 158920 - DNA, 55 bp, Artificial
  Synthetic oligonucleotide
cgaatggcgtgcgaaccgtgtgcgaaggccgtgcgaaaccgctgcgcagaggtct

SEQ ID NO: 158921 - DNA, 50 bp, Artificial
  Synthetic oligonucleotide
agcaagcacatgacaagctgccggtggtatgcctgaaaaagcgggcctga

SEQ ID NO: 158922 - DNA, 50 bp, Artificial
  Synthetic oligonucleotide
acacccatgcgtttccggatacccgtgcatcgccgaatacccgcgcgttg

SEQ ID NO: 158923 - DNA, 50 bp, Artificial
  Synthetic oligonucleotide
acacccgcgagcaaggacaagacaaccactgagcctaccgcccaaaggga

SEQ ID NO: 158924 - DNA, 50 bp, Artificial
  Synthetic oligonucleotide
atagccctcgtggcggcagggggaccattctgtgacgggtatctgctagg

SEQ ID NO: 158925 - DNA, 50 bp, Artificial
  Synthetic oligonucleotide
acacccttccccagtagggctctcaaggttccgtaggtccccgtggtgta

SEQ ID NO: 158926 - DNA, 50 bp, Artificial
  Synthetic oligonucleotide
acaccgcatcaccgttacggcgcagcgtggatgactggccatcacgtgca

SEQ ID NO: 158927 - DNA, 50 bp, Artificial
  Synthetic oligonucleotide
atagacgcctctatccgctcgtctggggcctgttgggactggccttcctt

SEQ ID NO: 158928 - DNA, 50 bp, Artificial
  Synthetic oligonucleotide
acaccggaagaggcaaacgtaatccgccgacgcacgagactggctggcaa

SEQ ID NO: 158929 - DNA, 50 bp, Artificial
  Synthetic oligonucleotide
cgtaacgatatgtaccgacgggtttcgcccgtttcaaggacggcgtctta

SEQ ID NO: 158930 - DNA, 50 bp, Artificial
  Synthetic oligonucleotide
acaccggcaccgcttcagtcgccaggtccctgaccaacgtgggaatgttg

SEQ ID NO: 158931 - DNA, 55 bp, Artificial
  Synthetic oligonucleotide
ctgtctcgttacaggttgagttctcgcgttgtgccgtattccaattgagccgaac

SEQ ID NO: 158932 - DNA, 50 bp, Artificial
  Synthetic oligonucleotide
acacctgtcacatccccgtgcgcatgtcatcggctagccttgcctttcga

SEQ ID NO: 158933 - DNA, 50 bp, Artificial
  Synthetic oligonucleotide
gttccgcaggtctgatgcaagcggagtagtagtgcataaacagcgtcacg

SEQ ID NO: 158934 - DNA, 50 bp, Artificial
  Synthetic oligonucleotide
acaccttgcgcaaagaccgggttgagctccgccctttccgggggcaacgg

SEQ ID NO: 158935 - DNA, 50 bp, Artificial
  Synthetic oligonucleotide
cactgagaactgatagttcgagcagacttcgttgtgatccggcgtgtaga

SEQ ID NO: 158936 - DNA, 50 bp, Artificial
  Synthetic oligonucleotide
acacgaagcagtgggatcgcctgcgaacgttattcacggccgattgccga

SEQ ID NO: 158937 - DNA, 50 bp, Artificial
  Synthetic oligonucleotide
acacgactctggcgttgccttgcgagcaaccgattctccggcgacctgtc

SEQ ID NO: 158938 - DNA, 50 bp, Artificial
  Synthetic oligonucleotide
acacgagcacagcgccccctatcgcggctaccgcattcacatcgcggcac

SEQ ID NO: 158939 - DNA, 50 bp, Artificial
  Synthetic oligonucleotide
cccagccgctgtgagggtcgaatgtgccgctactaacgaaaaagtgcgcc

SEQ ID NO: 158940 - DNA, 50 bp, Artificial
  Synthetic oligonucleotide
gtggatgtttgctgaccgggccccaagattcggagcccttcgtaggggtt

SEQ ID NO: 158941 - DNA, 50 bp, Artificial
  Synthetic oligonucleotide
acaggcgctgtcgggcggatagcgggagtccactcacacgcgaggaggca

SEQ ID NO: 158942 - DNA, 55 bp, Artificial
  Synthetic oligonucleotide
cttaagcaatccgtatgcctgtgcccgggattggcgccatgcgtaacgatatacc

SEQ ID NO: 158943 - DNA, 50 bp, Artificial
  Synthetic oligonucleotide
acagggccgccataggctgcattcagtctggcgaaaggcaggttcgcttc

SEQ ID NO: 158944 - DNA, 50 bp, Artificial
  Synthetic oligonucleotide
cgatgcctccacggcgcactctcacccacccgtgtcccatgatcgaaagc

SEQ ID NO: 158945 - DNA, 50 bp, Artificial
  Synthetic oligonucleotide
acaggtgccgcctggtccgcgataaccgttcatgctgcgcgatgcagtaa

SEQ ID NO: 158946 - DNA, 50 bp, Artificial
  Synthetic oligonucleotide
agatgttcagaaccgcgttcgaatgcccacggccactagcgtctgggtgc

SEQ ID NO: 158947 - DNA, 50 bp, Artificial
  Synthetic oligonucleotide
gatacggaaatgacgtgtgcgctgacgggactctggggccatgcagcctt

SEQ ID NO: 158948 - DNA, 50 bp, Artificial
  Synthetic oligonucleotide
acagtacgtcgggccaaataaggccagcaattccgcgactagtgccgccc

SEQ ID NO: 158949 - DNA, 50 bp, Artificial
  Synthetic oligonucleotide
gtgcgcggcggaccatagagcagtgttgcccatcaggaagtcaccgtctc

SEQ ID NO: 158950 - DNA, 50 bp, Artificial
  Synthetic oligonucleotide
acagtccagcgctgtactagggtaaacgcgggcgggcaagggccacagca

SEQ ID NO: 158951 - DNA, 50 bp, Artificial
  Synthetic oligonucleotide
agtggtgaacgcgccctagcatccgcctaccgaacaaacttcggcgccgc

SEQ ID NO: 158952 - DNA, 50 bp, Artificial
  Synthetic oligonucleotide
acagtggttcgcttatgcagacgtgaacaggggtcgcaggggtcgagggc

SEQ ID NO: 158953 - DNA, 55 bp, Artificial
  Synthetic oligonucleotide
cttcaactgcgctgaacttccccgttcaaagcgtattcttcaagccaccgggtac

SEQ ID NO: 158954 - DNA, 50 bp, Artificial
  Synthetic oligonucleotide
acatcaatcggccccgatcgtcgttaccggaacccaacgcccacctctta

SEQ ID NO: 158955 - DNA, 50 bp, Artificial
  Synthetic oligonucleotide
agtggctcagggctcgccagactgaaccatctcgatcgtgcatcggctga

SEQ ID NO: 158956 - DNA, 50 bp, Artificial
  Synthetic oligonucleotide
acatcgccagagacgaccagtatctgtgtccggcggggcaacgcgcgata

SEQ ID NO: 158957 - DNA, 50 bp, Artificial
  Synthetic oligonucleotide
acatcgccggggcatcaccaaacgaagccagtcgaccgccaaactgctct

SEQ ID NO: 158958 - DNA, 50 bp, Artificial
  Synthetic oligonucleotide
acatctagatcgagccacgcgagtccgtctgcatgaccacacgccacgct

SEQ ID NO: 158959 - DNA, 50 bp, Artificial
  Synthetic oligonucleotide
acatcttgggtgcaatcgctccgagggtccgcttgggcccgttgaatgga

SEQ ID NO: 158960 - DNA, 50 bp, Artificial
  Synthetic oligonucleotide
acagacccgggaaagcccactaagccgttgtggctcaacaccgactggcc

SEQ ID NO: 158961 - DNA, 50 bp, Artificial
  Synthetic oligonucleotide
acagacccttccttgacaccttgcgcaaagaccgggttgagctccgccct

SEQ ID NO: 158962 - DNA, 50 bp, Artificial
  Synthetic oligonucleotide
ataaacgtcagaggccgcacgcctgaggcatgaatgggaaccggggtgaa

SEQ ID NO: 158963 - DNA, 50 bp, Artificial
  Synthetic oligonucleotide
cccaacctgccgacgggttaaacggcctgcgatacctacggacactcgtc

SEQ ID NO: 158964 - DNA, 55 bp, Artificial
  Synthetic oligonucleotide
cttcatggcgtgacgtgcagggattccgtttcggaacgatgtcggttccaaaccg

SEQ ID NO: 158965 - DNA, 50 bp, Artificial
  Synthetic oligonucleotide
agttttcccatcaccggaccctcgctggctggtgcctcacgccacaattg

SEQ ID NO: 158966 - DNA, 50 bp, Artificial
  Synthetic oligonucleotide
acagatcacttagccggagtcgataccgagaacataatactggcgacgtc

SEQ ID NO: 158967 - DNA, 50 bp, Artificial
  Synthetic oligonucleotide
cggtgtgactgccaagatggtcgcgccatttcctccgcgtgatgcaacac

SEQ ID NO: 158968 - DNA, 50 bp, Artificial
  Synthetic oligonucleotide
acagattggcccaagaaacccatcacggcgatcctcccctttcctgcggg

SEQ ID NO: 158969 - DNA, 50 bp, Artificial
  Synthetic oligonucleotide
agtttggggcgcagtcagagtttctggacgaggctcagatgcgtgcgcgg

SEQ ID NO: 158970 - DNA, 50 bp, Artificial
  Synthetic oligonucleotide
acagctgcccgacgttcaagtgtgtcgccatttgcagcttcgctccgcct

SEQ ID NO: 158971 - DNA, 50 bp, Artificial
  Synthetic oligonucleotide
acaggactcgccgtcgaaaactggctccggcctgcgtagcgaaatgcaag

SEQ ID NO: 158972 - DNA, 50 bp, Artificial
  Synthetic oligonucleotide
cgatgcccgttctaccgcctccaagcgtccgcactgtatccgaagcagcc

SEQ ID NO: 158973 - DNA, 50 bp, Artificial
  Synthetic oligonucleotide
agcaacccgcgttatccgttttgcgcgtgccgcttaaatgccaattcgcg

SEQ ID NO: 158974 - DNA, 50 bp, Artificial
  Synthetic oligonucleotide
acaggcagggaatggggcgctgcatgtgtctcctgaggggtcgtgtcatc

SEQ ID NO: 158975 - DNA, 58 bp, Artificial
  Synthetic oligonucleotide
ggattcacatagccggtatcgttcacaaggaatgtccccggcgtatacatggcccaag

SEQ ID NO: 158976 - DNA, 55 bp, Artificial
  Synthetic oligonucleotide
cttcccgtcttccgaggtcttgctcgcgaacacccattcggatggcacccaggtc

SEQ ID NO: 158977 - DNA, 50 bp, Artificial
  Synthetic oligonucleotide
agttggcgcattagtgggtcgcgcgtctggagactgcatagcacggccaa

SEQ ID NO: 158978 - DNA, 50 bp, Artificial
  Synthetic oligonucleotide
acaggcgctgaatgaggccctcggtgtatcgcaccctccatctatgggcc

SEQ ID NO: 158979 - DNA, 50 bp, Artificial
  Synthetic oligonucleotide
gtggcccttcatcactgtatgacccgcgctaaagagggtcgatttctgag

SEQ ID NO: 158980 - DNA, 50 bp, Artificial
  Synthetic oligonucleotide
cagagcgaagcttcccggattggctactgcgcttctatgggggcgagacc

SEQ ID NO: 158981 - DNA, 50 bp, Artificial
  Synthetic oligonucleotide
acaggcgctgagtcgcgcatgcggtctaaaggaggcggtacttgccggca

SEQ ID NO: 158982 - DNA, 50 bp, Artificial
  Synthetic oligonucleotide
acctcccagtaccgcattgcgcggtctatcggggaacatgacgagtcgct

SEQ ID NO: 158983 - DNA, 50 bp, Artificial
  Synthetic oligonucleotide
ggtcgcgcgatgccgtgtggcgttcagaaatgcagcaggtcgtgttgcag

SEQ ID NO: 158984 - DNA, 50 bp, Artificial
  Synthetic oligonucleotide
acctcccgacttagcgggcgcgacttccatgcttcttgcggcccttacca

SEQ ID NO: 158985 - DNA, 50 bp, Artificial
  Synthetic oligonucleotide
cgggctccttgttgttagtcatagcacgtataggcactttcttgtcacga

SEQ ID NO: 158986 - DNA, 50 bp, Artificial
  Synthetic oligonucleotide
aggtgcttcctggtcagccaacggtggttttggacgttgcccataacccg

SEQ ID NO: 158987 - DNA, 52 bp, Artificial
  Synthetic oligonucleotide
cgaatggcggccctagggtacacccctaaactcacggttcccataacgggca

SEQ ID NO: 158988 - DNA, 50 bp, Artificial
  Synthetic oligonucleotide
acctccgtcggaaggcgactttgctggagaacgccccaaggtccttcgaa

SEQ ID NO: 158989 - DNA, 50 bp, Artificial
  Synthetic oligonucleotide
acctcgccaatacgatctggcgcaatgagcgggacgcgcaacactgcacg

SEQ ID NO: 158990 - DNA, 50 bp, Artificial
  Synthetic oligonucleotide
acctcgcccgaagctatccttgcctcgtaggtgtcgaccatcgcaaaata

SEQ ID NO: 158991 - DNA, 50 bp, Artificial
  Synthetic oligonucleotide
acctcgcgtgcatggaccgtcaccgattgcgtgagtgcaagcaggctcgt

SEQ ID NO: 158992 - DNA, 50 bp, Artificial
  Synthetic oligonucleotide
acctgacatggccaccgctgcccgatacgagctggtatgtgtccgacgcc

SEQ ID NO: 158993 - DNA, 50 bp, Artificial
  Synthetic oligonucleotide
acctgccacggcacccgagaaaacaagtgcccgtgcacatggccaggtcc

SEQ ID NO: 158994 - DNA, 50 bp, Artificial
  Synthetic oligonucleotide
acctgtcgatagtgttgagcaacgtgtatggccgcgcacttaattcaatt

SEQ ID NO: 158995 - DNA, 50 bp, Artificial
  Synthetic oligonucleotide
aggtgcgtcgcttcaagtgtgcgaacgccggctgtccccgtcgtacgttt

SEQ ID NO: 158996 - DNA, 50 bp, Artificial
  Synthetic oligonucleotide
aggtctcaccgccaaccagaaggacccgctcgaagcattcaaccgcgaaa

SEQ ID NO: 158997 - DNA, 50 bp, Artificial
  Synthetic oligonucleotide
aggtcgggcactgaaatgaacggcttgcctactcccttgcgaccctcggc

SEQ ID NO: 158998 - DNA, 55 bp, Artificial
  Synthetic oligonucleotide
cgaatgcatcggtacgccttgcattctagtgagcacccctttcgcgcaaacgttg

SEQ ID NO: 158999 - DNA, 50 bp, Artificial
  Synthetic oligonucleotide
accttgcacgtgccagtgaccctccgcagggcaataccgtgatgtggcgt

SEQ ID NO: 159000 - DNA, 50 bp, Artificial
  Synthetic oligonucleotide
agagtgcgacgcgaagcagggccatacgaccttggtccaatatcgccggt

SEQ ID NO: 159001 - DNA, 50 bp, Artificial
  Synthetic oligonucleotide
agcgcgtccgctactcgcgcgggctgccacctagagactgaacgaccgta

SEQ ID NO: 159002 - DNA, 50 bp, Artificial
  Synthetic oligonucleotide
accgtattgcgtcgtaggcgcacaggaatgccgctgaaggcaacggcgcg

SEQ ID NO: 159003 - DNA, 50 bp, Artificial
  Synthetic oligonucleotide
cgggtccacgcaagaccgtcagtacgaatggcacatcgcgggcattaccc

SEQ ID NO: 159004 - DNA, 50 bp, Artificial
  Synthetic oligonucleotide
aggttgcatagatccttcacccacggtcggacacgcacggcgatcgaagg

SEQ ID NO: 159005 - DNA, 50 bp, Artificial
  Synthetic oligonucleotide
cgcatggtgtggattcgcctacccgccgcgaccgtctaaagtaccggcgc

SEQ ID NO: 159006 - DNA, 50 bp, Artificial
  Synthetic oligonucleotide
cagcgaacggaaaaggtagccgtctatgggggcccggcggagtggccact

SEQ ID NO: 159007 - DNA, 50 bp, Artificial
  Synthetic oligonucleotide
cgccaacacgatccttcgtggtcatggctcctggcgcggtactgttcgcc

SEQ ID NO: 159008 - DNA, 50 bp, Artificial
  Synthetic oligonucleotide
accgtgcatgctgctgtgagacgaggtggggactggccgaacctcaacta

SEQ ID NO: 159009 - DNA, 55 bp, Artificial
  Synthetic oligonucleotide
cttcgttctgctgtgccgttgatgccggggtttccaccgagtgtcccgatgcgtc

SEQ ID NO: 159010 - DNA, 50 bp, Artificial
  Synthetic oligonucleotide
accgtgccttggtcggccaagtctcgaaccaacgttgcactgggcgcttc

SEQ ID NO: 159011 - DNA, 50 bp, Artificial
  Synthetic oligonucleotide
accgtggtaccggtgtgccagccttgtacgggatccattggcgagcgggc

SEQ ID NO: 159012 - DNA, 50 bp, Artificial
  Synthetic oligonucleotide
accgttcctggtaaccccagcgcaggcgaatgtaggtgggcctgctcagg

SEQ ID NO: 159013 - DNA, 50 bp, Artificial
  Synthetic oligonucleotide
aggtgtcccgatgtcgtcgtaagtcacgcttctgagccgcccacgctgtt

SEQ ID NO: 159014 - DNA, 50 bp, Artificial
  Synthetic oligonucleotide
accgttggacgagcgcgtgagtgtggcgcagcacacggaatgggggcatc

SEQ ID NO: 159015 - DNA, 50 bp, Artificial
  Synthetic oligonucleotide
aggtgggtgctacattggcaccgcttaggtcttgctgaggggttcgagcc

SEQ ID NO: 159016 - DNA, 50 bp, Artificial
  Synthetic oligonucleotide
acctcacgcatccttgagcgtggggctcgacttcaggcagtcagcgctgt

SEQ ID NO: 159017 - DNA, 50 bp, Artificial
  Synthetic oligonucleotide
acctcacgcgctccgccaccttactctgaggggcgtcgttcgtggatcgc

SEQ ID NO: 159018 - DNA, 50 bp, Artificial
  Synthetic oligonucleotide
acctccaggagtgggttggatcttcacgagtcggttctggcgacccgccc

SEQ ID NO: 159019 - DNA, 50 bp, Artificial
  Synthetic oligonucleotide
acctcccacgctttccacggtaagcggcgttgcatgaccctgtggcgcta

SEQ ID NO: 159020 - DNA, 55 bp, Artificial
  Synthetic oligonucleotide
cttcttctgtcgacttatgcctcgacggaattgtgtccacgcggaccactactcc

SEQ ID NO: 159021 - DNA, 50 bp, Artificial
  Synthetic oligonucleotide
acgactggcggtggattggactggtagacgtaggtacccggcgccccata

SEQ ID NO: 159022 - DNA, 50 bp, Artificial
  Synthetic oligonucleotide
agagtgatgcgctctgcctgtacggcatccgaccttacacccgtcgacga

SEQ ID NO: 159023 - DNA, 50 bp, Artificial
  Synthetic oligonucleotide
acgagcaaaggacaatgtccgcaagaagcgccaggcttagtcctgcgccg

SEQ ID NO: 159024 - DNA, 50 bp, Artificial
  Synthetic oligonucleotide
gggtaatgcccgcgatgtgccattcgtactgacggtcttgcgtggacccg

SEQ ID NO: 159025 - DNA, 50 bp, Artificial
  Synthetic oligonucleotide
acgagggatgaacgacgaaccgaggcctagcgccgtggcggtcaaactgc

SEQ ID NO: 159026 - DNA, 50 bp, Artificial
  Synthetic oligonucleotide
acgaggggtacgccatgtccgctgtctcgtttcctcgcgccaatccgacc

SEQ ID NO: 159027 - DNA, 50 bp, Artificial
  Synthetic oligonucleotide
acgaggtcacagatgaggatggcagttggcgtgcgattggtcgtccgcta

SEQ ID NO: 159028 - DNA, 50 bp, Artificial
  Synthetic oligonucleotide
acgagtgcgccgcagttctatcggatgattcgcgacctggccacgcgtgc

SEQ ID NO: 159029 - DNA, 50 bp, Artificial
  Synthetic oligonucleotide
agggggctagtcaaagaaggcgatcccccaagctggcaccagcacgcgtg

SEQ ID NO: 159030 - DNA, 50 bp, Artificial
  Synthetic oligonucleotide
acgagttgccggtagacgcccgccccgcgtgagtcctcgtgcttttgccg

SEQ ID NO: 159031 - DNA, 55 bp, Artificial
  Synthetic oligonucleotide
cgaatgattcgaacgcgccgcaacggaaggcgaatgtgatacggcgatatcaccg

SEQ ID NO: 159032 - DNA, 50 bp, Artificial
  Synthetic oligonucleotide
acgatagcgcaccaaatcgtgccgacatgcgggggagcattccgaggcac

SEQ ID NO: 159033 - DNA, 50 bp, Artificial
  Synthetic oligonucleotide
ggggccagagttatgtaaccgctatgtaacccgattgtggcgtaaccggt

SEQ ID NO: 159034 - DNA, 50 bp, Artificial
  Synthetic oligonucleotide
acgatcggagggccttacggatgcctcgaccggaggagggtactcgggct

SEQ ID NO: 159035 - DNA, 50 bp, Artificial
  Synthetic oligonucleotide
agagtccgccatagctgccagtcaccgtttgcgggcaacgcagtgtgccc

SEQ ID NO: 159036 - DNA, 50 bp, Artificial
  Synthetic oligonucleotide
gcggccgagtagcgacccgtcaggcatatgagcactttggcttaacgcca

SEQ ID NO: 159037 - DNA, 50 bp, Artificial
  Synthetic oligonucleotide
aggggcccgacgttcggacgaacttggccggtattacacccgagctgaca

SEQ ID NO: 159038 - DNA, 50 bp, Artificial
  Synthetic oligonucleotide
agagggtggcatcgcgcggtctcctgatacgggcacttgctcattgtcga

SEQ ID NO: 159039 - DNA, 50 bp, Artificial
  Synthetic oligonucleotide
gcggcactttcaaaccacggaggatttcatgtcgcttttcgactctgtct

SEQ ID NO: 159040 - DNA, 50 bp, Artificial
  Synthetic oligonucleotide
acgaaagttgcgcggggcttccgcaggcattctgacaaggcggcgtctgc

SEQ ID NO: 159041 - DNA, 50 bp, Artificial
  Synthetic oligonucleotide
ggtacccgctgtcgtgctaggcaacttgagtgccattatgtgcgcggcag

SEQ ID NO: 159042 - DNA, 55 bp, Artificial
  Synthetic oligonucleotide
cgaatccccgacggggaatgggcgggctgtacggaatcatggctttcgtactcga

SEQ ID NO: 159043 - DNA, 50 bp, Artificial
  Synthetic oligonucleotide
acgaacaaattacttgcgggcggtggcacgcgggggctaacagcagcgct

SEQ ID NO: 159044 - DNA, 50 bp, Artificial
  Synthetic oligonucleotide
acgaaccccgatcgacctgcccttgcctaggagcagcgccgactcgaaac

SEQ ID NO: 159045 - DNA, 50 bp, Artificial
  Synthetic oligonucleotide
acgaatagggcggggtcgtcattccacatgcccctgggaccggaaaacgg

SEQ ID NO: 159046 - DNA, 50 bp, Artificial
  Synthetic oligonucleotide
gggttgtcgtgtcggctacgcgggtcgtgtattcctcggacagccgtgaa

SEQ ID NO: 159047 - DNA, 50 bp, Artificial
  Synthetic oligonucleotide
aggtaacggaagggagacctgtcgggctgcttcacgcgtcaccagactgc

SEQ ID NO: 159048 - DNA, 50 bp, Artificial
  Synthetic oligonucleotide
acgacatgcccgatcgctgtcacgtcacgggccgattcacagtggcgaat

SEQ ID NO: 159049 - DNA, 50 bp, Artificial
  Synthetic oligonucleotide
aggtaaccggcagcgctttcgtgtcgacgtgtcgggtcggctacagacga

SEQ ID NO: 159050 - DNA, 50 bp, Artificial
  Synthetic oligonucleotide
acgaccgaccgatagcctgccactccgagtcacctctccggagccccttc

SEQ ID NO: 159051 - DNA, 50 bp, Artificial
  Synthetic oligonucleotide
agggttggttggggtacctggcagttacctttcctaacagccaccggcct

SEQ ID NO: 159052 - DNA, 50 bp, Artificial
  Synthetic oligonucleotide
acgacgacctatgcgccacccttcagtgagtcgagcctggtccattgccc

SEQ ID NO: 159053 - DNA, 55 bp, Artificial
  Synthetic oligonucleotide
cgaataaatagtgtgagctatttccttgtgtgctcaagctcttgcggtttgattc

SEQ ID NO: 159054 - DNA, 50 bp, Artificial
  Synthetic oligonucleotide
acgacgcagcagcgcatgcgactttcagccgacaggtcgggcaagcttac

SEQ ID NO: 159055 - DNA, 50 bp, Artificial
  Synthetic oligonucleotide
acgacgcttttagcggggcgcgagcgacacatggccacgacgcaatcacg

SEQ ID NO: 159056 - DNA, 50 bp, Artificial
  Synthetic oligonucleotide
agggtgggcctcacagtgcgccgggctattaaacacgagccgagtgcacg

SEQ ID NO: 159057 - DNA, 50 bp, Artificial
  Synthetic oligonucleotide
acgactggcccgtgacaacgccagccgactcaactgagcccaagggacaa

SEQ ID NO: 159058 - DNA, 50 bp, Artificial
  Synthetic oligonucleotide
agtcaggcgctagcgaggttcacggacttgaagccgcggactgagggagc

SEQ ID NO: 159059 - DNA, 50 bp, Artificial
  Synthetic oligonucleotide
cgcagcatggggagcccgccaaatgatgaagcgactcgtttcaacgcgca

SEQ ID NO: 159060 - DNA, 50 bp, Artificial
  Synthetic oligonucleotide
accgagagtggagatcttgcggcgtttccaaacctgtatcgcaatgtcat

SEQ ID NO: 159061 - DNA, 50 bp, Artificial
  Synthetic oligonucleotide
agatcaatgaccccagacgcgacccggcattgacgagggccagtggtata

SEQ ID NO: 159062 - DNA, 50 bp, Artificial
  Synthetic oligonucleotide
accgatacgctagggggcatacgcgtccgttagccgctctgagagggcaa

SEQ ID NO: 159063 - DNA, 50 bp, Artificial
  Synthetic oligonucleotide
cgcagccagcgaaggtgcggtagtaatccgtcttgccggctcaaagcgtc

SEQ ID NO: 159064 - DNA, 55 bp, Artificial
  Synthetic oligonucleotide
cttgggtcatctgtcgctccgggtattctgtgcagggactatgtgcgttatgggg

SEQ ID NO: 159065 - DNA, 50 bp, Artificial
  Synthetic oligonucleotide
gcaacccgcatcaattcgcggcacccgatttgcggcattctagccacgcc

SEQ ID NO: 159066 - DNA, 50 bp, Artificial
  Synthetic oligonucleotide
gtagttcggcggtccatggcgagcgattgttgtattgaaaacgcagcacc

SEQ ID NO: 159067 - DNA, 50 bp, Artificial
  Synthetic oligonucleotide
accgatgcaggtcgtacgatagattcgcccccgaatcgccacgcgacgcg

SEQ ID NO: 159068 - DNA, 50 bp, Artificial
  Synthetic oligonucleotide
accgattgcggatgccgcgtctccctgatgcccaactgcggtccggtgga

SEQ ID NO: 159069 - DNA, 50 bp, Artificial
  Synthetic oligonucleotide
agtcacaacacggggcagtgtgtacgtccgctgtaccctcgtctggcgta

SEQ ID NO: 159070 - DNA, 50 bp, Artificial
  Synthetic oligonucleotide
cgcaggccggagccagttttcgacggcgagtcctgtaacgcgagtgaatt

SEQ ID NO: 159071 - DNA, 50 bp, Artificial
  Synthetic oligonucleotide
accgcacctgcgacaccactcgcgcctttcgaagtaagcatggcaacgcc

SEQ ID NO: 159072 - DNA, 50 bp, Artificial
  Synthetic oligonucleotide
agtatggctggctctcgggaaaggaccagttacgggcggtaggccctccc

SEQ ID NO: 159073 - DNA, 50 bp, Artificial
  Synthetic oligonucleotide
accgcacgagagaatcggtctggacagtgtgacgtttgacgtggcgccgc

SEQ ID NO: 159074 - DNA, 50 bp, Artificial
  Synthetic oligonucleotide
accgcattgccgctgagaaagaccgtgcacgtactcgcactctcgtccga

SEQ ID NO: 159075 - DNA, 55 bp, Artificial
  Synthetic oligonucleotide
cgaccaagaaaggcgtaagcgtagcgctaatgcacgcgggaatcaatgctcgtta

SEQ ID NO: 159076 - DNA, 50 bp, Artificial
  Synthetic oligonucleotide
accgcccgacgaatccgccaatcctgcatcgcccctctgtgtagaggcgc

SEQ ID NO: 159077 - DNA, 50 bp, Artificial
  Synthetic oligonucleotide
acccgggtgcgtccggtttcttgatctgcatcacggttgcgaaacgcgtg

SEQ ID NO: 159078 - DNA, 50 bp, Artificial
  Synthetic oligonucleotide
acccggtaaattctctgcgtggcccgccacacaaaggacgttcggcgcac

SEQ ID NO: 159079 - DNA, 50 bp, Artificial
  Synthetic oligonucleotide
acccgtcatgcgccccgagtggacgcgcgacagtgctcccgactcataca

SEQ ID NO: 159080 - DNA, 50 bp, Artificial
  Synthetic oligonucleotide
cgcacattgcgtccagcggagcagcaaagccaaacttggtatgaccgcca

SEQ ID NO: 159081 - DNA, 50 bp, Artificial
  Synthetic oligonucleotide
acccgttgaggcgtttcggattcggcgcgctagagttcctcccagcccgc

SEQ ID NO: 159082 - DNA, 50 bp, Artificial
  Synthetic oligonucleotide
accctatgcaagccacagccccgacgttgcccacctgtgtgaccctgcga

SEQ ID NO: 159083 - DNA, 50 bp, Artificial
  Synthetic oligonucleotide
accctccgccacgtttgacgcgcagtgcgggaattttcgattcgcgggta

SEQ ID NO: 159084 - DNA, 50 bp, Artificial
  Synthetic oligonucleotide
accctgcacgtgtgtcggagaccgtcctacggcaagcgtttcgagcccgt

SEQ ID NO: 159085 - DNA, 50 bp, Artificial
  Synthetic oligonucleotide
agtcccttggctcgctatgggcagtgtccgttccgtggcgataagcgatt

SEQ ID NO: 159086 - DNA, 59 bp, Artificial
  Synthetic oligonucleotide
cttgcaagtcagtcatgacgcgcaaaaggtggcgattttcaatgtcgagggtgagtttt

SEQ ID NO: 159087 - DNA, 56 bp, Artificial
  Synthetic oligonucleotide
tccaccacggtcaaggtacggaatttcgaaccatcagccagttggtccgccacgaa

SEQ ID NO: 159088 - DNA, 55 bp, Artificial
  Synthetic oligonucleotide
ctgcctgaaatcgagccggtttgtggggcgaggggcattgcctttgcacggcaga

SEQ ID NO: 159089 - DNA, 50 bp, Artificial
  Synthetic oligonucleotide
acccttaatcgagccggtttgccgcggacccgtgcatcacttctcctcct

SEQ ID NO: 159090 - DNA, 50 bp, Artificial
  Synthetic oligonucleotide
gattgggcgcccttttctgtatggcttgggtgctatgggtgaggctggcg

SEQ ID NO: 159091 - DNA, 50 bp, Artificial
  Synthetic oligonucleotide
acccttgaaattttcaagcggcatgcgcccgttaagcaacctccgccgga

SEQ ID NO: 159092 - DNA, 50 bp, Artificial
  Synthetic oligonucleotide
accgaacaagtggcgaggggtggagcctgagtggattccctggcttggtt

SEQ ID NO: 159093 - DNA, 50 bp, Artificial
  Synthetic oligonucleotide
accgaagggcccgcgttgatacccaacgttgccacctggttcagaggcac

SEQ ID NO: 159094 - DNA, 50 bp, Artificial
  Synthetic oligonucleotide
gatttgagcgtggcccaggttgctcgccagagtgttccgtcgttcgcgaa

SEQ ID NO: 159095 - DNA, 50 bp, Artificial
  Synthetic oligonucleotide
accgaatcaaccagcaagcccgtgtaagggtgatacggcggcgccatgag

SEQ ID NO: 159096 - DNA, 50 bp, Artificial
  Synthetic oligonucleotide
accgacaaaaccggccgcccccgcattgagcgcagccgaaatgatgtgcg

SEQ ID NO: 159097 - DNA, 50 bp, Artificial
  Synthetic oligonucleotide
accggagtctgtgcgtcgatactgcgcttttgcagggcagcctcaccatg

SEQ ID NO: 159098 - DNA, 50 bp, Artificial
  Synthetic oligonucleotide
ccagttaggtggggccgtcgcttctgctgagtccttgggtaaggcccgtg

SEQ ID NO: 159099 - DNA, 55 bp, Artificial
  Synthetic oligonucleotide
ctgcgacaaggtgccgacaagcgatcggcttacgatgcgctcataacggggagcg

SEQ ID NO: 159100 - DNA, 50 bp, Artificial
  Synthetic oligonucleotide
accggcaatcgcggaatagataggcagcacggcgacccccatgccttcgc

SEQ ID NO: 159101 - DNA, 50 bp, Artificial
  Synthetic oligonucleotide
accggccaacggtcgacggtatgtgcctgaaagcacgcgcatttgtgaga

SEQ ID NO: 159102 - DNA, 50 bp, Artificial
  Synthetic oligonucleotide
accggccattagcgaaacagccgtgcccgatcccagtgcccgtcctatcg

SEQ ID NO: 159103 - DNA, 50 bp, Artificial
  Synthetic oligonucleotide
agtagccaggaacacccaaggacggcttagcgttgtacatcagtgaatct

SEQ ID NO: 159104 - DNA, 50 bp, Artificial
  Synthetic oligonucleotide
gcaattaggcgaagacgtttcggagcaactcgagtacataccggcaagct

SEQ ID NO: 159105 - DNA, 50 bp, Artificial
  Synthetic oligonucleotide
agtactgcccggcgcagatcggtggacacgacgattagctgtccgtcgcg

SEQ ID NO: 159106 - DNA, 50 bp, Artificial
  Synthetic oligonucleotide
agtacgccgcgcaagcttcgaggagccctcgcaagtcaccgccgagtgcc

SEQ ID NO: 159107 - DNA, 50 bp, Artificial
  Synthetic oligonucleotide
accgggaggccccttatgatcggctactggcagacgctagttctcccagc

SEQ ID NO: 159108 - DNA, 50 bp, Artificial
  Synthetic oligonucleotide
accgggcattggatggaacgatccgccggcccctgcagagaaggctaggc

SEQ ID NO: 159109 - DNA, 50 bp, Artificial
  Synthetic oligonucleotide
accggtcatggcgaaccctccacgtgcaccgcgcgttgacatcttaggac

SEQ ID NO: 159110 - DNA, 55 bp, Artificial
  Synthetic oligonucleotide
ctgcgagcagggttttccctctgtttgcgcgaatcgacaacaacttgtcgtgatc

SEQ ID NO: 159111 - DNA, 50 bp, Artificial
  Synthetic oligonucleotide
accggtgacccatacggcaacctcctgggcgaggctggatcgcttggcat

SEQ ID NO: 159112 - DNA, 50 bp, Artificial
  Synthetic oligonucleotide
accggtgcgtcttttgctcgaagcgcccactatcgctgagctcacgcctc

SEQ ID NO: 159113 - DNA, 50 bp, Artificial
  Synthetic oligonucleotide
accggttggattcatgcacgctcagaccccagcactgcggtccgcatatg

SEQ ID NO: 159114 - DNA, 50 bp, Artificial
  Synthetic oligonucleotide
accgtaagcaaaagctcggaggactttgccgggcgtagggccgcatgtcg

SEQ ID NO: 159115 - DNA, 50 bp, Artificial
  Synthetic oligonucleotide
accgtagcgacgccagttgcggttgcgccggcccgtcttgatgttgtagg

SEQ ID NO: 159116 - DNA, 50 bp, Artificial
  Synthetic oligonucleotide
accgccgacagtgccacatatcatcccgtccgcgtcgcccagtcgtacca

SEQ ID NO: 159117 - DNA, 50 bp, Artificial
  Synthetic oligonucleotide
accgcctaccaacagcaagaaggcgcctgcgacaattgcacccacgccag

SEQ ID NO: 159118 - DNA, 50 bp, Artificial
  Synthetic oligonucleotide
accgcctgcgtatctcgcaagaaaccctggaaagccgtcggggcgcgctt

SEQ ID NO: 159119 - DNA, 50 bp, Artificial
  Synthetic oligonucleotide
accgcgaggggagtgatctacgcttcgggtgatgaggtgggcttagccac

SEQ ID NO: 159120 - DNA, 50 bp, Artificial
  Synthetic oligonucleotide
accgcgatacgccgtgcagcgtccaacccgaaccgccttctgcccgatcc

SEQ ID NO: 159121 - DNA, 55 bp, Artificial
  Synthetic oligonucleotide
ctgcgccgagccgaatgctcgccaactctgttctggaacgtcacgccaaagtgac

SEQ ID NO: 159122 - DNA, 50 bp, Artificial
  Synthetic oligonucleotide
accgcgcactcgcgtgatgcccatagggacgcttaggacgttcacgctac

SEQ ID NO: 159123 - DNA, 50 bp, Artificial
  Synthetic oligonucleotide
accgcgcgggacctcgttgcccctggagtcgaccaccttgacctcaacgg

SEQ ID NO: 159124 - DNA, 50 bp, Artificial
  Synthetic oligonucleotide
accgcggccagtacggtgtggcgcttggcatatcgcacgtgacgccgaat

SEQ ID NO: 159125 - DNA, 50 bp, Artificial
  Synthetic oligonucleotide
cgcatcagcgtacttcgcgttgcactagcgagggccgtgtagtcccgttc

SEQ ID NO: 159126 - DNA, 50 bp, Artificial
  Synthetic oligonucleotide
gcaagatccgcacgaccccagtgagtggcaatcggatgttcatgcatgaa

SEQ ID NO: 159127 - DNA, 50 bp, Artificial
  Synthetic oligonucleotide
agatatgggtgcgcggcccaatcgtatatgcccggatgtcccaggcagcg

SEQ ID NO: 159128 - DNA, 50 bp, Artificial
  Synthetic oligonucleotide
accgcgtcgggatgtcgcgttggtctcgggtctaaaggacggatcgccat

SEQ ID NO: 159129 - DNA, 50 bp, Artificial
  Synthetic oligonucleotide
accgctgacacgcagtggaccgcatacgccccgacgaaggaggagtggca

SEQ ID NO: 159130 - DNA, 50 bp, Artificial
  Synthetic oligonucleotide
agtatcaagcccctcccggcgagatgatgtgagcgccgctgcactctatg

SEQ ID NO: 159131 - DNA, 50 bp, Artificial
  Synthetic oligonucleotide
accgctgcttggcgtgttgcctccccaacgatagcgcacgccgactaggc

SEQ ID NO: 159132 - DNA, 55 bp, Artificial
  Synthetic oligonucleotide
ctgcgcgaactcggtatcaagcagctagtcgtggacgttgcggagtatgaccccg

SEQ ID NO: 159133 - DNA, 50 bp, Artificial
  Synthetic oligonucleotide
accggagacgagcctactggagacaagtctaccggggacgagtctgccga

SEQ ID NO: 159134 - DNA, 50 bp, Artificial
  Synthetic oligonucleotide
accggagcgtctgcagctttcgcccctcgtcaaggtcgatgcacccgaag

SEQ ID NO: 159135 - DNA, 50 bp, Artificial
  Synthetic oligonucleotide
ggttttcccgcggctcgtcctgggcgctaactaccacgctgcgttcccgt

SEQ ID NO: 159136 - DNA, 50 bp, Artificial
  Synthetic oligonucleotide
agtagcgccaccttgttgggggttgcggccgtgcgggacaacacaacgaa

SEQ ID NO: 159137 - DNA, 48 bp, Artificial
  Synthetic oligonucleotide
tcagttccgtccgaaccatgatgattctccccgaacggatgcatgtcg

SEQ ID NO: 159138 - DNA, 55 bp, Artificial
  Synthetic oligonucleotide
ctgcgcgagtggccgtcgatcctgaataccgaactgcggcccgctgcctagtttc

SEQ ID NO: 159139 - DNA, 55 bp, Artificial
  Synthetic oligonucleotide
ctgcgctgaacttccccgttcaaagcgtattcttgaggccaccgggtaccgctac

SEQ ID NO: 159140 - DNA, 55 bp, Artificial
  Synthetic oligonucleotide
ctgcgctttgcttcgtgaactgcgagcatgcgacgggtgatcatcagacgccctc

SEQ ID NO: 159141 - DNA, 55 bp, Artificial
  Synthetic oligonucleotide
ctgctcttcgtctacggtgagatcgctatgtccgtgagatgctcgtgggcttagc

SEQ ID NO: 159142 - DNA, 55 bp, Artificial
  Synthetic oligonucleotide
ctgcttggtacgcagactctgtgacaaaggcgtcatgtcttccccttgaatcgtt

SEQ ID NO: 159143 - DNA, 59 bp, Artificial
  Synthetic oligonucleotide
acgtacggtaatcgttcggcgtacagtgacacgcatgcaaagtgatgcggccgggcaat

SEQ ID NO: 159144 - DNA, 55 bp, Artificial
  Synthetic oligonucleotide
ctggattatagccacgtcactccggggctccgtccgagccgccccgtcggtacga

SEQ ID NO: 159145 - DNA, 55 bp, Artificial
  Synthetic oligonucleotide
ctggcggactgggacaaaactcgggttggcaagcttacttgtccacatgggacat

SEQ ID NO: 159146 - DNA, 55 bp, Artificial
  Synthetic oligonucleotide
ctgggagacggtgacttcctgatgggcaacactgctctatggtccgccgcgcact

SEQ ID NO: 159147 - DNA, 55 bp, Artificial
  Synthetic oligonucleotide
ctggtagctgcaagcgtgaagcacggatcggtcgattgtgggttcgaccgattac

SEQ ID NO: 159148 - DNA, 55 bp, Artificial
  Synthetic oligonucleotide
cgacagccggggtccaaggcttcgtgatgggaagggctctcgttataatcggccc

SEQ ID NO: 159149 - DNA, 55 bp, Artificial
  Synthetic oligonucleotide
ctggtgcgaaggtagatgccgattcttcgaaggcactgatcctgcagccatcccg

SEQ ID NO: 159150 - DNA, 55 bp, Artificial
  Synthetic oligonucleotide
ctggtgctgtggttgccaagcttggttcacgcgacaggagtggggtcagttctcg

SEQ ID NO: 159151 - DNA, 55 bp, Artificial
  Synthetic oligonucleotide
cgacagccgaattctgtagcgtgcatcacacggttttggaaacagtccccgcctc

SEQ ID NO: 159152 - DNA, 55 bp, Artificial
  Synthetic oligonucleotide
ctgtacacacttaacggaaaccgtatgtttgacagagcccaaagcaccattgcga

SEQ ID NO: 159153 - DNA, 55 bp, Artificial
  Synthetic oligonucleotide
ctgtaggaatcacgcgcctttcgaagtgtgctgtgcattgcgcggcttgcaaact

SEQ ID NO: 159154 - DNA, 55 bp, Artificial
  Synthetic oligonucleotide
cgcccgttaccggggttggtatacgcatctgaggtagccggttgccgcgccacga

SEQ ID NO: 159155 - DNA, 55 bp, Artificial
  Synthetic oligonucleotide
gaacgacaagaatagagccgtcggcaaaagagcccgtgaaacccgctcagaggcc

SEQ ID NO: 159156 - DNA, 55 bp, Artificial
  Synthetic oligonucleotide
gaacgctcgcgacccgaacaattgctctgttagtggtcgaatgatcggatacgcg

SEQ ID NO: 159157 - DNA, 55 bp, Artificial
  Synthetic oligonucleotide
cgaacttcatgttcggctcaattggaatacggcacacacgtagtgtgggctccgc

SEQ ID NO: 159158 - DNA, 55 bp, Artificial
  Synthetic oligonucleotide
gaacgttcaatcgcccgtcatttatcacccggttgcgactcagtagagtgctttc

SEQ ID NO: 159159 - DNA, 55 bp, Artificial
  Synthetic oligonucleotide
cgaactcccgaatcctctcacctacctcttttgcacagagggtgtttcgatgact

SEQ ID NO: 159160 - DNA, 55 bp, Artificial
  Synthetic oligonucleotide
cgaactccagaatagagcgcgaggaaggggagccagtggtaatctggtgtgtcca

SEQ ID NO: 159161 - DNA, 55 bp, Artificial
  Synthetic oligonucleotide
cgaacccgacggagtggagggtcgtggcgaactgatatgtctatcgcgtcacttc

SEQ ID NO: 159162 - DNA, 55 bp, Artificial
  Synthetic oligonucleotide
gaactgcaatggcccatctttcagacgggtcagacgttatacgcaggcatcgact

SEQ ID NO: 159163 - DNA, 55 bp, Artificial
  Synthetic oligonucleotide
gaacttcgcaagttgtccgcctacttttcggtgcttgcagaggagcgaagcgtcg

SEQ ID NO: 159164 - DNA, 55 bp, Artificial
  Synthetic oligonucleotide
gaagacgacggacgcttctgagacataaagcgctgcgtagacagcgcatatgacg

SEQ ID NO: 159165 - DNA, 57 bp, Artificial
  Synthetic oligonucleotide
cccggattccgcgctcgtgactcgccccatttgtcgcttgaatacggtactggtagc

SEQ ID NO: 159166 - DNA, 55 bp, Artificial
  Synthetic oligonucleotide
cgaaccagttgcgtcgctggatcgtacgcggtcttttaacgacgcccctcagcgg

SEQ ID NO: 159167 - DNA, 55 bp, Artificial
  Synthetic oligonucleotide
gaagacgtcattcatggtatgcaggcggccggagattgacccggtattatatggg

SEQ ID NO: 159168 - DNA, 55 bp, Artificial
  Synthetic oligonucleotide
cgaaattggcacggccgaatccaagggcgaggcccgtattcggctctgggttagc

SEQ ID NO: 159169 - DNA, 55 bp, Artificial
  Synthetic oligonucleotide
gaagcacggtcgctcaacaggtgcaataaagtcgcgcctcgtgaagcacgggcga

SEQ ID NO: 159170 - DNA, 55 bp, Artificial
  Synthetic oligonucleotide
gaagcccatgcattcgacacgccgggtatgcacgagctgccgtgttgaaggattc

SEQ ID NO: 159171 - DNA, 55 bp, Artificial
  Synthetic oligonucleotide
cgaaatgaatcgaccttcgcgtttgagcggcaactgactggcgaatgcacttcag

SEQ ID NO: 159172 - DNA, 55 bp, Artificial
  Synthetic oligonucleotide
cgaaatcaccctcacaccccactgaagtcgaagaatgctgtcgcagtgaatcccg

SEQ ID NO: 159173 - DNA, 55 bp, Artificial
  Synthetic oligonucleotide
gaagcgacacaacacctcgcggcatcccgcatataaaagcatcgcgacccacccc

SEQ ID NO: 159174 - DNA, 55 bp, Artificial
  Synthetic oligonucleotide
gaagcgttagcccaccgagcgacttttcgattacggcatacatttcatcctccat

SEQ ID NO: 159175 - DNA, 55 bp, Artificial
  Synthetic oligonucleotide
cgaaacagctgcgtggtttcgcgcgcggacagcgaactcgtcggttcgtcgaatg

SEQ ID NO: 159176 - DNA, 59 bp, Artificial
  Synthetic oligonucleotide
tccataggttttcgtgacatgactcaagctggccgccaacacggacacctcccagggta

SEQ ID NO: 159177 - DNA, 55 bp, Artificial
  Synthetic oligonucleotide
gaaggacggtgtcatgcgccagcggagatgtctatgctccgtgcgagaatccttg

SEQ ID NO: 159178 - DNA, 55 bp, Artificial
  Synthetic oligonucleotide
cttgtgcatggcggtccatgcgagccagcagactagcaccggtcgagcaggatgt

SEQ ID NO: 159179 - DNA, 55 bp, Artificial
  Synthetic oligonucleotide
cttgtggaggctcgcatgacacctctgttgagtcagcagttcagagcattcgtcg

SEQ ID NO: 159180 - DNA, 55 bp, Artificial
  Synthetic oligonucleotide
cgaaggtatcgttgtgctcggcaacgctagcggtccactgacgcagggttgggga

SEQ ID NO: 159181 - DNA, 55 bp, Artificial
  Synthetic oligonucleotide
ctttattgagagtaatgcgctggtggcgaggaatattgacgtctgacatgtagtg

SEQ ID NO: 159182 - DNA, 55 bp, Artificial
  Synthetic oligonucleotide
cgaaggcttttcatgtatctcgaacacgcattgaaggacccctcgctgttgaggc

SEQ ID NO: 159183 - DNA, 55 bp, Artificial
  Synthetic oligonucleotide
ctttcagtcaaaatccccaggaatatccacgctttcgcacagattacgagttttc

SEQ ID NO: 159184 - DNA, 55 bp, Artificial
  Synthetic oligonucleotide
ctttggttgtcgatccaggtcgtcgtatctacgttcgccaggtagccatttcagg

SEQ ID NO: 159185 - DNA, 55 bp, Artificial
  Synthetic oligonucleotide
cttttcaggtgtgcagagcgatagattcccactatttcatacagtcgtcatacga

SEQ ID NO: 159186 - DNA, 55 bp, Artificial
  Synthetic oligonucleotide
cgaaggaattctatgcaattggtcaagaccgaacgagacaccctgctgcgtccgt

SEQ ID NO: 159187 - DNA, 59 bp, Artificial
  Synthetic oligonucleotide
cagcccgtaagtccacaactgcaacatgaggttgagcagttttattaccgcgaagccca

SEQ ID NO: 159188 - DNA, 55 bp, Artificial
  Synthetic oligonucleotide
gaaaagcaagcttgtcccggcaaagcaagtgcgcggctgctcctggcacgagtgg

SEQ ID NO: 159189 - DNA, 54 bp, Artificial
  Synthetic oligonucleotide
gaaaccgacgcgtgtctttagcgcacgtaattataaacgactacgtaaagcgag

SEQ ID NO: 159190 - DNA, 55 bp, Artificial
  Synthetic oligonucleotide
cgaagagttatccacaccggaatagatgtactacgctgtctcggggtgggtcaga

SEQ ID NO: 159191 - DNA, 55 bp, Artificial
  Synthetic oligonucleotide
gaaactccggcgggacgttttcatgggaattcgctccaacattgtgggttgtcgc

SEQ ID NO: 159192 - DNA, 55 bp, Artificial
  Synthetic oligonucleotide
gaaagaagggcgtaaaggtcctcaaatcgtggaaatgcgctgggttggccgcgca

SEQ ID NO: 159193 - DNA, 55 bp, Artificial
  Synthetic oligonucleotide
cgaagagatctatgcagaggtcgctgccaagtcaatttaccagggcgtgctcacc

SEQ ID NO: 159194 - DNA, 55 bp, Artificial
  Synthetic oligonucleotide
cgaagacaggctctgaccgcgacaggaaatagatgcgaccggaagagtcaaacgc

SEQ ID NO: 159195 - DNA, 55 bp, Artificial
  Synthetic oligonucleotide
cgaacttgatcggggtcatgaggcggatatcgaagtaacgacgacgtagcgggga

SEQ ID NO: 159196 - DNA, 55 bp, Artificial
  Synthetic oligonucleotide
gaacacgcagctactagaccacaggcagatgaacgtttcatgacggggcggggca

SEQ ID NO: 159197 - DNA, 55 bp, Artificial
  Synthetic oligonucleotide
gaacccacaatcgaccgatccgtgcttcacgcttgcagctaccagtgagccggtg

SEQ ID NO: 159198 - DNA, 60 bp, Artificial
  Synthetic oligonucleotide
gaaagcagatcggtctgggtcacacgagactccttgacgaagtgtcgggacggcagatcc

SEQ ID NO: 159199 - DNA, 55 bp, Artificial
  Synthetic oligonucleotide
gaacctggccggcttatcggtggttgggcatgcttgggatgatcgaggtgcgatg

SEQ ID NO: 159200 - DNA, 55 bp, Artificial
  Synthetic oligonucleotide
gcacataaggcgcaagcgtaccgagcagcgaccagaacgggttgtagaaggcgcc

SEQ ID NO: 159201 - DNA, 55 bp, Artificial
  Synthetic oligonucleotide
gcacatgtggttaccccatcgttatcgttgctgtgttgggaatggcgcgtatgtg

SEQ ID NO: 159202 - DNA, 55 bp, Artificial
  Synthetic oligonucleotide
gcaccaaatcatgcaaggcactgaaggatgtacccatctcctttaatttgcgctg

SEQ ID NO: 159203 - DNA, 55 bp, Artificial
  Synthetic oligonucleotide
gcaccaccgacacagattgcacaactagcaacaagttcgaggtatgcggacggcg

SEQ ID NO: 159204 - DNA, 55 bp, Artificial
  Synthetic oligonucleotide
gcaccaggcatcgtcaccgtccccaggcgcatttgtagttggggcagccttaacg

SEQ ID NO: 159205 - DNA, 55 bp, Artificial
  Synthetic oligonucleotide
gcaccagtcgattcccgagcaaggggactggttacgccgcgtggttcaagggtac

SEQ ID NO: 159206 - DNA, 55 bp, Artificial
  Synthetic oligonucleotide
gcaccattggatagtagtcctgcactgtgcgtacatggaatacacgtacacgccg

SEQ ID NO: 159207 - DNA, 55 bp, Artificial
  Synthetic oligonucleotide
ccgtccggccacacaccgtccacgcatatcctgaaaccgaatcatcagagcgcgg

SEQ ID NO: 159208 - DNA, 55 bp, Artificial
  Synthetic oligonucleotide
gcacccaaaactcagctcgatttatggtctatgcgtgacaacgaaagcggtcaac

SEQ ID NO: 159209 - DNA, 53 bp, Artificial
  Synthetic oligonucleotide
accaatgtcatagtggcggggaatataccacagggggcacccccgacttaccg

SEQ ID NO: 159210 - DNA, 55 bp, Artificial
  Synthetic oligonucleotide
gcacgaccactattggggcggcgctacaggaggattacaaccaaacgattggagg

SEQ ID NO: 159211 - DNA, 55 bp, Artificial
  Synthetic oligonucleotide
gcacgatcaacgacgatgaacttccagagcggtagtgaaaagtagtcgaggagcg

SEQ ID NO: 159212 - DNA, 55 bp, Artificial
  Synthetic oligonucleotide
gcacgcacaacaagaatttgcggttatccagcgattttccacagaatgcagggga

SEQ ID NO: 159213 - DNA, 55 bp, Artificial
  Synthetic oligonucleotide
gcacgcgcggagatccaattgctcgggcaagagttctttgagattgagtagctga

SEQ ID NO: 159214 - DNA, 55 bp, Artificial
  Synthetic oligonucleotide
gcacgctcgaacccagaactagattccgacctagccgcggctcaaagtccgagat

SEQ ID NO: 159215 - DNA, 55 bp, Artificial
  Synthetic oligonucleotide
ccgtccatcccaaggcgtgtacgtgtattccatgtacgcacagtgcaggactact

SEQ ID NO: 159216 - DNA, 55 bp, Artificial
  Synthetic oligonucleotide
gcacggctgacgaagacggcccatgctcgcgcgagtctgtggaatatttccgcac

SEQ ID NO: 159217 - DNA, 55 bp, Artificial
  Synthetic oligonucleotide
gcacggggaatgccgacggcacaggtagtacgggaagtgaattcgttgaccggct

SEQ ID NO: 159218 - DNA, 55 bp, Artificial
  Synthetic oligonucleotide
gcactccctccgctcccgcgttttctccgatcgtctcgtgctacgagcgcattct

SEQ ID NO: 159219 - DNA, 55 bp, Artificial
  Synthetic oligonucleotide
gcactgatgggctgttacgccgcgctttagtaacggactgcgcaagtggccgtcc

SEQ ID NO: 159220 - DNA, 52 bp, Artificial
  Synthetic oligonucleotide
acgggggctttcctggcgggtattttggggattctttttagcctgcatgacc

SEQ ID NO: 159221 - DNA, 55 bp, Artificial
  Synthetic oligonucleotide
gcactggcggagtaagccacccaagagcaattcccgttagaaacagggcaactgc

SEQ ID NO: 159222 - DNA, 55 bp, Artificial
  Synthetic oligonucleotide
ccgtagttgtgacggcgcgtagattagcaagtctcacgcaagccagcaaggcatt

SEQ ID NO: 159223 - DNA, 55 bp, Artificial
  Synthetic oligonucleotide
ccgtgcgtcattggcactcggttcgtacacttcgaagaacttcgcaccgtcactc

SEQ ID NO: 159224 - DNA, 55 bp, Artificial
  Synthetic oligonucleotide
gattctgcgcatcgcgatcgctgtctccaatagacgtgttacgccaaatcctgcc

SEQ ID NO: 159225 - DNA, 55 bp, Artificial
  Synthetic oligonucleotide
gattgcctgcagaaatgcgattgcctgagaatgtacgcaaggttaacgtacgatc

SEQ ID NO: 159226 - DNA, 55 bp, Artificial
  Synthetic oligonucleotide
gcaaaccgacagatcgattggaaggcaagactcgttttaccggtgccgcccttgg

SEQ ID NO: 159227 - DNA, 55 bp, Artificial
  Synthetic oligonucleotide
ccgtgccacagttacagagggctttcaagcctccggttatactcggcgccgtctc

SEQ ID NO: 159228 - DNA, 55 bp, Artificial
  Synthetic oligonucleotide
gcaaccactcgcggcacgcgaagtttaaggaggacgtcttgtctattccgctgct

SEQ ID NO: 159229 - DNA, 55 bp, Artificial
  Synthetic oligonucleotide
gcaaccataatttctggtggaaatcattctgatgtcgattcggtccgatgatcgt

SEQ ID NO: 159230 - DNA, 55 bp, Artificial
  Synthetic oligonucleotide
ccgtctgtcacgaaggcccagttgtgcgcaatcgatagtctgttgctacggctcg

SEQ ID NO: 159231 - DNA, 60 bp, Artificial
  Synthetic oligonucleotide
atgcgaaacaatcttccggtgacaggtgtcgaattcgattatcccgaaaccagcatgctg

SEQ ID NO: 159232 - DNA, 55 bp, Artificial
  Synthetic oligonucleotide
gcaacctgttcacgtgagtggcgcgctccttgatggcttaatgagtgacgaactt

SEQ ID NO: 159233 - DNA, 55 bp, Artificial
  Synthetic oligonucleotide
ccgtctcatctgtgttaaagttaccgtggaatcgaatcgcggtacatcgtgcgac

SEQ ID NO: 159234 - DNA, 55 bp, Artificial
  Synthetic oligonucleotide
ccgtcgatttatctcctaacgggacctgccgtgctttctactgccaacatcacga

SEQ ID NO: 159235 - DNA, 55 bp, Artificial
  Synthetic oligonucleotide
gcaacgacgatggggcacatccagcggaagcacctcacggaagcgaaaatcgctg

SEQ ID NO: 159236 - DNA, 55 bp, Artificial
  Synthetic oligonucleotide
gcaagacgcatcacgatgtctttccgaaccagacgtccccttcggggactgcaag

SEQ ID NO: 159237 - DNA, 55 bp, Artificial
  Synthetic oligonucleotide
gcaatatagtccgcgagcactttgcaggtcgacgcatgcattggaacgaaccggg

SEQ ID NO: 159238 - DNA, 55 bp, Artificial
  Synthetic oligonucleotide
gcaatcccgctaggcatgcaacgttccgagcaagataccgacgcattctcgactc

SEQ ID NO: 159239 - DNA, 55 bp, Artificial
  Synthetic oligonucleotide
ccgtcgaacatctattctaatccgcacttcgaagcccgccttatgtcgactcccg

SEQ ID NO: 159240 - DNA, 55 bp, Artificial
  Synthetic oligonucleotide
gcaatgctaccactctaagcgaggccgcagcctgcgactgtaagcacttgttaag

SEQ ID NO: 159241 - DNA, 55 bp, Artificial
  Synthetic oligonucleotide
gcaattcggacgctatggccctacccatccgcgacaggccgaagtattcccgagg

SEQ ID NO: 159242 - DNA, 60 bp, Artificial
  Synthetic oligonucleotide
gtctgttgcaccagttctgtcgactacttgcgtgagcaattcggacgctatggccctacc

SEQ ID NO: 159243 - DNA, 60 bp, Artificial
  Synthetic oligonucleotide
atgcgccataggggccacaatgacgtagaatcgccatagcctcggttaacctcgatgcgc

SEQ ID NO: 159244 - DNA, 55 bp, Artificial
  Synthetic oligonucleotide
gcaatttgcaatccgttgccgaacccgattcctacaatgactagtcagtcagacg

SEQ ID NO: 159245 - DNA, 55 bp, Artificial
  Synthetic oligonucleotide
gcacagtgcagtgccacacatccatgccccaaaaagggcatccgtacgcgcttcg

SEQ ID NO: 159246 - DNA, 55 bp, Artificial
  Synthetic oligonucleotide
gcatggggcatagcgcgttgcgcgtcacacgccgcacgccgtaagtcgtaggtcg

SEQ ID NO: 159247 - DNA, 55 bp, Artificial
  Synthetic oligonucleotide
gcatgtggggcagtcgattaggctacggagagcgtagtcaccggtgcgggacgtt

SEQ ID NO: 159248 - DNA, 55 bp, Artificial
  Synthetic oligonucleotide
gcatgtgtctgccagattcatggctgcacacgaacaatgtcacggcttgaggacg

SEQ ID NO: 159249 - DNA, 55 bp, Artificial
  Synthetic oligonucleotide
ccggcgtttctgcttgcagcgcagtcccagttttctacgcagtcgcctgatccgg

SEQ ID NO: 159250 - DNA, 55 bp, Artificial
  Synthetic oligonucleotide
gcattcctatcacagagcacggctcgacctcgaaggaggagacacatgcaagcgg

SEQ ID NO: 159251 - DNA, 55 bp, Artificial
  Synthetic oligonucleotide
ccggcgtgtcgggtatatagtaaccaccgtgcgaggaaaatgtgatccgcggcgg

SEQ ID NO: 159252 - DNA, 55 bp, Artificial
  Synthetic oligonucleotide
ccggcctacgcgcttccgaaatctacggattggagtggccgcaagtcgatatcgc

SEQ ID NO: 159253 - DNA, 55 bp, Artificial
  Synthetic oligonucleotide
gcatttcacggcgcagagttcaagggagtctcgaaaatcgtccgagagtcgcccg

SEQ ID NO: 159254 - DNA, 60 bp, Artificial
  Synthetic oligonucleotide
atgcgcgattacgccgttgctccattcccgcatcacacgaagaaggattgaatgacctac

SEQ ID NO: 159255 - DNA, 55 bp, Artificial
  Synthetic oligonucleotide
gcattttgcttgcaattcctatcgcacgcaacttgtggatagcctgtagccgacc

SEQ ID NO: 159256 - DNA, 55 bp, Artificial
  Synthetic oligonucleotide
gccaaccagaagacgttgcacgagtgggtccaacaggcgttctgcgcgacctatg

SEQ ID NO: 159257 - DNA, 55 bp, Artificial
  Synthetic oligonucleotide
gccaatattgcttctggcgtgttcggcggttattcagtaacaggaggcttttccc

SEQ ID NO: 159258 - DNA, 55 bp, Artificial
  Synthetic oligonucleotide
gccacagcttcctcttgcacaagcgcgacgtgtcttgcaccctgggcgattccac

SEQ ID NO: 159259 - DNA, 55 bp, Artificial
  Synthetic oligonucleotide
gccacctagcgagtattcctgtctcccgcgctcccgcggattgttttacgcgggg

SEQ ID NO: 159260 - DNA, 55 bp, Artificial
  Synthetic oligonucleotide
gccacctattgccccattgttcgcataccatccgatgccgaaagacgagaactgc

SEQ ID NO: 159261 - DNA, 55 bp, Artificial
  Synthetic oligonucleotide
ccggagtggggacgggtcaagcccgactggcgtcttagcgattagcgagttattg

SEQ ID NO: 159262 - DNA, 55 bp, Artificial
  Synthetic oligonucleotide
gccacgaatgtccggcgacattctaaggcctgtgcccgcgaacgacggaggcgga

SEQ ID NO: 159263 - DNA, 54 bp, Artificial
  Synthetic oligonucleotide
ccggactgatcgaacctcggtatttccctgccgcaacctctcttaccgcggtcg

SEQ ID NO: 159264 - DNA, 55 bp, Artificial
  Synthetic oligonucleotide
gccactgcggcgtagcgaactgtgctcgcagttcagcaacccatctgctttcccg

SEQ ID NO: 159265 - DNA, 60 bp, Artificial
  Synthetic oligonucleotide
tctcctgcttataggtggcgggcacgctagtcgtcacgttgtggcaatcctgcgttccgg

SEQ ID NO: 159266 - DNA, 55 bp, Artificial
  Synthetic oligonucleotide
gccagatagtgtacagaacgtgtccgccacaccccgaatccgaaacggattcccc

SEQ ID NO: 159267 - DNA, 55 bp, Artificial
  Synthetic oligonucleotide
gccagatggtaccaagcaaacatcgatggcgcgcaaaacgccatgttccgagaat

SEQ ID NO: 159268 - DNA, 54 bp, Artificial
  Synthetic oligonucleotide
ccggaataggccgaattgtttaaatcgactcggttagacggttccatcgattga

SEQ ID NO: 159269 - DNA, 55 bp, Artificial
  Synthetic oligonucleotide
gcagaagtacccaatagacggcgtggataaaatcagcgtcgtgaagcttcaacag

SEQ ID NO: 159270 - DNA, 55 bp, Artificial
  Synthetic oligonucleotide
gcagaagtttcgcgccacgtctggctaacgcataggcgaactcgcgcccgatacc

SEQ ID NO: 159271 - DNA, 55 bp, Artificial
  Synthetic oligonucleotide
gcagcacatccgaccaaattaccgtgccgatttggcgttgtgacaccacgagcac

SEQ ID NO: 159272 - DNA, 55 bp, Artificial
  Synthetic oligonucleotide
ccgtagaacttcggcgacatgtagacgagcgaattgttcgcgcggtagctcgtat

SEQ ID NO: 159273 - DNA, 55 bp, Artificial
  Synthetic oligonucleotide
gcagcgaagaccgcaattatggagacgggcgtatcccttgtcaagcactcgtccg

SEQ ID NO: 159274 - DNA, 55 bp, Artificial
  Synthetic oligonucleotide
ccggtttggggacacaatcacagcgtttcggcgttggaggattgtgagcctctcg

SEQ ID NO: 159275 - DNA, 55 bp, Artificial
  Synthetic oligonucleotide
gcagcgatgacgcgaagcactgggtttgccgatccatctcgtgctacgtttagcg

SEQ ID NO: 159276 - DNA, 58 bp, Artificial
  Synthetic oligonucleotide
ctatcacgcgccctaccctatctaaacaatcaatcgcccaacgtatagacagaacgaa

SEQ ID NO: 159277 - DNA, 55 bp, Artificial
  Synthetic oligonucleotide
gcagctcaatcgataggtgtcttgccgtacctcatgtcagagacagggtcggagc

SEQ ID NO: 159278 - DNA, 55 bp, Artificial
  Synthetic oligonucleotide
gcaggcgagtccgttttgcataggacggatgcagtcctgcaggtacggatttgat

SEQ ID NO: 159279 - DNA, 52 bp, Artificial
  Synthetic oligonucleotide
ccggttgtgacataccaacctcgccggacttccaccggccgatccccgtagg

SEQ ID NO: 159280 - DNA, 55 bp, Artificial
  Synthetic oligonucleotide
gcataaaccgcgccatgtgtggcgcacatcaagtataggcctgaggtatcgaaga

SEQ ID NO: 159281 - DNA, 55 bp, Artificial
  Synthetic oligonucleotide
ccggttggcaacgtacgcgccctccgcatacacgtctgtgcgcttggataatgcg

SEQ ID NO: 159282 - DNA, 55 bp, Artificial
  Synthetic oligonucleotide
gcatacgccccgttggtgctttccggatcggaagaccagaagacgatcatttccg

SEQ ID NO: 159283 - DNA, 55 bp, Artificial
  Synthetic oligonucleotide
ccggttcaaggccacgacgaattcgaagcacgacctgcctgtcgcgccgaatctg

SEQ ID NO: 159284 - DNA, 55 bp, Artificial
  Synthetic oligonucleotide
ccggtcgttcctcagtaggtcctcgtaagatgcctggtcgaatatcttccggtcc

SEQ ID NO: 159285 - DNA, 55 bp, Artificial
  Synthetic oligonucleotide
gcatcactctgactggctcaatcgccaatgggtaagattcgattcgttctctcga

SEQ ID NO: 159286 - DNA, 55 bp, Artificial
  Synthetic oligonucleotide
gcatcatggtgaatagggctcgcattgtcctagcttcaagtctcaagtgacccag

SEQ ID NO: 159287 - DNA, 60 bp, Artificial
  Synthetic oligonucleotide
ggtcgcttcgaatgtcatgcagaatcgggggcgctatccgccacatggcttaggaaaaag

SEQ ID NO: 159288 - DNA, 55 bp, Artificial
  Synthetic oligonucleotide
ccggtcgatcactgaaaatcccttgatgggcgcgattctagcaaactcgtaatcg

SEQ ID NO: 159289 - DNA, 55 bp, Artificial
  Synthetic oligonucleotide
gcatgacatattgcctgattcaacgcggatgctgatacgtaaacaatacgcgcag

SEQ ID NO: 159290 - DNA, 55 bp, Artificial
  Synthetic oligonucleotide
gcatgcgattggtcctgctcaagttcacatcagtcctcgtggtccgctcgatccc

SEQ ID NO: 159291 - DNA, 55 bp, Artificial
  Synthetic oligonucleotide
gcatgcgtgcaaccaatcgagccgacgtcttcaccgctcgcactagccggccttt

SEQ ID NO: 159292 - DNA, 55 bp, Artificial
  Synthetic oligonucleotide
ccgggtccatgacccacatccgtgcgccaatgttgtacacggcagacgaagaccg

SEQ ID NO: 159293 - DNA, 55 bp, Artificial
  Synthetic oligonucleotide
cctcgaacggcctcgcttcaaacgtggccactccatcggcatactctcgcaccca

SEQ ID NO: 159294 - DNA, 55 bp, Artificial
  Synthetic oligonucleotide
gagcgatgccagacttctgacgacggataggggtctcattgatatgcctcgtcgg

SEQ ID NO: 159295 - DNA, 55 bp, Artificial
  Synthetic oligonucleotide
gagcggcaacaagtacgctgagcgtcccaaggagcagcttgagtactccgcgcag

SEQ ID NO: 159296 - DNA, 55 bp, Artificial
  Synthetic oligonucleotide
gagcggcgggaagggagtgggtacggtcatctggagcctcgtcgaaacatcggaa

SEQ ID NO: 159297 - DNA, 55 bp, Artificial
  Synthetic oligonucleotide
gagcgtgacgcgaagtacgtcgacttcaaacccgagctagccaagcgcagggacc

SEQ ID NO: 159298 - DNA, 53 bp, Artificial
  Synthetic oligonucleotide
aagacccgatgtcgactttggaacgggctcttcaccgctaccgtactaaacgc

SEQ ID NO: 159299 - DNA, 55 bp, Artificial
  Synthetic oligonucleotide
gagcttagacaggacgacgcagacgtctttcttgaagtgcttcacttggcccggg

SEQ ID NO: 159300 - DNA, 55 bp, Artificial
  Synthetic oligonucleotide
gaggcgatgttccatgtctggtgcgtcataaagggtgagatttcgttcgcatgcg

SEQ ID NO: 159301 - DNA, 55 bp, Artificial
  Synthetic oligonucleotide
gaggcggcaacatcccggattccgcgctcgtgactcgccccatttgtcgcttgaa

SEQ ID NO: 159302 - DNA, 55 bp, Artificial
  Synthetic oligonucleotide
gaggctatccaatggcctgcgttacataccggcgatccagcaagcatttggatgc

SEQ ID NO: 159303 - DNA, 55 bp, Artificial
  Synthetic oligonucleotide
gagggaaacgccatagcggtttgcgcacgcactcaattgctcgaagtcgaccgcg

SEQ ID NO: 159304 - DNA, 55 bp, Artificial
  Synthetic oligonucleotide
gagggatgctcgatgcttgcgcgaggcgacacgttggccatgttttcgatgtggg

SEQ ID NO: 159305 - DNA, 55 bp, Artificial
  Synthetic oligonucleotide
gaggtcctttccgtccgaatgtacgttcaccgtgatgcaaccatggtcgggtgtg

SEQ ID NO: 159306 - DNA, 55 bp, Artificial
  Synthetic oligonucleotide
gaggtgaaactcgggccgaaaggcaagcaggcagcgaatatccaggcggtctgac

SEQ ID NO: 159307 - DNA, 55 bp, Artificial
  Synthetic oligonucleotide
gaggtgccgggccgatgattcgaaagcgcgtaaccaattgagcggcgggagtcgt

SEQ ID NO: 159308 - DNA, 55 bp, Artificial
  Synthetic oligonucleotide
cctccgttgggctacactcgcggccatcacaatcccggagaaattacgtgggcag

SEQ ID NO: 159309 - DNA, 56 bp, Artificial
  Synthetic oligonucleotide
aagacgaagatcagtcatgttcggggaatccttccgctacgccacggcaagtttcc

SEQ ID NO: 159310 - DNA, 55 bp, Artificial
  Synthetic oligonucleotide
cctccgttacacggcggaaagttcatgctaatgtggacaagtcgagatgccacgc

SEQ ID NO: 159311 - DNA, 55 bp, Artificial
  Synthetic oligonucleotide
gagtcatgggcagctctcgatgtattgatgttttgccgcgctaacgatcgaacgc

SEQ ID NO: 159312 - DNA, 55 bp, Artificial
  Synthetic oligonucleotide
gagtcgcggcccgcgcgtagcctcgtcgccgataggccggtagcgtcgacacatt

SEQ ID NO: 159313 - DNA, 55 bp, Artificial
  Synthetic oligonucleotide
gagtcgtcgcaagtccgaacggaaccgcaagtagaccgcctctagatgagcccgc

SEQ ID NO: 159314 - DNA, 55 bp, Artificial
  Synthetic oligonucleotide
gagtgagacgtatgcccgaatgatgtcggtcgatgtcaggcgaatcagcgtagcc

SEQ ID NO: 159315 - DNA, 55 bp, Artificial
  Synthetic oligonucleotide
gagaaccgtatctagtcagggcgcaaacgttcgcgactcgtgattcactcccgca

SEQ ID NO: 159316 - DNA, 55 bp, Artificial
  Synthetic oligonucleotide
gagaagaacatgctactaccaagcatacgacccgaagagaggtagcttacatcgt

SEQ ID NO: 159317 - DNA, 55 bp, Artificial
  Synthetic oligonucleotide
gagacgctgcatgacagatcggcgacaaaagcgtgtcaatcgtgatcgttgggtg

SEQ ID NO: 159318 - DNA, 55 bp, Artificial
  Synthetic oligonucleotide
gagacgtctccgtatcgtgggagcaatcagcatagtgcacccaataatgattcgc

SEQ ID NO: 159319 - DNA, 55 bp, Artificial
  Synthetic oligonucleotide
gagaggcgcatgcccggacttccggccgtacatcactcgcagacgctcgggacaa

SEQ ID NO: 159320 - DNA, 59 bp, Artificial
  Synthetic oligonucleotide
ctacgggcctcttctgtgacatagtgatctttggtacccatgtggaacatcgccggtcg

SEQ ID NO: 159321 - DNA, 55 bp, Artificial
  Synthetic oligonucleotide
gagatccgacatgcgcaccgtaaaatggcgctcggacgtaaaaggattgaattga

SEQ ID NO: 159322 - DNA, 55 bp, Artificial
  Synthetic oligonucleotide
cctgaacggtggttgcggtacctcataaatcttagagatcgaagtacatggcgca

SEQ ID NO: 159323 - DNA, 55 bp, Artificial
  Synthetic oligonucleotide
gagatttgtacggcaggagcagcctaatcactccaaggctaccttaacctgaccg

SEQ ID NO: 159324 - DNA, 55 bp, Artificial
  Synthetic oligonucleotide
gagcaacatgaccgctccgctcctgttggttgagatcgtctcggaacggcgcgtt

SEQ ID NO: 159325 - DNA, 54 bp, Artificial
  Synthetic oligonucleotide
cctcgctggggtaagggtaaacgtcacccatcatatcgttcgtattttcgaata

SEQ ID NO: 159326 - DNA, 55 bp, Artificial
  Synthetic oligonucleotide
cctcgctgcctagtgcaaacccgaaaagcgttcgataatcgcacggaattgaacg

SEQ ID NO: 159327 - DNA, 55 bp, Artificial
  Synthetic oligonucleotide
cctcgcgaagccaataacgaacgtcacatgatgaagacccgacgccatcccactc

SEQ ID NO: 159328 - DNA, 55 bp, Artificial
  Synthetic oligonucleotide
gagcacagggccactatcgttcgaatggatttcattatcgtcctctcgttcaggg

SEQ ID NO: 159329 - DNA, 55 bp, Artificial
  Synthetic oligonucleotide
gagcactcctaatacgctaaattcggggttcgatcgccggtgaaggttccatcgc

SEQ ID NO: 159330 - DNA, 55 bp, Artificial
  Synthetic oligonucleotide
gagcatagaagtatgtgttcaccctctgctttgggtacaccctcgcgaggcaggc

SEQ ID NO: 159331 - DNA, 60 bp, Artificial
  Synthetic oligonucleotide
ggtgcgaagaatggtcaatttcatggtcttgcagcggggtagcggcgcatgagcacgggc

SEQ ID NO: 159332 - DNA, 53 bp, Artificial
  Synthetic oligonucleotide
cctcgcacacgcgaacaccttgttcggtcgtgacgtaataaatcccggtacgg

SEQ ID NO: 159333 - DNA, 55 bp, Artificial
  Synthetic oligonucleotide
gagccaaccgatccgtttgaacccttgaaaggaatgcaggcatgacgattacccg

SEQ ID NO: 159334 - DNA, 55 bp, Artificial
  Synthetic oligonucleotide
gagcccgggtacatatcaatgtacgatcccggcggggcaaacctcgtgccaactg

SEQ ID NO: 159335 - DNA, 55 bp, Artificial
  Synthetic oligonucleotide
gagccgccaacccggtggttataatgacgagcgaacaaaatttctgactatcagc

SEQ ID NO: 159336 - DNA, 55 bp, Artificial
  Synthetic oligonucleotide
gagccgccacggtagcatcgcgtgcgttcgtgcaatgaccttcggaggacgtctt

SEQ ID NO: 159337 - DNA, 55 bp, Artificial
  Synthetic oligonucleotide
cctcgacatgtgacttgcgcgccacattctccctacggttcgcccgtaagcgtcc

SEQ ID NO: 159338 - DNA, 55 bp, Artificial
  Synthetic oligonucleotide
gatatgcgcctgactatccttatcaacggttccgatcccaccgtcagtcacgact

SEQ ID NO: 159339 - DNA, 55 bp, Artificial
  Synthetic oligonucleotide
gatcacgcctcgtgctgaatagctacacggcagcacatctaagcagcgggctgct

SEQ ID NO: 159340 - DNA, 55 bp, Artificial
  Synthetic oligonucleotide
gatcgttgatcatcggcgaaacgtctcgcacgtgaagcacccttgatctcatgcg

SEQ ID NO: 159341 - DNA, 55 bp, Artificial
  Synthetic oligonucleotide
gatctcatggatcatgaccgcaagacgtcaggtttaacgggatttaagctgattg

SEQ ID NO: 159342 - DNA, 60 bp, Artificial
  Synthetic oligonucleotide
ggtgcgattagcacgcagtcctgcctgactcatccattgcctcctgagatgactccgcac

SEQ ID NO: 159343 - DNA, 55 bp, Artificial
  Synthetic oligonucleotide
cctaaacttgagccctacctgccgagttccaaagttcggtgctctagcagcggac

SEQ ID NO: 159344 - DNA, 55 bp, Artificial
  Synthetic oligonucleotide
gatctgtatcgactgcggaagagacagtccaaccatgccgagtgcggaggcgttc

SEQ ID NO: 159345 - DNA, 55 bp, Artificial
  Synthetic oligonucleotide
ccgttttgcagggcagctaatcggtccccatttcctcattcgacttcacgaccag

SEQ ID NO: 159346 - DNA, 55 bp, Artificial
  Synthetic oligonucleotide
gatgcagctaaatattggggatgcatgttgttcaaacctcatcgctttgtaccta

SEQ ID NO: 159347 - DNA, 55 bp, Artificial
  Synthetic oligonucleotide
gatgcatcgattacctgcgagaagaggccgcactcggttacgcctatccgtaggc

SEQ ID NO: 159348 - DNA, 55 bp, Artificial
  Synthetic oligonucleotide
gatgccctgaatgaaatattcggtcgggagagtttcagccatgagggtacccaag

SEQ ID NO: 159349 - DNA, 55 bp, Artificial
  Synthetic oligonucleotide
gatggcgaacagtaccgcgccaggagccatgaccacgaaggatcgtgttggcgtc

SEQ ID NO: 159350 - DNA, 55 bp, Artificial
  Synthetic oligonucleotide
gatgtactacgctgtctcggagtgggtcagatttagatgaaatcggtgggttaag

SEQ ID NO: 159351 - DNA, 55 bp, Artificial
  Synthetic oligonucleotide
gatgtcaacgaggcgttgattatgatggttcctgctggcatcacggtgcttgaag

SEQ ID NO: 159352 - DNA, 55 bp, Artificial
  Synthetic oligonucleotide
gatgtgaatgtctcacgtgcgcataatcggctcgaccccacccgaacgagcgttg

SEQ ID NO: 159353 - DNA, 57 bp, Artificial
  Synthetic oligonucleotide
cttcgaaccaaacggagtagacgcaaatggcgacgcaagaatttaccgcagacaaca

SEQ ID NO: 159354 - DNA, 55 bp, Artificial
  Synthetic oligonucleotide
ggtgctgcttacaacggggacatgtctacggtcactttcggtttttcggcgcaaa

SEQ ID NO: 159355 - DNA, 55 bp, Artificial
  Synthetic oligonucleotide
gattccggctgtgcccaactacgcgacatatggccgaacgttccgcaacactcgc

SEQ ID NO: 159356 - DNA, 55 bp, Artificial
  Synthetic oligonucleotide
ccgttttacgccaataggtcaaatagtaggcaagaatcttggtgcgaccgagcag

SEQ ID NO: 159357 - DNA, 55 bp, Artificial
  Synthetic oligonucleotide
gattcgcaagcggtatcctcagggtccccaatcgctggttggtccagtgagtatc

SEQ ID NO: 159358 - DNA, 55 bp, Artificial
  Synthetic oligonucleotide
ccgtttgcaaccgaaggctgcagtgtaggactgtctgtttcggaccatataatgc

SEQ ID NO: 159359 - DNA, 54 bp, Artificial
  Synthetic oligonucleotide
ccgttggtctgcgaattacttctcccggctcttggggaaatttgtcactggttc

SEQ ID NO: 159360 - DNA, 55 bp, Artificial
  Synthetic oligonucleotide
ccgtgtttcacttcggctgagatgcatcccgtttcatcaggccatcgcaagggcc

SEQ ID NO: 159361 - DNA, 55 bp, Artificial
  Synthetic oligonucleotide
cctccgaagccaatgccgtacaacagtgccgcgatccccatgttcgtgatcgaag

SEQ ID NO: 159362 - DNA, 55 bp, Artificial
  Synthetic oligonucleotide
cctcaggagacgttatcgacacagtgtggaccaccgagaccccacttcggtgggg

SEQ ID NO: 159363 - DNA, 55 bp, Artificial
  Synthetic oligonucleotide
cctcaagatatagaggtgcatattctcagcaagcggtaccagtcccgggacccgg

SEQ ID NO: 159364 - DNA, 55 bp, Artificial
  Synthetic oligonucleotide
cctatgatgggttcataccgcttcactcgagccactcatcaccggagttaccgat

SEQ ID NO: 159365 - DNA, 60 bp, Artificial
  Synthetic oligonucleotide
gtcaccgatccgtgttagtgcgcagggattcgagaaaaatccgaggccctgagcagtatc

SEQ ID NO: 159366 - DNA, 55 bp, Artificial
  Synthetic oligonucleotide
gagttgtatcacgtctttatgacagacgccaatcaacctgtattcgggtattccc

SEQ ID NO: 159367 - DNA, 55 bp, Artificial
  Synthetic oligonucleotide
gagttgttctggcttctcataggcgcggaagtaagtctccgaggctctagacccg

SEQ ID NO: 159368 - DNA, 55 bp, Artificial
  Synthetic oligonucleotide
gagtttcgcgtctcgcgtcaaatatcgctgaatggccgcgtaccgtagctgtgtg

SEQ ID NO: 159369 - DNA, 55 bp, Artificial
  Synthetic oligonucleotide
gataagcacgagtccccggaacgtgtacatgtccgtgagggctctcatgacgagg

SEQ ID NO: 159370 - DNA, 55 bp, Artificial
  Synthetic oligonucleotide
gataagttaggcggagtgttctcgcacgagtaagcgacctacacgtcgaccaggg

SEQ ID NO: 159371 - DNA, 55 bp, Artificial
  Synthetic oligonucleotide
gataatggacgacatacggcccgctcgctcgctgatttcctgcattgtgtccacg

SEQ ID NO: 159372 - DNA, 55 bp, Artificial
  Synthetic oligonucleotide
cctagaagaccgcatgtggtgcgttcgtgttcggcactttgcccggtttgccttg

SEQ ID NO: 159373 - DNA, 55 bp, Artificial
  Synthetic oligonucleotide
gatacagagaaatgctaggcctcgctgtcacccgcaacaatcagggttaacgcgc

SEQ ID NO: 159374 - DNA, 55 bp, Artificial
  Synthetic oligonucleotide
gatacagtcggtgacgtcaatccgggaagttcggaggaaacgtgaagacagtggc

SEQ ID NO: 159375 - DNA, 55 bp, Artificial
  Synthetic oligonucleotide
cctacttcgagtgccgtattgctcttatgaattgtcgtgaccatagcaggaggaa

SEQ ID NO: 159376 - DNA, 59 bp, Artificial
  Synthetic oligonucleotide
ctaccggcggcgttacgttcgaattcgaagatcgcaagtgaggacggaccatgcagctc

SEQ ID NO: 159377 - DNA, 55 bp, Artificial
  Synthetic oligonucleotide
gatactgttctcgctcacgaagaatggattggtaccaggcgtctctgcgccgagc

SEQ ID NO: 159378 - DNA, 55 bp, Artificial
  Synthetic oligonucleotide
gatagcgcgtcttgaagagccacgagtaggtggacagtcgcacgtcctggcttgc

SEQ ID NO: 159379 - DNA, 55 bp, Artificial
  Synthetic oligonucleotide
gatagcggaaactctaacttgttcgatctacaaacacccaatggtctctgactgt

SEQ ID NO: 159380 - DNA, 55 bp, Artificial
  Synthetic oligonucleotide
cctacggcgcgctttcgtcgtgagtttcttatagtctgttgcaccagttctgtcg

SEQ ID NO: 159381 - DNA, 55 bp, Artificial
  Synthetic oligonucleotide
cctacatatcgaggacgcgagtgtgatcagtgtgtccagttgagtcaggctccgg

SEQ ID NO: 159382 - DNA, 55 bp, Artificial
  Synthetic oligonucleotide
cctaacagtcgtaaccatggagtgtcccctagactggagcctcactcaccgacac

SEQ ID NO: 159383 - DNA, 55 bp, Artificial
  Synthetic oligonucleotide
cggcgcatggatggattactgtgcgctcgcgatgcgacatggggaagcgttcgac

SEQ ID NO: 159384 - DNA, 55 bp, Artificial
  Synthetic oligonucleotide
cggcgcgtatgtggaactggccacgaacctctccggtgaatacgcacgcaaggtc

SEQ ID NO: 159385 - DNA, 55 bp, Artificial
  Synthetic oligonucleotide
cggcggacgatccgatagcacggtttgcgaccggcagttactgatcgattgttgc

SEQ ID NO: 159386 - DNA, 55 bp, Artificial
  Synthetic oligonucleotide
cggcgggaggggtgttcaatcaggctggatacacaatcgtgttctaattgagaga

SEQ ID NO: 159387 - DNA, 58 bp, Artificial
  Synthetic oligonucleotide
ggtgtgcccagctccctggcttgcatgggggctaaagcgcccccataccccgcaactc

SEQ ID NO: 159388 - DNA, 55 bp, Artificial
  Synthetic oligonucleotide
cgccgctctcatcgtagctaacaatatagtatggaaggccagattcagggtcgca

SEQ ID NO: 159389 - DNA, 55 bp, Artificial
  Synthetic oligonucleotide
cggcgtagctgttagacgtcgttgaaatgccctctaggcatagttgtgtctaggg

SEQ ID NO: 159390 - DNA, 55 bp, Artificial
  Synthetic oligonucleotide
cggcgtcagcagataactgaagggcaccgcagattcccgatacgaaacgacgatc

SEQ ID NO: 159391 - DNA, 55 bp, Artificial
  Synthetic oligonucleotide
cgccgcgattcgcatgagttctccctccgtatcaaggagactcgtaaaccgcgat

SEQ ID NO: 159392 - DNA, 55 bp, Artificial
  Synthetic oligonucleotide
cggctccggcgaaagagaccgttattcgaccgaacacgcaacccaacacgcactg

SEQ ID NO: 159393 - DNA, 55 bp, Artificial
  Synthetic oligonucleotide
cgccgcatccgtgtactggtttcgaagggcgtcggggatgtaagtgccgagatgc

SEQ ID NO: 159394 - DNA, 55 bp, Artificial
  Synthetic oligonucleotide
cggctgcccacctgagacaatggcgactcgaacgggtgcttcaatttgagattct

SEQ ID NO: 159395 - DNA, 55 bp, Artificial
  Synthetic oligonucleotide
cggctgcgtatgcctgtcgtttagcttttcgagcgtgctcgttgtaagtagcgac

SEQ ID NO: 159396 - DNA, 55 bp, Artificial
  Synthetic oligonucleotide
cgggaatggttgagatcttctcagccaaacgcttccactctgtaagtggagttgc

SEQ ID NO: 159397 - DNA, 55 bp, Artificial
  Synthetic oligonucleotide
cgggacatgaatgcaggcgatatctgtactagagacgttgtgacgtgcgggctga

SEQ ID NO: 159398 - DNA, 55 bp, Artificial
  Synthetic oligonucleotide
accgagattgaattgagatacgactgaaccgcttcccacccctgtttttccgcaa

SEQ ID NO: 159399 - DNA, 55 bp, Artificial
  Synthetic oligonucleotide
cgggacgctaaacacggtctcgtaggcttgcgtgagcacgcgagagatgggcgta

SEQ ID NO: 159400 - DNA, 55 bp, Artificial
  Synthetic oligonucleotide
cgggacgcttgcgccgatagactatgattcgtctgtcgccgaccttgtctcctac

SEQ ID NO: 159401 - DNA, 55 bp, Artificial
  Synthetic oligonucleotide
cgccgcatagattatggttgttcgcattgttgtgccttatggttcgagaaaacgt

SEQ ID NO: 159402 - DNA, 55 bp, Artificial
  Synthetic oligonucleotide
cgccgcagtgtgcaaagaactatacagacaatattgcggcatcgatgcaacgcgg

SEQ ID NO: 159403 - DNA, 55 bp, Artificial
  Synthetic oligonucleotide
cgccgaggaattgcagcgtcttggacggatggtctcggatatgctgtatctggca

SEQ ID NO: 159404 - DNA, 55 bp, Artificial
  Synthetic oligonucleotide
cggatgcggatcagcaaagtcagacgcagtacagctatgagccatacggcgcgac

SEQ ID NO: 159405 - DNA, 55 bp, Artificial
  Synthetic oligonucleotide
cggcaaatgggaagcgaggtggtagaacgcaggcagtgcatgtcaggttgaaaat

SEQ ID NO: 159406 - DNA, 55 bp, Artificial
  Synthetic oligonucleotide
cggcaacgaaagcgacttgttcataagggctggctccttgtgcatggttctgtga

SEQ ID NO: 159407 - DNA, 55 bp, Artificial
  Synthetic oligonucleotide
cgcctctatccgctcgtctggggcctgttgggactggccttccttgccaaaggat

SEQ ID NO: 159408 - DNA, 54 bp, Artificial
  Synthetic oligonucleotide
cggcaccgcatggtagttgaagtacccttgaaccacgcggcgtaaccagtcccc

SEQ ID NO: 159409 - DNA, 59 bp, Artificial
  Synthetic oligonucleotide
ggttcgagcgcatacgggaacatcggggtcttgaacgcgaacgagtcacgccagagcga

SEQ ID NO: 159410 - DNA, 55 bp, Artificial
  Synthetic oligonucleotide
cggcacctgatgggtgactctgctgcgaaatctccacacaagaatgtcgtggccg

SEQ ID NO: 159411 - DNA, 55 bp, Artificial
  Synthetic oligonucleotide
cggcaggaaatcgcttgctaatgcgattcaacaggaatacatgggacgtgctccg

SEQ ID NO: 159412 - DNA, 55 bp, Artificial
  Synthetic oligonucleotide
cggcatcacgactcgggctcgatgcaggcgcaccaatcttggcttcacgctcgtt

SEQ ID NO: 159413 - DNA, 55 bp, Artificial
  Synthetic oligonucleotide
cggcattaagccgatccactgaaggtcgcataagaccgccatggatacgcgtcaa

SEQ ID NO: 159414 - DNA, 55 bp, Artificial
  Synthetic oligonucleotide
cggccaaggagagcgttgtccaatcgcattcaccagtgtgcgaaattcgccgtgg

SEQ ID NO: 159415 - DNA, 55 bp, Artificial
  Synthetic oligonucleotide
cggccagacaccagtaagacgttgcgcggccattactacatgaaccactgtgacc

SEQ ID NO: 159416 - DNA, 55 bp, Artificial
  Synthetic oligonucleotide
cggcccgacacgatcagtcgaatgactcgaatattacgaaccggtcatctgaggg

SEQ ID NO: 159417 - DNA, 55 bp, Artificial
  Synthetic oligonucleotide
cggccggatagttccgtcggttacgcagttgatggacagtgcgggcctgatcagt

SEQ ID NO: 159418 - DNA, 55 bp, Artificial
  Synthetic oligonucleotide
cggccgttagttgcatgcgagacaaaacccatcagacggctatccacgatccgcc

SEQ ID NO: 159419 - DNA, 55 bp, Artificial
  Synthetic oligonucleotide
cgccggtactttgtcggcactgcataaggtaggcgaggcaagtgcggcaaggcag

SEQ ID NO: 159420 - DNA, 53 bp, Artificial
  Synthetic oligonucleotide
cgttcttgccgggaaatggggatgccgttacccaccggccgccgctggcgtcc

SEQ ID NO: 159421 - DNA, 55 bp, Artificial
  Synthetic oligonucleotide
cggccgttgcatattcgactgttctgtgtgcggccgtaccttcgtaatgcacggc

SEQ ID NO: 159422 - DNA, 55 bp, Artificial
  Synthetic oligonucleotide
cggcctaatgagcgttctcagtttgtcgaccccatatgtcgctataaagctgatc

SEQ ID NO: 159423 - DNA, 55 bp, Artificial
  Synthetic oligonucleotide
cggcgaacgtgatcagtttggaaggtggtgttgcgcggtcaatggattatagcga

SEQ ID NO: 159424 - DNA, 55 bp, Artificial
  Synthetic oligonucleotide
cgccgctgataggccgaataggctcggcgttgagcgctctaatgaacgttaggaa

SEQ ID NO: 159425 - DNA, 55 bp, Artificial
  Synthetic oligonucleotide
cggcgatttgttcacaggcttttcggggcggcatgaggcataccgtttgtcccgt

SEQ ID NO: 159426 - DNA, 55 bp, Artificial
  Synthetic oligonucleotide
cggtatgcacacgtgttatgtatctaaacgcttgactgttgctaacacgtacacg

SEQ ID NO: 159427 - DNA, 55 bp, Artificial
  Synthetic oligonucleotide
cggtattcgacgagcggtcgcatacaacacgcacagtatagtcccgggagtgcac

SEQ ID NO: 159428 - DNA, 55 bp, Artificial
  Synthetic oligonucleotide
cgcatcttgcgcgacggagcctaatccagttgcggcgctatgcaatcgacaatcc

SEQ ID NO: 159429 - DNA, 55 bp, Artificial
  Synthetic oligonucleotide
cggtcgactacgctcgcgcgaacgtcaaggcgtaatacgcgcgtcgtctgcaagt

SEQ ID NO: 159430 - DNA, 55 bp, Artificial
  Synthetic oligonucleotide
cggtcgttggacgtcgacggtagcgcatcgctcaagcgccgtgttgacgagagat

SEQ ID NO: 159431 - DNA, 58 bp, Artificial
  Synthetic oligonucleotide
cgtgttcaggccattgaatcgcccgattcacccaggcccatgcggggccacaacccag

SEQ ID NO: 159432 - DNA, 55 bp, Artificial
  Synthetic oligonucleotide
cgcatcggtacttcacagcgcgaaatcgtgcaaacgtctttaacagttgacccag

SEQ ID NO: 159433 - DNA, 55 bp, Artificial
  Synthetic oligonucleotide
cggtgacaatcccggcagtctcaccttttcggctctttcagtctcacgaaccgtg

SEQ ID NO: 159434 - DNA, 55 bp, Artificial
  Synthetic oligonucleotide
cggtgcattccgtcgcgaaacgctatatcgatcgcttttatgcggaggacacggc

SEQ ID NO: 159435 - DNA, 55 bp, Artificial
  Synthetic oligonucleotide
cgcatataacggactagaattccgcaatctgccttcactggagcgtgcttcgtcg

SEQ ID NO: 159436 - DNA, 55 bp, Artificial
  Synthetic oligonucleotide
cggtgcgtgcaatagaatgcgggcgcgtttgatttcctacaatggaacgacgatg

SEQ ID NO: 159437 - DNA, 55 bp, Artificial
  Synthetic oligonucleotide
cggtgctatcgccgctgctgtatcgggctatatcttgtttgtcaacgttcccgca

SEQ ID NO: 159438 - DNA, 55 bp, Artificial
  Synthetic oligonucleotide
cggtggacaaacctcgtactcacacaccttcttagatgcacagcccctatcgggt

SEQ ID NO: 159439 - DNA, 53 bp, Artificial
  Synthetic oligonucleotide
cggtggactgggtagaggtccatacggaaaactatctgggcgacggcggttac

SEQ ID NO: 159440 - DNA, 55 bp, Artificial
  Synthetic oligonucleotide
cggtgtcatcaacctaacggtgtccgcgtgtcctgagttacaggggcaactccac

SEQ ID NO: 159441 - DNA, 55 bp, Artificial
  Synthetic oligonucleotide
cggttcatcgtagtgccccgttcggaatcgatcggcaagagatgccccgcacgtt

SEQ ID NO: 159442 - DNA, 58 bp, Artificial
  Synthetic oligonucleotide
caccggaacctgaacgtcctatgcaacgcttcctcaacgtgttgactcaccctcgcac

SEQ ID NO: 159443 - DNA, 49 bp, Artificial
  Synthetic oligonucleotide
cggttcggtgttcggttcggtgttcggttcggtgttcggttcggtgttc

SEQ ID NO: 159444 - DNA, 55 bp, Artificial
  Synthetic oligonucleotide
cggttctccatccggttagctcatcatgccgcttcgaaagagggacttcaccgca

SEQ ID NO: 159445 - DNA, 55 bp, Artificial
  Synthetic oligonucleotide
cgcatagattgacatggttggatgcgaggaacctatcattttagtccgttccgcg

SEQ ID NO: 159446 - DNA, 55 bp, Artificial
  Synthetic oligonucleotide
cgcatagaacgaccacgcgggactcatttcatacacgacgccgatacgcgggctc

SEQ ID NO: 159447 - DNA, 55 bp, Artificial
  Synthetic oligonucleotide
cggttctgttgatttcgcgcttcgcacgttgcgttcagcggttgattgcatcgta

SEQ ID NO: 159448 - DNA, 52 bp, Artificial
  Synthetic oligonucleotide
cgccgaaaggaaacccctacgaagggctccgaatcttggggcccggtcagca

SEQ ID NO: 159449 - DNA, 55 bp, Artificial
  Synthetic oligonucleotide
cgggatcgacccacgctcgcgagtattgcatctgtctcgcttacttctgcaagga

SEQ ID NO: 159450 - DNA, 55 bp, Artificial
  Synthetic oligonucleotide
cgggattcaagtattgatccgaagatcggtacacagttgcgaagtttgtgaagtg

SEQ ID NO: 159451 - DNA, 55 bp, Artificial
  Synthetic oligonucleotide
cgccctggttgccctacttctagctgtcggcaaggaaatcgagatgtaggagggc

SEQ ID NO: 159452 - DNA, 55 bp, Artificial
  Synthetic oligonucleotide
cgccctcctcgtttcgaattcgcgaccaactcatcgcagacccctgcttatcagt

SEQ ID NO: 159453 - DNA, 60 bp, Artificial
  Synthetic oligonucleotide
tcgcaccgggagaccatcgcgacgtcccacgatgaaaagacgcttgcgtatcgtcggagc

SEQ ID NO: 159454 - DNA, 55 bp, Artificial
  Synthetic oligonucleotide
cgggcgtcacgccaagatatacggacatcttgcggcgtctgacgtctcgcagatc

SEQ ID NO: 159455 - DNA, 55 bp, Artificial
  Synthetic oligonucleotide
cggggatcacaacaaggccgtggacaaatacatacgaggtcaatgaatggcgcgt

SEQ ID NO: 159456 - DNA, 48 bp, Artificial
  Synthetic oligonucleotide
cggggttttacgtttcgaatgcacgaaaaccccttgacttacggtact

SEQ ID NO: 159457 - DNA, 55 bp, Artificial
  Synthetic oligonucleotide
cgggtaaggtcgactcggactgtccatatgggtcctccgattgcaaaagtgccgc

SEQ ID NO: 159458 - DNA, 55 bp, Artificial
  Synthetic oligonucleotide
cgccctcccgcttaccagcgtcttctcgtgttgacggaatgcgatccgcaagttg

SEQ ID NO: 159459 - DNA, 55 bp, Artificial
  Synthetic oligonucleotide
cgggtcacgggatgccaggcattgtcacggcgtcagtggtctagcaacaccaagc

SEQ ID NO: 159460 - DNA, 55 bp, Artificial
  Synthetic oligonucleotide
cgccccgtaaatgaccgtcggaacacctgcttcgcaatacaggcgtgcatccgta

SEQ ID NO: 159461 - DNA, 55 bp, Artificial
  Synthetic oligonucleotide
cgccccgatttccgtgggccctctattcatacgcagaaacgggtacgcctgcatt

SEQ ID NO: 159462 - DNA, 55 bp, Artificial
  Synthetic oligonucleotide
cgggttctatgaccggcgtcggtgagtaaatgcttggccgttgctgtttcgctgg

SEQ ID NO: 159463 - DNA, 55 bp, Artificial
  Synthetic oligonucleotide
cgccccgagctgatttacgcaacagagccgcgatgaaacacaaatggtggaaccg

SEQ ID NO: 159464 - DNA, 51 bp, Artificial
  Synthetic oligonucleotide
cttccgaaggggtttcaccccttcaccccattagtttaacgcctgtcgcgc

SEQ ID NO: 159465 - DNA, 60 bp, Artificial
  Synthetic oligonucleotide
cgatgtcctcttgctgcgagcctttcgccgtgtagtaccagccgctacaaggcgcgatgc

SEQ ID NO: 159466 - DNA, 55 bp, Artificial
  Synthetic oligonucleotide
cgccatcgattgacggcgaaggagaactattgcccgtcgaattcatgcaggaccg

SEQ ID NO: 159467 - DNA, 53 bp, Artificial
  Synthetic oligonucleotide
cgggttttgggacttccgggtactacttgaaactagtgtttggtgcggctgca

SEQ ID NO: 159468 - DNA, 55 bp, Artificial
  Synthetic oligonucleotide
cggtaaagtctgaacgtagccagactagaccgtgcagtttgtcgcgcgcttgggc

SEQ ID NO: 159469 - DNA, 55 bp, Artificial
  Synthetic oligonucleotide
cgccagaaacgattgtagtggctagatagtaatgtccgcttttagctacatagaa

SEQ ID NO: 159470 - DNA, 55 bp, Artificial
  Synthetic oligonucleotide
cggtaatcgcattgagaatgatttgcgtttacgttaaattgccctatctcggaat

SEQ ID NO: 159471 - DNA, 55 bp, Artificial
  Synthetic oligonucleotide
cggtacacgcttcaataccccgtactgttggtactgacgcgccacttcatcgggc

SEQ ID NO: 159472 - DNA, 55 bp, Artificial
  Synthetic oligonucleotide
cgccacatcgtatgagttgtacttcctacgcacgccgtccttaccatgagcctgg

SEQ ID NO: 159473 - DNA, 55 bp, Artificial
  Synthetic oligonucleotide
cgcgctatctctggttctaatcgacagttcttactttcgattcggcttatccggt

SEQ ID NO: 159474 - DNA, 55 bp, Artificial
  Synthetic oligonucleotide
cgctaaacgtagcacgagatggatcggcaaacccagtgcttcgcgtcatcgctgc

SEQ ID NO: 159475 - DNA, 55 bp, Artificial
  Synthetic oligonucleotide
cgcgctacctgtggccattgctcgcgacgaaagggtcatggtcgcttacctgcca

SEQ ID NO: 159476 - DNA, 60 bp, Artificial
  Synthetic oligonucleotide
cgatttcggcgagactgagtggtgctccagcatttctggcgagatcatatagcgcgctcg

SEQ ID NO: 159477 - DNA, 55 bp, Artificial
  Synthetic oligonucleotide
cgctattgtggcccgaaacgaaagcagactgaaagtgcccgccgcttacgatccg

SEQ ID NO: 159478 - DNA, 55 bp, Artificial
  Synthetic oligonucleotide
cgctcaacataaggagcggagtgagcatcgaccataggatgccaagcgccgaccc

SEQ ID NO: 159479 - DNA, 55 bp, Artificial
  Synthetic oligonucleotide
cgcgcgctagaatgggcatacgccgcactcagtcccatgttcgcgtacatcgagc

SEQ ID NO: 159480 - DNA, 55 bp, Artificial
  Synthetic oligonucleotide
cgctcaccgtgttcacagtctagctaccggacctgctccactgaattacccgcgt

SEQ ID NO: 159481 - DNA, 55 bp, Artificial
  Synthetic oligonucleotide
cgctcactatggataaggacaaagcgtggacaaggctcgtcgcgatgtcttcacg

SEQ ID NO: 159482 - DNA, 55 bp, Artificial
  Synthetic oligonucleotide
cgctcagacgggcgttcgctaagcatgtcgggatcacgcctgccgaataccggaa

SEQ ID NO: 159483 - DNA, 55 bp, Artificial
  Synthetic oligonucleotide
cgctcagggcgttgaaaagacgcaatcacgtttaacttgaaaggaggtacccatg

SEQ ID NO: 159484 - DNA, 55 bp, Artificial
  Synthetic oligonucleotide
cgctctagaaagtccagcagcaattaagtagttctcacgactggcatccccatag

SEQ ID NO: 159485 - DNA, 55 bp, Artificial
  Synthetic oligonucleotide
cgctctgatacacagagcgtttggccgtagcaagccgcccgacagtcgggaaagc

SEQ ID NO: 159486 - DNA, 55 bp, Artificial
  Synthetic oligonucleotide
cgctcttgtagacatacgggattgaagcgaggccctctcccgggatcgagccgaa

SEQ ID NO: 159487 - DNA, 60 bp, Artificial
  Synthetic oligonucleotide
gtactgcttgatccgcgcgaaggtagccacatgagcttcgaatacatccgcaactactac

SEQ ID NO: 159488 - DNA, 55 bp, Artificial
  Synthetic oligonucleotide
cgcgcgattgcactaggacaataattttcgggtgtctttctgagcgaccatgcga

SEQ ID NO: 159489 - DNA, 55 bp, Artificial
  Synthetic oligonucleotide
cgctgatgacaaaccgcgagacgacaacggacgatcacaggtatgagggtcgcga

SEQ ID NO: 159490 - DNA, 55 bp, Artificial
  Synthetic oligonucleotide
cgcgcgagtggacttggtatgccctgcgacgcggtgtatagtgtagccagactgc

SEQ ID NO: 159491 - DNA, 55 bp, Artificial
  Synthetic oligonucleotide
cgctgcaattgtgctcttcgcgcaaaccccattcgacaaagtgctcggtgtgagc

SEQ ID NO: 159492 - DNA, 55 bp, Artificial
  Synthetic oligonucleotide
cgctgcgccgtggaacacatatatcttcgtttcgagccgaatgccgcttcaatcg

SEQ ID NO: 159493 - DNA, 55 bp, Artificial
  Synthetic oligonucleotide
cgctgtgaaggccagtgggcgccaagcacctcatatttggactgttcctcagcgg

SEQ ID NO: 159494 - DNA, 55 bp, Artificial
  Synthetic oligonucleotide
cgcttgagattcgcgttgcgcccggaacaaatacgtccatcaataggtgggtcgc

SEQ ID NO: 159495 - DNA, 55 bp, Artificial
  Synthetic oligonucleotide
cgcttgctgagactcggaagtgggttcaacaagcttcgcaggtgaagccgtcccc

SEQ ID NO: 159496 - DNA, 55 bp, Artificial
  Synthetic oligonucleotide
cgcggcgcttatgacggtcgtgtcgatcatgtgtgcgtaccctctttagatgcgc

SEQ ID NO: 159497 - DNA, 55 bp, Artificial
  Synthetic oligonucleotide
cgcgggcggattggcgcacgcagacgtaacgagtcaaggagtctgagtcatgtct

SEQ ID NO: 159498 - DNA, 60 bp, Artificial
  Synthetic oligonucleotide
cgtgcagattcgtcttgccaccggaccctgtttgtttcggcacgagccctatccatgcag

SEQ ID NO: 159499 - DNA, 55 bp, Artificial
  Synthetic oligonucleotide
cgcgggctagccgaggttaacatttccacgtgtccgaactgtctggctatcagac

SEQ ID NO: 159500 - DNA, 55 bp, Artificial
  Synthetic oligonucleotide
cgcggggcacgttcattcagctttcgacgaggtggtatcgatgagtggcttcaac

SEQ ID NO: 159501 - DNA, 54 bp, Artificial
  Synthetic oligonucleotide
cgcggtaacctctttcagccaccccacagcataaggactaaggaaacccgccag

SEQ ID NO: 159502 - DNA, 55 bp, Artificial
  Synthetic oligonucleotide
cgcggtaatacaagtcgtgggacaaactgcccgcaatcgccaacaacaggccgtc

SEQ ID NO: 159503 - DNA, 55 bp, Artificial
  Synthetic oligonucleotide
cgcggtcagtttggcagcggaatcctctcttggcgcctcgtgttgacgagttcgg

SEQ ID NO: 159504 - DNA, 55 bp, Artificial
  Synthetic oligonucleotide
cgcgtacacgacgatgggttattgggtattccgtggaaaggtgcgtcatgcagac

SEQ ID NO: 159505 - DNA, 55 bp, Artificial
  Synthetic oligonucleotide
cgcgtcaaccgaaaattatacccgagcgtaccaagccaacgatagcggtcgcgga

SEQ ID NO: 159506 - DNA, 55 bp, Artificial
  Synthetic oligonucleotide
cgcggcaccgctgtggaagcacacggccgtgctaattgtctcccattcacaccct

SEQ ID NO: 159507 - DNA, 55 bp, Artificial
  Synthetic oligonucleotide
cgcggattggactggtctgcgtgacccgatgcgagaatctctcaccgaggggagt

SEQ ID NO: 159508 - DNA, 54 bp, Artificial
  Synthetic oligonucleotide
cgcgtgaaacgcgacgctttcgggttgtgtacgcgtcgtaatcgcgtagtttac

SEQ ID NO: 159509 - DNA, 60 bp, Artificial
  Synthetic oligonucleotide
ccatggtattggtccgaccagggtgcactgcgcatccaggtggcggggcttgcaagtggc

SEQ ID NO: 159510 - DNA, 55 bp, Artificial
  Synthetic oligonucleotide
cgcgtgcgcacgtaccaggggttcgcgtcgagcattcgttcagtgtttacgagga

SEQ ID NO: 159511 - DNA, 55 bp, Artificial
  Synthetic oligonucleotide
cgcgtggctgggtgcggatcacgaagcccaaaacactgcggcggggatgatctga

SEQ ID NO: 159512 - DNA, 55 bp, Artificial
  Synthetic oligonucleotide
cgcgtgtggcccggagtgcctgcgcgttcaacctacctaattccaatcagcgagt

SEQ ID NO: 159513 - DNA, 55 bp, Artificial
  Synthetic oligonucleotide
cgcgttcaacgggtacttcgcgactccacgcgactgggcgggatcgaacctctta

SEQ ID NO: 159514 - DNA, 55 bp, Artificial
  Synthetic oligonucleotide
cgcgttgaccactaagcgtgcagcggagcggtttgaacgcacgcgtaggcacttc

SEQ ID NO: 159515 - DNA, 55 bp, Artificial
  Synthetic oligonucleotide
cgcgttgtgcacgtgccatacagcctgatggaggacatgtacgcatatacgacat

SEQ ID NO: 159516 - DNA, 55 bp, Artificial
  Synthetic oligonucleotide
cgcgctgctctaccggattcgccctattaccccgtgggcactctttgcgcaattg

SEQ ID NO: 159517 - DNA, 55 bp, Artificial
  Synthetic oligonucleotide
cgcgtttccgcgttgggcggttcgcaccgttacaggttctaacatcggctcgcat

SEQ ID NO: 159518 - DNA, 55 bp, Artificial
  Synthetic oligonucleotide
cgcgctgacgcgcaagacggttcgttctatacatcgtatgcaaatgcgtcgcaca

SEQ ID NO: 159519 - DNA, 55 bp, Artificial
  Synthetic oligonucleotide
cggagaatccatcgatctgaacgtcctttctcaatggccgagatcaaagcctgtt

SEQ ID NO: 159520 - DNA, 60 bp, Artificial
  Synthetic oligonucleotide
cgcaacccaaatgcagctgtcaaggattacgcccatggatctcgcacgctgtcatccaag

SEQ ID NO: 159521 - DNA, 55 bp, Artificial
  Synthetic oligonucleotide
cgcgatcccgattcttctgcattcgcagaacgtgtgacataggacctcccggtct

SEQ ID NO: 159522 - DNA, 55 bp, Artificial
  Synthetic oligonucleotide
cggagattcgcatcatggccaaggtactcgttctttactactcgtcctacgggca

SEQ ID NO: 159523 - DNA, 55 bp, Artificial
  Synthetic oligonucleotide
cgcgagtgaatgtccgggaagtcgtggatcgacagccatgttccgagcgttgccc

SEQ ID NO: 159524 - DNA, 55 bp, Artificial
  Synthetic oligonucleotide
cgcgagccgcgcgtcaataacgacgcacgtttccctatactcgtcgccgtccaca

SEQ ID NO: 159525 - DNA, 54 bp, Artificial
  Synthetic oligonucleotide
cggagcagtatgttccgaccacgtaacaccgacccaataacccaacgactcacc

SEQ ID NO: 159526 - DNA, 55 bp, Artificial
  Synthetic oligonucleotide
cggagcgcgctgccatgacgctaaatagaggcactggcttgcaaagagcgccgca

SEQ ID NO: 159527 - DNA, 55 bp, Artificial
  Synthetic oligonucleotide
cggagctttcaagaacgatgcgcacgacgaaggatcgcattcgccacctggtgct

SEQ ID NO: 159528 - DNA, 55 bp, Artificial
  Synthetic oligonucleotide
cggaggcatcgacgtactgtcacttctcgtcgtatttgacacggagcaacgccga

SEQ ID NO: 159529 - DNA, 55 bp, Artificial
  Synthetic oligonucleotide
cgcgacggagtcgacgtgacggccaagtcccatatgttgttgcatatcgcgctac

SEQ ID NO: 159530 - DNA, 55 bp, Artificial
  Synthetic oligonucleotide
cggaggcgaaacatggtcgatccgcacgataagaagacgcgccaactgccgctga

SEQ ID NO: 159531 - DNA, 58 bp, Artificial
  Synthetic oligonucleotide
cagattcggagttccctcatggctattgaggccttggaacagttgctcggcgcccgtt

SEQ ID NO: 159532 - DNA, 55 bp, Artificial
  Synthetic oligonucleotide
cggaggctggcgtccaatttggctgcgtcagaacgatcagctctgctcatatcgc

SEQ ID NO: 159533 - DNA, 55 bp, Artificial
  Synthetic oligonucleotide
cggaggttggtaactcgatcgacatgggatcagcgcaagcactcttgaaggcttc

SEQ ID NO: 159534 - DNA, 53 bp, Artificial
  Synthetic oligonucleotide
cggagtttgtccgggtgacgggctctttgcttccggcacgcttctacgaacgg

SEQ ID NO: 159535 - DNA, 55 bp, Artificial
  Synthetic oligonucleotide
cggataggtgacagtcagcttggcatggggaaacaggaccgagtgcggcaggtct

SEQ ID NO: 159536 - DNA, 55 bp, Artificial
  Synthetic oligonucleotide
cgcgaaacgctgggagtcatgcgcaattcgatacgtctccacagttgacttgtta

SEQ ID NO: 159537 - DNA, 55 bp, Artificial
  Synthetic oligonucleotide
cggatatccaatagtagtgacgtgatgcctgacctcgatctgaacctgattccgt

SEQ ID NO: 159538 - DNA, 55 bp, Artificial
  Synthetic oligonucleotide
cggatccgacggacacctccagttgctccgcagaaatgggtacgcctggtgggta

SEQ ID NO: 159539 - DNA, 55 bp, Artificial
  Synthetic oligonucleotide
cggatgaaatattgtcaaatcaggatccggtgtcctgcgttgtaggttcgccgaa

SEQ ID NO: 159540 - DNA, 55 bp, Artificial
  Synthetic oligonucleotide
cggatgatcgaacgcttgcgtcggtttgggttgacagtctcggtacgcacgttgt

SEQ ID NO: 159541 - DNA, 55 bp, Artificial
  Synthetic oligonucleotide
cgcttgtgcataaggctagcgatactggacgctatgcggtcgagcgaaagcgccg

SEQ ID NO: 159542 - DNA, 60 bp, Artificial
  Synthetic oligonucleotide
tgagcgcttccgtctcacctcgaatagatcgcgacgccactccttatatagctcgagacg

SEQ ID NO: 159543 - DNA, 55 bp, Artificial
  Synthetic oligonucleotide
cgctttgcgcggtctgtattgcgggacccatccctgcttgctaatgtgactgcac

SEQ ID NO: 159544 - DNA, 55 bp, Artificial
  Synthetic oligonucleotide
cgcttttctgcaaagcttgcatagaccttgaccatgcttcctcacagacgcgtag

SEQ ID NO: 159545 - DNA, 55 bp, Artificial
  Synthetic oligonucleotide
cgcgcgaaaacaggtagttgacgggtgcgtttgctgtgcgcaggatggtcacagg

SEQ ID NO: 159546 - DNA, 55 bp, Artificial
  Synthetic oligonucleotide
cggaaaagataactttaccgcaaaatggtcgtcattcagtgttgtgaaaggtgcg

SEQ ID NO: 159547 - DNA, 55 bp, Artificial
  Synthetic oligonucleotide
cggaaaagcccctcttgttgcaaaccctcggtggatggcagatcggcatacccgg

SEQ ID NO: 159548 - DNA, 55 bp, Artificial
  Synthetic oligonucleotide
cggaaaagcgggcattcggcatcccgtgccgagcgactctagcaaccgggccttt

SEQ ID NO: 159549 - DNA, 55 bp, Artificial
  Synthetic oligonucleotide
cggaacgagtatctcaacccgcatgttctcgtcagtcaaggcggcgatctagctg

SEQ ID NO: 159550 - DNA, 55 bp, Artificial
  Synthetic oligonucleotide
cggaaggcctgatgtcgtatttcggggaatttcaatcaatatgctcgcacgagac

SEQ ID NO: 159551 - DNA, 55 bp, Artificial
  Synthetic oligonucleotide
cggaatggtgaagtgcgcaatcactacttgaagacggagtgtactcagtcgcttc

SEQ ID NO: 159552 - DNA, 55 bp, Artificial
  Synthetic oligonucleotide
cgcgcctgcctcatttctgacgccaatcacgaaacgcggtgcacatctgcggaat

SEQ ID NO: 159553 - DNA, 60 bp, Artificial
  Synthetic oligonucleotide
ctgaatgtcgacacgaactctgcgtagcgatcgagatatccgtagaccgcttcaagccga

SEQ ID NO: 159554 - DNA, 55 bp, Artificial
  Synthetic oligonucleotide
cgcgccatggttcggctgacgagatacagctcgctggcaggaattccttgcgact

SEQ ID NO: 159555 - DNA, 55 bp, Artificial
  Synthetic oligonucleotide
cgcgccatccgattggattcataccgttgccccttgagttgccggtgtagcgagt

SEQ ID NO: 159556 - DNA, 55 bp, Artificial
  Synthetic oligonucleotide
cgcgccatatggcttctcgttcgcgcggtagaaacgtatttcgttcagcgcagca

SEQ ID NO: 159557 - DNA, 55 bp, Artificial
  Synthetic oligonucleotide
cggacagagaaggcacaacggtcgtggcctgactaaattccgctcaaaccgcatc

SEQ ID NO: 159558 - DNA, 52 bp, Artificial
  Synthetic oligonucleotide
cggaccgacaactcgtaggccacccgttccggtcgcttgttttggtccttga

SEQ ID NO: 159559 - DNA, 55 bp, Artificial
  Synthetic oligonucleotide
cgcgcattggatgaatttgtgtggcagacgaggcccctggagattgcgggatgcg

SEQ ID NO: 159560 - DNA, 55 bp, Artificial
  Synthetic oligonucleotide
cggaccgcatagcctcacaagccaccgaggcactttcgaaatggttgtcggagca

SEQ ID NO: 159561 - DNA, 55 bp, Artificial
  Synthetic oligonucleotide
cggactacaatgtcgccccgtttgcctctcccgccccacgcatgcgcaacctctc

SEQ ID NO: 159562 - DNA, 55 bp, Artificial
  Synthetic oligonucleotide
cggactgcgacaatggcgcatcatgacacgattggtcgttcttcgtttctctgcg

SEQ ID NO: 159563 - DNA, 55 bp, Artificial
  Synthetic oligonucleotide
cgcgcatacaggctccttaccggaacggattgacgtcaggctgcttatgcgtcgg

SEQ ID NO: 159564 - DNA, 58 bp, Artificial
  Synthetic oligonucleotide
attctggcgaacaacctcagcgtgtttttctgagcggaggaaccagcacgatggcgtt

SEQ ID NO: 159565 - DNA, 55 bp, Artificial
  Synthetic oligonucleotide
cgcgatgcatttgttctgaagccgatccggatctatcgtgcgggatcgcccgtgt

SEQ ID NO: 159566 - DNA, 55 bp, Artificial
  Synthetic oligonucleotide
ctcaggagaaatgcaatgcgggattcgacaacccaccgtcgtacggccacgacac

SEQ ID NO: 159567 - DNA, 55 bp, Artificial
  Synthetic oligonucleotide
ctcagttaaaataagcggttatccgacggctgaccacgcaagcgctcgcttttgg

SEQ ID NO: 159568 - DNA, 55 bp, Artificial
  Synthetic oligonucleotide
ctcagttccgtccgaaccatgatgcgtctcccgaacggatgcatgtcacgtccgc

SEQ ID NO: 159569 - DNA, 55 bp, Artificial
  Synthetic oligonucleotide
ctcatctaaaggagcaggaataagggatttctagccggtacccgcgagcttgaca

SEQ ID NO: 159570 - DNA, 55 bp, Artificial
  Synthetic oligonucleotide
cgaggatctgcgtgaaaaccatcgaccttctcagacccactcccggactgcgcgt

SEQ ID NO: 159571 - DNA, 55 bp, Artificial
  Synthetic oligonucleotide
ctcatggttccctgctcttagccacgttccctagaatgactccctgccccgatcg

SEQ ID NO: 159572 - DNA, 55 bp, Artificial
  Synthetic oligonucleotide
ctcattcggcgcaattcgtgagggaatccacgcatgaacttttatcaactaccga

SEQ ID NO: 159573 - DNA, 55 bp, Artificial
  Synthetic oligonucleotide
ctccacgctggtactcaagcgcaccgagctcggcatggatgccgtcgacctcaat

SEQ ID NO: 159574 - DNA, 55 bp, Artificial
  Synthetic oligonucleotide
ctccagaaacgtcgatatggctgcccgtcgtgtaggacgacagatgcgttgcgag

SEQ ID NO: 159575 - DNA, 58 bp, Artificial
  Synthetic oligonucleotide
atggcgtttaccaaagcctgcagcgtggacgatgttccgcccggagaagccttgcaag

SEQ ID NO: 159576 - DNA, 56 bp, Artificial
  Synthetic oligonucleotide
aaggaacgccttgatttgaatactcgaaaaatccgcccaaggatgttcgcagacaa

SEQ ID NO: 159577 - DNA, 55 bp, Artificial
  Synthetic oligonucleotide
ctccatggtgctcgctccttaactcgcgagcagtctgtaggacgatggcggatgt

SEQ ID NO: 159578 - DNA, 53 bp, Artificial
  Synthetic oligonucleotide
ctcccaaaactcaaggcgggtaagcctgagccggtggaggtaaattcgagccc

SEQ ID NO: 159579 - DNA, 55 bp, Artificial
  Synthetic oligonucleotide
ctcccggtactatcaacgttattagtggacggatgtcgcaacgtgcatggcgcct

SEQ ID NO: 159580 - DNA, 55 bp, Artificial
  Synthetic oligonucleotide
cgaggacttgaagaccgaagcgcacaagatcggcgatcacggtctttcggaaatc

SEQ ID NO: 159581 - DNA, 55 bp, Artificial
  Synthetic oligonucleotide
cgagcgccgaactgatgcccataaacgactacctttcgccgataccataaacggc

SEQ ID NO: 159582 - DNA, 55 bp, Artificial
  Synthetic oligonucleotide
ctccgggaagttttcccgtcgcccacactccggcgctgactgcttacgtatctcg

SEQ ID NO: 159583 - DNA, 55 bp, Artificial
  Synthetic oligonucleotide
cgagccgaatagaactcgagatgcgtagtcacgacccttagcggacccgacgcgg

SEQ ID NO: 159584 - DNA, 55 bp, Artificial
  Synthetic oligonucleotide
ctcctcacgctagctattgttgccgagatggttatgagttcttagttcttagtgt

SEQ ID NO: 159585 - DNA, 55 bp, Artificial
  Synthetic oligonucleotide
ctcctcgtgtagcggggactcacgcgtcgcatagcgtgcctacatagttgccaga

SEQ ID NO: 159586 - DNA, 55 bp, Artificial
  Synthetic oligonucleotide
ctcgaagattgcctcgggatgtacaaagctgcgcgcatgatcaggaccccggagg

SEQ ID NO: 159587 - DNA, 60 bp, Artificial
  Synthetic oligonucleotide
aacgtgtagaagagtaggcatctttgctcgtgaattgcccgtcatgacctagctcggtag

SEQ ID NO: 159588 - DNA, 55 bp, Artificial
  Synthetic oligonucleotide
ctactaccttgccgtccgatcatgtcgtcttccgctacctgggtgattgaagtcg

SEQ ID NO: 159589 - DNA, 55 bp, Artificial
  Synthetic oligonucleotide
ctagaatcccgaccggtagccgtttcccaatgtacctaacgtggcacttcagcag

SEQ ID NO: 159590 - DNA, 55 bp, Artificial
  Synthetic oligonucleotide
ctagaccgactgtcagcccgctttgcttcgtttcatggctctcgttatggctata

SEQ ID NO: 159591 - DNA, 55 bp, Artificial
  Synthetic oligonucleotide
ctagcaaccgtaagttgctagtgaagcgccattccactccctagtgcgacgtccg

SEQ ID NO: 159592 - DNA, 55 bp, Artificial
  Synthetic oligonucleotide
ctagtatgattgccggatcatgtctcgcaaaaccctactcgatccgcgacgcata

SEQ ID NO: 159593 - DNA, 55 bp, Artificial
  Synthetic oligonucleotide
ctatagaatggccgctggtcgtattcgtaactttggagcgtgtgcatgaaaatcc

SEQ ID NO: 159594 - DNA, 55 bp, Artificial
  Synthetic oligonucleotide
cgagttcttggacatctagcccctgcgcgcttgtcggcagcgctatgaaggctgc

SEQ ID NO: 159595 - DNA, 55 bp, Artificial
  Synthetic oligonucleotide
cgagttattagttggcttggacttgaatcgatcccgatgcaagaattcgctcacc

SEQ ID NO: 159596 - DNA, 55 bp, Artificial
  Synthetic oligonucleotide
ctatggcgcggatggtaacgccacgcaacaatacaacttcaaccttgacaagagc

SEQ ID NO: 159597 - DNA, 55 bp, Artificial
  Synthetic oligonucleotide
cgagtgggtctcagtcgcagcgagatctatcgacgaattagcgccggcaccttcg

SEQ ID NO: 159598 - DNA, 60 bp, Artificial
  Synthetic oligonucleotide
tccgtgagctcacacctagagcgagcatgctcgacttgcacctgggatggcggtagtaac

SEQ ID NO: 159599 - DNA, 55 bp, Artificial
  Synthetic oligonucleotide
cgagtcttaacccaccgatttcatctaaatctgacccaccccgagacagcgtagt

SEQ ID NO: 159600 - DNA, 55 bp, Artificial
  Synthetic oligonucleotide
ctattaagcggcacggttagcctccagaaacgatacgctcggcggatgcctcacg

SEQ ID NO: 159601 - DNA, 55 bp, Artificial
  Synthetic oligonucleotide
ctattgcatgtgcgcagactgacgatgggtgtggtgcaccgttggggcagctagt

SEQ ID NO: 159602 - DNA, 55 bp, Artificial
  Synthetic oligonucleotide
ctcaaatcgtctctcaaggagaatcccgcacagtaacaaccccggggcgccgtat

SEQ ID NO: 159603 - DNA, 55 bp, Artificial
  Synthetic oligonucleotide
ctcaacggactccattagcaaaattcacggacttcaacatgcatccgcgacaggt

SEQ ID NO: 159604 - DNA, 55 bp, Artificial
  Synthetic oligonucleotide
cgagtcagtgcgagtaactgttggtcaccacgtcacaacgtacacggtaagtacg

SEQ ID NO: 159605 - DNA, 55 bp, Artificial
  Synthetic oligonucleotide
cgagtaggataggagtggggctccgcattgacgcaagtcgctccgagtactgcgc

SEQ ID NO: 159606 - DNA, 55 bp, Artificial
  Synthetic oligonucleotide
cgaggtaaaggcctcggtactgcagcacgtccgcttcaaatacgcgtgtcggcac

SEQ ID NO: 159607 - DNA, 55 bp, Artificial
  Synthetic oligonucleotide
ctcacgaactcgaggcgcgcgaaaccgttgtgcgaaacaatgggaaataccgaag

SEQ ID NO: 159608 - DNA, 55 bp, Artificial
  Synthetic oligonucleotide
ctcagactggcaagacgattcgccgatcacgtgtcagaccatcgatcgcagccag

SEQ ID NO: 159609 - DNA, 60 bp, Artificial
  Synthetic oligonucleotide
attgtccagcagagggccaatcgcttccaaacgcatttgtgcaacctcccattcttcgct

SEQ ID NO: 159610 - DNA, 55 bp, Artificial
  Synthetic oligonucleotide
ctcagcaacgctgtaggggaatcccgtgatgcgaccttggtactcgcgggaattg

SEQ ID NO: 159611 - DNA, 55 bp, Artificial
  Synthetic oligonucleotide
ctctcaatgcgatgtagaaggcagcgtctgacaggtatgctcggaaggcctgccg

SEQ ID NO: 159612 - DNA, 55 bp, Artificial
  Synthetic oligonucleotide
cgacggtcgtcactgcggtctccattcgaatcggacacggggatgcagcggaatc

SEQ ID NO: 159613 - DNA, 55 bp, Artificial
  Synthetic oligonucleotide
cgacggtatcgtcccctgctgacggcaactagcggcaaaaccttaggcctggtcg

SEQ ID NO: 159614 - DNA, 55 bp, Artificial
  Synthetic oligonucleotide
ctctcgagttagagctgacccgcgcggcattgaccgatgtacatagccgattgcg

SEQ ID NO: 159615 - DNA, 55 bp, Artificial
  Synthetic oligonucleotide
ctctctcagccattcgtgagcggggtgctcgacaaatggcgttgacgtgtaggta

SEQ ID NO: 159616 - DNA, 55 bp, Artificial
  Synthetic oligonucleotide
cgacgcgtgctgtgctttgagtaagcgattcgggaaaaccccacgcaagcttcag

SEQ ID NO: 159617 - DNA, 55 bp, Artificial
  Synthetic oligonucleotide
ctctgtgagatcgatccgtatctttagccatacgaagttattggtatccccggtg

SEQ ID NO: 159618 - DNA, 55 bp, Artificial
  Synthetic oligonucleotide
cgacgcatttgacgcatttcgccgggcgtctcgattgactgcgattaactgcggc

SEQ ID NO: 159619 - DNA, 55 bp, Artificial
  Synthetic oligonucleotide
cgacgcacagcactcgaaaaccgcaaatgcccgacgtatttcaagccccgtggtg

SEQ ID NO: 159620 - DNA, 57 bp, Artificial
  Synthetic oligonucleotide
ctcgcgttaacgacggttcgccgcgcttctttaggcaaggtgcgactgacgatacga

SEQ ID NO: 159621 - DNA, 55 bp, Artificial
  Synthetic oligonucleotide
ctgatcagcatcgattctattcaggcttactggtcgaactaggtgccccgcacaa

SEQ ID NO: 159622 - DNA, 55 bp, Artificial
  Synthetic oligonucleotide
ctgatgcgccctatgtacgggtaatgaaacgttgcaatcacgtgaacgtaatagg

SEQ ID NO: 159623 - DNA, 55 bp, Artificial
  Synthetic oligonucleotide
ctgatttgagtcggtccaccagcgtatgcatataggcacgcatcatcggcttgag

SEQ ID NO: 159624 - DNA, 55 bp, Artificial
  Synthetic oligonucleotide
ctgcaaccgttggatcgggagagcgccgtgtcgaaattcctcaattcgctgtttg

SEQ ID NO: 159625 - DNA, 55 bp, Artificial
  Synthetic oligonucleotide
ctgcaagctgcgttgcccgcgaccgctatcgttggcttggtacgctcgggtataa

SEQ ID NO: 159626 - DNA, 55 bp, Artificial
  Synthetic oligonucleotide
ctgcatcatggaatagccatcgatcgggaaacccctaggaccgtgtattcctggt

SEQ ID NO: 159627 - DNA, 55 bp, Artificial
  Synthetic oligonucleotide
cgacgaggtgtcacacgcgaaataactataaataggcgaacggttttgcttacgc

SEQ ID NO: 159628 - DNA, 55 bp, Artificial
  Synthetic oligonucleotide
cgacctggaatgtccgggcgccattcaaataacggtgacacggtcttgcctgcgg

SEQ ID NO: 159629 - DNA, 55 bp, Artificial
  Synthetic oligonucleotide
cgaccgcaaaatccacgtctgcctccgttgtgaagcgtccgaggctcaggcgaac

SEQ ID NO: 159630 - DNA, 55 bp, Artificial
  Synthetic oligonucleotide
cgaccctgccgtttcggctcgaaccacaaaacacagcagacacgcaaacggccgc

SEQ ID NO: 159631 - DNA, 60 bp, Artificial
  Synthetic oligonucleotide
tgaatgcctgcgtatgacgtgctcatagctcggcgtatcaagagtgcacatgccccgcag

SEQ ID NO: 159632 - DNA, 55 bp, Artificial
  Synthetic oligonucleotide
cgaccctcagccattctaggctattaaatgcaagtccgctaatggtggttagcgg

SEQ ID NO: 159633 - DNA, 55 bp, Artificial
  Synthetic oligonucleotide
ctgcctcgtatcggtgtcacgtcaaaaggtgtagggaaagcgcaggccagtgaca

SEQ ID NO: 159634 - DNA, 55 bp, Artificial
  Synthetic oligonucleotide
cgagccacggagcagcagtcgtagttcctttgtccacccacgacaaaggaggccg

SEQ ID NO: 159635 - DNA, 55 bp, Artificial
  Synthetic oligonucleotide
ctcgaatacgcttggatgcatcggcacactcagccgcgtgttaacccgttccgcc

SEQ ID NO: 159636 - DNA, 55 bp, Artificial
  Synthetic oligonucleotide
ctcgacctgtcgacatttatcgctcgcataatcttgagtggtattagcgacgggc

SEQ ID NO: 159637 - DNA, 55 bp, Artificial
  Synthetic oligonucleotide
ctcgagcaatctcgtacggtagttgtgtactgcgcccacggtcaagaacgaagtc

SEQ ID NO: 159638 - DNA, 55 bp, Artificial
  Synthetic oligonucleotide
ctcgattcatcagcgctccagttgttcgaattggatgcggggatcgacccacacg

SEQ ID NO: 159639 - DNA, 55 bp, Artificial
  Synthetic oligonucleotide
ctcgcacgcggcgtttgcatgcgggaaagcgagccactatagccagccgatatcg

SEQ ID NO: 159640 - DNA, 55 bp, Artificial
  Synthetic oligonucleotide
cgagaattcgctcgtgagaattgccgccatcgaagtcattcgcctgtcgctcgca

SEQ ID NO: 159641 - DNA, 55 bp, Artificial
  Synthetic oligonucleotide
ctcgcccgttgaaacttttgcgcgaatgtagtcggccatttcatacggaagcgag

SEQ ID NO: 159642 - DNA, 60 bp, Artificial
  Synthetic oligonucleotide
gtccgagacaggcacgcgctcatcttccagattgatgaggtagtggaagaagcccgcgat

SEQ ID NO: 159643 - DNA, 55 bp, Artificial
  Synthetic oligonucleotide
ctcgccgtggtaaacaccctgctgtacccgtatgcacggttcctctatgaacgag

SEQ ID NO: 159644 - DNA, 55 bp, Artificial
  Synthetic oligonucleotide
ctcgctaaacaacgcgaccttgtacagttccgtgttgcaatctgcggtgcaaacg

SEQ ID NO: 159645 - DNA, 55 bp, Artificial
  Synthetic oligonucleotide
cgacttgccgtacccaacacgacatcgaacatgcaagggcacccgaggaaccacc

SEQ ID NO: 159646 - DNA, 55 bp, Artificial
  Synthetic oligonucleotide
ctcggaatggtcccctccgttcagaacaaggcgcactggcatgcaaagcgtgtcg

SEQ ID NO: 159647 - DNA, 55 bp, Artificial
  Synthetic oligonucleotide
ctcgggctatccagtgtatttacgacgtggtgtcccggttaagcggctcgttctc

SEQ ID NO: 159648 - DNA, 55 bp, Artificial
  Synthetic oligonucleotide
cgacgtatccgcatgcatgttttgcatgcgcacgcgaatgtcgggaattcgcgag

SEQ ID NO: 159649 - DNA, 55 bp, Artificial
  Synthetic oligonucleotide
ctcgggctgctcattgcttgagaacgattgcatggcccttcgattaaaggacttt

SEQ ID NO: 159650 - DNA, 55 bp, Artificial
  Synthetic oligonucleotide
ctcgtcgtgcttcagtctgagacgaaattcgatacaaatccggggcgctgagacc

SEQ ID NO: 159651 - DNA, 55 bp, Artificial
  Synthetic oligonucleotide
ctcgtgaggtatttataggcccatcacggtgggcaagagttactgtccccgcagc

SEQ ID NO: 159652 - DNA, 55 bp, Artificial
  Synthetic oligonucleotide
ctcgtgcgtcttcccatgattcgaacagcgagaacgcggcagggcggaaggcacg

SEQ ID NO: 159653 - DNA, 60 bp, Artificial
  Synthetic oligonucleotide
ggggtaccacgcgtagcacacaactgacccgtgcaggcaagctgtttttggagcacgtgc

SEQ ID NO: 159654 - DNA, 55 bp, Artificial
  Synthetic oligonucleotide
ctcgttcaggctcaaatcatagcgacgcagcaccccatcacgccgcatctcttgc

SEQ ID NO: 159655 - DNA, 55 bp, Artificial
  Synthetic oligonucleotide
ctcgtttatgattgaacaccgcagcttgacccgctctcttcaatgacgtccgaac

SEQ ID NO: 159656 - DNA, 55 bp, Artificial
  Synthetic oligonucleotide
ctctacaaaagtcgtctttcgtcttacaggcgggtgcgctcttgcgccacttcgt

SEQ ID NO: 159657 - DNA, 55 bp, Artificial
  Synthetic oligonucleotide
cgtcgacttgtacaaccgcctgcttgcagcctatgggcagtcccagctctcatcg

SEQ ID NO: 159658 - DNA, 55 bp, Artificial
  Synthetic oligonucleotide
cgtcgatacagggcgtcgatcggtagcggcagcaaagtccgatccgccctatacc

SEQ ID NO: 159659 - DNA, 55 bp, Artificial
  Synthetic oligonucleotide
cgcacgccgcttatgcgttttcattcaagatcctccgtatgcggattcgtacgag

SEQ ID NO: 159660 - DNA, 55 bp, Artificial
  Synthetic oligonucleotide
cgtcgatagtgcatgagactctcctgctgaacggaaccgaccttaagcttagacg

SEQ ID NO: 159661 - DNA, 55 bp, Artificial
  Synthetic oligonucleotide
cgcacgaaatacgattgctcaacgagcgcgcacaagaaatgtcgctcgatagcgg

SEQ ID NO: 159662 - DNA, 55 bp, Artificial
  Synthetic oligonucleotide
cgcaccgtctagattgaaagggagactgtagatctatgcctattaaagtgccgaa

SEQ ID NO: 159663 - DNA, 55 bp, Artificial
  Synthetic oligonucleotide
cgtcgggtcaagcgaattcattgtgttctggcgcggcgaattccttagaacctcg

SEQ ID NO: 159664 - DNA, 60 bp, Artificial
  Synthetic oligonucleotide
acgagcgtagttctggttcatatatgccgctccattgctgaacatctgatcccaagtacc

SEQ ID NO: 159665 - DNA, 55 bp, Artificial
  Synthetic oligonucleotide
cgtcgtattggaatagttgccgaccgcgtaacgcgatagcaatcaatggaggcgt

SEQ ID NO: 159666 - DNA, 55 bp, Artificial
  Synthetic oligonucleotide
cgtcgtgaactcattcaatgtgagcgccggcaacatactgtccgccgaccatgtg

SEQ ID NO: 159667 - DNA, 55 bp, Artificial
  Synthetic oligonucleotide
cgtctataccgccgacgtgttttgtgatggcgacgactgctcgcaatggacgaac

SEQ ID NO: 159668 - DNA, 55 bp, Artificial
  Synthetic oligonucleotide
cgtctcgcaagtttcggcgacctgggcacagtagacggccatccggtagatggag

SEQ ID NO: 159669 - DNA, 55 bp, Artificial
  Synthetic oligonucleotide
cgcacatgacaggctagaccgcagaaaattggcgcgagaggatgcgaacaaagta

SEQ ID NO: 159670 - DNA, 55 bp, Artificial
  Synthetic oligonucleotide
cgtgagttgatgaggcggcttgactgcccgcacggacggcttttgcactcacgca

SEQ ID NO: 159671 - DNA, 55 bp, Artificial
  Synthetic oligonucleotide
cgtgataaatgagctgcaccacccgctcatacgtgtgcgccagacactcggcaac

SEQ ID NO: 159672 - DNA, 55 bp, Artificial
  Synthetic oligonucleotide
cgcaagacgaacagggcgttgactgaaaagaacgatattcggccagtaatcgatg

SEQ ID NO: 159673 - DNA, 55 bp, Artificial
  Synthetic oligonucleotide
cgcaaactctactacgggcgaatttcgaccacagacggccagtcgtcagtgagcc

SEQ ID NO: 159674 - DNA, 55 bp, Artificial
  Synthetic oligonucleotide
cgtgcatggattttggcgcacgatgttttcattggactgcatcaacccggggacc

SEQ ID NO: 159675 - DNA, 58 bp, Artificial
  Synthetic oligonucleotide
ctccgaggctctagacccgatcatgtaggttgaaccttggtcgcggtcgagaacaggc

SEQ ID NO: 159676 - DNA, 55 bp, Artificial
  Synthetic oligonucleotide
cgtgcgaatcctagggagaaagctctaacttgcgagcttgtttggttttaaacgc

SEQ ID NO: 159677 - DNA, 55 bp, Artificial
  Synthetic oligonucleotide
cgtgcgtggacgctaacggtctacagggatcaccgtccctttgatttgagtcgac

SEQ ID NO: 159678 - DNA, 55 bp, Artificial
  Synthetic oligonucleotide
cgtgctatgtgcgcgcattgtgcttttgaggccgctttccaatggcagcgcaccg

SEQ ID NO: 159679 - DNA, 55 bp, Artificial
  Synthetic oligonucleotide
cggttctttgccggcacggatcggaaactgtgctgagacggatccgacacctgcc

SEQ ID NO: 159680 - DNA, 55 bp, Artificial
  Synthetic oligonucleotide
cggttgggccgggcgtgttgcacaacgaatactgtcgcgacggcaatccacgcaa

SEQ ID NO: 159681 - DNA, 55 bp, Artificial
  Synthetic oligonucleotide
cggttgtgccatcccgcttcacggggtaaattcgtcagacggaaacagcggagcg

SEQ ID NO: 159682 - DNA, 55 bp, Artificial
  Synthetic oligonucleotide
cgtaacggctctaacgacctcaggatgaactctacacgccgatcgaccttgcgtc

SEQ ID NO: 159683 - DNA, 55 bp, Artificial
  Synthetic oligonucleotide
cgtaacgtttcagcaaattcatcggttagcgaagcagagttaagaggttgagggg

SEQ ID NO: 159684 - DNA, 55 bp, Artificial
  Synthetic oligonucleotide
cgtaccgggccgcagtcaatggaaacagctattcagcacccacgtgggctcatga

SEQ ID NO: 159685 - DNA, 55 bp, Artificial
  Synthetic oligonucleotide
cgcagtgaccggcgtagtcgctgctgtgtttgtgccgtggtggttgcacgctttc

SEQ ID NO: 159686 - DNA, 58 bp, Artificial
  Synthetic oligonucleotide
tcccggatccgttgttgagaattcccgctgcatagttgtactttccgatcaggtccga

SEQ ID NO: 159687 - DNA, 59 bp, Artificial
  Synthetic oligonucleotide
ctcccgttggaatcattggcagtacagacgtacgactcaaccgatgccccctgcctaca

SEQ ID NO: 159688 - DNA, 55 bp, Artificial
  Synthetic oligonucleotide
cgtagcattcggcaaatgggagcgggtgccagagtccgcattacgggttgggtcg

SEQ ID NO: 159689 - DNA, 55 bp, Artificial
  Synthetic oligonucleotide
cgcagtcatacgttgtatgacgtgtcggagcgaatgtacgtcggttaatcgttta

SEQ ID NO: 159690 - DNA, 55 bp, Artificial
  Synthetic oligonucleotide
cgtattctcagaaaaccagcctgacgatctacggaaagaaatttgttcacgttga

SEQ ID NO: 159691 - DNA, 55 bp, Artificial
  Synthetic oligonucleotide
cgtattcttccttgttcgcaattctggttatcgaggtccgctcggtacgacgatc

SEQ ID NO: 159692 - DNA, 55 bp, Artificial
  Synthetic oligonucleotide
cgtcacctggcgagctgtttcagagtgccgccccactttgagcgaagcgtaggtg

SEQ ID NO: 159693 - DNA, 55 bp, Artificial
  Synthetic oligonucleotide
cgtcagagtagatgcaggtcgcaagacggctacgcgcaatggctacgatttggtg

SEQ ID NO: 159694 - DNA, 55 bp, Artificial
  Synthetic oligonucleotide
cgtcatgtcaaccacgccctgtaactccggtttgatcgagatgaatgcgccaacg

SEQ ID NO: 159695 - DNA, 55 bp, Artificial
  Synthetic oligonucleotide
cgtccagtacatacagcgggcccgatagggcgaggataacttgaacaaatgtccg

SEQ ID NO: 159696 - DNA, 55 bp, Artificial
  Synthetic oligonucleotide
cgcagtatcgggtacgctgtcttgtcgctttgaggaacagccgtagtccctcctc

SEQ ID NO: 159697 - DNA, 55 bp, Artificial
  Synthetic oligonucleotide
cgcagcaacgcacaaggtggcttgctactcagcgcgacaaacctccgcccagaca

SEQ ID NO: 159698 - DNA, 60 bp, Artificial
  Synthetic oligonucleotide
cacgtgagcaccagatcaagactctcgtcagcccgcagaggcctgtgtgcgttgaaatca

SEQ ID NO: 159699 - DNA, 55 bp, Artificial
  Synthetic oligonucleotide
cgcacttgtgctccttcccgcgtatacgcacagccgcctgcgctagagctctgat

SEQ ID NO: 159700 - DNA, 55 bp, Artificial
  Synthetic oligonucleotide
cgcacgctcaacgcatgccggaattcggtcaaaccttacagcgagtagccattcg

SEQ ID NO: 159701 - DNA, 55 bp, Artificial
  Synthetic oligonucleotide
cgtcctgcaaaacgacatggttgtccgtgctgaattctcgcccgaaccgagtgtc

SEQ ID NO: 159702 - DNA, 55 bp, Artificial
  Synthetic oligonucleotide
cgtcgaaaaggggcggctctcggtggcagatccacgcgcctaacccgaagcgaaa

SEQ ID NO: 159703 - DNA, 55 bp, Artificial
  Synthetic oligonucleotide
cgttgccgcgttggcgcattctgttcgcgttgtatgggcacgaaggcccgattgc

SEQ ID NO: 159704 - DNA, 55 bp, Artificial
  Synthetic oligonucleotide
cgttgcgatcgcgcaagacctcctgatcagtcatgcagacaaggggccggacttt

SEQ ID NO: 159705 - DNA, 55 bp, Artificial
  Synthetic oligonucleotide
cgttgcgattgcagacctcttgcccgagatgattattgactacccgggtactggc

SEQ ID NO: 159706 - DNA, 55 bp, Artificial
  Synthetic oligonucleotide
cgatcgaatgacccaagtggcaatcagttaatatcccactctgctgattcccgcc

SEQ ID NO: 159707 - DNA, 55 bp, Artificial
  Synthetic oligonucleotide
cgttgcgtcacgcaaaacgtgcacccaaaggattggtgaatatatatccgttcgg

SEQ ID NO: 159708 - DNA, 55 bp, Artificial
  Synthetic oligonucleotide
cgttgcgtggtcgcattaccgagcatcatcgcactaggctcagactgcactggag

SEQ ID NO: 159709 - DNA, 58 bp, Artificial
  Synthetic oligonucleotide
ggtagtcgaacgtacgcattcctggctccacaatttccgtcgcctacgcactcgcttc

SEQ ID NO: 159710 - DNA, 55 bp, Artificial
  Synthetic oligonucleotide
cgtttatgaaccacacgccgccacgcactcacatcctcgggcggaggccgacgtt

SEQ ID NO: 159711 - DNA, 55 bp, Artificial
  Synthetic oligonucleotide
cgtttccagacgtttgctcctaagcttcgcttaagactcgctgcctaagctgcgg

SEQ ID NO: 159712 - DNA, 55 bp, Artificial
  Synthetic oligonucleotide
cgtttgcgtgcgatatcgtccgaccgtgcttcattgcaggccgccacgatgaatc

SEQ ID NO: 159713 - DNA, 55 bp, Artificial
  Synthetic oligonucleotide
cgatcgaactcgttcgaaccaacagccggctattcgagttggtcacgccctttaa

SEQ ID NO: 159714 - DNA, 55 bp, Artificial
  Synthetic oligonucleotide
cgatccatgcttttctcctgacgaaacgttgatcgaatcgcgatcgtacgcccga

SEQ ID NO: 159715 - DNA, 55 bp, Artificial
  Synthetic oligonucleotide
ctaagttctgcagggattcgtcctgccgcctgcgtggtcggagagccaacgagat

SEQ ID NO: 159716 - DNA, 55 bp, Artificial
  Synthetic oligonucleotide
ctaatcaaaagtcgccttgcgagcgagacttctctcacgcagtccaacaactcct

SEQ ID NO: 159717 - DNA, 55 bp, Artificial
  Synthetic oligonucleotide
cgatccagatctacgctccgttcacgtatgacgctgtgtacatcatcgtcgacgc

SEQ ID NO: 159718 - DNA, 55 bp, Artificial
  Synthetic oligonucleotide
cgatatcgattgctctatccatgtcggttgctctcggttcaggcggaatcaggcg

SEQ ID NO: 159719 - DNA, 55 bp, Artificial
  Synthetic oligonucleotide
ctaccgtgtcaagaagtcgaacagttggctctggtgcaaataggttgcgtagccg

SEQ ID NO: 159720 - DNA, 59 bp, Artificial
  Synthetic oligonucleotide
ccccacacctgaaaggtgcgagagcctaggcgttttggtatgctgtgcatgccggtttc

SEQ ID NO: 159721 - DNA, 55 bp, Artificial
  Synthetic oligonucleotide
cgatagcccggacaaatcttgtcacttactctatgactcacgcaacgagggaatt

SEQ ID NO: 159722 - DNA, 55 bp, Artificial
  Synthetic oligonucleotide
cgatacactgacattagatttggctccagacgtttgggatcgatgcttcgattcc

SEQ ID NO: 159723 - DNA, 55 bp, Artificial
  Synthetic oligonucleotide
ctacctcgcgtacaacatgttccgcattgcggcgattctgcaaggaatcatgaaa

SEQ ID NO: 159724 - DNA, 55 bp, Artificial
  Synthetic oligonucleotide
cgataacctggagtaatcgaaatgggctcgatcgatcgacgagactcgactcccc

SEQ ID NO: 159725 - DNA, 55 bp, Artificial
  Synthetic oligonucleotide
cgtggactcgtcctgcctgatagctgccgctgcttcgacccttacgtctccgctt

SEQ ID NO: 159726 - DNA, 55 bp, Artificial
  Synthetic oligonucleotide
cgcaaacggtgacaactttgcttcggtctacgcccctctcgcagcgttgcacgac

SEQ ID NO: 159727 - DNA, 55 bp, Artificial
  Synthetic oligonucleotide
cgtggggcgaattcccgtataatccgattttgcgcctagaggaaattgctatgcg

SEQ ID NO: 159728 - DNA, 55 bp, Artificial
  Synthetic oligonucleotide
cgattagcgttgcagcggacgccattagcacaaacttcgaacttcaacagcggcc

SEQ ID NO: 159729 - DNA, 55 bp, Artificial
  Synthetic oligonucleotide
cgatggttcaggtttaatcgtttgatcgggtgatccggctccgccaatatggcac

SEQ ID NO: 159730 - DNA, 55 bp, Artificial
  Synthetic oligonucleotide
cgtgggtaacggaagcgtccgcactggaagtgcgttgtggtgggaatggaagcgg

SEQ ID NO: 159731 - DNA, 60 bp, Artificial
  Synthetic oligonucleotide
cgtccgcatcagcgtcatcagctcgaccaagtacaagcggttttccggcgagtccggcaa

SEQ ID NO: 159732 - DNA, 55 bp, Artificial
  Synthetic oligonucleotide
cgatgcatgcgtacatcgaactacatcgttcctgtgttcaacggctcagatgcca

SEQ ID NO: 159733 - DNA, 55 bp, Artificial
  Synthetic oligonucleotide
cgtggtggtccaacacgtgtggctgccagtcgtctcttagtgccacttccagcgc

SEQ ID NO: 159734 - DNA, 55 bp, Artificial
  Synthetic oligonucleotide
cgtgtcgaacaaaggtgcctgtctgcgagcgggatgtttcgttgggcgtccgaag

SEQ ID NO: 159735 - DNA, 55 bp, Artificial
  Synthetic oligonucleotide
cgtgtcggaatagccgttcgactgcatcttcgtgcgcgtgtacagcccgtgcaag

SEQ ID NO: 159736 - DNA, 55 bp, Artificial
  Synthetic oligonucleotide
cgtgtggatgacgttcggtgagctggggtgacgtcgattcgttcacgctgttgcg

SEQ ID NO: 159737 - DNA, 54 bp, Artificial
  Synthetic oligonucleotide
cgatgactaaggaccgctagggtcccaagaagcatattcgctttcgttttaggg

SEQ ID NO: 159738 - DNA, 55 bp, Artificial
  Synthetic oligonucleotide
cgtgttgctgcattgtgagaaccgggacggaatcgcggacggaaagcgctggact

SEQ ID NO: 159739 - DNA, 55 bp, Artificial
  Synthetic oligonucleotide
cgttagcgcggcaaaacatcaatacatcgagagctgcccatgactcatcccactg

SEQ ID NO: 159740 - DNA, 55 bp, Artificial
  Synthetic oligonucleotide
cgttcaacagattcatccgttggatcgtgcctgctgcaagaacccgtcgccagat

SEQ ID NO: 159741 - DNA, 55 bp, Artificial
  Synthetic oligonucleotide
cgttcagcgaagcgttatgaaacacggcggaaatcactgttcgcggactgcctcg

SEQ ID NO: 159742 - DNA, 54 bp, Artificial
  Synthetic oligonucleotide
ggtatagggggacaaatctcgggcatagggggacaaatctcgggttggcctctg

SEQ ID NO: 159743 - DNA, 55 bp, Artificial
  Synthetic oligonucleotide
cgttccaaaccgaatcgacttcgatacctgcatttcggccaaactacgtgccagc

SEQ ID NO: 159744 - DNA, 55 bp, Artificial
  Synthetic oligonucleotide
cgttccattgtaggaaatcaaacgcgcccgcattctattgcacgcaccgtaagcg

SEQ ID NO: 159745 - DNA, 55 bp, Artificial
  Synthetic oligonucleotide
cgttcggaacactacgctcatggttatcgaaccatttgtagcaggcatgtaacgc

SEQ ID NO: 159746 - DNA, 55 bp, Artificial
  Synthetic oligonucleotide
cgttctacgtaggggaaaacgccatgttgagacgcagcaacgctatcgcgtattg

SEQ ID NO: 159747 - DNA, 55 bp, Artificial
  Synthetic oligonucleotide
cgatcgttctcaaccccaatgaaccggtagaagtcgcactgcggcgttttcgtcg

SEQ ID NO: 159748 - DNA, 55 bp, Artificial
  Synthetic oligonucleotide
cgttgagttctcgtagataccgaacggaagccgacgaggttgacacgacttgact

SEQ ID NO: 159749 - DNA, 55 bp, Artificial
  Synthetic oligonucleotide
gttggagcacaaggttcgtgcaatacattcgtcgatgctattgagacaagtcaac

SEQ ID NO: 159750 - DNA, 55 bp, Artificial
  Synthetic oligonucleotide
gttggtgcaatcccgctataatcgggttaaccctatacgtgatatccctgacatc

SEQ ID NO: 159751 - DNA, 55 bp, Artificial
  Synthetic oligonucleotide
gttgtcatgcatcggcacagtagcggtgcgcggtctgtcgtatatggtatatcac

SEQ ID NO: 159752 - DNA, 55 bp, Artificial
  Synthetic oligonucleotide
gtttgaccgcgaattccgggtcggggcatagatactcgaatcctagctgggagaa

SEQ ID NO: 159753 - DNA, 59 bp, Artificial
  Synthetic oligonucleotide
tcgaaccctgtcttagctgcagagggtgcccgtcgtttgtccgaataggtgcacttctc

SEQ ID NO: 159754 - DNA, 55 bp, Artificial
  Synthetic oligonucleotide
gtttgagcggaatttagtcaggccacgaccgttgtgccttctctgtccggttggg

SEQ ID NO: 159755 - DNA, 55 bp, Artificial
  Synthetic oligonucleotide
gtttggagttttcgttgtcggtcctgagggatggcattccaatagtcgcgcaggt

SEQ ID NO: 159756 - DNA, 55 bp, Artificial
  Synthetic oligonucleotide
gtttgggtactgacgattcgtctttcgaatacgcaaggggtatgccaacgacctg

SEQ ID NO: 159757 - DNA, 55 bp, Artificial
  Synthetic oligonucleotide
taaagatcggatagtgcaacgcgaagcttgccgctatatgcactgcgagcgggcg

SEQ ID NO: 159758 - DNA, 55 bp, Artificial
  Synthetic oligonucleotide
taaatccgggcgattgtaagcgatagttgcaggcaattcaagactttaggccggc

SEQ ID NO: 159759 - DNA, 55 bp, Artificial
  Synthetic oligonucleotide
taacgcgctgcccgctcactccatatcgtctgagtgaaccaacccctcaaacatc

SEQ ID NO: 159760 - DNA, 55 bp, Artificial
  Synthetic oligonucleotide
taagcgcgacctggcgcctctgggcacgccatccggcgaaagcaagtttattcgc

SEQ ID NO: 159761 - DNA, 55 bp, Artificial
  Synthetic oligonucleotide
taagcgcgcggattgtgattgtcacgggcatggcacgcgagtatgttgccgaagt

SEQ ID NO: 159762 - DNA, 55 bp, Artificial
  Synthetic oligonucleotide
taaggacaaagcgtggacaaggctcgtcgcgctgtcttcacgacgaagttccggt

SEQ ID NO: 159763 - DNA, 53 bp, Artificial
  Synthetic oligonucleotide
taaggccaagaagccgggctaatccgtggtttcgggaacgtagaatccgcgta

SEQ ID NO: 159764 - DNA, 58 bp, Artificial
  Synthetic oligonucleotide
ggtatcgcaaaccgagtggcattcccccatgcacgacaacgtgcgcggacccgactac

SEQ ID NO: 159765 - DNA, 55 bp, Artificial
  Synthetic oligonucleotide
taagtcataagctcgctccacttacttttctggtggagcagcgatgcaggtattg

SEQ ID NO: 159766 - DNA, 55 bp, Artificial
  Synthetic oligonucleotide
taagtgcggcctgcagtttccgcgaccacaaggttcacacgcggctacctgtcct

SEQ ID NO: 159767 - DNA, 55 bp, Artificial
  Synthetic oligonucleotide
taattgttgcgacgcaccatcagaggtttcactcacctatcgaaaccgggcggtc

SEQ ID NO: 159768 - DNA, 55 bp, Artificial
  Synthetic oligonucleotide
tacaatcggccatgaaattacccctgccataatgtgactcgccgtccggaagggg

SEQ ID NO: 159769 - DNA, 55 bp, Artificial
  Synthetic oligonucleotide
tacacaactagaggaggtgcgcgtgtcattcacgctgcatggaattcccgtgtca

SEQ ID NO: 159770 - DNA, 55 bp, Artificial
  Synthetic oligonucleotide
tacaggctgcccgacagcgtatgcgacagctcgaccgcgacttgcggcgccttct

SEQ ID NO: 159771 - DNA, 55 bp, Artificial
  Synthetic oligonucleotide
tacatctcacagatggtcgctcggtcgtgtaccaggatgctcggggtgtcgcccg

SEQ ID NO: 159772 - DNA, 55 bp, Artificial
  Synthetic oligonucleotide
tacattccgaggcctgccactaaccgccgaacaagactcggaggttcgccactat

SEQ ID NO: 159773 - DNA, 55 bp, Artificial
  Synthetic oligonucleotide
taccacccagcggtagtagagcatatgctgccggaacactagcgggtctcggaag

SEQ ID NO: 159774 - DNA, 55 bp, Artificial
  Synthetic oligonucleotide
taccatcacagatgggaacggaacggcgtcttagccagatctgctatgtcactgc

SEQ ID NO: 159775 - DNA, 60 bp, Artificial
  Synthetic oligonucleotide
ctcaacgtcactggtgcgattagcacgcagtcctgcctgactcatccattgcctcctgag

SEQ ID NO: 159776 - DNA, 55 bp, Artificial
  Synthetic oligonucleotide
tacccaattgtttaggtgtgacatcgagactagcatatcgcatatcgatattcaa

SEQ ID NO: 159777 - DNA, 55 bp, Artificial
  Synthetic oligonucleotide
gttacgtgtgctctcccgcattgaaccacaggttgaggacgtacatcgcccatcc

SEQ ID NO: 159778 - DNA, 55 bp, Artificial
  Synthetic oligonucleotide
gttagactgacatcaagcggtcaacttgtctgattgacagcacgacggggaagtg

SEQ ID NO: 159779 - DNA, 55 bp, Artificial
  Synthetic oligonucleotide
gttagcccatctctctcgcgaacgttacaacgaacgagaattaaggctagatcgc

SEQ ID NO: 159780 - DNA, 55 bp, Artificial
  Synthetic oligonucleotide
gttagcggcccttagacgtatacgcaagttaactttgtgcctgttgtacccgaga

SEQ ID NO: 159781 - DNA, 55 bp, Artificial
  Synthetic oligonucleotide
gttaggacgcagcgtaacgaccctgacttaaaggaggcttaatcagccttaagcg

SEQ ID NO: 159782 - DNA, 55 bp, Artificial
  Synthetic oligonucleotide
gttagtcgacagtaacggaacgccatgtcactccattcgaagaaagagcagattc

SEQ ID NO: 159783 - DNA, 55 bp, Artificial
  Synthetic oligonucleotide
gttatgcgtgtcgccgcatgcgaacttacacagcgtttggcgggattttaccctg

SEQ ID NO: 159784 - DNA, 55 bp, Artificial
  Synthetic oligonucleotide
gttcagtactgaccagtacggtaaagtctggtggtagccagacgagaccgtgcag

SEQ ID NO: 159785 - DNA, 55 bp, Artificial
  Synthetic oligonucleotide
gttccgctcctcgctttcgtgacgtggcttttcatcgcgcggcttgtttatccgc

SEQ ID NO: 159786 - DNA, 55 bp, Artificial
  Synthetic oligonucleotide
tcgacgttaactacaagcggcgcggaatccaccgaacgcgttccattaaccggca

SEQ ID NO: 159787 - DNA, 55 bp, Artificial
  Synthetic oligonucleotide
gttccgtccgaaccatgatgcgtctcccgaacggatgcatgtcacgtcgcatgca

SEQ ID NO: 159788 - DNA, 55 bp, Artificial
  Synthetic oligonucleotide
gttcctgcgcgtggattagacaccacataagcgtggcgctgcgcccagaactgtg

SEQ ID NO: 159789 - DNA, 55 bp, Artificial
  Synthetic oligonucleotide
gttcgccccttatactcgcaaactgacgagaacaatccagcggggtccaattgca

SEQ ID NO: 159790 - DNA, 55 bp, Artificial
  Synthetic oligonucleotide
gttcgggtggggtcgagccgattatgcgcacgtgagacattcacctctcacccac

SEQ ID NO: 159791 - DNA, 55 bp, Artificial
  Synthetic oligonucleotide
gttcgttatctccctcgagtcgtgattgattgagtgggaagcgcagcaacgctgc

SEQ ID NO: 159792 - DNA, 55 bp, Artificial
  Synthetic oligonucleotide
gttctcgtagataccgaacggaagccgacgaggtgacacgacttgactcgactgt

SEQ ID NO: 159793 - DNA, 55 bp, Artificial
  Synthetic oligonucleotide
gttctgtatgatccgggcacacgaccaatcctcacaatttcgttgcgtcgtgtcg

SEQ ID NO: 159794 - DNA, 55 bp, Artificial
  Synthetic oligonucleotide
gttgaaggatcgcgattgacatgctacctgaagcaactccggacgattgtcgcgg

SEQ ID NO: 159795 - DNA, 55 bp, Artificial
  Synthetic oligonucleotide
gttgaagtccgaagtttgtgctaatggcgtccgctgcaacgctaatcgtgtccgt

SEQ ID NO: 159796 - DNA, 55 bp, Artificial
  Synthetic oligonucleotide
gttgacagtcatgaacgatgttggcgacactggcccgggcctgccctgtacaggg

SEQ ID NO: 159797 - DNA, 51 bp, Artificial
  Synthetic oligonucleotide
ccttacggttttgtatatcctgcgggtgctcgtaagggggaaatatccccc

SEQ ID NO: 159798 - DNA, 55 bp, Artificial
  Synthetic oligonucleotide
cagaacctagacttagctagccgttacgcccacattaacgctagaaaagccgaaa

SEQ ID NO: 159799 - DNA, 59 bp, Artificial
  Synthetic oligonucleotide
gtatgggatattaagaagagcttataatcttaattcgatggtaagagatcttaagtgcc

SEQ ID NO: 159800 - DNA, 60 bp, Artificial
  Synthetic oligonucleotide
atagtgcttatgttatccttggaaaatacggtataaagcctgattatgtttgcatgctag

SEQ ID NO: 159801 - DNA, 59 bp, Artificial
  Synthetic oligonucleotide
gtgctatcagggaagcgaatttctatacgagctgaatttttacctatgccataaggaac

SEQ ID NO: 159802 - DNA, 59 bp, Artificial
  Synthetic oligonucleotide
atattctttggagtgttctaggcgggctgtccgccttaatctgctatctgcgtttgaat

SEQ ID NO: 159803 - DNA, 60 bp, Artificial
  Synthetic oligonucleotide
atattgcttcaaagctagcaaatagtgtaaatcagcaaattactgaagcaggaagtagtg

SEQ ID NO: 159804 - DNA, 51 bp, Artificial
  Synthetic oligonucleotide
tattaagggggcaaatctaaactattaagggggcaaatctaaactattaag

SEQ ID NO: 159805 - DNA, 56 bp, Artificial
  Synthetic oligonucleotide
gaacgagaatttagtcaaagagataatacggcggaacttgaacgacttagaaatca

SEQ ID NO: 159806 - DNA, 57 bp, Artificial
  Synthetic oligonucleotide
gccatctcgctaccggcgtaagtttgtatagcgtaccatttaagtgccatttcaaac

SEQ ID NO: 159807 - DNA, 60 bp, Artificial
  Synthetic oligonucleotide
tatggattgaaactatacaaaaatgttctcacggagaaggttgcactactgaaagcataa

SEQ ID NO: 159808 - DNA, 56 bp, Artificial
  Synthetic oligonucleotide
ctggcggcagaccaaaaagtgccaatcctgccgacaaaagaacgacaatgtttttg

SEQ ID NO: 159809 - DNA, 60 bp, Artificial
  Synthetic oligonucleotide
aggcaaggtgtgggagagtggtggagcgaaaataagtcgctgccgctgtgaaagagccaa

SEQ ID NO: 159810 - DNA, 59 bp, Artificial
  Synthetic oligonucleotide
gtcctgcttttgttctttggctgatcagatccctttcattttccgccaagtaagcataa

SEQ ID NO: 159811 - DNA, 55 bp, Artificial
  Synthetic oligonucleotide
caatcggctattttaaatatagatcttagtcgtttaggaaagcatttaagagtat

SEQ ID NO: 159812 - DNA, 60 bp, Artificial
  Synthetic oligonucleotide
tatctttgggcgatgctttgcgtcctggctctactcacgatgcaagtgatggggcacaaa

SEQ ID NO: 159813 - DNA, 60 bp, Artificial
  Synthetic oligonucleotide
atctctcttgtgagttgccttacccctttttaagatatagggtgcaagcacagcacaaga

SEQ ID NO: 159814 - DNA, 59 bp, Artificial
  Synthetic oligonucleotide
atctgcgaagatacaattaaactggaaaggggctctgtagctgtattaagtggcaatag

SEQ ID NO: 159815 - DNA, 54 bp, Artificial
  Synthetic oligonucleotide
cttaaatgtcccaaaaacccgaagccggtaacatcagtgcaagcgtgaatttcg

SEQ ID NO: 159816 - DNA, 56 bp, Artificial
  Synthetic oligonucleotide
catggcataagctagttaagcgtaaagcattcaaaaacgcttttttaggctttgtc

SEQ ID NO: 159817 - DNA, 56 bp, Artificial
  Synthetic oligonucleotide
ttatccccgattaaaatttcaagcggatcgtttgcgagttgatttagctctacaac

SEQ ID NO: 159818 - DNA, 58 bp, Artificial
  Synthetic oligonucleotide
tttgatgatacgcatacaaaacgttttgtatgcgtgtgatttaactccgctttgttta

SEQ ID NO: 159819 - DNA, 60 bp, Artificial
  Synthetic oligonucleotide
ttagcaaatcgcaccgtaaggtgcaatgatttgcggcaaggaaaggtgcggtgtcgtgaa

SEQ ID NO: 159820 - DNA, 57 bp, Artificial
  Synthetic oligonucleotide
aggcgaatggagtcttaaaggttttggtcattctttaagtccttacatcagatcaca

SEQ ID NO: 159821 - DNA, 57 bp, Artificial
  Synthetic oligonucleotide
gttttaatccgtattatcacaaagtagattataagcgtttagagacattccaagagc

SEQ ID NO: 159822 - DNA, 60 bp, Artificial
  Synthetic oligonucleotide
tttgcgaacaaggtccaagtgatactccgtgtggaatttgtaagcactgtcttgcagcac

SEQ ID NO: 159823 - DNA, 59 bp, Artificial
  Synthetic oligonucleotide
ttacttgctgatatgaacactcgctttggacctaccgcacttgttattccaaaactaga

SEQ ID NO: 159824 - DNA, 58 bp, Artificial
  Synthetic oligonucleotide
taaacgctattaattagcttagcaaatcgcaccttaaaggtgctatgatttgcggtaa

SEQ ID NO: 159825 - DNA, 59 bp, Artificial
  Synthetic oligonucleotide
catcatatccgtaatgattagctattcgttttatacaccgacttactcttgagttgtaa

SEQ ID NO: 159826 - DNA, 57 bp, Artificial
  Synthetic oligonucleotide
ctaaagatccgtgtcaatgaagcggtggcgaactttgatgaacgcttgaaaaattta

SEQ ID NO: 159827 - DNA, 54 bp, Artificial
  Synthetic oligonucleotide
cccattctaagggttagattaagccatagggttgcagcctacggctaacccttc

SEQ ID NO: 159828 - DNA, 60 bp, Artificial
  Synthetic oligonucleotide
gagagagtcaagcatcacaagaattcgttttagatccaaatcctcatgattggaaaacta

SEQ ID NO: 159829 - DNA, 60 bp, Artificial
  Synthetic oligonucleotide
aatctcacgcactctaaccgcatcggcgcatccacgatcactatgcaagtcgcgcgcatg

SEQ ID NO: 159830 - DNA, 60 bp, Artificial
  Synthetic oligonucleotide
aatctccaatggaagctctttcttatcaaagagagttgttagatatcttaagatcattac

SEQ ID NO: 159831 - DNA, 57 bp, Artificial
  Synthetic oligonucleotide
tagacttagcccaaactttaggggatttcactagccacagaatgcaagcccagaacc

SEQ ID NO: 159832 - DNA, 54 bp, Artificial
  Synthetic oligonucleotide
aatttacgcccaaataaaactaatgtaaagtggagattagatggcgaggataaa

SEQ ID NO: 159833 - DNA, 60 bp, Artificial
  Synthetic oligonucleotide
cgcactcttggctgatataagggtagctggcgtaccttagtgcgtgtccgaatgtatctc

SEQ ID NO: 159834 - DNA, 60 bp, Artificial
  Synthetic oligonucleotide
aatttgcatgtcttactatgatagcattaggactcatagcgtctaaattagtcgctgtat

SEQ ID NO: 159835 - DNA, 60 bp, Artificial
  Synthetic oligonucleotide
gagtgtgtgaagtattgcgttaagcctgccaaagtggctaagctctcccaagctcaattt

SEQ ID NO: 159836 - DNA, 60 bp, Artificial
  Synthetic oligonucleotide
gagtttatatacgaaatcggcgaaaatactacaatggagcaatgccaagagcttacgcaa

SEQ ID NO: 159837 - DNA, 54 bp, Artificial
  Synthetic oligonucleotide
cgcaaaatgtcggtataatttccgcaaaatgtcggtataatattcgccgaaaac

SEQ ID NO: 159838 - DNA, 54 bp, Artificial
  Synthetic oligonucleotide
ggagttaaacctatgcgtttatagccttgctttttacctaaactttcagcaata

SEQ ID NO: 159839 - DNA, 59 bp, Artificial
  Synthetic oligonucleotide
gttataaacattgggcagataaagcacctcaaagtaaagatgactggcgagaattagac

SEQ ID NO: 159840 - DNA, 56 bp, Artificial
  Synthetic oligonucleotide
ggtgctagttggggtggctatgaaagtttagccacagtaacaactccgccaagaac

SEQ ID NO: 159841 - DNA, 57 bp, Artificial
  Synthetic oligonucleotide
gactaaaaggaggcatctacagtgcagaattcacaaaccttaaaggacttagcgaac

SEQ ID NO: 159842 - DNA, 59 bp, Artificial
  Synthetic oligonucleotide
tcaggctaaatttacttcacaagagggttatggatatagtgtagatgctaaaggattta

SEQ ID NO: 159843 - DNA, 53 bp, Artificial
  Synthetic oligonucleotide
aacattttaaacgatttgcgagaaatagggacttctcaagacctatccaattt

SEQ ID NO: 159844 - DNA, 57 bp, Artificial
  Synthetic oligonucleotide
tttatcggtgatcaaaccccgccccacgagtgccacccgcattaccacgccatacta

SEQ ID NO: 159845 - DNA, 57 bp, Artificial
  Synthetic oligonucleotide
ccaactagtgaagagcaaatgttaagtggagatcttgagtatactaacaaaccttac

SEQ ID NO: 159846 - DNA, 60 bp, Artificial
  Synthetic oligonucleotide
cgtgaggtttgacttttagtctttgagagtcgatttcatcatcgcaagattcgcaaattc

SEQ ID NO: 159847 - DNA, 58 bp, Artificial
  Synthetic oligonucleotide
aacaagtccgcaatgagctactttccccctgccagtaaggcgtagtatcatcacccac

SEQ ID NO: 159848 - DNA, 58 bp, Artificial
  Synthetic oligonucleotide
ttgtccgcgccactgaatttatcggtgatcaaaccccgccccacgagtgccacccgca

SEQ ID NO: 159849 - DNA, 60 bp, Artificial
  Synthetic oligonucleotide
aacgttcatgataatgtctaacctcagagcaaccatgcggaactctttcttgtattacac

SEQ ID NO: 159850 - DNA, 53 bp, Artificial
  Synthetic oligonucleotide
cgcttaacttcaaatgcaaaatactcgtataggttttacccttataggtagtc

SEQ ID NO: 159851 - DNA, 60 bp, Artificial
  Synthetic oligonucleotide
aactgcatcaactcctgtactagcagcccattgccacgaaccaatatttgaactagcttc

SEQ ID NO: 159852 - DNA, 60 bp, Artificial
  Synthetic oligonucleotide
gactataacagtcttagaatcgattttgccctcatttaaagcgctttggatcattgcaaa

SEQ ID NO: 159853 - DNA, 54 bp, Artificial
  Synthetic oligonucleotide
cctattagttagctagtcgctccgctccctaaactaacctaacgccaagttgta

SEQ ID NO: 159854 - DNA, 54 bp, Artificial
  Synthetic oligonucleotide
ccatacgatgcttttataggtaatccgccttttggtcaaaaaaagatcttggaa

SEQ ID NO: 159855 - DNA, 57 bp, Artificial
  Synthetic oligonucleotide
gggaatttcatattctccattccctgcactaacttttactttaagtcatagcagaag

SEQ ID NO: 159856 - DNA, 57 bp, Artificial
  Synthetic oligonucleotide
aagagaaattcaaaccgaaatcgctgaaatcttaggaatggagcgcggcaaagataa

SEQ ID NO: 159857 - DNA, 57 bp, Artificial
  Synthetic oligonucleotide
gttgtattactataaattcaacagtaggccttagtgctattttagaaggctgtccga

SEQ ID NO: 159858 - DNA, 59 bp, Artificial
  Synthetic oligonucleotide
gttgtcttaatcatagtcacaacaagtgtaaacaccactctaagctcgattatattttc

SEQ ID NO: 159859 - DNA, 52 bp, Artificial
  Synthetic oligonucleotide
gggttttttggtgttagtaggttacttgtgttatagtgtgggctaccaaaca

SEQ ID NO: 159860 - DNA, 56 bp, Artificial
  Synthetic oligonucleotide
aagccctatatagcagtggctagcgaaatattaagggggcaaatctaaactattaa

SEQ ID NO: 159861 - DNA, 60 bp, Artificial
  Synthetic oligonucleotide
ttcttgctaaatttatcgcaatgtgcgatccaagtccgcctaaaccacacaccgccacgc

SEQ ID NO: 159862 - DNA, 60 bp, Artificial
  Synthetic oligonucleotide
ttcgccttgctcaccagaatagccaagcccacccttaatcccgtgtgcgatacaaggaga

SEQ ID NO: 159863 - DNA, 55 bp, Artificial
  Synthetic oligonucleotide
cattgtcaaagagacgcccccattagaacaagacgacttagacccagaggtttgg

SEQ ID NO: 159864 - DNA, 60 bp, Artificial
  Synthetic oligonucleotide
agtattctcatcatcaagcgataatgtaatgcttatgaaggagcttaaagaactttatcc

SEQ ID NO: 159865 - DNA, 60 bp, Artificial
  Synthetic oligonucleotide
aacaactcattgcaaccgaagatgatggtttttcgcaagtagcacaaatcgacgaagcac

SEQ ID NO: 159866 - DNA, 56 bp, Artificial
  Synthetic oligonucleotide
cgttacttcatcttatacagaccaatacggtaatatccgttatggttggcaagtag

SEQ ID NO: 159867 - DNA, 53 bp, Artificial
  Synthetic oligonucleotide
catggcggggggtgagtttggttttgtggctaagctttaaggcaaattctaaa

SEQ ID NO: 159868 - DNA, 60 bp, Artificial
  Synthetic oligonucleotide
gctcgtggcacaagaacaacctacacaaactacagctttgatgcttgaagcagaacctcc

SEQ ID NO: 159869 - DNA, 54 bp, Artificial
  Synthetic oligonucleotide
tagaagccgttttcacactcccagccgaagtgttttacccgggggcgtctgtga

SEQ ID NO: 159870 - DNA, 52 bp, Artificial
  Synthetic oligonucleotide
acctttcgcaagccaaaataaccgccctttggcaagcctccctaaaagtgcc

SEQ ID NO: 159871 - DNA, 60 bp, Artificial
  Synthetic oligonucleotide
actactatgacacagaagtaaagccctatgtagcaaactcttggatagcttgggatagtg

SEQ ID NO: 159872 - DNA, 60 bp, Artificial
  Synthetic oligonucleotide
cgagcatagcgcaaactgcggcaagctcagcgcttcccaaataaactttcgcgcccattc

SEQ ID NO: 159873 - DNA, 53 bp, Artificial
  Synthetic oligonucleotide
acgaacaaggcgtaaaaatcgctttgctaaaaactgaaagctatgttcctaaa

SEQ ID NO: 159874 - DNA, 52 bp, Artificial
  Synthetic oligonucleotide
ttttttactaggaaagcaagctaaaccaggtagtggagccttttctttaaca

SEQ ID NO: 159875 - DNA, 54 bp, Artificial
  Synthetic oligonucleotide
gtcgcacggcgtttgagtgcgacgctaagccccttaaaattcccccgatctttc

SEQ ID NO: 159876 - DNA, 60 bp, Artificial
  Synthetic oligonucleotide
gctgccaagatatacctgtagcatcgcttaatcctatctcacaagtgcttgatgtgctaa

SEQ ID NO: 159877 - DNA, 55 bp, Artificial
  Synthetic oligonucleotide
ctatgccttataacgcaagtaagggtatcgcttatacaggacaaacttccgccct

SEQ ID NO: 159878 - DNA, 54 bp, Artificial
  Synthetic oligonucleotide
tagaactaggacacgaaagagctttaaaggaacttacacaagagtttgaaaagc

SEQ ID NO: 159879 - DNA, 56 bp, Artificial
  Synthetic oligonucleotide
acgcacctataaggtgctatgttttgtgtaaatggggtgcggggttgtgaagttgc

SEQ ID NO: 159880 - DNA, 57 bp, Artificial
  Synthetic oligonucleotide
ttttactcttggcggaaatttatcaatcaaggctaactatgaaacaacatagtaagc

SEQ ID NO: 159881 - DNA, 60 bp, Artificial
  Synthetic oligonucleotide
acgcacgctcacccttatgcttgcattagtgctggtataggcgcactttgggggcatgct

SEQ ID NO: 159882 - DNA, 54 bp, Artificial
  Synthetic oligonucleotide
aaaccttagtcggacagccttctaaaatagcactaaggcctactgttgaattta

SEQ ID NO: 159883 - DNA, 56 bp, Artificial
  Synthetic oligonucleotide
taaatcttactagggcttacaccataatggcacgaaaaaatggatatgagggtgtt

SEQ ID NO: 159884 - DNA, 56 bp, Artificial
  Synthetic oligonucleotide
tgggaaaaatacaatcgaaatagctgtaaaaagtgtcgttccacttgctattccta

SEQ ID NO: 159885 - DNA, 51 bp, Artificial
  Synthetic oligonucleotide
gggggcaaatctaaactattaagggggcaaatctaaactattaagggggca

SEQ ID NO: 159886 - DNA, 60 bp, Artificial
  Synthetic oligonucleotide
agtcgctagtacatcctacactacaccagccatttagtgcgcaagtcgccgcccagcata

SEQ ID NO: 159887 - DNA, 57 bp, Artificial
  Synthetic oligonucleotide
ttttaggttatggtgcgactgttattaatccttatttggtttatgagagcatacaaa

SEQ ID NO: 159888 - DNA, 60 bp, Artificial
  Synthetic oligonucleotide
gtgtatgtaatgatcttaagatatctaacaactctctttgataagaaagagcttccattg

SEQ ID NO: 159889 - DNA, 60 bp, Artificial
  Synthetic oligonucleotide
gctatgctttgtttagcttcgcctattaaaccacctgaatgtagtgcagcgattgcaaga

SEQ ID NO: 159890 - DNA, 60 bp, Artificial
  Synthetic oligonucleotide
tgcgagaatctcaaagagagttattgcgaactagagaaagattacgaaaatttagagagc

SEQ ID NO: 159891 - DNA, 59 bp, Artificial
  Synthetic oligonucleotide
gagtttttggacttctgagtcttgttttgctgtactaattcttacatatgctattacca

SEQ ID NO: 159892 - DNA, 53 bp, Artificial
  Synthetic oligonucleotide
tactctaagtaatacctaaaggtaaatacttagaaccttgcaatgggagaccc

SEQ ID NO: 159893 - DNA, 60 bp, Artificial
  Synthetic oligonucleotide
tgtcgttgctataaggatcgcttaaacgatctatgatatttggcgagttgtagctgatct

SEQ ID NO: 159894 - DNA, 60 bp, Artificial
  Synthetic oligonucleotide
ctattacactcggactttttagcgatgaagatgtttctataatctgcgaagatacgatta

SEQ ID NO: 159895 - DNA, 55 bp, Artificial
  Synthetic oligonucleotide
cgaattaggatttggagtaactttagcaacgatcgccctacctgcaacattcttt

SEQ ID NO: 159896 - DNA, 56 bp, Artificial
  Synthetic oligonucleotide
gataacgttctagttttggaataacaagtgcggtaggtccaaagcgagtgttcata

SEQ ID NO: 159897 - DNA, 53 bp, Artificial
  Synthetic oligonucleotide
agtctcaaaacttagctttacataccaagtaaattttgacacattaaacaaag

SEQ ID NO: 159898 - DNA, 57 bp, Artificial
  Synthetic oligonucleotide
gatacgattaaattagaaaggggttctgtagctgtattaagtggcaatagtgaagta

SEQ ID NO: 159899 - DNA, 54 bp, Artificial
  Synthetic oligonucleotide
gctttaatgatggttgttcgtcccttttagtttgtctccgctttaaattccata

SEQ ID NO: 159900 - DNA, 56 bp, Artificial
  Synthetic oligonucleotide
aaagcatttaaacacatcaaaaggcggacttgatcgtgtaggattagaaatgttaa

SEQ ID NO: 159901 - DNA, 60 bp, Artificial
  Synthetic oligonucleotide
gacttagaaagtggctttgtcagcactcctgaagatagacgtaggggatatgaagaagac

SEQ ID NO: 159902 - DNA, 55 bp, Artificial
  Synthetic oligonucleotide
accaaaagaaggctagagacttattttagtatttcaagtgataatacaaaatcag

SEQ ID NO: 159903 - DNA, 57 bp, Artificial
  Synthetic oligonucleotide
accaacgataatgctaagacaatcactaaagaacttacgcatttaaatgaatactct

SEQ ID NO: 159904 - DNA, 52 bp, Artificial
  Synthetic oligonucleotide
gatagttaaatttttaccaactagagacggcggcggacttggtagcgtaaat

SEQ ID NO: 159905 - DNA, 55 bp, Artificial
  Synthetic oligonucleotide
aaacttaaaaatgggcgcgtggcggtgtgtggtttaggcggacttggatcacata

SEQ ID NO: 159906 - DNA, 58 bp, Artificial
  Synthetic oligonucleotide
tgggtttagcggagaactagttttcaatacttctagaccggatagcacaatggataga

SEQ ID NO: 159907 - DNA, 56 bp, Artificial
  Synthetic oligonucleotide
gattttaattcagttctttctaatattggcgataagttaccaagagatggtttagc

SEQ ID NO: 159908 - DNA, 60 bp, Artificial
  Synthetic oligonucleotide
agctactatgatgacatttcaaggtagtttgccagctcctgtagctgctataatatcagg

SEQ ID NO: 159909 - DNA, 60 bp, Artificial
  Synthetic oligonucleotide
tcacaggctcaatgcttatagcttacgggattagcaagggtgcaatgagcgttataagcg

SEQ ID NO: 159910 - DNA, 58 bp, Artificial
  Synthetic oligonucleotide
cttgtgccgcttaaaacgcctagtatagacgctccgcctcctatgtcgctaccctcgc

SEQ ID NO: 159911 - DNA, 54 bp, Artificial
  Synthetic oligonucleotide
tgcggtaattggggtaagggggcgtgaagttagcctagagctaacgaacggaca

SEQ ID NO: 159912 - DNA, 55 bp, Artificial
  Synthetic oligonucleotide
atcaaaccccgccccacgagtgccacccgcattaccacgccatactagtagcccc

SEQ ID NO: 159913 - DNA, 59 bp, Artificial
  Synthetic oligonucleotide
aacggcttgagtcttcggaggctagcactacagattctatctatgtagataattgctgg

SEQ ID NO: 159914 - DNA, 58 bp, Artificial
  Synthetic oligonucleotide
tttcacactcccagccgaagtgttttacccgggggcgtctgtgagtgcttgctgtatg

SEQ ID NO: 159915 - DNA, 56 bp, Artificial
  Synthetic oligonucleotide
tatcgtgatttaacgcgtaaaactaagatcaaaggcttaaccagcactagctggtt

SEQ ID NO: 159916 - DNA, 54 bp, Artificial
  Synthetic oligonucleotide
cgatttctattgtaagattaagcggtgaaagggctttagaatttgccttaaagc

SEQ ID NO: 159917 - DNA, 57 bp, Artificial
  Synthetic oligonucleotide
gtagaatctatatcccttggatcttttattttgccctcaactatatcacttcttaag

SEQ ID NO: 159918 - DNA, 59 bp, Artificial
  Synthetic oligonucleotide
tccatacgtgactagctcaaataccgtatctgcaggggcttgcaccggtttgggcctta

SEQ ID NO: 159919 - DNA, 59 bp, Artificial
  Synthetic oligonucleotide
gcacttgtgcggagctatctcatctcgcaccctatcacttagcacttcagcccccgctc

SEQ ID NO: 159920 - DNA, 60 bp, Artificial
  Synthetic oligonucleotide
gtgtaagacagctaatgttacctgcaattacactaggaatatttgctctagcaccaattg

SEQ ID NO: 159921 - DNA, 56 bp, Artificial
  Synthetic oligonucleotide
attgtaactattgaagacgctcaagaattatatatcgaaaacgagaacaaaaccca

SEQ ID NO: 159922 - DNA, 59 bp, Artificial
  Synthetic oligonucleotide
tccttacgagcaggagtttcactctctgcacccacctgaaggccacacccgacctttgc

SEQ ID NO: 159923 - DNA, 59 bp, Artificial
  Synthetic oligonucleotide
gcgatagtgctacacaatcaaaagcacccaaactatacaaatatttcaatggatacaag

SEQ ID NO: 159924 - DNA, 57 bp, Artificial
  Synthetic oligonucleotide
gatggctgtagtttcatcgtagcttttgtgtaaggttggaattcctcgtctaaagtc

SEQ ID NO: 159925 - DNA, 59 bp, Artificial
  Synthetic oligonucleotide
gttaatagataatgaaagccaaaagctaattaaggcagcaccgatctttgataatggtc

SEQ ID NO: 159926 - DNA, 59 bp, Artificial
  Synthetic oligonucleotide
attcgttcttgcactccaaaaactgatttaaatgcagtagctggcgaagcaaatggtaa

SEQ ID NO: 159927 - DNA, 59 bp, Artificial
  Synthetic oligonucleotide
caggcaataatggaggtggatcacatagtattagcgaagcaagtagggctttaatgtta

SEQ ID NO: 159928 - DNA, 59 bp, Artificial
  Synthetic oligonucleotide
gtttgaactcagatgcgagtgtgaaaagactcaaaggtgagagtcgtcctgtaaattca

SEQ ID NO: 159929 - DNA, 53 bp, Artificial
  Synthetic oligonucleotide
cttagctttacataccaagtaaattttgacacattaaacaaagttggacgacc

SEQ ID NO: 159930 - DNA, 58 bp, Artificial
  Synthetic oligonucleotide
tcgtaagaaccccaaccaacgaatccagctccaacgaatgcaattgtacttatccata

SEQ ID NO: 159931 - DNA, 59 bp, Artificial
  Synthetic oligonucleotide
gcgatctatataaaggatatttcatatcaagaagcggttaaatttatgcccaatggaac

SEQ ID NO: 159932 - DNA, 57 bp, Artificial
  Synthetic oligonucleotide
agcctaagctaagcggcaaaactctaaggcagacggcgcttgaggcgttaaagagcg

SEQ ID NO: 159933 - DNA, 58 bp, Artificial
  Synthetic oligonucleotide
ccatcgttgttaaatcttgcactacccacgatgatgttcgtaggaccttctcctgtag

SEQ ID NO: 159934 - DNA, 59 bp, Artificial
  Synthetic oligonucleotide
ctggagaaattatcgagatacttacaagcgaatgttcggatatcaatgctttaatttgg

SEQ ID NO: 159935 - DNA, 59 bp, Artificial
  Synthetic oligonucleotide
atggtatctgtggataagaccttatcagatcagcaaggagctaacaacaaaatcgaaca

SEQ ID NO: 159936 - DNA, 58 bp, Artificial
  Synthetic oligonucleotide
gagagttattgcgaactagagaaagattacgaaaatttagagagcgattacaaagagc

SEQ ID NO: 159937 - DNA, 55 bp, Artificial
  Synthetic oligonucleotide
attataaatttaggatctaacaactccaacaatagaaacgatggaaccgattcag

SEQ ID NO: 159938 - DNA, 58 bp, Artificial
  Synthetic oligonucleotide
gcatcatactcaataaaactgccttcatcgcttaaaagtttaatacgttcatcagctg

SEQ ID NO: 159939 - DNA, 58 bp, Artificial
  Synthetic oligonucleotide
caagcgataatgtaatgcttatgaaggagcttaaagaactttatccaaacgattggag

SEQ ID NO: 159940 - DNA, 57 bp, Artificial
  Synthetic oligonucleotide
aaaggggcttcaagtattagttatagattaaatgatagccttatgcaatacttgtta

SEQ ID NO: 159941 - DNA, 58 bp, Artificial
  Synthetic oligonucleotide
tcatcacctgcttcaccaaatcctaccccagggcttactgcaacgctagcacgctgta

SEQ ID NO: 159942 - DNA, 60 bp, Artificial
  Synthetic oligonucleotide
agtgcaggaaacccgtatcttggagcggctcttgcagctctagcaatagcgcagggaatg

SEQ ID NO: 159943 - DNA, 58 bp, Artificial
  Synthetic oligonucleotide
gttatggcatttgcgatagttgtaatagaagattaagcaatgatggatatatgatttg

SEQ ID NO: 159944 - DNA, 54 bp, Artificial
  Synthetic oligonucleotide
acccttagagattatgtatacccaaacagccgtttttataggaatggtgtatac

SEQ ID NO: 159945 - DNA, 58 bp, Artificial
  Synthetic oligonucleotide
tcgcccatgctataagtccagatagtggatctatacatcttggggcaactatagaact

SEQ ID NO: 159946 - DNA, 52 bp, Artificial
  Synthetic oligonucleotide
cgttttataagccctcccttagccgccaaagcccctcgcataatgtttcccc

SEQ ID NO: 159947 - DNA, 58 bp, Artificial
  Synthetic oligonucleotide
tcaaagctagcaaatagtgtaaatcagcaaattactgaagcaggaagtagtgtagcga

SEQ ID NO: 159948 - DNA, 57 bp, Artificial
  Synthetic oligonucleotide
gcgtttcaatcaagtcgccaaacaaagaattaaaacgcacaatttcattataagagc

SEQ ID NO: 159949 - DNA, 58 bp, Artificial
  Synthetic oligonucleotide
tctccttgtatcgcacacgggattaagggtgggcttggctattctggtgagcaaggcg

SEQ ID NO: 159950 - DNA, 58 bp, Artificial
  Synthetic oligonucleotide
gctgctaaggctatgatcatcacttttgctttaaatatcggcggatggcttactttag

SEQ ID NO: 159951 - DNA, 56 bp, Artificial
  Synthetic oligonucleotide
taacataaatgaagtaaaccaacctgtgaataccattttagactgagttgaaaaca

SEQ ID NO: 159952 - DNA, 58 bp, Artificial
  Synthetic oligonucleotide
tattattgaacgatgtaaatagtcaattagcaatagcaaacgagtcggcagatataag

SEQ ID NO: 159953 - DNA, 60 bp, Artificial
  Synthetic oligonucleotide
cactgactcaatcttatgtcagtcgcatagtagaacagcttttatttcgtgcaggaattc

SEQ ID NO: 159954 - DNA, 58 bp, Artificial
  Synthetic oligonucleotide
gacaatcactaaagaacttacgcatttaaatgaatactcttgcactagcgatgaagtg

SEQ ID NO: 159955 - DNA, 57 bp, Artificial
  Synthetic oligonucleotide
gctcaagggttgtagcaggacgcgttgttgtaagcgattcagataagaaattaggtt

SEQ ID NO: 159956 - DNA, 57 bp, Artificial
  Synthetic oligonucleotide
tagacaaacctaatctaacccaaagctgtatcagatctgctgtaagacaagttagtg

SEQ ID NO: 159957 - DNA, 57 bp, Artificial
  Synthetic oligonucleotide
gaacgcctataagcaattcaattacagagctttatactttgcaaagatacatacaac

SEQ ID NO: 159958 - DNA, 57 bp, Artificial
  Synthetic oligonucleotide
ggggtaatgtagattttacaaatcaactcagtatgaatcttggctttggtgctaaac

SEQ ID NO: 159959 - DNA, 57 bp, Artificial
  Synthetic oligonucleotide
cagctatcggctcttatgatatcgctggcggacaattcaacccacaattatggttag

SEQ ID NO: 159960 - DNA, 57 bp, Artificial
  Synthetic oligonucleotide
gcttgtggcataatatcctataccaactcctcttttattgctaggtattattctagc

SEQ ID NO: 159961 - DNA, 57 bp, Artificial
  Synthetic oligonucleotide
gatacttgagtcactggattgctgattcgctcacaatttctggtgttcctatttcgc

SEQ ID NO: 159962 - DNA, 54 bp, Artificial
  Synthetic oligonucleotide
acaaatttgacctacggtaatcacccctgcttcataaggggctaaacgcctaga

SEQ ID NO: 159963 - DNA, 57 bp, Artificial
  Synthetic oligonucleotide
tcaagtgcggcgatacactgcttacaagtgccgcaaggtgtggcatttggtccctca

SEQ ID NO: 159964 - DNA, 60 bp, Artificial
  Synthetic oligonucleotide
gatgtggcgtaaattttccctattgctaggaactagcatagctttaaatgcagcacaagt

SEQ ID NO: 159965 - DNA, 57 bp, Artificial
  Synthetic oligonucleotide
agtgggcatggtggtagcattacaagttgccatgcaggaagcacttctgaaacattc

SEQ ID NO: 159966 - DNA, 57 bp, Artificial
  Synthetic oligonucleotide
cgccccaagaggcattatagccccagctcccgcacttgccatagcacgcgctgcata

SEQ ID NO: 159967 - DNA, 57 bp, Artificial
  Synthetic oligonucleotide
ggcggaaatttatcaatcaaggctaactatgaaacaacatagtaagcgttttgtgag

SEQ ID NO: 159968 - DNA, 57 bp, Artificial
  Synthetic oligonucleotide
ggggaaattctttagccgatgcagttgtaactgggcatttagcaggcattggtgcga

SEQ ID NO: 159969 - DNA, 57 bp, Artificial
  Synthetic oligonucleotide
tttctagcaagctcacttagccacgccgagcggttagaagttacggcgtcaatagcg

SEQ ID NO: 159970 - DNA, 57 bp, Artificial
  Synthetic oligonucleotide
aaattcggctcaaagagagttacattctcatgattatgacctttatatggggcatag

SEQ ID NO: 159971 - DNA, 57 bp, Artificial
  Synthetic oligonucleotide
ggctaggttatctttccttagggcgcgatgcaagaacgattagtgggggtgaagcac

SEQ ID NO: 159972 - DNA, 57 bp, Artificial
  Synthetic oligonucleotide
tatgcagtctaaaacgataagtctatcgtacctagcgatgatatagctaagttgcaa

SEQ ID NO: 159973 - DNA, 57 bp, Artificial
  Synthetic oligonucleotide
gggattaacccctgtcctagtatggataagcacaaggaaaatctatgagcgatatag

SEQ ID NO: 159974 - DNA, 56 bp, Artificial
  Synthetic oligonucleotide
caagtcttaccgtatgagcttgacctaatgtttcttgttctaatcttacactttcg

SEQ ID NO: 159975 - DNA, 59 bp, Artificial
  Synthetic oligonucleotide
gtggtggtgctagtatgggcgaggctgattttataaggcaagccttacttgagagtggt

SEQ ID NO: 159976 - DNA, 56 bp, Artificial
  Synthetic oligonucleotide
tactaagtccaagagttggtagaagcataagttgttcaactctaaatgcaatacca

SEQ ID NO: 159977 - DNA, 56 bp, Artificial
  Synthetic oligonucleotide
tacccgggggcgtctgtgagtgcttgctgtatggtattcacccttggtaagccaca

SEQ ID NO: 159978 - DNA, 56 bp, Artificial
  Synthetic oligonucleotide
tcggtggcgttatttttggatcagcttcggcaatagctggttatatcattacataa

SEQ ID NO: 159979 - DNA, 56 bp, Artificial
  Synthetic oligonucleotide
gcgtggaaaagaaaggttcaaattcaacttgtaatgatccaagatttagtgtaggc

SEQ ID NO: 159980 - DNA, 54 bp, Artificial
  Synthetic oligonucleotide
cctctagttttataagtatccaaacgcgttccatctaaagggtacccatgaatc

SEQ ID NO: 159981 - DNA, 56 bp, Artificial
  Synthetic oligonucleotide
gcgagaagaaatttaaacctatgcaggttaagaagaagtatgagacctatgatata

SEQ ID NO: 159982 - DNA, 56 bp, Artificial
  Synthetic oligonucleotide
ttgggagtatagcttagatggaggaaatagttggactcaaggagtaggaacaagct

SEQ ID NO: 159983 - DNA, 56 bp, Artificial
  Synthetic oligonucleotide
gcttatgattatgtagcattaccgcctaatacaggattgggtatatcgcagacgtg

SEQ ID NO: 159984 - DNA, 55 bp, Artificial
  Synthetic oligonucleotide
atccttatttgagcggatttaattggacttatcatatcgtggttgagaaaaaaac

SEQ ID NO: 159985 - DNA, 56 bp, Artificial
  Synthetic oligonucleotide
atcgcatgctatggatgtcaggtcgcatgcagttcggcgcacgaagtaccagtcgg

SEQ ID NO: 159986 - DNA, 58 bp, Artificial
  Synthetic oligonucleotide
gcgaatacaagaatttggacgacaatttcaaaggaatattacagagtttggagagaca

SEQ ID NO: 159987 - DNA, 56 bp, Artificial
  Synthetic oligonucleotide
ctagagtatgtctaaccataaatggacattggggtataggtaaaactcatctatgg

SEQ ID NO: 159988 - DNA, 56 bp, Artificial
  Synthetic oligonucleotide
tttgggagtatctcaaaaccgagtacttcacatggtgtggcatggaatacaaacgc

SEQ ID NO: 159989 - DNA, 56 bp, Artificial
  Synthetic oligonucleotide
gtccgacgctagatatagacttgatcaaattgcgcgctaagaaaatcctttctaag

SEQ ID NO: 159990 - DNA, 55 bp, Artificial
  Synthetic oligonucleotide
ctaagagaaatgcaaacggaagttgctaaaatactaggaatggagcgtggtgtag

SEQ ID NO: 159991 - DNA, 55 bp, Artificial
  Synthetic oligonucleotide
ctaacctcagagcaaccatgcggaactctttcttgtattacactaagactagagc

SEQ ID NO: 159992 - DNA, 55 bp, Artificial
  Synthetic oligonucleotide
ctaaggcacgagaagattaatccttgcttgttgggttacaacacttttatagctt

SEQ ID NO: 159993 - DNA, 55 bp, Artificial
  Synthetic oligonucleotide
gaaggcctagcttatcaatgagtacgcgaaggcagatcattaaagctcacgcagc

SEQ ID NO: 159994 - DNA, 55 bp, Artificial
  Synthetic oligonucleotide
ctaaaacatcagcgtggatgagtgttagagaaccactatctattgggatagcaaa

SEQ ID NO: 159995 - DNA, 55 bp, Artificial
  Synthetic oligonucleotide
gtgccgtgattagttaaagcggttgccctattattcgtagaagcaatactacccg

SEQ ID NO: 159996 - DNA, 55 bp, Artificial
  Synthetic oligonucleotide
ctactaagcaacgccgcaaaatacgcaaaccaaggtggctacgtcgcgattagtt

SEQ ID NO: 159997 - DNA, 55 bp, Artificial
  Synthetic oligonucleotide
agttagcctagagctaacgaacggacaagcccccgccctaatgtatcatcgaaac

SEQ ID NO: 159998 - DNA, 55 bp, Artificial
  Synthetic oligonucleotide
cgtttatagcggctcaaagcctagctacttcgtagctgcgtttcacgagttgccg

SEQ ID NO: 159999 - DNA, 55 bp, Artificial
  Synthetic oligonucleotide
gaatgcttacgatgatgattttaagcgtagttgtatggtatctgtggataagacc

SEQ ID NO: 160000 - DNA, 55 bp, Artificial
  Synthetic oligonucleotide
gttacgaggcagttccgtctcagcgtccgcaatggtcgcattagagccaccgcat

SEQ ID NO: 160001 - DNA, 55 bp, Artificial
  Synthetic oligonucleotide
cgtttaaattttacgagatcggcacgggtatggtagagagcatagtttatagcgc

SEQ ID NO: 160002 - DNA, 55 bp, Artificial
  Synthetic oligonucleotide
cgttaggatagacagcagggctatcataagagactacgctctaaatgctactcca

SEQ ID NO: 160003 - DNA, 55 bp, Artificial
  Synthetic oligonucleotide
cgtgttagagtagatggcgataagggtgcgcaaaaaagtggtgcgtatgttggtt

SEQ ID NO: 160004 - DNA, 55 bp, Artificial
  Synthetic oligonucleotide
cgtgcaggacggctttgcgtggtttatggactactataggcagatcatggagtgg

SEQ ID NO: 160005 - DNA, 55 bp, Artificial
  Synthetic oligonucleotide
gacaacgtaagtctcagcgagcttgaagtagacgcgaaaattcagtttcgcgaca

SEQ ID NO: 160006 - DNA, 55 bp, Artificial
  Synthetic oligonucleotide
cgtgatgcgcctaagcggagcgggacaatgaagctcgcgcaaattttagaacgca

SEQ ID NO: 160007 - DNA, 55 bp, Artificial
  Synthetic oligonucleotide
cgtagtttgcccgcattgctataacgctgaacaggcaagtgcagaactaggtgtc

SEQ ID NO: 160008 - DNA, 58 bp, Artificial
  Synthetic oligonucleotide
gtatacgaagtcagcaccaacgcgaactgtttcgttgaaagtatatccaccagttaca

SEQ ID NO: 160009 - DNA, 55 bp, Artificial
  Synthetic oligonucleotide
gaccttaagatctactatgagctttatgctagcaggggtagatagtgcaaatatc

SEQ ID NO: 160010 - DNA, 55 bp, Artificial
  Synthetic oligonucleotide
gacgcgataaaatcaagcggaggttgtgggtgcgggtgtatgtaagccgcgaaat

SEQ ID NO: 160011 - DNA, 55 bp, Artificial
  Synthetic oligonucleotide
cggtgcttggcatctatctagcgttagggtttatctacgtgcttgcctggtcgag

SEQ ID NO: 160012 - DNA, 55 bp, Artificial
  Synthetic oligonucleotide
cggtactagcgaagttggacgcgctccatgcattaagatatgagcccacacacgc

SEQ ID NO: 160013 - DNA, 55 bp, Artificial
  Synthetic oligonucleotide
cggtacagcctatacaggattcagggtgtaccacctctatcatttgtcctaaaac

SEQ ID NO: 160014 - DNA, 55 bp, Artificial
  Synthetic oligonucleotide
cggggctatctgtgagtaggagtaagccctcactcgcataatcaagcctccccac

SEQ ID NO: 160015 - DNA, 55 bp, Artificial
  Synthetic oligonucleotide
cggctccgctcaaaacggtatagccgcaggcataaacgcttcgatcgctcaaagt

SEQ ID NO: 160016 - DNA, 55 bp, Artificial
  Synthetic oligonucleotide
cttggaagatatacacatcctgatggttattctagctcaccaacttctatagttg

SEQ ID NO: 160017 - DNA, 55 bp, Artificial
  Synthetic oligonucleotide
cttagttcagctcaatgcccctacttgggtaaccgccactagtgcgatgttagct

SEQ ID NO: 160018 - DNA, 55 bp, Artificial
  Synthetic oligonucleotide
gtgcgtaactctagcaccgcacgcattgtaaatagcgttaataatcgccgcatga

SEQ ID NO: 160019 - DNA, 58 bp, Artificial
  Synthetic oligonucleotide
tcctacttccctagctgttccacaggcacttggctgtcctgttaaagaaaaggctcca

SEQ ID NO: 160020 - DNA, 60 bp, Artificial
  Synthetic oligonucleotide
agagctgcaaggagcttacgagaatttgcgcaaagcgagaacgtctctatattacagcga

SEQ ID NO: 160021 - DNA, 55 bp, Artificial
  Synthetic oligonucleotide
ctggtatgagtaagttgtctctggagctaggtcgcgatccacatagtgcgtagca

SEQ ID NO: 160022 - DNA, 55 bp, Artificial
  Synthetic oligonucleotide
gaaatcacttgtaaaactgtcgtgatgattctagaaccacctgggctacctacta

SEQ ID NO: 160023 - DNA, 55 bp, Artificial
  Synthetic oligonucleotide
gtgcgtgtccgaatgtatctctgatgatagagcctataaatgggtaggtgggctt

SEQ ID NO: 160024 - DNA, 55 bp, Artificial
  Synthetic oligonucleotide
gtggctatgaaaaggctatgtttggaagcgatagcgcgcctcatccattgcacac

SEQ ID NO: 160025 - DNA, 55 bp, Artificial
  Synthetic oligonucleotide
ctgcaaagtatgaaactatcgagcaaaaccacaagctagctctcagccccgacgc

SEQ ID NO: 160026 - DNA, 55 bp, Artificial
  Synthetic oligonucleotide
ctgaccattcagttattggtacattcccaggaagaccacttagcaatccttatgc

SEQ ID NO: 160027 - DNA, 55 bp, Artificial
  Synthetic oligonucleotide
ctctttaaagctccttgcatacctgtgtttctaggatcttcactttcggaatctg

SEQ ID NO: 160028 - DNA, 55 bp, Artificial
  Synthetic oligonucleotide
ctctcttaggcaatcttcaaacgcataaaggcaggctacgaagctaagcgggata

SEQ ID NO: 160029 - DNA, 55 bp, Artificial
  Synthetic oligonucleotide
ctcgcttcagtagatgcaccgcttgaaatcaaaccttgtgtggaaccttcaattt

SEQ ID NO: 160030 - DNA, 55 bp, Artificial
  Synthetic oligonucleotide
ctcgagcatgcggcgtaagctttcgtctatcacactcaaactcacgcctacgcgg

SEQ ID NO: 160031 - DNA, 60 bp, Artificial
  Synthetic oligonucleotide
gctatgccaaagaggataagcatcaggcataagagcaagtgcccaacctaaaagtattgc

SEQ ID NO: 160032 - DNA, 55 bp, Artificial
  Synthetic oligonucleotide
ctccctatgcacgatgagtccaagtataggcgtttgcactctgcccacagatacc

SEQ ID NO: 160033 - DNA, 55 bp, Artificial
  Synthetic oligonucleotide
ctccatgcgtacacagaacctatacacaaatgaacaccaacagcggataacgcca

SEQ ID NO: 160034 - DNA, 55 bp, Artificial
  Synthetic oligonucleotide
ctcagcaaagagcacatctgtaaatacaagcctaagtaacaacgcaggagtttta

SEQ ID NO: 160035 - DNA, 55 bp, Artificial
  Synthetic oligonucleotide
ctcactcgctaatcggcgtaaaacttcctgctaaacagtggaacgtgatgtggat

SEQ ID NO: 160036 - DNA, 55 bp, Artificial
  Synthetic oligonucleotide
ctcactaagatcggaaatcaaatcattcgcgtcctctatacccacgcttaggcgg

SEQ ID NO: 160037 - DNA, 55 bp, Artificial
  Synthetic oligonucleotide
ctatgctcgcccaaacccgtctcacgttatgcgtgagccaacgctacgcttgtct

SEQ ID NO: 160038 - DNA, 54 bp, Artificial
  Synthetic oligonucleotide
ctatgacgccctcacgaactaaatttaaagtaagcggaacaagcgtttgaagtc

SEQ ID NO: 160039 - DNA, 55 bp, Artificial
  Synthetic oligonucleotide
gtgcgcttatggcgtgcacatcgctatctacggacgtatatctgcccgctatgcc

SEQ ID NO: 160040 - DNA, 55 bp, Artificial
  Synthetic oligonucleotide
ctagcttttgctccgtcaaatttaacacaggccggagccaagacggacgagtcaa

SEQ ID NO: 160041 - DNA, 55 bp, Artificial
  Synthetic oligonucleotide
gaagagcagacagatacatatcatgagactttagaagatgcctttgggcaagcag

SEQ ID NO: 160042 - DNA, 59 bp, Artificial
  Synthetic oligonucleotide
gctatgaaaaccaaagaagaatccaagaagatatggctatacaagaatactctaagtcg

SEQ ID NO: 160043 - DNA, 55 bp, Artificial
  Synthetic oligonucleotide
gaagcgttgctttagattctgctatgcaaagtgtgttttcaagggtaagcaatcc

SEQ ID NO: 160044 - DNA, 55 bp, Artificial
  Synthetic oligonucleotide
ctagctgcttacatcgaggctggcatatctataagctacggcgtgaagtcaaagg

SEQ ID NO: 160045 - DNA, 55 bp, Artificial
  Synthetic oligonucleotide
ctagacgccaaaggcaacataagtctagctggtagtgtagtggctgatagtctaa

SEQ ID NO: 160046 - DNA, 55 bp, Artificial
  Synthetic oligonucleotide
ggtgccaagatggattgaaactaattgtattcagtgtaatcaatgtgcttcggtg

SEQ ID NO: 160047 - DNA, 55 bp, Artificial
  Synthetic oligonucleotide
ggagctagtggcgcaccagtagcaggtatagcaggacaggacggcttaggaaaca

SEQ ID NO: 160048 - DNA, 55 bp, Artificial
  Synthetic oligonucleotide
ggactgtttcgtacatcaaggcgttttcttcgcccacgctaagcccacctatagc

SEQ ID NO: 160049 - DNA, 55 bp, Artificial
  Synthetic oligonucleotide
ggactgggggcacaaagccaccacgtctccttcggagtatcagcgaagcagggcg

SEQ ID NO: 160050 - DNA, 55 bp, Artificial
  Synthetic oligonucleotide
ggtgctatgttttgtgtaaatggggtgcggggttgtgaagttgcctagagcaacg

SEQ ID NO: 160051 - DNA, 55 bp, Artificial
  Synthetic oligonucleotide
ggaagtagccgaaaatcaggcattaactcgattcaatggtggatggggcgagaga

SEQ ID NO: 160052 - DNA, 55 bp, Artificial
  Synthetic oligonucleotide
ggtggataattacacttggtgtgattgttcgcgcattagtcctgaagctcctgtt

SEQ ID NO: 160053 - DNA, 59 bp, Artificial
  Synthetic oligonucleotide
agatagatgaatcacgccctatcctttcttgtatattacatggaggtgaaagggttcag

SEQ ID NO: 160054 - DNA, 55 bp, Artificial
  Synthetic oligonucleotide
gctttaagaagcagactgatcgtaacctagtcgttaccgaggttcgcgcgagacg

SEQ ID NO: 160055 - DNA, 55 bp, Artificial
  Synthetic oligonucleotide
gcttgtcctaatactatagcaggtgtaagtgttccttgtaccaaagttgttaatg

SEQ ID NO: 160056 - DNA, 55 bp, Artificial
  Synthetic oligonucleotide
ggtggctatgaaagtttagccacagtaacaactccgccaagaactgcaacagacc

SEQ ID NO: 160057 - DNA, 55 bp, Artificial
  Synthetic oligonucleotide
gcttgaagccatgctaaatgtaccgcaggatctgttttgaaagggctaagcgcac

SEQ ID NO: 160058 - DNA, 55 bp, Artificial
  Synthetic oligonucleotide
gcttagctctgagcttaaatttgtgccgccagctacgctaatatactcagcgccg

SEQ ID NO: 160059 - DNA, 55 bp, Artificial
  Synthetic oligonucleotide
gcttacgtagtagctgttgtttagagtcgggaagtcttggctcgcgcgctctacg

SEQ ID NO: 160060 - DNA, 55 bp, Artificial
  Synthetic oligonucleotide
gcttacgagaatttgcgcaaagcgagaacgtctctatattacagcgacttggcag

SEQ ID NO: 160061 - DNA, 55 bp, Artificial
  Synthetic oligonucleotide
gctgcgtatcgacgcccgatctgatgtttgagacttggttgcgcttgcccactag

SEQ ID NO: 160062 - DNA, 55 bp, Artificial
  Synthetic oligonucleotide
gctgccgcgcacttggcgaaatgcgttatttgcctgcatcatcacgccaaaagtt

SEQ ID NO: 160063 - DNA, 55 bp, Artificial
  Synthetic oligonucleotide
gctctaagtgcattgctagcacctcttgaggtactccctcttacagtgtttagac

SEQ ID NO: 160064 - DNA, 53 bp, Artificial
  Synthetic oligonucleotide
tgaccctttcgggcgtcctagttttttaccactagccttagcattttcaagtc

SEQ ID NO: 160065 - DNA, 55 bp, Artificial
  Synthetic oligonucleotide
gctccatctcaccaactgcgttcattaggcgattttctatcgtttcatcgctatc

SEQ ID NO: 160066 - DNA, 55 bp, Artificial
  Synthetic oligonucleotide
gctatttcaagtgcgataaaatactttagtgtagcggctgtaggagctgggtttt

SEQ ID NO: 160067 - DNA, 55 bp, Artificial
  Synthetic oligonucleotide
ggttagggcacgcgcaaaggatgcccgatcactgggaaacgaacaaggatgcgaa

SEQ ID NO: 160068 - DNA, 55 bp, Artificial
  Synthetic oligonucleotide
gctagcagccgtttcttacgatgaggctctttggtaagcccatatgctccattat

SEQ ID NO: 160069 - DNA, 55 bp, Artificial
  Synthetic oligonucleotide
gctagatggcggcactgccgaggtcgagctaaagcagagcgcatttggcgtggct

SEQ ID NO: 160070 - DNA, 55 bp, Artificial
  Synthetic oligonucleotide
gctaagggcgtggattttctagcgcttcgcatcaagcaaatcggagtgcaaaaca

SEQ ID NO: 160071 - DNA, 55 bp, Artificial
  Synthetic oligonucleotide
gctaagcttaggtgtagcaactttgctttattcgagtgcttttgcgcaagaaatc

SEQ ID NO: 160072 - DNA, 55 bp, Artificial
  Synthetic oligonucleotide
gctaaaggacgacagatcgctaagaaaagccataaacaaggcgtatctagaggga

SEQ ID NO: 160073 - DNA, 55 bp, Artificial
  Synthetic oligonucleotide
gcgtcactaaaaatatcgtcgcccgcagcccaaactcgcgcaagaccgggtaggc

SEQ ID NO: 160074 - DNA, 55 bp, Artificial
  Synthetic oligonucleotide
gcgtagcgtcggcagggatagtcatctgaggctgaagcacgtatccatcggagtt

SEQ ID NO: 160075 - DNA, 60 bp, Artificial
  Synthetic oligonucleotide
gctatatgctgccaagatatacccgtagcatcgcttaatcctatctcgcaagtgcttgat

SEQ ID NO: 160076 - DNA, 55 bp, Artificial
  Synthetic oligonucleotide
gcgggcaaatgttacgaggcagttccgtctcagcgtccgcaatggtcgcattaga

SEQ ID NO: 160077 - DNA, 55 bp, Artificial
  Synthetic oligonucleotide
gcgggacaggctgtcaagtaaccttgcacgtggaaaacaacgtcgttcgtgccgc

SEQ ID NO: 160078 - DNA, 55 bp, Artificial
  Synthetic oligonucleotide
gggtaggatgactagcgatgagctagatggactaaccgatagaagcaatgaaaag

SEQ ID NO: 160079 - DNA, 55 bp, Artificial
  Synthetic oligonucleotide
gggtcactagggcttatgggtattataactccatatggaacaggaccttctccaa

SEQ ID NO: 160080 - DNA, 55 bp, Artificial
  Synthetic oligonucleotide
ggggatttcactagccacagaatgcaagcccagaacctagacttagctagccgtt

SEQ ID NO: 160081 - DNA, 55 bp, Artificial
  Synthetic oligonucleotide
gggcttgccatatcgtggttcgtgggtatcttgctgccgggacttgaatacaaca

SEQ ID NO: 160082 - DNA, 55 bp, Artificial
  Synthetic oligonucleotide
gggctaaggctagtggatttagcattatagttgctgcatttagtatagctatgat

SEQ ID NO: 160083 - DNA, 55 bp, Artificial
  Synthetic oligonucleotide
gggcgtgagtttggctctatgtataaggctgaagtgcgcgcaagaaccacagggc

SEQ ID NO: 160084 - DNA, 55 bp, Artificial
  Synthetic oligonucleotide
gggtgataatttgggtagcgattcagtaagcggtggcaatgagacatacgatgag

SEQ ID NO: 160085 - DNA, 55 bp, Artificial
  Synthetic oligonucleotide
gggagttttgattggcaaaacaggaactatcactgcgggaaaatttgtagctagc

SEQ ID NO: 160086 - DNA, 53 bp, Artificial
  Synthetic oligonucleotide
gctagcgaaatattaagggggcaaatctaaactattaagggggcaaatctaaa

SEQ ID NO: 160087 - DNA, 55 bp, Artificial
  Synthetic oligonucleotide
gggacttgatctagcaagcgtagcacaagctcctatcataagtaataacgcaggc

SEQ ID NO: 160088 - DNA, 55 bp, Artificial
  Synthetic oligonucleotide
ggctttggcaagagatgatgtctaagaagatcgattgcgtgcttgtgcctactgc

SEQ ID NO: 160089 - DNA, 55 bp, Artificial
  Synthetic oligonucleotide
ggcttgtcaaattgtacgagaactttgtccccagtaacttctgttacagtacaag

SEQ ID NO: 160090 - DNA, 55 bp, Artificial
  Synthetic oligonucleotide
ggctcccggatatgtaggatttgaacaaggcggaatcttaacaaatgccgtcaaa

SEQ ID NO: 160091 - DNA, 55 bp, Artificial
  Synthetic oligonucleotide
ggtaagcgcctaaaagccgttaggctagactcgggcgacctagcgtatctatcta

SEQ ID NO: 160092 - DNA, 55 bp, Artificial
  Synthetic oligonucleotide
ggtagaagcgagagtgactcactaaaccttgcttatacattttatagggactcaa

SEQ ID NO: 160093 - DNA, 52 bp, Artificial
  Synthetic oligonucleotide
ggcggtgttagtacaactttaggttcgttgcttgtacctttagtaactctag

SEQ ID NO: 160094 - DNA, 55 bp, Artificial
  Synthetic oligonucleotide
ggcgggctgtccgccttaatctgctatctgcgtttgaatttgaaggggttaaggg

SEQ ID NO: 160095 - DNA, 55 bp, Artificial
  Synthetic oligonucleotide
ggcgaaaatccagagcgcataaaatttggttctaccttaagcaatgatcaacaaa

SEQ ID NO: 160096 - DNA, 55 bp, Artificial
  Synthetic oligonucleotide
ggccgtctatctaccaaataagggagatgatgactacaaagagataagctgggcc

SEQ ID NO: 160097 - DNA, 58 bp, Artificial
  Synthetic oligonucleotide
cgaactaaatttgcaggaagaattacagaaggtattgatagaaatacagatgaaccta

SEQ ID NO: 160098 - DNA, 54 bp, Artificial
  Synthetic oligonucleotide
ggcccgcttatatcttgtaaaattcctacgcgagtgttaagttctcttgaaact

SEQ ID NO: 160099 - DNA, 55 bp, Artificial
  Synthetic oligonucleotide
ggccatccagctgataccgtagatcgctacaagtgctaccataccgctgtgaaag

SEQ ID NO: 160100 - DNA, 55 bp, Artificial
  Synthetic oligonucleotide
ggtagcgcgcttagcaaggaaattttcgacgctttggtcaagctaggacacggga

SEQ ID NO: 160101 - DNA, 55 bp, Artificial
  Synthetic oligonucleotide
ggcatactcgcccttatagtcctctgtgctagggtgcgagagtgcttgcagcgcc

SEQ ID NO: 160102 - DNA, 55 bp, Artificial
  Synthetic oligonucleotide
ggcataatagctggaggcatagctaatggcgataaaggagcaaacacaggctata

SEQ ID NO: 160103 - DNA, 55 bp, Artificial
  Synthetic oligonucleotide
ggcagtgatataaatttaaatgccaaaagtgctcttagcctaaaaggtgcaaacc

SEQ ID NO: 160104 - DNA, 55 bp, Artificial
  Synthetic oligonucleotide
ggcacggccagcttatgccgcctagcttatctagcctatagtagctaataccgcc

SEQ ID NO: 160105 - DNA, 55 bp, Artificial
  Synthetic oligonucleotide
ggcaactacgtcctaggcacgcaaaatacgctaacgcaggtgactccaagccagg

SEQ ID NO: 160106 - DNA, 55 bp, Artificial
  Synthetic oligonucleotide
ggcaaccatgacataacctacggtgacgtaaaagctacatgcgagctaatcgggc

SEQ ID NO: 160107 - DNA, 55 bp, Artificial
  Synthetic oligonucleotide
ggattcagggtgtaccacctctatcatttgtcctaaaaccgcatgcacatcatcg

SEQ ID NO: 160108 - DNA, 58 bp, Artificial
  Synthetic oligonucleotide
tgaagcacaaggcagatataatattttgtgggtagaacataacgacaagggacggtta

SEQ ID NO: 160109 - DNA, 55 bp, Artificial
  Synthetic oligonucleotide
gcacctaactagccgctggatgtttaagtgcgcggacgacgaaactatggccgcg

SEQ ID NO: 160110 - DNA, 55 bp, Artificial
  Synthetic oligonucleotide
gtcccaagtcttgtaatggactcaagcaccttagcttgagagcccaatcccaaag

SEQ ID NO: 160111 - DNA, 55 bp, Artificial
  Synthetic oligonucleotide
gtccgaacagtctgtggttcatgagcgaaaaggaactcaaatgcctatgcacatc

SEQ ID NO: 160112 - DNA, 55 bp, Artificial
  Synthetic oligonucleotide
gcaatgtgcatacggtcattgaaattgactcaaaattggttagaaacgaaacgtc

SEQ ID NO: 160113 - DNA, 51 bp, Artificial
  Synthetic oligonucleotide
gcaatctattacgaaagatttggggtaaactacgaaagatttggggtaaac

SEQ ID NO: 160114 - DNA, 55 bp, Artificial
  Synthetic oligonucleotide
gcaatatgtatcgttgctaaaacagtctgggcttaaagtaacgccgcagcgtctt

SEQ ID NO: 160115 - DNA, 55 bp, Artificial
  Synthetic oligonucleotide
gcaagctaaaccaggtagtggagccttttctttaacaggacagccaagtgcctgt

SEQ ID NO: 160116 - DNA, 55 bp, Artificial
  Synthetic oligonucleotide
gatttaatagcgctttggacaagcagttgattaagtgtagcaccgctttcgtgaa

SEQ ID NO: 160117 - DNA, 55 bp, Artificial
  Synthetic oligonucleotide
gattatccgcgacgcgcacggctttaaatttcgcgcccaaaaccagcgcttcgtt

SEQ ID NO: 160118 - DNA, 55 bp, Artificial
  Synthetic oligonucleotide
gatctgctatgagttttatgctagcaggagtagatagtgctaatatcgcttatgg

SEQ ID NO: 160119 - DNA, 59 bp, Artificial
  Synthetic oligonucleotide
ctcaataaaactgccttcatcgcttaaaagtttaatacgttcatcagctgaaattctca

SEQ ID NO: 160120 - DNA, 55 bp, Artificial
  Synthetic oligonucleotide
gatcgtaggctgttcgttcatcgcgagctcatattcggtcttatttatccagccg

SEQ ID NO: 160121 - DNA, 55 bp, Artificial
  Synthetic oligonucleotide
gtctatgcagggcttgacgctggtatggtaagagcagcaaatagcggcataaagg

SEQ ID NO: 160122 - DNA, 55 bp, Artificial
  Synthetic oligonucleotide
gatagtagcgaagagatagttaatgagcttagccaaagcatagcaggagcgatca

SEQ ID NO: 160123 - DNA, 55 bp, Artificial
  Synthetic oligonucleotide
gtcttgatgcagaaccggctcctgagcttattaccatcggtaaaacgccgaatgc

SEQ ID NO: 160124 - DNA, 54 bp, Artificial
  Synthetic oligonucleotide
gagtgctggtatttaggttttaaccgaaggtagagcaacaaaggcaacgctaaa

SEQ ID NO: 160125 - DNA, 55 bp, Artificial
  Synthetic oligonucleotide
gagtatgaaaatcgccctataaatagtcttagcggaggcgagataaggcgcgtag

SEQ ID NO: 160126 - DNA, 55 bp, Artificial
  Synthetic oligonucleotide
gagtaatcctcgtctccacaagcgataacgacgtagtgatgcgtgctgcttctgc

SEQ ID NO: 160127 - DNA, 55 bp, Artificial
  Synthetic oligonucleotide
gaggtttaaacatcatcttgcatgcctgcacgtccgttaacatcagtcgggccgc

SEQ ID NO: 160128 - DNA, 55 bp, Artificial
  Synthetic oligonucleotide
gagggctaacaaacgacatttacttccagatcggactactgcttctcatcggtct

SEQ ID NO: 160129 - DNA, 55 bp, Artificial
  Synthetic oligonucleotide
gagggcgctatcataaatttaaacgcctacgcaagcttgatgagagtcgagataa

SEQ ID NO: 160130 - DNA, 56 bp, Artificial
  Synthetic oligonucleotide
cctgcttccaaaaattatcataaggttaaaacttacagcacaaactcttatagaca

SEQ ID NO: 160131 - DNA, 60 bp, Artificial
  Synthetic oligonucleotide
agcaatcagttttatggctggttattggttaagatctttgatgatttatcaatcaaattc

SEQ ID NO: 160132 - DNA, 55 bp, Artificial
  Synthetic oligonucleotide
gagctctggacccataatctactaatcagtcataagatttcagcaaccagaatag

SEQ ID NO: 160133 - DNA, 55 bp, Artificial
  Synthetic oligonucleotide
gagctaacgaacggacaagacaccgccctattagttagctagtcgctccgctccc

SEQ ID NO: 160134 - DNA, 55 bp, Artificial
  Synthetic oligonucleotide
gagcgaaagcttgaagctccctatactgcgccaaatcaagccttaaagtcccaga

SEQ ID NO: 160135 - DNA, 55 bp, Artificial
  Synthetic oligonucleotide
gagccagtcgaggacaagccagaagccatcgaggtaaaatctgagacaactaatg

SEQ ID NO: 160136 - DNA, 55 bp, Artificial
  Synthetic oligonucleotide
gagcaaatgttaagtggagatcttgagtatactaacaaaccttacgcaatcgcta

SEQ ID NO: 160137 - DNA, 55 bp, Artificial
  Synthetic oligonucleotide
gtcttgtgctacaaggtggcacaacaaggataaccgacgaggctcttagcgtgta

SEQ ID NO: 160138 - DNA, 55 bp, Artificial
  Synthetic oligonucleotide
gagaagccgatatcactatactcggacacatcggtcttgcgatgttgggagaggg

SEQ ID NO: 160139 - DNA, 55 bp, Artificial
  Synthetic oligonucleotide
gactatcagtttcccaagcagtttaatggttaagccattagatttcacaagagac

SEQ ID NO: 160140 - DNA, 55 bp, Artificial
  Synthetic oligonucleotide
gcggcggtataaacagtggtcaaatcatagaaataggagcgctaaaactcttgga

SEQ ID NO: 160141 - DNA, 55 bp, Artificial
  Synthetic oligonucleotide
gtaagttcgctaccagcttttcgcttttgaattagtttgccccatatttctgggc

SEQ ID NO: 160142 - DNA, 60 bp, Artificial
  Synthetic oligonucleotide
agcacggaatagctaacgctattccaggctctcaaagtcttagaaaaatggcaggagatc

SEQ ID NO: 160143 - DNA, 55 bp, Artificial
  Synthetic oligonucleotide
gcgcttctactcgactcaaaggcgtattgacgaccttccctgcttgcagacgctg

SEQ ID NO: 160144 - DNA, 55 bp, Artificial
  Synthetic oligonucleotide
gtagtcctcagtcgtcgaactcttgcgagataacgggcgagaactcctcccagcg

SEQ ID NO: 160145 - DNA, 55 bp, Artificial
  Synthetic oligonucleotide
gcgcctttatatgccttatactacgctgatgaataagcttacaggcgatagaaat

SEQ ID NO: 160146 - DNA, 55 bp, Artificial
  Synthetic oligonucleotide
gcgatgggcaaatggtcgctcttgattctatacttacgcttaaaagtagtgcagg

SEQ ID NO: 160147 - DNA, 55 bp, Artificial
  Synthetic oligonucleotide
gcgagctgagctgctaaaccgctcggtcacagaccagcctccaagccgtaagcat

SEQ ID NO: 160148 - DNA, 55 bp, Artificial
  Synthetic oligonucleotide
gcgacggttgagataagcagatcggtagaggacgcggatcttttagatgcgatcg

SEQ ID NO: 160149 - DNA, 55 bp, Artificial
  Synthetic oligonucleotide
gcgacgcccgattttgtaggatccaaagagcgtatctttgagcgtgagcgggatg

SEQ ID NO: 160150 - DNA, 55 bp, Artificial
  Synthetic oligonucleotide
gcctttaagcatgcttagcgcttttaaagtagcgcgaacgacgtttgccgagttg

SEQ ID NO: 160151 - DNA, 55 bp, Artificial
  Synthetic oligonucleotide
gcctgatagaatttaacatgccgtcacttttgacaacaagcctagcaagtaaaac

SEQ ID NO: 160152 - DNA, 55 bp, Artificial
  Synthetic oligonucleotide
gcctcggctggagtgctagagatactaaaacattgtagtattgttattgttccca

SEQ ID NO: 160153 - DNA, 58 bp, Artificial
  Synthetic oligonucleotide
agcagagaaaagctaagagaaatgcaaacggaagttgctaaaatactaggaatggagc

SEQ ID NO: 160154 - DNA, 54 bp, Artificial
  Synthetic oligonucleotide
gcctaaacggtcttgagggctgcgactttgtaaacgggctaaatttgggcgagc

SEQ ID NO: 160155 - DNA, 54 bp, Artificial
  Synthetic oligonucleotide
gccgttgtaggcctttaatatcgcgtctagtccgccgaaattttcgcttagcgg

SEQ ID NO: 160156 - DNA, 55 bp, Artificial
  Synthetic oligonucleotide
gccgttacgcccacattaacgctagaaaagccgaaaggtgtgcagcatgtggcac

SEQ ID NO: 160157 - DNA, 55 bp, Artificial
  Synthetic oligonucleotide
gccccttcttgggtgtagctcgcccgccctggctctacgctcggcttttagcatg

SEQ ID NO: 160158 - DNA, 55 bp, Artificial
  Synthetic oligonucleotide
gccccacctgtaagaacagctaccactgtggctattgcaacacccgctatagcac

SEQ ID NO: 160159 - DNA, 55 bp, Artificial
  Synthetic oligonucleotide
gcccactacgatcgactttcgtatagtctttgctactttgagcgccgcctcctat

SEQ ID NO: 160160 - DNA, 55 bp, Artificial
  Synthetic oligonucleotide
gcccacataggaaatttcgcgctaaccctccgaactggagacgatacggccaatc

SEQ ID NO: 160161 - DNA, 53 bp, Artificial
  Synthetic oligonucleotide
gtcaaagaaacacggggtgagactaaaatttcttaccaagatgaacttcttag

SEQ ID NO: 160162 - DNA, 55 bp, Artificial
  Synthetic oligonucleotide
gccacggcggacacctaacacacggcgcaaaggtaagcagctctggcaagatgta

SEQ ID NO: 160163 - DNA, 55 bp, Artificial
  Synthetic oligonucleotide
gtcaaagagataatacggcggaacttgaacgacttagaaatcagtttgaacgagc

SEQ ID NO: 160164 - DNA, 57 bp, Artificial
  Synthetic oligonucleotide
tcttatttggtcgttctcaaagccctactaaagaagtaatgtgggatttagctgcta

SEQ ID NO: 160165 - DNA, 55 bp, Artificial
  Synthetic oligonucleotide
gcatttaagacttccgatagtgtctcctgtaagacactcactgtgaatgcgaacc

SEQ ID NO: 160166 - DNA, 55 bp, Artificial
  Synthetic oligonucleotide
gcattatcatcacaaaattgcctaagatctgaacgcttaggagaaagagtagccg

SEQ ID NO: 160167 - DNA, 55 bp, Artificial
  Synthetic oligonucleotide
gtcagcggcgattagagaagtaccggcttgatatgaaacggagtgttcgtttggc

SEQ ID NO: 160168 - DNA, 55 bp, Artificial
  Synthetic oligonucleotide
gcaggcttgccacaggactttaaaattcacaaaagcacgcttgatgcgatagtgc

SEQ ID NO: 160169 - DNA, 55 bp, Artificial
  Synthetic oligonucleotide
gcagagatagaagcctataacaacaaacgcctactagcatctcagctaataggca

SEQ ID NO: 160170 - DNA, 55 bp, Artificial
  Synthetic oligonucleotide
gcacgatcaagctgataaccctcagagtcataggatagcttagcagcagcttgct

SEQ ID NO: 160171 - DNA, 55 bp, Artificial
  Synthetic oligonucleotide
caaggtagtttgccagctcctgtagctgctataatatcaggtttaacggttgctt

SEQ ID NO: 160172 - DNA, 55 bp, Artificial
  Synthetic oligonucleotide
caagcacaatatgaagctcagaaaattgcattcgctccgattgtattccaagttg

SEQ ID NO: 160173 - DNA, 55 bp, Artificial
  Synthetic oligonucleotide
tagcggcgaacgggcgtcaaatttatctaacgcggatgcctatttgcgggcgagg

SEQ ID NO: 160174 - DNA, 53 bp, Artificial
  Synthetic oligonucleotide
caagacgcaaaatacctaaattcggacttgctaagtataggcttttaccgtcg

SEQ ID NO: 160175 - DNA, 59 bp, Artificial
  Synthetic oligonucleotide
agcattagggcggtgggctttgtccgtgttccgtgctacgcactcacacagcccccgca

SEQ ID NO: 160176 - DNA, 55 bp, Artificial
  Synthetic oligonucleotide
caactcgccaaatatcatagatcgtttaagtgatccttatagcaacgacactcaa

SEQ ID NO: 160177 - DNA, 55 bp, Artificial
  Synthetic oligonucleotide
caaacaaaacccctacgactttagccttgcttcccacataatacgcatctacggc

SEQ ID NO: 160178 - DNA, 55 bp, Artificial
  Synthetic oligonucleotide
tagtgtagcaattttaagggtggaagcgaaatcataaggagtttcgtttgtctca

SEQ ID NO: 160179 - DNA, 54 bp, Artificial
  Synthetic oligonucleotide
atttgaattttgccccgcagtgcccaatactctagggagtttacgaccgcccca

SEQ ID NO: 160180 - DNA, 55 bp, Artificial
  Synthetic oligonucleotide
atttctccgatataagcggtatgatccccatcaccccaagctccatactgataag

SEQ ID NO: 160181 - DNA, 55 bp, Artificial
  Synthetic oligonucleotide
atttccaagaagctactatatccggacgatgttgcttgatatgttgcaactcata

SEQ ID NO: 160182 - DNA, 51 bp, Artificial
  Synthetic oligonucleotide
attataaaaggtagatgccaaagggctacaaccctttagcgttaatttacc

SEQ ID NO: 160183 - DNA, 55 bp, Artificial
  Synthetic oligonucleotide
atgtagctcgtgtacatataaagtgggtgtatgctttgcgcatcatgacccatag

SEQ ID NO: 160184 - DNA, 55 bp, Artificial
  Synthetic oligonucleotide
atggagcgtggagctaatcgctacgagaataacgaaaagcaacctcaatacatac

SEQ ID NO: 160185 - DNA, 55 bp, Artificial
  Synthetic oligonucleotide
atgatagaaccataggacactttggtggtggtataagatattatccaaacgcaac

SEQ ID NO: 160186 - DNA, 60 bp, Artificial
  Synthetic oligonucleotide
tctgttataagtaatcatgcgatagagagtatttacatgaatgaattagatattatcgct

SEQ ID NO: 160187 - DNA, 55 bp, Artificial
  Synthetic oligonucleotide
tatgcaacgtcgtgtcggtccttggatggttggacctgccggagtgttacagatt

SEQ ID NO: 160188 - DNA, 55 bp, Artificial
  Synthetic oligonucleotide
atcaagccctaaatccttgttgccgtcacgctttagtatgtcaagttctgctcac

SEQ ID NO: 160189 - DNA, 55 bp, Artificial
  Synthetic oligonucleotide
tatgggctataggtttactcatgggcataggacaagttttaggggcttatcttgg

SEQ ID NO: 160190 - DNA, 55 bp, Artificial
  Synthetic oligonucleotide
atatcactgcggcattctatcaccgtatgtacatttccgcgtggattaaaatccc

SEQ ID NO: 160191 - DNA, 55 bp, Artificial
  Synthetic oligonucleotide
atagagcgcgcaaactctagcaaagatacgatctcatcgtcgtttacgcctctta

SEQ ID NO: 160192 - DNA, 55 bp, Artificial
  Synthetic oligonucleotide
atacctacttgcctatacaaagtcgtgatatctatagccgaaggtccaagagtgc

SEQ ID NO: 160193 - DNA, 55 bp, Artificial
  Synthetic oligonucleotide
ataagttccagaacttagcttggaaaattccacacaaagctttgcggcaaattct

SEQ ID NO: 160194 - DNA, 55 bp, Artificial
  Synthetic oligonucleotide
ataagcgtaagtaaaccaagcaatctaagcgtaactttggatttgcacgggctta

SEQ ID NO: 160195 - DNA, 55 bp, Artificial
  Synthetic oligonucleotide
tcaagattataggttaaatctatgctagtatatctacctagtgtttttcctacgc

SEQ ID NO: 160196 - DNA, 55 bp, Artificial
  Synthetic oligonucleotide
agtgcgtccgtatcatcttctcttacgctaagtgcggctaaaaccaagccttgcg

SEQ ID NO: 160197 - DNA, 60 bp, Artificial
  Synthetic oligonucleotide
gaacgctcccctagaggccttaaaatgcaatctagggcatatgagcaaggcatggcataa

SEQ ID NO: 160198 - DNA, 55 bp, Artificial
  Synthetic oligonucleotide
tcaagctctgctaaatttgcacgcattgcaaaagtcgtatttggaagcaatagcg

SEQ ID NO: 160199 - DNA, 55 bp, Artificial
  Synthetic oligonucleotide
agtgcctaaaattcccatcataggaaagatagtcgcacccactgcggcgaaattc

SEQ ID NO: 160200 - DNA, 55 bp, Artificial
  Synthetic oligonucleotide
ccaagccctaccatagtgggcgtgggagtgcaaaaggacgcaaatttgaccctta

SEQ ID NO: 160201 - DNA, 54 bp, Artificial
  Synthetic oligonucleotide
ccaagaggcgcaggtagcggttttacgggtggatctttagccgcaaacggtgga

SEQ ID NO: 160202 - DNA, 51 bp, Artificial
  Synthetic oligonucleotide
ccaagacgttttaaccccgatcgccgaaattttagacctgggcgagctaag

SEQ ID NO: 160203 - DNA, 55 bp, Artificial
  Synthetic oligonucleotide
ccaagaacggctcttacatgtaaggcaaattcgctctgactttgggttatcatcg

SEQ ID NO: 160204 - DNA, 54 bp, Artificial
  Synthetic oligonucleotide
ccaaacttaccacaaaacgattacaaagttagtgtgattatcacagataaccct

SEQ ID NO: 160205 - DNA, 55 bp, Artificial
  Synthetic oligonucleotide
ccaaaagagttgggcgagatagtagagagttatgtagtagcagggatggagtgtg

SEQ ID NO: 160206 - DNA, 55 bp, Artificial
  Synthetic oligonucleotide
cattgttattaagtggacgtggtatgcgagaatgattcgagggatggtggcaggc

SEQ ID NO: 160207 - DNA, 55 bp, Artificial
  Synthetic oligonucleotide
catgactgcagtaggtctttatcagtcttttgcacattatggcaatcacgctcat

SEQ ID NO: 160208 - DNA, 54 bp, Artificial
  Synthetic oligonucleotide
tctagggagtttacgaccgccccacaaagtgggagagtattgggctcaataccc

SEQ ID NO: 160209 - DNA, 55 bp, Artificial
  Synthetic oligonucleotide
catctcttgtgattctttgacggaccacttcgtagcctagatcttttgcgatatc

SEQ ID NO: 160210 - DNA, 55 bp, Artificial
  Synthetic oligonucleotide
catcgtaggggacggcctaaacgataagagcagtgactatactaatgtgatctca

SEQ ID NO: 160211 - DNA, 55 bp, Artificial
  Synthetic oligonucleotide
tactaggataattttagtcattcgactcacctcccttctgggcggtaaattgaat

SEQ ID NO: 160212 - DNA, 55 bp, Artificial
  Synthetic oligonucleotide
catacttgccacatggttaaattttgctcttacggtatcaagtcttccgcgacct

SEQ ID NO: 160213 - DNA, 55 bp, Artificial
  Synthetic oligonucleotide
catacaatctttttatgatgatgtattgcaagatccacaaggttttttaagcgat

SEQ ID NO: 160214 - DNA, 55 bp, Artificial
  Synthetic oligonucleotide
tactggtcttcccgtcgctaaggttgccacacctaaaagcgcttcaatggtcggg

SEQ ID NO: 160215 - DNA, 55 bp, Artificial
  Synthetic oligonucleotide
caggcgtgttgttctgcagtcgtcattccaaaaggtactgctgtccaaaacatcg

SEQ ID NO: 160216 - DNA, 53 bp, Artificial
  Synthetic oligonucleotide
caggagttatgtcttcttttaacgagcctttaaccccttttgaagcagaggta

SEQ ID NO: 160217 - DNA, 55 bp, Artificial
  Synthetic oligonucleotide
cagcgcaggttttgggcactatacgcaaaatcacaagggttttgggcctacgatt

SEQ ID NO: 160218 - DNA, 55 bp, Artificial
  Synthetic oligonucleotide
cagccgaaacgctagcctcatttcccggaatcgccttagccgagatgatgacttg

SEQ ID NO: 160219 - DNA, 60 bp, Artificial
  Synthetic oligonucleotide
tctaatgattccgtacttaaatggtactccactttgtgcagcataaccaagtgcggcagg

SEQ ID NO: 160220 - DNA, 55 bp, Artificial
  Synthetic oligonucleotide
cagaagtaaagccctatgtagcaaactcttggatagcttgggatagtgctagcgt

SEQ ID NO: 160221 - DNA, 55 bp, Artificial
  Synthetic oligonucleotide
cacttctggctctaatctagtctctccgccatctagcacagtatgtcctgcactc

SEQ ID NO: 160222 - DNA, 55 bp, Artificial
  Synthetic oligonucleotide
cactaataaagatggctcaataactaaaggcggacttatagcagccgtcataaac

SEQ ID NO: 160223 - DNA, 55 bp, Artificial
  Synthetic oligonucleotide
cacgctaaagcccaaaacaatgctaatactcgtataataaagtgccgtccctatg

SEQ ID NO: 160224 - DNA, 55 bp, Artificial
  Synthetic oligonucleotide
tagcgcgtagctgtcgataaagagcattagcacgactagtggcgcggcgatactt

SEQ ID NO: 160225 - DNA, 55 bp, Artificial
  Synthetic oligonucleotide
cacacgcacaggtgctttgatatgataaagtcccataacgccatcgcctaagaag

SEQ ID NO: 160226 - DNA, 55 bp, Artificial
  Synthetic oligonucleotide
cacaacgctgctagcaaacatacgaagcggcgcaaatataacatctggaagctcg

SEQ ID NO: 160227 - DNA, 55 bp, Artificial
  Synthetic oligonucleotide
tgtccatcacctaatcttacctttagtggtatttttaaatcatccgtgataattt

SEQ ID NO: 160228 - DNA, 55 bp, Artificial
  Synthetic oligonucleotide
acagccgctacactaaagtattttatcgcacttgaaatagcattatcacttccac

SEQ ID NO: 160229 - DNA, 55 bp, Artificial
  Synthetic oligonucleotide
acagcaggctctttgcttgaaactagcgaattcatttgcgaaacactacaagcac

SEQ ID NO: 160230 - DNA, 60 bp, Artificial
  Synthetic oligonucleotide
cagcaaatcattgatgcaataagacaagtgggcacgagtgataaggttgctgagcttagt

SEQ ID NO: 160231 - DNA, 55 bp, Artificial
  Synthetic oligonucleotide
acacgacgcttggtgctggtatctgggtcgctatactgctagccgtgggctggta

SEQ ID NO: 160232 - DNA, 55 bp, Artificial
  Synthetic oligonucleotide
tgtgatctctttgctaagctgagatatgtttattgttgtataaagctcgctccag

SEQ ID NO: 160233 - DNA, 55 bp, Artificial
  Synthetic oligonucleotide
ttaaagagcatactgtatcccgcactttcgtgacgatagacaaacatgaaaagca

SEQ ID NO: 160234 - DNA, 55 bp, Artificial
  Synthetic oligonucleotide
ttacgatgaaggaaatgtaggacaatattggggaatatttacttctgatagagcg

SEQ ID NO: 160235 - DNA, 55 bp, Artificial
  Synthetic oligonucleotide
acaagaggatcttatgcttatgttccacaaagcccaatcgtagcagcaatgatag

SEQ ID NO: 160236 - DNA, 55 bp, Artificial
  Synthetic oligonucleotide
ttacgatttgtcggtaattcttcagccgtgtagcgtcctacgacactacgcacca

SEQ ID NO: 160237 - DNA, 55 bp, Artificial
  Synthetic oligonucleotide
aatttgcgtgggctgctacgtgtgccttaaacggcttaacgcatgtgggggttgc

SEQ ID NO: 160238 - DNA, 53 bp, Artificial
  Synthetic oligonucleotide
aatttgacacacaagagtaagaattagccccgctaaaacgccccactccttac

SEQ ID NO: 160239 - DNA, 55 bp, Artificial
  Synthetic oligonucleotide
aatcggttggtcgatcctagtcggcgttatcggcgttacattgcttgcgctaggc

SEQ ID NO: 160240 - DNA, 55 bp, Artificial
  Synthetic oligonucleotide
aatacggctcttagctacgagatagatctttggggcagagtaagggatagcgcaa

SEQ ID NO: 160241 - DNA, 60 bp, Artificial
  Synthetic oligonucleotide
tcctacactacaccagccatttagtgcgcaagtcgccgcccagcataaattcgctcttgc

SEQ ID NO: 160242 - DNA, 56 bp, Artificial
  Synthetic oligonucleotide
tcggtaattatgtaattgctgaaaccactgcaaaaaaatttacaatcaaaagtgga

SEQ ID NO: 160243 - DNA, 55 bp, Artificial
  Synthetic oligonucleotide
aatacgcttaggctgcttggacttatcgataatgtcacgctagtaccgcacggaa

SEQ ID NO: 160244 - DNA, 55 bp, Artificial
  Synthetic oligonucleotide
aatacaaagcagcttgtgctccttttgggcacaatctcatcatagcaagtgcagg

SEQ ID NO: 160245 - DNA, 55 bp, Artificial
  Synthetic oligonucleotide
aagtcgaatttgcaataatggacaggtttgtaattgtgccgaaagagcttatgtg

SEQ ID NO: 160246 - DNA, 53 bp, Artificial
  Synthetic oligonucleotide
aagggtatcgcttatacaggacaaacttccgcccttttaagagcggtaagcga

SEQ ID NO: 160247 - DNA, 55 bp, Artificial
  Synthetic oligonucleotide
aaggatcgcttaaacgatctatgatatttggcgagttgtagctgatctcatcctc

SEQ ID NO: 160248 - DNA, 55 bp, Artificial
  Synthetic oligonucleotide
ttcaatgactactaagcataaaacttgcgtaggttgtttagcttttacagaacaa

SEQ ID NO: 160249 - DNA, 55 bp, Artificial
  Synthetic oligonucleotide
aagcgtgcacatacatctcgacccaaacggtctgtaccaaaaggatactccatgc

SEQ ID NO: 160250 - DNA, 55 bp, Artificial
  Synthetic oligonucleotide
ttcagagctggggaccgctcattttcggacactgcgaccctgatatcgagagtgc

SEQ ID NO: 160251 - DNA, 55 bp, Artificial
  Synthetic oligonucleotide
ttgccaatagatccgtggcgtctgtgaaatctagaaccgtgacttgctggacccc

SEQ ID NO: 160252 - DNA, 55 bp, Artificial
  Synthetic oligonucleotide
aacctttggcgattagctctcttttgtcgtccgctatcgctcgtcctaggcgtgg

SEQ ID NO: 160253 - DNA, 50 bp, Artificial
  Synthetic oligonucleotide
gcgtcttttttcgcgacgctaggagccgaaaaaaacccttttgcgaaatt

SEQ ID NO: 160254 - DNA, 55 bp, Artificial
  Synthetic oligonucleotide
tttagccgggcactgctgcaaaaacactctgccgctccccttagccccgctcgca

SEQ ID NO: 160255 - DNA, 55 bp, Artificial
  Synthetic oligonucleotide
tttcgtaaaggccgtagttatcgctactacgcttggcgagagacacgcttactcg

SEQ ID NO: 160256 - DNA, 55 bp, Artificial
  Synthetic oligonucleotide
ttttagcctcgcgcaaagcatttcgcccgcatagctaaaatttgacgcaggctcg

SEQ ID NO: 160257 - DNA, 55 bp, Artificial
  Synthetic oligonucleotide
agtctggcgaaacgagatccactactgcttcgatcgcggtatttaggcactcgca

SEQ ID NO: 160258 - DNA, 55 bp, Artificial
  Synthetic oligonucleotide
tcacggcgggctttgcgaggactacgtctccaccctaaatcgagacatagcggac

SEQ ID NO: 160259 - DNA, 55 bp, Artificial
  Synthetic oligonucleotide
tcactgttgtcttctaagtttatacggtttgcgtggagccaacattgtgtttgac

SEQ ID NO: 160260 - DNA, 55 bp, Artificial
  Synthetic oligonucleotide
agcttatattctctatgtatatcgttctttggaccaaggattaagacatagcccc

SEQ ID NO: 160261 - DNA, 55 bp, Artificial
  Synthetic oligonucleotide
agctctaccaccgagttagggtccgccttgccgttaaatgtcggagtgctgtcgt

SEQ ID NO: 160262 - DNA, 55 bp, Artificial
  Synthetic oligonucleotide
tccttgccagtgttcagcatctgcaataccattagaagttaatccccatcctaaa

SEQ ID NO: 160263 - DNA, 55 bp, Artificial
  Synthetic oligonucleotide
tcgataagctttgtgaaagtgcgaataaggacaagacttcgggctattcgacctc

SEQ ID NO: 160264 - DNA, 60 bp, Artificial
  Synthetic oligonucleotide
tcgcaatcttgttacctattgcaatctagttcttatactgattatcaaggttttgagtat

SEQ ID NO: 160265 - DNA, 55 bp, Artificial
  Synthetic oligonucleotide
tctaatagatcttttgcgtttgagctggtaagcagtaaaacacttaatagtgtgg

SEQ ID NO: 160266 - DNA, 55 bp, Artificial
  Synthetic oligonucleotide
agccgatcacggcggttatccgctacgccacagactctaccgagcggccaagcta

SEQ ID NO: 160267 - DNA, 55 bp, Artificial
  Synthetic oligonucleotide
tctgcgcactacgcaaagcgttgagagtaagatttatacttcatctatccgtaag

SEQ ID NO: 160268 - DNA, 55 bp, Artificial
  Synthetic oligonucleotide
tgaaatctgtaagccgcatcaagcgcaagatctattgcggaatattctatatggg

SEQ ID NO: 160269 - DNA, 55 bp, Artificial
  Synthetic oligonucleotide
agatttgacatctatattgcccgccaagcccatttcgtaaaatgtaaccatgatg

SEQ ID NO: 160270 - DNA, 55 bp, Artificial
  Synthetic oligonucleotide
tgaagttgcgaccttatatagcgtgcaagtaagtcgctttctatatggatgcgcc

SEQ ID NO: 160271 - DNA, 55 bp, Artificial
  Synthetic oligonucleotide
agattcactatgccataagggataagcatctggcataagagctaaattccaacct

SEQ ID NO: 160272 - DNA, 55 bp, Artificial
  Synthetic oligonucleotide
agagcttgttccatcgccacttccattaagtcctacaacaagtccataacctatg

SEQ ID NO: 160273 - DNA, 55 bp, Artificial
  Synthetic oligonucleotide
actttagtaggctaggatttgcgatatctagcgtttcgtcaaaatttaacctagc

SEQ ID NO: 160274 - DNA, 55 bp, Artificial
  Synthetic oligonucleotide
acttgatctgccgcctccacaaggctatttcgattgatttgaggcactgccaccg

SEQ ID NO: 160275 - DNA, 58 bp, Artificial
  Synthetic oligonucleotide
tcgcaatatgtgatccaagtccgcctaaaccacacaccgccacgcgcccatttttaag

SEQ ID NO: 160276 - DNA, 55 bp, Artificial
  Synthetic oligonucleotide
acttcgcctgcggctcgtaactgcaagcagacctacttacgctctgtttacagct

SEQ ID NO: 160277 - DNA, 55 bp, Artificial
  Synthetic oligonucleotide
actgcttatatatccaacagcttcagctcttcctgtaatgcctatccagccaaaa

SEQ ID NO: 160278 - DNA, 54 bp, Artificial
  Synthetic oligonucleotide
actcagaacaactaggataatacctacaagcagcgggttttaaagggcttaaga

SEQ ID NO: 160279 - DNA, 55 bp, Artificial
  Synthetic oligonucleotide
actactgatcctgtaggaattatccctctaagattggaagatagaacagctggtg

SEQ ID NO: 160280 - DNA, 55 bp, Artificial
  Synthetic oligonucleotide
acggagtgcaagccacgaaagcgaagcgtaagcgtagcgaagtggctaagctatg

SEQ ID NO: 160281 - DNA, 55 bp, Artificial
  Synthetic oligonucleotide
tggcaaacccttaactatatgaaccgcacgatataaagatgtctaagcggttcta

SEQ ID NO: 160282 - DNA, 55 bp, Artificial
  Synthetic oligonucleotide
tggctaatgataccagcacaatggttaaaatcagctactgcaggacttatagggg

SEQ ID NO: 160283 - DNA, 55 bp, Artificial
  Synthetic oligonucleotide
accgccctttggcaagcctccctaaaagtgccctatacgcccattgtgcatgtca

SEQ ID NO: 160284 - DNA, 55 bp, Artificial
  Synthetic oligonucleotide
tggtttgttggcgggtgtatgaatacttgttataatgcgcttgatttacatgtac

SEQ ID NO: 160285 - DNA, 54 bp, Artificial
  Synthetic oligonucleotide
cgattaattctacagtgggtttaagtgctattttggagggctgtcctactaagg

SEQ ID NO: 160286 - DNA, 60 bp, Artificial
  Synthetic oligonucleotide
gatgaaattacacgagataatcaagagcgaacgaatagcatacgagaacgctttggaagc

SEQ ID NO: 160287 - DNA, 55 bp, Artificial
  Synthetic oligonucleotide
cccttcttgctgcacattgggtttacatagccgactttgttaccaaaatcgctgg

SEQ ID NO: 160288 - DNA, 55 bp, Artificial
  Synthetic oligonucleotide
cgattttagcggtagtggttgcgagtgcaactttgcaagcaagcggtggtttgga

SEQ ID NO: 160289 - DNA, 55 bp, Artificial
  Synthetic oligonucleotide
cctaaaacagcttggtggagatgaaagctatttaactaatgctggactaagagag

SEQ ID NO: 160290 - DNA, 55 bp, Artificial
  Synthetic oligonucleotide
cgcaaagcaaatgagcttgtagctagaacgcttgattatctagagggcattatag

SEQ ID NO: 160291 - DNA, 55 bp, Artificial
  Synthetic oligonucleotide
ccctgtattatttactactcctcttagaagttcatctactgcatgggtagttaga

SEQ ID NO: 160292 - DNA, 55 bp, Artificial
  Synthetic oligonucleotide
taaagagggtaagctcataagttggaggcggtgcatttatatggagtgtgccgag

SEQ ID NO: 160293 - DNA, 55 bp, Artificial
  Synthetic oligonucleotide
ccctcgtgcgcccactttccatcgtaccataccagttcgtgtgcggatacgctta

SEQ ID NO: 160294 - DNA, 55 bp, Artificial
  Synthetic oligonucleotide
cctaataatcggcctaatcgcgactataccgctacttatcatgacgcttgcagcg

SEQ ID NO: 160295 - DNA, 55 bp, Artificial
  Synthetic oligonucleotide
cgcagcccgcatttaaaaggcgtgagatatcatctatcgtgcgtatgcctccacc

SEQ ID NO: 160296 - DNA, 55 bp, Artificial
  Synthetic oligonucleotide
cgcagtgcctatgtatcggtatgtagcttgagtgtcgttgctataaggatcgctt

SEQ ID NO: 160297 - DNA, 59 bp, Artificial
  Synthetic oligonucleotide
ccttagcattttcaagtcctgcttttgttctttggctgatcagatctctttcattttcc

SEQ ID NO: 160298 - DNA, 55 bp, Artificial
  Synthetic oligonucleotide
ccctataatcgcaaggtgactttcacaaaaccctttactccgcatataagcctat

SEQ ID NO: 160299 - DNA, 55 bp, Artificial
  Synthetic oligonucleotide
cgccccttaatcttcttaggcgatggcgttatggggctttatcatatcaaagccc

SEQ ID NO: 160300 - DNA, 55 bp, Artificial
  Synthetic oligonucleotide
cccgtcgttgctcacctaggactaaccccacaagctgtaaatatgctaggtggct

SEQ ID NO: 160301 - DNA, 55 bp, Artificial
  Synthetic oligonucleotide
cccgtcgctaaaatagtctttaagcggaaagattttctcgcgcttagcggtctgc

SEQ ID NO: 160302 - DNA, 55 bp, Artificial
  Synthetic oligonucleotide
cccgtatcctgccatctggggtattatatttgcaagatgacaatacaaactctca

SEQ ID NO: 160303 - DNA, 55 bp, Artificial
  Synthetic oligonucleotide
cgcgaacagcgtttgagtagtgcaacgaagcgtcttgaaaagggaagatacgagc

SEQ ID NO: 160304 - DNA, 55 bp, Artificial
  Synthetic oligonucleotide
cgacgctctcaaacgctcgcacgacgcgccatcagctaagctcttgctacgtggg

SEQ ID NO: 160305 - DNA, 55 bp, Artificial
  Synthetic oligonucleotide
cgacgaatttggcgaagtaagcttgataaaaggcacgttaagagaccttagccta

SEQ ID NO: 160306 - DNA, 55 bp, Artificial
  Synthetic oligonucleotide
cgactcgctgcatatagcgtgtgacttccaaaatctccggagcactcaaatttcc

SEQ ID NO: 160307 - DNA, 55 bp, Artificial
  Synthetic oligonucleotide
cgagacaacaaggtatcttgtgggcttaacatgccagatggttgttctggtggat

SEQ ID NO: 160308 - DNA, 60 bp, Artificial
  Synthetic oligonucleotide
agcgtaaatatcaacttgtgctgcatttaaagctatgctagttcctagcaatagggaaaa

SEQ ID NO: 160309 - DNA, 55 bp, Artificial
  Synthetic oligonucleotide
ccgtcaaataactacgcagattatatcttacctgatgcaactatgctggagcaag

SEQ ID NO: 160310 - DNA, 55 bp, Artificial
  Synthetic oligonucleotide
cgagataatcaagagcgaacgaatagcatacgagaacgctttggaagctatgaga

SEQ ID NO: 160311 - DNA, 55 bp, Artificial
  Synthetic oligonucleotide
cgataatcagcgctatcataaccatcgcttggtaaatcctaaacgcccattgtga

SEQ ID NO: 160312 - DNA, 55 bp, Artificial
  Synthetic oligonucleotide
cgatatatgcgtggagtgtgacgatactctcgttaccttttatgttgctaactgc

SEQ ID NO: 160313 - DNA, 55 bp, Artificial
  Synthetic oligonucleotide
taagtggctatacaaaacctagtgaaggggattactttgtagcgggacattcaag

SEQ ID NO: 160314 - DNA, 55 bp, Artificial
  Synthetic oligonucleotide
ccgcgcctagccagagcgtcgtttacggcaaagtcgcagccgtctacgtagcgat

SEQ ID NO: 160315 - DNA, 51 bp, Artificial
  Synthetic oligonucleotide
cgaatacgtagacgaaacctttactatcgtaaactttaaaggtagatggga

SEQ ID NO: 160316 - DNA, 55 bp, Artificial
  Synthetic oligonucleotide
ccgcccagctttgcgttactggcataagttcgattttattgacattgatgtgagg

SEQ ID NO: 160317 - DNA, 55 bp, Artificial
  Synthetic oligonucleotide
taaatatcggcggatggcttaccttggtcattaatgctatggatggaatttatga

SEQ ID NO: 160318 - DNA, 55 bp, Artificial
  Synthetic oligonucleotide
cgatgagtgcactggtgcatgatgcgtataaaatggcatacattgacaccctcac

SEQ ID NO: 160319 - DNA, 53 bp, Artificial
  Synthetic oligonucleotide
tcgaactttgttgcaatctattacgaaagatttggggtaaactacgaaagatt

SEQ ID NO: 160320 - DNA, 55 bp, Artificial
  Synthetic oligonucleotide
cgatgctccaccgtaacccgcgcggcatcgagtactactggctcggacaaccgtc

SEQ ID NO: 160321 - DNA, 55 bp, Artificial
  Synthetic oligonucleotide
ccgtctcatccagccactcacggtacaataagaaatttcgttgcattagacggag

SEQ ID NO: 160322 - DNA, 55 bp, Artificial
  Synthetic oligonucleotide
cgatgttatcaatgatagctcatcaatggagacaaccattaagtgaagtagctgg

SEQ ID NO: 160323 - DNA, 55 bp, Artificial
  Synthetic oligonucleotide
ccgaaatcgctgaaatcttaggaatggagcgcggcaaagataagagaataagcgg

SEQ ID NO: 160324 - DNA, 55 bp, Artificial
  Synthetic oligonucleotide
cccattcattttgccctataagatgtccatatccgatagttgcacctttaacata

SEQ ID NO: 160325 - DNA, 55 bp, Artificial
  Synthetic oligonucleotide
ccttagtaatataatcccacaagcatttaaacacggtgcgtggcatatcctcgtg

SEQ ID NO: 160326 - DNA, 53 bp, Artificial
  Synthetic oligonucleotide
cccagtcttcttgcgttaccctttctaaatgcggattttctttataagcgtcc

SEQ ID NO: 160327 - DNA, 55 bp, Artificial
  Synthetic oligonucleotide
ccatctgcaaacgaaggctttagctctccatttccttgtaaaacgatgtcttgtg

SEQ ID NO: 160328 - DNA, 55 bp, Artificial
  Synthetic oligonucleotide
ccatagtttagcttcgcaaagtcgaattttctatctgcgttgtagccaaatccag

SEQ ID NO: 160329 - DNA, 55 bp, Artificial
  Synthetic oligonucleotide
cctgcgctaggtcttataaaatcttcttgctccagcatagttgcatcaggtaaga

SEQ ID NO: 160330 - DNA, 60 bp, Artificial
  Synthetic oligonucleotide
tccttttgtgccgatttgtcctaacatcgcacaaagagtaactaacatccagtgaggctg

SEQ ID NO: 160331 - DNA, 55 bp, Artificial
  Synthetic oligonucleotide
ccagtccgaaaacctcaactaaacgtgcagaatcagctcttttgatgtgctctct

SEQ ID NO: 160332 - DNA, 55 bp, Artificial
  Synthetic oligonucleotide
ccagtaagtacgcttcctccatagagatgcagtctagaccagaccgtgagcgaac

SEQ ID NO: 160333 - DNA, 55 bp, Artificial
  Synthetic oligonucleotide
gttgcggggcgttcacacacgcttccaaatcggctccaaaactgctaatcgcacc

SEQ ID NO: 160334 - DNA, 55 bp, Artificial
  Synthetic oligonucleotide
gttccgcaaaagcgaatttgaccgtctcgcatcgttacttaaatttggtccgagc

SEQ ID NO: 160335 - DNA, 55 bp, Artificial
  Synthetic oligonucleotide
cctcgtaatctctgtcctagaatgccccatctctaagcttatctgtgctagtgtc

SEQ ID NO: 160336 - DNA, 55 bp, Artificial
  Synthetic oligonucleotide
tacgcatagaggtaggatacggcctagaaggtactctaacggacgctcttagcag

SEQ ID NO: 160337 - DNA, 54 bp, Artificial
  Synthetic oligonucleotide
ccaccgtttgtgtaacagtttatacccataacttagcccatggtgttttctcag

SEQ ID NO: 160338 - DNA, 55 bp, Artificial
  Synthetic oligonucleotide
cctatctcgtttagctgcatttgcagcgcctctatgctacttatttgtcgctccg

SEQ ID NO: 160339 - DNA, 55 bp, Artificial
  Synthetic oligonucleotide
cggctcatactgctagtatagaaatctttgactcattaggaactagacatgaact

SEQ ID NO: 160340 - DNA, 55 bp, Artificial
  Synthetic oligonucleotide
ccacatcccgataaaagatatgctaagcatcctggaggcgctaagcgacatcgcc

SEQ ID NO: 160341 - DNA, 58 bp, Artificial
  Synthetic oligonucleotide
atgagttttttagtgggaatgcttacgatgatgattttaagcgtagttgtatggtatc

SEQ ID NO: 160342 - DNA, 55 bp, Artificial
  Synthetic oligonucleotide
ccacaagagagctagcacctctaatagcggctattgtgatagcgggacgcagtgc

SEQ ID NO: 160343 - DNA, 55 bp, Artificial
  Synthetic oligonucleotide
gttgttatagcaccttggctgatacacagacatgaaggcttttggactaatccgc

SEQ ID NO: 160344 - DNA, 55 bp, Artificial
  Synthetic oligonucleotide
cccgatctaaactacaaaaccgtcgttgctagccctatttgcaactccgctttgc

SEQ ID NO: 160345 - DNA, 55 bp, Artificial
  Synthetic oligonucleotide
cccctttagcgattctctcataagcctcaccgcttaaaacagcgtgagtgcaaca

SEQ ID NO: 160346 - DNA, 55 bp, Artificial
  Synthetic oligonucleotide
cgcggtttgcattgcctatagagtgttgcaattcaatccctctagcttgtgctaa

SEQ ID NO: 160347 - DNA, 55 bp, Artificial
  Synthetic oligonucleotide
cgctacttaggtggtgcaaatgcgagcattttacccgtgccaatgtgtaatatca

SEQ ID NO: 160348 - DNA, 55 bp, Artificial
  Synthetic oligonucleotide
cccgcaagataacgccttgctctcaagcctacttgagtgtgtgaagtattgcgtt

SEQ ID NO: 160349 - DNA, 55 bp, Artificial
  Synthetic oligonucleotide
ccttgcaagatagcattttgtgggatcacattaaaggttgtccctgcatgaaatt

SEQ ID NO: 160350 - DNA, 55 bp, Artificial
  Synthetic oligonucleotide
ccccgtattttcatcctttagtaggtgagctaagagagcttagggcaaagcttgg

SEQ ID NO: 160351 - DNA, 55 bp, Artificial
  Synthetic oligonucleotide
ccccaagctgggctgaagcttgcaaggtcttatatttgccttctataggctctac

SEQ ID NO: 160352 - DNA, 52 bp, Artificial
  Synthetic oligonucleotide
agcttaaaaagaattcttgggttttacaatcttaaattcacttttgaggcat

SEQ ID NO: 160353 - DNA, 60 bp, Artificial
  Synthetic oligonucleotide
gccaaatcgtgtgaaaatagtttggagaccacatcctgatgtaagagtgaattcatatat

SEQ ID NO: 160354 - DNA, 55 bp, Artificial
  Synthetic oligonucleotide
cccattctcctgttagcatcttgttctactatggcatctttagcactattattga

SEQ ID NO: 160355 - DNA, 55 bp, Artificial
  Synthetic oligonucleotide
cgctttaagcgaaataccaggaccagaagaggctgtcatcgctttggtaccactc

SEQ ID NO: 160356 - DNA, 55 bp, Artificial
  Synthetic oligonucleotide
gttgtagggactttgcttgttatgcttgtctgtatggttgtgagtgttcctatag

SEQ ID NO: 160357 - DNA, 55 bp, Artificial
  Synthetic oligonucleotide
taagcaccgccccgataatcacactcgcatcatcaaacaaagaagccaaaatgct

SEQ ID NO: 160358 - DNA, 55 bp, Artificial
  Synthetic oligonucleotide
cggatgcattcgttcttcgccgaatttatgatccacttttgtcgccatagccgga

SEQ ID NO: 160359 - DNA, 55 bp, Artificial
  Synthetic oligonucleotide
cggcaagcgatacaatatcttgcgtgaggtttgacttttagtctttgagagtcga

SEQ ID NO: 160360 - DNA, 55 bp, Artificial
  Synthetic oligonucleotide
cccgcatctcgtcgctaaagcccgtgcctactttaaatttcactccgctacgtag

SEQ ID NO: 160361 - DNA, 54 bp, Artificial
  Synthetic oligonucleotide
cctagcaggctagatggagccgttccctgctcgcaccacgcttcaagcgcgctt

SEQ ID NO: 160362 - DNA, 54 bp, Artificial
  Synthetic oligonucleotide
tcgagatcagagccaacgagatattaaaagtagtctcgctgaagttagaaaatt

SEQ ID NO: 160363 - DNA, 54 bp, Artificial
  Synthetic oligonucleotide
agcccacttgctttgagtgtcgtgattatctaccacatttgttaaataagatcc

SEQ ID NO: 160364 - DNA, 60 bp, Artificial
  Synthetic oligonucleotide
tatcataataggtagttcaaaggtataagtgctgatatttagagtatagcttcctaattc

SEQ ID NO: 160365 - DNA, 54 bp, Artificial
  Synthetic oligonucleotide
cctttgcagcttgcggggctagcggagttgcgggtggatccttactgcttatac

SEQ ID NO: 160366 - DNA, 54 bp, Artificial
  Synthetic oligonucleotide
agcaaatcgcaccgcaaggtgctatgatttgcgataatcggggtaagggggcgt

SEQ ID NO: 160367 - DNA, 54 bp, Artificial
  Synthetic oligonucleotide
aaaatgcgtaagggtcgtttgagttcgtaaatttgcccgtctttgcacacctca

SEQ ID NO: 160368 - DNA, 50 bp, Artificial
  Synthetic oligonucleotide
ggggcggggtggtaaggttgtcggtattgaatttacatttaagcccgaaa

SEQ ID NO: 160369 - DNA, 54 bp, Artificial
  Synthetic oligonucleotide
aaatagcactttgcgtagcttatggagcgcttttaagaacagaaagtcgcgggg

SEQ ID NO: 160370 - DNA, 54 bp, Artificial
  Synthetic oligonucleotide
tttcgtgggctgattcttttagagttggtgctttaatgaatacaagaggcttaa

SEQ ID NO: 160371 - DNA, 54 bp, Artificial
  Synthetic oligonucleotide
aagattatcttcttataataatgatattgtcaagcactatgataatcttaagtg

SEQ ID NO: 160372 - DNA, 54 bp, Artificial
  Synthetic oligonucleotide
ggctgctacgtgtgccttaaacggcttaacgcatgtgggggttgcaggggttac

SEQ ID NO: 160373 - DNA, 54 bp, Artificial
  Synthetic oligonucleotide
ttcctacgtcgctctctacagttgtctctagtacgagtaatttaatacttattc

SEQ ID NO: 160374 - DNA, 54 bp, Artificial
  Synthetic oligonucleotide
cgtaagcgctctaaacgctgccgtaagtgcacttgagataaataacgaaccgtt

SEQ ID NO: 160375 - DNA, 59 bp, Artificial
  Synthetic oligonucleotide
gcaaaggtcgggtgtggccttcaggtgggtgcagagagtgaaactcctgctcgtaagga

SEQ ID NO: 160376 - DNA, 54 bp, Artificial
  Synthetic oligonucleotide
cgtgcaagtaatccatttgcttgtgcacctgttaatgcaggttctagtgagata

SEQ ID NO: 160377 - DNA, 54 bp, Artificial
  Synthetic oligonucleotide
ggtgcgagtgcggagcaaatcgaagctgcattgctagccaatatgggtaatgtt

SEQ ID NO: 160378 - DNA, 54 bp, Artificial
  Synthetic oligonucleotide
tgttaagtggcggacgcttgagtttaaatatatgctcatcggtgctaacaactt

SEQ ID NO: 160379 - DNA, 54 bp, Artificial
  Synthetic oligonucleotide
cgcaaaatgctacgcaagattagcgcttaactcaaataccgcaaaagaacttcg

SEQ ID NO: 160380 - DNA, 54 bp, Artificial
  Synthetic oligonucleotide
acgaaatcgccgaattttccgtcgtcttcgttaccgacaggagcttcaaggcta

SEQ ID NO: 160381 - DNA, 54 bp, Artificial
  Synthetic oligonucleotide
acgacaaaatctgccgcacttcctatagcgtgttggcttttaggggctccacca

SEQ ID NO: 160382 - DNA, 54 bp, Artificial
  Synthetic oligonucleotide
tgcggacgcccacaaatttggcatcttgtatagcctctaactttaaatttaggc

SEQ ID NO: 160383 - DNA, 54 bp, Artificial
  Synthetic oligonucleotide
gctcgtcctttctgcattcttggcagcgtgtaactcatgcggcagctccgaaaa

SEQ ID NO: 160384 - DNA, 54 bp, Artificial
  Synthetic oligonucleotide
tgccactggtatgaatgaggttaaaggaggcctagaatttaaaggaccttggaa

SEQ ID NO: 160385 - DNA, 54 bp, Artificial
  Synthetic oligonucleotide
ccataatgagccatcgtggtttagcgcttatgggcgtaggcagtgctagcggtg

SEQ ID NO: 160386 - DNA, 52 bp, Artificial
  Synthetic oligonucleotide
cttaactccgctagtatggaatttaaagcggagacaaactaaaagggacgaa

SEQ ID NO: 160387 - DNA, 54 bp, Artificial
  Synthetic oligonucleotide
tattctgcgacgccgcctgcgtataggttcatcggcacctgtgcgaactgaagg

SEQ ID NO: 160388 - DNA, 54 bp, Artificial
  Synthetic oligonucleotide
ccgattaatgcttggaactcttatcctacacctgtgcaaagtataggcgatgag

SEQ ID NO: 160389 - DNA, 54 bp, Artificial
  Synthetic oligonucleotide
atgagctctgaaaaagtcgcaaatgaatatagagcttggtacgaaggtgaaaac

SEQ ID NO: 160390 - DNA, 50 bp, Artificial
  Synthetic oligonucleotide
ccgacctaggtggttggtaaaatttaagtagcctacaataaattttgtag

SEQ ID NO: 160391 - DNA, 54 bp, Artificial
  Synthetic oligonucleotide
tatcaatcaaggctaactatgaaacgacatagtaagcgttttgtgagattatac

SEQ ID NO: 160392 - DNA, 54 bp, Artificial
  Synthetic oligonucleotide
tatattgtgcgggcttcctaccaactcttgttcactatatccgcaaactcttat

SEQ ID NO: 160393 - DNA, 54 bp, Artificial
  Synthetic oligonucleotide
caggcaatgcaacgctaaatcgcgctatagaagcagtaaggcttggagtaaaag

SEQ ID NO: 160394 - DNA, 54 bp, Artificial
  Synthetic oligonucleotide
gatatgtcttagaggaactaagctcaggaatgctcttaaaagccggtaccatca

SEQ ID NO: 160395 - DNA, 54 bp, Artificial
  Synthetic oligonucleotide
cccctagagataggggtaatttgaccaaaaggacatactatgaagcaacatagt

SEQ ID NO: 160396 - DNA, 54 bp, Artificial
  Synthetic oligonucleotide
tagcacgtgatgcttccaatacccccactgcggggtttagtatccccgatgcga

SEQ ID NO: 160397 - DNA, 60 bp, Artificial
  Synthetic oligonucleotide
tatcaacgatgaatgtaatttcatcagcccagacgatccaaaaaatcagtataaccagaa

SEQ ID NO: 160398 - DNA, 54 bp, Artificial
  Synthetic oligonucleotide
caatagagtgctgtcgttctgcctttgagttgctacctaaagctatagccatgt

SEQ ID NO: 160399 - DNA, 54 bp, Artificial
  Synthetic oligonucleotide
cttacaatctttgttgttactaccttcacacaaacactgcttgtaatcaccgcc

SEQ ID NO: 160400 - DNA, 54 bp, Artificial
  Synthetic oligonucleotide
cccgcgtgtagatcgatagtagccacacgatcaatccctgctgcttcgattaaa

SEQ ID NO: 160401 - DNA, 54 bp, Artificial
  Synthetic oligonucleotide
cttctatatagtttgagccactagttagagttatggtgtcatctcctgctaggg

SEQ ID NO: 160402 - DNA, 54 bp, Artificial
  Synthetic oligonucleotide
cttcaggagaaatagatccatcactcataggaccacgtcctagaatagaatttg

SEQ ID NO: 160403 - DNA, 54 bp, Artificial
  Synthetic oligonucleotide
caactcaaaaagagccaatacgacttaacgagagagaatacgctttacttgcag

SEQ ID NO: 160404 - DNA, 54 bp, Artificial
  Synthetic oligonucleotide
ccaatcggtcttgctctaagacttgaagttcagggtacatcgattcgtagtaat

SEQ ID NO: 160405 - DNA, 54 bp, Artificial
  Synthetic oligonucleotide
gagaaatataaaagcgtatatgctatacattattatagctttaactacgattgt

SEQ ID NO: 160406 - DNA, 54 bp, Artificial
  Synthetic oligonucleotide
ccaccaaccaaacgagctctttagttttaggctacaaggtagataaagatggct

SEQ ID NO: 160407 - DNA, 54 bp, Artificial
  Synthetic oligonucleotide
aggcaagatataaggcactagttccgcttgaacagcctatagcatgcttaatgc

SEQ ID NO: 160408 - DNA, 59 bp, Artificial
  Synthetic oligonucleotide
atgggcgcgtggcggtgtgtggtttaggcggacttggatcgcacattgcgataaattta

SEQ ID NO: 160409 - DNA, 54 bp, Artificial
  Synthetic oligonucleotide
taaccccaggaacggcacatccccctaccatcgctccgcctaaaaccagaggaa

SEQ ID NO: 160410 - DNA, 54 bp, Artificial
  Synthetic oligonucleotide
gacgtaggacttggatacgtaactttaggtcagccggcaaccactctaagcggc

SEQ ID NO: 160411 - DNA, 54 bp, Artificial
  Synthetic oligonucleotide
agtggggttacgaccagtaccagtaatggttagtcctagatgactttcaactgc

SEQ ID NO: 160412 - DNA, 52 bp, Artificial
  Synthetic oligonucleotide
gagtaaaaatttgattaatacccactttagaatgggtaaattataacaccaa

SEQ ID NO: 160413 - DNA, 54 bp, Artificial
  Synthetic oligonucleotide
agttctaaaagctggataatttgactgagttttgaatctttgtaaagctttgtt

SEQ ID NO: 160414 - DNA, 53 bp, Artificial
  Synthetic oligonucleotide
ttacagcagacattggagtttgagttgctggtctaataataactggacaacct

SEQ ID NO: 160415 - DNA, 53 bp, Artificial
  Synthetic oligonucleotide
catatccaattacctggatttaaggcccaaactgttaatgcggctccatttgg

SEQ ID NO: 160416 - DNA, 53 bp, Artificial
  Synthetic oligonucleotide
aaagtctttaatgaagagatacttactctcccttttgatatgatacttatgca

SEQ ID NO: 160417 - DNA, 47 bp, Artificial
  Synthetic oligonucleotide
cgtttacccgacctaagtacgacctaacgtacggccgtaaaacttta

SEQ ID NO: 160418 - DNA, 53 bp, Artificial
  Synthetic oligonucleotide
tacttgtgttatagtgtgggctaccaaacaaccaagtaaggagacccacatgc

SEQ ID NO: 160419 - DNA, 55 bp, Artificial
  Synthetic oligonucleotide
atgggggatatacctttatggcttctttacgatttagcgatagtttgctacgaac

SEQ ID NO: 160420 - DNA, 53 bp, Artificial
  Synthetic oligonucleotide
caggcgagaaagacttatttaatcgtcctactattttatctactcacaaagat

SEQ ID NO: 160421 - DNA, 53 bp, Artificial
  Synthetic oligonucleotide
catgtgtcaatccttgtatgggttgtgacaagagaaatcttgacattaagggg

SEQ ID NO: 160422 - DNA, 53 bp, Artificial
  Synthetic oligonucleotide
gaaactcgactaaaagaaataggcaaatggtgtgaaaaaaatttaagcgtgga

SEQ ID NO: 160423 - DNA, 53 bp, Artificial
  Synthetic oligonucleotide
tttgataggagaacactttatgcgtcaaaacgatatctgtgctgccgtacgcg

SEQ ID NO: 160424 - DNA, 53 bp, Artificial
  Synthetic oligonucleotide
aatcgctataccttactcctatacagccccacaaagctatgtagatactaatg

SEQ ID NO: 160425 - DNA, 53 bp, Artificial
  Synthetic oligonucleotide
cccctgcgtgtgcgacgataagcaccgtgccatggtaggtttgcgtgagggta

SEQ ID NO: 160426 - DNA, 53 bp, Artificial
  Synthetic oligonucleotide
ggctactcacattcaaaaatagcaagaagaataggtgttcatagagacacttt

SEQ ID NO: 160427 - DNA, 53 bp, Artificial
  Synthetic oligonucleotide
ccactatgttttataaggacatagtaaccttcagaataattgctcacagcaac

SEQ ID NO: 160428 - DNA, 53 bp, Artificial
  Synthetic oligonucleotide
ttagcgtcatccatactaagccctgatatgctaaacggctcacttagggtata

SEQ ID NO: 160429 - DNA, 53 bp, Artificial
  Synthetic oligonucleotide
cggggaaataagcgtcacacccgctgtagaatgtctagccttagctatccaag

SEQ ID NO: 160430 - DNA, 57 bp, Artificial
  Synthetic oligonucleotide
gcataacattaccacgcatattaaaaacccctagaacataatcaggtacactaggaa

SEQ ID NO: 160431 - DNA, 53 bp, Artificial
  Synthetic oligonucleotide
aactggtgcaaagttagctgctaaaggtgcttgggctggcgctaaaggtggtt

SEQ ID NO: 160432 - DNA, 53 bp, Artificial
  Synthetic oligonucleotide
ttgtgcttaaaaacgccatttttctcgcgcgtaaccttatcttgatactatta

SEQ ID NO: 160433 - DNA, 53 bp, Artificial
  Synthetic oligonucleotide
cggagcttatttggtagatcaagacgcggctttaaaattttgcgaattagctg

SEQ ID NO: 160434 - DNA, 53 bp, Artificial
  Synthetic oligonucleotide
ttagtggtgtgagcgtagggattttcttaggcttgtttattggaaaacaacta

SEQ ID NO: 160435 - DNA, 53 bp, Artificial
  Synthetic oligonucleotide
gatagcagatagtttaagatctcaagctaatactttaggtcaagctatatcta

SEQ ID NO: 160436 - DNA, 53 bp, Artificial
  Synthetic oligonucleotide
ttgtacactttttgtacggcactatccctatacattggtccaggaaattgtgc

SEQ ID NO: 160437 - DNA, 53 bp, Artificial
  Synthetic oligonucleotide
caggcatgctggtagcttctgcgatagatcctattgggactggttcaaataca

SEQ ID NO: 160438 - DNA, 53 bp, Artificial
  Synthetic oligonucleotide
cggtttaatgtctgtaactaccgccgacggatatgatccgatgtatcctatag

SEQ ID NO: 160439 - DNA, 53 bp, Artificial
  Synthetic oligonucleotide
tcaatgtgcctgttgctagttctcagattatgctcggatggacgccttatggc

SEQ ID NO: 160440 - DNA, 53 bp, Artificial
  Synthetic oligonucleotide
taaggtaaagcataatagcgacaaatgcactaaatgttacgaatgtatccgtg

SEQ ID NO: 160441 - DNA, 57 bp, Artificial
  Synthetic oligonucleotide
cttactagggcgtataccataatggcacgaaaaaatggatatgagggcattttaagc

SEQ ID NO: 160442 - DNA, 53 bp, Artificial
  Synthetic oligonucleotide
agttcaagagcagcacttagagcagttcctgatagtataagacaagcaggata

SEQ ID NO: 160443 - DNA, 53 bp, Artificial
  Synthetic oligonucleotide
gtagggctaagtggtgctacagagatttgttcaaaggttccaagttccctctc

SEQ ID NO: 160444 - DNA, 53 bp, Artificial
  Synthetic oligonucleotide
agtttcgcacataccatgggtgaatttggcatagtattaatgataggcggttc

SEQ ID NO: 160445 - DNA, 53 bp, Artificial
  Synthetic oligonucleotide
ataaagaaatccgtcaagtactctcaggcatagccaaatactataaagccagt

SEQ ID NO: 160446 - DNA, 53 bp, Artificial
  Synthetic oligonucleotide
tccccgtaatgccacaggcttcacatccgtttgagagggcaggaaggtcgaga

SEQ ID NO: 160447 - DNA, 53 bp, Artificial
  Synthetic oligonucleotide
tgcctgtttcgcttcggtaattacaggcgtaagaagatgcggtatatcattgt

SEQ ID NO: 160448 - DNA, 53 bp, Artificial
  Synthetic oligonucleotide
ataagcggaattgacgaatctaattcaaagcctaatcgtttataagttccaca

SEQ ID NO: 160449 - DNA, 53 bp, Artificial
  Synthetic oligonucleotide
ccgtagtgatgcactgcgtttcttcactacaacaactaagtttaccgccaccc

SEQ ID NO: 160450 - DNA, 53 bp, Artificial
  Synthetic oligonucleotide
ctggcgagctctcgtccattgcgacttttaagtctatgcggtcaagcactggg

SEQ ID NO: 160451 - DNA, 53 bp, Artificial
  Synthetic oligonucleotide
atctttagccgctgcagtaacacctccattgatcactaagcatttattgccac

SEQ ID NO: 160452 - DNA, 59 bp, Artificial
  Synthetic oligonucleotide
attaaagtattgcaaaattctagtattgatgagccttcaattgtaaatcttagagctaa

SEQ ID NO: 160453 - DNA, 53 bp, Artificial
  Synthetic oligonucleotide
tgcgcggataacattttcaaacgttggtcgcgccgattaagatctcttgcatc

SEQ ID NO: 160454 - DNA, 53 bp, Artificial
  Synthetic oligonucleotide
tgcggcttttggcgatatagcaggagtcggcgcaggtagaaactgggctcacg

SEQ ID NO: 160455 - DNA, 53 bp, Artificial
  Synthetic oligonucleotide
caacatctatctttgtagcaacacgattagcgcctgatttactcggggcgatt

SEQ ID NO: 160456 - DNA, 53 bp, Artificial
  Synthetic oligonucleotide
ggagcaagtggaatacaaggatgggtagatcatcattatatgaaacgctttgg

SEQ ID NO: 160457 - DNA, 53 bp, Artificial
  Synthetic oligonucleotide
tagtagcgagagccgatcttttgcgtgcgggcgggatctagccccgacatctt

SEQ ID NO: 160458 - DNA, 53 bp, Artificial
  Synthetic oligonucleotide
cgcagcataaggcacgctaaaggcttgcgtattgatagcaggatcgctaaaac

SEQ ID NO: 160459 - DNA, 53 bp, Artificial
  Synthetic oligonucleotide
ccctctttggtctcattgcttgagcgaggtttatcttgaccataaccaactgt

SEQ ID NO: 160460 - DNA, 53 bp, Artificial
  Synthetic oligonucleotide
ctaagcaagtgcaaccgaaaggccaaattgtcatcgataatccaaagtcttat

SEQ ID NO: 160461 - DNA, 53 bp, Artificial
  Synthetic oligonucleotide
cgcaaagactccaataaaaccttaaccaaccgcgtaaacgagtatgcaagtag

SEQ ID NO: 160462 - DNA, 53 bp, Artificial
  Synthetic oligonucleotide
tgtatgtagtaatacaaaccgaagatatggatatattagctcctttggtgcgt

SEQ ID NO: 160463 - DNA, 55 bp, Artificial
  Synthetic oligonucleotide
ctccaatcctgcttccaaaaattatcataaggttaaaacttacagcacaaactct

SEQ ID NO: 160464 - DNA, 60 bp, Artificial
  Synthetic oligonucleotide
gcagttggctcaacgcacgctcacccttatgcttgcattagtgctggtataggcgcactt

SEQ ID NO: 160465 - DNA, 53 bp, Artificial
  Synthetic oligonucleotide
cttaattcgatggttactgacaccataattggaatattaggtgccacatcatt

SEQ ID NO: 160466 - DNA, 53 bp, Artificial
  Synthetic oligonucleotide
tggtagtggagattttgttggagaggtcttcactcccacaatcgctaaagtta

SEQ ID NO: 160467 - DNA, 53 bp, Artificial
  Synthetic oligonucleotide
aggcaagactaagacagaatcacctggcatcatatcaacacttccactatatc

SEQ ID NO: 160468 - DNA, 50 bp, Artificial
  Synthetic oligonucleotide
cctataaagtagatttttatcccctaagtagatttttatcccctataaag

SEQ ID NO: 160469 - DNA, 53 bp, Artificial
  Synthetic oligonucleotide
tataaccgatgggcgttttagctggaccgactcgcggcctaagcatagggcac

SEQ ID NO: 160470 - DNA, 53 bp, Artificial
  Synthetic oligonucleotide
ggtgtgaggaagtgtatgtggtacgattcaccttggagatgcccgttcatctg

SEQ ID NO: 160471 - DNA, 53 bp, Artificial
  Synthetic oligonucleotide
tgcgtacctttgacgtcgcagcgtctcacggactaaaagcgatgaatatctac

SEQ ID NO: 160472 - DNA, 52 bp, Artificial
  Synthetic oligonucleotide
ttttttatccctgccaagattccattttggctctaactctaaatattcagcc

SEQ ID NO: 160473 - DNA, 52 bp, Artificial
  Synthetic oligonucleotide
ggttttgcttgaaggtataagtgcaactccgtgagaactcactcctgctctt

SEQ ID NO: 160474 - DNA, 52 bp, Artificial
  Synthetic oligonucleotide
gtacgggaactctaacgctttgtccgtgaagtttgccatttaaactcggcat

SEQ ID NO: 160475 - DNA, 60 bp, Artificial
  Synthetic oligonucleotide
attcaggtgctaccgatgaattaggtgcaagtggcgttcaaggttgggtagatcatcatt

SEQ ID NO: 160476 - DNA, 52 bp, Artificial
  Synthetic oligonucleotide
tcacaagaaccttttacaccttctggattatcagttccaaggtgttttgctc

SEQ ID NO: 160477 - DNA, 52 bp, Artificial
  Synthetic oligonucleotide
gttcatgcaagatcaaagctacacctatagcaaaagtcggggctccccctgt

SEQ ID NO: 160478 - DNA, 52 bp, Artificial
  Synthetic oligonucleotide
tttacgggctaaatttgagcgtagagtatatcgagcaagtagctagaaagtg

SEQ ID NO: 160479 - DNA, 52 bp, Artificial
  Synthetic oligonucleotide
tattttcgagcccgttatatctaggcctctttcgagatagtccgcaaagtga

SEQ ID NO: 160480 - DNA, 52 bp, Artificial
  Synthetic oligonucleotide
ttgcattagagtcgaattcttacctaggaagtggaacagccttagcccacca

SEQ ID NO: 160481 - DNA, 52 bp, Artificial
  Synthetic oligonucleotide
taagtaaatacatagccgaatttcctacatcttctatactaacattgcgttt

SEQ ID NO: 160482 - DNA, 52 bp, Artificial
  Synthetic oligonucleotide
ttcacagtatgatgtgagcgttcttgatcgcatgcttgatcttagtagtgag

SEQ ID NO: 160483 - DNA, 52 bp, Artificial
  Synthetic oligonucleotide
tataaccgatgggcgttttagcggagcgactcgcggcctaagcatagggcac

SEQ ID NO: 160484 - DNA, 52 bp, Artificial
  Synthetic oligonucleotide
gtcatagcatggcgggtaatttcgcttgtttgattacccttgccatgcgctg

SEQ ID NO: 160485 - DNA, 52 bp, Artificial
  Synthetic oligonucleotide
ttacttgcattttagtgtttgcatcgattctgcggttatacttagagtctaa

SEQ ID NO: 160486 - DNA, 60 bp, Artificial
  Synthetic oligonucleotide
attctcacattgtgagtaacacaggtatgcctttagaggctttgattaccgctactgctt

SEQ ID NO: 160487 - DNA, 52 bp, Artificial
  Synthetic oligonucleotide
gcgctctatatgctctaaatttacacaaagactcatatctatacggcaccag

SEQ ID NO: 160488 - DNA, 52 bp, Artificial
  Synthetic oligonucleotide
gcctttgccgtcgctatcacggataatgtcaagtgttcctgcattgtatgta

SEQ ID NO: 160489 - DNA, 52 bp, Artificial
  Synthetic oligonucleotide
acacaatagactgcctatctatacgggtaaagattctcactccataatcccc

SEQ ID NO: 160490 - DNA, 52 bp, Artificial
  Synthetic oligonucleotide
gcacccctatcataggagcgtttctctcaaagtcgctagacatgaaagcata

SEQ ID NO: 160491 - DNA, 52 bp, Artificial
  Synthetic oligonucleotide
gcacactaaaagtagtgcttattatctcgcccataggggatactttatcccc

SEQ ID NO: 160492 - DNA, 52 bp, Artificial
  Synthetic oligonucleotide
gattgtacatatcatgactcttgttatttagtaagacacaatgatatagatg

SEQ ID NO: 160493 - DNA, 52 bp, Artificial
  Synthetic oligonucleotide
gatgcgttagagggtgcgtatcgttttatagtgcgtctttatgatagggctt

SEQ ID NO: 160494 - DNA, 52 bp, Artificial
  Synthetic oligonucleotide
acatgccttgggcggcttattatgagatatcagccccgagcaagagtagcga

SEQ ID NO: 160495 - DNA, 52 bp, Artificial
  Synthetic oligonucleotide
agatggctcgaagtgtagttgaacttcatgggggagatattccgcatgatac

SEQ ID NO: 160496 - DNA, 52 bp, Artificial
  Synthetic oligonucleotide
cttcgataattgatggggcgtgttttccgcaggtagattttataagaacaag

SEQ ID NO: 160497 - DNA, 57 bp, Artificial
  Synthetic oligonucleotide
attgaatttagcgatgaagaagtcattataaataccgctacaggattttctgaaggt

SEQ ID NO: 160498 - DNA, 52 bp, Artificial
  Synthetic oligonucleotide
agcattcccgtatgtggcgccgctgcttgcgtatatcacatctcacccgcag

SEQ ID NO: 160499 - DNA, 52 bp, Artificial
  Synthetic oligonucleotide
agtatggatactttggcggatatagggcttacctttggtaagggcgattttc

SEQ ID NO: 160500 - DNA, 52 bp, Artificial
  Synthetic oligonucleotide
agtctcatcgaaggctcggtgataatcggcgccatctcaaagcagtttggct

SEQ ID NO: 160501 - DNA, 50 bp, Artificial
  Synthetic oligonucleotide
agtggtgcttaaatgggtggtgggaacccgcctaattccggggccgggga

SEQ ID NO: 160502 - DNA, 52 bp, Artificial
  Synthetic oligonucleotide
ctatcaaggtagatgaagcacacgctaaagaacttgcttctttgatagtaca

SEQ ID NO: 160503 - DNA, 52 bp, Artificial
  Synthetic oligonucleotide
ataaagtagggactcataagtatttgtccaaggtgcatgccctgaaattacc

SEQ ID NO: 160504 - DNA, 52 bp, Artificial
  Synthetic oligonucleotide
cggcctgccatgcctggaggtagaaccggaaaactttaccctgggacccggc

SEQ ID NO: 160505 - DNA, 52 bp, Artificial
  Synthetic oligonucleotide
caaaaacgacaacaaaataggacaaaatcgcttagaaatacaatggagagaa

SEQ ID NO: 160506 - DNA, 52 bp, Artificial
  Synthetic oligonucleotide
cgctcggaccctctagagtcggcactccacactcgggggcatggagtacttg

SEQ ID NO: 160507 - DNA, 52 bp, Artificial
  Synthetic oligonucleotide
caagagcttataaacgcaaaatataatctaagtagtcctaaagagccaataa

SEQ ID NO: 160508 - DNA, 57 bp, Artificial
  Synthetic oligonucleotide
gtgcggtgtcgtgaagttagcctagagctaacgaacggacaagacaccgccctatta

SEQ ID NO: 160509 - DNA, 52 bp, Artificial
  Synthetic oligonucleotide
caggaaccgtgagtggaactactactgtaggaggtttggttggatataatgg

SEQ ID NO: 160510 - DNA, 52 bp, Artificial
  Synthetic oligonucleotide
cgatcacagcgggtaacgcaccaggcgtaaacgacggagcatgtgcgatggt

SEQ ID NO: 160511 - DNA, 52 bp, Artificial
  Synthetic oligonucleotide
cgacttacacactctatggaagtttcgcaaaacgcaagatttatagctagaa

SEQ ID NO: 160512 - DNA, 52 bp, Artificial
  Synthetic oligonucleotide
ccacgccacttcttgctaaattgatagcgatatgcgatccaagtccgcctaa

SEQ ID NO: 160513 - DNA, 52 bp, Artificial
  Synthetic oligonucleotide
ccggtagacgaggtagcgctagtctcaaggcaggctactttaaaacgcgtaa

SEQ ID NO: 160514 - DNA, 52 bp, Artificial
  Synthetic oligonucleotide
ggggtctggtttccatagaacacggcttaaaaggtccaaatctatctagcgt

SEQ ID NO: 160515 - DNA, 52 bp, Artificial
  Synthetic oligonucleotide
ggcttgaaatgtagccatcataactccaaacatatgtctcaaagagtgtaat

SEQ ID NO: 160516 - DNA, 52 bp, Artificial
  Synthetic oligonucleotide
ggcgttggtgttgcacctatgattatggttttatccgccccaaaactaaggc

SEQ ID NO: 160517 - DNA, 52 bp, Artificial
  Synthetic oligonucleotide
aaacttcacaccttctacatcttttcgactgattataaaaatagcaaagatc

SEQ ID NO: 160518 - DNA, 52 bp, Artificial
  Synthetic oligonucleotide
aaatcaggcgcaatcttaggcctaatgaatctataaggtggcaaatatgtgt

SEQ ID NO: 160519 - DNA, 51 bp, Artificial
  Synthetic oligonucleotide
atttggggtaaactacgaaagatttggggtaaactacgaatacttgacaca

SEQ ID NO: 160520 - DNA, 52 bp, Artificial
  Synthetic oligonucleotide
ggatattggttggcgtctaaaatcacttgtgcgacactgtgtgtatcgacat

SEQ ID NO: 160521 - DNA, 52 bp, Artificial
  Synthetic oligonucleotide
ggagctattccgatagctaaaggaactatggcagcatttgtgcctatgcttg

SEQ ID NO: 160522 - DNA, 52 bp, Artificial
  Synthetic oligonucleotide
gctttactgtctataaaatcacgaagttcggctatctcgtcagcattcatac

SEQ ID NO: 160523 - DNA, 52 bp, Artificial
  Synthetic oligonucleotide
aacaccttaaatcttataaaagcacctttatccatgcccatttgttctgcca

SEQ ID NO: 160524 - DNA, 52 bp, Artificial
  Synthetic oligonucleotide
aaccaagcttttagcgctaagctagcttacaaaaagggcactggtatattta

SEQ ID NO: 160525 - DNA, 52 bp, Artificial
  Synthetic oligonucleotide
aaccctgtcagcacatccgtgatggccactccgaccttttgcggacccgaat

SEQ ID NO: 160526 - DNA, 52 bp, Artificial
  Synthetic oligonucleotide
aaggccgtgtgtgggccacctggtccgtaaagatttacatctgcgtttgcca

SEQ ID NO: 160527 - DNA, 52 bp, Artificial
  Synthetic oligonucleotide
aactcctcctgttgttaaagtaagcgctacttactcaggtgctgatgcacaa

SEQ ID NO: 160528 - DNA, 52 bp, Artificial
  Synthetic oligonucleotide
gcggaattttcgagtttatagacaatcgcatagccaatggacacaccttaag

SEQ ID NO: 160529 - DNA, 52 bp, Artificial
  Synthetic oligonucleotide
gcggatcctctgatacagggctatgtgggtattcaaaccggcgaatgttcgc

SEQ ID NO: 160530 - DNA, 58 bp, Artificial
  Synthetic oligonucleotide
ccctagcttagccgatacgcactaaagctaggcttaatactgacactttaagcgtgag

SEQ ID NO: 160531 - DNA, 52 bp, Artificial
  Synthetic oligonucleotide
aagcattgctttgtatgcacttggtggagttttactcacaattgcacttatg

SEQ ID NO: 160532 - DNA, 51 bp, Artificial
  Synthetic oligonucleotide
atctatccgctagtcgagagcagcgagagctcaaactaccaaagtctaagc

SEQ ID NO: 160533 - DNA, 51 bp, Artificial
  Synthetic oligonucleotide
attaagggagtttgagctacgtagattaaatcgacgtagctttgatacagg

SEQ ID NO: 160534 - DNA, 51 bp, Artificial
  Synthetic oligonucleotide
aaagaaccgcaccattgcgattaattacagctacgatgaacctactctttt

SEQ ID NO: 160535 - DNA, 51 bp, Artificial
  Synthetic oligonucleotide
tttgggcagctaaagttagacttattggtactggagcgattgctatagcag

SEQ ID NO: 160536 - DNA, 51 bp, Artificial
  Synthetic oligonucleotide
caaaattatcttgtgaagctgttctatgtttagcttcgccttataaaccaa

SEQ ID NO: 160537 - DNA, 51 bp, Artificial
  Synthetic oligonucleotide
caacagataaaggtagagaaatgagtggagcttatagtggatttttagatg

SEQ ID NO: 160538 - DNA, 51 bp, Artificial
  Synthetic oligonucleotide
tagcttgcgaaatagctgattttaaagacgaaagtgttatgcgtataggct

SEQ ID NO: 160539 - DNA, 51 bp, Artificial
  Synthetic oligonucleotide
aagtgcctgcataccgccaagactgccgcctatcacggctcttgcccttgt

SEQ ID NO: 160540 - DNA, 51 bp, Artificial
  Synthetic oligonucleotide
cagctactgcaggacttatagggggaaatgcagacagttttggaaatcaag

SEQ ID NO: 160541 - DNA, 58 bp, Artificial
  Synthetic oligonucleotide
taatagtgacaattgggtatctattcctcccacagaataacttaatactcctagtgaa

SEQ ID NO: 160542 - DNA, 51 bp, Artificial
  Synthetic oligonucleotide
ttttcttgttaaactcgaactgatcttgtctaacgaacatcagtgggatta

SEQ ID NO: 160543 - DNA, 51 bp, Artificial
  Synthetic oligonucleotide
aaaagtaacttcaaccgtgccacgcaaagtgagcgccaaccaggatctagc

SEQ ID NO: 160544 - DNA, 51 bp, Artificial
  Synthetic oligonucleotide
cagttttatttgacttagaggatggttgtagacaaaaagccatgagtagag

SEQ ID NO: 160545 - DNA, 51 bp, Artificial
  Synthetic oligonucleotide
cataacctgctacaatttcagcgtcattttctgttaagcaaagcggagttc

SEQ ID NO: 160546 - DNA, 51 bp, Artificial
  Synthetic oligonucleotide
aaaacatactcgcgtggtaaaacacgaatagcaggcttttccgtaatacac

SEQ ID NO: 160547 - DNA, 51 bp, Artificial
  Synthetic oligonucleotide
ccatttatgatattacacattggtacaggtaaaatgctcgcatttgcacca

SEQ ID NO: 160548 - DNA, 51 bp, Artificial
  Synthetic oligonucleotide
ccgtaagctcacgcgaagcttcatagctatcgccttgaccacctaaaagcc

SEQ ID NO: 160549 - DNA, 51 bp, Artificial
  Synthetic oligonucleotide
ttaaaaaccgccgcgatgtctaaagaggtagtcgttacttggtcgttggct

SEQ ID NO: 160550 - DNA, 51 bp, Artificial
  Synthetic oligonucleotide
tttaacagcgtttcttataagcgcagatcatcatctagctggatttgacgg

SEQ ID NO: 160551 - DNA, 51 bp, Artificial
  Synthetic oligonucleotide
aacgccgtttatccgctgaaagtaaatcaatacccaggtttcgtggaaaat

SEQ ID NO: 160552 - DNA, 56 bp, Artificial
  Synthetic oligonucleotide
cttgcctaaagatttaaaagcggttgatatttcaataagcttagggacaacatgga

SEQ ID NO: 160553 - DNA, 51 bp, Artificial
  Synthetic oligonucleotide
acgcgtcgcccgtttgagcaagagccgttcccataagacttgcttgaccgc

SEQ ID NO: 160554 - DNA, 51 bp, Artificial
  Synthetic oligonucleotide
agaatactcaattccgctagcaacacttgaatatctaccacttgaactctc

SEQ ID NO: 160555 - DNA, 51 bp, Artificial
  Synthetic oligonucleotide
tgccaggcattcgtgcgcttgtgccccgtcataacaccatagaagtgcgct

SEQ ID NO: 160556 - DNA, 51 bp, Artificial
  Synthetic oligonucleotide
tgagtacgcacttttacgcacagcagtgagttttggcgagggttatgggcc

SEQ ID NO: 160557 - DNA, 51 bp, Artificial
  Synthetic oligonucleotide
agattgatctttgtatagtcgggagtgaaaattttttagcagagggtatag

SEQ ID NO: 160558 - DNA, 51 bp, Artificial
  Synthetic oligonucleotide
ttacatcgtcgctcggaccctctagagtcggcactccacactcgggggcat

SEQ ID NO: 160559 - DNA, 51 bp, Artificial
  Synthetic oligonucleotide
aaatggcactctctatcgccccagcagccccaagcgtatgaccgatctgcg

SEQ ID NO: 160560 - DNA, 51 bp, Artificial
  Synthetic oligonucleotide
tcctatagcactaagtgctgaagtatcggttgtaagcgctatacctgccaa

SEQ ID NO: 160561 - DNA, 51 bp, Artificial
  Synthetic oligonucleotide
aggagttaaggctgctagtttagcgcttaatactagggtatccatagtcag

SEQ ID NO: 160562 - DNA, 51 bp, Artificial
  Synthetic oligonucleotide
tcatgcgcccgaaaggaagtgcccaaaggatggcgcttgtaccgcttcaca

SEQ ID NO: 160563 - DNA, 57 bp, Artificial
  Synthetic oligonucleotide
caaatatcaacttggattaagtattttgcaaaagtaactcaagcaggagacgaagta

SEQ ID NO: 160564 - DNA, 51 bp, Artificial
  Synthetic oligonucleotide
aaatgagcgggtgcttgtcgtactcacctactgcggctgggcgctactgct

SEQ ID NO: 160565 - DNA, 51 bp, Artificial
  Synthetic oligonucleotide
aataccacacagaagtaaagaagtacgagtggctatcatctgatgaccaca

SEQ ID NO: 160566 - DNA, 51 bp, Artificial
  Synthetic oligonucleotide
aagtggcggagtgaggccaagaagcggcagtgagatgccatgaactgcgat

SEQ ID NO: 160567 - DNA, 51 bp, Artificial
  Synthetic oligonucleotide
agttcgctatgtttagctgcaaacatcgatatagagtctcctttcgtaaag

SEQ ID NO: 160568 - DNA, 51 bp, Artificial
  Synthetic oligonucleotide
tttgcgtatggcttttaattgttgtaacggggtcatttcatcgctactgct

SEQ ID NO: 160569 - DNA, 51 bp, Artificial
  Synthetic oligonucleotide
atacgaaagacgatatcatatatcaaaccaaagactatatgcccgatggcg

SEQ ID NO: 160570 - DNA, 51 bp, Artificial
  Synthetic oligonucleotide
atcaacgcaagcattcatagcgtttagcattacaaaatacgcatcagcccc

SEQ ID NO: 160571 - DNA, 51 bp, Artificial
  Synthetic oligonucleotide
ctacgccatcacttatcctagaaacttcttcgcgtcttatggcttcgtaca

SEQ ID NO: 160572 - DNA, 51 bp, Artificial
  Synthetic oligonucleotide
gatacttggtgccggcgtttcaaatttattggatcgttttatacatggagg

SEQ ID NO: 160573 - DNA, 51 bp, Artificial
  Synthetic oligonucleotide
cggaaacaacgagtagctagcaaacagcggggattcgtcggttctagtata

SEQ ID NO: 160574 - DNA, 60 bp, Artificial
  Synthetic oligonucleotide
tccgcaatgagctactttccccctgccagtaaggcgtagtatcatcacccacgatgtgct

SEQ ID NO: 160575 - DNA, 60 bp, Artificial
  Synthetic oligonucleotide
taggcgaatttgctaatgatagaaccataggacactttggtggtggtataagatattatc

SEQ ID NO: 160576 - DNA, 51 bp, Artificial
  Synthetic oligonucleotide
ctggagctgtgaaagttacaacaagatcgtttgtagaagtgacccttggct

SEQ ID NO: 160577 - DNA, 51 bp, Artificial
  Synthetic oligonucleotide
cgggccactacgcgatataccgggtggacattcttgggcgtgacccgtaca

SEQ ID NO: 160578 - DNA, 51 bp, Artificial
  Synthetic oligonucleotide
gcataaatgtcaagccacgcaagaaccgtaaaggctacaaatagtactaag

SEQ ID NO: 160579 - DNA, 51 bp, Artificial
  Synthetic oligonucleotide
gtttattagcgatgaagcttatcacgcaacaaggcatagcggttaaggctt

SEQ ID NO: 160580 - DNA, 51 bp, Artificial
  Synthetic oligonucleotide
gtagccattacagggtgaattgcgcccgagttaatcggctcatcgaaaagt

SEQ ID NO: 160581 - DNA, 51 bp, Artificial
  Synthetic oligonucleotide
gtaaggtaacaccgcctatattaaacgccgatagagcactagaaccaagag

SEQ ID NO: 160582 - DNA, 51 bp, Artificial
  Synthetic oligonucleotide
ggaatttgcttgttatccgggctgtgagactggacttaagggacaaaggct

SEQ ID NO: 160583 - DNA, 51 bp, Artificial
  Synthetic oligonucleotide
gagatgatagctggaagctctagcgtaccgccatcaaaccaaactacgttt

SEQ ID NO: 160584 - DNA, 51 bp, Artificial
  Synthetic oligonucleotide
ctgctttggttttagcgacaagcacattatcgagtatgccttgagcgcgtt

SEQ ID NO: 160585 - DNA, 51 bp, Artificial
  Synthetic oligonucleotide
cgcaggtacgctttcggctgtgatttttgttataccaggtctttttatgtg

SEQ ID NO: 160586 - DNA, 60 bp, Artificial
  Synthetic oligonucleotide
gaaaatatagagctgcaaggagcttacgagaatttgcgcaaagcgagaacgtctctatat

SEQ ID NO: 160587 - DNA, 51 bp, Artificial
  Synthetic oligonucleotide
gtgatttagtagctcacgatgaggatagcgcattaaaatatggcgatcata

SEQ ID NO: 160588 - DNA, 51 bp, Artificial
  Synthetic oligonucleotide
ctaatccataaagcaactatcgcccaagccatagtattaaaaagtagtggt

SEQ ID NO: 160589 - DNA, 51 bp, Artificial
  Synthetic oligonucleotide
ggtagagctcttcagggaagcggcgctgtaggagctgtggcgaccgctttg

SEQ ID NO: 160590 - DNA, 51 bp, Artificial
  Synthetic oligonucleotide
cctttgggaatgagtggaaatcgccttgaagtttctacgcatattgtaatt

SEQ ID NO: 160591 - DNA, 51 bp, Artificial
  Synthetic oligonucleotide
ctccgaaggatcgaaatttctgccgtcgtctctcatacatagcttaagcgc

SEQ ID NO: 160592 - DNA, 51 bp, Artificial
  Synthetic oligonucleotide
cttaaatttggatcactatctagcatacgcacgctaaatcgcaactcattg

SEQ ID NO: 160593 - DNA, 51 bp, Artificial
  Synthetic oligonucleotide
gaactgtaaaatcggtctgtagaacacttttgaagcaggtctatgagatag

SEQ ID NO: 160594 - DNA, 51 bp, Artificial
  Synthetic oligonucleotide
taacataagaatttaatgcgtaattattacctttaagattccattcaccag

SEQ ID NO: 160595 - DNA, 51 bp, Artificial
  Synthetic oligonucleotide
gggcgggggatattcgccggacgcgtttcaaatggtgaaaggaggccagac

SEQ ID NO: 160596 - DNA, 51 bp, Artificial
  Synthetic oligonucleotide
cctagaaacacagcacaaagcagacttagcggagcagagagcagagaaagc

SEQ ID NO: 160597 - DNA, 57 bp, Artificial
  Synthetic oligonucleotide
caaccaagtaaggagacccacatgcagactttacccaatgagataaagccactttac

SEQ ID NO: 160598 - DNA, 51 bp, Artificial
  Synthetic oligonucleotide
ggggctaatatgcgaaagcatactaagcacctactgctgaaattataccta

SEQ ID NO: 160599 - DNA, 51 bp, Artificial
  Synthetic oligonucleotide
cctactgaagttttcatagttgcaaactgagaaagtccgctttgactagaa

SEQ ID NO: 160600 - DNA, 51 bp, Artificial
  Synthetic oligonucleotide
gccactagtacaattgcaacaagcaagtaatgaaagtggagcgacagtatt

SEQ ID NO: 160601 - DNA, 50 bp, Artificial
  Synthetic oligonucleotide
acactatcagcaaaagatataagtctaaactcaaataccataaacgccct

SEQ ID NO: 160602 - DNA, 50 bp, Artificial
  Synthetic oligonucleotide
acacatccgcacgggatgatccacccgccgtttcgttcggtctgtccgcg

SEQ ID NO: 160603 - DNA, 50 bp, Artificial
  Synthetic oligonucleotide
acacagctttaagcaccgcgaattctcgcctctctatgaccgccgcgcgc

SEQ ID NO: 160604 - DNA, 50 bp, Artificial
  Synthetic oligonucleotide
gcaaggaccaacgatgagagcagataagaatcccataatcgcaattccta

SEQ ID NO: 160605 - DNA, 50 bp, Artificial
  Synthetic oligonucleotide
acacaccgacgagaaacgtccctgccgcaccgatgctcgtccagactgcg

SEQ ID NO: 160606 - DNA, 50 bp, Artificial
  Synthetic oligonucleotide
ttaagagaaagagccataatgagtgtacatcgcttttcaaccgcaggaag

SEQ ID NO: 160607 - DNA, 50 bp, Artificial
  Synthetic oligonucleotide
gcagggcacaaggataggcaagaccatctggcggctaaagcttggcgcat

SEQ ID NO: 160608 - DNA, 57 bp, Artificial
  Synthetic oligonucleotide
gcacaaagtttaaaaatggagcgtggagctaatcgctacgagaataacgaaaagcaa

SEQ ID NO: 160609 - DNA, 50 bp, Artificial
  Synthetic oligonucleotide
gccaagctcacgtagcgatgaaagtagggagaagccgtcgccttgcggga

SEQ ID NO: 160610 - DNA, 50 bp, Artificial
  Synthetic oligonucleotide
acaaagccagtgaggctcatgccaccgcccgcaagtagtagcccaagtgg

SEQ ID NO: 160611 - DNA, 50 bp, Artificial
  Synthetic oligonucleotide
aatcgtccaccgatgcgattagcgggcggttaaactcgcttcccggcacc

SEQ ID NO: 160612 - DNA, 50 bp, Artificial
  Synthetic oligonucleotide
gtgcggcaagacgcctcgctcatagccttagcctagcagacccagaagct

SEQ ID NO: 160613 - DNA, 50 bp, Artificial
  Synthetic oligonucleotide
gaatccgcctgacccctcgaatcgcacctaagcgttgcacgagtctgcct

SEQ ID NO: 160614 - DNA, 50 bp, Artificial
  Synthetic oligonucleotide
tgatggaagaagtgcgtgtaaaaagaggcttggcatattcagtatatgct

SEQ ID NO: 160615 - DNA, 50 bp, Artificial
  Synthetic oligonucleotide
agagtgtctactaaagtccctgtttgagccacgcttaaaggcaagtgata

SEQ ID NO: 160616 - DNA, 50 bp, Artificial
  Synthetic oligonucleotide
agaccgatgggactagtccgacgcgtttggttgccggggcttgaaagccc

SEQ ID NO: 160617 - DNA, 50 bp, Artificial
  Synthetic oligonucleotide
tgcgatttaccattgggtcgggggcaagtacccggtccgcggaaatcaga

SEQ ID NO: 160618 - DNA, 50 bp, Artificial
  Synthetic oligonucleotide
acggtgcctcatatcgtctcgccacagataaacggcgtttcatatcgcct

SEQ ID NO: 160619 - DNA, 58 bp, Artificial
  Synthetic oligonucleotide
ctttcggctctgataaaaagaaccgcaccattgcgattaattacagctacgatgaacc

SEQ ID NO: 160620 - DNA, 50 bp, Artificial
  Synthetic oligonucleotide
acgcttagagcaggtcacgaagggcaacccttggagcgctggggcagtga

SEQ ID NO: 160621 - DNA, 50 bp, Artificial
  Synthetic oligonucleotide
acgctgcaaagcttgcaaccgcggccggagctacgtttgttggtcgtgaa

SEQ ID NO: 160622 - DNA, 50 bp, Artificial
  Synthetic oligonucleotide
acgcgttaaagctttctatggggcgggaaggagccccggttgcgagggca

SEQ ID NO: 160623 - DNA, 50 bp, Artificial
  Synthetic oligonucleotide
tggatttcatatccattcgctgtttgcaaagttccgcttgtacccattct

SEQ ID NO: 160624 - DNA, 50 bp, Artificial
  Synthetic oligonucleotide
acgcgtaatcaagcgcagtcgcaccgcgtggcagagtaaagacctcgcct

SEQ ID NO: 160625 - DNA, 50 bp, Artificial
  Synthetic oligonucleotide
acgcgctggctgctcgtgcgcaggctcatacggacatgatcttttggggc

SEQ ID NO: 160626 - DNA, 50 bp, Artificial
  Synthetic oligonucleotide
acgcgcgcaggagcctgtccggtcggatcttgcacccattttagctcgcc

SEQ ID NO: 160627 - DNA, 50 bp, Artificial
  Synthetic oligonucleotide
accgagttgagcataagttagtgctagattatagtggagtatcgagtggc

SEQ ID NO: 160628 - DNA, 50 bp, Artificial
  Synthetic oligonucleotide
accctgctctcaaaccctagaaatgcggctgcaggcagcttgcgacagct

SEQ ID NO: 160629 - DNA, 50 bp, Artificial
  Synthetic oligonucleotide
accatccgggaagctcggcgggagcgatgctagcggcaaatagaatcggc

SEQ ID NO: 160630 - DNA, 59 bp, Artificial
  Synthetic oligonucleotide
ctttgcaagagaacgatgacatttgaattttgccccgcagtgcccaatactctagggag

SEQ ID NO: 160631 - DNA, 50 bp, Artificial
  Synthetic oligonucleotide
gatattcttagtcgtaatctttggggcgaccacccgagcattctaaaaga

SEQ ID NO: 160632 - DNA, 50 bp, Artificial
  Synthetic oligonucleotide
acatgacgccaagcccgggagctactagctgttttgagacggcacgggcg

SEQ ID NO: 160633 - DNA, 50 bp, Artificial
  Synthetic oligonucleotide
ttgttaagaagtggcgataaagtcgttggtatttttaatcgtggctatgc

SEQ ID NO: 160634 - DNA, 50 bp, Artificial
  Synthetic oligonucleotide
ggtttggcttgctagcagcccacgctctagcgccctttgtagctccacct

SEQ ID NO: 160635 - DNA, 50 bp, Artificial
  Synthetic oligonucleotide
aaccgcgcttagctttgtgcccggagctactgcgatacgctttagccccc

SEQ ID NO: 160636 - DNA, 50 bp, Artificial
  Synthetic oligonucleotide
gctattctgatcacacaaggggcatacacatttccctagctgcggttgcc

SEQ ID NO: 160637 - DNA, 49 bp, Artificial
  Synthetic oligonucleotide
aacccccgggagtggtgcttaaatgggtggtgggaacccgcctaattcc

SEQ ID NO: 160638 - DNA, 50 bp, Artificial
  Synthetic oligonucleotide
gcttatagcacagctttagcgcttgaagtaaatccggttccatttatcct

SEQ ID NO: 160639 - DNA, 50 bp, Artificial
  Synthetic oligonucleotide
gcttgcctacatgcagcgccgcgtgggacctgatatggtggggcctgctg

SEQ ID NO: 160640 - DNA, 50 bp, Artificial
  Synthetic oligonucleotide
aacaaggtagtgtccgccctcgccgtttgcccctgcgccgctctctctta

SEQ ID NO: 160641 - DNA, 56 bp, Artificial
  Synthetic oligonucleotide
caagataataatatgggggaaagccaagtatcacaagaatttgttttagatccgaa

SEQ ID NO: 160642 - DNA, 50 bp, Artificial
  Synthetic oligonucleotide
aaattccgtccgaaagccagccggcatcacgtttatcacggcgacgccaa

SEQ ID NO: 160643 - DNA, 50 bp, Artificial
  Synthetic oligonucleotide
ggacttgttagtggaagtctatactctaatgtatcaagtaatcctgctat

SEQ ID NO: 160644 - DNA, 50 bp, Artificial
  Synthetic oligonucleotide
ggtcgtttttctaagtccaatttctactatagttccttctaccccagaaa

SEQ ID NO: 160645 - DNA, 50 bp, Artificial
  Synthetic oligonucleotide
ggtatttgacagcgacagtgcgagcatgcaaagagaggatgtcacgacta

SEQ ID NO: 160646 - DNA, 50 bp, Artificial
  Synthetic oligonucleotide
ggccagcctatgggcacctgtggcaagagcgacacactagcgcttttgca

SEQ ID NO: 160647 - DNA, 50 bp, Artificial
  Synthetic oligonucleotide
ggcgtggaatcaggagatgattacgtgctaaaactgatgaataaaggcta

SEQ ID NO: 160648 - DNA, 50 bp, Artificial
  Synthetic oligonucleotide
aaacgctcaaactacccgcaccgccgagggtgggccgtatagaaggcaag

SEQ ID NO: 160649 - DNA, 50 bp, Artificial
  Synthetic oligonucleotide
aaacaccgctagccccaagcgcaaaggctgctcgtacgcctctaacgtcg

SEQ ID NO: 160650 - DNA, 50 bp, Artificial
  Synthetic oligonucleotide
aaaatggctaaactaccagtctattacgataataagatgaacctattagc

SEQ ID NO: 160651 - DNA, 50 bp, Artificial
  Synthetic oligonucleotide
ggggtattgagctctgcgaggcaagttgaaagaaacggaggttttaaaaa

SEQ ID NO: 160652 - DNA, 54 bp, Artificial
  Synthetic oligonucleotide
cacgataaacttaaaaatgggcgcgtggcggtgtgtggtttaggcggacttgga

SEQ ID NO: 160653 - DNA, 50 bp, Artificial
  Synthetic oligonucleotide
gccccaagcgtatgaccgatctgcggctttagcgtgcttgcaaaggtggc

SEQ ID NO: 160654 - DNA, 50 bp, Artificial
  Synthetic oligonucleotide
ttagcgatcaagagcttatcggctcgaaagaggcttataagctaacgatt

SEQ ID NO: 160655 - DNA, 50 bp, Artificial
  Synthetic oligonucleotide
gcgcgctaagtgaggcatgagaagtcccacccaagcgactatgccgctta

SEQ ID NO: 160656 - DNA, 50 bp, Artificial
  Synthetic oligonucleotide
ttagctatgttgaaactcatgggacaggaacactatttggtgaccccata

SEQ ID NO: 160657 - DNA, 50 bp, Artificial
  Synthetic oligonucleotide
aaggccggcgagctagcaccgctgataaacgcgactggtgtgagcatcca

SEQ ID NO: 160658 - DNA, 50 bp, Artificial
  Synthetic oligonucleotide
aagctcgaatatcgcaaacgctcaaactacccgcaccgccgagggtgggc

SEQ ID NO: 160659 - DNA, 50 bp, Artificial
  Synthetic oligonucleotide
aagctcacggcgtccttgcaaagtagcggctcggagtatggcgcatcgga

SEQ ID NO: 160660 - DNA, 50 bp, Artificial
  Synthetic oligonucleotide
aagcgcattggctagcgcgtgaccgaatgtgagcccacctctagcgatcg

SEQ ID NO: 160661 - DNA, 50 bp, Artificial
  Synthetic oligonucleotide
aagcgagtcttgcaagttacctagccgcgagcgatctactgcgccgcgag

SEQ ID NO: 160662 - DNA, 50 bp, Artificial
  Synthetic oligonucleotide
aagcgaccgccgaaggatcatgcccttgctgggtagcgacgataggcaca

SEQ ID NO: 160663 - DNA, 60 bp, Artificial
  Synthetic oligonucleotide
ctcttgcacagattaacccgcaagataacgccttgctctcaagcctacttgagtgtgtga

SEQ ID NO: 160664 - DNA, 50 bp, Artificial
  Synthetic oligonucleotide
aagccttacgctgccctcgttcgccattatgcttgccatcgtggcggtct

SEQ ID NO: 160665 - DNA, 50 bp, Artificial
  Synthetic oligonucleotide
gcggaattacaaccgcgcttaaagtaaatgtagaatggtaccctactcac

SEQ ID NO: 160666 - DNA, 50 bp, Artificial
  Synthetic oligonucleotide
aagagctgccgcaacgtcgtcgcaaaagccgcatagccgcacgtggtccc

SEQ ID NO: 160667 - DNA, 50 bp, Artificial
  Synthetic oligonucleotide
ttggagctggggtgtgctattattctacaagcggagcaaatcataacgca

SEQ ID NO: 160668 - DNA, 50 bp, Artificial
  Synthetic oligonucleotide
ttggctcttttaggttctattgatactcaactaacatctgtgttagttga

SEQ ID NO: 160669 - DNA, 50 bp, Artificial
  Synthetic oligonucleotide
aactgccgaactcgtcataggcacaggcgcacttgatctgtgggtcgccg

SEQ ID NO: 160670 - DNA, 50 bp, Artificial
  Synthetic oligonucleotide
aacgggactggcaggttccaccacgctaggacgaaacgtcgtcatgggcg

SEQ ID NO: 160671 - DNA, 50 bp, Artificial
  Synthetic oligonucleotide
ttgtccggtctgtgagtgcctggaattcttgtatagtttaaaacgccata

SEQ ID NO: 160672 - DNA, 50 bp, Artificial
  Synthetic oligonucleotide
gcggtcaagcaagtcttatgggaacggctcttgctcaaacgggcgacgcg

SEQ ID NO: 160673 - DNA, 50 bp, Artificial
  Synthetic oligonucleotide
atgtgataaccgctaattgctataaggtgtgctataccgtagtaatttac

SEQ ID NO: 160674 - DNA, 55 bp, Artificial
  Synthetic oligonucleotide
gatgttttagtggttcaaaaaatcgcgaaacaaattctattaagaagcggtgata

SEQ ID NO: 160675 - DNA, 50 bp, Artificial
  Synthetic oligonucleotide
atggctgcctcatcgtctcgcaaacgggactggcaggttccaccacgcta

SEQ ID NO: 160676 - DNA, 50 bp, Artificial
  Synthetic oligonucleotide
atggctctctactggcagtgccaacccgataaaatcggtattcttaaaga

SEQ ID NO: 160677 - DNA, 50 bp, Artificial
  Synthetic oligonucleotide
atgcgtataagattgcttgtgccttctactccagttggaaagcctgcagt

SEQ ID NO: 160678 - DNA, 50 bp, Artificial
  Synthetic oligonucleotide
atgcggcgcgttttacgttggccatgcaccgaaaatcgattggcatgcga

SEQ ID NO: 160679 - DNA, 50 bp, Artificial
  Synthetic oligonucleotide
atcgctatccatggacgcacaagggctgggggatatagcgcgaaggtcga

SEQ ID NO: 160680 - DNA, 50 bp, Artificial
  Synthetic oligonucleotide
atcatacctcttgccacgcgccgcttagtgccgggcgctgtaaatctgct

SEQ ID NO: 160681 - DNA, 50 bp, Artificial
  Synthetic oligonucleotide
atcagtcctagccctagcaattgctaacttcatgacgggagaaagtatag

SEQ ID NO: 160682 - DNA, 50 bp, Artificial
  Synthetic oligonucleotide
atcaggaggcgtcgagcccatatacgcagccaagctagccttgtcgctgg

SEQ ID NO: 160683 - DNA, 50 bp, Artificial
  Synthetic oligonucleotide
atcaactacataaaagtttacacttaaactcgccagagttatacctacta

SEQ ID NO: 160684 - DNA, 50 bp, Artificial
  Synthetic oligonucleotide
atatcggcggaatgaccgcgttgtgggggttggacttggcctctatgccc

SEQ ID NO: 160685 - DNA, 55 bp, Artificial
  Synthetic oligonucleotide
tccctttttttgataacactgagcttagcgaagtagttatctcaattaacgcttt

SEQ ID NO: 160686 - DNA, 60 bp, Artificial
  Synthetic oligonucleotide
cacccttaagcacccagttaatgctttctgtcgcacaggaggttacaactatgtcatcta

SEQ ID NO: 160687 - DNA, 50 bp, Artificial
  Synthetic oligonucleotide
atacaccgccacgcctctgggccactatctcaaatccgcggtagctgccg

SEQ ID NO: 160688 - DNA, 50 bp, Artificial
  Synthetic oligonucleotide
ctagacaaggcgacgattacataagtttaaaattgccaaatgcaaacaag

SEQ ID NO: 160689 - DNA, 50 bp, Artificial
  Synthetic oligonucleotide
agtttataaacaaggtagtgtccgccctcgccgtttgcccctgcgccgct

SEQ ID NO: 160690 - DNA, 50 bp, Artificial
  Synthetic oligonucleotide
tcaaaatctaactcgataccaagatgagctaatctctcgcatactttttg

SEQ ID NO: 160691 - DNA, 50 bp, Artificial
  Synthetic oligonucleotide
tcaaacctctactcaaacgatcgtatccagcctagctttgattgttctaa

SEQ ID NO: 160692 - DNA, 50 bp, Artificial
  Synthetic oligonucleotide
ctaggagctaatgtgaattttgctaccccaagaactcctttagatgatgc

SEQ ID NO: 160693 - DNA, 50 bp, Artificial
  Synthetic oligonucleotide
ctatgaatgaaaaatgactttaattccgcgatggattatgaagctagttt

SEQ ID NO: 160694 - DNA, 50 bp, Artificial
  Synthetic oligonucleotide
agtgcgacaaggcagccgccctagagatagcaaaacgcgctagggccacg

SEQ ID NO: 160695 - DNA, 50 bp, Artificial
  Synthetic oligonucleotide
ccgtgcattcgccgccgctaaagacgatgccatttagcttgccgaccctg

SEQ ID NO: 160696 - DNA, 50 bp, Artificial
  Synthetic oligonucleotide
ccctagaaatgcggctgcaggcagcttgcgacagctagatagcgccgtga

SEQ ID NO: 160697 - DNA, 56 bp, Artificial
  Synthetic oligonucleotide
tatttacgagtatgtggtaccagaagacttaattgaagaggtcgcaaatttttgta

SEQ ID NO: 160698 - DNA, 50 bp, Artificial
  Synthetic oligonucleotide
ccactagaattatctatcaccccatctaccaaccaaggtgcaatcttagc

SEQ ID NO: 160699 - DNA, 50 bp, Artificial
  Synthetic oligonucleotide
catatgtcggtgcggcaagcctagcgaagcgagcaggtcacttgcgcaag

SEQ ID NO: 160700 - DNA, 50 bp, Artificial
  Synthetic oligonucleotide
tactcacctactgcggctgggcgctactgcttggcataatggtgctcgca

SEQ ID NO: 160701 - DNA, 50 bp, Artificial
  Synthetic oligonucleotide
tactcctagacctatcgcagccactataagcattgtacctatctcgatcg

SEQ ID NO: 160702 - DNA, 50 bp, Artificial
  Synthetic oligonucleotide
cataattgttaaatcgaaatacagcttttctagggtgttaagtctagcat

SEQ ID NO: 160703 - DNA, 50 bp, Artificial
  Synthetic oligonucleotide
cgacattttgcggaaattatataatccaatcaaatagcctatttatagcc

SEQ ID NO: 160704 - DNA, 50 bp, Artificial
  Synthetic oligonucleotide
cgcagatttttcgtgatcgctggctgtgacgcgcctggcaaaggacgtga

SEQ ID NO: 160705 - DNA, 50 bp, Artificial
  Synthetic oligonucleotide
cagctatgtaacctgatgcccacgcgaagtgtagattatatccaccccta

SEQ ID NO: 160706 - DNA, 50 bp, Artificial
  Synthetic oligonucleotide
cgccatctatcactatgccgccgcacccataaacaagcgctcccatcggc

SEQ ID NO: 160707 - DNA, 50 bp, Artificial
  Synthetic oligonucleotide
cacgagcccgcacactccgtcgatagtccgtcgctaccctgcgcgtagta

SEQ ID NO: 160708 - DNA, 60 bp, Artificial
  Synthetic oligonucleotide
tagcaggataagtaaaactaagtgacaaatcttcagatttagcactcattgtcgttacag

SEQ ID NO: 160709 - DNA, 50 bp, Artificial
  Synthetic oligonucleotide
cacccccgctgggcgcgtgaaaagcactgaaagcgtgtagccccagttgg

SEQ ID NO: 160710 - DNA, 50 bp, Artificial
  Synthetic oligonucleotide
cacatttggcttggatgtaggcgtaacgggcggcactccgggaagcgact

SEQ ID NO: 160711 - DNA, 50 bp, Artificial
  Synthetic oligonucleotide
cgccccagcagccccaagcgtatgaccgatctgcggctttagcgtgcttg

SEQ ID NO: 160712 - DNA, 50 bp, Artificial
  Synthetic oligonucleotide
taggccgccttgctctttacgccgagtctgtttagtgcgaaaagcgcggc

SEQ ID NO: 160713 - DNA, 50 bp, Artificial
  Synthetic oligonucleotide
cgctaaatgcgccactctcgcctctttgtgccaagcgatatgccgcgcgg

SEQ ID NO: 160714 - DNA, 50 bp, Artificial
  Synthetic oligonucleotide
cgctctttaacgagcctgttgctagcggggcgctgcaccctgtgatggct

SEQ ID NO: 160715 - DNA, 50 bp, Artificial
  Synthetic oligonucleotide
attagccgcggcaggcttggtgtaggtcgcacctttgacgccatcggtgt

SEQ ID NO: 160716 - DNA, 50 bp, Artificial
  Synthetic oligonucleotide
cggcggtgatatgcatggacgtatgcgtgttacggttgcgacatccatag

SEQ ID NO: 160717 - DNA, 50 bp, Artificial
  Synthetic oligonucleotide
agcggcagggtcccacccaaatctttatcgatgacaagtaagccctcctt

SEQ ID NO: 160718 - DNA, 50 bp, Artificial
  Synthetic oligonucleotide
agcgcgcctttagggctacgctcatcgcaaactgcaaacccgccgtcaca

SEQ ID NO: 160719 - DNA, 60 bp, Artificial
  Synthetic oligonucleotide
ctgctgtaattatggcccaagctaagaccatatcacctgtatgtacaaaaagacctgcca

SEQ ID NO: 160720 - DNA, 50 bp, Artificial
  Synthetic oligonucleotide
agcgcgcatatagcgggctgcactcgacttgatcgaccgccggagctatc

SEQ ID NO: 160721 - DNA, 50 bp, Artificial
  Synthetic oligonucleotide
tcgcacgggtatttgggctatctggtcgtcgtgagcgataaattttggag

SEQ ID NO: 160722 - DNA, 50 bp, Artificial
  Synthetic oligonucleotide
agcgatcccaaccacatcgagcctgagagtttgctgcgatttcgcgggct

SEQ ID NO: 160723 - DNA, 50 bp, Artificial
  Synthetic oligonucleotide
agcgaggggcttttactgctcacggacgcgcctgcgatcgctacagctct

SEQ ID NO: 160724 - DNA, 50 bp, Artificial
  Synthetic oligonucleotide
agcgaggcaggacagaccagcgatgccgtgtttagatcggcgctgcagca

SEQ ID NO: 160725 - DNA, 50 bp, Artificial
  Synthetic oligonucleotide
agcgagcttgctaaatttgtggcggtcacgagagaggcggctgtggcata

SEQ ID NO: 160726 - DNA, 50 bp, Artificial
  Synthetic oligonucleotide
agcgacattagtgccgagctcaggttctacggtgcttgctagcccgcctt

SEQ ID NO: 160727 - DNA, 50 bp, Artificial
  Synthetic oligonucleotide
agcctttcgccgcacgtcgtcggtttcggatttcaaacacggcgcgttta

SEQ ID NO: 160728 - DNA, 50 bp, Artificial
  Synthetic oligonucleotide
agcctggttaagcttagcccggtgcggtatctgggctttcgcacgcagag

SEQ ID NO: 160729 - DNA, 50 bp, Artificial
  Synthetic oligonucleotide
agcccgcgcagaaataggcacaccctgcaaaacgctagccagtgcgcacg

SEQ ID NO: 160730 - DNA, 60 bp, Artificial
  Synthetic oligonucleotide
caccagccatttagtgcgcaagtcgccgcccagcataaattcgctcttgcgtcatagctt

SEQ ID NO: 160731 - DNA, 50 bp, Artificial
  Synthetic oligonucleotide
tctagtaagtggacgtggaagtacggttggaaatttactagcaagtcaca

SEQ ID NO: 160732 - DNA, 50 bp, Artificial
  Synthetic oligonucleotide
agcccctttgcttcgcggttttcgcgcgtagtagtggcggcatttgctag

SEQ ID NO: 160733 - DNA, 50 bp, Artificial
  Synthetic oligonucleotide
agcccaccgtaaagctagctcgctttgagcccgcctcccatttggaggag

SEQ ID NO: 160734 - DNA, 50 bp, Artificial
  Synthetic oligonucleotide
agcagcctcgctcaaagcaactccgctcacaccgcacttgcacagatcga

SEQ ID NO: 160735 - DNA, 50 bp, Artificial
  Synthetic oligonucleotide
agcaatatcgccacgctagctaccgcgatgcccgtgctagggagtgcggc

SEQ ID NO: 160736 - DNA, 50 bp, Artificial
  Synthetic oligonucleotide
agcaaacagttattataatcgcactatgagcgggtattatgatacggata

SEQ ID NO: 160737 - DNA, 50 bp, Artificial
  Synthetic oligonucleotide
agtgcccaaaggatggcgcttgtaccgcttcacaaaaagagcccggtccg

SEQ ID NO: 160738 - DNA, 50 bp, Artificial
  Synthetic oligonucleotide
agtgcaaatgtcggagaaaaagatgatgtggcacttttctttggacttag

SEQ ID NO: 160739 - DNA, 50 bp, Artificial
  Synthetic oligonucleotide
agtgaaggcgtcaatgatcgaggcgcaagagactatgaggcgagcgcgcc

SEQ ID NO: 160740 - DNA, 50 bp, Artificial
  Synthetic oligonucleotide
agtcctcgggtggtacctctatggcggctccacacgtaagcggtgcgtta

SEQ ID NO: 160741 - DNA, 49 bp, Artificial
  Synthetic oligonucleotide
ataataaaaaagccccaaagccttacggggcaaaggggcaaaaattgtc

SEQ ID NO: 160742 - DNA, 50 bp, Artificial
  Synthetic oligonucleotide
ctcgcttctttcgaaactcaaacgacgccacagaacacggtaaatcgcac

SEQ ID NO: 160743 - DNA, 50 bp, Artificial
  Synthetic oligonucleotide
aggtgggtcgtgttagcgcgctcccagtcgttttgtacggcatccggcac

SEQ ID NO: 160744 - DNA, 50 bp, Artificial
  Synthetic oligonucleotide
agggtgccggttgggtggtcatcacaattggatggggtctcgcagttgca

SEQ ID NO: 160745 - DNA, 50 bp, Artificial
  Synthetic oligonucleotide
agggcggaagagggttccgtgtatgaaagcatagagccgagagccggcgc

SEQ ID NO: 160746 - DNA, 50 bp, Artificial
  Synthetic oligonucleotide
tccattaagcccccgccaaaagacccagccgccgctcctaaaatgctctt

SEQ ID NO: 160747 - DNA, 50 bp, Artificial
  Synthetic oligonucleotide
aggctcgcgcaataggcgcacagggtatcgcattttacggcgtgtgctgt

SEQ ID NO: 160748 - DNA, 50 bp, Artificial
  Synthetic oligonucleotide
agcttgctgcctacgccagggtttctggctgttccgctgatagtagccgc

SEQ ID NO: 160749 - DNA, 50 bp, Artificial
  Synthetic oligonucleotide
tccgtgatggccactccgaccttttgcggacccgaatcttcattccccgt

SEQ ID NO: 160750 - DNA, 50 bp, Artificial
  Synthetic oligonucleotide
agctgaccaaagccgctcgatcctagacggccacatcgtgctaagccgcg

SEQ ID NO: 160751 - DNA, 50 bp, Artificial
  Synthetic oligonucleotide
agctcggtctgaaagcacaccccgccgcagcctaaaattcgcccctcctc

SEQ ID NO: 160752 - DNA, 59 bp, Artificial
  Synthetic oligonucleotide
tattgcactagaaagggttaatcttgtttgtgcaagttccgctttcatagcctctacat

SEQ ID NO: 160753 - DNA, 50 bp, Artificial
  Synthetic oligonucleotide
ctggatcgcatactaattgtataagtccgctacgatctctaagatcgata

SEQ ID NO: 160754 - DNA, 50 bp, Artificial
  Synthetic oligonucleotide
agctcgcggttgccctgtaacgcctctgcgcttggatttagcagcgagtg

SEQ ID NO: 160755 - DNA, 50 bp, Artificial
  Synthetic oligonucleotide
agctaccgcgatgcccgtgctagggagtgcggcgagtgtgcctgctaata

SEQ ID NO: 160756 - DNA, 50 bp, Artificial
  Synthetic oligonucleotide
agcgtgcggcgagatgggctctacggtttggtttggagcggcaagagaga

SEQ ID NO: 160757 - DNA, 50 bp, Artificial
  Synthetic oligonucleotide
agcgtgcgcccatgtctcgcaacccgcattctgcgctatctcacagatcg

SEQ ID NO: 160758 - DNA, 50 bp, Artificial
  Synthetic oligonucleotide
agcgggcgaacatccgacctctcgcccaagattatcggcggacggacgat

SEQ ID NO: 160759 - DNA, 60 bp, Artificial
  Synthetic oligonucleotide
atacactacatttttagggtggctaatgataccagcacaatggttaaaatcagctactgc

SEQ ID NO: 160760 - DNA, 58 bp, Artificial
  Synthetic oligonucleotide
gcccctatcaccctagctgtatcctttacaggctcgccacgactaagttgtaaatcat

SEQ ID NO: 160761 - DNA, 60 bp, Artificial
  Synthetic oligonucleotide
atagacacaaccaacttgtagtctttgagtatggcttaaaacgctatactatgatcatag

SEQ ID NO: 160762 - DNA, 55 bp, Artificial
  Synthetic oligonucleotide
gcgccgtcgataatcaacaaaggtccggattgcacggcataatctgcttttggcg

SEQ ID NO: 160763 - DNA, 55 bp, Artificial
  Synthetic oligonucleotide
cacgagacggttggtactaatgattccagcaatcttacgctaactacgagtaatg

SEQ ID NO: 160764 - DNA, 50 bp, Artificial
  Synthetic oligonucleotide
gaaagcccgctgtgggcatcgtgcaatcgcggcgccaaaatttcgcgttt

SEQ ID NO: 160765 - DNA, 50 bp, Artificial
  Synthetic oligonucleotide
cacgctaaccgcccccgtgagcgcatgaaaataagctgctacgctacgcg

SEQ ID NO: 160766 - DNA, 50 bp, Artificial
  Synthetic oligonucleotide
ccccgcccggtgtttgtcgcaatccctttggagcagggacggtttttcaa

SEQ ID NO: 160767 - DNA, 50 bp, Artificial
  Synthetic oligonucleotide
atgcggtgctttgcttgccttcgctgtagcactcccaaagggcgttgggt

SEQ ID NO: 160768 - DNA, 50 bp, Artificial
  Synthetic oligonucleotide
cgtcagcaaccgccgctgttgcctcgcttagcgggctttcgtcgtgtccg

SEQ ID NO: 160769 - DNA, 50 bp, Artificial
  Synthetic oligonucleotide
cccgcacatgcacgcggcgctcgctaatgttgcccccgctgtcgcaatat

SEQ ID NO: 160770 - DNA, 50 bp, Artificial
  Synthetic oligonucleotide
cccgccaatgatgccgccctgacttacaccattgactatggcaaccgccg

SEQ ID NO: 160771 - DNA, 50 bp, Artificial
  Synthetic oligonucleotide
atcacatcgccggactcggattccagctgccgtttaccccggtacgcaaa

SEQ ID NO: 160772 - DNA, 50 bp, Artificial
  Synthetic oligonucleotide
agtcgcgagcttggtcacgcggaaacccgtctgcacataactcgccatct

SEQ ID NO: 160773 - DNA, 50 bp, Artificial
  Synthetic oligonucleotide
aggtaacgtttgcaggcaccccgtcatcgtcgttaacggtcgcggtcagc

SEQ ID NO: 160774 - DNA, 55 bp, Artificial
  Synthetic oligonucleotide
gaattggggcgacctgaattcgatgtacgcgaatgtcagttacgtggtgtgacct

SEQ ID NO: 160775 - DNA, 55 bp, Artificial
  Synthetic oligonucleotide
cagcgacgcgccttgtctgaggctttcggtgtatcgctataaaggagagtgcgcc

SEQ ID NO: 160776 - DNA, 55 bp, Artificial
  Synthetic oligonucleotide
cttgggtggaagtccgaacagtgcccgatcatggtcgcgctctaggtagctgtcc

SEQ ID NO: 160777 - DNA, 55 bp, Artificial
  Synthetic oligonucleotide
catatcgaggaagagaacgccagtggccccatggcgcaggtgattggccgcatgg

SEQ ID NO: 160778 - DNA, 54 bp, Artificial
  Synthetic oligonucleotide
cattatcttgatacgactccaaacgaaatccggtaaccgctttgcaaataaccg

SEQ ID NO: 160779 - DNA, 55 bp, Artificial
  Synthetic oligonucleotide
ctagcgcttttgctaattcgcttggagatagttgtgtcgctcttaataagcgctc

SEQ ID NO: 160780 - DNA, 55 bp, Artificial
  Synthetic oligonucleotide
ctaagaacaagtacagtctcagccacgtccggcacgacccggcgcactgtctggc

SEQ ID NO: 160781 - DNA, 55 bp, Artificial
  Synthetic oligonucleotide
cgttaccgctgatgccatggtggttaagggcagctatcgggcgctggcccgtgaa

SEQ ID NO: 160782 - DNA, 55 bp, Artificial
  Synthetic oligonucleotide
cgtggctggacatggaggttgtgggccggggtcttgatcgcttccgtgatgccta

SEQ ID NO: 160783 - DNA, 55 bp, Artificial
  Synthetic oligonucleotide
gcgccgggtgttttccttgcgcttttgctgctgctcccgtgctctgatccgttgg

SEQ ID NO: 160784 - DNA, 55 bp, Artificial
  Synthetic oligonucleotide
cgtccctgtgcgctgcggacttcttcgcggtatgccagcagtttgcctgcgtcat

SEQ ID NO: 160785 - DNA, 55 bp, Artificial
  Synthetic oligonucleotide
cgggcctgcatgtggaacgatgaactgccggagtgctacatccagaactctgtgc

SEQ ID NO: 160786 - DNA, 55 bp, Artificial
  Synthetic oligonucleotide
cggcgcgacccaccatttcgcattctggcgcagataattgaataccgtaatatcg

SEQ ID NO: 160787 - DNA, 55 bp, Artificial
  Synthetic oligonucleotide
cccgcgtctttcgttcctgtttgctgcagatgcgggcataatgcgtgcttttcgc

SEQ ID NO: 160788 - DNA, 55 bp, Artificial
  Synthetic oligonucleotide
cccgtgcgaacatcgagaaaacgttgattggtggttgggcaatctaaaccgccta

SEQ ID NO: 160789 - DNA, 55 bp, Artificial
  Synthetic oligonucleotide
cggcgcacacgcggaaaagtattgttcatcgatgctttggtttattcctacaata

SEQ ID NO: 160790 - DNA, 55 bp, Artificial
  Synthetic oligonucleotide
cggccagatcatcgacttacaagaataccgggaggttatcgagcatgagcgcgat

SEQ ID NO: 160791 - DNA, 55 bp, Artificial
  Synthetic oligonucleotide
ccgctgctttataccgtcgaacataacggtcacacaattcaggcgacccctgcgg

SEQ ID NO: 160792 - DNA, 55 bp, Artificial
  Synthetic oligonucleotide
cgccgccgagggccgccgcctgatggtgttggatacgctgcgtcggttccatatc

SEQ ID NO: 160793 - DNA, 55 bp, Artificial
  Synthetic oligonucleotide
cgccgacagccgtcactatggccgtctggcaggctttaccaaccgcaaggacaag

SEQ ID NO: 160794 - DNA, 55 bp, Artificial
  Synthetic oligonucleotide
atcgaccccggcaagaccggcaaggcggccatagataccctgtgcggctatgtct

SEQ ID NO: 160795 - DNA, 55 bp, Artificial
  Synthetic oligonucleotide
aaaatggccgcaagcggcaggggttccggctgcttgccgagtacgccagcgacga

SEQ ID NO: 160796 - DNA, 55 bp, Artificial
  Synthetic oligonucleotide
aaccgagttcgcggcgggcaagtacgacatcacccggcccaaggcggcaggctga

SEQ ID NO: 160797 - DNA, 55 bp, Artificial
  Synthetic oligonucleotide
aacgcgggcgcaattttcgcgtgggattatttgtagacggcggttatgcgtggtc

SEQ ID NO: 160798 - DNA, 55 bp, Artificial
  Synthetic oligonucleotide
ttcatgcactgtcagcgtgttgaactgaaaacggcgcgggtagaggcgccagtaa

SEQ ID NO: 160799 - DNA, 55 bp, Artificial
  Synthetic oligonucleotide
aaggccaactatggggcgccgttcaaagatcgctggttcaggcggcatgacggcg

SEQ ID NO: 160800 - DNA, 55 bp, Artificial
  Synthetic oligonucleotide
tgctggacgtgggagagctgcccaccggcccggtgatctacttgcccgccgaaga

SEQ ID NO: 160801 - DNA, 55 bp, Artificial
  Synthetic oligonucleotide
tgcgcaccccgtaacgctgacgcgcatcggcaatttaacgcattatgtgcccgcg

SEQ ID NO: 160802 - DNA, 53 bp, Artificial
  Synthetic oligonucleotide
aattgtcaacacgcctagggcaaagcccgtaacccaacctatgaccaccgaac

SEQ ID NO: 160803 - DNA, 55 bp, Artificial
  Synthetic oligonucleotide
tgagggcgagcgcctgccgtatacgctggccatccatgccggtaacggtgagaac

SEQ ID NO: 160804 - DNA, 55 bp, Artificial
  Synthetic oligonucleotide
tcagaagcgggagacgcattatccttacctgaaaccggtacgtcaatctctgccg

SEQ ID NO: 160805 - DNA, 55 bp, Artificial
  Synthetic oligonucleotide
atcgagttcaaggggccggagccgctgggtgctgatgatctgcgcatcctgcaag

SEQ ID NO: 160806 - DNA, 55 bp, Artificial
  Synthetic oligonucleotide
acaccgccagaggtgatgtgcggcagttcaagacactggatgcggcggccaaggt

SEQ ID NO: 160807 - DNA, 55 bp, Artificial
  Synthetic oligonucleotide
tcaagtgaaaggtgaccgcaccgcgcaagccatcgcccggcagctcaaggccatg

SEQ ID NO: 160808 - DNA, 55 bp, Artificial
  Synthetic oligonucleotide
tatggccatctatcaccttacggccaagaccggcagccggaacggcggccaatcg

SEQ ID NO: 160809 - DNA, 55 bp, Artificial
  Synthetic oligonucleotide
tagatcagcagcgggagctggtggacgaattcgcccggcatctgactgagggcga

SEQ ID NO: 160810 - DNA, 55 bp, Artificial
  Synthetic oligonucleotide
tacgtttcttgactgcgcgcccgtgacgcttgtggttttcgtgttaatacggtcg

SEQ ID NO: 160811 - DNA, 55 bp, Artificial
  Synthetic oligonucleotide
taatccagccgctgatcggcagcctgcccaacatcatggccccggagtggttcga

SEQ ID NO: 160812 - DNA, 55 bp, Artificial
  Synthetic oligonucleotide
agagtagctttgtcattcctgtaaggaagcccggtcggatgctgcaatgccgttc

SEQ ID NO: 160813 - DNA, 55 bp, Artificial
  Synthetic oligonucleotide
agcaggagggccgggagcctgccgccatcatcgagaccagccccaagaattatca

SEQ ID NO: 160814 - DNA, 55 bp, Artificial
  Synthetic oligonucleotide
gttgttatggaacacaaatggggcccgctataatcgtcatgcgctggcataccgc

SEQ ID NO: 160815 - DNA, 55 bp, Artificial
  Synthetic oligonucleotide
gtagagcaactccgctccctactgccaaactatcccattgggtacgcaacggcgt

SEQ ID NO: 160816 - DNA, 55 bp, Artificial
  Synthetic oligonucleotide
gcacgggtgacgtaaaccgcggtaaacattgaagtcataatgcccacggataaag

SEQ ID NO: 160817 - DNA, 55 bp, Artificial
  Synthetic oligonucleotide
gtacggcggccaaaactgccctgcacgttaatcagcgcgagattcatacgctaga

SEQ ID NO: 160818 - DNA, 55 bp, Artificial
  Synthetic oligonucleotide
gggaatggacaccgcaggaagtgcagcagaacgccgcctggctcaagcgcatgaa

SEQ ID NO: 160819 - DNA, 55 bp, Artificial
  Synthetic oligonucleotide
ggatctcggcgttgattcgtgcccgttgttcttccagcttggcgagccgttccgc

SEQ ID NO: 160820 - DNA, 55 bp, Artificial
  Synthetic oligonucleotide
aggtgttggacagcatcgagcgccgacaggaacggacggcacgactggccgagat

SEQ ID NO: 160821 - DNA, 55 bp, Artificial
  Synthetic oligonucleotide
gcggcaaaggggcaattgctcaacttcgtacctctgaactgaatctgctcgcgtc

SEQ ID NO: 160822 - DNA, 55 bp, Artificial
  Synthetic oligonucleotide
agtggtttaagcggtacaacggcaaacagccagagcggggcggggcgcagaagtc

SEQ ID NO: 160823 - DNA, 55 bp, Artificial
  Synthetic oligonucleotide
atcaagcgtacggtgcagaaggtgatggagcttccgcaggtgcaggaggcccgcg

SEQ ID NO: 160824 - DNA, 54 bp, Artificial
  Synthetic oligonucleotide
gtgggcgctgtgtaggatgcggtactaagattacgattcgctaccttctggtag

SEQ ID NO: 160825 - DNA, 54 bp, Artificial
  Synthetic oligonucleotide
ttgctgtcgagcgcgcggtaatcaaatcctgccggcaagcgcacttcataaaac

SEQ ID NO: 160826 - DNA, 53 bp, Artificial
  Synthetic oligonucleotide
gtatgtatgcgcggtttgctgaaaatcgcggttggcagatttccgttttatca

SEQ ID NO: 160827 - DNA, 54 bp, Artificial
  Synthetic oligonucleotide
gcacagacaccgcaaaccccgaccgtcattttgcgggagggcgcacttaccggt

SEQ ID NO: 160828 - DNA, 53 bp, Artificial
  Synthetic oligonucleotide
atcactattgtgcatacgcgctccgataaaccattaactgctgccaaaattcc

SEQ ID NO: 160829 - DNA, 53 bp, Artificial
  Synthetic oligonucleotide
gcattcgcgccgcttcccgtatctgcagtacctaagactgaattattggtggg

SEQ ID NO: 160830 - DNA, 53 bp, Artificial
  Synthetic oligonucleotide
cgtcatcgcggctttcctcacgcaaaagtacagcggctcgctcattcttgccg

SEQ ID NO: 160831 - DNA, 52 bp, Artificial
  Synthetic oligonucleotide
gccgcaccgccagcacattaaccgcataatcaagcacgcttaataaattagc

SEQ ID NO: 160832 - DNA, 51 bp, Artificial
  Synthetic oligonucleotide
ctggagcgattttagccgctttagcggccttttccctacccgaagggtggg

SEQ ID NO: 160833 - DNA, 51 bp, Artificial
  Synthetic oligonucleotide
aaagattgtttgctggcgtcgttgtcacgggaaccggcatgcccgatgctt

SEQ ID NO: 160834 - DNA, 51 bp, Artificial
  Synthetic oligonucleotide
aatatccgctgacgccaaacgaccacgcctgccgttctctaagagccgcta

SEQ ID NO: 160835 - DNA, 51 bp, Artificial
  Synthetic oligonucleotide
acacccgacacagaggaggacgccacctcgaagcgtaaataaccccaaccg

SEQ ID NO: 160836 - DNA, 51 bp, Artificial
  Synthetic oligonucleotide
acgccgctgggttcggaggcaacttgtcgggtggataattgctcgccgata

SEQ ID NO: 160837 - DNA, 51 bp, Artificial
  Synthetic oligonucleotide
acggcgacagttccgctcgaacgcgcaattaacgcatcggcagattgcgtt

SEQ ID NO: 160838 - DNA, 55 bp, Artificial
  Synthetic oligonucleotide
gatttggattgggttgcggatttggattgggttgcggatttggattgggttgcgg

SEQ ID NO: 160839 - DNA, 51 bp, Artificial
  Synthetic oligonucleotide
aggctgtgtgttaagggacgatattcagattccgctgcatgatccggggcg

SEQ ID NO: 160840 - DNA, 51 bp, Artificial
  Synthetic oligonucleotide
atgctgttccaaacgcgaatgccctgcaaacgccgcagaagtcaccgttgc

SEQ ID NO: 160841 - DNA, 51 bp, Artificial
  Synthetic oligonucleotide
caagcggtacggtgatgatctcagcaagtgcgacttcatcgcggccatgaa

SEQ ID NO: 160842 - DNA, 51 bp, Artificial
  Synthetic oligonucleotide
ctggcgtcgttgtcacgggaaccggcatgcccgatgcttcttcaaccaccg

SEQ ID NO: 160843 - DNA, 51 bp, Artificial
  Synthetic oligonucleotide
ccatagcgttttccaaatcggctagttgtgtgctcccaccctgcacgccgc

SEQ ID NO: 160844 - DNA, 51 bp, Artificial
  Synthetic oligonucleotide
cgcaccaactgccatctaaagcctgcccgttgatttggcacacccgcggac

SEQ ID NO: 160845 - DNA, 51 bp, Artificial
  Synthetic oligonucleotide
ccgtgatgcgtaaatcgccgcgccacgcctttaaattgcgcgagcccctcg

SEQ ID NO: 160846 - DNA, 50 bp, Artificial
  Synthetic oligonucleotide
agggtgcatatcggcggcttgcctcgcttcggttcgctacgcaaatacgc

SEQ ID NO: 160847 - DNA, 50 bp, Artificial
  Synthetic oligonucleotide
ccgacccgccgtgcctcttaatggagacgcacatctctgacagcgcctct

SEQ ID NO: 160848 - DNA, 50 bp, Artificial
  Synthetic oligonucleotide
aggctcgccacgaacccagcatttaccccgcttggcgcgctgcccacgaa

SEQ ID NO: 160849 - DNA, 55 bp, Artificial
  Synthetic oligonucleotide
gattcgacaggaaaatgcacaagaatcggtatcagggcgttttaatgtatacggc

SEQ ID NO: 160850 - DNA, 50 bp, Artificial
  Synthetic oligonucleotide
ccgccgtcatagtggcgactgtttctgtcgctcgggaggactccggaata

SEQ ID NO: 160851 - DNA, 50 bp, Artificial
  Synthetic oligonucleotide
aggcggcattacgttgcttgacaagccctgcctacgggcatacagtgcgc

SEQ ID NO: 160852 - DNA, 50 bp, Artificial
  Synthetic oligonucleotide
agcgattgacgcgccgcttgtgtagccactgcaaaacgcgtgaccgaaaa

SEQ ID NO: 160853 - DNA, 50 bp, Artificial
  Synthetic oligonucleotide
acgggtggcgttccggcactcagcctgcgttgggcggacatcctgggtgt

SEQ ID NO: 160854 - DNA, 50 bp, Artificial
  Synthetic oligonucleotide
tacatcgatcatcgtttgccggacgtgcgccatcaaggtattgcgggcga

SEQ ID NO: 160855 - DNA, 50 bp, Artificial
  Synthetic oligonucleotide
tacgggcggattgcatcttgctaatgcgcttgccgtgccaaccattggtt

SEQ ID NO: 160856 - DNA, 50 bp, Artificial
  Synthetic oligonucleotide
cggaaagtggaggtgccccaatgggcagggtatctcgcactgcaaccaca

SEQ ID NO: 160857 - DNA, 50 bp, Artificial
  Synthetic oligonucleotide
cgctacgggttgcgctttagggcgtgtttgcatttcaacggccaagccct

SEQ ID NO: 160858 - DNA, 50 bp, Artificial
  Synthetic oligonucleotide
acgacccttcggcgcataatctcagcggcacgctctgacgccttgcaacc

SEQ ID NO: 160859 - DNA, 50 bp, Artificial
  Synthetic oligonucleotide
accggctacgctcccagtgtggtcggtgcgttggatggcaacgtcatcat

SEQ ID NO: 160860 - DNA, 55 bp, Artificial
  Synthetic oligonucleotide
cacaccctcccaataggctaaccgccttgacctattgaagttaggcggatactgg

SEQ ID NO: 160861 - DNA, 50 bp, Artificial
  Synthetic oligonucleotide
acaccatgcacaccaaaccgctgcttaccgcactctgcctcgccctgatg

SEQ ID NO: 160862 - DNA, 50 bp, Artificial
  Synthetic oligonucleotide
aattggtcgggtttgtccgggctttgtgcgcgctcttgcgccaatgtgat

SEQ ID NO: 160863 - DNA, 50 bp, Artificial
  Synthetic oligonucleotide
aagcggctcgccgtaccgcgaaagtcttggcaaagcgtgataggctggcg

SEQ ID NO: 160864 - DNA, 50 bp, Artificial
  Synthetic oligonucleotide
ccatgtggtgcccgtggctgagggttttgtcacggtagcggatctgtccg

SEQ ID NO: 160865 - DNA, 50 bp, Artificial
  Synthetic oligonucleotide
ccatgatcgtgagcaatacgaccgtgatgcgtaaatcgccgcgccacgcc

SEQ ID NO: 160866 - DNA, 50 bp, Artificial
  Synthetic oligonucleotide
ccccgcaaagcatagtggctaccatgcgccgcttcattcacaaccggaga

SEQ ID NO: 160867 - DNA, 50 bp, Artificial
  Synthetic oligonucleotide
ctcgcgagagggcggcaagcctaccgattaacatcaggcgacgcaagagg

SEQ ID NO: 160868 - DNA, 50 bp, Artificial
  Synthetic oligonucleotide
cgtgaaggcagcgtcaccattagcggcgatgccaaagtgggcagtaccct

SEQ ID NO: 160869 - DNA, 50 bp, Artificial
  Synthetic oligonucleotide
cgtcgaatgggcacccgttggctggaacgacaaaggacaagacgcgggcg

SEQ ID NO: 160870 - DNA, 50 bp, Artificial
  Synthetic oligonucleotide
caggttgagcgctcaggtgtatgtaaatgcggggctggttggcgcgtagc

SEQ ID NO: 160871 - DNA, 58 bp, Artificial
  Synthetic oligonucleotide
tagttcgttcaaaggtaaccatacggaacctgcagagtcctgacctgaaaattgatca

SEQ ID NO: 160872 - DNA, 60 bp, Artificial
  Synthetic oligonucleotide
ctagagtacgaatgtgtctattatgtatgttctagcctcggatcgagtcggagcctgttt

SEQ ID NO: 160873 - DNA, 55 bp, Artificial
  Synthetic oligonucleotide
acgcgcagcactatcaaaatgctacaccgaaaccatagctaaagagtcgctcatc

SEQ ID NO: 160874 - DNA, 55 bp, Artificial
  Synthetic oligonucleotide
acccattctccaatttccatcaacgtggttcttaatacaccgatatctactacat

SEQ ID NO: 160875 - DNA, 53 bp, Artificial
  Synthetic oligonucleotide
aatggtcaccacggagccactattttattcccgaatcaaacttggaaaaccta

SEQ ID NO: 160876 - DNA, 55 bp, Artificial
  Synthetic oligonucleotide
aaggtaaccatacggaacctgcagagtcctgacctgaaaattgatcaacctgttc

SEQ ID NO: 160877 - DNA, 55 bp, Artificial
  Synthetic oligonucleotide
aaggcgactaataaagcagttgttggagaaatcgttaaggcgactataattgctg

SEQ ID NO: 160878 - DNA, 55 bp, Artificial
  Synthetic oligonucleotide
aaatgtgcgttatgttcatcataccaactaaaccacgtaggtaataggactggtg

SEQ ID NO: 160879 - DNA, 55 bp, Artificial
  Synthetic oligonucleotide
aaacagattggtcttgattgttctagcgatcaacgacttgcgaatggcgacccga

SEQ ID NO: 160880 - DNA, 55 bp, Artificial
  Synthetic oligonucleotide
cgtagccctatctaaattaatgggatatagtggtatgatcagtgtactatcaacc

SEQ ID NO: 160881 - DNA, 55 bp, Artificial
  Synthetic oligonucleotide
cggacgtggcgttcgtgtgattgcccacttacctcaacacactccgtccatgcct

SEQ ID NO: 160882 - DNA, 55 bp, Artificial
  Synthetic oligonucleotide
cgtcaaggatcctgtgtagtgatagaattctttactcttagggagcaatctgtct

SEQ ID NO: 160883 - DNA, 59 bp, Artificial
  Synthetic oligonucleotide
aaggcacccaggcggaaactagcctgctaatgcgtccattcactcactcctggcttaaa

SEQ ID NO: 160884 - DNA, 55 bp, Artificial
  Synthetic oligonucleotide
cgtcctcaaacatttgatatgagtcatgaattagccgttattgcttctgcaatcg

SEQ ID NO: 160885 - DNA, 55 bp, Artificial
  Synthetic oligonucleotide
cgcttcatatctctcgttgtaaccatgggtgaaattcttacaacaggctttctag

SEQ ID NO: 160886 - DNA, 55 bp, Artificial
  Synthetic oligonucleotide
cgatttctaggcaaggcatatcgcctccccaagtacgaacatcaatcgtgtgacc

SEQ ID NO: 160887 - DNA, 55 bp, Artificial
  Synthetic oligonucleotide
cgattatttatcggttcagtatcagaatacgtcatccgaaacgctagctgtgacg

SEQ ID NO: 160888 - DNA, 55 bp, Artificial
  Synthetic oligonucleotide
cgttcaacaatgattgctgcatgaacttggactttacccaattcatttcgttgca

SEQ ID NO: 160889 - DNA, 55 bp, Artificial
  Synthetic oligonucleotide
cgacctctcagaagttaaggtaccgcacggaagcggctagacgcgaccagaacgg

SEQ ID NO: 160890 - DNA, 55 bp, Artificial
  Synthetic oligonucleotide
cgaaatcttggtgactcgttttaccgatacaggatggagtcacgcttttggctct

SEQ ID NO: 160891 - DNA, 55 bp, Artificial
  Synthetic oligonucleotide
cgtttagaatattggatagcctctgtaaccatctctccattcgtccagaacctgg

SEQ ID NO: 160892 - DNA, 55 bp, Artificial
  Synthetic oligonucleotide
ctagtgatcgtttgcctaatgaaattcctaagttgcaagaacgcttagtatcaag

SEQ ID NO: 160893 - DNA, 55 bp, Artificial
  Synthetic oligonucleotide
ctcatcgatatcatcgatttgacctgacgccacgaattgttttgctcctgcgcca

SEQ ID NO: 160894 - DNA, 60 bp, Artificial
  Synthetic oligonucleotide
gtaaaccatgctagcccaatgaaagatggctcgtatgccgcctcctgcttgaaaaacaac

SEQ ID NO: 160895 - DNA, 55 bp, Artificial
  Synthetic oligonucleotide
ctcttgttaaaggggatgcacatgtacctgtatcgaagtgtggacaaccatttag

SEQ ID NO: 160896 - DNA, 55 bp, Artificial
  Synthetic oligonucleotide
cctggtgtctgagtagcgtaatttcgctgaaacttatcacagattcgacgagtaa

SEQ ID NO: 160897 - DNA, 55 bp, Artificial
  Synthetic oligonucleotide
ccgtcttcggaaggccagtcgtcatatcacgaccttttacaatcatatccgactg

SEQ ID NO: 160898 - DNA, 55 bp, Artificial
  Synthetic oligonucleotide
ccgtcatcaaggcatagcactttccttgctcttctactctaaacatcgtcgctga

SEQ ID NO: 160899 - DNA, 54 bp, Artificial
  Synthetic oligonucleotide
aactgagggcatcccgcattcccccgttggcacatctagccactacactgaggg

SEQ ID NO: 160900 - DNA, 54 bp, Artificial
  Synthetic oligonucleotide
aaccccgcgcacaagaacgctagctcctaactggaccgccgcctctaccgttaa

SEQ ID NO: 160901 - DNA, 54 bp, Artificial
  Synthetic oligonucleotide
ttgacaaaccagtatacatctgcacgtttgggctgcttatcaaatattgagtac

SEQ ID NO: 160902 - DNA, 54 bp, Artificial
  Synthetic oligonucleotide
agccgctgtaataaagaaccctaccattacgactgcagtggaatttaatccact

SEQ ID NO: 160903 - DNA, 54 bp, Artificial
  Synthetic oligonucleotide
ttttcggcccattttcttgtaagtacgggctatttgtcggctcgcttccaccca

SEQ ID NO: 160904 - DNA, 54 bp, Artificial
  Synthetic oligonucleotide
gtctcttaatcgcgctagagaacgccccaatcacgctaaaggtgtcgggatatt

SEQ ID NO: 160905 - DNA, 58 bp, Artificial
  Synthetic oligonucleotide
aagagtcctaggcccagggcctaagcctgccctgcgacgtatcccgcgtagctgtaga

SEQ ID NO: 160906 - DNA, 54 bp, Artificial
  Synthetic oligonucleotide
gcttgaaaggatatctcagctctacccctagggacaactctggctaacaggtgt

SEQ ID NO: 160907 - DNA, 54 bp, Artificial
  Synthetic oligonucleotide
gcctgcctgggtctagcacgtcaccgttgacttgaccgtaaacaacacgttggc

SEQ ID NO: 160908 - DNA, 53 bp, Artificial
  Synthetic oligonucleotide
tcggccctaagcgttcgccctctcatcctagttgtagttgagctcgccatcgc

SEQ ID NO: 160909 - DNA, 53 bp, Artificial
  Synthetic oligonucleotide
tcgcgcgttgtatccgcacaaatctcgcacggatcctcttgcgtcacattgcc

SEQ ID NO: 160910 - DNA, 53 bp, Artificial
  Synthetic oligonucleotide
cgatcgctatagctaaatatgatactgaggcactgctagctagccaattaatg

SEQ ID NO: 160911 - DNA, 53 bp, Artificial
  Synthetic oligonucleotide
gtaatcatggaaggtcatacacgatcacctgaacatgttaaacagggattaca

SEQ ID NO: 160912 - DNA, 53 bp, Artificial
  Synthetic oligonucleotide
aggcgttaatatcccatcggctaagagagccgcccctcctatgatggccggta

SEQ ID NO: 160913 - DNA, 53 bp, Artificial
  Synthetic oligonucleotide
ttcgagtcccttgcgtcatatcagtccactggttcggccctaagcgttcgccc

SEQ ID NO: 160914 - DNA, 53 bp, Artificial
  Synthetic oligonucleotide
gccacaactcctaatgccaccaagaacgcaataagcgggggcgaacagaggct

SEQ ID NO: 160915 - DNA, 53 bp, Artificial
  Synthetic oligonucleotide
tctgataacgttgttttccaaccatcgctagaacaaatgcgtgcgtatcgtcc

SEQ ID NO: 160916 - DNA, 58 bp, Artificial
  Synthetic oligonucleotide
gcgtaattctccacggatagtatgtggtcgtttgctgggggcttaacgagcctgagac

SEQ ID NO: 160917 - DNA, 53 bp, Artificial
  Synthetic oligonucleotide
gaggtacgcttagtagccgaaggaaaatctggcgtatgcaaagggactccggc

SEQ ID NO: 160918 - DNA, 53 bp, Artificial
  Synthetic oligonucleotide
gaccgtgaccatgacggagtagcgtgcgaaatcagtcgttctaaaggagcata

SEQ ID NO: 160919 - DNA, 53 bp, Artificial
  Synthetic oligonucleotide
tctttccgcttccagcccccgccattacgagaagcggaccttgtgtatgcata

SEQ ID NO: 160920 - DNA, 53 bp, Artificial
  Synthetic oligonucleotide
atcctgtgtagtcgggttcggcttcgcagaaatggcgtgcgtttccccaaacg

SEQ ID NO: 160921 - DNA, 53 bp, Artificial
  Synthetic oligonucleotide
cggtacaacacaaggggattacttctacggaacaatcccatgtactcgtgcga

SEQ ID NO: 160922 - DNA, 53 bp, Artificial
  Synthetic oligonucleotide
cgtcaacacttctttcgtgtgagtatcataagtagcgacaacgacgcctccta

SEQ ID NO: 160923 - DNA, 52 bp, Artificial
  Synthetic oligonucleotide
acggtcattctatctgacgcctggcttatgggaaatgacaggtagttctttt

SEQ ID NO: 160924 - DNA, 52 bp, Artificial
  Synthetic oligonucleotide
tcgtacggtcgcgcgttgtatccgcacaaatctcgcacggatcctcttgcgt

SEQ ID NO: 160925 - DNA, 52 bp, Artificial
  Synthetic oligonucleotide
cagttgcgtttcgaaccccgcgcacaagaacgctagctcctaactggaccgc

SEQ ID NO: 160926 - DNA, 52 bp, Artificial
  Synthetic oligonucleotide
ttatgctttacaagttagttatatcaaatgcaaactagcttgtaaagcataa

SEQ ID NO: 160927 - DNA, 52 bp, Artificial
  Synthetic oligonucleotide
ttgggaaggcccgagaaaactgtttggagggaggaccccaccatgggacaag

SEQ ID NO: 160928 - DNA, 52 bp, Artificial
  Synthetic oligonucleotide
gtccgataaaacctgctaacattggaagcatcatcgcaaaggctaatttacc

SEQ ID NO: 160929 - DNA, 52 bp, Artificial
  Synthetic oligonucleotide
tttgcaagtagctgctctttcaggggtaaaagtacggattatggttccatgt

SEQ ID NO: 160930 - DNA, 51 bp, Artificial
  Synthetic oligonucleotide
aagcaactgttcgagtcaacggaactagccctgatgccattgcaaggtagg

SEQ ID NO: 160931 - DNA, 51 bp, Artificial
  Synthetic oligonucleotide
tgttcccgaggcccgggagcaagacgatactattgctgtggcacccgtagg

SEQ ID NO: 160932 - DNA, 51 bp, Artificial
  Synthetic oligonucleotide
ctgtacgtgttagcttcttcccagcgatgcgtgaggcagtagaacaaaacc

SEQ ID NO: 160933 - DNA, 51 bp, Artificial
  Synthetic oligonucleotide
aaagctttaaagtccaagggttaaaacaagcgtgatcacaccgcttatttc

SEQ ID NO: 160934 - DNA, 51 bp, Artificial
  Synthetic oligonucleotide
gctgacatacttaaagctattagcacttccttactatcgagcgagcgtttt

SEQ ID NO: 160935 - DNA, 51 bp, Artificial
  Synthetic oligonucleotide
tgtcaacatccactaaattgtctgctccgcctagaccattaacaacatcta

SEQ ID NO: 160936 - DNA, 51 bp, Artificial
  Synthetic oligonucleotide
cctttaccaatgatggagtaggtgtgcagacagccggtacgatgtatttag

SEQ ID NO: 160937 - DNA, 51 bp, Artificial
  Synthetic oligonucleotide
tcttctacctcaattggaaacttagtcgctattccacacccctacattggg

SEQ ID NO: 160938 - DNA, 57 bp, Artificial
  Synthetic oligonucleotide
aaacgctaacgctcgcgcaaaagaaatcaactgacgctccccagacgaatactccgc

SEQ ID NO: 160939 - DNA, 51 bp, Artificial
  Synthetic oligonucleotide
cgttcgtactgttgctttaaatgctcctattaacataaccattgcgtctga

SEQ ID NO: 160940 - DNA, 51 bp, Artificial
  Synthetic oligonucleotide
acggcaggcatggatgtcgtggatcattggccagacggcccgacccgcgct

SEQ ID NO: 160941 - DNA, 51 bp, Artificial
  Synthetic oligonucleotide
cgtcaacacgcgcgtctttccgcttccagcccccgccattacgagaagcgg

SEQ ID NO: 160942 - DNA, 51 bp, Artificial
  Synthetic oligonucleotide
tcggcaactgatcgaatgtttaagtagtcataatggagagtatgtatctgc

SEQ ID NO: 160943 - DNA, 51 bp, Artificial
  Synthetic oligonucleotide
agtggcaaagaacggatgagtgactagtcgccgcctcttgagctacaatgg

SEQ ID NO: 160944 - DNA, 51 bp, Artificial
  Synthetic oligonucleotide
cttcttgcctgtcaccaccgttgaggggcggtaagtccatgttaagctctt

SEQ ID NO: 160945 - DNA, 51 bp, Artificial
  Synthetic oligonucleotide
tcgccctcatatcctgtgtagtcgggttcggcttcgcagaaatggcgtgcg

SEQ ID NO: 160946 - DNA, 51 bp, Artificial
  Synthetic oligonucleotide
tcctacaaaccttacttggtgaagcatatgggcatatctgtgaaaagcgga

SEQ ID NO: 160947 - DNA, 50 bp, Artificial
  Synthetic oligonucleotide
cccgcattcccccgttggcacatctagccactacactgagggcatctgct

SEQ ID NO: 160948 - DNA, 50 bp, Artificial
  Synthetic oligonucleotide
tagcgactaatacttggcaaggcacgtttccagaagttcatagctgcgat

SEQ ID NO: 160949 - DNA, 60 bp, Artificial
  Synthetic oligonucleotide
tttactggccggacgattagagcggcactagatgcactgatggacatcggtcgcccaagt

SEQ ID NO: 160950 - DNA, 50 bp, Artificial
  Synthetic oligonucleotide
ccccaatagctgattcgtaattgccaagtacatctggaattaatcgaacc

SEQ ID NO: 160951 - DNA, 50 bp, Artificial
  Synthetic oligonucleotide
cgtgtacacgagataccttttgattctagtcgtaagttgatgactaccgt

SEQ ID NO: 160952 - DNA, 50 bp, Artificial
  Synthetic oligonucleotide
ggagcttgggttcgctaggaaagcagttgacagtttcaaggattgtcagt

SEQ ID NO: 160953 - DNA, 50 bp, Artificial
  Synthetic oligonucleotide
tcgtcgcgtccagctactttgagcgatgcaatcgcacgttccgcaaaggg

SEQ ID NO: 160954 - DNA, 50 bp, Artificial
  Synthetic oligonucleotide
accatttgcttcttggaccatggcaattttatccatcataacgctatcgc

SEQ ID NO: 160955 - DNA, 59 bp, Artificial
  Synthetic oligonucleotide
tgtgctatcttttgactgtgaacgtgcacttgtcctaattgacgaccttgtcagggtat

SEQ ID NO: 160956 - DNA, 59 bp, Artificial
  Synthetic oligonucleotide
tcgccgcagcgaaatgaccgaagtcacctgattggaggtcaactcatcgcatgggtata

SEQ ID NO: 160957 - DNA, 60 bp, Artificial
  Synthetic oligonucleotide
cttcgagaccaaggctcgaagtttagccatgagactcgcttagctaggctgctggcggcc

SEQ ID NO: 160958 - DNA, 59 bp, Artificial
  Synthetic oligonucleotide
tacgcgctccaaagactacagtgtgctgaaggatgttatgcgcccgggacaagctgatt

SEQ ID NO: 160959 - DNA, 58 bp, Artificial
  Synthetic oligonucleotide
gaggatatagcgaccctatttgattgttcctagcattccttattgcagcggcgtatgc

SEQ ID NO: 160960 - DNA, 58 bp, Artificial
  Synthetic oligonucleotide
gatcaagcgtcaagacagtcagtcaacgactacattacacactgtgcaagtttagtcg

SEQ ID NO: 160961 - DNA, 57 bp, Artificial
  Synthetic oligonucleotide
gatcgcatttatatagatgttccacccacaatatctgattactcagacaatgctatg

SEQ ID NO: 160962 - DNA, 57 bp, Artificial
  Synthetic oligonucleotide
tacacctgccgcattgagagggctgatattgcccatcggattggttactcccacgta

SEQ ID NO: 160963 - DNA, 53 bp, Artificial
  Synthetic oligonucleotide
gaaatttacagtactagctagcactttcccgtaaccttctagtctttccattt

SEQ ID NO: 160964 - DNA, 56 bp, Artificial
  Synthetic oligonucleotide
gttagaatcaaacgcctctttaatgtatagttgttcctttccagacatatgtggtg

SEQ ID NO: 160965 - DNA, 56 bp, Artificial
  Synthetic oligonucleotide
tccgtagcgtagtttgttcctaattggacttcttggtcacgcgcgccgcccaaagc

SEQ ID NO: 160966 - DNA, 56 bp, Artificial
  Synthetic oligonucleotide
ctagcgagactaagacttcattcggtaacacctcagcttatcactgacacggttta

SEQ ID NO: 160967 - DNA, 55 bp, Artificial
  Synthetic oligonucleotide
gcgttggtgttacattcgcttataatctctgtgccggtttacttcgtgccgttgg

SEQ ID NO: 160968 - DNA, 60 bp, Artificial
  Synthetic oligonucleotide
atctgcgtcacaattcttgagcggtcgcattcaacgagcgagctttgcaattccacgcct

SEQ ID NO: 160969 - DNA, 55 bp, Artificial
  Synthetic oligonucleotide
ctgcagcgttgattggtgcaatagttccaaccagcatatttactcctgcagtaag

SEQ ID NO: 160970 - DNA, 55 bp, Artificial
  Synthetic oligonucleotide
gcgccaatggatattttacgtcgtgcaggagtagaagtcgatatagttggagtag

SEQ ID NO: 160971 - DNA, 55 bp, Artificial
  Synthetic oligonucleotide
gcctgtaccataatgaccagtagtatttacgcggacaccttctaaattagccggc

SEQ ID NO: 160972 - DNA, 55 bp, Artificial
  Synthetic oligonucleotide
gcaggatttcttctatttgtgggtagtgtattttgggctactaagaatctgttcc

SEQ ID NO: 160973 - DNA, 55 bp, Artificial
  Synthetic oligonucleotide
gcactgccaaatcccagctcatctagcgacagtaagcttccattcgtgacccatc

SEQ ID NO: 160974 - DNA, 55 bp, Artificial
  Synthetic oligonucleotide
gcacctgaaaacgcatcaaacgagcatttatccttactatccaaattatcaacct

SEQ ID NO: 160975 - DNA, 55 bp, Artificial
  Synthetic oligonucleotide
gcacacgagggatttcccttcataacaaaagtctggagcttttcgtaagagcacc

SEQ ID NO: 160976 - DNA, 55 bp, Artificial
  Synthetic oligonucleotide
ctggcctccgagacacaatataaatcatttgaataccgtgatccattaaatacgc

SEQ ID NO: 160977 - DNA, 55 bp, Artificial
  Synthetic oligonucleotide
ctgtatccttacggatatcttcatattagcgataacggggcatcgcttcgagccc

SEQ ID NO: 160978 - DNA, 55 bp, Artificial
  Synthetic oligonucleotide
gatagactaaatgattgaataacgcatcttgtcctactcgctgatcagtaaaacg

SEQ ID NO: 160979 - DNA, 60 bp, Artificial
  Synthetic oligonucleotide
attcttgagcggtcgcattcaacgagcgagctttgcaattccacgcctcggttaactggc

SEQ ID NO: 160980 - DNA, 55 bp, Artificial
  Synthetic oligonucleotide
gagggtttataagaattccaagctatgaaagatcgagccagtgaaactgcctaag

SEQ ID NO: 160981 - DNA, 50 bp, Artificial
  Synthetic oligonucleotide
gaggcctctaagacgatttctagttaactaccccttaataaagaaccccg

SEQ ID NO: 160982 - DNA, 55 bp, Artificial
  Synthetic oligonucleotide
cttaccaatgagttaaatagaactaccgaaagtgaatatagaactgaactccggc

SEQ ID NO: 160983 - DNA, 55 bp, Artificial
  Synthetic oligonucleotide
gactcgttaggagccacaccaatagagtgttaaagttagtcctcattggtatagg

SEQ ID NO: 160984 - DNA, 55 bp, Artificial
  Synthetic oligonucleotide
gactcgctgcctcatatttacagtgcattagcggattttggcttaacacggagcg

SEQ ID NO: 160985 - DNA, 55 bp, Artificial
  Synthetic oligonucleotide
gacggttacggtcatattgcaattagtagcaatgatttagaaggatggcatgctg

SEQ ID NO: 160986 - DNA, 55 bp, Artificial
  Synthetic oligonucleotide
gaccattctctcccattaccttataagcacggactggtgtgataatctccttcac

SEQ ID NO: 160987 - DNA, 55 bp, Artificial
  Synthetic oligonucleotide
gaactctagcgtgactaatttgacagaaaatgcgcttgtctgttcaccaaaagag

SEQ ID NO: 160988 - DNA, 55 bp, Artificial
  Synthetic oligonucleotide
ttcactccggttacgagagaggatctcttccgcttattttagacttgtgcttaaa

SEQ ID NO: 160989 - DNA, 55 bp, Artificial
  Synthetic oligonucleotide
ttattacgtatcaaacctgctacagttaaaggtcaatacgtacgtaacgttgctg

SEQ ID NO: 160990 - DNA, 60 bp, Artificial
  Synthetic oligonucleotide
actcaagcaccagcacagcaggcgagaaaagctgttgccacgcgcaatagtggaacacgc

SEQ ID NO: 160991 - DNA, 55 bp, Artificial
  Synthetic oligonucleotide
ttaatttgtccattgccaaatctttcccttgatatcccctaacaaaggcacgcgc

SEQ ID NO: 160992 - DNA, 55 bp, Artificial
  Synthetic oligonucleotide
ttaattccgttattagtgagcgggtcacttctagatgaccgtttccataactgcc

SEQ ID NO: 160993 - DNA, 55 bp, Artificial
  Synthetic oligonucleotide
tgtcctaattgacgaccttgtcagggtatccatatagatctcttgaacggttgcc

SEQ ID NO: 160994 - DNA, 55 bp, Artificial
  Synthetic oligonucleotide
tggcggttcatctttactggttggactactttatttcgtcacagatagaaatgaa

SEQ ID NO: 160995 - DNA, 55 bp, Artificial
  Synthetic oligonucleotide
tggacacagtcgagacgggtactgtcttatgccttaatagctcgatctgaatgac

SEQ ID NO: 160996 - DNA, 55 bp, Artificial
  Synthetic oligonucleotide
tcgttcaaacatggttcatagcggaactttagttacgtatggtcgtggtcttgtg

SEQ ID NO: 160997 - DNA, 55 bp, Artificial
  Synthetic oligonucleotide
tcctctatatgaggacagaccaatcaacgaaactatgaaagcgcatataatggtc

SEQ ID NO: 160998 - DNA, 55 bp, Artificial
  Synthetic oligonucleotide
tatttatggtttgtggaagatggcggaaatcccataacgttaagtgaacacgtgg

SEQ ID NO: 160999 - DNA, 55 bp, Artificial
  Synthetic oligonucleotide
taatccctctgtcacttcaactcctagttgtgattgtactgcagcgttgattggt

SEQ ID NO: 161000 - DNA, 55 bp, Artificial
  Synthetic oligonucleotide
taactagagttaccttatctgtatcacaacttcagtctaggaagtaccagtagcc

SEQ ID NO: 161001 - DNA, 57 bp, Artificial
  Synthetic oligonucleotide
tcgtccgtctcccagtaaagcaccggttggacaagcgtcgacacaacgagtacattc

SEQ ID NO: 161002 - DNA, 55 bp, Artificial
  Synthetic oligonucleotide
gtctagcgaaaactgctgactgagccaagccttctgtccaaagcgacaaccgctt

SEQ ID NO: 161003 - DNA, 54 bp, Artificial
  Synthetic oligonucleotide
gtcgtaactgtcctaacgagcgaaaacaagtggggcggtttagcgagcggtcta

SEQ ID NO: 161004 - DNA, 55 bp, Artificial
  Synthetic oligonucleotide
gtcgggcttagtgccagtaactaggcctgccacacggttgccaatcttataggtc

SEQ ID NO: 161005 - DNA, 55 bp, Artificial
  Synthetic oligonucleotide
gtcggaataatgagtagttgaccaacacgaatcaagttcatattcgttagctgat

SEQ ID NO: 161006 - DNA, 55 bp, Artificial
  Synthetic oligonucleotide
gtcgcatagacaattagacacccgttgttgttttgcttcttttagccatacgcag

SEQ ID NO: 161007 - DNA, 55 bp, Artificial
  Synthetic oligonucleotide
gtcagccagtattcgtttattgattgatcaagcgtcaagacagtcagtcaacgac

SEQ ID NO: 161008 - DNA, 55 bp, Artificial
  Synthetic oligonucleotide
gtatccgtgattgtacatacacagatgattgctacaaagcgagctatcttttcga

SEQ ID NO: 161009 - DNA, 55 bp, Artificial
  Synthetic oligonucleotide
ggtgttgttacagactcatcatcgtcaagtgtgcggtaagtagggcccattaagg

SEQ ID NO: 161010 - DNA, 55 bp, Artificial
  Synthetic oligonucleotide
ggtgtaaggagcatctgacattgacgtccaaaccatattcccaattcctactact

SEQ ID NO: 161011 - DNA, 55 bp, Artificial
  Synthetic oligonucleotide
ggtacaaagagtgtgaaaggaattgcggaacaattaggcattacttcggcaactg

SEQ ID NO: 161012 - DNA, 56 bp, Artificial
  Synthetic oligonucleotide
cgtttggtctgaccaaggtgtagacaccccctgcaaacgttgctacgtcaagccga

SEQ ID NO: 161013 - DNA, 55 bp, Artificial
  Synthetic oligonucleotide
gggagggacagagagtccacccggagtcagcgaaatggaaacacccaataccaag

SEQ ID NO: 161014 - DNA, 55 bp, Artificial
  Synthetic oligonucleotide
gggaattacgcgttcagtcatcgtaaatgcattacgtaagttagagtccggcggt

SEQ ID NO: 161015 - DNA, 55 bp, Artificial
  Synthetic oligonucleotide
ggaggcgtttcagaataactaacttacgatctttactgtcaccatattgattacc

SEQ ID NO: 161016 - DNA, 55 bp, Artificial
  Synthetic oligonucleotide
ggaggattaggggagtcgtttcaagtcgttactctctcattccaactctcatttg

SEQ ID NO: 161017 - DNA, 55 bp, Artificial
  Synthetic oligonucleotide
gcttaacctgtctacttaaatgctgttacgcacacagcttggctcctgtgttggt

SEQ ID NO: 161018 - DNA, 55 bp, Artificial
  Synthetic oligonucleotide
gctggtctctcctccagttaagctgtggtcagagataggtaggatggttaagggc

SEQ ID NO: 161019 - DNA, 55 bp, Artificial
  Synthetic oligonucleotide
gctccattcaaggtagaagaccggtgagattgcactcatacacgaagaaggtgtg

SEQ ID NO: 161020 - DNA, 55 bp, Artificial
  Synthetic oligonucleotide
gctcaggcatcaatgctggttctggaagcccttctactgtttgacgagctaccgc

SEQ ID NO: 161021 - DNA, 55 bp, Artificial
  Synthetic oligonucleotide
cccgcttgtttattacgtgacttacgctcatatcctatcgcccatccgcataaac

SEQ ID NO: 161022 - DNA, 55 bp, Artificial
  Synthetic oligonucleotide
ccccagaagttgacttgacgactacttgtcactagtacggccgcatcataacggt

SEQ ID NO: 161023 - DNA, 59 bp, Artificial
  Synthetic oligonucleotide
tctccacggatagtatgtggtcgtttgctgggggcttaacgagcctgagacgctttagc

SEQ ID NO: 161024 - DNA, 55 bp, Artificial
  Synthetic oligonucleotide
ccagggataagtgtaacgaccacgcctaatgcaagtgcgttaaggacgttcatcg

SEQ ID NO: 161025 - DNA, 55 bp, Artificial
  Synthetic oligonucleotide
catggcttactagtgtaatatgaacaaatcctgctatcatccccgcaaacggccc

SEQ ID NO: 161026 - DNA, 55 bp, Artificial
  Synthetic oligonucleotide
cactgcttaagctttgatggaccgctggactaccaattaattctagcgaatcaat

SEQ ID NO: 161027 - DNA, 55 bp, Artificial
  Synthetic oligonucleotide
cactctcatcccttggcggactgcgttaagactatctagcgacctcattctgtcc

SEQ ID NO: 161028 - DNA, 55 bp, Artificial
  Synthetic oligonucleotide
cacggtagccttcttgggtaactagttctcctgtatcattaacagcaaagttccc

SEQ ID NO: 161029 - DNA, 55 bp, Artificial
  Synthetic oligonucleotide
caccttaatcagcacagatcttagcgcttttctggccaggaattagtagcaggca

SEQ ID NO: 161030 - DNA, 55 bp, Artificial
  Synthetic oligonucleotide
cacagtgaggctactggcgtcctagtactacctcagtcaagtctattcgttaaac

SEQ ID NO: 161031 - DNA, 55 bp, Artificial
  Synthetic oligonucleotide
caagtgcaaggcgaatgagcttgactcagttcaccggtttattacaaacacctgg

SEQ ID NO: 161032 - DNA, 55 bp, Artificial
  Synthetic oligonucleotide
caacgacaaacatagggttattttcacgatagctaaggcaacaagaaccgttaca

SEQ ID NO: 161033 - DNA, 55 bp, Artificial
  Synthetic oligonucleotide
caaacccttactctatattggctgtgttctgttaggttcaattgttacctgtcta

SEQ ID NO: 161034 - DNA, 60 bp, Artificial
  Synthetic oligonucleotide
ctacagtgtgctgaaggatgttatgcgcccgggacaagctgattaccctggacgtgtgcg

SEQ ID NO: 161035 - DNA, 55 bp, Artificial
  Synthetic oligonucleotide
attttaggttccataggtgaaccgattcttctaacctcgattcaacagaacatag

SEQ ID NO: 161036 - DNA, 55 bp, Artificial
  Synthetic oligonucleotide
atttcgattgctataattagcgactgattgagaagtagctaagcctaattgtccc

SEQ ID NO: 161037 - DNA, 54 bp, Artificial
  Synthetic oligonucleotide
attaggctctcctgctaaagtttggcctatcccttttagtaaaatcggcacgcc

SEQ ID NO: 161038 - DNA, 55 bp, Artificial
  Synthetic oligonucleotide
atgatatcattgaagccctcgtcagtaccgctcacgaaaatcatgcactcggcgc

SEQ ID NO: 161039 - DNA, 55 bp, Artificial
  Synthetic oligonucleotide
atccatatgaagagcgattaacgttaactgcacgcatggaaattgaccgtagcgg

SEQ ID NO: 161040 - DNA, 55 bp, Artificial
  Synthetic oligonucleotide
atcaccctctccctgggtcttagatcggacgagcaaacccgacatctgacgagag

SEQ ID NO: 161041 - DNA, 55 bp, Artificial
  Synthetic oligonucleotide
atcaattgagggtaatcctttcgttcacttaaccgtatgatccaattcatgttgc

SEQ ID NO: 161042 - DNA, 55 bp, Artificial
  Synthetic oligonucleotide
agtcgttgaagatgggctatcacggttgcaagttcctttagtcattgcacaaacg

SEQ ID NO: 161043 - DNA, 55 bp, Artificial
  Synthetic oligonucleotide
agaaagtttgaaagcggtggcaatctcttaataaggtaggtgatgcttatgagca

SEQ ID NO: 161044 - DNA, 55 bp, Artificial
  Synthetic oligonucleotide
agaaaatttcgccacgttattaactgtgaccaatctatagacatacgcgcacctc

SEQ ID NO: 161045 - DNA, 55 bp, Artificial
  Synthetic oligonucleotide
acccaacagacgttcaccagaggcctgatgggccggaatcgtttccagggcagac

SEQ ID NO: 161046 - DNA, 55 bp, Artificial
  Synthetic oligonucleotide
cggcacctgagcgcatgtgacaaatcggacctgaagtaggggacactctcggtcc

SEQ ID NO: 161047 - DNA, 55 bp, Artificial
  Synthetic oligonucleotide
cggtacgaaagacccgccgaccaaagcaacagttgcacggatcctggctggctac

SEQ ID NO: 161048 - DNA, 55 bp, Artificial
  Synthetic oligonucleotide
ctccgaactagacatgcggacataccactgaggtaagatcgctcaacacaacggt

SEQ ID NO: 161049 - DNA, 55 bp, Artificial
  Synthetic oligonucleotide
ttcgggtggttgtactaccattggaggcttgttcgggtctaacgtctgaaccagc

SEQ ID NO: 161050 - DNA, 55 bp, Artificial
  Synthetic oligonucleotide
tgtgcctaatgcccgttccgtcccaacgacggctaagccacttccggcctcacct

SEQ ID NO: 161051 - DNA, 55 bp, Artificial
  Synthetic oligonucleotide
tactgaaccccttgcactcgcgggaactgtctctcatcgatctgtggtgcgaaac

SEQ ID NO: 161052 - DNA, 55 bp, Artificial
  Synthetic oligonucleotide
tacgtgtggccagtcggcagatcaacgagcggtttcggacggcccggatcagtca

SEQ ID NO: 161053 - DNA, 55 bp, Artificial
  Synthetic oligonucleotide
tacggtgcgcctgtgacgattcccaccgaaaacatcggtagcatcccgcgctctc

SEQ ID NO: 161054 - DNA, 55 bp, Artificial
  Synthetic oligonucleotide
ggcgctacttgtaccgggaggagttgtcgtgccactccaagcaccctcccatcca

SEQ ID NO: 161055 - DNA, 55 bp, Artificial
  Synthetic oligonucleotide
gccgtaatggtagccagccggtcactccgaatacgcttcatgagtgagcacgacc

SEQ ID NO: 161056 - DNA, 55 bp, Artificial
  Synthetic oligonucleotide
agcaacaagcagcagtagccgttatcggatcgtccgttacaggtctacgcaatcg

SEQ ID NO: 161057 - DNA, 55 bp, Artificial
  Synthetic oligonucleotide
gcatgtctccactatgtcctgaccgctcggtcctcagacgggaagcacaaccaca

SEQ ID NO: 161058 - DNA, 55 bp, Artificial
  Synthetic oligonucleotide
gacgtcttcgccacacgcttaccccgcgcaccgcagagctatcccagataacgga

SEQ ID NO: 161059 - DNA, 55 bp, Artificial
  Synthetic oligonucleotide
gacactcccgctatacggtcggaattcaacaggatactgacctccgctctgctcg

SEQ ID NO: 161060 - DNA, 55 bp, Artificial
  Synthetic oligonucleotide
cttgctcaccccttaccgagtagacgcttccccgcacgcatatcacgaggtgagc

SEQ ID NO: 161061 - DNA, 54 bp, Artificial
  Synthetic oligonucleotide
aatcttccttatataagtctctactggtcgtccgtatacgacacccgacccaca

SEQ ID NO: 161062 - DNA, 54 bp, Artificial
  Synthetic oligonucleotide
actgactccctcggttctcgtgcgaagtcgggcactcgtgacaagtcaacagtc

SEQ ID NO: 161063 - DNA, 53 bp, Artificial
  Synthetic oligonucleotide
gtctctcgcggcctcacagggccgtatgagggccactttggtcagtcgggcag

SEQ ID NO: 161064 - DNA, 53 bp, Artificial
  Synthetic oligonucleotide
agtgctcttcaagagcctgtgaggtgcgacggggcaacgtgtaagtacgctgc

SEQ ID NO: 161065 - DNA, 53 bp, Artificial
  Synthetic oligonucleotide
agtacgtaatcggttggcgctcaggggttacggaagccataggcgtctttgta

SEQ ID NO: 161066 - DNA, 52 bp, Artificial
  Synthetic oligonucleotide
cctcggtgagtacggctcctgctacaccggggttgtgtccagcgattacgta

SEQ ID NO: 161067 - DNA, 55 bp, Artificial
  Synthetic oligonucleotide
agcggcggggactgggagttcgcctctgctgttgcaggcgtcggtcctcacatat

SEQ ID NO: 161068 - DNA, 52 bp, Artificial
  Synthetic oligonucleotide
acccgtccgggctatttcaaacgccgagccttctgactttgacccgcgaact

SEQ ID NO: 161069 - DNA, 50 bp, Artificial
  Synthetic oligonucleotide
acccggggacgagcagtcgagcccaagcacgctgcatgggggagagtcct

SEQ ID NO: 161070 - DNA, 50 bp, Artificial
  Synthetic oligonucleotide
acccggcgagcttaccgcgcagacgccaggccaacaggcgagaagacctt

SEQ ID NO: 161071 - DNA, 50 bp, Artificial
  Synthetic oligonucleotide
acccgccgaccaaagcaacagttgcacggatcctggctggctactgtccc

SEQ ID NO: 161072 - DNA, 50 bp, Artificial
  Synthetic oligonucleotide
aaacccctgagaatcttggggattcgaacagggctccgggcttgcccctg

SEQ ID NO: 161073 - DNA, 50 bp, Artificial
  Synthetic oligonucleotide
aaacgcggaatcatggacggtgtgagtcctcgccccgcacaacccgatat

SEQ ID NO: 161074 - DNA, 50 bp, Artificial
  Synthetic oligonucleotide
aacacgtcgggggcagctgtggcccacttaaggcccggtttggaacgcag

SEQ ID NO: 161075 - DNA, 50 bp, Artificial
  Synthetic oligonucleotide
aaccggacgactctgcactcgaatcgcccaccctatggtgtgcgtcccgg

SEQ ID NO: 161076 - DNA, 50 bp, Artificial
  Synthetic oligonucleotide
aacgttcaccggtgtcgaagccccatagggtgtcagccctcgttgacgtg

SEQ ID NO: 161077 - DNA, 50 bp, Artificial
  Synthetic oligonucleotide
aactcaccctcgccgggagtgcgccgcagctgagtggtggcagagtcctg

SEQ ID NO: 161078 - DNA, 55 bp, Artificial
  Synthetic oligonucleotide
cacaatccgtgaacggtatataaggatttcctaagcaccgacgtccgattcgtgg

SEQ ID NO: 161079 - DNA, 50 bp, Artificial
  Synthetic oligonucleotide
aactcagattgggagccgaccatgccactggacactcctagcatcgcgcc

SEQ ID NO: 161080 - DNA, 50 bp, Artificial
  Synthetic oligonucleotide
aactgcggtcatagtgcgtttcccgggaggtatgcggggttcgacgcctt

SEQ ID NO: 161081 - DNA, 50 bp, Artificial
  Synthetic oligonucleotide
aagagcgcacgttggctgcctaggaacggatcgcggcgtggttacggacc

SEQ ID NO: 161082 - DNA, 50 bp, Artificial
  Synthetic oligonucleotide
aagccagcacgtcatgttaacggcccctgcaaacgttgcccggacgcgaa

SEQ ID NO: 161083 - DNA, 50 bp, Artificial
  Synthetic oligonucleotide
aagcgccgagtctgccactagcggtcccctcagcgcgagagaaccccgcc

SEQ ID NO: 161084 - DNA, 50 bp, Artificial
  Synthetic oligonucleotide
aaggactcgtggtcctggggacacaagtgctcacctgccgacggctgtcc

SEQ ID NO: 161085 - DNA, 50 bp, Artificial
  Synthetic oligonucleotide
aaggagctcgcgtgggaacgacgaacacccgcatgcgtcgcagactcagg

SEQ ID NO: 161086 - DNA, 50 bp, Artificial
  Synthetic oligonucleotide
aatcccgagcggccaactgctcgacttgaaggcggcaccaaggcgacacc

SEQ ID NO: 161087 - DNA, 50 bp, Artificial
  Synthetic oligonucleotide
aatccgccagggtcgatgcagactgaccggagtaccgcccggtaacctca

SEQ ID NO: 161088 - DNA, 50 bp, Artificial
  Synthetic oligonucleotide
aatcctgatctgccggcgaacctggaaccgacagtgacccccggcctcac

SEQ ID NO: 161089 - DNA, 55 bp, Artificial
  Synthetic oligonucleotide
caggtcagggtagggcatcgccgatgttcggcaaactattgacggcagtcacgac

SEQ ID NO: 161090 - DNA, 50 bp, Artificial
  Synthetic oligonucleotide
aatctgaggacgcagcggatccaaggcaccactgggacgacggcaccgga

SEQ ID NO: 161091 - DNA, 50 bp, Artificial
  Synthetic oligonucleotide
acaccggaaacatccctgggatttgcgcggactgcctgtgcggtcggctc

SEQ ID NO: 161092 - DNA, 50 bp, Artificial
  Synthetic oligonucleotide
acagaatgcgccaatgacgcggaagtcgccgtgaacgcgagacgggtccc

SEQ ID NO: 161093 - DNA, 50 bp, Artificial
  Synthetic oligonucleotide
acagactcccgtgtcaaggctttcagcggtaccagggacgtcagagccgc

SEQ ID NO: 161094 - DNA, 50 bp, Artificial
  Synthetic oligonucleotide
acagccgattgtgctgtctacaggcgggctacggccggtgtaccgaccta

SEQ ID NO: 161095 - DNA, 50 bp, Artificial
  Synthetic oligonucleotide
acaggttgaccggggaaccccgtactgctatgcagcaatcgggaggcggt

SEQ ID NO: 161096 - DNA, 50 bp, Artificial
  Synthetic oligonucleotide
acattccccgaatgcccgagtcacctcaccggatttccctgcgcagtggc

SEQ ID NO: 161097 - DNA, 50 bp, Artificial
  Synthetic oligonucleotide
accaccccggtaggaggcggcatggacccgcgaacgtggttgatcacgcg

SEQ ID NO: 161098 - DNA, 50 bp, Artificial
  Synthetic oligonucleotide
accagcatcggggactgagacctggattccgatgggggtggccctactct

SEQ ID NO: 161099 - DNA, 50 bp, Artificial
  Synthetic oligonucleotide
accagggcagcaactgcgctctacgcttcgggcagtacagccgccacatc

SEQ ID NO: 161100 - DNA, 55 bp, Artificial
  Synthetic oligonucleotide
cccgagtcctaacgcaggatccttcacggcaaccgcccgcacgactccatcacaa

SEQ ID NO: 161101 - DNA, 50 bp, Artificial
  Synthetic oligonucleotide
accatacggccggtgctgctaggcccgtgtctcgcgtctcgggacgtccg

SEQ ID NO: 161102 - DNA, 50 bp, Artificial
  Synthetic oligonucleotide
acccaacgtgcccgagtcctaacgcaggatccttcacggcaaccgcccgc

SEQ ID NO: 161103 - DNA, 50 bp, Artificial
  Synthetic oligonucleotide
acccagtcataaggaccctccttctccccggacgtcccgagctgcgggct

SEQ ID NO: 161104 - DNA, 50 bp, Artificial
  Synthetic oligonucleotide
acccccgaagggtgcgcgccgtccactccccggacgcggttggagcgata

SEQ ID NO: 161105 - DNA, 53 bp, Artificial
  Synthetic oligonucleotide
ccgaacaggcgtgtcaacccgaaggccgatgccggttcttagaggggaactcc

SEQ ID NO: 161106 - DNA, 55 bp, Artificial
  Synthetic oligonucleotide
cctgcgagcatgtccggttgcggccacatccacatcttgattgagggcgaatatt

SEQ ID NO: 161107 - DNA, 55 bp, Artificial
  Synthetic oligonucleotide
cgcatcgcttttactgtggtcgagaaacgctgggcttgactgcttcgtcgaatcg

SEQ ID NO: 161108 - DNA, 59 bp, Artificial
  Synthetic oligonucleotide
tgaacccttgacaaatggacatgagtggagggggtgaccggagaccctacaggctctga

SEQ ID NO: 161109 - DNA, 60 bp, Artificial
  Synthetic oligonucleotide
acttgaaatagtgtcttcgccagatctaatccgacgactgcaatcccttccatgatccgc

SEQ ID NO: 161110 - DNA, 55 bp, Artificial
  Synthetic oligonucleotide
ataacgctgttacgcggcgagtggggcggtggatgactgggcgaccgcccaacat

SEQ ID NO: 161111 - DNA, 53 bp, Artificial
  Synthetic oligonucleotide
agtcgtccggactcagggaccacacccgggcccgcgacgcaagtcacggaccc

SEQ ID NO: 161112 - DNA, 53 bp, Artificial
  Synthetic oligonucleotide
agggatttgcgcttagggtaaacaggtgttaacgccccgctaagacagaggcg

SEQ ID NO: 161113 - DNA, 52 bp, Artificial
  Synthetic oligonucleotide
aggcgagggccgtctcaacccactgaaaagttcgtttgtgccgggcttttcc

SEQ ID NO: 161114 - DNA, 55 bp, Artificial
  Synthetic oligonucleotide
agcgggcaatcgcgcctcacacgcaattttcttcccatgaaggctagctattgcg

SEQ ID NO: 161115 - DNA, 55 bp, Artificial
  Synthetic oligonucleotide
agccttaggcgcgcggcttcgattcagagggccgggccaaggattgagtagccat

SEQ ID NO: 161116 - DNA, 55 bp, Artificial
  Synthetic oligonucleotide
ccgtgatcccatcgggtagaaacatggctatccaggtatttctacagtggtcgcg

SEQ ID NO: 161117 - DNA, 55 bp, Artificial
  Synthetic oligonucleotide
ccgtcgttcggacacagcgctaagtggtggggtatcactcatctatacgctcaaa

SEQ ID NO: 161118 - DNA, 55 bp, Artificial
  Synthetic oligonucleotide
ccgtcgtattccgctatcaagtcagtaccgtcatagaggaacttggtcgtcacac

SEQ ID NO: 161119 - DNA, 55 bp, Artificial
  Synthetic oligonucleotide
ccgtaggcccggttatgatgcggtgaggcctgcgtcgtgttctgacgcgtctgta

SEQ ID NO: 161120 - DNA, 59 bp, Artificial
  Synthetic oligonucleotide
catgtccacgatggtcaaataagtggactaatttccgataagatttgttagacgcaaca

SEQ ID NO: 161121 - DNA, 55 bp, Artificial
  Synthetic oligonucleotide
ccggctcgcggactgatcttgatgatgtgggatgatcctgaactagcgagtgaag

SEQ ID NO: 161122 - DNA, 55 bp, Artificial
  Synthetic oligonucleotide
ccgcgccttgcatctctctcgataagcaatcgccgtgtagttcgtggatgatggt

SEQ ID NO: 161123 - DNA, 55 bp, Artificial
  Synthetic oligonucleotide
ccgccaggcatttgacagtgggctacgtaaccgcttcggtctgcggtcatgccca

SEQ ID NO: 161124 - DNA, 55 bp, Artificial
  Synthetic oligonucleotide
ccctttgtgcgcgctagacgtaaagaggacgtcaatcccctcgtgccacaaggcg

SEQ ID NO: 161125 - DNA, 55 bp, Artificial
  Synthetic oligonucleotide
ccctcgcagctatccgacttggaacgtcaactgtgggccgatgccgtctctagcc

SEQ ID NO: 161126 - DNA, 55 bp, Artificial
  Synthetic oligonucleotide
cccgtttaaactatcgcttgaattgacttcctccactcgcggttcatagtggcag

SEQ ID NO: 161127 - DNA, 55 bp, Artificial
  Synthetic oligonucleotide
cccggcaagccagcttattctcccacatgtgcttcagcacggaaagcttgaaagc

SEQ ID NO: 161128 - DNA, 55 bp, Artificial
  Synthetic oligonucleotide
cccgcccagtgcgctatcctgacaactccacaacgcttcgtcacgctacagtagg

SEQ ID NO: 161129 - DNA, 55 bp, Artificial
  Synthetic oligonucleotide
cccgcaggacagtctcctggaaggaggaccgatcgctcacgagtttaaggaactg

SEQ ID NO: 161130 - DNA, 55 bp, Artificial
  Synthetic oligonucleotide
ccccttgccaaagaaggcgatggccataagcgtgatgaccagccactcctgatca

SEQ ID NO: 161131 - DNA, 60 bp, Artificial
  Synthetic oligonucleotide
cggaaatccatggtcacactccgccgacgggccagcttataagatcgtgctctgcgtcca

SEQ ID NO: 161132 - DNA, 54 bp, Artificial
  Synthetic oligonucleotide
cccctccagattcagccggttccatccggcttccagacaccgatttaaaaggcc

SEQ ID NO: 161133 - DNA, 55 bp, Artificial
  Synthetic oligonucleotide
cccctaacacacaaggtctgacgaggggaacgaaagggtcatcaactcgacacat

SEQ ID NO: 161134 - DNA, 52 bp, Artificial
  Synthetic oligonucleotide
ccccgaaaccaaattgggcgggtcgtaaaccagcgttccgcgaacaatgcaa

SEQ ID NO: 161135 - DNA, 50 bp, Artificial
  Synthetic oligonucleotide
ccccacggtaaacaaattggggcggtatgagggtttacttcaccccatag

SEQ ID NO: 161136 - DNA, 55 bp, Artificial
  Synthetic oligonucleotide
cccacgccacgctttacagcactcaattgcacaagaggtagacttaacaactgca

SEQ ID NO: 161137 - DNA, 52 bp, Artificial
  Synthetic oligonucleotide
ccatattcgttacgtccgggatcgtccccgaacgcctttccttgtcgttggc

SEQ ID NO: 161138 - DNA, 55 bp, Artificial
  Synthetic oligonucleotide
ccagatctcgttattgatcgaataaccgtgcagggcatagattaccggataccgc

SEQ ID NO: 161139 - DNA, 55 bp, Artificial
  Synthetic oligonucleotide
ccaccctctgccggaatttggtcaggcggcttcaagtatgctcacgcaatcgacg

SEQ ID NO: 161140 - DNA, 55 bp, Artificial
  Synthetic oligonucleotide
ccaatgcgtggacggatgtgtggctttccatcacctcaagggcttcgggacctga

SEQ ID NO: 161141 - DNA, 55 bp, Artificial
  Synthetic oligonucleotide
ccaatatagagacatagatacgccacgcgttgtttcctcgcgtttgacgaattct

SEQ ID NO: 161142 - DNA, 60 bp, Artificial
  Synthetic oligonucleotide
gtcgtctatggacatctctcgttggagggcctgcatatcacagtgggcggcatccctcga

SEQ ID NO: 161143 - DNA, 54 bp, Artificial
  Synthetic oligonucleotide
ccaaccagcgctaatttccgcgcgtaagcgcttccttaccggaatcgggtcgaa

SEQ ID NO: 161144 - DNA, 55 bp, Artificial
  Synthetic oligonucleotide
catgtcgttcggtttcccctcgggaggcggatttcgactcaatgcgccctttcac

SEQ ID NO: 161145 - DNA, 55 bp, Artificial
  Synthetic oligonucleotide
tagtggaatttagtatcaacgataccataaagcacaggatgatcgttggtagttc

SEQ ID NO: 161146 - DNA, 53 bp, Artificial
  Synthetic oligonucleotide
taggtcttcgtaaacaggtcttaaccctttgcatgcgattaaccgggcttaac

SEQ ID NO: 161147 - DNA, 55 bp, Artificial
  Synthetic oligonucleotide
tagggtgttccgcatcagggagtgacaaatcggaacacgtttctgcctccggcta

SEQ ID NO: 161148 - DNA, 55 bp, Artificial
  Synthetic oligonucleotide
gttcggtgtgtgggatctcagaacaccagaagcgcctagatggcgcggatgcacg

SEQ ID NO: 161149 - DNA, 55 bp, Artificial
  Synthetic oligonucleotide
gtgcgttgacgccgcagggtccgataggccaaatgaactcactcgagggcaagcg

SEQ ID NO: 161150 - DNA, 55 bp, Artificial
  Synthetic oligonucleotide
gtgcgtcttggcgatcattgcgtgcacctagccgcacctgtagacacggcgcttc

SEQ ID NO: 161151 - DNA, 55 bp, Artificial
  Synthetic oligonucleotide
gtgcagtcgcctgggtgacacgcgcagatgccactaactttaggcagcggcgatg

SEQ ID NO: 161152 - DNA, 55 bp, Artificial
  Synthetic oligonucleotide
gtgacttcatccccatactcgcctgctagcatacccgcccatgaggttgaacccc

SEQ ID NO: 161153 - DNA, 60 bp, Artificial
  Synthetic oligonucleotide
gcggagcctgtactcaaaatgaggccgtgggcgctcctagtttttacgacgatgctctgc

SEQ ID NO: 161154 - DNA, 55 bp, Artificial
  Synthetic oligonucleotide
gtgactgcgcgttacccacgtgctttccgactcgcaaacccagcgtttggcgcta

SEQ ID NO: 161155 - DNA, 55 bp, Artificial
  Synthetic oligonucleotide
gtcgtttaggcctatcgacggagagtcgatgcctggaccttaggcgtctacgcct

SEQ ID NO: 161156 - DNA, 55 bp, Artificial
  Synthetic oligonucleotide
gtcggttgtcgtcgctcttcctgacaccaccattagatatgtccgcgtcgccgcg

SEQ ID NO: 161157 - DNA, 55 bp, Artificial
  Synthetic oligonucleotide
gtcggcgccattggtcaactggatatcacggcctcttatgttcggttggacggcg

SEQ ID NO: 161158 - DNA, 55 bp, Artificial
  Synthetic oligonucleotide
gtcctcaggccgcctcgacaacacgtcggatcacttgtctgactcagctgcctca

SEQ ID NO: 161159 - DNA, 55 bp, Artificial
  Synthetic oligonucleotide
gtcattaatgacgcgacggtgtcttgaaaagataggttacgcggcgtgagttccc

SEQ ID NO: 161160 - DNA, 55 bp, Artificial
  Synthetic oligonucleotide
gtacgcgacaggactgaagacgggcctccttcctacgctaattcagggaatcgcc

SEQ ID NO: 161161 - DNA, 52 bp, Artificial
  Synthetic oligonucleotide
gtaattccttaacgccgccccttaacgggagtcgcgacgctctgtagtttcc

SEQ ID NO: 161162 - DNA, 55 bp, Artificial
  Synthetic oligonucleotide
ggtggattcgagagcactcaggtcttcgaggctgatacacgtcatgcgagagccg

SEQ ID NO: 161163 - DNA, 55 bp, Artificial
  Synthetic oligonucleotide
ggtctgccaacggttgctgaccacggcattgtaagagggcgaccacttcttggcg

SEQ ID NO: 161164 - DNA, 60 bp, Artificial
  Synthetic oligonucleotide
ccaatgcgttccggctccgatatcaggccgtaggtcagatggacgaacagtccgcactgg

SEQ ID NO: 161165 - DNA, 55 bp, Artificial
  Synthetic oligonucleotide
ggtagagctccgccgaacttcggagatcaaagtccggcaggcgaccccgctttag

SEQ ID NO: 161166 - DNA, 55 bp, Artificial
  Synthetic oligonucleotide
ggggtgctcgcgccggctaccatacatctgacgtttgacgagctttagcttggtg

SEQ ID NO: 161167 - DNA, 55 bp, Artificial
  Synthetic oligonucleotide
ggggtcaacgaacattgcattacagaaacgtaacccatccattgtgtcgcattac

SEQ ID NO: 161168 - DNA, 55 bp, Artificial
  Synthetic oligonucleotide
ggggatattccgcactttaatgtaagcagtcccacaaacatcaacgtaacctcag

SEQ ID NO: 161169 - DNA, 55 bp, Artificial
  Synthetic oligonucleotide
ggggaggcacagcacccgaatatagggtactccctgccagtatcaaggagtgcgc

SEQ ID NO: 161170 - DNA, 55 bp, Artificial
  Synthetic oligonucleotide
ggggagagccaatcattatgagcgcccggcgatgagcgaccggtagtgatggtgg

SEQ ID NO: 161171 - DNA, 55 bp, Artificial
  Synthetic oligonucleotide
ggggaccgcaacgacgcgtttctcaacgctgctgtcgagtttctagaaagcctgg

SEQ ID NO: 161172 - DNA, 55 bp, Artificial
  Synthetic oligonucleotide
gggccggtctagtcgcgttcatttcgaacactgacatgcggtaaggcgtttcccg

SEQ ID NO: 161173 - DNA, 55 bp, Artificial
  Synthetic oligonucleotide
gggcatatcgctcaccggatggaacatatagggcgtggacatcattcacactgcg

SEQ ID NO: 161174 - DNA, 55 bp, Artificial
  Synthetic oligonucleotide
ttttgccgccaccgtgaattagaccggctaaccaggtgtgacccatagtgcagta

SEQ ID NO: 161175 - DNA, 60 bp, Artificial
  Synthetic oligonucleotide
gtatgcagcccgctcgggaatgatcgagctcagcgcctgtcgcagcatgggtcagcctct

SEQ ID NO: 161176 - DNA, 55 bp, Artificial
  Synthetic oligonucleotide
tttgtcgtgaatgcgagccgcctggatacgcccctgctaatccagtccgcagacg

SEQ ID NO: 161177 - DNA, 54 bp, Artificial
  Synthetic oligonucleotide
tttacgccccgtcttgggaccccggctgtgtatgaagcctaagaagcgccaacc

SEQ ID NO: 161178 - DNA, 55 bp, Artificial
  Synthetic oligonucleotide
ttgcattccgcgtgcgtcgaccgccattgtctcctccggcccctgtctgtggttt

SEQ ID NO: 161179 - DNA, 55 bp, Artificial
  Synthetic oligonucleotide
ttctcatatgcgtcagggggtgtgaacggcctcatgaagctcagcctattggctc

SEQ ID NO: 161180 - DNA, 55 bp, Artificial
  Synthetic oligonucleotide
ttcagcaaaacgcggtgcccggacgcttacgatcatctctgcggaggtgcctgcc

SEQ ID NO: 161181 - DNA, 55 bp, Artificial
  Synthetic oligonucleotide
ttaccgtcccgaacgtcgtgacacgcagatccgcaatggcagggtcggcgaatag

SEQ ID NO: 161182 - DNA, 55 bp, Artificial
  Synthetic oligonucleotide
tgtgaatactcgcgtctgacgaacaaacgcggttacgcatcaagggttcacggct

SEQ ID NO: 161183 - DNA, 55 bp, Artificial
  Synthetic oligonucleotide
tgtcacgcagttagggtttgtgcttttctggcgtgcgacagaggggtttatggga

SEQ ID NO: 161184 - DNA, 55 bp, Artificial
  Synthetic oligonucleotide
tggccatgagggaaggcagaatggtctcgattagcgcatggtcccgattagcggt

SEQ ID NO: 161185 - DNA, 55 bp, Artificial
  Synthetic oligonucleotide
tggaaaacggtatcgggcgttagccaccgcttcacccatgcacacgtccaggggt

SEQ ID NO: 161186 - DNA, 59 bp, Artificial
  Synthetic oligonucleotide
ggtcgcgctgcgacacactggggacggcgcgttttcgatgaaagctccaaccgcgatcc

SEQ ID NO: 161187 - DNA, 55 bp, Artificial
  Synthetic oligonucleotide
tgcgaacagaccgggcccatgtttcctgcgaatgccgtggcctagaagcgccagg

SEQ ID NO: 161188 - DNA, 55 bp, Artificial
  Synthetic oligonucleotide
tgcatggtataaaacgttcatgtcggacccctcgattatcctcccgaaagatcca

SEQ ID NO: 161189 - DNA, 55 bp, Artificial
  Synthetic oligonucleotide
tgatctcgttggcttggaacagcgacttcatgtcatagcctgcgtcgttcaggtg

SEQ ID NO: 161190 - DNA, 55 bp, Artificial
  Synthetic oligonucleotide
tgatcgaaaaccccagccattatctgaacctacgcggccacgattacgaagagac

SEQ ID NO: 161191 - DNA, 55 bp, Artificial
  Synthetic oligonucleotide
tgatataggggctggtctggggttttggtcaagcctagtggattgattccaacgt

SEQ ID NO: 161192 - DNA, 50 bp, Artificial
  Synthetic oligonucleotide
tgaggcccgccgggtttacggtaacgccttccccgacctaacgcctcaac

SEQ ID NO: 161193 - DNA, 55 bp, Artificial
  Synthetic oligonucleotide
tcttggtccgcgtcttgcccctacgcgcccgatccctttccgtgcgcgtcctgca

SEQ ID NO: 161194 - DNA, 55 bp, Artificial
  Synthetic oligonucleotide
tcttctctcgtgccaatgtccgcaatgggtcggcagcggtccaaagccctagccc

SEQ ID NO: 161195 - DNA, 55 bp, Artificial
  Synthetic oligonucleotide
tctgacggccggggtttccttcgcaggctcgcgtctctagggtccgccgctcatt

SEQ ID NO: 161196 - DNA, 55 bp, Artificial
  Synthetic oligonucleotide
tctgaccccactcgcggtcacccgccttccacaacttgtcaccccacccttcaga

SEQ ID NO: 161197 - DNA, 60 bp, Artificial
  Synthetic oligonucleotide
ggtacgatcggcgacaagtttggccagagtcgtctcggcgtctgcgcttccaatctcgcg

SEQ ID NO: 161198 - DNA, 55 bp, Artificial
  Synthetic oligonucleotide
tctagacaacgctgtgacgggtagatagttatctacttaacggccgttcaacaag

SEQ ID NO: 161199 - DNA, 55 bp, Artificial
  Synthetic oligonucleotide
tccgcggggcgtacattgtgaggcctggagcgtaatttgaccgacctgcccctaa

SEQ ID NO: 161200 - DNA, 55 bp, Artificial
  Synthetic oligonucleotide
tcccacaggtttcgggagcaacggaatgagcagtatgacacagttaccgcgcgag

SEQ ID NO: 161201 - DNA, 55 bp, Artificial
  Synthetic oligonucleotide
tccaaggcgagatcagagcgtccacacacaatttccgcagatgccagatgactga

SEQ ID NO: 161202 - DNA, 55 bp, Artificial
  Synthetic oligonucleotide
tcagttggacggcttatgagtttcagatagacaagacttcagtttcaattagacg

SEQ ID NO: 161203 - DNA, 55 bp, Artificial
  Synthetic oligonucleotide
gcggtcccagaagacctttccgttaccatcgatctttccttcaccgtagatgcgc

SEQ ID NO: 161204 - DNA, 55 bp, Artificial
  Synthetic oligonucleotide
gcggcaaacactcttccggtccgccttatccagcgctagaatagttaccatgtca

SEQ ID NO: 161205 - DNA, 55 bp, Artificial
  Synthetic oligonucleotide
gcggaattgacattccgtaaccgtgatcttacccttcccgaagtctcaggaagtg

SEQ ID NO: 161206 - DNA, 55 bp, Artificial
  Synthetic oligonucleotide
gcgctggataaaggacccggtctaagctcatgtctataaagcagattacctccct

SEQ ID NO: 161207 - DNA, 55 bp, Artificial
  Synthetic oligonucleotide
gcgccccggtccactaacgccagcttgaggcccgaaccctctctcatgtctgatt

SEQ ID NO: 161208 - DNA, 54 bp, Artificial
  Synthetic oligonucleotide
aatgctggggttacccacccttctctaaaagccgttgcggctaagcacgcccac

SEQ ID NO: 161209 - DNA, 55 bp, Artificial
  Synthetic oligonucleotide
gcgcaacccttgcgactctgtctctgctccgcttatcgttggttgcgggctcttg

SEQ ID NO: 161210 - DNA, 55 bp, Artificial
  Synthetic oligonucleotide
gcgattcgccgcacaggacacattccaccgcgttttcagtcgcctactcgcgcga

SEQ ID NO: 161211 - DNA, 55 bp, Artificial
  Synthetic oligonucleotide
gcctgaatggaaggcaacaccgaagtgccaggtcgcatagacaattcggtatcgt

SEQ ID NO: 161212 - DNA, 55 bp, Artificial
  Synthetic oligonucleotide
gcctccgatctgtctgtgagaagtttctatccgaggcattaaccaaccgttaccc

SEQ ID NO: 161213 - DNA, 55 bp, Artificial
  Synthetic oligonucleotide
gcctcacacctcaatgagaacaacgcgcacctctcgcgcgctgcgcataacgcac

SEQ ID NO: 161214 - DNA, 55 bp, Artificial
  Synthetic oligonucleotide
gccggaggaccgggagcagcttatctgacgcctctgttggactctcgggtccatt

SEQ ID NO: 161215 - DNA, 55 bp, Artificial
  Synthetic oligonucleotide
gccgcttggtcctgcgggcacaggacgcatatagaacacgacgtctctcgcacga

SEQ ID NO: 161216 - DNA, 55 bp, Artificial
  Synthetic oligonucleotide
gccgccatttagtaatgtcgcaccgtgccatttagacatgtcaccctccgccgca

SEQ ID NO: 161217 - DNA, 55 bp, Artificial
  Synthetic oligonucleotide
gccgaactgaacgatatcacgatccgatacaccgtattcttcgccaagatgggag

SEQ ID NO: 161218 - DNA, 55 bp, Artificial
  Synthetic oligonucleotide
gccctgatgggcgctcgcaaaatcgtcgattacgaagaccaaaggctcggcaatg

SEQ ID NO: 161219 - DNA, 60 bp, Artificial
  Synthetic oligonucleotide
gcccaagggttgagttagcatcgcttgatgagcctgacgctacacagtgtggacagacgc

SEQ ID NO: 161220 - DNA, 60 bp, Artificial
  Synthetic oligonucleotide
cccgccatttctcaatcggtcaggattggaccatgcaaatctggctaagctcgaagattt

SEQ ID NO: 161221 - DNA, 55 bp, Artificial
  Synthetic oligonucleotide
gccatcgtctgtatcgtctctttcttccggttgaaccgccgcaggcaaccctccg

SEQ ID NO: 161222 - DNA, 55 bp, Artificial
  Synthetic oligonucleotide
gccagacaggtgaatctacgcccaacttataacgcagcagtttaatgaatcaccg

SEQ ID NO: 161223 - DNA, 55 bp, Artificial
  Synthetic oligonucleotide
gccaccatgtcgggcaatcggtgtaagaaaaccctcattccgtccctgcgcaccg

SEQ ID NO: 161224 - DNA, 53 bp, Artificial
  Synthetic oligonucleotide
gcagcggcctttagcctcgcggggtttcgccgtccaatagttaggactaaacc

SEQ ID NO: 161225 - DNA, 55 bp, Artificial
  Synthetic oligonucleotide
gcagccctttgggtgactgcgcgttcctagattggtcggccgggttcgttaggac

SEQ ID NO: 161226 - DNA, 55 bp, Artificial
  Synthetic oligonucleotide
gcacgtcaaagaaactgtattgcgatggtactatagcgcttcttccgggacctcc

SEQ ID NO: 161227 - DNA, 55 bp, Artificial
  Synthetic oligonucleotide
gcaagctccgacccgacttccgcttggaatggccgatggggatgcggagttcgtt

SEQ ID NO: 161228 - DNA, 55 bp, Artificial
  Synthetic oligonucleotide
gcaagaccggtcccgtcctcaagtcacgaatatgcgttattcggggatacgcgcc

SEQ ID NO: 161229 - DNA, 55 bp, Artificial
  Synthetic oligonucleotide
gatttgatgaggcgggctagccctaaccgcagatcaggcgtatagcatgctaccg

SEQ ID NO: 161230 - DNA, 53 bp, Artificial
  Synthetic oligonucleotide
gaggggaactcgactaacggaacgttttggtgcattagcgcccacctgttacg

SEQ ID NO: 161231 - DNA, 54 bp, Artificial
  Synthetic oligonucleotide
ccttcgggccaggaacgggtcagtaaaatgcggggacgggacatcagagctcct

SEQ ID NO: 161232 - DNA, 55 bp, Artificial
  Synthetic oligonucleotide
gagcgataattgcatgttagccgagacctatttaagaggcccctcttacctgcct

SEQ ID NO: 161233 - DNA, 55 bp, Artificial
  Synthetic oligonucleotide
gacgcgactagcgtgtcggacatggcatacgacgcatccttcctttcgacgggcc

SEQ ID NO: 161234 - DNA, 55 bp, Artificial
  Synthetic oligonucleotide
gggactcgacatccgttctatcttcgttcttaatcgctcaggtagagccaatttt

SEQ ID NO: 161235 - DNA, 55 bp, Artificial
  Synthetic oligonucleotide
gggacgcttcggatcgcatgggattctgatccacggggatctcctgtcgcggtag

SEQ ID NO: 161236 - DNA, 55 bp, Artificial
  Synthetic oligonucleotide
ggcgtgccttacgcttacgccgatagcgctcaaccccgctgataacctcataccg

SEQ ID NO: 161237 - DNA, 55 bp, Artificial
  Synthetic oligonucleotide
ggcgctaaagctgtcaagctcgcaaactttccaagcggtagtgtactggacgctg

SEQ ID NO: 161238 - DNA, 55 bp, Artificial
  Synthetic oligonucleotide
ggcgaaatcgtccaggaactgtacgcttggttggggcgtgccacggtctactcgg

SEQ ID NO: 161239 - DNA, 55 bp, Artificial
  Synthetic oligonucleotide
ggccggcagagttatcgacgttcaggtttggatcaaggcatggcgtacagagccg

SEQ ID NO: 161240 - DNA, 55 bp, Artificial
  Synthetic oligonucleotide
ggccgcttcgggtaagaccgactacgaagagtgtctggcttgccagtaagctcgt

SEQ ID NO: 161241 - DNA, 55 bp, Artificial
  Synthetic oligonucleotide
ggccatcagtgattttcggatatggtttgggttcctacactcattccagagacga

SEQ ID NO: 161242 - DNA, 56 bp, Artificial
  Synthetic oligonucleotide
ccggaagagcccccgatggttacgaccggctgacgagcaaggcccagtcgaccatc

SEQ ID NO: 161243 - DNA, 55 bp, Artificial
  Synthetic oligonucleotide
ggccacaccggggaaattctctttccacatggaggggagtaagaggcagtcaatc

SEQ ID NO: 161244 - DNA, 55 bp, Artificial
  Synthetic oligonucleotide
ggcaacagtgatgttgcgcccattcgctcagagactacgcaccgctatcaaggct

SEQ ID NO: 161245 - DNA, 55 bp, Artificial
  Synthetic oligonucleotide
ggattgccctgggttcgattcataacgtcgatggaaccttcaccatcgccgatct

SEQ ID NO: 161246 - DNA, 55 bp, Artificial
  Synthetic oligonucleotide
ggagttgcgaatgagagcgtactatcttggcctagtgcgaagttcccaatacgtg

SEQ ID NO: 161247 - DNA, 55 bp, Artificial
  Synthetic oligonucleotide
ggaggatgttcgggcctgccaagtccatttggtctctacgggcatctcgtggccc

SEQ ID NO: 161248 - DNA, 55 bp, Artificial
  Synthetic oligonucleotide
ggactgcgccaagcatcataggagaccaccatgttgtactatacgggtatcgacg

SEQ ID NO: 161249 - DNA, 54 bp, Artificial
  Synthetic oligonucleotide
ggaccggtgtcgcgtcaacggttcgctcaaaacgaacgaagcgtgttcggcttc

SEQ ID NO: 161250 - DNA, 55 bp, Artificial
  Synthetic oligonucleotide
ggacccaataagcgggttttcatgggtgggatgttgtgattcactgcctcgtccg

SEQ ID NO: 161251 - DNA, 55 bp, Artificial
  Synthetic oligonucleotide
ggaacgaccgatgtgcgcgtatttggccaacgtggcgtagtgaggcggttcagac

SEQ ID NO: 161252 - DNA, 55 bp, Artificial
  Synthetic oligonucleotide
ggaacgaactatagcaaacataggtgctggacctacgcaccctcctccgagcaac

SEQ ID NO: 161253 - DNA, 59 bp, Artificial
  Synthetic oligonucleotide
agggagctgcgacgaagtgggctcaggcgccagcctgagcccactcgaactccgttccg

SEQ ID NO: 161254 - DNA, 55 bp, Artificial
  Synthetic oligonucleotide
gcttcgctttatttcaaagctgccttcatgatgcgatgttatctcgacgctgtca

SEQ ID NO: 161255 - DNA, 55 bp, Artificial
  Synthetic oligonucleotide
gctgggcaactcgcctcgcgttaatcggcgactcggctgcaattagctctaacgc

SEQ ID NO: 161256 - DNA, 55 bp, Artificial
  Synthetic oligonucleotide
gctggagcgctaccaagttccgcttttggcgctttatgcaatcaaacagacgcgg

SEQ ID NO: 161257 - DNA, 55 bp, Artificial
  Synthetic oligonucleotide
gctgatcgcacaaagggagatcggccaaacatggcgccgcttcctgaggctgcga

SEQ ID NO: 161258 - DNA, 55 bp, Artificial
  Synthetic oligonucleotide
gctgaaaccataactgacgctggggcggataagatactgtcccagacgcgaggcg

SEQ ID NO: 161259 - DNA, 55 bp, Artificial
  Synthetic oligonucleotide
gcgtggagcgcctggggttcactccgacagtatcaaacctgcttgaggacgaccc

SEQ ID NO: 161260 - DNA, 55 bp, Artificial
  Synthetic oligonucleotide
gcgtcgcgtaagccgcgtccggagtaaatccgtatgcgtatcgtcggtggtgagt

SEQ ID NO: 161261 - DNA, 55 bp, Artificial
  Synthetic oligonucleotide
gcgtaacgcagcgatcgtatgacagcctgtttcgtgtggattgcgtggctcaacg

SEQ ID NO: 161262 - DNA, 55 bp, Artificial
  Synthetic oligonucleotide
gcggtcctgcgtcttgtaaccgagtgagtactagcgcaggcgaggggctccgttg

SEQ ID NO: 161263 - DNA, 54 bp, Artificial
  Synthetic oligonucleotide
aagggtcgcgtaattttcagactgctccgacggagtctccatcccgggcgaacc

SEQ ID NO: 161264 - DNA, 60 bp, Artificial
  Synthetic oligonucleotide
agggatgtgcgagcatggatctcaagaacggatgtgttctatctttgttctctcgccaag

SEQ ID NO: 161265 - DNA, 55 bp, Artificial
  Synthetic oligonucleotide
agacgtccgctacgcttgcggctcgcttgaccgtgccctatcgcgtcaccattgt

SEQ ID NO: 161266 - DNA, 53 bp, Artificial
  Synthetic oligonucleotide
agataacgcgttatttaagcttccgcggttcaataaaggtggacttcgcgttc

SEQ ID NO: 161267 - DNA, 55 bp, Artificial
  Synthetic oligonucleotide
acggtgctcgacatctaggcgaggatggacagacaccgcgccatgccctcaggat

SEQ ID NO: 161268 - DNA, 55 bp, Artificial
  Synthetic oligonucleotide
agagtccagagaactttgatacgggagacgctattgaggggctgtgaagtgggca

SEQ ID NO: 161269 - DNA, 55 bp, Artificial
  Synthetic oligonucleotide
aaccctgccgagataattcccgccgatcattttgtgatcgtgacccgttgctatg

SEQ ID NO: 161270 - DNA, 55 bp, Artificial
  Synthetic oligonucleotide
actgaggaggcacttcgccatggcgttagatgcccggatccgtgaactcgggtcc

SEQ ID NO: 161271 - DNA, 55 bp, Artificial
  Synthetic oligonucleotide
agacgattcgtgctttccgaaagccaaggaccgaacgaacatatccagcgagcgg

SEQ ID NO: 161272 - DNA, 55 bp, Artificial
  Synthetic oligonucleotide
agacgtccagtcgaatgagcgcagggcgctgcaacactgaactcgcgcgtgagtg

SEQ ID NO: 161273 - DNA, 55 bp, Artificial
  Synthetic oligonucleotide
accgggtctctcaactggtatctgcacgggaagttcgactgatgccgccacctta

SEQ ID NO: 161274 - DNA, 55 bp, Artificial
  Synthetic oligonucleotide
agacggttgcgtagctccggagcgtctagcgttgctagtatcctagagggtctag

SEQ ID NO: 161275 - DNA, 60 bp, Artificial
  Synthetic oligonucleotide
ttagattctgatttcgaccatagtagacgcccaagggttgagttagcatcgcttgatgag

SEQ ID NO: 161276 - DNA, 55 bp, Artificial
  Synthetic oligonucleotide
acaattgtcacgacaacgcgtttgtagcgcgtaagcgccggtgttcctttatccg

SEQ ID NO: 161277 - DNA, 55 bp, Artificial
  Synthetic oligonucleotide
actcttatcggtctgacggatgggacgtttgctttgtcgtatgaggaagccaata

SEQ ID NO: 161278 - DNA, 55 bp, Artificial
  Synthetic oligonucleotide
acgattgatcgcgctcgcgcagtgagaccgaaccatcaagtgcgagttcgctgac

SEQ ID NO: 161279 - DNA, 55 bp, Artificial
  Synthetic oligonucleotide
acctaagggcgatcctcccggtcgcagtgagtagactccccatgacgttcctccg

SEQ ID NO: 161280 - DNA, 55 bp, Artificial
  Synthetic oligonucleotide
acctctcgtcgcgacgaggaaacccatccgttcctcacccttcatcgggaggtga

SEQ ID NO: 161281 - DNA, 54 bp, Artificial
  Synthetic oligonucleotide
aagcgctcattagggataagggtccgaggatttccccaagcgaaacaatgggga

SEQ ID NO: 161282 - DNA, 55 bp, Artificial
  Synthetic oligonucleotide
acgcgccgatacgcccaattggttccttaaaccaggccgctctgcctattgtacc

SEQ ID NO: 161283 - DNA, 55 bp, Artificial
  Synthetic oligonucleotide
agacacgctcgggaactctcctccgcaggctgcgcttttgatggggtcccggaga

SEQ ID NO: 161284 - DNA, 54 bp, Artificial
  Synthetic oligonucleotide
acccgaaggcttttacacggtttcgcgtgggcagatgaaacccgatagtcaata

SEQ ID NO: 161285 - DNA, 55 bp, Artificial
  Synthetic oligonucleotide
acgcaggtgtcgattcaaacgtctacctgtctcagtcagacgagaacaacaccgg

SEQ ID NO: 161286 - DNA, 58 bp, Artificial
  Synthetic oligonucleotide
ttgacgttgggtgatcttcagcgcgacagtccctaagtcggccatcaccgtccgggtg

SEQ ID NO: 161287 - DNA, 54 bp, Artificial
  Synthetic oligonucleotide
cttcggatagggataaccgaccatgcggttgcgatcagtgaccgtcaccaattc

SEQ ID NO: 161288 - DNA, 52 bp, Artificial
  Synthetic oligonucleotide
attacagacgacacgataaccgccctcaaagagttttggtccctccccaaat

SEQ ID NO: 161289 - DNA, 54 bp, Artificial
  Synthetic oligonucleotide
ctgactgtcgcattatggccacatcattacattcgcgtaacctcgttacattag

SEQ ID NO: 161290 - DNA, 54 bp, Artificial
  Synthetic oligonucleotide
gctcgatgagcatttgacagcgttgacagacctgaaatttctccaggcacacgc

SEQ ID NO: 161291 - DNA, 54 bp, Artificial
  Synthetic oligonucleotide
acatcggtttccacggctaaaagactgccctgaatcttcgttgcacttacattg

SEQ ID NO: 161292 - DNA, 54 bp, Artificial
  Synthetic oligonucleotide
tctccccatcggattgtctcagccgcaaggactaagctaatggtcgtaagaacg

SEQ ID NO: 161293 - DNA, 54 bp, Artificial
  Synthetic oligonucleotide
acatcgacttcgaagatcgggaacgcatgcaagccgcgccctgaagtctacccc

SEQ ID NO: 161294 - DNA, 54 bp, Artificial
  Synthetic oligonucleotide
gcgagccagagcttcggccgatacccctctcgggcgatagaccagaaaactcag

SEQ ID NO: 161295 - DNA, 54 bp, Artificial
  Synthetic oligonucleotide
cgacgtatgaggccgcacccctccgtcgacttacaggccttcgccgtgtacctc

SEQ ID NO: 161296 - DNA, 54 bp, Artificial
  Synthetic oligonucleotide
gacccgcgctgtgtgcgccaccgactcttgcgcgccccgtctaactatcggcta

SEQ ID NO: 161297 - DNA, 56 bp, Artificial
  Synthetic oligonucleotide
tgtccacgccggaccaaagtaaacctgacccaggaagcagccatcccgccgagaac

SEQ ID NO: 161298 - DNA, 54 bp, Artificial
  Synthetic oligonucleotide
tgtccctcaagcgcacgcctgaggccggtatccgaaagagcggtaaggggcacg

SEQ ID NO: 161299 - DNA, 54 bp, Artificial
  Synthetic oligonucleotide
aaatgcgaaggccaggccccgactttctggagacgcgcctaaaccgcttctgca

SEQ ID NO: 161300 - DNA, 54 bp, Artificial
  Synthetic oligonucleotide
gtcttctgtctgtcgcggattaagcttaggcaacattcccgaaagtcgatttcg

SEQ ID NO: 161301 - DNA, 54 bp, Artificial
  Synthetic oligonucleotide
gaagggcgcttatcgcccaaggtggactctcgctctgcgtttcgatcgctatat

SEQ ID NO: 161302 - DNA, 53 bp, Artificial
  Synthetic oligonucleotide
ggttcgcccagcctaaggtgaagagctccacccgggagcatgagcgtccttca

SEQ ID NO: 161303 - DNA, 53 bp, Artificial
  Synthetic oligonucleotide
tattgtcacggaacgatgttctcaacgtctccgggtcatgtcagataggaccc

SEQ ID NO: 161304 - DNA, 53 bp, Artificial
  Synthetic oligonucleotide
ttgggatacagtattaactaatggccgaaccccatagtcggtcagggctaaaa

SEQ ID NO: 161305 - DNA, 53 bp, Artificial
  Synthetic oligonucleotide
cggatgctactccccggcccctagagggtgcgaaaacagggttgccgcaagat

SEQ ID NO: 161306 - DNA, 53 bp, Artificial
  Synthetic oligonucleotide
ttctttcgccgcgttcaacaagtccgacatagttgcgatgcagacctgcctgt

SEQ ID NO: 161307 - DNA, 53 bp, Artificial
  Synthetic oligonucleotide
cgaaatttaacaagaatgccgtgcgtttgtcgtcacaccggcacctgtagatc

SEQ ID NO: 161308 - DNA, 55 bp, Artificial
  Synthetic oligonucleotide
aggcggacgatcgcaggcggccgtatacggacacccccgagcactcccgcgggga

SEQ ID NO: 161309 - DNA, 53 bp, Artificial
  Synthetic oligonucleotide
agaggctttgatccctttcggccggtcccacgcggaatggccccctagctccg

SEQ ID NO: 161310 - DNA, 53 bp, Artificial
  Synthetic oligonucleotide
gagtgcgtcggacgaccggcctctcgcacgcggacaggcaaaaccctgcgagc

SEQ ID NO: 161311 - DNA, 53 bp, Artificial
  Synthetic oligonucleotide
cgtcaaccgacgggccaacgcttgtatcctgacgtccgaagaaggcccctatc

SEQ ID NO: 161312 - DNA, 53 bp, Artificial
  Synthetic oligonucleotide
agcgcgatcgtattaggcttcaattacggccctgacagcgacccgcttctcgg

SEQ ID NO: 161313 - DNA, 53 bp, Artificial
  Synthetic oligonucleotide
atggggtccaactttgatagggacgcgggccgtgaagcagtgctgcgccctgt

SEQ ID NO: 161314 - DNA, 53 bp, Artificial
  Synthetic oligonucleotide
cacatctccgaccgaagataggaacggcgccgctacggccaaggttcccgaac

SEQ ID NO: 161315 - DNA, 53 bp, Artificial
  Synthetic oligonucleotide
aggacgccaactatctgagcgtcctgcaatacgcggtgaacgtgctcaagatt

SEQ ID NO: 161316 - DNA, 53 bp, Artificial
  Synthetic oligonucleotide
cacgaccgcttaggtccgcagctgatacgcatgaaccgccttctctgccacat

SEQ ID NO: 161317 - DNA, 53 bp, Artificial
  Synthetic oligonucleotide
tgatcgggctcgaaacgattgcgtcgatccggccctcaggaatccgcctgtgg

SEQ ID NO: 161318 - DNA, 53 bp, Artificial
  Synthetic oligonucleotide
cgtagtggcttcgatagaagtcgctcattgctgaaggtctcctaggacaggta

SEQ ID NO: 161319 - DNA, 53 bp, Artificial
  Synthetic oligonucleotide
gatttcccctaggcgccatcgtccctaactccgcctcgggtcaccaacggggc

SEQ ID NO: 161320 - DNA, 53 bp, Artificial
  Synthetic oligonucleotide
ccggtccgcccttgtggttaatcgcccttaagctacactatgttggggtgaac

SEQ ID NO: 161321 - DNA, 53 bp, Artificial
  Synthetic oligonucleotide
tactggaggtccatggttgggtccctggctcgttctagcaacagcaccctaac

SEQ ID NO: 161322 - DNA, 53 bp, Artificial
  Synthetic oligonucleotide
ttcacagagacaactgaccggtgtttatttaccctgcattaaccgtgtgatct

SEQ ID NO: 161323 - DNA, 52 bp, Artificial
  Synthetic oligonucleotide
cggccggtcccacgcggaatggccccctagctccgacgccccttaaggcctg

SEQ ID NO: 161324 - DNA, 52 bp, Artificial
  Synthetic oligonucleotide
ccgagaggccggtaacgctgacaagagcgactgatttacgaggctcagacga

SEQ ID NO: 161325 - DNA, 52 bp, Artificial
  Synthetic oligonucleotide
tatattcgcgaacaattaaccgcgatgcttggccgttcattagctcttctct

SEQ ID NO: 161326 - DNA, 52 bp, Artificial
  Synthetic oligonucleotide
gcggcgtataacgccgctatgcacgagcgcagtttcagacccgatctgacgg

SEQ ID NO: 161327 - DNA, 52 bp, Artificial
  Synthetic oligonucleotide
aactacttccactgatcctcaaaccaggagacccaatgctcgcccatcccac

SEQ ID NO: 161328 - DNA, 52 bp, Artificial
  Synthetic oligonucleotide
cgcttaccccctatccgagctgctgaattgtcatgactggcgtccccgcaaa

SEQ ID NO: 161329 - DNA, 52 bp, Artificial
  Synthetic oligonucleotide
aagctccgaggctgtcgccgtgattaatggctggaggcgagcttcagcacaa

SEQ ID NO: 161330 - DNA, 55 bp, Artificial
  Synthetic oligonucleotide
caagagcttcgtcggggtttgaccgacgatacaaccgtaaatgaagatgccggct

SEQ ID NO: 161331 - DNA, 60 bp, Artificial
  Synthetic oligonucleotide
tggcagtctgcgccaagccgccgccttatggtagagctcgaacggtcttcgcgttctcag

SEQ ID NO: 161332 - DNA, 52 bp, Artificial
  Synthetic oligonucleotide
tcagccatgggaaagcgcggagcagttacgcacgagaagatgtctctaccgc

SEQ ID NO: 161333 - DNA, 52 bp, Artificial
  Synthetic oligonucleotide
gcttgagaaggctaagtctcgtggcgatgctgtcacgtagttctcgtaacgt

SEQ ID NO: 161334 - DNA, 52 bp, Artificial
  Synthetic oligonucleotide
cccgaaatacgccggaaagcgagtcgggagccatcatcacgcgtcagggcgc

SEQ ID NO: 161335 - DNA, 52 bp, Artificial
  Synthetic oligonucleotide
gatccctttcggccggtcccacgcggaatggccccctagctccgacgcccct

SEQ ID NO: 161336 - DNA, 52 bp, Artificial
  Synthetic oligonucleotide
ggggacacaattgatcaactttgagtcgctagaaaacctgccggcctatctg

SEQ ID NO: 161337 - DNA, 52 bp, Artificial
  Synthetic oligonucleotide
gggcgtttgggagaaacgcttctgcatttgggtctttcgcagtcgcgaagca

SEQ ID NO: 161338 - DNA, 52 bp, Artificial
  Synthetic oligonucleotide
gccacttgctccgttcgttcagttcctcgtctgtcctcaggtgtgggtgatc

SEQ ID NO: 161339 - DNA, 52 bp, Artificial
  Synthetic oligonucleotide
gggttgcgaaatttgcaactctaaaacggaaggtatgttcagcgccgcgcgg

SEQ ID NO: 161340 - DNA, 52 bp, Artificial
  Synthetic oligonucleotide
gaaagcgtttagccttatggtgtcgccctgagcgagcgtccctcaagacgct

SEQ ID NO: 161341 - DNA, 52 bp, Artificial
  Synthetic oligonucleotide
gccccagtaccggggctctgaagggtggggtgacaagttgtggaaggcgggt

SEQ ID NO: 161342 - DNA, 55 bp, Artificial
  Synthetic oligonucleotide
tttactaaacgtagatcgaaaggatttatgctcgcttaccgcctccctgagaagt

SEQ ID NO: 161343 - DNA, 52 bp, Artificial
  Synthetic oligonucleotide
gcccttcaaatggaagacggcaaacctggcgctagcgcgttccccgcgcaga

SEQ ID NO: 161344 - DNA, 52 bp, Artificial
  Synthetic oligonucleotide
tgattcactgcgacgttttctagcacccgtgggcccgcgaggcaaagtttcg

SEQ ID NO: 161345 - DNA, 52 bp, Artificial
  Synthetic oligonucleotide
ggccacacgcaccgccaaaggggtgatatgtggaggaggctctgtcttaaac

SEQ ID NO: 161346 - DNA, 52 bp, Artificial
  Synthetic oligonucleotide
aagatgggtcacgacatcctgagtgatctcgaggcagtacccgtacggatag

SEQ ID NO: 161347 - DNA, 52 bp, Artificial
  Synthetic oligonucleotide
ggaagcggcccctcccgggcaaggtcacatctgctaggagttggatcatgat

SEQ ID NO: 161348 - DNA, 52 bp, Artificial
  Synthetic oligonucleotide
ggttcaccagtgtgccaacaccgaatgtactcaggtgaccaaatattcccgg

SEQ ID NO: 161349 - DNA, 52 bp, Artificial
  Synthetic oligonucleotide
tcgaggccaatgcgccacacagctatcgggtcggtgcgacaaccccaaccct

SEQ ID NO: 161350 - DNA, 52 bp, Artificial
  Synthetic oligonucleotide
ctcgggtccaagcctttccgctagatccggccgagacacctccaggcctcga

SEQ ID NO: 161351 - DNA, 52 bp, Artificial
  Synthetic oligonucleotide
acgcggaatggccccctagctccgacgccccttaaggcctgctacggtccgg

SEQ ID NO: 161352 - DNA, 52 bp, Artificial
  Synthetic oligonucleotide
gcctagttccagttccgcgggaccgacctcttgcaggcgcgagcaggaccca

SEQ ID NO: 161353 - DNA, 60 bp, Artificial
  Synthetic oligonucleotide
tgcctaggccgctgaggccgctagctcatgccagcccagtgcaacgcttgagacgtcagg

SEQ ID NO: 161354 - DNA, 52 bp, Artificial
  Synthetic oligonucleotide
tcgtccaggcttatgtggacgtcaggcgggatcaacgtatcgtagagatccg

SEQ ID NO: 161355 - DNA, 51 bp, Artificial
  Synthetic oligonucleotide
cagcatctctgagcaatggacgttatcccggaaaacaggaagttgatgcgt

SEQ ID NO: 161356 - DNA, 51 bp, Artificial
  Synthetic oligonucleotide
agaagcttgaccgctacagttgcacaaacgcgcagctcgccacaacggaga

SEQ ID NO: 161357 - DNA, 51 bp, Artificial
  Synthetic oligonucleotide
ggggcttaaccgaccggtgtgtgtgccctgggtgtttgcacgaaacctcaa

SEQ ID NO: 161358 - DNA, 51 bp, Artificial
  Synthetic oligonucleotide
gctgcccccccataagcagccgagtcccactgggcgtaaagcggagtcgaa

SEQ ID NO: 161359 - DNA, 51 bp, Artificial
  Synthetic oligonucleotide
cgatggcctgcccgcgtcagggtaattcaacgaggaaagccggtcgtagcc

SEQ ID NO: 161360 - DNA, 51 bp, Artificial
  Synthetic oligonucleotide
cgcttcccgacgtgcatatcggattggagttaggggttccagcagccgaga

SEQ ID NO: 161361 - DNA, 51 bp, Artificial
  Synthetic oligonucleotide
caccagaccggctaggcttggaggatgttcgggcctgccaagtccatttgg

SEQ ID NO: 161362 - DNA, 51 bp, Artificial
  Synthetic oligonucleotide
ccacttggcaacgttaccgtcgtgctagccgcaaacgggcttgtgctcgac

SEQ ID NO: 161363 - DNA, 51 bp, Artificial
  Synthetic oligonucleotide
ggtccaacggcctgtgagtgccgtcgcagtaccgagttgtgatagaatacg

SEQ ID NO: 161364 - DNA, 59 bp, Artificial
  Synthetic oligonucleotide
tgagtatccgacagcccggagaaagattcccacggctgtaatgtttcggcgcgcccagc

SEQ ID NO: 161365 - DNA, 51 bp, Artificial
  Synthetic oligonucleotide
gtaccataagccgttttggatcagaaacctatgggttgcacgcagcccttt

SEQ ID NO: 161366 - DNA, 51 bp, Artificial
  Synthetic oligonucleotide
ggttacggcaagaccaaaccacgtaagggcgtattccagatgccgattgga

SEQ ID NO: 161367 - DNA, 51 bp, Artificial
  Synthetic oligonucleotide
actgtcccgtcaggtttcgatcgataccgttcgccgcaagaatattggcga

SEQ ID NO: 161368 - DNA, 51 bp, Artificial
  Synthetic oligonucleotide
ccaagtccatttggtctctacgggcatctcgtggcccgccctgaaccagac

SEQ ID NO: 161369 - DNA, 51 bp, Artificial
  Synthetic oligonucleotide
aagagcgcgactaacaggcttggcttgatcttgggccgagaggctttaggt

SEQ ID NO: 161370 - DNA, 51 bp, Artificial
  Synthetic oligonucleotide
ccttgcggtgaagaatgtaatcctgctcccgtccgggccagtcgcaaccag

SEQ ID NO: 161371 - DNA, 51 bp, Artificial
  Synthetic oligonucleotide
ggtcggatcgggcacagacattcttcgggtgtgaggctttgcgggtcggga

SEQ ID NO: 161372 - DNA, 51 bp, Artificial
  Synthetic oligonucleotide
cccgcgacggggttcgatgaactctaccgagtgagcgacttcgcctgagtc

SEQ ID NO: 161373 - DNA, 51 bp, Artificial
  Synthetic oligonucleotide
atacaccagcggacgcttgcaataagtggccggggcgcccaattcgcaacc

SEQ ID NO: 161374 - DNA, 51 bp, Artificial
  Synthetic oligonucleotide
aaccttagggctatttgttagcgtgcgctcaagcttggcgtcctagcctgg

SEQ ID NO: 161375 - DNA, 57 bp, Artificial
  Synthetic oligonucleotide
attaatgagttcgtgcctattttgaccctgcccaaaccttgcgagcgatacgctgtt

SEQ ID NO: 161376 - DNA, 51 bp, Artificial
  Synthetic oligonucleotide
ggacaagggaagatgcgcacatctagcgatcacttttcaaccgaccgctag

SEQ ID NO: 161377 - DNA, 51 bp, Artificial
  Synthetic oligonucleotide
ggacaattggctccgcctagcgaatacgaacgtgaggccatcaagccagtt

SEQ ID NO: 161378 - DNA, 51 bp, Artificial
  Synthetic oligonucleotide
tgaactatgcgcccgatttcatcggtattcctaagtacacgacggagcttt

SEQ ID NO: 161379 - DNA, 51 bp, Artificial
  Synthetic oligonucleotide
agggcctgcatatcacagtgggcggcatccctcgattggtcgtggccgaca

SEQ ID NO: 161380 - DNA, 51 bp, Artificial
  Synthetic oligonucleotide
accgctcgcgtaggttcagagcgggtaactgggcggtaggggttcagagaa

SEQ ID NO: 161381 - DNA, 51 bp, Artificial
  Synthetic oligonucleotide
tgcgccacacagctatcgggtcggtgcgacaaccccaaccctgacggtcat

SEQ ID NO: 161382 - DNA, 51 bp, Artificial
  Synthetic oligonucleotide
cctacgccgcagccgtgctatggcgcttggggtaatggaccgccgggattg

SEQ ID NO: 161383 - DNA, 51 bp, Artificial
  Synthetic oligonucleotide
tgcttgttggcggagcgcttgtcagccaatcccaggacgcgggtctgtctg

SEQ ID NO: 161384 - DNA, 51 bp, Artificial
  Synthetic oligonucleotide
tggcaaccgactccggtgtgccacgcacatcgttcgacagcacccgacctt

SEQ ID NO: 161385 - DNA, 51 bp, Artificial
  Synthetic oligonucleotide
gaaggggcgacggccataagtctggccagctatctgacgacgggcaatttt

SEQ ID NO: 161386 - DNA, 60 bp, Artificial
  Synthetic oligonucleotide
gaccgcatgcgttgcgcagcaatgcataactgcgcccttgtcacgtcacgaccacaaggg

SEQ ID NO: 161387 - DNA, 51 bp, Artificial
  Synthetic oligonucleotide
tggttctttcgtctctggaatgagtgtaggaacccaaaccatatccgaaaa

SEQ ID NO: 161388 - DNA, 51 bp, Artificial
  Synthetic oligonucleotide
tgtttgcaggaccgagagacgggaggctgaattgacctacaaggctatcat

SEQ ID NO: 161389 - DNA, 51 bp, Artificial
  Synthetic oligonucleotide
gcataggcgaacgcggtctctgtatctgcacgggtggtagtggctgtaaaa

SEQ ID NO: 161390 - DNA, 51 bp, Artificial
  Synthetic oligonucleotide
gatcagtcaccgatgaaccggacctttcggccattgaagtcttcacgtgca

SEQ ID NO: 161391 - DNA, 51 bp, Artificial
  Synthetic oligonucleotide
aaagccgctaacgcgactgggtcgatccttgtctgtcgggccgaagccgaa

SEQ ID NO: 161392 - DNA, 51 bp, Artificial
  Synthetic oligonucleotide
ggaccggacgtcggacagaggcgataacgcccgccgtcgcaaggatccgtg

SEQ ID NO: 161393 - DNA, 51 bp, Artificial
  Synthetic oligonucleotide
gtgcacatgttcgcccagctgaagggaacgtatggcctgtcggtcttctcg

SEQ ID NO: 161394 - DNA, 51 bp, Artificial
  Synthetic oligonucleotide
caaagatcgggtccttgattcacggagatagtcatgtctgacgacaataag

SEQ ID NO: 161395 - DNA, 51 bp, Artificial
  Synthetic oligonucleotide
gggaactttcgtagattcaactacttacgatgcaaatgcccagtcaccgta

SEQ ID NO: 161396 - DNA, 51 bp, Artificial
  Synthetic oligonucleotide
cgggacaccaagtttgcaacgcggccgctcttctggcgaacggccccgctc

SEQ ID NO: 161397 - DNA, 56 bp, Artificial
  Synthetic oligonucleotide
cgatcgatcttgggtcaggaggccgaacgatccttgccgctcccaacgggccccca

SEQ ID NO: 161398 - DNA, 51 bp, Artificial
  Synthetic oligonucleotide
gttgtgctccagcggcctttggttggcttgtatccggtgagatggttgaaa

SEQ ID NO: 161399 - DNA, 51 bp, Artificial
  Synthetic oligonucleotide
ccgacgtgagcttgcagcctcgcgcctcccctcacatccatttcgatacat

SEQ ID NO: 161400 - DNA, 51 bp, Artificial
  Synthetic oligonucleotide
taccgtcctgacatcgggccaagccctgacggtattcatttccagcaagtc

SEQ ID NO: 161401 - DNA, 51 bp, Artificial
  Synthetic oligonucleotide
tacgtggcgatagatgccggccccttcgtagaaccacccttcaccatagga

SEQ ID NO: 161402 - DNA, 51 bp, Artificial
  Synthetic oligonucleotide
aacgcggtcaatcgctcaaccgaggccatgtatctgccgggggctggaacc

SEQ ID NO: 161403 - DNA, 51 bp, Artificial
  Synthetic oligonucleotide
agagcctcatttacccgcttgcgagggccggtcggcatggctataagcccc

SEQ ID NO: 161404 - DNA, 51 bp, Artificial
  Synthetic oligonucleotide
ggcggagcttcgatcgccacgacttccatctgggaccgtccggtctcaggg

SEQ ID NO: 161405 - DNA, 51 bp, Artificial
  Synthetic oligonucleotide
tatgaagatgctcagcggatacagcaccttacccagagtcttgttgaaatc

SEQ ID NO: 161406 - DNA, 51 bp, Artificial
  Synthetic oligonucleotide
atctgagtgagtcaatcggatcggaaagggccgcacggctgcggttaggcg

SEQ ID NO: 161407 - DNA, 51 bp, Artificial
  Synthetic oligonucleotide
tcactgaacaccgcgtcattcctttcaccgtgcaacggaggtggaaattgc

SEQ ID NO: 161408 - DNA, 58 bp, Artificial
  Synthetic oligonucleotide
aggggtggctcaccactcgcttccttggcgccgccatcagctatgaaggaacggagct

SEQ ID NO: 161409 - DNA, 51 bp, Artificial
  Synthetic oligonucleotide
atcacagtgggcggcatccctcgattggtcgtggccgacacgttcgtgtta

SEQ ID NO: 161410 - DNA, 51 bp, Artificial
  Synthetic oligonucleotide
cctgacggggcctccctcacgcggcaatcgcttcactggcgtccgcctccg

SEQ ID NO: 161411 - DNA, 50 bp, Artificial
  Synthetic oligonucleotide
aatcgacaaggcgaagcccaacaggaccccgccgatcaaaccccacggac

SEQ ID NO: 161412 - DNA, 50 bp, Artificial
  Synthetic oligonucleotide
ggacattcacgtcggacgctgcaccctacgtgtgcccaagcctgcgcgct

SEQ ID NO: 161413 - DNA, 50 bp, Artificial
  Synthetic oligonucleotide
aatctccgggaaaatccggttggcctggaaggcgtttctcgcgtcctgcg

SEQ ID NO: 161414 - DNA, 50 bp, Artificial
  Synthetic oligonucleotide
aatcggcactgtggttttccgtcgcagggcgcatgctgacagcctttata

SEQ ID NO: 161415 - DNA, 50 bp, Artificial
  Synthetic oligonucleotide
aatccctccggggtcgccctcgcaaaacgcggtgctgagccccatatcga

SEQ ID NO: 161416 - DNA, 50 bp, Artificial
  Synthetic oligonucleotide
ggaatgatcgagctcagcgcctgtcgcagcatgggtcagcctctagcgta

SEQ ID NO: 161417 - DNA, 50 bp, Artificial
  Synthetic oligonucleotide
aatcccagaccttacccgtcagacggacgtaacggcccttgggcaagccg

SEQ ID NO: 161418 - DNA, 50 bp, Artificial
  Synthetic oligonucleotide
accccgcacaccagatcttgcgccctctccgctcgcacggtccttatgtg

SEQ ID NO: 161419 - DNA, 57 bp, Artificial
  Synthetic oligonucleotide
aagcgtgtgggcaaaggcccaatactccaggagtctggcgctctgggcttggggatc

SEQ ID NO: 161420 - DNA, 50 bp, Artificial
  Synthetic oligonucleotide
acccccaggtcaggcgcgatctgaaatcggggtctgtcttgccagcgcgg

SEQ ID NO: 161421 - DNA, 50 bp, Artificial
  Synthetic oligonucleotide
acccacagccgccccaacaacatattgtgccgcagtgggccctggccact

SEQ ID NO: 161422 - DNA, 50 bp, Artificial
  Synthetic oligonucleotide
accatgcatcgcgcccttgcagacggatatgcctcagcggggtccgatat

SEQ ID NO: 161423 - DNA, 50 bp, Artificial
  Synthetic oligonucleotide
accagcgaaccggctcttcggaattctggaactccctcagcgccgcacgg

SEQ ID NO: 161424 - DNA, 50 bp, Artificial
  Synthetic oligonucleotide
accagcacgggtgcccagcgcgagattcaggtgattgctccgaattggaa

SEQ ID NO: 161425 - DNA, 50 bp, Artificial
  Synthetic oligonucleotide
accacgcgaaactcaccgaccgctaagcctgtcgttgcccccattgacta

SEQ ID NO: 161426 - DNA, 50 bp, Artificial
  Synthetic oligonucleotide
accaaaaattcacccgaccgagcgaaggtggccggtctgcttgacaggct

SEQ ID NO: 161427 - DNA, 50 bp, Artificial
  Synthetic oligonucleotide
acattgtgatcccctctctcgaatctcgcgcgaagggcctctggcccccg

SEQ ID NO: 161428 - DNA, 50 bp, Artificial
  Synthetic oligonucleotide
acatgtcagatcaccgtccaaccggtccagccgcatcagggctagcgact

SEQ ID NO: 161429 - DNA, 50 bp, Artificial
  Synthetic oligonucleotide
acatgacaaacgtcacctcggacgcgtgaccccaggcactgcaacgcttt

SEQ ID NO: 161430 - DNA, 57 bp, Artificial
  Synthetic oligonucleotide
gctaaggcgggctccgatcagccgccccattcaagtcgcgggtctgaggactcggcc

SEQ ID NO: 161431 - DNA, 50 bp, Artificial
  Synthetic oligonucleotide
acatcggtcgcggcccgcatttacggtggatttgacgcgcggatcggctc

SEQ ID NO: 161432 - DNA, 50 bp, Artificial
  Synthetic oligonucleotide
acatcgatcgtgtccctgttccagccgagctgagccagtagcccctccgc

SEQ ID NO: 161433 - DNA, 50 bp, Artificial
  Synthetic oligonucleotide
acaggggcggcgaatcgcgaggttcaggatctgtcaggcacatggaccta

SEQ ID NO: 161434 - DNA, 50 bp, Artificial
  Synthetic oligonucleotide
acaggcgcacgcggtccgctagcccgtagatggcgaaaggggcggggtgt

SEQ ID NO: 161435 - DNA, 50 bp, Artificial
  Synthetic oligonucleotide
acaggcagcggggaatgacgccgtaaccggaccgcacacgtagcgactgg

SEQ ID NO: 161436 - DNA, 50 bp, Artificial
  Synthetic oligonucleotide
acagcccatgtgggacgatccgtgatgaaccccgcgactgcgaggcttct

SEQ ID NO: 161437 - DNA, 50 bp, Artificial
  Synthetic oligonucleotide
acagaacgccgcaatctcgcctcacacgtgaacgccggaccccgtgaagt

SEQ ID NO: 161438 - DNA, 50 bp, Artificial
  Synthetic oligonucleotide
acactcgcgcgaacgccctttcgacgcggttaacggcttgtgaccgatcg

SEQ ID NO: 161439 - DNA, 50 bp, Artificial
  Synthetic oligonucleotide
acacggcctctattgcgcttttcaaggcggagcgccgatcagctgagacc

SEQ ID NO: 161440 - DNA, 50 bp, Artificial
  Synthetic oligonucleotide
acaatcgggcggggctatacgggcggaaacaatctcgacctcgggtctgc

SEQ ID NO: 161441 - DNA, 57 bp, Artificial
  Synthetic oligonucleotide
caccgttgccccggacgtctagacggttgcgtagctccggagcgtctagcgttgcta

SEQ ID NO: 161442 - DNA, 56 bp, Artificial
  Synthetic oligonucleotide
aatattcgccttcctccgtagcgcctaattaccgagacatcgttgcgacctacaga

SEQ ID NO: 161443 - DNA, 50 bp, Artificial
  Synthetic oligonucleotide
acaatcgcgtcaggaacgggagcgcccaaacgcctgtctggttgtaacga

SEQ ID NO: 161444 - DNA, 50 bp, Artificial
  Synthetic oligonucleotide
acaaggtcgggagacgctccgaccgccagtcaggatgtggtctaggcggg

SEQ ID NO: 161445 - DNA, 50 bp, Artificial
  Synthetic oligonucleotide
acaaacggtggatccccgcctttgggtggcccattccaggcgcgaaatcc

SEQ ID NO: 161446 - DNA, 50 bp, Artificial
  Synthetic oligonucleotide
aatgtccggttgtgtacatcggtcccctgtcaggcgtgggtgcgagatga

SEQ ID NO: 161447 - DNA, 50 bp, Artificial
  Synthetic oligonucleotide
aatggggcgcgtccgctcagtcgccgccctttgctgtcagatcagcctcg

SEQ ID NO: 161448 - DNA, 50 bp, Artificial
  Synthetic oligonucleotide
aatgggcgcctcggactccctgctcattcctcccacgacgaaacccgaga

SEQ ID NO: 161449 - DNA, 50 bp, Artificial
  Synthetic oligonucleotide
aatgcggcagtgagacctccgcgccgacactctgttccagcttggcgaag

SEQ ID NO: 161450 - DNA, 50 bp, Artificial
  Synthetic oligonucleotide
aacccgcctgatctacgccgagtccgggcggtttcccgagctcgcccaac

SEQ ID NO: 161451 - DNA, 50 bp, Artificial
  Synthetic oligonucleotide
aacccgggggacgggcgagctgggatactagagcgcaagtgtagggtctg

SEQ ID NO: 161452 - DNA, 50 bp, Artificial
  Synthetic oligonucleotide
aaccctccgctcgacaacgtccctcccaaattcccgaagcgagaccgtgt

SEQ ID NO: 161453 - DNA, 56 bp, Artificial
  Synthetic oligonucleotide
gtgttggccgattgaacgccgcggaagacaacgtagcgcgcggtcggttctgcccc

SEQ ID NO: 161454 - DNA, 50 bp, Artificial
  Synthetic oligonucleotide
aacccttgaccaaccgcaagcctgcaagccgtccccggaaaggctgaaac

SEQ ID NO: 161455 - DNA, 50 bp, Artificial
  Synthetic oligonucleotide
aaccgcccgaacgcgctctaagcgtaaacagacaggctctagcgctccgg

SEQ ID NO: 161456 - DNA, 50 bp, Artificial
  Synthetic oligonucleotide
aaccggagcaaacttgctcgaaatctcggcccccacctgttcggtcggac

SEQ ID NO: 161457 - DNA, 50 bp, Artificial
  Synthetic oligonucleotide
aaccggctccgatccatggacatctaatgcccggcctggcgacaacaagc

SEQ ID NO: 161458 - DNA, 50 bp, Artificial
  Synthetic oligonucleotide
aaccggggttgcccccgtagcgtctcggcaatcagggagggtgctaagtg

SEQ ID NO: 161459 - DNA, 50 bp, Artificial
  Synthetic oligonucleotide
tctcgttggagggcctgcatatcacagtgggcggcatccctcgattggtc

SEQ ID NO: 161460 - DNA, 50 bp, Artificial
  Synthetic oligonucleotide
aaccttgctccgatcagagcgggggcgcaaaaatcaggtccactcggcca

SEQ ID NO: 161461 - DNA, 50 bp, Artificial
  Synthetic oligonucleotide
tcgctgaaacttccatcatgacggcactcctaattaccgcaatttacggg

SEQ ID NO: 161462 - DNA, 50 bp, Artificial
  Synthetic oligonucleotide
aacgaccacgatccccagaatggcgtagcgacggcccgatgacagcattt

SEQ ID NO: 161463 - DNA, 50 bp, Artificial
  Synthetic oligonucleotide
aacgcacgcgccacttgtcccaagcataagacaggtcagccgtgccggtg

SEQ ID NO: 161464 - DNA, 55 bp, Artificial
  Synthetic oligonucleotide
cgcggcaatcgcttcactggcgtccgcctccgatatgcctgtctcattgccatcc

SEQ ID NO: 161465 - DNA, 50 bp, Artificial
  Synthetic oligonucleotide
aacgcacgtcacccccaatcgctctcctaggcgacgggtccgctctcccc

SEQ ID NO: 161466 - DNA, 50 bp, Artificial
  Synthetic oligonucleotide
aacgcagccctccgtttgcctgggatgtaccgttcgtagtccgtcacggc

SEQ ID NO: 161467 - DNA, 50 bp, Artificial
  Synthetic oligonucleotide
tcacgacccaatagactgcgcagggccgattgatgatccttggtaagctc

SEQ ID NO: 161468 - DNA, 50 bp, Artificial
  Synthetic oligonucleotide
aacgcagccggtctcaggcggatctgtatccccagacgtgtggcggtgcg

SEQ ID NO: 161469 - DNA, 50 bp, Artificial
  Synthetic oligonucleotide
aacgccaacccccgctttgagcggatttccatttgaaacgggcgggtcca

SEQ ID NO: 161470 - DNA, 50 bp, Artificial
  Synthetic oligonucleotide
aacgcttgaggactgaaagggcgcgctgaggggacaattcgggccgaaac

SEQ ID NO: 161471 - DNA, 50 bp, Artificial
  Synthetic oligonucleotide
tacctaggtgagggccttcgtaaggagcttcgagcgagaactcattcctc

SEQ ID NO: 161472 - DNA, 50 bp, Artificial
  Synthetic oligonucleotide
aaacacgggtggccgtcacaaatccgttgcgtcccgaccgcaaaccggag

SEQ ID NO: 161473 - DNA, 50 bp, Artificial
  Synthetic oligonucleotide
aaaccagacattccacccctctggctcgcccaaacagccctatggggcga

SEQ ID NO: 161474 - DNA, 50 bp, Artificial
  Synthetic oligonucleotide
aaaccgcgagatgggatcgaagcagagcccgctttctccggcactaggtt

SEQ ID NO: 161475 - DNA, 55 bp, Artificial
  Synthetic oligonucleotide
cgcctctgcggtgatctccagacgtagcgaaggccagtcctcgcgctgcttatga

SEQ ID NO: 161476 - DNA, 50 bp, Artificial
  Synthetic oligonucleotide
aaacgctgcggaaggggcaagttattgctccgaggaccgtcatgcaccca

SEQ ID NO: 161477 - DNA, 50 bp, Artificial
  Synthetic oligonucleotide
ttggtctctacgggcatctcgtggcccgccctgaaccagactgtttgcgc

SEQ ID NO: 161478 - DNA, 50 bp, Artificial
  Synthetic oligonucleotide
aaactggagtcctgctccataactgacgcgcccccacgcacgcttaagcg

SEQ ID NO: 161479 - DNA, 50 bp, Artificial
  Synthetic oligonucleotide
aaagcgcaatcggtcatacgcggcctcagggttgcaaacgtgcggaatcg

SEQ ID NO: 161480 - DNA, 50 bp, Artificial
  Synthetic oligonucleotide
aaaggaacgtgagcgtcatgaactccgtgtgccgctcccacgcgacactc

SEQ ID NO: 161481 - DNA, 50 bp, Artificial
  Synthetic oligonucleotide
ttatatcgagcactatgggttgcttcgcgagaaaatggcggacgggcgtt

SEQ ID NO: 161482 - DNA, 50 bp, Artificial
  Synthetic oligonucleotide
aaaggcgcacttgccaatacccgtgttactgcggcaaggtgcactgaggg

SEQ ID NO: 161483 - DNA, 50 bp, Artificial
  Synthetic oligonucleotide
ttacgaccggctgacgagcaaggcccagtcgaccatcgcgcaccctgtcc

SEQ ID NO: 161484 - DNA, 50 bp, Artificial
  Synthetic oligonucleotide
aaagttcgactccgcccgatacgtgcgttgacgccgcagggtccgatagg

SEQ ID NO: 161485 - DNA, 50 bp, Artificial
  Synthetic oligonucleotide
aaatccaggattgcgcggcagagtggacacgcccccgttgaggggtcaat

SEQ ID NO: 161486 - DNA, 55 bp, Artificial
  Synthetic oligonucleotide
cctcagagcgcatgagggcttaacccaacgccgaaaccttgacctttcgccgcct

SEQ ID NO: 161487 - DNA, 50 bp, Artificial
  Synthetic oligonucleotide
aacaacgagtggcatcacgtccggcactggtaagggtcgcaatggctgca

SEQ ID NO: 161488 - DNA, 50 bp, Artificial
  Synthetic oligonucleotide
aacaacggcgcgtatcgccaacaggccaggcgtctaaggccctagcccta

SEQ ID NO: 161489 - DNA, 50 bp, Artificial
  Synthetic oligonucleotide
aacagaggcctggcgttgttcgatcttcacagacaggccgtcgggcgggg

SEQ ID NO: 161490 - DNA, 50 bp, Artificial
  Synthetic oligonucleotide
aacataagcggcgttcgcacatacggcgaagcaagggcgtcgatccacgg

SEQ ID NO: 161491 - DNA, 50 bp, Artificial
  Synthetic oligonucleotide
tgcgggtgtgcgaggtagccattcggaaccgggcggttgtccgctcagcg

SEQ ID NO: 161492 - DNA, 50 bp, Artificial
  Synthetic oligonucleotide
aacatgcgagtctccgtcttcgcgccgtcagcctagcctgttcaggccgg

SEQ ID NO: 161493 - DNA, 50 bp, Artificial
  Synthetic oligonucleotide
aacatggactcgccctcttttgagtcgcgcttcctaagcggcccgccgtc

SEQ ID NO: 161494 - DNA, 50 bp, Artificial
  Synthetic oligonucleotide
aaccatgagcctcagttgcatggctgtgcgtcatgcttgtggggacgggg

SEQ ID NO: 161495 - DNA, 50 bp, Artificial
  Synthetic oligonucleotide
aacccgcaaataacaaacgtcatagccgggaccgcagccccgctaaggct

SEQ ID NO: 161496 - DNA, 50 bp, Artificial
  Synthetic oligonucleotide
aagcctccggatggggctccaggatctcgtcaggatcgctgggctgggtc

SEQ ID NO: 161497 - DNA, 55 bp, Artificial
  Synthetic oligonucleotide
cgccgctttacgcctcttggcgaacgacctagaaatgttaccgctaacgcgagaa

SEQ ID NO: 161498 - DNA, 50 bp, Artificial
  Synthetic oligonucleotide
aagcctgtcgcgtcgagggctcgcttctgagtacgggtgcagtatgagcc

SEQ ID NO: 161499 - DNA, 50 bp, Artificial
  Synthetic oligonucleotide
aagcgaccaaccgaggccgaaatgcggcaatatgtcacgatggcgcgttt

SEQ ID NO: 161500 - DNA, 50 bp, Artificial
  Synthetic oligonucleotide
aagcgccagcgaacttcgaaatccgagcggctatcttcgggtccgccctt

SEQ ID NO: 161501 - DNA, 50 bp, Artificial
  Synthetic oligonucleotide
aagcgtgcgctcttgccattagcgcctacgacggaaacgatgcgtcccgt

SEQ ID NO: 161502 - DNA, 50 bp, Artificial
  Synthetic oligonucleotide
aagcgttaccgtgaaatcggtgttcgccgttgacacctttgccgcccggt

SEQ ID NO: 161503 - DNA, 50 bp, Artificial
  Synthetic oligonucleotide
aagctatgagcgttgcgcttctgtcgggcgagagtgggggctgctatcct

SEQ ID NO: 161504 - DNA, 50 bp, Artificial
  Synthetic oligonucleotide
aagctccagcgatcgagagtcgaccttggccctgctatggcccagcgcct

SEQ ID NO: 161505 - DNA, 50 bp, Artificial
  Synthetic oligonucleotide
aaggcactccgggtactgaccggccactggtagaagcgaccgttgcaagg

SEQ ID NO: 161506 - DNA, 50 bp, Artificial
  Synthetic oligonucleotide
ggcgtatagcatgctaccgtaattggtatgccggactacgcgtgtgctgt

SEQ ID NO: 161507 - DNA, 50 bp, Artificial
  Synthetic oligonucleotide
aaggccgtcgatgcatgaggccctgcgaaaagggctgacaagcgaatgtg

SEQ ID NO: 161508 - DNA, 55 bp, Artificial
  Synthetic oligonucleotide
cctcatgggtcatcgtgttaaggtctggcgagcattgaaggcagggcgcgagtgt

SEQ ID NO: 161509 - DNA, 50 bp, Artificial
  Synthetic oligonucleotide
aaggcgcccgtgtagagacggagtcggtttggcgcaaccccgcatgttgg

SEQ ID NO: 161510 - DNA, 50 bp, Artificial
  Synthetic oligonucleotide
aaggcgcgaaagctagagccgggattcgcctttgcgtaccccgcgatcca

SEQ ID NO: 161511 - DNA, 50 bp, Artificial
  Synthetic oligonucleotide
aaggcggtgtggtttccatagggcggatccagacgttgccattcggggac

SEQ ID NO: 161512 - DNA, 50 bp, Artificial
  Synthetic oligonucleotide
aaggcgtactcccagaccgtgggtagcccgcaatccggctgaggtttcgc

SEQ ID NO: 161513 - DNA, 50 bp, Artificial
  Synthetic oligonucleotide
aagggcgcaactcactcaggaggaggcggctcaatgagccttgaaacccc

SEQ ID NO: 161514 - DNA, 50 bp, Artificial
  Synthetic oligonucleotide
aagtgcggctagagcctgctctcctgttgctgacttctcgccggaaggtg

SEQ ID NO: 161515 - DNA, 50 bp, Artificial
  Synthetic oligonucleotide
aagtggaccgtccggctgagcgccatcgctatgtaagcctgtcgaactgg

SEQ ID NO: 161516 - DNA, 50 bp, Artificial
  Synthetic oligonucleotide
aatatccccacaccgtcatgactcgacggcgcggacaggggcaagtgaaa

SEQ ID NO: 161517 - DNA, 50 bp, Artificial
  Synthetic oligonucleotide
aacggatcgccgtggtcctggatcggctcgcactggcagatctcgcagaa

SEQ ID NO: 161518 - DNA, 50 bp, Artificial
  Synthetic oligonucleotide
aacggggcggtcccactccaccaccctatctcagagcgccgtgcggtcaa

SEQ ID NO: 161519 - DNA, 55 bp, Artificial
  Synthetic oligonucleotide
cctgcctttaggcggttatgtgaaattttcttgcgacgaacatgtgtcttcaatg

SEQ ID NO: 161520 - DNA, 50 bp, Artificial
  Synthetic oligonucleotide
aacggttgtccgagggtggagcggtcaaagagtccgcgtggattcaccgt

SEQ ID NO: 161521 - DNA, 50 bp, Artificial
  Synthetic oligonucleotide
aacgtctccagcgcgggcttcgcagcttggaggatgacaatatggggcgc

SEQ ID NO: 161522 - DNA, 50 bp, Artificial
  Synthetic oligonucleotide
aactcatcggaccttcgcgcgcttgtgattggtcgtggaattcgggggcg

SEQ ID NO: 161523 - DNA, 50 bp, Artificial
  Synthetic oligonucleotide
aactccggacttcaggcggccggacatagtctgcgtcccgcgtcagaaca

SEQ ID NO: 161524 - DNA, 50 bp, Artificial
  Synthetic oligonucleotide
aactccgtgtgccgctcccacgcgacactcatctgtccctcgcgccacgt

SEQ ID NO: 161525 - DNA, 50 bp, Artificial
  Synthetic oligonucleotide
aactgagccgacgaaggctctaggcccgccgttcggtcttccgcatctgt

SEQ ID NO: 161526 - DNA, 50 bp, Artificial
  Synthetic oligonucleotide
aactgcctcatagcgtctcctttcccgtcggagctccaaagggctccgcc

SEQ ID NO: 161527 - DNA, 50 bp, Artificial
  Synthetic oligonucleotide
aactggaagcctaggcgaacgtaggcgctacggccccgcacgtcataggt

SEQ ID NO: 161528 - DNA, 50 bp, Artificial
  Synthetic oligonucleotide
aacttgcgggtgtggcccctttatgcgcctttgtgccgcatgaccatgtg

SEQ ID NO: 161529 - DNA, 50 bp, Artificial
  Synthetic oligonucleotide
aacttgcgttgctccctcgcgcaatggacgtcagtaaagcccgctcagcg

SEQ ID NO: 161530 - DNA, 54 bp, Artificial
  Synthetic oligonucleotide
cctgcgacgcccttactaggttaaaattccaacgcgtcccttggcttgagacgc

SEQ ID NO: 161531 - DNA, 50 bp, Artificial
  Synthetic oligonucleotide
aactttggggactgcgagtgaggacgcgaccgtcacccttgtgatggagg

SEQ ID NO: 161532 - DNA, 50 bp, Artificial
  Synthetic oligonucleotide
gtccgcgtactgttgacacctcgcaaggcggacgatcgcaggcggccgta

SEQ ID NO: 161533 - DNA, 50 bp, Artificial
  Synthetic oligonucleotide
aagaaggagctgccggaacagaccccctacgccctgcgcttcgttctgca

SEQ ID NO: 161534 - DNA, 50 bp, Artificial
  Synthetic oligonucleotide
gtattccacgtaggggtcggcccacagcgatagcgacgcccgacaggtgg

SEQ ID NO: 161535 - DNA, 50 bp, Artificial
  Synthetic oligonucleotide
aagacccaaaggcgccctgatgtcttggtaaaggcacccccgctgccagg

SEQ ID NO: 161536 - DNA, 50 bp, Artificial
  Synthetic oligonucleotide
aagaccttcggacaacgtaatgacggcgttgggtcggctcacgaggcggc

SEQ ID NO: 161537 - DNA, 50 bp, Artificial
  Synthetic oligonucleotide
aagactgcgtccagtcggcggatggcttcgttaaacctctcgaacggggg

SEQ ID NO: 161538 - DNA, 50 bp, Artificial
  Synthetic oligonucleotide
aagccccgatggggacggagtgcgccagaagccgccgttggcactcctcc

SEQ ID NO: 161539 - DNA, 50 bp, Artificial
  Synthetic oligonucleotide
aagcccgctgggtcagggtagagcgcttcggtcgaaagtcacattggtcc

SEQ ID NO: 161540 - DNA, 50 bp, Artificial
  Synthetic oligonucleotide
attcaggcgaaaccgcggcaagaggtgggccattcaccaagactgaggcc

SEQ ID NO: 161541 - DNA, 55 bp, Artificial
  Synthetic oligonucleotide
cgcacgtcaaagccatgccgtttcgactcacgcgagggccgttttcactctccag

SEQ ID NO: 161542 - DNA, 50 bp, Artificial
  Synthetic oligonucleotide
agagataggcgccctggcactgttcccggtcgccataggaccattcggcc

SEQ ID NO: 161543 - DNA, 50 bp, Artificial
  Synthetic oligonucleotide
agagcccgtcgcacttatacgcaccgcctccgaaacacccggatgttccg

SEQ ID NO: 161544 - DNA, 50 bp, Artificial
  Synthetic oligonucleotide
atgtcgagaaggggccgaaacgtcaacgcaacgcggttcctttgtgggca

SEQ ID NO: 161545 - DNA, 50 bp, Artificial
  Synthetic oligonucleotide
atgtccctgcggcttgcccaaactgcactcgcgtcgcttttcctcatggt

SEQ ID NO: 161546 - DNA, 50 bp, Artificial
  Synthetic oligonucleotide
atgggggcgccaggcggatcaaattcgcacggccgacactctcccgttga

SEQ ID NO: 161547 - DNA, 50 bp, Artificial
  Synthetic oligonucleotide
agagccgggattcgcctttgcgtaccccgcgatccagtctttcaggacgt

SEQ ID NO: 161548 - DNA, 50 bp, Artificial
  Synthetic oligonucleotide
atggccggacccttcacgctttccctttcgcccgcaagagtctgaaagcg

SEQ ID NO: 161549 - DNA, 50 bp, Artificial
  Synthetic oligonucleotide
atgcgcaaaaagcccgaaatcgcccctgtcttctggcagcagaccctacg

SEQ ID NO: 161550 - DNA, 50 bp, Artificial
  Synthetic oligonucleotide
atgcacgagcgcagtttcagacccgatctgacgggctcggacgagagcct

SEQ ID NO: 161551 - DNA, 50 bp, Artificial
  Synthetic oligonucleotide
atcgctgaaatggccggttgcgtcgtccggtcgcagttgtaagcttcccg

SEQ ID NO: 161552 - DNA, 60 bp, Artificial
  Synthetic oligonucleotide
gccgtcatccataatccaggtgcgccgctgaagatgactgtcttcggtgactatagctgc

SEQ ID NO: 161553 - DNA, 55 bp, Artificial
  Synthetic oligonucleotide
cgcacgcccaatgagcccggtgatctggcacttcgaaatgatctctggtcatcgc

SEQ ID NO: 161554 - DNA, 50 bp, Artificial
  Synthetic oligonucleotide
agagcgatagcaaggtggcgaggaatgcgcagaggaagcgcggactcgtc

SEQ ID NO: 161555 - DNA, 50 bp, Artificial
  Synthetic oligonucleotide
atccacggtgctccccgccttaatcgagcaaggtcgaaacgctacgccct

SEQ ID NO: 161556 - DNA, 50 bp, Artificial
  Synthetic oligonucleotide
atcacgcccttgatgtagcgtcccaatcccacgcgcgtctcccctcgatc

SEQ ID NO: 161557 - DNA, 50 bp, Artificial
  Synthetic oligonucleotide
atcaaattcgcacggccgacactctcccgttgacacgattccggcgcccc

SEQ ID NO: 161558 - DNA, 50 bp, Artificial
  Synthetic oligonucleotide
atcaaacacaggcgaggcgccgctgaatccaaccttcggtcagcctaccg

SEQ ID NO: 161559 - DNA, 50 bp, Artificial
  Synthetic oligonucleotide
agagctaagccatgggacgaaacgtagcaggtcgggaacgagcccagcct

SEQ ID NO: 161560 - DNA, 50 bp, Artificial
  Synthetic oligonucleotide
ataactgtcagagagccctctgacgccgtggggagatggggacgcgacct

SEQ ID NO: 161561 - DNA, 50 bp, Artificial
  Synthetic oligonucleotide
agagctgcgcgcccggaaacatcacgacaggcggcgtcacctatcggatg

SEQ ID NO: 161562 - DNA, 50 bp, Artificial
  Synthetic oligonucleotide
ataacgccgctatgcacgagcgcagtttcagacccgatctgacgggctcg

SEQ ID NO: 161563 - DNA, 50 bp, Artificial
  Synthetic oligonucleotide
ataacgaggttcatgcgtgttcggtctcgggaaggggcgcgaacgtggtt

SEQ ID NO: 161564 - DNA, 55 bp, Artificial
  Synthetic oligonucleotide
ccttagtcgtgttgaactcctaagcgtggtgcggcagagttttctgccgcctgtg

SEQ ID NO: 161565 - DNA, 50 bp, Artificial
  Synthetic oligonucleotide
agttgttgcacatgccgttcaccctctcactcggtccaggccgagccaag

SEQ ID NO: 161566 - DNA, 50 bp, Artificial
  Synthetic oligonucleotide
cactgtcagcgggcatgggggtctcgttctgcgggattcgtggtgtctta

SEQ ID NO: 161567 - DNA, 50 bp, Artificial
  Synthetic oligonucleotide
agacaggctctaaggtctcccgcagagatcggcagacggcctgggacctc

SEQ ID NO: 161568 - DNA, 50 bp, Artificial
  Synthetic oligonucleotide
cacgtcgggcgtcgttgcgttcagggatcgaggccactataagacgcgct

SEQ ID NO: 161569 - DNA, 50 bp, Artificial
  Synthetic oligonucleotide
agacaggcttgcacaggaacgccccttgccctttcccgaattcgatccgg

SEQ ID NO: 161570 - DNA, 50 bp, Artificial
  Synthetic oligonucleotide
cacggccgaaaaactttggggactgcgagtgaggacgcgaccgtcaccct

SEQ ID NO: 161571 - DNA, 50 bp, Artificial
  Synthetic oligonucleotide
cacgacgtcaacggatcgcgcgaacaggtgtcctcggcctatcccgcctg

SEQ ID NO: 161572 - DNA, 50 bp, Artificial
  Synthetic oligonucleotide
caccttgcggagcggacccatggcgcctgcccactacatccgacccttcg

SEQ ID NO: 161573 - DNA, 50 bp, Artificial
  Synthetic oligonucleotide
cacctcgcaaggcggacgatcgcaggcggccgtatacggacacccccgag

SEQ ID NO: 161574 - DNA, 50 bp, Artificial
  Synthetic oligonucleotide
agaccggtagggtgaggggcgctgacgtctttttccaagccgaggggctc

SEQ ID NO: 161575 - DNA, 55 bp, Artificial
  Synthetic oligonucleotide
cgaccaatcgggattcgatacatcactatccggccgcgatcttgtgtggaaccgg

SEQ ID NO: 161576 - DNA, 50 bp, Artificial
  Synthetic oligonucleotide
cacccatgacacggctgacataggcccgcccgacacctagcatagacgac

SEQ ID NO: 161577 - DNA, 50 bp, Artificial
  Synthetic oligonucleotide
caccacatctattgcgggcaggccccgacgcgccctaggctgtcgtaacg

SEQ ID NO: 161578 - DNA, 50 bp, Artificial
  Synthetic oligonucleotide
cacaccgaaccatagggtcgcggatcggcgttcagaagaccgggcgttac

SEQ ID NO: 161579 - DNA, 50 bp, Artificial
  Synthetic oligonucleotide
caatgtccaccttgcaggagccatccgtgatgtcgcgccaccgtttaccc

SEQ ID NO: 161580 - DNA, 50 bp, Artificial
  Synthetic oligonucleotide
caagcgggacgaggggatcacgggagagttcgggctcctagctgccgacc

SEQ ID NO: 161581 - DNA, 50 bp, Artificial
  Synthetic oligonucleotide
caagagtccgggtccgcatgcttccccctgccccgtcgcgcacagcctac

SEQ ID NO: 161582 - DNA, 50 bp, Artificial
  Synthetic oligonucleotide
agacgaaacgcatggccggacccttcacgctttccctttcgcccgcaaga

SEQ ID NO: 161583 - DNA, 50 bp, Artificial
  Synthetic oligonucleotide
caacggatcgcgcgaacaggtgtcctcggcctatcccgcctggatgtggc

SEQ ID NO: 161584 - DNA, 50 bp, Artificial
  Synthetic oligonucleotide
agacgcatggggaggaacctgtcgaacggaaaatcgggagggggcggact

SEQ ID NO: 161585 - DNA, 50 bp, Artificial
  Synthetic oligonucleotide
caaagtgttcccctgtcgccgtcagactgcccgactcgtggccgtaccag

SEQ ID NO: 161586 - DNA, 55 bp, Artificial
  Synthetic oligonucleotide
cgaaggatgcaaggctgacgagtcattccgctcacgctacacagtcggacatgcc

SEQ ID NO: 161587 - DNA, 50 bp, Artificial
  Synthetic oligonucleotide
caaacggcggtcaacggttcaaggtgggggcgagtccccgtgtattaggc

SEQ ID NO: 161588 - DNA, 50 bp, Artificial
  Synthetic oligonucleotide
caaaacctgcgcgccgtagacctgacgccccattagcgcctcacgtcctg

SEQ ID NO: 161589 - DNA, 50 bp, Artificial
  Synthetic oligonucleotide
atttgtcgccgcagaacggttgcgaaagctcggccacccgctaagcgcgg

SEQ ID NO: 161590 - DNA, 50 bp, Artificial
  Synthetic oligonucleotide
atttgcgcgttcactcagcctgcatccctccggcaaaggctgacgtaccg

SEQ ID NO: 161591 - DNA, 50 bp, Artificial
  Synthetic oligonucleotide
agacgggctcacagggggtgccatgtcaaccaaacacgttacctggccac

SEQ ID NO: 161592 - DNA, 50 bp, Artificial
  Synthetic oligonucleotide
attgggtctgaccacacccttgggaggccgtcacgcttgatccctggcgc

SEQ ID NO: 161593 - DNA, 50 bp, Artificial
  Synthetic oligonucleotide
aggccataatgtccgacgaagcccgttacgtgtacgcgcagacgtgacga

SEQ ID NO: 161594 - DNA, 50 bp, Artificial
  Synthetic oligonucleotide
aggatctcgtcaggatcgctgggctgggtcttgcccacggaaaggctgga

SEQ ID NO: 161595 - DNA, 50 bp, Artificial
  Synthetic oligonucleotide
aggaagcgtcgtccatcggagcaccctggggccttatgcggagaggcggc

SEQ ID NO: 161596 - DNA, 50 bp, Artificial
  Synthetic oligonucleotide
agctacgctcggccgcgaagtaaagctcgaggatcgctagcgggatcaga

SEQ ID NO: 161597 - DNA, 55 bp, Artificial
  Synthetic oligonucleotide
ccttgtggcgtcactaccattgtctcgtccccatcattggatttaccttgccgtc

SEQ ID NO: 161598 - DNA, 50 bp, Artificial
  Synthetic oligonucleotide
agcgtttgcggttccgaacgcgtgaggaccttctcatagcgccagacctc

SEQ ID NO: 161599 - DNA, 50 bp, Artificial
  Synthetic oligonucleotide
agcgggtccaaggtcccctccgtgggttgcgaacaggcctccaaaggcct

SEQ ID NO: 161600 - DNA, 50 bp, Artificial
  Synthetic oligonucleotide
agcggggacgatccttgcgaattgcgcggtctaagtagggtagagcggcc

SEQ ID NO: 161601 - DNA, 50 bp, Artificial
  Synthetic oligonucleotide
agcgggctaaaaaggttaacaccgacgagcctgcgcgttaaccgcaaggg

SEQ ID NO: 161602 - DNA, 50 bp, Artificial
  Synthetic oligonucleotide
agcagtcgaacgctagacaaaaaccctcgtcaccccggaagcctcgcaga

SEQ ID NO: 161603 - DNA, 50 bp, Artificial
  Synthetic oligonucleotide
agcggaggccactaggaggacatgtcgccaggaggatctagcgaacgctc

SEQ ID NO: 161604 - DNA, 50 bp, Artificial
  Synthetic oligonucleotide
agcgcttgacggcaaattgctcgccgctcgcccaaggcttgtgcaactgc

SEQ ID NO: 161605 - DNA, 50 bp, Artificial
  Synthetic oligonucleotide
agcgcttgacactctgccaccacgtgcacaggccatcgtcatgctacgac

SEQ ID NO: 161606 - DNA, 50 bp, Artificial
  Synthetic oligonucleotide
agcgcagggttcaactctcgcgctacacgtctgtacagcccttcccgaca

SEQ ID NO: 161607 - DNA, 50 bp, Artificial
  Synthetic oligonucleotide
agcgcagacacgacccccggacaaagtcgatacgcgccaggaaggatgtg

SEQ ID NO: 161608 - DNA, 55 bp, Artificial
  Synthetic oligonucleotide
gacatggcccctcccaatcggtcctgtcccgacactgggacggacatcaaagcgt

SEQ ID NO: 161609 - DNA, 50 bp, Artificial
  Synthetic oligonucleotide
agcgacggtcgtccgccaggcatttgacagtgggctacgtaaccgcttcg

SEQ ID NO: 161610 - DNA, 50 bp, Artificial
  Synthetic oligonucleotide
agcataagcaggcgcaatgtaggctcttccgcacacggcgcaagggaaat

SEQ ID NO: 161611 - DNA, 50 bp, Artificial
  Synthetic oligonucleotide
agccgttatccggtgagccctcgacgcgcggggtcttaacccgcttccga

SEQ ID NO: 161612 - DNA, 50 bp, Artificial
  Synthetic oligonucleotide
agcccgcatgtaaacttcgcgcacgcgatagggttcggtcgtctccgagg

SEQ ID NO: 161613 - DNA, 50 bp, Artificial
  Synthetic oligonucleotide
agcccgatactcgggaagctctgtccgcgttcgatccttccgatttggcg

SEQ ID NO: 161614 - DNA, 50 bp, Artificial
  Synthetic oligonucleotide
agccccgcggccattcaacttccgaatctatgccggtcgttgaccggacc

SEQ ID NO: 161615 - DNA, 50 bp, Artificial
  Synthetic oligonucleotide
agccccctgccgatgcatctttacgccccacaaaatcgagacgcaccgga

SEQ ID NO: 161616 - DNA, 50 bp, Artificial
  Synthetic oligonucleotide
agcatggccgcgccgcctcaaaacaggaatcgcgtgacctcaccgccaca

SEQ ID NO: 161617 - DNA, 50 bp, Artificial
  Synthetic oligonucleotide
agttcattgaccccgaacgcacagcacaagagggcggagagctgatcgga

SEQ ID NO: 161618 - DNA, 50 bp, Artificial
  Synthetic oligonucleotide
agtgccaccggggcgctgtttgcgggacccagcatcatcgacgggtcggt

SEQ ID NO: 161619 - DNA, 55 bp, Artificial
  Synthetic oligonucleotide
ccttggagtaccactgtatgttcgaggatcgaactcacccacagacagaagagca

SEQ ID NO: 161620 - DNA, 50 bp, Artificial
  Synthetic oligonucleotide
agtcgcgaatacggcccatgatcgcaaaatgaacagaacccggcaggcgc

SEQ ID NO: 161621 - DNA, 50 bp, Artificial
  Synthetic oligonucleotide
agtcagcttccagccgccaaggttccggtaggggccagattgcgggacgg

SEQ ID NO: 161622 - DNA, 50 bp, Artificial
  Synthetic oligonucleotide
aggtgagaggcgtaagcctcgaaggctcccaatcctttcagctacgcgcc

SEQ ID NO: 161623 - DNA, 50 bp, Artificial
  Synthetic oligonucleotide
aggtcatgacgtgcctagtgccgtgtgccgtgcgggcaagtggatgccct

SEQ ID NO: 161624 - DNA, 50 bp, Artificial
  Synthetic oligonucleotide
agggttttgacgtcgtggggccttgcccttctgatactcgcgtctcaggc

SEQ ID NO: 161625 - DNA, 50 bp, Artificial
  Synthetic oligonucleotide
agggttgggggctttcctgcgtggataaccggcgtgcttctggtggctag

SEQ ID NO: 161626 - DNA, 50 bp, Artificial
  Synthetic oligonucleotide
aggggtgggatgcgatcctatcgcgggttacgatgcgggatggcagaaga

SEQ ID NO: 161627 - DNA, 50 bp, Artificial
  Synthetic oligonucleotide
agaggtccgcccgctgcagccttccacatcaggacggtgatctagggggc

SEQ ID NO: 161628 - DNA, 50 bp, Artificial
  Synthetic oligonucleotide
agggcgttgcgcccgtccgttacagcaccactggtcctcagtctgggtga

SEQ ID NO: 161629 - DNA, 50 bp, Artificial
  Synthetic oligonucleotide
agggatgtcgcttttccggccgacgcctaaagtccggtcttggcgcattt

SEQ ID NO: 161630 - DNA, 55 bp, Artificial
  Synthetic oligonucleotide
ctaactgcgaacgataacttcgctggagaagtccgcctcgccgcgtaatgcggtt

SEQ ID NO: 161631 - DNA, 50 bp, Artificial
  Synthetic oligonucleotide
agggatcgggcggaatgcacgggggtgtctgcgtccaattccgacgtcgg

SEQ ID NO: 161632 - DNA, 50 bp, Artificial
  Synthetic oligonucleotide
agggaggctcattcagttgcagactctggcgcctcgccctgggttcgagg

SEQ ID NO: 161633 - DNA, 50 bp, Artificial
  Synthetic oligonucleotide
agatgcggggttgcgccaaaccgactccgtctctacacgggcgccttaac

SEQ ID NO: 161634 - DNA, 50 bp, Artificial
  Synthetic oligonucleotide
aggctccgttgggtcgtctgatcaggactggagagcgccgtatggcatga

SEQ ID NO: 161635 - DNA, 50 bp, Artificial
  Synthetic oligonucleotide
aggctacgcgtccaatcaaacgggctgcatcggtacaccctgcaagcgta

SEQ ID NO: 161636 - DNA, 50 bp, Artificial
  Synthetic oligonucleotide
aggctacgcgaggtccggaaaccgattgcgcctgagcgcagacacgaccc

SEQ ID NO: 161637 - DNA, 50 bp, Artificial
  Synthetic oligonucleotide
aggcgggttttgcacgggagcttgaccccgcgttacgttgacaggccttc

SEQ ID NO: 161638 - DNA, 50 bp, Artificial
  Synthetic oligonucleotide
agattggtcggccgggttcgttaggacaaccatcttgtagcgccctggcg

SEQ ID NO: 161639 - DNA, 50 bp, Artificial
  Synthetic oligonucleotide
aggcgccgaaaagagcgcctagccatcaagaaccgaccagagtcccgata

SEQ ID NO: 161640 - DNA, 50 bp, Artificial
  Synthetic oligonucleotide
agcagggtcggaaacaccgattcagcgccactccacgcacggagggaagg

SEQ ID NO: 161641 - DNA, 55 bp, Artificial
  Synthetic oligonucleotide
ctccccatcctttgcagctagcaaggccgcgctatcagaagaaacgacggccagg

SEQ ID NO: 161642 - DNA, 50 bp, Artificial
  Synthetic oligonucleotide
aggcgacagagccgccctgagcgactgcaacgcacagcttcacatgtggt

SEQ ID NO: 161643 - DNA, 50 bp, Artificial
  Synthetic oligonucleotide
aggcgaagctctcccctgaccggggcgaaatctgaccaatcatggcgaca

SEQ ID NO: 161644 - DNA, 50 bp, Artificial
  Synthetic oligonucleotide
aggccgtagacaggcgcctctgagggcggagatttaggcgtcagggtcgc

SEQ ID NO: 161645 - DNA, 50 bp, Artificial
  Synthetic oligonucleotide
acctgctggggccgattacggaccgccgggactgaaaccctccgtcgtcc

SEQ ID NO: 161646 - DNA, 50 bp, Artificial
  Synthetic oligonucleotide
cgtagctcgtcatgagggctcccccgaggtgaaaaggcggagcggacacc

SEQ ID NO: 161647 - DNA, 50 bp, Artificial
  Synthetic oligonucleotide
accttcgaaggccccataggccgtcaggtcaatggaatgctgacgcgccc

SEQ ID NO: 161648 - DNA, 50 bp, Artificial
  Synthetic oligonucleotide
accttgagcgccacgcctaattacgaatattggggcgaccgctccatatc

SEQ ID NO: 161649 - DNA, 50 bp, Artificial
  Synthetic oligonucleotide
acgaacggcacgaaaagcacgaacgggagattggggcatagcgttgcgct

SEQ ID NO: 161650 - DNA, 50 bp, Artificial
  Synthetic oligonucleotide
acgaagcccttctgcgtctgaacattgcgcacgtggccgtctcacccgga

SEQ ID NO: 161651 - DNA, 50 bp, Artificial
  Synthetic oligonucleotide
acgaccattcggccacctatcacgccgtgtggctggaaaccgccttcagc

SEQ ID NO: 161652 - DNA, 55 bp, Artificial
  Synthetic oligonucleotide
ctaaacgcatgcgaactctactggcctcgtatggttctggatttcagtggcctga

SEQ ID NO: 161653 - DNA, 50 bp, Artificial
  Synthetic oligonucleotide
acgacccgccgcgcaagtttgaagctggcagttgctagccgtgacgccac

SEQ ID NO: 161654 - DNA, 50 bp, Artificial
  Synthetic oligonucleotide
acgagcggccttgacacagatcagttcgcagcgactttccgcagcgcatt

SEQ ID NO: 161655 - DNA, 50 bp, Artificial
  Synthetic oligonucleotide
cgcggctccgttcggccgtcctttacggtcttgaggtcattcgtcgtcac

SEQ ID NO: 161656 - DNA, 50 bp, Artificial
  Synthetic oligonucleotide
acgatgtacgcatcgcgggagatacactggcgccgcagcttatcggggca

SEQ ID NO: 161657 - DNA, 50 bp, Artificial
  Synthetic oligonucleotide
cgcgagaaggagtggaggatatgatcagctttattgttggctgcgtgggc

SEQ ID NO: 161658 - DNA, 50 bp, Artificial
  Synthetic oligonucleotide
acgcacagcacaagagggcggagagctgatcggagggttgctgtccactg

SEQ ID NO: 161659 - DNA, 50 bp, Artificial
  Synthetic oligonucleotide
acgcctatcttgctgagcggcgggtcatgctgtggctcacgtcgaaggca

SEQ ID NO: 161660 - DNA, 50 bp, Artificial
  Synthetic oligonucleotide
acgcctcgcccggccttggaaatgagcctcgacgagtcagcgcgtgcgat

SEQ ID NO: 161661 - DNA, 50 bp, Artificial
  Synthetic oligonucleotide
acgcctctaaatcccgcttcgggacgaccaatgcgtccccctggggttcc

SEQ ID NO: 161662 - DNA, 50 bp, Artificial
  Synthetic oligonucleotide
acgcgtcggtttgacgacagatggtccgtgggctgtcggttgggaagggg

SEQ ID NO: 161663 - DNA, 60 bp, Artificial
  Synthetic oligonucleotide
agaatccgctgaggattccgctacgcttcctcgccaagccgaatacgttgctctttcagc

SEQ ID NO: 161664 - DNA, 55 bp, Artificial
  Synthetic oligonucleotide
cgtttgcgcggatgcaacgtcgtcagagacagcgaatgaaacgtagctgcggaaa

SEQ ID NO: 161665 - DNA, 50 bp, Artificial
  Synthetic oligonucleotide
acgctcgtttactctcgatatgcgcccgtcagaggcgccatccagggaga

SEQ ID NO: 161666 - DNA, 50 bp, Artificial
  Synthetic oligonucleotide
cctgtactggattttgcgaggcctttgattgtcgagaacaggggagttcc

SEQ ID NO: 161667 - DNA, 50 bp, Artificial
  Synthetic oligonucleotide
acgctgtaaaggacatgggtgtccgcgctgtcctcatcacgccgcgaaga

SEQ ID NO: 161668 - DNA, 50 bp, Artificial
  Synthetic oligonucleotide
acggaagcattgcctatgcccccggccgacgaaaggtaaacgcaatcggc

SEQ ID NO: 161669 - DNA, 50 bp, Artificial
  Synthetic oligonucleotide
accccttcataagatgcggggttgcgccgagccgactccgtctctacacg

SEQ ID NO: 161670 - DNA, 50 bp, Artificial
  Synthetic oligonucleotide
accccttgggacgcgctctgacgatttaaatgtgcgtgtggatggggcga

SEQ ID NO: 161671 - DNA, 50 bp, Artificial
  Synthetic oligonucleotide
acccgaccgtcaggctccccctgcggaaagcaccatcggcattgaattca

SEQ ID NO: 161672 - DNA, 50 bp, Artificial
  Synthetic oligonucleotide
gatctccggcatggtctggtctcaaatcgctgtctgcgcctcaaaatata

SEQ ID NO: 161673 - DNA, 50 bp, Artificial
  Synthetic oligonucleotide
acccgccacttattgaaaaggtcgaacagacccgtgcggcggcacccgtc

SEQ ID NO: 161674 - DNA, 50 bp, Artificial
  Synthetic oligonucleotide
acccgggcataggcggtcacaaaggccggcccaaggatcgtgttcagcgc

SEQ ID NO: 161675 - DNA, 55 bp, Artificial
  Synthetic oligonucleotide
cgttgtcaccgttagggtggatgtcgcgtcccgcaacgtcggacaggggagtgaa

SEQ ID NO: 161676 - DNA, 50 bp, Artificial
  Synthetic oligonucleotide
accctgcgcatcatcgattgaagacgagcgaagcgggatgggcaagcgct

SEQ ID NO: 161677 - DNA, 50 bp, Artificial
  Synthetic oligonucleotide
acccttgcgcccggaatccatcatgagcgacgcaccgcgtaccagtatca

SEQ ID NO: 161678 - DNA, 50 bp, Artificial
  Synthetic oligonucleotide
accgaaagtttcccaccgggataggcccgccgccttcccacgcaaaagga

SEQ ID NO: 161679 - DNA, 50 bp, Artificial
  Synthetic oligonucleotide
accgcagaccttggacgggctccagagggcgatatccaagacgcgctgga

SEQ ID NO: 161680 - DNA, 50 bp, Artificial
  Synthetic oligonucleotide
accgccaggcgagtccttagcggaaagaaaggcgcccggaccacgactcg

SEQ ID NO: 161681 - DNA, 50 bp, Artificial
  Synthetic oligonucleotide
gaaactggctggcggtccgcgtactgttgacacctcgcaaggcggacgat

SEQ ID NO: 161682 - DNA, 50 bp, Artificial
  Synthetic oligonucleotide
accgccattgtctcctccggcccctgtctgtggtttgcccgatacggggt

SEQ ID NO: 161683 - DNA, 50 bp, Artificial
  Synthetic oligonucleotide
accgctaaggtgtcacgggagcttcgcacgggaacctccggaaaggccac

SEQ ID NO: 161684 - DNA, 50 bp, Artificial
  Synthetic oligonucleotide
cttcggacgttacctgttgattggttccaaccgtccgggctccctgccgc

SEQ ID NO: 161685 - DNA, 48 bp, Artificial
  Synthetic oligonucleotide
accgggaattaacctctcccgtcggcgtccccgatttttgggcgttcc

SEQ ID NO: 161686 - DNA, 55 bp, Artificial
  Synthetic oligonucleotide
cgttcctcgggatgcgcgaaccagtgactacaatttcctctacttcggacgtggc

SEQ ID NO: 161687 - DNA, 50 bp, Artificial
  Synthetic oligonucleotide
accggtcgttcgacgctcggccccatacgcatgttggatttcgcaaccac

SEQ ID NO: 161688 - DNA, 50 bp, Artificial
  Synthetic oligonucleotide
ctacccgttttattgaaatagagcggcgagcaagggtcgttgcgatctcg

SEQ ID NO: 161689 - DNA, 50 bp, Artificial
  Synthetic oligonucleotide
accgtcgcgacacaccccgtctggctggacccccagaacgccaatgacct

SEQ ID NO: 161690 - DNA, 50 bp, Artificial
  Synthetic oligonucleotide
accgtgggggccgactcaagggacatgtgatcgccgtgcagagccatgac

SEQ ID NO: 161691 - DNA, 50 bp, Artificial
  Synthetic oligonucleotide
acctagtgcggtcagtgcatagtatttgcgcgggtgtgaggcgtcggcct

SEQ ID NO: 161692 - DNA, 50 bp, Artificial
  Synthetic oligonucleotide
acctatagcggtcctgccaccggcacggggtctgtctatgaatgggcgtc

SEQ ID NO: 161693 - DNA, 50 bp, Artificial
  Synthetic oligonucleotide
acctcaacctgggcgctcgaacggggacactcgccaaccgatgcggacta

SEQ ID NO: 161694 - DNA, 50 bp, Artificial
  Synthetic oligonucleotide
acctccggacattgaccgcccctcccctgaaccggacgctcggaaggtca

SEQ ID NO: 161695 - DNA, 50 bp, Artificial
  Synthetic oligonucleotide
acctgcgcgctatccgattgttcacagcgggtctggccgccgttagcttt

SEQ ID NO: 161696 - DNA, 50 bp, Artificial
  Synthetic oligonucleotide
cccgctgggcgataaggtctgcgaacaagctgcaatggcggacgcatata

SEQ ID NO: 161697 - DNA, 55 bp, Artificial
  Synthetic oligonucleotide
ctcggcaaacccctcgatataccacgccgggtagtaggagcgagcatgctggaac

SEQ ID NO: 161698 - DNA, 50 bp, Artificial
  Synthetic oligonucleotide
cccgcgatctccacctacgcgcagcacacctgccgcttggatatcgtgcg

SEQ ID NO: 161699 - DNA, 50 bp, Artificial
  Synthetic oligonucleotide
cccgcctccgctgtgacgttagtcacaccccttaactacacaccgtggcc

SEQ ID NO: 161700 - DNA, 50 bp, Artificial
  Synthetic oligonucleotide
acgtccgaaggcgaatgacctgacctgcccgaagccccgacaactaagcg

SEQ ID NO: 161701 - DNA, 50 bp, Artificial
  Synthetic oligonucleotide
acgtccgccacagcccatgtgggacgatccgtgatgaaccccgcgactgc

SEQ ID NO: 161702 - DNA, 50 bp, Artificial
  Synthetic oligonucleotide
acgtccgggatcgtccccgaacgcctttccttgtcgttggccgctgatca

SEQ ID NO: 161703 - DNA, 50 bp, Artificial
  Synthetic oligonucleotide
acgtcgcaccccgacgctgatttcacacctggttaaccacgttgcccgac

SEQ ID NO: 161704 - DNA, 50 bp, Artificial
  Synthetic oligonucleotide
acgtcggcccccggaagcaggagtcgtccctcgtgggccctgtggttctt

SEQ ID NO: 161705 - DNA, 50 bp, Artificial
  Synthetic oligonucleotide
acgtctccacgtctccgctctagggacaggcctgcgttggcccgggcaag

SEQ ID NO: 161706 - DNA, 50 bp, Artificial
  Synthetic oligonucleotide
acgtgtcgaattgccgctctgaggccaacccggcgttgcgtcgtggttaa

SEQ ID NO: 161707 - DNA, 50 bp, Artificial
  Synthetic oligonucleotide
acgtttcgtatctatcgtagaccaaactcccgccgttagtttgcgaacac

SEQ ID NO: 161708 - DNA, 55 bp, Artificial
  Synthetic oligonucleotide
ctcggtctcatagtcgtccgtaacgaataggcccgactcaggcaccgcagtagcg

SEQ ID NO: 161709 - DNA, 50 bp, Artificial
  Synthetic oligonucleotide
cccacgttacgtctcccctgtgaccggcgcatcgctatgatgccaccaca

SEQ ID NO: 161710 - DNA, 50 bp, Artificial
  Synthetic oligonucleotide
actatccgagcgtgacctagcgacaggatctcggctttggtgccctgccg

SEQ ID NO: 161711 - DNA, 50 bp, Artificial
  Synthetic oligonucleotide
actcccgattcgtggatcagggtgtcaatctccagcccttgcgcctccga

SEQ ID NO: 161712 - DNA, 50 bp, Artificial
  Synthetic oligonucleotide
actccctcgcgggctgcatacgcacgaccatgttacagccgtaggcatta

SEQ ID NO: 161713 - DNA, 50 bp, Artificial
  Synthetic oligonucleotide
ccacctacgcgcagcacacctgccgcttggatatcgtgcgtcgcacaatg

SEQ ID NO: 161714 - DNA, 50 bp, Artificial
  Synthetic oligonucleotide
actccgcccgatacgtgcgttgacgccgcagggtccgataggccaaatga

SEQ ID NO: 161715 - DNA, 50 bp, Artificial
  Synthetic oligonucleotide
actcgagtcaccgcgcaagccccattccgccaaccacgtgtgcagttacg

SEQ ID NO: 161716 - DNA, 50 bp, Artificial
  Synthetic oligonucleotide
actgcctagcccttctcgcacgcccaatgagcccggtgatctggcacttc

SEQ ID NO: 161717 - DNA, 50 bp, Artificial
  Synthetic oligonucleotide
actggctttcctccgtgcggcgcgtcaaactcgatcccgttccgcggacg

SEQ ID NO: 161718 - DNA, 50 bp, Artificial
  Synthetic oligonucleotide
actgggcggcttctatccgggggtgctttcggaatatgtggcgttcccgc

SEQ ID NO: 161719 - DNA, 55 bp, Artificial
  Synthetic oligonucleotide
cgtcttccggaacacgggtgagccgatgtagtagaagggctgccccgcattggga

SEQ ID NO: 161720 - DNA, 50 bp, Artificial
  Synthetic oligonucleotide
acttccgcggcggacttgttggtcacggacgcttccccctaggcattggt

SEQ ID NO: 161721 - DNA, 50 bp, Artificial
  Synthetic oligonucleotide
caggctccccctgcggaaagcaccatcggcattgaattcaaccgggctgc

SEQ ID NO: 161722 - DNA, 50 bp, Artificial
  Synthetic oligonucleotide
agaacgacaggacctgtgcggccatacggcggaagcttccccaagcctag

SEQ ID NO: 161723 - DNA, 50 bp, Artificial
  Synthetic oligonucleotide
cagaaatattcgtgcaacgtggttctgctcggctatcatactcgacttat

SEQ ID NO: 161724 - DNA, 50 bp, Artificial
  Synthetic oligonucleotide
acggagtgcgccagaagccgccgttggcactcctcccgacacacgacgtt

SEQ ID NO: 161725 - DNA, 50 bp, Artificial
  Synthetic oligonucleotide
cctcatgggctaaaggctacgcgaggtccggaaaccgattgcgcctgagc

SEQ ID NO: 161726 - DNA, 50 bp, Artificial
  Synthetic oligonucleotide
acggccccctcgaagtcaagagaggcgcgtgcggaaacctgatcaggact

SEQ ID NO: 161727 - DNA, 50 bp, Artificial
  Synthetic oligonucleotide
ccgtggctgttccgttctgatccattcaggcgaaaccgcggcaagaggtg

SEQ ID NO: 161728 - DNA, 50 bp, Artificial
  Synthetic oligonucleotide
acggcgaataggggcggctccggtgctgttggtatgacgtgcggtaattg

SEQ ID NO: 161729 - DNA, 50 bp, Artificial
  Synthetic oligonucleotide
acggcgtaaaactgcatcgcacgccgctttacgtgccgccaaaacccacg

SEQ ID NO: 161730 - DNA, 55 bp, Artificial
  Synthetic oligonucleotide
cgtcgtttacgagagcaagcttggacatgtccctcacgccttccatgtttgcctc

SEQ ID NO: 161731 - DNA, 50 bp, Artificial
  Synthetic oligonucleotide
acggcttgtcagccgccccaaaacgcctcactgtgctgcgtataccagca

SEQ ID NO: 161732 - DNA, 50 bp, Artificial
  Synthetic oligonucleotide
acggggccctgaatttcgacaggctttcggcccagtgtgctgcctcacgg

SEQ ID NO: 161733 - DNA, 50 bp, Artificial
  Synthetic oligonucleotide
acggggtcgcccattttaaccctgatgtccagaaagcccagtgacgcgcc

SEQ ID NO: 161734 - DNA, 50 bp, Artificial
  Synthetic oligonucleotide
ccggccccctcccaaaggaacgtgagcgtcatgaactccgtgtgccgctc

SEQ ID NO: 161735 - DNA, 50 bp, Artificial
  Synthetic oligonucleotide
acgggttatctcttccgcacgcctccgggctttgccctgtgggctacagg

SEQ ID NO: 161736 - DNA, 50 bp, Artificial
  Synthetic oligonucleotide
ccgctcgcaacatgggggcgccaggcggatcaaattcgcacggccgacac

SEQ ID NO: 161737 - DNA, 50 bp, Artificial
  Synthetic oligonucleotide
ccgctcatgctcgggagaatggacccgtgttcgcggaagttccgttctga

SEQ ID NO: 161738 - DNA, 50 bp, Artificial
  Synthetic oligonucleotide
acggtagaacgcccgcggctgctatcgatgggcattcaggggaacaggcg

SEQ ID NO: 161739 - DNA, 50 bp, Artificial
  Synthetic oligonucleotide
acggtgccttccggctggctaccctgacggacgtgcagtcggaaatctat

SEQ ID NO: 161740 - DNA, 50 bp, Artificial
  Synthetic oligonucleotide
ccgattgcgcctgagcgcagacacgacccccggacaaagtcgatacgcgc

SEQ ID NO: 161741 - DNA, 55 bp, Artificial
  Synthetic oligonucleotide
cgtcgcggaatcctgtcgaggtcttggttaacgaaagattaggcggcagcccggc

SEQ ID NO: 161742 - DNA, 50 bp, Artificial
  Synthetic oligonucleotide
ccgatacgtctcggcttgggctcgtctaacctacgccgcagccgtgctat

SEQ ID NO: 161743 - DNA, 50 bp, Artificial
  Synthetic oligonucleotide
acggtgcgtggtctacagcgacctgcctccgttgctggaaactgtcggta

SEQ ID NO: 161744 - DNA, 50 bp, Artificial
  Synthetic oligonucleotide
cccgtgagtgaccgtgggggccgactcaagggacatgtgatcgccgtgca

SEQ ID NO: 161745 - DNA, 50 bp, Artificial
  Synthetic oligonucleotide
acgtcagccgcataccctcgaaccatctagccgctttccgtcactgccct

SEQ ID NO: 161746 - DNA, 55 bp, Artificial
  Synthetic oligonucleotide
cttcgacaaactggaatgagcgaaggttaggccgggatcggaagggtgtcgatgc

SEQ ID NO: 161747 - DNA, 55 bp, Artificial
  Synthetic oligonucleotide
cgtcgaacatgtgatcgccagggttctcagaccggacttcacgttcgaacccgag

SEQ ID NO: 161748 - DNA, 57 bp, Artificial
  Synthetic oligonucleotide
tacgtcttagtcggcggaccggccagttcatagaccgtgcgtagctgtacgttggcg

SEQ ID NO: 161749 - DNA, 55 bp, Artificial
  Synthetic oligonucleotide
cttggtgcagcgggatcgaaaccagcatcatagatgtacacggttaccggtcctt

SEQ ID NO: 161750 - DNA, 55 bp, Artificial
  Synthetic oligonucleotide
ctttcctgtagcaacgccgcctttccggaaccgcctggccattggcatgccatgg

SEQ ID NO: 161751 - DNA, 55 bp, Artificial
  Synthetic oligonucleotide
cgtaggtatggcacagtgtaaaccgaaaggcagcgccctgtgaccatgcagaccc

SEQ ID NO: 161752 - DNA, 55 bp, Artificial
  Synthetic oligonucleotide
gaaggacggtcgactcaggctggaatgttagagggaaagccacccttctcagacc

SEQ ID NO: 161753 - DNA, 55 bp, Artificial
  Synthetic oligonucleotide
cggctctcccgttcgacaggaaaatcggagagcgatccagtacgaccatgcagca

SEQ ID NO: 161754 - DNA, 52 bp, Artificial
  Synthetic oligonucleotide
cggcgttcaaatgcttaggggccgcgacgttacgacccgtattccgccaaat

SEQ ID NO: 161755 - DNA, 55 bp, Artificial
  Synthetic oligonucleotide
cggacattgctaaatgcgtatccagccggggtgttcaaattgtcgccgagttagc

SEQ ID NO: 161756 - DNA, 55 bp, Artificial
  Synthetic oligonucleotide
gaatggctggtcggctctaccatcggcgtgagcgtttcaggcaagcgctctaagc

SEQ ID NO: 161757 - DNA, 55 bp, Artificial
  Synthetic oligonucleotide
cgctttgggccgtttgtttctccggcccgtctggctgtttcctcgagcattcgcc

SEQ ID NO: 161758 - DNA, 55 bp, Artificial
  Synthetic oligonucleotide
cgctgtctggaatccgtcggccgagaacattcagcggtattacgcctatcagcaa

SEQ ID NO: 161759 - DNA, 60 bp, Artificial
  Synthetic oligonucleotide
tacaggctgtcgcaggagatcagggaacgcgcgtctggatcaagactggcgggctccgat

SEQ ID NO: 161760 - DNA, 55 bp, Artificial
  Synthetic oligonucleotide
cgcgtgatcgcacagcttgtgcccaaggtcgccaaactcctacgcttatccctcc

SEQ ID NO: 161761 - DNA, 55 bp, Artificial
  Synthetic oligonucleotide
catctacagccatcgtggtagccgcatgaccctgcactgtgagcgcataggcagg

SEQ ID NO: 161762 - DNA, 55 bp, Artificial
  Synthetic oligonucleotide
cagtgcggcttgctagcaatgcggggattgcaacctcgggtcaaccagcggccaa

SEQ ID NO: 161763 - DNA, 55 bp, Artificial
  Synthetic oligonucleotide
caggcgtaactgccattcggaggaattgacacagggaagacccaaaggcgccctg

SEQ ID NO: 161764 - DNA, 55 bp, Artificial
  Synthetic oligonucleotide
cagcgaccgttcacgcgatagcgtgctaatgacctctcaaccttgaccgacccgg

SEQ ID NO: 161765 - DNA, 55 bp, Artificial
  Synthetic oligonucleotide
cagccacgttcggctctgacatcctgaattcaggcaccaccaaccgttcggacta

SEQ ID NO: 161766 - DNA, 55 bp, Artificial
  Synthetic oligonucleotide
cactcagacggcctgagtcgataatcaagcccgggtgttccggcttactcagcga

SEQ ID NO: 161767 - DNA, 55 bp, Artificial
  Synthetic oligonucleotide
cacggctgcagtcctgcagatttactctcgcgcgatccggctcttacgttagatt

SEQ ID NO: 161768 - DNA, 55 bp, Artificial
  Synthetic oligonucleotide
cacgaccgcacgctatcgataggtgggatgtcgggacactccacgctcgcacatg

SEQ ID NO: 161769 - DNA, 55 bp, Artificial
  Synthetic oligonucleotide
caacctgtctgcttcgctaagaaggacgattagcgaaccttaaccaagcccgacg

SEQ ID NO: 161770 - DNA, 59 bp, Artificial
  Synthetic oligonucleotide
gttgctagtatcctagagggtctaggaggtctagaccgtctagacatagccaccaccca

SEQ ID NO: 161771 - DNA, 55 bp, Artificial
  Synthetic oligonucleotide
caaataccgaccaactaatagtgtgcctggtagaactatttatcaccacacggtc

SEQ ID NO: 161772 - DNA, 55 bp, Artificial
  Synthetic oligonucleotide
atttgagccccaatgccattgagtcacctccgcccgcgctcaagcagcgaggctc

SEQ ID NO: 161773 - DNA, 55 bp, Artificial
  Synthetic oligonucleotide
attgtcttggagtgagttaggccaggcccctgtcgggcctggtgtttatgcgtgg

SEQ ID NO: 161774 - DNA, 55 bp, Artificial
  Synthetic oligonucleotide
attgagcgtcagggccgtacggtctgccaatgcagcccacaggggacggatgtag

SEQ ID NO: 161775 - DNA, 55 bp, Artificial
  Synthetic oligonucleotide
attcagggccagatcaagcgtcttttgatgctctggtgcaaagtccttctgatag

SEQ ID NO: 161776 - DNA, 55 bp, Artificial
  Synthetic oligonucleotide
atgtgcagctggaggcccgcttccggaaccggagggcgcaccgtaccctgtcgat

SEQ ID NO: 161777 - DNA, 55 bp, Artificial
  Synthetic oligonucleotide
atgggacccacttcagacagacaccgggtgcttaccggcctttgggcagcacgac

SEQ ID NO: 161778 - DNA, 55 bp, Artificial
  Synthetic oligonucleotide
atggcggacctggggcgtcggttgcaaagcaagcatccgggcgcccgactaacat

SEQ ID NO: 161779 - DNA, 55 bp, Artificial
  Synthetic oligonucleotide
atccgggcgcccgactaacattctgctacgaggcaggggcatgcgggtacggctt

SEQ ID NO: 161780 - DNA, 55 bp, Artificial
  Synthetic oligonucleotide
atatacttaagcagagcgcaattttcaggtagcacccgacgctccatcgtgaacg

SEQ ID NO: 161781 - DNA, 58 bp, Artificial
  Synthetic oligonucleotide
tgtgtcatccatcgttgtaggtccgctttcgcgtccctcgtgcgggttaactttgcga

SEQ ID NO: 161782 - DNA, 55 bp, Artificial
  Synthetic oligonucleotide
cgtctggtccggccttccatgtaccgacgagacgcagaggcatgacgtgagcgaa

SEQ ID NO: 161783 - DNA, 50 bp, Artificial
  Synthetic oligonucleotide
agctacggcttcgtctcagccggtggtggctcgtggtactcccggaccct

SEQ ID NO: 161784 - DNA, 50 bp, Artificial
  Synthetic oligonucleotide
cccggatcgtctggtccggccttccatgtaccgacgagacgcagaggcat

SEQ ID NO: 161785 - DNA, 50 bp, Artificial
  Synthetic oligonucleotide
cccagagtgccggctctccgcgctgtcctgcccagtgaccctgcgtcgtc

SEQ ID NO: 161786 - DNA, 50 bp, Artificial
  Synthetic oligonucleotide
cccacgtcggatgccttcgtacagtgaccgccgcagcatcatgttgcgaa

SEQ ID NO: 161787 - DNA, 50 bp, Artificial
  Synthetic oligonucleotide
ccacgtcactcccgcatcggttcacccgtggcgtaaggtaagcctcacct

SEQ ID NO: 161788 - DNA, 50 bp, Artificial
  Synthetic oligonucleotide
cattccgcgaaagacgggagggacgagcgccacgggatgccccgtatagc

SEQ ID NO: 161789 - DNA, 50 bp, Artificial
  Synthetic oligonucleotide
atcctcaccagggatcagcgggacgcaggactcgacaagaggggtaccac

SEQ ID NO: 161790 - DNA, 50 bp, Artificial
  Synthetic oligonucleotide
cagttggcttacacaccggcgaacggtcacacgactagcgctacgccccc

SEQ ID NO: 161791 - DNA, 50 bp, Artificial
  Synthetic oligonucleotide
caggtgcgaccaccagaccgcggagtccccggcagatgtgaccacgccgg

SEQ ID NO: 161792 - DNA, 50 bp, Artificial
  Synthetic oligonucleotide
caggtgagatcccatagcgggtgcgggcactagtcgaagttgccccgatg

SEQ ID NO: 161793 - DNA, 55 bp, Artificial
  Synthetic oligonucleotide
cgtagttgatcgtcacggggttgcgaaggttgacggtcccaccgtagagctgtcc

SEQ ID NO: 161794 - DNA, 50 bp, Artificial
  Synthetic oligonucleotide
caggagccggcgccacggttgtctgatggagtcacaggtcgcacgctgga

SEQ ID NO: 161795 - DNA, 50 bp, Artificial
  Synthetic oligonucleotide
cagcgggacgcaggactcgacaagaggggtaccacgcatgattcgttcga

SEQ ID NO: 161796 - DNA, 50 bp, Artificial
  Synthetic oligonucleotide
cagccgatctatcctgaggccacacagtccaccggagtgcgacgggggtc

SEQ ID NO: 161797 - DNA, 50 bp, Artificial
  Synthetic oligonucleotide
cagcagaccaggccccgaaccggatgattcggacagttgcccggccccgc

SEQ ID NO: 161798 - DNA, 50 bp, Artificial
  Synthetic oligonucleotide
caccttgcttcggagggcctcgtcagatgtcgtagtcgggcctggtcaca

SEQ ID NO: 161799 - DNA, 50 bp, Artificial
  Synthetic oligonucleotide
atgtacccaccctaaacccgtccgactcgggacacatcccctgcgagcac

SEQ ID NO: 161800 - DNA, 50 bp, Artificial
  Synthetic oligonucleotide
atgtcctgggacgcccaggcctctccgcgatgattcacgtgatccgtcac

SEQ ID NO: 161801 - DNA, 50 bp, Artificial
  Synthetic oligonucleotide
attccgtgcagatgggggaggtcggcgcaacagttcacgaccgactgaac

SEQ ID NO: 161802 - DNA, 50 bp, Artificial
  Synthetic oligonucleotide
cacatccaaccggatctgggtgccatccgggaggtcgcgacattgccatc

SEQ ID NO: 161803 - DNA, 50 bp, Artificial
  Synthetic oligonucleotide
cacaggtagtctcatgagtcgttgtgcgtcctcgtcgtgcgcccgtggct

SEQ ID NO: 161804 - DNA, 55 bp, Artificial
  Synthetic oligonucleotide
cgggcgtgataagatacacgtctgcgaaaggggacgcctgcagatgactttcact

SEQ ID NO: 161805 - DNA, 50 bp, Artificial
  Synthetic oligonucleotide
cacaaggtcccttgcggacctacgctggcgggacatcaggcaatggggcc

SEQ ID NO: 161806 - DNA, 50 bp, Artificial
  Synthetic oligonucleotide
caaggtacccgctcgcccctaccccgacaataccgagcgccttgccagca

SEQ ID NO: 161807 - DNA, 50 bp, Artificial
  Synthetic oligonucleotide
caacgactatggatggggctcagtcccgtcggcctacaaaggcgtgcctc

SEQ ID NO: 161808 - DNA, 50 bp, Artificial
  Synthetic oligonucleotide
caaagggcagtgccgttccagcgatggtgccgattcgctcaaatcccgga

SEQ ID NO: 161809 - DNA, 50 bp, Artificial
  Synthetic oligonucleotide
caaacgacgctaacgggcctacgcccggttgtccacgacagggagcgccc

SEQ ID NO: 161810 - DNA, 50 bp, Artificial
  Synthetic oligonucleotide
aggtgtgtcacgtcatcccgccctccgatgtaggaacgccgagctcctga

SEQ ID NO: 161811 - DNA, 50 bp, Artificial
  Synthetic oligonucleotide
cgctcccgcgtcggggtacacgcagttcgcacgtaggtacggtgggcccg

SEQ ID NO: 161812 - DNA, 50 bp, Artificial
  Synthetic oligonucleotide
cgcgccacactgcaccgatcctcaccagggatcagcgggacgcaggactc

SEQ ID NO: 161813 - DNA, 50 bp, Artificial
  Synthetic oligonucleotide
cgatgcatggccaggaatctacccagacgggacgtatcgccgcaggcccc

SEQ ID NO: 161814 - DNA, 50 bp, Artificial
  Synthetic oligonucleotide
cgagtcactggttcgccccatttcggcaacgattgggttaaggctgcgcc

SEQ ID NO: 161815 - DNA, 55 bp, Artificial
  Synthetic oligonucleotide
cgcggatacaaagactgagtaccttcgcgccacactgcaccgatcctcaccaggg

SEQ ID NO: 161816 - DNA, 50 bp, Artificial
  Synthetic oligonucleotide
cgacgctagggcgagggggtttccctgatgtgagccgattgtttccgtga

SEQ ID NO: 161817 - DNA, 50 bp, Artificial
  Synthetic oligonucleotide
cgaccctcgggccatgcaagccgggcggaccgaacttgagtctgctgggc

SEQ ID NO: 161818 - DNA, 50 bp, Artificial
  Synthetic oligonucleotide
cgaatgttggggacacggggcctcctgagctcgcggttgggtcgcacttc

SEQ ID NO: 161819 - DNA, 50 bp, Artificial
  Synthetic oligonucleotide
cgaatgggcccgaatggcttgacatgcaacggtgtggcgaggactctgga

SEQ ID NO: 161820 - DNA, 50 bp, Artificial
  Synthetic oligonucleotide
cgaatcgtatgcaaggtacccgctcgcccctaccccgacaataccgagcg

SEQ ID NO: 161821 - DNA, 50 bp, Artificial
  Synthetic oligonucleotide
cgaacctacgggtgagacgttgcgagcgccaagactggacgtcacggtcc

SEQ ID NO: 161822 - DNA, 50 bp, Artificial
  Synthetic oligonucleotide
cctcagcagtggtcgggggcggggcgtaatgggggtggaccctgcacgcg

SEQ ID NO: 161823 - DNA, 50 bp, Artificial
  Synthetic oligonucleotide
cctaggggatcggacaccgacgtcacaaggcgttccatcccggtcggagc

SEQ ID NO: 161824 - DNA, 50 bp, Artificial
  Synthetic oligonucleotide
ccggagcccaaccctttgacctgcggtgggacatgtaggtgagacggtgc

SEQ ID NO: 161825 - DNA, 50 bp, Artificial
  Synthetic oligonucleotide
ccgctgggggagggtcgcgtgtggcggttaatgagaacgggtcgcgttat

SEQ ID NO: 161826 - DNA, 55 bp, Artificial
  Synthetic oligonucleotide
cgaccgttcgtgggaggtccgtgagaaggtcacgattcgataacggcggcttgcc

SEQ ID NO: 161827 - DNA, 50 bp, Artificial
  Synthetic oligonucleotide
ccgcgctgtcctgcccagtgaccctgcgtcgtcccgagccgtcaggcgtc

SEQ ID NO: 161828 - DNA, 50 bp, Artificial
  Synthetic oligonucleotide
ccgcaggggttggacggcaggtctcgattccgttacggtcgcgtgtcgct

SEQ ID NO: 161829 - DNA, 50 bp, Artificial
  Synthetic oligonucleotide
ccgcagaaggtgtgtgtcgtagtacgcggcctccagtgcttcgaactggc

SEQ ID NO: 161830 - DNA, 50 bp, Artificial
  Synthetic oligonucleotide
ccgaaggtggatcgatcgctcgtcctgtcgcggtggtgaagacgtgaccg

SEQ ID NO: 161831 - DNA, 50 bp, Artificial
  Synthetic oligonucleotide
ccctgcgctccacccctcaatgatgagggtccctcgcggcgtcaatgtct

SEQ ID NO: 161832 - DNA, 55 bp, Artificial
  Synthetic oligonucleotide
ccgagatgcaccaaactgcatcaaatgcgatccacggaggacaacgatgggcatc

SEQ ID NO: 161833 - DNA, 55 bp, Artificial
  Synthetic oligonucleotide
cccgtgtccgcgaactatgtaacaaacgcggcgttcacgttacgctgaggacatg

SEQ ID NO: 161834 - DNA, 55 bp, Artificial
  Synthetic oligonucleotide
cccgaacggctacctagcgtgtcacccacctgagtgcgtttagcgataaacacgc

SEQ ID NO: 161835 - DNA, 55 bp, Artificial
  Synthetic oligonucleotide
cattccacagcagaataccagcctcgtgttcacgccaaagccggttgttcaaatg

SEQ ID NO: 161836 - DNA, 55 bp, Artificial
  Synthetic oligonucleotide
catcgaacgtgtccggagcccaaccctttgacctgcggtgggacatgtaggtgag

SEQ ID NO: 161837 - DNA, 60 bp, Artificial
  Synthetic oligonucleotide
gccacggataggtccaatggcccatgcggggcttcgatcagccataatgacgacgtgtcg

SEQ ID NO: 161838 - DNA, 55 bp, Artificial
  Synthetic oligonucleotide
cagtagtgcacccgcttctgacagccgtcaagacatcccggcacacacgcaggtc

SEQ ID NO: 161839 - DNA, 55 bp, Artificial
  Synthetic oligonucleotide
caccttgaagtttcgaccatagccggaactttggcagaactgtagggaagccctc

SEQ ID NO: 161840 - DNA, 55 bp, Artificial
  Synthetic oligonucleotide
cacccgtgagagtgcaaaagcgtttaagtggtggaacggtgagccttcgggtgaa

SEQ ID NO: 161841 - DNA, 53 bp, Artificial
  Synthetic oligonucleotide
cacccaacccggtctgtccgtttcgccgcaactactggggagtaacaatgcgg

SEQ ID NO: 161842 - DNA, 55 bp, Artificial
  Synthetic oligonucleotide
tgggtatttgttgtacggctgaatttatctctggaacggactagggtcaagcccg

SEQ ID NO: 161843 - DNA, 54 bp, Artificial
  Synthetic oligonucleotide
tggaggacgactggggtcgtactgaggacacggaagggacaccgccgggccgta

SEQ ID NO: 161844 - DNA, 55 bp, Artificial
  Synthetic oligonucleotide
tgcgtcgtcccgagccgtcaggcgtcgtcccacgggatcggaccagaggcgtcct

SEQ ID NO: 161845 - DNA, 55 bp, Artificial
  Synthetic oligonucleotide
tgacgcagcgcacagcccacgtccaggaagtttccggaacgagacacaaacacct

SEQ ID NO: 161846 - DNA, 55 bp, Artificial
  Synthetic oligonucleotide
tctggtatgcagatcagcgggcaagcgcacgaactgggtggacccaagcgaccgg

SEQ ID NO: 161847 - DNA, 55 bp, Artificial
  Synthetic oligonucleotide
tcccggatacaaaccatggttaccgtcgcgtcacgttgcacggggtcccgatgcc

SEQ ID NO: 161848 - DNA, 60 bp, Artificial
  Synthetic oligonucleotide
aggctcgagctgcctcaggggatccggtagcgcgtcggagtacaaagcgccgtcgatcca

SEQ ID NO: 161849 - DNA, 55 bp, Artificial
  Synthetic oligonucleotide
gtgtcgggagcgtttcggcctagttaaggccgtgcgtgtctcgcatcatggacgg

SEQ ID NO: 161850 - DNA, 53 bp, Artificial
  Synthetic oligonucleotide
gtcccgtttctcccgaatcgttgacccgtttcacctgcgctcgttaccgtctg

SEQ ID NO: 161851 - DNA, 55 bp, Artificial
  Synthetic oligonucleotide
gtcccgttgccaaactgacgtcccgcgactacagtgatgggccgtaacagacggt

SEQ ID NO: 161852 - DNA, 52 bp, Artificial
  Synthetic oligonucleotide
ggttgctcgttccttccgttgggtacccgaccggtcggccggctactcgatc

SEQ ID NO: 161853 - DNA, 55 bp, Artificial
  Synthetic oligonucleotide
ggtgtcgagtccaggtcggatccaccccgtggtgatggcttggagtattgatgcc

SEQ ID NO: 161854 - DNA, 55 bp, Artificial
  Synthetic oligonucleotide
ggtcataggacggaagggtaagggcgcaacactcgatgtctgaaaggcccgggga

SEQ ID NO: 161855 - DNA, 54 bp, Artificial
  Synthetic oligonucleotide
gggtccttctggcgtccgaacaccggaccagggtagtcgagtagcgtggcggtc

SEQ ID NO: 161856 - DNA, 55 bp, Artificial
  Synthetic oligonucleotide
ggggatcacgtgaaaagcatcacgcatcgggcgtaacggacgctcccgtggcact

SEQ ID NO: 161857 - DNA, 55 bp, Artificial
  Synthetic oligonucleotide
ggcccgaatggcttgacatgcaacggtgtggcgaggactctggacgcatcagacg

SEQ ID NO: 161858 - DNA, 55 bp, Artificial
  Synthetic oligonucleotide
ggatctgtgaaagcgcattccggacggtaggtgagccccgacggcagtgtcaacg

SEQ ID NO: 161859 - DNA, 57 bp, Artificial
  Synthetic oligonucleotide
caccgtgttccggtgcggaatgatggttgaccgatgtggaacaccggtgttccactg

SEQ ID NO: 161860 - DNA, 55 bp, Artificial
  Synthetic oligonucleotide
ggagtcggacgtgagggacatcgtgggtcatccgtcctgcgagtgaactgcttcg

SEQ ID NO: 161861 - DNA, 55 bp, Artificial
  Synthetic oligonucleotide
gcctgctagcgggcaatgacaactagtgccgtagcagttcacccggcggtccctt

SEQ ID NO: 161862 - DNA, 55 bp, Artificial
  Synthetic oligonucleotide
gcctccgtcggttccgtgtcacgccgtctcacatcctggctcacgcgaccatcat

SEQ ID NO: 161863 - DNA, 55 bp, Artificial
  Synthetic oligonucleotide
gagaccctcgtgcgtcggcgcacgctcaagtgagggccccgagatcccgatagca

SEQ ID NO: 161864 - DNA, 55 bp, Artificial
  Synthetic oligonucleotide
gacctgacgcgacgtcatctcgtggggcgtgtcgtgcactcgtgaagatcgtcac

SEQ ID NO: 161865 - DNA, 55 bp, Artificial
  Synthetic oligonucleotide
aggttcgtgcgagctgcatcagagctcctcctgaggtgatcccgtggagcgttcg

SEQ ID NO: 161866 - DNA, 55 bp, Artificial
  Synthetic oligonucleotide
atcccgaccgactatctacgcggcgatccgacagctcccacgatctattactccc

SEQ ID NO: 161867 - DNA, 55 bp, Artificial
  Synthetic oligonucleotide
agaccgcggagtccccggcagatgtgaccacgccggtgtcagtcgcgtcctcacg

SEQ ID NO: 161868 - DNA, 55 bp, Artificial
  Synthetic oligonucleotide
atggacgctgcttcgaggctaggtcggcgggtgcttcgcacacagggacacacgt

SEQ ID NO: 161869 - DNA, 55 bp, Artificial
  Synthetic oligonucleotide
aatcccgacgcgcgacgcagggattgcgtcctagtctgggcgagtgccaccagcc

SEQ ID NO: 161870 - DNA, 55 bp, Artificial
  Synthetic oligonucleotide
gacccacgaccgtcgtacaggaacgcacgagggagtgcacacgtgtccgcaacta

SEQ ID NO: 161871 - DNA, 55 bp, Artificial
  Synthetic oligonucleotide
agcgcgacgtgtcagttggggcgacacgccaggtggggcgacgcgtcaggtggga

SEQ ID NO: 161872 - DNA, 55 bp, Artificial
  Synthetic oligonucleotide
acagtagtgcacacttccgatgcgcgaccacggggtacattcagccggtgggcac

SEQ ID NO: 161873 - DNA, 55 bp, Artificial
  Synthetic oligonucleotide
atgtgccggaccggcgtcatagcctgcgggaacgcccctctcatcgcacgtgaca

SEQ ID NO: 161874 - DNA, 55 bp, Artificial
  Synthetic oligonucleotide
acaggtgtcgatctcttgctccagagtcctccgtatcgacaggcatcgatacgag

SEQ ID NO: 161875 - DNA, 54 bp, Artificial
  Synthetic oligonucleotide
acacgactccggtccagcgggcgtccgaagtcgcggatcaagttccaaccgaag

SEQ ID NO: 161876 - DNA, 55 bp, Artificial
  Synthetic oligonucleotide
acaatgtgacgtcgttacccgaacgggacattcgtgtgaccgccctgtgctggtc

SEQ ID NO: 161877 - DNA, 54 bp, Artificial
  Synthetic oligonucleotide
ctgactcactcatcgggtcatgttagccttgtacatgaacgccccagtgtcgcc

SEQ ID NO: 161878 - DNA, 54 bp, Artificial
  Synthetic oligonucleotide
agtgaagccgatggaagtagcattgaggcgcgagtacaaaatacacccgtccaa

SEQ ID NO: 161879 - DNA, 54 bp, Artificial
  Synthetic oligonucleotide
catgaggaccacctgcgcctgagcacgtacccggggctgcatcgacctctcacc

SEQ ID NO: 161880 - DNA, 52 bp, Artificial
  Synthetic oligonucleotide
caacgtaccgtctggtaccgcccgcttgcgacgggttccgcccgaatggtcc

SEQ ID NO: 161881 - DNA, 55 bp, Artificial
  Synthetic oligonucleotide
gaatgacgaatcgacgccctagcgtttgacgcctgaatcggacggatgtcatgct

SEQ ID NO: 161882 - DNA, 51 bp, Artificial
  Synthetic oligonucleotide
acaagggtgcccgctcgacccgagaaaaccaacccgcgtactcgactttcc

SEQ ID NO: 161883 - DNA, 53 bp, Artificial
  Synthetic oligonucleotide
tcgttacctgacaggctcgtccgtaacatcccggaaacaaagggcacacgaca

SEQ ID NO: 161884 - DNA, 53 bp, Artificial
  Synthetic oligonucleotide
acgacctccgaggggtggcgagtcctgcagggacgtacccgaccgacgctaga

SEQ ID NO: 161885 - DNA, 53 bp, Artificial
  Synthetic oligonucleotide
actgtcaactactgccgttagttgagaattgaactacactcgggagccgagcg

SEQ ID NO: 161886 - DNA, 53 bp, Artificial
  Synthetic oligonucleotide
gggcgtcggaggtatcaccgcgtagccctcgccactcactgaacggacactac

SEQ ID NO: 161887 - DNA, 52 bp, Artificial
  Synthetic oligonucleotide
cggaatgtgagatgacacccgttcggcgcttgacaaatcgagaagcgcttcg

SEQ ID NO: 161888 - DNA, 52 bp, Artificial
  Synthetic oligonucleotide
tacccgctgaggcctagatcgtctggcgtgcatatgctctgcacagcacacg

SEQ ID NO: 161889 - DNA, 52 bp, Artificial
  Synthetic oligonucleotide
cgtctcgctcggtcacgaataccctcgtgaacctaccgagttcaggcgacgt

SEQ ID NO: 161890 - DNA, 52 bp, Artificial
  Synthetic oligonucleotide
ccacgaccacagctcatcggatcggggcgggatctccgactcgtccccgatg

SEQ ID NO: 161891 - DNA, 51 bp, Artificial
  Synthetic oligonucleotide
tgtgcaacaccgcagtcaagtgcgctggctgcgtggcgtcaggtcgggtgt

SEQ ID NO: 161892 - DNA, 55 bp, Artificial
  Synthetic oligonucleotide
gaagcgaaacagtacaaccgcgccagaagttgttcaagaccgcttcgcacgatcg

SEQ ID NO: 161893 - DNA, 51 bp, Artificial
  Synthetic oligonucleotide
cgacggcgtgacctgtgctggcggcccggtgtcgtgctgtcacaggcgggg

SEQ ID NO: 161894 - DNA, 51 bp, Artificial
  Synthetic oligonucleotide
ggcgggcacgtaggtggcggctcgtgactcgtacgggtccacgcacgtcca

SEQ ID NO: 161895 - DNA, 51 bp, Artificial
  Synthetic oligonucleotide
ccggtgggctcgcagaccgagtgcttcggtgccaggacgctcgagaagcgt

SEQ ID NO: 161896 - DNA, 51 bp, Artificial
  Synthetic oligonucleotide
tatcagcgagcaagtacgacgtgtagattcgctttgacaactgctgggaaa

SEQ ID NO: 161897 - DNA, 51 bp, Artificial
  Synthetic oligonucleotide
acaccgtgtgggcggaactcatcgacttgttcgagacaggcgagacgccta

SEQ ID NO: 161898 - DNA, 51 bp, Artificial
  Synthetic oligonucleotide
gtgaggattgaccgctcaacgaccaggggagaactctcatgcgcgccatcc

SEQ ID NO: 161899 - DNA, 50 bp, Artificial
  Synthetic oligonucleotide
cttgcggacctacgctggcgggacatcaggcaatggggccaccgcttcac

SEQ ID NO: 161900 - DNA, 50 bp, Artificial
  Synthetic oligonucleotide
ctgcaccgatcctcaccagggatcagcgggacgcaggactcgacaagagg

SEQ ID NO: 161901 - DNA, 50 bp, Artificial
  Synthetic oligonucleotide
ctcgttcggaccgcaaagtggcggcctatcgggcaactttgggcctcgcg

SEQ ID NO: 161902 - DNA, 50 bp, Artificial
  Synthetic oligonucleotide
aggaactcatcgaacgtgtccggagcccaaccctttgacctgcggtggga

SEQ ID NO: 161903 - DNA, 55 bp, Artificial
  Synthetic oligonucleotide
ctcaccgggtgatttaccgatacagtgaacgttcgcatggcaccccaacggcgtg

SEQ ID NO: 161904 - DNA, 50 bp, Artificial
  Synthetic oligonucleotide
cgtgctccgagagatgccgagatgcccggaaagtcaccgttccgcgggag

SEQ ID NO: 161905 - DNA, 50 bp, Artificial
  Synthetic oligonucleotide
cgtgattcaccggtcccgtccgtacggggttgtcagtaccgcacgcagag

SEQ ID NO: 161906 - DNA, 50 bp, Artificial
  Synthetic oligonucleotide
cgtgagacatgggtgtcctctccaaaggggtggcggtacggaggtcgtga

SEQ ID NO: 161907 - DNA, 50 bp, Artificial
  Synthetic oligonucleotide
agggacagcgctggggatcacgtgaaaagcatcacgcatcgggcgtaacg

SEQ ID NO: 161908 - DNA, 50 bp, Artificial
  Synthetic oligonucleotide
cggtccacggagggagcacgacgtccgtcaggtgaaatctcggccaacct

SEQ ID NO: 161909 - DNA, 50 bp, Artificial
  Synthetic oligonucleotide
aaagtggcggcctatcgggcaactttgggcctcgcggtgggtagggacac

SEQ ID NO: 161910 - DNA, 50 bp, Artificial
  Synthetic oligonucleotide
aaccatggttaccgtcgcgtcacgttgcacggggtcccgatgccttcggg

SEQ ID NO: 161911 - DNA, 50 bp, Artificial
  Synthetic oligonucleotide
aagccgggcggaccgaacttgagtctgctgggctcaacttgcggatggcg

SEQ ID NO: 161912 - DNA, 50 bp, Artificial
  Synthetic oligonucleotide
aaggccgatggagtgacggcgggacgaatgctagtgaaccggtaggcgtc

SEQ ID NO: 161913 - DNA, 50 bp, Artificial
  Synthetic oligonucleotide
accggtgcaacacagccgatgactgcggctcctacgatcgcgagagtcat

SEQ ID NO: 161914 - DNA, 53 bp, Artificial
  Synthetic oligonucleotide
cgttacacgaaccgtaccgtcagcctaaacctggcgaatcggtcatacgaccc

SEQ ID NO: 161915 - DNA, 50 bp, Artificial
  Synthetic oligonucleotide
accgttccggggtccgacgctctcgggttatgctgtccccgcttgtcgtg

SEQ ID NO: 161916 - DNA, 50 bp, Artificial
  Synthetic oligonucleotide
acgcccccgtggggtgtgccggttcctcactctaggaacgcgttagcact

SEQ ID NO: 161917 - DNA, 50 bp, Artificial
  Synthetic oligonucleotide
acggaccagccgcacacaacagcgggtgctttcccctaggcgagtgcgta

SEQ ID NO: 161918 - DNA, 50 bp, Artificial
  Synthetic oligonucleotide
acggcaggacccgacccatgggcatctcctcatctacgcggatcttcaga

SEQ ID NO: 161919 - DNA, 50 bp, Artificial
  Synthetic oligonucleotide
acgggcacgtcgacgctcaacccacgggtgtcctcaccggggatgatgaa

SEQ ID NO: 161920 - DNA, 50 bp, Artificial
  Synthetic oligonucleotide
acggggtcccgatgccttcgggcctctgacgcattcctcacggagaggta

SEQ ID NO: 161921 - DNA, 50 bp, Artificial
  Synthetic oligonucleotide
actccacggaaccgggcgcacacccagagacccaatgagccagggcgact

SEQ ID NO: 161922 - DNA, 50 bp, Artificial
  Synthetic oligonucleotide
gatgtgtggccctcaagagacttgccggagtccgcgaggcagccgcggtc

SEQ ID NO: 161923 - DNA, 50 bp, Artificial
  Synthetic oligonucleotide
gaggcttgacgcgcgggacacgtttaaagtatcaatgtgtcgacacattg

SEQ ID NO: 161924 - DNA, 50 bp, Artificial
  Synthetic oligonucleotide
agcgttccagttcgctcgcactcattccgcgaaagacgggagggacgagc

SEQ ID NO: 161925 - DNA, 59 bp, Artificial
  Synthetic oligonucleotide
tacacgcaacagcaaaccaggatcctctagaagccaccaccggtaaggtgcctcttctc

SEQ ID NO: 161926 - DNA, 57 bp, Artificial
  Synthetic oligonucleotide
caatcccgtataagtctgcatatattttagctgctaggaaaggagacttaaaaacaa

SEQ ID NO: 161927 - DNA, 60 bp, Artificial
  Synthetic oligonucleotide
tcgagttagctatcgataaatgtatagaaatcgccattcagcttggttggttatctagaa

SEQ ID NO: 161928 - DNA, 57 bp, Artificial
  Synthetic oligonucleotide
agctgttaattggaactgactctacgccagtagcggcaaaaataactgctaaagaag

SEQ ID NO: 161929 - DNA, 60 bp, Artificial
  Synthetic oligonucleotide
agcttctaggatggaaggaaatgtcgtcttagcattggtgaaagagggtgacactgctcc

SEQ ID NO: 161930 - DNA, 55 bp, Artificial
  Synthetic oligonucleotide
aaaacatcaaactgattatgttgacggattacctacgggatacccgtctatagac

SEQ ID NO: 161931 - DNA, 57 bp, Artificial
  Synthetic oligonucleotide
agctttgtgccaggtttgggtacgctcgctttcgcttaacttgtagtgcaacacgcc

SEQ ID NO: 161932 - DNA, 58 bp, Artificial
  Synthetic oligonucleotide
aaactcgttccgaaatagaaaatcgcatgcaagatatcgagtatgcgttgttaggtaa

SEQ ID NO: 161933 - DNA, 59 bp, Artificial
  Synthetic oligonucleotide
tccctcgtgatataacctatccgcaaaatgtcctgattagtgaaataatcaggttgtta

SEQ ID NO: 161934 - DNA, 58 bp, Artificial
  Synthetic oligonucleotide
tgataagaataccaagtctttattccagtcaataccgtataaaacggcatatctatta

SEQ ID NO: 161935 - DNA, 56 bp, Artificial
  Synthetic oligonucleotide
gggcccccaattgtcgcgcaggaatcatcgttcctgttgcgttacccggagctaaa

SEQ ID NO: 161936 - DNA, 57 bp, Artificial
  Synthetic oligonucleotide
tcatgcggtcttagccgtaggtcataaagcgaaggcgatgttagggaagaccccgcg

SEQ ID NO: 161937 - DNA, 60 bp, Artificial
  Synthetic oligonucleotide
caatgcgttttcttctagataaccaaccaagctgaatggcgatttctatacatttatcga

SEQ ID NO: 161938 - DNA, 57 bp, Artificial
  Synthetic oligonucleotide
ggtctgggtacgctgctcccagtcctacgtgctttaaggatttttcgggatgagcgc

SEQ ID NO: 161939 - DNA, 59 bp, Artificial
  Synthetic oligonucleotide
gcagctgctgtaatcacccagtcgataaatgtgtaagcatactttgatgcatttgggaa

SEQ ID NO: 161940 - DNA, 59 bp, Artificial
  Synthetic oligonucleotide
attcacgtgagcacccacctgtttataacccaatgaggtgcgcgctcgagtctccggaa

SEQ ID NO: 161941 - DNA, 56 bp, Artificial
  Synthetic oligonucleotide
tccgtagggcgagcttattcgcctaaagaagtgttaagcaaggtggaaggcctgcc

SEQ ID NO: 161942 - DNA, 56 bp, Artificial
  Synthetic oligonucleotide
tcccaaggggaatttatggatctctgtcgaggcccccacttgccctctactgcccc

SEQ ID NO: 161943 - DNA, 55 bp, Artificial
  Synthetic oligonucleotide
gcgcaacaagggagtatacatgagcgttcccgaccgaaaaagggctttggaagcg

SEQ ID NO: 161944 - DNA, 58 bp, Artificial
  Synthetic oligonucleotide
ctagaaaagttgggagatcaaattcttggtggaattgctgatactattgttgatagta

SEQ ID NO: 161945 - DNA, 57 bp, Artificial
  Synthetic oligonucleotide
acaagtacttgttcaggaaagcctatttctgaggcttcaaaacaagctagggctgcc

SEQ ID NO: 161946 - DNA, 56 bp, Artificial
  Synthetic oligonucleotide
ttggaagctttatatcatttgggaaacgaaccgtatcttatagttgccacgagaaa

SEQ ID NO: 161947 - DNA, 58 bp, Artificial
  Synthetic oligonucleotide
tagggacgtactcagctaatgtgcaaagccttgtgaatcagggtcatggcggacgcgg

SEQ ID NO: 161948 - DNA, 59 bp, Artificial
  Synthetic oligonucleotide
caatgtaatggtctgttcacaaaatccaatatcgggacattagttggaggtactgagat

SEQ ID NO: 161949 - DNA, 57 bp, Artificial
  Synthetic oligonucleotide
ctgaatgttaacgttaaaagccttgcgtatattttaaggatgaatcgatatatcagc

SEQ ID NO: 161950 - DNA, 57 bp, Artificial
  Synthetic oligonucleotide
tttaaattcgccgtcagaattatatcacaaaagtatatccgttatactgaacctgct

SEQ ID NO: 161951 - DNA, 56 bp, Artificial
  Synthetic oligonucleotide
cgcctctccgtatgcatacccgcaacccgttaaagaagcatgggcagtaggaggct

SEQ ID NO: 161952 - DNA, 56 bp, Artificial
  Synthetic oligonucleotide
agagagcgagcacgccgcactaatccagccccaggatccgcaatacaagggagacc

SEQ ID NO: 161953 - DNA, 56 bp, Artificial
  Synthetic oligonucleotide
gcggacgggtcatcaatgtgcccaacctgctatggagcgatggaatgtgggtcatg

SEQ ID NO: 161954 - DNA, 56 bp, Artificial
  Synthetic oligonucleotide
aaatagacatggttctgtgttttcaacaacgctaagatttaattcgtgcacaggga

SEQ ID NO: 161955 - DNA, 56 bp, Artificial
  Synthetic oligonucleotide
cttatgccttgggagggggaggccgttacgacggacttattgctgcatctggaggc

SEQ ID NO: 161956 - DNA, 55 bp, Artificial
  Synthetic oligonucleotide
gtttaaagcgaccgcccgctacatacgggttcagcctcgcaaagcccgactagcc

SEQ ID NO: 161957 - DNA, 56 bp, Artificial
  Synthetic oligonucleotide
gcctcctactgcccatgcttctttaacgggttgcgggtatgcatacggagaggcgc

SEQ ID NO: 161958 - DNA, 56 bp, Artificial
  Synthetic oligonucleotide
gggagggggaggccgttacgacggacttattgctgcatctggaggcgtcgcaactc

SEQ ID NO: 161959 - DNA, 54 bp, Artificial
  Synthetic oligonucleotide
caatttacgaaggtaagattttatctagtaaagtacgaagagatattactgtta

SEQ ID NO: 161960 - DNA, 56 bp, Artificial
  Synthetic oligonucleotide
gccgttacgacggacttattgctgcatctggaggcgtcgcaactcctgcatgtggt

SEQ ID NO: 161961 - DNA, 56 bp, Artificial
  Synthetic oligonucleotide
actagcgtggagagaccggaagcccctgcgcacatgactgcccagcagtttcgcga

SEQ ID NO: 161962 - DNA, 56 bp, Artificial
  Synthetic oligonucleotide
tctataggggagcccatcgtgacatccaatgggatcctccgtcctgcagcctctca

SEQ ID NO: 161963 - DNA, 53 bp, Artificial
  Synthetic oligonucleotide
aacattcggagggcattcttatgccttgggagggggaggccgttacgacggac

SEQ ID NO: 161964 - DNA, 56 bp, Artificial
  Synthetic oligonucleotide
tcctgcaacgcaggcgaaaagggtaacccagatgcctagtggggctcctaaccaga

SEQ ID NO: 161965 - DNA, 56 bp, Artificial
  Synthetic oligonucleotide
gtctagaaaagacatgttttccaaggctgaatagataacttactctaacgttggag

SEQ ID NO: 161966 - DNA, 56 bp, Artificial
  Synthetic oligonucleotide
agttgcacaaccacattcccataaagctccacgtgcacctacgctccaagagaagg

SEQ ID NO: 161967 - DNA, 56 bp, Artificial
  Synthetic oligonucleotide
gtagtctaagaaccagtattactaatacaggattgactccgacaacgtattcatta

SEQ ID NO: 161968 - DNA, 56 bp, Artificial
  Synthetic oligonucleotide
aacaggcggttgtatagcgaggaagcaacggcaagtagagcccccaagtccgcagc

SEQ ID NO: 161969 - DNA, 56 bp, Artificial
  Synthetic oligonucleotide
cactatagaactctgcaagcctaaaattatgcgcaacctgacttgttgttacagga

SEQ ID NO: 161970 - DNA, 56 bp, Artificial
  Synthetic oligonucleotide
gtctttattccagtcaataccgtataaaacggcatatctattagcttctagaaaag

SEQ ID NO: 161971 - DNA, 55 bp, Artificial
  Synthetic oligonucleotide
gcctcgagacgccttgtaccaggtctgtgtacgttcactgtcacttaacttgtag

SEQ ID NO: 161972 - DNA, 55 bp, Artificial
  Synthetic oligonucleotide
gcctgtatcccgttgaagtgtgctcgtatccccaggggaatccttgtggcattgc

SEQ ID NO: 161973 - DNA, 55 bp, Artificial
  Synthetic oligonucleotide
gcgaaacccacgaaaggctgggtaagaaagttcacgatcatccccactacagcga

SEQ ID NO: 161974 - DNA, 55 bp, Artificial
  Synthetic oligonucleotide
gcgaaagtattagatgccgtgatcagagctttcctacgccaacacgaagttctag

SEQ ID NO: 161975 - DNA, 55 bp, Artificial
  Synthetic oligonucleotide
gatgggctgcttaaaatgacgctcttcaggagaacatccaagacgcacccacaca

SEQ ID NO: 161976 - DNA, 55 bp, Artificial
  Synthetic oligonucleotide
gcgacagcgacaaaagtcgcacgtggcgccaagcttccgaaggatccctacgtat

SEQ ID NO: 161977 - DNA, 55 bp, Artificial
  Synthetic oligonucleotide
gaggagggttatggacatttggattctctagtgtgcgctatgcagtctccatgga

SEQ ID NO: 161978 - DNA, 55 bp, Artificial
  Synthetic oligonucleotide
gcgagccattgggacttctgttgggagccaggtattcgcgcatccatttacatag

SEQ ID NO: 161979 - DNA, 55 bp, Artificial
  Synthetic oligonucleotide
gcgagtatcgtgtttatcttctacgcaaatgttatcagcttatgatacaggcatg

SEQ ID NO: 161980 - DNA, 55 bp, Artificial
  Synthetic oligonucleotide
gaggaaagtcgccctggttcagaagacggcaacagtaatacgcaggagatagtcg

SEQ ID NO: 161981 - DNA, 56 bp, Artificial
  Synthetic oligonucleotide
cagataaaacttctgttactcgtttggccccttggagaatcgtttgagctattagc

SEQ ID NO: 161982 - DNA, 55 bp, Artificial
  Synthetic oligonucleotide
gataaactgcggctaatatccgagtctgtgcgtggagagggaggacgcgtttggg

SEQ ID NO: 161983 - DNA, 55 bp, Artificial
  Synthetic oligonucleotide
gatggcgtacttgggaagagggagagtccgtgagtggctcaatctttcacacgaa

SEQ ID NO: 161984 - DNA, 55 bp, Artificial
  Synthetic oligonucleotide
gagccaaggatcaattcttcctctagtagggccttcacggctggtttaccaatcg

SEQ ID NO: 161985 - DNA, 55 bp, Artificial
  Synthetic oligonucleotide
gcgcattagccgtgggaactgctgtagccggtattaccctagctattgtattggg

SEQ ID NO: 161986 - DNA, 55 bp, Artificial
  Synthetic oligonucleotide
gcgcgcgcagcacaatttggctccaaagttctaggggcctctatgcaagccgctc

SEQ ID NO: 161987 - DNA, 55 bp, Artificial
  Synthetic oligonucleotide
gcgtgccaggaacataacgtacctctagtgtgccctgttgataatcaggggtgtt

SEQ ID NO: 161988 - DNA, 55 bp, Artificial
  Synthetic oligonucleotide
gacgcatagaggaggcatccgcaatagcttcttacctaacttcatgtgcagatcc

SEQ ID NO: 161989 - DNA, 55 bp, Artificial
  Synthetic oligonucleotide
gcgtatatcattttcgaagatgagtgacctgttatcttcatgatatcggaatctg

SEQ ID NO: 161990 - DNA, 55 bp, Artificial
  Synthetic oligonucleotide
gcggagatccttttcgtccagggcagagtgtcctggtcacatcgataggttcttc

SEQ ID NO: 161991 - DNA, 55 bp, Artificial
  Synthetic oligonucleotide
gcggctcttcaagaagttgccctagcaacgggagaaaccctagcagcgcaccaat

SEQ ID NO: 161992 - DNA, 60 bp, Artificial
  Synthetic oligonucleotide
cagatagagaacctaattgttagtagatatgaccatcttgatagcaaatttagtaatgga

SEQ ID NO: 161993 - DNA, 55 bp, Artificial
  Synthetic oligonucleotide
gatgagtattgttcgcctttatatgatgtgtgcatagtagatactccacctagtc

SEQ ID NO: 161994 - DNA, 55 bp, Artificial
  Synthetic oligonucleotide
gcgggattactttaggagcacttggagcgccaggcctagcagttgctacagccgt

SEQ ID NO: 161995 - DNA, 55 bp, Artificial
  Synthetic oligonucleotide
gcggtttatcgaatgctctagctatcgatgtattaaataagttcctacctccttt

SEQ ID NO: 161996 - DNA, 55 bp, Artificial
  Synthetic oligonucleotide
gcgtagaaaactcctcacgctagaattactacaagtgatcgctcaacgtgaacct

SEQ ID NO: 161997 - DNA, 55 bp, Artificial
  Synthetic oligonucleotide
gcaaacctatccaattttgcgtgtaaggttggttatgctgaaagctccataaact

SEQ ID NO: 161998 - DNA, 55 bp, Artificial
  Synthetic oligonucleotide
gcacgcatcccaaccgcctgcaaaactaccaccaacttcaggtacttcttaaacc

SEQ ID NO: 161999 - DNA, 55 bp, Artificial
  Synthetic oligonucleotide
gatgaccggagttcgactaatcaaacgtacatagatatcattgagtcaatttacg

SEQ ID NO: 162000 - DNA, 55 bp, Artificial
  Synthetic oligonucleotide
gcagacgaaccttctggaaatttagaccatcggactgcggatacaattcacgaac

SEQ ID NO: 162001 - DNA, 54 bp, Artificial
  Synthetic oligonucleotide
gcagatttaaacgtctccgaacaccttttccaaaaggtatggcaacgtatccaa

SEQ ID NO: 162002 - DNA, 55 bp, Artificial
  Synthetic oligonucleotide
tttcgctttcggctttatttagctcgattgtttcgctagtatccccttgattagc

SEQ ID NO: 162003 - DNA, 59 bp, Artificial
  Synthetic oligonucleotide
gtcccgtgaccttcattatgtcggagtctgagcaccctaggcgtttgtactccgtcaca

SEQ ID NO: 162004 - DNA, 55 bp, Artificial
  Synthetic oligonucleotide
gagccattaacagcggaaaaggagtgtgcaacagtactagcaggagatacgccac

SEQ ID NO: 162005 - DNA, 55 bp, Artificial
  Synthetic oligonucleotide
gcagtaggctatcttccttctaaagggatcttttcacatgtaggattcggacttg

SEQ ID NO: 162006 - DNA, 55 bp, Artificial
  Synthetic oligonucleotide
ttttgtatcaacgtctataccagatccagagatcgttgggttccaagtggtcatt

SEQ ID NO: 162007 - DNA, 55 bp, Artificial
  Synthetic oligonucleotide
gatttgtcgtgagtaattgacgttcttgagtaagaatgcgatgcctttgaagatc

SEQ ID NO: 162008 - DNA, 55 bp, Artificial
  Synthetic oligonucleotide
tttgagtaacgttacaggtcctgatttcacatcacgttttaggtcttggatgtag

SEQ ID NO: 162009 - DNA, 51 bp, Artificial
  Synthetic oligonucleotide
tttacctaccccgttcaaacgcctacctattaaagagtctccgtaagtcac

SEQ ID NO: 162010 - DNA, 55 bp, Artificial
  Synthetic oligonucleotide
gatccccacgttccaaatagataggctcctccgtgcgctattgtattaatcatcg

SEQ ID NO: 162011 - DNA, 55 bp, Artificial
  Synthetic oligonucleotide
gcatacgttgtccacatgcgacgaataatgcaggagggtccgtaggcaggtagga

SEQ ID NO: 162012 - DNA, 55 bp, Artificial
  Synthetic oligonucleotide
gagattccgttcgaaaggtcttcttactatggaaagaaaggcactaggcgaggag

SEQ ID NO: 162013 - DNA, 55 bp, Artificial
  Synthetic oligonucleotide
gatatctgtccttccgcgttagctgcgactacactgccgcatcctgcaatagttg

SEQ ID NO: 162014 - DNA, 54 bp, Artificial
  Synthetic oligonucleotide
tcccatcttctgttctggtggaggactttcggggtttaaataaagacgccagct

SEQ ID NO: 162015 - DNA, 55 bp, Artificial
  Synthetic oligonucleotide
gccatatcaggacctagagagggagatatagccacgataagatcttgaggacgag

SEQ ID NO: 162016 - DNA, 55 bp, Artificial
  Synthetic oligonucleotide
gccatcccttggagccaatccttcattctcagtttgtacgcagtatgaagacggc

SEQ ID NO: 162017 - DNA, 55 bp, Artificial
  Synthetic oligonucleotide
gcccagctctagctacggaaggattaacataacaaacagatctgcgcatagtaac

SEQ ID NO: 162018 - DNA, 55 bp, Artificial
  Synthetic oligonucleotide
gagagctgttgtgaaccaatactcagtaaagctctagtgggtgtgcttcgttgaa

SEQ ID NO: 162019 - DNA, 55 bp, Artificial
  Synthetic oligonucleotide
gccctcaactatttactgtgcttcctgaggatgggtataggcttccaaatctatc

SEQ ID NO: 162020 - DNA, 55 bp, Artificial
  Synthetic oligonucleotide
gccgctcggccagcaataaccttactggcagctgtgtcataagcggtagaagcaa

SEQ ID NO: 162021 - DNA, 55 bp, Artificial
  Synthetic oligonucleotide
gccgtggttgggctcactaacagagaagcgttgcagtcagggttgcttcttacga

SEQ ID NO: 162022 - DNA, 55 bp, Artificial
  Synthetic oligonucleotide
gagcatactcaagatagggagattgaaccccgtaagggtatgtagcgtaagggtc

SEQ ID NO: 162023 - DNA, 54 bp, Artificial
  Synthetic oligonucleotide
gagcgtataagaaacccctgtatagatggagaggaacgtagggaagcttttagg

SEQ ID NO: 162024 - DNA, 55 bp, Artificial
  Synthetic oligonucleotide
gcctcagaatatactcagtagagtcttcaaatatcagagctttacctaacaacgc

SEQ ID NO: 162025 - DNA, 60 bp, Artificial
  Synthetic oligonucleotide
tccattgcgtagatctccgtttctattgcttgagcgtataaagggaaggcttgacagtgc

SEQ ID NO: 162026 - DNA, 55 bp, Artificial
  Synthetic oligonucleotide
gatgtatgattagttaaagaagacagccatgtatgcacagcttcataaagtggga

SEQ ID NO: 162027 - DNA, 55 bp, Artificial
  Synthetic oligonucleotide
gcctcagagctaaacattcctatagtttgcttatcccaactatctagaaaagttg

SEQ ID NO: 162028 - DNA, 55 bp, Artificial
  Synthetic oligonucleotide
ttagttccactagaattgtctggagtgactgttaggttcacggatatggtcttgg

SEQ ID NO: 162029 - DNA, 55 bp, Artificial
  Synthetic oligonucleotide
gtgtttagcacgctatatacatgaagtcggtccgttatacttaatgtactcgata

SEQ ID NO: 162030 - DNA, 55 bp, Artificial
  Synthetic oligonucleotide
gtgtcgctgcaggtagcaaacctcgtaaacagtctaatactttagctcgtaaaga

SEQ ID NO: 162031 - DNA, 53 bp, Artificial
  Synthetic oligonucleotide
gtgggcgtcggtacctgcgtgtcccacggctagtttgtacagggttacgtaac

SEQ ID NO: 162032 - DNA, 55 bp, Artificial
  Synthetic oligonucleotide
gtgggacaacagccggcagtaggtgctgggggagcgaatgccttcccaggatctc

SEQ ID NO: 162033 - DNA, 55 bp, Artificial
  Synthetic oligonucleotide
ttcaatcgtaagagctgagtcgtttagctgcaatcggcctagagcatctttcagg

SEQ ID NO: 162034 - DNA, 55 bp, Artificial
  Synthetic oligonucleotide
gtcttggttcacgcgttagttattggcctattttgcgatattggatcctcgtatc

SEQ ID NO: 162035 - DNA, 54 bp, Artificial
  Synthetic oligonucleotide
gtccttgtccgaccccttctggtcgataatcttgaatttccggaggtaacaatg

SEQ ID NO: 162036 - DNA, 60 bp, Artificial
  Synthetic oligonucleotide
taagcttgtatgcagtgaattgtctttacgcacgtgcaacctcgtgatataagttgtgaa

SEQ ID NO: 162037 - DNA, 49 bp, Artificial
  Synthetic oligonucleotide
aggggttattaaacacgccagtccttctaaggactttgggaacccaact

SEQ ID NO: 162038 - DNA, 54 bp, Artificial
  Synthetic oligonucleotide
gtcaccataaataacctcgccaaaccctataaagaatggaaaggaggtggcgcc

SEQ ID NO: 162039 - DNA, 55 bp, Artificial
  Synthetic oligonucleotide
gtagcattatctgggtcaatgttggatacaaaatgtacgtgcttatccgaaggac

SEQ ID NO: 162040 - DNA, 55 bp, Artificial
  Synthetic oligonucleotide
gtagcactggcattttgtgatagggcgtagcttatgaatcctgattgttggtcgt

SEQ ID NO: 162041 - DNA, 55 bp, Artificial
  Synthetic oligonucleotide
gtaagtccttcgaaatgaacgatacgtacagagccttcatccatagcaaccaggg

SEQ ID NO: 162042 - DNA, 55 bp, Artificial
  Synthetic oligonucleotide
ttctgcgtgtccttcttagattgactacgtcgagcaaataatcttcgcgaacgac

SEQ ID NO: 162043 - DNA, 55 bp, Artificial
  Synthetic oligonucleotide
gtaaggcaaaatgcacaacagtgaatgttgtacttcctacaatttccgagttgcg

SEQ ID NO: 162044 - DNA, 55 bp, Artificial
  Synthetic oligonucleotide
gtaagaagtggggtataggagctttggctaccgtaggctccaatctcacacacga

SEQ ID NO: 162045 - DNA, 55 bp, Artificial
  Synthetic oligonucleotide
ggttctctaccatatggctgtagtatgctgagcggatcacagaggttccgtgatg

SEQ ID NO: 162046 - DNA, 55 bp, Artificial
  Synthetic oligonucleotide
ggttatatctggacagttaggaacagctcagactcaagagcagacgtatacgttt

SEQ ID NO: 162047 - DNA, 55 bp, Artificial
  Synthetic oligonucleotide
ttcttcatatagggctagagatgcatccaaagaagtcgtgggttgattcataagg

SEQ ID NO: 162048 - DNA, 60 bp, Artificial
  Synthetic oligonucleotide
tccaaatagcactagcggtccttgctccttgcatatggggactgtaccccggttgcacaa

SEQ ID NO: 162049 - DNA, 55 bp, Artificial
  Synthetic oligonucleotide
tccccagtagcttccgcatgcgtgcctccacaaagttcatgagagtgccctgcag

SEQ ID NO: 162050 - DNA, 55 bp, Artificial
  Synthetic oligonucleotide
tccacgcaccctataaggatgattctctagggtttgagatcaataggctagggca

SEQ ID NO: 162051 - DNA, 55 bp, Artificial
  Synthetic oligonucleotide
tcctagagaacgaacttcttctatttagcggtgaaggaggaggttggtacgctga

SEQ ID NO: 162052 - DNA, 55 bp, Artificial
  Synthetic oligonucleotide
tcactgatgtcacgatatcttgactaccgtcatcccatgtgcgcaagaaaccggg

SEQ ID NO: 162053 - DNA, 55 bp, Artificial
  Synthetic oligonucleotide
tatcgaatctacgttcaaacgggatgcacagatcaagaacagcagtgatctggag

SEQ ID NO: 162054 - DNA, 55 bp, Artificial
  Synthetic oligonucleotide
tataacccatcatgacggcactttctcctagatccaccttagggatcaccatagc

SEQ ID NO: 162055 - DNA, 55 bp, Artificial
  Synthetic oligonucleotide
tcgctctatagggatttctaagcctacatatagtcttgggactgtagaaagtatc

SEQ ID NO: 162056 - DNA, 55 bp, Artificial
  Synthetic oligonucleotide
tagggttggagtctacagtaatcgatcctgaggagcgaattgtttatcgtgaggg

SEQ ID NO: 162057 - DNA, 55 bp, Artificial
  Synthetic oligonucleotide
taggggaacgcaaaccgcggttaacatcataccgaagcaggcaaaccagggatga

SEQ ID NO: 162058 - DNA, 55 bp, Artificial
  Synthetic oligonucleotide
taggaatctcgcctgtgcctaaagatgatcgtcctaaatcccaatggcggacccc

SEQ ID NO: 162059 - DNA, 58 bp, Artificial
  Synthetic oligonucleotide
tcaaatttaagcgaaatttcatgcgagcaattaaaaagaggcaatttctctagggatg

SEQ ID NO: 162060 - DNA, 55 bp, Artificial
  Synthetic oligonucleotide
tctcccattgcaacaagtcaagtagtgcataattttaaaatagcagcgcttcgga

SEQ ID NO: 162061 - DNA, 55 bp, Artificial
  Synthetic oligonucleotide
tctgactcccaactcccaagctgtttctggcgaaatagtccctggaaggtgcacg

SEQ ID NO: 162062 - DNA, 55 bp, Artificial
  Synthetic oligonucleotide
tctgttactcgtttggccccttggagaatcgtttgagctattagccagtctctgt

SEQ ID NO: 162063 - DNA, 55 bp, Artificial
  Synthetic oligonucleotide
tacagttaaagcttcggacaatgctgaaggaaccacctacattttatccgacgac

SEQ ID NO: 162064 - DNA, 55 bp, Artificial
  Synthetic oligonucleotide
tgcataacacgatgcatcatgatgaccgagagactacttcgcgtcaaaatattcg

SEQ ID NO: 162065 - DNA, 55 bp, Artificial
  Synthetic oligonucleotide
tggcaccctgtgtgcagttaggatgagtagactagttctgcagccttttacaggg

SEQ ID NO: 162066 - DNA, 55 bp, Artificial
  Synthetic oligonucleotide
tggggatggcggtacgctttcctcatgataaggtgcggcctatgggaagaacagc

SEQ ID NO: 162067 - DNA, 55 bp, Artificial
  Synthetic oligonucleotide
gttggtaagtcctctttattgggcatgattgctcgtaatgctgaagaggcagaca

SEQ ID NO: 162068 - DNA, 55 bp, Artificial
  Synthetic oligonucleotide
gttacggtcctcgcgctaactagtatggcgagttcatttgccagcgggaagatag

SEQ ID NO: 162069 - DNA, 55 bp, Artificial
  Synthetic oligonucleotide
ggattgactccgacaacgtattcattacgtgtaggcggtttagaaagcggtgtgg

SEQ ID NO: 162070 - DNA, 59 bp, Artificial
  Synthetic oligonucleotide
tattattcacaggaagctacgaaaggactctcagaaatcatagtagggaaaaatagaca

SEQ ID NO: 162071 - DNA, 55 bp, Artificial
  Synthetic oligonucleotide
ggattacaaaactttgcgctctttcttataacgcaagaatttgttgcagggaagc

SEQ ID NO: 162072 - DNA, 55 bp, Artificial
  Synthetic oligonucleotide
ggatcgtaccaacccaataattcgatatatctaccatcacgaggagactcaacgt

SEQ ID NO: 162073 - DNA, 55 bp, Artificial
  Synthetic oligonucleotide
ggatccgtaagcgataaaacaggactatcgattgcaaacaaccaagaagtcagcc

SEQ ID NO: 162074 - DNA, 55 bp, Artificial
  Synthetic oligonucleotide
ggatcactgtctatggggaacttgagtattccagcattcgccagaaacagttcac

SEQ ID NO: 162075 - DNA, 55 bp, Artificial
  Synthetic oligonucleotide
ggatcacacgacaaccacaacgaatagcctcttcgaaacaagctgtgtaagctcg

SEQ ID NO: 162076 - DNA, 54 bp, Artificial
  Synthetic oligonucleotide
ggagtccctccacctatagacacggtttcggataaacgaataacgagactccta

SEQ ID NO: 162077 - DNA, 53 bp, Artificial
  Synthetic oligonucleotide
ggagaagcttcggaaatttggttgtcaacgttgtccccgctaactagaaagaa

SEQ ID NO: 162078 - DNA, 55 bp, Artificial
  Synthetic oligonucleotide
ggagaaaaccccagttatcagaagacttattcgagctgttcccgagcatttgtac

SEQ ID NO: 162079 - DNA, 55 bp, Artificial
  Synthetic oligonucleotide
ggactatcttgtggctattcgggccaacaagagacagtggtctgcgtgtacgaga

SEQ ID NO: 162080 - DNA, 55 bp, Artificial
  Synthetic oligonucleotide
ggacaggctgttaattatctagaacatgctcacactgttgtgcgtcgattgtctg

SEQ ID NO: 162081 - DNA, 60 bp, Artificial
  Synthetic oligonucleotide
agtatgagtggtttgagtcactaccataagagtagattatgtctgacagtactagaagct

SEQ ID NO: 162082 - DNA, 55 bp, Artificial
  Synthetic oligonucleotide
ggaagtagtgattagcgctacgggacatacggaaagctggatagctgccattgat

SEQ ID NO: 162083 - DNA, 55 bp, Artificial
  Synthetic oligonucleotide
ggaagggaatgtcgttctcgctcttgtaagagaaggtgattcatctccttgtgcc

SEQ ID NO: 162084 - DNA, 55 bp, Artificial
  Synthetic oligonucleotide
ggaaggaaatgtcgtcttagcattggtgaaagagggtgacactgctccttgcgct

SEQ ID NO: 162085 - DNA, 55 bp, Artificial
  Synthetic oligonucleotide
gctgcggacttgggggctctacttgccgttgcttcctcgctatacaaccgcctgt

SEQ ID NO: 162086 - DNA, 55 bp, Artificial
  Synthetic oligonucleotide
gctgcctgattccgcaactacagaaatcgctaaagcctatattcctgcagttacg

SEQ ID NO: 162087 - DNA, 55 bp, Artificial
  Synthetic oligonucleotide
gctgcaagttggtattctaacgccatggaatagcttctgactctagtgtttgtac

SEQ ID NO: 162088 - DNA, 55 bp, Artificial
  Synthetic oligonucleotide
gctgagtcttggaaacataaggcaacaggatctcgcggagtcctccctctcctaa

SEQ ID NO: 162089 - DNA, 55 bp, Artificial
  Synthetic oligonucleotide
gcgtggttggctgtggatggggcgcaaagtatgggccatcagtctgtggatgttc

SEQ ID NO: 162090 - DNA, 55 bp, Artificial
  Synthetic oligonucleotide
ggtgtgcaacaatatctaacggaattagaaacctcaacgcaaggtacagtcgact

SEQ ID NO: 162091 - DNA, 55 bp, Artificial
  Synthetic oligonucleotide
ttgaatctatcgcgcaaatcccataaaccgtagtcttcctgagagcggtggcccc

SEQ ID NO: 162092 - DNA, 58 bp, Artificial
  Synthetic oligonucleotide
ataacgccctaggatattacgagttattcattagcctgcctgataagaataccaagtc

SEQ ID NO: 162093 - DNA, 55 bp, Artificial
  Synthetic oligonucleotide
ggtctacatggttttgtattggaactattctattatggggagcattaggatggtg

SEQ ID NO: 162094 - DNA, 55 bp, Artificial
  Synthetic oligonucleotide
ggtcatcttgtgggcattcctctagctggagtttcatgtacattgcttgggatgc

SEQ ID NO: 162095 - DNA, 55 bp, Artificial
  Synthetic oligonucleotide
ggtagacagatacgaaaataagcacaagcgttcgggagcctactcctcaggatgc

SEQ ID NO: 162096 - DNA, 55 bp, Artificial
  Synthetic oligonucleotide
ggtagaagaccaggtcaattaatcaagatatctcctaagttagctcaaaatggct

SEQ ID NO: 162097 - DNA, 55 bp, Artificial
  Synthetic oligonucleotide
ggtaagtgtcacatagaccattttgcgaacggctaaagaatcgtcatcacggacg

SEQ ID NO: 162098 - DNA, 55 bp, Artificial
  Synthetic oligonucleotide
ggtaaacgcattcttcctggcgggaaagggactctcttggttatgtcagggctag

SEQ ID NO: 162099 - DNA, 54 bp, Artificial
  Synthetic oligonucleotide
gggtagttgtgggttatctaaacacgctagggaacgaagatggggagaagccac

SEQ ID NO: 162100 - DNA, 55 bp, Artificial
  Synthetic oligonucleotide
ggggcataaaggagaacctcgagccttatctcagtatatcgcgtattcatcagac

SEQ ID NO: 162101 - DNA, 53 bp, Artificial
  Synthetic oligonucleotide
ttgcaaactagttaaaagtcctaacaggtccgagggtttgattaactgaggcc

SEQ ID NO: 162102 - DNA, 55 bp, Artificial
  Synthetic oligonucleotide
gggcggagccatcattggggtggggtgcggtttaattatccgtcatggaggatcc

SEQ ID NO: 162103 - DNA, 53 bp, Artificial
  Synthetic oligonucleotide
ataccgtataaaacagcttacttattagcctctagaaaagggtctgttaaaga

SEQ ID NO: 162104 - DNA, 55 bp, Artificial
  Synthetic oligonucleotide
gggccttatgtgggatcattaggagatctaagtctcattcctaagggatacacgt

SEQ ID NO: 162105 - DNA, 55 bp, Artificial
  Synthetic oligonucleotide
gggattaagagatgaagaaattatgcgagtttcttgtctttcctcgaagcaaagt

SEQ ID NO: 162106 - DNA, 55 bp, Artificial
  Synthetic oligonucleotide
gggacagtgacggatgtgggaacccttttaggagagaatcgcaccatggttcgcc

SEQ ID NO: 162107 - DNA, 55 bp, Artificial
  Synthetic oligonucleotide
ggctgcttgtaccggttatttatacggtttatcagtagctaaggcctatgtcgaa

SEQ ID NO: 162108 - DNA, 55 bp, Artificial
  Synthetic oligonucleotide
ggctgcaagactttcttgagaatcctctggagcggactgaaggttttgtgtggcg

SEQ ID NO: 162109 - DNA, 55 bp, Artificial
  Synthetic oligonucleotide
ggctgacggagccagtatttattgtgggtttagcattatctctcgccctgttggc

SEQ ID NO: 162110 - DNA, 55 bp, Artificial
  Synthetic oligonucleotide
ggcgcctccgcccctcattcaatagtagcttactctgcggagtcccttatactgc

SEQ ID NO: 162111 - DNA, 55 bp, Artificial
  Synthetic oligonucleotide
ggcctccgtaaggagcgagcagctcctcaagtaagacttgtgcgtgaatacctcg

SEQ ID NO: 162112 - DNA, 53 bp, Artificial
  Synthetic oligonucleotide
ccggggttttagtctccgggagcccaccagagaagcgtaaagctatttatcag

SEQ ID NO: 162113 - DNA, 55 bp, Artificial
  Synthetic oligonucleotide
cctaataggcgttctccctatactcttgtggatcaatttaaagaacgcttggaca

SEQ ID NO: 162114 - DNA, 60 bp, Artificial
  Synthetic oligonucleotide
atccagacataagattgattatgtagatggattgcctacaggatattcttcaatagacga

SEQ ID NO: 162115 - DNA, 55 bp, Artificial
  Synthetic oligonucleotide
cctaatttcttaatgcaagagttgcaagattatcttgggaatagagagggttggg

SEQ ID NO: 162116 - DNA, 55 bp, Artificial
  Synthetic oligonucleotide
cctacctagcgcaatgccaacgctatcataacttccgtaatacctttgcgaatct

SEQ ID NO: 162117 - DNA, 55 bp, Artificial
  Synthetic oligonucleotide
cctatgatcaacgattggaaacggctctttgcgactacatttaacggagcatctc

SEQ ID NO: 162118 - DNA, 55 bp, Artificial
  Synthetic oligonucleotide
cctccccagactctaggggtaggggcatcctgaatcgactacatgctatcatgat

SEQ ID NO: 162119 - DNA, 55 bp, Artificial
  Synthetic oligonucleotide
caagaagccttcctagctagccaatacttggttgtgtgtctaacaccagagccct

SEQ ID NO: 162120 - DNA, 54 bp, Artificial
  Synthetic oligonucleotide
cctcccgaccttatctccaaaactccgtgtaaccaatgtcagggtcttggcgta

SEQ ID NO: 162121 - DNA, 55 bp, Artificial
  Synthetic oligonucleotide
caacgtcgggagattctgacgcgacaacacaatcgctgttggcccctgaaaccgc

SEQ ID NO: 162122 - DNA, 55 bp, Artificial
  Synthetic oligonucleotide
cctttacatgcctatattcaattcgtcagcccagaacataaaagaggccaggtat

SEQ ID NO: 162123 - DNA, 55 bp, Artificial
  Synthetic oligonucleotide
cctttatcattcaaggctaaagagagaggttttcgaagcatcttgctctaacacc

SEQ ID NO: 162124 - DNA, 55 bp, Artificial
  Synthetic oligonucleotide
cgaagacacgagagaatatctctacatgcctctagaattctctgccctgagggcg

SEQ ID NO: 162125 - DNA, 53 bp, Artificial
  Synthetic oligonucleotide
tagctcgggattaaaagagtggcctgacaaaatagaaatagggtttgaaaccc

SEQ ID NO: 162126 - DNA, 55 bp, Artificial
  Synthetic oligonucleotide
cgaagtctaaggtatagtatcttccagcactatggaagtgtttccttgttgtgga

SEQ ID NO: 162127 - DNA, 55 bp, Artificial
  Synthetic oligonucleotide
cgaatgcttgagccgaatccgatactaaaattgccatgcgtccaaaagagattcc

SEQ ID NO: 162128 - DNA, 55 bp, Artificial
  Synthetic oligonucleotide
cgacattacctattaatggagctacgtggacctctatagggaataatctaaccag

SEQ ID NO: 162129 - DNA, 55 bp, Artificial
  Synthetic oligonucleotide
cgccctacttggcggaggaaccatattggcggacgttgttgatctcgaggggaga

SEQ ID NO: 162130 - DNA, 55 bp, Artificial
  Synthetic oligonucleotide
attggaaaatacgggcagtgcctaaaccatgaagtacacgatgataggggcggtc

SEQ ID NO: 162131 - DNA, 55 bp, Artificial
  Synthetic oligonucleotide
cgccctaaagactgccccataaggcaacgtgtttctaatcccatccgcgagttct

SEQ ID NO: 162132 - DNA, 55 bp, Artificial
  Synthetic oligonucleotide
acagaatttcctccttcgtgccacttattagatcctatattagcggctccgccgt

SEQ ID NO: 162133 - DNA, 55 bp, Artificial
  Synthetic oligonucleotide
accgtttatgacatattttcatccggggaaaatggcaaagctagtgttattgccc

SEQ ID NO: 162134 - DNA, 53 bp, Artificial
  Synthetic oligonucleotide
cgccaggttacgtaaccctgtacaaactagccgtgggacacgcaggtaccgac

SEQ ID NO: 162135 - DNA, 55 bp, Artificial
  Synthetic oligonucleotide
cgcatgcatacactccatagggaagcaaacactgctcttgaggcaggttaatggt

SEQ ID NO: 162136 - DNA, 59 bp, Artificial
  Synthetic oligonucleotide
tagagttagtttttagaactaagtcttctgcttacaatgctcttgcatattacgagctt

SEQ ID NO: 162137 - DNA, 55 bp, Artificial
  Synthetic oligonucleotide
agcctcgtattcgggtatcactagaaatgcgttgggtttctggcctcgctcatac

SEQ ID NO: 162138 - DNA, 55 bp, Artificial
  Synthetic oligonucleotide
agcccaaatcagattgtagaacgggtagtatcaaatttaagcgaaatttcatgcg

SEQ ID NO: 162139 - DNA, 55 bp, Artificial
  Synthetic oligonucleotide
acctcatcaagcgatcatatccctagcgattacgatgacgtaggtagtaacaacg

SEQ ID NO: 162140 - DNA, 55 bp, Artificial
  Synthetic oligonucleotide
cgcactagctgctatccagagattacttacagctacaaattataaggggaataca

SEQ ID NO: 162141 - DNA, 55 bp, Artificial
  Synthetic oligonucleotide
cgcaactataaattagaagctgcgtggtgtattcagcgaggtgctctttatgcgc

SEQ ID NO: 162142 - DNA, 55 bp, Artificial
  Synthetic oligonucleotide
cgatgcgacatccctaacccaaagcgcatctaaaggagctagctcgcaacaatgc

SEQ ID NO: 162143 - DNA, 55 bp, Artificial
  Synthetic oligonucleotide
acctgcaaggaacttgcttcccataccgtaggctaggcacgctgttggtccaccg

SEQ ID NO: 162144 - DNA, 55 bp, Artificial
  Synthetic oligonucleotide
agcaggtctcaaagggtgaggcaatccgtgagttggttgcttcggaccgctgtta

SEQ ID NO: 162145 - DNA, 55 bp, Artificial
  Synthetic oligonucleotide
cgataatcaagacggtcttgtgcaatcgacctctggacctaattacgaaggccat

SEQ ID NO: 162146 - DNA, 55 bp, Artificial
  Synthetic oligonucleotide
cgagatgcggtcatggatccgacttcccgctattacactcatcccttagttgagc

SEQ ID NO: 162147 - DNA, 60 bp, Artificial
  Synthetic oligonucleotide
taaatttatggatgtttcttacctgatacatatgtctcaaaatgcagacatacctataga

SEQ ID NO: 162148 - DNA, 54 bp, Artificial
  Synthetic oligonucleotide
tagactttgcaactttaggtggtagactttgcaactttaggtggtagacttttg

SEQ ID NO: 162149 - DNA, 55 bp, Artificial
  Synthetic oligonucleotide
ccccgctcaagaagctagcgttgcaggattgtccattctccctcaacttgaagcg

SEQ ID NO: 162150 - DNA, 55 bp, Artificial
  Synthetic oligonucleotide
cccataccacacacttattcccttgctcttatccctttgtcaagctgtgtcacac

SEQ ID NO: 162151 - DNA, 55 bp, Artificial
  Synthetic oligonucleotide
cccacggccgagatgctctccgtaaggggaagtttcttagggcagacacggacac

SEQ ID NO: 162152 - DNA, 52 bp, Artificial
  Synthetic oligonucleotide
cccacaccggaaggagggttccctacagtcgtgttgtttcacggcttccgag

SEQ ID NO: 162153 - DNA, 55 bp, Artificial
  Synthetic oligonucleotide
ccatgtctaagtaaagttctaatccccttctagcctcaagagctaattggttgca

SEQ ID NO: 162154 - DNA, 55 bp, Artificial
  Synthetic oligonucleotide
caggagagcaggctcggttagatgtaggaagacttcgtgctgagtcccaagctgt

SEQ ID NO: 162155 - DNA, 55 bp, Artificial
  Synthetic oligonucleotide
ccatgctcaatggacggcactctaaccataagtctgtaggcttgccttcgggact

SEQ ID NO: 162156 - DNA, 55 bp, Artificial
  Synthetic oligonucleotide
ccagggtgccttgctcctagatagcaacactgcagcgagaaatggcggagccatc

SEQ ID NO: 162157 - DNA, 55 bp, Artificial
  Synthetic oligonucleotide
agagcaccgactcatgaaaagctgctagagtgacttattgtaactgttaacgagc

SEQ ID NO: 162158 - DNA, 55 bp, Artificial
  Synthetic oligonucleotide
ccaggaattgatagggaggcctgtagatatggaagaacaacttaagcggctcacg

SEQ ID NO: 162159 - DNA, 60 bp, Artificial
  Synthetic oligonucleotide
atgatgggaacacttaaactcataattagcaagctgcctcagaatatactcagtagagtc

SEQ ID NO: 162160 - DNA, 55 bp, Artificial
  Synthetic oligonucleotide
cagttacgattaaacataacacggcgtctcccaagaattctaaacgctcgctatc

SEQ ID NO: 162161 - DNA, 55 bp, Artificial
  Synthetic oligonucleotide
cataaagagtccgattatttgttcctgatggaatgcctccgttaggcgtaggcgc

SEQ ID NO: 162162 - DNA, 55 bp, Artificial
  Synthetic oligonucleotide
ccagaattccactgtaaagcggcctcaaattctatatccccatcatctcgaggtc

SEQ ID NO: 162163 - DNA, 55 bp, Artificial
  Synthetic oligonucleotide
ccactcggatagtaagcgtgcatagagagcccttatttagcggagggtagtaggc

SEQ ID NO: 162164 - DNA, 55 bp, Artificial
  Synthetic oligonucleotide
cattgtcttcgttgcctaaccgctttctatcgattacagatctctgtgaacgcgc

SEQ ID NO: 162165 - DNA, 55 bp, Artificial
  Synthetic oligonucleotide
cattaatacacagcaacccgttcccattctcggccccgataggctggtctaccaa

SEQ ID NO: 162166 - DNA, 55 bp, Artificial
  Synthetic oligonucleotide
catagatcgtcgtatcgattacttgcggcaggcaattattcatagttcgtctgag

SEQ ID NO: 162167 - DNA, 55 bp, Artificial
  Synthetic oligonucleotide
ccggaatcaggactataggttgcagcggaagtaaagtgaaacactaatgctccgc

SEQ ID NO: 162168 - DNA, 55 bp, Artificial
  Synthetic oligonucleotide
caagccactagctccatgctctctaccctaaaggaactaacaatcaaggcaaatc

SEQ ID NO: 162169 - DNA, 55 bp, Artificial
  Synthetic oligonucleotide
ccgccctcgctcttcatggaggcataagctcctaaagctctttatgctcaagccc

SEQ ID NO: 162170 - DNA, 58 bp, Artificial
  Synthetic oligonucleotide
atggcgataaatcttgcggttactcaacagcgtagagttggtttcctatctctagaaa

SEQ ID NO: 162171 - DNA, 55 bp, Artificial
  Synthetic oligonucleotide
cacagtttgcattgagattacagttcacgagatcgaaatttcgcgttttggttgt

SEQ ID NO: 162172 - DNA, 55 bp, Artificial
  Synthetic oligonucleotide
caccaatggccgctgttcgttatacccatggtttattggaggatccactataacg

SEQ ID NO: 162173 - DNA, 55 bp, Artificial
  Synthetic oligonucleotide
acgaactatggattaccgagctagattagggattggctacctagctcaagaaccc

SEQ ID NO: 162174 - DNA, 55 bp, Artificial
  Synthetic oligonucleotide
ccctgcgtagtcttcctcccctaggcgatacctaaggagagagtaatatgtccgg

SEQ ID NO: 162175 - DNA, 55 bp, Artificial
  Synthetic oligonucleotide
agcaaccggagggatgtctgggattcggagttgctgcttatgtagttggcctagc

SEQ ID NO: 162176 - DNA, 55 bp, Artificial
  Synthetic oligonucleotide
cactgtaggtgatccctctacggatacactcttcgggagagtatttcggcacacc

SEQ ID NO: 162177 - DNA, 55 bp, Artificial
  Synthetic oligonucleotide
ccctcgtgctcttgtttgacctgcttgtcaggaatctctagggcatacctgagac

SEQ ID NO: 162178 - DNA, 55 bp, Artificial
  Synthetic oligonucleotide
cccgtagtggcgcaagcaagacgcacagcggtcatggtagcttccgtacctgatg

SEQ ID NO: 162179 - DNA, 55 bp, Artificial
  Synthetic oligonucleotide
cccgggatccaagttagtgatcgatcttttgtcccattgtccctatcgtttgttc

SEQ ID NO: 162180 - DNA, 55 bp, Artificial
  Synthetic oligonucleotide
cagaagttgagcgcctacaatcacgacagctagacctaggatggtttgtgttgcg

SEQ ID NO: 162181 - DNA, 58 bp, Artificial
  Synthetic oligonucleotide
attacacccgacaacgttaatagtatgtttttaatttctgctgacatcatagcttcta

SEQ ID NO: 162182 - DNA, 55 bp, Artificial
  Synthetic oligonucleotide
cccctgactatgatccctacagcgtcggtagcctcaacgattatctatccagggt

SEQ ID NO: 162183 - DNA, 55 bp, Artificial
  Synthetic oligonucleotide
cccctcataagcttcgcctctcttcacaacgaagaaccgttcctacaaatgagta

SEQ ID NO: 162184 - DNA, 55 bp, Artificial
  Synthetic oligonucleotide
cccctatgacactaacgctgcatacatcgggagatatctcagtaaccaatcccgg

SEQ ID NO: 162185 - DNA, 55 bp, Artificial
  Synthetic oligonucleotide
cagcgcgccctgggtacaaacagtaagcgtgggtaaggactacgatgttgctgcg

SEQ ID NO: 162186 - DNA, 55 bp, Artificial
  Synthetic oligonucleotide
aggaagttgacaagaaggacgtatagcattctgtattgcggacagcgacgtaaac

SEQ ID NO: 162187 - DNA, 55 bp, Artificial
  Synthetic oligonucleotide
cgttgccatggtagctcgttgcctcctagttaaagtggtaacccttgcgtcccta

SEQ ID NO: 162188 - DNA, 55 bp, Artificial
  Synthetic oligonucleotide
cgttttaataccgtctcttcgtaaaggaaggtctgagataagcaagagtgctcct

SEQ ID NO: 162189 - DNA, 54 bp, Artificial
  Synthetic oligonucleotide
aacataccttcccgaagaactattagcccctatacagaatctaaaagcggaatg

SEQ ID NO: 162190 - DNA, 55 bp, Artificial
  Synthetic oligonucleotide
aggttcatgcgtttctggcccttgggatgtagaagagggcgcgcaactgtacacc

SEQ ID NO: 162191 - DNA, 53 bp, Artificial
  Synthetic oligonucleotide
ctaagccgttttgataggaagtcctatttgtatcccgatagcccaaggaactt

SEQ ID NO: 162192 - DNA, 58 bp, Artificial
  Synthetic oligonucleotide
attcacatctagcaatgtaacaactttattaggaggaacagaaataggtagatttaca

SEQ ID NO: 162193 - DNA, 55 bp, Artificial
  Synthetic oligonucleotide
ctaagttatgagcccctgcaggaatagtatccccaatgccacaagatttagggat

SEQ ID NO: 162194 - DNA, 55 bp, Artificial
  Synthetic oligonucleotide
ctatgatcatcgtgagagtccaaaacagcaccgtagaggggactgggattcacca

SEQ ID NO: 162195 - DNA, 55 bp, Artificial
  Synthetic oligonucleotide
agggggctccctcattattgcagggaccgccataggtgctggggtgttagctgtc

SEQ ID NO: 162196 - DNA, 54 bp, Artificial
  Synthetic oligonucleotide
ctcagttactgccgtggctcttaaaacatggggcgtaactttaaatggtatacg

SEQ ID NO: 162197 - DNA, 55 bp, Artificial
  Synthetic oligonucleotide
ctcatagcagctgttgcatgatttagtaacgtcgccaactacagctgtatgctgc

SEQ ID NO: 162198 - DNA, 55 bp, Artificial
  Synthetic oligonucleotide
ctccacgcgatcaaaggaaattcaaccgcgttagcctcaggtgcctctttaaagc

SEQ ID NO: 162199 - DNA, 55 bp, Artificial
  Synthetic oligonucleotide
ctcctcctctaagacgaactatctcctaacacgggagctcagtcgtaaggtaggg

SEQ ID NO: 162200 - DNA, 55 bp, Artificial
  Synthetic oligonucleotide
ctcggagtcccttgtagaggtgctggggtatatgaaaagctcaccctcacaggca

SEQ ID NO: 162201 - DNA, 55 bp, Artificial
  Synthetic oligonucleotide
aacactgtatccaaactcttatgcagtgaattgtctttacgcacacacaacctcg

SEQ ID NO: 162202 - DNA, 51 bp, Artificial
  Synthetic oligonucleotide
ctctcctaacccagagcgtaaaggttcgttagtcccgaacactctttgggg

SEQ ID NO: 162203 - DNA, 57 bp, Artificial
  Synthetic oligonucleotide
gcgataagggtgttggatcaatttcttccttcatctagaaacaaagacgttagagaa

SEQ ID NO: 162204 - DNA, 55 bp, Artificial
  Synthetic oligonucleotide
ctctgaatcccttctgggatactcaaacggcaagtaccttcttttaagagtgtgg

SEQ ID NO: 162205 - DNA, 53 bp, Artificial
  Synthetic oligonucleotide
ctgcaaagataaaatccctttacccacgaaattcctcgtgatataacctaaac

SEQ ID NO: 162206 - DNA, 55 bp, Artificial
  Synthetic oligonucleotide
ctgcagggcactctcatgaactttgtggaggcacgcatgcggaagctactgggga

SEQ ID NO: 162207 - DNA, 55 bp, Artificial
  Synthetic oligonucleotide
agggcaacctctgcacgcttacgatgcgagtcacgtcgctttagactctctgcga

SEQ ID NO: 162208 - DNA, 55 bp, Artificial
  Synthetic oligonucleotide
ctgtagctacggagaggttatggacgaggtaatttaccaaggcgttatctaggaa

SEQ ID NO: 162209 - DNA, 54 bp, Artificial
  Synthetic oligonucleotide
ctgttaacctagattctttaggtgatggcaaaatgattacccttaccgcttcgg

SEQ ID NO: 162210 - DNA, 55 bp, Artificial
  Synthetic oligonucleotide
cttaagacttcagaagaacgcttacctccttgcagcatagtttgggcgatcaacc

SEQ ID NO: 162211 - DNA, 55 bp, Artificial
  Synthetic oligonucleotide
cttcatcaggaacctatgctttaggaagtggcggagccatctgcatccctacggg

SEQ ID NO: 162212 - DNA, 55 bp, Artificial
  Synthetic oligonucleotide
ctttagctgcgacttcaggatcaggactgatgttcgtaggaccagagttacgcca

SEQ ID NO: 162213 - DNA, 55 bp, Artificial
  Synthetic oligonucleotide
gaaagactgggaacaaagtttcgagttatttgtgggagtctactgtcaatgaatc

SEQ ID NO: 162214 - DNA, 59 bp, Artificial
  Synthetic oligonucleotide
cgttgaattttttgtcctaggacaggctgttaattatctagaacatgctcacactgttg

SEQ ID NO: 162215 - DNA, 54 bp, Artificial
  Synthetic oligonucleotide
aaatcgcttaccaacctgtggtctacagacactaccctaaaatcttaacaacat

SEQ ID NO: 162216 - DNA, 55 bp, Artificial
  Synthetic oligonucleotide
gaacaccctaggcgtttgtactctgtcacagcggttgctctaagcacgtgagggg

SEQ ID NO: 162217 - DNA, 55 bp, Artificial
  Synthetic oligonucleotide
aggcttccgtagctgatgagacgttttggatagtgacgtctgaagtaagagtgta

SEQ ID NO: 162218 - DNA, 55 bp, Artificial
  Synthetic oligonucleotide
gaacgtaattaatacgtagtatcagggatttctatgcagccctggtgacgttgcc

SEQ ID NO: 162219 - DNA, 55 bp, Artificial
  Synthetic oligonucleotide
gaagatcatgacgcgtatgggagcttctgttttagcgatgttgggttctaatggg

SEQ ID NO: 162220 - DNA, 55 bp, Artificial
  Synthetic oligonucleotide
gaatcatgagtagagaggcttgtgacggatagagggtcgtattgatcgaaagggg

SEQ ID NO: 162221 - DNA, 55 bp, Artificial
  Synthetic oligonucleotide
cgcggatgacactatgcttatggtccctgcattaaatgggcttcctggcaagcta

SEQ ID NO: 162222 - DNA, 55 bp, Artificial
  Synthetic oligonucleotide
attccgagtcactaatttgaccacgaactgcgaacgatgccacctcgccacccgc

SEQ ID NO: 162223 - DNA, 55 bp, Artificial
  Synthetic oligonucleotide
cgcgtccttgaatattgagcactttagcacagatggctccgccatttctcgctgc

SEQ ID NO: 162224 - DNA, 55 bp, Artificial
  Synthetic oligonucleotide
aattgctaggtattaatcagcctgcaacgtctctccaggaattgatagggaggcc

SEQ ID NO: 162225 - DNA, 58 bp, Artificial
  Synthetic oligonucleotide
ctaagaaccagcattactaatacaggattgactccaacaacgtattcattacgtgtag

SEQ ID NO: 162226 - DNA, 55 bp, Artificial
  Synthetic oligonucleotide
atgaggtgcatgtaggttcgtggcagtggcatgagggtaaacccttaggatatcg

SEQ ID NO: 162227 - DNA, 55 bp, Artificial
  Synthetic oligonucleotide
cgctctgccaataactgtagattcagcttgggaagagctgttaagaaggcgtgtc

SEQ ID NO: 162228 - DNA, 55 bp, Artificial
  Synthetic oligonucleotide
cgctgatctcacacaaatgagctcgtcgaaaaggcttatttcctcgtgaactatc

SEQ ID NO: 162229 - DNA, 55 bp, Artificial
  Synthetic oligonucleotide
cggacatagatggattagtgcacgacatggaagagtacgtacaggctcccttggt

SEQ ID NO: 162230 - DNA, 55 bp, Artificial
  Synthetic oligonucleotide
cggacggatagctccgaatgtcgcgaggtaggtaattcctccgatgatgctacag

SEQ ID NO: 162231 - DNA, 55 bp, Artificial
  Synthetic oligonucleotide
aatagtgcaattttcggagggatacttatcggcgtaggcgtagggatcatgttgc

SEQ ID NO: 162232 - DNA, 55 bp, Artificial
  Synthetic oligonucleotide
cgggtggcaaaatcttggccgcgtctttagcttgcaagatttcaacacggtttat

SEQ ID NO: 162233 - DNA, 55 bp, Artificial
  Synthetic oligonucleotide
cggtaacagataaagcttctgttacgcgttttgccccttgaagaatagtttgagc

SEQ ID NO: 162234 - DNA, 55 bp, Artificial
  Synthetic oligonucleotide
cggtcaccacaggatacggcatatacttaataaaagtgcctagtccggcaagacc

SEQ ID NO: 162235 - DNA, 55 bp, Artificial
  Synthetic oligonucleotide
cggtctcgctgtttcaacacctcaatacggacatacctactaaaccctgtccaac

SEQ ID NO: 162236 - DNA, 60 bp, Artificial
  Synthetic oligonucleotide
gcatcaggtgatgatgggaagaacagcgttatatctcagatacggcataggtatgactat

SEQ ID NO: 162237 - DNA, 55 bp, Artificial
  Synthetic oligonucleotide
atcggtatttccgactgtaatatggaggaaggatcggttcgtttcgatgtgaaca

SEQ ID NO: 162238 - DNA, 55 bp, Artificial
  Synthetic oligonucleotide
cgttcgttcgtggagagcctcatggaaacgtgactgtgctgaaagatagtctcgg

SEQ ID NO: 162239 - DNA, 55 bp, Artificial
  Synthetic oligonucleotide
aggttggttatctagtcggaaacgagtagagttcttagaagcatctaagctgtct

SEQ ID NO: 162240 - DNA, 55 bp, Artificial
  Synthetic oligonucleotide
aagccctgagcaggttcgtttgatcaccgttgcggacaggcatattcctcgtgcg

SEQ ID NO: 162241 - DNA, 55 bp, Artificial
  Synthetic oligonucleotide
atataaaatcgcatacagagctgttatggaccccttgtcattgtttccggcacgt

SEQ ID NO: 162242 - DNA, 55 bp, Artificial
  Synthetic oligonucleotide
ataggtgggctcccggactaactaagaagttcgcttgagcagatgactctgggag

SEQ ID NO: 162243 - DNA, 55 bp, Artificial
  Synthetic oligonucleotide
cgtgtttctctccagagacgtaagctaaaggctcagcacctcctgaatacttatc

SEQ ID NO: 162244 - DNA, 55 bp, Artificial
  Synthetic oligonucleotide
agtaaccatcttgtccgcatgacgacgcaactctttggccttaggcaatgtagtc

SEQ ID NO: 162245 - DNA, 55 bp, Artificial
  Synthetic oligonucleotide
agctagtaaagctctaaatctccctatagtcctatcccgagggatccttaggccc

SEQ ID NO: 162246 - DNA, 54 bp, Artificial
  Synthetic oligonucleotide
aggattgcaaatctctattcaaggcagcgaataccactgcttcctagaacaaag

SEQ ID NO: 162247 - DNA, 56 bp, Artificial
  Synthetic oligonucleotide
ctaggaaaagctttggtatttgaagactgtacagagtacattcttaggcaacttgt

SEQ ID NO: 162248 - DNA, 54 bp, Artificial
  Synthetic oligonucleotide
aggctcttaaacctccaagtacgcgactcccgtagtttcgatattcagcactaa

SEQ ID NO: 162249 - DNA, 54 bp, Artificial
  Synthetic oligonucleotide
gttgcagggatggtttgcgggattactttaggagcacttggagcgccaggccta

SEQ ID NO: 162250 - DNA, 54 bp, Artificial
  Synthetic oligonucleotide
cataagcaagtcctaagcgatcaaagatcttactgtacgccatacgcaactttt

SEQ ID NO: 162251 - DNA, 54 bp, Artificial
  Synthetic oligonucleotide
agtagtggatgctcagtctattcgtcgtgttgctcgtagcgtaggggatcatgg

SEQ ID NO: 162252 - DNA, 54 bp, Artificial
  Synthetic oligonucleotide
tacatgatgattaataaactccctaaggcgcaccctttaggtcactaccctgcc

SEQ ID NO: 162253 - DNA, 53 bp, Artificial
  Synthetic oligonucleotide
tcctcggaagccgtgaaacaacacgactgtagggaaccctccttccggtgtgg

SEQ ID NO: 162254 - DNA, 54 bp, Artificial
  Synthetic oligonucleotide
agctgttgagttacaaatacccgttgtatgtttatcacagctatctaggaaggt

SEQ ID NO: 162255 - DNA, 54 bp, Artificial
  Synthetic oligonucleotide
tcgttgttcctcgagcaggcgtgccccaactataccctgacgaattcctccccg

SEQ ID NO: 162256 - DNA, 54 bp, Artificial
  Synthetic oligonucleotide
tcggtggttcttagcagcaggcatccgctctccgcaaacaatcatccaacagcc

SEQ ID NO: 162257 - DNA, 54 bp, Artificial
  Synthetic oligonucleotide
agcgtggtagcctcttgcagatttacgtagttctatacttccttgagcaaatag

SEQ ID NO: 162258 - DNA, 59 bp, Artificial
  Synthetic oligonucleotide
attggttgatcgcccagacaatgctccaaggaggtaaacgctcctctgaagtcttaagc

SEQ ID NO: 162259 - DNA, 59 bp, Artificial
  Synthetic oligonucleotide
ctatctgataggcaagttgatcatacaaggagtcagaaaattaaccgaggtaatatctt

SEQ ID NO: 162260 - DNA, 54 bp, Artificial
  Synthetic oligonucleotide
atatattagatggttccatgaaattggaaggtttagtctgttgtgatcattgtg

SEQ ID NO: 162261 - DNA, 54 bp, Artificial
  Synthetic oligonucleotide
atccgccccggagatgctaatgaagtgaagggagcttggcatgcggcgttacgt

SEQ ID NO: 162262 - DNA, 54 bp, Artificial
  Synthetic oligonucleotide
gtggatggagctgcactattgcctgtatcagttgtaggcttggcacccatgtgg

SEQ ID NO: 162263 - DNA, 54 bp, Artificial
  Synthetic oligonucleotide
tcgctatcaaactttctctcctattttacgcatctgtgaaggttgggaaggtct

SEQ ID NO: 162264 - DNA, 54 bp, Artificial
  Synthetic oligonucleotide
aggatacgtagggatccttcggaagcttggcgccacgtgcgacttttgtcgctg

SEQ ID NO: 162265 - DNA, 54 bp, Artificial
  Synthetic oligonucleotide
gtgaactatgttcaagctccgataaccctcacactagctttagcagtatgttta

SEQ ID NO: 162266 - DNA, 54 bp, Artificial
  Synthetic oligonucleotide
cgcatcatccttacttgcctggaaggtatctgctctagccacagcgatactctc

SEQ ID NO: 162267 - DNA, 54 bp, Artificial
  Synthetic oligonucleotide
gctggagaagaaccataatagccgtgttctaacgtacacaagcgcaccaaagaa

SEQ ID NO: 162268 - DNA, 52 bp, Artificial
  Synthetic oligonucleotide
ggacctttggcagtccccgggaaaaaccctagatctcgagccccttgcaacg

SEQ ID NO: 162269 - DNA, 54 bp, Artificial
  Synthetic oligonucleotide
ggcagctcgggagtaggttcagcagggagttcggtagaaggtcttcaggacaca

SEQ ID NO: 162270 - DNA, 56 bp, Artificial
  Synthetic oligonucleotide
ctattttccagtatttgtacggaatctaaaatcgaagttataggattagatctaca

SEQ ID NO: 162271 - DNA, 54 bp, Artificial
  Synthetic oligonucleotide
gggagccatggtggtttctcttggggaggatgttgcgggagtattttcgaacaa

SEQ ID NO: 162272 - DNA, 53 bp, Artificial
  Synthetic oligonucleotide
gccgttgcaaggggctcgagatctagggtttttcccggggactgccaaaggtc

SEQ ID NO: 162273 - DNA, 53 bp, Artificial
  Synthetic oligonucleotide
aaccccgccgatgagactttgactggggacgacccattcgaggaactctaccc

SEQ ID NO: 162274 - DNA, 54 bp, Artificial
  Synthetic oligonucleotide
acctgtgatcgtgtgtagatgagcgaaaggggttaaatcatgagtgggaagtgg

SEQ ID NO: 162275 - DNA, 54 bp, Artificial
  Synthetic oligonucleotide
gggctctctcaaggctctggcattcctctcattggggtgaaccacgttgaggcc

SEQ ID NO: 162276 - DNA, 54 bp, Artificial
  Synthetic oligonucleotide
tggagctaccacattagccgctcttatgaactatgccaaaacaacagccctacc

SEQ ID NO: 162277 - DNA, 54 bp, Artificial
  Synthetic oligonucleotide
ttttcgaacaacacatacatgcgacagtcggtagtacaaccgaaactaactcgt

SEQ ID NO: 162278 - DNA, 54 bp, Artificial
  Synthetic oligonucleotide
ccagagctttacgggaagttggtttagctgcgggagagcctccagcaagagcgg

SEQ ID NO: 162279 - DNA, 54 bp, Artificial
  Synthetic oligonucleotide
acggtctcggcctattctattccaaggtgtggcgacctatggttatatgcaaca

SEQ ID NO: 162280 - DNA, 54 bp, Artificial
  Synthetic oligonucleotide
ctatgccacgagaatatccatgcatgcccatctaaatcttgtgctagggcccat

SEQ ID NO: 162281 - DNA, 58 bp, Artificial
  Synthetic oligonucleotide
ctctagaatggaagggaatgttgtcctagctctagttaaggaaggtgattctgctcct

SEQ ID NO: 162282 - DNA, 54 bp, Artificial
  Synthetic oligonucleotide
cgttgacaggaagaagttgagcgtgctacgaatcaaactaaccgccgttagaat

SEQ ID NO: 162283 - DNA, 54 bp, Artificial
  Synthetic oligonucleotide
gccgcacactgccacgaagcacaggggcagtcacacaaaaaccctagaagcatt

SEQ ID NO: 162284 - DNA, 53 bp, Artificial
  Synthetic oligonucleotide
atgacaataagttaactgcgcatgaaggactaacggagcttctacgccgatag

SEQ ID NO: 162285 - DNA, 53 bp, Artificial
  Synthetic oligonucleotide
aatattggagtgcaaaactgcatagcaaccttagtaggcgattcggcatctct

SEQ ID NO: 162286 - DNA, 53 bp, Artificial
  Synthetic oligonucleotide
aagtgcgtagagatattactgtcagtagatctttattaaaagagacctcagta

SEQ ID NO: 162287 - DNA, 53 bp, Artificial
  Synthetic oligonucleotide
tagcgaggaagcaacggcaagtagagcccccaagtccgcagcaggctctataa

SEQ ID NO: 162288 - DNA, 53 bp, Artificial
  Synthetic oligonucleotide
tagcgtggggtagagcactccacgaatcttagggagctccttgcgaccaagct

SEQ ID NO: 162289 - DNA, 53 bp, Artificial
  Synthetic oligonucleotide
aaggtttctgcccaacaacgcatctggtccattcctgcggaacggaaagtatc

SEQ ID NO: 162290 - DNA, 53 bp, Artificial
  Synthetic oligonucleotide
cgtagcgttagaggacgatctgtttatgatatcttttctcaagcagaactcgg

SEQ ID NO: 162291 - DNA, 53 bp, Artificial
  Synthetic oligonucleotide
cgtaggagctacggagaatttgatactcgcttctgtccgtgctcaaggcagaa

SEQ ID NO: 162292 - DNA, 60 bp, Artificial
  Synthetic oligonucleotide
gatgaggaaatcatgcgtatttcctgtctttcatcgagacaaagtgtgtgttcttattgt

SEQ ID NO: 162293 - DNA, 53 bp, Artificial
  Synthetic oligonucleotide
tcaatccaaataggagagctccatgccatcgcttgatccacttgggtcacgcg

SEQ ID NO: 162294 - DNA, 53 bp, Artificial
  Synthetic oligonucleotide
gaacatggtcttcgagctcatagttctcccacgattactcccataatggattc

SEQ ID NO: 162295 - DNA, 52 bp, Artificial
  Synthetic oligonucleotide
cgtcctaaatcccaatggcggaccccctcgtagtaaacggagcgagcgggct

SEQ ID NO: 162296 - DNA, 53 bp, Artificial
  Synthetic oligonucleotide
ctggggtacaacgggaatgatagggggtggggtcgcttgtgttgtgtggcgag

SEQ ID NO: 162297 - DNA, 53 bp, Artificial
  Synthetic oligonucleotide
agcttgttgacgtcgttactacaggagttgtggtcgtagtagttgtgacattc

SEQ ID NO: 162298 - DNA, 53 bp, Artificial
  Synthetic oligonucleotide
tatccgctatccctttgtccctacgcaagcgcgcacttgggatcatgctccgg

SEQ ID NO: 162299 - DNA, 53 bp, Artificial
  Synthetic oligonucleotide
gcacatctgatatgaactcctcctccttaacagacgctccgccattaactccc

SEQ ID NO: 162300 - DNA, 53 bp, Artificial
  Synthetic oligonucleotide
cgtctagagccctctacatcagctcccgtgcttgcacgtttgtcccgaggcac

SEQ ID NO: 162301 - DNA, 53 bp, Artificial
  Synthetic oligonucleotide
gcattagcagctatccaaagattactgaccgcaacgaattacaaggggaacac

SEQ ID NO: 162302 - DNA, 53 bp, Artificial
  Synthetic oligonucleotide
gtaaatcgaaattgccaataaccatagctcttgttgatcccgaaagtgttgct

SEQ ID NO: 162303 - DNA, 60 bp, Artificial
  Synthetic oligonucleotide
ctgcgtctttgctgataatatcaaagttgggcaaatgacagagccgctcaaggaccagca

SEQ ID NO: 162304 - DNA, 53 bp, Artificial
  Synthetic oligonucleotide
tgcatgagttgtggagtggatcggtaattcgtatccaatattagctgagactc

SEQ ID NO: 162305 - DNA, 53 bp, Artificial
  Synthetic oligonucleotide
gggtgcgcatgagcgacaatagggaagctccctgaagtgcgatctccgagacg

SEQ ID NO: 162306 - DNA, 53 bp, Artificial
  Synthetic oligonucleotide
acgggatttcttggaatcggttggtgtgattgccctaaaggatctaaaggatt

SEQ ID NO: 162307 - DNA, 53 bp, Artificial
  Synthetic oligonucleotide
ggggctagcatcgaaggcaaccataaaggccttcacgaagtgatgtgtgcctc

SEQ ID NO: 162308 - DNA, 53 bp, Artificial
  Synthetic oligonucleotide
gggctagtaatgcgggggccgacgagtctccgtcattggttgtcccgtctgca

SEQ ID NO: 162309 - DNA, 53 bp, Artificial
  Synthetic oligonucleotide
ccgaggcgagagctttacgcacgcatttccaatcccaagaagggggaatgcgg

SEQ ID NO: 162310 - DNA, 53 bp, Artificial
  Synthetic oligonucleotide
acctgccaattgtttcaaaccaacacccctgcctttcttagttataaacacca

SEQ ID NO: 162311 - DNA, 53 bp, Artificial
  Synthetic oligonucleotide
gttcggatgggtgcgtccatgcgtgaaaagaatacggaagccagcgggagcat

SEQ ID NO: 162312 - DNA, 53 bp, Artificial
  Synthetic oligonucleotide
gttcggggatcccgttggagggcatatggtctcaggacatgtgtgcggtacgg

SEQ ID NO: 162313 - DNA, 53 bp, Artificial
  Synthetic oligonucleotide
cggcggctggttggataacggaactggcggagagtgtgtgttagtcgcggttg

SEQ ID NO: 162314 - DNA, 60 bp, Artificial
  Synthetic oligonucleotide
ctgctccttgcgctgttagttatggttattcatctggcatacctaatgtttgttcattaa

SEQ ID NO: 162315 - DNA, 53 bp, Artificial
  Synthetic oligonucleotide
cggcatttacaccatgctttcgtagagaggcgggggctgcaggagctcacgaa

SEQ ID NO: 162316 - DNA, 53 bp, Artificial
  Synthetic oligonucleotide
tacccaagcggctcccttacgctctcctcgtatggttcccgtacgagttgcat

SEQ ID NO: 162317 - DNA, 53 bp, Artificial
  Synthetic oligonucleotide
agcggtgaaaggtaattacaggagcatctaaatgcgaagatagagtttctgct

SEQ ID NO: 162318 - DNA, 53 bp, Artificial
  Synthetic oligonucleotide
gcgtcaaagcggtgtgcgcgtaaagcggttccttgtgtccgatgacccgaata

SEQ ID NO: 162319 - DNA, 53 bp, Artificial
  Synthetic oligonucleotide
acaccatgctttcgtagagaggcgggggctgcaggagctcacgaacgaggact

SEQ ID NO: 162320 - DNA, 53 bp, Artificial
  Synthetic oligonucleotide
agcaaccttaagaatgtcttgtcgcaagtcatagcttcgactcctcaaggcgt

SEQ ID NO: 162321 - DNA, 53 bp, Artificial
  Synthetic oligonucleotide
cctgtattgcagatcctggagcgagtttagtgcgtcgtgcacgtgctttgggg

SEQ ID NO: 162322 - DNA, 52 bp, Artificial
  Synthetic oligonucleotide
tgagaactattgagcttcctagtgtgagtgctgtagctatgacaatctttgg

SEQ ID NO: 162323 - DNA, 52 bp, Artificial
  Synthetic oligonucleotide
ttgggcaggcatgggtgccacaataccaccggatcctgtccgttcttggaag

SEQ ID NO: 162324 - DNA, 52 bp, Artificial
  Synthetic oligonucleotide
aatgagtgtggggctagcgcgcctaaatggttaggccaatgtccgggatgct

SEQ ID NO: 162325 - DNA, 57 bp, Artificial
  Synthetic oligonucleotide
gagttacgaagacaaaacctcttcgttgaccgatgtactcttgtagaaagtgcataa

SEQ ID NO: 162326 - DNA, 52 bp, Artificial
  Synthetic oligonucleotide
tccctggattgtatgtaatacgtcctgccgatgctaatgaagttagaggagc

SEQ ID NO: 162327 - DNA, 52 bp, Artificial
  Synthetic oligonucleotide
tgtctcgcaaatcaagtttgaacgactcagtgctgccagataattcaacctt

SEQ ID NO: 162328 - DNA, 52 bp, Artificial
  Synthetic oligonucleotide
aagaattatgcttcggggatcaaattcctggtttctaataatatactagatg

SEQ ID NO: 162329 - DNA, 52 bp, Artificial
  Synthetic oligonucleotide
actgtttatgacattttttcttccggagacgacggtaaaaacggtgtcatct

SEQ ID NO: 162330 - DNA, 52 bp, Artificial
  Synthetic oligonucleotide
aaaaccgcagctatccgagatttggtggctgaaacagctttattaccccaag

SEQ ID NO: 162331 - DNA, 52 bp, Artificial
  Synthetic oligonucleotide
gaaatacgacggagcccgttgtacaattttaagcatgagcgaatttggttta

SEQ ID NO: 162332 - DNA, 52 bp, Artificial
  Synthetic oligonucleotide
cgtcgacgagatccgcctagaaccttgaaacacttaactttcttagcccctg

SEQ ID NO: 162333 - DNA, 52 bp, Artificial
  Synthetic oligonucleotide
cgtagttgaatcgacactctgttatcggtgatccatgtacatcccgcttccc

SEQ ID NO: 162334 - DNA, 52 bp, Artificial
  Synthetic oligonucleotide
cggtgctatgtagtgaatgtgtgtagagggagacccagaaggataggggccc

SEQ ID NO: 162335 - DNA, 52 bp, Artificial
  Synthetic oligonucleotide
cgggacgtcccatagagaatatcggattgggtagcttctcgtttgcctagtt

SEQ ID NO: 162336 - DNA, 59 bp, Artificial
  Synthetic oligonucleotide
ctttgattatgcttatcttgtctagaaaagacatgttttccaaggctgaatagacaact

SEQ ID NO: 162337 - DNA, 52 bp, Artificial
  Synthetic oligonucleotide
cgctacatacgggttcagcctcgcaaggcccgactagctgctgggcttatga

SEQ ID NO: 162338 - DNA, 52 bp, Artificial
  Synthetic oligonucleotide
gggtacatcgtattggccagagtcgctcggtctcttcctataagctagttac

SEQ ID NO: 162339 - DNA, 52 bp, Artificial
  Synthetic oligonucleotide
ggttctctacgtcagggagccggaaggccgacgatactgcctcctgcgatta

SEQ ID NO: 162340 - DNA, 52 bp, Artificial
  Synthetic oligonucleotide
catggtccattatcccctggccatgttactatctctggacaagattcccaat

SEQ ID NO: 162341 - DNA, 52 bp, Artificial
  Synthetic oligonucleotide
cagtccaacaacgtctgctattgaatgcccatgaagggagatctatgacggt

SEQ ID NO: 162342 - DNA, 52 bp, Artificial
  Synthetic oligonucleotide
cacgaaagcataaaggattcattgtagaaccttgtcccatcttggtagatca

SEQ ID NO: 162343 - DNA, 52 bp, Artificial
  Synthetic oligonucleotide
caacgcctacccgcttacggtctatcctgtgttattcgtcgtatgtggacaa

SEQ ID NO: 162344 - DNA, 52 bp, Artificial
  Synthetic oligonucleotide
tccaggcacaaccggttacggagccatcaaagctggagggaatactactatt

SEQ ID NO: 162345 - DNA, 52 bp, Artificial
  Synthetic oligonucleotide
tacagatcaacaaataatacttgggacatcgacaactcctgtcgcagcaaaa

SEQ ID NO: 162346 - DNA, 52 bp, Artificial
  Synthetic oligonucleotide
tactgagattgggaaattcacgattacaccggaaaatactaatagcacattc

SEQ ID NO: 162347 - DNA, 56 bp, Artificial
  Synthetic oligonucleotide
cttttttaatcgcatctagaattagattatgatttaaaagggaaaactcttgcaga

SEQ ID NO: 162348 - DNA, 52 bp, Artificial
  Synthetic oligonucleotide
agggttacccgttcctgcttacgactttgttattaaggcatctcacgccttt

SEQ ID NO: 162349 - DNA, 52 bp, Artificial
  Synthetic oligonucleotide
atcctgggaaggcattcgctcccccagcacctactgccggctgttgtcccac

SEQ ID NO: 162350 - DNA, 52 bp, Artificial
  Synthetic oligonucleotide
tatatccaaaccccaagcgaccccttggtcttgacagaccacaggagcccga

SEQ ID NO: 162351 - DNA, 51 bp, Artificial
  Synthetic oligonucleotide
ttacgaagaccaaacctcttcgtggcccaatgtactctcttagagcgtgca

SEQ ID NO: 162352 - DNA, 51 bp, Artificial
  Synthetic oligonucleotide
gggccattccgtaatctatgggattcggatacaacgcccaaggatctcgaa

SEQ ID NO: 162353 - DNA, 51 bp, Artificial
  Synthetic oligonucleotide
gggataggattttgttatctttagagctatagcgaccaacagcggaatagt

SEQ ID NO: 162354 - DNA, 51 bp, Artificial
  Synthetic oligonucleotide
cgatcacaacacatatcgccgatatcgattacgatacgattattatctacc

SEQ ID NO: 162355 - DNA, 51 bp, Artificial
  Synthetic oligonucleotide
gcttctagggtttttgtgtgactgcccctgtgcttcgtggcagtgtgcggc

SEQ ID NO: 162356 - DNA, 51 bp, Artificial
  Synthetic oligonucleotide
gctgatcaagaaataatgcggatatcttgtttatcttcgactcaaatgcta

SEQ ID NO: 162357 - DNA, 51 bp, Artificial
  Synthetic oligonucleotide
aatttgatagcgaatcaaattcgtttgttaaaacgagatgatcgtgtcgac

SEQ ID NO: 162358 - DNA, 57 bp, Artificial
  Synthetic oligonucleotide
gaaccagtattactaatacaggattgactccgacaacgtattcattacgtgtaggcg

SEQ ID NO: 162359 - DNA, 51 bp, Artificial
  Synthetic oligonucleotide
gcgggaggtacgggattaaacttagtaggagctgatacggtaatccattac

SEQ ID NO: 162360 - DNA, 51 bp, Artificial
  Synthetic oligonucleotide
aagtagcttgagagtccccatttcccgagaagatctaggcaaagtacacgg

SEQ ID NO: 162361 - DNA, 51 bp, Artificial
  Synthetic oligonucleotide
tcagttgtggggattcttgtagttccgacatctataacgacagcgtgtgaa

SEQ ID NO: 162362 - DNA, 51 bp, Artificial
  Synthetic oligonucleotide
cgtatcgttgccacgacctctagtgcatccggaggaagcggggtcagcagt

SEQ ID NO: 162363 - DNA, 51 bp, Artificial
  Synthetic oligonucleotide
cgtattatctatgggaccctcacgtctttctatctgtaatacgcctgtgtt

SEQ ID NO: 162364 - DNA, 51 bp, Artificial
  Synthetic oligonucleotide
ctctcccgatgcataagcatttcgaagagtactccagaatccaactcaaac

SEQ ID NO: 162365 - DNA, 51 bp, Artificial
  Synthetic oligonucleotide
tttgtaatattaaggatcagtcttactttgaaacacagcgactgctctccc

SEQ ID NO: 162366 - DNA, 51 bp, Artificial
  Synthetic oligonucleotide
gagaaggacaacaggtggccattaatcaagtttattactattttaagctgg

SEQ ID NO: 162367 - DNA, 51 bp, Artificial
  Synthetic oligonucleotide
agaccttgcaactcttggtggtagaccttgcaactcttggtggtagacctt

SEQ ID NO: 162368 - DNA, 51 bp, Artificial
  Synthetic oligonucleotide
gtcgaaaacaaagtcaccatagtaacctatacgcatgctgatagcgtcaca

SEQ ID NO: 162369 - DNA, 57 bp, Artificial
  Synthetic oligonucleotide
gtttcatttcattagaaatgagcccaaatcagattgtagaacgggtagtatcaaatt

SEQ ID NO: 162370 - DNA, 58 bp, Artificial
  Synthetic oligonucleotide
gaagattttcgttataggaggacaaagaaactccggaacacatgatgcgaagtatctc

SEQ ID NO: 162371 - DNA, 51 bp, Artificial
  Synthetic oligonucleotide
tacttaaacagggagtgaccttgatcacacaaggattctcgcaggagccag

SEQ ID NO: 162372 - DNA, 51 bp, Artificial
  Synthetic oligonucleotide
tagagcctgctgcggacttgggggctctacttgccgttgcttcctcgctat

SEQ ID NO: 162373 - DNA, 51 bp, Artificial
  Synthetic oligonucleotide
actggacgctcttgttggacttcctccagaccagacaagggaatccctggc

SEQ ID NO: 162374 - DNA, 51 bp, Artificial
  Synthetic oligonucleotide
tcttgtgatactaatgacaggataggggatagtggaacactatttgctaac

SEQ ID NO: 162375 - DNA, 51 bp, Artificial
  Synthetic oligonucleotide
tgtatatccaacttcaagagctgcaacagatattctgaatttaacacacga

SEQ ID NO: 162376 - DNA, 51 bp, Artificial
  Synthetic oligonucleotide
ggtgtatcaatacacccatgcgccgtctctatccgacctactctagcccta

SEQ ID NO: 162377 - DNA, 51 bp, Artificial
  Synthetic oligonucleotide
ataacaggattgccggaaggtaattggtgtgcataacccactcgacaggtg

SEQ ID NO: 162378 - DNA, 51 bp, Artificial
  Synthetic oligonucleotide
taactagctgcacgaacttgtttggtgccttctgtccatgaagcttttgac

SEQ ID NO: 162379 - DNA, 51 bp, Artificial
  Synthetic oligonucleotide
ccctggataagctgcctaccatgcaagttcttgctagccattctaacttcc

SEQ ID NO: 162380 - DNA, 50 bp, Artificial
  Synthetic oligonucleotide
atttctgaaattgtatcgtaggcaaaatctacttctcggggatctacacc

SEQ ID NO: 162381 - DNA, 60 bp, Artificial
  Synthetic oligonucleotide
gacaggtgttgatgttgtcccaaggattatttgctggtccttgagcggctctgtcatttg

SEQ ID NO: 162382 - DNA, 50 bp, Artificial
  Synthetic oligonucleotide
gcatttttagctagtgattacctagttgtgtgtttaaccccagaaccatt

SEQ ID NO: 162383 - DNA, 50 bp, Artificial
  Synthetic oligonucleotide
cactgtcccccgaagaacgtgcacgcgcagggttgtttgtgggattccag

SEQ ID NO: 162384 - DNA, 50 bp, Artificial
  Synthetic oligonucleotide
tgagttggaatcttcctcgaagtgcttacgagtctatccaggatacattc

SEQ ID NO: 162385 - DNA, 50 bp, Artificial
  Synthetic oligonucleotide
agatttactgaacgaacatcgcgaatgtattacgcagctttagtcctagg

SEQ ID NO: 162386 - DNA, 50 bp, Artificial
  Synthetic oligonucleotide
gacatgggatccatatccaaagcgtaaagcatttgtagtacgatctcccg

SEQ ID NO: 162387 - DNA, 50 bp, Artificial
  Synthetic oligonucleotide
cgtagagttggttggctgcaagatttagataatgtacccctgtcagcatg

SEQ ID NO: 162388 - DNA, 50 bp, Artificial
  Synthetic oligonucleotide
tcaactaggttggttatctagtcggaaacgagtagagttcttagaagcat

SEQ ID NO: 162389 - DNA, 50 bp, Artificial
  Synthetic oligonucleotide
gcgaccttagttctgatggctctgagcgtggtgttcgtgactctgccttt

SEQ ID NO: 162390 - DNA, 50 bp, Artificial
  Synthetic oligonucleotide
cggggaaatgctccgatgtctgagcgctctcccttgagccatgcgggttt

SEQ ID NO: 162391 - DNA, 50 bp, Artificial
  Synthetic oligonucleotide
agtctacataggaagaatcggtcattataggcggccttaagttattcgcg

SEQ ID NO: 162392 - DNA, 53 bp, Artificial
  Synthetic oligonucleotide
gtcaaaacagtttcgatttctaagaaggagtggacggtattttttgaagcgct

SEQ ID NO: 162393 - DNA, 50 bp, Artificial
  Synthetic oligonucleotide
actttaggcgtagatattattctgaatggagctaaggttggacgtggtaa

SEQ ID NO: 162394 - DNA, 50 bp, Artificial
  Synthetic oligonucleotide
ttcgccttgttatctcaacaggatgtttacgcacacagaccgtacaggat

SEQ ID NO: 162395 - DNA, 50 bp, Artificial
  Synthetic oligonucleotide
gctgattggaatgcgttatggaaccgtgcctctagttcgctctactgggg

SEQ ID NO: 162396 - DNA, 50 bp, Artificial
  Synthetic oligonucleotide
ggttagataatgttcgctcataatcttggaatacgaggcgtagagaaaca

SEQ ID NO: 162397 - DNA, 50 bp, Artificial
  Synthetic oligonucleotide
tgttactcgatttaaaaacttagttagggatatataacatgctgctctga

SEQ ID NO: 162398 - DNA, 50 bp, Artificial
  Synthetic oligonucleotide
ttaaccgatcccctccgtaatcaatctctgcctgtagcacctaacccagg

SEQ ID NO: 162399 - DNA, 47 bp, Artificial
  Synthetic oligonucleotide
gctcctaaagtcgcacaaccacactcccataaagctccgcgtgcacc

SEQ ID NO: 162400 - DNA, 60 bp, Artificial
  Synthetic oligonucleotide
catctgcgtcttgctctatttgaccgctgtctcgcaaatctgaaagcatgggaactttat

SEQ ID NO: 162401 - DNA, 54 bp, Artificial
  Synthetic oligonucleotide
cattaacccataccacaccgctttctaaaccgcctacacgtaatgaatacgttg

SEQ ID NO: 162402 - DNA, 54 bp, Artificial
  Synthetic oligonucleotide
catttttccggagcgagttacgaagacaaaacctcttcgttgaccgatgtactc

SEQ ID NO: 162403 - DNA, 59 bp, Artificial
  Synthetic oligonucleotide
ccaactatctagaaaagttgaggatagagcaaataaagttcccatgctttcagatttgc

SEQ ID NO: 162404 - DNA, 56 bp, Artificial
  Synthetic oligonucleotide
ggttaaagtaaactatcctagtttcttaatgcaagaattgcgtgactatcttggaa

SEQ ID NO: 162405 - DNA, 60 bp, Artificial
  Synthetic oligonucleotide
ccatagttgagagtgctgtacaggacattatagataagattacctcggacccttctctag

SEQ ID NO: 162406 - DNA, 60 bp, Artificial
  Synthetic oligonucleotide
ccatcccggatcacctgtaaggtctgagcggatgacatcgttactgccgacgcgctttta

SEQ ID NO: 162407 - DNA, 60 bp, Artificial
  Synthetic oligonucleotide
attttcggatgctatggatttgtcataggcatatatcatcttcgaagaagaatgaccggt

SEQ ID NO: 162408 - DNA, 59 bp, Artificial
  Synthetic oligonucleotide
ggtgaaggtaagctatcctaatttcttaatgcaagagttgcaagattatcttgggaata

SEQ ID NO: 162409 - DNA, 59 bp, Artificial
  Synthetic oligonucleotide
gggttaacgcattagcaaatggtgattctatcttagggacaacaacaacatcgaatata

SEQ ID NO: 162410 - DNA, 57 bp, Artificial
  Synthetic oligonucleotide
ggggacctgtcctaagtgtgggtttgatcgggctaggggagacgaatgtcagcagtg

SEQ ID NO: 162411 - DNA, 59 bp, Artificial
  Synthetic oligonucleotide
ggcatcccaaggaagtccggggacgatctcatactctccagtccccagcattcgacaag

SEQ ID NO: 162412 - DNA, 55 bp, Artificial
  Synthetic oligonucleotide
cgaaagttgaatatctcttagtccttcccaaatacgttcatttctaatagaaaga

SEQ ID NO: 162413 - DNA, 58 bp, Artificial
  Synthetic oligonucleotide
cgcaaatgattgattttaaatcgtttgatgtgtatactatgtcgtgtaagcctttttg

SEQ ID NO: 162414 - DNA, 60 bp, Artificial
  Synthetic oligonucleotide
cgcgattagttatggatactcatcaggcattcctaatttatgtagtctaagaaccagtat

SEQ ID NO: 162415 - DNA, 60 bp, Artificial
  Synthetic oligonucleotide
gcgctcatttctagagataggaaaccaactctacgctgttgagtaaccgcaagatttatc

SEQ ID NO: 162416 - DNA, 56 bp, Artificial
  Synthetic oligonucleotide
gcgcaaaactccctgacggcaggcaaccagtaaatcttccccggaaacaccaagca

SEQ ID NO: 162417 - DNA, 59 bp, Artificial
  Synthetic oligonucleotide
agatccacaagcaaacctaactacaggtcttggaattcagattcgtgacgaacatagtc

SEQ ID NO: 162418 - DNA, 52 bp, Artificial
  Synthetic oligonucleotide
caaaaccccgagagaaattgcaactttaggtggtagactttgcaactttagg

SEQ ID NO: 162419 - DNA, 59 bp, Artificial
  Synthetic oligonucleotide
agataaggttaaagtcttaggcaaaattgagggaatgtcaaatactgcagctatagata

SEQ ID NO: 162420 - DNA, 60 bp, Artificial
  Synthetic oligonucleotide
tgcaacattaacccgagatacgatttgtccatatctttgatacgacgccgcaaaagctct

SEQ ID NO: 162421 - DNA, 58 bp, Artificial
  Synthetic oligonucleotide
tttgcccgagcacgcatcccctgtaccgttgacaaaaactgtccagctaattgagccc

SEQ ID NO: 162422 - DNA, 53 bp, Artificial
  Synthetic oligonucleotide
agaaccaaaagtttgggagaaaaccccagttatcagaagacttattcgagctg

SEQ ID NO: 162423 - DNA, 60 bp, Artificial
  Synthetic oligonucleotide
actgtgagaatatatcataaatagaccggcctctagcgctgcgaatagaaaaagtctttg

SEQ ID NO: 162424 - DNA, 60 bp, Artificial
  Synthetic oligonucleotide
tgtagtcatggattagcttctattaaactattaacagggcagatcaagtctatacaaaaa

SEQ ID NO: 162425 - DNA, 59 bp, Artificial
  Synthetic oligonucleotide
tgtcggagtccgaacaccctaggcgtttgtactctgtcacagcggttgctctaagcacg

SEQ ID NO: 162426 - DNA, 59 bp, Artificial
  Synthetic oligonucleotide
tgtgcaaatcaactccaacgttagagtaagttatctattcagccttggaaaacatgtct

SEQ ID NO: 162427 - DNA, 60 bp, Artificial
  Synthetic oligonucleotide
tgttgagtgatgcggtccaatgcataataacttcgaataaggagaagcttttcatgcgtt

SEQ ID NO: 162428 - DNA, 58 bp, Artificial
  Synthetic oligonucleotide
aacacttttaggctatattagagccatcttctttgaagcgttgtcttctcgagaagat

SEQ ID NO: 162429 - DNA, 56 bp, Artificial
  Synthetic oligonucleotide
gttgttgatcgttaccaaacgttttctcccatcttacgtatctgtgaaggctggga

SEQ ID NO: 162430 - DNA, 60 bp, Artificial
  Synthetic oligonucleotide
ttatagcaactgtcacttcattagaagtcctattcatcttgagaatcagaagtttggtag

SEQ ID NO: 162431 - DNA, 60 bp, Artificial
  Synthetic oligonucleotide
ttatcttctggattgggggctagtgtcagaagtgaccaaaaaggcttgcacgacatagta

SEQ ID NO: 162432 - DNA, 57 bp, Artificial
  Synthetic oligonucleotide
acctacacggaaacataaagggttcgttgtagagccatgtcctatcttggtagatca

SEQ ID NO: 162433 - DNA, 55 bp, Artificial
  Synthetic oligonucleotide
aacagtttaaagctaaaaaaagcgttgattatgcttattctgtctagaaaagaca

SEQ ID NO: 162434 - DNA, 60 bp, Artificial
  Synthetic oligonucleotide
ttcactggcaatagagggcccactgagatagcctagatgttgcgcggcgggacggccaaa

SEQ ID NO: 162435 - DNA, 59 bp, Artificial
  Synthetic oligonucleotide
accagtcccaacctatttcccacatagttttgcatcagtctcatgaaccgttgtggata

SEQ ID NO: 162436 - DNA, 60 bp, Artificial
  Synthetic oligonucleotide
ttctaggacaagctgttaattatctagaacatgcgcatacaattgtgcgtaggttatcag

SEQ ID NO: 162437 - DNA, 60 bp, Artificial
  Synthetic oligonucleotide
acactgctccttgcgctattagttatggttattcatctggtatcccaaatgtttgctctt

SEQ ID NO: 162438 - DNA, 59 bp, Artificial
  Synthetic oligonucleotide
acaccaaatcttctgcttataatgctctaggatattacgagttatttattagtcttcca

SEQ ID NO: 162439 - DNA, 57 bp, Artificial
  Synthetic oligonucleotide
aaccccttttgtgttccccttgtaattcgttgcagtcagcaatctttggatagctgc

SEQ ID NO: 162440 - DNA, 60 bp, Artificial
  Synthetic oligonucleotide
caagagataatgcgagtatcgtgtttatcttctacgcaaatgttatcagcttatgataca

SEQ ID NO: 162441 - DNA, 55 bp, Artificial
  Synthetic oligonucleotide
aactgaggatttgtcttttgctcagaatcaggtcaccttcaaagttaaaaaacga

SEQ ID NO: 162442 - DNA, 60 bp, Artificial
  Synthetic oligonucleotide
aatggcaaagctagtgttattgcccaaatacgtcacaggtatgattatagatccagacat

SEQ ID NO: 162443 - DNA, 55 bp, Artificial
  Synthetic oligonucleotide
ttgcaactttaggtggtagactttgcaactttaggtggtagactttgcaacttta

SEQ ID NO: 162444 - DNA, 56 bp, Artificial
  Synthetic oligonucleotide
aagacgtcgcggagactttaccttagccaccggaagatggatagccgactatccga

SEQ ID NO: 162445 - DNA, 54 bp, Artificial
  Synthetic oligonucleotide
ttgcaactttaggtggtagactttgcaactttaggtggtagacttttggttgaa

SEQ ID NO: 162446 - DNA, 58 bp, Artificial
  Synthetic oligonucleotide
ttgggaagagcttttgcggcgtcgtatcaaagatatggacaaatcgtatctcgggtta

SEQ ID NO: 162447 - DNA, 58 bp, Artificial
  Synthetic oligonucleotide
ttgggaaagattagcggtttatcgaatgctctagctatcgatgtattaaataagttcc

SEQ ID NO: 162448 - DNA, 60 bp, Artificial
  Synthetic oligonucleotide
ttgcttgtggatctagatccacaagcaaacctaactacaggtcttggaattcagattcgt

SEQ ID NO: 162449 - DNA, 59 bp, Artificial
  Synthetic oligonucleotide
tctagggatccttactcaagaagccttcctagctagccaatacttggttgtgtgtctaa

SEQ ID NO: 162450 - DNA, 60 bp, Artificial
  Synthetic oligonucleotide
aaacgcatggatgtttcatatctaatacatatgtctcaaaatgcagacatacctatagat

SEQ ID NO: 162451 - DNA, 60 bp, Artificial
  Synthetic oligonucleotide
acgcctggtccaggcgcagtacgtatctgttgtcttgttgctatagtgccgaacatacag

SEQ ID NO: 162452 - DNA, 58 bp, Artificial
  Synthetic oligonucleotide
aaggcttgccgtgcgggtgaaaaagatgcatgcgaaaggctgaaacgactggccggga

SEQ ID NO: 162453 - DNA, 50 bp, Artificial
  Synthetic oligonucleotide
cgttttctcggggatataggaccgttattggccccgttattaaccagtaa

SEQ ID NO: 162454 - DNA, 55 bp, Artificial
  Synthetic oligonucleotide
cctttgagcgccttaccggtatggcccgtgttgtgcgctcgaactccattgccgc

SEQ ID NO: 162455 - DNA, 55 bp, Artificial
  Synthetic oligonucleotide
cgtgcacgatccctcaagggtatcggggaattaagaacgagttaattatcgagta

SEQ ID NO: 162456 - DNA, 55 bp, Artificial
  Synthetic oligonucleotide
ccggttcagaggatgagtacaggcgtactcgcgatgaagatccggttaagcatac

SEQ ID NO: 162457 - DNA, 55 bp, Artificial
  Synthetic oligonucleotide
cgtcttggagatgttcgtataggcattggagatgaccggccaacttttgttatcg

SEQ ID NO: 162458 - DNA, 55 bp, Artificial
  Synthetic oligonucleotide
cgtagcacgtctggcatacgccatgacctccgcacacatagcccacatggcactg

SEQ ID NO: 162459 - DNA, 55 bp, Artificial
  Synthetic oligonucleotide
cggtcgctggattctgcatcgaggtatccgccaaccgtcgtgcggcttgcgatac

SEQ ID NO: 162460 - DNA, 55 bp, Artificial
  Synthetic oligonucleotide
ccgttgaacggtagtgacgaagtgagtgacgaagtgagtgacgaagtgagtgacg

SEQ ID NO: 162461 - DNA, 55 bp, Artificial
  Synthetic oligonucleotide
cggtgcgaaatcttctggcgcatggtgactgtccggttatgagttgtggccgcgt

SEQ ID NO: 162462 - DNA, 55 bp, Artificial
  Synthetic oligonucleotide
cctgacctgatcaccatcagataagggactcaagtgcctccgcttagcttgcccc

SEQ ID NO: 162463 - DNA, 60 bp, Artificial
  Synthetic oligonucleotide
ctgggaggaaaaaccatgtcaaacatgtttatcgccatcaaattggttgctgccgctatg

SEQ ID NO: 162464 - DNA, 55 bp, Artificial
  Synthetic oligonucleotide
ccttgagcacactggcgctattgccactggttgaaagtccgatcagaatgtcccc

SEQ ID NO: 162465 - DNA, 55 bp, Artificial
  Synthetic oligonucleotide
ccttgaacagtgccctggattattgaaagccgcacctgtgcatgcgttctgaacg

SEQ ID NO: 162466 - DNA, 55 bp, Artificial
  Synthetic oligonucleotide
gagagcggtgtcagtctaagcttctacaccatgcttgccgcctctctgtcaaccg

SEQ ID NO: 162467 - DNA, 55 bp, Artificial
  Synthetic oligonucleotide
gagaagtggatcccgagtgttcaggatatcgcggaatagatttataaacgagccc

SEQ ID NO: 162468 - DNA, 55 bp, Artificial
  Synthetic oligonucleotide
gagaactacgccgatagctacggtagtcgtcgtaatcatttcgggaaataaggct

SEQ ID NO: 162469 - DNA, 55 bp, Artificial
  Synthetic oligonucleotide
gacttcgaacgatgagacctgaaagagaattgcccattaactgttaagtactccc

SEQ ID NO: 162470 - DNA, 55 bp, Artificial
  Synthetic oligonucleotide
gactgaccatacacaccaaggggagaaacctcgtcacattcacgatacggaaccg

SEQ ID NO: 162471 - DNA, 55 bp, Artificial
  Synthetic oligonucleotide
gaccaatggaattattcggcgggattaaaatggacgcacttttacggcagcggat

SEQ ID NO: 162472 - DNA, 55 bp, Artificial
  Synthetic oligonucleotide
gacagggcaggtgtaagatggagttgcactccgagtttcagcatggatggactcg

SEQ ID NO: 162473 - DNA, 55 bp, Artificial
  Synthetic oligonucleotide
caggggttgattatcaattctgtgaaggagtgcgtattggggtgtccgggttccg

SEQ ID NO: 162474 - DNA, 58 bp, Artificial
  Synthetic oligonucleotide
tcgcctgcgccgtcgataaaacccaaagcagccataggggttgactatttcgcgacca

SEQ ID NO: 162475 - DNA, 55 bp, Artificial
  Synthetic oligonucleotide
gacacgaagatgatgcctcatctgaacaaccttcattttactcccacggttgagc

SEQ ID NO: 162476 - DNA, 55 bp, Artificial
  Synthetic oligonucleotide
caggttcatccattattagcaacgctcatgcaacgaatcttgatacaacgcgtac

SEQ ID NO: 162477 - DNA, 55 bp, Artificial
  Synthetic oligonucleotide
cagtattgattcaccgcgactcccctgcggagcgcttattgcacactccattgga

SEQ ID NO: 162478 - DNA, 55 bp, Artificial
  Synthetic oligonucleotide
gacaatggtcgagtccacgccgcttatgtacttcacgtggtagcgctgtctcgga

SEQ ID NO: 162479 - DNA, 55 bp, Artificial
  Synthetic oligonucleotide
catccgtcttactgtaacgaacgggttgcaacttggcgcactcagcacaagcggc

SEQ ID NO: 162480 - DNA, 55 bp, Artificial
  Synthetic oligonucleotide
cgagagcaacgatcccgactcgtcgagaattttctggtctgacggcggagtgcat

SEQ ID NO: 162481 - DNA, 55 bp, Artificial
  Synthetic oligonucleotide
catctcatgacaatacgtagagacgccctcaagatgcagcacagggttgccgccc

SEQ ID NO: 162482 - DNA, 55 bp, Artificial
  Synthetic oligonucleotide
gaagatgattcacggaaatacacgcacgtgaaaagatgaaccatgaaccgctgtg

SEQ ID NO: 162483 - DNA, 55 bp, Artificial
  Synthetic oligonucleotide
catgggtgagaacgcatttatcgcctatactgttgtccataccctcggatattca

SEQ ID NO: 162484 - DNA, 55 bp, Artificial
  Synthetic oligonucleotide
gaactgtaatacttcagtctctacggagctataggacaggtcggcaggatattcg

SEQ ID NO: 162485 - DNA, 54 bp, Artificial
  Synthetic oligonucleotide
gaacgttttttttcccgggcctggattgaagtggtgcttcgcaaggatgaagcc

SEQ ID NO: 162486 - DNA, 55 bp, Artificial
  Synthetic oligonucleotide
ccaacccgagcctgtcgattcgaacgaggatacgagcttttgccgtacgatcctg

SEQ ID NO: 162487 - DNA, 55 bp, Artificial
  Synthetic oligonucleotide
cgagacgcttggagagcggctcaagtgcgtaatcaccccgacatgcagtactctt

SEQ ID NO: 162488 - DNA, 55 bp, Artificial
  Synthetic oligonucleotide
cttgcgagagcgcatagtcaaaattccgaattgcctgtggataaccgcctcgcga

SEQ ID NO: 162489 - DNA, 55 bp, Artificial
  Synthetic oligonucleotide
cttgagacaggaacacctttgtcggcacggtaaatagattgcgaaccatgacgcc

SEQ ID NO: 162490 - DNA, 55 bp, Artificial
  Synthetic oligonucleotide
ccagcataaacgttctctttagaggttgccatcgtgttgaggtcaacgacaatag

SEQ ID NO: 162491 - DNA, 55 bp, Artificial
  Synthetic oligonucleotide
cgacggtttagacactctggttattgagggctcgggtgatattaccgttgtgagg

SEQ ID NO: 162492 - DNA, 55 bp, Artificial
  Synthetic oligonucleotide
ccatcccggtgcccagctatccgtcgcaggatcgtacgccataccgaaatagcca

SEQ ID NO: 162493 - DNA, 55 bp, Artificial
  Synthetic oligonucleotide
cggtaacagcgaaggtgacagggccgacgggcatactgacggtgaggtcaacctc

SEQ ID NO: 162494 - DNA, 55 bp, Artificial
  Synthetic oligonucleotide
ccatttcagtcaccggtaacgtgctcagggattatcttaccgatcttttcccgat

SEQ ID NO: 162495 - DNA, 55 bp, Artificial
  Synthetic oligonucleotide
cttctggacactctccgcaaggctaagagctgaacgatccagaatcccgccccgt

SEQ ID NO: 162496 - DNA, 56 bp, Artificial
  Synthetic oligonucleotide
acccaggtcgttcgacagggtggagtcatggctgctccctccttgtccaaaaacgc

SEQ ID NO: 162497 - DNA, 55 bp, Artificial
  Synthetic oligonucleotide
cccacaagcccgtcaggagtcaggacgctcatatcgggacgaatcccgtcgtttg

SEQ ID NO: 162498 - DNA, 55 bp, Artificial
  Synthetic oligonucleotide
cccacgaggtcatagtgcctctacgtaagtgtactcgggctactctcgctgaatc

SEQ ID NO: 162499 - DNA, 55 bp, Artificial
  Synthetic oligonucleotide
ctggtggcatactggaccttcatgttgtcaactctggcggctatcttctggtgtt

SEQ ID NO: 162500 - DNA, 55 bp, Artificial
  Synthetic oligonucleotide
acagtcagggtgccggttgtactctccgcggcatcagtttcgaccagtgcccctg

SEQ ID NO: 162501 - DNA, 55 bp, Artificial
  Synthetic oligonucleotide
tcctggagccctgaaaccgttaccataccgaatcatcccggcattacagaacagg

SEQ ID NO: 162502 - DNA, 55 bp, Artificial
  Synthetic oligonucleotide
tccggtcgtggtcattcagcgtgaatccaacagcggtacccaggagactttcagg

SEQ ID NO: 162503 - DNA, 55 bp, Artificial
  Synthetic oligonucleotide
cggcctgtgaaggctgcatcccgaaatattgaaaaccggccacaggtatagtggt

SEQ ID NO: 162504 - DNA, 55 bp, Artificial
  Synthetic oligonucleotide
accataccgaattttagctggaatcgacaccatcgtgtagcgattcatggaacgc

SEQ ID NO: 162505 - DNA, 55 bp, Artificial
  Synthetic oligonucleotide
acccctactctcttcagtcctacggcaatcatgtatccagtcgactagcgcaacg

SEQ ID NO: 162506 - DNA, 55 bp, Artificial
  Synthetic oligonucleotide
cggcgtgggtttacgttttacgcccgtcgtgctggatgcaggccgtatttcactc

SEQ ID NO: 162507 - DNA, 60 bp, Artificial
  Synthetic oligonucleotide
gtatatcctgacgtgcagcttcttgtgtccgcacgtacacggacaatggtccatcgcctg

SEQ ID NO: 162508 - DNA, 55 bp, Artificial
  Synthetic oligonucleotide
cggctaaagcacttgatccccggtacgaaaatctgcacctctttctggacaacgg

SEQ ID NO: 162509 - DNA, 55 bp, Artificial
  Synthetic oligonucleotide
tcccaccggtaatcgtatagaccggactgctcattatctcattgacaggccgttc

SEQ ID NO: 162510 - DNA, 55 bp, Artificial
  Synthetic oligonucleotide
tcataccgggaatcatacgtacggagctgcaagctaaaacctcacaacaaaccga

SEQ ID NO: 162511 - DNA, 55 bp, Artificial
  Synthetic oligonucleotide
tcaggattcccgtatctggcttgattatgtttcgaaagatcttgtcgagatcagt

SEQ ID NO: 162512 - DNA, 55 bp, Artificial
  Synthetic oligonucleotide
tatcgcgggtacctgggtcaacactacgcccgcggcgaatagattcttcgagagt

SEQ ID NO: 162513 - DNA, 55 bp, Artificial
  Synthetic oligonucleotide
tacgacagaccgtctcccgcagctattgcgtaatccgcaagctccagattcagga

SEQ ID NO: 162514 - DNA, 55 bp, Artificial
  Synthetic oligonucleotide
taccctttggcgaccttgacctgtacctcaccggccgtcaccatgctcaggatct

SEQ ID NO: 162515 - DNA, 55 bp, Artificial
  Synthetic oligonucleotide
acgcaatggaataatgagtaagcgccccggcattgagtaccactcctctgtaccc

SEQ ID NO: 162516 - DNA, 55 bp, Artificial
  Synthetic oligonucleotide
taccccggattgttgttggttggatcgagtgccacggttatctcctttgcttttg

SEQ ID NO: 162517 - DNA, 55 bp, Artificial
  Synthetic oligonucleotide
cggctttccgttcttctgtagtagtgttccggggtatcggcatagtgagagtcgg

SEQ ID NO: 162518 - DNA, 60 bp, Artificial
  Synthetic oligonucleotide
ccacgccagcacctgaactgatgtcatggcgccaggggcgcagaaggggagtcatatccc

SEQ ID NO: 162519 - DNA, 55 bp, Artificial
  Synthetic oligonucleotide
cgggccaatcgtttatgcagacgtcgaatcgctctatccctcgatcatgctcacc

SEQ ID NO: 162520 - DNA, 55 bp, Artificial
  Synthetic oligonucleotide
cgggccggtaagcgctccaaatcgatcacctacgaaattgcacttcgacaggggt

SEQ ID NO: 162521 - DNA, 55 bp, Artificial
  Synthetic oligonucleotide
acgtttcagctcttgcacagagacgttatggttgaacttgacgcatacggcatct

SEQ ID NO: 162522 - DNA, 55 bp, Artificial
  Synthetic oligonucleotide
actaccattcacgcatcggatatgtgaccccggaacagatgcatcaggaccttgc

SEQ ID NO: 162523 - DNA, 55 bp, Artificial
  Synthetic oligonucleotide
gtgtatagcgattgttctggaaatagctcatctaagacggtcgtctacgggaatc

SEQ ID NO: 162524 - DNA, 52 bp, Artificial
  Synthetic oligonucleotide
gtggtaaccaacctggttgtgctggttatgttcgtcctttatccttttaccg

SEQ ID NO: 162525 - DNA, 54 bp, Artificial
  Synthetic oligonucleotide
gtggggtatcaacgaatcggaccgggaggcaagggatcttcccgcataccggga

SEQ ID NO: 162526 - DNA, 55 bp, Artificial
  Synthetic oligonucleotide
gtgcactgacgaagggttttgttactgcgtacgacagcgaatgccttgctttcgg

SEQ ID NO: 162527 - DNA, 55 bp, Artificial
  Synthetic oligonucleotide
cgcgcctgtacgcctctctcatcaatcgcttaatccgattgcgatccacagcatc

SEQ ID NO: 162528 - DNA, 55 bp, Artificial
  Synthetic oligonucleotide
cggcaacaagggcattataaacggcttgagctgtcatgttcgtatagagcaaggt

SEQ ID NO: 162529 - DNA, 60 bp, Artificial
  Synthetic oligonucleotide
accagtggactcgatcaaatacggggcatcagccgaaattccgcagccaccccatagcgc

SEQ ID NO: 162530 - DNA, 55 bp, Artificial
  Synthetic oligonucleotide
cggagcaaagcgggctccagatcgatgtcgcgaatacatattggttgcgacttcg

SEQ ID NO: 162531 - DNA, 55 bp, Artificial
  Synthetic oligonucleotide
aaattaatcgcaaagaaggccactggattcatgttgcaattgcttatacgcaggg

SEQ ID NO: 162532 - DNA, 55 bp, Artificial
  Synthetic oligonucleotide
aacaggggttgtcagggcgatcttgtttgctttagtctcgattcgatagcctcgg

SEQ ID NO: 162533 - DNA, 55 bp, Artificial
  Synthetic oligonucleotide
ttataaatgctcgtgaattcaggttactcacgccgctcaccaacgtcccgacccc

SEQ ID NO: 162534 - DNA, 55 bp, Artificial
  Synthetic oligonucleotide
ttacgaagggatgctctccgttcagggctgctactgcccgcagcatctattggag

SEQ ID NO: 162535 - DNA, 55 bp, Artificial
  Synthetic oligonucleotide
tgtgagagatcaaccccgagagcccctgcattgtatagcagcgtgttatcacagg

SEQ ID NO: 162536 - DNA, 53 bp, Artificial
  Synthetic oligonucleotide
cggacggctattaaccaaaatttgcgaatacggcccttctaatccgttcatcc

SEQ ID NO: 162537 - DNA, 55 bp, Artificial
  Synthetic oligonucleotide
cggaatgaggatcgagatagtctaccatccccttgatcgaagagttcacgagact

SEQ ID NO: 162538 - DNA, 55 bp, Artificial
  Synthetic oligonucleotide
tgggcaattctctttcgggtctcgtcgttcgaagtcgcaaccaatatgtattcgc

SEQ ID NO: 162539 - DNA, 53 bp, Artificial
  Synthetic oligonucleotide
aacggaaacgggttttcgccgctgcctcggaactcccgttacagcaagtcagc

SEQ ID NO: 162540 - DNA, 60 bp, Artificial
  Synthetic oligonucleotide
cagccattgcaaacgaagccgggagggaagcacatctgaaagcggccataagccgcgttc

SEQ ID NO: 162541 - DNA, 55 bp, Artificial
  Synthetic oligonucleotide
tgccatatcgtggattttatgtggtcgttccgccggaataccgccagataggatg

SEQ ID NO: 162542 - DNA, 55 bp, Artificial
  Synthetic oligonucleotide
aacggtctattcgcgtcaaggttcttcatactgacaactactacctggttcctcc

SEQ ID NO: 162543 - DNA, 55 bp, Artificial
  Synthetic oligonucleotide
aacgtatcgaacgcatgagagaaagcctgtcgatatgatggacctcatcgttgtt

SEQ ID NO: 162544 - DNA, 55 bp, Artificial
  Synthetic oligonucleotide
tgatcgcttcattgtcacaaacccacgcatcataacggtttccgttagcttcaaa

SEQ ID NO: 162545 - DNA, 55 bp, Artificial
  Synthetic oligonucleotide
aagagagaccgttgcagctgcctgcagcgttgtgccgtctgccataccaagatct

SEQ ID NO: 162546 - DNA, 55 bp, Artificial
  Synthetic oligonucleotide
tctccggctactccgggtcattacaccataacagtagacggaaaatcctataacg

SEQ ID NO: 162547 - DNA, 55 bp, Artificial
  Synthetic oligonucleotide
tctccataacgacccggccgtcaggatcgataatacgcctgacgatataggggcg

SEQ ID NO: 162548 - DNA, 55 bp, Artificial
  Synthetic oligonucleotide
tcgttgagaaatgggacgctgaccaacccttgcctaaacggacgatcttgcttcc

SEQ ID NO: 162549 - DNA, 55 bp, Artificial
  Synthetic oligonucleotide
cgctgttactgaagccgcaaaatgtgacgccgagctgaacattgaatatcgcgtc

SEQ ID NO: 162550 - DNA, 55 bp, Artificial
  Synthetic oligonucleotide
tcggtaatgcggaccttttcggaaacaccttcattggcatccataaaggcactcc

SEQ ID NO: 162551 - DNA, 58 bp, Artificial
  Synthetic oligonucleotide
cagcctaaaccatcgctatggcaacgcttaaagatcaaatagcccggtggaacctctc

SEQ ID NO: 162552 - DNA, 55 bp, Artificial
  Synthetic oligonucleotide
tcggcatatggaaaaccctcgatgatttggtactattatggtcaggctttcgcct

SEQ ID NO: 162553 - DNA, 55 bp, Artificial
  Synthetic oligonucleotide
tcgctgataatacggggataatcgggcgataactcaggattggtgccataaaacg

SEQ ID NO: 162554 - DNA, 55 bp, Artificial
  Synthetic oligonucleotide
aattatggacctaccttatcgtaggcctgacctttgcgctctatatcgccattgc

SEQ ID NO: 162555 - DNA, 55 bp, Artificial
  Synthetic oligonucleotide
aattcgccatgagcaacaaggtgtcagtgccaaggcctatgcactctcatttgcc

SEQ ID NO: 162556 - DNA, 55 bp, Artificial
  Synthetic oligonucleotide
acaatccgggatagaggtcgcacttttcaacctcagcaagatagagcccatccgt

SEQ ID NO: 162557 - DNA, 55 bp, Artificial
  Synthetic oligonucleotide
tcgcctgccccgttttctgatccatctcattcggtcagtccggcaataaagcctc

SEQ ID NO: 162558 - DNA, 55 bp, Artificial
  Synthetic oligonucleotide
tcgaacgcaaatcgtaccgctccacagcagtctcgcgtgctctctgccgcatcgg

SEQ ID NO: 162559 - DNA, 55 bp, Artificial
  Synthetic oligonucleotide
ggttcgcgatccgcagcaagtccggctcgaagtccgtattgctcaggtgtcgagg

SEQ ID NO: 162560 - DNA, 55 bp, Artificial
  Synthetic oligonucleotide
agcgcgcgaacggtctcaggcgcacgaatcacatccgccgtccgataaacgcctt

SEQ ID NO: 162561 - DNA, 52 bp, Artificial
  Synthetic oligonucleotide
ggtatggggaaatcgttttgaagactttaaggattatggctacaactgggtt

SEQ ID NO: 162562 - DNA, 59 bp, Artificial
  Synthetic oligonucleotide
cgaggctatacgtctgatcggtatcgggttcgctgatgagtttcgtgccgtttgcgccc

SEQ ID NO: 162563 - DNA, 60 bp, Artificial
  Synthetic oligonucleotide
aaagagcagtttgggtaccattatgatcgcatggacaacttcaggagggtcttcactcat

SEQ ID NO: 162564 - DNA, 55 bp, Artificial
  Synthetic oligonucleotide
ggggcagttgaggacgtttctcattgccgtaaagctcgctttacatacacttgtc

SEQ ID NO: 162565 - DNA, 55 bp, Artificial
  Synthetic oligonucleotide
cgcgaatgtatccgatcgcattagggtgggttggcataagatgcgctccaattaa

SEQ ID NO: 162566 - DNA, 55 bp, Artificial
  Synthetic oligonucleotide
gggctcctgcgttaagggtagctctccatccacaaccattcacttccggtcatcg

SEQ ID NO: 162567 - DNA, 55 bp, Artificial
  Synthetic oligonucleotide
gggccggtatcgtattccctgcaccttcatctcgaaacctgaaagtctcgaacgg

SEQ ID NO: 162568 - DNA, 55 bp, Artificial
  Synthetic oligonucleotide
gggcatgttccaaagtcaccgtgtcgctctcaatttgtttgacatgcgtgctgaa

SEQ ID NO: 162569 - DNA, 55 bp, Artificial
  Synthetic oligonucleotide
aggagtgagcggaactgatgtcgcgatgcagtaccgactcggcgcaaggcgctta

SEQ ID NO: 162570 - DNA, 55 bp, Artificial
  Synthetic oligonucleotide
aggatagctgccggtcacgccctatttccatacagacagcggctactccgggagt

SEQ ID NO: 162571 - DNA, 54 bp, Artificial
  Synthetic oligonucleotide
ggcttcgttaacctttatggtacggcctttaagatccttgtcgttcatggattc

SEQ ID NO: 162572 - DNA, 55 bp, Artificial
  Synthetic oligonucleotide
ggctcatggaaagtaccgcatgttccactgaaatcgtcccttgtccgttaagttc

SEQ ID NO: 162573 - DNA, 55 bp, Artificial
  Synthetic oligonucleotide
ggcgagcagccatgaatattctgaactccggacatccattccactatacggggcg

SEQ ID NO: 162574 - DNA, 57 bp, Artificial
  Synthetic oligonucleotide
agtgcggaggcggagcgaaagtcctgtagcgaagcggacgtacgaccgtgcccgaca

SEQ ID NO: 162575 - DNA, 55 bp, Artificial
  Synthetic oligonucleotide
ggccgtgcaggtcaatacgcagatcgttcaaggcatttgacctctggttccagaa

SEQ ID NO: 162576 - DNA, 55 bp, Artificial
  Synthetic oligonucleotide
cgcccgtcaacagttaaatggaggagtaagcacctatggcgcgatatggaatggt

SEQ ID NO: 162577 - DNA, 55 bp, Artificial
  Synthetic oligonucleotide
ggcagctgttcaggcgactactcccagagacgatgcaactaacattccgcgtctt

SEQ ID NO: 162578 - DNA, 55 bp, Artificial
  Synthetic oligonucleotide
ggagttcgttggcataaacggtagcctgttcgatgctcattttacggcagactcc

SEQ ID NO: 162579 - DNA, 55 bp, Artificial
  Synthetic oligonucleotide
aggtgggctgacgccgcgattgtgctgagactccagcttgaaagaacaacagggg

SEQ ID NO: 162580 - DNA, 55 bp, Artificial
  Synthetic oligonucleotide
cgcagcgttatgcagagctttatctccctcttacgggtacctttcatgcggcaac

SEQ ID NO: 162581 - DNA, 55 bp, Artificial
  Synthetic oligonucleotide
ggagatcaaccatcccgagcattcaaaattcgctatctgggtaggaggcaagaac

SEQ ID NO: 162582 - DNA, 55 bp, Artificial
  Synthetic oligonucleotide
ggaccataattccgcaccaagtactctggttctgcaggggttaggcaatattgac

SEQ ID NO: 162583 - DNA, 55 bp, Artificial
  Synthetic oligonucleotide
ggaatactacagccaccatgacggctggacaaaccgccttatccagggagacagc

SEQ ID NO: 162584 - DNA, 55 bp, Artificial
  Synthetic oligonucleotide
gcttcaggctcaatggcgctaaatagaatgcgtcaggctaaaggtgccgttggac

SEQ ID NO: 162585 - DNA, 60 bp, Artificial
  Synthetic oligonucleotide
gctttgcagaacggccatattgttcagcgtcatcgcaacatccggcaggtacgttgcccg

SEQ ID NO: 162586 - DNA, 55 bp, Artificial
  Synthetic oligonucleotide
cgcagatgatcctcgcgtaaaggcgcttcaggaacatgtcgactacaagatggag

SEQ ID NO: 162587 - DNA, 55 bp, Artificial
  Synthetic oligonucleotide
gctggcggcatacaaggagaacccttcaattaccgatggtcaccgctggttgcgc

SEQ ID NO: 162588 - DNA, 55 bp, Artificial
  Synthetic oligonucleotide
gtcgcatgtcatgatcccatgcctcgacagctttgattccacgagatttcccacc

SEQ ID NO: 162589 - DNA, 55 bp, Artificial
  Synthetic oligonucleotide
agcagaaggagatttcgtcatgtcacagacaaaaggcgtcaagttagatgagagt

SEQ ID NO: 162590 - DNA, 55 bp, Artificial
  Synthetic oligonucleotide
gtcgcacgttgaacttatcctcaaccgcaccgacgcgaacggttccatctccagc

SEQ ID NO: 162591 - DNA, 55 bp, Artificial
  Synthetic oligonucleotide
cgcgcagccgtaagcccattgtgattgttggccgtcatcatagcatctcctgaaa

SEQ ID NO: 162592 - DNA, 55 bp, Artificial
  Synthetic oligonucleotide
gtacccatttcacagcttacggtaagacggtgccgacccttagcccttctcgatg

SEQ ID NO: 162593 - DNA, 55 bp, Artificial
  Synthetic oligonucleotide
gtaaagacgacactgagcccctcgaaattgctgtttatgagcggcttcggatctt

SEQ ID NO: 162594 - DNA, 55 bp, Artificial
  Synthetic oligonucleotide
ggttgcatcacattaacaatccggagagacgttcaatatacaccatgctttcgga

SEQ ID NO: 162595 - DNA, 54 bp, Artificial
  Synthetic oligonucleotide
cagttcgagatgattcatcgacttgagacggttacagaccgctgcgtcattaag

SEQ ID NO: 162596 - DNA, 54 bp, Artificial
  Synthetic oligonucleotide
cggggaaatggggtgaccctgtttcttgtagatgccgcaaccgggattatcgag

SEQ ID NO: 162597 - DNA, 54 bp, Artificial
  Synthetic oligonucleotide
ttttcacgcccttcgcttgataggccggtaactgagtgataattgaatgtttcg

SEQ ID NO: 162598 - DNA, 54 bp, Artificial
  Synthetic oligonucleotide
cgtaccgatgatgctataacgaacgaaggaggttcacccgttcccgtcctcgca

SEQ ID NO: 162599 - DNA, 54 bp, Artificial
  Synthetic oligonucleotide
agatacccctctctccggagacatccatcagctcgttgtgcagagcatgataac

SEQ ID NO: 162600 - DNA, 54 bp, Artificial
  Synthetic oligonucleotide
gctttagtctacacaattcaagcgcgctccaaagaactgcgctacttaatataa

SEQ ID NO: 162601 - DNA, 54 bp, Artificial
  Synthetic oligonucleotide
cacgagagtccgtcgaagacattgcgaggcttctttcgcgatacaacgacgcta

SEQ ID NO: 162602 - DNA, 54 bp, Artificial
  Synthetic oligonucleotide
tgctcacaagccacctctctccgacaacctccgtaacgatgatcgggcgagggt

SEQ ID NO: 162603 - DNA, 54 bp, Artificial
  Synthetic oligonucleotide
ccctttattacgcattcacctctatgatatccgaccatcgggtagtataacaag

SEQ ID NO: 162604 - DNA, 54 bp, Artificial
  Synthetic oligonucleotide
cggccacttcacctccccgacctacacaatggaaaccgctctcgggggcaaggc

SEQ ID NO: 162605 - DNA, 54 bp, Artificial
  Synthetic oligonucleotide
ctcatagacgtccacatcgggtacatagtcatggagccggcttacccttttggc

SEQ ID NO: 162606 - DNA, 54 bp, Artificial
  Synthetic oligonucleotide
atcggggcgaaaatttcccatgcaatatgggcttcaagtttgaccagaggatcg

SEQ ID NO: 162607 - DNA, 60 bp, Artificial
  Synthetic oligonucleotide
actgccggcagtgctcaacagttcagcgtacctgcagaacaaatatggttcaccggttta

SEQ ID NO: 162608 - DNA, 54 bp, Artificial
  Synthetic oligonucleotide
tcggggttggctcacgcgaatctgttgaagacattggtctcctgctctcacgct

SEQ ID NO: 162609 - DNA, 54 bp, Artificial
  Synthetic oligonucleotide
gttccctatgtagtcgggccgaatgtactgagtaagattaatcagtatgcccag

SEQ ID NO: 162610 - DNA, 54 bp, Artificial
  Synthetic oligonucleotide
cgagcgccaagttgctcccgctgctgtagaaccactctacacccacgttatcag

SEQ ID NO: 162611 - DNA, 54 bp, Artificial
  Synthetic oligonucleotide
ctttgccagcgctgccttacgataagctttgttcatctgcatggttatgctccc

SEQ ID NO: 162612 - DNA, 54 bp, Artificial
  Synthetic oligonucleotide
tacgttattgcgttggcgcacactaaacgcaaaccgggatattggttgaagagg

SEQ ID NO: 162613 - DNA, 54 bp, Artificial
  Synthetic oligonucleotide
gacaaagcatgttgagtccggtaatccgctgcaataaatggtgaggggattggc

SEQ ID NO: 162614 - DNA, 54 bp, Artificial
  Synthetic oligonucleotide
ggggtatctgaaggtatcttctcccgaggtgacggcttttgatgtaaccggata

SEQ ID NO: 162615 - DNA, 54 bp, Artificial
  Synthetic oligonucleotide
gtatttcactcaaggttgtatccgaggtttctgaacctaacacggaaccactca

SEQ ID NO: 162616 - DNA, 53 bp, Artificial
  Synthetic oligonucleotide
gagatagcggataaaccacggccccgccataagactgatcaaaagcgccgtta

SEQ ID NO: 162617 - DNA, 53 bp, Artificial
  Synthetic oligonucleotide
ttgcacatgtatcgacgagcagaggagtaagggttgaccggcttgattcgcgc

SEQ ID NO: 162618 - DNA, 60 bp, Artificial
  Synthetic oligonucleotide
aaccaggtagatgccgtacagtccatctgatcacaagcttaatcgagctaaaaacagcga

SEQ ID NO: 162619 - DNA, 53 bp, Artificial
  Synthetic oligonucleotide
aacaataccagagtattgcctcgacgacatgaaagtccatcaaggcttaatga

SEQ ID NO: 162620 - DNA, 53 bp, Artificial
  Synthetic oligonucleotide
aacacaacgtgccggaatacaacagcagggtcatcggaaacagaagtctcccc

SEQ ID NO: 162621 - DNA, 53 bp, Artificial
  Synthetic oligonucleotide
gacaccgtttcaattccacattggtgcaattagatgggtgacgctttcacgcc

SEQ ID NO: 162622 - DNA, 53 bp, Artificial
  Synthetic oligonucleotide
tccggccgtaaccggtgataatcggctccgacttttatcagccgatagtcatt

SEQ ID NO: 162623 - DNA, 53 bp, Artificial
  Synthetic oligonucleotide
gagggtctccggattattggtgatcacggttcctttagattcgggacatagcg

SEQ ID NO: 162624 - DNA, 53 bp, Artificial
  Synthetic oligonucleotide
tggcccagtcgcgtatgaatttcatgagtcaggtcggaaacgagtatgcagag

SEQ ID NO: 162625 - DNA, 53 bp, Artificial
  Synthetic oligonucleotide
gtgcgatagcgaatcccgggagtgatcatgccctatgatttcttctccctatc

SEQ ID NO: 162626 - DNA, 53 bp, Artificial
  Synthetic oligonucleotide
cgcaccgagggattatgaaaggcaactgctacactgtgagcattcagttcaca

SEQ ID NO: 162627 - DNA, 53 bp, Artificial
  Synthetic oligonucleotide
ttctgggagtatggtacaggcacgaatgttacgctgacctcaaccattgcggc

SEQ ID NO: 162628 - DNA, 53 bp, Artificial
  Synthetic oligonucleotide
ccatctattcgtgcgttactgctgcacatgcgaacaatgatcgaagatctacg

SEQ ID NO: 162629 - DNA, 60 bp, Artificial
  Synthetic oligonucleotide
ggccctcgcaatatggtcgatctctgccacctggtgaagcggtattactacgatccctat

SEQ ID NO: 162630 - DNA, 53 bp, Artificial
  Synthetic oligonucleotide
taacctgcagccgctccgctacattgccctcaccgccagggcagagtgcgacg

SEQ ID NO: 162631 - DNA, 53 bp, Artificial
  Synthetic oligonucleotide
gtcgaaacgaacgcatcgcattacggaatagtaactggagccgtgacaagagt

SEQ ID NO: 162632 - DNA, 53 bp, Artificial
  Synthetic oligonucleotide
ggttcattcaggatcgggagtatgaacggatcggagaccataagacaagaaaa

SEQ ID NO: 162633 - DNA, 53 bp, Artificial
  Synthetic oligonucleotide
gctggcgtcgactttgacgcaatttgatcaagtgagcatgaacttttcacaga

SEQ ID NO: 162634 - DNA, 53 bp, Artificial
  Synthetic oligonucleotide
gatgtcatggcgccaggggcgcagaaggggagtcatatccccggacggcagag

SEQ ID NO: 162635 - DNA, 53 bp, Artificial
  Synthetic oligonucleotide
aaaggccattggacttgcggctccgctgatttcaaagttcatgtcgaagaaaa

SEQ ID NO: 162636 - DNA, 53 bp, Artificial
  Synthetic oligonucleotide
ggggtacactgaaagacgctcccgattaagccaatgcgtatctgagtttgcgg

SEQ ID NO: 162637 - DNA, 52 bp, Artificial
  Synthetic oligonucleotide
ccttgcacctcaacggcgtcagtcggcctaataaacgctcgatatgggaacg

SEQ ID NO: 162638 - DNA, 52 bp, Artificial
  Synthetic oligonucleotide
cctgcaagtcaagacacctcctgcaggttacctcatagcccgttgccgggtg

SEQ ID NO: 162639 - DNA, 52 bp, Artificial
  Synthetic oligonucleotide
ggtcaacatagcgcattccgtatcgaagcgtgttatagaacaggacggcaat

SEQ ID NO: 162640 - DNA, 53 bp, Artificial
  Synthetic oligonucleotide
gagctggttgaaaaccaggtccgttatccggtccgaacgggaataacaagtga

SEQ ID NO: 162641 - DNA, 52 bp, Artificial
  Synthetic oligonucleotide
cctatcctgggttatggcctgcaccagacgatggatggaaaaagtatcggtg

SEQ ID NO: 162642 - DNA, 52 bp, Artificial
  Synthetic oligonucleotide
gcagaagtgcgagattagagccgaaattccccggataacactcatcaggttc

SEQ ID NO: 162643 - DNA, 52 bp, Artificial
  Synthetic oligonucleotide
catgaaatcttcgccacatcaccgagataaggttcactgatctgtcggtttt

SEQ ID NO: 162644 - DNA, 52 bp, Artificial
  Synthetic oligonucleotide
gagtgccgatactgcctgggcgttctgatcgatatccgaggatacgccggga

SEQ ID NO: 162645 - DNA, 52 bp, Artificial
  Synthetic oligonucleotide
ataagcctgcacgatcctcaggatccggtacggcagtatggtactcgggata

SEQ ID NO: 162646 - DNA, 52 bp, Artificial
  Synthetic oligonucleotide
gtcgtgagggtaatcttgccgcaaggaggctcatggactcggtgtatatggt

SEQ ID NO: 162647 - DNA, 52 bp, Artificial
  Synthetic oligonucleotide
tgcgggcttttaaccgcaatcatccggttgtggggcggctatcctgagggcg

SEQ ID NO: 162648 - DNA, 52 bp, Artificial
  Synthetic oligonucleotide
ctatagtgacggatacggtgagctctatttcatgcagcgttcgtttctctat

SEQ ID NO: 162649 - DNA, 52 bp, Artificial
  Synthetic oligonucleotide
ccgcataactcaggtcgttgtcgggaagaacatagggaaagcccatactgtg

SEQ ID NO: 162650 - DNA, 52 bp, Artificial
  Synthetic oligonucleotide
ccgcaagaatgaacttccctgtccagagttgcttggtaatggtgacaagtgc

SEQ ID NO: 162651 - DNA, 53 bp, Artificial
  Synthetic oligonucleotide
acggcattatcggggtttcccgtcccgagtttgtcaacacccctgcggtcaga

SEQ ID NO: 162652 - DNA, 52 bp, Artificial
  Synthetic oligonucleotide
aggtgacaaggggtattacagtttcagggaatccggactgatatgaggttta

SEQ ID NO: 162653 - DNA, 52 bp, Artificial
  Synthetic oligonucleotide
caaaaggagagggtttcgcaatacgtggttgccatcataagccgactggacg

SEQ ID NO: 162654 - DNA, 52 bp, Artificial
  Synthetic oligonucleotide
agcggcaaggatacgggatgccaacgaatgtctcggggcaccgtacgcgatt

SEQ ID NO: 162655 - DNA, 52 bp, Artificial
  Synthetic oligonucleotide
actcacaaatgctgtcctgtccgtatcgtcacgaacgatgctcccttgatcg

SEQ ID NO: 162656 - DNA, 52 bp, Artificial
  Synthetic oligonucleotide
ggctgagcgcctgaaggtcaagcaaggggacgttgtgtatttaacggaaacg

SEQ ID NO: 162657 - DNA, 52 bp, Artificial
  Synthetic oligonucleotide
gattccaacccgtctgtctatggttcggctattgcattcgagccttatgcat

SEQ ID NO: 162658 - DNA, 52 bp, Artificial
  Synthetic oligonucleotide
cagggagctcaacacactccggctctcaccggtcttcgactggtacagcgga

SEQ ID NO: 162659 - DNA, 52 bp, Artificial
  Synthetic oligonucleotide
caagagtcggttgggctacctgtgcttggcatagcaaaagttatgaatcagt

SEQ ID NO: 162660 - DNA, 51 bp, Artificial
  Synthetic oligonucleotide
ggagggttggtgaatactacttccggaagaaaatgtctgattaccccgatg

SEQ ID NO: 162661 - DNA, 51 bp, Artificial
  Synthetic oligonucleotide
tggttgttctcaacgtccagtcgatgcgggttaacgatcagcctgctctct

SEQ ID NO: 162662 - DNA, 59 bp, Artificial
  Synthetic oligonucleotide
aacctcgcgagaagactcaccaagaggtcaccacgatcgattcagtatccgggattaca

SEQ ID NO: 162663 - DNA, 51 bp, Artificial
  Synthetic oligonucleotide
gttgccgtaggagacccacaggtggccgactatatcatgatgaaccgctcc

SEQ ID NO: 162664 - DNA, 51 bp, Artificial
  Synthetic oligonucleotide
ccggaggctgtcgaaagggccttggcgcattagggagtacatactgtcggg

SEQ ID NO: 162665 - DNA, 51 bp, Artificial
  Synthetic oligonucleotide
atcgctcgcactcacagcagtaacccttgatctgccagcagaacggagagg

SEQ ID NO: 162666 - DNA, 51 bp, Artificial
  Synthetic oligonucleotide
gttttctctggtcgaggaacccgggcattttctcgcaggggataaataccg

SEQ ID NO: 162667 - DNA, 51 bp, Artificial
  Synthetic oligonucleotide
cttgacattccgacgctctgagtcaatcgtcattttcacctcttcgtttgt

SEQ ID NO: 162668 - DNA, 51 bp, Artificial
  Synthetic oligonucleotide
ccaggggcgcagaaggggagtcatatccccggacggcagagccgcaaaggt

SEQ ID NO: 162669 - DNA, 51 bp, Artificial
  Synthetic oligonucleotide
tcgtccgctgcgtctctgtcatgttctccgggttgcggagccaagcatatt

SEQ ID NO: 162670 - DNA, 51 bp, Artificial
  Synthetic oligonucleotide
accataatgcgcaaaggtatctgcatagacatgggctattataccaagtaa

SEQ ID NO: 162671 - DNA, 51 bp, Artificial
  Synthetic oligonucleotide
acccctgacgcgcattgttggtgacggaagcaaattccgaaccgtacgaac

SEQ ID NO: 162672 - DNA, 51 bp, Artificial
  Synthetic oligonucleotide
accgaggaatcagtagtctatgagttgaggcaggcgtatctgttacgattc

SEQ ID NO: 162673 - DNA, 57 bp, Artificial
  Synthetic oligonucleotide
aggcaagacgggagatagagaagtaccgccggcagtggtggtcaaagcgcaagaacc

SEQ ID NO: 162674 - DNA, 58 bp, Artificial
  Synthetic oligonucleotide
catcgatacatgagcagctgacagactccggatcacgtcatgctccagaaccattgga

SEQ ID NO: 162675 - DNA, 51 bp, Artificial
  Synthetic oligonucleotide
atgccttgtggctcgcggggtgaaagcacctcggaactgatcatagaacac

SEQ ID NO: 162676 - DNA, 51 bp, Artificial
  Synthetic oligonucleotide
acgcttagagccacatttgcggtaggtgttacgcacttttgccaccacatc

SEQ ID NO: 162677 - DNA, 50 bp, Artificial
  Synthetic oligonucleotide
gtgagcgaacgctcacagcagccgatgatagacaacgacttgggactttc

SEQ ID NO: 162678 - DNA, 50 bp, Artificial
  Synthetic oligonucleotide
gtcgtggcatgtccgaatacaagaacgctcttcgcgagcttgccaaatga

SEQ ID NO: 162679 - DNA, 49 bp, Artificial
  Synthetic oligonucleotide
gtccgcccattccaattttcgggttgtttgaaaccccgacaccctcttt

SEQ ID NO: 162680 - DNA, 50 bp, Artificial
  Synthetic oligonucleotide
ggggaaaaccttgttattggcggactcaagctcgacaatctcaccaatgc

SEQ ID NO: 162681 - DNA, 50 bp, Artificial
  Synthetic oligonucleotide
gggatcagagacttgtaacgtcagacctttacgcataaacggtaccgatt

SEQ ID NO: 162682 - DNA, 50 bp, Artificial
  Synthetic oligonucleotide
gttaagctttgtaggcatttccgaacaagacgcatttagaacaaccggat

SEQ ID NO: 162683 - DNA, 50 bp, Artificial
  Synthetic oligonucleotide
tctcggcccatttagcctctttaaagttcaggagggcacttcttgacaga

SEQ ID NO: 162684 - DNA, 50 bp, Artificial
  Synthetic oligonucleotide
cggcaaggcagttacgagccgtggcaaaatccccgcttgcccaggcgaga

SEQ ID NO: 162685 - DNA, 58 bp, Artificial
  Synthetic oligonucleotide
gcggattaaccaaacaggacactatcgatttgacatgcacatgaatttgacatgctaa

SEQ ID NO: 162686 - DNA, 50 bp, Artificial
  Synthetic oligonucleotide
tggtgtagggttgcgatttactcctaccgtgctggatgcaggccgtattt

SEQ ID NO: 162687 - DNA, 50 bp, Artificial
  Synthetic oligonucleotide
tttgccctatgccaccgttcaagccgagaatgcagaataagcaggacgtc

SEQ ID NO: 162688 - DNA, 50 bp, Artificial
  Synthetic oligonucleotide
ttttgctaatgcgtgtcagtatttgaacgagtgcggggttgatatcacga

SEQ ID NO: 162689 - DNA, 50 bp, Artificial
  Synthetic oligonucleotide
cggtgacagccacgcgcaagtaattcacgcgccggccaaatctatcggct

SEQ ID NO: 162690 - DNA, 50 bp, Artificial
  Synthetic oligonucleotide
cggtgcaaagcctggaaatggccgcaacgagcgattcgtgagcattcgcc

SEQ ID NO: 162691 - DNA, 50 bp, Artificial
  Synthetic oligonucleotide
cgtacgccagaccggtcgtccacactacggagaagagcgtccaggcaagg

SEQ ID NO: 162692 - DNA, 50 bp, Artificial
  Synthetic oligonucleotide
cgtgcagccgatgggttgagtggcaccatactgcagttatgagcgcggca

SEQ ID NO: 162693 - DNA, 50 bp, Artificial
  Synthetic oligonucleotide
cgttttggggttgacttcggagcctgtaaccaaaacagtccgctctccga

SEQ ID NO: 162694 - DNA, 50 bp, Artificial
  Synthetic oligonucleotide
ctggctaacgccgcaaaagcgcgaagaagggcaccgtttggcctgtcagg

SEQ ID NO: 162695 - DNA, 50 bp, Artificial
  Synthetic oligonucleotide
gaaacaacgaggcctgaacagtagagcgttatagcatccatgccctatgt

SEQ ID NO: 162696 - DNA, 57 bp, Artificial
  Synthetic oligonucleotide
ataacaaaacggagatgctctcatgcgtgcgacggtaacgaaaattggtaattcgac

SEQ ID NO: 162697 - DNA, 50 bp, Artificial
  Synthetic oligonucleotide
gaatgttacccagtcaggataacttgacgcattggcatttgttcgaagaa

SEQ ID NO: 162698 - DNA, 50 bp, Artificial
  Synthetic oligonucleotide
gataaaacacagggcggcaccagattgctaatgtctccgcccagccgcga

SEQ ID NO: 162699 - DNA, 50 bp, Artificial
  Synthetic oligonucleotide
gcagcgcgaaagtgtggtattgtggggcgctgtgcccgagcaagggttag

SEQ ID NO: 162700 - DNA, 50 bp, Artificial
  Synthetic oligonucleotide
gcccgcgctttaaaacgacctcagccgctgtgcgcatgttgcgaatgtcg

SEQ ID NO: 162701 - DNA, 50 bp, Artificial
  Synthetic oligonucleotide
cggggttgcaagcgggcgaattgcgccgtggggagtggcgctacctaagc

SEQ ID NO: 162702 - DNA, 50 bp, Artificial
  Synthetic oligonucleotide
cgggggttcggatcgtttaacatccgctacaagaacctgcggcaggcccg

SEQ ID NO: 162703 - DNA, 50 bp, Artificial
  Synthetic oligonucleotide
gcgccgtacccagccgaacgccctcttgccctctgtaaacctccatcaaa

SEQ ID NO: 162704 - DNA, 50 bp, Artificial
  Synthetic oligonucleotide
gcgtatagcggtaaatcattccggtgcgcgtgttccaatcgggctcgcga

SEQ ID NO: 162705 - DNA, 50 bp, Artificial
  Synthetic oligonucleotide
cggggagaagggatgcgtggaggttaaatgctccaaggcgtgcttggcta

SEQ ID NO: 162706 - DNA, 50 bp, Artificial
  Synthetic oligonucleotide
gctgttatggaccagcctttcctcttgaagattaccctgcaatatctctc

SEQ ID NO: 162707 - DNA, 57 bp, Artificial
  Synthetic oligonucleotide
gcatgacaactgccctggtgagtgaaggcggaaccgtcgtgcgcagcatgcctcttg

SEQ ID NO: 162708 - DNA, 50 bp, Artificial
  Synthetic oligonucleotide
ggccggaaacttgctcttctcccggggctgttactcatgactctcaatac

SEQ ID NO: 162709 - DNA, 50 bp, Artificial
  Synthetic oligonucleotide
agcggtcgtacagtgccgtcgtaacggagtagccgagtgccctgtggttt

SEQ ID NO: 162710 - DNA, 50 bp, Artificial
  Synthetic oligonucleotide
agcggcaggtacgggcagtgagacgccgcctggatcgtaggtaaggcaga

SEQ ID NO: 162711 - DNA, 50 bp, Artificial
  Synthetic oligonucleotide
agcggcactcccgctttcagggcgagaaaggccggaccaagaaatacggc

SEQ ID NO: 162712 - DNA, 50 bp, Artificial
  Synthetic oligonucleotide
agcgcttgacccgttccgtcataacacgggcgccgttgacatagcgttcc

SEQ ID NO: 162713 - DNA, 50 bp, Artificial
  Synthetic oligonucleotide
agcgctcaaggagtcgatgcatggttcggccacggcaaccatccttacca

SEQ ID NO: 162714 - DNA, 50 bp, Artificial
  Synthetic oligonucleotide
agcgcgcgtggtgcgaacggttccacaaaccgaccttgtcacgaaaactt

SEQ ID NO: 162715 - DNA, 50 bp, Artificial
  Synthetic oligonucleotide
agcgccctgccatcaagcccgagaggggtaagggcatcactccactccct

SEQ ID NO: 162716 - DNA, 50 bp, Artificial
  Synthetic oligonucleotide
agcgatggaggttcggtgtcgctgccaacatgtgccggagtctgagttct

SEQ ID NO: 162717 - DNA, 50 bp, Artificial
  Synthetic oligonucleotide
agcgaacagctatgcgggagtgaccaccatcagtgccggagctctccgtg

SEQ ID NO: 162718 - DNA, 56 bp, Artificial
  Synthetic oligonucleotide
agacgagaccggcctctcaacccagggcaacttggtacggggctatgctcctgctg

SEQ ID NO: 162719 - DNA, 50 bp, Artificial
  Synthetic oligonucleotide
agccttgtatgcagccgtgcgctccccggaagattgctcaagcgccaacg

SEQ ID NO: 162720 - DNA, 50 bp, Artificial
  Synthetic oligonucleotide
agccttccagcggcccgagtttgttgctgtcgtgcttgattctcggggtg

SEQ ID NO: 162721 - DNA, 50 bp, Artificial
  Synthetic oligonucleotide
agccgtttgaccctgtcaatctctccggaccgaagccccgggaagcctct

SEQ ID NO: 162722 - DNA, 50 bp, Artificial
  Synthetic oligonucleotide
agccgtttcctttcgacccccgggaaattgacgcggttgtgctcagccac

SEQ ID NO: 162723 - DNA, 50 bp, Artificial
  Synthetic oligonucleotide
agccggctacaatcgcatcggtctcccttggccggggtctggagttgaaa

SEQ ID NO: 162724 - DNA, 50 bp, Artificial
  Synthetic oligonucleotide
agcatttcaacccggattgccgaacagacacccggcaggaatcgcatgcg

SEQ ID NO: 162725 - DNA, 50 bp, Artificial
  Synthetic oligonucleotide
agcatgctgcccctgacatagcgtgcgataccagctgccccgttaatgct

SEQ ID NO: 162726 - DNA, 50 bp, Artificial
  Synthetic oligonucleotide
agcacggttcttctccgcgtgccgatcagggaagctgcccatccgatgga

SEQ ID NO: 162727 - DNA, 50 bp, Artificial
  Synthetic oligonucleotide
agcacagcggaaaaggtaacggaacttcacggcagaggcgtcggcttgga

SEQ ID NO: 162728 - DNA, 50 bp, Artificial
  Synthetic oligonucleotide
agatgtggcttcgctggacgcttccccgactcagggttgaccagctcatg

SEQ ID NO: 162729 - DNA, 56 bp, Artificial
  Synthetic oligonucleotide
ggacggcagctccgagtgctgatgggcctcgttcggcgtattcgagaaaatgcttc

SEQ ID NO: 162730 - DNA, 50 bp, Artificial
  Synthetic oligonucleotide
agatacgctcggtgaatgcccatgcatccctcggatcgcgtcccttcaga

SEQ ID NO: 162731 - DNA, 50 bp, Artificial
  Synthetic oligonucleotide
agagcatcggtgcccgaattcacgccaacagcatgcgaaactccgcagta

SEQ ID NO: 162732 - DNA, 50 bp, Artificial
  Synthetic oligonucleotide
agacgcaggggcgcatgttgtgcaatggaatgcaaagggtgtcgcttcgg

SEQ ID NO: 162733 - DNA, 50 bp, Artificial
  Synthetic oligonucleotide
acttactcgcttgtcggcaaaagaacgcatcgcaggttgcaaatcggctc

SEQ ID NO: 162734 - DNA, 50 bp, Artificial
  Synthetic oligonucleotide
actgccgcattcgggctggcgactgcagcgggcaaacttccgctgggagt

SEQ ID NO: 162735 - DNA, 50 bp, Artificial
  Synthetic oligonucleotide
atacgggggttttcatcaccaagagcgcccttcggctcgcaccgatgctt

SEQ ID NO: 162736 - DNA, 50 bp, Artificial
  Synthetic oligonucleotide
agtttggcggtgataagccagagcgcgattgcctcgtggagcggcatgta

SEQ ID NO: 162737 - DNA, 50 bp, Artificial
  Synthetic oligonucleotide
agttcgttagtacgcgtggcacgtcgctcagtgtaaaggtatcatacgga

SEQ ID NO: 162738 - DNA, 50 bp, Artificial
  Synthetic oligonucleotide
agttcgcccctctttccgggcggtgtgcaattgggtgagcacctgacgcc

SEQ ID NO: 162739 - DNA, 50 bp, Artificial
  Synthetic oligonucleotide
agtggcggttgccgttacgccaaaacgaatggtggggaaccactcggctt

SEQ ID NO: 162740 - DNA, 55 bp, Artificial
  Synthetic oligonucleotide
caacgcggtgcttaaaccgcctcttccggggagttcacaatcacgtagcactccc

SEQ ID NO: 162741 - DNA, 50 bp, Artificial
  Synthetic oligonucleotide
agtgcgggcctcctccgacgccctaccaagtgagagggttcttgtctggt

SEQ ID NO: 162742 - DNA, 50 bp, Artificial
  Synthetic oligonucleotide
agtcgcttcatcccctgtgcacgaagcttctccagagcggcgcgaaactc

SEQ ID NO: 162743 - DNA, 50 bp, Artificial
  Synthetic oligonucleotide
agtcgcacgacgcggtcgcttgggtgaactatccgggtctcgaaagccat

SEQ ID NO: 162744 - DNA, 50 bp, Artificial
  Synthetic oligonucleotide
agtcgatgcatggttcggccacggcaaccatccttaccaactgcccctcg

SEQ ID NO: 162745 - DNA, 50 bp, Artificial
  Synthetic oligonucleotide
agtccggcgttcaacacaattgccgaacctgccagaggcacagcggatgg

SEQ ID NO: 162746 - DNA, 50 bp, Artificial
  Synthetic oligonucleotide
agtccgcgtttcagtacggccctacaccggggctgccaaccctccttgaa

SEQ ID NO: 162747 - DNA, 50 bp, Artificial
  Synthetic oligonucleotide
agtcccgcccaaggcaggattccacgggtcagcgaagcagaccacgattg

SEQ ID NO: 162748 - DNA, 50 bp, Artificial
  Synthetic oligonucleotide
aggtggcaccagatgggcgtagggctccccggttgctatagcgtaacgga

SEQ ID NO: 162749 - DNA, 50 bp, Artificial
  Synthetic oligonucleotide
agggggtcgctcttcacggggccttgcctgattgactttgatagagcggc

SEQ ID NO: 162750 - DNA, 50 bp, Artificial
  Synthetic oligonucleotide
agggctcggcaccgagttctgctgcgacagaaagggcgcttgtcgggtcc

SEQ ID NO: 162751 - DNA, 55 bp, Artificial
  Synthetic oligonucleotide
cacgcggctcattcaggactacctcggccaccggaacattcagcacaccgtgatc

SEQ ID NO: 162752 - DNA, 50 bp, Artificial
  Synthetic oligonucleotide
aggctgatatttccggtacaaccgatgtgacccttgcagactatgttcat

SEQ ID NO: 162753 - DNA, 50 bp, Artificial
  Synthetic oligonucleotide
aggcgtcctggaacttcgctaccgcgcctggtagagtcccctgaaaccca

SEQ ID NO: 162754 - DNA, 50 bp, Artificial
  Synthetic oligonucleotide
aggcggaggtcaagcccagctttttcgcgccccagttcgtggtaagcttc

SEQ ID NO: 162755 - DNA, 50 bp, Artificial
  Synthetic oligonucleotide
aggcatgtccggcccactgacaacccggaaccctttcctctcgagagccc

SEQ ID NO: 162756 - DNA, 50 bp, Artificial
  Synthetic oligonucleotide
aggcaaggtagtccgctccccgctttctgactgatgtcccggggcttgtt

SEQ ID NO: 162757 - DNA, 50 bp, Artificial
  Synthetic oligonucleotide
aggataggcagctgttgcaaagctccgcgtcaatgcggggaaaccatgga

SEQ ID NO: 162758 - DNA, 50 bp, Artificial
  Synthetic oligonucleotide
aggacaagtcgggtacgctcagggctcttcgtgccatccaccttgggctc

SEQ ID NO: 162759 - DNA, 50 bp, Artificial
  Synthetic oligonucleotide
agcgtatgcccacagttgggcacaatggagagggttgcgtgaggcgctaa

SEQ ID NO: 162760 - DNA, 50 bp, Artificial
  Synthetic oligonucleotide
aaggggcagtgacgaggtgagcagtatggtcgcaggcccgaaagcgttta

SEQ ID NO: 162761 - DNA, 50 bp, Artificial
  Synthetic oligonucleotide
aagggaaccggttacgacagaccctgcggcacgactctgccagtgcccgg

SEQ ID NO: 162762 - DNA, 55 bp, Artificial
  Synthetic oligonucleotide
caacgtatgggataagttgttcagagatccatcccgtttaccggttttctgcgat

SEQ ID NO: 162763 - DNA, 50 bp, Artificial
  Synthetic oligonucleotide
aaggcatcccgtcaccgcggttgtcctcagccggaacataccctctgccc

SEQ ID NO: 162764 - DNA, 50 bp, Artificial
  Synthetic oligonucleotide
aagcgtggacagcagacttcgtcccgggctgaccgacagggcgtagtcag

SEQ ID NO: 162765 - DNA, 50 bp, Artificial
  Synthetic oligonucleotide
aagcggtcacacctgcgttgaaaccaccccgtgaaaagtcagcgccaacc

SEQ ID NO: 162766 - DNA, 50 bp, Artificial
  Synthetic oligonucleotide
aagcgggcattgattggagcgattctggtctcatgcagcagtgccccgct

SEQ ID NO: 162767 - DNA, 50 bp, Artificial
  Synthetic oligonucleotide
aagcccgctgaagacggcaggctccacgccatcaaccctgaatacggatt

SEQ ID NO: 162768 - DNA, 50 bp, Artificial
  Synthetic oligonucleotide
aagacggccatccttgatcgctccgagtacaaccgggcatacggcaccgt

SEQ ID NO: 162769 - DNA, 50 bp, Artificial
  Synthetic oligonucleotide
aagacctgacgacctgacgctttgggagaaacgtgcgaccggatgggaga

SEQ ID NO: 162770 - DNA, 50 bp, Artificial
  Synthetic oligonucleotide
aacgggagccggggaaattctcgcggacgcattgctgactttcgatgcac

SEQ ID NO: 162771 - DNA, 50 bp, Artificial
  Synthetic oligonucleotide
aacggatggcttccctatgcaggtggcggagtagagcttcgctggatcga

SEQ ID NO: 162772 - DNA, 50 bp, Artificial
  Synthetic oligonucleotide
aacgctttcccgcatcggggacaggtaacggatttcgggcctcctgaccc

SEQ ID NO: 162773 - DNA, 55 bp, Artificial
  Synthetic oligonucleotide
cacggccgatagaatcaataaggccagaaccgctgccgagaatgcttgcagcgac

SEQ ID NO: 162774 - DNA, 50 bp, Artificial
  Synthetic oligonucleotide
aacgcgagtgctgaagagtgcgccgagtacaccatgacgatcctgagcga

SEQ ID NO: 162775 - DNA, 50 bp, Artificial
  Synthetic oligonucleotide
aacctaccaggcggaggtcaagcccagctttttcgcgccccagttcgtgg

SEQ ID NO: 162776 - DNA, 50 bp, Artificial
  Synthetic oligonucleotide
aaccgcgctccgtcggcaatctgaacgtgagggcctacttcggttctgtc

SEQ ID NO: 162777 - DNA, 50 bp, Artificial
  Synthetic oligonucleotide
aaccgcatgcttgcgagggtttttccgcctccagtcggcacagtgagcaa

SEQ ID NO: 162778 - DNA, 50 bp, Artificial
  Synthetic oligonucleotide
aacccggattgccgaacagacacccggcaggaatcgcatgcgtacagcag

SEQ ID NO: 162779 - DNA, 50 bp, Artificial
  Synthetic oligonucleotide
aaccatgcggcaaagcagaccacatggagcaagcgcaagagaggtagggc

SEQ ID NO: 162780 - DNA, 50 bp, Artificial
  Synthetic oligonucleotide
aaccaatgaagccaccggcgtaatcgccgctaccggaaactttgcccgtt

SEQ ID NO: 162781 - DNA, 50 bp, Artificial
  Synthetic oligonucleotide
aacatccttccttccgcatagcctgcaaacatgacgcgccggcccgttcg

SEQ ID NO: 162782 - DNA, 50 bp, Artificial
  Synthetic oligonucleotide
aacacacatgatgcaggctatcggtaacagtgtccgtgagaaccggttat

SEQ ID NO: 162783 - DNA, 50 bp, Artificial
  Synthetic oligonucleotide
aaattgcgccgctcccggcgtaaagagcataggcttctgtcgtggctgct

SEQ ID NO: 162784 - DNA, 54 bp, Artificial
  Synthetic oligonucleotide
agatgaagccgacttttcgagctggttgaaaaccaggtccgttatccggtccga

SEQ ID NO: 162785 - DNA, 55 bp, Artificial
  Synthetic oligonucleotide
caagcatcatctccggcgcaacccttgacctgaacggttttacactcggtacggc

SEQ ID NO: 162786 - DNA, 50 bp, Artificial
  Synthetic oligonucleotide
aaagcggtgagggcaaccggtgcgtcaactcatagccccgactgtttggg

SEQ ID NO: 162787 - DNA, 50 bp, Artificial
  Synthetic oligonucleotide
aaacgcccggatagcccttacccggttgtaggcgtcctttggttcggcgc

SEQ ID NO: 162788 - DNA, 50 bp, Artificial
  Synthetic oligonucleotide
aaaagggattgtccacgacgcacccgctaagaaccgacgaactgaaggca

SEQ ID NO: 162789 - DNA, 50 bp, Artificial
  Synthetic oligonucleotide
actgcagcgtcgcagccatgctccgcggctccggatgcaacataacctgg

SEQ ID NO: 162790 - DNA, 50 bp, Artificial
  Synthetic oligonucleotide
acgtccctgttcgtgcttcgttcgagtccggtagggcattgcccgatcgc

SEQ ID NO: 162791 - DNA, 50 bp, Artificial
  Synthetic oligonucleotide
acggtccagtcgtgacggccgctcagatgctgctgccagatagtgcgtat

SEQ ID NO: 162792 - DNA, 50 bp, Artificial
  Synthetic oligonucleotide
acggcgtgcactctctttggcattgaccgctcacggttggttggcgatcg

SEQ ID NO: 162793 - DNA, 50 bp, Artificial
  Synthetic oligonucleotide
acggcgcgacgcacaagtacgacgatcacgaatcggtcatgaaagcgcgg

SEQ ID NO: 162794 - DNA, 50 bp, Artificial
  Synthetic oligonucleotide
acgcctggcttggtgttcgcaaactactaccgtgaccaggcacgcagcct

SEQ ID NO: 162795 - DNA, 50 bp, Artificial
  Synthetic oligonucleotide
acgatcgcccaatctccatgacccggatacgcgcatgatgcaacaccccc

SEQ ID NO: 162796 - DNA, 55 bp, Artificial
  Synthetic oligonucleotide
caaggtaaattccgaatgtgcagtacaattccgcaagtgggcgaccactatcatt

SEQ ID NO: 162797 - DNA, 50 bp, Artificial
  Synthetic oligonucleotide
acgactggattccgcctgccatgtactgcctcgcagctctgttcgcctcg

SEQ ID NO: 162798 - DNA, 50 bp, Artificial
  Synthetic oligonucleotide
acgaatcaaccgcaagcgcctactgggcggctgtcaataccttctgcgcg

SEQ ID NO: 162799 - DNA, 50 bp, Artificial
  Synthetic oligonucleotide
accttgcggacaagaacacctgggcggctaaccacgcgccccaactgctt

SEQ ID NO: 162800 - DNA, 50 bp, Artificial
  Synthetic oligonucleotide
acctcgtgtgcaatgcgcgatgcgtggtcagccatacgctcaaggtagcg

SEQ ID NO: 162801 - DNA, 50 bp, Artificial
  Synthetic oligonucleotide
accggtcaggcgtgacggctatcaactggttgacggaggactcgtggcaa

SEQ ID NO: 162802 - DNA, 50 bp, Artificial
  Synthetic oligonucleotide
accgggagtctattccgcacgctttgcgccaatgcccgaaggcagagaac

SEQ ID NO: 162803 - DNA, 50 bp, Artificial
  Synthetic oligonucleotide
accggcgccaagatgtgcttccgagaggacacggcgataaaagcggtcgt

SEQ ID NO: 162804 - DNA, 50 bp, Artificial
  Synthetic oligonucleotide
accgcaagcgcctactgggcggctgtcaataccttctgcgcgctcaggga

SEQ ID NO: 162805 - DNA, 50 bp, Artificial
  Synthetic oligonucleotide
accctcaagccgccacgctcaggattgccaacccgccaaaccgtaccatt

SEQ ID NO: 162806 - DNA, 50 bp, Artificial
  Synthetic oligonucleotide
accatgcggcattgggatgcgcttgctgtgccgaaagcaatccacccatt

SEQ ID NO: 162807 - DNA, 55 bp, Artificial
  Synthetic oligonucleotide
gatcgcgacagtaccccgattcctcttgacgggaccggttattcgcgtatcgttc

SEQ ID NO: 162808 - DNA, 50 bp, Artificial
  Synthetic oligonucleotide
accaccgttctgcaacaggcgtaagccctccctgaccgattgcctcggat

SEQ ID NO: 162809 - DNA, 50 bp, Artificial
  Synthetic oligonucleotide
accacccagaggtctgtcgcggtattgtcgattaaccagactccgtcaga

SEQ ID NO: 162810 - DNA, 50 bp, Artificial
  Synthetic oligonucleotide
acagtgtgtctgtgccgctcgagcaaaccaaccagcgaatgacgccgtgg

SEQ ID NO: 162811 - DNA, 50 bp, Artificial
  Synthetic oligonucleotide
acagggcggcaccagattgctaatgtctccgcccagccgcgagacttccc

SEQ ID NO: 162812 - DNA, 50 bp, Artificial
  Synthetic oligonucleotide
acagaccctgcggcacgactctgccagtgcccggtacaacggttccgaag

SEQ ID NO: 162813 - DNA, 50 bp, Artificial
  Synthetic oligonucleotide
acacgcgagcacaaacccaactgccgcacgagcaactctgcctcactccg

SEQ ID NO: 162814 - DNA, 50 bp, Artificial
  Synthetic oligonucleotide
aagtgtgcgggcaattggcggttcctccatgagcgcaagatcgcactcat

SEQ ID NO: 162815 - DNA, 50 bp, Artificial
  Synthetic oligonucleotide
ccgtaagcggcaccactcgcctcagctttgaaccgcgcctcagctatgat

SEQ ID NO: 162816 - DNA, 50 bp, Artificial
  Synthetic oligonucleotide
ccggtggttgcctggtggattctcgggtttgcggggttgcggaactgacc

SEQ ID NO: 162817 - DNA, 50 bp, Artificial
  Synthetic oligonucleotide
ccggtcgcataagtcggcagcgtgttcccgtcccagctttcggtcgtttt

SEQ ID NO: 162818 - DNA, 55 bp, Artificial
  Synthetic oligonucleotide
gatacccctcaccattacagggcgcaacgtcccaggcgcatctagtcttgctccc

SEQ ID NO: 162819 - DNA, 50 bp, Artificial
  Synthetic oligonucleotide
ccggggctatgacaaacagcggtttgctggtgacgcctcactgtacgcga

SEQ ID NO: 162820 - DNA, 50 bp, Artificial
  Synthetic oligonucleotide
ccgctcggctgcttttacgcttttggctcccagtagcaacgcttggggga

SEQ ID NO: 162821 - DNA, 50 bp, Artificial
  Synthetic oligonucleotide
ccgccaaccgaggcttcagccatgagcccgctctttggaagcgcaaatat

SEQ ID NO: 162822 - DNA, 50 bp, Artificial
  Synthetic oligonucleotide
ccctgtcgccgatagggacgggaactgatgacgttgggttccgggaaagc

SEQ ID NO: 162823 - DNA, 50 bp, Artificial
  Synthetic oligonucleotide
ccctctctgaagccccttaagtccgcaggcatcgatcatctgtcccgcgc

SEQ ID NO: 162824 - DNA, 50 bp, Artificial
  Synthetic oligonucleotide
cccgtaacgcgagccgatattcagcaagtgcgtggggtaagccccgatta

SEQ ID NO: 162825 - DNA, 50 bp, Artificial
  Synthetic oligonucleotide
cccgcgtttatcgccgattcggccctttgctataccccggtgcaggtagg

SEQ ID NO: 162826 - DNA, 50 bp, Artificial
  Synthetic oligonucleotide
cccgaccaatccgccgacactctgactcccgtttgcttcgcctaacgcac

SEQ ID NO: 162827 - DNA, 50 bp, Artificial
  Synthetic oligonucleotide
cccctgcctatcgtcaccatctgaacccgctcgtccgatcgcagcggcat

SEQ ID NO: 162828 - DNA, 50 bp, Artificial
  Synthetic oligonucleotide
cccatcgcgccccggtggttctaagcgtcgccagcgcctgaggcagtacc

SEQ ID NO: 162829 - DNA, 55 bp, Artificial
  Synthetic oligonucleotide
gagtcaataccgggagtaccatactgcataacaagatattccgatccgtcaaggg

SEQ ID NO: 162830 - DNA, 50 bp, Artificial
  Synthetic oligonucleotide
cccataccgccctgcgccaacattgcaacaccccacgttaccgctgaccc

SEQ ID NO: 162831 - DNA, 50 bp, Artificial
  Synthetic oligonucleotide
cccacggccattggcgtacatcactccaaggttgccttgcgctccagcgt

SEQ ID NO: 162832 - DNA, 50 bp, Artificial
  Synthetic oligonucleotide
cccaacggaaatggcctggctaacgccgcaaaagcgcgaagaagggcacc

SEQ ID NO: 162833 - DNA, 50 bp, Artificial
  Synthetic oligonucleotide
ccatgggcgggcgggcgacctagcacacgacgttgcaagtttagtaacgg

SEQ ID NO: 162834 - DNA, 50 bp, Artificial
  Synthetic oligonucleotide
ccacgctcaggattgccaacccgccaaaccgtaccattaatcggcgctgc

SEQ ID NO: 162835 - DNA, 50 bp, Artificial
  Synthetic oligonucleotide
ccacgctacgccgactcacatgcggctgctcgtgcacttccaaaccaacg

SEQ ID NO: 162836 - DNA, 50 bp, Artificial
  Synthetic oligonucleotide
ccacaccgcaaccgcacagttcacgaaaaggatagccgcaacccggcact

SEQ ID NO: 162837 - DNA, 50 bp, Artificial
  Synthetic oligonucleotide
ccaagcttgccgtgtcgctgcatagtgcccgccaagaggtacgccagcaa

SEQ ID NO: 162838 - DNA, 50 bp, Artificial
  Synthetic oligonucleotide
cattcctccggacaggcttgaccacgttcgcgaagcgctgatacaggccg

SEQ ID NO: 162839 - DNA, 50 bp, Artificial
  Synthetic oligonucleotide
catgtcgcacgctgtaaccaaccatgcggcattgggatgcgcttgctgtg

SEQ ID NO: 162840 - DNA, 55 bp, Artificial
  Synthetic oligonucleotide
gagagtggaataacgatctgagaaacccgttgcgagttttgatgacagcttcagg

SEQ ID NO: 162841 - DNA, 50 bp, Artificial
  Synthetic oligonucleotide
catgaagcaggcatttgcgcacgccgtcaaggtcgcgtgaagcgcttcca

SEQ ID NO: 162842 - DNA, 50 bp, Artificial
  Synthetic oligonucleotide
catctatgcgcggggcaaggagcggcagaacgagggtgaagcacgggcaa

SEQ ID NO: 162843 - DNA, 50 bp, Artificial
  Synthetic oligonucleotide
cggagcgctaacggttgctagttcggatgcagccggcattgatgccacaa

SEQ ID NO: 162844 - DNA, 50 bp, Artificial
  Synthetic oligonucleotide
cggaaggggattcagccccctcccaagccacgttagccccagcaataagc

SEQ ID NO: 162845 - DNA, 50 bp, Artificial
  Synthetic oligonucleotide
cggaaacagcagtcgcgcttcgatggcaatcgagccggtgcaaaaaccga

SEQ ID NO: 162846 - DNA, 50 bp, Artificial
  Synthetic oligonucleotide
cgctgtaaccaaccatgcggcattgggatgcgcttgctgtgccgaaagca

SEQ ID NO: 162847 - DNA, 50 bp, Artificial
  Synthetic oligonucleotide
cgctgcagcgcatgacaactgccctggtgagtgaaggcggaaccgtcgtg

SEQ ID NO: 162848 - DNA, 50 bp, Artificial
  Synthetic oligonucleotide
cgctgcacctgcatggtacgcgacacatcggaaagtcccgcccagtttga

SEQ ID NO: 162849 - DNA, 50 bp, Artificial
  Synthetic oligonucleotide
cgcgtggtaagcccggtaagtgcatgtgcccgtggtcagaaaattcggct

SEQ ID NO: 162850 - DNA, 50 bp, Artificial
  Synthetic oligonucleotide
cgcggttttaatcgattccggagttcgcccctctttccgggcggtgtgca

SEQ ID NO: 162851 - DNA, 55 bp, Artificial
  Synthetic oligonucleotide
cacacccgaaacttgttgccgacaggctactgtccagccgtacccatagcgctgc

SEQ ID NO: 162852 - DNA, 50 bp, Artificial
  Synthetic oligonucleotide
cgcgcttcgggtcggagctatcgcccataaacgagaacggcttttcgccg

SEQ ID NO: 162853 - DNA, 50 bp, Artificial
  Synthetic oligonucleotide
cgcgcgaagctcgtggcttactgtgcgttgccgtaaccatggagcgagca

SEQ ID NO: 162854 - DNA, 50 bp, Artificial
  Synthetic oligonucleotide
cgcgccgtatagaccaccgtcgagtcgatatctcccggcttccgctctgg

SEQ ID NO: 162855 - DNA, 50 bp, Artificial
  Synthetic oligonucleotide
cgcacggttgaattgctggttgcggagtcggaacgcccgtggcaggaatt

SEQ ID NO: 162856 - DNA, 50 bp, Artificial
  Synthetic oligonucleotide
cgcacggagtgaagcagccacaaatccctcagcaccgtttatgcggtggc

SEQ ID NO: 162857 - DNA, 50 bp, Artificial
  Synthetic oligonucleotide
cgcaatcctccctcggcgtggagaggcttttcggagccgtggcgattagc

SEQ ID NO: 162858 - DNA, 50 bp, Artificial
  Synthetic oligonucleotide
cgattccggagttcgcccctctttccgggcggtgtgcaattgggtgagca

SEQ ID NO: 162859 - DNA, 50 bp, Artificial
  Synthetic oligonucleotide
cgatcgaacactttcctaacatctatgaaacctgtctcggttacggaata

SEQ ID NO: 162860 - DNA, 50 bp, Artificial
  Synthetic oligonucleotide
cgatcagtggcacggtggttgggcttgcgcaagggggagagttacgactt

SEQ ID NO: 162861 - DNA, 50 bp, Artificial
  Synthetic oligonucleotide
cgacgaggatctttgccgcgtggtaagcccggtaagtgcatgtgcccgtg

SEQ ID NO: 162862 - DNA, 55 bp, Artificial
  Synthetic oligonucleotide
caccaagaggtcaccacgatcgattcagtatccgggattacaatttcaaaacagg

SEQ ID NO: 162863 - DNA, 50 bp, Artificial
  Synthetic oligonucleotide
cgacccgcatgggaggcatgagtgctgcgccgatggagtcgctgaatttc

SEQ ID NO: 162864 - DNA, 50 bp, Artificial
  Synthetic oligonucleotide
cctttgacgcagggctgaccaacgaaagcggctggtgtccggttgatccc

SEQ ID NO: 162865 - DNA, 50 bp, Artificial
  Synthetic oligonucleotide
ccttccaccagcaaagcggcggaaggggattcagccccctcccaagccac

SEQ ID NO: 162866 - DNA, 50 bp, Artificial
  Synthetic oligonucleotide
cctcgcgtcagcttcgggtgcttatcaagcgtgcgttggaagaggtgccg

SEQ ID NO: 162867 - DNA, 50 bp, Artificial
  Synthetic oligonucleotide
cctcgacacaggtcggaaacgtcacaccctctccctgtatggtgggcggg

SEQ ID NO: 162868 - DNA, 50 bp, Artificial
  Synthetic oligonucleotide
cctcagcgcagaacagcgtgcacacctactcggggtgagagcgggagaaa

SEQ ID NO: 162869 - DNA, 50 bp, Artificial
  Synthetic oligonucleotide
ccgtgacgctcaaaggcatactcatgggcgcggcagatcttatccccggc

SEQ ID NO: 162870 - DNA, 50 bp, Artificial
  Synthetic oligonucleotide
ccgtcggaaatcatcagctatgcacgccgcatgggcattaccacccccat

SEQ ID NO: 162871 - DNA, 50 bp, Artificial
  Synthetic oligonucleotide
atttgcgccaaacgctgcatacggtctttggtcggtgtgatgcgcccgtc

SEQ ID NO: 162872 - DNA, 50 bp, Artificial
  Synthetic oligonucleotide
atttgcatccgccacacacgccgaagaccgagcataccggttcgaccctg

SEQ ID NO: 162873 - DNA, 55 bp, Artificial
  Synthetic oligonucleotide
cgagatagccgttgttctgcgtgacgataccataaacggttgaaagtcccatgcc

SEQ ID NO: 162874 - DNA, 50 bp, Artificial
  Synthetic oligonucleotide
attgcatcatccctcatccgggaggagagctgtgctgacggtgccgcaat

SEQ ID NO: 162875 - DNA, 50 bp, Artificial
  Synthetic oligonucleotide
attctcgcgaagcggttcctgggggctcatgttcagtgcgtggcgttccg

SEQ ID NO: 162876 - DNA, 50 bp, Artificial
  Synthetic oligonucleotide
attccgtacccataccgccctgcgccaacattgcaacaccccacgttacc

SEQ ID NO: 162877 - DNA, 50 bp, Artificial
  Synthetic oligonucleotide
atgtggttgcatggcagggcgagccaccgggtatcgacaagggatggctc

SEQ ID NO: 162878 - DNA, 50 bp, Artificial
  Synthetic oligonucleotide
atgtcgccgctcggtaacgcgagtgctgaagagtgcgccgagtacaccat

SEQ ID NO: 162879 - DNA, 50 bp, Artificial
  Synthetic oligonucleotide
atggagccggtgtctcagaggttcaccatctttcagccctcccggccgta

SEQ ID NO: 162880 - DNA, 50 bp, Artificial
  Synthetic oligonucleotide
atggaactccctggttcccggtgacttctcctcaacgcaggcgccacgaa

SEQ ID NO: 162881 - DNA, 50 bp, Artificial
  Synthetic oligonucleotide
atgcgaaccagagcagaataatgggaccgaacaacgccccgagccgtgcc

SEQ ID NO: 162882 - DNA, 50 bp, Artificial
  Synthetic oligonucleotide
atgactgccagaccaagcgcttctgatttgagcgcaagcccgggaccagc

SEQ ID NO: 162883 - DNA, 50 bp, Artificial
  Synthetic oligonucleotide
atgaccatggtgtcacccatacgcacgattgtggctccgtccgcctgctt

SEQ ID NO: 162884 - DNA, 55 bp, Artificial
  Synthetic oligonucleotide
gagcctacctttatccgaagctctttaagcccatcagtacctgcgagtgttttgg

SEQ ID NO: 162885 - DNA, 50 bp, Artificial
  Synthetic oligonucleotide
atcttggagtgctcttgcaagcacaagggcgtgccagcgaagccgaacca

SEQ ID NO: 162886 - DNA, 50 bp, Artificial
  Synthetic oligonucleotide
atctggttcgaccttacgccaaccatgacgtgccaacattctataaaccg

SEQ ID NO: 162887 - DNA, 50 bp, Artificial
  Synthetic oligonucleotide
atctgctcggggcccataacaggtccctatcggcgtttcccccggttgtt

SEQ ID NO: 162888 - DNA, 50 bp, Artificial
  Synthetic oligonucleotide
atctcgcgctgtaggctcatagcggcttccaggaacctgatgccccttgg

SEQ ID NO: 162889 - DNA, 50 bp, Artificial
  Synthetic oligonucleotide
atcgggattgaccggagggtccgcgacgatgccgaatcactcgggattct

SEQ ID NO: 162890 - DNA, 50 bp, Artificial
  Synthetic oligonucleotide
atcggccgggctccccgctggctttggcccgtttgagctctgtcaccagt

SEQ ID NO: 162891 - DNA, 50 bp, Artificial
  Synthetic oligonucleotide
atcggagcaaccgaagcgacaaaagggggagggcagattgccccgatgct

SEQ ID NO: 162892 - DNA, 50 bp, Artificial
  Synthetic oligonucleotide
atcgcttgaacgcccccattctccgttgacccgtcacgcccccttttgcg

SEQ ID NO: 162893 - DNA, 50 bp, Artificial
  Synthetic oligonucleotide
atcgctctctgccgttgggtcatcgggtggacgaggcaacagcattcgtg

SEQ ID NO: 162894 - DNA, 50 bp, Artificial
  Synthetic oligonucleotide
atccctcatccgggaggagagctgtgctgacggtgccgcaatagtgccgg

SEQ ID NO: 162895 - DNA, 57 bp, Artificial
  Synthetic oligonucleotide
cgccgaaaaatggtacaggaaggcttgccgtgcgggtgaaaaagatgcatgcgaaag

SEQ ID NO: 162896 - DNA, 55 bp, Artificial
  Synthetic oligonucleotide
cggggcttctgcactccggattgaacgactctgccggtactccctggagaataca

SEQ ID NO: 162897 - DNA, 50 bp, Artificial
  Synthetic oligonucleotide
atcagtagttgtctctccgagggggtcgctcttcacggggccttgcctga

SEQ ID NO: 162898 - DNA, 50 bp, Artificial
  Synthetic oligonucleotide
ataggagccaataccaccggagccttgaccaaatcgggagcaggcacgct

SEQ ID NO: 162899 - DNA, 50 bp, Artificial
  Synthetic oligonucleotide
atagcccttacccggttgtaggcgtcctttggttcggcgctctggttgcc

SEQ ID NO: 162900 - DNA, 50 bp, Artificial
  Synthetic oligonucleotide
catcgccctgaaaacatcgtaggactgataggcaatagactcaagtgccg

SEQ ID NO: 162901 - DNA, 50 bp, Artificial
  Synthetic oligonucleotide
cataataccgaccgcatcgctgggacctcccgcaaggggagtgaccacga

SEQ ID NO: 162902 - DNA, 50 bp, Artificial
  Synthetic oligonucleotide
cataagcccgacgcgtaacccgcccttttggccaagtccgcaatgaagcg

SEQ ID NO: 162903 - DNA, 50 bp, Artificial
  Synthetic oligonucleotide
caggggtttttgtcgagacctcgcatccgttcagggcgggcaacgccttt

SEQ ID NO: 162904 - DNA, 50 bp, Artificial
  Synthetic oligonucleotide
caggcttcggaacgctttccgcgcgacttggtatcccccggtccatagga

SEQ ID NO: 162905 - DNA, 50 bp, Artificial
  Synthetic oligonucleotide
caggagtgacagggcgcgaaacaagttccgtttcagcgaggctgcgttgc

SEQ ID NO: 162906 - DNA, 50 bp, Artificial
  Synthetic oligonucleotide
cagcggagacgacaaagggctccatccctggcaaggggagacaacaccga

SEQ ID NO: 162907 - DNA, 55 bp, Artificial
  Synthetic oligonucleotide
ataaataagcccgctcgatgaacctcgactacctgttgcgagttttgtggacaca

SEQ ID NO: 162908 - DNA, 50 bp, Artificial
  Synthetic oligonucleotide
cagcgctttcgcacggttgaattgctggttgcggagtcggaacgcccgtg

SEQ ID NO: 162909 - DNA, 50 bp, Artificial
  Synthetic oligonucleotide
cagcctgctattgcaattgctcagccagctatagtgcgccccgagccacc

SEQ ID NO: 162910 - DNA, 50 bp, Artificial
  Synthetic oligonucleotide
cagccgggacaacgagccgcgttccactcccatcctgtttcgctcgaaag

SEQ ID NO: 162911 - DNA, 50 bp, Artificial
  Synthetic oligonucleotide
cagccagctatagtgcgccccgagccacctcagcccgttgcaccaatgcc

SEQ ID NO: 162912 - DNA, 50 bp, Artificial
  Synthetic oligonucleotide
cagcaataaggggcttgcgggtaacgggggcaaccgatccccacgaaaga

SEQ ID NO: 162913 - DNA, 50 bp, Artificial
  Synthetic oligonucleotide
cagatcagaccagtccagctcgagggcgactgcttcgatctcccgccagc

SEQ ID NO: 162914 - DNA, 50 bp, Artificial
  Synthetic oligonucleotide
cagaccggtcagggcgttatcccgaccctggtccagcgaggggaatatgt

SEQ ID NO: 162915 - DNA, 50 bp, Artificial
  Synthetic oligonucleotide
cagacactgtttcgaggcgggcctgacaagcggcatagggttcacgggaa

SEQ ID NO: 162916 - DNA, 50 bp, Artificial
  Synthetic oligonucleotide
cacctcatccggtttgtcccgcctgcctccggcagcccactcccattcaa

SEQ ID NO: 162917 - DNA, 50 bp, Artificial
  Synthetic oligonucleotide
caccgaactcgggtgcgacatttgcggcatgaatacccagacggggatgc

SEQ ID NO: 162918 - DNA, 55 bp, Artificial
  Synthetic oligonucleotide
gcgggacgtgacagcacacgcggagtgatcaaccttctcaaggttcgcgatccgc

SEQ ID NO: 162919 - DNA, 50 bp, Artificial
  Synthetic oligonucleotide
caccccggaaccccctgttgagaagcccgcagctccggccaaacaaccgg

SEQ ID NO: 162920 - DNA, 50 bp, Artificial
  Synthetic oligonucleotide
caatgtcgccaaccctcaagccgccacgctcaggattgccaacccgccaa

SEQ ID NO: 162921 - DNA, 50 bp, Artificial
  Synthetic oligonucleotide
caatcgctgcctaaccgcgctccgtcggcaatctgaacgtgagggcctac

SEQ ID NO: 162922 - DNA, 50 bp, Artificial
  Synthetic oligonucleotide
caagcggcatgtcaccggctttaccctgtgcctgtgcgtcaatagcccac

SEQ ID NO: 162923 - DNA, 50 bp, Artificial
  Synthetic oligonucleotide
caagccgcctatggtatggagcgctgcccgtaccggataactccgtccgt

SEQ ID NO: 162924 - DNA, 50 bp, Artificial
  Synthetic oligonucleotide
caacagctccgtgacagcggcgacctacagcggtcttatcacgctcggga

SEQ ID NO: 162925 - DNA, 50 bp, Artificial
  Synthetic oligonucleotide
caaaattcgcaaggtgcgtgggctcaaccgcacggtacgctacgagccac

SEQ ID NO: 162926 - DNA, 50 bp, Artificial
  Synthetic oligonucleotide
caaaacgctcctcgctccgcaacgtttcagccacagccaccatacgctcc

SEQ ID NO: 162927 - DNA, 55 bp, Artificial
  Synthetic oligonucleotide
gcgcccgcatcaaactgcgcggcaaaattcgtacactctcatccgaaggacgggc

SEQ ID NO: 162928 - DNA, 55 bp, Artificial
  Synthetic oligonucleotide
gcgcacctgcaagctcacatcatccggggtatgcttcagaaccagctcatcggta

SEQ ID NO: 162929 - DNA, 53 bp, Artificial
  Synthetic oligonucleotide
cggggtttcccgtcccgagtttgtcaacacccctgcggtcagatcccgcataa

SEQ ID NO: 162930 - DNA, 55 bp, Artificial
  Synthetic oligonucleotide
gcgcaatggagcggcatcattacccgaatatcgacaatggccctgcaaacaaacc

SEQ ID NO: 162931 - DNA, 55 bp, Artificial
  Synthetic oligonucleotide
gcgattctcgaagtcagcgcgggaagggttatcaatccatcgaccttcgagtttg

SEQ ID NO: 162932 - DNA, 55 bp, Artificial
  Synthetic oligonucleotide
gccttatcgccagaaagctcttcgggacggataatgacctctgctccatactctc

SEQ ID NO: 162933 - DNA, 55 bp, Artificial
  Synthetic oligonucleotide
gcctgttcctatcagtttgaggtgctaaggggatatggcgtaaccggggagcgtg

SEQ ID NO: 162934 - DNA, 59 bp, Artificial
  Synthetic oligonucleotide
cggggaagcaaaggctcagctctatccccaggtgtcgctcggtctgaacaccgacctgc

SEQ ID NO: 162935 - DNA, 55 bp, Artificial
  Synthetic oligonucleotide
gcctctcgcatcaatcgtttcagtctgtttcgcgacacggcatgaggcacgtttt

SEQ ID NO: 162936 - DNA, 55 bp, Artificial
  Synthetic oligonucleotide
atcgtccgtttaggcaagggttggtcagcgtcccatttctcaacgatatgcgtcc

SEQ ID NO: 162937 - DNA, 55 bp, Artificial
  Synthetic oligonucleotide
gccgggcagttatgtggatgttctggtgagcggcaaggacgccgacaatcaccct

SEQ ID NO: 162938 - DNA, 55 bp, Artificial
  Synthetic oligonucleotide
gccattcagcccatcgacttcgtcaagtcgtgataccacttcgcagtaatcgtcg

SEQ ID NO: 162939 - DNA, 55 bp, Artificial
  Synthetic oligonucleotide
gccaggcgtaagtcccaatgtcgcagaacagataagggcacagtacggtctgaac

SEQ ID NO: 162940 - DNA, 55 bp, Artificial
  Synthetic oligonucleotide
atcttgtagcgatatctacgattgcctctatttcaacgatggtgggtcttctcgg

SEQ ID NO: 162941 - DNA, 55 bp, Artificial
  Synthetic oligonucleotide
gccaccggccatgagatccgattcccggacggagggattcaactcttaactattg

SEQ ID NO: 162942 - DNA, 55 bp, Artificial
  Synthetic oligonucleotide
gcattcattaacaaatccggttcagcattaattatgacctttcagggcgatccgc

SEQ ID NO: 162943 - DNA, 55 bp, Artificial
  Synthetic oligonucleotide
atgcgggacatgcccagccatggttcatgagcgaaggtcgttatctgagccatgg

SEQ ID NO: 162944 - DNA, 55 bp, Artificial
  Synthetic oligonucleotide
gcatgaccggtaatggattcgtcaagcaatctgccgattccctgcatgattgtgg

SEQ ID NO: 162945 - DNA, 57 bp, Artificial
  Synthetic oligonucleotide
gcattcgtggcgaagggaaaagagagctttgacgaaccttcggagccggtcaagaga

SEQ ID NO: 162946 - DNA, 55 bp, Artificial
  Synthetic oligonucleotide
gcagtgcaaaatcgaagttaggccttacgaccgcaaaggcgacccagcatactcc

SEQ ID NO: 162947 - DNA, 55 bp, Artificial
  Synthetic oligonucleotide
attaaccgggcgtccgttactcaacgtaccgtcgcgccatgagaaccactcctgc

SEQ ID NO: 162948 - DNA, 55 bp, Artificial
  Synthetic oligonucleotide
gcagggtaatgtcggactcggttatgatctccatccctctctgtcggcacttgtt

SEQ ID NO: 162949 - DNA, 55 bp, Artificial
  Synthetic oligonucleotide
gcaggggtgaaatatacgcccggtaaaattttatgagcgctattggcaacgcggc

SEQ ID NO: 162950 - DNA, 55 bp, Artificial
  Synthetic oligonucleotide
gcagcggttacaggatatacgtgtatcaaatattgagcggttgacaactccccgc

SEQ ID NO: 162951 - DNA, 55 bp, Artificial
  Synthetic oligonucleotide
cgagcctgacgaggggtggattcttgtctggaaagggcctgagacgggaacgctc

SEQ ID NO: 162952 - DNA, 55 bp, Artificial
  Synthetic oligonucleotide
gcagccacaaatccctcagcaccgtttatgcggtggcgaacctatgcagcgcctg

SEQ ID NO: 162953 - DNA, 55 bp, Artificial
  Synthetic oligonucleotide
gcacagcgtaatcgtgccggtaccgcaatagaggtcatacaccgtatcggttggc

SEQ ID NO: 162954 - DNA, 55 bp, Artificial
  Synthetic oligonucleotide
gcaatggtctggtttcgggcgagggccatggtaagcttcgaataactgccgttgg

SEQ ID NO: 162955 - DNA, 55 bp, Artificial
  Synthetic oligonucleotide
caacgatccgaacagatttcatgaaaccctctcttgtacagacacatccgaaact

SEQ ID NO: 162956 - DNA, 59 bp, Artificial
  Synthetic oligonucleotide
ctggaacctggcgtggcggtggttcaaaggcctcagcccgcaagccgaatgcgcattcg

SEQ ID NO: 162957 - DNA, 55 bp, Artificial
  Synthetic oligonucleotide
cggtatgaaccagatagactgccatcaccataacaaatgcctcaataagagccgc

SEQ ID NO: 162958 - DNA, 55 bp, Artificial
  Synthetic oligonucleotide
ccccgccatgaggaatccgcacaagcctttcggcaagattctgaaccacacggct

SEQ ID NO: 162959 - DNA, 55 bp, Artificial
  Synthetic oligonucleotide
ctgctatcaccagacggcacccgctacaggatcgcgaacttcgtcatgctctgga

SEQ ID NO: 162960 - DNA, 55 bp, Artificial
  Synthetic oligonucleotide
ctgcgaggagcctccctgtgtggatatctgtccggttgaggcattgcacaagcgc

SEQ ID NO: 162961 - DNA, 55 bp, Artificial
  Synthetic oligonucleotide
ctgcccttcccgatgcttcgttctactcgatcgatcgatacctcggtgcagtttc

SEQ ID NO: 162962 - DNA, 55 bp, Artificial
  Synthetic oligonucleotide
ctatccacctcttcagaagatgagatggattagtctgactcaggcatgaacgagc

SEQ ID NO: 162963 - DNA, 55 bp, Artificial
  Synthetic oligonucleotide
ccctgtgatttccgcaagagagcttctggtcatgcttgacgcaaaagagagcgtc

SEQ ID NO: 162964 - DNA, 55 bp, Artificial
  Synthetic oligonucleotide
ccgatcgctgttttcagatagccctgcaaatcccggtatctgaccccggagaccc

SEQ ID NO: 162965 - DNA, 55 bp, Artificial
  Synthetic oligonucleotide
ccgatgcatctgttccggggtcacatatccgatgcgtgaatggtagtgctccgtg

SEQ ID NO: 162966 - DNA, 55 bp, Artificial
  Synthetic oligonucleotide
ccgctcctataacgtcaaccgtcgttggtctttcaggtatatagattcggtcacc

SEQ ID NO: 162967 - DNA, 60 bp, Artificial
  Synthetic oligonucleotide
tcactctgagagaagggcgtgaagatagaacgaatctcccgcttgttgtcaggagtgagc

SEQ ID NO: 162968 - DNA, 55 bp, Artificial
  Synthetic oligonucleotide
ccgctcctatgatgacgcatggggtcaaggttcagcttcctgaaacgacgcatga

SEQ ID NO: 162969 - DNA, 55 bp, Artificial
  Synthetic oligonucleotide
cgaccattcgcccatacttgttactgacccacatagccttaaagggcagaaacag

SEQ ID NO: 162970 - DNA, 55 bp, Artificial
  Synthetic oligonucleotide
ccgctctccatagcacgacgaacggtttccttgtcaccatcaccactcagacaga

SEQ ID NO: 162971 - DNA, 55 bp, Artificial
  Synthetic oligonucleotide
ccgcttctgtctagattcggtctttacctccctgtcgcagcatatcggaaaacag

SEQ ID NO: 162972 - DNA, 55 bp, Artificial
  Synthetic oligonucleotide
ccgcttgacaacaaaaggcgcggtaaagggatgtttcttgcccttgaacctcgca

SEQ ID NO: 162973 - DNA, 54 bp, Artificial
  Synthetic oligonucleotide
ccggagaattataacgatgccgggtcaaggacgggagtatcgtgcctcggggag

SEQ ID NO: 162974 - DNA, 55 bp, Artificial
  Synthetic oligonucleotide
cgaaggtacgcctatgccatgcgattggttggctgaggatccggagagccggagc

SEQ ID NO: 162975 - DNA, 55 bp, Artificial
  Synthetic oligonucleotide
ccggcacattcaggctccgcacttcgacaaccgctcactcgaatcgctcacggca

SEQ ID NO: 162976 - DNA, 55 bp, Artificial
  Synthetic oligonucleotide
ccgggagcgtccattcggtagtagcttattgcctgaaaactctgggcataggcgt

SEQ ID NO: 162977 - DNA, 53 bp, Artificial
  Synthetic oligonucleotide
ccgggctcttcagggaaaaccttttcgcgttgaggtatcgggtgtgggcattc

SEQ ID NO: 162978 - DNA, 59 bp, Artificial
  Synthetic oligonucleotide
ttccgttagcagcggcacaaacgaattcggcggaagaccatctgggatgcgtttggctc

SEQ ID NO: 162979 - DNA, 55 bp, Artificial
  Synthetic oligonucleotide
cggttcattctgcccgacgcaacctgaaggatcacgctctcctgttcgtctactg

SEQ ID NO: 162980 - DNA, 52 bp, Artificial
  Synthetic oligonucleotide
gctgatacacacgtagttgacataagttgtgggtaatgcatagggagtggga

SEQ ID NO: 162981 - DNA, 52 bp, Artificial
  Synthetic oligonucleotide
tctaaatgtcaagcatgacttgcggtgtgtgcttccctggagtatgatgtcg

SEQ ID NO: 162982 - DNA, 51 bp, Artificial
  Synthetic oligonucleotide
ggcaatccctgctacttaccgctccgatgttttgcggcgtcgattgcgcaa

SEQ ID NO: 162983 - DNA, 51 bp, Artificial
  Synthetic oligonucleotide
cggtagagcactgaaacacttggcaacacgctttaggttgtaccgttctaa

SEQ ID NO: 162984 - DNA, 51 bp, Artificial
  Synthetic oligonucleotide
cggttggtgcttcgcctgcatttcgcgaatgtgctccatccagtcggaagc

SEQ ID NO: 162985 - DNA, 51 bp, Artificial
  Synthetic oligonucleotide
tagaaaccgtgcagacgttcagaagtaacatttgccggatcggcgtatgcc

SEQ ID NO: 162986 - DNA, 51 bp, Artificial
  Synthetic oligonucleotide
aaacaaaccataagcgcctgaggaaaacgctatgtcactctatcagcgcct

SEQ ID NO: 162987 - DNA, 51 bp, Artificial
  Synthetic oligonucleotide
gtgctgcataatcgcctgcaatgaccacatatacatttgctgtcaggttcg

SEQ ID NO: 162988 - DNA, 51 bp, Artificial
  Synthetic oligonucleotide
tgtgcgtgcgctgatttcgatacgtttcatggaaccctcggttggagtatg

SEQ ID NO: 162989 - DNA, 50 bp, Artificial
  Synthetic oligonucleotide
aaccggcccgttccactggccgttatagttttgcggcgcgtaccagtcac

SEQ ID NO: 162990 - DNA, 55 bp, Artificial
  Synthetic oligonucleotide
cgttcacgacgcactcgactcaccggcatatgcgaccgcagtagggcttttgcgg

SEQ ID NO: 162991 - DNA, 50 bp, Artificial
  Synthetic oligonucleotide
aaccgacacgccaggagtagcgaccgggcaacgtatcaggcggcacaacc

SEQ ID NO: 162992 - DNA, 50 bp, Artificial
  Synthetic oligonucleotide
aaccggtcaaccgatgtatgtcacagcgctcgatgttgcacgcaacgccg

SEQ ID NO: 162993 - DNA, 50 bp, Artificial
  Synthetic oligonucleotide
aaccgtacccggtacagaaggcggttggtgcagaaacatggctcccgcat

SEQ ID NO: 162994 - DNA, 50 bp, Artificial
  Synthetic oligonucleotide
aaccgtgaggtcaaccgtcggtgttggggctgcgcaggcactgcatagca

SEQ ID NO: 162995 - DNA, 50 bp, Artificial
  Synthetic oligonucleotide
aaccgtgttccaacgatcacgctggcaccacccctgagtgcggacgtaca

SEQ ID NO: 162996 - DNA, 50 bp, Artificial
  Synthetic oligonucleotide
aaccgttcgagactccagaccagcaggccacgggtacgttccggcagtgc

SEQ ID NO: 162997 - DNA, 50 bp, Artificial
  Synthetic oligonucleotide
aacctcactgccaatgcaccaatgaagcgtccccaggcggctcgataccc

SEQ ID NO: 162998 - DNA, 50 bp, Artificial
  Synthetic oligonucleotide
aacgacccatccatcagcacgcaaccgagagtcaccagcgtctgctcccg

SEQ ID NO: 162999 - DNA, 50 bp, Artificial
  Synthetic oligonucleotide
aacgacgcgcgtgacaaccggtcggatcactattccgccttccgcaaccc

SEQ ID NO: 163000 - DNA, 50 bp, Artificial
  Synthetic oligonucleotide
aacgcccctgagccgcaggttgggtcgagcactgtcagactcgtcaacgc

SEQ ID NO: 163001 - DNA, 55 bp, Artificial
  Synthetic oligonucleotide
cgttgggagtgaattgtctgcgttcatttccggtcagtggcaatgtggtttgggg

SEQ ID NO: 163002 - DNA, 50 bp, Artificial
  Synthetic oligonucleotide
aacgcgccaattcacacgcccgattgtgtgggttcacggtgactgcctga

SEQ ID NO: 163003 - DNA, 50 bp, Artificial
  Synthetic oligonucleotide
aacggcgtgccacacaatggatcgtgagcacggcctctgcactgcaaacg

SEQ ID NO: 163004 - DNA, 50 bp, Artificial
  Synthetic oligonucleotide
aaaacccggcaccgtggaggagcgacgggccatcaatgcgtggcgaatcg

SEQ ID NO: 163005 - DNA, 50 bp, Artificial
  Synthetic oligonucleotide
aaaagcaccccctcacgtcgccgaatctgcgcaaagcctaccagcttccg

SEQ ID NO: 163006 - DNA, 50 bp, Artificial
  Synthetic oligonucleotide
aaacgccgcaacacgtgcatgataagcgggtaaggcaccccatccaacga

SEQ ID NO: 163007 - DNA, 50 bp, Artificial
  Synthetic oligonucleotide
tctgctggagattgcgcccattgacagcgccggttggagcctgattgacg

SEQ ID NO: 163008 - DNA, 50 bp, Artificial
  Synthetic oligonucleotide
aaacgccgcgccacgcgcataacgagcgggcaaggtaaccaattcagcgc

SEQ ID NO: 163009 - DNA, 50 bp, Artificial
  Synthetic oligonucleotide
aaagagcgcatcgagtgttggcaggatcgcagcagggatggagacccccg

SEQ ID NO: 163010 - DNA, 50 bp, Artificial
  Synthetic oligonucleotide
aaagcccaccacagacttcgtatcagcccacgtaccggttcggcggtgct

SEQ ID NO: 163011 - DNA, 50 bp, Artificial
  Synthetic oligonucleotide
aaagcgggaaacgctctcgcgtgtgacgaggccgcaggggtggatggcgg

SEQ ID NO: 163012 - DNA, 55 bp, Artificial
  Synthetic oligonucleotide
ctagccgatgtaacctgtcgctcctcgcaacgccgctaacctgcgcagctccagg

SEQ ID NO: 163013 - DNA, 50 bp, Artificial
  Synthetic oligonucleotide
aaatcggtgcgaaggcagggatcattccgcctgtcggtcccggctgggaa

SEQ ID NO: 163014 - DNA, 50 bp, Artificial
  Synthetic oligonucleotide
aaatgcttcgagacgggggcggaaccgatcccaaccggcagcgtccacag

SEQ ID NO: 163015 - DNA, 50 bp, Artificial
  Synthetic oligonucleotide
aacaatcgccatccaccccgcaacgacccaccgcgaagtcggttggctgg

SEQ ID NO: 163016 - DNA, 50 bp, Artificial
  Synthetic oligonucleotide
aacaccgccctgtacccttcgctggcacgccaggccaaaactgatccaac

SEQ ID NO: 163017 - DNA, 50 bp, Artificial
  Synthetic oligonucleotide
aaccacgaagtgcgcgaacggggagcgaatctctctatcggccaacgcca

SEQ ID NO: 163018 - DNA, 50 bp, Artificial
  Synthetic oligonucleotide
aaccccgccgcctaatgtctggccgaacggagcgctcacaataggtttgg

SEQ ID NO: 163019 - DNA, 50 bp, Artificial
  Synthetic oligonucleotide
aacccgattgtcctgcctgaacaaccgcaacgcgcctgatggattgccgc

SEQ ID NO: 163020 - DNA, 50 bp, Artificial
  Synthetic oligonucleotide
aacccgcccctacgacccgtcctctgtgttccacggcaatatctagcggg

SEQ ID NO: 163021 - DNA, 50 bp, Artificial
  Synthetic oligonucleotide
aacccgcccctccggacggtatctgtaccgttcacctgaccatccaaggg

SEQ ID NO: 163022 - DNA, 50 bp, Artificial
  Synthetic oligonucleotide
aacccgcggaaggtcaacgtgtatggccccatctgtgcgctctgatccac

SEQ ID NO: 163023 - DNA, 55 bp, Artificial
  Synthetic oligonucleotide
ctatctgaggttattgtgtcaagcgtcgcaatgctttgtcgtggtgcataggttg

SEQ ID NO: 163024 - DNA, 50 bp, Artificial
  Synthetic oligonucleotide
aatggtcgcacaggagcggggaaagatcagccgtaacagatgcgcccgcg

SEQ ID NO: 163025 - DNA, 50 bp, Artificial
  Synthetic oligonucleotide
aatgtctcggttgagacctgcacaggtgcgcgctgtccacatttccgcga

SEQ ID NO: 163026 - DNA, 50 bp, Artificial
  Synthetic oligonucleotide
aatgtgaacggcggtccgtggacgccctacccggatattcagggcatccc

SEQ ID NO: 163027 - DNA, 50 bp, Artificial
  Synthetic oligonucleotide
cgcctctaagcgtggaataagatcgccaatcggatgttcactgactaacc

SEQ ID NO: 163028 - DNA, 50 bp, Artificial
  Synthetic oligonucleotide
aatgttaagcccggttagtgcccgtgcttccgggagattcggggtcacga

SEQ ID NO: 163029 - DNA, 50 bp, Artificial
  Synthetic oligonucleotide
cgatcatgcattggcgataaggggttgctgatagggctggatgtctccag

SEQ ID NO: 163030 - DNA, 50 bp, Artificial
  Synthetic oligonucleotide
aattcgtaccgggcggcgacatgacgcaattcatccgcgaggatggacgc

SEQ ID NO: 163031 - DNA, 50 bp, Artificial
  Synthetic oligonucleotide
acaaccgtgctgtgggtgatccctgatccccggtaaaaggcgctgtggga

SEQ ID NO: 163032 - DNA, 50 bp, Artificial
  Synthetic oligonucleotide
acagacgtgcaacgtgtgcgtccacacatccccctcagggtggtaacggg

SEQ ID NO: 163033 - DNA, 50 bp, Artificial
  Synthetic oligonucleotide
acagccgtagcgaacagagtgacggggagcgcagttgccggagcgaccgt

SEQ ID NO: 163034 - DNA, 55 bp, Artificial
  Synthetic oligonucleotide
ctggctgctacccacatcgttcatacaggtacgtcgcccgatgttgcgcacagcg

SEQ ID NO: 163035 - DNA, 50 bp, Artificial
  Synthetic oligonucleotide
acagcgacccccgatccgcatccctatccgtttgcgttgcttccgggaac

SEQ ID NO: 163036 - DNA, 50 bp, Artificial
  Synthetic oligonucleotide
accacgcgcaaagcggcgtatcaaccgcaaggggtatcttgtgagcagcg

SEQ ID NO: 163037 - DNA, 50 bp, Artificial
  Synthetic oligonucleotide
accacgtgtgcgccacccgtaaggagatgccgggttccgtgaacgaaccg

SEQ ID NO: 163038 - DNA, 50 bp, Artificial
  Synthetic oligonucleotide
accagggagcgccatcgctcacgtagatgtttccgctggcgtcaaaggca

SEQ ID NO: 163039 - DNA, 50 bp, Artificial
  Synthetic oligonucleotide
accccatgagcagactgacccccaaccgccgcctgcagaacgatagcagg

SEQ ID NO: 163040 - DNA, 50 bp, Artificial
  Synthetic oligonucleotide
acccctcgctccatggcaaacagcgcagatcgggaacaagcaccatcgta

SEQ ID NO: 163041 - DNA, 50 bp, Artificial
  Synthetic oligonucleotide
acccctgtccggatctgctgtgtcgtgtaaggcgcccgtttccgtcagag

SEQ ID NO: 163042 - DNA, 50 bp, Artificial
  Synthetic oligonucleotide
acccgcctgtgacgcgaagggcgaagacgtttgtatacccagggtgcgtt

SEQ ID NO: 163043 - DNA, 50 bp, Artificial
  Synthetic oligonucleotide
acccggcacatcgggagacacctcatggacggatcaggggcgactcctga

SEQ ID NO: 163044 - DNA, 50 bp, Artificial
  Synthetic oligonucleotide
attgaatcacttcgccgataaagcgctggttgggactctcaatcactcgg

SEQ ID NO: 163045 - DNA, 55 bp, Artificial
  Synthetic oligonucleotide
ctttcgcttatctactggtggcatgataacacactgtattgccgacgatgacggt

SEQ ID NO: 163046 - DNA, 50 bp, Artificial
  Synthetic oligonucleotide
acccgtcgctcattcacaacgccaggtgagccctgacgcgtcacaagagc

SEQ ID NO: 163047 - DNA, 50 bp, Artificial
  Synthetic oligonucleotide
acccgtgctcttcgatacgccagcgctaaccgctcagcatccagacgcat

SEQ ID NO: 163048 - DNA, 50 bp, Artificial
  Synthetic oligonucleotide
agcagttacgaaccttcaaccttcaacgtgcaacgtttcttccacctgtc

SEQ ID NO: 163049 - DNA, 50 bp, Artificial
  Synthetic oligonucleotide
acccttctgaccttcgacgcgccaccacacatatccgtcggcggctaccg

SEQ ID NO: 163050 - DNA, 50 bp, Artificial
  Synthetic oligonucleotide
accgcgtttcccatacactacggcagacacgccgcacgccgagatatgca

SEQ ID NO: 163051 - DNA, 50 bp, Artificial
  Synthetic oligonucleotide
aacgggagatggtggatcgccgtgctccccatacggtttcgggcaacgta

SEQ ID NO: 163052 - DNA, 50 bp, Artificial
  Synthetic oligonucleotide
aacggtactcggcacatcgctggtcgcaatcacccgaatcccgcgatcaa

SEQ ID NO: 163053 - DNA, 50 bp, Artificial
  Synthetic oligonucleotide
aacggtgcaaccggcaggcgagactcagtaagcaaccgcgcatccgtctt

SEQ ID NO: 163054 - DNA, 50 bp, Artificial
  Synthetic oligonucleotide
aactgacaacctttgcaacggcgcagggtaggggtcagggggtgtctcat

SEQ ID NO: 163055 - DNA, 50 bp, Artificial
  Synthetic oligonucleotide
aagaaaggggtcggcagttcacgcaatgggcgcgacagcaacccgaaaat

SEQ ID NO: 163056 - DNA, 55 bp, Artificial
  Synthetic oligonucleotide
gaagggtcggtcggataagagacgaaatggcatcgctcaggagagtgacagaacg

SEQ ID NO: 163057 - DNA, 50 bp, Artificial
  Synthetic oligonucleotide
aagaccaggcttcagaacccgcccctacggacgatacacgtgccggttca

SEQ ID NO: 163058 - DNA, 50 bp, Artificial
  Synthetic oligonucleotide
aagagccgcgaccgcaaagtgatggcagtatcctggtcgtgtgggggtat

SEQ ID NO: 163059 - DNA, 50 bp, Artificial
  Synthetic oligonucleotide
aagcccctgcgtgccatctcccgtttcaggcatcaggacgcccaaccttc

SEQ ID NO: 163060 - DNA, 50 bp, Artificial
  Synthetic oligonucleotide
aagccctcttgcaacgcttcgggcgggttaatcgacgggcagcgaaagga

SEQ ID NO: 163061 - DNA, 50 bp, Artificial
  Synthetic oligonucleotide
aagccgcgtgccgtcaatgcataccgaccgaccggtacaccgttactgtc

SEQ ID NO: 163062 - DNA, 50 bp, Artificial
  Synthetic oligonucleotide
aagcgcatgcctgcattgtagcacagaccggttgcattgctgcacctccg

SEQ ID NO: 163063 - DNA, 50 bp, Artificial
  Synthetic oligonucleotide
aagcgcgtcaaagatcgccttcgcatccgcctgaaacgtctcggagggcg

SEQ ID NO: 163064 - DNA, 50 bp, Artificial
  Synthetic oligonucleotide
aagcgctgcggccaaatggacggggtgaaacgacgctgcttaaccagcaa

SEQ ID NO: 163065 - DNA, 50 bp, Artificial
  Synthetic oligonucleotide
aagcggcacgatagttgcttgcttaagcgcgatcccactggctgcccagg

SEQ ID NO: 163066 - DNA, 50 bp, Artificial
  Synthetic oligonucleotide
aagctcgcgtgtgggaattgcaaagcaagccggtggtctgtacgctgtgc

SEQ ID NO: 163067 - DNA, 55 bp, Artificial
  Synthetic oligonucleotide
gagagaagacctgagtcgggcttagtcattcggtaccagcggcaggaatacgctg

SEQ ID NO: 163068 - DNA, 50 bp, Artificial
  Synthetic oligonucleotide
aagggcaacgtcgtgcagtttagcctgacagtcagcctctatggcccgct

SEQ ID NO: 163069 - DNA, 50 bp, Artificial
  Synthetic oligonucleotide
aagtgcagggtcacgattcggtcaactcaggtgggctaaaggcccgtgcg

SEQ ID NO: 163070 - DNA, 50 bp, Artificial
  Synthetic oligonucleotide
aatacgcgctaatctgcccaaccgcgcccatccgcgtaccctgtctatgg

SEQ ID NO: 163071 - DNA, 50 bp, Artificial
  Synthetic oligonucleotide
aatcaacgcatctccccggaagagggtcaaccgcacgacatcaccgggtt

SEQ ID NO: 163072 - DNA, 50 bp, Artificial
  Synthetic oligonucleotide
aatcggcgtctattcacaccgcctgatcgttcgggcagcaccggttgccg

SEQ ID NO: 163073 - DNA, 50 bp, Artificial
  Synthetic oligonucleotide
aatcgggcgtctcatcacctgcgcttgacaatgccccacctccgacacac

SEQ ID NO: 163074 - DNA, 50 bp, Artificial
  Synthetic oligonucleotide
aatctcgtgcatccgcggcgatcaatttcggtcggacgcccgcctttgga

SEQ ID NO: 163075 - DNA, 50 bp, Artificial
  Synthetic oligonucleotide
aatctggtcgctggtcgataaggcggcagaccgcgaggtgttgtggcaca

SEQ ID NO: 163076 - DNA, 50 bp, Artificial
  Synthetic oligonucleotide
aatgcgcaacccctgtgcgctcgctccgcctggaagtcgtgtcgctgatc

SEQ ID NO: 163077 - DNA, 50 bp, Artificial
  Synthetic oligonucleotide
aatgggaactcagcctgtggcggcactttgcgcgtcacgaacgcaaccgt

SEQ ID NO: 163078 - DNA, 55 bp, Artificial
  Synthetic oligonucleotide
gaggcgacgtgcgggatctcacaatcacgaccgcagatcggagagcacttactat

SEQ ID NO: 163079 - DNA, 60 bp, Artificial
  Synthetic oligonucleotide
gatgccccggcgtgctattgcgtccgatgatgcaaccaaactgttcgagttgggtcacac

SEQ ID NO: 163080 - DNA, 55 bp, Artificial
  Synthetic oligonucleotide
gatcgcacagcaccactccctcgacaatactgttgatcacggctgtcagtttccg

SEQ ID NO: 163081 - DNA, 55 bp, Artificial
  Synthetic oligonucleotide
gcaacatgtcagggaacagtcgtatcgtgagcggtacgtattaggaacggaacgc

SEQ ID NO: 163082 - DNA, 53 bp, Artificial
  Synthetic oligonucleotide
acgtgaaatgctcaccgaaatacccaattttacggtggttggtgaagtgttaa

SEQ ID NO: 163083 - DNA, 55 bp, Artificial
  Synthetic oligonucleotide
agatcaatagcagccaattgcccgatcgtgttgcacaggcgctcgcatctgcgtt

SEQ ID NO: 163084 - DNA, 55 bp, Artificial
  Synthetic oligonucleotide
agtttcaccacccatccgagccgtgcttcgtatggattggtctcttccgtgatct

SEQ ID NO: 163085 - DNA, 55 bp, Artificial
  Synthetic oligonucleotide
atggcgtctctggacaatgtggcaggtggtacatcgtccgtttcaggtatcggaa

SEQ ID NO: 163086 - DNA, 55 bp, Artificial
  Synthetic oligonucleotide
attgagcgtgataccatcgggtgcacgagctacaggaagttgctcttcatgacgg

SEQ ID NO: 163087 - DNA, 55 bp, Artificial
  Synthetic oligonucleotide
cagccatctgctcatagtcacaattgaccggctagcgacactggtgaatcaccgg

SEQ ID NO: 163088 - DNA, 55 bp, Artificial
  Synthetic oligonucleotide
cagggatgggcagaaaggctaacgcaaatttggccgcatcaggaagcactagcgc

SEQ ID NO: 163089 - DNA, 55 bp, Artificial
  Synthetic oligonucleotide
catcgcaccctcctctgtacatcaggccgcggtatcacacgaacagcactactgc

SEQ ID NO: 163090 - DNA, 59 bp, Artificial
  Synthetic oligonucleotide
gcggcacaaacgaattcggcggaagaccatctgggatgcgtttggctcgtctgagtcgt

SEQ ID NO: 163091 - DNA, 55 bp, Artificial
  Synthetic oligonucleotide
catgtcacccagcagtcggtatgacccctcatagcaccttgtgcgggacacggcg

SEQ ID NO: 163092 - DNA, 55 bp, Artificial
  Synthetic oligonucleotide
cattgagccagaggcgaataagactatcactatcacctaccacaactaagttggg

SEQ ID NO: 163093 - DNA, 55 bp, Artificial
  Synthetic oligonucleotide
ccaggtaagattggctgtaaacgcccgaatcacctcatcccgattgagcggcggt

SEQ ID NO: 163094 - DNA, 55 bp, Artificial
  Synthetic oligonucleotide
ccatctgccgattgtaccggagagcgaatgatcgcgcacacatcggacgtggtac

SEQ ID NO: 163095 - DNA, 55 bp, Artificial
  Synthetic oligonucleotide
cccagacctttgaaaagtgcgccgatcatacacgtctctcactttgttatatgcg

SEQ ID NO: 163096 - DNA, 55 bp, Artificial
  Synthetic oligonucleotide
cccgaattgcctgccagtctagtccgttgtagtcagggtacacatagttgtcgcg

SEQ ID NO: 163097 - DNA, 55 bp, Artificial
  Synthetic oligonucleotide
cccgcttgtcattgaactgcggtttaccaacccgcgtccactgcgccaggtggga

SEQ ID NO: 163098 - DNA, 55 bp, Artificial
  Synthetic oligonucleotide
ccgcagcttgccctctcgtatacatcgattagtgagcgccctgaatttcgtagct

SEQ ID NO: 163099 - DNA, 55 bp, Artificial
  Synthetic oligonucleotide
ccggcagatcgcgtgattacgtcggcccaagcaactgccctgtatctgcgtgatc

SEQ ID NO: 163100 - DNA, 55 bp, Artificial
  Synthetic oligonucleotide
ccggtacgagggaagcgtgagcgtggcatgctgcactcctggatcaacacggtgt

SEQ ID NO: 163101 - DNA, 58 bp, Artificial
  Synthetic oligonucleotide
gcggaagaccatctgggatgcgtttggctcgtctgagtcgttttagtggtcgcacggt

SEQ ID NO: 163102 - DNA, 55 bp, Artificial
  Synthetic oligonucleotide
cgcaaaagcgggtgatacgtctgtgatacccgtatcgtgatctgtctctagttcc

SEQ ID NO: 163103 - DNA, 55 bp, Artificial
  Synthetic oligonucleotide
cgcgcgagccagtcaaccgtgagcgtaatgcattccaggtctatcgggagcgaga

SEQ ID NO: 163104 - DNA, 54 bp, Artificial
  Synthetic oligonucleotide
gtcaccgttctgggacggacaatcaatatatttcgggaggtagtccgacaaacc

SEQ ID NO: 163105 - DNA, 55 bp, Artificial
  Synthetic oligonucleotide
gtccacccgttatccacaagcgaggggtgacaattcagcgagtgtgcgtcgcggt

SEQ ID NO: 163106 - DNA, 55 bp, Artificial
  Synthetic oligonucleotide
gtccatcgccccatgtttcaccgtgtccgatcacatcaggaccaaggtagcgacg

SEQ ID NO: 163107 - DNA, 55 bp, Artificial
  Synthetic oligonucleotide
gtcgcaaagcgccattgcaatctgcgtgtgggagagtgcttgttcgtagtgcccc

SEQ ID NO: 163108 - DNA, 55 bp, Artificial
  Synthetic oligonucleotide
gtcgctcaatcgccgatgtacaccaaatgacaattggagaggcgtttgcatgggc

SEQ ID NO: 163109 - DNA, 55 bp, Artificial
  Synthetic oligonucleotide
gtctccattcctcccgataaaaccacgtactccccggacagtagcttatgacagg

SEQ ID NO: 163110 - DNA, 55 bp, Artificial
  Synthetic oligonucleotide
gtgagttatgcgcgagccgttacgctacgtggcctgatttacgtgccgggaggcg

SEQ ID NO: 163111 - DNA, 55 bp, Artificial
  Synthetic oligonucleotide
gtgcgcatgattgagtccaatagccgcaaagcgtaccgtttcggatggcataggt

SEQ ID NO: 163112 - DNA, 55 bp, Artificial
  Synthetic oligonucleotide
cgctgaactggggtcgactgagacgctatgtatacgttcgcctgttccgctcggg

SEQ ID NO: 163113 - DNA, 55 bp, Artificial
  Synthetic oligonucleotide
gtgcgtgtgccaaccattgatggtacggtaacactgaagattccgccacgtaccc

SEQ ID NO: 163114 - DNA, 55 bp, Artificial
  Synthetic oligonucleotide
tagcgtaatcacatctgactcaacggaagtcaggataagcaccggtattcccctg

SEQ ID NO: 163115 - DNA, 55 bp, Artificial
  Synthetic oligonucleotide
tatagtgtacgcaagcggtatccacctcataaaaccggagcgacaatcactcccg

SEQ ID NO: 163116 - DNA, 55 bp, Artificial
  Synthetic oligonucleotide
tatgcatattgctgcgaaagacgcacaaccgtggtcgttgcggagtgccgtggac

SEQ ID NO: 163117 - DNA, 55 bp, Artificial
  Synthetic oligonucleotide
tcacagcgtcatagaatgatcggcgagtgtggtacaatgcctggaaacgaatcgc

SEQ ID NO: 163118 - DNA, 55 bp, Artificial
  Synthetic oligonucleotide
tcagcgtatctgagaactgctataaacccggtatactgcactatccgtcgggccc

SEQ ID NO: 163119 - DNA, 55 bp, Artificial
  Synthetic oligonucleotide
tcgcacaccgtctggcgccattggacctgaacagacgtcgctgcccattggaaac

SEQ ID NO: 163120 - DNA, 55 bp, Artificial
  Synthetic oligonucleotide
tcggcaacacccgaatcaaccatagaaagcgattgctttccgcctggctcaacct

SEQ ID NO: 163121 - DNA, 55 bp, Artificial
  Synthetic oligonucleotide
tgcatgagtatagagcctagtgatgtcttgggtgtcctcagctccgactcctcgc

SEQ ID NO: 163122 - DNA, 55 bp, Artificial
  Synthetic oligonucleotide
tggtctcgatacctagtgcatcgtacctctatcagctcgtctggttccaatgggg

SEQ ID NO: 163123 - DNA, 51 bp, Artificial
  Synthetic oligonucleotide
cggaaagtagggttaacgacagaccatcgtttgcccattcaaacggggcgg

SEQ ID NO: 163124 - DNA, 55 bp, Artificial
  Synthetic oligonucleotide
ttcgcgcaacccatcaccggccatttcaaacacgccaacctcgttggtgctcccg

SEQ ID NO: 163125 - DNA, 55 bp, Artificial
  Synthetic oligonucleotide
gcaccgcaagagggacagataatcatagtcgttcctcatactggctagcagtcgc

SEQ ID NO: 163126 - DNA, 55 bp, Artificial
  Synthetic oligonucleotide
gcatgatcactagcttttgccctaccaccactaacaatctcgcgatcggtgccac

SEQ ID NO: 163127 - DNA, 55 bp, Artificial
  Synthetic oligonucleotide
gcgaggggcaagtaaacgacgacgaacgatacaagaaacgcggcattatggatac

SEQ ID NO: 163128 - DNA, 55 bp, Artificial
  Synthetic oligonucleotide
gcgcaatccggccaccttcccatcccgcacgcagaaaacatctactctccggacg

SEQ ID NO: 163129 - DNA, 55 bp, Artificial
  Synthetic oligonucleotide
gcgcttcccatgcaaaacttcgacataacaatttggtgtagcgacgttgctatgc

SEQ ID NO: 163130 - DNA, 55 bp, Artificial
  Synthetic oligonucleotide
gcgtaaactgcccttttgccgtgtacatcaccgaattaccggcctgatcaatcgc

SEQ ID NO: 163131 - DNA, 55 bp, Artificial
  Synthetic oligonucleotide
gcgtggatatggtaatgattacgctgcattatagcactttggcatcattggtgca

SEQ ID NO: 163132 - DNA, 55 bp, Artificial
  Synthetic oligonucleotide
gcgtggttgagtccttaccggctgaacgacgagacgtttattcaacgtactgccg

SEQ ID NO: 163133 - DNA, 55 bp, Artificial
  Synthetic oligonucleotide
gcgttgtggttcacaggtgataaatacgaaggcagtgaccatgagcgcactcctg

SEQ ID NO: 163134 - DNA, 55 bp, Artificial
  Synthetic oligonucleotide
cggagcgctatcgagcgcaatgagttgcgtgtccactatcaaccgatcgtcgccc

SEQ ID NO: 163135 - DNA, 55 bp, Artificial
  Synthetic oligonucleotide
gctacaatgtctggtgagataaagctgcaacgctagctacgatggtgggcgaacg

SEQ ID NO: 163136 - DNA, 55 bp, Artificial
  Synthetic oligonucleotide
gctcacggagggctgtttcatcgaagctaagctggagtggtacacgtaccggcgt

SEQ ID NO: 163137 - DNA, 55 bp, Artificial
  Synthetic oligonucleotide
ggagagtggggacatgatgaacacgaaacgtcgtcgcaaaacagtcggccaggcg

SEQ ID NO: 163138 - DNA, 55 bp, Artificial
  Synthetic oligonucleotide
ggcgacacaaacgcagccaggacgtggaagttcgtcttgttcatctcattcggtc

SEQ ID NO: 163139 - DNA, 55 bp, Artificial
  Synthetic oligonucleotide
ggctgaagcgactaccatgcgtatgacgcgcatgtacgaagatgccagttcgcgc

SEQ ID NO: 163140 - DNA, 55 bp, Artificial
  Synthetic oligonucleotide
ggggcgtatgccggaagatcaagcgcgtagcgaattacctcaagcaacgccgact

SEQ ID NO: 163141 - DNA, 53 bp, Artificial
  Synthetic oligonucleotide
ggggcttgtctttccggtcacgccggtaccgacctacaacctcgaagcacacc

SEQ ID NO: 163142 - DNA, 55 bp, Artificial
  Synthetic oligonucleotide
gggtaacccggcctggatcgatcgagaacgcgatttgatggagggattgcgggcc

SEQ ID NO: 163143 - DNA, 55 bp, Artificial
  Synthetic oligonucleotide
ggtgctcccaagcgtatgcatcttcattaacggcgtcaagtgagccgtatcaccg

SEQ ID NO: 163144 - DNA, 55 bp, Artificial
  Synthetic oligonucleotide
gtaacgccgcatcgtcgtggggttcagggatcgctttcgtttcagtccatgcccc

SEQ ID NO: 163145 - DNA, 55 bp, Artificial
  Synthetic oligonucleotide
cggcataagccatcctcttgagcgcgcatcggtgcatcaactcgaactgcatcgg

SEQ ID NO: 163146 - DNA, 55 bp, Artificial
  Synthetic oligonucleotide
gtatggttatcgcagcgctagggagcaatcgtcgagtggtgcaactccattgggg

SEQ ID NO: 163147 - DNA, 55 bp, Artificial
  Synthetic oligonucleotide
aacccgctggcaagcatctctggttatgcgcaattactgatgcgcaatcgcactc

SEQ ID NO: 163148 - DNA, 54 bp, Artificial
  Synthetic oligonucleotide
acgggaacatgcaatgtccagcgaagtgggttcgttaggggcgggttcagaacc

SEQ ID NO: 163149 - DNA, 54 bp, Artificial
  Synthetic oligonucleotide
tcgaccctgcaccgtgcgcgcttcgttcgttagcccaccgaccgaacaccggtt

SEQ ID NO: 163150 - DNA, 54 bp, Artificial
  Synthetic oligonucleotide
ctcgacgatcccggctcgtaatgagatagcaacaaggaggttgcgatgtaccgc

SEQ ID NO: 163151 - DNA, 54 bp, Artificial
  Synthetic oligonucleotide
agctgtgtctacctcgatccgactgtgcaaggacgattaccatgacattagcaa

SEQ ID NO: 163152 - DNA, 54 bp, Artificial
  Synthetic oligonucleotide
gtggctgatgtaaaacaacctgccagctatccgaattaacgttccattccagta

SEQ ID NO: 163153 - DNA, 54 bp, Artificial
  Synthetic oligonucleotide
tgcttcgctccccggcaaacaacgttcgaccagaccggtatatgaggagggcca

SEQ ID NO: 163154 - DNA, 54 bp, Artificial
  Synthetic oligonucleotide
tgctgccccaacatctatcggggaactctgcgggctaagcgctgatcccggtgt

SEQ ID NO: 163155 - DNA, 54 bp, Artificial
  Synthetic oligonucleotide
aattcacacccttacagtgaagtacacggcacaggcgtacctcgaaagcattgc

SEQ ID NO: 163156 - DNA, 55 bp, Artificial
  Synthetic oligonucleotide
cggggcagtagaggccgcattaatgtcgagtggcaaaccgaacacagttgcaagg

SEQ ID NO: 163157 - DNA, 54 bp, Artificial
  Synthetic oligonucleotide
tctcatagcgtcctcgccgaacgatggttgcagacagtgcgcaaccttaagtat

SEQ ID NO: 163158 - DNA, 53 bp, Artificial
  Synthetic oligonucleotide
cttgacgcaaatgctaatagaccggttgtgatatagataacaaggggtgcata

SEQ ID NO: 163159 - DNA, 53 bp, Artificial
  Synthetic oligonucleotide
cggtagagcactgaaacccaatcgacgtaacatcaaaccagccggttgcagaa

SEQ ID NO: 163160 - DNA, 53 bp, Artificial
  Synthetic oligonucleotide
cggcatgtagacgacatcgattggcaccttccgaatagccgcgagttgcgctg

SEQ ID NO: 163161 - DNA, 53 bp, Artificial
  Synthetic oligonucleotide
tgcgggtgtcaattgcgacgaccgatggttcgctaatcacaatccctttcccc

SEQ ID NO: 163162 - DNA, 53 bp, Artificial
  Synthetic oligonucleotide
atttgcgctatctttcgggaataacgctgcacgccggtttgcgattgactctg

SEQ ID NO: 163163 - DNA, 53 bp, Artificial
  Synthetic oligonucleotide
ttcgccctagtgtgtcggtcgtgacattgttggcaattatgctgtggttcagt

SEQ ID NO: 163164 - DNA, 52 bp, Artificial
  Synthetic oligonucleotide
gttgatgctgcgactataccataccccggcgaaggtgtcaactctcacgatc

SEQ ID NO: 163165 - DNA, 52 bp, Artificial
  Synthetic oligonucleotide
ggttgggtgcatgggattgtgcggtcacggcccgttagttcgtctggaaccg

SEQ ID NO: 163166 - DNA, 52 bp, Artificial
  Synthetic oligonucleotide
cccgcaggggacgccacgacattcacgccaaaccaccaggactgcggtttgg

SEQ ID NO: 163167 - DNA, 57 bp, Artificial
  Synthetic oligonucleotide
gtagagattccgggctacaccacgagagattccgggcaataccagtagagattccgg

SEQ ID NO: 163168 - DNA, 54 bp, Artificial
  Synthetic oligonucleotide
gtggcttcccggaaaatcccctgcgcctgcaaggtccgggagtcaatccggtct

SEQ ID NO: 163169 - DNA, 57 bp, Artificial
  Synthetic oligonucleotide
gaagactcatcgcctgatccctcgatcgttgaaccgagcaaatgcgactccgtgacc

SEQ ID NO: 163170 - DNA, 57 bp, Artificial
  Synthetic oligonucleotide
tgaatcaggaatgcacgagtgcgagggcgtctatgtcggctcctatcagctaccagc

SEQ ID NO: 163171 - DNA, 53 bp, Artificial
  Synthetic oligonucleotide
accgctgccggacggagctgtttttactaggtccgagtccggctaagcggtta

SEQ ID NO: 163172 - DNA, 56 bp, Artificial
  Synthetic oligonucleotide
acgcaagcccaatacctcacctccaaacacaggggcaatttccgtgcgcgggatag

SEQ ID NO: 163173 - DNA, 55 bp, Artificial
  Synthetic oligonucleotide
cttgggattaccttaccgagggttggcatcacctgcgggaaagagcgaaccaggc

SEQ ID NO: 163174 - DNA, 56 bp, Artificial
  Synthetic oligonucleotide
gatcgggatttaatgcaagccggttgattgcacgcttccattctggccgcactagt

SEQ ID NO: 163175 - DNA, 56 bp, Artificial
  Synthetic oligonucleotide
ctgcctgttcatagtccggtagcgtggggaagcgaaccgtgacaccaagcataccg

SEQ ID NO: 163176 - DNA, 56 bp, Artificial
  Synthetic oligonucleotide
gcttgccccgcactggttgctctggacaatctatgcggccgaaaggggatacacct

SEQ ID NO: 163177 - DNA, 56 bp, Artificial
  Synthetic oligonucleotide
catggggcctatcgcgacgggactgggggaaatcgttctctggaccatggaggcgg

SEQ ID NO: 163178 - DNA, 56 bp, Artificial
  Synthetic oligonucleotide
cttaccggggctggtgcattattccccgctggaagctgactcgttggtacacgcag

SEQ ID NO: 163179 - DNA, 48 bp, Artificial
  Synthetic oligonucleotide
aggcggttttccccccggggctttggcgaacacgaaatcgtccccttc

SEQ ID NO: 163180 - DNA, 56 bp, Artificial
  Synthetic oligonucleotide
ggcgtcctattgcggtggagtctatccgaagggtaccgccagcattaaggctgcct

SEQ ID NO: 163181 - DNA, 56 bp, Artificial
  Synthetic oligonucleotide
gtgcaacagatcaacaagcacagtgacctgaaggtcacaatggaacagcgtaaacg

SEQ ID NO: 163182 - DNA, 55 bp, Artificial
  Synthetic oligonucleotide
caaacgattgccgcgcgttcaggggcgggaggtaatccagcagcggtgctaccaa

SEQ ID NO: 163183 - DNA, 55 bp, Artificial
  Synthetic oligonucleotide
caaagcgcttgcggccctcttgttgggtctcgtcaatgaggttcatcatcgtgtg

SEQ ID NO: 163184 - DNA, 55 bp, Artificial
  Synthetic oligonucleotide
tgcgcctcatagtgcaggtcgccgtcatacagatagggccattcgcgaaagacgc

SEQ ID NO: 163185 - DNA, 55 bp, Artificial
  Synthetic oligonucleotide
ctagggcgtctcatctattccaacgtccgagaactagagggagcattgcggagag

SEQ ID NO: 163186 - DNA, 54 bp, Artificial
  Synthetic oligonucleotide
caagggaacggtctaatcgccggtaaccaatcgcttcggaaagatggggcgtgc

SEQ ID NO: 163187 - DNA, 53 bp, Artificial
  Synthetic oligonucleotide
caagtggcccgtactcaacgtgacaaaagacgtccgttgttacaaaccgaaga

SEQ ID NO: 163188 - DNA, 55 bp, Artificial
  Synthetic oligonucleotide
caatacatggtgaaagggcactattaagcggcctgagttaatgtcgggccttgcc

SEQ ID NO: 163189 - DNA, 55 bp, Artificial
  Synthetic oligonucleotide
caatgcttaaaagagcgcggatatacaccaatgggttgggagtagtaggccagtc

SEQ ID NO: 163190 - DNA, 56 bp, Artificial
  Synthetic oligonucleotide
gttccgaatcagatcgattcccccccggcgacagacccacacgctggtcataaaaa

SEQ ID NO: 163191 - DNA, 55 bp, Artificial
  Synthetic oligonucleotide
caccagcccatcgattgaaggccgtcttaaccaaccgcgcacccagtgacgcggt

SEQ ID NO: 163192 - DNA, 55 bp, Artificial
  Synthetic oligonucleotide
tgggatcctcacacatcaagcggacgtcggatccctccctggaacccggctaacg

SEQ ID NO: 163193 - DNA, 55 bp, Artificial
  Synthetic oligonucleotide
tggtttctcctgggtcgcctaaatccgagtgccggaccgtactcgtgactaacaa

SEQ ID NO: 163194 - DNA, 55 bp, Artificial
  Synthetic oligonucleotide
ctaatgcttggttgacgcactgcgcccagttctcgcgccattgagccaaggtggc

SEQ ID NO: 163195 - DNA, 55 bp, Artificial
  Synthetic oligonucleotide
tgtgcgctctgagggatattcaaaggcactactctctccccacgctttccctgcc

SEQ ID NO: 163196 - DNA, 55 bp, Artificial
  Synthetic oligonucleotide
cactcttcggatagggctaaacgaagcatcaagaattaggtgcccgatagagcgt

SEQ ID NO: 163197 - DNA, 55 bp, Artificial
  Synthetic oligonucleotide
cagcaggtaggattagatcccgcagcttatatgacaccagaacggttactcgacc

SEQ ID NO: 163198 - DNA, 55 bp, Artificial
  Synthetic oligonucleotide
caggcgatcgtttgcacatccaaacttcagacctttatagccagccgcgttccgc

SEQ ID NO: 163199 - DNA, 55 bp, Artificial
  Synthetic oligonucleotide
caggctgcgcacgggagacaaccgcgtgctcaaacccgagggaaacggttgatct

SEQ ID NO: 163200 - DNA, 55 bp, Artificial
  Synthetic oligonucleotide
cgtggtctctgggtaccttatcagccgggtatcgctagtgacggtggggctcctt

SEQ ID NO: 163201 - DNA, 59 bp, Artificial
  Synthetic oligonucleotide
gttctagatgaatagaataaacgagacatttcgaaacgttctagatgaatagaatagcg

SEQ ID NO: 163202 - DNA, 55 bp, Artificial
  Synthetic oligonucleotide
catactgcctgcgaccttgagcctgtttcagcactgacaggatagacttcagtcg

SEQ ID NO: 163203 - DNA, 55 bp, Artificial
  Synthetic oligonucleotide
cgtatcgtacacagttcgcctcgagtgaaacgctcgggtcgcagaccttgacgcg

SEQ ID NO: 163204 - DNA, 54 bp, Artificial
  Synthetic oligonucleotide
cgggcttgtattacaggagtttaaagacgcgaagggcgagtatgttcgccccga

SEQ ID NO: 163205 - DNA, 55 bp, Artificial
  Synthetic oligonucleotide
cgggcactcctcatcggctcgattaggtccgcgaaagccttccccatccaatccg

SEQ ID NO: 163206 - DNA, 55 bp, Artificial
  Synthetic oligonucleotide
catcggtcgcatcaaagcgccactctggccagtccgcaagacagtctcgcatgcg

SEQ ID NO: 163207 - DNA, 55 bp, Artificial
  Synthetic oligonucleotide
catcttctggaccaatgaggtatttctcgctcatactgtgaccgggcctagcggc

SEQ ID NO: 163208 - DNA, 55 bp, Artificial
  Synthetic oligonucleotide
tagatccgtcggcatgtctgagtgtccgacttctcataaccccttatagggattc

SEQ ID NO: 163209 - DNA, 55 bp, Artificial
  Synthetic oligonucleotide
ctggccataaacggtttaaaggtttatcgaaagcagcccagagatcagcataacg

SEQ ID NO: 163210 - DNA, 55 bp, Artificial
  Synthetic oligonucleotide
agtctacacaacgcccatctaccacccgcccattttcgacataggaccgacaccc

SEQ ID NO: 163211 - DNA, 55 bp, Artificial
  Synthetic oligonucleotide
ctggcagtctgcagtagctgacctatcagcgacctccacttcgagcgagagtacc

SEQ ID NO: 163212 - DNA, 54 bp, Artificial
  Synthetic oligonucleotide
cttgcctagaatgcgcgggcgctctttatgattttctgggggtaaaaaccaccg

SEQ ID NO: 163213 - DNA, 55 bp, Artificial
  Synthetic oligonucleotide
ctggagaggattcatgtctacccaatcgttcactgtcgccacgacctttggtgtc

SEQ ID NO: 163214 - DNA, 55 bp, Artificial
  Synthetic oligonucleotide
agtggcagaaaagagcggcgccaatccctaacggtgtggccagaaggatagcccc

SEQ ID NO: 163215 - DNA, 55 bp, Artificial
  Synthetic oligonucleotide
ctgcgtcgagtaacgatccggatcgctgatgctcttctaagactgcaatccgtac

SEQ ID NO: 163216 - DNA, 55 bp, Artificial
  Synthetic oligonucleotide
tcagtggcattgtcatgctggttgcacgcaatcacacaatccagcgatgtgctca

SEQ ID NO: 163217 - DNA, 55 bp, Artificial
  Synthetic oligonucleotide
ctgcccacctattctgatgaaatgacggtttcgaattattatcaagcggtgacag

SEQ ID NO: 163218 - DNA, 55 bp, Artificial
  Synthetic oligonucleotide
tccatgctcgcggcactccgaaatttgcgattttcgaacttgcaagtatttgccg

SEQ ID NO: 163219 - DNA, 55 bp, Artificial
  Synthetic oligonucleotide
ctgaagccggacgtacccctccatgttctgcctagtgtgccaatcacgtccgacg

SEQ ID NO: 163220 - DNA, 55 bp, Artificial
  Synthetic oligonucleotide
tccgatggttcgtcctcaaggcaaatcgggaacactctgtataattcagacggta

SEQ ID NO: 163221 - DNA, 55 bp, Artificial
  Synthetic oligonucleotide
tcgagtgtcggttttctttacggtttgtgtggcgatgcgtgtgcggaaagacggc

SEQ ID NO: 163222 - DNA, 55 bp, Artificial
  Synthetic oligonucleotide
ctctgaacgcagagctgcaatcatccaaccggataaatacaggtatttacgtttg

SEQ ID NO: 163223 - DNA, 60 bp, Artificial
  Synthetic oligonucleotide
taaatcgatagtacgtgcctcataaatcgatagtacgtgcctcataaatcgatagtacgt

SEQ ID NO: 163224 - DNA, 55 bp, Artificial
  Synthetic oligonucleotide
atcggatacttatgaacgctagatgagatcgaaatcggcgcgtttatgcgcctga

SEQ ID NO: 163225 - DNA, 55 bp, Artificial
  Synthetic oligonucleotide
ctctatcgtacacccagagttctgtgtaatgggatgcgtcaaaggctctgcgggg

SEQ ID NO: 163226 - DNA, 55 bp, Artificial
  Synthetic oligonucleotide
ctcgcttccaagtgagctcgacgtccggtgcatccacggcctttagcagggtcgt

SEQ ID NO: 163227 - DNA, 55 bp, Artificial
  Synthetic oligonucleotide
ctccaaggttaaatgctggcagatgggtactagctggaggatcctcgattaattt

SEQ ID NO: 163228 - DNA, 54 bp, Artificial
  Synthetic oligonucleotide
ctcaggtcgacacccgggtcggtaatccgcactcggggtggcttcaaacgtgtc

SEQ ID NO: 163229 - DNA, 55 bp, Artificial
  Synthetic oligonucleotide
ctcaagaggagggactagcggcgtgatagcattggctacacagcgtatatagcgg

SEQ ID NO: 163230 - DNA, 55 bp, Artificial
  Synthetic oligonucleotide
tcggacatcgggatttacttcgcgttttccggtcggctcattgttatccgagcag

SEQ ID NO: 163231 - DNA, 55 bp, Artificial
  Synthetic oligonucleotide
tcgtaacgaggtccggagcgggatggggcatcctcgcgggagcgagacagtcact

SEQ ID NO: 163232 - DNA, 55 bp, Artificial
  Synthetic oligonucleotide
tgacacccggcccagtgtgcataggcgagtgcatcatgccaggagacgcagacta

SEQ ID NO: 163233 - DNA, 55 bp, Artificial
  Synthetic oligonucleotide
caaaagtcagatcagtaccgttatgaggggctgtcacacctaaagcacccggagt

SEQ ID NO: 163234 - DNA, 59 bp, Artificial
  Synthetic oligonucleotide
cttgatcgctcccatttaagatgatcccaagtttcatagcaagaggcattaaaaacgcc

SEQ ID NO: 163235 - DNA, 55 bp, Artificial
  Synthetic oligonucleotide
cgagacgattgcggatttggtctaaccgcgggcctcgctcgtaagacaggccacc

SEQ ID NO: 163236 - DNA, 55 bp, Artificial
  Synthetic oligonucleotide
cgacacatccctttgtaatcgatcggaggctcccatgtcactgttacaggccttc

SEQ ID NO: 163237 - DNA, 54 bp, Artificial
  Synthetic oligonucleotide
ccctagctatattcccctcagtaccgtggcgactttggaaatcactcccggacc

SEQ ID NO: 163238 - DNA, 55 bp, Artificial
  Synthetic oligonucleotide
ccctctcagactcaacatggctcactaaggcttgccgggtttgcccgataagcgc

SEQ ID NO: 163239 - DNA, 55 bp, Artificial
  Synthetic oligonucleotide
ttgttatactgcgcggtttacccgctgagcatttaggactgaggggttcgtagct

SEQ ID NO: 163240 - DNA, 55 bp, Artificial
  Synthetic oligonucleotide
cgaatcttaatttggctcctgccatccggggtttgcctatcttcggtaccgatat

SEQ ID NO: 163241 - DNA, 55 bp, Artificial
  Synthetic oligonucleotide
ccgacacaacgtcgccacccagatacaaatgggttttagtgtgtgtgtcctgatg

SEQ ID NO: 163242 - DNA, 55 bp, Artificial
  Synthetic oligonucleotide
ccgccgccttgtttcaccacatgggagacgtacagttccggggactcaatcagta

SEQ ID NO: 163243 - DNA, 55 bp, Artificial
  Synthetic oligonucleotide
ccgcgaatggagagtccttcggtcggagacatgttgggttccgttcggtcgtgag

SEQ ID NO: 163244 - DNA, 55 bp, Artificial
  Synthetic oligonucleotide
ccgcgattgtctaaggagtttaacggtccgtgcgatcgctgtctctaggcgagct

SEQ ID NO: 163245 - DNA, 59 bp, Artificial
  Synthetic oligonucleotide
tacaaggcagccttaatgctggcggtacccttcggatagactccaccgcaataggacgc

SEQ ID NO: 163246 - DNA, 55 bp, Artificial
  Synthetic oligonucleotide
ccgctctaatgaagtaatgaagcggccaactgattaagtttcccgatagcagacc

SEQ ID NO: 163247 - DNA, 54 bp, Artificial
  Synthetic oligonucleotide
cctggttctaaggcgttagcgtttcagcttcccgtactcgttaaggagatattc

SEQ ID NO: 163248 - DNA, 55 bp, Artificial
  Synthetic oligonucleotide
cctggtagccacctggtttacctatccgcctagcagcgatagcggagcacaggcg

SEQ ID NO: 163249 - DNA, 55 bp, Artificial
  Synthetic oligonucleotide
ccggcggcaggttcaagccatccgttgattcatcgaggaacgagccatgtggtac

SEQ ID NO: 163250 - DNA, 55 bp, Artificial
  Synthetic oligonucleotide
ccggtcgacctgacgcgcagtcaatatgcccgactcgtcaagatcgcgtcagact

SEQ ID NO: 163251 - DNA, 54 bp, Artificial
  Synthetic oligonucleotide
ccggttgggcggaaatagaacgtgtacaacggtccaatcagatgcggtttccac

SEQ ID NO: 163252 - DNA, 55 bp, Artificial
  Synthetic oligonucleotide
ccgtcccattcccggaattgaacgttgccttgactgtggcagtgatgctgtatcg

SEQ ID NO: 163253 - DNA, 55 bp, Artificial
  Synthetic oligonucleotide
cctaactaaaccgcgtccggagcagtgtgagtcgttcttggattggagctgcctc

SEQ ID NO: 163254 - DNA, 55 bp, Artificial
  Synthetic oligonucleotide
cctaagacaagcaaccgggtatcggctctggcgtgggctaatttcaacaccgact

SEQ ID NO: 163255 - DNA, 55 bp, Artificial
  Synthetic oligonucleotide
cctagaacgcatacgagattcgagacctccatcgcccagcccagaaacccacagc

SEQ ID NO: 163256 - DNA, 55 bp, Artificial
  Synthetic oligonucleotide
agggctgttattggatgatgaccgctacccttgtagcgcctagccccttaaaacg

SEQ ID NO: 163257 - DNA, 55 bp, Artificial
  Synthetic oligonucleotide
cctagacgatctcaccgctgtttgtaagccccgctttatgcgcctcaccgcggag

SEQ ID NO: 163258 - DNA, 55 bp, Artificial
  Synthetic oligonucleotide
cctagtgctttggaacattctattgtggcagtcggtaaggaagcatctggggatc

SEQ ID NO: 163259 - DNA, 55 bp, Artificial
  Synthetic oligonucleotide
cctattcagggagtgacctcccgttattatagccatgtcaagtccccgaagattg

SEQ ID NO: 163260 - DNA, 55 bp, Artificial
  Synthetic oligonucleotide
tttccccagcggccaagtaccgtggatcacgacaccatgagggaccgagtcgacc

SEQ ID NO: 163261 - DNA, 55 bp, Artificial
  Synthetic oligonucleotide
cctctgtcactatgggcgagtcaaataacgcttgcgccgtctgaatggatgcgac

SEQ ID NO: 163262 - DNA, 55 bp, Artificial
  Synthetic oligonucleotide
cggatgtggcctgcaccaaaggtgagatcaacgggccgccgttcacgcttgtcag

SEQ ID NO: 163263 - DNA, 54 bp, Artificial
  Synthetic oligonucleotide
aaatgcgcaagctggggataaaactctaccccgagttcaaacaggagacgggaa

SEQ ID NO: 163264 - DNA, 55 bp, Artificial
  Synthetic oligonucleotide
catttaggcagaccagaagtcattaccaatgcaagcaaagcgatagtctggcggg

SEQ ID NO: 163265 - DNA, 55 bp, Artificial
  Synthetic oligonucleotide
ccaagcgaccccgatcgatatggagagttcccctttggttcaacagatgcgtctc

SEQ ID NO: 163266 - DNA, 55 bp, Artificial
  Synthetic oligonucleotide
ccaccgtggcgaccgacaatagtgccttgggccgaagcacataaattatgatcgc

SEQ ID NO: 163267 - DNA, 58 bp, Artificial
  Synthetic oligonucleotide
aacggtaattaacctgcagcgatcactctacactgctaaattcacctgtggtatttgg

SEQ ID NO: 163268 - DNA, 55 bp, Artificial
  Synthetic oligonucleotide
cggaccacagcacgagggttatacctattgcgtcaagtgcggccgaatagaggcc

SEQ ID NO: 163269 - DNA, 55 bp, Artificial
  Synthetic oligonucleotide
cggaacctactgagaatgctgacgctgtagcgcgactccatccgactgaatcgac

SEQ ID NO: 163270 - DNA, 55 bp, Artificial
  Synthetic oligonucleotide
cgctggtggttaccatccaggatgggcttcgcatccacgtcccctcggatattca

SEQ ID NO: 163271 - DNA, 55 bp, Artificial
  Synthetic oligonucleotide
cgctgggcaatctagcctaatctcgattgtttacaaggagtatgcaatccgtgcc

SEQ ID NO: 163272 - DNA, 55 bp, Artificial
  Synthetic oligonucleotide
ccagggagtcatctcccgcatgctgagatacaaaacaatcatggtagcgattggc

SEQ ID NO: 163273 - DNA, 52 bp, Artificial
  Synthetic oligonucleotide
cgctgacccacccaaccaattaaaccttcggagaaaccaatagaaatttggc

SEQ ID NO: 163274 - DNA, 55 bp, Artificial
  Synthetic oligonucleotide
cgctatcgtacactcagagttctgtgtaatgggatgctttgaaggtcacaattcg

SEQ ID NO: 163275 - DNA, 55 bp, Artificial
  Synthetic oligonucleotide
ttaggaggcgcgctaaaatcagtagcacgaggagctgcagtaaagcttgcacccc

SEQ ID NO: 163276 - DNA, 55 bp, Artificial
  Synthetic oligonucleotide
cgcctttctacccaactgattctttggcaagacatcagccgattcaggttgcacc

SEQ ID NO: 163277 - DNA, 55 bp, Artificial
  Synthetic oligonucleotide
ttatgactgacgtcgaattttgtgtttcgacgcaggagtggactgggtgcctgga

SEQ ID NO: 163278 - DNA, 57 bp, Artificial
  Synthetic oligonucleotide
gaccggctttgccttacgccaagtgatcgggagtggcgccccgaatcgcctcaagac

SEQ ID NO: 163279 - DNA, 60 bp, Artificial
  Synthetic oligonucleotide
taccactgtccccagatcgcccgctttaagtccatgctcgggcacgtcctgagtgagtac

SEQ ID NO: 163280 - DNA, 55 bp, Artificial
  Synthetic oligonucleotide
cgcctcatgtccatgactggattggcgaggttcggggaaccatatcgtaattccg

SEQ ID NO: 163281 - DNA, 52 bp, Artificial
  Synthetic oligonucleotide
ccccggggctttggcgaacacgaaatcgtccccttccctgccctgtagccaa

SEQ ID NO: 163282 - DNA, 55 bp, Artificial
  Synthetic oligonucleotide
cgcccactacctgcaagatctaatggtagatcttaagcccgacttcaaaacttgc

SEQ ID NO: 163283 - DNA, 55 bp, Artificial
  Synthetic oligonucleotide
cccctataggtttgctgtactcgaccggtaagttcagaccaatacctgctgttgc

SEQ ID NO: 163284 - DNA, 53 bp, Artificial
  Synthetic oligonucleotide
cgccaaatgctcggaacccggggtagtttcatccctccaagacctaccaagac

SEQ ID NO: 163285 - DNA, 55 bp, Artificial
  Synthetic oligonucleotide
cgcatatgggcctgtccagaggtgcgatcgctgaccgtattgatggcgagaatgt

SEQ ID NO: 163286 - DNA, 55 bp, Artificial
  Synthetic oligonucleotide
cgattggttccgttgcgtccacgatcatgcgagaacccttgcggataccgggtcg

SEQ ID NO: 163287 - DNA, 55 bp, Artificial
  Synthetic oligonucleotide
cccgcgaagccctattcgccattgctcactgcgtaatcgattctagccgagcccc

SEQ ID NO: 163288 - DNA, 55 bp, Artificial
  Synthetic oligonucleotide
cccgctcaacgtcgatcgcatgaacaagctggaggtcgcgcaatcctggacccag

SEQ ID NO: 163289 - DNA, 55 bp, Artificial
  Synthetic oligonucleotide
ttcgctgatctgctgaggcaatcttaagcaaactctcaccaggtatattatcgtg

SEQ ID NO: 163290 - DNA, 60 bp, Artificial
  Synthetic oligonucleotide
cttgaattcgatggagactggatgcattgtccgagttgcaagtccgttcaccgtcccatt

SEQ ID NO: 163291 - DNA, 55 bp, Artificial
  Synthetic oligonucleotide
cccggtaatccagacacttcagtccagtggggctgagagggagagtatcccaccc

SEQ ID NO: 163292 - DNA, 55 bp, Artificial
  Synthetic oligonucleotide
gcctcgttatggcagcctttactctgttccggtcgaagagaattggcagtccgtc

SEQ ID NO: 163293 - DNA, 55 bp, Artificial
  Synthetic oligonucleotide
gcctacctcgaactacgtgcctgcctacctcgaactacgtgcctacctacctcga

SEQ ID NO: 163294 - DNA, 54 bp, Artificial
  Synthetic oligonucleotide
accctggttgcaccggtcagcgaggggattcccttcctcggctttcggatctac

SEQ ID NO: 163295 - DNA, 55 bp, Artificial
  Synthetic oligonucleotide
gcccttgtcgataatagcgcattcgatggttttaatggtgactggctcgtcggtc

SEQ ID NO: 163296 - DNA, 55 bp, Artificial
  Synthetic oligonucleotide
gggatggcaattgacttgcaactagtatggacccaaattggtacggtgctgctac

SEQ ID NO: 163297 - DNA, 54 bp, Artificial
  Synthetic oligonucleotide
gggattacgtacgcctaacagaaagcgttattgagggaggactgctaccgggcc

SEQ ID NO: 163298 - DNA, 54 bp, Artificial
  Synthetic oligonucleotide
gcccacacataaatccgcccctaaagcttctccccgcccctggagcgagttccc

SEQ ID NO: 163299 - DNA, 55 bp, Artificial
  Synthetic oligonucleotide
ggggaatctggcggagtaggtttggttaataccaaagagcgattagcggcattgt

SEQ ID NO: 163300 - DNA, 55 bp, Artificial
  Synthetic oligonucleotide
acgccttccgagcgcactgaaattgaggaaccccaggatacgcccgacgccaggt

SEQ ID NO: 163301 - DNA, 59 bp, Artificial
  Synthetic oligonucleotide
tacgttccaccttatcgaccaaatcagcctgtatcttgctgcggtctgcccgttcgtaa

SEQ ID NO: 163302 - DNA, 55 bp, Artificial
  Synthetic oligonucleotide
gccattgctatacgcatccatcactgcaggataacgaactaacacgttgtagttg

SEQ ID NO: 163303 - DNA, 55 bp, Artificial
  Synthetic oligonucleotide
gcatagttatcgaatttcgtgatcatggtcgcgattgattgtatctcttccggca

SEQ ID NO: 163304 - DNA, 55 bp, Artificial
  Synthetic oligonucleotide
gcaggggcattctgtgaccacacgggttccttgagctatcaataaacgagcgaca

SEQ ID NO: 163305 - DNA, 55 bp, Artificial
  Synthetic oligonucleotide
gcagacgcaagacagcttgactatggatttggctaacacgtgactcgctcacccc

SEQ ID NO: 163306 - DNA, 55 bp, Artificial
  Synthetic oligonucleotide
acgtcttggagaccaaccggggcctattgaaggcacgggcccttgtggtgtgtgc

SEQ ID NO: 163307 - DNA, 55 bp, Artificial
  Synthetic oligonucleotide
gcacttttgaaatacgggcagtatcggacctcggtggaaaattcacgcaacggcg

SEQ ID NO: 163308 - DNA, 55 bp, Artificial
  Synthetic oligonucleotide
gggtaccctcattgacggcaactataagagtgataccccttgcgtggaaattatt

SEQ ID NO: 163309 - DNA, 55 bp, Artificial
  Synthetic oligonucleotide
gatggccccaattaacacgccaaccttgaactaggaaaatcagggataacgactc

SEQ ID NO: 163310 - DNA, 55 bp, Artificial
  Synthetic oligonucleotide
ggtagctgatctctatcgcctatcaatatgcacgccgcatgactggggatggctt

SEQ ID NO: 163311 - DNA, 55 bp, Artificial
  Synthetic oligonucleotide
actcgttgccattgacggaagctctctctaatcaggcgctttatccgatttctat

SEQ ID NO: 163312 - DNA, 60 bp, Artificial
  Synthetic oligonucleotide
acaaatctcttgatccagcatgtgaccggcgtttactcgttctttgcaatgcctacagac

SEQ ID NO: 163313 - DNA, 55 bp, Artificial
  Synthetic oligonucleotide
aagtgcaggtgaacggtcattcgctcgatactgtagaccgggtgcaacgtggggc

SEQ ID NO: 163314 - DNA, 55 bp, Artificial
  Synthetic oligonucleotide
aagtgatccgcactaccaacagattgtccgaagctttagtgaatatacaaacagg

SEQ ID NO: 163315 - DNA, 55 bp, Artificial
  Synthetic oligonucleotide
gatccagtagcgatctccgggttgcgtaccctcaaactgctcgataagcgtgcac

SEQ ID NO: 163316 - DNA, 55 bp, Artificial
  Synthetic oligonucleotide
gatcagccgtcaccactaacgcttccaatgctacggcgtcgtccattgcttgtgc

SEQ ID NO: 163317 - DNA, 55 bp, Artificial
  Synthetic oligonucleotide
agagtcgatcccaccgcatctccctttaccaggatcgcattcatgactccttcta

SEQ ID NO: 163318 - DNA, 55 bp, Artificial
  Synthetic oligonucleotide
aattgggcgctatcctcgatggcttgtggttcgaaatcccaaatggtatctcccc

SEQ ID NO: 163319 - DNA, 55 bp, Artificial
  Synthetic oligonucleotide
ggcaagtcgaaccccaacctggccccattcggctgaatgaagcaaccactaagat

SEQ ID NO: 163320 - DNA, 55 bp, Artificial
  Synthetic oligonucleotide
ggcacttattttgacagcagcggcgataatttcaccgacgtcttgctaggcggcc

SEQ ID NO: 163321 - DNA, 53 bp, Artificial
  Synthetic oligonucleotide
ggatcatgtttcccgtcgcattattaacgaggtagcgggtatttcccgggtta

SEQ ID NO: 163322 - DNA, 55 bp, Artificial
  Synthetic oligonucleotide
ggccatcgagtgctaaactgactgcaacccaagactagccctcaacttgacatcg

SEQ ID NO: 163323 - DNA, 60 bp, Artificial
  Synthetic oligonucleotide
aatggtgatctccacgcattagaattttaagctcggagagcagaattacctctgctctat

SEQ ID NO: 163324 - DNA, 55 bp, Artificial
  Synthetic oligonucleotide
ggccgggcgctgggaacaagggctccatttatacctcgaacaagacccactatag

SEQ ID NO: 163325 - DNA, 55 bp, Artificial
  Synthetic oligonucleotide
ggcgaagtaattatgggattttcgcattaatttaaggataagtgaggttagtgcc

SEQ ID NO: 163326 - DNA, 55 bp, Artificial
  Synthetic oligonucleotide
ggagactggatgcattgtccgagttgcaagtccgttcaccgtcccattcccggaa

SEQ ID NO: 163327 - DNA, 55 bp, Artificial
  Synthetic oligonucleotide
ggcggcgcacgttgcaactctttaggactccaatctagggatacatcctgacgaa

SEQ ID NO: 163328 - DNA, 55 bp, Artificial
  Synthetic oligonucleotide
ggaagggagtatatgggcgttggaaagtcgtactggtgcctctctttggcgccaa

SEQ ID NO: 163329 - DNA, 55 bp, Artificial
  Synthetic oligonucleotide
ggaaccaaagcgccttattgagtttgacgttaccgtctaccgacttgactgctcg

SEQ ID NO: 163330 - DNA, 55 bp, Artificial
  Synthetic oligonucleotide
gcttaccttctatcgccgctaaagtggctatagtaattgacgacattggttacca

SEQ ID NO: 163331 - DNA, 55 bp, Artificial
  Synthetic oligonucleotide
gctcgttagtcgtgcctgttagatcgctgggcgttatagccataggactaagccg

SEQ ID NO: 163332 - DNA, 55 bp, Artificial
  Synthetic oligonucleotide
gcgggtcaaatggccacgctgtttccaaaccctcaccaaagcgataattatacct

SEQ ID NO: 163333 - DNA, 55 bp, Artificial
  Synthetic oligonucleotide
ggcgtccttgtcttctgttctgatacgctgggcattccctggatcgttgaccagc

SEQ ID NO: 163334 - DNA, 60 bp, Artificial
  Synthetic oligonucleotide
ggagcgtcagatccgacttaaacggctgaaccatctccaatggatcatgagtgtcaggaa

SEQ ID NO: 163335 - DNA, 55 bp, Artificial
  Synthetic oligonucleotide
gcgcgcgtccttgcaaggccccatcgatcactacgatttgccggtgctagtcaat

SEQ ID NO: 163336 - DNA, 55 bp, Artificial
  Synthetic oligonucleotide
gcgcgccttttcttgtcgtgtgccttgaaatcgccagggttcaggcgtatagtcc

SEQ ID NO: 163337 - DNA, 55 bp, Artificial
  Synthetic oligonucleotide
gcgccgagagaagtcgcaaacgtaatggaaccgttcgtgctgatagacggagagc

SEQ ID NO: 163338 - DNA, 55 bp, Artificial
  Synthetic oligonucleotide
gcgacctagcttgcgatgtcgccttgacttatggctgctaaatcgttttaatggc

SEQ ID NO: 163339 - DNA, 53 bp, Artificial
  Synthetic oligonucleotide
gccttcgggaactaattcacgtaccttaagctgtgtaccaaaagggccacacc

SEQ ID NO: 163340 - DNA, 55 bp, Artificial
  Synthetic oligonucleotide
gcctggatcagtgagcgtcccatacgcccagcagcgccgctgatagctactcgta

SEQ ID NO: 163341 - DNA, 55 bp, Artificial
  Synthetic oligonucleotide
gcctgccggagtaacaatcaacacacgccggagcataccgcggctacgtaaagcg

SEQ ID NO: 163342 - DNA, 55 bp, Artificial
  Synthetic oligonucleotide
ggttgcccgtcctggagtcccgaggattcgtcgattagtggtgcatggacaaccc

SEQ ID NO: 163343 - DNA, 55 bp, Artificial
  Synthetic oligonucleotide
gagccatgaggggcgtctgtcctggcgtgtcagcgtcgatggagtccagatagta

SEQ ID NO: 163344 - DNA, 55 bp, Artificial
  Synthetic oligonucleotide
gagaatcccatgagtcatcttattcaaagacagccgttaagggttcattcagcgc

SEQ ID NO: 163345 - DNA, 50 bp, Artificial
  Synthetic oligonucleotide
acactccaaaaaccttttaaatcccctttaaggctatgcaaacgataacc

SEQ ID NO: 163346 - DNA, 55 bp, Artificial
  Synthetic oligonucleotide
gactcatgccatggctatcatccgaacgcttctccagggactgactgtcgatggg

SEQ ID NO: 163347 - DNA, 55 bp, Artificial
  Synthetic oligonucleotide
ggtttatgaactttcgtcccctgcctataagttgtctgttccatcacccaattcc

SEQ ID NO: 163348 - DNA, 55 bp, Artificial
  Synthetic oligonucleotide
gacgagatccaagccttggcaaagcaactctccgttaacttggagggaatcgatc

SEQ ID NO: 163349 - DNA, 55 bp, Artificial
  Synthetic oligonucleotide
gtccgcatactggctctgtagggccgtgataagatcaacggtcttgcgaagaagc

SEQ ID NO: 163350 - DNA, 53 bp, Artificial
  Synthetic oligonucleotide
gtccgcccaacaaacccggtaagtcgcccggaagacgtcttgcttctcccgca

SEQ ID NO: 163351 - DNA, 55 bp, Artificial
  Synthetic oligonucleotide
gtcgagactggttccgggaccacaagcgatataggcgacagcaaaattttcgtcg

SEQ ID NO: 163352 - DNA, 55 bp, Artificial
  Synthetic oligonucleotide
gaccaaccgctccaatacctgccgctctagcacatagcctggaggaagtgacgtt

SEQ ID NO: 163353 - DNA, 55 bp, Artificial
  Synthetic oligonucleotide
gacaccttctacgccagtatgctcgactatctgtgcgagaagtgcccgacactgg

SEQ ID NO: 163354 - DNA, 55 bp, Artificial
  Synthetic oligonucleotide
gtgagctccaggaaatcgcattcatcccagctctgcgcggttgccagggtgtgcg

SEQ ID NO: 163355 - DNA, 55 bp, Artificial
  Synthetic oligonucleotide
gaaatcggtagggaagccgactggcttccatcgtcgagtcttagagtagttcctg

SEQ ID NO: 163356 - DNA, 52 bp, Artificial
  Synthetic oligonucleotide
ggaattgaccgcgctagcgggcaaggggggcaacgcccccggtcaaaaggga

SEQ ID NO: 163357 - DNA, 55 bp, Artificial
  Synthetic oligonucleotide
gtgctgattacccgttaccagagtaatcgcagctatctcgggtttcgataggccg

SEQ ID NO: 163358 - DNA, 55 bp, Artificial
  Synthetic oligonucleotide
gttattcggtaaagctcgctggtacccctgtgatctggagcactgtacttgacgc

SEQ ID NO: 163359 - DNA, 55 bp, Artificial
  Synthetic oligonucleotide
gttcgcctactttccgtccactgatccagaggcgtacctcaactctctggagcgg

SEQ ID NO: 163360 - DNA, 52 bp, Artificial
  Synthetic oligonucleotide
gtttcccaacggagagacgcaccattaccggtttaacggggtgaagtcgata

SEQ ID NO: 163361 - DNA, 55 bp, Artificial
  Synthetic oligonucleotide
taacagagggtccgggacagacatactacgctcggatgacggtcactcgcacccc

SEQ ID NO: 163362 - DNA, 55 bp, Artificial
  Synthetic oligonucleotide
agggtaagatggacccagatgctagctccatagcctaaggcaatagcccagatcc

SEQ ID NO: 163363 - DNA, 55 bp, Artificial
  Synthetic oligonucleotide
tagaagcctatcaagtagaagtggaatatgggcggaccattgaagcctaccgggg

SEQ ID NO: 163364 - DNA, 55 bp, Artificial
  Synthetic oligonucleotide
ggttcgatggatcgctggtcttggggtggccaactgagtggtaccgttcgcctgg

SEQ ID NO: 163365 - DNA, 55 bp, Artificial
  Synthetic oligonucleotide
agcagcgctacgaacgcgaatcaatgggaactttgctgccgcctgtaaatacatg

SEQ ID NO: 163366 - DNA, 55 bp, Artificial
  Synthetic oligonucleotide
agcaatgacaaacgttccgcccaggggccaccgccggatgaagtactaacgactc

SEQ ID NO: 163367 - DNA, 53 bp, Artificial
  Synthetic oligonucleotide
ggcggttttttttggacctgcctacctcgaactacgtgcctgcctacctcgaa

SEQ ID NO: 163368 - DNA, 55 bp, Artificial
  Synthetic oligonucleotide
gagcggagagaagcaagacgcgtcaagtagtggataaggcgaacaaccttttgat

SEQ ID NO: 163369 - DNA, 55 bp, Artificial
  Synthetic oligonucleotide
gagtccaggacaacatggtacgcgtgctcaggaaagtctccgtcgtaaccgtcgg

SEQ ID NO: 163370 - DNA, 55 bp, Artificial
  Synthetic oligonucleotide
agatctggtacgcgactacatcgcccgacatggcgtgctaatcgagtcgccgggt

SEQ ID NO: 163371 - DNA, 55 bp, Artificial
  Synthetic oligonucleotide
gagctagaggccaactctcacgtgaagtagcgaagcgatgcactaactgcccgtc

SEQ ID NO: 163372 - DNA, 55 bp, Artificial
  Synthetic oligonucleotide
gaggtccactacgccgttctctacaccaaaagcgtaggggtccgcatccaactgg

SEQ ID NO: 163373 - DNA, 54 bp, Artificial
  Synthetic oligonucleotide
tggacatgatcggtcgagagggtcggagagatgagtgagctggcgacacagggg

SEQ ID NO: 163374 - DNA, 54 bp, Artificial
  Synthetic oligonucleotide
atccggtatgatcggggacgaaaaaacacacgtcatggcgcctggaggaccata

SEQ ID NO: 163375 - DNA, 54 bp, Artificial
  Synthetic oligonucleotide
tggtcgactatgtatgactgcgtgcaacgtggcattcgcaccgaaggcatttta

SEQ ID NO: 163376 - DNA, 54 bp, Artificial
  Synthetic oligonucleotide
gcggccatactgacgacacaggcgcttatgactacaatatgcagctgtcgaaaa

SEQ ID NO: 163377 - DNA, 54 bp, Artificial
  Synthetic oligonucleotide
ttaaaaccatcgaatgcgctattatcgacaagggctggcaagaaggctggatca

SEQ ID NO: 163378 - DNA, 55 bp, Artificial
  Synthetic oligonucleotide
gcggcccttggacggcctgctaaaaaatagcctgtcatcaggggttcagggcttt

SEQ ID NO: 163379 - DNA, 54 bp, Artificial
  Synthetic oligonucleotide
ggcgggtcctagctcataaacatcccgcgtgatccatgcctctgggttatgggg

SEQ ID NO: 163380 - DNA, 54 bp, Artificial
  Synthetic oligonucleotide
ataggcgctcgagtctatctaaaagatggacgcatagaattattatcgcaggta

SEQ ID NO: 163381 - DNA, 54 bp, Artificial
  Synthetic oligonucleotide
tatgacgtggccccgctgaatcctccctatacgcctacgcgctatatcgagatt

SEQ ID NO: 163382 - DNA, 54 bp, Artificial
  Synthetic oligonucleotide
ggactgcatacgccgttcaacgaacaggagatgcggggacgggtgagttggaca

SEQ ID NO: 163383 - DNA, 54 bp, Artificial
  Synthetic oligonucleotide
cttccagaactagagaattcggaacaaggtgggttgacctccatggtagcggct

SEQ ID NO: 163384 - DNA, 54 bp, Artificial
  Synthetic oligonucleotide
cttcaatcggcttgaagtgaatacggttatccgcggttactagggccgcagtcg

SEQ ID NO: 163385 - DNA, 54 bp, Artificial
  Synthetic oligonucleotide
ggatagcaccgatggtcgacccccaaacaggcggacaacctagatcgcaccacg

SEQ ID NO: 163386 - DNA, 54 bp, Artificial
  Synthetic oligonucleotide
ttaatgaagctgatcgctgtgcccagattcttgtggaacgatggttcagcggcc

SEQ ID NO: 163387 - DNA, 54 bp, Artificial
  Synthetic oligonucleotide
acgtttaatcatttcctcaagattgtcccatcctcggggaatgtgactccagtt

SEQ ID NO: 163388 - DNA, 54 bp, Artificial
  Synthetic oligonucleotide
agcgattcctaactggatagtgtctccatcaacccaaattcacggacccacatt

SEQ ID NO: 163389 - DNA, 60 bp, Artificial
  Synthetic oligonucleotide
gaatcgagttcgaatactaggattacgccgctccagctcagctagagaaccctcgaagaa

SEQ ID NO: 163390 - DNA, 60 bp, Artificial
  Synthetic oligonucleotide
gcgcttggcacgttcaccacatagacaagcccgtctctgatttcaaaattacgaatcacg

SEQ ID NO: 163391 - DNA, 54 bp, Artificial
  Synthetic oligonucleotide
gccccgctggtcggtccacgatgatgtcacaaggatacagcacgagatagactg

SEQ ID NO: 163392 - DNA, 54 bp, Artificial
  Synthetic oligonucleotide
tctgctctttcccggatcaatcgaaaatacccggttctcgcattaaccgtttaa

SEQ ID NO: 163393 - DNA, 54 bp, Artificial
  Synthetic oligonucleotide
ggtttgatacgacgagacgcgcagtcccttaagcttggccgtgtcgactcgaca

SEQ ID NO: 163394 - DNA, 54 bp, Artificial
  Synthetic oligonucleotide
tgctgataaggagcgatagcctcttcgtatagctgtctggctagtgttaccagg

SEQ ID NO: 163395 - DNA, 54 bp, Artificial
  Synthetic oligonucleotide
cggcttcgggctatcatccatgatttccgaccccaaccaccctggaaacgccta

SEQ ID NO: 163396 - DNA, 54 bp, Artificial
  Synthetic oligonucleotide
gatctagctcaacagaagcacgaagggactctgaaagcggcaaagcctctactt

SEQ ID NO: 163397 - DNA, 54 bp, Artificial
  Synthetic oligonucleotide
aagtggaacaggggacattgccgcagcgtcatagtgaggtgttggcccgcctta

SEQ ID NO: 163398 - DNA, 54 bp, Artificial
  Synthetic oligonucleotide
gcctcctgagcgcctgtgaaccgatcccagtcctctccgactcacagacgctct

SEQ ID NO: 163399 - DNA, 53 bp, Artificial
  Synthetic oligonucleotide
cggagaccagaaggtgcaagctgccggactcacagctcgacagactgtcgtag

SEQ ID NO: 163400 - DNA, 53 bp, Artificial
  Synthetic oligonucleotide
ctggccgcgtttcggttgtgcttcacagcggccttctccctgggtaggagtca

SEQ ID NO: 163401 - DNA, 60 bp, Artificial
  Synthetic oligonucleotide
ggctagaatgccagtccgaagtaatttctcccctcgattcttatgttatctgcacagcgt

SEQ ID NO: 163402 - DNA, 53 bp, Artificial
  Synthetic oligonucleotide
tactgctgactggtgggagcgagtcccattaggggatgtctgtgacattttga

SEQ ID NO: 163403 - DNA, 53 bp, Artificial
  Synthetic oligonucleotide
cttaccggtcggccaattgccaccttcctacggctgagcttaaccaggcttta

SEQ ID NO: 163404 - DNA, 53 bp, Artificial
  Synthetic oligonucleotide
ggatataaagctccgtgtcccccaggccaatggctaaataccgcgtgccgata

SEQ ID NO: 163405 - DNA, 53 bp, Artificial
  Synthetic oligonucleotide
ggaggttgccccctcccgagcgtccggttcctagatgcgaagcactcacaacg

SEQ ID NO: 163406 - DNA, 53 bp, Artificial
  Synthetic oligonucleotide
gacatcgcgctcatggcgaactggggctacctgaaaggcgggttcacgctgga

SEQ ID NO: 163407 - DNA, 53 bp, Artificial
  Synthetic oligonucleotide
cggaaaccgcctccaaacaaaggcgaagtgagtgaatataacgcgaatgccgt

SEQ ID NO: 163408 - DNA, 53 bp, Artificial
  Synthetic oligonucleotide
cctgctgcagtaataagaggagtttggaaagcgttggtcccaggtgggagatt

SEQ ID NO: 163409 - DNA, 53 bp, Artificial
  Synthetic oligonucleotide
tacatgcgctggctgtctcagggagtgcccgtgggcacggtcgttcagggaca

SEQ ID NO: 163410 - DNA, 53 bp, Artificial
  Synthetic oligonucleotide
ggggaactgcggcagttgagtcgtagtataaaacagcagcggcatgagaatgc

SEQ ID NO: 163411 - DNA, 53 bp, Artificial
  Synthetic oligonucleotide
gtgcccgggcttgggaaatggcgggacatcctactatttctccccacgatagt

SEQ ID NO: 163412 - DNA, 59 bp, Artificial
  Synthetic oligonucleotide
ggcttgcttggagtctcagcgataactcgggactcttaatcctagttatgcccgtgcgt

SEQ ID NO: 163413 - DNA, 53 bp, Artificial
  Synthetic oligonucleotide
tgttgcgttggcgactgtccagattgccgtatcgcgggttaacggagccggac

SEQ ID NO: 163414 - DNA, 53 bp, Artificial
  Synthetic oligonucleotide
tttactgctcgggtagtaatccgacgcccaatagcagacctgccttggactcc

SEQ ID NO: 163415 - DNA, 53 bp, Artificial
  Synthetic oligonucleotide
tcacgcctcgcggtttggagcttgagcgtcagtccctacgattcaagagtata

SEQ ID NO: 163416 - DNA, 53 bp, Artificial
  Synthetic oligonucleotide
gcgtcctttggcggtcataggaccacctccagtgggtatacgcctccacgcgc

SEQ ID NO: 163417 - DNA, 53 bp, Artificial
  Synthetic oligonucleotide
ggtcagtcatccccggatgactggccttttttacggcctggagatctcgaatg

SEQ ID NO: 163418 - DNA, 53 bp, Artificial
  Synthetic oligonucleotide
aaaagaccgccatcggactatgcttgaagcaggaaccccgagctgatgcaagg

SEQ ID NO: 163419 - DNA, 53 bp, Artificial
  Synthetic oligonucleotide
aaacgctgggttgtcacaccggccgtgcaacagatcaacaagcacagtgacct

SEQ ID NO: 163420 - DNA, 53 bp, Artificial
  Synthetic oligonucleotide
acacaactataagcgtctgttagaaggccgggcgactacggtcattagcctcg

SEQ ID NO: 163421 - DNA, 53 bp, Artificial
  Synthetic oligonucleotide
acactttaacaacagtgaaggtgcaccagtaattcgtattcgtgatgtaacct

SEQ ID NO: 163422 - DNA, 53 bp, Artificial
  Synthetic oligonucleotide
caacgcccatctaccacccgcccattttcgacataggaccgacacccgcacgg

SEQ ID NO: 163423 - DNA, 55 bp, Artificial
  Synthetic oligonucleotide
gcgcggggttgggtcggcttcgggctatcatccatgatttccgaccccaaccacc

SEQ ID NO: 163424 - DNA, 53 bp, Artificial
  Synthetic oligonucleotide
cccgtacccaacattaaccctgaaggcagtagcgtattctgagaggattgggc

SEQ ID NO: 163425 - DNA, 53 bp, Artificial
  Synthetic oligonucleotide
cccgctaaaaccgcccctatcgcctcctgagcgcctgtgaaccgatcccagtc

SEQ ID NO: 163426 - DNA, 53 bp, Artificial
  Synthetic oligonucleotide
agggagcaaaacttgaagtatttcagtgacatcgaacgactcatccctcccgc

SEQ ID NO: 163427 - DNA, 52 bp, Artificial
  Synthetic oligonucleotide
gaacctgcaagcttgtgacgcccgcttgagacggggggatgcggtttcatag

SEQ ID NO: 163428 - DNA, 52 bp, Artificial
  Synthetic oligonucleotide
tagcgctcaacccgtccagacctcgtcgcctatccattgctcatgcgctata

SEQ ID NO: 163429 - DNA, 50 bp, Artificial
  Synthetic oligonucleotide
agggattcgtcggttttacgggaaaaggtcacctcacgccctagtcgacg

SEQ ID NO: 163430 - DNA, 52 bp, Artificial
  Synthetic oligonucleotide
tcgacataggaccgacacccgcacggattgttgtcgtgttcgcaggtgcctt

SEQ ID NO: 163431 - DNA, 52 bp, Artificial
  Synthetic oligonucleotide
tctatcatgcccccgctaaaaccgcccctatcgcctcctgagcgcctgtgaa

SEQ ID NO: 163432 - DNA, 52 bp, Artificial
  Synthetic oligonucleotide
atgaacgatagcgcgcccctatgtctgcgcgcattcatcaagcgcctgaatc

SEQ ID NO: 163433 - DNA, 52 bp, Artificial
  Synthetic oligonucleotide
tctcggaagccaggtcgggcctagccagggttggatctcaaccccaggtgaa

SEQ ID NO: 163434 - DNA, 58 bp, Artificial
  Synthetic oligonucleotide
gcccctatctgcctttatctagggtgtctcagggaacaggcctccgagacgtttgcta

SEQ ID NO: 163435 - DNA, 52 bp, Artificial
  Synthetic oligonucleotide
tctgacatggattatgcgtggatgtgatcatatacgcctaattgagggctac

SEQ ID NO: 163436 - DNA, 52 bp, Artificial
  Synthetic oligonucleotide
aaccgattggaacctagactgatgcgaaaccggttcgtttcaagcctcctgc

SEQ ID NO: 163437 - DNA, 52 bp, Artificial
  Synthetic oligonucleotide
ctacttggctccttcgatataacttatcgcctgacctacagtggcaatgttc

SEQ ID NO: 163438 - DNA, 52 bp, Artificial
  Synthetic oligonucleotide
ctaacgcttcggctcagacgttcgcatcctgcgacgggtgctcgaggacttc

SEQ ID NO: 163439 - DNA, 52 bp, Artificial
  Synthetic oligonucleotide
cgtcatgtgatctgcttcgagcgatgagtgagatcctgtcgttcgatgcccg

SEQ ID NO: 163440 - DNA, 52 bp, Artificial
  Synthetic oligonucleotide
ggcgaacacgaaatcgtccccttccctgccctgtagccaagccccgaatact

SEQ ID NO: 163441 - DNA, 52 bp, Artificial
  Synthetic oligonucleotide
ggcggataaagtgctcgccccttcccggatagcgggttttaggactctggcc

SEQ ID NO: 163442 - DNA, 52 bp, Artificial
  Synthetic oligonucleotide
ggatcgtacaacgcccgcggggcgcttcatgaccgcaatggggcgcaattcc

SEQ ID NO: 163443 - DNA, 52 bp, Artificial
  Synthetic oligonucleotide
gcttcgatctatactcgaccactccccaatgatgccagagaggacatgctta

SEQ ID NO: 163444 - DNA, 52 bp, Artificial
  Synthetic oligonucleotide
ggggatattggcctatgagcgcgcaaggcgtgaacaaaatgaggcgacgagt

SEQ ID NO: 163445 - DNA, 60 bp, Artificial
  Synthetic oligonucleotide
gggcaaatccatatcctcaatgacaagcgcttgctccagccgcgctaaaatacgttccac

SEQ ID NO: 163446 - DNA, 52 bp, Artificial
  Synthetic oligonucleotide
gtatcgatcaccactgaacacccaaggtccgcgcatgcctcagattaccctt

SEQ ID NO: 163447 - DNA, 52 bp, Artificial
  Synthetic oligonucleotide
gccgagtagcggcctgacggagcacggaacggcggcgacactggcccgaagg

SEQ ID NO: 163448 - DNA, 52 bp, Artificial
  Synthetic oligonucleotide
gcatagtgcagcctatattgtaggtctacacgacagatgtcaggtctgttgg

SEQ ID NO: 163449 - DNA, 52 bp, Artificial
  Synthetic oligonucleotide
gcagactagatggtttgcgtgttaggcgactcatcattcccatatacctctc

SEQ ID NO: 163450 - DNA, 52 bp, Artificial
  Synthetic oligonucleotide
actcagcgcgctccgtggggcaagtgagatcgatttatactggatagcgttt

SEQ ID NO: 163451 - DNA, 52 bp, Artificial
  Synthetic oligonucleotide
agactcgggcatgccccctctgggctcgcaggattttctcggacatgccata

SEQ ID NO: 163452 - DNA, 52 bp, Artificial
  Synthetic oligonucleotide
gactcattcacgcattcgtctgagatgttgtcctcgccacagctcgtccaac

SEQ ID NO: 163453 - DNA, 52 bp, Artificial
  Synthetic oligonucleotide
taccacccgcccattttcgacataggaccgacacccgcacggattgttgtcg

SEQ ID NO: 163454 - DNA, 52 bp, Artificial
  Synthetic oligonucleotide
agcgccttccttcggtcttgcggacgctccctctgtactcaggatgggttct

SEQ ID NO: 163455 - DNA, 52 bp, Artificial
  Synthetic oligonucleotide
ccgaaactccgccaccttaagccgagacgggtctgcccgttgccgggtctgt

SEQ ID NO: 163456 - DNA, 58 bp, Artificial
  Synthetic oligonucleotide
gggcatgaatacaaccgccgaattcgataaggagttgaccttcactttatgtagccca

SEQ ID NO: 163457 - DNA, 52 bp, Artificial
  Synthetic oligonucleotide
cggcaatcgaggccaatgaaaatttgttcgatctcaattccgatccgatttt

SEQ ID NO: 163458 - DNA, 52 bp, Artificial
  Synthetic oligonucleotide
cccgtcaggccgactatgccggggtacgggtgacacgctatctgcaatccgg

SEQ ID NO: 163459 - DNA, 52 bp, Artificial
  Synthetic oligonucleotide
cgagtgcgtcgtactctatcatgcccccgctaaaaccgcccctatcgcctcc

SEQ ID NO: 163460 - DNA, 52 bp, Artificial
  Synthetic oligonucleotide
cccacatggattcagaggtcgggacgatgaataggctagacgctgcacatgc

SEQ ID NO: 163461 - DNA, 52 bp, Artificial
  Synthetic oligonucleotide
ttgtggcattttgcgcaagttacggtcagttgggagtaactacgggccgcta

SEQ ID NO: 163462 - DNA, 52 bp, Artificial
  Synthetic oligonucleotide
ccagccagggtaggttggcaaggggttcgttccaagtgccgaatgccagtac

SEQ ID NO: 163463 - DNA, 52 bp, Artificial
  Synthetic oligonucleotide
tgtaactccggatctgattcggagtgttttggaaccgtagacgttcatctac

SEQ ID NO: 163464 - DNA, 52 bp, Artificial
  Synthetic oligonucleotide
cccctctggacgcatcggacgaaagagtatagccttgctttcaagacacccc

SEQ ID NO: 163465 - DNA, 52 bp, Artificial
  Synthetic oligonucleotide
ttcgagctcataccatccgtaccaatcccgggcctctaggaaatcgcgccgg

SEQ ID NO: 163466 - DNA, 52 bp, Artificial
  Synthetic oligonucleotide
ccaacggggatcatcggtcgcatcaaagcgccactctggccagtccgcaaga

SEQ ID NO: 163467 - DNA, 60 bp, Artificial
  Synthetic oligonucleotide
acgcctatcggagacgcaaaaggaggtcctgccacacctccgcatgctgtcctcctcgga

SEQ ID NO: 163468 - DNA, 51 bp, Artificial
  Synthetic oligonucleotide
gaaccatagagctcacgcgaaaccaagtatccaggatcggtagtcgaaccc

SEQ ID NO: 163469 - DNA, 51 bp, Artificial
  Synthetic oligonucleotide
tagtcccgtgcagcctccacgcccttcacagccagcagtagacccggtagg

SEQ ID NO: 163470 - DNA, 51 bp, Artificial
  Synthetic oligonucleotide
tcagtgacgatccacgagcccgacccccgccaacccaagtcagatcgactg

SEQ ID NO: 163471 - DNA, 51 bp, Artificial
  Synthetic oligonucleotide
ctggtgatatcgcggaaattggagtctggaaaggtaaatccctggcccttc

SEQ ID NO: 163472 - DNA, 51 bp, Artificial
  Synthetic oligonucleotide
tccgatagattaagtgccaacttttacaatccgcggctttccgttcctacc

SEQ ID NO: 163473 - DNA, 51 bp, Artificial
  Synthetic oligonucleotide
ccaggctgcgcccaatcaaagggtcaattcttccctgcgccgctagccggt

SEQ ID NO: 163474 - DNA, 51 bp, Artificial
  Synthetic oligonucleotide
tagaatcgattacgcagtgagcaatggcgaatagggcttcgcgggttccat

SEQ ID NO: 163475 - DNA, 51 bp, Artificial
  Synthetic oligonucleotide
gttggaaacttgagatcatcccaacacgacacgagccctctgcatttagca

SEQ ID NO: 163476 - DNA, 51 bp, Artificial
  Synthetic oligonucleotide
agacctgcacaccgaatccactcccttggcattgacactggcgggccagct

SEQ ID NO: 163477 - DNA, 51 bp, Artificial
  Synthetic oligonucleotide
gtccgctagcctcatctcttacgcccccttcaatcaaaggaccaaagtagg

SEQ ID NO: 163478 - DNA, 56 bp, Artificial
  Synthetic oligonucleotide
gcaaggggtactgattgagtccccggaactgtacgtctcccatgtggtgaaacaag

SEQ ID NO: 163479 - DNA, 51 bp, Artificial
  Synthetic oligonucleotide
gcctggcgcccacctggagcaaagtaagcggctagtgattacgtaagtggt

SEQ ID NO: 163480 - DNA, 51 bp, Artificial
  Synthetic oligonucleotide
ggctgtgtgcgcttaagcagtaagacgcttccgtcccttggcacgccgcct

SEQ ID NO: 163481 - DNA, 51 bp, Artificial
  Synthetic oligonucleotide
ggctgagcagacatgaatcggatctcgctggatcgaagccagaggcgtttc

SEQ ID NO: 163482 - DNA, 51 bp, Artificial
  Synthetic oligonucleotide
ttttctcggttagggtcgcccctgagggttgagttgtcccgttggaggctg

SEQ ID NO: 163483 - DNA, 51 bp, Artificial
  Synthetic oligonucleotide
tgtaatacccctgaacatctaccagtacctgagctttgatcatacgtgact

SEQ ID NO: 163484 - DNA, 51 bp, Artificial
  Synthetic oligonucleotide
catcgaaaagacttgcttgcagggaggctctaatgaccgtcttcggggatg

SEQ ID NO: 163485 - DNA, 51 bp, Artificial
  Synthetic oligonucleotide
atgacgtgtcctgggactttggcgtgttatctgcggtcgctggttatcagt

SEQ ID NO: 163486 - DNA, 51 bp, Artificial
  Synthetic oligonucleotide
aacccttggaggtaaccataacagtagccgctagtgaaagcagctccagat

SEQ ID NO: 163487 - DNA, 51 bp, Artificial
  Synthetic oligonucleotide
ctaccccaagcgagcattcaagtgttaaagacacgtcggagtgtctacggg

SEQ ID NO: 163488 - DNA, 51 bp, Artificial
  Synthetic oligonucleotide
cagttctctatcgtacacccagagttctgtgtaatgggatgggcactaccg

SEQ ID NO: 163489 - DNA, 56 bp, Artificial
  Synthetic oligonucleotide
actggagcggacaaaaatggcatccgtcggcactgctgttaccgggttgggaacga

SEQ ID NO: 163490 - DNA, 50 bp, Artificial
  Synthetic oligonucleotide
aagtggcgcgccttgaaacggggttggggcccttctcggatctaagcgtc

SEQ ID NO: 163491 - DNA, 50 bp, Artificial
  Synthetic oligonucleotide
aagtgagcatctcgctctgattcgacctggcgcctcctctcggcaggcta

SEQ ID NO: 163492 - DNA, 50 bp, Artificial
  Synthetic oligonucleotide
aagtcgccaccagcttaaaaccccgtcctgcagtaaagcgtgctgccaga

SEQ ID NO: 163493 - DNA, 50 bp, Artificial
  Synthetic oligonucleotide
aaggttcgggacggaacccaacggagtgcggcggctagtgtggaaaatct

SEQ ID NO: 163494 - DNA, 50 bp, Artificial
  Synthetic oligonucleotide
aagggtccgcctaattccgaccgcgaccacagaactgcagtgcagcctaa

SEQ ID NO: 163495 - DNA, 50 bp, Artificial
  Synthetic oligonucleotide
aaggctggggtaccagcgattagctcccgctccttgagcgcacaccatgg

SEQ ID NO: 163496 - DNA, 50 bp, Artificial
  Synthetic oligonucleotide
aaggctcggacgggaacaagatgaagcgcgaccacaatggcgctcttggg

SEQ ID NO: 163497 - DNA, 50 bp, Artificial
  Synthetic oligonucleotide
aaggcgtgtcccggtgatggttgcctgcgtgtcaagggtactcgggatgc

SEQ ID NO: 163498 - DNA, 50 bp, Artificial
  Synthetic oligonucleotide
aaggcggcggagttgttgggctacgtcttgtagtggctccacctgttggc

SEQ ID NO: 163499 - DNA, 50 bp, Artificial
  Synthetic oligonucleotide
aaggcggccatccaaaccattcgtcgctcgtgacatccgctctgcggtgt

SEQ ID NO: 163500 - DNA, 60 bp, Artificial
  Synthetic oligonucleotide
gtgcctggcatcgtaaagaagttacgaacatcagcccctatctactagaaggaggcgaca

SEQ ID NO: 163501 - DNA, 53 bp, Artificial
  Synthetic oligonucleotide
agacggcctcttggtaaaacccaattcctacagagtcggacgtccgactccaa

SEQ ID NO: 163502 - DNA, 50 bp, Artificial
  Synthetic oligonucleotide
aaaccaggggtgagcgtcgggtgtgtcgcatgacttgatgtgagcgacgg

SEQ ID NO: 163503 - DNA, 50 bp, Artificial
  Synthetic oligonucleotide
aaggccttcgcaccagcctacgcgtaacagggaacgtctgcactccgagc

SEQ ID NO: 163504 - DNA, 50 bp, Artificial
  Synthetic oligonucleotide
aacccttggcgagcttggacaatgggtccgaaccgacttggagcccggat

SEQ ID NO: 163505 - DNA, 50 bp, Artificial
  Synthetic oligonucleotide
aaggccgtgggtgtaccgaaggggtgcgtagttcgacctgccagggtagc

SEQ ID NO: 163506 - DNA, 50 bp, Artificial
  Synthetic oligonucleotide
aaggagtgatgcgcgggaggttcggtcggtcatcgcagccgaatgacaag

SEQ ID NO: 163507 - DNA, 50 bp, Artificial
  Synthetic oligonucleotide
aagctcttctccgatgaccgatacgaggtgtgggagcgaccaggcgcgtc

SEQ ID NO: 163508 - DNA, 50 bp, Artificial
  Synthetic oligonucleotide
aaccgaattgtggtccgctccggaatggccccgtccttggtcgtcggctc

SEQ ID NO: 163509 - DNA, 50 bp, Artificial
  Synthetic oligonucleotide
aagcgccaatggagacgattttctacgccccagtgcccccgcacggctgt

SEQ ID NO: 163510 - DNA, 50 bp, Artificial
  Synthetic oligonucleotide
aagcccgtcctctcggtgtcatcttgggatccagggattggggccgcaga

SEQ ID NO: 163511 - DNA, 50 bp, Artificial
  Synthetic oligonucleotide
aagccccactcccgcttgctgtcgctgggctcagacacgaatcgcctcgc

SEQ ID NO: 163512 - DNA, 60 bp, Artificial
  Synthetic oligonucleotide
gatccacgctcgcaccaagtgttggccttctatgtcggtgaccgctcacgagacagtgcc

SEQ ID NO: 163513 - DNA, 50 bp, Artificial
  Synthetic oligonucleotide
aagcattttcccgccagtgtgtttcgcctcgacaacgcctgcctagcggt

SEQ ID NO: 163514 - DNA, 50 bp, Artificial
  Synthetic oligonucleotide
aaccaagcaggtgcccctacccttaaggcgaagcggcgtctagggcagga

SEQ ID NO: 163515 - DNA, 50 bp, Artificial
  Synthetic oligonucleotide
aatggacaggaggtgagggcgcgtcgcgttagccatctttcacacgccgc

SEQ ID NO: 163516 - DNA, 50 bp, Artificial
  Synthetic oligonucleotide
aaaatgtttgcggtaacgcgcttcgactccaggctcttcgcgagccccgt

SEQ ID NO: 163517 - DNA, 50 bp, Artificial
  Synthetic oligonucleotide
aaacaccgcggcaacttactcaaactgcccctgttggtggccgccgaatg

SEQ ID NO: 163518 - DNA, 50 bp, Artificial
  Synthetic oligonucleotide
aatgctgaccccgatagttgcgttgccgttcgccgtagacccgtgccaag

SEQ ID NO: 163519 - DNA, 50 bp, Artificial
  Synthetic oligonucleotide
aacagacatcatggcctccaatgggtgcggcggatggttccgcgtcgatt

SEQ ID NO: 163520 - DNA, 50 bp, Artificial
  Synthetic oligonucleotide
aatgaccaggggactaccccggcgagccgccactaaatggtcgggcttcc

SEQ ID NO: 163521 - DNA, 50 bp, Artificial
  Synthetic oligonucleotide
aatctcggaccgacgtgcacgccccatctagcctcttcgcgccgccacca

SEQ ID NO: 163522 - DNA, 50 bp, Artificial
  Synthetic oligonucleotide
aaacagcgggggctcagtctcccgttgcgttcggttactggtccgtcaaa

SEQ ID NO: 163523 - DNA, 58 bp, Artificial
  Synthetic oligonucleotide
gatacgattcggcatgactggcgtaaaaaccatgcaaccatagcgccaaaggtttacg

SEQ ID NO: 163524 - DNA, 50 bp, Artificial
  Synthetic oligonucleotide
aatcgttgccagtcctgtgaacggacgcctgcctttgggatcgtcggacc

SEQ ID NO: 163525 - DNA, 50 bp, Artificial
  Synthetic oligonucleotide
aatcgtgttgccgcgctagcaggtacggctagaagcaccgctgcgttagc

SEQ ID NO: 163526 - DNA, 50 bp, Artificial
  Synthetic oligonucleotide
aatcggcaggcatccggagcattcggtatgaacgggctatgtccgacccg

SEQ ID NO: 163527 - DNA, 50 bp, Artificial
  Synthetic oligonucleotide
aacccattccgccacgaaaccatcgtgaagcagaagcgtcgcaccgacga

SEQ ID NO: 163528 - DNA, 50 bp, Artificial
  Synthetic oligonucleotide
aacacggtgaaacgacgcccaccaggtttggccaacccaagcagacagag

SEQ ID NO: 163529 - DNA, 50 bp, Artificial
  Synthetic oligonucleotide
aatcgagcgccagacgccttccgagcgcactgaaattgaggaaccccagg

SEQ ID NO: 163530 - DNA, 50 bp, Artificial
  Synthetic oligonucleotide
aatcgacgtggcagttgctaagcttccgtcatgggccatggggtcccggg

SEQ ID NO: 163531 - DNA, 50 bp, Artificial
  Synthetic oligonucleotide
aatccgtcggccaaggccagtcgcagacgattcggttgaagccaccaacc

SEQ ID NO: 163532 - DNA, 50 bp, Artificial
  Synthetic oligonucleotide
aaacatatccatcgtccgcagacgcaaaggtccgacccgctcccgtggta

SEQ ID NO: 163533 - DNA, 50 bp, Artificial
  Synthetic oligonucleotide
aatcccgctcggtgggttcccatgcaacggtccatccaagacccgactcc

SEQ ID NO: 163534 - DNA, 60 bp, Artificial
  Synthetic oligonucleotide
ggtctgaagggctattgatgtgcctcataaatcgatagtaatgtgcctcataaatcgata

SEQ ID NO: 163535 - DNA, 50 bp, Artificial
  Synthetic oligonucleotide
aatcccgacgctgcacgcacgttgacccagcagggccgaacgtcacttcg

SEQ ID NO: 163536 - DNA, 50 bp, Artificial
  Synthetic oligonucleotide
aatcagcacccgatgaaggccggttcctgccctgaggcccaaccatgccg

SEQ ID NO: 163537 - DNA, 50 bp, Artificial
  Synthetic oligonucleotide
aatagggatcgatggccaagcgccccgccatctgcgcctccgaaagtcct

SEQ ID NO: 163538 - DNA, 50 bp, Artificial
  Synthetic oligonucleotide
aatacaaaccgccaaggcccaagcgggttaacaggggcgccacaaattgc

SEQ ID NO: 163539 - DNA, 50 bp, Artificial
  Synthetic oligonucleotide
aaaccacagggatgcgcccaccgccaaaggctcgtatgccccagccgata

SEQ ID NO: 163540 - DNA, 50 bp, Artificial
  Synthetic oligonucleotide
aagttttccggtgcgtaagcggccttgatcccggcaaagacctggcgagt

SEQ ID NO: 163541 - DNA, 50 bp, Artificial
  Synthetic oligonucleotide
aagttccgaaagcaacagaaggggcgcaatcgcggtctggctcagagcgg

SEQ ID NO: 163542 - DNA, 50 bp, Artificial
  Synthetic oligonucleotide
aacggccctgaaaccgtcactgttccgcgttggaccttctcgataccccc

SEQ ID NO: 163543 - DNA, 50 bp, Artificial
  Synthetic oligonucleotide
aacggaggtctcgggtcgagggctgggagggtaacgaatcgcgccgtctt

SEQ ID NO: 163544 - DNA, 50 bp, Artificial
  Synthetic oligonucleotide
aacggagatgtggagctccagttgggcgaactcactggggcgcagacggg

SEQ ID NO: 163545 - DNA, 60 bp, Artificial
  Synthetic oligonucleotide
agcatgagaggcaagtttgcttgttaccattcttctatgcggaaatataggcatttgaac

SEQ ID NO: 163546 - DNA, 50 bp, Artificial
  Synthetic oligonucleotide
aaccgcgccccctaagggccatgggtgcatcaaaggtcgaactcacccga

SEQ ID NO: 163547 - DNA, 50 bp, Artificial
  Synthetic oligonucleotide
aacggagaagctcctgatcaccagccaccgggagacagcctttctcgccc

SEQ ID NO: 163548 - DNA, 50 bp, Artificial
  Synthetic oligonucleotide
aacaccgccataccacccccttcccagcgataggtatgccattgctgccc

SEQ ID NO: 163549 - DNA, 50 bp, Artificial
  Synthetic oligonucleotide
aaaggtccgacccgctcccgtggtatgtcaacgggcattgggcaatggca

SEQ ID NO: 163550 - DNA, 50 bp, Artificial
  Synthetic oligonucleotide
aaccgcgggcctcgctcgtaagacaggccacctagaacaccactggctcg

SEQ ID NO: 163551 - DNA, 50 bp, Artificial
  Synthetic oligonucleotide
tagtgcccgtggtaaagaaactgtccgaagcctggagactgctaccgttg

SEQ ID NO: 163552 - DNA, 50 bp, Artificial
  Synthetic oligonucleotide
aaccgcgtccccgctaagggccgtggatgcaccaaacgtcgagctcactc

SEQ ID NO: 163553 - DNA, 50 bp, Artificial
  Synthetic oligonucleotide
aacggaccggagtccaaggatcatgacgactcgccagccctccaaccccg

SEQ ID NO: 163554 - DNA, 50 bp, Artificial
  Synthetic oligonucleotide
aacgcccgcgtaccacatagcaggtctcggcacgatcgtaacgccaggga

SEQ ID NO: 163555 - DNA, 50 bp, Artificial
  Synthetic oligonucleotide
tcgcggttttgatttaagatatcccgttctagggctttacgatcggcttc

SEQ ID NO: 163556 - DNA, 60 bp, Artificial
  Synthetic oligonucleotide
gacctgggctacacaaagtaaaggtcaactcctcattaaatgtagcagtcgtattcatgc

SEQ ID NO: 163557 - DNA, 50 bp, Artificial
  Synthetic oligonucleotide
aacgattcaggcgtggtgatcaaaacagccggcctgcgctgcttgtcgcg

SEQ ID NO: 163558 - DNA, 50 bp, Artificial
  Synthetic oligonucleotide
aacgatccgagaccgatccgacaaggcgaatcggccaatcgcaaggaccc

SEQ ID NO: 163559 - DNA, 50 bp, Artificial
  Synthetic oligonucleotide
aacgagcgcggcatgtcccttgcccgtcaaactgcgtctttgtgtcactc

SEQ ID NO: 163560 - DNA, 50 bp, Artificial
  Synthetic oligonucleotide
aaccgtctccatgcccaggggattcgggtggtggctatccttgacccggg

SEQ ID NO: 163561 - DNA, 50 bp, Artificial
  Synthetic oligonucleotide
aaccgtctttcgcgcagcagtcttgcttgttcggacgcccaagcgaccac

SEQ ID NO: 163562 - DNA, 50 bp, Artificial
  Synthetic oligonucleotide
aaaggtgtagcttcgccatagaagcaggcgcgtccccaggcgaccccggg

SEQ ID NO: 163563 - DNA, 50 bp, Artificial
  Synthetic oligonucleotide
aacctgtggcgttagttttcgggtccgaggtgcagagcacattcccccgg

SEQ ID NO: 163564 - DNA, 50 bp, Artificial
  Synthetic oligonucleotide
aacgaaccccagacgcaaggaacagatcccatgcgccgtctatccgccca

SEQ ID NO: 163565 - DNA, 50 bp, Artificial
  Synthetic oligonucleotide
aacgaacagcggtgatgtgccccttccctatgggcatccttcgcaggtcc

SEQ ID NO: 163566 - DNA, 50 bp, Artificial
  Synthetic oligonucleotide
aacaccccgctcgacgttcctacataaagaagcgcggcccagcctactgg

SEQ ID NO: 163567 - DNA, 60 bp, Artificial
  Synthetic oligonucleotide
tgataaccggataaggtcagcaatgcggtacagactgaggagcccatgaccgcccacggt

SEQ ID NO: 163568 - DNA, 50 bp, Artificial
  Synthetic oligonucleotide
aaaccatcgtgaagcagaagcgtcgcaccgacgagggcgcaacggtaagc

SEQ ID NO: 163569 - DNA, 50 bp, Artificial
  Synthetic oligonucleotide
aagcagggttcggagcagtctgacagtgcgggtttcgggcatcgtgacat

SEQ ID NO: 163570 - DNA, 50 bp, Artificial
  Synthetic oligonucleotide
aagagcctccaggtcgtgcgcttctacgacgcgccccgtcacacactggt

SEQ ID NO: 163571 - DNA, 50 bp, Artificial
  Synthetic oligonucleotide
aaaccgcaaagccacggggcacctcccgacgtttggtgctgcatcaccga

SEQ ID NO: 163572 - DNA, 50 bp, Artificial
  Synthetic oligonucleotide
aagacgagcgattcgcacagctgtctcaagagcatgagaccgcgccccca

SEQ ID NO: 163573 - DNA, 50 bp, Artificial
  Synthetic oligonucleotide
aacaccgccgttaccggttacgtcctgcgcatgcttgagccaggaaatgg

SEQ ID NO: 163574 - DNA, 50 bp, Artificial
  Synthetic oligonucleotide
aagaagcgcggcccagcctactggaacttcgcttcccgagccagcgactc

SEQ ID NO: 163575 - DNA, 50 bp, Artificial
  Synthetic oligonucleotide
aaccgcatgcctaaaccgcgccccctaagggccatgggtgcatcaaaggt

SEQ ID NO: 163576 - DNA, 50 bp, Artificial
  Synthetic oligonucleotide
aaaccgccaaactcccagcgagccgatacacgtcgccgcagccaagcagc

SEQ ID NO: 163577 - DNA, 50 bp, Artificial
  Synthetic oligonucleotide
aagaagccggtggtttgccttctagcgggcggctcgatgctgaaactgca

SEQ ID NO: 163578 - DNA, 60 bp, Artificial
  Synthetic oligonucleotide
caacgacggctcctgccaatcgcgcaaaaacatcctttagccactcatgcatgggcttcc

SEQ ID NO: 163579 - DNA, 50 bp, Artificial
  Synthetic oligonucleotide
aagaactcaaaggggcgcacacacgcaccttcaagagcggacgccacgat

SEQ ID NO: 163580 - DNA, 50 bp, Artificial
  Synthetic oligonucleotide
aactgttattgcgcatgcagtcgaaaccgccctgcgtaagcaccctcccg

SEQ ID NO: 163581 - DNA, 50 bp, Artificial
  Synthetic oligonucleotide
aactgggaacggcgcccctatcggctcatgcgcgcctacggacaatccaa

SEQ ID NO: 163582 - DNA, 50 bp, Artificial
  Synthetic oligonucleotide
aaccgcattgtgcattctccggccaaacgcttactctgcgagtggcccca

SEQ ID NO: 163583 - DNA, 50 bp, Artificial
  Synthetic oligonucleotide
aactgcggatgggtcgattgccccagttgtccgggagcttcgcgcgagat

SEQ ID NO: 163584 - DNA, 50 bp, Artificial
  Synthetic oligonucleotide
aactgcgactcaaccctccccaactcggtccccttgaggcccgcattaac

SEQ ID NO: 163585 - DNA, 50 bp, Artificial
  Synthetic oligonucleotide
aactgcgaccatcaccgcccctcagctcagcctgaacgtctggcgttaaa

SEQ ID NO: 163586 - DNA, 50 bp, Artificial
  Synthetic oligonucleotide
aacgtgccacggagctgcgggtcaaagcaccagagtagcaagagtccgag

SEQ ID NO: 163587 - DNA, 50 bp, Artificial
  Synthetic oligonucleotide
aaacggatggtcgacccagaagggcgttttcagtccgatctctcgcgccg

SEQ ID NO: 163588 - DNA, 50 bp, Artificial
  Synthetic oligonucleotide
aacgtccggtggttcggctgtccttgtcgacccggaagacagcgtcttgc

SEQ ID NO: 163589 - DNA, 57 bp, Artificial
  Synthetic oligonucleotide
cacccagcaaggggtactgattgagtccccggaactgtacgtctcccatgtggtgaa

SEQ ID NO: 163590 - DNA, 50 bp, Artificial
  Synthetic oligonucleotide
aacgtcaatgccaggagaagtcacggcgccaccgcgctacacaatgcagc

SEQ ID NO: 163591 - DNA, 50 bp, Artificial
  Synthetic oligonucleotide
aaactgcgcgtgccaatgtgctggggcgattcagtcgcgaggcgtcggcc

SEQ ID NO: 163592 - DNA, 50 bp, Artificial
  Synthetic oligonucleotide
aacggtaatcgagggcgatctccgagggtctctccatccagagggtccgc

SEQ ID NO: 163593 - DNA, 50 bp, Artificial
  Synthetic oligonucleotide
aaagactccgaatggtcggggctaagcgggaagggatccgcgcgcagtcc

SEQ ID NO: 163594 - DNA, 50 bp, Artificial
  Synthetic oligonucleotide
aaagaggtcgctcgggcttggctcgagggcggtggaataaccatgccgca

SEQ ID NO: 163595 - DNA, 50 bp, Artificial
  Synthetic oligonucleotide
aacggcggcccgttgatctcacctttggtgcaggccacatccgcgaggca

SEQ ID NO: 163596 - DNA, 50 bp, Artificial
  Synthetic oligonucleotide
cacgcaccgtcgcttcatggtctatcaccccgcttggggctatttcgccg

SEQ ID NO: 163597 - DNA, 50 bp, Artificial
  Synthetic oligonucleotide
caccgttgcgcaatgaccgccggattgcaacccccgcgagcctgtactat

SEQ ID NO: 163598 - DNA, 50 bp, Artificial
  Synthetic oligonucleotide
atttctcctcgccacacgcacatggacttgacaggctgcccgactctgga

SEQ ID NO: 163599 - DNA, 50 bp, Artificial
  Synthetic oligonucleotide
attgccaagcgatacctggccgtcacctgcaatggcaacatggccgttgc

SEQ ID NO: 163600 - DNA, 57 bp, Artificial
  Synthetic oligonucleotide
ctactggtttcgaacaccggaccacagcacgagggttatacctattgcgtcaagtgc

SEQ ID NO: 163601 - DNA, 50 bp, Artificial
  Synthetic oligonucleotide
atggccttttggccctcgttagcgcagcacccggcattttgtttgccagc

SEQ ID NO: 163602 - DNA, 50 bp, Artificial
  Synthetic oligonucleotide
atgctgccgatccgctgcgacacacccctgcaccaagaagcatagtcggg

SEQ ID NO: 163603 - DNA, 50 bp, Artificial
  Synthetic oligonucleotide
atgcgacccgaccccatgggcgaaacccttttcgtctccgacgttcatct

SEQ ID NO: 163604 - DNA, 50 bp, Artificial
  Synthetic oligonucleotide
atcgggtcgagggacgggtgactctacccaagcccagcgccgatcagtat

SEQ ID NO: 163605 - DNA, 50 bp, Artificial
  Synthetic oligonucleotide
atcgaaaccgtgatggttcgccccaatcgcttctaccgggggcgctgagc

SEQ ID NO: 163606 - DNA, 50 bp, Artificial
  Synthetic oligonucleotide
atccgtccacacacgcgccgtcacagagactgggtgcccgttcactcggg

SEQ ID NO: 163607 - DNA, 50 bp, Artificial
  Synthetic oligonucleotide
atcccggcaaaacgccaatctgccgcgcagcggagataacttcccccaac

SEQ ID NO: 163608 - DNA, 50 bp, Artificial
  Synthetic oligonucleotide
atccccgctcgtcgcccctctgtcctagacctgagagtttgcgcccggat

SEQ ID NO: 163609 - DNA, 50 bp, Artificial
  Synthetic oligonucleotide
atcacgtcacagtgacgcgaattcacccgcctcgattcccgtcacccgta

SEQ ID NO: 163610 - DNA, 50 bp, Artificial
  Synthetic oligonucleotide
atagggattcgtaacggacgtcgcattgcgttctctgtgcccgccgtggc

SEQ ID NO: 163611 - DNA, 55 bp, Artificial
  Synthetic oligonucleotide
aagcactttagccccttccgtcacggaaaggccaagcgggtccagacaatccagc

SEQ ID NO: 163612 - DNA, 60 bp, Artificial
  Synthetic oligonucleotide
cagatatgaaactcctggcctatggcgggggcataccctccgctcgagcgcccctcatct

SEQ ID NO: 163613 - DNA, 50 bp, Artificial
  Synthetic oligonucleotide
agtgcgttgatgacgcgttgatgtggaggccggcccctggagatcagagt

SEQ ID NO: 163614 - DNA, 50 bp, Artificial
  Synthetic oligonucleotide
agtgccggcagttgtggggtcagggtactggaccaaatctgctcgctctg

SEQ ID NO: 163615 - DNA, 50 bp, Artificial
  Synthetic oligonucleotide
agtgcaggacgcagttgtagtgacagagcccggttagcccagctaccggt

SEQ ID NO: 163616 - DNA, 50 bp, Artificial
  Synthetic oligonucleotide
agtcccacttcaaagcggctgggctgatagccggtactctggcgcgacag

SEQ ID NO: 163617 - DNA, 50 bp, Artificial
  Synthetic oligonucleotide
aggtttgagttggccagcaagacacgaggggcgtccgggtgagtcgggaa

SEQ ID NO: 163618 - DNA, 50 bp, Artificial
  Synthetic oligonucleotide
aggttcagaacacgcatcaggggcctcgctctgaggttccctcaagcacg

SEQ ID NO: 163619 - DNA, 50 bp, Artificial
  Synthetic oligonucleotide
aggtgggtcggttcggctgtcatcgttcgcgggcctattgggtcaggtgc

SEQ ID NO: 163620 - DNA, 50 bp, Artificial
  Synthetic oligonucleotide
aggtccgagatgagcggcctgagtcgtgttcgtcatgcacggctcctgga

SEQ ID NO: 163621 - DNA, 50 bp, Artificial
  Synthetic oligonucleotide
aggtccctgtctgccgcccgtagagcggacagcccttgcgcggtcaagta

SEQ ID NO: 163622 - DNA, 50 bp, Artificial
  Synthetic oligonucleotide
aggggctggcttttgcctgtccccgcgagtaaaacgtgagacttcagcgc

SEQ ID NO: 163623 - DNA, 53 bp, Artificial
  Synthetic oligonucleotide
cggagggtccgcgttagcggaaaccgctgtttttggcaccgccaagcaaagcg

SEQ ID NO: 163624 - DNA, 50 bp, Artificial
  Synthetic oligonucleotide
agggcgtcccatgaccgaccatcgaccgacagccctgagtcgacccgctc

SEQ ID NO: 163625 - DNA, 50 bp, Artificial
  Synthetic oligonucleotide
aggcgtcggattcgacccacgcaaactcggactcaaagcgaccaggaacc

SEQ ID NO: 163626 - DNA, 50 bp, Artificial
  Synthetic oligonucleotide
aggcgcgtggatgggcggttaggacgattgggatccaaccaaatgctggg

SEQ ID NO: 163627 - DNA, 50 bp, Artificial
  Synthetic oligonucleotide
aggcgccggccgaaagggtctgcaatcttgcccaatcgagtcgacgactg

SEQ ID NO: 163628 - DNA, 50 bp, Artificial
  Synthetic oligonucleotide
aggcgccggacaagcattttcccgccagtgtgtttcgcctcgacaacgcc

SEQ ID NO: 163629 - DNA, 50 bp, Artificial
  Synthetic oligonucleotide
aggccaggatagcatctacttcagccggagcatgacaacccgtggcagcc

SEQ ID NO: 163630 - DNA, 50 bp, Artificial
  Synthetic oligonucleotide
aggagtggagcccggcaaccgacctgttaactcaaggcgaacctgtcacc

SEQ ID NO: 163631 - DNA, 50 bp, Artificial
  Synthetic oligonucleotide
ccggtactctcatataacggggcggttcgtgaggggtacggggcaacccc

SEQ ID NO: 163632 - DNA, 50 bp, Artificial
  Synthetic oligonucleotide
ccggccattttgaatcaccctgaagtgggcatggaagcgcgtcgggtgca

SEQ ID NO: 163633 - DNA, 50 bp, Artificial
  Synthetic oligonucleotide
ccggataaccaatcctttgtacactggggccaagctgtcccgccatgccg

SEQ ID NO: 163634 - DNA, 60 bp, Artificial
  Synthetic oligonucleotide
ttagagaaaggagctctcggtacgatctgacacggagctgagcatcctccgtggtgagta

SEQ ID NO: 163635 - DNA, 50 bp, Artificial
  Synthetic oligonucleotide
ccgcgacaaagtgccccactggccttcgcctgttaaagctccggaagcgg

SEQ ID NO: 163636 - DNA, 50 bp, Artificial
  Synthetic oligonucleotide
cgacaaatgggcctttacaacggggtgactggcgatagatatagcgggct

SEQ ID NO: 163637 - DNA, 50 bp, Artificial
  Synthetic oligonucleotide
cgaccctcaccgccagttggattatttgagtcgggtgctgcgtagcggcg

SEQ ID NO: 163638 - DNA, 50 bp, Artificial
  Synthetic oligonucleotide
cgaggggattaagacgttgcagtaagctaggcagaactctgggttcagcg

SEQ ID NO: 163639 - DNA, 50 bp, Artificial
  Synthetic oligonucleotide
cccgcccagccgtgttaaactgcgacgccctgacggcatgacactgcatc

SEQ ID NO: 163640 - DNA, 50 bp, Artificial
  Synthetic oligonucleotide
cgcaaatcgcgccttcagtgccacaatggaccagttggctggccgtcgct

SEQ ID NO: 163641 - DNA, 50 bp, Artificial
  Synthetic oligonucleotide
cccctcatctaatcaaaatattcaggcacgttcagtcattttcccgccag

SEQ ID NO: 163642 - DNA, 50 bp, Artificial
  Synthetic oligonucleotide
ccccgtatcctctcccgcgagtgatgggctgggcgacaaccccaagccgt

SEQ ID NO: 163643 - DNA, 50 bp, Artificial
  Synthetic oligonucleotide
cgcctatggcttgccaggataacgggctgatatcgaaccaggcggggtcc

SEQ ID NO: 163644 - DNA, 50 bp, Artificial
  Synthetic oligonucleotide
cccagcgagccaatacagcagaccatcacggcatcagggggtagcagccg

SEQ ID NO: 163645 - DNA, 55 bp, Artificial
  Synthetic oligonucleotide
cgcgagaaacccgcaccgtgcagttgccggaaggcaggcggcgaaccgtaaactg

SEQ ID NO: 163646 - DNA, 50 bp, Artificial
  Synthetic oligonucleotide
cccagccgtctcttgcgtgggttgagcgtctctcgtttcgccatctgcta

SEQ ID NO: 163647 - DNA, 50 bp, Artificial
  Synthetic oligonucleotide
cccaacgtctgtaggcggtctgggggccaggcaacgtactttggtcgcat

SEQ ID NO: 163648 - DNA, 50 bp, Artificial
  Synthetic oligonucleotide
ccatcgcatccgggcgtatgccggtgataaagtttgctatggctgcgcct

SEQ ID NO: 163649 - DNA, 50 bp, Artificial
  Synthetic oligonucleotide
ccaggcaacacacctgatagcaggcactctcgccatgcccatgccactgc

SEQ ID NO: 163650 - DNA, 50 bp, Artificial
  Synthetic oligonucleotide
ccagaccaaacccactgcagccgccacccagaaccaatatggccgccttg

SEQ ID NO: 163651 - DNA, 50 bp, Artificial
  Synthetic oligonucleotide
ccacgcgtctctcgatgggctcacgcaccgtcgcttcatggtctatcacc

SEQ ID NO: 163652 - DNA, 50 bp, Artificial
  Synthetic oligonucleotide
catggcgatacttgtggtccatgcgacccgagcaacggcaacagctgcta

SEQ ID NO: 163653 - DNA, 50 bp, Artificial
  Synthetic oligonucleotide
catcctgctccctcccgcgggccgagaagactcctcgcccacatgaggct

SEQ ID NO: 163654 - DNA, 50 bp, Artificial
  Synthetic oligonucleotide
cgggctccagcatacagcctgataaatcccgcactgcagtgaccccggca

SEQ ID NO: 163655 - DNA, 50 bp, Artificial
  Synthetic oligonucleotide
catccgccgattcgcttccacgggctatcgtgaacggataccacggagcc

SEQ ID NO: 163656 - DNA, 58 bp, Artificial
  Synthetic oligonucleotide
ttcaattctaggggcatgaatacgactgctacatttaatgaggagttgacctttactt

SEQ ID NO: 163657 - DNA, 50 bp, Artificial
  Synthetic oligonucleotide
cgggggcaagccccgatagagatgtgtttggaattcaagacgggcgggta

SEQ ID NO: 163658 - DNA, 50 bp, Artificial
  Synthetic oligonucleotide
cgtatcgccggtgacaggccttgaaagcgaagtggcgactctgcgcctta

SEQ ID NO: 163659 - DNA, 50 bp, Artificial
  Synthetic oligonucleotide
catcccaatccggtgtatgcgacaggcgacggactctcctcgtacgcgca

SEQ ID NO: 163660 - DNA, 50 bp, Artificial
  Synthetic oligonucleotide
cactccgtccaacacgagccccttccaccggtcatgctggctttccgaca

SEQ ID NO: 163661 - DNA, 50 bp, Artificial
  Synthetic oligonucleotide
cacggctacagagctggaattagtgggcctgcctttggcccatcgcgata

SEQ ID NO: 163662 - DNA, 50 bp, Artificial
  Synthetic oligonucleotide
cacggaaaccctggctccatgaagcccgtaacgaccatgcatccgttggc

SEQ ID NO: 163663 - DNA, 50 bp, Artificial
  Synthetic oligonucleotide
acccctccaatagcggctcgggggtgataggtcccggttcggtcagtggg

SEQ ID NO: 163664 - DNA, 50 bp, Artificial
  Synthetic oligonucleotide
accccgctgaagcggcctctaagccccagtggcgactagtcagatcccta

SEQ ID NO: 163665 - DNA, 50 bp, Artificial
  Synthetic oligonucleotide
accccaagagatgttgcggttctctacctcgagtggcaccgtgcggtccg

SEQ ID NO: 163666 - DNA, 50 bp, Artificial
  Synthetic oligonucleotide
accccaaaccgccattaagctctctcctcgagggcttatgccccgcgacc

SEQ ID NO: 163667 - DNA, 59 bp, Artificial
  Synthetic oligonucleotide
ttcatcgatagttgtaagtgttacaacttattacgccaacaaacatccactgtcaagaa

SEQ ID NO: 163668 - DNA, 50 bp, Artificial
  Synthetic oligonucleotide
acccaacggcctccacgcccctagccgggctgaaacgacccgaaacggga

SEQ ID NO: 163669 - DNA, 50 bp, Artificial
  Synthetic oligonucleotide
accatgcgccggggttcgtcgagctgaaatcgagtcatacccgcaacagc

SEQ ID NO: 163670 - DNA, 50 bp, Artificial
  Synthetic oligonucleotide
accaggacaggtccgagatgagcggcctgagtcgtgttcgtcatgcacgg

SEQ ID NO: 163671 - DNA, 50 bp, Artificial
  Synthetic oligonucleotide
accagccaggtttgtgcaacaccgccgttaccggttacgtcctgcgcatg

SEQ ID NO: 163672 - DNA, 50 bp, Artificial
  Synthetic oligonucleotide
accaaccggggcctattgaaggcacgggcccttgtggtgtgtgcgggcgg

SEQ ID NO: 163673 - DNA, 50 bp, Artificial
  Synthetic oligonucleotide
acattcggcgcggttggctaggttgtttatggggacgccgggtctgcgag

SEQ ID NO: 163674 - DNA, 50 bp, Artificial
  Synthetic oligonucleotide
acatgatggtgatacgggttttgccgggggattcgatggctgggcctcgc

SEQ ID NO: 163675 - DNA, 50 bp, Artificial
  Synthetic oligonucleotide
acatcgcccggagtccacggaggagggcagtacgccacaggtggaggatg

SEQ ID NO: 163676 - DNA, 50 bp, Artificial
  Synthetic oligonucleotide
acataaacctgcgtaccgtgccatagcgctacgtaaatctcagacactga

SEQ ID NO: 163677 - DNA, 50 bp, Artificial
  Synthetic oligonucleotide
acaggccctccccgaagggacgatgccgccccctacgtgcaccgaggaac

SEQ ID NO: 163678 - DNA, 57 bp, Artificial
  Synthetic oligonucleotide
cccggaccgcagaacctgaccaggcacccggcgccgagtagcggcctgacggagcac

SEQ ID NO: 163679 - DNA, 50 bp, Artificial
  Synthetic oligonucleotide
gctggctattctctcgactaccatggccaataaatggcgggttcccgcat

SEQ ID NO: 163680 - DNA, 50 bp, Artificial
  Synthetic oligonucleotide
acaggatcccggatgccgccagtacttgcgggagcagcagatacccttct

SEQ ID NO: 163681 - DNA, 50 bp, Artificial
  Synthetic oligonucleotide
acagccgtgttcaggtgatcgagaatcgtccgctctagggccggcttcgg

SEQ ID NO: 163682 - DNA, 50 bp, Artificial
  Synthetic oligonucleotide
acagccgcgcgctagagatggcgtccgaacactcaagagagccgcgttcc

SEQ ID NO: 163683 - DNA, 50 bp, Artificial
  Synthetic oligonucleotide
acagaaaggctcgctgcaccagccggttatagcgtatgggctggcggtct

SEQ ID NO: 163684 - DNA, 50 bp, Artificial
  Synthetic oligonucleotide
acacttcgcaatcgaaagcctcatctgggggtgtccctaggccggtcggg

SEQ ID NO: 163685 - DNA, 50 bp, Artificial
  Synthetic oligonucleotide
acactgtcaaatcgctaccccgccgactcagggtcatacggcccggcgtc

SEQ ID NO: 163686 - DNA, 50 bp, Artificial
  Synthetic oligonucleotide
acactgcatagcgcagggacacgcggcatcttcacacggattcgcctcgt

SEQ ID NO: 163687 - DNA, 50 bp, Artificial
  Synthetic oligonucleotide
acacgggccagtaaaccgcaggtaaaggactcttccggggccacagcacg

SEQ ID NO: 163688 - DNA, 50 bp, Artificial
  Synthetic oligonucleotide
acacccgtactgcagcgccggattcggaccacccaaattgtggtgcacgt

SEQ ID NO: 163689 - DNA, 60 bp, Artificial
  Synthetic oligonucleotide
ttcgctgggttcttcgtcataacggtgagcgcgtaaccatccgactaatcgatgacagtg

SEQ ID NO: 163690 - DNA, 50 bp, Artificial
  Synthetic oligonucleotide
acaaggcgtgttgccaccatagcgctgtgtatccggcccaggcgtgggaa

SEQ ID NO: 163691 - DNA, 50 bp, Artificial
  Synthetic oligonucleotide
acaaggccatcagttgttgctcggccctatccactatggcgtgagcggcc

SEQ ID NO: 163692 - DNA, 50 bp, Artificial
  Synthetic oligonucleotide
aattggtcgggatcgacgcactcccgaaccgctgtatgttgctcggggcc

SEQ ID NO: 163693 - DNA, 50 bp, Artificial
  Synthetic oligonucleotide
aattgcggcgccatattctggagcggcttaccgcagccgaagggctagag

SEQ ID NO: 163694 - DNA, 50 bp, Artificial
  Synthetic oligonucleotide
aatgggtccgaaccgacttggagcccggatcggtctatcaaccacccgga

SEQ ID NO: 163695 - DNA, 50 bp, Artificial
  Synthetic oligonucleotide
aatggggatccgctctccgcacgcacagttcatgtgccccaaaacaggcc

SEQ ID NO: 163696 - DNA, 50 bp, Artificial
  Synthetic oligonucleotide
agctcgacaacagccgtcctcctacacgcagtgcccgctgactttctgcc

SEQ ID NO: 163697 - DNA, 50 bp, Artificial
  Synthetic oligonucleotide
agctatggcccgtgtctgtgatggcgccgagaaacaccctcgagtgcaaa

SEQ ID NO: 163698 - DNA, 50 bp, Artificial
  Synthetic oligonucleotide
agcggaagttggacgcgagtcgaaaaataccgtcggacgacgaccggcaa

SEQ ID NO: 163699 - DNA, 50 bp, Artificial
  Synthetic oligonucleotide
agcgctatactccccatcccagctactgatggccaaaacggggccgcact

SEQ ID NO: 163700 - DNA, 57 bp, Artificial
  Synthetic oligonucleotide
cccttgtagcgcctagccccttaaaacgtctctacaagctccctgtgcgctctgagg

SEQ ID NO: 163701 - DNA, 50 bp, Artificial
  Synthetic oligonucleotide
agcgatcactctcaatcctgtcaccggccattgcccggggtgcgattcga

SEQ ID NO: 163702 - DNA, 50 bp, Artificial
  Synthetic oligonucleotide
gacgcatcataagatgctttcagatccgtagagacgcatgcgagaccgtg

SEQ ID NO: 163703 - DNA, 50 bp, Artificial
  Synthetic oligonucleotide
agcctgtaacccgaccctgatgccaaggcggatggggctacccgatctat

SEQ ID NO: 163704 - DNA, 50 bp, Artificial
  Synthetic oligonucleotide
agccgcctccacctgtgcaagtccggatctggcctcggagaattaccgat

SEQ ID NO: 163705 - DNA, 50 bp, Artificial
  Synthetic oligonucleotide
agccgccgtctgcatctcagcaatcgttgccagtcctgtgaacggacgcc

SEQ ID NO: 163706 - DNA, 50 bp, Artificial
  Synthetic oligonucleotide
agcagaaaaggccggtccgctcaaacactgggtcagccggtatgctgtgg

SEQ ID NO: 163707 - DNA, 50 bp, Artificial
  Synthetic oligonucleotide
agcacccggacaccccaaccccgtagcataggagagctcagttgcggctc

SEQ ID NO: 163708 - DNA, 50 bp, Artificial
  Synthetic oligonucleotide
agatcgccgatttagcaggtttgcctgggcgagcccgcttggtgggtaaa

SEQ ID NO: 163709 - DNA, 50 bp, Artificial
  Synthetic oligonucleotide
agatcctgtacacctgggcgagccccgttcactacagcattcgcgccggg

SEQ ID NO: 163710 - DNA, 50 bp, Artificial
  Synthetic oligonucleotide
agagggtcgtcccggtcctctccgtgaaccactcggatgtctgcgccaac

SEQ ID NO: 163711 - DNA, 56 bp, Artificial
  Synthetic oligonucleotide
ccttgaagccgttccgggtcaggggccttgtggtgagcaaaatatgggcgtgaatg

SEQ ID NO: 163712 - DNA, 50 bp, Artificial
  Synthetic oligonucleotide
agagacagcccaggtgtccgatgcttcccagtgcccgccccttgtagctc

SEQ ID NO: 163713 - DNA, 50 bp, Artificial
  Synthetic oligonucleotide
actcggacttcgctcgtgatcggggcagggacgccctagacggcaccgga

SEQ ID NO: 163714 - DNA, 50 bp, Artificial
  Synthetic oligonucleotide
acgttggcccatgatcgactccaggactgtgcgccacgccatgtctggcg

SEQ ID NO: 163715 - DNA, 50 bp, Artificial
  Synthetic oligonucleotide
acgtgccggcaacggaaccaggggtgaatagagcgccttgtcgagtccct

SEQ ID NO: 163716 - DNA, 50 bp, Artificial
  Synthetic oligonucleotide
acgtccagtcatcggggctttgatagactgcgcggatgtgcggtcgtgcg

SEQ ID NO: 163717 - DNA, 50 bp, Artificial
  Synthetic oligonucleotide
acgggcggactcggacttcgctcgtgatcggggcagggacgccctagacg

SEQ ID NO: 163718 - DNA, 50 bp, Artificial
  Synthetic oligonucleotide
gcagtcgcacggttgtgaccaaagcgttatcctgtggcgctgactcagcg

SEQ ID NO: 163719 - DNA, 50 bp, Artificial
  Synthetic oligonucleotide
acggagcctgttgcgatgcaacaagcggaacggttgaaccgcacaacgcc

SEQ ID NO: 163720 - DNA, 50 bp, Artificial
  Synthetic oligonucleotide
acgcgagcccgtcaatcggtggattctgcgcatgatccagagcccggaat

SEQ ID NO: 163721 - DNA, 50 bp, Artificial
  Synthetic oligonucleotide
acgacgctaggtccagcaactacgccaccgttgtccagcccaacctggtg

SEQ ID NO: 163722 - DNA, 57 bp, Artificial
  Synthetic oligonucleotide
aagattgccttacaaggcagccttaatgctggcggtacccttcggatagactccacc

SEQ ID NO: 163723 - DNA, 56 bp, Artificial
  Synthetic oligonucleotide
ccgctacccttgtagcgcctagccccttaaaacgtctctacaagctccctgtgcgc

SEQ ID NO: 163724 - DNA, 50 bp, Artificial
  Synthetic oligonucleotide
accgtgaacatagtggagcgaggccgtgcgatagtcgggccagtcccaac

SEQ ID NO: 163725 - DNA, 50 bp, Artificial
  Synthetic oligonucleotide
accgggtccaggtccctgtctgccgcccgtagagcggacagcccttgcgc

SEQ ID NO: 163726 - DNA, 50 bp, Artificial
  Synthetic oligonucleotide
accgccggattgcaacccccgcgagcctgtactatccggttcaggacacg

SEQ ID NO: 163727 - DNA, 50 bp, Artificial
  Synthetic oligonucleotide
acccgggtacgatcagctgcctccaccatagtgacactgcgcgtcatccc

SEQ ID NO: 163728 - DNA, 50 bp, Artificial
  Synthetic oligonucleotide
acccggaagactgcgctcggcgcctagcccgaatggtaggggcggatagc

SEQ ID NO: 163729 - DNA, 50 bp, Artificial
  Synthetic oligonucleotide
acccctccccggagtttcgacccagtaggcctgggtgctagaagggacta

SEQ ID NO: 163730 - DNA, 58 bp, Artificial
  Synthetic oligonucleotide
tttcatacgtgccctcaatcacctccctaaccacatcgccggtatgccgccgcttaac

SEQ ID NO: 163731 - DNA, 60 bp, Artificial
  Synthetic oligonucleotide
cctcccgcgcccgatcagagagacgcggatcgtcagtgacccaccacagaaaggcatggg

SEQ ID NO: 163732 - DNA, 60 bp, Artificial
  Synthetic oligonucleotide
tttcgcttcagtagcacattgagtctgcgaatagacagtctcacccgttataggatcggc

SEQ ID NO: 163733 - DNA, 54 bp, Artificial
  Synthetic oligonucleotide
aaaagttcggcactgagacccgaattgaggggattaagaccgggattgagcgct

SEQ ID NO: 163734 - DNA, 59 bp, Artificial
  Synthetic oligonucleotide
tttgccttccatcagcccgcactggcaaaaccggggcttttgcgattgggtagcattga

SEQ ID NO: 163735 - DNA, 54 bp, Artificial
  Synthetic oligonucleotide
agtattcggggcttggctacagggcagggaaggggacgatttcgtgttcgccaa

SEQ ID NO: 163736 - DNA, 54 bp, Artificial
  Synthetic oligonucleotide
attgagtccccggaactgtacgtctcccatgtggtgaaacaaggcggcggtaac

SEQ ID NO: 163737 - DNA, 60 bp, Artificial
  Synthetic oligonucleotide
tcctgtgcagcactttcgagctcataccatccgtaccaatcccgggcctctaggaaatcg

SEQ ID NO: 163738 - DNA, 52 bp, Artificial
  Synthetic oligonucleotide
ataactcataggggttgcgtgtcgttccgttaagggtttcccttatctgtta

SEQ ID NO: 163739 - DNA, 60 bp, Artificial
  Synthetic oligonucleotide
aagattcaaggcggcgctgcaaggcgggatcgtatgtgtccatgggcttatcctttctgc

SEQ ID NO: 163740 - DNA, 60 bp, Artificial
  Synthetic oligonucleotide
tctattactttcgagcttctgccagtagagttcgtaactttgctcaatgtggccgcggta

SEQ ID NO: 163741 - DNA, 60 bp, Artificial
  Synthetic oligonucleotide
ctctgcgtagcttcgcatattcttcccgcacttcgagcacacaagtttacgatccatggt

SEQ ID NO: 163742 - DNA, 54 bp, Artificial
  Synthetic oligonucleotide
tcgcctgggggttaccgccgccttgtttcaccacatgggagacgtacagttccg

SEQ ID NO: 163743 - DNA, 54 bp, Artificial
  Synthetic oligonucleotide
atccgatcctaactgatacccgtagggaatcccgcccacacgttcaccacgaac

SEQ ID NO: 163744 - DNA, 60 bp, Artificial
  Synthetic oligonucleotide
tccgaggcaggtcggctgttgggcgccagatcactacccgagcagtcaagtcggtagacg

SEQ ID NO: 163745 - DNA, 54 bp, Artificial
  Synthetic oligonucleotide
atcccgattttaaaatgataaatcgccaccagcctttaactctattcgcggccc

SEQ ID NO: 163746 - DNA, 60 bp, Artificial
  Synthetic oligonucleotide
atagtgtacctcagacgtagtgggatggaagctttggctggatcaccctgtcagttggac

SEQ ID NO: 163747 - DNA, 58 bp, Artificial
  Synthetic oligonucleotide
attattccatatagggcgtcctattgcggtggagtctatccgaagggtaccgccagca

SEQ ID NO: 163748 - DNA, 56 bp, Artificial
  Synthetic oligonucleotide
ctatctgtaaagcgtcaatagccgcttgtcaaacaaaaacggttgtaatggcgtcc

SEQ ID NO: 163749 - DNA, 58 bp, Artificial
  Synthetic oligonucleotide
tcgagcgtgggcttatcgtccgaaccggacgcatccaaactccaaaagcatgggtgac

SEQ ID NO: 163750 - DNA, 60 bp, Artificial
  Synthetic oligonucleotide
cttttccgaaacatggtgcttatccattaacatcgatgagcctggggagccttgattgca

SEQ ID NO: 163751 - DNA, 54 bp, Artificial
  Synthetic oligonucleotide
taatgccccgttaccgggtgtactttctggtatgcctgccgtcactgtaccggg

SEQ ID NO: 163752 - DNA, 56 bp, Artificial
  Synthetic oligonucleotide
cagacgtgtgcggccgttcttttggacgaaaagccagccgacgtatcgagttgtcg

SEQ ID NO: 163753 - DNA, 58 bp, Artificial
  Synthetic oligonucleotide
ggagatatcgattggggcatcctttaagagcaccgaccttactactcacggcttcgag

SEQ ID NO: 163754 - DNA, 59 bp, Artificial
  Synthetic oligonucleotide
gactaccttccgggattcgtgaccttgcagcatcagggactcctgatcgcacgccagtc

SEQ ID NO: 163755 - DNA, 57 bp, Artificial
  Synthetic oligonucleotide
gtagcgcttggatctcccgacgctcgtttccgaaactagtgaagaccaatccgctcc

SEQ ID NO: 163756 - DNA, 59 bp, Artificial
  Synthetic oligonucleotide
gtatgacacactccgcgatccttgacgcatctcatactgaatgcgatagcttgtaggcg

SEQ ID NO: 163757 - DNA, 59 bp, Artificial
  Synthetic oligonucleotide
ctaggcgcgtaaattcggtaataaactcatcgtcggtcattgctcctggcctctgtgca

SEQ ID NO: 163758 - DNA, 59 bp, Artificial
  Synthetic oligonucleotide
caatgtatcggctactgcgctaccagacgctggtaggtatccgatcatgatagctatcg

SEQ ID NO: 163759 - DNA, 58 bp, Artificial
  Synthetic oligonucleotide
agatacaatgtctcgctgcgattgaacgactattatttgtcgatgctgcgctacatat

SEQ ID NO: 163760 - DNA, 58 bp, Artificial
  Synthetic oligonucleotide
ctactgccatctgtaagaaagccgcttggacagctagttcccgtttttggaatgactc

SEQ ID NO: 163761 - DNA, 60 bp, Artificial
  Synthetic oligonucleotide
gtggagattgggcgccgactgaaccgatcaatcggagctcgtatccgcacgagacgcaag

SEQ ID NO: 163762 - DNA, 57 bp, Artificial
  Synthetic oligonucleotide
ttaacgaaggcgtgtccaattttgtcagttcgccttcgtacaagagtgtcgagaaca

SEQ ID NO: 163763 - DNA, 58 bp, Artificial
  Synthetic oligonucleotide
gtcattatggctgcgcgagaatagcgatttagcgcttggatttggacgatgcatctgg

SEQ ID NO: 163764 - DNA, 57 bp, Artificial
  Synthetic oligonucleotide
actccgcctgcgttggtgcgtaagaatcgttctggcgaggtgcttagcacggcccct

SEQ ID NO: 163765 - DNA, 56 bp, Artificial
  Synthetic oligonucleotide
ttagaaagccgttaccgctattctgcaactatcgtctacaacaccttcccttggcc

SEQ ID NO: 163766 - DNA, 56 bp, Artificial
  Synthetic oligonucleotide
gacccgtcacacgtacatcccggactcttaaagcgagtgcttcgctaatacgtaac

SEQ ID NO: 163767 - DNA, 58 bp, Artificial
  Synthetic oligonucleotide
agcgtgcaaggcagaacacaatactatcccgctgtttagaaggaatttactcctattg

SEQ ID NO: 163768 - DNA, 58 bp, Artificial
  Synthetic oligonucleotide
aggatgactttccactccgcctgcgttggtgcgtaagaatcgttctggcgaggtgctt

SEQ ID NO: 163769 - DNA, 57 bp, Artificial
  Synthetic oligonucleotide
ctgtgctcaacgctaggtggctaggaatcctccccttaattctgttggggtgtgccg

SEQ ID NO: 163770 - DNA, 57 bp, Artificial
  Synthetic oligonucleotide
ggtaacactctggatctagctgagaggctttatgtatctagctcgatctctgtcttg

SEQ ID NO: 163771 - DNA, 56 bp, Artificial
  Synthetic oligonucleotide
cgttggtgcgtaagaatcgttctggcgaggtgcttagcacggccccttcggggata

SEQ ID NO: 163772 - DNA, 55 bp, Artificial
  Synthetic oligonucleotide
cgactccagtccttggggtcgatacattgcgagtgcgtgtctgcgtggcaaagga

SEQ ID NO: 163773 - DNA, 55 bp, Artificial
  Synthetic oligonucleotide
gataggcatactccacttccagacgcgccataatcaggcgaaaccgggaagggtc

SEQ ID NO: 163774 - DNA, 55 bp, Artificial
  Synthetic oligonucleotide
gccgcccagttttgcgactgttcagagtgcatgggtactccttaatggatattcg

SEQ ID NO: 163775 - DNA, 55 bp, Artificial
  Synthetic oligonucleotide
gcctatggtatgttgcacgcgacctgtagggaagatcccctgcggcgcaagactc

SEQ ID NO: 163776 - DNA, 55 bp, Artificial
  Synthetic oligonucleotide
gctcggctgagcgtatatagaatcttgacaacagtacccttttctgggagcatgc

SEQ ID NO: 163777 - DNA, 55 bp, Artificial
  Synthetic oligonucleotide
aatacgacgaagctcactccaggtggcacaatttacatattcgtagcacgatcgt

SEQ ID NO: 163778 - DNA, 55 bp, Artificial
  Synthetic oligonucleotide
ggcttgaccggcttccgtgatggtcattctgcgattcttacgccagaacagtggc

SEQ ID NO: 163779 - DNA, 55 bp, Artificial
  Synthetic oligonucleotide
gtatatggccagcagaactccattatcgtgaactgggaaaactgacgaggaggag

SEQ ID NO: 163780 - DNA, 55 bp, Artificial
  Synthetic oligonucleotide
cctgggttttcgctctcaatgggcctgacctcactttcccagccggacgcggaag

SEQ ID NO: 163781 - DNA, 55 bp, Artificial
  Synthetic oligonucleotide
tccggcaaagatcggatagcgggattttcgacaatgttcactaaatcgtccagat

SEQ ID NO: 163782 - DNA, 52 bp, Artificial
  Synthetic oligonucleotide
ccgtgccctattgtactggaagtgtaacgggaaatgaaccggacagaaactt

SEQ ID NO: 163783 - DNA, 55 bp, Artificial
  Synthetic oligonucleotide
cgtacgcaaatagcccttgaatccgctctcctcaatacgctccagaagttgcttc

SEQ ID NO: 163784 - DNA, 55 bp, Artificial
  Synthetic oligonucleotide
cccggcaagagccgtattattctgcacaggcaagcgtaaagaaggagtgcacacg

SEQ ID NO: 163785 - DNA, 55 bp, Artificial
  Synthetic oligonucleotide
aaaggaagtcctggtgattatgaaagttgcgggcgaactcagtgtaccttggctc

SEQ ID NO: 163786 - DNA, 55 bp, Artificial
  Synthetic oligonucleotide
cacgagaactaccagtacgcctttatctctggtcccaacaccgggtatctctggt

SEQ ID NO: 163787 - DNA, 55 bp, Artificial
  Synthetic oligonucleotide
caaataccccagagagcaacaatagcagaggttccgtatatccggcaagggttcg

SEQ ID NO: 163788 - DNA, 54 bp, Artificial
  Synthetic oligonucleotide
tgttcaccgtgtcggacatgtgggcaatcaggcggttgcaggattccacgtgtt

SEQ ID NO: 163789 - DNA, 53 bp, Artificial
  Synthetic oligonucleotide
tgataggcatcacccaggagaaaagtggcttcctccaccagaggtgattccgg

SEQ ID NO: 163790 - DNA, 53 bp, Artificial
  Synthetic oligonucleotide
attcacgggcaggactcgcgggtgcagtacaactttgatcgatacaatcccgt

SEQ ID NO: 163791 - DNA, 51 bp, Artificial
  Synthetic oligonucleotide
tctcagcctggacgcaagcggagcaaattaacggcgagacaagtctcctgg

SEQ ID NO: 163792 - DNA, 51 bp, Artificial
  Synthetic oligonucleotide
tggcgcatgctttccacctgggattgccagaatgcagggtcaacgaaattg

SEQ ID NO: 163793 - DNA, 50 bp, Artificial
  Synthetic oligonucleotide
agggtgtcaggggctttcccagtgagttctccgccaggggaaccgcagaa

SEQ ID NO: 163794 - DNA, 55 bp, Artificial
  Synthetic oligonucleotide
ctaccattgattacgtcttacacaggagaagaatatgaccgcgatcacagcgagc

SEQ ID NO: 163795 - DNA, 50 bp, Artificial
  Synthetic oligonucleotide
aggggctttcccagtgagttctccgccaggggaaccgcagaactgtctcc

SEQ ID NO: 163796 - DNA, 50 bp, Artificial
  Synthetic oligonucleotide
agtgtactgctccacggtcgcgggctggggattgacgattaccagaccct

SEQ ID NO: 163797 - DNA, 50 bp, Artificial
  Synthetic oligonucleotide
ctctggtggatggtattgcggctgtggtaaacggagtacccattacgatt

SEQ ID NO: 163798 - DNA, 50 bp, Artificial
  Synthetic oligonucleotide
tcattcgcctcctggataatttcgatctgccgcctcgcgatatactcctt

SEQ ID NO: 163799 - DNA, 50 bp, Artificial
  Synthetic oligonucleotide
aaagcttccagcgcgtaggagctacaggtgggcgtaaaccggcacgaagg

SEQ ID NO: 163800 - DNA, 50 bp, Artificial
  Synthetic oligonucleotide
aaccagtgcagccccatgccggcttcactccccgtatacccttctccggg

SEQ ID NO: 163801 - DNA, 50 bp, Artificial
  Synthetic oligonucleotide
aacctgcactatcgctctgggtgtgggaagtcacctgctgtgcaagcgga

SEQ ID NO: 163802 - DNA, 50 bp, Artificial
  Synthetic oligonucleotide
aacggtgctggcggtttgccaggggagtggcgaagagatgaagtacgggg

SEQ ID NO: 163803 - DNA, 50 bp, Artificial
  Synthetic oligonucleotide
aacgtacggggagtacgttgcaattctcgctctgtgggcgccttgcacct

SEQ ID NO: 163804 - DNA, 50 bp, Artificial
  Synthetic oligonucleotide
aactgacacgcactcgggtcggtcgtgtacccaacagtccaaacaggccc

SEQ ID NO: 163805 - DNA, 55 bp, Artificial
  Synthetic oligonucleotide
actggtagtcaccgtaaacttccacggtattattgtgatcgtagtacgcgtctgc

SEQ ID NO: 163806 - DNA, 50 bp, Artificial
  Synthetic oligonucleotide
aagggttccagaatcgcgcgggttgtctcccgattacgctgccagtgcga

SEQ ID NO: 163807 - DNA, 50 bp, Artificial
  Synthetic oligonucleotide
acatctgccggtgatgcactcttcaggggaggtttcaggccagcgggata

SEQ ID NO: 163808 - DNA, 50 bp, Artificial
  Synthetic oligonucleotide
acatggtgcgtcccaggctggcaccccggtgggagatgagttccggcata

SEQ ID NO: 163809 - DNA, 50 bp, Artificial
  Synthetic oligonucleotide
acccaaaaagacctgtctctggcttacagccccggcgttgcccgcccttg

SEQ ID NO: 163810 - DNA, 50 bp, Artificial
  Synthetic oligonucleotide
acccgaaccagggaagcgtgctggtgaaccgccgtaatgtgccggatctg

SEQ ID NO: 163811 - DNA, 50 bp, Artificial
  Synthetic oligonucleotide
accgcgaatgggggagatatcacgcaaagaccgtggggaggggaaaccgg

SEQ ID NO: 163812 - DNA, 50 bp, Artificial
  Synthetic oligonucleotide
accgtttgcacccctttgggcagtggttccgacagctctgggccgaaagt

SEQ ID NO: 163813 - DNA, 50 bp, Artificial
  Synthetic oligonucleotide
acgcacaacgggaagcagcgagtaagacgcgagggctggtgcctcgtcaa

SEQ ID NO: 163814 - DNA, 50 bp, Artificial
  Synthetic oligonucleotide
actggccttttacaccgaagtgcgccccaagcgtgaaggagcttcccgct

SEQ ID NO: 163815 - DNA, 50 bp, Artificial
  Synthetic oligonucleotide
agaacgcattgggttacctcccgacggtaactgctgtggggtggctgcga

SEQ ID NO: 163816 - DNA, 55 bp, Artificial
  Synthetic oligonucleotide
ctcggtgagtgctccagtacatgaggagccattttgataggtctcgtgagagttt

SEQ ID NO: 163817 - DNA, 50 bp, Artificial
  Synthetic oligonucleotide
agccaccccctcatttcagcagttcatcagagcagacgccgacaacccgc

SEQ ID NO: 163818 - DNA, 50 bp, Artificial
  Synthetic oligonucleotide
agccacggacgaaagtgagcgtctctgggaggaatgctggtgcgactgcc

SEQ ID NO: 163819 - DNA, 50 bp, Artificial
  Synthetic oligonucleotide
agccgacgcatatacccgccctcctgactgaaaggcacgaacacttcgcc

SEQ ID NO: 163820 - DNA, 50 bp, Artificial
  Synthetic oligonucleotide
agccggatccctggacccatggtgcttgaaagggtgatcccgcgaacata

SEQ ID NO: 163821 - DNA, 50 bp, Artificial
  Synthetic oligonucleotide
agccggcggcaccaatatgcagcacgcgccctacgtattcaggctcatcg

SEQ ID NO: 163822 - DNA, 50 bp, Artificial
  Synthetic oligonucleotide
agcctccggagggttgctgacggaaagaggggatagcgaaaaccggtgtg

SEQ ID NO: 163823 - DNA, 50 bp, Artificial
  Synthetic oligonucleotide
agcctttcagcgggcttcccgtggagtgaatgggccacggacataaccag

SEQ ID NO: 163824 - DNA, 50 bp, Artificial
  Synthetic oligonucleotide
agcgagcccggatggtgagcggcagagacgtaggtcctcggacgaaagtg

SEQ ID NO: 163825 - DNA, 50 bp, Artificial
  Synthetic oligonucleotide
agcggaccataccccgccaccagtatgagcacccggaactctggcgaacc

SEQ ID NO: 163826 - DNA, 50 bp, Artificial
  Synthetic oligonucleotide
agcgtggcggccccatgggaaaagcgatactccatgcgtgccatatccag

SEQ ID NO: 163827 - DNA, 55 bp, Artificial
  Synthetic oligonucleotide
actcccgggtattttacacagtgtgccgacgcagtggctcgtagaaaacattacg

SEQ ID NO: 163828 - DNA, 50 bp, Artificial
  Synthetic oligonucleotide
aggaaccagcgggaatttgccgtcagcggggaagtgctcttcctgcttgt

SEQ ID NO: 163829 - DNA, 50 bp, Artificial
  Synthetic oligonucleotide
aggcggcgagcacatgccttatggcacacctggagagcagggtattcacg

SEQ ID NO: 163830 - DNA, 55 bp, Artificial
  Synthetic oligonucleotide
cgaaagcgagtgtctccgtgaggaatgcgggcgcgaatgctgctacaacgtgaag

SEQ ID NO: 163831 - DNA, 55 bp, Artificial
  Synthetic oligonucleotide
ctgaaataccataaaacacgcagcctgttaacggttgtgaaatgtagcggcatgg

SEQ ID NO: 163832 - DNA, 55 bp, Artificial
  Synthetic oligonucleotide
ctttcactcctaccgctacgtacgcgatcacctggttatccgcatgaactcgccc

SEQ ID NO: 163833 - DNA, 60 bp, Artificial
  Synthetic oligonucleotide
gtctgaccacctcttaggctacctacaactgagctacttgtgcttggtgattgtctaact

SEQ ID NO: 163834 - DNA, 60 bp, Artificial
  Synthetic oligonucleotide
ctgcaggtatacagcaggttcaagtgacaggaggagaagcgttaacgcatcctgaattgg

SEQ ID NO: 163835 - DNA, 56 bp, Artificial
  Synthetic oligonucleotide
tactatctagtttatacttactaaaaccatctgtgctaaaccttacagtatacaac

SEQ ID NO: 163836 - DNA, 55 bp, Artificial
  Synthetic oligonucleotide
tttcctcatctatagctcttgctagatcatagtctacaactattggtccccttcc

SEQ ID NO: 163837 - DNA, 53 bp, Artificial
  Synthetic oligonucleotide
tttccatccttaggtaagtctattggttaacaaggtatcgttgtaaccttggc

SEQ ID NO: 163838 - DNA, 55 bp, Artificial
  Synthetic oligonucleotide
tttcacgacgaagatttccggaatacagtcctatgtgtcaaccggatggtctcac

SEQ ID NO: 163839 - DNA, 55 bp, Artificial
  Synthetic oligonucleotide
tttatggagtggctcctaaaagttcgattgcaatggttaaatctactagagggca

SEQ ID NO: 163840 - DNA, 55 bp, Artificial
  Synthetic oligonucleotide
tttagaacgtttgtcaatccattaactgctgttgctgtatctgtaaaaccgccct

SEQ ID NO: 163841 - DNA, 55 bp, Artificial
  Synthetic oligonucleotide
tttacaacacatcagaggcaacgggttcagttactggtagctttacaggtcaagt

SEQ ID NO: 163842 - DNA, 55 bp, Artificial
  Synthetic oligonucleotide
ttagttgttgagtcagtaatgcgcccagcgactatagcaagacttgatgatgtac

SEQ ID NO: 163843 - DNA, 55 bp, Artificial
  Synthetic oligonucleotide
ttattatcgttgcagaggccattacaacatgggcaaatagacatggtgatttagc

SEQ ID NO: 163844 - DNA, 55 bp, Artificial
  Synthetic oligonucleotide
ttcacgatggacctggtatcagaacaatcgtcttcctaaaaggttgtccgctgag

SEQ ID NO: 163845 - DNA, 55 bp, Artificial
  Synthetic oligonucleotide
ttcagactccaattccacccaaacaggatagacaatatgacacgcacctcctaga

SEQ ID NO: 163846 - DNA, 60 bp, Artificial
  Synthetic oligonucleotide
tactcacggagcaataggagcaaccactaaccttgcgccagctcttaccctaggatgcgg

SEQ ID NO: 163847 - DNA, 51 bp, Artificial
  Synthetic oligonucleotide
ttccggaagccacaagccggtgcaaaccgttccctccggaagtacggtccg

SEQ ID NO: 163848 - DNA, 55 bp, Artificial
  Synthetic oligonucleotide
ttcggttcacgagaacttatcaataagccactttgaccgttcacgggaacaagtc

SEQ ID NO: 163849 - DNA, 55 bp, Artificial
  Synthetic oligonucleotide
ttctatgtgtataggggtaatagttgctaaatggggacctgtagcgattgcagta

SEQ ID NO: 163850 - DNA, 55 bp, Artificial
  Synthetic oligonucleotide
ttctccgttccgcggccgtagactcccctgaccgtcgtcccgaatcggctcatat

SEQ ID NO: 163851 - DNA, 55 bp, Artificial
  Synthetic oligonucleotide
ttgagccagaacaaaacatttcgcctgaaagagcctattgtctttccacacatgc

SEQ ID NO: 163852 - DNA, 55 bp, Artificial
  Synthetic oligonucleotide
ttgcaccatatgtagatgcttgttcataccctgtgttctcccttactgaatacgc

SEQ ID NO: 163853 - DNA, 55 bp, Artificial
  Synthetic oligonucleotide
ttgctacagtagtagtattgaccacgaagccctcacttcaacggagtaagtgagg

SEQ ID NO: 163854 - DNA, 55 bp, Artificial
  Synthetic oligonucleotide
ttggagtagtcgattcgtttgaggtgtttgatgaataaaagtataggagccatag

SEQ ID NO: 163855 - DNA, 55 bp, Artificial
  Synthetic oligonucleotide
ttggatccgtcgtatccatctataacgtatttgtccgatatataccgtccctacc

SEQ ID NO: 163856 - DNA, 55 bp, Artificial
  Synthetic oligonucleotide
ttggtgccatagtagcagttatgcctaatccagttttaggtggagctggtgttat

SEQ ID NO: 163857 - DNA, 60 bp, Artificial
  Synthetic oligonucleotide
tactgcgtcagcagaacccgccgatagcactactagcgacggaacctgcttccttgtcta

SEQ ID NO: 163858 - DNA, 55 bp, Artificial
  Synthetic oligonucleotide
ttgtccgtctccttttctgaatacgtaagtatcacttcctgctccgccagttagc

SEQ ID NO: 163859 - DNA, 55 bp, Artificial
  Synthetic oligonucleotide
ttgtgcttcctgcatttgctacaagcgatctacctggttcaataagcagtgtagg

SEQ ID NO: 163860 - DNA, 55 bp, Artificial
  Synthetic oligonucleotide
tttaataagtcctggtgaatctcatttgctagtccttgcacctcttgcacacttg

SEQ ID NO: 163861 - DNA, 55 bp, Artificial
  Synthetic oligonucleotide
tccattatgacatgtcagacactagcacttcaaaagccagtattagttagtgctg

SEQ ID NO: 163862 - DNA, 55 bp, Artificial
  Synthetic oligonucleotide
tccatcaggaaccccagacgcctccagacccggatttagttgttgatacctacaa

SEQ ID NO: 163863 - DNA, 55 bp, Artificial
  Synthetic oligonucleotide
tccagtcccgctgtttcttctagaagacctaatagattggaggtatttgctaggg

SEQ ID NO: 163864 - DNA, 55 bp, Artificial
  Synthetic oligonucleotide
tccagctgataactcacttggtataagtgttgagcctgtactagtattcaaagcc

SEQ ID NO: 163865 - DNA, 55 bp, Artificial
  Synthetic oligonucleotide
tccagaagtaccacgggcaaacagaaaagcaactggtcgttgtgttcaaccagcg

SEQ ID NO: 163866 - DNA, 55 bp, Artificial
  Synthetic oligonucleotide
tccactgctgccgcgatccttggatcaatgggaatctttgccaacacggtaaggc

SEQ ID NO: 163867 - DNA, 55 bp, Artificial
  Synthetic oligonucleotide
tccactcatatagtcatgtaaagctcctccaaatacacagccaataggtattagt

SEQ ID NO: 163868 - DNA, 57 bp, Artificial
  Synthetic oligonucleotide
tactgctgtcaactagggaaaggggtatgccgccttccaatatcccctgggggcaga

SEQ ID NO: 163869 - DNA, 55 bp, Artificial
  Synthetic oligonucleotide
tccaaccgtcttgagtgaaagccaaggtgttattaacgagtcttaattgctcatt

SEQ ID NO: 163870 - DNA, 55 bp, Artificial
  Synthetic oligonucleotide
tcagtctaatttacgtaactcatgcgaatcgtatatttgttcaaggttccaagcc

SEQ ID NO: 163871 - DNA, 55 bp, Artificial
  Synthetic oligonucleotide
tcaggtgatccgtcaccggattatgcatgggatacggtcataacaaatgccgggg

SEQ ID NO: 163872 - DNA, 55 bp, Artificial
  Synthetic oligonucleotide
tcagatacttgtctttgactgctttgtgctctttgcagacggagaccgctttctg

SEQ ID NO: 163873 - DNA, 55 bp, Artificial
  Synthetic oligonucleotide
tcagaagattcgctaaagtatctactaacggacaggtagctggatacatccacgg

SEQ ID NO: 163874 - DNA, 55 bp, Artificial
  Synthetic oligonucleotide
tcacttacacaccgcctagcatacttatttctttacgatccgttttagagccgct

SEQ ID NO: 163875 - DNA, 55 bp, Artificial
  Synthetic oligonucleotide
tcacccgcctcaggcgcctccccaagtgccagcgtgatgttgcttccgtctatct

SEQ ID NO: 163876 - DNA, 55 bp, Artificial
  Synthetic oligonucleotide
tcaacacccgccaccacctaatgctgttccaacctgccaacaagcaggagttctt

SEQ ID NO: 163877 - DNA, 55 bp, Artificial
  Synthetic oligonucleotide
tatttttgacgtgtattcttatgttaattggaggttctccaggatctacggctgg

SEQ ID NO: 163878 - DNA, 55 bp, Artificial
  Synthetic oligonucleotide
tattcttcgatactgctggaaggaacggccatattggaatctaccttggaaatgg

SEQ ID NO: 163879 - DNA, 60 bp, Artificial
  Synthetic oligonucleotide
tactttctctggtgcatagtgtagttttaatttagttttagcatatggataatactcatc

SEQ ID NO: 163880 - DNA, 55 bp, Artificial
  Synthetic oligonucleotide
tattcgttggcgctgtgcattagcactttaagcaacggaatttattcgttggcgc

SEQ ID NO: 163881 - DNA, 55 bp, Artificial
  Synthetic oligonucleotide
tatgtgaagaggtaactagcaacacttatgggtggtcagccgagaatatacttct

SEQ ID NO: 163882 - DNA, 55 bp, Artificial
  Synthetic oligonucleotide
tatggctagagctgttatgagttcagagttcctagaggaagctatagcataccct

SEQ ID NO: 163883 - DNA, 55 bp, Artificial
  Synthetic oligonucleotide
tatgcgtagtttcgaggtactctccgcctttgaatagtatcccgttttctgctcc

SEQ ID NO: 163884 - DNA, 55 bp, Artificial
  Synthetic oligonucleotide
tatgcacaggggacattgtttaataagccgattacgatcgacacttttgaagtgc

SEQ ID NO: 163885 - DNA, 55 bp, Artificial
  Synthetic oligonucleotide
tatgatgttgggtgatattatcactccttcaaagtctattgctggtgatggtgca

SEQ ID NO: 163886 - DNA, 55 bp, Artificial
  Synthetic oligonucleotide
tatcggatagaagcattgcacgagctcttggagtatcacatagcacggtcggtcg

SEQ ID NO: 163887 - DNA, 55 bp, Artificial
  Synthetic oligonucleotide
tatcctctgctctgccgtgtacaaagtcaacctgcccgagcttcgtttcagcaca

SEQ ID NO: 163888 - DNA, 55 bp, Artificial
  Synthetic oligonucleotide
tatcatacccaacgctgccaccgaagataccgtaggccatggcactgccgttgcg

SEQ ID NO: 163889 - DNA, 55 bp, Artificial
  Synthetic oligonucleotide
tatagtgccataaaaggagtgcctgtaaataatagagtggctatgactggtgaga

SEQ ID NO: 163890 - DNA, 60 bp, Artificial
  Synthetic oligonucleotide
acaaaatggtcttcatggatggacagtatatatagcaccttgtatgaaccctgacggagt

SEQ ID NO: 163891 - DNA, 55 bp, Artificial
  Synthetic oligonucleotide
tatagcctgtttgttgcggtttaataatatagatccagaatcaccaggatcaccc

SEQ ID NO: 163892 - DNA, 55 bp, Artificial
  Synthetic oligonucleotide
tatactcccgcgtccgccctgcctctgtagccccggatcttctcgggcgttacca

SEQ ID NO: 163893 - DNA, 55 bp, Artificial
  Synthetic oligonucleotide
tagttaagtttgacattcctctaccttcactaccgattattattccacaagcacc

SEQ ID NO: 163894 - DNA, 55 bp, Artificial
  Synthetic oligonucleotide
tagtagtggagtgcctgtcctggtggagtttgctttagctcctaggggtgtgtgt

SEQ ID NO: 163895 - DNA, 55 bp, Artificial
  Synthetic oligonucleotide
tagtaactggccatgttaatactcatgaaactggtgctatagaagccactggtca

SEQ ID NO: 163896 - DNA, 55 bp, Artificial
  Synthetic oligonucleotide
tgcccattcctatgttggtctgcgcaatcccggttccgtccgtatggtaaacctt

SEQ ID NO: 163897 - DNA, 55 bp, Artificial
  Synthetic oligonucleotide
tgccatctgaacctgctgaggagtagaaagtccagctgtatggtttagagcaacc

SEQ ID NO: 163898 - DNA, 55 bp, Artificial
  Synthetic oligonucleotide
tgcatctgtaatggcaactctacacataccagacaagtacgctatggaacgtggc

SEQ ID NO: 163899 - DNA, 55 bp, Artificial
  Synthetic oligonucleotide
tgcagaatatggttgcatgttccggaaagaactgcgcattaacgtacactttccg

SEQ ID NO: 163900 - DNA, 55 bp, Artificial
  Synthetic oligonucleotide
tgcaccaatattcatatcctggattaattttatatactcaacgcccggaaactcc

SEQ ID NO: 163901 - DNA, 60 bp, Artificial
  Synthetic oligonucleotide
aattttgatgttacaccatgcccaatgctagaattcagattaggaaatctgcataaagat

SEQ ID NO: 163902 - DNA, 55 bp, Artificial
  Synthetic oligonucleotide
tgcaattgggttcattgagagaggttttgatactaccgttgcaccagcctatgct

SEQ ID NO: 163903 - DNA, 55 bp, Artificial
  Synthetic oligonucleotide
tgatgtccttttgcaaacgttcgttctgagccagttcaaattcttgctgttgctc

SEQ ID NO: 163904 - DNA, 55 bp, Artificial
  Synthetic oligonucleotide
tgaccggggcaggaaatcaagccggtaaagggagtcatacctcaggggtgataac

SEQ ID NO: 163905 - DNA, 55 bp, Artificial
  Synthetic oligonucleotide
tgaatacgacggggaaaaggtcaatgtgagctatctcggactgagcgttggggta

SEQ ID NO: 163906 - DNA, 55 bp, Artificial
  Synthetic oligonucleotide
tgaagactagggtacctctgcgtttagactttgataccttgctaatagctcaaaa

SEQ ID NO: 163907 - DNA, 55 bp, Artificial
  Synthetic oligonucleotide
tgaacaaaacgagcatcctttagcattaagattctattccatggctgaccgtttg

SEQ ID NO: 163908 - DNA, 55 bp, Artificial
  Synthetic oligonucleotide
tcttggccccattgatatcaacagtaccttctagcaagtttccgccgtttataac

SEQ ID NO: 163909 - DNA, 55 bp, Artificial
  Synthetic oligonucleotide
tcttatgttctggtcctccccacaaaattactataccactccctacaatcatccc

SEQ ID NO: 163910 - DNA, 55 bp, Artificial
  Synthetic oligonucleotide
tcttacaattctgaatacacccttagaaaaggggcatccaacggagagctttgca

SEQ ID NO: 163911 - DNA, 55 bp, Artificial
  Synthetic oligonucleotide
tctcggatcaaatacgtagttatagtcacaaataactgcatcagcccaaagggtc

SEQ ID NO: 163912 - DNA, 54 bp, Artificial
  Synthetic oligonucleotide
tagaatacccactatttagtagttacacagttaccgtctttcgaccatgaaacc

SEQ ID NO: 163913 - DNA, 55 bp, Artificial
  Synthetic oligonucleotide
tctcgcatgagagatgtatcaaaggagcaatccgctataagatgggcccgcggcg

SEQ ID NO: 163914 - DNA, 55 bp, Artificial
  Synthetic oligonucleotide
tccattttgcggtgactatacgcccgatcagttatctgtatacggtgctgttatc

SEQ ID NO: 163915 - DNA, 55 bp, Artificial
  Synthetic oligonucleotide
tcccattggagcgccgtagctaagtgaaaggtacatccgaccccagccggggctg

SEQ ID NO: 163916 - DNA, 55 bp, Artificial
  Synthetic oligonucleotide
tccgctttggcgctctgccccgtccgtccggttctccgccgtcatacaggactgt

SEQ ID NO: 163917 - DNA, 55 bp, Artificial
  Synthetic oligonucleotide
tccggttcgttcagtctgaaccctccgtctgtaccgtcattcggtgttgaatggt

SEQ ID NO: 163918 - DNA, 55 bp, Artificial
  Synthetic oligonucleotide
tcctgctcggcatagaaacggaatgcagcagtagcatagtcacgtatatgatttt

SEQ ID NO: 163919 - DNA, 55 bp, Artificial
  Synthetic oligonucleotide
tcctgtatgggctgaagtcgtacccaaaggagcggtggactgtacaggagagagt

SEQ ID NO: 163920 - DNA, 55 bp, Artificial
  Synthetic oligonucleotide
tccttccgaccatcatttccgcaagttgatctatgttagtgtccttagtttgtac

SEQ ID NO: 163921 - DNA, 55 bp, Artificial
  Synthetic oligonucleotide
tcctttaggcccgaatgctaaatgatctactatacttgtagtgccaccgcatgca

SEQ ID NO: 163922 - DNA, 55 bp, Artificial
  Synthetic oligonucleotide
tcgaaggcggcctccggtaggcaatatcggctatagaccattgtacatgatatcc

SEQ ID NO: 163923 - DNA, 54 bp, Artificial
  Synthetic oligonucleotide
aatttgaaagcgctatgtctcaagttaaggctacatttggaaattccttaaaac

SEQ ID NO: 163924 - DNA, 55 bp, Artificial
  Synthetic oligonucleotide
tcgccgcgctttccgagggatttaaacaggacattatgaaaacggtcaggagcaa

SEQ ID NO: 163925 - DNA, 55 bp, Artificial
  Synthetic oligonucleotide
tcgtatctccggtggatatttaaagaatgtagttagctcctcccaattgtttctc

SEQ ID NO: 163926 - DNA, 55 bp, Artificial
  Synthetic oligonucleotide
tctaagcgctacgcaatactactaacggatgtggctatagataagaggttgtatc

SEQ ID NO: 163927 - DNA, 55 bp, Artificial
  Synthetic oligonucleotide
tctacccctgtccatatgattattccccttcttgtacactgttttatggtaaaca

SEQ ID NO: 163928 - DNA, 55 bp, Artificial
  Synthetic oligonucleotide
tctagttctctcaatgtgtcttaagaaatctagccctaaacctactccctccgaa

SEQ ID NO: 163929 - DNA, 55 bp, Artificial
  Synthetic oligonucleotide
tctatctgctatatttgtggttccagaagcaccatcattagctgccacagctacg

SEQ ID NO: 163930 - DNA, 55 bp, Artificial
  Synthetic oligonucleotide
tctattcaacagaagtacaacacatgtgcactgtagcaaaaggcccaaatcatgg

SEQ ID NO: 163931 - DNA, 55 bp, Artificial
  Synthetic oligonucleotide
tctccgtccagttcaatctctatcgtttcaccagactctagctttggcactactt

SEQ ID NO: 163932 - DNA, 55 bp, Artificial
  Synthetic oligonucleotide
ggacagccgaacttcgttgtcatcatttaccataagctccagtgaaagcggagtg

SEQ ID NO: 163933 - DNA, 55 bp, Artificial
  Synthetic oligonucleotide
ggacaaaggaggttcgtatgcctattttccaatccggctgctccgaggtatgcca

SEQ ID NO: 163934 - DNA, 60 bp, Artificial
  Synthetic oligonucleotide
gcagaggtagttggtgatgaactatatctaagagacgcaaatggtagcttaataccaggt

SEQ ID NO: 163935 - DNA, 55 bp, Artificial
  Synthetic oligonucleotide
ggacaaaatcttatactagctgtagacggcactaacgataaagtaaccatttgga

SEQ ID NO: 163936 - DNA, 55 bp, Artificial
  Synthetic oligonucleotide
ggaatatatctaagcaccataaatccaagacatcctgcaatagccgaatacgtct

SEQ ID NO: 163937 - DNA, 55 bp, Artificial
  Synthetic oligonucleotide
ggaagtggtagtaaagtactatttgcaggattcgcgttacatggatgggaagata

SEQ ID NO: 163938 - DNA, 55 bp, Artificial
  Synthetic oligonucleotide
ggaagccgctaagaaggatgccatgagatgtttagaatgcggctgtcacgatgta

SEQ ID NO: 163939 - DNA, 53 bp, Artificial
  Synthetic oligonucleotide
ggaagaacccttccctggggaacccttacaggcatccgccccaccaagattgc

SEQ ID NO: 163940 - DNA, 55 bp, Artificial
  Synthetic oligonucleotide
ggaacgtgaatgatggtggcgttcataaatcccaaaggtatgtaccctaagggcg

SEQ ID NO: 163941 - DNA, 54 bp, Artificial
  Synthetic oligonucleotide
ggaaccgaactgaaacgaaaaccactgatagattcaaattggttatttgaagtg

SEQ ID NO: 163942 - DNA, 55 bp, Artificial
  Synthetic oligonucleotide
ggaaagctgtctcccctgattatcgtaagtatagaggtctaacttgctcattgag

SEQ ID NO: 163943 - DNA, 55 bp, Artificial
  Synthetic oligonucleotide
ggaaaccttcgtatttattgtactattggcggtaggatttggatatgtaggaagc

SEQ ID NO: 163944 - DNA, 55 bp, Artificial
  Synthetic oligonucleotide
ggaaaaggcatgtagcaacccataatctaacgttactctacgatcagcatttcca

SEQ ID NO: 163945 - DNA, 57 bp, Artificial
  Synthetic oligonucleotide
cccgaagtgaatctaggtccgctacttgatagcatagctttagtagctgaccccccc

SEQ ID NO: 163946 - DNA, 60 bp, Artificial
  Synthetic oligonucleotide
caagtctatatcatcataaaacggtatacttgaatattgtattgtatgtatcatgtaaag

SEQ ID NO: 163947 - DNA, 55 bp, Artificial
  Synthetic oligonucleotide
gctttggtagtgcgaataccttagtaactggcttatattagtgggtgcgaaccat

SEQ ID NO: 163948 - DNA, 55 bp, Artificial
  Synthetic oligonucleotide
gcttggtcatatgactcacataagtatagccgttaaatctattgtaacgtgcctt

SEQ ID NO: 163949 - DNA, 55 bp, Artificial
  Synthetic oligonucleotide
gcttgcgatagctcctattgtcgtctcttctactctcggcgtagttatttgaact

SEQ ID NO: 163950 - DNA, 55 bp, Artificial
  Synthetic oligonucleotide
gcttccgataatatatccgccagcaactggacgaactctgttagttaaagacaag

SEQ ID NO: 163951 - DNA, 55 bp, Artificial
  Synthetic oligonucleotide
gcttatgtttccatcaataaagcggttgtaacacaagccagcgctgctatacctg

SEQ ID NO: 163952 - DNA, 55 bp, Artificial
  Synthetic oligonucleotide
gctgtttcattctagtcctaccttctccacctgtgtaacatctagcttccatcgc

SEQ ID NO: 163953 - DNA, 55 bp, Artificial
  Synthetic oligonucleotide
gctgttcatcagctcacaagtatgcaagaatgcacattcctatagcgccaaagtg

SEQ ID NO: 163954 - DNA, 55 bp, Artificial
  Synthetic oligonucleotide
gctgttaagcgggattctgatcacgaatttattattctcggagtactgattcgta

SEQ ID NO: 163955 - DNA, 55 bp, Artificial
  Synthetic oligonucleotide
gctgggatgtagctggtgctaaaagctttggcctcaatgtagcttggataaatcg

SEQ ID NO: 163956 - DNA, 55 bp, Artificial
  Synthetic oligonucleotide
gctggacttttagcgccaaccgatggatatcttcgcacgaggaaggaaataccct

SEQ ID NO: 163957 - DNA, 55 bp, Artificial
  Synthetic oligonucleotide
atcaaatctccacgcttcatttgttctttcggaacagactttcctaaagttaata

SEQ ID NO: 163958 - DNA, 55 bp, Artificial
  Synthetic oligonucleotide
gctggacctacgcttgcttgtggaacgggaagttgtgcatctgtagttgcaagta

SEQ ID NO: 163959 - DNA, 55 bp, Artificial
  Synthetic oligonucleotide
gctgcatcaagaatacgtccagctattatagcaagtcttgctgctgtgcttggag

SEQ ID NO: 163960 - DNA, 55 bp, Artificial
  Synthetic oligonucleotide
gctgcactcctgctataacagctggagcacccacttcgtgaaccacaatatggct

SEQ ID NO: 163961 - DNA, 55 bp, Artificial
  Synthetic oligonucleotide
gctgcaccatatgtattaccaggtgctagatggggccaaagaatgggcgacgcta

SEQ ID NO: 163962 - DNA, 55 bp, Artificial
  Synthetic oligonucleotide
gctgattgcccgcataacggaatcatatatccccatcaggagaaacaggtaggaa

SEQ ID NO: 163963 - DNA, 55 bp, Artificial
  Synthetic oligonucleotide
gctgaggataataggcccttgtaactatatgcgcataccatttgtcctcaatatg

SEQ ID NO: 163964 - DNA, 55 bp, Artificial
  Synthetic oligonucleotide
gctgaccttcgacaattacatcactgcctattattagctgcatatcgcttaacaa

SEQ ID NO: 163965 - DNA, 55 bp, Artificial
  Synthetic oligonucleotide
gctgaactaccatatgaagttgctgttgacattattgagatactagacacatcac

SEQ ID NO: 163966 - DNA, 55 bp, Artificial
  Synthetic oligonucleotide
gctcttcggtctcatcgtatttgagtgtcttcgcatggcatataaatccagagac

SEQ ID NO: 163967 - DNA, 55 bp, Artificial
  Synthetic oligonucleotide
gctctgatatgctgggagatgcttatcagtacctcatcaaggagtttgcagatga

SEQ ID NO: 163968 - DNA, 60 bp, Artificial
  Synthetic oligonucleotide
caatactatgcttgtcttaaagtgctttaatatcctatatcatgcccatagaatacccac

SEQ ID NO: 163969 - DNA, 55 bp, Artificial
  Synthetic oligonucleotide
ggatctctttctggtataccaacaaatccattcagttttatacacacccctccat

SEQ ID NO: 163970 - DNA, 55 bp, Artificial
  Synthetic oligonucleotide
ggatctcttacaggtttaagtcccatagctgttaaggttccaccgctatatgcag

SEQ ID NO: 163971 - DNA, 55 bp, Artificial
  Synthetic oligonucleotide
ggatcgcggcacagggtgattccatcagcagtatcgagtactacctgcgttgtaa

SEQ ID NO: 163972 - DNA, 55 bp, Artificial
  Synthetic oligonucleotide
ggatcccactcccggatcaacgacgctgacgaatacagagccttccggccagtag

SEQ ID NO: 163973 - DNA, 55 bp, Artificial
  Synthetic oligonucleotide
ggatcacgtacttatggtgctgcaataaaggcatctcatcccaatgcaattcaag

SEQ ID NO: 163974 - DNA, 55 bp, Artificial
  Synthetic oligonucleotide
ggatataggaggtaggacatggaatatatgtgtatcttctggtggtaagtgtatt

SEQ ID NO: 163975 - DNA, 55 bp, Artificial
  Synthetic oligonucleotide
ggatagcaagctttctggacaagcccaagaggttaccttaatgggtggatttcta

SEQ ID NO: 163976 - DNA, 54 bp, Artificial
  Synthetic oligonucleotide
ggagtcttaaaagaaccggtacatttctaccagatgggaacaaccgatgaacca

SEQ ID NO: 163977 - DNA, 55 bp, Artificial
  Synthetic oligonucleotide
ggaggttaatactaagaccaatcctgaacactggaaaacggctgcgagtagaact

SEQ ID NO: 163978 - DNA, 55 bp, Artificial
  Synthetic oligonucleotide
ggaggcagtaagtgcatttcttgaatggataccggacgtagttatgaatggtctg

SEQ ID NO: 163979 - DNA, 52 bp, Artificial
  Synthetic oligonucleotide
atatgggttcttataggtattctttgttttaggggtggagtttcagtcttta

SEQ ID NO: 163980 - DNA, 55 bp, Artificial
  Synthetic oligonucleotide
ggagctgtaatgctgaatatgactcttatgggtgcagcgcagacatatgtaagac

SEQ ID NO: 163981 - DNA, 55 bp, Artificial
  Synthetic oligonucleotide
ggagctacctttaaggcgttccagatatggctaatagttgcgattatgtacttta

SEQ ID NO: 163982 - DNA, 55 bp, Artificial
  Synthetic oligonucleotide
ggagccccgctctgttggtttccgctgtccgcagacccattttaccagcattgcg

SEQ ID NO: 163983 - DNA, 55 bp, Artificial
  Synthetic oligonucleotide
ggagccacgtattacaagtgttgcatattgtacacctggttgtctgacaggagag

SEQ ID NO: 163984 - DNA, 55 bp, Artificial
  Synthetic oligonucleotide
ggagatagtcgctttcacagagtgtgatggaagtgttacggatggtagccatcgg

SEQ ID NO: 163985 - DNA, 55 bp, Artificial
  Synthetic oligonucleotide
ggagagtttgactgcggtgttgtagattttacaaatcccaaggcttatgaatggt

SEQ ID NO: 163986 - DNA, 55 bp, Artificial
  Synthetic oligonucleotide
ggacaggaacttcaaagggttaaagcaggagagacggatattgatatggctgatg

SEQ ID NO: 163987 - DNA, 55 bp, Artificial
  Synthetic oligonucleotide
ggacagggttggcaaaacctttaatcacagcatacttacggctgttcccatggaa

SEQ ID NO: 163988 - DNA, 55 bp, Artificial
  Synthetic oligonucleotide
ggacagtagtcacagcacagcaatggcctttaccgttttgcaactgtgtaacgtg

SEQ ID NO: 163989 - DNA, 55 bp, Artificial
  Synthetic oligonucleotide
ggaccatatatggcaattatgccaggagtggttattgctcattctagaccaggtg

SEQ ID NO: 163990 - DNA, 59 bp, Artificial
  Synthetic oligonucleotide
gctcaaagctttgctaagtgcggtgccccactagattgacgttctatcccgagccgtgg

SEQ ID NO: 163991 - DNA, 55 bp, Artificial
  Synthetic oligonucleotide
ggacccagccatatccactcggaatccgtcacaccccatgtttaaccaaaacctc

SEQ ID NO: 163992 - DNA, 55 bp, Artificial
  Synthetic oligonucleotide
ggaccttaatgtttctgtaacagagttatcagatcaatcaaaagcgggtccatct

SEQ ID NO: 163993 - DNA, 55 bp, Artificial
  Synthetic oligonucleotide
ggacggatgatgtataagataccgatcgaagagcagtatattaccagacaactga

SEQ ID NO: 163994 - DNA, 55 bp, Artificial
  Synthetic oligonucleotide
ggacgtcacctcaatataacgctccttcgcatcataatggttcgtcgatttcccg

SEQ ID NO: 163995 - DNA, 55 bp, Artificial
  Synthetic oligonucleotide
ggactaccgctaattgaaccgttgctatttgaaccactactaattcgtgccctac

SEQ ID NO: 163996 - DNA, 55 bp, Artificial
  Synthetic oligonucleotide
ggactccccggaaacaggccgtacagagagtatggcggcgtgccatttaagccgg

SEQ ID NO: 163997 - DNA, 55 bp, Artificial
  Synthetic oligonucleotide
ggactgctatatctaatcttctagattgacctccacttaatctacccactaagga

SEQ ID NO: 163998 - DNA, 55 bp, Artificial
  Synthetic oligonucleotide
ggactggatagagctgtcttcggagtacagtatggctgagactgtgataccggac

SEQ ID NO: 163999 - DNA, 55 bp, Artificial
  Synthetic oligonucleotide
ggactggtatggctcgtatggttagaggtcaggttcttcaacttaaacagtcaga

SEQ ID NO: 164000 - DNA, 54 bp, Artificial
  Synthetic oligonucleotide
ggacttaggtactgtttatactattaaggtgtctaacgaccgtataacaggcga

SEQ ID NO: 164001 - DNA, 60 bp, Artificial
  Synthetic oligonucleotide
atatatttatgaacatggctaagaatattccatcaaaagagttgaaaagtagaattgatg

SEQ ID NO: 164002 - DNA, 55 bp, Artificial
  Synthetic oligonucleotide
ggagaaccaactaggataccacttgcttcctctgctcttttaacaagctctgaca

SEQ ID NO: 164003 - DNA, 55 bp, Artificial
  Synthetic oligonucleotide
ggagagcacccctagctgatctttattatagtggtactcaaggagaggcatatta

SEQ ID NO: 164004 - DNA, 55 bp, Artificial
  Synthetic oligonucleotide
ggagaggatgtccgatctcttcatatgacttacgtcccataaccacagtattccc

SEQ ID NO: 164005 - DNA, 55 bp, Artificial
  Synthetic oligonucleotide
gcggacattccgcttaaggaggctttaacacgtgcggcggccctggtctacgaaa

SEQ ID NO: 164006 - DNA, 55 bp, Artificial
  Synthetic oligonucleotide
gcgcttgtttgtgccacgctagtaactagcctatgggctggggtatcaactaaag

SEQ ID NO: 164007 - DNA, 55 bp, Artificial
  Synthetic oligonucleotide
gcgcttcttctattccgaatgccctcagtaccaaaaccactgtctcctgacgggt

SEQ ID NO: 164008 - DNA, 55 bp, Artificial
  Synthetic oligonucleotide
gcgctgtgcgttagcactttaagtaacgaaataatcttagtgaatacgaaggttg

SEQ ID NO: 164009 - DNA, 55 bp, Artificial
  Synthetic oligonucleotide
gcgctacagccatcagacggaatctgcgatgtaacagcggaacaagttatccgaa

SEQ ID NO: 164010 - DNA, 55 bp, Artificial
  Synthetic oligonucleotide
gcgaggattatactggacctcgtcgtgcagaccgtaatttcaagaacgaattacc

SEQ ID NO: 164011 - DNA, 55 bp, Artificial
  Synthetic oligonucleotide
gcgactttaacattagtctctgtgcaaattgtcgccacaagtcatacttacaggc

SEQ ID NO: 164012 - DNA, 60 bp, Artificial
  Synthetic oligonucleotide
atatagtgactcgcatcaagatttcaacggaagatattggacttatacaactaatgttgc

SEQ ID NO: 164013 - DNA, 55 bp, Artificial
  Synthetic oligonucleotide
gcgactactggagttgccggtttactttataaaatagctccaatagttggtgcgg

SEQ ID NO: 164014 - DNA, 55 bp, Artificial
  Synthetic oligonucleotide
gcgaagcctataaaccaagagtgaggagacccagtttcattgtcagcggtacctg

SEQ ID NO: 164015 - DNA, 55 bp, Artificial
  Synthetic oligonucleotide
gcgaaccgtggtagctagaagttcgattatcctcttgggagcgtttaatgccgta

SEQ ID NO: 164016 - DNA, 55 bp, Artificial
  Synthetic oligonucleotide
gcgaaaacgctaattatgtcgtttgttgacatgcgtccaagctatatggtatcat

SEQ ID NO: 164017 - DNA, 55 bp, Artificial
  Synthetic oligonucleotide
gccttgctactagattccatgtctagtaattacctattcaacatgagttctcaac

SEQ ID NO: 164018 - DNA, 55 bp, Artificial
  Synthetic oligonucleotide
gccttagccttttcatatgttccaccagcagtcccactatctttcattataagaa

SEQ ID NO: 164019 - DNA, 55 bp, Artificial
  Synthetic oligonucleotide
gccttaattccaaggggagtagctgcattagatagtccaaacatattagcagtta

SEQ ID NO: 164020 - DNA, 53 bp, Artificial
  Synthetic oligonucleotide
gcctctgttccctcggtattaacccctatgactttggcttcaaatccccgaag

SEQ ID NO: 164021 - DNA, 55 bp, Artificial
  Synthetic oligonucleotide
gcctctatggatctcggtctagcatcagatttagtaactgatagcatgagttcca

SEQ ID NO: 164022 - DNA, 55 bp, Artificial
  Synthetic oligonucleotide
gcctccttagctaaagttacttctggtgtaactcctattgccataacaactgcgc

SEQ ID NO: 164023 - DNA, 60 bp, Artificial
  Synthetic oligonucleotide
gcaccaccggtatcctctgcaactgcgtagccatagtctgcccttccattggtagtggac

SEQ ID NO: 164024 - DNA, 55 bp, Artificial
  Synthetic oligonucleotide
gcctcctcctgcactcttggcaaatcaaacatattgcagacaccgctgtcccgta

SEQ ID NO: 164025 - DNA, 55 bp, Artificial
  Synthetic oligonucleotide
gcctcccgtacccgaaaggactgtactgcggactgtacatcgagatgaaattcgg

SEQ ID NO: 164026 - DNA, 55 bp, Artificial
  Synthetic oligonucleotide
gcctcccaactgatctatcgcagtaaaagacgtataccactcgtcacctctcgta

SEQ ID NO: 164027 - DNA, 55 bp, Artificial
  Synthetic oligonucleotide
gcctcatctcgcttctcgtaaaggtagctgtgggaagcagcagggtgtttgctcc

SEQ ID NO: 164028 - DNA, 55 bp, Artificial
  Synthetic oligonucleotide
gcctcacattcgtcaagtgaatccaaagggactactctatgactacaagctattc

SEQ ID NO: 164029 - DNA, 55 bp, Artificial
  Synthetic oligonucleotide
gcctacactatgcaagacttagggacttagtaaagcttatggaactaagagaagg

SEQ ID NO: 164030 - DNA, 54 bp, Artificial
  Synthetic oligonucleotide
gccgttacgcttgttactgaaccaaccaaaacgttgaatgtgatttccgcaaac

SEQ ID NO: 164031 - DNA, 55 bp, Artificial
  Synthetic oligonucleotide
gccgtctttcctcttaactgtcagctttccgtcttcgaggcttactgcatagttc

SEQ ID NO: 164032 - DNA, 55 bp, Artificial
  Synthetic oligonucleotide
gccgtccttacgttcatccggctggaaataggttacccagatgcgcggctgctcc

SEQ ID NO: 164033 - DNA, 55 bp, Artificial
  Synthetic oligonucleotide
gccgtaaacggcccaggagaagctaaggatgccgatattggtattgcaggtggtg

SEQ ID NO: 164034 - DNA, 60 bp, Artificial
  Synthetic oligonucleotide
atataatgactacatgagtaatcctgaaaaatcaggttcattattcacttcaactaaaga

SEQ ID NO: 164035 - DNA, 55 bp, Artificial
  Synthetic oligonucleotide
gccgcatgcctcctgaagtgtgtaatatgtatcggcctccagatattttgcggtt

SEQ ID NO: 164036 - DNA, 55 bp, Artificial
  Synthetic oligonucleotide
gccgcatctatgagtgctatgcctcatgcgggacttgacaataaacccgcatttg

SEQ ID NO: 164037 - DNA, 55 bp, Artificial
  Synthetic oligonucleotide
gccgatacccttgatagcacgtggatcatacgctgggattgcttggtcttttact

SEQ ID NO: 164038 - DNA, 55 bp, Artificial
  Synthetic oligonucleotide
gccgaggtgatccgtctactagaacagcaagacccacacagcaaggcgcggttca

SEQ ID NO: 164039 - DNA, 55 bp, Artificial
  Synthetic oligonucleotide
gccgaatctgatctatcccaaattgagatgcaactcctgacattttgataccgga

SEQ ID NO: 164040 - DNA, 55 bp, Artificial
  Synthetic oligonucleotide
gctctagcagcataaattccagcagttaaaccagcaggaccgcttcctatgataa

SEQ ID NO: 164041 - DNA, 55 bp, Artificial
  Synthetic oligonucleotide
gctcgtccataaaatgagaaaatctaccaaacgacttcccagcataagttgatcc

SEQ ID NO: 164042 - DNA, 55 bp, Artificial
  Synthetic oligonucleotide
gctcctctttggctgccatcactcttccgtgacctgcaatgatattgtaatcccc

SEQ ID NO: 164043 - DNA, 55 bp, Artificial
  Synthetic oligonucleotide
gctcatcatgaagccttggatccggtgagcggagaaggcaatccctggcaggcgt

SEQ ID NO: 164044 - DNA, 55 bp, Artificial
  Synthetic oligonucleotide
gctcagactccgcagcctacattaagtgtactgtatgatgagaaaacaccagagg

SEQ ID NO: 164045 - DNA, 53 bp, Artificial
  Synthetic oligonucleotide
atagttaaaggtacgcaaaagtcatagttaggtacgcaaaagtcatagttaaa

SEQ ID NO: 164046 - DNA, 55 bp, Artificial
  Synthetic oligonucleotide
gctcaccctcaataaccccaataggtgccttataatatgcctctccttgagtacc

SEQ ID NO: 164047 - DNA, 55 bp, Artificial
  Synthetic oligonucleotide
gctatcggacttatatctacaggagcagagtactttagttccttaactaatggga

SEQ ID NO: 164048 - DNA, 55 bp, Artificial
  Synthetic oligonucleotide
gctatcacacaagcatttgacgcatttgatgaccaagagaagttctctgcagtgg

SEQ ID NO: 164049 - DNA, 55 bp, Artificial
  Synthetic oligonucleotide
gctatagatggtacatttggttttcctgtaatgaagtgtggtatattgctgactg

SEQ ID NO: 164050 - DNA, 55 bp, Artificial
  Synthetic oligonucleotide
gctaggttcggcatttaaagattatggcggtggagttagttcgtggattaatgaa

SEQ ID NO: 164051 - DNA, 55 bp, Artificial
  Synthetic oligonucleotide
gctagcaagaatagttccccttactcgtacatatgtatccttattagctggcgct

SEQ ID NO: 164052 - DNA, 55 bp, Artificial
  Synthetic oligonucleotide
gctacgtatcgtctaaatggctaacatctaaagcaccaaaggtattaataggagt

SEQ ID NO: 164053 - DNA, 55 bp, Artificial
  Synthetic oligonucleotide
gctacgctctgcctttcgcagattcagataatcacgcagtagaacggcaaggttc

SEQ ID NO: 164054 - DNA, 55 bp, Artificial
  Synthetic oligonucleotide
gctaccgaaaggcctgacagggttgctgccatgcttactgaaggcaaggttgcgg

SEQ ID NO: 164055 - DNA, 55 bp, Artificial
  Synthetic oligonucleotide
gctacatcatcccaaccttggctgatgcaataatcatagcctgcaattgtgtgtt

SEQ ID NO: 164056 - DNA, 57 bp, Artificial
  Synthetic oligonucleotide
gtgtaaaaagtgtacaatctgtcagaaaggagtattagtgagagtttagtacttaca

SEQ ID NO: 164057 - DNA, 60 bp, Artificial
  Synthetic oligonucleotide
ataggcttgtttaaatatccaaaagcatggactgaaaatgctagatttacatattcacta

SEQ ID NO: 164058 - DNA, 55 bp, Artificial
  Synthetic oligonucleotide
gctacactacttccaaccgctaagtttattcctataccacgtccaggattcataa

SEQ ID NO: 164059 - DNA, 55 bp, Artificial
  Synthetic oligonucleotide
gcggactcggcgttacatgcgggaaatggggatacatggcttctgtcctgggccc

SEQ ID NO: 164060 - DNA, 55 bp, Artificial
  Synthetic oligonucleotide
gcggaggcagttaccagtgaaagtgtgcagagtaattctacagaagatacgaagc

SEQ ID NO: 164061 - DNA, 55 bp, Artificial
  Synthetic oligonucleotide
gcggcaaatataggggcagggtccactgtaggtataacggggattgcatataagt

SEQ ID NO: 164062 - DNA, 55 bp, Artificial
  Synthetic oligonucleotide
gcggcatagttgatccactcaaacacacgatccgcaatggccagatgttcctccg

SEQ ID NO: 164063 - DNA, 55 bp, Artificial
  Synthetic oligonucleotide
gcggcgtcgcttagaccatatttaacgtcaacattaacgtagcttccatgaacag

SEQ ID NO: 164064 - DNA, 55 bp, Artificial
  Synthetic oligonucleotide
gcggctattacagagaattgcgtataatttgaccagtcatacaccgtacgtgcta

SEQ ID NO: 164065 - DNA, 55 bp, Artificial
  Synthetic oligonucleotide
gcggtagcgtcatttgcagtatcagcgtctacacttgcgtctgtttctggtgtct

SEQ ID NO: 164066 - DNA, 55 bp, Artificial
  Synthetic oligonucleotide
gcggtgataggaaaagtagcctgggctaaggtaccgatttatttagctggtcaat

SEQ ID NO: 164067 - DNA, 55 bp, Artificial
  Synthetic oligonucleotide
gcggtgtgggaattgtattcgtagtggcatataacgtgatcagcggtattttccg

SEQ ID NO: 164068 - DNA, 59 bp, Artificial
  Synthetic oligonucleotide
ataggagaatttctaccagctaatagcttgggcaattttgaaactaaatcatgagagaa

SEQ ID NO: 164069 - DNA, 55 bp, Artificial
  Synthetic oligonucleotide
gcgtaagactgaaccccgtcttatgccggggctgtttccatgcgcagcgggaatc

SEQ ID NO: 164070 - DNA, 55 bp, Artificial
  Synthetic oligonucleotide
gcgtaatgatcaatcagcgtcttcataacacccattgtaaccgtaagtgtacagc

SEQ ID NO: 164071 - DNA, 55 bp, Artificial
  Synthetic oligonucleotide
gcgtcatcttcacttccgttgttcttatttagtgcatatgcccaagctgctaagt

SEQ ID NO: 164072 - DNA, 55 bp, Artificial
  Synthetic oligonucleotide
gcgtctccaatatattgacttaattcgtcatcccatgtacaaacttgagttctga

SEQ ID NO: 164073 - DNA, 55 bp, Artificial
  Synthetic oligonucleotide
gcgtgggtgcagggaaacaaaatcagttggtatgagactagacgattggtgcctg

SEQ ID NO: 164074 - DNA, 55 bp, Artificial
  Synthetic oligonucleotide
gcgttttgatcggaattttactatgtatcttgctcgatgtcctgttagcacttgg

SEQ ID NO: 164075 - DNA, 55 bp, Artificial
  Synthetic oligonucleotide
gctaagcctgttatgttaagtataatctttggagtagcatggcaatgtatgactc

SEQ ID NO: 164076 - DNA, 55 bp, Artificial
  Synthetic oligonucleotide
gctaagggtgtgttggccgctgtaacctgggttgcaactagtgcaacatgggctc

SEQ ID NO: 164077 - DNA, 54 bp, Artificial
  Synthetic oligonucleotide
ggtatatttggagtatactagaaggctctttcgggtttaaagatcctacgagtc

SEQ ID NO: 164078 - DNA, 55 bp, Artificial
  Synthetic oligonucleotide
ggtatatccttatcaacccataaccagtcgcattgttggatagggaatggcgaac

SEQ ID NO: 164079 - DNA, 59 bp, Artificial
  Synthetic oligonucleotide
gcaatggtttcgacaggggtgtgatgtgtttgagaagcgagtcgagggaacctgtgggc

SEQ ID NO: 164080 - DNA, 52 bp, Artificial
  Synthetic oligonucleotide
ggtagtagttaagatggtgttttacgttgaccttcgtttaacgttgcttgcc

SEQ ID NO: 164081 - DNA, 55 bp, Artificial
  Synthetic oligonucleotide
ggtaggaattaggtatcctactccagttgcaagtgctgctccactaatacccatt

SEQ ID NO: 164082 - DNA, 55 bp, Artificial
  Synthetic oligonucleotide
ggtagcattttaaccaccgctggattaaagggtgatcttcctttactgatgggaa

SEQ ID NO: 164083 - DNA, 55 bp, Artificial
  Synthetic oligonucleotide
ggtagcattattccacaaccatccatgtgaggaattggcacatctttgataactc

SEQ ID NO: 164084 - DNA, 55 bp, Artificial
  Synthetic oligonucleotide
ggtagaacccataagcgatagtaaacttgttaaatgcatagaatcagcaggggac

SEQ ID NO: 164085 - DNA, 53 bp, Artificial
  Synthetic oligonucleotide
ggtactgacgaaagaggtcacgttcttacatacgaaaactttgtaagcctact

SEQ ID NO: 164086 - DNA, 55 bp, Artificial
  Synthetic oligonucleotide
ggtactccatgattaagaacaagttctatacatataggccattgagtgtatccag

SEQ ID NO: 164087 - DNA, 55 bp, Artificial
  Synthetic oligonucleotide
ggtactatcatggcacttatatgccaagtagtttcgtctcggtggagcgttgcat

SEQ ID NO: 164088 - DNA, 55 bp, Artificial
  Synthetic oligonucleotide
ggtacatctataaggggtcacctccgtaacattaaactttggtcaggataatgcg

SEQ ID NO: 164089 - DNA, 55 bp, Artificial
  Synthetic oligonucleotide
ggtaattttatagaccaatcacggtatagtggaactttgacggcagggacacttg

SEQ ID NO: 164090 - DNA, 53 bp, Artificial
  Synthetic oligonucleotide
atagcttaaactattggtatccaacgaggtcggaacgcccttgttagcttggt

SEQ ID NO: 164091 - DNA, 55 bp, Artificial
  Synthetic oligonucleotide
ggtaatggcgttgtcgatatccttgatgaagcaagatgggaggtagaatggatct

SEQ ID NO: 164092 - DNA, 55 bp, Artificial
  Synthetic oligonucleotide
ggtaataagcgaggttggttcgaccttttgagcgtgagtaaacttgctacagtag

SEQ ID NO: 164093 - DNA, 55 bp, Artificial
  Synthetic oligonucleotide
ggtaagtgtatcataacagaggctcttaatcctgttccgatattggttgggcagg

SEQ ID NO: 164094 - DNA, 55 bp, Artificial
  Synthetic oligonucleotide
ggtaactcacgatacaatttctgcaagctactgtgacagggttatagttatgaag

SEQ ID NO: 164095 - DNA, 55 bp, Artificial
  Synthetic oligonucleotide
ggtaaatgtattcctacaccaagtttcagaactcaagtttgtacatgggatgacg

SEQ ID NO: 164096 - DNA, 55 bp, Artificial
  Synthetic oligonucleotide
gggttgttcattaaggctcttgctatggctgttctctgctgctgaccaccagaca

SEQ ID NO: 164097 - DNA, 55 bp, Artificial
  Synthetic oligonucleotide
gggttgaaatgctattgagctccgaaattttacaaagtctcagaggccgacgcag

SEQ ID NO: 164098 - DNA, 55 bp, Artificial
  Synthetic oligonucleotide
gggttccactgtcccaaataaaagccggacctatatcatatccaccaggtacagg

SEQ ID NO: 164099 - DNA, 55 bp, Artificial
  Synthetic oligonucleotide
gggtgcagttgtatttgggaaagagttggttgcaggtgcatttactccggcttgg

SEQ ID NO: 164100 - DNA, 53 bp, Artificial
  Synthetic oligonucleotide
gggtattacaaaaccagtgatggaaccgggaagaccctttcgcaaagcaataa

SEQ ID NO: 164101 - DNA, 57 bp, Artificial
  Synthetic oligonucleotide
atagcacacaatgtttgttggagcgtttacggcttttgcgtggacaaaacaccgcta

SEQ ID NO: 164102 - DNA, 55 bp, Artificial
  Synthetic oligonucleotide
gggtatagaaatgtttggctccgaaggtgctatatatatgcttatggcatgttct

SEQ ID NO: 164103 - DNA, 55 bp, Artificial
  Synthetic oligonucleotide
gggtaattctatagcatatggagattacgctatacaggctacggaatgtgcttgg

SEQ ID NO: 164104 - DNA, 52 bp, Artificial
  Synthetic oligonucleotide
ggggtttatcatatcggctcggttcaaaaccgtatgcccctaagtttaagta

SEQ ID NO: 164105 - DNA, 53 bp, Artificial
  Synthetic oligonucleotide
ggggttcctgcgaataaaacttgacaccggcctaataattgggactggcctaa

SEQ ID NO: 164106 - DNA, 55 bp, Artificial
  Synthetic oligonucleotide
ggggtattgtgttattgtagtagactagactggaataagactcatgcggcacgcg

SEQ ID NO: 164107 - DNA, 55 bp, Artificial
  Synthetic oligonucleotide
ggggtaagtgctggagaagttacgataacagcaactacagtggacggtaataaga

SEQ ID NO: 164108 - DNA, 55 bp, Artificial
  Synthetic oligonucleotide
ggggcttgcattactggccaaactaatgatagggatgtttggcttccagtaggag

SEQ ID NO: 164109 - DNA, 53 bp, Artificial
  Synthetic oligonucleotide
ggggctcaaagtattgtaccagcagttttaagggtattaactgtaggtgtgtt

SEQ ID NO: 164110 - DNA, 54 bp, Artificial
  Synthetic oligonucleotide
ggggcggcagctcgtctctggggtcccgtccaggctttaggaactccttaacga

SEQ ID NO: 164111 - DNA, 55 bp, Artificial
  Synthetic oligonucleotide
ggggcatgaatataatctccaccacctacatacatgccaacgtgacctggcgctg

SEQ ID NO: 164112 - DNA, 60 bp, Artificial
  Synthetic oligonucleotide
gctcttattaagtaaactattgctaacaatcattgagttatcagatctgataaacccatc

SEQ ID NO: 164113 - DNA, 55 bp, Artificial
  Synthetic oligonucleotide
ggttggagaatccgaaggagcgaagttttggttgtcagtatgcaatgatttgaag

SEQ ID NO: 164114 - DNA, 55 bp, Artificial
  Synthetic oligonucleotide
ggttcggtctgtttcaaccatgccaggattgctgacttgtcccatgtttcggata

SEQ ID NO: 164115 - DNA, 55 bp, Artificial
  Synthetic oligonucleotide
ggttccacatacctgatattggtacgttccatacatacaacccgctcgtcatttc

SEQ ID NO: 164116 - DNA, 55 bp, Artificial
  Synthetic oligonucleotide
ggttccacaataggtttgatacggacaagttgatggtccaggcaatttagagtag

SEQ ID NO: 164117 - DNA, 55 bp, Artificial
  Synthetic oligonucleotide
ggttcagatcagcacgatgtaacttcaggattatacccaggaattatcagattat

SEQ ID NO: 164118 - DNA, 55 bp, Artificial
  Synthetic oligonucleotide
ggttatttgtactggcggaatgagtgtagacccagatgatttaacaccaagtgcg

SEQ ID NO: 164119 - DNA, 55 bp, Artificial
  Synthetic oligonucleotide
ggttagttggacaaaagaattgtagagcttgatatagcaaggtggaggacaagtc

SEQ ID NO: 164120 - DNA, 55 bp, Artificial
  Synthetic oligonucleotide
ggttactgttaccgctcacaggggagatgctgttaatgcaccagataacactatg

SEQ ID NO: 164121 - DNA, 55 bp, Artificial
  Synthetic oligonucleotide
ggttactagtgatccatccacaagttgtagcttggattccgaaatctccgtaagc

SEQ ID NO: 164122 - DNA, 55 bp, Artificial
  Synthetic oligonucleotide
ggttaccgtacctaagtggaatcctgagacatgtatccaatgtaatatgtgtgcg

SEQ ID NO: 164123 - DNA, 60 bp, Artificial
  Synthetic oligonucleotide
cacaaaatggacttcatggatggacagtatatatagcaccatgtatgaatccagatggag

SEQ ID NO: 164124 - DNA, 55 bp, Artificial
  Synthetic oligonucleotide
ggtgtgtagcagcggctggtcaaacccagtttggtacttttctgctaccaatagg

SEQ ID NO: 164125 - DNA, 55 bp, Artificial
  Synthetic oligonucleotide
ggtgtctggtgtcaggattgggcgggaaagagaatcacttcatttggtaagcgcc

SEQ ID NO: 164126 - DNA, 55 bp, Artificial
  Synthetic oligonucleotide
ggtgtaggtatgttctcactatccggctccccgtatatctcagaggagcttagga

SEQ ID NO: 164127 - DNA, 55 bp, Artificial
  Synthetic oligonucleotide
ggtggttatgtccttacacatggacaactcgattaatgtgtccaatactaggtgt

SEQ ID NO: 164128 - DNA, 55 bp, Artificial
  Synthetic oligonucleotide
ggtatccaacgaggtcggaatgcccttgttagcttggttaatctcacaccgttag

SEQ ID NO: 164129 - DNA, 55 bp, Artificial
  Synthetic oligonucleotide
ggtatgagctacagtgaccgaaaagcggataattcaaacagtgcgatcgttgtga

SEQ ID NO: 164130 - DNA, 55 bp, Artificial
  Synthetic oligonucleotide
ggtattccctataagtaaactccatctgagtctaagaatcacttgatatgctcag

SEQ ID NO: 164131 - DNA, 55 bp, Artificial
  Synthetic oligonucleotide
ggtattctagcatgttccgtacctataccccaaattctcactaatggctctactg

SEQ ID NO: 164132 - DNA, 55 bp, Artificial
  Synthetic oligonucleotide
ggtcacacatcctgacctgcagcttatccttgacattcccgtaatccatcatgcc

SEQ ID NO: 164133 - DNA, 51 bp, Artificial
  Synthetic oligonucleotide
ggtcacttttaactttagctaaggttaaattattcgtttccattggtataa

SEQ ID NO: 164134 - DNA, 54 bp, Artificial
  Synthetic oligonucleotide
atacgctatttaacaggcaatttagagtggaaaggattagacttttctaattgg

SEQ ID NO: 164135 - DNA, 55 bp, Artificial
  Synthetic oligonucleotide
ggtcatcccaagcttcgtcagcgaatttatcacttaaaaggtagtagcgaatatc

SEQ ID NO: 164136 - DNA, 53 bp, Artificial
  Synthetic oligonucleotide
ggtccgctactgcctgacaacgaataagaattttaacacggccggaaaccgcc

SEQ ID NO: 164137 - DNA, 55 bp, Artificial
  Synthetic oligonucleotide
ggtcgatggggacaacgccgcatcccacctcgtcacagaggatgactaaatcccg

SEQ ID NO: 164138 - DNA, 55 bp, Artificial
  Synthetic oligonucleotide
ggtctagcatacgtaggacttggactttcatacgcactgtttgttcttgctcaaa

SEQ ID NO: 164139 - DNA, 55 bp, Artificial
  Synthetic oligonucleotide
ggtgactatcatcaccctgcagtataacggctgcttccgtactctcctaactgat

SEQ ID NO: 164140 - DNA, 55 bp, Artificial
  Synthetic oligonucleotide
ggtgatgaactatatctaagagacgcaaatggtagcttaataccaggtagaagtg

SEQ ID NO: 164141 - DNA, 55 bp, Artificial
  Synthetic oligonucleotide
ggtgatgtaaggttgttctcaagttgcgatataaaccccttcgacagctcacatc

SEQ ID NO: 164142 - DNA, 55 bp, Artificial
  Synthetic oligonucleotide
ggtgcagttatacgccgagcagcacagtgagggttgtaaactcgggtatgctcac

SEQ ID NO: 164143 - DNA, 55 bp, Artificial
  Synthetic oligonucleotide
ggtgcatttcgtacatttaatccataaccatcactttgactttccgcatacgcca

SEQ ID NO: 164144 - DNA, 55 bp, Artificial
  Synthetic oligonucleotide
ggtgcgttagcacttgcggagcccttgtacgggattgtagcggcatactggagta

SEQ ID NO: 164145 - DNA, 56 bp, Artificial
  Synthetic oligonucleotide
atacacctatagggaatgttgattgttattcgtatacaagaggaagtgaaaaaata

SEQ ID NO: 164146 - DNA, 55 bp, Artificial
  Synthetic oligonucleotide
ggtgctgccatttgcttcagtgcttctagagatttctctgttctaaattcttgga

SEQ ID NO: 164147 - DNA, 55 bp, Artificial
  Synthetic oligonucleotide
ggctacaatcagttgatcatagaaccgtgatgggatcacaagaaagcctaatcgc

SEQ ID NO: 164148 - DNA, 53 bp, Artificial
  Synthetic oligonucleotide
ggctaattcccgtccggaactaattgcttgggttaacgaatgccggaacgcga

SEQ ID NO: 164149 - DNA, 53 bp, Artificial
  Synthetic oligonucleotide
ggcgtaagattttcttccactgcgactctgggtttcaaaattccacctcccgg

SEQ ID NO: 164150 - DNA, 55 bp, Artificial
  Synthetic oligonucleotide
ggcggtaactcgataccacttcttttacacccttatcataggtctctgcccaaag

SEQ ID NO: 164151 - DNA, 55 bp, Artificial
  Synthetic oligonucleotide
ggcgggcttaatccgtccaatcaccctttggccgttcccaacagacgctttgcaa

SEQ ID NO: 164152 - DNA, 55 bp, Artificial
  Synthetic oligonucleotide
ggcggaacctggttcacagtcctgccgtccataatgacctcgccgctgcttatac

SEQ ID NO: 164153 - DNA, 55 bp, Artificial
  Synthetic oligonucleotide
ggcgctgtgcgttagcactttaagcaacgggatttatccgttggcgctgtgcgtt

SEQ ID NO: 164154 - DNA, 55 bp, Artificial
  Synthetic oligonucleotide
ggcgctatctccacattggatctgatgaacgtaacgaaggacttaatcggtatgt

SEQ ID NO: 164155 - DNA, 55 bp, Artificial
  Synthetic oligonucleotide
ggcgcagaggggtgccgggtggtcagaaagtccacatggcttgttactccgcctt

SEQ ID NO: 164156 - DNA, 60 bp, Artificial
  Synthetic oligonucleotide
gcaaccactaaccttgcgccagctcttaccctaggatgcggtgctgtaggaggaagtgct

SEQ ID NO: 164157 - DNA, 55 bp, Artificial
  Synthetic oligonucleotide
ggcgatacatggatctccgactcttaagttctcggatgaaccgatcgtgatctct

SEQ ID NO: 164158 - DNA, 55 bp, Artificial
  Synthetic oligonucleotide
ggcctattatggctatctggtggcatagaattgcattgtgctcttttacattcta

SEQ ID NO: 164159 - DNA, 55 bp, Artificial
  Synthetic oligonucleotide
ggccgtattatggttttgtatggatctgcctgagtttccttccgagtttgtcccc

SEQ ID NO: 164160 - DNA, 55 bp, Artificial
  Synthetic oligonucleotide
ggccctaacattggtattagattgccagcaatattaggttgtacctttgcagctg

SEQ ID NO: 164161 - DNA, 55 bp, Artificial
  Synthetic oligonucleotide
ggccccggcgatgagttctatttacaagcggtacaagagttagtggatagcgcgc

SEQ ID NO: 164162 - DNA, 53 bp, Artificial
  Synthetic oligonucleotide
ggcccatatactccttaaatccgtcctcgtttaaataaccggagaggatcgcc

SEQ ID NO: 164163 - DNA, 54 bp, Artificial
  Synthetic oligonucleotide
ggcatccttatccaggtccggaagaatgtctacgccggtctttaaggtaccgcc

SEQ ID NO: 164164 - DNA, 55 bp, Artificial
  Synthetic oligonucleotide
ggcatatgctccaccatgtaatttccttctacacatattcctatggatacagaat

SEQ ID NO: 164165 - DNA, 55 bp, Artificial
  Synthetic oligonucleotide
ggcaggattcgccataactggtattgttcaaagttcaagtgcatctatgggtatg

SEQ ID NO: 164166 - DNA, 55 bp, Artificial
  Synthetic oligonucleotide
ggcagcatgtcttgcatttggtaatgtagcctacgcagatgatgttaatgtaagt

SEQ ID NO: 164167 - DNA, 59 bp, Artificial
  Synthetic oligonucleotide
ctgattccaatattagtagtaatggaactgtactttatacaagtgatgattcttcagtt

SEQ ID NO: 164168 - DNA, 60 bp, Artificial
  Synthetic oligonucleotide
gctgctatccgaccacgtgggtgattgtagaccgccatgtgttctcgcttgtcctggtgg

SEQ ID NO: 164169 - DNA, 55 bp, Artificial
  Synthetic oligonucleotide
ggcagatatgttaccatagatatccctgagtacactcattatgatggtggcatta

SEQ ID NO: 164170 - DNA, 55 bp, Artificial
  Synthetic oligonucleotide
ggcacctgtagtatttcgccagccgcagtttaattattacctgtcacccttaaaa

SEQ ID NO: 164171 - DNA, 55 bp, Artificial
  Synthetic oligonucleotide
ggcacactaaatactggtgctcaaacattgaataacggcataggaacattaaatg

SEQ ID NO: 164172 - DNA, 53 bp, Artificial
  Synthetic oligonucleotide
ggcaatttagagtggaaaggattagacttttctaattggggttataaaggctc

SEQ ID NO: 164173 - DNA, 55 bp, Artificial
  Synthetic oligonucleotide
ggcaatgtattagttccataaccataatgattaccttgaccgccgaaactttgag

SEQ ID NO: 164174 - DNA, 55 bp, Artificial
  Synthetic oligonucleotide
ggcaagccggacctataacagggacggcgcggggtttcaattggatgaggtactg

SEQ ID NO: 164175 - DNA, 52 bp, Artificial
  Synthetic oligonucleotide
ggcaaagcttggttaggaaaaggactctacaaatggttaggcgttcggggag

SEQ ID NO: 164176 - DNA, 55 bp, Artificial
  Synthetic oligonucleotide
ggattgttaccaccagttggattgttaccaccagttggattgttaccaccagttg

SEQ ID NO: 164177 - DNA, 55 bp, Artificial
  Synthetic oligonucleotide
ggatgtcatggttctatgcctaacactggagttgacccacttaatgtagctgctc

SEQ ID NO: 164178 - DNA, 55 bp, Artificial
  Synthetic oligonucleotide
ggatgccggctcctctatgatctccaggtcggatatgttcacctgtgaccgcagg

SEQ ID NO: 164179 - DNA, 60 bp, Artificial
  Synthetic oligonucleotide
ataaatggcggaagaccatctggtatgggagacatgagtggtgctcattgtgctgcgcta

SEQ ID NO: 164180 - DNA, 55 bp, Artificial
  Synthetic oligonucleotide
ggatgatcgtctgtatggtagtgagacaatgcagcattacgagctgtcatgtaag

SEQ ID NO: 164181 - DNA, 55 bp, Artificial
  Synthetic oligonucleotide
ggatgaaataacataatatcctggttttaaggcgttagcggtcactttagcaggc

SEQ ID NO: 164182 - DNA, 55 bp, Artificial
  Synthetic oligonucleotide
ggatcttgatcgatggaacaccaaaagtacagcgagccaagatagaagctctggg

SEQ ID NO: 164183 - DNA, 55 bp, Artificial
  Synthetic oligonucleotide
ggggatccctggatagctggagccatccgccttctgaatactgctgtgggctaca

SEQ ID NO: 164184 - DNA, 55 bp, Artificial
  Synthetic oligonucleotide
ggggagcagatcttagaggggccctacttattgcagcaaatatgagaggtgcgga

SEQ ID NO: 164185 - DNA, 55 bp, Artificial
  Synthetic oligonucleotide
ggggaatggaatacctagtggaggtggcgaaggtggtctagtaggagataatgaa

SEQ ID NO: 164186 - DNA, 55 bp, Artificial
  Synthetic oligonucleotide
ggggaacaaaatccctttctgaagccgacaccatgggaatggcgtgctgatccgc

SEQ ID NO: 164187 - DNA, 54 bp, Artificial
  Synthetic oligonucleotide
gggctgtaaaaccggcggcggatatggtagaatgttgataactgtccggaacgg

SEQ ID NO: 164188 - DNA, 55 bp, Artificial
  Synthetic oligonucleotide
gggctaattgctcttttgaaactaactgtatcgtctctgcatctcccgacaaaga

SEQ ID NO: 164189 - DNA, 55 bp, Artificial
  Synthetic oligonucleotide
gggcctcttaatgacacgtcgctaactggttcggaaatttgcctgtaagtaccac

SEQ ID NO: 164190 - DNA, 60 bp, Artificial
  Synthetic oligonucleotide
gcaaaatctgaactatacaggcttagtatggatagcaaggaaagagaacaatataacatg

SEQ ID NO: 164191 - DNA, 55 bp, Artificial
  Synthetic oligonucleotide
gggcattttcctttcttctgcgaatatccctcagctttggtgatgctgcatcatc

SEQ ID NO: 164192 - DNA, 55 bp, Artificial
  Synthetic oligonucleotide
gggcatttcaggacgttacgccttcattctacctctcaaactaacagttccttga

SEQ ID NO: 164193 - DNA, 55 bp, Artificial
  Synthetic oligonucleotide
gggcagaaccactttccttcgtatacaagatctgcaaacctggttgctacgagct

SEQ ID NO: 164194 - DNA, 55 bp, Artificial
  Synthetic oligonucleotide
gggattcacacaccactcttaagctatcaccagcaagagaagctgcactaggaga

SEQ ID NO: 164195 - DNA, 55 bp, Artificial
  Synthetic oligonucleotide
gggattatttccgtcaacaggaagggaatcataaccctggccaatacatgctgcc

SEQ ID NO: 164196 - DNA, 55 bp, Artificial
  Synthetic oligonucleotide
gggatggctataagcgttgatttaactagcattgcgctatatctaaatcgaatgg

SEQ ID NO: 164197 - DNA, 55 bp, Artificial
  Synthetic oligonucleotide
gggatggcctcaaatcttagcacaactttcaatttatttcgacgaacgtcttgac

SEQ ID NO: 164198 - DNA, 55 bp, Artificial
  Synthetic oligonucleotide
gggataggttggagaacaagcgccctcgtcaactatacattttgacatactatca

SEQ ID NO: 164199 - DNA, 55 bp, Artificial
  Synthetic oligonucleotide
gggataccacctgatagtactgaattctaactggatgccatgaatctgtgacagg

SEQ ID NO: 164200 - DNA, 55 bp, Artificial
  Synthetic oligonucleotide
ggctacgttaaaggcaagcccctgatgggaatatcaactcaagaagttccggaac

SEQ ID NO: 164201 - DNA, 57 bp, Artificial
  Synthetic oligonucleotide
agttgggaaaggcccacagagacggactaatttagcctctcggtctgccaccataga

SEQ ID NO: 164202 - DNA, 55 bp, Artificial
  Synthetic oligonucleotide
ggctctggacttaatacctcaggatagcttagcatgaatccaacttcttgaccta

SEQ ID NO: 164203 - DNA, 55 bp, Artificial
  Synthetic oligonucleotide
ggctcttaattcgaatttaggcttaagtccatgggacgtatttcaccaaggatta

SEQ ID NO: 164204 - DNA, 55 bp, Artificial
  Synthetic oligonucleotide
ggctgaattaatcctggttcggaacataagcacgatgaccagtgctaatgctacc

SEQ ID NO: 164205 - DNA, 55 bp, Artificial
  Synthetic oligonucleotide
ggctgctcattaagctttccaataaagaaagctgctattcctcccactaccagca

SEQ ID NO: 164206 - DNA, 55 bp, Artificial
  Synthetic oligonucleotide
ggctggaggtccagctccctatggttataaattaattgctctgccatctaaccgt

SEQ ID NO: 164207 - DNA, 55 bp, Artificial
  Synthetic oligonucleotide
ggctgtgtccgtatagttggacgagtcgtcttatgtgtcctatactcggtatact

SEQ ID NO: 164208 - DNA, 55 bp, Artificial
  Synthetic oligonucleotide
ggcttccggtgttaggtcagatcagtatgaactccgttatcgtggatacaaccgg

SEQ ID NO: 164209 - DNA, 55 bp, Artificial
  Synthetic oligonucleotide
ggcttcttaggttgacggtcatggacgctacccctataatacttactttacagtc

SEQ ID NO: 164210 - DNA, 55 bp, Artificial
  Synthetic oligonucleotide
ggctttatggacacaggatacgcttccctgcgggaattagaagaccggtgcagag

SEQ ID NO: 164211 - DNA, 55 bp, Artificial
  Synthetic oligonucleotide
ggctttcctcctatatagacatgagaccatggaaccatctgagagtctccatgtt

SEQ ID NO: 164212 - DNA, 60 bp, Artificial
  Synthetic oligonucleotide
agttatagtcttccctggttgctctatctgcataataccacatcctgcactggcacacct

SEQ ID NO: 164213 - DNA, 55 bp, Artificial
  Synthetic oligonucleotide
gggaacaggctgttttggggaaatgctatcaaaacactcctccatgtgttattat

SEQ ID NO: 164214 - DNA, 55 bp, Artificial
  Synthetic oligonucleotide
gggaagcatgcaaaacttgtaaatctctgggtcaagggcctgatctttgactgga

SEQ ID NO: 164215 - DNA, 55 bp, Artificial
  Synthetic oligonucleotide
gggaatcaccatatcccttgacatgagtcttctgacttaaagacattctgggtca

SEQ ID NO: 164216 - DNA, 55 bp, Artificial
  Synthetic oligonucleotide
gggactgtgaccttggcgaagtctggtaaaatgacctgggacactataatgaatg

SEQ ID NO: 164217 - DNA, 55 bp, Artificial
  Synthetic oligonucleotide
gggagcattaaaagactgagcgggaaccgcacgaacccttatggagtgtacccgc

SEQ ID NO: 164218 - DNA, 55 bp, Artificial
  Synthetic oligonucleotide
gggagttctctgcgaaccgtggtagctagaagttcgattatcctcttgggagcgt

SEQ ID NO: 164219 - DNA, 55 bp, Artificial
  Synthetic oligonucleotide
cagaatgttttagagcacgtcgtaatgataaagctgacaatggttataagggtgc

SEQ ID NO: 164220 - DNA, 55 bp, Artificial
  Synthetic oligonucleotide
cagaaggtatgggtggaccgatagcgaatttaatacaggctagtatgatagctcc

SEQ ID NO: 164221 - DNA, 55 bp, Artificial
  Synthetic oligonucleotide
cagaacaccatatagcacacggagttgctaacggaatcttaatagaccatgtaat

SEQ ID NO: 164222 - DNA, 55 bp, Artificial
  Synthetic oligonucleotide
cacttgccacttcttcaccacatacatttcccataactctagttctacaccccat

SEQ ID NO: 164223 - DNA, 60 bp, Artificial
  Synthetic oligonucleotide
gcttcttgccgactggatagtacgcccgccgtacatatcgtgattgactagggcggtgta

SEQ ID NO: 164224 - DNA, 55 bp, Artificial
  Synthetic oligonucleotide
cacttccaagcccctggcggataagacttggaaaaccagtagtgacgatgcgcac

SEQ ID NO: 164225 - DNA, 55 bp, Artificial
  Synthetic oligonucleotide
cacttaagagtgcgtaacaagatttctggaacagctgctagaccaagattagcgg

SEQ ID NO: 164226 - DNA, 55 bp, Artificial
  Synthetic oligonucleotide
cactccacttaacaagctcatccgctgattgatgaccacgtttagtaaccctagc

SEQ ID NO: 164227 - DNA, 55 bp, Artificial
  Synthetic oligonucleotide
cactagcagcagatggaaaagatggtatgtctatgactgttgcagatacagaatg

SEQ ID NO: 164228 - DNA, 55 bp, Artificial
  Synthetic oligonucleotide
cactactagcttatctccacttactacagtgtcatgcagtaatgcttcgtcaaaa

SEQ ID NO: 164229 - DNA, 55 bp, Artificial
  Synthetic oligonucleotide
cacggtactggtcgagtttgtcacggtagcttaaagagaagccttcagctgccca

SEQ ID NO: 164230 - DNA, 55 bp, Artificial
  Synthetic oligonucleotide
cacgcttcatagccatcacccttaacaatacttctaggattaaactttattccac

SEQ ID NO: 164231 - DNA, 55 bp, Artificial
  Synthetic oligonucleotide
cacgctgctatagacaaaggaatcgacgctatcgttgaaatcactgttccagctg

SEQ ID NO: 164232 - DNA, 55 bp, Artificial
  Synthetic oligonucleotide
cacgcaattctgctctttcccgccttactgctgctaaacgtgctgggagctcttc

SEQ ID NO: 164233 - DNA, 55 bp, Artificial
  Synthetic oligonucleotide
cacctggcctatgcttaacataaccaccagttgcaagttgtggaattgtgccaac

SEQ ID NO: 164234 - DNA, 55 bp, Artificial
  Synthetic oligonucleotide
attccctcctagcaaaacttacttacaataattgtatatgcactagaaggagttt

SEQ ID NO: 164235 - DNA, 55 bp, Artificial
  Synthetic oligonucleotide
caccgtcttcatcacggtcaagcaactggaatacatcaccaaagacagccgcgac

SEQ ID NO: 164236 - DNA, 55 bp, Artificial
  Synthetic oligonucleotide
caccgataccttctataagccaaacttttggcgcactatttgaagccctacctac

SEQ ID NO: 164237 - DNA, 55 bp, Artificial
  Synthetic oligonucleotide
caccatcacttaacttaacggatgatactactggtgtaaatttaacggataccca

SEQ ID NO: 164238 - DNA, 55 bp, Artificial
  Synthetic oligonucleotide
cagcggtggcaagaggtactccaatggaatgcccacctccaatgactaaggatac

SEQ ID NO: 164239 - DNA, 55 bp, Artificial
  Synthetic oligonucleotide
cagcggctcccatttgtactgatggaccttctctacctaaagacaatccagctcc

SEQ ID NO: 164240 - DNA, 55 bp, Artificial
  Synthetic oligonucleotide
cagcggattctggagtaggggatttagatgaggtgataagatgggcaacagaatc

SEQ ID NO: 164241 - DNA, 55 bp, Artificial
  Synthetic oligonucleotide
cagcggaacaagttatccgaaacatgggacaagtcagcaatcctggcatggttga

SEQ ID NO: 164242 - DNA, 55 bp, Artificial
  Synthetic oligonucleotide
cagcgaattgcagtatacaattacttaggttctactaaagagcatccatcggctg

SEQ ID NO: 164243 - DNA, 55 bp, Artificial
  Synthetic oligonucleotide
cagccggatgcatattgggcggattgaccaggagaccacatccaatatcgggcgg

SEQ ID NO: 164244 - DNA, 53 bp, Artificial
  Synthetic oligonucleotide
cagccacggacgcatttaaagacccgacgttacctttcataggtattttgagg

SEQ ID NO: 164245 - DNA, 57 bp, Artificial
  Synthetic oligonucleotide
attattagtagacctagatcctcaatcaaatcttactaagttatttaaagcatatag

SEQ ID NO: 164246 - DNA, 55 bp, Artificial
  Synthetic oligonucleotide
cagccaattctttcgagacatgtccgatgcagtttccgagagcatccgtcacagc

SEQ ID NO: 164247 - DNA, 55 bp, Artificial
  Synthetic oligonucleotide
cagcatagacctctgatcccggatttgtatcacctactataactatatttccggg

SEQ ID NO: 164248 - DNA, 55 bp, Artificial
  Synthetic oligonucleotide
cagcaggagaaacaggtgatacactagatgcattgggtaactgagtattaacagt

SEQ ID NO: 164249 - DNA, 55 bp, Artificial
  Synthetic oligonucleotide
cagcacccgtaaatcccatagaacccgctatgataaatactcttccgtaatctcc

SEQ ID NO: 164250 - DNA, 55 bp, Artificial
  Synthetic oligonucleotide
cagcaatttgctttagttaagaatgttcccactaatggtcctaatgaatctcccg

SEQ ID NO: 164251 - DNA, 55 bp, Artificial
  Synthetic oligonucleotide
cagcaatacagttgcaaactccaactattccagaagttcctaaagcagtagacac

SEQ ID NO: 164252 - DNA, 55 bp, Artificial
  Synthetic oligonucleotide
cagcaagtttcctcacttcatctgctacaaccgcaaaacctttaccagcttcccc

SEQ ID NO: 164253 - DNA, 55 bp, Artificial
  Synthetic oligonucleotide
cagagtataaggcaacacagctctcgaatgaattgggcaccctttcggttgatgc

SEQ ID NO: 164254 - DNA, 55 bp, Artificial
  Synthetic oligonucleotide
cagagctgtgggatcaaggaatttgaggcctgtgctaagacctacagggcctggc

SEQ ID NO: 164255 - DNA, 55 bp, Artificial
  Synthetic oligonucleotide
cagagagggcaaaatcattataggaaccattgggcaccctaagaagcttcggttt

SEQ ID NO: 164256 - DNA, 56 bp, Artificial
  Synthetic oligonucleotide
attcgtttctatacactttgataaatgttatgacaaatttgatggtcctttaggta

SEQ ID NO: 164257 - DNA, 55 bp, Artificial
  Synthetic oligonucleotide
cagacgacttaatcgttacagttccgtccgcccgtcaagagccctgagcagcgta

SEQ ID NO: 164258 - DNA, 55 bp, Artificial
  Synthetic oligonucleotide
caaggggagtagctgcattagatagtccaaacatattagcagttaagttcataac

SEQ ID NO: 164259 - DNA, 55 bp, Artificial
  Synthetic oligonucleotide
caacttctactgcacatactgctgcaacctttggacattcatttcccattgaatg

SEQ ID NO: 164260 - DNA, 54 bp, Artificial
  Synthetic oligonucleotide
caaccgagcttaataggaatactcctacaagcctacgaatttattcgtgggtta

SEQ ID NO: 164261 - DNA, 55 bp, Artificial
  Synthetic oligonucleotide
caacacacctaaacaacgaccttacggtctgctactgcatatcctagcttgattg

SEQ ID NO: 164262 - DNA, 55 bp, Artificial
  Synthetic oligonucleotide
caacaacgccaaaacctctaccactttctccagctcttgctgcctctatagccgc

SEQ ID NO: 164263 - DNA, 55 bp, Artificial
  Synthetic oligonucleotide
caaatggcaccagaggttaagattgaggcagcaggtggaaccagtgataatagaa

SEQ ID NO: 164264 - DNA, 55 bp, Artificial
  Synthetic oligonucleotide
caaagttaaataaatcacctgctatgggcatatacggtaacttaggtggtggaaa

SEQ ID NO: 164265 - DNA, 55 bp, Artificial
  Synthetic oligonucleotide
caaaggatgaagctgacaagaaattgcgctcgataggcaacttgaatcttgacag

SEQ ID NO: 164266 - DNA, 55 bp, Artificial
  Synthetic oligonucleotide
caaacggttatcagttcgacttctatgttatgggtactctgggcattcgtgccgg

SEQ ID NO: 164267 - DNA, 60 bp, Artificial
  Synthetic oligonucleotide
atgtgttggtagcacatactaagtttggcttatatacaatgttggtagcattatatataa

SEQ ID NO: 164268 - DNA, 55 bp, Artificial
  Synthetic oligonucleotide
caaacagggacagccttgcctcttcaatctcataacccggacggttatccgcatg

SEQ ID NO: 164269 - DNA, 55 bp, Artificial
  Synthetic oligonucleotide
attttggagaaggaaccccattaaagggtggaatgccttcaggacacagtgctat

SEQ ID NO: 164270 - DNA, 55 bp, Artificial
  Synthetic oligonucleotide
atttggcgacagaaggctgcacactctgtcaattctcagacccagttctctcatc

SEQ ID NO: 164271 - DNA, 55 bp, Artificial
  Synthetic oligonucleotide
atttaccttagccatataagctccgatatgttgtgttattccacctgcttctgaa

SEQ ID NO: 164272 - DNA, 55 bp, Artificial
  Synthetic oligonucleotide
attgtttacctgcaaaattcgtagtacatactgttggacctattgtatctggtgg

SEQ ID NO: 164273 - DNA, 55 bp, Artificial
  Synthetic oligonucleotide
attggcacaagccggattaagtcaaagcatgggtagtatggaaggtaaggaggta

SEQ ID NO: 164274 - DNA, 55 bp, Artificial
  Synthetic oligonucleotide
attcttatctgcttgctggtagcgtttgtattcaaacgggttcgctatgatacgg

SEQ ID NO: 164275 - DNA, 53 bp, Artificial
  Synthetic oligonucleotide
attctgaaactgccgtagaacaaaagaccttacaggtcggataaaaccgcctg

SEQ ID NO: 164276 - DNA, 55 bp, Artificial
  Synthetic oligonucleotide
attccttgcaggtattattaatgggttaaatccctgttccctgtccatgctgctg

SEQ ID NO: 164277 - DNA, 55 bp, Artificial
  Synthetic oligonucleotide
caccagtaccactataatatagatcagctataggagctctccagtccactacaac

SEQ ID NO: 164278 - DNA, 54 bp, Artificial
  Synthetic oligonucleotide
gtgttattgtacttctgtttactcctaattcgttagctacttgacttttattta

SEQ ID NO: 164279 - DNA, 60 bp, Artificial
  Synthetic oligonucleotide
gcctatatttgctaagattccacctggcctatgcttaacataaccaccagttgcaagttg

SEQ ID NO: 164280 - DNA, 55 bp, Artificial
  Synthetic oligonucleotide
caccacttgtaggcattatatctgctaaaatacttctaggcactcctataatgtc

SEQ ID NO: 164281 - DNA, 53 bp, Artificial
  Synthetic oligonucleotide
caccaacaaccgcacgacaattaagcggggatttatcaaaccctacaaaagac

SEQ ID NO: 164282 - DNA, 55 bp, Artificial
  Synthetic oligonucleotide
cacatctttaaacgttggagtaaagagcagctacgtctatggatgagtactctct

SEQ ID NO: 164283 - DNA, 55 bp, Artificial
  Synthetic oligonucleotide
cacagggctttgcttccagtcctttcaccgctgtacttccgatatgggacatcct

SEQ ID NO: 164284 - DNA, 55 bp, Artificial
  Synthetic oligonucleotide
cacactttgacatcgtaatagcactacaatgtatactctttacaggaggtgtcac

SEQ ID NO: 164285 - DNA, 55 bp, Artificial
  Synthetic oligonucleotide
cacactcattaactcaaagaattcgtccagttatttgtggatatagtataggccc

SEQ ID NO: 164286 - DNA, 55 bp, Artificial
  Synthetic oligonucleotide
cacaagtcgaattgttttcggcacaatccgatatattaataggtccttcgactac

SEQ ID NO: 164287 - DNA, 55 bp, Artificial
  Synthetic oligonucleotide
cacaagtatacctggccaacaagtaatatagagaaagtcgagtgtcgtatctacg

SEQ ID NO: 164288 - DNA, 55 bp, Artificial
  Synthetic oligonucleotide
cacaacacttagcatacggaaattatcaattggaggaggcaaaacctaaggatgg

SEQ ID NO: 164289 - DNA, 55 bp, Artificial
  Synthetic oligonucleotide
caatttacagttaggctctcggagcataattctttgaccttaccgcctatcctag

SEQ ID NO: 164290 - DNA, 57 bp, Artificial
  Synthetic oligonucleotide
atggcttacaggtcaaaattttctaggtgagtatgagaacactaacgtatattctta

SEQ ID NO: 164291 - DNA, 55 bp, Artificial
  Synthetic oligonucleotide
caattggaggtatatatccttgagaggctattgtaaaagaatcatactgaggtcc

SEQ ID NO: 164292 - DNA, 55 bp, Artificial
  Synthetic oligonucleotide
caatgctaccttctcctaaagtacatccttgcattatagaagctctagcccctac

SEQ ID NO: 164293 - DNA, 55 bp, Artificial
  Synthetic oligonucleotide
caatgagtggtggtgccataactatgatgttcaataagcgaatgggagtaagaat

SEQ ID NO: 164294 - DNA, 55 bp, Artificial
  Synthetic oligonucleotide
caatagtgtagttagatccactcaacgctttgattcggtttactttagctgcact

SEQ ID NO: 164295 - DNA, 55 bp, Artificial
  Synthetic oligonucleotide
caagtctaccgattaatacaaccttgttcatttgacagcaccgtccttattactt

SEQ ID NO: 164296 - DNA, 52 bp, Artificial
  Synthetic oligonucleotide
caaggttagtcttccggtgtacccctttgaaggacaatccttctgggcaaaa

SEQ ID NO: 164297 - DNA, 55 bp, Artificial
  Synthetic oligonucleotide
caagggtaactatatctttggacgatgttgatattagggtcgctgacgttaggca

SEQ ID NO: 164298 - DNA, 55 bp, Artificial
  Synthetic oligonucleotide
ccaatacttctgttatgtcccaagtaggtgctcccatggacattacaccagctgc

SEQ ID NO: 164299 - DNA, 55 bp, Artificial
  Synthetic oligonucleotide
ccaagagatcgtatttgtggggtattgtatgacgtcgaaagggtgattcctttag

SEQ ID NO: 164300 - DNA, 55 bp, Artificial
  Synthetic oligonucleotide
ccaactggctgtacagtagtaatttgtgaagaaggtgcatctgctggagtagatg

SEQ ID NO: 164301 - DNA, 58 bp, Artificial
  Synthetic oligonucleotide
attgtgataatcctagttggtaatactagacctgagcgactttgaacctatgacgttg

SEQ ID NO: 164302 - DNA, 55 bp, Artificial
  Synthetic oligonucleotide
ccaactgctcgctttggtagtaaaatgggtgacataaccatggtagatagtatgc

SEQ ID NO: 164303 - DNA, 53 bp, Artificial
  Synthetic oligonucleotide
ccaacgaggtcggaacgcccttgttagcttggttaatctcacaccgttaggtg

SEQ ID NO: 164304 - DNA, 55 bp, Artificial
  Synthetic oligonucleotide
ccaaccagtaatgcatcctcgaaattgtaaacatcttcaagctgagccggtgcta

SEQ ID NO: 164305 - DNA, 55 bp, Artificial
  Synthetic oligonucleotide
ccaaagtaaaggctcttgaggccgagttcgaaaatccactgtgtttaagtatgcc

SEQ ID NO: 164306 - DNA, 55 bp, Artificial
  Synthetic oligonucleotide
ccaaaggttttggacagccaatctaaggagtaactgccgtcattgactaaactac

SEQ ID NO: 164307 - DNA, 55 bp, Artificial
  Synthetic oligonucleotide
ccaaagcagttatgaaatccacagagccttgggagtataccttgccatcctgacc

SEQ ID NO: 164308 - DNA, 53 bp, Artificial
  Synthetic oligonucleotide
ccaaagacgatgttaaactaggaattccttacatgggtttctatggaaattgg

SEQ ID NO: 164309 - DNA, 54 bp, Artificial
  Synthetic oligonucleotide
cattgtcctgtggtctattttattacccttgcggtctactaattttctaagtac

SEQ ID NO: 164310 - DNA, 55 bp, Artificial
  Synthetic oligonucleotide
cattcctcactacgtagtttaacaccagctgaagtatcaggaatcaattattcag

SEQ ID NO: 164311 - DNA, 55 bp, Artificial
  Synthetic oligonucleotide
cattcctaaatcgtttccgtccataaaccctcctatctgctatgccctatatcat

SEQ ID NO: 164312 - DNA, 60 bp, Artificial
  Synthetic oligonucleotide
atggatcttcaggtggaggatatttctcatattgggcacaaggattaccaagaacgagag

SEQ ID NO: 164313 - DNA, 55 bp, Artificial
  Synthetic oligonucleotide
cattccgcaagtcgtttgcactctattctaacgcaacggtgctaagctcgtcgca

SEQ ID NO: 164314 - DNA, 55 bp, Artificial
  Synthetic oligonucleotide
cattagcaggtggacatttgactcgtattgagtgggaatctggtagtaaacgtag

SEQ ID NO: 164315 - DNA, 55 bp, Artificial
  Synthetic oligonucleotide
catgtcacattcttccagggtgcaagaacttaatacacagtgtaaacaggtcagt

SEQ ID NO: 164316 - DNA, 55 bp, Artificial
  Synthetic oligonucleotide
catggttggagaaaagggtgcaggggacatagtaatgggacttgttaatcaggag

SEQ ID NO: 164317 - DNA, 55 bp, Artificial
  Synthetic oligonucleotide
ccagtgttgattacgcagcaaacggtaactgtaatttcgtagatgccaattcacc

SEQ ID NO: 164318 - DNA, 55 bp, Artificial
  Synthetic oligonucleotide
ccagtatgtgatagaatacaggcgtagaaaccacctttggaccattgtggctcga

SEQ ID NO: 164319 - DNA, 55 bp, Artificial
  Synthetic oligonucleotide
ccagtagttactataagtgtcaatagcgctactattggtgctgtgattattgttg

SEQ ID NO: 164320 - DNA, 55 bp, Artificial
  Synthetic oligonucleotide
ccaggtcttgttaataagcaaggacgtttaccagatccatcggagttagtttgca

SEQ ID NO: 164321 - DNA, 55 bp, Artificial
  Synthetic oligonucleotide
ccagctgcagaaatcaattttgcaccaactatagtgcaaccattcttaggtagtg

SEQ ID NO: 164322 - DNA, 55 bp, Artificial
  Synthetic oligonucleotide
ccagaccctttaggacctgcaaggacaagatttgaaatctgtaaatccctttgtg

SEQ ID NO: 164323 - DNA, 54 bp, Artificial
  Synthetic oligonucleotide
gccttatatccccatgtttgaagacaggggatttacgacaaacctggtaaatgg

SEQ ID NO: 164324 - DNA, 55 bp, Artificial
  Synthetic oligonucleotide
ccactccccagatctggctggtataaatctcctgataccggttcctctctgtggc

SEQ ID NO: 164325 - DNA, 55 bp, Artificial
  Synthetic oligonucleotide
ccactcaaacaggatctttatatacgagagtaccttatttcggaaggataagtgc

SEQ ID NO: 164326 - DNA, 55 bp, Artificial
  Synthetic oligonucleotide
ccacgcaggtgtccagaataaggacactgatagcctctcctgtcagacgtctctc

SEQ ID NO: 164327 - DNA, 55 bp, Artificial
  Synthetic oligonucleotide
ccacccgaggatgaatgggaagtctacaggaagcactacggcaaatactgttccc

SEQ ID NO: 164328 - DNA, 55 bp, Artificial
  Synthetic oligonucleotide
ccacccatagtaactcctaatcccattgtaacccctgaagctagtccaacatgat

SEQ ID NO: 164329 - DNA, 55 bp, Artificial
  Synthetic oligonucleotide
ccaccattaacatactcctgagttggcatttctaaaactttccccttccatccag

SEQ ID NO: 164330 - DNA, 52 bp, Artificial
  Synthetic oligonucleotide
ccacatagtaaacacgaccgtcaagggaatagtttataaccgccggtacaaa

SEQ ID NO: 164331 - DNA, 55 bp, Artificial
  Synthetic oligonucleotide
ccacataggtaggtattctctcccctggcatagagcctccgcctaccatagaaag

SEQ ID NO: 164332 - DNA, 55 bp, Artificial
  Synthetic oligonucleotide
ccacatacaacggctacaacctcttgaccccaaagcgtaccttggtggaaagtca

SEQ ID NO: 164333 - DNA, 55 bp, Artificial
  Synthetic oligonucleotide
ccacaatggagaatctatactaatacaaacgacgttccaccacaatatataggac

SEQ ID NO: 164334 - DNA, 58 bp, Artificial
  Synthetic oligonucleotide
gcctttacggcagttataggtcctctagtagaagtacctgttatgatagcactcgtaa

SEQ ID NO: 164335 - DNA, 55 bp, Artificial
  Synthetic oligonucleotide
ccacaactagcaaagtcagttaccatagcatagtcaagagcacctaagcattgca

SEQ ID NO: 164336 - DNA, 55 bp, Artificial
  Synthetic oligonucleotide
ccaattgtccaaccagattatgctcatgacggttatgcacctactgatacaattg

SEQ ID NO: 164337 - DNA, 55 bp, Artificial
  Synthetic oligonucleotide
cagtggctctgccaaagagttctgccgccatatatttaagttctccgcctttcgc

SEQ ID NO: 164338 - DNA, 55 bp, Artificial
  Synthetic oligonucleotide
cagtcggctataatttggcggaacaaaggaatgatttggacttattggcgactga

SEQ ID NO: 164339 - DNA, 55 bp, Artificial
  Synthetic oligonucleotide
cagtcatgaacttatcgtagttataaccgtagaataggtcacggcacacggacag

SEQ ID NO: 164340 - DNA, 55 bp, Artificial
  Synthetic oligonucleotide
cagtagcggcactctcagccattgggcttataagaggtctaacaaattgagggtg

SEQ ID NO: 164341 - DNA, 55 bp, Artificial
  Synthetic oligonucleotide
cagtaccgccagcaacctcaaatgagaacgggctgccgcctgcgtataatgccat

SEQ ID NO: 164342 - DNA, 55 bp, Artificial
  Synthetic oligonucleotide
caggcgtagctgacttagaaaggtccacaattttagaacgtatgtggctcggtgc

SEQ ID NO: 164343 - DNA, 55 bp, Artificial
  Synthetic oligonucleotide
caggcgatactggtgttactggacctacaggtgatactggtgtaactggacctac

SEQ ID NO: 164344 - DNA, 55 bp, Artificial
  Synthetic oligonucleotide
caggcctgtaatactgaatgtccccgatcctcttttggcggtcatagtcctcttc

SEQ ID NO: 164345 - DNA, 58 bp, Artificial
  Synthetic oligonucleotide
atggaacattatacttgttggctaagaatagtatagcttcaataggcttttcaaagtg

SEQ ID NO: 164346 - DNA, 55 bp, Artificial
  Synthetic oligonucleotide
caggcacctttcttctattattatgctgatgacggaaaacagcatgtggtttggt

SEQ ID NO: 164347 - DNA, 55 bp, Artificial
  Synthetic oligonucleotide
caggacctctagttccaataccagctcccgtcctagataatacggtacccattcc

SEQ ID NO: 164348 - DNA, 55 bp, Artificial
  Synthetic oligonucleotide
caggaccgcttgttgtagcggagggcatgagagatgcgaatatgtttgacgtcgt

SEQ ID NO: 164349 - DNA, 55 bp, Artificial
  Synthetic oligonucleotide
caggacatctgaacatatatcggcatatatggattgcgatcgtgtaattcggctg

SEQ ID NO: 164350 - DNA, 55 bp, Artificial
  Synthetic oligonucleotide
cagcttttagcaggagctaatgttataaccatatcagatccaagtggtacaggtg

SEQ ID NO: 164351 - DNA, 55 bp, Artificial
  Synthetic oligonucleotide
cagcttgttcatatgccgaagagcctactcccaacaggcgccagccgtcactgaa

SEQ ID NO: 164352 - DNA, 55 bp, Artificial
  Synthetic oligonucleotide
cagcttcaggggttaagtgtttccaaaattcatatagacctacaagccaaggaaa

SEQ ID NO: 164353 - DNA, 55 bp, Artificial
  Synthetic oligonucleotide
cagctgatgttattacgttgtttggagctaatgcgttttggtcagtatcaacacc

SEQ ID NO: 164354 - DNA, 55 bp, Artificial
  Synthetic oligonucleotide
cagcgttatctattcctttagggctacctataaaagcaatattagggagtccctc

SEQ ID NO: 164355 - DNA, 55 bp, Artificial
  Synthetic oligonucleotide
cagcgtaagtgcaaaagtgctatcgaataggaatctccgcattcaaacgttacct

SEQ ID NO: 164356 - DNA, 56 bp, Artificial
  Synthetic oligonucleotide
atttccattaaaatatctgctccaataagggctatttaaatctcctatacttacac

SEQ ID NO: 164357 - DNA, 55 bp, Artificial
  Synthetic oligonucleotide
catggcccaagtataacactggatactatgtgttcatcttcattaactgcgttgc

SEQ ID NO: 164358 - DNA, 55 bp, Artificial
  Synthetic oligonucleotide
catctgagtatcatgaattggcaaagatagctaaagacgtagcagctggtgcggt

SEQ ID NO: 164359 - DNA, 55 bp, Artificial
  Synthetic oligonucleotide
catctcgaagcttttcccagcaccaacacaatgtgctagtagtgtacttcctcca

SEQ ID NO: 164360 - DNA, 55 bp, Artificial
  Synthetic oligonucleotide
catctatccttgccattgcacaatctacatagttttcttccccactgccaaattt

SEQ ID NO: 164361 - DNA, 55 bp, Artificial
  Synthetic oligonucleotide
catcgtgggatgaattctctagtatggtcccatgctgggttcaatactggttgag

SEQ ID NO: 164362 - DNA, 55 bp, Artificial
  Synthetic oligonucleotide
catcgcacagtttgtaccgcgtatgatgtctgttggatattctaacggtgaagcg

SEQ ID NO: 164363 - DNA, 55 bp, Artificial
  Synthetic oligonucleotide
catccattgggaggatgctgtctgccgttttaggttagctgtgccatgagcatgc

SEQ ID NO: 164364 - DNA, 55 bp, Artificial
  Synthetic oligonucleotide
catcatcggcatcatgtattacaacaaattctccaaaggacatctggaaaccaat

SEQ ID NO: 164365 - DNA, 55 bp, Artificial
  Synthetic oligonucleotide
catcataaacctccggatcagctaaagtcactaaatgcccaagagcccaagttac

SEQ ID NO: 164366 - DNA, 55 bp, Artificial
  Synthetic oligonucleotide
catcagcggaggccggggagaaaagacagccaaccgtaccctgaacagggcaacg

SEQ ID NO: 164367 - DNA, 59 bp, Artificial
  Synthetic oligonucleotide
atgcccacgaagcagggcgtacaacggacagataggtcctaccctcctgacagactgga

SEQ ID NO: 164368 - DNA, 55 bp, Artificial
  Synthetic oligonucleotide
catcagatagcttcccacgaccagcgcggaaccaatccacaaatgagactgcaac

SEQ ID NO: 164369 - DNA, 55 bp, Artificial
  Synthetic oligonucleotide
catatgtctctgattacttatcttcgctgctacaggcataatcttgcgctctaaa

SEQ ID NO: 164370 - DNA, 55 bp, Artificial
  Synthetic oligonucleotide
catatagtacttcctaaaatcccgcctaatgaaccttctacagtcttcttaggac

SEQ ID NO: 164371 - DNA, 55 bp, Artificial
  Synthetic oligonucleotide
catagctgtaggaccccatcgctcccgggattacggccatctcaccgtttccggc

SEQ ID NO: 164372 - DNA, 55 bp, Artificial
  Synthetic oligonucleotide
catagatatgtccggctatcagggcggaagcacccgagttatatgcctcttgtgc

SEQ ID NO: 164373 - DNA, 55 bp, Artificial
  Synthetic oligonucleotide
cagtttctaaagcaccacctttaccgtaagcaataacaggtctcccactagccat

SEQ ID NO: 164374 - DNA, 55 bp, Artificial
  Synthetic oligonucleotide
cagttgctacttctttctgtgcagtacgtctatatttaacatctgggtatccaat

SEQ ID NO: 164375 - DNA, 55 bp, Artificial
  Synthetic oligonucleotide
cagttatgtaatcacgagcagctgcatctatatcacagaatctaactcctggttt

SEQ ID NO: 164376 - DNA, 55 bp, Artificial
  Synthetic oligonucleotide
accaaggtgtagatggcttagcttcaccaccaaaagttagtttcccagccttagc

SEQ ID NO: 164377 - DNA, 55 bp, Artificial
  Synthetic oligonucleotide
acattcctgctcgcagaaaacctgagtccgcgcaaactgacgcacggctgaatcg

SEQ ID NO: 164378 - DNA, 53 bp, Artificial
  Synthetic oligonucleotide
atgcaattaaagttggtaagggagtaaagaataagattgttactacttggaag

SEQ ID NO: 164379 - DNA, 53 bp, Artificial
  Synthetic oligonucleotide
acagtgggacagtaatcacgggaaatccgggaacatatggccgtgggaaaacc

SEQ ID NO: 164380 - DNA, 55 bp, Artificial
  Synthetic oligonucleotide
acaggagttccattagtagatactctaatttctccaagagggtataggatgctta

SEQ ID NO: 164381 - DNA, 55 bp, Artificial
  Synthetic oligonucleotide
acagcgcggaatgcttcgaggctcgtccagggaaccagcgaatcgagctcctgct

SEQ ID NO: 164382 - DNA, 55 bp, Artificial
  Synthetic oligonucleotide
acagcccgtaattgggcggggcaatatacaggccggggcatttctgcctcgcctc

SEQ ID NO: 164383 - DNA, 55 bp, Artificial
  Synthetic oligonucleotide
acactatatctttccgagtggacatcgtgaatcgctacggttaagcgttgatcag

SEQ ID NO: 164384 - DNA, 55 bp, Artificial
  Synthetic oligonucleotide
acactaatagctgtaggacctagtccgttgatggctcagtatccgaccggagcgt

SEQ ID NO: 164385 - DNA, 55 bp, Artificial
  Synthetic oligonucleotide
acacctaacgatatagcagtattcacagcaatgggtatgtgctggtcaggatact

SEQ ID NO: 164386 - DNA, 55 bp, Artificial
  Synthetic oligonucleotide
acaatgtgctacttttagattaccaccagtgtacggtgtaggaccacattcggaa

SEQ ID NO: 164387 - DNA, 55 bp, Artificial
  Synthetic oligonucleotide
acaaaatgcacttaatgtagtacaatccttagaacctattggagtaggtgcgaga

SEQ ID NO: 164388 - DNA, 55 bp, Artificial
  Synthetic oligonucleotide
aatttcctatctaattctatagcctctctcccattgcacgcttctgctataaccc

SEQ ID NO: 164389 - DNA, 60 bp, Artificial
  Synthetic oligonucleotide
ctgatactattacttcccacatcttgaacgctgtcattttgagagctgtcattttgactg

SEQ ID NO: 164390 - DNA, 55 bp, Artificial
  Synthetic oligonucleotide
attttaagtatggactattatgaaagttttctgccttagaggcctctataggagt

SEQ ID NO: 164391 - DNA, 55 bp, Artificial
  Synthetic oligonucleotide
aattgcatgtatgacttacagccttacacggaagctcccttacccgcgctcctgt

SEQ ID NO: 164392 - DNA, 52 bp, Artificial
  Synthetic oligonucleotide
aattcttataccgtgattaaaacggcccgatctgtatcaaaaccgggctaaa

SEQ ID NO: 164393 - DNA, 55 bp, Artificial
  Synthetic oligonucleotide
aattacgctcagcgtccgaaaccgttggtatgactagctttgaggtagctttagc

SEQ ID NO: 164394 - DNA, 55 bp, Artificial
  Synthetic oligonucleotide
aatgtgtaataggcttgtcctatgctgcatcgggaatagcggcatagatgttgat

SEQ ID NO: 164395 - DNA, 54 bp, Artificial
  Synthetic oligonucleotide
aatgtagaggttcccgcccctgaaacgtaataagctctaactatatttactcca

SEQ ID NO: 164396 - DNA, 53 bp, Artificial
  Synthetic oligonucleotide
aatggcgtagggttacctaaatacaaaacctcaccttttgtaataactctgca

SEQ ID NO: 164397 - DNA, 55 bp, Artificial
  Synthetic oligonucleotide
actggtagcaaagcttgtcaacaacgatcatatactgctcctctcaccggtgtct

SEQ ID NO: 164398 - DNA, 55 bp, Artificial
  Synthetic oligonucleotide
actgcaaagtcaacaaaaccataaactctaaaatatactgaaccatctgtaaagc

SEQ ID NO: 164399 - DNA, 55 bp, Artificial
  Synthetic oligonucleotide
actgaaatccttgcacaggacaataaagttacaggagtacgcctttcggacggaa

SEQ ID NO: 164400 - DNA, 55 bp, Artificial
  Synthetic oligonucleotide
actcgtttaggtgcactagctagattttcgcctgctcattgtacggacttgcgac

SEQ ID NO: 164401 - DNA, 57 bp, Artificial
  Synthetic oligonucleotide
gcgctactggtaatcatggttgggcagaattttacttaccttattatggttggatta

SEQ ID NO: 164402 - DNA, 55 bp, Artificial
  Synthetic oligonucleotide
acgttattatagtaccacagatcggccaccgaacgttatccaaaagcctcggcga

SEQ ID NO: 164403 - DNA, 55 bp, Artificial
  Synthetic oligonucleotide
acgtactgccttttctctgcattaaatatatatcctattttttgaaatctatctc

SEQ ID NO: 164404 - DNA, 55 bp, Artificial
  Synthetic oligonucleotide
acgctcgcaaaggaagatgcataaaaggtcgccagatccaaagtcgtctgcgatt

SEQ ID NO: 164405 - DNA, 55 bp, Artificial
  Synthetic oligonucleotide
acgctcatacccgatgtattgtacagggtcaatttaagcgtatttgaagctgact

SEQ ID NO: 164406 - DNA, 55 bp, Artificial
  Synthetic oligonucleotide
acgcgtagaatgcgcgctagaacggcttaatggaaacactgccggattttgaggc

SEQ ID NO: 164407 - DNA, 55 bp, Artificial
  Synthetic oligonucleotide
acgcggcatacctgcagcccctgtaaaacaactgggtccgtgcagtcaggggacc

SEQ ID NO: 164408 - DNA, 53 bp, Artificial
  Synthetic oligonucleotide
acgccgatgcccggttgtccggtgactccagccgacggcctggtttacggtaa

SEQ ID NO: 164409 - DNA, 55 bp, Artificial
  Synthetic oligonucleotide
acctgttgtaggttctgttcctttaacgtcttctatatctaatggtgaaggcatg

SEQ ID NO: 164410 - DNA, 55 bp, Artificial
  Synthetic oligonucleotide
acctatatcctaatacaatccttacacagggagatatgagggaatacaatccacg

SEQ ID NO: 164411 - DNA, 55 bp, Artificial
  Synthetic oligonucleotide
accggatacactagtatgtattttagcaccaagtccgttcggctctgctatgcat

SEQ ID NO: 164412 - DNA, 55 bp, Artificial
  Synthetic oligonucleotide
caaaagtcatagttaggtacgcaaaagtcatagttaggtacgcaaaagtcatagt

SEQ ID NO: 164413 - DNA, 55 bp, Artificial
  Synthetic oligonucleotide
acccctagctaatccaactcctgcgatgcaaagttctccaggaattcctattccg

SEQ ID NO: 164414 - DNA, 55 bp, Artificial
  Synthetic oligonucleotide
accccgtacttttaggataggggtgccaccatcagtggccgcagaagaatagccc

SEQ ID NO: 164415 - DNA, 55 bp, Artificial
  Synthetic oligonucleotide
accataatttaatgtagtctggctacaccctgctaaacttgccatacttaacacg

SEQ ID NO: 164416 - DNA, 55 bp, Artificial
  Synthetic oligonucleotide
accagcgtgtagttacttttaaggacattgatacagtgcatgaaagaccaagtgg

SEQ ID NO: 164417 - DNA, 52 bp, Artificial
  Synthetic oligonucleotide
aacggtgccttccgtctaagtctacttactaaataagctttcgattagaaac

SEQ ID NO: 164418 - DNA, 53 bp, Artificial
  Synthetic oligonucleotide
aacgcttttagattactccaagcgggaggaattcgcggtaagaaacgcggtgc

SEQ ID NO: 164419 - DNA, 55 bp, Artificial
  Synthetic oligonucleotide
aacgccataactaaactcatagtacccatattcataggtgaatcatccatcggag

SEQ ID NO: 164420 - DNA, 55 bp, Artificial
  Synthetic oligonucleotide
aacgatatatgttccagttgatttccgttcccgccataggaaaaggtcaggtcac

SEQ ID NO: 164421 - DNA, 55 bp, Artificial
  Synthetic oligonucleotide
aacgagtcactctgatagatgcttcgagtaacttcctgtttatctgctccctttg

SEQ ID NO: 164422 - DNA, 55 bp, Artificial
  Synthetic oligonucleotide
aacatctatagactgaggaaacctacctttgaaagttggatcatgagatatggcc

SEQ ID NO: 164423 - DNA, 55 bp, Artificial
  Synthetic oligonucleotide
gcatatacggctttaaatatggactaaaagttaattcaacatatccagtaccctt

SEQ ID NO: 164424 - DNA, 55 bp, Artificial
  Synthetic oligonucleotide
aacacttaccctgtattgcgaagccagctctgcttccgaagggagccgtgttccc

SEQ ID NO: 164425 - DNA, 55 bp, Artificial
  Synthetic oligonucleotide
aacacacactgcctcttatggtctttcggatgccggtcgtatggtgttttatagg

SEQ ID NO: 164426 - DNA, 55 bp, Artificial
  Synthetic oligonucleotide
aaataaggcatcacgtccttacgcagtatttagttatgctgtcattgcatctatg

SEQ ID NO: 164427 - DNA, 55 bp, Artificial
  Synthetic oligonucleotide
aaataagcactggtgttccccagttctctctcacaaacctccatgcgtcctccag

SEQ ID NO: 164428 - DNA, 55 bp, Artificial
  Synthetic oligonucleotide
aaagtgctaacgcacagcgccaacggataaatcccgttgcttaaagtgctaacgc

SEQ ID NO: 164429 - DNA, 55 bp, Artificial
  Synthetic oligonucleotide
aaagtcttaactacagcactagtcactggtggatgagaagtacccactatatata

SEQ ID NO: 164430 - DNA, 55 bp, Artificial
  Synthetic oligonucleotide
aaagagtacacctatcatagtccctccagccacatctactatggaatgctgctta

SEQ ID NO: 164431 - DNA, 55 bp, Artificial
  Synthetic oligonucleotide
aaactttgaaggatctcctttatatgctcttggtataaaagtcgccggatcacca

SEQ ID NO: 164432 - DNA, 55 bp, Artificial
  Synthetic oligonucleotide
aaactgtagtctattggcctaaaagcactgtgtttgtatctgtagtcgatcctgg

SEQ ID NO: 164433 - DNA, 55 bp, Artificial
  Synthetic oligonucleotide
aaaatggaacaaccattagcagaaactcgactcacgttcgttcgctgagtaagcg

SEQ ID NO: 164434 - DNA, 60 bp, Artificial
  Synthetic oligonucleotide
atgaggagtgccacagagacaggatggagcgtctgaacgtcacagacctcacgaacccat

SEQ ID NO: 164435 - DNA, 55 bp, Artificial
  Synthetic oligonucleotide
aaaagactccgaaggattgactgcttaacgaaaagtctgatgcaagtctcatggc

SEQ ID NO: 164436 - DNA, 55 bp, Artificial
  Synthetic oligonucleotide
aaaacaggcacccgacgggaagtacgctaatcaacgccgcgggccatacactcat

SEQ ID NO: 164437 - DNA, 55 bp, Artificial
  Synthetic oligonucleotide
aatccgccccattacccgccgctcccagtgtgatatcccggaagattgctgctgt

SEQ ID NO: 164438 - DNA, 55 bp, Artificial
  Synthetic oligonucleotide
aatcccctgttttaataggagtacttatatcaacaataccatctataggcgcttt

SEQ ID NO: 164439 - DNA, 55 bp, Artificial
  Synthetic oligonucleotide
aatcagaaatccaaacaagtgtatactttgcggagactgtgtaagagcgtgtcag

SEQ ID NO: 164440 - DNA, 53 bp, Artificial
  Synthetic oligonucleotide
aatatgtccccacgaaaacagtaggctttgcctacttccccaccttgtgtggg

SEQ ID NO: 164441 - DNA, 53 bp, Artificial
  Synthetic oligonucleotide
aagtggtccaggaagcaattacggggtaataggaaccttacgtaataatgata

SEQ ID NO: 164442 - DNA, 55 bp, Artificial
  Synthetic oligonucleotide
aagtggaggggctacaggacttgctcttatcctagaatatacaatgggactaccg

SEQ ID NO: 164443 - DNA, 54 bp, Artificial
  Synthetic oligonucleotide
aagtaacatttgtcgtacaaacttagttccaaactctggtacagcaaggcaacc

SEQ ID NO: 164444 - DNA, 55 bp, Artificial
  Synthetic oligonucleotide
aaggctctctcataagctctcctgctcctaccgctgttcttcccggaattattcc

SEQ ID NO: 164445 - DNA, 55 bp, Artificial
  Synthetic oligonucleotide
atgacctttgacccttaaaatgatgacctttgacccttaaaatgatgacctttga

SEQ ID NO: 164446 - DNA, 55 bp, Artificial
  Synthetic oligonucleotide
aagcttatatagacatttctttcgtcatctgagcttctttgcctgacaaccagct

SEQ ID NO: 164447 - DNA, 55 bp, Artificial
  Synthetic oligonucleotide
aagctgattcgagtgttctttgcgatcatgacgaagggtgttgtctttaatggaa

SEQ ID NO: 164448 - DNA, 55 bp, Artificial
  Synthetic oligonucleotide
aagcagaggataatagtgttggcatgggtatggatgcaacagagatagaagcagc

SEQ ID NO: 164449 - DNA, 55 bp, Artificial
  Synthetic oligonucleotide
aagcacgattgtcccggtgggaaatccgaataatgtcaaagcacatgtccaggtt

SEQ ID NO: 164450 - DNA, 55 bp, Artificial
  Synthetic oligonucleotide
aagaggatctcagactgctggctgaattaggactgaagaccttccgtaccagcat

SEQ ID NO: 164451 - DNA, 55 bp, Artificial
  Synthetic oligonucleotide
aagacttggtgcgggagcgtttgtttgcggtgaagaaactgcacttatgacctca

SEQ ID NO: 164452 - DNA, 55 bp, Artificial
  Synthetic oligonucleotide
aacttgatcatactaatcttttaggggtggatataagccgtaattgcgttgaacc

SEQ ID NO: 164453 - DNA, 55 bp, Artificial
  Synthetic oligonucleotide
aacttcattacatctggtatcctgaaagatccgcctatctctactagctgacctc

SEQ ID NO: 164454 - DNA, 55 bp, Artificial
  Synthetic oligonucleotide
aactgccacgcaaattctacatatccagcaaacattcctactggcggattattcc

SEQ ID NO: 164455 - DNA, 55 bp, Artificial
  Synthetic oligonucleotide
aactagcaaatgaaggacctatctgtaaagcttcatttcctataagaggttgtcc

SEQ ID NO: 164456 - DNA, 55 bp, Artificial
  Synthetic oligonucleotide
atcttgggatggaattgtaaacgtaacagtttcggatttagttgtagtttgatca

SEQ ID NO: 164457 - DNA, 54 bp, Artificial
  Synthetic oligonucleotide
atatctaacgcgtgaggtgaaaggtgtgaaacacgaacgccctgggaaggggag

SEQ ID NO: 164458 - DNA, 55 bp, Artificial
  Synthetic oligonucleotide
atatccaccctttccatctggttcagtagttccccaacgcattgatctagatact

SEQ ID NO: 164459 - DNA, 55 bp, Artificial
  Synthetic oligonucleotide
atagttctacccaaggagtaagtattggagacctaaatagtgcttattggagcag

SEQ ID NO: 164460 - DNA, 55 bp, Artificial
  Synthetic oligonucleotide
atagtaaattaccacagcaagccgtgtaaggttgtacatcataaggaagccatcc

SEQ ID NO: 164461 - DNA, 55 bp, Artificial
  Synthetic oligonucleotide
ataggtccaaacagatatagacctgtatctacagaagtagaccaagcctctagcg

SEQ ID NO: 164462 - DNA, 55 bp, Artificial
  Synthetic oligonucleotide
atagacatagtgtagctgatattatacaacgtggtggaaccatgctaaggactgc

SEQ ID NO: 164463 - DNA, 55 bp, Artificial
  Synthetic oligonucleotide
atacttacaactagaatgggtgagagtggagattctggagctatgttattggata

SEQ ID NO: 164464 - DNA, 55 bp, Artificial
  Synthetic oligonucleotide
atacggaggcctatgccataacaggggacagcctttatgcggatgtatccagggg

SEQ ID NO: 164465 - DNA, 55 bp, Artificial
  Synthetic oligonucleotide
ataagcacacgagggataatcctcgctacagattaattataccactttctcggcc

SEQ ID NO: 164466 - DNA, 55 bp, Artificial
  Synthetic oligonucleotide
ataaccgcttttgagcagaggataatggataatactcttgctgtggcactggttc

SEQ ID NO: 164467 - DNA, 58 bp, Artificial
  Synthetic oligonucleotide
atctactgtctctgttttactaggaatagctggtacaattctagcaggttactttcaa

SEQ ID NO: 164468 - DNA, 52 bp, Artificial
  Synthetic oligonucleotide
agttttataacatcctcaggaacggttctaagtgtaccgccccggtttgcaa

SEQ ID NO: 164469 - DNA, 55 bp, Artificial
  Synthetic oligonucleotide
agtttctcgtatagtttaaatccttcttctgcatctctactcatacggctaacgc

SEQ ID NO: 164470 - DNA, 54 bp, Artificial
  Synthetic oligonucleotide
agttcggttggttagagtgcccaactcataactagtaattctagggtttgagtc

SEQ ID NO: 164471 - DNA, 55 bp, Artificial
  Synthetic oligonucleotide
agtggtggaaccttaacagctatgggacttaaacctgtaagagatccaggtggaa

SEQ ID NO: 164472 - DNA, 55 bp, Artificial
  Synthetic oligonucleotide
agtggctataccactataaaaagactcattaaactccagtaaaaactactggcca

SEQ ID NO: 164473 - DNA, 55 bp, Artificial
  Synthetic oligonucleotide
agtgctgatgggactaatattatgggtacagcaggatgccttgtgactaatggtg

SEQ ID NO: 164474 - DNA, 55 bp, Artificial
  Synthetic oligonucleotide
agtcttagcgagtaagggatagtgtgagccttatacgaagtctattccgaagaac

SEQ ID NO: 164475 - DNA, 55 bp, Artificial
  Synthetic oligonucleotide
agtcctaagacgtaattatcattatctagtagaactgacccagaatctcctggtt

SEQ ID NO: 164476 - DNA, 55 bp, Artificial
  Synthetic oligonucleotide
attccataccacacatccatagtaaatttacgcggtagttgccctgttgttaaag

SEQ ID NO: 164477 - DNA, 55 bp, Artificial
  Synthetic oligonucleotide
attagttggtggaactacattaggtaggtcattagctccaagacttgccgctaga

SEQ ID NO: 164478 - DNA, 60 bp, Artificial
  Synthetic oligonucleotide
caacgaccttacggtctgctactgcatatcctagcttgattgtttagttgcctcaactat

SEQ ID NO: 164479 - DNA, 55 bp, Artificial
  Synthetic oligonucleotide
attaatactgtaacagagctgcaccccatacccatgggcattttattatcggtgc

SEQ ID NO: 164480 - DNA, 55 bp, Artificial
  Synthetic oligonucleotide
atgtgggaagaataagctccgctataatagttggcgaggaaaatggagtatcggg

SEQ ID NO: 164481 - DNA, 55 bp, Artificial
  Synthetic oligonucleotide
atgtcataagtgagactctaaatttaccgagctggcgtatgcaagttgggtctac

SEQ ID NO: 164482 - DNA, 55 bp, Artificial
  Synthetic oligonucleotide
atgggccttggttttttgttagctcccgaattagcacaataggcgccactgagat

SEQ ID NO: 164483 - DNA, 55 bp, Artificial
  Synthetic oligonucleotide
atgggatgacgcaggaggataggatgtgcacactattggatgtgtgtctaagcac

SEQ ID NO: 164484 - DNA, 55 bp, Artificial
  Synthetic oligonucleotide
atggaactggacagactctacaactaggatttcaagtaatagacatgggagtttt

SEQ ID NO: 164485 - DNA, 55 bp, Artificial
  Synthetic oligonucleotide
atgagtgcactagaactggggaagcgaaacccaagtattaggatcatgcgaaggt

SEQ ID NO: 164486 - DNA, 55 bp, Artificial
  Synthetic oligonucleotide
atgagtagccttatgacgcgtagacttcattctacttcccctacccgccgctaga

SEQ ID NO: 164487 - DNA, 55 bp, Artificial
  Synthetic oligonucleotide
atcgtatgacagatattcatgcttcacgtcttacttataacgacggaagtcctta

SEQ ID NO: 164488 - DNA, 55 bp, Artificial
  Synthetic oligonucleotide
atcgctgaaattctagtaatggtctgtgacttggtgtactctaccttctcccaat

SEQ ID NO: 164489 - DNA, 60 bp, Artificial
  Synthetic oligonucleotide
gcgtactcaaaatatatcctctataacgccttcgatatatgcaatacagtctaatacccc

SEQ ID NO: 164490 - DNA, 54 bp, Artificial
  Synthetic oligonucleotide
atcccctaacctttgaaccattatgggacctccagttagcatatttccaagttg

SEQ ID NO: 164491 - DNA, 55 bp, Artificial
  Synthetic oligonucleotide
atccagagtcctttggcctcaattccggggatttgatatatttgtacggtacaga

SEQ ID NO: 164492 - DNA, 55 bp, Artificial
  Synthetic oligonucleotide
atccaagcctatctccaataaccgcacactccattatttgatcataggtaagcct

SEQ ID NO: 164493 - DNA, 55 bp, Artificial
  Synthetic oligonucleotide
atcagctataatatgtgccattcccttactgtccattactgttgctcctctaacg

SEQ ID NO: 164494 - DNA, 55 bp, Artificial
  Synthetic oligonucleotide
atcacttattacctgctttcgcaggttttgaatccctggcttcgttctggcagtc

SEQ ID NO: 164495 - DNA, 55 bp, Artificial
  Synthetic oligonucleotide
atcaacctctgcataagtgtaattcatagctctacctacgtccctaatacaagct

SEQ ID NO: 164496 - DNA, 55 bp, Artificial
  Synthetic oligonucleotide
agcacttatctttgagtctactgcgtagccacgaaagaacgcactacagtagcag

SEQ ID NO: 164497 - DNA, 55 bp, Artificial
  Synthetic oligonucleotide
agcacatagttttcagttagtagctggtgactatatattccacgagagcgcagct

SEQ ID NO: 164498 - DNA, 55 bp, Artificial
  Synthetic oligonucleotide
agcacagattgtatggggattagggtctacttttatcagtggctcgcttgaagct

SEQ ID NO: 164499 - DNA, 55 bp, Artificial
  Synthetic oligonucleotide
agcaatgagctatcacttttaacattaacgggagtaggcttaggcagcctacttc

SEQ ID NO: 164500 - DNA, 57 bp, Artificial
  Synthetic oligonucleotide
ctgacggagttgtggttaaaggaactcataatgggccaggtagatgtgcggtaacta

SEQ ID NO: 164501 - DNA, 60 bp, Artificial
  Synthetic oligonucleotide
gcgtatgtattacaacacacctaaacaacgaccttacggtctgctactgcatatcctagc

SEQ ID NO: 164502 - DNA, 55 bp, Artificial
  Synthetic oligonucleotide
agattttctgcggttagtgaagaactaaaatacatggacagctatgattatgccg

SEQ ID NO: 164503 - DNA, 55 bp, Artificial
  Synthetic oligonucleotide
agagtcgatccaacttgcagctaaacgtgataccagtaattctgtaaaatggttt

SEQ ID NO: 164504 - DNA, 55 bp, Artificial
  Synthetic oligonucleotide
agagctacattgccaagatcaactgttatactgtgaggaggtgttccagtagcac

SEQ ID NO: 164505 - DNA, 55 bp, Artificial
  Synthetic oligonucleotide
agagatattactgccatatgcctctataaggtatcttgacaagccctcagtggtt

SEQ ID NO: 164506 - DNA, 55 bp, Artificial
  Synthetic oligonucleotide
agagagtacatcttcctcagagcctctaaagtgctttacccctagcctttcggct

SEQ ID NO: 164507 - DNA, 55 bp, Artificial
  Synthetic oligonucleotide
agactcggcaattgacccgtacttaggagagggtgcctacgagagtagcgcagtg

SEQ ID NO: 164508 - DNA, 55 bp, Artificial
  Synthetic oligonucleotide
agaaagccgaggatatccgttccgtcatattcttttggaatgcagtagtcaagga

SEQ ID NO: 164509 - DNA, 55 bp, Artificial
  Synthetic oligonucleotide
actttactatctcaaggtataggggatactataagggtatctttgacaggagacc

SEQ ID NO: 164510 - DNA, 55 bp, Artificial
  Synthetic oligonucleotide
acttccgcctccagtagaactaccagctccttcataatgaactaatcctgacttt

SEQ ID NO: 164511 - DNA, 55 bp, Artificial
  Synthetic oligonucleotide
acttccaaggcgacttttacttgcaggatttagccacactacttctttaggaatg
